United States Patent Application Publication US 2014/0004565 A1 - sequence listing, part 37

SEQ ID NO: 833045 - RNA, 19 nt, Artificial Sequence
  Description of Artificial Sequence: Synthetic oligonucleotide
cauauugggccaccaaguc

SEQ ID NO: 833046 - RNA, 19 nt, Artificial Sequence
  Description of Artificial Sequence: Synthetic oligonucleotide
ccggguaagacgaaaagac

SEQ ID NO: 833047 - RNA, 19 nt, Artificial Sequence
  Description of Artificial Sequence: Synthetic oligonucleotide
uuuuggcgccgccugccgg

SEQ ID NO: 833048 - RNA, 19 nt, Artificial Sequence
  Description of Artificial Sequence: Synthetic oligonucleotide
uggguuugugucccugcag

SEQ ID NO: 833049 - RNA, 19 nt, Artificial Sequence
  Description of Artificial Sequence: Synthetic oligonucleotide
guuugugucccugcagagg

SEQ ID NO: 833050 - RNA, 19 nt, Artificial Sequence
  Description of Artificial Sequence: Synthetic oligonucleotide
auuauacgugccacuauug

SEQ ID NO: 833051 - RNA, 19 nt, Artificial Sequence
  Description of Artificial Sequence: Synthetic oligonucleotide
ucgaggguucuuaguguag

SEQ ID NO: 833052 - RNA, 19 nt, Artificial Sequence
  Description of Artificial Sequence: Synthetic oligonucleotide
guuguaccuuaugagccgg

SEQ ID NO: 833053 - RNA, 19 nt, Artificial Sequence
  Description of Artificial Sequence: Synthetic oligonucleotide
auuuguacccaaguccaga

SEQ ID NO: 833054 - RNA, 19 nt, Artificial Sequence
  Description of Artificial Sequence: Synthetic oligonucleotide
ggaugaaugccuuguaguc

SEQ ID NO: 833055 - RNA, 19 nt, Artificial Sequence
  Description of Artificial Sequence: Synthetic oligonucleotide
guaccuuaugagccggacc

SEQ ID NO: 833056 - RNA, 19 nt, Artificial Sequence
  Description of Artificial Sequence: Synthetic oligonucleotide
gaccaaauuguugccagca

SEQ ID NO: 833057 - RNA, 19 nt, Artificial Sequence
  Description of Artificial Sequence: Synthetic oligonucleotide
gucaucgccagagaagaug

SEQ ID NO: 833058 - RNA, 19 nt, Artificial Sequence
  Description of Artificial Sequence: Synthetic oligonucleotide
uuauucagggcuugcucua

SEQ ID NO: 833059 - RNA, 19 nt, Artificial Sequence
  Description of Artificial Sequence: Synthetic oligonucleotide
guaggaguuccauguguug

SEQ ID NO: 833060 - RNA, 19 nt, Artificial Sequence
  Description of Artificial Sequence: Synthetic oligonucleotide
gguagcaggugugugaccc

SEQ ID NO: 833061 - RNA, 19 nt, Artificial Sequence
  Description of Artificial Sequence: Synthetic oligonucleotide
guagagaucuucagucuug

SEQ ID NO: 833062 - RNA, 19 nt, Artificial Sequence
  Description of Artificial Sequence: Synthetic oligonucleotide
aaguccagauaggcccacc

SEQ ID NO: 833063 - RNA, 19 nt, Artificial Sequence
  Description of Artificial Sequence: Synthetic oligonucleotide
caggcuaguagugacagca

SEQ ID NO: 833064 - RNA, 19 nt, Artificial Sequence
  Description of Artificial Sequence: Synthetic oligonucleotide
agauaggcccacccggucu

SEQ ID NO: 833065 - RNA, 19 nt, Artificial Sequence
  Description of Artificial Sequence: Synthetic oligonucleotide
caccgcuagggauggaugc

SEQ ID NO: 833066 - RNA, 19 nt, Artificial Sequence
  Description of Artificial Sequence: Synthetic oligonucleotide
guccagauaggcccacccg

SEQ ID NO: 833067 - RNA, 19 nt, Artificial Sequence
  Description of Artificial Sequence: Synthetic oligonucleotide
cuuauucagggcuugcucu

SEQ ID NO: 833068 - RNA, 19 nt, Artificial Sequence
  Description of Artificial Sequence: Synthetic oligonucleotide
ggguaagacgaaaagacca

SEQ ID NO: 833069 - RNA, 19 nt, Artificial Sequence
  Description of Artificial Sequence: Synthetic oligonucleotide
gucgugaaggaaguuguug

SEQ ID NO: 833070 - RNA, 19 nt, Artificial Sequence
  Description of Artificial Sequence: Synthetic oligonucleotide
acuaggaaaauggcgccca

SEQ ID NO: 833071 - RNA, 19 nt, Artificial Sequence
  Description of Artificial Sequence: Synthetic oligonucleotide
caugugaagcaugcugcgg

SEQ ID NO: 833072 - RNA, 19 nt, Artificial Sequence
  Description of Artificial Sequence: Synthetic oligonucleotide
ggauugaggucagagcggg

SEQ ID NO: 833073 - RNA, 19 nt, Artificial Sequence
  Description of Artificial Sequence: Synthetic oligonucleotide
guccacaaucauccauugg

SEQ ID NO: 833074 - RNA, 19 nt, Artificial Sequence
  Description of Artificial Sequence: Synthetic oligonucleotide
uauucagggcuugcucuag

SEQ ID NO: 833075 - RNA, 19 nt, Artificial Sequence
  Description of Artificial Sequence: Synthetic oligonucleotide
ugugaagcaugcugcggaa

SEQ ID NO: 833076 - RNA, 19 nt, Artificial Sequence
  Description of Artificial Sequence: Synthetic oligonucleotide
gagaauguccagagaucag

SEQ ID NO: 833077 - RNA, 19 nt, Artificial Sequence
  Description of Artificial Sequence: Synthetic oligonucleotide
aaucauccauugguuauua

SEQ ID NO: 833078 - RNA, 19 nt, Artificial Sequence
  Description of Artificial Sequence: Synthetic oligonucleotide
caguagguugucuuguaga

SEQ ID NO: 833079 - RNA, 19 nt, Artificial Sequence
  Description of Artificial Sequence: Synthetic oligonucleotide
uguaccuuaugagccggac

SEQ ID NO: 833080 - RNA, 19 nt, Artificial Sequence
  Description of Artificial Sequence: Synthetic oligonucleotide
ggagccauuggcaggauug

SEQ ID NO: 833081 - RNA, 19 nt, Artificial Sequence
  Description of Artificial Sequence: Synthetic oligonucleotide
agaagacuuggggauggag

SEQ ID NO: 833082 - RNA, 19 nt, Artificial Sequence
  Description of Artificial Sequence: Synthetic oligonucleotide
guucuaggaugguaagcac

SEQ ID NO: 833083 - RNA, 19 nt, Artificial Sequence
  Description of Artificial Sequence: Synthetic oligonucleotide
ccauugguuauuauacgug

SEQ ID NO: 833084 - RNA, 19 nt, Artificial Sequence
  Description of Artificial Sequence: Synthetic oligonucleotide
gaguuccauguguugugug

SEQ ID NO: 833085 - RNA, 19 nt, Artificial Sequence
  Description of Artificial Sequence: Synthetic oligonucleotide
caggccaccgcuagggaug

SEQ ID NO: 833086 - RNA, 19 nt, Artificial Sequence
  Description of Artificial Sequence: Synthetic oligonucleotide
aggucaaacggccuucgua

SEQ ID NO: 833087 - RNA, 19 nt, Artificial Sequence
  Description of Artificial Sequence: Synthetic oligonucleotide
caaugauaagcccuaucaa

SEQ ID NO: 833088 - RNA, 19 nt, Artificial Sequence
  Description of Artificial Sequence: Synthetic oligonucleotide
gauaggcccacccggucuc

SEQ ID NO: 833089 - RNA, 19 nt, Artificial Sequence
  Description of Artificial Sequence: Synthetic oligonucleotide
gucacgugcgccuggcagc

SEQ ID NO: 833090 - RNA, 19 nt, Artificial Sequence
  Description of Artificial Sequence: Synthetic oligonucleotide
aaggucaaacggccuucgu

SEQ ID NO: 833091 - RNA, 19 nt, Artificial Sequence
  Description of Artificial Sequence: Synthetic oligonucleotide
cuggcguugaacacaaucu

SEQ ID NO: 833092 - RNA, 19 nt, Artificial Sequence
  Description of Artificial Sequence: Synthetic oligonucleotide
aauggcgcccagaauccca

SEQ ID NO: 833093 - RNA, 19 nt, Artificial Sequence
  Description of Artificial Sequence: Synthetic oligonucleotide
cugcggaacggcgauaaac

SEQ ID NO: 833094 - RNA, 19 nt, Artificial Sequence
  Description of Artificial Sequence: Synthetic oligonucleotide
agaucaggcuggcccaugu

SEQ ID NO: 833095 - RNA, 19 nt, Artificial Sequence
  Description of Artificial Sequence: Synthetic oligonucleotide
ugcgccuggcagcaacuug

SEQ ID NO: 833096 - RNA, 19 nt, Artificial Sequence
  Description of Artificial Sequence: Synthetic oligonucleotide
ugaacccucccaguuggga

SEQ ID NO: 833097 - RNA, 19 nt, Artificial Sequence
  Description of Artificial Sequence: Synthetic oligonucleotide
ugggcccgcaggcuaguag

SEQ ID NO: 833098 - RNA, 19 nt, Artificial Sequence
  Description of Artificial Sequence: Synthetic oligonucleotide
cauccagugcauguagaug

SEQ ID NO: 833099 - RNA, 19 nt, Artificial Sequence
  Description of Artificial Sequence: Synthetic oligonucleotide
ccaaaggguggguagcagg

SEQ ID NO: 833100 - RNA, 19 nt, Artificial Sequence
  Description of Artificial Sequence: Synthetic oligonucleotide
guuuuggcgccgccugccg

SEQ ID NO: 833101 - RNA, 19 nt, Artificial Sequence
  Description of Artificial Sequence: Synthetic oligonucleotide
gaacccucccaguugggaa

SEQ ID NO: 833102 - RNA, 19 nt, Artificial Sequence
  Description of Artificial Sequence: Synthetic oligonucleotide
ugcauugggcuucgggaua

SEQ ID NO: 833103 - RNA, 19 nt, Artificial Sequence
  Description of Artificial Sequence: Synthetic oligonucleotide
guacccaaguccagauagg

SEQ ID NO: 833104 - RNA, 19 nt, Artificial Sequence
  Description of Artificial Sequence: Synthetic oligonucleotide
ucccacguugggccacugg

SEQ ID NO: 833105 - RNA, 19 nt, Artificial Sequence
  Description of Artificial Sequence: Synthetic oligonucleotide
gcuaguagugacagcaaug

SEQ ID NO: 833106 - RNA, 19 nt, Artificial Sequence
  Description of Artificial Sequence: Synthetic oligonucleotide
cacuaggaaaauggcgccc

SEQ ID NO: 833107 - RNA, 19 nt, Artificial Sequence
  Description of Artificial Sequence: Synthetic oligonucleotide
gccauuggcaggauugagg

SEQ ID NO: 833108 - RNA, 19 nt, Artificial Sequence
  Description of Artificial Sequence: Synthetic oligonucleotide
cuaggaaaauggcgcccag

SEQ ID NO: 833109 - RNA, 19 nt, Artificial Sequence
  Description of Artificial Sequence: Synthetic oligonucleotide
ggguuuuaauggugaaccc

SEQ ID NO: 833110 - RNA, 19 nt, Artificial Sequence
  Description of Artificial Sequence: Synthetic oligonucleotide
uuguaccuuaugagccgga

SEQ ID NO: 833111 - RNA, 19 nt, Artificial Sequence
  Description of Artificial Sequence: Synthetic oligonucleotide
gacgcugguacagggcuug

SEQ ID NO: 833112 - RNA, 19 nt, Artificial Sequence
  Description of Artificial Sequence: Synthetic oligonucleotide
uggucuuauucagggcuug

SEQ ID NO: 833113 - RNA, 19 nt, Artificial Sequence
  Description of Artificial Sequence: Synthetic oligonucleotide
ggucacgugcgccuggcag

SEQ ID NO: 833114 - RNA, 19 nt, Artificial Sequence
  Description of Artificial Sequence: Synthetic oligonucleotide
acgaaaagaccaaauuguu

SEQ ID NO: 833115 - RNA, 19 nt, Artificial Sequence
  Description of Artificial Sequence: Synthetic oligonucleotide
ucccaguugggaaggucaa

SEQ ID NO: 833116 - RNA, 19 nt, Artificial Sequence
  Description of Artificial Sequence: Synthetic oligonucleotide
ugcccggguaagacgaaaa

SEQ ID NO: 833117 - RNA, 19 nt, Artificial Sequence
  Description of Artificial Sequence: Synthetic oligonucleotide
ggguucuuaguguaggaaa

SEQ ID NO: 833118 - RNA, 19 nt, Artificial Sequence
  Description of Artificial Sequence: Synthetic oligonucleotide
augaugcguagcauguucu

SEQ ID NO: 833119 - RNA, 19 nt, Artificial Sequence
  Description of Artificial Sequence: Synthetic oligonucleotide
uuguacccaaguccagaua

SEQ ID NO: 833120 - RNA, 19 nt, Artificial Sequence
  Description of Artificial Sequence: Synthetic oligonucleotide
ugagccuacuggguuugug

SEQ ID NO: 833121 - RNA, 19 nt, Artificial Sequence
  Description of Artificial Sequence: Synthetic oligonucleotide
ggugcuggucuuauucagg

SEQ ID NO: 833122 - RNA, 19 nt, Artificial Sequence
  Description of Artificial Sequence: Synthetic oligonucleotide
ggaacggcgauaaacucca

SEQ ID NO: 833123 - RNA, 19 nt, Artificial Sequence
  Description of Artificial Sequence: Synthetic oligonucleotide
agcgacuggucccucugga

SEQ ID NO: 833124 - RNA, 19 nt, Artificial Sequence
  Description of Artificial Sequence: Synthetic oligonucleotide
gggguacgccucuugaggc

SEQ ID NO: 833125 - RNA, 19 nt, Artificial Sequence
  Description of Artificial Sequence: Synthetic oligonucleotide
ggaaaaccaaucuccauau

SEQ ID NO: 833126 - RNA, 19 nt, Artificial Sequence
  Description of Artificial Sequence: Synthetic oligonucleotide
caaagaacgggauguugua

SEQ ID NO: 833127 - RNA, 19 nt, Artificial Sequence
  Description of Artificial Sequence: Synthetic oligonucleotide
gagccuacuggguuugugu

SEQ ID NO: 833128 - RNA, 19 nt, Artificial Sequence
  Description of Artificial Sequence: Synthetic oligonucleotide
cacccggucucgcgaaugg

SEQ ID NO: 833129 - RNA, 19 nt, Artificial Sequence
  Description of Artificial Sequence: Synthetic oligonucleotide
auggcgcccagaaucccac

SEQ ID NO: 833130 - RNA, 19 nt, Artificial Sequence
  Description of Artificial Sequence: Synthetic oligonucleotide
cucgcgaauggcguuggug

SEQ ID NO: 833131 - RNA, 19 nt, Artificial Sequence
  Description of Artificial Sequence: Synthetic oligonucleotide
ugcguagcauguucuggua

SEQ ID NO: 833132 - RNA, 19 nt, Artificial Sequence
  Description of Artificial Sequence: Synthetic oligonucleotide
ggguuugugucccugcaga

SEQ ID NO: 833133 - RNA, 19 nt, Artificial Sequence
  Description of Artificial Sequence: Synthetic oligonucleotide
ggugagguuggcccaggcc

SEQ ID NO: 833134 - RNA, 19 nt, Artificial Sequence
  Description of Artificial Sequence: Synthetic oligonucleotide
cacacagaccagaguccag

SEQ ID NO: 833135 - RNA, 19 nt, Artificial Sequence
  Description of Artificial Sequence: Synthetic oligonucleotide
guaagacgaaaagaccaaa

SEQ ID NO: 833136 - RNA, 19 nt, Artificial Sequence
  Description of Artificial Sequence: Synthetic oligonucleotide
uggugagguuggcccaggc

SEQ ID NO: 833137 - RNA, 19 nt, Artificial Sequence
  Description of Artificial Sequence: Synthetic oligonucleotide
gugugugacccuacuggcc

SEQ ID NO: 833138 - RNA, 19 nt, Artificial Sequence
  Description of Artificial Sequence: Synthetic oligonucleotide
uggggaugaaugccuugua

SEQ ID NO: 833139 - RNA, 19 nt, Artificial Sequence
  Description of Artificial Sequence: Synthetic oligonucleotide
gguucuuaguguaggaaaa

SEQ ID NO: 833140 - RNA, 19 nt, Artificial Sequence
  Description of Artificial Sequence: Synthetic oligonucleotide
ucaugcgcuuggccaguga

SEQ ID NO: 833141 - RNA, 19 nt, Artificial Sequence
  Description of Artificial Sequence: Synthetic oligonucleotide
ucacgugcgccuggcagca

SEQ ID NO: 833142 - RNA, 19 nt, Artificial Sequence
  Description of Artificial Sequence: Synthetic oligonucleotide
ugguaagcacucggcuucc

SEQ ID NO: 833143 - RNA, 19 nt, Artificial Sequence
  Description of Artificial Sequence: Synthetic oligonucleotide
caaaggguggguagcaggu

SEQ ID NO: 833144 - RNA, 19 nt, Artificial Sequence
  Description of Artificial Sequence: Synthetic oligonucleotide
ucgagguuuuggcgccgcc

SEQ ID NO: 833145 - RNA, 19 nt, Artificial Sequence
  Description of Artificial Sequence: Synthetic oligonucleotide
augccuuguaguccacaau

SEQ ID NO: 833146 - RNA, 19 nt, Artificial Sequence
  Description of Artificial Sequence: Synthetic oligonucleotide
acguacuuccacagggcug

SEQ ID NO: 833147 - RNA, 19 nt, Artificial Sequence
  Description of Artificial Sequence: Synthetic oligonucleotide
cggaacggcgauaaacucc

SEQ ID NO: 833148 - RNA, 19 nt, Artificial Sequence
  Description of Artificial Sequence: Synthetic oligonucleotide
guaguccacaaucauccau

SEQ ID NO: 833149 - RNA, 19 nt, Artificial Sequence
  Description of Artificial Sequence: Synthetic oligonucleotide
ggcgggucgagguuuuggc

SEQ ID NO: 833150 - RNA, 19 nt, Artificial Sequence
  Description of Artificial Sequence: Synthetic oligonucleotide
ugugacccuacuggccaca

SEQ ID NO: 833151 - RNA, 19 nt, Artificial Sequence
  Description of Artificial Sequence: Synthetic oligonucleotide
gguaagacgaaaagaccaa

SEQ ID NO: 833152 - RNA, 19 nt, Artificial Sequence
  Description of Artificial Sequence: Synthetic oligonucleotide
augagccggaccauggaau

SEQ ID NO: 833153 - RNA, 19 nt, Artificial Sequence
  Description of Artificial Sequence: Synthetic oligonucleotide
cucgaggguucuuagugua

SEQ ID NO: 833154 - RNA, 19 nt, Artificial Sequence
  Description of Artificial Sequence: Synthetic oligonucleotide
cggguaagacgaaaagacc

SEQ ID NO: 833155 - RNA, 19 nt, Artificial Sequence
  Description of Artificial Sequence: Synthetic oligonucleotide
caugcgcuuggccagugaa

SEQ ID NO: 833156 - RNA, 19 nt, Artificial Sequence
  Description of Artificial Sequence: Synthetic oligonucleotide
gguuauuauacgugccacu

SEQ ID NO: 833157 - RNA, 19 nt, Artificial Sequence
  Description of Artificial Sequence: Synthetic oligonucleotide
gcgggucgagguuuuggcg

SEQ ID NO: 833158 - RNA, 19 nt, Artificial Sequence
  Description of Artificial Sequence: Synthetic oligonucleotide
acccggucucgcgaauggc

SEQ ID NO: 833159 - RNA, 19 nt, Artificial Sequence
  Description of Artificial Sequence: Synthetic oligonucleotide
ggcccguuggggaugaaug

SEQ ID NO: 833160 - RNA, 19 nt, Artificial Sequence
  Description of Artificial Sequence: Synthetic oligonucleotide
auggagggcagaagacuug

SEQ ID NO: 833161 - RNA, 19 nt, Artificial Sequence
  Description of Artificial Sequence: Synthetic oligonucleotide
gagaccggcgggucgaggu

SEQ ID NO: 833162 - RNA, 19 nt, Artificial Sequence
  Description of Artificial Sequence: Synthetic oligonucleotide
ggcguugaacacaaucuca

SEQ ID NO: 833163 - RNA, 19 nt, Artificial Sequence
  Description of Artificial Sequence: Synthetic oligonucleotide
cacuauugaacugcuugaa

SEQ ID NO: 833164 - RNA, 19 nt, Artificial Sequence
  Description of Artificial Sequence: Synthetic oligonucleotide
acgggauguuguagcuagc

SEQ ID NO: 833165 - RNA, 19 nt, Artificial Sequence
  Description of Artificial Sequence: Synthetic oligonucleotide
ccacuauugaacugcuuga

SEQ ID NO: 833166 - RNA, 19 nt, Artificial Sequence
  Description of Artificial Sequence: Synthetic oligonucleotide
gguacgccucuugaggccc

SEQ ID NO: 833167 - RNA, 19 nt, Artificial Sequence
  Description of Artificial Sequence: Synthetic oligonucleotide
cagauaggcccacccgguc

SEQ ID NO: 833168 - RNA, 19 nt, Artificial Sequence
  Description of Artificial Sequence: Synthetic oligonucleotide
gcccggguaagacgaaaag

SEQ ID NO: 833169 - RNA, 19 nt, Artificial Sequence
  Description of Artificial Sequence: Synthetic oligonucleotide
gucucgcgaauggcguugg

SEQ ID NO: 833170 - RNA, 19 nt, Artificial Sequence
  Description of Artificial Sequence: Synthetic oligonucleotide
gcggcguccagcagcaccg

SEQ ID NO: 833171 - RNA, 19 nt, Artificial Sequence
  Description of Artificial Sequence: Synthetic oligonucleotide
accagcgacuggucccucu

SEQ ID NO: 833172 - RNA, 19 nt, Artificial Sequence
  Description of Artificial Sequence: Synthetic oligonucleotide
ggcugcacguacuuccaca

SEQ ID NO: 833173 - RNA, 19 nt, Artificial Sequence
  Description of Artificial Sequence: Synthetic oligonucleotide
ggguacgccucuugaggcc

SEQ ID NO: 833174 - RNA, 19 nt, Artificial Sequence
  Description of Artificial Sequence: Synthetic oligonucleotide
agcuagcccaguagguugu

SEQ ID NO: 833175 - RNA, 19 nt, Artificial Sequence
  Description of Artificial Sequence: Synthetic oligonucleotide
cgggucgagguuuuggcgc

SEQ ID NO: 833176 - RNA, 19 nt, Artificial Sequence
  Description of Artificial Sequence: Synthetic oligonucleotide
gguuuuggcgccgccugcc

SEQ ID NO: 833177 - RNA, 19 nt, Artificial Sequence
  Description of Artificial Sequence: Synthetic oligonucleotide
gugaagcaugcugcggaac

SEQ ID NO: 833178 - RNA, 19 nt, Artificial Sequence
  Description of Artificial Sequence: Synthetic oligonucleotide
auaggcccacccggucucg

SEQ ID NO: 833179 - RNA, 19 nt, Artificial Sequence
  Description of Artificial Sequence: Synthetic oligonucleotide
ugccacuauugaacugcuu

SEQ ID NO: 833180 - RNA, 19 nt, Artificial Sequence
  Description of Artificial Sequence: Synthetic oligonucleotide
ugacccgacgcggcgucca

SEQ ID NO: 833181 - RNA, 19 nt, Artificial Sequence
  Description of Artificial Sequence: Synthetic oligonucleotide
cagcccacuggcguugaac

SEQ ID NO: 833182 - RNA, 19 nt, Artificial Sequence
  Description of Artificial Sequence: Synthetic oligonucleotide
caacuggguggaggcaaag

SEQ ID NO: 833183 - RNA, 19 nt, Artificial Sequence
  Description of Artificial Sequence: Synthetic oligonucleotide
ucucgcgaauggcguuggu

SEQ ID NO: 833184 - RNA, 19 nt, Artificial Sequence
  Description of Artificial Sequence: Synthetic oligonucleotide
aggaaccccaggguuuuaa

SEQ ID NO: 833185 - RNA, 19 nt, Artificial Sequence
  Description of Artificial Sequence: Synthetic oligonucleotide
ggucuuauucagggcuugc

SEQ ID NO: 833186 - RNA, 19 nt, Artificial Sequence
  Description of Artificial Sequence: Synthetic oligonucleotide
gcguugaacacaaucucaa

SEQ ID NO: 833187 - RNA, 19 nt, Artificial Sequence
  Description of Artificial Sequence: Synthetic oligonucleotide
cccguccaaggccaggcgg

SEQ ID NO: 833188 - RNA, 19 nt, Artificial Sequence
  Description of Artificial Sequence: Synthetic oligonucleotide
aggaggucacgugcgccug

SEQ ID NO: 833189 - RNA, 19 nt, Artificial Sequence
  Description of Artificial Sequence: Synthetic oligonucleotide
cacguacuuccacagggcu

SEQ ID NO: 833190 - RNA, 19 nt, Artificial Sequence
  Description of Artificial Sequence: Synthetic oligonucleotide
gugaacccucccaguuggg

SEQ ID NO: 833191 - RNA, 19 nt, Artificial Sequence
  Description of Artificial Sequence: Synthetic oligonucleotide
cccguuggggaugaaugcc

SEQ ID NO: 833192 - RNA, 19 nt, Artificial Sequence
  Description of Artificial Sequence: Synthetic oligonucleotide
gaacgggauguuguagcua

SEQ ID NO: 833193 - RNA, 19 nt, Artificial Sequence
  Description of Artificial Sequence: Synthetic oligonucleotide
agauggugcccggguaaga

SEQ ID NO: 833194 - RNA, 19 nt, Artificial Sequence
  Description of Artificial Sequence: Synthetic oligonucleotide
ggucucgcgaauggcguug

SEQ ID NO: 833195 - RNA, 19 nt, Artificial Sequence
  Description of Artificial Sequence: Synthetic oligonucleotide
cggcgauaaacuccacugg

SEQ ID NO: 833196 - RNA, 19 nt, Artificial Sequence
  Description of Artificial Sequence: Synthetic oligonucleotide
cuaggccuuucagcugcag

SEQ ID NO: 833197 - RNA, 19 nt, Artificial Sequence
  Description of Artificial Sequence: Synthetic oligonucleotide
accgagcggacgcgggaga

SEQ ID NO: 833198 - RNA, 19 nt, Artificial Sequence
  Description of Artificial Sequence: Synthetic oligonucleotide
gagccggaccauggaauuc

SEQ ID NO: 833199 - RNA, 19 nt, Artificial Sequence
  Description of Artificial Sequence: Synthetic oligonucleotide
cccgcaggcuaguagugac

SEQ ID NO: 833200 - RNA, 19 nt, Artificial Sequence
  Description of Artificial Sequence: Synthetic oligonucleotide
caugcccgggaucuguucu

SEQ ID NO: 833201 - RNA, 19 nt, Artificial Sequence
  Description of Artificial Sequence: Synthetic oligonucleotide
cacugaugggugagaaugu

SEQ ID NO: 833202 - RNA, 19 nt, Artificial Sequence
  Description of Artificial Sequence: Synthetic oligonucleotide
cuccauauugggccaccaa

SEQ ID NO: 833203 - RNA, 19 nt, Artificial Sequence
  Description of Artificial Sequence: Synthetic oligonucleotide
gacccgacgcggcguccag

SEQ ID NO: 833204 - RNA, 19 nt, Artificial Sequence
  Description of Artificial Sequence: Synthetic oligonucleotide
aucugagcucgaggguucu

SEQ ID NO: 833205 - RNA, 19 nt, Artificial Sequence
  Description of Artificial Sequence: Synthetic oligonucleotide
ccauauugggccaccaagu

SEQ ID NO: 833206 - RNA, 19 nt, Artificial Sequence
  Description of Artificial Sequence: Synthetic oligonucleotide
gcggaacggcgauaaacuc

SEQ ID NO: 833207 - RNA, 19 nt, Artificial Sequence
  Description of Artificial Sequence: Synthetic oligonucleotide
guagcuagcccaguagguu

SEQ ID NO: 833208 - RNA, 19 nt, Artificial Sequence
  Description of Artificial Sequence: Synthetic oligonucleotide
ggcuggauucuuguugcca

SEQ ID NO: 833209 - RNA, 19 nt, Artificial Sequence
  Description of Artificial Sequence: Synthetic oligonucleotide
cccgggaucuguucuagga

SEQ ID NO: 833210 - RNA, 19 nt, Artificial Sequence
  Description of Artificial Sequence: Synthetic oligonucleotide
ggggcaacugaucccacgu

SEQ ID NO: 833211 - RNA, 19 nt, Artificial Sequence
  Description of Artificial Sequence: Synthetic oligonucleotide
cuucgggauacaggcuuca

SEQ ID NO: 833212 - RNA, 19 nt, Artificial Sequence
  Description of Artificial Sequence: Synthetic oligonucleotide
gagcucgaggguucuuagu

SEQ ID NO: 833213 - RNA, 19 nt, Artificial Sequence
  Description of Artificial Sequence: Synthetic oligonucleotide
caggaggucacgugcgccu

SEQ ID NO: 833214 - RNA, 19 nt, Artificial Sequence
  Description of Artificial Sequence: Synthetic oligonucleotide
agaccggcgggucgagguu

SEQ ID NO: 833215 - RNA, 19 nt, Artificial Sequence
  Description of Artificial Sequence: Synthetic oligonucleotide
gcgcuuggccagugaaaag

SEQ ID NO: 833216 - RNA, 19 nt, Artificial Sequence
  Description of Artificial Sequence: Synthetic oligonucleotide
cugagcucgaggguucuua

SEQ ID NO: 833217 - RNA, 19 nt, Artificial Sequence
  Description of Artificial Sequence: Synthetic oligonucleotide
ccaccgcuagggauggaug

SEQ ID NO: 833218 - RNA, 19 nt, Artificial Sequence
  Description of Artificial Sequence: Synthetic oligonucleotide
cgcaggcuaguagugacag

SEQ ID NO: 833219 - RNA, 19 nt, Artificial Sequence
  Description of Artificial Sequence: Synthetic oligonucleotide
ccgcuagggauggaugccg

SEQ ID NO: 833220 - RNA, 19 nt, Artificial Sequence
  Description of Artificial Sequence: Synthetic oligonucleotide
augcgcuuggccagugaaa

SEQ ID NO: 833221 - RNA, 19 nt, Artificial Sequence
  Description of Artificial Sequence: Synthetic oligonucleotide
aggcuaguagugacagcaa

SEQ ID NO: 833222 - RNA, 19 nt, Artificial Sequence
  Description of Artificial Sequence: Synthetic oligonucleotide
ggcuaguagugacagcaau

SEQ ID NO: 833223 - RNA, 19 nt, Artificial Sequence
  Description of Artificial Sequence: Synthetic oligonucleotide
caugcugcggaacggcgau

SEQ ID NO: 833224 - RNA, 19 nt, Artificial Sequence
  Description of Artificial Sequence: Synthetic oligonucleotide
ccaaguccagauaggccca

SEQ ID NO: 833225 - RNA, 19 nt, Artificial Sequence
  Description of Artificial Sequence: Synthetic oligonucleotide
agcugacccgacgcggcgu

SEQ ID NO: 833226 - RNA, 19 nt, Artificial Sequence
  Description of Artificial Sequence: Synthetic oligonucleotide
gugacccuacuggccacac

SEQ ID NO: 833227 - RNA, 19 nt, Artificial Sequence
  Description of Artificial Sequence: Synthetic oligonucleotide
gggucgugaaggaaguugu

SEQ ID NO: 833228 - RNA, 19 nt, Artificial Sequence
  Description of Artificial Sequence: Synthetic oligonucleotide
gggcuggauucuuguugcc

SEQ ID NO: 833229 - RNA, 19 nt, Artificial Sequence
  Description of Artificial Sequence: Synthetic oligonucleotide
gcuagggauggaugccguc

SEQ ID NO: 833230 - RNA, 19 nt, Artificial Sequence
  Description of Artificial Sequence: Synthetic oligonucleotide
cgccgggcaauucagcaac

SEQ ID NO: 833231 - RNA, 19 nt, Artificial Sequence
  Description of Artificial Sequence: Synthetic oligonucleotide
gggcuugaaauggguagga

SEQ ID NO: 833232 - RNA, 19 nt, Artificial Sequence
  Description of Artificial Sequence: Synthetic oligonucleotide
ccaaauuguugccagcaau

SEQ ID NO: 833233 - RNA, 19 nt, Artificial Sequence
  Description of Artificial Sequence: Synthetic oligonucleotide
agucaucgccagagaagau

SEQ ID NO: 833234 - RNA, 19 nt, Artificial Sequence
  Description of Artificial Sequence: Synthetic oligonucleotide
ggucuccggcaaucugcag

SEQ ID NO: 833235 - RNA, 19 nt, Artificial Sequence
  Description of Artificial Sequence: Synthetic oligonucleotide
cccggguaagacgaaaaga

SEQ ID NO: 833236 - RNA, 19 nt, Artificial Sequence
  Description of Artificial Sequence: Synthetic oligonucleotide
aggcaacuggguggaggca

SEQ ID NO: 833237 - RNA, 19 nt, Artificial Sequence
  Description of Artificial Sequence: Synthetic oligonucleotide
ccagcgacuggucccucug

SEQ ID NO: 833238 - RNA, 19 nt, Artificial Sequence
  Description of Artificial Sequence: Synthetic oligonucleotide
caaucauccauugguuauu

SEQ ID NO: 833239 - RNA, 19 nt, Artificial Sequence
  Description of Artificial Sequence: Synthetic oligonucleotide
cuugaggccccugccggaa

SEQ ID NO: 833240 - RNA, 19 nt, Artificial Sequence
  Description of Artificial Sequence: Synthetic oligonucleotide
guacgccucuugaggcccc

SEQ ID NO: 833241 - RNA, 19 nt, Artificial Sequence
  Description of Artificial Sequence: Synthetic oligonucleotide
uacgccucuugaggccccu

SEQ ID NO: 833242 - RNA, 19 nt, Artificial Sequence
  Description of Artificial Sequence: Synthetic oligonucleotide
acccuacuggccacacaga

SEQ ID NO: 833243 - RNA, 19 nt, Artificial Sequence
  Description of Artificial Sequence: Synthetic oligonucleotide
ucugagcucgaggguucuu

SEQ ID NO: 833244 - RNA, 19 nt, Artificial Sequence
  Description of Artificial Sequence: Synthetic oligonucleotide
cccuacuggccacacagaa

SEQ ID NO: 833245 - RNA, 19 nt, Artificial Sequence
  Description of Artificial Sequence: Synthetic oligonucleotide
cgcgaauggcguuggugag

SEQ ID NO: 833246 - RNA, 19 nt, Artificial Sequence
  Description of Artificial Sequence: Synthetic oligonucleotide
gcccgggaucuguucuagg

SEQ ID NO: 833247 - RNA, 19 nt, Artificial Sequence
  Description of Artificial Sequence: Synthetic oligonucleotide
gcucgaggguucuuagugu

SEQ ID NO: 833248 - RNA, 19 nt, Artificial Sequence
  Description of Artificial Sequence: Synthetic oligonucleotide
gguaggaguuccauguguu

SEQ ID NO: 833249 - RNA, 19 nt, Artificial Sequence
  Description of Artificial Sequence: Synthetic oligonucleotide
cugacccgacgcggcgucc

SEQ ID NO: 833250 - RNA, 19 nt, Artificial Sequence
  Description of Artificial Sequence: Synthetic oligonucleotide
cgcggcguccagcagcacc

SEQ ID NO: 833251 - RNA, 19 nt, Artificial Sequence
  Description of Artificial Sequence: Synthetic oligonucleotide
gcuucgggauacaggcuuc

SEQ ID NO: 833252 - RNA, 19 nt, Artificial Sequence
  Description of Artificial Sequence: Synthetic oligonucleotide
ggagaccggcgggucgagg

SEQ ID NO: 833253 - RNA, 19 nt, Artificial Sequence
  Description of Artificial Sequence: Synthetic oligonucleotide
gcugacccgacgcggcguc

SEQ ID NO: 833254 - RNA, 19 nt, Artificial Sequence
  Description of Artificial Sequence: Synthetic oligonucleotide
ggcaaagucucagucccau

SEQ ID NO: 833255 - RNA, 19 nt, Artificial Sequence
  Description of Artificial Sequence: Synthetic oligonucleotide
cuccggcaaucugcagcag

SEQ ID NO: 833256 - RNA, 19 nt, Artificial Sequence
  Description of Artificial Sequence: Synthetic oligonucleotide
gcaacaccucagucagcga

SEQ ID NO: 833257 - RNA, 19 nt, Artificial Sequence
  Description of Artificial Sequence: Synthetic oligonucleotide
cgauaaacuccacuggaau

SEQ ID NO: 833258 - RNA, 19 nt, Artificial Sequence
  Description of Artificial Sequence: Synthetic oligonucleotide
cugcguggggagggcgccc

SEQ ID NO: 833259 - RNA, 19 nt, Artificial Sequence
  Description of Artificial Sequence: Synthetic oligonucleotide
gccccagcccacuggugac

SEQ ID NO: 833260 - RNA, 19 nt, Artificial Sequence
  Description of Artificial Sequence: Synthetic oligonucleotide
gcgacuggucccucuggaa

SEQ ID NO: 833261 - RNA, 19 nt, Artificial Sequence
  Description of Artificial Sequence: Synthetic oligonucleotide
ccaugcccgggaucuguuc

SEQ ID NO: 833262 - RNA, 19 nt, Artificial Sequence
  Description of Artificial Sequence: Synthetic oligonucleotide
gugccacuauugaacugcu

SEQ ID NO: 833263 - RNA, 19 nt, Artificial Sequence
  Description of Artificial Sequence: Synthetic oligonucleotide
ggcccgcaggcuaguagug

SEQ ID NO: 833264 - RNA, 19 nt, Artificial Sequence
  Description of Artificial Sequence: Synthetic oligonucleotide
ccgggcaauucagcaacac

SEQ ID NO: 833265 - RNA, 19 nt, Artificial Sequence
  Description of Artificial Sequence: Synthetic oligonucleotide
caucgccagagaagauggu

SEQ ID NO: 833266 - RNA, 19 nt, Artificial Sequence
  Description of Artificial Sequence: Synthetic oligonucleotide
ggcccacccggucucgcga

SEQ ID NO: 833267 - RNA, 19 nt, Artificial Sequence
  Description of Artificial Sequence: Synthetic oligonucleotide
gugcccggguaagacgaaa

SEQ ID NO: 833268 - RNA, 19 nt, Artificial Sequence
  Description of Artificial Sequence: Synthetic oligonucleotide
gaucccacguugggccacu

SEQ ID NO: 833269 - RNA, 19 nt, Artificial Sequence
  Description of Artificial Sequence: Synthetic oligonucleotide
cccgacgcggcguccagca

SEQ ID NO: 833270 - RNA, 19 nt, Artificial Sequence
  Description of Artificial Sequence: Synthetic oligonucleotide
gcgcccgccgggcaauuca

SEQ ID NO: 833271 - RNA, 19 nt, Artificial Sequence
  Description of Artificial Sequence: Synthetic oligonucleotide
ggacgauggacugcucccu

SEQ ID NO: 833272 - RNA, 19 nt, Artificial Sequence
  Description of Artificial Sequence: Synthetic oligonucleotide
acgccucuugaggccccug

SEQ ID NO: 833273 - RNA, 19 nt, Artificial Sequence
  Description of Artificial Sequence: Synthetic oligonucleotide
gaugggcccgcaggcuagu

SEQ ID NO: 833274 - RNA, 19 nt, Artificial Sequence
  Description of Artificial Sequence: Synthetic oligonucleotide
caccaugcccgggaucugu

SEQ ID NO: 833275 - RNA, 19 nt, Artificial Sequence
  Description of Artificial Sequence: Synthetic oligonucleotide
ccgcaggcuaguagugaca

SEQ ID NO: 833276 - RNA, 19 nt, Artificial Sequence
  Description of Artificial Sequence: Synthetic oligonucleotide
ccuacuggccacacagaau

SEQ ID NO: 833277 - RNA, 19 nt, Artificial Sequence
  Description of Artificial Sequence: Synthetic oligonucleotide
ccacccggucucgcgaaug

SEQ ID NO: 833278 - RNA, 19 nt, Artificial Sequence
  Description of Artificial Sequence: Synthetic oligonucleotide
gcccaguagguugucuugu

SEQ ID NO: 833279 - RNA, 19 nt, Artificial Sequence
  Description of Artificial Sequence: Synthetic oligonucleotide
gaccggcgggucgagguuu

SEQ ID NO: 833280 - RNA, 19 nt, Artificial Sequence
  Description of Artificial Sequence: Synthetic oligonucleotide
cggcgggucgagguuuugg

SEQ ID NO: 833281 - RNA, 19 nt, Artificial Sequence
  Description of Artificial Sequence: Synthetic oligonucleotide
cgcccgccgggcaauucag

SEQ ID NO: 833282 - RNA, 19 nt, Artificial Sequence
  Description of Artificial Sequence: Synthetic oligonucleotide
accggcgggucgagguuuu

SEQ ID NO: 833283 - RNA, 19 nt, Artificial Sequence
  Description of Artificial Sequence: Synthetic oligonucleotide
gcugcggaacggcgauaaa

SEQ ID NO: 833284 - RNA, 19 nt, Artificial Sequence
  Description of Artificial Sequence: Synthetic oligonucleotide
gaauggcguuggugagguu

SEQ ID NO: 833285 - RNA, 19 nt, Artificial Sequence
  Description of Artificial Sequence: Synthetic oligonucleotide
gccgggcaauucagcaaca

SEQ ID NO: 833286 - RNA, 19 nt, Artificial Sequence
  Description of Artificial Sequence: Synthetic oligonucleotide
ccgccgggcaauucagcaa

SEQ ID NO: 833287 - RNA, 19 nt, Artificial Sequence
  Description of Artificial Sequence: Synthetic oligonucleotide
gcccacccggucucgcgaa

SEQ ID NO: 833288 - RNA, 19 nt, Artificial Sequence
  Description of Artificial Sequence: Synthetic oligonucleotide
ccgacgcggcguccagcag

SEQ ID NO: 833289 - RNA, 19 nt, Artificial Sequence
  Description of Artificial Sequence: Synthetic oligonucleotide
gcgguuggccacgauguuu

SEQ ID NO: 833290 - RNA, 19 nt, Artificial Sequence
  Description of Artificial Sequence: Synthetic oligonucleotide
ggucgugaaggaaguuguu

SEQ ID NO: 833291 - RNA, 19 nt, Artificial Sequence
  Description of Artificial Sequence: Synthetic oligonucleotide
ggugcccggguaagacgaa

SEQ ID NO: 833292 - RNA, 19 nt, Artificial Sequence
  Description of Artificial Sequence: Synthetic oligonucleotide
ccguggggacgcugguaca

SEQ ID NO: 833293 - RNA, 19 nt, Artificial Sequence
  Description of Artificial Sequence: Synthetic oligonucleotide
cccaguugggaaggucaaa

SEQ ID NO: 833294 - RNA, 19 nt, Artificial Sequence
  Description of Artificial Sequence: Synthetic oligonucleotide
ccaccaugcccgggaucug

SEQ ID NO: 833295 - RNA, 19 nt, Artificial Sequence
  Description of Artificial Sequence: Synthetic oligonucleotide
cugagccuacuggguuugu

SEQ ID NO: 833296 - RNA, 19 nt, Artificial Sequence
  Description of Artificial Sequence: Synthetic oligonucleotide
cgagguuuuggcgccgccu

SEQ ID NO: 833297 - RNA, 19 nt, Artificial Sequence
  Description of Artificial Sequence: Synthetic oligonucleotide
ggcgcccgccgggcaauuc

SEQ ID NO: 833298 - RNA, 19 nt, Artificial Sequence
  Description of Artificial Sequence: Synthetic oligonucleotide
ggacgcugguacagggcuu

SEQ ID NO: 833299 - RNA, 19 nt, Artificial Sequence
  Description of Artificial Sequence: Synthetic oligonucleotide
cgggagaccggcgggucga

SEQ ID NO: 833300 - RNA, 19 nt, Artificial Sequence
  Description of Artificial Sequence: Synthetic oligonucleotide
cggccuucguagcuguccu

SEQ ID NO: 833301 - RNA, 19 nt, Artificial Sequence
  Description of Artificial Sequence: Synthetic oligonucleotide
cgcuagggauggaugccgu

SEQ ID NO: 833302 - RNA, 19 nt, Artificial Sequence
  Description of Artificial Sequence: Synthetic oligonucleotide
cgugcgccuggcagcaacu

SEQ ID NO: 833303 - RNA, 19 nt, Artificial Sequence
  Description of Artificial Sequence: Synthetic oligonucleotide
cacgugcgccuggcagcaa

SEQ ID NO: 833304 - RNA, 19 nt, Artificial Sequence
  Description of Artificial Sequence: Synthetic oligonucleotide
ccggcgggucgagguuuug

SEQ ID NO: 833305 - RNA, 19 nt, Artificial Sequence
  Description of Artificial Sequence: Synthetic oligonucleotide
cggucucgcgaauggcguu

SEQ ID NO: 833306 - RNA, 19 nt, Artificial Sequence
  Description of Artificial Sequence: Synthetic oligonucleotide
cccacccggucucgcgaau

SEQ ID NO: 833307 - RNA, 19 nt, Artificial Sequence
  Description of Artificial Sequence: Synthetic oligonucleotide
gggcgcccgccgggcaauu

SEQ ID NO: 833308 - RNA, 19 nt, Artificial Sequence
  Description of Artificial Sequence: Synthetic oligonucleotide
aaaagcauaacucugaggg

SEQ ID NO: 833309 - RNA, 19 nt, Artificial Sequence
  Description of Artificial Sequence: Synthetic oligonucleotide
aacaacaacacacacacac

SEQ ID NO: 833310 - RNA, 19 nt, Artificial Sequence
  Description of Artificial Sequence: Synthetic oligonucleotide
acuugaauagccuauaugc

SEQ ID NO: 833311 - RNA, 19 nt, Artificial Sequence
  Description of Artificial Sequence: Synthetic oligonucleotide
aacuaaacuaaacaagccc

SEQ ID NO: 833312 - RNA, 19 nt, Artificial Sequence
  Description of Artificial Sequence: Synthetic oligonucleotide
acaacaacaacacacacac

SEQ ID NO: 833313 - RNA, 19 nt, Artificial Sequence
  Description of Artificial Sequence: Synthetic oligonucleotide
aaauguugagcacugggcc

SEQ ID NO: 833314 - RNA, 19 nt, Artificial Sequence
  Description of Artificial Sequence: Synthetic oligonucleotide
aacaacaacaacaacacac

SEQ ID NO: 833315 - RNA, 19 nt, Artificial Sequence
  Description of Artificial Sequence: Synthetic oligonucleotide
uaugcaauaggcuugaaug

SEQ ID NO: 833316 - RNA, 19 nt, Artificial Sequence
  Description of Artificial Sequence: Synthetic oligonucleotide
aagaccacaaucuuucagg

SEQ ID NO: 833317 - RNA, 19 nt, Artificial Sequence
  Description of Artificial Sequence: Synthetic oligonucleotide
auaauagggcgauaaaggc

SEQ ID NO: 833318 - RNA, 19 nt, Artificial Sequence
  Description of Artificial Sequence: Synthetic oligonucleotide
aacaagccccaucagaggc

SEQ ID NO: 833319 - RNA, 19 nt, Artificial Sequence
  Description of Artificial Sequence: Synthetic oligonucleotide
agaaaucacaauccuaccc

SEQ ID NO: 833320 - RNA, 19 nt, Artificial Sequence
  Description of Artificial Sequence: Synthetic oligonucleotide
aacacacacacacacuagc

SEQ ID NO: 833321 - RNA, 19 nt, Artificial Sequence
  Description of Artificial Sequence: Synthetic oligonucleotide
aucguuucuaaauucagac

SEQ ID NO: 833322 - RNA, 19 nt, Artificial Sequence
  Description of Artificial Sequence: Synthetic oligonucleotide
agacuaagaccucagaugg

SEQ ID NO: 833323 - RNA, 19 nt, Artificial Sequence
  Description of Artificial Sequence: Synthetic oligonucleotide
aacaacaacaacaacaaca

SEQ ID NO: 833324 - RNA, 19 nt, Artificial Sequence
  Description of Artificial Sequence: Synthetic oligonucleotide
aaagcaauaugcuaaagua

SEQ ID NO: 833325 - RNA, 19 nt, Artificial Sequence
  Description of Artificial Sequence: Synthetic oligonucleotide
aaccuucuaacaaagaaac

SEQ ID NO: 833326 - RNA, 19 nt, Artificial Sequence
  Description of Artificial Sequence: Synthetic oligonucleotide
acuaaacuaaacaagcccc

SEQ ID NO: 833327 - RNA, 19 nt, Artificial Sequence
  Description of Artificial Sequence: Synthetic oligonucleotide
aacuaaacaagccccauca

SEQ ID NO: 833328 - RNA, 19 nt, Artificial Sequence
  Description of Artificial Sequence: Synthetic oligonucleotide
agcaauaugcuaaaguacc

SEQ ID NO: 833329 - RNA, 19 nt, Artificial Sequence
  Description of Artificial Sequence: Synthetic oligonucleotide
acuuugaauuucuaggagg

SEQ ID NO: 833330 - RNA, 19 nt, Artificial Sequence
  Description of Artificial Sequence: Synthetic oligonucleotide
agaguuaucaauguggcag

SEQ ID NO: 833331 - RNA, 19 nt, Artificial Sequence
  Description of Artificial Sequence: Synthetic oligonucleotide
uucaauuggaaacaacaca

SEQ ID NO: 833332 - RNA, 19 nt, Artificial Sequence
  Description of Artificial Sequence: Synthetic oligonucleotide
aaauucagacuugaauagc

SEQ ID NO: 833333 - RNA, 19 nt, Artificial Sequence
  Description of Artificial Sequence: Synthetic oligonucleotide
ucaagagggaguuucaaug

SEQ ID NO: 833334 - RNA, 19 nt, Artificial Sequence
  Description of Artificial Sequence: Synthetic oligonucleotide
uagccuauaugcaauaggc

SEQ ID NO: 833335 - RNA, 19 nt, Artificial Sequence
  Description of Artificial Sequence: Synthetic oligonucleotide
ucagaaguaacuaucucac

SEQ ID NO: 833336 - RNA, 19 nt, Artificial Sequence
  Description of Artificial Sequence: Synthetic oligonucleotide
uaaacuugcuuuucaauug

SEQ ID NO: 833337 - RNA, 19 nt, Artificial Sequence
  Description of Artificial Sequence: Synthetic oligonucleotide
uccgagauaagcaaagcug

SEQ ID NO: 833338 - RNA, 19 nt, Artificial Sequence
  Description of Artificial Sequence: Synthetic oligonucleotide
acaacaacaacaacaacac

SEQ ID NO: 833339 - RNA, 19 nt, Artificial Sequence
  Description of Artificial Sequence: Synthetic oligonucleotide
aauaugcuaaaguaccccu

SEQ ID NO: 833340 - RNA, 19 nt, Artificial Sequence
  Description of Artificial Sequence: Synthetic oligonucleotide
uauauuaaaggugaauaga

SEQ ID NO: 833341 - RNA, 19 nt, Artificial Sequence
  Description of Artificial Sequence: Synthetic oligonucleotide
auaggcuugaauguuggcc

SEQ ID NO: 833342 - RNA, 19 nt, Artificial Sequence
  Description of Artificial Sequence: Synthetic oligonucleotide
aaaacaacaacaacaacaa

SEQ ID NO: 833343 - RNA, 19 nt, Artificial Sequence
  Description of Artificial Sequence: Synthetic oligonucleotide
ggugcuagcaauuagcugc

SEQ ID NO: 833344 - RNA, 19 nt, Artificial Sequence
  Description of Artificial Sequence: Synthetic oligonucleotide
aaacuaaacaagccccauc

SEQ ID NO: 833345 - RNA, 19 nt, Artificial Sequence
  Description of Artificial Sequence: Synthetic oligonucleotide
acaggagacucugagaacc

SEQ ID NO: 833346 - RNA, 19 nt, Artificial Sequence
  Description of Artificial Sequence: Synthetic oligonucleotide
uuuaucucuacaggaaagg

SEQ ID NO: 833347 - RNA, 19 nt, Artificial Sequence
  Description of Artificial Sequence: Synthetic oligonucleotide
aagcaauaugcuaaaguac

SEQ ID NO: 833348 - RNA, 19 nt, Artificial Sequence
  Description of Artificial Sequence: Synthetic oligonucleotide
aaaacaacaggagacucug

SEQ ID NO: 833349 - RNA, 19 nt, Artificial Sequence
  Description of Artificial Sequence: Synthetic oligonucleotide
aaggcuuggguauaugucu

SEQ ID NO: 833350 - RNA, 19 nt, Artificial Sequence
  Description of Artificial Sequence: Synthetic oligonucleotide
aaacaacaacaacaacaac

SEQ ID NO: 833351 - RNA, 19 nt, Artificial Sequence
  Description of Artificial Sequence: Synthetic oligonucleotide
gaaaucacaauccuaccca

SEQ ID NO: 833352 - RNA, 19 nt, Artificial Sequence
  Description of Artificial Sequence: Synthetic oligonucleotide
ugugacuaaaggaggacug

SEQ ID NO: 833353 - RNA, 19 nt, Artificial Sequence
  Description of Artificial Sequence: Synthetic oligonucleotide
uggagauggcccauaauag

SEQ ID NO: 833354 - RNA, 19 nt, Artificial Sequence
  Description of Artificial Sequence: Synthetic oligonucleotide
uucaauggaugcaagggcu

SEQ ID NO: 833355 - RNA, 19 nt, Artificial Sequence
  Description of Artificial Sequence: Synthetic oligonucleotide
acacacacacacuagcuuc

SEQ ID NO: 833356 - RNA, 19 nt, Artificial Sequence
  Description of Artificial Sequence: Synthetic oligonucleotide
agaguaaagguccaagggu

SEQ ID NO: 833357 - RNA, 19 nt, Artificial Sequence
  Description of Artificial Sequence: Synthetic oligonucleotide
uagacauguacagaagcgg

SEQ ID NO: 833358 - RNA, 19 nt, Artificial Sequence
  Description of Artificial Sequence: Synthetic oligonucleotide
uaugcuaaaguaccccuga

SEQ ID NO: 833359 - RNA, 19 nt, Artificial Sequence
  Description of Artificial Sequence: Synthetic oligonucleotide
cuugacgaggaaauggaag

SEQ ID NO: 833360 - RNA, 19 nt, Artificial Sequence
  Description of Artificial Sequence: Synthetic oligonucleotide
aagaucaucauggggcuuc

SEQ ID NO: 833361 - RNA, 19 nt, Artificial Sequence
  Description of Artificial Sequence: Synthetic oligonucleotide
gaauagaaauccucucugc

SEQ ID NO: 833362 - RNA, 19 nt, Artificial Sequence
  Description of Artificial Sequence: Synthetic oligonucleotide
ugcaucauagcuguuaaac

SEQ ID NO: 833363 - RNA, 19 nt, Artificial Sequence
  Description of Artificial Sequence: Synthetic oligonucleotide
auagcuauggugauaaugu

SEQ ID NO: 833364 - RNA, 19 nt, Artificial Sequence
  Description of Artificial Sequence: Synthetic oligonucleotide
uugaauagccuauaugcaa

SEQ ID NO: 833365 - RNA, 19 nt, Artificial Sequence
  Description of Artificial Sequence: Synthetic oligonucleotide
acuaaaggaggacugcuug

SEQ ID NO: 833366 - RNA, 19 nt, Artificial Sequence
  Description of Artificial Sequence: Synthetic oligonucleotide
uuaucucuacaggaaaggg

SEQ ID NO: 833367 - RNA, 19 nt, Artificial Sequence
  Description of Artificial Sequence: Synthetic oligonucleotide
ugagaacccaacuaaacua

SEQ ID NO: 833368 - RNA, 19 nt, Artificial Sequence
  Description of Artificial Sequence: Synthetic oligonucleotide
aacccaguuauagcuaugg

SEQ ID NO: 833369 - RNA, 19 nt, Artificial Sequence
  Description of Artificial Sequence: Synthetic oligonucleotide
cuuacuuccccacuacugc

SEQ ID NO: 833370 - RNA, 19 nt, Artificial Sequence
  Description of Artificial Sequence: Synthetic oligonucleotide
acuaagaccucagaugggg

SEQ ID NO: 833371 - RNA, 19 nt, Artificial Sequence
  Description of Artificial Sequence: Synthetic oligonucleotide
ccaacuaaacuaaacaagc

SEQ ID NO: 833372 - RNA, 19 nt, Artificial Sequence
  Description of Artificial Sequence: Synthetic oligonucleotide
ucagacuaagaccucagau

SEQ ID NO: 833373 - RNA, 19 nt, Artificial Sequence
  Description of Artificial Sequence: Synthetic oligonucleotide
gauggcccauaauagggcg

SEQ ID NO: 833374 - RNA, 19 nt, Artificial Sequence
  Description of Artificial Sequence: Synthetic oligonucleotide
gaguuaucaauguggcagg

SEQ ID NO: 833375 - RNA, 19 nt, Artificial Sequence
  Description of Artificial Sequence: Synthetic oligonucleotide
ugaaaucuccgagauaagc

SEQ ID NO: 833376 - RNA, 19 nt, Artificial Sequence
  Description of Artificial Sequence: Synthetic oligonucleotide
aaguaacuaucucaccaug

SEQ ID NO: 833377 - RNA, 19 nt, Artificial Sequence
  Description of Artificial Sequence: Synthetic oligonucleotide
auagcuguuaaacucccca

SEQ ID NO: 833378 - RNA, 19 nt, Artificial Sequence
  Description of Artificial Sequence: Synthetic oligonucleotide
aaauggaagggcccggacu

SEQ ID NO: 833379 - RNA, 19 nt, Artificial Sequence
  Description of Artificial Sequence: Synthetic oligonucleotide
aauccuacccacuucuaaa

SEQ ID NO: 833380 - RNA, 19 nt, Artificial Sequence
  Description of Artificial Sequence: Synthetic oligonucleotide
cuaaaccuugguuauuccc

SEQ ID NO: 833381 - RNA, 19 nt, Artificial Sequence
  Description of Artificial Sequence: Synthetic oligonucleotide
uugcagaucagaaguaacu

SEQ ID NO: 833382 - RNA, 19 nt, Artificial Sequence
  Description of Artificial Sequence: Synthetic oligonucleotide
agaggugcuagcaauuagc

SEQ ID NO: 833383 - RNA, 19 nt, Artificial Sequence
  Description of Artificial Sequence: Synthetic oligonucleotide
cagacuaagaccucagaug

SEQ ID NO: 833384 - RNA, 19 nt, Artificial Sequence
  Description of Artificial Sequence: Synthetic oligonucleotide
ugccuuugaaagaucaaga

SEQ ID NO: 833385 - RNA, 19 nt, Artificial Sequence
  Description of Artificial Sequence: Synthetic oligonucleotide
agguacuuugaauuucuag

SEQ ID NO: 833386 - RNA, 19 nt, Artificial Sequence
  Description of Artificial Sequence: Synthetic oligonucleotide
agacaaaaguagucucccc

SEQ ID NO: 833387 - RNA, 19 nt, Artificial Sequence
  Description of Artificial Sequence: Synthetic oligonucleotide
aaagcauaacucugagggu

SEQ ID NO: 833388 - RNA, 19 nt, Artificial Sequence
  Description of Artificial Sequence: Synthetic oligonucleotide
aaaggagauaaagaccaca

SEQ ID NO: 833389 - RNA, 19 nt, Artificial Sequence
  Description of Artificial Sequence: Synthetic oligonucleotide
uggguauaugucuucuucc

SEQ ID NO: 833390 - RNA, 19 nt, Artificial Sequence
  Description of Artificial Sequence: Synthetic oligonucleotide
gacuugaauagccuauaug

SEQ ID NO: 833391 - RNA, 19 nt, Artificial Sequence
  Description of Artificial Sequence: Synthetic oligonucleotide
gaguaaagguccaagggug

SEQ ID NO: 833392 - RNA, 19 nt, Artificial Sequence
  Description of Artificial Sequence: Synthetic oligonucleotide
aacaacaacaacacacaca

SEQ ID NO: 833393 - RNA, 19 nt, Artificial Sequence
  Description of Artificial Sequence: Synthetic oligonucleotide
uguucuaaaccuugguuau

SEQ ID NO: 833394 - RNA, 19 nt, Artificial Sequence
  Description of Artificial Sequence: Synthetic oligonucleotide
caacaacacacacacacac

SEQ ID NO: 833395 - RNA, 19 nt, Artificial Sequence
  Description of Artificial Sequence: Synthetic oligonucleotide
cuaaaguaccccugauucc

SEQ ID NO: 833396 - RNA, 19 nt, Artificial Sequence
  Description of Artificial Sequence: Synthetic oligonucleotide
agaauaaaucuacuuuuau

SEQ ID NO: 833397 - RNA, 19 nt, Artificial Sequence
  Description of Artificial Sequence: Synthetic oligonucleotide
acaacacacacacacacua

SEQ ID NO: 833398 - RNA, 19 nt, Artificial Sequence
  Description of Artificial Sequence: Synthetic oligonucleotide
cagaucagaaguaacuauc

SEQ ID NO: 833399 - RNA, 19 nt, Artificial Sequence
  Description of Artificial Sequence: Synthetic oligonucleotide
ucuaaccuauuuuauuaaa

SEQ ID NO: 833400 - RNA, 19 nt, Artificial Sequence
  Description of Artificial Sequence: Synthetic oligonucleotide
agaggccucacaaauuccc

SEQ ID NO: 833401 - RNA, 19 nt, Artificial Sequence
  Description of Artificial Sequence: Synthetic oligonucleotide
gcuaaaguaccccugauuc

SEQ ID NO: 833402 - RNA, 19 nt, Artificial Sequence
  Description of Artificial Sequence: Synthetic oligonucleotide
ucagacuugaauagccuau

SEQ ID NO: 833403 - RNA, 19 nt, Artificial Sequence
  Description of Artificial Sequence: Synthetic oligonucleotide
ugcuauucuaaccuauuuu

SEQ ID NO: 833404 - RNA, 19 nt, Artificial Sequence
  Description of Artificial Sequence: Synthetic oligonucleotide
uggugauaauguuccacag

SEQ ID NO: 833405 - RNA, 19 nt, Artificial Sequence
  Description of Artificial Sequence: Synthetic oligonucleotide
ucaauggaugcaagggcug

SEQ ID NO: 833406 - RNA, 19 nt, Artificial Sequence
  Description of Artificial Sequence: Synthetic oligonucleotide
acaacaacaacaacaacaa

SEQ ID NO: 833407 - RNA, 19 nt, Artificial Sequence
  Description of Artificial Sequence: Synthetic oligonucleotide
uguaccugcuggaacccag

SEQ ID NO: 833408 - RNA, 19 nt, Artificial Sequence
  Description of Artificial Sequence: Synthetic oligonucleotide
ucacucuugacgaggaaau

SEQ ID NO: 833409 - RNA, 19 nt, Artificial Sequence
  Description of Artificial Sequence: Synthetic oligonucleotide
uuagcugccuuugaaagau

SEQ ID NO: 833410 - RNA, 19 nt, Artificial Sequence
  Description of Artificial Sequence: Synthetic oligonucleotide
auugccaguaaggcaagac

SEQ ID NO: 833411 - RNA, 19 nt, Artificial Sequence
  Description of Artificial Sequence: Synthetic oligonucleotide
caauaugcuaaaguacccc

SEQ ID NO: 833412 - RNA, 19 nt, Artificial Sequence
  Description of Artificial Sequence: Synthetic oligonucleotide
aggaaagggaguuacuaaa

SEQ ID NO: 833413 - RNA, 19 nt, Artificial Sequence
  Description of Artificial Sequence: Synthetic oligonucleotide
augcaauaggcuugaaugu

SEQ ID NO: 833414 - RNA, 19 nt, Artificial Sequence
  Description of Artificial Sequence: Synthetic oligonucleotide
agaagaucugcuacuuuac

SEQ ID NO: 833415 - RNA, 19 nt, Artificial Sequence
  Description of Artificial Sequence: Synthetic oligonucleotide
auugcagaucagaaguaac

SEQ ID NO: 833416 - RNA, 19 nt, Artificial Sequence
  Description of Artificial Sequence: Synthetic oligonucleotide
uauggugauaauguuccac

SEQ ID NO: 833417 - RNA, 19 nt, Artificial Sequence
  Description of Artificial Sequence: Synthetic oligonucleotide
ccuuugaaagaucaagagg

SEQ ID NO: 833418 - RNA, 19 nt, Artificial Sequence
  Description of Artificial Sequence: Synthetic oligonucleotide
cccauauagggucagaggc

SEQ ID NO: 833419 - RNA, 19 nt, Artificial Sequence
  Description of Artificial Sequence: Synthetic oligonucleotide
ucuaaaccuugguuauucc

SEQ ID NO: 833420 - RNA, 19 nt, Artificial Sequence
  Description of Artificial Sequence: Synthetic oligonucleotide
cuugaauagccuauaugca

SEQ ID NO: 833421 - RNA, 19 nt, Artificial Sequence
  Description of Artificial Sequence: Synthetic oligonucleotide
uagcuguuaaacuccccag

SEQ ID NO: 833422 - RNA, 19 nt, Artificial Sequence
  Description of Artificial Sequence: Synthetic oligonucleotide
uucuaaaccuugguuauuc

SEQ ID NO: 833423 - RNA, 19 nt, Artificial Sequence
  Description of Artificial Sequence: Synthetic oligonucleotide
ucguuucuaaauucagacu

SEQ ID NO: 833424 - RNA, 19 nt, Artificial Sequence
  Description of Artificial Sequence: Synthetic oligonucleotide
ggagauggcccauaauagg

SEQ ID NO: 833425 - RNA, 19 nt, Artificial Sequence
  Description of Artificial Sequence: Synthetic oligonucleotide
acaaauuccccguggucug

SEQ ID NO: 833426 - RNA, 19 nt, Artificial Sequence
  Description of Artificial Sequence: Synthetic oligonucleotide
ucaugaucaaaggcuuggg

SEQ ID NO: 833427 - RNA, 19 nt, Artificial Sequence
  Description of Artificial Sequence: Synthetic oligonucleotide
ccaguuauagcuaugguga

SEQ ID NO: 833428 - RNA, 19 nt, Artificial Sequence
  Description of Artificial Sequence: Synthetic oligonucleotide
uacugccuugaaaucuccg

SEQ ID NO: 833429 - RNA, 19 nt, Artificial Sequence
  Description of Artificial Sequence: Synthetic oligonucleotide
acaacaacaacaacacaca

SEQ ID NO: 833430 - RNA, 19 nt, Artificial Sequence
  Description of Artificial Sequence: Synthetic oligonucleotide
acuaaacaagccccaucag

SEQ ID NO: 833431 - RNA, 19 nt, Artificial Sequence
  Description of Artificial Sequence: Synthetic oligonucleotide
gacaaucacaaaggagagg

SEQ ID NO: 833432 - RNA, 19 nt, Artificial Sequence
  Description of Artificial Sequence: Synthetic oligonucleotide
uagucaugaucaaaggcuu

SEQ ID NO: 833433 - RNA, 19 nt, Artificial Sequence
  Description of Artificial Sequence: Synthetic oligonucleotide
auaugcaauaggcuugaau

SEQ ID NO: 833434 - RNA, 19 nt, Artificial Sequence
  Description of Artificial Sequence: Synthetic oligonucleotide
auuccaagaaggauggaca

SEQ ID NO: 833435 - RNA, 19 nt, Artificial Sequence
  Description of Artificial Sequence: Synthetic oligonucleotide
accccugauuccaagaagg

SEQ ID NO: 833436 - RNA, 19 nt, Artificial Sequence
  Description of Artificial Sequence: Synthetic oligonucleotide
gaguagggaccucacgugc

SEQ ID NO: 833437 - RNA, 19 nt, Artificial Sequence
  Description of Artificial Sequence: Synthetic oligonucleotide
accuugguuauucccaacu

SEQ ID NO: 833438 - RNA, 19 nt, Artificial Sequence
  Description of Artificial Sequence: Synthetic oligonucleotide
accagauugggaagaaggg

SEQ ID NO: 833439 - RNA, 19 nt, Artificial Sequence
  Description of Artificial Sequence: Synthetic oligonucleotide
cuccccagaagcacuaggc

SEQ ID NO: 833440 - RNA, 19 nt, Artificial Sequence
  Description of Artificial Sequence: Synthetic oligonucleotide
uucagacuugaauagccua

SEQ ID NO: 833441 - RNA, 19 nt, Artificial Sequence
  Description of Artificial Sequence: Synthetic oligonucleotide
aucacaauccuacccacuu

SEQ ID NO: 833442 - RNA, 19 nt, Artificial Sequence
  Description of Artificial Sequence: Synthetic oligonucleotide
uugaaaucuccgagauaag

SEQ ID NO: 833443 - RNA, 19 nt, Artificial Sequence
  Description of Artificial Sequence: Synthetic oligonucleotide
acuacugccuugaaaucuc

SEQ ID NO: 833444 - RNA, 19 nt, Artificial Sequence
  Description of Artificial Sequence: Synthetic oligonucleotide
aauuucuaggagguggguu

SEQ ID NO: 833445 - RNA, 19 nt, Artificial Sequence
  Description of Artificial Sequence: Synthetic oligonucleotide
gacaaaaguagucuccccu

SEQ ID NO: 833446 - RNA, 19 nt, Artificial Sequence
  Description of Artificial Sequence: Synthetic oligonucleotide
uuuuccgaggccagcucug

SEQ ID NO: 833447 - RNA, 19 nt, Artificial Sequence
  Description of Artificial Sequence: Synthetic oligonucleotide
agaucagaaguaacuaucu

SEQ ID NO: 833448 - RNA, 19 nt, Artificial Sequence
  Description of Artificial Sequence: Synthetic oligonucleotide
ggaucagaagaucugcuac

SEQ ID NO: 833449 - RNA, 19 nt, Artificial Sequence
  Description of Artificial Sequence: Synthetic oligonucleotide
aaguggaucagaagaucug

SEQ ID NO: 833450 - RNA, 19 nt, Artificial Sequence
  Description of Artificial Sequence: Synthetic oligonucleotide
gccuuugaaagaucaagag

SEQ ID NO: 833451 - RNA, 19 nt, Artificial Sequence
  Description of Artificial Sequence: Synthetic oligonucleotide
agcuguuaaacuccccaga

SEQ ID NO: 833452 - RNA, 19 nt, Artificial Sequence
  Description of Artificial Sequence: Synthetic oligonucleotide
cugucuggaaaauggugac

SEQ ID NO: 833453 - RNA, 19 nt, Artificial Sequence
  Description of Artificial Sequence: Synthetic oligonucleotide
ugggcaucguuucuaaauu

SEQ ID NO: 833454 - RNA, 19 nt, Artificial Sequence
  Description of Artificial Sequence: Synthetic oligonucleotide
ggaacaagacugaaggcag

SEQ ID NO: 833455 - RNA, 19 nt, Artificial Sequence
  Description of Artificial Sequence: Synthetic oligonucleotide
ucuugacgaggaaauggaa

SEQ ID NO: 833456 - RNA, 19 nt, Artificial Sequence
  Description of Artificial Sequence: Synthetic oligonucleotide
cauuaaguccagauugcca

SEQ ID NO: 833457 - RNA, 19 nt, Artificial Sequence
  Description of Artificial Sequence: Synthetic oligonucleotide
ggaugaugcuauucuaacc

SEQ ID NO: 833458 - RNA, 19 nt, Artificial Sequence
  Description of Artificial Sequence: Synthetic oligonucleotide
uagaggacacucccacuug

SEQ ID NO: 833459 - RNA, 19 nt, Artificial Sequence
  Description of Artificial Sequence: Synthetic oligonucleotide
gagggaguuucaauggaug

SEQ ID NO: 833460 - RNA, 19 nt, Artificial Sequence
  Description of Artificial Sequence: Synthetic oligonucleotide
cagaaguaacuaucucacc

SEQ ID NO: 833461 - RNA, 19 nt, Artificial Sequence
  Description of Artificial Sequence: Synthetic oligonucleotide
aggugaauagaaauccucu

SEQ ID NO: 833462 - RNA, 19 nt, Artificial Sequence
  Description of Artificial Sequence: Synthetic oligonucleotide
gacauguacagaagcggug

SEQ ID NO: 833463 - RNA, 19 nt, Artificial Sequence
  Description of Artificial Sequence: Synthetic oligonucleotide
cuggagauggcccauaaua

SEQ ID NO: 833464 - RNA, 19 nt, Artificial Sequence
  Description of Artificial Sequence: Synthetic oligonucleotide
ugacuaaaggaggacugcu

SEQ ID NO: 833465 - RNA, 19 nt, Artificial Sequence
  Description of Artificial Sequence: Synthetic oligonucleotide
ugcuaaaguaccccugauu

SEQ ID NO: 833466 - RNA, 19 nt, Artificial Sequence
  Description of Artificial Sequence: Synthetic oligonucleotide
uauagggucagaggcuucu

SEQ ID NO: 833467 - RNA, 19 nt, Artificial Sequence
  Description of Artificial Sequence: Synthetic oligonucleotide
aguaacuaucucaccaugu

SEQ ID NO: 833468 - RNA, 19 nt, Artificial Sequence
  Description of Artificial Sequence: Synthetic oligonucleotide
ugcagaucagaaguaacua

SEQ ID NO: 833469 - RNA, 19 nt, Artificial Sequence
  Description of Artificial Sequence: Synthetic oligonucleotide
cuacaggaaagggaguuac

SEQ ID NO: 833470 - RNA, 19 nt, Artificial Sequence
  Description of Artificial Sequence: Synthetic oligonucleotide
caacacacacacacacuag

SEQ ID NO: 833471 - RNA, 19 nt, Artificial Sequence
  Description of Artificial Sequence: Synthetic oligonucleotide
aacaacacacacacacacu

SEQ ID NO: 833472 - RNA, 19 nt, Artificial Sequence
  Description of Artificial Sequence: Synthetic oligonucleotide
ucagaggcuggguuucagc

SEQ ID NO: 833473 - RNA, 19 nt, Artificial Sequence
  Description of Artificial Sequence: Synthetic oligonucleotide
aguaccccugauuccaaga

SEQ ID NO: 833474 - RNA, 19 nt, Artificial Sequence
  Description of Artificial Sequence: Synthetic oligonucleotide
ugaggguaaacuugcuuuu

SEQ ID NO: 833475 - RNA, 19 nt, Artificial Sequence
  Description of Artificial Sequence: Synthetic oligonucleotide
auacaggcaaauucuugaa

SEQ ID NO: 833476 - RNA, 19 nt, Artificial Sequence
  Description of Artificial Sequence: Synthetic oligonucleotide
uggaucagaagaucugcua

SEQ ID NO: 833477 - RNA, 19 nt, Artificial Sequence
  Description of Artificial Sequence: Synthetic oligonucleotide
gguauaugucuucuucccc

SEQ ID NO: 833478 - RNA, 19 nt, Artificial Sequence
  Description of Artificial Sequence: Synthetic oligonucleotide
cucuugacgaggaaaugga

SEQ ID NO: 833479 - RNA, 19 nt, Artificial Sequence
  Description of Artificial Sequence: Synthetic oligonucleotide
cccaguuauagcuauggug

SEQ ID NO: 833480 - RNA, 19 nt, Artificial Sequence
  Description of Artificial Sequence: Synthetic oligonucleotide
uagcaauuagcugccuuug

SEQ ID NO: 833481 - RNA, 19 nt, Artificial Sequence
  Description of Artificial Sequence: Synthetic oligonucleotide
ccauaauagggcgauaaag

SEQ ID NO: 833482 - RNA, 19 nt, Artificial Sequence
  Description of Artificial Sequence: Synthetic oligonucleotide
caucguuucuaaauucaga

SEQ ID NO: 833483 - RNA, 19 nt, Artificial Sequence
  Description of Artificial Sequence: Synthetic oligonucleotide
gaccaguggaagguagagg

SEQ ID NO: 833484 - RNA, 19 nt, Artificial Sequence
  Description of Artificial Sequence: Synthetic oligonucleotide
aucuccgagauaagcaaag

SEQ ID NO: 833485 - RNA, 19 nt, Artificial Sequence
  Description of Artificial Sequence: Synthetic oligonucleotide
ggugaauagaaauccucuc

SEQ ID NO: 833486 - RNA, 19 nt, Artificial Sequence
  Description of Artificial Sequence: Synthetic oligonucleotide
gacuaagaccucagauggg

SEQ ID NO: 833487 - RNA, 19 nt, Artificial Sequence
  Description of Artificial Sequence: Synthetic oligonucleotide
ggaagaguaaagguccaag

SEQ ID NO: 833488 - RNA, 19 nt, Artificial Sequence
  Description of Artificial Sequence: Synthetic oligonucleotide
gauugcagaucagaaguaa

SEQ ID NO: 833489 - RNA, 19 nt, Artificial Sequence
  Description of Artificial Sequence: Synthetic oligonucleotide
caaucacaaaggagaggag

SEQ ID NO: 833490 - RNA, 19 nt, Artificial Sequence
  Description of Artificial Sequence: Synthetic oligonucleotide
cacagaaccuucuaacaaa

SEQ ID NO: 833491 - RNA, 19 nt, Artificial Sequence
  Description of Artificial Sequence: Synthetic oligonucleotide
agccagaguuaucaaugug

SEQ ID NO: 833492 - RNA, 19 nt, Artificial Sequence
  Description of Artificial Sequence: Synthetic oligonucleotide
ugcaauaggcuugaauguu

SEQ ID NO: 833493 - RNA, 19 nt, Artificial Sequence
  Description of Artificial Sequence: Synthetic oligonucleotide
auaacacagaggccucaca

SEQ ID NO: 833494 - RNA, 19 nt, Artificial Sequence
  Description of Artificial Sequence: Synthetic oligonucleotide
auaugcuaaaguaccccug

SEQ ID NO: 833495 - RNA, 19 nt, Artificial Sequence
  Description of Artificial Sequence: Synthetic oligonucleotide
augcuauucuaaccuauuu

SEQ ID NO: 833496 - RNA, 19 nt, Artificial Sequence
  Description of Artificial Sequence: Synthetic oligonucleotide
ucucuacaggaaagggagu

SEQ ID NO: 833497 - RNA, 19 nt, Artificial Sequence
  Description of Artificial Sequence: Synthetic oligonucleotide
aagcacuaggcaagcuggg

SEQ ID NO: 833498 - RNA, 19 nt, Artificial Sequence
  Description of Artificial Sequence: Synthetic oligonucleotide
uggaugcaagggcugggga

SEQ ID NO: 833499 - RNA, 19 nt, Artificial Sequence
  Description of Artificial Sequence: Synthetic oligonucleotide
uggaacccaguuauagcua

SEQ ID NO: 833500 - RNA, 19 nt, Artificial Sequence
  Description of Artificial Sequence: Synthetic oligonucleotide
aaucuccgagauaagcaaa

SEQ ID NO: 833501 - RNA, 19 nt, Artificial Sequence
  Description of Artificial Sequence: Synthetic oligonucleotide
gugacuaaaggaggacugc

SEQ ID NO: 833502 - RNA, 19 nt, Artificial Sequence
  Description of Artificial Sequence: Synthetic oligonucleotide
uuuccgaggccagcucugg

SEQ ID NO: 833503 - RNA, 19 nt, Artificial Sequence
  Description of Artificial Sequence: Synthetic oligonucleotide
cuacugccuugaaaucucc

SEQ ID NO: 833504 - RNA, 19 nt, Artificial Sequence
  Description of Artificial Sequence: Synthetic oligonucleotide
acaacaacacacacacaca

SEQ ID NO: 833505 - RNA, 19 nt, Artificial Sequence
  Description of Artificial Sequence: Synthetic oligonucleotide
caacaacaacaacaacaac

SEQ ID NO: 833506 - RNA, 19 nt, Artificial Sequence
  Description of Artificial Sequence: Synthetic oligonucleotide
gaucugcuacuuuacagau

SEQ ID NO: 833507 - RNA, 19 nt, Artificial Sequence
  Description of Artificial Sequence: Synthetic oligonucleotide
aucaauguggcagguacuu

SEQ ID NO: 833508 - RNA, 19 nt, Artificial Sequence
  Description of Artificial Sequence: Synthetic oligonucleotide
auucagacuugaauagccu

SEQ ID NO: 833509 - RNA, 19 nt, Artificial Sequence
  Description of Artificial Sequence: Synthetic oligonucleotide
gaaagaucaagagggaguu

SEQ ID NO: 833510 - RNA, 19 nt, Artificial Sequence
  Description of Artificial Sequence: Synthetic oligonucleotide
cuacccacuucuaaaauau

SEQ ID NO: 833511 - RNA, 19 nt, Artificial Sequence
  Description of Artificial Sequence: Synthetic oligonucleotide
gcgauaaaggcccucuuca

SEQ ID NO: 833512 - RNA, 19 nt, Artificial Sequence
  Description of Artificial Sequence: Synthetic oligonucleotide
agaccucagauggggaaag

SEQ ID NO: 833513 - RNA, 19 nt, Artificial Sequence
  Description of Artificial Sequence: Synthetic oligonucleotide
gcccauauagggucagagg

SEQ ID NO: 833514 - RNA, 19 nt, Artificial Sequence
  Description of Artificial Sequence: Synthetic oligonucleotide
gguuuguaccugcuggaac

SEQ ID NO: 833515 - RNA, 19 nt, Artificial Sequence
  Description of Artificial Sequence: Synthetic oligonucleotide
cuauaugcaauaggcuuga

SEQ ID NO: 833516 - RNA, 19 nt, Artificial Sequence
  Description of Artificial Sequence: Synthetic oligonucleotide
gcuggaacccaguuauagc

SEQ ID NO: 833517 - RNA, 19 nt, Artificial Sequence
  Description of Artificial Sequence: Synthetic oligonucleotide
acacacacacacacuagcu

SEQ ID NO: 833518 - RNA, 19 nt, Artificial Sequence
  Description of Artificial Sequence: Synthetic oligonucleotide
ucacuucacuuagaaccug

SEQ ID NO: 833519 - RNA, 19 nt, Artificial Sequence
  Description of Artificial Sequence: Synthetic oligonucleotide
ucuacaggaaagggaguua

SEQ ID NO: 833520 - RNA, 19 nt, Artificial Sequence
  Description of Artificial Sequence: Synthetic oligonucleotide
gcaauaugcuaaaguaccc

SEQ ID NO: 833521 - RNA, 19 nt, Artificial Sequence
  Description of Artificial Sequence: Synthetic oligonucleotide
gauaaaggcccucuucauu

SEQ ID NO: 833522 - RNA, 19 nt, Artificial Sequence
  Description of Artificial Sequence: Synthetic oligonucleotide
ucccaaagacagacagagu

SEQ ID NO: 833523 - RNA, 19 nt, Artificial Sequence
  Description of Artificial Sequence: Synthetic oligonucleotide
ggaugcaagggcuggggac

SEQ ID NO: 833524 - RNA, 19 nt, Artificial Sequence
  Description of Artificial Sequence: Synthetic oligonucleotide
cacuucacuuagaaccuga

SEQ ID NO: 833525 - RNA, 19 nt, Artificial Sequence
  Description of Artificial Sequence: Synthetic oligonucleotide
ccgagauaagcaaagcuga

SEQ ID NO: 833526 - RNA, 19 nt, Artificial Sequence
  Description of Artificial Sequence: Synthetic oligonucleotide
agaagcgguggguuuguuu

SEQ ID NO: 833527 - RNA, 19 nt, Artificial Sequence
  Description of Artificial Sequence: Synthetic oligonucleotide
guaacuaucucaccauguu

SEQ ID NO: 833528 - RNA, 19 nt, Artificial Sequence
  Description of Artificial Sequence: Synthetic oligonucleotide
acccaguuauagcuauggu

SEQ ID NO: 833529 - RNA, 19 nt, Artificial Sequence
  Description of Artificial Sequence: Synthetic oligonucleotide
cuaagaccucagaugggga

SEQ ID NO: 833530 - RNA, 19 nt, Artificial Sequence
  Description of Artificial Sequence: Synthetic oligonucleotide
agccccaucagaggcuggg

SEQ ID NO: 833531 - RNA, 19 nt, Artificial Sequence
  Description of Artificial Sequence: Synthetic oligonucleotide
gcaauaggcuugaauguug

SEQ ID NO: 833532 - RNA, 19 nt, Artificial Sequence
  Description of Artificial Sequence: Synthetic oligonucleotide
cuucacuuagaaccugaaa

SEQ ID NO: 833533 - RNA, 19 nt, Artificial Sequence
  Description of Artificial Sequence: Synthetic oligonucleotide
aaacaacaggagacucuga

SEQ ID NO: 833534 - RNA, 19 nt, Artificial Sequence
  Description of Artificial Sequence: Synthetic oligonucleotide
gcuguuaaacuccccagaa

SEQ ID NO: 833535 - RNA, 19 nt, Artificial Sequence
  Description of Artificial Sequence: Synthetic oligonucleotide
aguuauagcuauggugaua

SEQ ID NO: 833536 - RNA, 19 nt, Artificial Sequence
  Description of Artificial Sequence: Synthetic oligonucleotide
gcccggacuccuuuuaugc

SEQ ID NO: 833537 - RNA, 19 nt, Artificial Sequence
  Description of Artificial Sequence: Synthetic oligonucleotide
caauccuacccacuucuaa

SEQ ID NO: 833538 - RNA, 19 nt, Artificial Sequence
  Description of Artificial Sequence: Synthetic oligonucleotide
gugcuagcaauuagcugcc

SEQ ID NO: 833539 - RNA, 19 nt, Artificial Sequence
  Description of Artificial Sequence: Synthetic oligonucleotide
uacccacuucuaaaauaua

SEQ ID NO: 833540 - RNA, 19 nt, Artificial Sequence
  Description of Artificial Sequence: Synthetic oligonucleotide
agauaacacagaggccuca

SEQ ID NO: 833541 - RNA, 19 nt, Artificial Sequence
  Description of Artificial Sequence: Synthetic oligonucleotide
guagaggacacucccacuu

SEQ ID NO: 833542 - RNA, 19 nt, Artificial Sequence
  Description of Artificial Sequence: Synthetic oligonucleotide
cucucacucuugacgagga

SEQ ID NO: 833543 - RNA, 19 nt, Artificial Sequence
  Description of Artificial Sequence: Synthetic oligonucleotide
aauuccccguggucugcau

SEQ ID NO: 833544 - RNA, 19 nt, Artificial Sequence
  Description of Artificial Sequence: Synthetic oligonucleotide
aguagggaccucacgugcu

SEQ ID NO: 833545 - RNA, 19 nt, Artificial Sequence
  Description of Artificial Sequence: Synthetic oligonucleotide
agggcgauaaaggcccucu

SEQ ID NO: 833546 - RNA, 19 nt, Artificial Sequence
  Description of Artificial Sequence: Synthetic oligonucleotide
cuagcaauuagcugccuuu

SEQ ID NO: 833547 - RNA, 19 nt, Artificial Sequence
  Description of Artificial Sequence: Synthetic oligonucleotide
ggcgauaaaggcccucuuc

SEQ ID NO: 833548 - RNA, 19 nt, Artificial Sequence
  Description of Artificial Sequence: Synthetic oligonucleotide
caacaacaacaacaacaca

SEQ ID NO: 833549 - RNA, 19 nt, Artificial Sequence
  Description of Artificial Sequence: Synthetic oligonucleotide
cugcuacuuuacagauggg

SEQ ID NO: 833550 - RNA, 19 nt, Artificial Sequence
  Description of Artificial Sequence: Synthetic oligonucleotide
ggcaucguuucuaaauuca

SEQ ID NO: 833551 - RNA, 19 nt, Artificial Sequence
  Description of Artificial Sequence: Synthetic oligonucleotide
uggcccauaauagggcgau

SEQ ID NO: 833552 - RNA, 19 nt, Artificial Sequence
  Description of Artificial Sequence: Synthetic oligonucleotide
accuucuaacaaagaaaca

SEQ ID NO: 833553 - RNA, 19 nt, Artificial Sequence
  Description of Artificial Sequence: Synthetic oligonucleotide
caaauuccccguggucugc

SEQ ID NO: 833554 - RNA, 19 nt, Artificial Sequence
  Description of Artificial Sequence: Synthetic oligonucleotide
acuaggcaagcugggguga

SEQ ID NO: 833555 - RNA, 19 nt, Artificial Sequence
  Description of Artificial Sequence: Synthetic oligonucleotide
ggugggcuaggcaauaguc

SEQ ID NO: 833556 - RNA, 19 nt, Artificial Sequence
  Description of Artificial Sequence: Synthetic oligonucleotide
ugccuuuggugugacuaaa

SEQ ID NO: 833557 - RNA, 19 nt, Artificial Sequence
  Description of Artificial Sequence: Synthetic oligonucleotide
cuccgagauaagcaaagcu

SEQ ID NO: 833558 - RNA, 19 nt, Artificial Sequence
  Description of Artificial Sequence: Synthetic oligonucleotide
guagucuccccuggugggc

SEQ ID NO: 833559 - RNA, 19 nt, Artificial Sequence
  Description of Artificial Sequence: Synthetic oligonucleotide
gccuauaugcaauaggcuu

SEQ ID NO: 833560 - RNA, 19 nt, Artificial Sequence
  Description of Artificial Sequence: Synthetic oligonucleotide
cuauggugauaauguucca

SEQ ID NO: 833561 - RNA, 19 nt, Artificial Sequence
  Description of Artificial Sequence: Synthetic oligonucleotide
ucaauguggcagguacuuu

SEQ ID NO: 833562 - RNA, 19 nt, Artificial Sequence
  Description of Artificial Sequence: Synthetic oligonucleotide
aggcaauagucaugaucaa

SEQ ID NO: 833563 - RNA, 19 nt, Artificial Sequence
  Description of Artificial Sequence: Synthetic oligonucleotide
gggaccucacgugcuaagg

SEQ ID NO: 833564 - RNA, 19 nt, Artificial Sequence
  Description of Artificial Sequence: Synthetic oligonucleotide
agaacccaacuaaacuaaa

SEQ ID NO: 833565 - RNA, 19 nt, Artificial Sequence
  Description of Artificial Sequence: Synthetic oligonucleotide
cuaggcaagcuggggugag

SEQ ID NO: 833566 - RNA, 19 nt, Artificial Sequence
  Description of Artificial Sequence: Synthetic oligonucleotide
cacucuugacgaggaaaug

SEQ ID NO: 833567 - RNA, 19 nt, Artificial Sequence
  Description of Artificial Sequence: Synthetic oligonucleotide
gggcaucguuucuaaauuc

SEQ ID NO: 833568 - RNA, 19 nt, Artificial Sequence
  Description of Artificial Sequence: Synthetic oligonucleotide
cgagauaagcaaagcugag

SEQ ID NO: 833569 - RNA, 19 nt, Artificial Sequence
  Description of Artificial Sequence: Synthetic oligonucleotide
aggagacucugagaaccca

SEQ ID NO: 833570 - RNA, 19 nt, Artificial Sequence
  Description of Artificial Sequence: Synthetic oligonucleotide
gaucaaaggcuuggguaua

SEQ ID NO: 833571 - RNA, 19 nt, Artificial Sequence
  Description of Artificial Sequence: Synthetic oligonucleotide
ccucucacucuugacgagg

SEQ ID NO: 833572 - RNA, 19 nt, Artificial Sequence
  Description of Artificial Sequence: Synthetic oligonucleotide
gugugacuaaaggaggacu

SEQ ID NO: 833573 - RNA, 19 nt, Artificial Sequence
  Description of Artificial Sequence: Synthetic oligonucleotide
guuaucaauguggcaggua

SEQ ID NO: 833574 - RNA, 19 nt, Artificial Sequence
  Description of Artificial Sequence: Synthetic oligonucleotide
caacaacaacacacacaca

SEQ ID NO: 833575 - RNA, 19 nt, Artificial Sequence
  Description of Artificial Sequence: Synthetic oligonucleotide
gaauuucuaggaggugggu

SEQ ID NO: 833576 - RNA, 19 nt, Artificial Sequence
  Description of Artificial Sequence: Synthetic oligonucleotide
auggcccauaauagggcga

SEQ ID NO: 833577 - RNA, 19 nt, Artificial Sequence
  Description of Artificial Sequence: Synthetic oligonucleotide
ggcccggacuccuuuuaug

SEQ ID NO: 833578 - RNA, 19 nt, Artificial Sequence
  Description of Artificial Sequence: Synthetic oligonucleotide
ccuccuuauccuaccccag

SEQ ID NO: 833579 - RNA, 19 nt, Artificial Sequence
  Description of Artificial Sequence: Synthetic oligonucleotide
guagggaccucacgugcua

SEQ ID NO: 833580 - RNA, 19 nt, Artificial Sequence
  Description of Artificial Sequence: Synthetic oligonucleotide
cauauagggucagaggcuu

SEQ ID NO: 833581 - RNA, 19 nt, Artificial Sequence
  Description of Artificial Sequence: Synthetic oligonucleotide
ggaacccaguuauagcuau

SEQ ID NO: 833582 - RNA, 19 nt, Artificial Sequence
  Description of Artificial Sequence: Synthetic oligonucleotide
agccuuuagucaggaaguu

SEQ ID NO: 833583 - RNA, 19 nt, Artificial Sequence
  Description of Artificial Sequence: Synthetic oligonucleotide
gacuaaaggaggacugcuu

SEQ ID NO: 833584 - RNA, 19 nt, Artificial Sequence
  Description of Artificial Sequence: Synthetic oligonucleotide
gcccauaauagggcgauaa

SEQ ID NO: 833585 - RNA, 19 nt, Artificial Sequence
  Description of Artificial Sequence: Synthetic oligonucleotide
ugcuagcaauuagcugccu

SEQ ID NO: 833586 - RNA, 19 nt, Artificial Sequence
  Description of Artificial Sequence: Synthetic oligonucleotide
cacacacacacacuagcuu

SEQ ID NO: 833587 - RNA, 19 nt, Artificial Sequence
  Description of Artificial Sequence: Synthetic oligonucleotide
cucuacaggaaagggaguu

SEQ ID NO: 833588 - RNA, 19 nt, Artificial Sequence
  Description of Artificial Sequence: Synthetic oligonucleotide
augcaagggcuggggaccu

SEQ ID NO: 833589 - RNA, 19 nt, Artificial Sequence
  Description of Artificial Sequence: Synthetic oligonucleotide
acccugcaucagaaaucac

SEQ ID NO: 833590 - RNA, 19 nt, Artificial Sequence
  Description of Artificial Sequence: Synthetic oligonucleotide
cuccuuuuaugcugcuccu

SEQ ID NO: 833591 - RNA, 19 nt, Artificial Sequence
  Description of Artificial Sequence: Synthetic oligonucleotide
caguuauagcuauggugau

SEQ ID NO: 833592 - RNA, 19 nt, Artificial Sequence
  Description of Artificial Sequence: Synthetic oligonucleotide
gggcuaggcaauagucaug

SEQ ID NO: 833593 - RNA, 19 nt, Artificial Sequence
  Description of Artificial Sequence: Synthetic oligonucleotide
ccauauagggucagaggcu

SEQ ID NO: 833594 - RNA, 19 nt, Artificial Sequence
  Description of Artificial Sequence: Synthetic oligonucleotide
ggagaggugcuagcaauua

SEQ ID NO: 833595 - RNA, 19 nt, Artificial Sequence
  Description of Artificial Sequence: Synthetic oligonucleotide
ccuggaauggguggggaga

SEQ ID NO: 833596 - RNA, 19 nt, Artificial Sequence
  Description of Artificial Sequence: Synthetic oligonucleotide
agguggguuuguaccugcu

SEQ ID NO: 833597 - RNA, 19 nt, Artificial Sequence
  Description of Artificial Sequence: Synthetic oligonucleotide
ccccugauuccaagaagga

SEQ ID NO: 833598 - RNA, 19 nt, Artificial Sequence
  Description of Artificial Sequence: Synthetic oligonucleotide
gaagaucaucauggggcuu

SEQ ID NO: 833599 - RNA, 19 nt, Artificial Sequence
  Description of Artificial Sequence: Synthetic oligonucleotide
cccauaauagggcgauaaa

SEQ ID NO: 833600 - RNA, 19 nt, Artificial Sequence
  Description of Artificial Sequence: Synthetic oligonucleotide
guucuaaaccuugguuauu

SEQ ID NO: 833601 - RNA, 19 nt, Artificial Sequence
  Description of Artificial Sequence: Synthetic oligonucleotide
cuuuacagaugggcaucgu

SEQ ID NO: 833602 - RNA, 19 nt, Artificial Sequence
  Description of Artificial Sequence: Synthetic oligonucleotide
ccuugaaaucuccgagaua

SEQ ID NO: 833603 - RNA, 19 nt, Artificial Sequence
  Description of Artificial Sequence: Synthetic oligonucleotide
ccuaccccagcucucugcu

SEQ ID NO: 833604 - RNA, 19 nt, Artificial Sequence
  Description of Artificial Sequence: Synthetic oligonucleotide
gggagaggugcuagcaauu

SEQ ID NO: 833605 - RNA, 19 nt, Artificial Sequence
  Description of Artificial Sequence: Synthetic oligonucleotide
cccugauuccaagaaggau

SEQ ID NO: 833606 - RNA, 19 nt, Artificial Sequence
  Description of Artificial Sequence: Synthetic oligonucleotide
gcuaggcaauagucaugau

SEQ ID NO: 833607 - RNA, 19 nt, Artificial Sequence
  Description of Artificial Sequence: Synthetic oligonucleotide
gggcgauaaaggcccucuu

SEQ ID NO: 833608 - RNA, 19 nt, Artificial Sequence
  Description of Artificial Sequence: Synthetic oligonucleotide
gggcccggacuccuuuuau

SEQ ID NO: 833609 - RNA, 19 nt, Artificial Sequence
  Description of Artificial Sequence: Synthetic oligonucleotide
ggcccauaauagggcgaua

SEQ ID NO: 833610 - RNA, 19 nt, Artificial Sequence
  Description of Artificial Sequence: Synthetic oligonucleotide
cagaagcgguggguuuguu

SEQ ID NO: 833611 - RNA, 19 nt, Artificial Sequence
  Description of Artificial Sequence: Synthetic oligonucleotide
ggaagggcccggacuccuu

SEQ ID NO: 833612 - RNA, 19 nt, Artificial Sequence
  Description of Artificial Sequence: Synthetic oligonucleotide
acaacuauaaccuacagcc

SEQ ID NO: 833613 - RNA, 19 nt, Artificial Sequence
  Description of Artificial Sequence: Synthetic oligonucleotide
uuaaaucggacuaaaaggg

SEQ ID NO: 833614 - RNA, 19 nt, Artificial Sequence
  Description of Artificial Sequence: Synthetic oligonucleotide
uaugaugcuaaucaggugg

SEQ ID NO: 833615 - RNA, 19 nt, Artificial Sequence
  Description of Artificial Sequence: Synthetic oligonucleotide
aguaggugcauuuaguucc

SEQ ID NO: 833616 - RNA, 19 nt, Artificial Sequence
  Description of Artificial Sequence: Synthetic oligonucleotide
cuuaaaucggacuaaaagg

SEQ ID NO: 833617 - RNA, 19 nt, Artificial Sequence
  Description of Artificial Sequence: Synthetic oligonucleotide
aauaauaggaucaacaccu

SEQ ID NO: 833618 - RNA, 19 nt, Artificial Sequence
  Description of Artificial Sequence: Synthetic oligonucleotide
aaaaccuuuguucugagug

SEQ ID NO: 833619 - RNA, 19 nt, Artificial Sequence
  Description of Artificial Sequence: Synthetic oligonucleotide
aaaacuaagaccaccaguc

SEQ ID NO: 833620 - RNA, 19 nt, Artificial Sequence
  Description of Artificial Sequence: Synthetic oligonucleotide
uuuuaugaugcuaaucagg

SEQ ID NO: 833621 - RNA, 19 nt, Artificial Sequence
  Description of Artificial Sequence: Synthetic oligonucleotide
gauaugauaucuaaucugg

SEQ ID NO: 833622 - RNA, 19 nt, Artificial Sequence
  Description of Artificial Sequence: Synthetic oligonucleotide
uugauuaggaccuguaagg

SEQ ID NO: 833623 - RNA, 19 nt, Artificial Sequence
  Description of Artificial Sequence: Synthetic oligonucleotide
auuuagucgaccuuugaac

SEQ ID NO: 833624 - RNA, 19 nt, Artificial Sequence
  Description of Artificial Sequence: Synthetic oligonucleotide
uguucuaccaguuuuauau

SEQ ID NO: 833625 - RNA, 19 nt, Artificial Sequence
  Description of Artificial Sequence: Synthetic oligonucleotide
uauuauugggcauacaacu

SEQ ID NO: 833626 - RNA, 19 nt, Artificial Sequence
  Description of Artificial Sequence: Synthetic oligonucleotide
ugugccaaaaccaguaccg

SEQ ID NO: 833627 - RNA, 19 nt, Artificial Sequence
  Description of Artificial Sequence: Synthetic oligonucleotide
ugggcauacaacuauaacc

SEQ ID NO: 833628 - RNA, 19 nt, Artificial Sequence
  Description of Artificial Sequence: Synthetic oligonucleotide
ucuuugaaacccaccaucg

SEQ ID NO: 833629 - RNA, 19 nt, Artificial Sequence
  Description of Artificial Sequence: Synthetic oligonucleotide
auaguguccagcugaaccc

SEQ ID NO: 833630 - RNA, 19 nt, Artificial Sequence
  Description of Artificial Sequence: Synthetic oligonucleotide
gauaguguccagcugaacc

SEQ ID NO: 833631 - RNA, 19 nt, Artificial Sequence
  Description of Artificial Sequence: Synthetic oligonucleotide
aguauggaugguuucauuc

SEQ ID NO: 833632 - RNA, 19 nt, Artificial Sequence
  Description of Artificial Sequence: Synthetic oligonucleotide
auuaaauccuccaaauccc

SEQ ID NO: 833633 - RNA, 19 nt, Artificial Sequence
  Description of Artificial Sequence: Synthetic oligonucleotide
aaccuacagccuuaaaucg

SEQ ID NO: 833634 - RNA, 19 nt, Artificial Sequence
  Description of Artificial Sequence: Synthetic oligonucleotide
uauugugcuauuuuggcca

SEQ ID NO: 833635 - RNA, 19 nt, Artificial Sequence
  Description of Artificial Sequence: Synthetic oligonucleotide
uuuuacucuccacugauga

SEQ ID NO: 833636 - RNA, 19 nt, Artificial Sequence
  Description of Artificial Sequence: Synthetic oligonucleotide
aguuuuauaucuucuaggu

SEQ ID NO: 833637 - RNA, 19 nt, Artificial Sequence
  Description of Artificial Sequence: Synthetic oligonucleotide
ugaaguagcaagaugacuu

SEQ ID NO: 833638 - RNA, 19 nt, Artificial Sequence
  Description of Artificial Sequence: Synthetic oligonucleotide
ucuucgucagccuggaugg

SEQ ID NO: 833639 - RNA, 19 nt, Artificial Sequence
  Description of Artificial Sequence: Synthetic oligonucleotide
cuuugaacugaguaggugc

SEQ ID NO: 833640 - RNA, 19 nt, Artificial Sequence
  Description of Artificial Sequence: Synthetic oligonucleotide
agauaugauaucuaaucug

SEQ ID NO: 833641 - RNA, 19 nt, Artificial Sequence
  Description of Artificial Sequence: Synthetic oligonucleotide
augauaucuaaucuggucu

SEQ ID NO: 833642 - RNA, 19 nt, Artificial Sequence
  Description of Artificial Sequence: Synthetic oligonucleotide
aaagugagcauacaguguu

SEQ ID NO: 833643 - RNA, 19 nt, Artificial Sequence
  Description of Artificial Sequence: Synthetic oligonucleotide
uucacgucuucauagaaca

SEQ ID NO: 833644 - RNA, 19 nt, Artificial Sequence
  Description of Artificial Sequence: Synthetic oligonucleotide
uaaccuacagccuuaaauc

SEQ ID NO: 833645 - RNA, 19 nt, Artificial Sequence
  Description of Artificial Sequence: Synthetic oligonucleotide
cuauguaauaccuuucuuc

SEQ ID NO: 833646 - RNA, 19 nt, Artificial Sequence
  Description of Artificial Sequence: Synthetic oligonucleotide
uaacguuggagcgagaaag

SEQ ID NO: 833647 - RNA, 19 nt, Artificial Sequence
  Description of Artificial Sequence: Synthetic oligonucleotide
gaagagaccgccuagagua

SEQ ID NO: 833648 - RNA, 19 nt, Artificial Sequence
  Description of Artificial Sequence: Synthetic oligonucleotide
uacaacuauaaccuacagc

SEQ ID NO: 833649 - RNA, 19 nt, Artificial Sequence
  Description of Artificial Sequence: Synthetic oligonucleotide
uuagcuuguucccaaauaa

SEQ ID NO: 833650 - RNA, 19 nt, Artificial Sequence
  Description of Artificial Sequence: Synthetic oligonucleotide
auaaccuacagccuuaaau

SEQ ID NO: 833651 - RNA, 19 nt, Artificial Sequence
  Description of Artificial Sequence: Synthetic oligonucleotide
uguaaugauucuaccaacu

SEQ ID NO: 833652 - RNA, 19 nt, Artificial Sequence
  Description of Artificial Sequence: Synthetic oligonucleotide
uuuagucgaccuuugaacu

SEQ ID NO: 833653 - RNA, 19 nt, Artificial Sequence
  Description of Artificial Sequence: Synthetic oligonucleotide
cucccaauaacguuggagc

SEQ ID NO: 833654 - RNA, 19 nt, Artificial Sequence
  Description of Artificial Sequence: Synthetic oligonucleotide
auuaggaccuguaagguuc

SEQ ID NO: 833655 - RNA, 19 nt, Artificial Sequence
  Description of Artificial Sequence: Synthetic oligonucleotide
ucaucguaaggccugaagu

SEQ ID NO: 833656 - RNA, 19 nt, Artificial Sequence
  Description of Artificial Sequence: Synthetic oligonucleotide
uaguucacuaauaucuuca

SEQ ID NO: 833657 - RNA, 19 nt, Artificial Sequence
  Description of Artificial Sequence: Synthetic oligonucleotide
uugaaagccaugucgcggg

SEQ ID NO: 833658 - RNA, 19 nt, Artificial Sequence
  Description of Artificial Sequence: Synthetic oligonucleotide
uucagaaucgggguuaucc

SEQ ID NO: 833659 - RNA, 19 nt, Artificial Sequence
  Description of Artificial Sequence: Synthetic oligonucleotide
cucucaucucccaauaacg

SEQ ID NO: 833660 - RNA, 19 nt, Artificial Sequence
  Description of Artificial Sequence: Synthetic oligonucleotide
uuuguuggggcagaaaagc

SEQ ID NO: 833661 - RNA, 19 nt, Artificial Sequence
  Description of Artificial Sequence: Synthetic oligonucleotide
ucaguuccaaauaaguaaa

SEQ ID NO: 833662 - RNA, 19 nt, Artificial Sequence
  Description of Artificial Sequence: Synthetic oligonucleotide
aaagacaccgccucuagua

SEQ ID NO: 833663 - RNA, 19 nt, Artificial Sequence
  Description of Artificial Sequence: Synthetic oligonucleotide
aaccuuuguucugagugcc

SEQ ID NO: 833664 - RNA, 19 nt, Artificial Sequence
  Description of Artificial Sequence: Synthetic oligonucleotide
uaugauaucuaaucugguc

SEQ ID NO: 833665 - RNA, 19 nt, Artificial Sequence
  Description of Artificial Sequence: Synthetic oligonucleotide
auuuggagaacgcucaaca

SEQ ID NO: 833666 - RNA, 19 nt, Artificial Sequence
  Description of Artificial Sequence: Synthetic oligonucleotide
guuggagcgagaaagggcg

SEQ ID NO: 833667 - RNA, 19 nt, Artificial Sequence
  Description of Artificial Sequence: Synthetic oligonucleotide
aauugguuaggcauguucu

SEQ ID NO: 833668 - RNA, 19 nt, Artificial Sequence
  Description of Artificial Sequence: Synthetic oligonucleotide
aauccuaauugguuaggca

SEQ ID NO: 833669 - RNA, 19 nt, Artificial Sequence
  Description of Artificial Sequence: Synthetic oligonucleotide
ugagcuuccucuuguauug

SEQ ID NO: 833670 - RNA, 19 nt, Artificial Sequence
  Description of Artificial Sequence: Synthetic oligonucleotide
ugauaucuaaucuggucug

SEQ ID NO: 833671 - RNA, 19 nt, Artificial Sequence
  Description of Artificial Sequence: Synthetic oligonucleotide
cuaaucagguggcugaggc

SEQ ID NO: 833672 - RNA, 19 nt, Artificial Sequence
  Description of Artificial Sequence: Synthetic oligonucleotide
uucucgaggugccauuugg

SEQ ID NO: 833673 - RNA, 19 nt, Artificial Sequence
  Description of Artificial Sequence: Synthetic oligonucleotide
ugcuauuuuggccauaguu

SEQ ID NO: 833674 - RNA, 19 nt, Artificial Sequence
  Description of Artificial Sequence: Synthetic oligonucleotide
uaauugguuaggcauguuc

SEQ ID NO: 833675 - RNA, 19 nt, Artificial Sequence
  Description of Artificial Sequence: Synthetic oligonucleotide
cacgggaggaauauuauug

SEQ ID NO: 833676 - RNA, 19 nt, Artificial Sequence
  Description of Artificial Sequence: Synthetic oligonucleotide
ucccaauaacguuggagcg

SEQ ID NO: 833677 - RNA, 19 nt, Artificial Sequence
  Description of Artificial Sequence: Synthetic oligonucleotide
aagaugacuuuaugaaccu

SEQ ID NO: 833678 - RNA, 19 nt, Artificial Sequence
  Description of Artificial Sequence: Synthetic oligonucleotide
uaauaggaucaacaccugc

SEQ ID NO: 833679 - RNA, 19 nt, Artificial Sequence
  Description of Artificial Sequence: Synthetic oligonucleotide
uuauugggcauacaacuau

SEQ ID NO: 833680 - RNA, 19 nt, Artificial Sequence
  Description of Artificial Sequence: Synthetic oligonucleotide
ucucucaucucccaauaac

SEQ ID NO: 833681 - RNA, 19 nt, Artificial Sequence
  Description of Artificial Sequence: Synthetic oligonucleotide
ugauucuaccaacuguugu

SEQ ID NO: 833682 - RNA, 19 nt, Artificial Sequence
  Description of Artificial Sequence: Synthetic oligonucleotide
uaaaucggacuaaaagggu

SEQ ID NO: 833683 - RNA, 19 nt, Artificial Sequence
  Description of Artificial Sequence: Synthetic oligonucleotide
ugaccucacagauauaaaa

SEQ ID NO: 833684 - RNA, 19 nt, Artificial Sequence
  Description of Artificial Sequence: Synthetic oligonucleotide
aaacccaccaucgguacag

SEQ ID NO: 833685 - RNA, 19 nt, Artificial Sequence
  Description of Artificial Sequence: Synthetic oligonucleotide
ucgaccuuugaacugagua

SEQ ID NO: 833686 - RNA, 19 nt, Artificial Sequence
  Description of Artificial Sequence: Synthetic oligonucleotide
uucuaccaguuuuauaucu

SEQ ID NO: 833687 - RNA, 19 nt, Artificial Sequence
  Description of Artificial Sequence: Synthetic oligonucleotide
auugaaagccaugucgcgg

SEQ ID NO: 833688 - RNA, 19 nt, Artificial Sequence
  Description of Artificial Sequence: Synthetic oligonucleotide
ugccaaaacagugauuuug

SEQ ID NO: 833689 - RNA, 19 nt, Artificial Sequence
  Description of Artificial Sequence: Synthetic oligonucleotide
uagaguaguuugcugcugc

SEQ ID NO: 833690 - RNA, 19 nt, Artificial Sequence
  Description of Artificial Sequence: Synthetic oligonucleotide
guaaugauucuaccaacug

SEQ ID NO: 833691 - RNA, 19 nt, Artificial Sequence
  Description of Artificial Sequence: Synthetic oligonucleotide
ucuaguauggaugguuuca

SEQ ID NO: 833692 - RNA, 19 nt, Artificial Sequence
  Description of Artificial Sequence: Synthetic oligonucleotide
aauaacguuggagcgagaa

SEQ ID NO: 833693 - RNA, 19 nt, Artificial Sequence
  Description of Artificial Sequence: Synthetic oligonucleotide
ugucgcugugccaaaacca

SEQ ID NO: 833694 - RNA, 19 nt, Artificial Sequence
  Description of Artificial Sequence: Synthetic oligonucleotide
guauugugcuauuuuggcc

SEQ ID NO: 833695 - RNA, 19 nt, Artificial Sequence
  Description of Artificial Sequence: Synthetic oligonucleotide
uuuauaucuucuaggucau

SEQ ID NO: 833696 - RNA, 19 nt, Artificial Sequence
  Description of Artificial Sequence: Synthetic oligonucleotide
aguaccgaagccaaaaccu

SEQ ID NO: 833697 - RNA, 19 nt, Artificial Sequence
  Description of Artificial Sequence: Synthetic oligonucleotide
caguaccuaaaccagugcc

SEQ ID NO: 833698 - RNA, 19 nt, Artificial Sequence
  Description of Artificial Sequence: Synthetic oligonucleotide
ucucccaauaacguuggag

SEQ ID NO: 833699 - RNA, 19 nt, Artificial Sequence
  Description of Artificial Sequence: Synthetic oligonucleotide
aacgcucaacaacauaaau

SEQ ID NO: 833700 - RNA, 19 nt, Artificial Sequence
  Description of Artificial Sequence: Synthetic oligonucleotide
acguggucaucguaaggcc

SEQ ID NO: 833701 - RNA, 19 nt, Artificial Sequence
  Description of Artificial Sequence: Synthetic oligonucleotide
ucauagaaagugucacccc

SEQ ID NO: 833702 - RNA, 19 nt, Artificial Sequence
  Description of Artificial Sequence: Synthetic oligonucleotide
uuagucgaccuuugaacug

SEQ ID NO: 833703 - RNA, 19 nt, Artificial Sequence
  Description of Artificial Sequence: Synthetic oligonucleotide
uaucuaaucuggucugaug

SEQ ID NO: 833704 - RNA, 19 nt, Artificial Sequence
  Description of Artificial Sequence: Synthetic oligonucleotide
ggagccccaaaauugaaag

SEQ ID NO: 833705 - RNA, 19 nt, Artificial Sequence
  Description of Artificial Sequence: Synthetic oligonucleotide
agagucuguaaauggucag

SEQ ID NO: 833706 - RNA, 19 nt, Artificial Sequence
  Description of Artificial Sequence: Synthetic oligonucleotide
ugaagagaccgccuagagu

SEQ ID NO: 833707 - RNA, 19 nt, Artificial Sequence
  Description of Artificial Sequence: Synthetic oligonucleotide
uaccaacuguuguugcugg

SEQ ID NO: 833708 - RNA, 19 nt, Artificial Sequence
  Description of Artificial Sequence: Synthetic oligonucleotide
ucugacagagucuguaaau

SEQ ID NO: 833709 - RNA, 19 nt, Artificial Sequence
  Description of Artificial Sequence: Synthetic oligonucleotide
cauacaacuauaaccuaca

SEQ ID NO: 833710 - RNA, 19 nt, Artificial Sequence
  Description of Artificial Sequence: Synthetic oligonucleotide
auacaacuauaaccuacag

SEQ ID NO: 833711 - RNA, 19 nt, Artificial Sequence
  Description of Artificial Sequence: Synthetic oligonucleotide
auguaauaccuuucuucag

SEQ ID NO: 833712 - RNA, 19 nt, Artificial Sequence
  Description of Artificial Sequence: Synthetic oligonucleotide
aggaggguucugcaagagc

SEQ ID NO: 833713 - RNA, 19 nt, Artificial Sequence
  Description of Artificial Sequence: Synthetic oligonucleotide
ugaguaggugcauuuaguu

SEQ ID NO: 833714 - RNA, 19 nt, Artificial Sequence
  Description of Artificial Sequence: Synthetic oligonucleotide
aaaagacaccgccucuagu

SEQ ID NO: 833715 - RNA, 19 nt, Artificial Sequence
  Description of Artificial Sequence: Synthetic oligonucleotide
cacguggucaucguaaggc

SEQ ID NO: 833716 - RNA, 19 nt, Artificial Sequence
  Description of Artificial Sequence: Synthetic oligonucleotide
gaugcuaaucagguggcug

SEQ ID NO: 833717 - RNA, 19 nt, Artificial Sequence
  Description of Artificial Sequence: Synthetic oligonucleotide
aacaccugcaggaggguuc

SEQ ID NO: 833718 - RNA, 19 nt, Artificial Sequence
  Description of Artificial Sequence: Synthetic oligonucleotide
ucuaccaacuguuguugcu

SEQ ID NO: 833719 - RNA, 19 nt, Artificial Sequence
  Description of Artificial Sequence: Synthetic oligonucleotide
aacguuggagcgagaaagg

SEQ ID NO: 833720 - RNA, 19 nt, Artificial Sequence
  Description of Artificial Sequence: Synthetic oligonucleotide
gaguaggugcauuuaguuc

SEQ ID NO: 833721 - RNA, 19 nt, Artificial Sequence
  Description of Artificial Sequence: Synthetic oligonucleotide
ucuauguaauaccuuucuu

SEQ ID NO: 833722 - RNA, 19 nt, Artificial Sequence
  Description of Artificial Sequence: Synthetic oligonucleotide
auauaaaagcugaaauaca

SEQ ID NO: 833723 - RNA, 19 nt, Artificial Sequence
  Description of Artificial Sequence: Synthetic oligonucleotide
aucguaaggccugaaguag

SEQ ID NO: 833724 - RNA, 19 nt, Artificial Sequence
  Description of Artificial Sequence: Synthetic oligonucleotide
ugccauuuggagaacgcuc

SEQ ID NO: 833725 - RNA, 19 nt, Artificial Sequence
  Description of Artificial Sequence: Synthetic oligonucleotide
auuuugcuaaauccuaauu

SEQ ID NO: 833726 - RNA, 19 nt, Artificial Sequence
  Description of Artificial Sequence: Synthetic oligonucleotide
gacaccgccucuaguaugg

SEQ ID NO: 833727 - RNA, 19 nt, Artificial Sequence
  Description of Artificial Sequence: Synthetic oligonucleotide
caguaccgaagccaaaacc

SEQ ID NO: 833728 - RNA, 19 nt, Artificial Sequence
  Description of Artificial Sequence: Synthetic oligonucleotide
ucguaaggccugaaguagc

SEQ ID NO: 833729 - RNA, 19 nt, Artificial Sequence
  Description of Artificial Sequence: Synthetic oligonucleotide
ucugcauccggaucuggga

SEQ ID NO: 833730 - RNA, 19 nt, Artificial Sequence
  Description of Artificial Sequence: Synthetic oligonucleotide
uuuggagaacgcucaacaa

SEQ ID NO: 833731 - RNA, 19 nt, Artificial Sequence
  Description of Artificial Sequence: Synthetic oligonucleotide
ugauuaggaccuguaaggu

SEQ ID NO: 833732 - RNA, 19 nt, Artificial Sequence
  Description of Artificial Sequence: Synthetic oligonucleotide
gggagcagcgcuuagguug

SEQ ID NO: 833733 - RNA, 19 nt, Artificial Sequence
  Description of Artificial Sequence: Synthetic oligonucleotide
gguuauccaccuuagcuug

SEQ ID NO: 833734 - RNA, 19 nt, Artificial Sequence
  Description of Artificial Sequence: Synthetic oligonucleotide
uuuacucuccacugaugac

SEQ ID NO: 833735 - RNA, 19 nt, Artificial Sequence
  Description of Artificial Sequence: Synthetic oligonucleotide
caucucccaauaacguugg

SEQ ID NO: 833736 - RNA, 19 nt, Artificial Sequence
  Description of Artificial Sequence: Synthetic oligonucleotide
acgcucaacaacauaaaug

SEQ ID NO: 833737 - RNA, 19 nt, Artificial Sequence
  Description of Artificial Sequence: Synthetic oligonucleotide
aaaucggacuaaaaggguu

SEQ ID NO: 833738 - RNA, 19 nt, Artificial Sequence
  Description of Artificial Sequence: Synthetic oligonucleotide
guuugaucugagcagggga

SEQ ID NO: 833739 - RNA, 19 nt, Artificial Sequence
  Description of Artificial Sequence: Synthetic oligonucleotide
ucgaggugccauuuggaga

SEQ ID NO: 833740 - RNA, 19 nt, Artificial Sequence
  Description of Artificial Sequence: Synthetic oligonucleotide
uguaagguucugugggaga

SEQ ID NO: 833741 - RNA, 19 nt, Artificial Sequence
  Description of Artificial Sequence: Synthetic oligonucleotide
ucuuaauguuagcuugcuc

SEQ ID NO: 833742 - RNA, 19 nt, Artificial Sequence
  Description of Artificial Sequence: Synthetic oligonucleotide
auucuaccaacuguuguug

SEQ ID NO: 833743 - RNA, 19 nt, Artificial Sequence
  Description of Artificial Sequence: Synthetic oligonucleotide
guaccuaaaccagugccag

SEQ ID NO: 833744 - RNA, 19 nt, Artificial Sequence
  Description of Artificial Sequence: Synthetic oligonucleotide
aagacaccgccucuaguau

SEQ ID NO: 833745 - RNA, 19 nt, Artificial Sequence
  Description of Artificial Sequence: Synthetic oligonucleotide
uauugggcauacaacuaua

SEQ ID NO: 833746 - RNA, 19 nt, Artificial Sequence
  Description of Artificial Sequence: Synthetic oligonucleotide
cuggauaguguccagcuga

SEQ ID NO: 833747 - RNA, 19 nt, Artificial Sequence
  Description of Artificial Sequence: Synthetic oligonucleotide
uucugagugccaccaagaa

SEQ ID NO: 833748 - RNA, 19 nt, Artificial Sequence
  Description of Artificial Sequence: Synthetic oligonucleotide
acgggaggaauauuauugu

SEQ ID NO: 833749 - RNA, 19 nt, Artificial Sequence
  Description of Artificial Sequence: Synthetic oligonucleotide
uucuaccaacuguuguugc

SEQ ID NO: 833750 - RNA, 19 nt, Artificial Sequence
  Description of Artificial Sequence: Synthetic oligonucleotide
uugacaguaagggucuggu

SEQ ID NO: 833751 - RNA, 19 nt, Artificial Sequence
  Description of Artificial Sequence: Synthetic oligonucleotide
accaacuguuguugcuggc

SEQ ID NO: 833752 - RNA, 19 nt, Artificial Sequence
  Description of Artificial Sequence: Synthetic oligonucleotide
caaaagacaccgccucuag

SEQ ID NO: 833753 - RNA, 19 nt, Artificial Sequence
  Description of Artificial Sequence: Synthetic oligonucleotide
uaguguccagcugaacccg

SEQ ID NO: 833754 - RNA, 19 nt, Artificial Sequence
  Description of Artificial Sequence: Synthetic oligonucleotide
gacaguaagggucugguuu

SEQ ID NO: 833755 - RNA, 19 nt, Artificial Sequence
  Description of Artificial Sequence: Synthetic oligonucleotide
gagucuguaaauggucagc

SEQ ID NO: 833756 - RNA, 19 nt, Artificial Sequence
  Description of Artificial Sequence: Synthetic oligonucleotide
ucgggguuauccaccuuag

SEQ ID NO: 833757 - RNA, 19 nt, Artificial Sequence
  Description of Artificial Sequence: Synthetic oligonucleotide
aguaccuaaaccagugcca

SEQ ID NO: 833758 - RNA, 19 nt, Artificial Sequence
  Description of Artificial Sequence: Synthetic oligonucleotide
accuacagccuuaaaucgg

SEQ ID NO: 833759 - RNA, 19 nt, Artificial Sequence
  Description of Artificial Sequence: Synthetic oligonucleotide
uagucgaccuuugaacuga

SEQ ID NO: 833760 - RNA, 19 nt, Artificial Sequence
  Description of Artificial Sequence: Synthetic oligonucleotide
auaccuuucuucagauuuc

SEQ ID NO: 833761 - RNA, 19 nt, Artificial Sequence
  Description of Artificial Sequence: Synthetic oligonucleotide
ucucgaggugccauuugga

SEQ ID NO: 833762 - RNA, 19 nt, Artificial Sequence
  Description of Artificial Sequence: Synthetic oligonucleotide
agaaagggcgacuggcagu

SEQ ID NO: 833763 - RNA, 19 nt, Artificial Sequence
  Description of Artificial Sequence: Synthetic oligonucleotide
cugucgcugugccaaaacc

SEQ ID NO: 833764 - RNA, 19 nt, Artificial Sequence
  Description of Artificial Sequence: Synthetic oligonucleotide
ggaauauuauuguugaaau

SEQ ID NO: 833765 - RNA, 19 nt, Artificial Sequence
  Description of Artificial Sequence: Synthetic oligonucleotide
guguaggcugacugaagag

SEQ ID NO: 833766 - RNA, 19 nt, Artificial Sequence
  Description of Artificial Sequence: Synthetic oligonucleotide
aaacccacccgcgggugcg

SEQ ID NO: 833767 - RNA, 19 nt, Artificial Sequence
  Description of Artificial Sequence: Synthetic oligonucleotide
uugguuaggcauguucugu

SEQ ID NO: 833768 - RNA, 19 nt, Artificial Sequence
  Description of Artificial Sequence: Synthetic oligonucleotide
accgccuagaguaguuugc

SEQ ID NO: 833769 - RNA, 19 nt, Artificial Sequence
  Description of Artificial Sequence: Synthetic oligonucleotide
aguucauuuagucgaccuu

SEQ ID NO: 833770 - RNA, 19 nt, Artificial Sequence
  Description of Artificial Sequence: Synthetic oligonucleotide
ugguuaggcauguucuguc

SEQ ID NO: 833771 - RNA, 19 nt, Artificial Sequence
  Description of Artificial Sequence: Synthetic oligonucleotide
aagcugaaauacauucaca

SEQ ID NO: 833772 - RNA, 19 nt, Artificial Sequence
  Description of Artificial Sequence: Synthetic oligonucleotide
aaucggacuaaaaggguuu

SEQ ID NO: 833773 - RNA, 19 nt, Artificial Sequence
  Description of Artificial Sequence: Synthetic oligonucleotide
accaguaccuaaaccagug

SEQ ID NO: 833774 - RNA, 19 nt, Artificial Sequence
  Description of Artificial Sequence: Synthetic oligonucleotide
ugcaucuauguaauaccuu

SEQ ID NO: 833775 - RNA, 19 nt, Artificial Sequence
  Description of Artificial Sequence: Synthetic oligonucleotide
agcgagaaagggcgacugg

SEQ ID NO: 833776 - RNA, 19 nt, Artificial Sequence
  Description of Artificial Sequence: Synthetic oligonucleotide
cagcugaacccgcaguugc

SEQ ID NO: 833777 - RNA, 19 nt, Artificial Sequence
  Description of Artificial Sequence: Synthetic oligonucleotide
cuccaaacccacccgcggg

SEQ ID NO: 833778 - RNA, 19 nt, Artificial Sequence
  Description of Artificial Sequence: Synthetic oligonucleotide
auaacguuggagcgagaaa

SEQ ID NO: 833779 - RNA, 19 nt, Artificial Sequence
  Description of Artificial Sequence: Synthetic oligonucleotide
ugcccaaaccaguaccuaa

SEQ ID NO: 833780 - RNA, 19 nt, Artificial Sequence
  Description of Artificial Sequence: Synthetic oligonucleotide
cuguguaaacuccacggga

SEQ ID NO: 833781 - RNA, 19 nt, Artificial Sequence
  Description of Artificial Sequence: Synthetic oligonucleotide
aacccgcaguugcucuucg

SEQ ID NO: 833782 - RNA, 19 nt, Artificial Sequence
  Description of Artificial Sequence: Synthetic oligonucleotide
uugaaucuccuguuugauu

SEQ ID NO: 833783 - RNA, 19 nt, Artificial Sequence
  Description of Artificial Sequence: Synthetic oligonucleotide
agugagcauacaguguugu

SEQ ID NO: 833784 - RNA, 19 nt, Artificial Sequence
  Description of Artificial Sequence: Synthetic oligonucleotide
uccaaacccacccgcgggu

SEQ ID NO: 833785 - RNA, 19 nt, Artificial Sequence
  Description of Artificial Sequence: Synthetic oligonucleotide
aucgggguuauccaccuua

SEQ ID NO: 833786 - RNA, 19 nt, Artificial Sequence
  Description of Artificial Sequence: Synthetic oligonucleotide
guaguuugauucuuuugua

SEQ ID NO: 833787 - RNA, 19 nt, Artificial Sequence
  Description of Artificial Sequence: Synthetic oligonucleotide
uccacgggaggaauauuau

SEQ ID NO: 833788 - RNA, 19 nt, Artificial Sequence
  Description of Artificial Sequence: Synthetic oligonucleotide
auauaucuucacgucuuca

SEQ ID NO: 833789 - RNA, 19 nt, Artificial Sequence
  Description of Artificial Sequence: Synthetic oligonucleotide
gauaucuaaucuggucuga

SEQ ID NO: 833790 - RNA, 19 nt, Artificial Sequence
  Description of Artificial Sequence: Synthetic oligonucleotide
agaguaguuugcugcugcu

SEQ ID NO: 833791 - RNA, 19 nt, Artificial Sequence
  Description of Artificial Sequence: Synthetic oligonucleotide
accgccucuaguauggaug

SEQ ID NO: 833792 - RNA, 19 nt, Artificial Sequence
  Description of Artificial Sequence: Synthetic oligonucleotide
cagauaugauaucuaaucu

SEQ ID NO: 833793 - RNA, 19 nt, Artificial Sequence
  Description of Artificial Sequence: Synthetic oligonucleotide
cucuaguauggaugguuuc

SEQ ID NO: 833794 - RNA, 19 nt, Artificial Sequence
  Description of Artificial Sequence: Synthetic oligonucleotide
agacaccgccucuaguaug

SEQ ID NO: 833795 - RNA, 19 nt, Artificial Sequence
  Description of Artificial Sequence: Synthetic oligonucleotide
cuuagguugucccgagcuc

SEQ ID NO: 833796 - RNA, 19 nt, Artificial Sequence
  Description of Artificial Sequence: Synthetic oligonucleotide
cuguaagguucugugggag

SEQ ID NO: 833797 - RNA, 19 nt, Artificial Sequence
  Description of Artificial Sequence: Synthetic oligonucleotide
uauaaccuacagccuuaaa

SEQ ID NO: 833798 - RNA, 19 nt, Artificial Sequence
  Description of Artificial Sequence: Synthetic oligonucleotide
agcagcgcuuagguugucc

SEQ ID NO: 833799 - RNA, 19 nt, Artificial Sequence
  Description of Artificial Sequence: Synthetic oligonucleotide
aagugagcauacaguguug

SEQ ID NO: 833800 - RNA, 19 nt, Artificial Sequence
  Description of Artificial Sequence: Synthetic oligonucleotide
auuauugggcauacaacua

SEQ ID NO: 833801 - RNA, 19 nt, Artificial Sequence
  Description of Artificial Sequence: Synthetic oligonucleotide
agcuuguucccaaauaaua

SEQ ID NO: 833802 - RNA, 19 nt, Artificial Sequence
  Description of Artificial Sequence: Synthetic oligonucleotide
auaauaggaucaacaccug

SEQ ID NO: 833803 - RNA, 19 nt, Artificial Sequence
  Description of Artificial Sequence: Synthetic oligonucleotide
ccuguguaaacuccacggg

SEQ ID NO: 833804 - RNA, 19 nt, Artificial Sequence
  Description of Artificial Sequence: Synthetic oligonucleotide
uaaacuccacgggaggaau

SEQ ID NO: 833805 - RNA, 19 nt, Artificial Sequence
  Description of Artificial Sequence: Synthetic oligonucleotide
caaaucccaggccggugcc

SEQ ID NO: 833806 - RNA, 19 nt, Artificial Sequence
  Description of Artificial Sequence: Synthetic oligonucleotide
cugguuuccucccaaaccu

SEQ ID NO: 833807 - RNA, 19 nt, Artificial Sequence
  Description of Artificial Sequence: Synthetic oligonucleotide
agugccaguuccugucgcu

SEQ ID NO: 833808 - RNA, 19 nt, Artificial Sequence
  Description of Artificial Sequence: Synthetic oligonucleotide
auaucuaaucuggucugau

SEQ ID NO: 833809 - RNA, 19 nt, Artificial Sequence
  Description of Artificial Sequence: Synthetic oligonucleotide
ggucugaugcugcuuaguc

SEQ ID NO: 833810 - RNA, 19 nt, Artificial Sequence
  Description of Artificial Sequence: Synthetic oligonucleotide
gaggaauauuauuguugaa

SEQ ID NO: 833811 - RNA, 19 nt, Artificial Sequence
  Description of Artificial Sequence: Synthetic oligonucleotide
cagcgcuuagguugucccg

SEQ ID NO: 833812 - RNA, 19 nt, Artificial Sequence
  Description of Artificial Sequence: Synthetic oligonucleotide
gaaacccaccaucgguaca

SEQ ID NO: 833813 - RNA, 19 nt, Artificial Sequence
  Description of Artificial Sequence: Synthetic oligonucleotide
gggguuauccaccuuagcu

SEQ ID NO: 833814 - RNA, 19 nt, Artificial Sequence
  Description of Artificial Sequence: Synthetic oligonucleotide
ccaauaacguuggagcgag

SEQ ID NO: 833815 - RNA, 19 nt, Artificial Sequence
  Description of Artificial Sequence: Synthetic oligonucleotide
gggcauacaacuauaaccu

SEQ ID NO: 833816 - RNA, 19 nt, Artificial Sequence
  Description of Artificial Sequence: Synthetic oligonucleotide
guaggugcauuuaguuccc

SEQ ID NO: 833817 - RNA, 19 nt, Artificial Sequence
  Description of Artificial Sequence: Synthetic oligonucleotide
ucgcugugccaaaaccagu

SEQ ID NO: 833818 - RNA, 19 nt, Artificial Sequence
  Description of Artificial Sequence: Synthetic oligonucleotide
cgaccuuugaacugaguag

SEQ ID NO: 833819 - RNA, 19 nt, Artificial Sequence
  Description of Artificial Sequence: Synthetic oligonucleotide
auugggcauacaacuauaa

SEQ ID NO: 833820 - RNA, 19 nt, Artificial Sequence
  Description of Artificial Sequence: Synthetic oligonucleotide
agcgcuuagguugucccga

SEQ ID NO: 833821 - RNA, 19 nt, Artificial Sequence
  Description of Artificial Sequence: Synthetic oligonucleotide
ugcucaaagugagcauaca

SEQ ID NO: 833822 - RNA, 19 nt, Artificial Sequence
  Description of Artificial Sequence: Synthetic oligonucleotide
uaggcauguucugucaguu

SEQ ID NO: 833823 - RNA, 19 nt, Artificial Sequence
  Description of Artificial Sequence: Synthetic oligonucleotide
uaagguucugugggagaga

SEQ ID NO: 833824 - RNA, 19 nt, Artificial Sequence
  Description of Artificial Sequence: Synthetic oligonucleotide
acuauaaccuacagccuua

SEQ ID NO: 833825 - RNA, 19 nt, Artificial Sequence
  Description of Artificial Sequence: Synthetic oligonucleotide
aggucugcaucuauguaau

SEQ ID NO: 833826 - RNA, 19 nt, Artificial Sequence
  Description of Artificial Sequence: Synthetic oligonucleotide
gauggcguagccgcucuuc

SEQ ID NO: 833827 - RNA, 19 nt, Artificial Sequence
  Description of Artificial Sequence: Synthetic oligonucleotide
cugcaucuauguaauaccu

SEQ ID NO: 833828 - RNA, 19 nt, Artificial Sequence
  Description of Artificial Sequence: Synthetic oligonucleotide
uggcaguauugaucagcug

SEQ ID NO: 833829 - RNA, 19 nt, Artificial Sequence
  Description of Artificial Sequence: Synthetic oligonucleotide
ugaugcuaaucagguggcu

SEQ ID NO: 833830 - RNA, 19 nt, Artificial Sequence
  Description of Artificial Sequence: Synthetic oligonucleotide
gaaucgggguuauccaccu

SEQ ID NO: 833831 - RNA, 19 nt, Artificial Sequence
  Description of Artificial Sequence: Synthetic oligonucleotide
gagaacgcucaacaacaua

SEQ ID NO: 833832 - RNA, 19 nt, Artificial Sequence
  Description of Artificial Sequence: Synthetic oligonucleotide
cccaaaauugaaagccaug

SEQ ID NO: 833833 - RNA, 19 nt, Artificial Sequence
  Description of Artificial Sequence: Synthetic oligonucleotide
cuccacgggaggaauauua

SEQ ID NO: 833834 - RNA, 19 nt, Artificial Sequence
  Description of Artificial Sequence: Synthetic oligonucleotide
uggagcgagaaagggcgac

SEQ ID NO: 833835 - RNA, 19 nt, Artificial Sequence
  Description of Artificial Sequence: Synthetic oligonucleotide
caaacccacccgcgggugc

SEQ ID NO: 833836 - RNA, 19 nt, Artificial Sequence
  Description of Artificial Sequence: Synthetic oligonucleotide
ugacaguaagggucugguu

SEQ ID NO: 833837 - RNA, 19 nt, Artificial Sequence
  Description of Artificial Sequence: Synthetic oligonucleotide
agggcgacuggcaguauug

SEQ ID NO: 833838 - RNA, 19 nt, Artificial Sequence
  Description of Artificial Sequence: Synthetic oligonucleotide
aagccaugucgcgggagca

SEQ ID NO: 833839 - RNA, 19 nt, Artificial Sequence
  Description of Artificial Sequence: Synthetic oligonucleotide
gcagcgcuuagguuguccc

SEQ ID NO: 833840 - RNA, 19 nt, Artificial Sequence
  Description of Artificial Sequence: Synthetic oligonucleotide
ccgccucuaguauggaugg

SEQ ID NO: 833841 - RNA, 19 nt, Artificial Sequence
  Description of Artificial Sequence: Synthetic oligonucleotide
gguuaggcauguucuguca

SEQ ID NO: 833842 - RNA, 19 nt, Artificial Sequence
  Description of Artificial Sequence: Synthetic oligonucleotide
gaacgcucaacaacauaaa

SEQ ID NO: 833843 - RNA, 19 nt, Artificial Sequence
  Description of Artificial Sequence: Synthetic oligonucleotide
cuucucgaggugccauuug

SEQ ID NO: 833844 - RNA, 19 nt, Artificial Sequence
  Description of Artificial Sequence: Synthetic oligonucleotide
ugguuuccucccaaaccuu

SEQ ID NO: 833845 - RNA, 19 nt, Artificial Sequence
  Description of Artificial Sequence: Synthetic oligonucleotide
gcaucuauguaauaccuuu

SEQ ID NO: 833846 - RNA, 19 nt, Artificial Sequence
  Description of Artificial Sequence: Synthetic oligonucleotide
caggccggugcccaaacca

SEQ ID NO: 833847 - RNA, 19 nt, Artificial Sequence
  Description of Artificial Sequence: Synthetic oligonucleotide
guaaacuccacgggaggaa

SEQ ID NO: 833848 - RNA, 19 nt, Artificial Sequence
  Description of Artificial Sequence: Synthetic oligonucleotide
uugaacugaguaggugcau

SEQ ID NO: 833849 - RNA, 19 nt, Artificial Sequence
  Description of Artificial Sequence: Synthetic oligonucleotide
aggugcccagaagugcccg

SEQ ID NO: 833850 - RNA, 19 nt, Artificial Sequence
  Description of Artificial Sequence: Synthetic oligonucleotide
ccuacagccuuaaaucgga

SEQ ID NO: 833851 - RNA, 19 nt, Artificial Sequence
  Description of Artificial Sequence: Synthetic oligonucleotide
uagccgcucuuccuuugaa

SEQ ID NO: 833852 - RNA, 19 nt, Artificial Sequence
  Description of Artificial Sequence: Synthetic oligonucleotide
caugucgcgggagcagcgc

SEQ ID NO: 833853 - RNA, 19 nt, Artificial Sequence
  Description of Artificial Sequence: Synthetic oligonucleotide
agccgcucuuccuuugaau

SEQ ID NO: 833854 - RNA, 19 nt, Artificial Sequence
  Description of Artificial Sequence: Synthetic oligonucleotide
cuaagaccaccaguccauc

SEQ ID NO: 833855 - RNA, 19 nt, Artificial Sequence
  Description of Artificial Sequence: Synthetic oligonucleotide
agagaccgccuagaguagu

SEQ ID NO: 833856 - RNA, 19 nt, Artificial Sequence
  Description of Artificial Sequence: Synthetic oligonucleotide
ccaguaccuaaaccagugc

SEQ ID NO: 833857 - RNA, 19 nt, Artificial Sequence
  Description of Artificial Sequence: Synthetic oligonucleotide
uggucaucguaaggccuga

SEQ ID NO: 833858 - RNA, 19 nt, Artificial Sequence
  Description of Artificial Sequence: Synthetic oligonucleotide
gcuaaucagguggcugagg

SEQ ID NO: 833859 - RNA, 19 nt, Artificial Sequence
  Description of Artificial Sequence: Synthetic oligonucleotide
ugggacccuucucgaggug

SEQ ID NO: 833860 - RNA, 19 nt, Artificial Sequence
  Description of Artificial Sequence: Synthetic oligonucleotide
gaacccgcaguugcucuuc

SEQ ID NO: 833861 - RNA, 19 nt, Artificial Sequence
  Description of Artificial Sequence: Synthetic oligonucleotide
ccuuugaacugaguaggug

SEQ ID NO: 833862 - RNA, 19 nt, Artificial Sequence
  Description of Artificial Sequence: Synthetic oligonucleotide
caucgguacaggaauuaau

SEQ ID NO: 833863 - RNA, 19 nt, Artificial Sequence
  Description of Artificial Sequence: Synthetic oligonucleotide
ggguuauccaccuuagcuu

SEQ ID NO: 833864 - RNA, 19 nt, Artificial Sequence
  Description of Artificial Sequence: Synthetic oligonucleotide
agucgaccuuugaacugag

SEQ ID NO: 833865 - RNA, 19 nt, Artificial Sequence
  Description of Artificial Sequence: Synthetic oligonucleotide
aacccacccgcgggugcgg

SEQ ID NO: 833866 - RNA, 19 nt, Artificial Sequence
  Description of Artificial Sequence: Synthetic oligonucleotide
ccaguaccgaagccaaaac

SEQ ID NO: 833867 - RNA, 19 nt, Artificial Sequence
  Description of Artificial Sequence: Synthetic oligonucleotide
caccuuagcuuguucccaa

SEQ ID NO: 833868 - RNA, 19 nt, Artificial Sequence
  Description of Artificial Sequence: Synthetic oligonucleotide
cuauaaccuacagccuuaa

SEQ ID NO: 833869 - RNA, 19 nt, Artificial Sequence
  Description of Artificial Sequence: Synthetic oligonucleotide
cugacugaagagaccgccu

SEQ ID NO: 833870 - RNA, 19 nt, Artificial Sequence
  Description of Artificial Sequence: Synthetic oligonucleotide
caaaaccuuuguucugagu

SEQ ID NO: 833871 - RNA, 19 nt, Artificial Sequence
  Description of Artificial Sequence: Synthetic oligonucleotide
gucuuaauguuagcuugcu

SEQ ID NO: 833872 - RNA, 19 nt, Artificial Sequence
  Description of Artificial Sequence: Synthetic oligonucleotide
aucucccguaacaggucug

SEQ ID NO: 833873 - RNA, 19 nt, Artificial Sequence
  Description of Artificial Sequence: Synthetic oligonucleotide
gcuuagucaucuggucuug

SEQ ID NO: 833874 - RNA, 19 nt, Artificial Sequence
  Description of Artificial Sequence: Synthetic oligonucleotide
ggcauacaacuauaaccua

SEQ ID NO: 833875 - RNA, 19 nt, Artificial Sequence
  Description of Artificial Sequence: Synthetic oligonucleotide
ccaugucgcgggagcagcg

SEQ ID NO: 833876 - RNA, 19 nt, Artificial Sequence
  Description of Artificial Sequence: Synthetic oligonucleotide
ucgcgggagcagcgcuuag

SEQ ID NO: 833877 - RNA, 19 nt, Artificial Sequence
  Description of Artificial Sequence: Synthetic oligonucleotide
ggacccuucucgaggugcc

SEQ ID NO: 833878 - RNA, 19 nt, Artificial Sequence
  Description of Artificial Sequence: Synthetic oligonucleotide
uccugucgcugugccaaaa

SEQ ID NO: 833879 - RNA, 19 nt, Artificial Sequence
  Description of Artificial Sequence: Synthetic oligonucleotide
ccugucgcugugccaaaac

SEQ ID NO: 833880 - RNA, 19 nt, Artificial Sequence
  Description of Artificial Sequence: Synthetic oligonucleotide
cugaacccgcaguugcucu

SEQ ID NO: 833881 - RNA, 19 nt, Artificial Sequence
  Description of Artificial Sequence: Synthetic oligonucleotide
gcaaaagacaccgccucua

SEQ ID NO: 833882 - RNA, 19 nt, Artificial Sequence
  Description of Artificial Sequence: Synthetic oligonucleotide
acccgcaguugcucuucgu

SEQ ID NO: 833883 - RNA, 19 nt, Artificial Sequence
  Description of Artificial Sequence: Synthetic oligonucleotide
ggugcggcgguagcugcag

SEQ ID NO: 833884 - RNA, 19 nt, Artificial Sequence
  Description of Artificial Sequence: Synthetic oligonucleotide
gcggcgguagcugcagagg

SEQ ID NO: 833885 - RNA, 19 nt, Artificial Sequence
  Description of Artificial Sequence: Synthetic oligonucleotide
cauguucuaccaguuuuau

SEQ ID NO: 833886 - RNA, 19 nt, Artificial Sequence
  Description of Artificial Sequence: Synthetic oligonucleotide
gccaugucgcgggagcagc

SEQ ID NO: 833887 - RNA, 19 nt, Artificial Sequence
  Description of Artificial Sequence: Synthetic oligonucleotide
gcgcuuagguugucccgag

SEQ ID NO: 833888 - RNA, 19 nt, Artificial Sequence
  Description of Artificial Sequence: Synthetic oligonucleotide
cguaaggccugaaguagca

SEQ ID NO: 833889 - RNA, 19 nt, Artificial Sequence
  Description of Artificial Sequence: Synthetic oligonucleotide
cccaauaacguuggagcga

SEQ ID NO: 833890 - RNA, 19 nt, Artificial Sequence
  Description of Artificial Sequence: Synthetic oligonucleotide
caauaacguuggagcgaga

SEQ ID NO: 833891 - RNA, 19 nt, Artificial Sequence
  Description of Artificial Sequence: Synthetic oligonucleotide
guuauccaccuuagcuugu

SEQ ID NO: 833892 - RNA, 19 nt, Artificial Sequence
  Description of Artificial Sequence: Synthetic oligonucleotide
agucuucgaagcaguucuu

SEQ ID NO: 833893 - RNA, 19 nt, Artificial Sequence
  Description of Artificial Sequence: Synthetic oligonucleotide
ggugcccaaaccaguaccu

SEQ ID NO: 833894 - RNA, 19 nt, Artificial Sequence
  Description of Artificial Sequence: Synthetic oligonucleotide
ggugcccagaagugcccga

SEQ ID NO: 833895 - RNA, 19 nt, Artificial Sequence
  Description of Artificial Sequence: Synthetic oligonucleotide
acuccacgggaggaauauu

SEQ ID NO: 833896 - RNA, 19 nt, Artificial Sequence
  Description of Artificial Sequence: Synthetic oligonucleotide
gccuuaaaucggacuaaaa

SEQ ID NO: 833897 - RNA, 19 nt, Artificial Sequence
  Description of Artificial Sequence: Synthetic oligonucleotide
ccuaauugguuaggcaugu

SEQ ID NO: 833898 - RNA, 19 nt, Artificial Sequence
  Description of Artificial Sequence: Synthetic oligonucleotide
guuugccaaaacagugauu

SEQ ID NO: 833899 - RNA, 19 nt, Artificial Sequence
  Description of Artificial Sequence: Synthetic oligonucleotide
cgccuagaguaguuugcug

SEQ ID NO: 833900 - RNA, 19 nt, Artificial Sequence
  Description of Artificial Sequence: Synthetic oligonucleotide
gagaccgccuagaguaguu

SEQ ID NO: 833901 - RNA, 19 nt, Artificial Sequence
  Description of Artificial Sequence: Synthetic oligonucleotide
gagccuguguaggcugacu

SEQ ID NO: 833902 - RNA, 19 nt, Artificial Sequence
  Description of Artificial Sequence: Synthetic oligonucleotide
ggagcagcgcuuagguugu

SEQ ID NO: 833903 - RNA, 19 nt, Artificial Sequence
  Description of Artificial Sequence: Synthetic oligonucleotide
cgggguuauccaccuuagc

SEQ ID NO: 833904 - RNA, 19 nt, Artificial Sequence
  Description of Artificial Sequence: Synthetic oligonucleotide
ccucuaguauggaugguuu

SEQ ID NO: 833905 - RNA, 19 nt, Artificial Sequence
  Description of Artificial Sequence: Synthetic oligonucleotide
aucagguggcugaggccuu

SEQ ID NO: 833906 - RNA, 19 nt, Artificial Sequence
  Description of Artificial Sequence: Synthetic oligonucleotide
ggcgacuggcaguauugau

SEQ ID NO: 833907 - RNA, 19 nt, Artificial Sequence
  Description of Artificial Sequence: Synthetic oligonucleotide
ccacccgcgggugcggcgg

SEQ ID NO: 833908 - RNA, 19 nt, Artificial Sequence
  Description of Artificial Sequence: Synthetic oligonucleotide
gucgcgggagcagcgcuua

SEQ ID NO: 833909 - RNA, 19 nt, Artificial Sequence
  Description of Artificial Sequence: Synthetic oligonucleotide
gguuuccucccaaaccuuu

SEQ ID NO: 833910 - RNA, 19 nt, Artificial Sequence
  Description of Artificial Sequence: Synthetic oligonucleotide
gggcgacuggcaguauuga

SEQ ID NO: 833911 - RNA, 19 nt, Artificial Sequence
  Description of Artificial Sequence: Synthetic oligonucleotide
ccauuuggagaacgcucaa

SEQ ID NO: 833912 - RNA, 19 nt, Artificial Sequence
  Description of Artificial Sequence: Synthetic oligonucleotide
ggagcgagaaagggcgacu

SEQ ID NO: 833913 - RNA, 19 nt, Artificial Sequence
  Description of Artificial Sequence: Synthetic oligonucleotide
gccucuaguauggaugguu

SEQ ID NO: 833914 - RNA, 19 nt, Artificial Sequence
  Description of Artificial Sequence: Synthetic oligonucleotide
ccaucgguacaggaauuaa

SEQ ID NO: 833915 - RNA, 19 nt, Artificial Sequence
  Description of Artificial Sequence: Synthetic oligonucleotide
cgcuuagguugucccgagc

SEQ ID NO: 833916 - RNA, 19 nt, Artificial Sequence
  Description of Artificial Sequence: Synthetic oligonucleotide
cgcgggagcagcgcuuagg

SEQ ID NO: 833917 - RNA, 19 nt, Artificial Sequence
  Description of Artificial Sequence: Synthetic oligonucleotide
gccuguagugccuguguuu

SEQ ID NO: 833918 - RNA, 19 nt, Artificial Sequence
  Description of Artificial Sequence: Synthetic oligonucleotide
ggagaacgcucaacaacau

SEQ ID NO: 833919 - RNA, 19 nt, Artificial Sequence
  Description of Artificial Sequence: Synthetic oligonucleotide
gucgaccuuugaacugagu

SEQ ID NO: 833920 - RNA, 19 nt, Artificial Sequence
  Description of Artificial Sequence: Synthetic oligonucleotide
gagcagcgcuuagguuguc

SEQ ID NO: 833921 - RNA, 19 nt, Artificial Sequence
  Description of Artificial Sequence: Synthetic oligonucleotide
ggucaucguaaggccugaa

SEQ ID NO: 833922 - RNA, 19 nt, Artificial Sequence
  Description of Artificial Sequence: Synthetic oligonucleotide
cccgaaggagccccaaaau

SEQ ID NO: 833923 - RNA, 19 nt, Artificial Sequence
  Description of Artificial Sequence: Synthetic oligonucleotide
ccacgggaggaauauuauu

SEQ ID NO: 833924 - RNA, 19 nt, Artificial Sequence
  Description of Artificial Sequence: Synthetic oligonucleotide
gggugcggcgguagcugca

SEQ ID NO: 833925 - RNA, 19 nt, Artificial Sequence
  Description of Artificial Sequence: Synthetic oligonucleotide
ccgccuagaguaguuugcu

SEQ ID NO: 833926 - RNA, 19 nt, Artificial Sequence
  Description of Artificial Sequence: Synthetic oligonucleotide
gcguagccgcucuuccuuu

SEQ ID NO: 833927 - RNA, 19 nt, Artificial Sequence
  Description of Artificial Sequence: Synthetic oligonucleotide
cggcgguagcugcagaggu

SEQ ID NO: 833928 - RNA, 19 nt, Artificial Sequence
  Description of Artificial Sequence: Synthetic oligonucleotide
ccuucucgaggugccauuu

SEQ ID NO: 833929 - RNA, 19 nt, Artificial Sequence
  Description of Artificial Sequence: Synthetic oligonucleotide
acccgcgggugcggcggua

SEQ ID NO: 833930 - RNA, 19 nt, Artificial Sequence
  Description of Artificial Sequence: Synthetic oligonucleotide
cacccgcgggugcggcggu

SEQ ID NO: 833931 - RNA, 19 nt, Artificial Sequence
  Description of Artificial Sequence: Synthetic oligonucleotide
cgccucuaguauggauggu

SEQ ID NO: 833932 - RNA, 19 nt, Artificial Sequence
  Description of Artificial Sequence: Synthetic oligonucleotide
ucuaauagagaaaauauac

SEQ ID NO: 833933 - RNA, 19 nt, Artificial Sequence
  Description of Artificial Sequence: Synthetic oligonucleotide
aaauccaugcucuugcccc

SEQ ID NO: 833934 - RNA, 19 nt, Artificial Sequence
  Description of Artificial Sequence: Synthetic oligonucleotide
aaagagaucuaauagagaa

SEQ ID NO: 833935 - RNA, 19 nt, Artificial Sequence
  Description of Artificial Sequence: Synthetic oligonucleotide
uggggauagauccagaacg

SEQ ID NO: 833936 - RNA, 19 nt, Artificial Sequence
  Description of Artificial Sequence: Synthetic oligonucleotide
uaucuguagauguagacgg

SEQ ID NO: 833937 - RNA, 19 nt, Artificial Sequence
  Description of Artificial Sequence: Synthetic oligonucleotide
ugccuuaucggccuuaucg

SEQ ID NO: 833938 - RNA, 19 nt, Artificial Sequence
  Description of Artificial Sequence: Synthetic oligonucleotide
gacauugauacguucauag

SEQ ID NO: 833939 - RNA, 19 nt, Artificial Sequence
  Description of Artificial Sequence: Synthetic oligonucleotide
uauggaaaagugcccaugg

SEQ ID NO: 833940 - RNA, 19 nt, Artificial Sequence
  Description of Artificial Sequence: Synthetic oligonucleotide
aagaaguaucuguagaugu

SEQ ID NO: 833941 - RNA, 19 nt, Artificial Sequence
  Description of Artificial Sequence: Synthetic oligonucleotide
aguggaagagguuaucucg

SEQ ID NO: 833942 - RNA, 19 nt, Artificial Sequence
  Description of Artificial Sequence: Synthetic oligonucleotide
cugaaaagagaucuaauag

SEQ ID NO: 833943 - RNA, 19 nt, Artificial Sequence
  Description of Artificial Sequence: Synthetic oligonucleotide
auagauagguagcacacuc

SEQ ID NO: 833944 - RNA, 19 nt, Artificial Sequence
  Description of Artificial Sequence: Synthetic oligonucleotide
caaagaaggagaaacauca

SEQ ID NO: 833945 - RNA, 19 nt, Artificial Sequence
  Description of Artificial Sequence: Synthetic oligonucleotide
cuuaaauccaugcucuugc

SEQ ID NO: 833946 - RNA, 19 nt, Artificial Sequence
  Description of Artificial Sequence: Synthetic oligonucleotide
ugacuuaaaacaauggauu

SEQ ID NO: 833947 - RNA, 19 nt, Artificial Sequence
  Description of Artificial Sequence: Synthetic oligonucleotide
agaaacaucacgcaccccu

SEQ ID NO: 833948 - RNA, 19 nt, Artificial Sequence
  Description of Artificial Sequence: Synthetic oligonucleotide
aagguagaucuucacaucu

SEQ ID NO: 833949 - RNA, 19 nt, Artificial Sequence
  Description of Artificial Sequence: Synthetic oligonucleotide
auggauuacagaaaccagc

SEQ ID NO: 833950 - RNA, 19 nt, Artificial Sequence
  Description of Artificial Sequence: Synthetic oligonucleotide
gaaagcuucaccgccacgg

SEQ ID NO: 833951 - RNA, 19 nt, Artificial Sequence
  Description of Artificial Sequence: Synthetic oligonucleotide
ucauggaugauaucugcag

SEQ ID NO: 833952 - RNA, 19 nt, Artificial Sequence
  Description of Artificial Sequence: Synthetic oligonucleotide
ucugaaaagagaucuaaua

SEQ ID NO: 833953 - RNA, 19 nt, Artificial Sequence
  Description of Artificial Sequence: Synthetic oligonucleotide
caaccaugcccauagauag

SEQ ID NO: 833954 - RNA, 19 nt, Artificial Sequence
  Description of Artificial Sequence: Synthetic oligonucleotide
ggacaugucacaucuaugg

SEQ ID NO: 833955 - RNA, 19 nt, Artificial Sequence
  Description of Artificial Sequence: Synthetic oligonucleotide
aaaggccucacaccacccc

SEQ ID NO: 833956 - RNA, 19 nt, Artificial Sequence
  Description of Artificial Sequence: Synthetic oligonucleotide
auugauacguucauaguuc

SEQ ID NO: 833957 - RNA, 19 nt, Artificial Sequence
  Description of Artificial Sequence: Synthetic oligonucleotide
ugggacuuccccaaaagug

SEQ ID NO: 833958 - RNA, 19 nt, Artificial Sequence
  Description of Artificial Sequence: Synthetic oligonucleotide
auuuccccauccuuagucc

SEQ ID NO: 833959 - RNA, 19 nt, Artificial Sequence
  Description of Artificial Sequence: Synthetic oligonucleotide
acagaugaccgucuccacc

SEQ ID NO: 833960 - RNA, 19 nt, Artificial Sequence
  Description of Artificial Sequence: Synthetic oligonucleotide
uacuccgucacuaccaucu

SEQ ID NO: 833961 - RNA, 19 nt, Artificial Sequence
  Description of Artificial Sequence: Synthetic oligonucleotide
uccuggaugauguaugucu

SEQ ID NO: 833962 - RNA, 19 nt, Artificial Sequence
  Description of Artificial Sequence: Synthetic oligonucleotide
ggacaaaaguaccaggugg

SEQ ID NO: 833963 - RNA, 19 nt, Artificial Sequence
  Description of Artificial Sequence: Synthetic oligonucleotide
cacacuuaggccuaaggac

SEQ ID NO: 833964 - RNA, 19 nt, Artificial Sequence
  Description of Artificial Sequence: Synthetic oligonucleotide
ucaagccuuaaauccaugc

SEQ ID NO: 833965 - RNA, 19 nt, Artificial Sequence
  Description of Artificial Sequence: Synthetic oligonucleotide
ucugauggguccaacccag

SEQ ID NO: 833966 - RNA, 19 nt, Artificial Sequence
  Description of Artificial Sequence: Synthetic oligonucleotide
uugaguucgaugacguagc

SEQ ID NO: 833967 - RNA, 19 nt, Artificial Sequence
  Description of Artificial Sequence: Synthetic oligonucleotide
aauggauuacagaaaccag

SEQ ID NO: 833968 - RNA, 19 nt, Artificial Sequence
  Description of Artificial Sequence: Synthetic oligonucleotide
uuaucggccuugaugcccg

SEQ ID NO: 833969 - RNA, 19 nt, Artificial Sequence
  Description of Artificial Sequence: Synthetic oligonucleotide
ugcacgaacaucaguaaaa

SEQ ID NO: 833970 - RNA, 19 nt, Artificial Sequence
  Description of Artificial Sequence: Synthetic oligonucleotide
agagaucuaauagagaaaa

SEQ ID NO: 833971 - RNA, 19 nt, Artificial Sequence
  Description of Artificial Sequence: Synthetic oligonucleotide
aaacaucacgcaccccugg

SEQ ID NO: 833972 - RNA, 19 nt, Artificial Sequence
  Description of Artificial Sequence: Synthetic oligonucleotide
uguagacggaggcaaagac

SEQ ID NO: 833973 - RNA, 19 nt, Artificial Sequence
  Description of Artificial Sequence: Synthetic oligonucleotide
caugcccauagauagguag

SEQ ID NO: 833974 - RNA, 19 nt, Artificial Sequence
  Description of Artificial Sequence: Synthetic oligonucleotide
acaagcuaagcaaagggag

SEQ ID NO: 833975 - RNA, 19 nt, Artificial Sequence
  Description of Artificial Sequence: Synthetic oligonucleotide
gaugccgcugccuuaucgg

SEQ ID NO: 833976 - RNA, 19 nt, Artificial Sequence
  Description of Artificial Sequence: Synthetic oligonucleotide
caacccaggacacauuucc

SEQ ID NO: 833977 - RNA, 19 nt, Artificial Sequence
  Description of Artificial Sequence: Synthetic oligonucleotide
aguaccagguggcucuccc

SEQ ID NO: 833978 - RNA, 19 nt, Artificial Sequence
  Description of Artificial Sequence: Synthetic oligonucleotide
agaacggaaaggaagcggg

SEQ ID NO: 833979 - RNA, 19 nt, Artificial Sequence
  Description of Artificial Sequence: Synthetic oligonucleotide
aaagaaggagaaacaucac

SEQ ID NO: 833980 - RNA, 19 nt, Artificial Sequence
  Description of Artificial Sequence: Synthetic oligonucleotide
gacaaaaguaccagguggc

SEQ ID NO: 833981 - RNA, 19 nt, Artificial Sequence
  Description of Artificial Sequence: Synthetic oligonucleotide
uucuuaggcaccaggccag

SEQ ID NO: 833982 - RNA, 19 nt, Artificial Sequence
  Description of Artificial Sequence: Synthetic oligonucleotide
cacaaagguguucucaaag

SEQ ID NO: 833983 - RNA, 19 nt, Artificial Sequence
  Description of Artificial Sequence: Synthetic oligonucleotide
gaggaaaggccucacacca

SEQ ID NO: 833984 - RNA, 19 nt, Artificial Sequence
  Description of Artificial Sequence: Synthetic oligonucleotide
uagagcacgccacagugga

SEQ ID NO: 833985 - RNA, 19 nt, Artificial Sequence
  Description of Artificial Sequence: Synthetic oligonucleotide
cuuaucggccuuaucggcc

SEQ ID NO: 833986 - RNA, 19 nt, Artificial Sequence
  Description of Artificial Sequence: Synthetic oligonucleotide
uucaccgccacggacaacc

SEQ ID NO: 833987 - RNA, 19 nt, Artificial Sequence
  Description of Artificial Sequence: Synthetic oligonucleotide
cuuaguccacacuuaggcc

SEQ ID NO: 833988 - RNA, 19 nt, Artificial Sequence
  Description of Artificial Sequence: Synthetic oligonucleotide
cuuaaaacaauggauuaca

SEQ ID NO: 833989 - RNA, 19 nt, Artificial Sequence
  Description of Artificial Sequence: Synthetic oligonucleotide
uaggacaugucacaucuau

SEQ ID NO: 833990 - RNA, 19 nt, Artificial Sequence
  Description of Artificial Sequence: Synthetic oligonucleotide
ucuguagauguagacggag

SEQ ID NO: 833991 - RNA, 19 nt, Artificial Sequence
  Description of Artificial Sequence: Synthetic oligonucleotide
guuaucucgggccagcuga

SEQ ID NO: 833992 - RNA, 19 nt, Artificial Sequence
  Description of Artificial Sequence: Synthetic oligonucleotide
ucaugguaggcagugagac

SEQ ID NO: 833993 - RNA, 19 nt, Artificial Sequence
  Description of Artificial Sequence: Synthetic oligonucleotide
acggaaaggaagcggggac

SEQ ID NO: 833994 - RNA, 19 nt, Artificial Sequence
  Description of Artificial Sequence: Synthetic oligonucleotide
caauggauuacagaaacca

SEQ ID NO: 833995 - RNA, 19 nt, Artificial Sequence
  Description of Artificial Sequence: Synthetic oligonucleotide
ugucacaucuauggaaaag

SEQ ID NO: 833996 - RNA, 19 nt, Artificial Sequence
  Description of Artificial Sequence: Synthetic oligonucleotide
uccgucacuaccaucuccu

SEQ ID NO: 833997 - RNA, 19 nt, Artificial Sequence
  Description of Artificial Sequence: Synthetic oligonucleotide
gccuuaucggccuugaugc

SEQ ID NO: 833998 - RNA, 19 nt, Artificial Sequence
  Description of Artificial Sequence: Synthetic oligonucleotide
gaagcggggacaaaaguac

SEQ ID NO: 833999 - RNA, 19 nt, Artificial Sequence
  Description of Artificial Sequence: Synthetic oligonucleotide
aaaagagaucuaauagaga

SEQ ID NO: 834000 - RNA, 19 nt, Artificial Sequence
  Description of Artificial Sequence: Synthetic oligonucleotide
gacauacuccgucacuacc

SEQ ID NO: 834001 - RNA, 19 nt, Artificial Sequence
  Description of Artificial Sequence: Synthetic oligonucleotide
gacuuaaaacaauggauua

SEQ ID NO: 834002 - RNA, 19 nt, Artificial Sequence
  Description of Artificial Sequence: Synthetic oligonucleotide
aggugguagaugaaggaac

SEQ ID NO: 834003 - RNA, 19 nt, Artificial Sequence
  Description of Artificial Sequence: Synthetic oligonucleotide
uugauacguucauaguucu

SEQ ID NO: 834004 - RNA, 19 nt, Artificial Sequence
  Description of Artificial Sequence: Synthetic oligonucleotide
auccuuaguccacacuuag

SEQ ID NO: 834005 - RNA, 19 nt, Artificial Sequence
  Description of Artificial Sequence: Synthetic oligonucleotide
cagagaacugugcuuggcg

SEQ ID NO: 834006 - RNA, 19 nt, Artificial Sequence
  Description of Artificial Sequence: Synthetic oligonucleotide
caucccacccucaaacacc

SEQ ID NO: 834007 - RNA, 19 nt, Artificial Sequence
  Description of Artificial Sequence: Synthetic oligonucleotide
agcuugggcaacuguuccc

SEQ ID NO: 834008 - RNA, 19 nt, Artificial Sequence
  Description of Artificial Sequence: Synthetic oligonucleotide
cucccagaaguuccgaggg

SEQ ID NO: 834009 - RNA, 19 nt, Artificial Sequence
  Description of Artificial Sequence: Synthetic oligonucleotide
caacuccucauuucuuugg

SEQ ID NO: 834010 - RNA, 19 nt, Artificial Sequence
  Description of Artificial Sequence: Synthetic oligonucleotide
uuccccuuggcccagccac

SEQ ID NO: 834011 - RNA, 19 nt, Artificial Sequence
  Description of Artificial Sequence: Synthetic oligonucleotide
uggggagcugacuuaaaac

SEQ ID NO: 834012 - RNA, 19 nt, Artificial Sequence
  Description of Artificial Sequence: Synthetic oligonucleotide
cgugucaagccuuaaaucc

SEQ ID NO: 834013 - RNA, 19 nt, Artificial Sequence
  Description of Artificial Sequence: Synthetic oligonucleotide
cauuuccccauccuuaguc

SEQ ID NO: 834014 - RNA, 19 nt, Artificial Sequence
  Description of Artificial Sequence: Synthetic oligonucleotide
agaugccgcugccuuaucg

SEQ ID NO: 834015 - RNA, 19 nt, Artificial Sequence
  Description of Artificial Sequence: Synthetic oligonucleotide
aagcggggacaaaaguacc

SEQ ID NO: 834016 - RNA, 19 nt, Artificial Sequence
  Description of Artificial Sequence: Synthetic oligonucleotide
cucccuuuaguccuucccc

SEQ ID NO: 834017 - RNA, 19 nt, Artificial Sequence
  Description of Artificial Sequence: Synthetic oligonucleotide
aagucauggaugauaucug

SEQ ID NO: 834018 - RNA, 19 nt, Artificial Sequence
  Description of Artificial Sequence: Synthetic oligonucleotide
uaagcaaagggaggaggag

SEQ ID NO: 834019 - RNA, 19 nt, Artificial Sequence
  Description of Artificial Sequence: Synthetic oligonucleotide
cagcccaugacuucuguac

SEQ ID NO: 834020 - RNA, 19 nt, Artificial Sequence
  Description of Artificial Sequence: Synthetic oligonucleotide
uggaugauguaugucugug

SEQ ID NO: 834021 - RNA, 19 nt, Artificial Sequence
  Description of Artificial Sequence: Synthetic oligonucleotide
cugaaucccgugucaagcc

SEQ ID NO: 834022 - RNA, 19 nt, Artificial Sequence
  Description of Artificial Sequence: Synthetic oligonucleotide
aacaucacgcaccccugga

SEQ ID NO: 834023 - RNA, 19 nt, Artificial Sequence
  Description of Artificial Sequence: Synthetic oligonucleotide
gucacugacauacuccguc

SEQ ID NO: 834024 - RNA, 19 nt, Artificial Sequence
  Description of Artificial Sequence: Synthetic oligonucleotide
uguggggauagauccagaa

SEQ ID NO: 834025 - RNA, 19 nt, Artificial Sequence
  Description of Artificial Sequence: Synthetic oligonucleotide
augcccauagauagguagc

SEQ ID NO: 834026 - RNA, 19 nt, Artificial Sequence
  Description of Artificial Sequence: Synthetic oligonucleotide
ggaaaagugcccaugguac

SEQ ID NO: 834027 - RNA, 19 nt, Artificial Sequence
  Description of Artificial Sequence: Synthetic oligonucleotide
cuaagcaaagggaggagga

SEQ ID NO: 834028 - RNA, 19 nt, Artificial Sequence
  Description of Artificial Sequence: Synthetic oligonucleotide
cuuucacguguccagcccc

SEQ ID NO: 834029 - RNA, 19 nt, Artificial Sequence
  Description of Artificial Sequence: Synthetic oligonucleotide
ugaaucccgugucaagccu

SEQ ID NO: 834030 - RNA, 19 nt, Artificial Sequence
  Description of Artificial Sequence: Synthetic oligonucleotide
gagcugacuuaaaacaaug

SEQ ID NO: 834031 - RNA, 19 nt, Artificial Sequence
  Description of Artificial Sequence: Synthetic oligonucleotide
agaacugugcuuggcggac

SEQ ID NO: 834032 - RNA, 19 nt, Artificial Sequence
  Description of Artificial Sequence: Synthetic oligonucleotide
uuaucggccuuaucggccu

SEQ ID NO: 834033 - RNA, 19 nt, Artificial Sequence
  Description of Artificial Sequence: Synthetic oligonucleotide
aggauagccaccuucucuu

SEQ ID NO: 834034 - RNA, 19 nt, Artificial Sequence
  Description of Artificial Sequence: Synthetic oligonucleotide
agcugagcaaggaagaagu

SEQ ID NO: 834035 - RNA, 19 nt, Artificial Sequence
  Description of Artificial Sequence: Synthetic oligonucleotide
aacggaaaggaagcgggga

SEQ ID NO: 834036 - RNA, 19 nt, Artificial Sequence
  Description of Artificial Sequence: Synthetic oligonucleotide
aaaagugcccaugguacaa

SEQ ID NO: 834037 - RNA, 19 nt, Artificial Sequence
  Description of Artificial Sequence: Synthetic oligonucleotide
ggcagugagaccccgcugg

SEQ ID NO: 834038 - RNA, 19 nt, Artificial Sequence
  Description of Artificial Sequence: Synthetic oligonucleotide
agucagcaggaucuccgcg

SEQ ID NO: 834039 - RNA, 19 nt, Artificial Sequence
  Description of Artificial Sequence: Synthetic oligonucleotide
ugcucugauggguccaacc

SEQ ID NO: 834040 - RNA, 19 nt, Artificial Sequence
  Description of Artificial Sequence: Synthetic oligonucleotide
ucaaaguggcggauggcau

SEQ ID NO: 834041 - RNA, 19 nt, Artificial Sequence
  Description of Artificial Sequence: Synthetic oligonucleotide
aaagugcccaugguacaag

SEQ ID NO: 834042 - RNA, 19 nt, Artificial Sequence
  Description of Artificial Sequence: Synthetic oligonucleotide
cugacuuaaaacaauggau

SEQ ID NO: 834043 - RNA, 19 nt, Artificial Sequence
  Description of Artificial Sequence: Synthetic oligonucleotide
ggagaaacaucacgcaccc

SEQ ID NO: 834044 - RNA, 19 nt, Artificial Sequence
  Description of Artificial Sequence: Synthetic oligonucleotide
uugaaagcuucaccgccac

SEQ ID NO: 834045 - RNA, 19 nt, Artificial Sequence
  Description of Artificial Sequence: Synthetic oligonucleotide
uuuccccauccuuagucca

SEQ ID NO: 834046 - RNA, 19 nt, Artificial Sequence
  Description of Artificial Sequence: Synthetic oligonucleotide
caggcuuucacguguccag

SEQ ID NO: 834047 - RNA, 19 nt, Artificial Sequence
  Description of Artificial Sequence: Synthetic oligonucleotide
cauugcaguucuuggcccc

SEQ ID NO: 834048 - RNA, 19 nt, Artificial Sequence
  Description of Artificial Sequence: Synthetic oligonucleotide
auacguucauaguucuccu

SEQ ID NO: 834049 - RNA, 19 nt, Artificial Sequence
  Description of Artificial Sequence: Synthetic oligonucleotide
aagagaucuaauagagaaa

SEQ ID NO: 834050 - RNA, 19 nt, Artificial Sequence
  Description of Artificial Sequence: Synthetic oligonucleotide
acaacccaagucugacccg

SEQ ID NO: 834051 - RNA, 19 nt, Artificial Sequence
  Description of Artificial Sequence: Synthetic oligonucleotide
ccugccucacacuugaaag

SEQ ID NO: 834052 - RNA, 19 nt, Artificial Sequence
  Description of Artificial Sequence: Synthetic oligonucleotide
ugccucacacuugaaagac

SEQ ID NO: 834053 - RNA, 19 nt, Artificial Sequence
  Description of Artificial Sequence: Synthetic oligonucleotide
gaacggaaaggaagcgggg

SEQ ID NO: 834054 - RNA, 19 nt, Artificial Sequence
  Description of Artificial Sequence: Synthetic oligonucleotide
ugacauacuccgucacuac

SEQ ID NO: 834055 - RNA, 19 nt, Artificial Sequence
  Description of Artificial Sequence: Synthetic oligonucleotide
augauguaugucuguggga

SEQ ID NO: 834056 - RNA, 19 nt, Artificial Sequence
  Description of Artificial Sequence: Synthetic oligonucleotide
ugaguucgaugacguagca

SEQ ID NO: 834057 - RNA, 19 nt, Artificial Sequence
  Description of Artificial Sequence: Synthetic oligonucleotide
gccuuaucggccuuaucgg

SEQ ID NO: 834058 - RNA, 19 nt, Artificial Sequence
  Description of Artificial Sequence: Synthetic oligonucleotide
uccugccucacacuugaaa

SEQ ID NO: 834059 - RNA, 19 nt, Artificial Sequence
  Description of Artificial Sequence: Synthetic oligonucleotide
guguucuuaggcaccaggc

SEQ ID NO: 834060 - RNA, 19 nt, Artificial Sequence
  Description of Artificial Sequence: Synthetic oligonucleotide
cuggaaaggaugguaggac

SEQ ID NO: 834061 - RNA, 19 nt, Artificial Sequence
  Description of Artificial Sequence: Synthetic oligonucleotide
ggaaaggccucacaccacc

SEQ ID NO: 834062 - RNA, 19 nt, Artificial Sequence
  Description of Artificial Sequence: Synthetic oligonucleotide
aggaagcggggacaaaagu

SEQ ID NO: 834063 - RNA, 19 nt, Artificial Sequence
  Description of Artificial Sequence: Synthetic oligonucleotide
uucguagagcacgccacag

SEQ ID NO: 834064 - RNA, 19 nt, Artificial Sequence
  Description of Artificial Sequence: Synthetic oligonucleotide
ccauagauagguagcacac

SEQ ID NO: 834065 - RNA, 19 nt, Artificial Sequence
  Description of Artificial Sequence: Synthetic oligonucleotide
aguagcccuggcauggagg

SEQ ID NO: 834066 - RNA, 19 nt, Artificial Sequence
  Description of Artificial Sequence: Synthetic oligonucleotide
uccgaguccgcaucuggga

SEQ ID NO: 834067 - RNA, 19 nt, Artificial Sequence
  Description of Artificial Sequence: Synthetic oligonucleotide
ugcccauagauagguagca

SEQ ID NO: 834068 - RNA, 19 nt, Artificial Sequence
  Description of Artificial Sequence: Synthetic oligonucleotide
cacauucaugaggagcucc

SEQ ID NO: 834069 - RNA, 19 nt, Artificial Sequence
  Description of Artificial Sequence: Synthetic oligonucleotide
gguaggacaugucacaucu

SEQ ID NO: 834070 - RNA, 19 nt, Artificial Sequence
  Description of Artificial Sequence: Synthetic oligonucleotide
caucacgcaccccuggaug

SEQ ID NO: 834071 - RNA, 19 nt, Artificial Sequence
  Description of Artificial Sequence: Synthetic oligonucleotide
ugcccaggcuuucacgugu

SEQ ID NO: 834072 - RNA, 19 nt, Artificial Sequence
  Description of Artificial Sequence: Synthetic oligonucleotide
accaugcccauagauaggu

SEQ ID NO: 834073 - RNA, 19 nt, Artificial Sequence
  Description of Artificial Sequence: Synthetic oligonucleotide
uuucacguguccagccccu

SEQ ID NO: 834074 - RNA, 19 nt, Artificial Sequence
  Description of Artificial Sequence: Synthetic oligonucleotide
gauaucugcagggucccca

SEQ ID NO: 834075 - RNA, 19 nt, Artificial Sequence
  Description of Artificial Sequence: Synthetic oligonucleotide
ggccuuaucggccuugaug

SEQ ID NO: 834076 - RNA, 19 nt, Artificial Sequence
  Description of Artificial Sequence: Synthetic oligonucleotide
ucugacccgaggcaccaaa

SEQ ID NO: 834077 - RNA, 19 nt, Artificial Sequence
  Description of Artificial Sequence: Synthetic oligonucleotide
agggacauugauacguuca

SEQ ID NO: 834078 - RNA, 19 nt, Artificial Sequence
  Description of Artificial Sequence: Synthetic oligonucleotide
ggugguagaugaaggaacc

SEQ ID NO: 834079 - RNA, 19 nt, Artificial Sequence
  Description of Artificial Sequence: Synthetic oligonucleotide
aggcuuucacguguccagc

SEQ ID NO: 834080 - RNA, 19 nt, Artificial Sequence
  Description of Artificial Sequence: Synthetic oligonucleotide
cauugauacguucauaguu

SEQ ID NO: 834081 - RNA, 19 nt, Artificial Sequence
  Description of Artificial Sequence: Synthetic oligonucleotide
agugugcugugcaagaaaa

SEQ ID NO: 834082 - RNA, 19 nt, Artificial Sequence
  Description of Artificial Sequence: Synthetic oligonucleotide
caaaaguaccagguggcuc

SEQ ID NO: 834083 - RNA, 19 nt, Artificial Sequence
  Description of Artificial Sequence: Synthetic oligonucleotide
guagagcacgccacagugg

SEQ ID NO: 834084 - RNA, 19 nt, Artificial Sequence
  Description of Artificial Sequence: Synthetic oligonucleotide
caagucugacccgaggcac

SEQ ID NO: 834085 - RNA, 19 nt, Artificial Sequence
  Description of Artificial Sequence: Synthetic oligonucleotide
aaccagcuugggcaacugu

SEQ ID NO: 834086 - RNA, 19 nt, Artificial Sequence
  Description of Artificial Sequence: Synthetic oligonucleotide
gcucccagaaguuccgagg

SEQ ID NO: 834087 - RNA, 19 nt, Artificial Sequence
  Description of Artificial Sequence: Synthetic oligonucleotide
gcucugauggguccaaccc

SEQ ID NO: 834088 - RNA, 19 nt, Artificial Sequence
  Description of Artificial Sequence: Synthetic oligonucleotide
agcagacucagaggucccc

SEQ ID NO: 834089 - RNA, 19 nt, Artificial Sequence
  Description of Artificial Sequence: Synthetic oligonucleotide
gggacaaaaguaccaggug

SEQ ID NO: 834090 - RNA, 19 nt, Artificial Sequence
  Description of Artificial Sequence: Synthetic oligonucleotide
guagcccuggcauggagga

SEQ ID NO: 834091 - RNA, 19 nt, Artificial Sequence
  Description of Artificial Sequence: Synthetic oligonucleotide
auacuccgucacuaccauc

SEQ ID NO: 834092 - RNA, 19 nt, Artificial Sequence
  Description of Artificial Sequence: Synthetic oligonucleotide
agcccuggcauggaggaag

SEQ ID NO: 834093 - RNA, 19 nt, Artificial Sequence
  Description of Artificial Sequence: Synthetic oligonucleotide
gugggaugaaggcacugac

SEQ ID NO: 834094 - RNA, 19 nt, Artificial Sequence
  Description of Artificial Sequence: Synthetic oligonucleotide
gagucuucguagagcacgc

SEQ ID NO: 834095 - RNA, 19 nt, Artificial Sequence
  Description of Artificial Sequence: Synthetic oligonucleotide
uccauccgaguccgcaucu

SEQ ID NO: 834096 - RNA, 19 nt, Artificial Sequence
  Description of Artificial Sequence: Synthetic oligonucleotide
ggaagagguuaucucgggc

SEQ ID NO: 834097 - RNA, 19 nt, Artificial Sequence
  Description of Artificial Sequence: Synthetic oligonucleotide
aacuggggcacagggacau

SEQ ID NO: 834098 - RNA, 19 nt, Artificial Sequence
  Description of Artificial Sequence: Synthetic oligonucleotide
ucccgcuuccaucuuucac

SEQ ID NO: 834099 - RNA, 19 nt, Artificial Sequence
  Description of Artificial Sequence: Synthetic oligonucleotide
gucuucguagagcacgcca

SEQ ID NO: 834100 - RNA, 19 nt, Artificial Sequence
  Description of Artificial Sequence: Synthetic oligonucleotide
cacggacaacccaagucug

SEQ ID NO: 834101 - RNA, 19 nt, Artificial Sequence
  Description of Artificial Sequence: Synthetic oligonucleotide
cauggcugcgcugacccgc

SEQ ID NO: 834102 - RNA, 19 nt, Artificial Sequence
  Description of Artificial Sequence: Synthetic oligonucleotide
guagacggaggcaaagaca

SEQ ID NO: 834103 - RNA, 19 nt, Artificial Sequence
  Description of Artificial Sequence: Synthetic oligonucleotide
cucggccagugcaaccucg

SEQ ID NO: 834104 - RNA, 19 nt, Artificial Sequence
  Description of Artificial Sequence: Synthetic oligonucleotide
guagauguagacggaggca

SEQ ID NO: 834105 - RNA, 19 nt, Artificial Sequence
  Description of Artificial Sequence: Synthetic oligonucleotide
ucuuaggcaccaggccagg

SEQ ID NO: 834106 - RNA, 19 nt, Artificial Sequence
  Description of Artificial Sequence: Synthetic oligonucleotide
agaaaccagcuugggcaac

SEQ ID NO: 834107 - RNA, 19 nt, Artificial Sequence
  Description of Artificial Sequence: Synthetic oligonucleotide
cuuggcggacucaucccac

SEQ ID NO: 834108 - RNA, 19 nt, Artificial Sequence
  Description of Artificial Sequence: Synthetic oligonucleotide
ugguaggacaugucacauc

SEQ ID NO: 834109 - RNA, 19 nt, Artificial Sequence
  Description of Artificial Sequence: Synthetic oligonucleotide
agucuucguagagcacgcc

SEQ ID NO: 834110 - RNA, 19 nt, Artificial Sequence
  Description of Artificial Sequence: Synthetic oligonucleotide
gugucaagccuuaaaucca

SEQ ID NO: 834111 - RNA, 19 nt, Artificial Sequence
  Description of Artificial Sequence: Synthetic oligonucleotide
gaaaggccucacaccaccc

SEQ ID NO: 834112 - RNA, 19 nt, Artificial Sequence
  Description of Artificial Sequence: Synthetic oligonucleotide
agaaguaucuguagaugua

SEQ ID NO: 834113 - RNA, 19 nt, Artificial Sequence
  Description of Artificial Sequence: Synthetic oligonucleotide
gaugccgaggccgggccag

SEQ ID NO: 834114 - RNA, 19 nt, Artificial Sequence
  Description of Artificial Sequence: Synthetic oligonucleotide
accccgcuggaagucaugg

SEQ ID NO: 834115 - RNA, 19 nt, Artificial Sequence
  Description of Artificial Sequence: Synthetic oligonucleotide
uggguccaacccaggacac

SEQ ID NO: 834116 - RNA, 19 nt, Artificial Sequence
  Description of Artificial Sequence: Synthetic oligonucleotide
gagguuaucucgggccagc

SEQ ID NO: 834117 - RNA, 19 nt, Artificial Sequence
  Description of Artificial Sequence: Synthetic oligonucleotide
gccaggguggcccaacucc

SEQ ID NO: 834118 - RNA, 19 nt, Artificial Sequence
  Description of Artificial Sequence: Synthetic oligonucleotide
cacacuccgcccacugagc

SEQ ID NO: 834119 - RNA, 19 nt, Artificial Sequence
  Description of Artificial Sequence: Synthetic oligonucleotide
gaguucgaugacguagcac

SEQ ID NO: 834120 - RNA, 19 nt, Artificial Sequence
  Description of Artificial Sequence: Synthetic oligonucleotide
cacugacauacuccgucac

SEQ ID NO: 834121 - RNA, 19 nt, Artificial Sequence
  Description of Artificial Sequence: Synthetic oligonucleotide
cugccucacacuugaaaga

SEQ ID NO: 834122 - RNA, 19 nt, Artificial Sequence
  Description of Artificial Sequence: Synthetic oligonucleotide
ggaagaaguaucuguagau

SEQ ID NO: 834123 - RNA, 19 nt, Artificial Sequence
  Description of Artificial Sequence: Synthetic oligonucleotide
ugggagguaggucccucuc

SEQ ID NO: 834124 - RNA, 19 nt, Artificial Sequence
  Description of Artificial Sequence: Synthetic oligonucleotide
gugguagaugaaggaaccc

SEQ ID NO: 834125 - RNA, 19 nt, Artificial Sequence
  Description of Artificial Sequence: Synthetic oligonucleotide
ccuuaucggccuuaucggc

SEQ ID NO: 834126 - RNA, 19 nt, Artificial Sequence
  Description of Artificial Sequence: Synthetic oligonucleotide
acauuuccccauccuuagu

SEQ ID NO: 834127 - RNA, 19 nt, Artificial Sequence
  Description of Artificial Sequence: Synthetic oligonucleotide
guaggucccucucuucaca

SEQ ID NO: 834128 - RNA, 19 nt, Artificial Sequence
  Description of Artificial Sequence: Synthetic oligonucleotide
guagaugaaggaacccaga

SEQ ID NO: 834129 - RNA, 19 nt, Artificial Sequence
  Description of Artificial Sequence: Synthetic oligonucleotide
acaucacgcaccccuggau

SEQ ID NO: 834130 - RNA, 19 nt, Artificial Sequence
  Description of Artificial Sequence: Synthetic oligonucleotide
cacuuaggccuaaggacca

SEQ ID NO: 834131 - RNA, 19 nt, Artificial Sequence
  Description of Artificial Sequence: Synthetic oligonucleotide
aggacaugucacaucuaug

SEQ ID NO: 834132 - RNA, 19 nt, Artificial Sequence
  Description of Artificial Sequence: Synthetic oligonucleotide
gggcguucaucccucgccg

SEQ ID NO: 834133 - RNA, 19 nt, Artificial Sequence
  Description of Artificial Sequence: Synthetic oligonucleotide
cccacccucaaacaccagg

SEQ ID NO: 834134 - RNA, 19 nt, Artificial Sequence
  Description of Artificial Sequence: Synthetic oligonucleotide
gcuggugggaugaaggcac

SEQ ID NO: 834135 - RNA, 19 nt, Artificial Sequence
  Description of Artificial Sequence: Synthetic oligonucleotide
gauccagaacggaaaggaa

SEQ ID NO: 834136 - RNA, 19 nt, Artificial Sequence
  Description of Artificial Sequence: Synthetic oligonucleotide
cagggacauugauacguuc

SEQ ID NO: 834137 - RNA, 19 nt, Artificial Sequence
  Description of Artificial Sequence: Synthetic oligonucleotide
agcggggacaaaaguacca

SEQ ID NO: 834138 - RNA, 19 nt, Artificial Sequence
  Description of Artificial Sequence: Synthetic oligonucleotide
cagaugccgaggccgggcc

SEQ ID NO: 834139 - RNA, 19 nt, Artificial Sequence
  Description of Artificial Sequence: Synthetic oligonucleotide
ggggcguucaucccucgcc

SEQ ID NO: 834140 - RNA, 19 nt, Artificial Sequence
  Description of Artificial Sequence: Synthetic oligonucleotide
gcuuucacguguccagccc

SEQ ID NO: 834141 - RNA, 19 nt, Artificial Sequence
  Description of Artificial Sequence: Synthetic oligonucleotide
gguagcacaaugguggugu

SEQ ID NO: 834142 - RNA, 19 nt, Artificial Sequence
  Description of Artificial Sequence: Synthetic oligonucleotide
caucccucgccggagucag

SEQ ID NO: 834143 - RNA, 19 nt, Artificial Sequence
  Description of Artificial Sequence: Synthetic oligonucleotide
ggauagauccagaacggaa

SEQ ID NO: 834144 - RNA, 19 nt, Artificial Sequence
  Description of Artificial Sequence: Synthetic oligonucleotide
cguagagcacgccacagug

SEQ ID NO: 834145 - RNA, 19 nt, Artificial Sequence
  Description of Artificial Sequence: Synthetic oligonucleotide
ucccggggagaccccagga

SEQ ID NO: 834146 - RNA, 19 nt, Artificial Sequence
  Description of Artificial Sequence: Synthetic oligonucleotide
ugaugcgccuccggguagc

SEQ ID NO: 834147 - RNA, 19 nt, Artificial Sequence
  Description of Artificial Sequence: Synthetic oligonucleotide
aaggaccaggaggauggaa

SEQ ID NO: 834148 - RNA, 19 nt, Artificial Sequence
  Description of Artificial Sequence: Synthetic oligonucleotide
cuucguagagcacgccaca

SEQ ID NO: 834149 - RNA, 19 nt, Artificial Sequence
  Description of Artificial Sequence: Synthetic oligonucleotide
ccuuaaauccaugcucuug

SEQ ID NO: 834150 - RNA, 19 nt, Artificial Sequence
  Description of Artificial Sequence: Synthetic oligonucleotide
agcacuuguccagggagau

SEQ ID NO: 834151 - RNA, 19 nt, Artificial Sequence
  Description of Artificial Sequence: Synthetic oligonucleotide
ggcaccaaagccucuccca

SEQ ID NO: 834152 - RNA, 19 nt, Artificial Sequence
  Description of Artificial Sequence: Synthetic oligonucleotide
cacugacaggagucccggg

SEQ ID NO: 834153 - RNA, 19 nt, Artificial Sequence
  Description of Artificial Sequence: Synthetic oligonucleotide
gcccaugacuucuguaccc

SEQ ID NO: 834154 - RNA, 19 nt, Artificial Sequence
  Description of Artificial Sequence: Synthetic oligonucleotide
cagaaaccagcuugggcaa

SEQ ID NO: 834155 - RNA, 19 nt, Artificial Sequence
  Description of Artificial Sequence: Synthetic oligonucleotide
gccacggacaacccaaguc

SEQ ID NO: 834156 - RNA, 19 nt, Artificial Sequence
  Description of Artificial Sequence: Synthetic oligonucleotide
gcucccuguagccucggcc

SEQ ID NO: 834157 - RNA, 19 nt, Artificial Sequence
  Description of Artificial Sequence: Synthetic oligonucleotide
cuccauccgaguccgcauc

SEQ ID NO: 834158 - RNA, 19 nt, Artificial Sequence
  Description of Artificial Sequence: Synthetic oligonucleotide
auugcaguucuuggcccca

SEQ ID NO: 834159 - RNA, 19 nt, Artificial Sequence
  Description of Artificial Sequence: Synthetic oligonucleotide
gaguccgcaucugggagga

SEQ ID NO: 834160 - RNA, 19 nt, Artificial Sequence
  Description of Artificial Sequence: Synthetic oligonucleotide
aacccaagucugacccgag

SEQ ID NO: 834161 - RNA, 19 nt, Artificial Sequence
  Description of Artificial Sequence: Synthetic oligonucleotide
cagcagacucagagguccc

SEQ ID NO: 834162 - RNA, 19 nt, Artificial Sequence
  Description of Artificial Sequence: Synthetic oligonucleotide
cuggggagcugacuuaaaa

SEQ ID NO: 834163 - RNA, 19 nt, Artificial Sequence
  Description of Artificial Sequence: Synthetic oligonucleotide
acuuaggccuaaggaccag

SEQ ID NO: 834164 - RNA, 19 nt, Artificial Sequence
  Description of Artificial Sequence: Synthetic oligonucleotide
ccacacuuaggccuaagga

SEQ ID NO: 834165 - RNA, 19 nt, Artificial Sequence
  Description of Artificial Sequence: Synthetic oligonucleotide
ugugcucugauggguccaa

SEQ ID NO: 834166 - RNA, 19 nt, Artificial Sequence
  Description of Artificial Sequence: Synthetic oligonucleotide
cccagggcgggcuugcugc

SEQ ID NO: 834167 - RNA, 19 nt, Artificial Sequence
  Description of Artificial Sequence: Synthetic oligonucleotide
cugcacgaacaucaguaaa

SEQ ID NO: 834168 - RNA, 19 nt, Artificial Sequence
  Description of Artificial Sequence: Synthetic oligonucleotide
ccacgcuuguugaugcgcc

SEQ ID NO: 834169 - RNA, 19 nt, Artificial Sequence
  Description of Artificial Sequence: Synthetic oligonucleotide
ccgugucaagccuuaaauc

SEQ ID NO: 834170 - RNA, 19 nt, Artificial Sequence
  Description of Artificial Sequence: Synthetic oligonucleotide
uaucucgggccagcugagc

SEQ ID NO: 834171 - RNA, 19 nt, Artificial Sequence
  Description of Artificial Sequence: Synthetic oligonucleotide
caggauagccaccuucucu

SEQ ID NO: 834172 - RNA, 19 nt, Artificial Sequence
  Description of Artificial Sequence: Synthetic oligonucleotide
ggaagcggggacaaaagua

SEQ ID NO: 834173 - RNA, 19 nt, Artificial Sequence
  Description of Artificial Sequence: Synthetic oligonucleotide
gcuggaaaggaugguagga

SEQ ID NO: 834174 - RNA, 19 nt, Artificial Sequence
  Description of Artificial Sequence: Synthetic oligonucleotide
ggauagccaccuucucuug

SEQ ID NO: 834175 - RNA, 19 nt, Artificial Sequence
  Description of Artificial Sequence: Synthetic oligonucleotide
cugacccgcgccugcuccc

SEQ ID NO: 834176 - RNA, 19 nt, Artificial Sequence
  Description of Artificial Sequence: Synthetic oligonucleotide
ggcguucaucccucgccgg

SEQ ID NO: 834177 - RNA, 19 nt, Artificial Sequence
  Description of Artificial Sequence: Synthetic oligonucleotide
ccgcuuccaucuuucacag

SEQ ID NO: 834178 - RNA, 19 nt, Artificial Sequence
  Description of Artificial Sequence: Synthetic oligonucleotide
gcggggacaaaaguaccag

SEQ ID NO: 834179 - RNA, 19 nt, Artificial Sequence
  Description of Artificial Sequence: Synthetic oligonucleotide
gcgggcuggaaacugaucu

SEQ ID NO: 834180 - RNA, 19 nt, Artificial Sequence
  Description of Artificial Sequence: Synthetic oligonucleotide
gccaccgcgggcuggaaac

SEQ ID NO: 834181 - RNA, 19 nt, Artificial Sequence
  Description of Artificial Sequence: Synthetic oligonucleotide
ugcucccuguagccucggc

SEQ ID NO: 834182 - RNA, 19 nt, Artificial Sequence
  Description of Artificial Sequence: Synthetic oligonucleotide
guguugaguucgaugacgu

SEQ ID NO: 834183 - RNA, 19 nt, Artificial Sequence
  Description of Artificial Sequence: Synthetic oligonucleotide
agaugccgaggccgggcca

SEQ ID NO: 834184 - RNA, 19 nt, Artificial Sequence
  Description of Artificial Sequence: Synthetic oligonucleotide
uagcccggcgccgcagccg

SEQ ID NO: 834185 - RNA, 19 nt, Artificial Sequence
  Description of Artificial Sequence: Synthetic oligonucleotide
ggcaaagacaaggcccaug

SEQ ID NO: 834186 - RNA, 19 nt, Artificial Sequence
  Description of Artificial Sequence: Synthetic oligonucleotide
auggcugcgcugacccgcg

SEQ ID NO: 834187 - RNA, 19 nt, Artificial Sequence
  Description of Artificial Sequence: Synthetic oligonucleotide
ggcucaggacugaggacgg

SEQ ID NO: 834188 - RNA, 19 nt, Artificial Sequence
  Description of Artificial Sequence: Synthetic oligonucleotide
ucggccuuaucggccuuga

SEQ ID NO: 834189 - RNA, 19 nt, Artificial Sequence
  Description of Artificial Sequence: Synthetic oligonucleotide
acggacaacccaagucuga

SEQ ID NO: 834190 - RNA, 19 nt, Artificial Sequence
  Description of Artificial Sequence: Synthetic oligonucleotide
ggggacaaaaguaccaggu

SEQ ID NO: 834191 - RNA, 19 nt, Artificial Sequence
  Description of Artificial Sequence: Synthetic oligonucleotide
acgccacaguggaagaggu

SEQ ID NO: 834192 - RNA, 19 nt, Artificial Sequence
  Description of Artificial Sequence: Synthetic oligonucleotide
cuggaggaaaggccucaca

SEQ ID NO: 834193 - RNA, 19 nt, Artificial Sequence
  Description of Artificial Sequence: Synthetic oligonucleotide
cucacaccaccccacagau

SEQ ID NO: 834194 - RNA, 19 nt, Artificial Sequence
  Description of Artificial Sequence: Synthetic oligonucleotide
ucccacccucaaacaccag

SEQ ID NO: 834195 - RNA, 19 nt, Artificial Sequence
  Description of Artificial Sequence: Synthetic oligonucleotide
ccuggagcgguggcgaggg

SEQ ID NO: 834196 - RNA, 19 nt, Artificial Sequence
  Description of Artificial Sequence: Synthetic oligonucleotide
acagggacauugauacguu

SEQ ID NO: 834197 - RNA, 19 nt, Artificial Sequence
  Description of Artificial Sequence: Synthetic oligonucleotide
ccuuaucggccuugaugcc

SEQ ID NO: 834198 - RNA, 19 nt, Artificial Sequence
  Description of Artificial Sequence: Synthetic oligonucleotide
gaugcgccuccggguagcc

SEQ ID NO: 834199 - RNA, 19 nt, Artificial Sequence
  Description of Artificial Sequence: Synthetic oligonucleotide
ggaaaggaagcggggacaa

SEQ ID NO: 834200 - RNA, 19 nt, Artificial Sequence
  Description of Artificial Sequence: Synthetic oligonucleotide
cccacagaugaccgucucc

SEQ ID NO: 834201 - RNA, 19 nt, Artificial Sequence
  Description of Artificial Sequence: Synthetic oligonucleotide
ccgaguccgcaucugggag

SEQ ID NO: 834202 - RNA, 19 nt, Artificial Sequence
  Description of Artificial Sequence: Synthetic oligonucleotide
uaucggccuugaugcccgc

SEQ ID NO: 834203 - RNA, 19 nt, Artificial Sequence
  Description of Artificial Sequence: Synthetic oligonucleotide
cgaguccgcaucugggagg

SEQ ID NO: 834204 - RNA, 19 nt, Artificial Sequence
  Description of Artificial Sequence: Synthetic oligonucleotide
guagccucggccagugcaa

SEQ ID NO: 834205 - RNA, 19 nt, Artificial Sequence
  Description of Artificial Sequence: Synthetic oligonucleotide
caggguggcccaacuccuc

SEQ ID NO: 834206 - RNA, 19 nt, Artificial Sequence
  Description of Artificial Sequence: Synthetic oligonucleotide
uagccucggccagugcaac

SEQ ID NO: 834207 - RNA, 19 nt, Artificial Sequence
  Description of Artificial Sequence: Synthetic oligonucleotide
gacggccugcacgaacauc

SEQ ID NO: 834208 - RNA, 19 nt, Artificial Sequence
  Description of Artificial Sequence: Synthetic oligonucleotide
ccaagucugacccgaggca

SEQ ID NO: 834209 - RNA, 19 nt, Artificial Sequence
  Description of Artificial Sequence: Synthetic oligonucleotide
gggauagauccagaacgga

SEQ ID NO: 834210 - RNA, 19 nt, Artificial Sequence
  Description of Artificial Sequence: Synthetic oligonucleotide
ccacggacaacccaagucu

SEQ ID NO: 834211 - RNA, 19 nt, Artificial Sequence
  Description of Artificial Sequence: Synthetic oligonucleotide
gggacauugauacguucau

SEQ ID NO: 834212 - RNA, 19 nt, Artificial Sequence
  Description of Artificial Sequence: Synthetic oligonucleotide
gcggacucaucccacccuc

SEQ ID NO: 834213 - RNA, 19 nt, Artificial Sequence
  Description of Artificial Sequence: Synthetic oligonucleotide
cauacuccgucacuaccau

SEQ ID NO: 834214 - RNA, 19 nt, Artificial Sequence
  Description of Artificial Sequence: Synthetic oligonucleotide
caggaucuccgcggccggg

SEQ ID NO: 834215 - RNA, 19 nt, Artificial Sequence
  Description of Artificial Sequence: Synthetic oligonucleotide
gccggagucagcaggaucu

SEQ ID NO: 834216 - RNA, 19 nt, Artificial Sequence
  Description of Artificial Sequence: Synthetic oligonucleotide
caaaguggcggauggcauu

SEQ ID NO: 834217 - RNA, 19 nt, Artificial Sequence
  Description of Artificial Sequence: Synthetic oligonucleotide
uaucggccuuaucggccuu

SEQ ID NO: 834218 - RNA, 19 nt, Artificial Sequence
  Description of Artificial Sequence: Synthetic oligonucleotide
cccacgcuuguugaugcgc

SEQ ID NO: 834219 - RNA, 19 nt, Artificial Sequence
  Description of Artificial Sequence: Synthetic oligonucleotide
ggacucaucccacccucaa

SEQ ID NO: 834220 - RNA, 19 nt, Artificial Sequence
  Description of Artificial Sequence: Synthetic oligonucleotide
auguggggauagauccaga

SEQ ID NO: 834221 - RNA, 19 nt, Artificial Sequence
  Description of Artificial Sequence: Synthetic oligonucleotide
gcggccggggcagaugccg

SEQ ID NO: 834222 - RNA, 19 nt, Artificial Sequence
  Description of Artificial Sequence: Synthetic oligonucleotide
cucaaacaccaggcuccug

SEQ ID NO: 834223 - RNA, 19 nt, Artificial Sequence
  Description of Artificial Sequence: Synthetic oligonucleotide
ggagcugacuuaaaacaau

SEQ ID NO: 834224 - RNA, 19 nt, Artificial Sequence
  Description of Artificial Sequence: Synthetic oligonucleotide
cugccuuaucggccuuauc

SEQ ID NO: 834225 - RNA, 19 nt, Artificial Sequence
  Description of Artificial Sequence: Synthetic oligonucleotide
ggccccacgcuuguugaug

SEQ ID NO: 834226 - RNA, 19 nt, Artificial Sequence
  Description of Artificial Sequence: Synthetic oligonucleotide
gaaucccgugucaagccuu

SEQ ID NO: 834227 - RNA, 19 nt, Artificial Sequence
  Description of Artificial Sequence: Synthetic oligonucleotide
gcccaugguacaagcuaag

SEQ ID NO: 834228 - RNA, 19 nt, Artificial Sequence
  Description of Artificial Sequence: Synthetic oligonucleotide
accccacagaugaccgucu

SEQ ID NO: 834229 - RNA, 19 nt, Artificial Sequence
  Description of Artificial Sequence: Synthetic oligonucleotide
caccgcgggcuggaaacug

SEQ ID NO: 834230 - RNA, 19 nt, Artificial Sequence
  Description of Artificial Sequence: Synthetic oligonucleotide
guucaucccucgccggagu

SEQ ID NO: 834231 - RNA, 19 nt, Artificial Sequence
  Description of Artificial Sequence: Synthetic oligonucleotide
uccgcggccggggcagaug

SEQ ID NO: 834232 - RNA, 19 nt, Artificial Sequence
  Description of Artificial Sequence: Synthetic oligonucleotide
ccugcacgaacaucaguaa

SEQ ID NO: 834233 - RNA, 19 nt, Artificial Sequence
  Description of Artificial Sequence: Synthetic oligonucleotide
ggguagcacaaugguggug

SEQ ID NO: 834234 - RNA, 19 nt, Artificial Sequence
  Description of Artificial Sequence: Synthetic oligonucleotide
ggacauugauacguucaua

SEQ ID NO: 834235 - RNA, 19 nt, Artificial Sequence
  Description of Artificial Sequence: Synthetic oligonucleotide
gcccauagauagguagcac

SEQ ID NO: 834236 - RNA, 19 nt, Artificial Sequence
  Description of Artificial Sequence: Synthetic oligonucleotide
ugaggacggccugcacgaa

SEQ ID NO: 834237 - RNA, 19 nt, Artificial Sequence
  Description of Artificial Sequence: Synthetic oligonucleotide
gcuucaccgccacggacaa

SEQ ID NO: 834238 - RNA, 19 nt, Artificial Sequence
  Description of Artificial Sequence: Synthetic oligonucleotide
cuugccccugcccaggcuu

SEQ ID NO: 834239 - RNA, 19 nt, Artificial Sequence
  Description of Artificial Sequence: Synthetic oligonucleotide
gcguucaucccucgccgga

SEQ ID NO: 834240 - RNA, 19 nt, Artificial Sequence
  Description of Artificial Sequence: Synthetic oligonucleotide
cucccgcuuccaucuuuca

SEQ ID NO: 834241 - RNA, 19 nt, Artificial Sequence
  Description of Artificial Sequence: Synthetic oligonucleotide
aguccgcaucugggaggac

SEQ ID NO: 834242 - RNA, 19 nt, Artificial Sequence
  Description of Artificial Sequence: Synthetic oligonucleotide
cacccucaaacaccaggcu

SEQ ID NO: 834243 - RNA, 19 nt, Artificial Sequence
  Description of Artificial Sequence: Synthetic oligonucleotide
cggacaacccaagucugac

SEQ ID NO: 834244 - RNA, 19 nt, Artificial Sequence
  Description of Artificial Sequence: Synthetic oligonucleotide
ggauuacagaaaccagcuu

SEQ ID NO: 834245 - RNA, 19 nt, Artificial Sequence
  Description of Artificial Sequence: Synthetic oligonucleotide
cuguacccacuugcuccug

SEQ ID NO: 834246 - RNA, 19 nt, Artificial Sequence
  Description of Artificial Sequence: Synthetic oligonucleotide
caccgccacggacaaccca

SEQ ID NO: 834247 - RNA, 19 nt, Artificial Sequence
  Description of Artificial Sequence: Synthetic oligonucleotide
cccgugucaagccuuaaau

SEQ ID NO: 834248 - RNA, 19 nt, Artificial Sequence
  Description of Artificial Sequence: Synthetic oligonucleotide
agagcacgccacaguggaa

SEQ ID NO: 834249 - RNA, 19 nt, Artificial Sequence
  Description of Artificial Sequence: Synthetic oligonucleotide
gggagguaggucccucucu

SEQ ID NO: 834250 - RNA, 19 nt, Artificial Sequence
  Description of Artificial Sequence: Synthetic oligonucleotide
ccgcggccggggcagaugc

SEQ ID NO: 834251 - RNA, 19 nt, Artificial Sequence
  Description of Artificial Sequence: Synthetic oligonucleotide
cacgcuuguugaugcgccu

SEQ ID NO: 834252 - RNA, 19 nt, Artificial Sequence
  Description of Artificial Sequence: Synthetic oligonucleotide
ccccacgcuuguugaugcg

SEQ ID NO: 834253 - RNA, 19 nt, Artificial Sequence
  Description of Artificial Sequence: Synthetic oligonucleotide
gcacuuguccagggagaug

SEQ ID NO: 834254 - RNA, 19 nt, Artificial Sequence
  Description of Artificial Sequence: Synthetic oligonucleotide
agaccccgcuggaagucau

SEQ ID NO: 834255 - RNA, 19 nt, Artificial Sequence
  Description of Artificial Sequence: Synthetic oligonucleotide
cguucaucccucgccggag

SEQ ID NO: 834256 - RNA, 19 nt, Artificial Sequence
  Description of Artificial Sequence: Synthetic oligonucleotide
guucgaugacguagcacuu

SEQ ID NO: 834257 - RNA, 19 nt, Artificial Sequence
  Description of Artificial Sequence: Synthetic oligonucleotide
cuggugggaugaaggcacu

SEQ ID NO: 834258 - RNA, 19 nt, Artificial Sequence
  Description of Artificial Sequence: Synthetic oligonucleotide
guagcacaauggugguguu

SEQ ID NO: 834259 - RNA, 19 nt, Artificial Sequence
  Description of Artificial Sequence: Synthetic oligonucleotide
ucccucccgcuuccaucuu

SEQ ID NO: 834260 - RNA, 19 nt, Artificial Sequence
  Description of Artificial Sequence: Synthetic oligonucleotide
ccccauccuuaguccacac

SEQ ID NO: 834261 - RNA, 19 nt, Artificial Sequence
  Description of Artificial Sequence: Synthetic oligonucleotide
ccgucacuaccaucuccuc

SEQ ID NO: 834262 - RNA, 19 nt, Artificial Sequence
  Description of Artificial Sequence: Synthetic oligonucleotide
ggcggacucaucccacccu

SEQ ID NO: 834263 - RNA, 19 nt, Artificial Sequence
  Description of Artificial Sequence: Synthetic oligonucleotide
gcugagcaaggaagaagua

SEQ ID NO: 834264 - RNA, 19 nt, Artificial Sequence
  Description of Artificial Sequence: Synthetic oligonucleotide
aucccgugucaagccuuaa

SEQ ID NO: 834265 - RNA, 19 nt, Artificial Sequence
  Description of Artificial Sequence: Synthetic oligonucleotide
cgaggcaccaaagccucuc

SEQ ID NO: 834266 - RNA, 19 nt, Artificial Sequence
  Description of Artificial Sequence: Synthetic oligonucleotide
cgaugacguagcacuuguc

SEQ ID NO: 834267 - RNA, 19 nt, Artificial Sequence
  Description of Artificial Sequence: Synthetic oligonucleotide
gcacaaccaugcccauaga

SEQ ID NO: 834268 - RNA, 19 nt, Artificial Sequence
  Description of Artificial Sequence: Synthetic oligonucleotide
gcucaggacugaggacggc

SEQ ID NO: 834269 - RNA, 19 nt, Artificial Sequence
  Description of Artificial Sequence: Synthetic oligonucleotide
cagggcgggcuugcugcuc

SEQ ID NO: 834270 - RNA, 19 nt, Artificial Sequence
  Description of Artificial Sequence: Synthetic oligonucleotide
cagcacaaccaugcccaua

SEQ ID NO: 834271 - RNA, 19 nt, Artificial Sequence
  Description of Artificial Sequence: Synthetic oligonucleotide
gguccccuugagagaucac

SEQ ID NO: 834272 - RNA, 19 nt, Artificial Sequence
  Description of Artificial Sequence: Synthetic oligonucleotide
ccggguagcccggcgccgc

SEQ ID NO: 834273 - RNA, 19 nt, Artificial Sequence
  Description of Artificial Sequence: Synthetic oligonucleotide
ccggagucagcaggaucuc

SEQ ID NO: 834274 - RNA, 19 nt, Artificial Sequence
  Description of Artificial Sequence: Synthetic oligonucleotide
gcccaggcuuucacguguc

SEQ ID NO: 834275 - RNA, 19 nt, Artificial Sequence
  Description of Artificial Sequence: Synthetic oligonucleotide
ccaugcccauagauaggua

SEQ ID NO: 834276 - RNA, 19 nt, Artificial Sequence
  Description of Artificial Sequence: Synthetic oligonucleotide
cgcgggcuggaaacugauc

SEQ ID NO: 834277 - RNA, 19 nt, Artificial Sequence
  Description of Artificial Sequence: Synthetic oligonucleotide
ggcgccgcagccgguaggu

SEQ ID NO: 834278 - RNA, 19 nt, Artificial Sequence
  Description of Artificial Sequence: Synthetic oligonucleotide
ccgcgccugcucccuguag

SEQ ID NO: 834279 - RNA, 19 nt, Artificial Sequence
  Description of Artificial Sequence: Synthetic oligonucleotide
cugguacagggaggagggu

SEQ ID NO: 834280 - RNA, 19 nt, Artificial Sequence
  Description of Artificial Sequence: Synthetic oligonucleotide
gcgccgcagccgguaggug

SEQ ID NO: 834281 - RNA, 19 nt, Artificial Sequence
  Description of Artificial Sequence: Synthetic oligonucleotide
cgcugacccgcgccugcuc

SEQ ID NO: 834282 - RNA, 19 nt, Artificial Sequence
  Description of Artificial Sequence: Synthetic oligonucleotide
ccagggcgggcuugcugcu

SEQ ID NO: 834283 - RNA, 19 nt, Artificial Sequence
  Description of Artificial Sequence: Synthetic oligonucleotide
ccgcgggcuggaaacugau

SEQ ID NO: 834284 - RNA, 19 nt, Artificial Sequence
  Description of Artificial Sequence: Synthetic oligonucleotide
ccgaggcaccaaagccucu

SEQ ID NO: 834285 - RNA, 19 nt, Artificial Sequence
  Description of Artificial Sequence: Synthetic oligonucleotide
cccuguagccucggccagu

SEQ ID NO: 834286 - RNA, 19 nt, Artificial Sequence
  Description of Artificial Sequence: Synthetic oligonucleotide
cccucccgcuuccaucuuu

SEQ ID NO: 834287 - RNA, 19 nt, Artificial Sequence
  Description of Artificial Sequence: Synthetic oligonucleotide
cgccacggacaacccaagu

SEQ ID NO: 834288 - RNA, 19 nt, Artificial Sequence
  Description of Artificial Sequence: Synthetic oligonucleotide
ccacugcccagggcgggcu

SEQ ID NO: 834289 - RNA, 19 nt, Artificial Sequence
  Description of Artificial Sequence: Synthetic oligonucleotide
ccgcugccuuaucggccuu

SEQ ID NO: 834290 - RNA, 19 nt, Artificial Sequence
  Description of Artificial Sequence: Synthetic oligonucleotide
ccgccaccgcgggcuggaa

SEQ ID NO: 834291 - RNA, 19 nt, Artificial Sequence
  Description of Artificial Sequence: Synthetic oligonucleotide
aagagagucauuccuaggc

SEQ ID NO: 834292 - RNA, 19 nt, Artificial Sequence
  Description of Artificial Sequence: Synthetic oligonucleotide
aggaagacgaaucucaggc

SEQ ID NO: 834293 - RNA, 19 nt, Artificial Sequence
  Description of Artificial Sequence: Synthetic oligonucleotide
aaaggcucaaaucaauggg

SEQ ID NO: 834294 - RNA, 19 nt, Artificial Sequence
  Description of Artificial Sequence: Synthetic oligonucleotide
cuuacugucgucaaucagg

SEQ ID NO: 834295 - RNA, 19 nt, Artificial Sequence
  Description of Artificial Sequence: Synthetic oligonucleotide
ugcaacacagcauugauga

SEQ ID NO: 834296 - RNA, 19 nt, Artificial Sequence
  Description of Artificial Sequence: Synthetic oligonucleotide
gaaguuuagcacuuggucc

SEQ ID NO: 834297 - RNA, 19 nt, Artificial Sequence
  Description of Artificial Sequence: Synthetic oligonucleotide
agaaguuuagcacuugguc

SEQ ID NO: 834298 - RNA, 19 nt, Artificial Sequence
  Description of Artificial Sequence: Synthetic oligonucleotide
uuagggauaguacccaggg

SEQ ID NO: 834299 - RNA, 19 nt, Artificial Sequence
  Description of Artificial Sequence: Synthetic oligonucleotide
guacgggucagauagaagg

SEQ ID NO: 834300 - RNA, 19 nt, Artificial Sequence
  Description of Artificial Sequence: Synthetic oligonucleotide
uuagguaucgcaccaugcg

SEQ ID NO: 834301 - RNA, 19 nt, Artificial Sequence
  Description of Artificial Sequence: Synthetic oligonucleotide
ugugauacuguccacuagc

SEQ ID NO: 834302 - RNA, 19 nt, Artificial Sequence
  Description of Artificial Sequence: Synthetic oligonucleotide
uuccguuugaugaaccugg

SEQ ID NO: 834303 - RNA, 19 nt, Artificial Sequence
  Description of Artificial Sequence: Synthetic oligonucleotide
cuuccaucggcccagaucc

SEQ ID NO: 834304 - RNA, 19 nt, Artificial Sequence
  Description of Artificial Sequence: Synthetic oligonucleotide
aagcugauccccuggagac

SEQ ID NO: 834305 - RNA, 19 nt, Artificial Sequence
  Description of Artificial Sequence: Synthetic oligonucleotide
acagaugucagaucauugg

SEQ ID NO: 834306 - RNA, 19 nt, Artificial Sequence
  Description of Artificial Sequence: Synthetic oligonucleotide
aauacugucucaugagcug

SEQ ID NO: 834307 - RNA, 19 nt, Artificial Sequence
  Description of Artificial Sequence: Synthetic oligonucleotide
agagcuucugcguuuaggg

SEQ ID NO: 834308 - RNA, 19 nt, Artificial Sequence
  Description of Artificial Sequence: Synthetic oligonucleotide
gucgacaucaaucugguug

SEQ ID NO: 834309 - RNA, 19 nt, Artificial Sequence
  Description of Artificial Sequence: Synthetic oligonucleotide
aaggcucaaaucaaugggc

SEQ ID NO: 834310 - RNA, 19 nt, Artificial Sequence
  Description of Artificial Sequence: Synthetic oligonucleotide
aaaagggagacuaaagcug

SEQ ID NO: 834311 - RNA, 19 nt, Artificial Sequence
  Description of Artificial Sequence: Synthetic oligonucleotide
ucuucacacgcuuagugag

SEQ ID NO: 834312 - RNA, 19 nt, Artificial Sequence
  Description of Artificial Sequence: Synthetic oligonucleotide
aagguuucugaccaaguga

SEQ ID NO: 834313 - RNA, 19 nt, Artificial Sequence
  Description of Artificial Sequence: Synthetic oligonucleotide
caaaggcucaaaucaaugg

SEQ ID NO: 834314 - RNA, 19 nt, Artificial Sequence
  Description of Artificial Sequence: Synthetic oligonucleotide
aacgcauuagguaucgcac

SEQ ID NO: 834315 - RNA, 19 nt, Artificial Sequence
  Description of Artificial Sequence: Synthetic oligonucleotide
uaauacugucucaugagcu

SEQ ID NO: 834316 - RNA, 19 nt, Artificial Sequence
  Description of Artificial Sequence: Synthetic oligonucleotide
ugcguuuagggauaguacc

SEQ ID NO: 834317 - RNA, 19 nt, Artificial Sequence
  Description of Artificial Sequence: Synthetic oligonucleotide
uuuagggauaguacccagg

SEQ ID NO: 834318 - RNA, 19 nt, Artificial Sequence
  Description of Artificial Sequence: Synthetic oligonucleotide
ucugcuacccgccucacug

SEQ ID NO: 834319 - RNA, 19 nt, Artificial Sequence
  Description of Artificial Sequence: Synthetic oligonucleotide
ucucgcauguccuugagcu

SEQ ID NO: 834320 - RNA, 19 nt, Artificial Sequence
  Description of Artificial Sequence: Synthetic oligonucleotide
ggcaguacgggucagauag

SEQ ID NO: 834321 - RNA, 19 nt, Artificial Sequence
  Description of Artificial Sequence: Synthetic oligonucleotide
aaagcugauccccuggaga

SEQ ID NO: 834322 - RNA, 19 nt, Artificial Sequence
  Description of Artificial Sequence: Synthetic oligonucleotide
ucaaaggcucaaaucaaug

SEQ ID NO: 834323 - RNA, 19 nt, Artificial Sequence
  Description of Artificial Sequence: Synthetic oligonucleotide
cuggauccaaaccacaggg

SEQ ID NO: 834324 - RNA, 19 nt, Artificial Sequence
  Description of Artificial Sequence: Synthetic oligonucleotide
aaaucggcagcugaacuuc

SEQ ID NO: 834325 - RNA, 19 nt, Artificial Sequence
  Description of Artificial Sequence: Synthetic oligonucleotide
aaugacaggggaaacugag

SEQ ID NO: 834326 - RNA, 19 nt, Artificial Sequence
  Description of Artificial Sequence: Synthetic oligonucleotide
acggaguuguugcuaagcc

SEQ ID NO: 834327 - RNA, 19 nt, Artificial Sequence
  Description of Artificial Sequence: Synthetic oligonucleotide
uagguaucgcaccaugcgg

SEQ ID NO: 834328 - RNA, 19 nt, Artificial Sequence
  Description of Artificial Sequence: Synthetic oligonucleotide
ugaguaggaggucaucugc

SEQ ID NO: 834329 - RNA, 19 nt, Artificial Sequence
  Description of Artificial Sequence: Synthetic oligonucleotide
aacgcucuugaacuucccg

SEQ ID NO: 834330 - RNA, 19 nt, Artificial Sequence
  Description of Artificial Sequence: Synthetic oligonucleotide
agggucguagaguagggcg

SEQ ID NO: 834331 - RNA, 19 nt, Artificial Sequence
  Description of Artificial Sequence: Synthetic oligonucleotide
cuucccgcaggguaaaucg

SEQ ID NO: 834332 - RNA, 19 nt, Artificial Sequence
  Description of Artificial Sequence: Synthetic oligonucleotide
acuaaagcugauccccugg

SEQ ID NO: 834333 - RNA, 19 nt, Artificial Sequence
  Description of Artificial Sequence: Synthetic oligonucleotide
cucacgagaacgcauuagg

SEQ ID NO: 834334 - RNA, 19 nt, Artificial Sequence
  Description of Artificial Sequence: Synthetic oligonucleotide
guugucgaagucuggagag

SEQ ID NO: 834335 - RNA, 19 nt, Artificial Sequence
  Description of Artificial Sequence: Synthetic oligonucleotide
aauuucuccgcggcgacag

SEQ ID NO: 834336 - RNA, 19 nt, Artificial Sequence
  Description of Artificial Sequence: Synthetic oligonucleotide
guuugaugaaccuggaaga

SEQ ID NO: 834337 - RNA, 19 nt, Artificial Sequence
  Description of Artificial Sequence: Synthetic oligonucleotide
acgcauuagguaucgcacc

SEQ ID NO: 834338 - RNA, 19 nt, Artificial Sequence
  Description of Artificial Sequence: Synthetic oligonucleotide
acgaagcucgcuucugucc

SEQ ID NO: 834339 - RNA, 19 nt, Artificial Sequence
  Description of Artificial Sequence: Synthetic oligonucleotide
agucuggagagcucaugcc

SEQ ID NO: 834340 - RNA, 19 nt, Artificial Sequence
  Description of Artificial Sequence: Synthetic oligonucleotide
caucaauguagaugggccg

SEQ ID NO: 834341 - RNA, 19 nt, Artificial Sequence
  Description of Artificial Sequence: Synthetic oligonucleotide
ucgacaucaaucugguugu

SEQ ID NO: 834342 - RNA, 19 nt, Artificial Sequence
  Description of Artificial Sequence: Synthetic oligonucleotide
uuccgugagauacaucuac

SEQ ID NO: 834343 - RNA, 19 nt, Artificial Sequence
  Description of Artificial Sequence: Synthetic oligonucleotide
acgagaacgcauuagguau

SEQ ID NO: 834344 - RNA, 19 nt, Artificial Sequence
  Description of Artificial Sequence: Synthetic oligonucleotide
uccaacaauuucuccgcgg

SEQ ID NO: 834345 - RNA, 19 nt, Artificial Sequence
  Description of Artificial Sequence: Synthetic oligonucleotide
aacaauuucuccgcggcga

SEQ ID NO: 834346 - RNA, 19 nt, Artificial Sequence
  Description of Artificial Sequence: Synthetic oligonucleotide
cuuaugcaauuccuguucc

SEQ ID NO: 834347 - RNA, 19 nt, Artificial Sequence
  Description of Artificial Sequence: Synthetic oligonucleotide
auacugucucaugagcugc

SEQ ID NO: 834348 - RNA, 19 nt, Artificial Sequence
  Description of Artificial Sequence: Synthetic oligonucleotide
gaucucucguuucuggcgc

SEQ ID NO: 834349 - RNA, 19 nt, Artificial Sequence
  Description of Artificial Sequence: Synthetic oligonucleotide
aguacuaggggccuuggau

SEQ ID NO: 834350 - RNA, 19 nt, Artificial Sequence
  Description of Artificial Sequence: Synthetic oligonucleotide
uagaguagggcguaccaac

SEQ ID NO: 834351 - RNA, 19 nt, Artificial Sequence
  Description of Artificial Sequence: Synthetic oligonucleotide
agaggguuuuccaggagcc

SEQ ID NO: 834352 - RNA, 19 nt, Artificial Sequence
  Description of Artificial Sequence: Synthetic oligonucleotide
auguagaugggccgccggc

SEQ ID NO: 834353 - RNA, 19 nt, Artificial Sequence
  Description of Artificial Sequence: Synthetic oligonucleotide
acuguggugugaucuuggc

SEQ ID NO: 834354 - RNA, 19 nt, Artificial Sequence
  Description of Artificial Sequence: Synthetic oligonucleotide
uugaacuucccgcagggua

SEQ ID NO: 834355 - RNA, 19 nt, Artificial Sequence
  Description of Artificial Sequence: Synthetic oligonucleotide
uaaagcugauccccuggag

SEQ ID NO: 834356 - RNA, 19 nt, Artificial Sequence
  Description of Artificial Sequence: Synthetic oligonucleotide
gaacgcauuagguaucgca

SEQ ID NO: 834357 - RNA, 19 nt, Artificial Sequence
  Description of Artificial Sequence: Synthetic oligonucleotide
ugaacuucccgcaggguaa

SEQ ID NO: 834358 - RNA, 19 nt, Artificial Sequence
  Description of Artificial Sequence: Synthetic oligonucleotide
agacaggucgacaucaauc

SEQ ID NO: 834359 - RNA, 19 nt, Artificial Sequence
  Description of Artificial Sequence: Synthetic oligonucleotide
gaugucagaucauuggucu

SEQ ID NO: 834360 - RNA, 19 nt, Artificial Sequence
  Description of Artificial Sequence: Synthetic oligonucleotide
cagaucauuggucugcaac

SEQ ID NO: 834361 - RNA, 19 nt, Artificial Sequence
  Description of Artificial Sequence: Synthetic oligonucleotide
uccucaaguagguaauacu

SEQ ID NO: 834362 - RNA, 19 nt, Artificial Sequence
  Description of Artificial Sequence: Synthetic oligonucleotide
uacgggucagauagaaggc

SEQ ID NO: 834363 - RNA, 19 nt, Artificial Sequence
  Description of Artificial Sequence: Synthetic oligonucleotide
ugccagugacucuucaucc

SEQ ID NO: 834364 - RNA, 19 nt, Artificial Sequence
  Description of Artificial Sequence: Synthetic oligonucleotide
gauccuacuuugcucagca

SEQ ID NO: 834365 - RNA, 19 nt, Artificial Sequence
  Description of Artificial Sequence: Synthetic oligonucleotide
agccacuggauccaaacca

SEQ ID NO: 834366 - RNA, 19 nt, Artificial Sequence
  Description of Artificial Sequence: Synthetic oligonucleotide
aggcucaaaucaaugggcc

SEQ ID NO: 834367 - RNA, 19 nt, Artificial Sequence
  Description of Artificial Sequence: Synthetic oligonucleotide
acaauuucuccgcggcgac

SEQ ID NO: 834368 - RNA, 19 nt, Artificial Sequence
  Description of Artificial Sequence: Synthetic oligonucleotide
agguaucgcaccaugcggc

SEQ ID NO: 834369 - RNA, 19 nt, Artificial Sequence
  Description of Artificial Sequence: Synthetic oligonucleotide
gagcucaugccugugauac

SEQ ID NO: 834370 - RNA, 19 nt, Artificial Sequence
  Description of Artificial Sequence: Synthetic oligonucleotide
gaagguuuccaagguaggc

SEQ ID NO: 834371 - RNA, 19 nt, Artificial Sequence
  Description of Artificial Sequence: Synthetic oligonucleotide
agaugucagaucauugguc

SEQ ID NO: 834372 - RNA, 19 nt, Artificial Sequence
  Description of Artificial Sequence: Synthetic oligonucleotide
cucugaacggcuagcagug

SEQ ID NO: 834373 - RNA, 19 nt, Artificial Sequence
  Description of Artificial Sequence: Synthetic oligonucleotide
uaaaucggcagcugaacuu

SEQ ID NO: 834374 - RNA, 19 nt, Artificial Sequence
  Description of Artificial Sequence: Synthetic oligonucleotide
acgaaucucaggcuggcga

SEQ ID NO: 834375 - RNA, 19 nt, Artificial Sequence
  Description of Artificial Sequence: Synthetic oligonucleotide
uuuccguuugaugaaccug

SEQ ID NO: 834376 - RNA, 19 nt, Artificial Sequence
  Description of Artificial Sequence: Synthetic oligonucleotide
gagaacgcauuagguaucg

SEQ ID NO: 834377 - RNA, 19 nt, Artificial Sequence
  Description of Artificial Sequence: Synthetic oligonucleotide
uaucgcaccaugcggcccc

SEQ ID NO: 834378 - RNA, 19 nt, Artificial Sequence
  Description of Artificial Sequence: Synthetic oligonucleotide
gugcacagaugucagauca

SEQ ID NO: 834379 - RNA, 19 nt, Artificial Sequence
  Description of Artificial Sequence: Synthetic oligonucleotide
cauccaagguuucugacca

SEQ ID NO: 834380 - RNA, 19 nt, Artificial Sequence
  Description of Artificial Sequence: Synthetic oligonucleotide
agggugaucucacgagaac

SEQ ID NO: 834381 - RNA, 19 nt, Artificial Sequence
  Description of Artificial Sequence: Synthetic oligonucleotide
uggucgauccuacuuugcu

SEQ ID NO: 834382 - RNA, 19 nt, Artificial Sequence
  Description of Artificial Sequence: Synthetic oligonucleotide
ucugcguuuagggauagua

SEQ ID NO: 834383 - RNA, 19 nt, Artificial Sequence
  Description of Artificial Sequence: Synthetic oligonucleotide
augacagggucguagagua

SEQ ID NO: 834384 - RNA, 19 nt, Artificial Sequence
  Description of Artificial Sequence: Synthetic oligonucleotide
gucgauccuacuuugcuca

SEQ ID NO: 834385 - RNA, 19 nt, Artificial Sequence
  Description of Artificial Sequence: Synthetic oligonucleotide
ugauacuguccacuagcac

SEQ ID NO: 834386 - RNA, 19 nt, Artificial Sequence
  Description of Artificial Sequence: Synthetic oligonucleotide
ggaagagagucauuccuag

SEQ ID NO: 834387 - RNA, 19 nt, Artificial Sequence
  Description of Artificial Sequence: Synthetic oligonucleotide
uccacuacccacucugggu

SEQ ID NO: 834388 - RNA, 19 nt, Artificial Sequence
  Description of Artificial Sequence: Synthetic oligonucleotide
guacccagggccugggacg

SEQ ID NO: 834389 - RNA, 19 nt, Artificial Sequence
  Description of Artificial Sequence: Synthetic oligonucleotide
gacaggucgacaucaaucu

SEQ ID NO: 834390 - RNA, 19 nt, Artificial Sequence
  Description of Artificial Sequence: Synthetic oligonucleotide
ggaguuguugcuaagccgc

SEQ ID NO: 834391 - RNA, 19 nt, Artificial Sequence
  Description of Artificial Sequence: Synthetic oligonucleotide
uccgugagauacaucuaca

SEQ ID NO: 834392 - RNA, 19 nt, Artificial Sequence
  Description of Artificial Sequence: Synthetic oligonucleotide
uacuaggggccuuggauac

SEQ ID NO: 834393 - RNA, 19 nt, Artificial Sequence
  Description of Artificial Sequence: Synthetic oligonucleotide
agcggccugauuccacucc

SEQ ID NO: 834394 - RNA, 19 nt, Artificial Sequence
  Description of Artificial Sequence: Synthetic oligonucleotide
aguagguaauacugucuca

SEQ ID NO: 834395 - RNA, 19 nt, Artificial Sequence
  Description of Artificial Sequence: Synthetic oligonucleotide
cacagaugucagaucauug

SEQ ID NO: 834396 - RNA, 19 nt, Artificial Sequence
  Description of Artificial Sequence: Synthetic oligonucleotide
guaccaacgcucuugaacu

SEQ ID NO: 834397 - RNA, 19 nt, Artificial Sequence
  Description of Artificial Sequence: Synthetic oligonucleotide
ugaacggcuagcagugccu

SEQ ID NO: 834398 - RNA, 19 nt, Artificial Sequence
  Description of Artificial Sequence: Synthetic oligonucleotide
ucgaagucuggagagcuca

SEQ ID NO: 834399 - RNA, 19 nt, Artificial Sequence
  Description of Artificial Sequence: Synthetic oligonucleotide
cauuagguaucgcaccaug

SEQ ID NO: 834400 - RNA, 19 nt, Artificial Sequence
  Description of Artificial Sequence: Synthetic oligonucleotide
aguagggcguaccaacgcu

SEQ ID NO: 834401 - RNA, 19 nt, Artificial Sequence
  Description of Artificial Sequence: Synthetic oligonucleotide
cuaagccgccacuuggagc

SEQ ID NO: 834402 - RNA, 19 nt, Artificial Sequence
  Description of Artificial Sequence: Synthetic oligonucleotide
uucccgcaggguaaaucgg

SEQ ID NO: 834403 - RNA, 19 nt, Artificial Sequence
  Description of Artificial Sequence: Synthetic oligonucleotide
ugaucucacgagaacgcau

SEQ ID NO: 834404 - RNA, 19 nt, Artificial Sequence
  Description of Artificial Sequence: Synthetic oligonucleotide
gacuaaagcugauccccug

SEQ ID NO: 834405 - RNA, 19 nt, Artificial Sequence
  Description of Artificial Sequence: Synthetic oligonucleotide
agaugccgggaagagaguc

SEQ ID NO: 834406 - RNA, 19 nt, Artificial Sequence
  Description of Artificial Sequence: Synthetic oligonucleotide
gucauuccuaggcugccag

SEQ ID NO: 834407 - RNA, 19 nt, Artificial Sequence
  Description of Artificial Sequence: Synthetic oligonucleotide
ugcuaagccgccacuugga

SEQ ID NO: 834408 - RNA, 19 nt, Artificial Sequence
  Description of Artificial Sequence: Synthetic oligonucleotide
ucucacgagaacgcauuag

SEQ ID NO: 834409 - RNA, 19 nt, Artificial Sequence
  Description of Artificial Sequence: Synthetic oligonucleotide
cggccaucaauguagaugg

SEQ ID NO: 834410 - RNA, 19 nt, Artificial Sequence
  Description of Artificial Sequence: Synthetic oligonucleotide
gaguagggcguaccaacgc

SEQ ID NO: 834411 - RNA, 19 nt, Artificial Sequence
  Description of Artificial Sequence: Synthetic oligonucleotide
ggguagaggguuuuccagg

SEQ ID NO: 834412 - RNA, 19 nt, Artificial Sequence
  Description of Artificial Sequence: Synthetic oligonucleotide
aaggcaucagggugucugu

SEQ ID NO: 834413 - RNA, 19 nt, Artificial Sequence
  Description of Artificial Sequence: Synthetic oligonucleotide
gagcuuagaugccgggaag

SEQ ID NO: 834414 - RNA, 19 nt, Artificial Sequence
  Description of Artificial Sequence: Synthetic oligonucleotide
gggugcaauugccucaugg

SEQ ID NO: 834415 - RNA, 19 nt, Artificial Sequence
  Description of Artificial Sequence: Synthetic oligonucleotide
ugcuaaacagggccuugcu

SEQ ID NO: 834416 - RNA, 19 nt, Artificial Sequence
  Description of Artificial Sequence: Synthetic oligonucleotide
aaugcccugguuucugcua

SEQ ID NO: 834417 - RNA, 19 nt, Artificial Sequence
  Description of Artificial Sequence: Synthetic oligonucleotide
ugcuuucgggagaucuucc

SEQ ID NO: 834418 - RNA, 19 nt, Artificial Sequence
  Description of Artificial Sequence: Synthetic oligonucleotide
guugcuaagccgccacuug

SEQ ID NO: 834419 - RNA, 19 nt, Artificial Sequence
  Description of Artificial Sequence: Synthetic oligonucleotide
ggaaucuuuguccauucuc

SEQ ID NO: 834420 - RNA, 19 nt, Artificial Sequence
  Description of Artificial Sequence: Synthetic oligonucleotide
uguagaugggccgccggcc

SEQ ID NO: 834421 - RNA, 19 nt, Artificial Sequence
  Description of Artificial Sequence: Synthetic oligonucleotide
gauuuggccaggcugcucu

SEQ ID NO: 834422 - RNA, 19 nt, Artificial Sequence
  Description of Artificial Sequence: Synthetic oligonucleotide
gagugauguggcaauggug

SEQ ID NO: 834423 - RNA, 19 nt, Artificial Sequence
  Description of Artificial Sequence: Synthetic oligonucleotide
agaguagggcguaccaacg

SEQ ID NO: 834424 - RNA, 19 nt, Artificial Sequence
  Description of Artificial Sequence: Synthetic oligonucleotide
gagcuuacugucgucaauc

SEQ ID NO: 834425 - RNA, 19 nt, Artificial Sequence
  Description of Artificial Sequence: Synthetic oligonucleotide
ucaauguagaugggccgcc

SEQ ID NO: 834426 - RNA, 19 nt, Artificial Sequence
  Description of Artificial Sequence: Synthetic oligonucleotide
ugauccccuggagacacag

SEQ ID NO: 834427 - RNA, 19 nt, Artificial Sequence
  Description of Artificial Sequence: Synthetic oligonucleotide
ggagacuaaagcugauccc

SEQ ID NO: 834428 - RNA, 19 nt, Artificial Sequence
  Description of Artificial Sequence: Synthetic oligonucleotide
ucaucucgcauguccuuga

SEQ ID NO: 834429 - RNA, 19 nt, Artificial Sequence
  Description of Artificial Sequence: Synthetic oligonucleotide
gcuuccgugagauacaucu

SEQ ID NO: 834430 - RNA, 19 nt, Artificial Sequence
  Description of Artificial Sequence: Synthetic oligonucleotide
aaucaaugggccagcaguu

SEQ ID NO: 834431 - RNA, 19 nt, Artificial Sequence
  Description of Artificial Sequence: Synthetic oligonucleotide
ugguccucaaguagguaau

SEQ ID NO: 834432 - RNA, 19 nt, Artificial Sequence
  Description of Artificial Sequence: Synthetic oligonucleotide
gggugaucucacgagaacg

SEQ ID NO: 834433 - RNA, 19 nt, Artificial Sequence
  Description of Artificial Sequence: Synthetic oligonucleotide
uuuucuucacacgcuuagu

SEQ ID NO: 834434 - RNA, 19 nt, Artificial Sequence
  Description of Artificial Sequence: Synthetic oligonucleotide
ugggaaucuuuguccauuc

SEQ ID NO: 834435 - RNA, 19 nt, Artificial Sequence
  Description of Artificial Sequence: Synthetic oligonucleotide
uuguccauucucucacagu

SEQ ID NO: 834436 - RNA, 19 nt, Artificial Sequence
  Description of Artificial Sequence: Synthetic oligonucleotide
caucagggaugaaucuagc

SEQ ID NO: 834437 - RNA, 19 nt, Artificial Sequence
  Description of Artificial Sequence: Synthetic oligonucleotide
agcuuacugucgucaauca

SEQ ID NO: 834438 - RNA, 19 nt, Artificial Sequence
  Description of Artificial Sequence: Synthetic oligonucleotide
caccuugcuucaaaggcuc

SEQ ID NO: 834439 - RNA, 19 nt, Artificial Sequence
  Description of Artificial Sequence: Synthetic oligonucleotide
uagggcguaccaacgcucu

SEQ ID NO: 834440 - RNA, 19 nt, Artificial Sequence
  Description of Artificial Sequence: Synthetic oligonucleotide
agccugaguucccagcuca

SEQ ID NO: 834441 - RNA, 19 nt, Artificial Sequence
  Description of Artificial Sequence: Synthetic oligonucleotide
ugagcuuacugucgucaau

SEQ ID NO: 834442 - RNA, 19 nt, Artificial Sequence
  Description of Artificial Sequence: Synthetic oligonucleotide
uugcuaaacagggccuugc

SEQ ID NO: 834443 - RNA, 19 nt, Artificial Sequence
  Description of Artificial Sequence: Synthetic oligonucleotide
augucagaucauuggucug

SEQ ID NO: 834444 - RNA, 19 nt, Artificial Sequence
  Description of Artificial Sequence: Synthetic oligonucleotide
aacagcggccugauuccac

SEQ ID NO: 834445 - RNA, 19 nt, Artificial Sequence
  Description of Artificial Sequence: Synthetic oligonucleotide
accaacgcucuugaacuuc

SEQ ID NO: 834446 - RNA, 19 nt, Artificial Sequence
  Description of Artificial Sequence: Synthetic oligonucleotide
acaggucgacaucaaucug

SEQ ID NO: 834447 - RNA, 19 nt, Artificial Sequence
  Description of Artificial Sequence: Synthetic oligonucleotide
ucaaaucaaugggccagca

SEQ ID NO: 834448 - RNA, 19 nt, Artificial Sequence
  Description of Artificial Sequence: Synthetic oligonucleotide
uugagcuuacugucgucaa

SEQ ID NO: 834449 - RNA, 19 nt, Artificial Sequence
  Description of Artificial Sequence: Synthetic oligonucleotide
cucaaaucaaugggccagc

SEQ ID NO: 834450 - RNA, 19 nt, Artificial Sequence
  Description of Artificial Sequence: Synthetic oligonucleotide
ucauuccuaggcugccagc

SEQ ID NO: 834451 - RNA, 19 nt, Artificial Sequence
  Description of Artificial Sequence: Synthetic oligonucleotide
uccguuugaugaaccugga

SEQ ID NO: 834452 - RNA, 19 nt, Artificial Sequence
  Description of Artificial Sequence: Synthetic oligonucleotide
aggccggccaucaauguag

SEQ ID NO: 834453 - RNA, 19 nt, Artificial Sequence
  Description of Artificial Sequence: Synthetic oligonucleotide
acuucccgcaggguaaauc

SEQ ID NO: 834454 - RNA, 19 nt, Artificial Sequence
  Description of Artificial Sequence: Synthetic oligonucleotide
acgcuuagugaguccuggg

SEQ ID NO: 834455 - RNA, 19 nt, Artificial Sequence
  Description of Artificial Sequence: Synthetic oligonucleotide
ugcuacccgccucacugug

SEQ ID NO: 834456 - RNA, 19 nt, Artificial Sequence
  Description of Artificial Sequence: Synthetic oligonucleotide
ucaugccugugauacuguc

SEQ ID NO: 834457 - RNA, 19 nt, Artificial Sequence
  Description of Artificial Sequence: Synthetic oligonucleotide
ugggacgaagcucgcuucu

SEQ ID NO: 834458 - RNA, 19 nt, Artificial Sequence
  Description of Artificial Sequence: Synthetic oligonucleotide
cagagccuuggcaguacgg

SEQ ID NO: 834459 - RNA, 19 nt, Artificial Sequence
  Description of Artificial Sequence: Synthetic oligonucleotide
cacggaguuguugcuaagc

SEQ ID NO: 834460 - RNA, 19 nt, Artificial Sequence
  Description of Artificial Sequence: Synthetic oligonucleotide
gacgaagcucgcuucuguc

SEQ ID NO: 834461 - RNA, 19 nt, Artificial Sequence
  Description of Artificial Sequence: Synthetic oligonucleotide
cuagccucuccuggcaucc

SEQ ID NO: 834462 - RNA, 19 nt, Artificial Sequence
  Description of Artificial Sequence: Synthetic oligonucleotide
ggugaucucacgagaacgc

SEQ ID NO: 834463 - RNA, 19 nt, Artificial Sequence
  Description of Artificial Sequence: Synthetic oligonucleotide
guagaggguuuuccaggag

SEQ ID NO: 834464 - RNA, 19 nt, Artificial Sequence
  Description of Artificial Sequence: Synthetic oligonucleotide
guaaaucggcagcugaacu

SEQ ID NO: 834465 - RNA, 19 nt, Artificial Sequence
  Description of Artificial Sequence: Synthetic oligonucleotide
uuucuccgcggcgacagga

SEQ ID NO: 834466 - RNA, 19 nt, Artificial Sequence
  Description of Artificial Sequence: Synthetic oligonucleotide
gucagauagaaggcaucag

SEQ ID NO: 834467 - RNA, 19 nt, Artificial Sequence
  Description of Artificial Sequence: Synthetic oligonucleotide
acagcggccugauuccacu

SEQ ID NO: 834468 - RNA, 19 nt, Artificial Sequence
  Description of Artificial Sequence: Synthetic oligonucleotide
guacuaggggccuuggaua

SEQ ID NO: 834469 - RNA, 19 nt, Artificial Sequence
  Description of Artificial Sequence: Synthetic oligonucleotide
ucgauccuacuuugcucag

SEQ ID NO: 834470 - RNA, 19 nt, Artificial Sequence
  Description of Artificial Sequence: Synthetic oligonucleotide
cacgagaacgcauuaggua

SEQ ID NO: 834471 - RNA, 19 nt, Artificial Sequence
  Description of Artificial Sequence: Synthetic oligonucleotide
cuagcagugccugaugcca

SEQ ID NO: 834472 - RNA, 19 nt, Artificial Sequence
  Description of Artificial Sequence: Synthetic oligonucleotide
uugucgaagucuggagagc

SEQ ID NO: 834473 - RNA, 19 nt, Artificial Sequence
  Description of Artificial Sequence: Synthetic oligonucleotide
gucucaugagcugccagug

SEQ ID NO: 834474 - RNA, 19 nt, Artificial Sequence
  Description of Artificial Sequence: Synthetic oligonucleotide
ugccggaucucucguuucu

SEQ ID NO: 834475 - RNA, 19 nt, Artificial Sequence
  Description of Artificial Sequence: Synthetic oligonucleotide
agaacgcauuagguaucgc

SEQ ID NO: 834476 - RNA, 19 nt, Artificial Sequence
  Description of Artificial Sequence: Synthetic oligonucleotide
caucggcccagauccuugg

SEQ ID NO: 834477 - RNA, 19 nt, Artificial Sequence
  Description of Artificial Sequence: Synthetic oligonucleotide
accacggaguuguugcuaa

SEQ ID NO: 834478 - RNA, 19 nt, Artificial Sequence
  Description of Artificial Sequence: Synthetic oligonucleotide
cucaaguagguaauacugu

SEQ ID NO: 834479 - RNA, 19 nt, Artificial Sequence
  Description of Artificial Sequence: Synthetic oligonucleotide
ugcacagaugucagaucau

SEQ ID NO: 834480 - RNA, 19 nt, Artificial Sequence
  Description of Artificial Sequence: Synthetic oligonucleotide
gguugucgaagucuggaga

SEQ ID NO: 834481 - RNA, 19 nt, Artificial Sequence
  Description of Artificial Sequence: Synthetic oligonucleotide
ugcaggcuuccaucggccc

SEQ ID NO: 834482 - RNA, 19 nt, Artificial Sequence
  Description of Artificial Sequence: Synthetic oligonucleotide
cuggucgauccuacuuugc

SEQ ID NO: 834483 - RNA, 19 nt, Artificial Sequence
  Description of Artificial Sequence: Synthetic oligonucleotide
gcucacuccccgaacagcg

SEQ ID NO: 834484 - RNA, 19 nt, Artificial Sequence
  Description of Artificial Sequence: Synthetic oligonucleotide
acuaggggccuuggauacc

SEQ ID NO: 834485 - RNA, 19 nt, Artificial Sequence
  Description of Artificial Sequence: Synthetic oligonucleotide
ucguagaguagggcguacc

SEQ ID NO: 834486 - RNA, 19 nt, Artificial Sequence
  Description of Artificial Sequence: Synthetic oligonucleotide
gagcuucugcguuuaggga

SEQ ID NO: 834487 - RNA, 19 nt, Artificial Sequence
  Description of Artificial Sequence: Synthetic oligonucleotide
cguaccaacgcucuugaac

SEQ ID NO: 834488 - RNA, 19 nt, Artificial Sequence
  Description of Artificial Sequence: Synthetic oligonucleotide
aacggcuagcagugccuga

SEQ ID NO: 834489 - RNA, 19 nt, Artificial Sequence
  Description of Artificial Sequence: Synthetic oligonucleotide
ggaagguuuccaagguagg

SEQ ID NO: 834490 - RNA, 19 nt, Artificial Sequence
  Description of Artificial Sequence: Synthetic oligonucleotide
gaaugacaggggaaacuga

SEQ ID NO: 834491 - RNA, 19 nt, Artificial Sequence
  Description of Artificial Sequence: Synthetic oligonucleotide
ggguccuagccucuccugg

SEQ ID NO: 834492 - RNA, 19 nt, Artificial Sequence
  Description of Artificial Sequence: Synthetic oligonucleotide
ggcauccccauggugaucc

SEQ ID NO: 834493 - RNA, 19 nt, Artificial Sequence
  Description of Artificial Sequence: Synthetic oligonucleotide
gaagagcuucugcguuuag

SEQ ID NO: 834494 - RNA, 19 nt, Artificial Sequence
  Description of Artificial Sequence: Synthetic oligonucleotide
caauguagaugggccgccg

SEQ ID NO: 834495 - RNA, 19 nt, Artificial Sequence
  Description of Artificial Sequence: Synthetic oligonucleotide
gaagcucgcuucuguccug

SEQ ID NO: 834496 - RNA, 19 nt, Artificial Sequence
  Description of Artificial Sequence: Synthetic oligonucleotide
aguacgggucagauagaag

SEQ ID NO: 834497 - RNA, 19 nt, Artificial Sequence
  Description of Artificial Sequence: Synthetic oligonucleotide
uggcuggucgauccuacuu

SEQ ID NO: 834498 - RNA, 19 nt, Artificial Sequence
  Description of Artificial Sequence: Synthetic oligonucleotide
aagccggcuuccgugagau

SEQ ID NO: 834499 - RNA, 19 nt, Artificial Sequence
  Description of Artificial Sequence: Synthetic oligonucleotide
ccggguagaggauuuggcc

SEQ ID NO: 834500 - RNA, 19 nt, Artificial Sequence
  Description of Artificial Sequence: Synthetic oligonucleotide
ggauccaaaccacagggcu

SEQ ID NO: 834501 - RNA, 19 nt, Artificial Sequence
  Description of Artificial Sequence: Synthetic oligonucleotide
auuucuccgcggcgacagg

SEQ ID NO: 834502 - RNA, 19 nt, Artificial Sequence
  Description of Artificial Sequence: Synthetic oligonucleotide
gguaaaucggcagcugaac

SEQ ID NO: 834503 - RNA, 19 nt, Artificial Sequence
  Description of Artificial Sequence: Synthetic oligonucleotide
gguaucgcaccaugcggcc

SEQ ID NO: 834504 - RNA, 19 nt, Artificial Sequence
  Description of Artificial Sequence: Synthetic oligonucleotide
gaacggcuagcagugccug

SEQ ID NO: 834505 - RNA, 19 nt, Artificial Sequence
  Description of Artificial Sequence: Synthetic oligonucleotide
cacuacccacucuggguag

SEQ ID NO: 834506 - RNA, 19 nt, Artificial Sequence
  Description of Artificial Sequence: Synthetic oligonucleotide
gccaucaauguagaugggc

SEQ ID NO: 834507 - RNA, 19 nt, Artificial Sequence
  Description of Artificial Sequence: Synthetic oligonucleotide
gcucaugccugugauacug

SEQ ID NO: 834508 - RNA, 19 nt, Artificial Sequence
  Description of Artificial Sequence: Synthetic oligonucleotide
guagguaauacugucucau

SEQ ID NO: 834509 - RNA, 19 nt, Artificial Sequence
  Description of Artificial Sequence: Synthetic oligonucleotide
acccggguagaggauuugg

SEQ ID NO: 834510 - RNA, 19 nt, Artificial Sequence
  Description of Artificial Sequence: Synthetic oligonucleotide
acgggucagauagaaggca

SEQ ID NO: 834511 - RNA, 19 nt, Artificial Sequence
  Description of Artificial Sequence: Synthetic oligonucleotide
gccugauuccacuccacug

SEQ ID NO: 834512 - RNA, 19 nt, Artificial Sequence
  Description of Artificial Sequence: Synthetic oligonucleotide
ucgggagaucuuccaggcu

SEQ ID NO: 834513 - RNA, 19 nt, Artificial Sequence
  Description of Artificial Sequence: Synthetic oligonucleotide
gaugaaucuagcagccccu

SEQ ID NO: 834514 - RNA, 19 nt, Artificial Sequence
  Description of Artificial Sequence: Synthetic oligonucleotide
gcguuuagggauaguaccc

SEQ ID NO: 834515 - RNA, 19 nt, Artificial Sequence
  Description of Artificial Sequence: Synthetic oligonucleotide
ggucgauccuacuuugcuc

SEQ ID NO: 834516 - RNA, 19 nt, Artificial Sequence
  Description of Artificial Sequence: Synthetic oligonucleotide
gcuagcagugccugaugcc

SEQ ID NO: 834517 - RNA, 19 nt, Artificial Sequence
  Description of Artificial Sequence: Synthetic oligonucleotide
uagaugccgggaagagagu

SEQ ID NO: 834518 - RNA, 19 nt, Artificial Sequence
  Description of Artificial Sequence: Synthetic oligonucleotide
uccugccagugacucuuca

SEQ ID NO: 834519 - RNA, 19 nt, Artificial Sequence
  Description of Artificial Sequence: Synthetic oligonucleotide
gauccaaaccacagggcua

SEQ ID NO: 834520 - RNA, 19 nt, Artificial Sequence
  Description of Artificial Sequence: Synthetic oligonucleotide
caucucgcauguccuugag

SEQ ID NO: 834521 - RNA, 19 nt, Artificial Sequence
  Description of Artificial Sequence: Synthetic oligonucleotide
cugggacgaagcucgcuuc

SEQ ID NO: 834522 - RNA, 19 nt, Artificial Sequence
  Description of Artificial Sequence: Synthetic oligonucleotide
cagaugucagaucauuggu

SEQ ID NO: 834523 - RNA, 19 nt, Artificial Sequence
  Description of Artificial Sequence: Synthetic oligonucleotide
aggucgacaucaaucuggu

SEQ ID NO: 834524 - RNA, 19 nt, Artificial Sequence
  Description of Artificial Sequence: Synthetic oligonucleotide
aaucggcagcugaacuuca

SEQ ID NO: 834525 - RNA, 19 nt, Artificial Sequence
  Description of Artificial Sequence: Synthetic oligonucleotide
uagcagugccugaugccau

SEQ ID NO: 834526 - RNA, 19 nt, Artificial Sequence
  Description of Artificial Sequence: Synthetic oligonucleotide
aguuguugcuaagccgcca

SEQ ID NO: 834527 - RNA, 19 nt, Artificial Sequence
  Description of Artificial Sequence: Synthetic oligonucleotide
gccacuuaugcaauuccug

SEQ ID NO: 834528 - RNA, 19 nt, Artificial Sequence
  Description of Artificial Sequence: Synthetic oligonucleotide
gcuaagccgccacuuggag

SEQ ID NO: 834529 - RNA, 19 nt, Artificial Sequence
  Description of Artificial Sequence: Synthetic oligonucleotide
acaggccggccaucaaugu

SEQ ID NO: 834530 - RNA, 19 nt, Artificial Sequence
  Description of Artificial Sequence: Synthetic oligonucleotide
uccgcggcgacaggaggag

SEQ ID NO: 834531 - RNA, 19 nt, Artificial Sequence
  Description of Artificial Sequence: Synthetic oligonucleotide
cugguugucgaagucugga

SEQ ID NO: 834532 - RNA, 19 nt, Artificial Sequence
  Description of Artificial Sequence: Synthetic oligonucleotide
gcuaaacagggccuugcuc

SEQ ID NO: 834533 - RNA, 19 nt, Artificial Sequence
  Description of Artificial Sequence: Synthetic oligonucleotide
gcuuagaugccgggaagag

SEQ ID NO: 834534 - RNA, 19 nt, Artificial Sequence
  Description of Artificial Sequence: Synthetic oligonucleotide
aucggcagcugaacuucac

SEQ ID NO: 834535 - RNA, 19 nt, Artificial Sequence
  Description of Artificial Sequence: Synthetic oligonucleotide
cuuuguccauucucucaca

SEQ ID NO: 834536 - RNA, 19 nt, Artificial Sequence
  Description of Artificial Sequence: Synthetic oligonucleotide
caaagccggcuuccgugag

SEQ ID NO: 834537 - RNA, 19 nt, Artificial Sequence
  Description of Artificial Sequence: Synthetic oligonucleotide
gaaucucaggcuggcgauc

SEQ ID NO: 834538 - RNA, 19 nt, Artificial Sequence
  Description of Artificial Sequence: Synthetic oligonucleotide
agagcucaugccugugaua

SEQ ID NO: 834539 - RNA, 19 nt, Artificial Sequence
  Description of Artificial Sequence: Synthetic oligonucleotide
aucucacgagaacgcauua

SEQ ID NO: 834540 - RNA, 19 nt, Artificial Sequence
  Description of Artificial Sequence: Synthetic oligonucleotide
gccggcuuccgugagauac

SEQ ID NO: 834541 - RNA, 19 nt, Artificial Sequence
  Description of Artificial Sequence: Synthetic oligonucleotide
acccgccucacuguggugu

SEQ ID NO: 834542 - RNA, 19 nt, Artificial Sequence
  Description of Artificial Sequence: Synthetic oligonucleotide
cuguggugugaucuuggca

SEQ ID NO: 834543 - RNA, 19 nt, Artificial Sequence
  Description of Artificial Sequence: Synthetic oligonucleotide
cagggugaucucacgagaa

SEQ ID NO: 834544 - RNA, 19 nt, Artificial Sequence
  Description of Artificial Sequence: Synthetic oligonucleotide
cuggguggcacaggaguac

SEQ ID NO: 834545 - RNA, 19 nt, Artificial Sequence
  Description of Artificial Sequence: Synthetic oligonucleotide
ugcccugguuucugcuacc

SEQ ID NO: 834546 - RNA, 19 nt, Artificial Sequence
  Description of Artificial Sequence: Synthetic oligonucleotide
gugaucucacgagaacgca

SEQ ID NO: 834547 - RNA, 19 nt, Artificial Sequence
  Description of Artificial Sequence: Synthetic oligonucleotide
agccccugggaaucuuugu

SEQ ID NO: 834548 - RNA, 19 nt, Artificial Sequence
  Description of Artificial Sequence: Synthetic oligonucleotide
ccggaucucucguuucugg

SEQ ID NO: 834549 - RNA, 19 nt, Artificial Sequence
  Description of Artificial Sequence: Synthetic oligonucleotide
ggcucaaaucaaugggcca

SEQ ID NO: 834550 - RNA, 19 nt, Artificial Sequence
  Description of Artificial Sequence: Synthetic oligonucleotide
cgaacagcggccugauucc

SEQ ID NO: 834551 - RNA, 19 nt, Artificial Sequence
  Description of Artificial Sequence: Synthetic oligonucleotide
guagaguagggcguaccaa

SEQ ID NO: 834552 - RNA, 19 nt, Artificial Sequence
  Description of Artificial Sequence: Synthetic oligonucleotide
gcaacacagcauugaugag

SEQ ID NO: 834553 - RNA, 19 nt, Artificial Sequence
  Description of Artificial Sequence: Synthetic oligonucleotide
agcucaugccugugauacu

SEQ ID NO: 834554 - RNA, 19 nt, Artificial Sequence
  Description of Artificial Sequence: Synthetic oligonucleotide
ggcucauccaagguuucug

SEQ ID NO: 834555 - RNA, 19 nt, Artificial Sequence
  Description of Artificial Sequence: Synthetic oligonucleotide
guagggcguaccaacgcuc

SEQ ID NO: 834556 - RNA, 19 nt, Artificial Sequence
  Description of Artificial Sequence: Synthetic oligonucleotide
uacccagggccugggacga

SEQ ID NO: 834557 - RNA, 19 nt, Artificial Sequence
  Description of Artificial Sequence: Synthetic oligonucleotide
cagagaaguuuagcacuug

SEQ ID NO: 834558 - RNA, 19 nt, Artificial Sequence
  Description of Artificial Sequence: Synthetic oligonucleotide
uccccgaacagcggccuga

SEQ ID NO: 834559 - RNA, 19 nt, Artificial Sequence
  Description of Artificial Sequence: Synthetic oligonucleotide
gccgggaagagagucauuc

SEQ ID NO: 834560 - RNA, 19 nt, Artificial Sequence
  Description of Artificial Sequence: Synthetic oligonucleotide
cagggucguagaguagggc

SEQ ID NO: 834561 - RNA, 19 nt, Artificial Sequence
  Description of Artificial Sequence: Synthetic oligonucleotide
uccaaaccacagggcuagg

SEQ ID NO: 834562 - RNA, 19 nt, Artificial Sequence
  Description of Artificial Sequence: Synthetic oligonucleotide
cagucccaaagccacugga

SEQ ID NO: 834563 - RNA, 19 nt, Artificial Sequence
  Description of Artificial Sequence: Synthetic oligonucleotide
cuuagugaguccugggguu

SEQ ID NO: 834564 - RNA, 19 nt, Artificial Sequence
  Description of Artificial Sequence: Synthetic oligonucleotide
gucagaucauuggucugca

SEQ ID NO: 834565 - RNA, 19 nt, Artificial Sequence
  Description of Artificial Sequence: Synthetic oligonucleotide
gcaucagggugucugugca

SEQ ID NO: 834566 - RNA, 19 nt, Artificial Sequence
  Description of Artificial Sequence: Synthetic oligonucleotide
uaccaacgcucuugaacuu

SEQ ID NO: 834567 - RNA, 19 nt, Artificial Sequence
  Description of Artificial Sequence: Synthetic oligonucleotide
gcuuagugaguccuggggu

SEQ ID NO: 834568 - RNA, 19 nt, Artificial Sequence
  Description of Artificial Sequence: Synthetic oligonucleotide
guaucgcaccaugcggccc

SEQ ID NO: 834569 - RNA, 19 nt, Artificial Sequence
  Description of Artificial Sequence: Synthetic oligonucleotide
gccacauagcacaggccgg

SEQ ID NO: 834570 - RNA, 19 nt, Artificial Sequence
  Description of Artificial Sequence: Synthetic oligonucleotide
ggggcgucuggcucugggg

SEQ ID NO: 834571 - RNA, 19 nt, Artificial Sequence
  Description of Artificial Sequence: Synthetic oligonucleotide
acggcuagcagugccugau

SEQ ID NO: 834572 - RNA, 19 nt, Artificial Sequence
  Description of Artificial Sequence: Synthetic oligonucleotide
cugucgucaaucagguccu

SEQ ID NO: 834573 - RNA, 19 nt, Artificial Sequence
  Description of Artificial Sequence: Synthetic oligonucleotide
agcuuggagaugacagggu

SEQ ID NO: 834574 - RNA, 19 nt, Artificial Sequence
  Description of Artificial Sequence: Synthetic oligonucleotide
augccgggaagagagucau

SEQ ID NO: 834575 - RNA, 19 nt, Artificial Sequence
  Description of Artificial Sequence: Synthetic oligonucleotide
cccggguagaggauuuggc

SEQ ID NO: 834576 - RNA, 19 nt, Artificial Sequence
  Description of Artificial Sequence: Synthetic oligonucleotide
uuccaucggcccagauccu

SEQ ID NO: 834577 - RNA, 19 nt, Artificial Sequence
  Description of Artificial Sequence: Synthetic oligonucleotide
ccauggugaucccaccuug

SEQ ID NO: 834578 - RNA, 19 nt, Artificial Sequence
  Description of Artificial Sequence: Synthetic oligonucleotide
acuacccacucuggguaga

SEQ ID NO: 834579 - RNA, 19 nt, Artificial Sequence
  Description of Artificial Sequence: Synthetic oligonucleotide
cauuccuaggcugccagcu

SEQ ID NO: 834580 - RNA, 19 nt, Artificial Sequence
  Description of Artificial Sequence: Synthetic oligonucleotide
cugccggaucucucguuuc

SEQ ID NO: 834581 - RNA, 19 nt, Artificial Sequence
  Description of Artificial Sequence: Synthetic oligonucleotide
cucuccuggcauccccaug

SEQ ID NO: 834582 - RNA, 19 nt, Artificial Sequence
  Description of Artificial Sequence: Synthetic oligonucleotide
ccaccgucagcucaugcuc

SEQ ID NO: 834583 - RNA, 19 nt, Artificial Sequence
  Description of Artificial Sequence: Synthetic oligonucleotide
gcuuucgggagaucuucca

SEQ ID NO: 834584 - RNA, 19 nt, Artificial Sequence
  Description of Artificial Sequence: Synthetic oligonucleotide
ccgggaagagagucauucc

SEQ ID NO: 834585 - RNA, 19 nt, Artificial Sequence
  Description of Artificial Sequence: Synthetic oligonucleotide
cuucacacgcuuagugagu

SEQ ID NO: 834586 - RNA, 19 nt, Artificial Sequence
  Description of Artificial Sequence: Synthetic oligonucleotide
caguacgggucagauagaa

SEQ ID NO: 834587 - RNA, 19 nt, Artificial Sequence
  Description of Artificial Sequence: Synthetic oligonucleotide
ugggugcaauugccucaug

SEQ ID NO: 834588 - RNA, 19 nt, Artificial Sequence
  Description of Artificial Sequence: Synthetic oligonucleotide
ggcguaccaacgcucuuga

SEQ ID NO: 834589 - RNA, 19 nt, Artificial Sequence
  Description of Artificial Sequence: Synthetic oligonucleotide
gggcguaccaacgcucuug

SEQ ID NO: 834590 - RNA, 19 nt, Artificial Sequence
  Description of Artificial Sequence: Synthetic oligonucleotide
gggcucacuccccgaacag

SEQ ID NO: 834591 - RNA, 19 nt, Artificial Sequence
  Description of Artificial Sequence: Synthetic oligonucleotide
ccacauagcacaggccggc

SEQ ID NO: 834592 - RNA, 19 nt, Artificial Sequence
  Description of Artificial Sequence: Synthetic oligonucleotide
cuccgcggcgacaggagga

SEQ ID NO: 834593 - RNA, 19 nt, Artificial Sequence
  Description of Artificial Sequence: Synthetic oligonucleotide
cuuccgugagauacaucua

SEQ ID NO: 834594 - RNA, 19 nt, Artificial Sequence
  Description of Artificial Sequence: Synthetic oligonucleotide
ggaagacgaaucucaggcu

SEQ ID NO: 834595 - RNA, 19 nt, Artificial Sequence
  Description of Artificial Sequence: Synthetic oligonucleotide
aggagccgcagggccaaag

SEQ ID NO: 834596 - RNA, 19 nt, Artificial Sequence
  Description of Artificial Sequence: Synthetic oligonucleotide
auccaagguuucugaccaa

SEQ ID NO: 834597 - RNA, 19 nt, Artificial Sequence
  Description of Artificial Sequence: Synthetic oligonucleotide
ggauaguacccagggccug

SEQ ID NO: 834598 - RNA, 19 nt, Artificial Sequence
  Description of Artificial Sequence: Synthetic oligonucleotide
acacgcuuagugaguccug

SEQ ID NO: 834599 - RNA, 19 nt, Artificial Sequence
  Description of Artificial Sequence: Synthetic oligonucleotide
cacacgcuuagugaguccu

SEQ ID NO: 834600 - RNA, 19 nt, Artificial Sequence
  Description of Artificial Sequence: Synthetic oligonucleotide
ccugccacuuaugcaauuc

SEQ ID NO: 834601 - RNA, 19 nt, Artificial Sequence
  Description of Artificial Sequence: Synthetic oligonucleotide
agccgccacuuggagccac

SEQ ID NO: 834602 - RNA, 19 nt, Artificial Sequence
  Description of Artificial Sequence: Synthetic oligonucleotide
cggguagaggauuuggcca

SEQ ID NO: 834603 - RNA, 19 nt, Artificial Sequence
  Description of Artificial Sequence: Synthetic oligonucleotide
gucgaagucuggagagcuc

SEQ ID NO: 834604 - RNA, 19 nt, Artificial Sequence
  Description of Artificial Sequence: Synthetic oligonucleotide
cugaccaagugagcuuaga

SEQ ID NO: 834605 - RNA, 19 nt, Artificial Sequence
  Description of Artificial Sequence: Synthetic oligonucleotide
ccgcaggguaaaucggcag

SEQ ID NO: 834606 - RNA, 19 nt, Artificial Sequence
  Description of Artificial Sequence: Synthetic oligonucleotide
aacuucccgcaggguaaau

SEQ ID NO: 834607 - RNA, 19 nt, Artificial Sequence
  Description of Artificial Sequence: Synthetic oligonucleotide
ccaucggcccagauccuug

SEQ ID NO: 834608 - RNA, 19 nt, Artificial Sequence
  Description of Artificial Sequence: Synthetic oligonucleotide
cuacccgccucacuguggu

SEQ ID NO: 834609 - RNA, 19 nt, Artificial Sequence
  Description of Artificial Sequence: Synthetic oligonucleotide
gcuacccgccucacugugg

SEQ ID NO: 834610 - RNA, 19 nt, Artificial Sequence
  Description of Artificial Sequence: Synthetic oligonucleotide
uacccgccucacuguggug

SEQ ID NO: 834611 - RNA, 19 nt, Artificial Sequence
  Description of Artificial Sequence: Synthetic oligonucleotide
ugaucccaccuugcuucaa

SEQ ID NO: 834612 - RNA, 19 nt, Artificial Sequence
  Description of Artificial Sequence: Synthetic oligonucleotide
gucguagaguagggcguac

SEQ ID NO: 834613 - RNA, 19 nt, Artificial Sequence
  Description of Artificial Sequence: Synthetic oligonucleotide
cagcggccugauuccacuc

SEQ ID NO: 834614 - RNA, 19 nt, Artificial Sequence
  Description of Artificial Sequence: Synthetic oligonucleotide
gggguccuagccucuccug

SEQ ID NO: 834615 - RNA, 19 nt, Artificial Sequence
  Description of Artificial Sequence: Synthetic oligonucleotide
gccgccggcccucauuggc

SEQ ID NO: 834616 - RNA, 19 nt, Artificial Sequence
  Description of Artificial Sequence: Synthetic oligonucleotide
cgagaacgcauuagguauc

SEQ ID NO: 834617 - RNA, 19 nt, Artificial Sequence
  Description of Artificial Sequence: Synthetic oligonucleotide
gggucagauagaaggcauc

SEQ ID NO: 834618 - RNA, 19 nt, Artificial Sequence
  Description of Artificial Sequence: Synthetic oligonucleotide
caauuucuccgcggcgaca

SEQ ID NO: 834619 - RNA, 19 nt, Artificial Sequence
  Description of Artificial Sequence: Synthetic oligonucleotide
ccuagccucuccuggcauc

SEQ ID NO: 834620 - RNA, 19 nt, Artificial Sequence
  Description of Artificial Sequence: Synthetic oligonucleotide
ccgccggcccucauuggcg

SEQ ID NO: 834621 - RNA, 19 nt, Artificial Sequence
  Description of Artificial Sequence: Synthetic oligonucleotide
ugucgucaaucagguccuc

SEQ ID NO: 834622 - RNA, 19 nt, Artificial Sequence
  Description of Artificial Sequence: Synthetic oligonucleotide
cgcauuagguaucgcacca

SEQ ID NO: 834623 - RNA, 19 nt, Artificial Sequence
  Description of Artificial Sequence: Synthetic oligonucleotide
uggcaaugguggggcgucu

SEQ ID NO: 834624 - RNA, 19 nt, Artificial Sequence
  Description of Artificial Sequence: Synthetic oligonucleotide
agggcguaccaacgcucuu

SEQ ID NO: 834625 - RNA, 19 nt, Artificial Sequence
  Description of Artificial Sequence: Synthetic oligonucleotide
cguagaguagggcguacca

SEQ ID NO: 834626 - RNA, 19 nt, Artificial Sequence
  Description of Artificial Sequence: Synthetic oligonucleotide
uugcucugcccagggugau

SEQ ID NO: 834627 - RNA, 19 nt, Artificial Sequence
  Description of Artificial Sequence: Synthetic oligonucleotide
accuugcuuucgggagauc

SEQ ID NO: 834628 - RNA, 19 nt, Artificial Sequence
  Description of Artificial Sequence: Synthetic oligonucleotide
cccuucacccggguagagg

SEQ ID NO: 834629 - RNA, 19 nt, Artificial Sequence
  Description of Artificial Sequence: Synthetic oligonucleotide
gcggccugauuccacucca

SEQ ID NO: 834630 - RNA, 19 nt, Artificial Sequence
  Description of Artificial Sequence: Synthetic oligonucleotide
ggcaaugguggggcgucug

SEQ ID NO: 834631 - RNA, 19 nt, Artificial Sequence
  Description of Artificial Sequence: Synthetic oligonucleotide
ccacuacccacucugggua

SEQ ID NO: 834632 - RNA, 19 nt, Artificial Sequence
  Description of Artificial Sequence: Synthetic oligonucleotide
ggaagagcuucugcguuua

SEQ ID NO: 834633 - RNA, 19 nt, Artificial Sequence
  Description of Artificial Sequence: Synthetic oligonucleotide
ggacgaagcucgcuucugu

SEQ ID NO: 834634 - RNA, 19 nt, Artificial Sequence
  Description of Artificial Sequence: Synthetic oligonucleotide
caggccggccaucaaugua

SEQ ID NO: 834635 - RNA, 19 nt, Artificial Sequence
  Description of Artificial Sequence: Synthetic oligonucleotide
gggauaguacccagggccu

SEQ ID NO: 834636 - RNA, 19 nt, Artificial Sequence
  Description of Artificial Sequence: Synthetic oligonucleotide
cugggaaucuuuguccauu

SEQ ID NO: 834637 - RNA, 19 nt, Artificial Sequence
  Description of Artificial Sequence: Synthetic oligonucleotide
aagccgccacuuggagcca

SEQ ID NO: 834638 - RNA, 19 nt, Artificial Sequence
  Description of Artificial Sequence: Synthetic oligonucleotide
gggaaucuuuguccauucu

SEQ ID NO: 834639 - RNA, 19 nt, Artificial Sequence
  Description of Artificial Sequence: Synthetic oligonucleotide
gcuucugcguuuagggaua

SEQ ID NO: 834640 - RNA, 19 nt, Artificial Sequence
  Description of Artificial Sequence: Synthetic oligonucleotide
gcccugguuucugcuaccc

SEQ ID NO: 834641 - RNA, 19 nt, Artificial Sequence
  Description of Artificial Sequence: Synthetic oligonucleotide
ggcuggucgauccuacuuu

SEQ ID NO: 834642 - RNA, 19 nt, Artificial Sequence
  Description of Artificial Sequence: Synthetic oligonucleotide
ccacggaguuguugcuaag

SEQ ID NO: 834643 - RNA, 19 nt, Artificial Sequence
  Description of Artificial Sequence: Synthetic oligonucleotide
uaggggccuuggauaccuu

SEQ ID NO: 834644 - RNA, 19 nt, Artificial Sequence
  Description of Artificial Sequence: Synthetic oligonucleotide
gccggucagccaccgucag

SEQ ID NO: 834645 - RNA, 19 nt, Artificial Sequence
  Description of Artificial Sequence: Synthetic oligonucleotide
cguuuagggauaguaccca

SEQ ID NO: 834646 - RNA, 19 nt, Artificial Sequence
  Description of Artificial Sequence: Synthetic oligonucleotide
cacccggguagaggauuug

SEQ ID NO: 834647 - RNA, 19 nt, Artificial Sequence
  Description of Artificial Sequence: Synthetic oligonucleotide
ggccugauuccacuccacu

SEQ ID NO: 834648 - RNA, 19 nt, Artificial Sequence
  Description of Artificial Sequence: Synthetic oligonucleotide
ccgcaacacugccaggguc

SEQ ID NO: 834649 - RNA, 19 nt, Artificial Sequence
  Description of Artificial Sequence: Synthetic oligonucleotide
ccuugcuuucgggagaucu

SEQ ID NO: 834650 - RNA, 19 nt, Artificial Sequence
  Description of Artificial Sequence: Synthetic oligonucleotide
cugauccccuggagacaca

SEQ ID NO: 834651 - RNA, 19 nt, Artificial Sequence
  Description of Artificial Sequence: Synthetic oligonucleotide
ccaaaccacagggcuagga

SEQ ID NO: 834652 - RNA, 19 nt, Artificial Sequence
  Description of Artificial Sequence: Synthetic oligonucleotide
caccacggaguuguugcua

SEQ ID NO: 834653 - RNA, 19 nt, Artificial Sequence
  Description of Artificial Sequence: Synthetic oligonucleotide
ggcgacaggaggagccgca

SEQ ID NO: 834654 - RNA, 19 nt, Artificial Sequence
  Description of Artificial Sequence: Synthetic oligonucleotide
cugcuacccgccucacugu

SEQ ID NO: 834655 - RNA, 19 nt, Artificial Sequence
  Description of Artificial Sequence: Synthetic oligonucleotide
cgggaagagagucauuccu

SEQ ID NO: 834656 - RNA, 19 nt, Artificial Sequence
  Description of Artificial Sequence: Synthetic oligonucleotide
gguccucaaguagguaaua

SEQ ID NO: 834657 - RNA, 19 nt, Artificial Sequence
  Description of Artificial Sequence: Synthetic oligonucleotide
cccgccucacuguggugug

SEQ ID NO: 834658 - RNA, 19 nt, Artificial Sequence
  Description of Artificial Sequence: Synthetic oligonucleotide
cugggugcaauugccucau

SEQ ID NO: 834659 - RNA, 19 nt, Artificial Sequence
  Description of Artificial Sequence: Synthetic oligonucleotide
cugcacugucugguccuca

SEQ ID NO: 834660 - RNA, 19 nt, Artificial Sequence
  Description of Artificial Sequence: Synthetic oligonucleotide
cucgcauguccuugagcuu

SEQ ID NO: 834661 - RNA, 19 nt, Artificial Sequence
  Description of Artificial Sequence: Synthetic oligonucleotide
ccggcuuccgugagauaca

SEQ ID NO: 834662 - RNA, 19 nt, Artificial Sequence
  Description of Artificial Sequence: Synthetic oligonucleotide
ccguuugaugaaccuggaa

SEQ ID NO: 834663 - RNA, 19 nt, Artificial Sequence
  Description of Artificial Sequence: Synthetic oligonucleotide
cgaagcucgcuucuguccu

SEQ ID NO: 834664 - RNA, 19 nt, Artificial Sequence
  Description of Artificial Sequence: Synthetic oligonucleotide
cagccaccgucagcucaug

SEQ ID NO: 834665 - RNA, 19 nt, Artificial Sequence
  Description of Artificial Sequence: Synthetic oligonucleotide
gcaguacgggucagauaga

SEQ ID NO: 834666 - RNA, 19 nt, Artificial Sequence
  Description of Artificial Sequence: Synthetic oligonucleotide
ggccggccaucaauguaga

SEQ ID NO: 834667 - RNA, 19 nt, Artificial Sequence
  Description of Artificial Sequence: Synthetic oligonucleotide
cacuagcaccugccacuua

SEQ ID NO: 834668 - RNA, 19 nt, Artificial Sequence
  Description of Artificial Sequence: Synthetic oligonucleotide
ggcuuccgugagauacauc

SEQ ID NO: 834669 - RNA, 19 nt, Artificial Sequence
  Description of Artificial Sequence: Synthetic oligonucleotide
cgaaucucaggcuggcgau

SEQ ID NO: 834670 - RNA, 19 nt, Artificial Sequence
  Description of Artificial Sequence: Synthetic oligonucleotide
ccgcagggccaaagccggc

SEQ ID NO: 834671 - RNA, 19 nt, Artificial Sequence
  Description of Artificial Sequence: Synthetic oligonucleotide
gcguaccaacgcucuugaa

SEQ ID NO: 834672 - RNA, 19 nt, Artificial Sequence
  Description of Artificial Sequence: Synthetic oligonucleotide
ccccauggugaucccaccu

SEQ ID NO: 834673 - RNA, 19 nt, Artificial Sequence
  Description of Artificial Sequence: Synthetic oligonucleotide
ggccugggacgaagcucgc

SEQ ID NO: 834674 - RNA, 19 nt, Artificial Sequence
  Description of Artificial Sequence: Synthetic oligonucleotide
ccccuucacccggguagag

SEQ ID NO: 834675 - RNA, 19 nt, Artificial Sequence
  Description of Artificial Sequence: Synthetic oligonucleotide
ccugggaaucuuuguccau

SEQ ID NO: 834676 - RNA, 19 nt, Artificial Sequence
  Description of Artificial Sequence: Synthetic oligonucleotide
gguaggcuggcuggucgau

SEQ ID NO: 834677 - RNA, 19 nt, Artificial Sequence
  Description of Artificial Sequence: Synthetic oligonucleotide
ggucgacaucaaucugguu

SEQ ID NO: 834678 - RNA, 19 nt, Artificial Sequence
  Description of Artificial Sequence: Synthetic oligonucleotide
cgacaucaaucugguuguc

SEQ ID NO: 834679 - RNA, 19 nt, Artificial Sequence
  Description of Artificial Sequence: Synthetic oligonucleotide
ccuugcuaaacagggccuu

SEQ ID NO: 834680 - RNA, 19 nt, Artificial Sequence
  Description of Artificial Sequence: Synthetic oligonucleotide
gccgccacuuggagccaca

SEQ ID NO: 834681 - RNA, 19 nt, Artificial Sequence
  Description of Artificial Sequence: Synthetic oligonucleotide
ccgcggcgacaggaggagc

SEQ ID NO: 834682 - RNA, 19 nt, Artificial Sequence
  Description of Artificial Sequence: Synthetic oligonucleotide
gccugggacgaagcucgcu

SEQ ID NO: 834683 - RNA, 19 nt, Artificial Sequence
  Description of Artificial Sequence: Synthetic oligonucleotide
cgaagucuggagagcucau

SEQ ID NO: 834684 - RNA, 19 nt, Artificial Sequence
  Description of Artificial Sequence: Synthetic oligonucleotide
ccacuagcaccugccacuu

SEQ ID NO: 834685 - RNA, 19 nt, Artificial Sequence
  Description of Artificial Sequence: Synthetic oligonucleotide
cagcccggaugagggcaau

SEQ ID NO: 834686 - RNA, 19 nt, Artificial Sequence
  Description of Artificial Sequence: Synthetic oligonucleotide
cggcuuccgugagauacau

SEQ ID NO: 834687 - RNA, 19 nt, Artificial Sequence
  Description of Artificial Sequence: Synthetic oligonucleotide
ccgccacuuggagccacau

SEQ ID NO: 834688 - RNA, 19 nt, Artificial Sequence
  Description of Artificial Sequence: Synthetic oligonucleotide
cccgaacagcggccugauu

SEQ ID NO: 834689 - RNA, 19 nt, Artificial Sequence
  Description of Artificial Sequence: Synthetic oligonucleotide
uuaacacacacuuaaaugg

SEQ ID NO: 834690 - RNA, 19 nt, Artificial Sequence
  Description of Artificial Sequence: Synthetic oligonucleotide
aauuuuaagaagguaacac

SEQ ID NO: 834691 - RNA, 19 nt, Artificial Sequence
  Description of Artificial Sequence: Synthetic oligonucleotide
aagaguagcacacccaacc

SEQ ID NO: 834692 - RNA, 19 nt, Artificial Sequence
  Description of Artificial Sequence: Synthetic oligonucleotide
cauuauagccucuugaugg

SEQ ID NO: 834693 - RNA, 19 nt, Artificial Sequence
  Description of Artificial Sequence: Synthetic oligonucleotide
aauauugagaucucaguug

SEQ ID NO: 834694 - RNA, 19 nt, Artificial Sequence
  Description of Artificial Sequence: Synthetic oligonucleotide
aacggaacagaaaugacgc

SEQ ID NO: 834695 - RNA, 19 nt, Artificial Sequence
  Description of Artificial Sequence: Synthetic oligonucleotide
aucaaauaaaauuaaacau

SEQ ID NO: 834696 - RNA, 19 nt, Artificial Sequence
  Description of Artificial Sequence: Synthetic oligonucleotide
aaaucuuaagaguagcaca

SEQ ID NO: 834697 - RNA, 19 nt, Artificial Sequence
  Description of Artificial Sequence: Synthetic oligonucleotide
aauuauuaaggagaacagg

SEQ ID NO: 834698 - RNA, 19 nt, Artificial Sequence
  Description of Artificial Sequence: Synthetic oligonucleotide
uuugucucuguauugagcc

SEQ ID NO: 834699 - RNA, 19 nt, Artificial Sequence
  Description of Artificial Sequence: Synthetic oligonucleotide
auauugagaucucaguugg

SEQ ID NO: 834700 - RNA, 19 nt, Artificial Sequence
  Description of Artificial Sequence: Synthetic oligonucleotide
uuuaguauucuguaguugu

SEQ ID NO: 834701 - RNA, 19 nt, Artificial Sequence
  Description of Artificial Sequence: Synthetic oligonucleotide
acaucuauauggcugaaag

SEQ ID NO: 834702 - RNA, 19 nt, Artificial Sequence
  Description of Artificial Sequence: Synthetic oligonucleotide
uuuucuuccaaccgauagg

SEQ ID NO: 834703 - RNA, 19 nt, Artificial Sequence
  Description of Artificial Sequence: Synthetic oligonucleotide
accgauaggaauccgaggg

SEQ ID NO: 834704 - RNA, 19 nt, Artificial Sequence
  Description of Artificial Sequence: Synthetic oligonucleotide
aaacggaacagaaaugacg

SEQ ID NO: 834705 - RNA, 19 nt, Artificial Sequence
  Description of Artificial Sequence: Synthetic oligonucleotide
gagcugaucuuuuaggagg

SEQ ID NO: 834706 - RNA, 19 nt, Artificial Sequence
  Description of Artificial Sequence: Synthetic oligonucleotide
ugacuuguuaguuucucgg

SEQ ID NO: 834707 - RNA, 19 nt, Artificial Sequence
  Description of Artificial Sequence: Synthetic oligonucleotide
gguaguuuaugacagaaag

SEQ ID NO: 834708 - RNA, 19 nt, Artificial Sequence
  Description of Artificial Sequence: Synthetic oligonucleotide
aaauuauuaaggagaacag

SEQ ID NO: 834709 - RNA, 19 nt, Artificial Sequence
  Description of Artificial Sequence: Synthetic oligonucleotide
aucucgagaacuuggauag

SEQ ID NO: 834710 - RNA, 19 nt, Artificial Sequence
  Description of Artificial Sequence: Synthetic oligonucleotide
uggucuaucugcuucaacc

SEQ ID NO: 834711 - RNA, 19 nt, Artificial Sequence
  Description of Artificial Sequence: Synthetic oligonucleotide
acuuaaauggucuuauacu

SEQ ID NO: 834712 - RNA, 19 nt, Artificial Sequence
  Description of Artificial Sequence: Synthetic oligonucleotide
aaaaguuguuuguuccuag

SEQ ID NO: 834713 - RNA, 19 nt, Artificial Sequence
  Description of Artificial Sequence: Synthetic oligonucleotide
ucuaccaacgcgaucacga

SEQ ID NO: 834714 - RNA, 19 nt, Artificial Sequence
  Description of Artificial Sequence: Synthetic oligonucleotide
auuauuaaggagaacagga

SEQ ID NO: 834715 - RNA, 19 nt, Artificial Sequence
  Description of Artificial Sequence: Synthetic oligonucleotide
cauaauaucaaauaaaauu

SEQ ID NO: 834716 - RNA, 19 nt, Artificial Sequence
  Description of Artificial Sequence: Synthetic oligonucleotide
ccaaaggacaucuauaugg

SEQ ID NO: 834717 - RNA, 19 nt, Artificial Sequence
  Description of Artificial Sequence: Synthetic oligonucleotide
ugucuuuaguggaauagcc

SEQ ID NO: 834718 - RNA, 19 nt, Artificial Sequence
  Description of Artificial Sequence: Synthetic oligonucleotide
ucgucuaccacuuucaaau

SEQ ID NO: 834719 - RNA, 19 nt, Artificial Sequence
  Description of Artificial Sequence: Synthetic oligonucleotide
uccaccauaagauggcggg

SEQ ID NO: 834720 - RNA, 19 nt, Artificial Sequence
  Description of Artificial Sequence: Synthetic oligonucleotide
ucuuuuaggaggaggaccu

SEQ ID NO: 834721 - RNA, 19 nt, Artificial Sequence
  Description of Artificial Sequence: Synthetic oligonucleotide
uuguaucucgagaacuugg

SEQ ID NO: 834722 - RNA, 19 nt, Artificial Sequence
  Description of Artificial Sequence: Synthetic oligonucleotide
aauugccgagucuggaaac

SEQ ID NO: 834723 - RNA, 19 nt, Artificial Sequence
  Description of Artificial Sequence: Synthetic oligonucleotide
aauucaucccucaauggag

SEQ ID NO: 834724 - RNA, 19 nt, Artificial Sequence
  Description of Artificial Sequence: Synthetic oligonucleotide
uuuccauucaugucucggg

SEQ ID NO: 834725 - RNA, 19 nt, Artificial Sequence
  Description of Artificial Sequence: Synthetic oligonucleotide
cuuggguaguuuaugacag

SEQ ID NO: 834726 - RNA, 19 nt, Artificial Sequence
  Description of Artificial Sequence: Synthetic oligonucleotide
cagaaaugacgcuaggacg

SEQ ID NO: 834727 - RNA, 19 nt, Artificial Sequence
  Description of Artificial Sequence: Synthetic oligonucleotide
gaaauuuuaagaagguaac

SEQ ID NO: 834728 - RNA, 19 nt, Artificial Sequence
  Description of Artificial Sequence: Synthetic oligonucleotide
ugucauuauagccucuuga

SEQ ID NO: 834729 - RNA, 19 nt, Artificial Sequence
  Description of Artificial Sequence: Synthetic oligonucleotide
uuaagaguagcacacccaa

SEQ ID NO: 834730 - RNA, 19 nt, Artificial Sequence
  Description of Artificial Sequence: Synthetic oligonucleotide
aauaaagagcuuuccuggu

SEQ ID NO: 834731 - RNA, 19 nt, Artificial Sequence
  Description of Artificial Sequence: Synthetic oligonucleotide
uaguuuaugacagaaaguu

SEQ ID NO: 834732 - RNA, 19 nt, Artificial Sequence
  Description of Artificial Sequence: Synthetic oligonucleotide
ugaaaucuuaagaguagca

SEQ ID NO: 834733 - RNA, 19 nt, Artificial Sequence
  Description of Artificial Sequence: Synthetic oligonucleotide
aagaucuuaggauugcuuu

SEQ ID NO: 834734 - RNA, 19 nt, Artificial Sequence
  Description of Artificial Sequence: Synthetic oligonucleotide
aguggaauagccaucaucu

SEQ ID NO: 834735 - RNA, 19 nt, Artificial Sequence
  Description of Artificial Sequence: Synthetic oligonucleotide
uggaauagccaucaucucu

SEQ ID NO: 834736 - RNA, 19 nt, Artificial Sequence
  Description of Artificial Sequence: Synthetic oligonucleotide
ucuuuaguggaauagccau

SEQ ID NO: 834737 - RNA, 19 nt, Artificial Sequence
  Description of Artificial Sequence: Synthetic oligonucleotide
aaauuuuaagaagguaaca

SEQ ID NO: 834738 - RNA, 19 nt, Artificial Sequence
  Description of Artificial Sequence: Synthetic oligonucleotide
cacccugaaaucuuaagag

SEQ ID NO: 834739 - RNA, 19 nt, Artificial Sequence
  Description of Artificial Sequence: Synthetic oligonucleotide
guuuaugacagaaaguuuc

SEQ ID NO: 834740 - RNA, 19 nt, Artificial Sequence
  Description of Artificial Sequence: Synthetic oligonucleotide
cuguaguuguuuaacacac

SEQ ID NO: 834741 - RNA, 19 nt, Artificial Sequence
  Description of Artificial Sequence: Synthetic oligonucleotide
aacgagggcgaacaaagga

SEQ ID NO: 834742 - RNA, 19 nt, Artificial Sequence
  Description of Artificial Sequence: Synthetic oligonucleotide
uugacuuguuaguuucucg

SEQ ID NO: 834743 - RNA, 19 nt, Artificial Sequence
  Description of Artificial Sequence: Synthetic oligonucleotide
cuauauggcugaaaguuug

SEQ ID NO: 834744 - RNA, 19 nt, Artificial Sequence
  Description of Artificial Sequence: Synthetic oligonucleotide
gaaaucuuaagaguagcac

SEQ ID NO: 834745 - RNA, 19 nt, Artificial Sequence
  Description of Artificial Sequence: Synthetic oligonucleotide
cacuuaaauggucuuauac

SEQ ID NO: 834746 - RNA, 19 nt, Artificial Sequence
  Description of Artificial Sequence: Synthetic oligonucleotide
auaaagagcuuuccugguc

SEQ ID NO: 834747 - RNA, 19 nt, Artificial Sequence
  Description of Artificial Sequence: Synthetic oligonucleotide
guaguuguuuaacacacac

SEQ ID NO: 834748 - RNA, 19 nt, Artificial Sequence
  Description of Artificial Sequence: Synthetic oligonucleotide
ucugcgagagggaaggggc

SEQ ID NO: 834749 - RNA, 19 nt, Artificial Sequence
  Description of Artificial Sequence: Synthetic oligonucleotide
cuagcuugucuacauaggc

SEQ ID NO: 834750 - RNA, 19 nt, Artificial Sequence
  Description of Artificial Sequence: Synthetic oligonucleotide
agcuagcuugucuacauag

SEQ ID NO: 834751 - RNA, 19 nt, Artificial Sequence
  Description of Artificial Sequence: Synthetic oligonucleotide
uaacacacacuuaaauggu

SEQ ID NO: 834752 - RNA, 19 nt, Artificial Sequence
  Description of Artificial Sequence: Synthetic oligonucleotide
aaccgauaggaauccgagg

SEQ ID NO: 834753 - RNA, 19 nt, Artificial Sequence
  Description of Artificial Sequence: Synthetic oligonucleotide
uguaucucgagaacuugga

SEQ ID NO: 834754 - RNA, 19 nt, Artificial Sequence
  Description of Artificial Sequence: Synthetic oligonucleotide
gauugcuuuccucauuuac

SEQ ID NO: 834755 - RNA, 19 nt, Artificial Sequence
  Description of Artificial Sequence: Synthetic oligonucleotide
aaaguuguuuguuccuagu

SEQ ID NO: 834756 - RNA, 19 nt, Artificial Sequence
  Description of Artificial Sequence: Synthetic oligonucleotide
uguagguggagcacuacgu

SEQ ID NO: 834757 - RNA, 19 nt, Artificial Sequence
  Description of Artificial Sequence: Synthetic oligonucleotide
aucuauauggcugaaaguu

SEQ ID NO: 834758 - RNA, 19 nt, Artificial Sequence
  Description of Artificial Sequence: Synthetic oligonucleotide
agcacuuccacuauucguc

SEQ ID NO: 834759 - RNA, 19 nt, Artificial Sequence
  Description of Artificial Sequence: Synthetic oligonucleotide
gaaaguuuguggaagaucu

SEQ ID NO: 834760 - RNA, 19 nt, Artificial Sequence
  Description of Artificial Sequence: Synthetic oligonucleotide
ucuuccaaccgauaggaau

SEQ ID NO: 834761 - RNA, 19 nt, Artificial Sequence
  Description of Artificial Sequence: Synthetic oligonucleotide
aguuucucgguccuucauc

SEQ ID NO: 834762 - RNA, 19 nt, Artificial Sequence
  Description of Artificial Sequence: Synthetic oligonucleotide
guuuguggaagaucuuagg

SEQ ID NO: 834763 - RNA, 19 nt, Artificial Sequence
  Description of Artificial Sequence: Synthetic oligonucleotide
ucucgaauagcuagcuagc

SEQ ID NO: 834764 - RNA, 19 nt, Artificial Sequence
  Description of Artificial Sequence: Synthetic oligonucleotide
aaaaucaggaaguggccuu

SEQ ID NO: 834765 - RNA, 19 nt, Artificial Sequence
  Description of Artificial Sequence: Synthetic oligonucleotide
cuuccaaccgauaggaauc

SEQ ID NO: 834766 - RNA, 19 nt, Artificial Sequence
  Description of Artificial Sequence: Synthetic oligonucleotide
uauucuguaguuguuuaac

SEQ ID NO: 834767 - RNA, 19 nt, Artificial Sequence
  Description of Artificial Sequence: Synthetic oligonucleotide
uacgagcucgcccacgggg

SEQ ID NO: 834768 - RNA, 19 nt, Artificial Sequence
  Description of Artificial Sequence: Synthetic oligonucleotide
cuuggauagucucugcuug

SEQ ID NO: 834769 - RNA, 19 nt, Artificial Sequence
  Description of Artificial Sequence: Synthetic oligonucleotide
uaucucgagaacuuggaua

SEQ ID NO: 834770 - RNA, 19 nt, Artificial Sequence
  Description of Artificial Sequence: Synthetic oligonucleotide
ucaaggcuuacacauuuaa

SEQ ID NO: 834771 - RNA, 19 nt, Artificial Sequence
  Description of Artificial Sequence: Synthetic oligonucleotide
aguagcacacccaaccaac

SEQ ID NO: 834772 - RNA, 19 nt, Artificial Sequence
  Description of Artificial Sequence: Synthetic oligonucleotide
gaucuuaggauugcuuucc

SEQ ID NO: 834773 - RNA, 19 nt, Artificial Sequence
  Description of Artificial Sequence: Synthetic oligonucleotide
uuccauucaugucucgggc

SEQ ID NO: 834774 - RNA, 19 nt, Artificial Sequence
  Description of Artificial Sequence: Synthetic oligonucleotide
auagcuagcuagcuugucu

SEQ ID NO: 834775 - RNA, 19 nt, Artificial Sequence
  Description of Artificial Sequence: Synthetic oligonucleotide
aaugacgcuaggacgacug

SEQ ID NO: 834776 - RNA, 19 nt, Artificial Sequence
  Description of Artificial Sequence: Synthetic oligonucleotide
agaaaugacgcuaggacga

SEQ ID NO: 834777 - RNA, 19 nt, Artificial Sequence
  Description of Artificial Sequence: Synthetic oligonucleotide
aaaucaggaaguggccuuc

SEQ ID NO: 834778 - RNA, 19 nt, Artificial Sequence
  Description of Artificial Sequence: Synthetic oligonucleotide
uauuuaguauucuguaguu

SEQ ID NO: 834779 - RNA, 19 nt, Artificial Sequence
  Description of Artificial Sequence: Synthetic oligonucleotide
uagcuugucuacauaggca

SEQ ID NO: 834780 - RNA, 19 nt, Artificial Sequence
  Description of Artificial Sequence: Synthetic oligonucleotide
gugaauauugagaucucag

SEQ ID NO: 834781 - RNA, 19 nt, Artificial Sequence
  Description of Artificial Sequence: Synthetic oligonucleotide
ugacaauugccgagucugg

SEQ ID NO: 834782 - RNA, 19 nt, Artificial Sequence
  Description of Artificial Sequence: Synthetic oligonucleotide
uuuaggaggaggaccucca

SEQ ID NO: 834783 - RNA, 19 nt, Artificial Sequence
  Description of Artificial Sequence: Synthetic oligonucleotide
caugucucgggcagcaucc

SEQ ID NO: 834784 - RNA, 19 nt, Artificial Sequence
  Description of Artificial Sequence: Synthetic oligonucleotide
cuugugaauauugagaucu

SEQ ID NO: 834785 - RNA, 19 nt, Artificial Sequence
  Description of Artificial Sequence: Synthetic oligonucleotide
uggaaacggaacagaaaug

SEQ ID NO: 834786 - RNA, 19 nt, Artificial Sequence
  Description of Artificial Sequence: Synthetic oligonucleotide
cugacaauugccgagucug

SEQ ID NO: 834787 - RNA, 19 nt, Artificial Sequence
  Description of Artificial Sequence: Synthetic oligonucleotide
gacgacugcgcaacgaggg

SEQ ID NO: 834788 - RNA, 19 nt, Artificial Sequence
  Description of Artificial Sequence: Synthetic oligonucleotide
ucuauauggcugaaaguuu

SEQ ID NO: 834789 - RNA, 19 nt, Artificial Sequence
  Description of Artificial Sequence: Synthetic oligonucleotide
ugucuacauaggcagggca

SEQ ID NO: 834790 - RNA, 19 nt, Artificial Sequence
  Description of Artificial Sequence: Synthetic oligonucleotide
uccuucaucaaaagcacuu

SEQ ID NO: 834791 - RNA, 19 nt, Artificial Sequence
  Description of Artificial Sequence: Synthetic oligonucleotide
uaaucucuuguaucucgag

SEQ ID NO: 834792 - RNA, 19 nt, Artificial Sequence
  Description of Artificial Sequence: Synthetic oligonucleotide
uguuuaacacacacuuaaa

SEQ ID NO: 834793 - RNA, 19 nt, Artificial Sequence
  Description of Artificial Sequence: Synthetic oligonucleotide
uuuuaggaggaggaccucc

SEQ ID NO: 834794 - RNA, 19 nt, Artificial Sequence
  Description of Artificial Sequence: Synthetic oligonucleotide
agaacuuggauagucucug

SEQ ID NO: 834795 - RNA, 19 nt, Artificial Sequence
  Description of Artificial Sequence: Synthetic oligonucleotide
ugugaauauugagaucuca

SEQ ID NO: 834796 - RNA, 19 nt, Artificial Sequence
  Description of Artificial Sequence: Synthetic oligonucleotide
ucuggaaacggaacagaaa

SEQ ID NO: 834797 - RNA, 19 nt, Artificial Sequence
  Description of Artificial Sequence: Synthetic oligonucleotide
aggagcugaucuuuuagga

SEQ ID NO: 834798 - RNA, 19 nt, Artificial Sequence
  Description of Artificial Sequence: Synthetic oligonucleotide
ucuuguaucucgagaacuu

SEQ ID NO: 834799 - RNA, 19 nt, Artificial Sequence
  Description of Artificial Sequence: Synthetic oligonucleotide
aaccaacccucucgaauag

SEQ ID NO: 834800 - RNA, 19 nt, Artificial Sequence
  Description of Artificial Sequence: Synthetic oligonucleotide
ggcaauucaucccucaaug

SEQ ID NO: 834801 - RNA, 19 nt, Artificial Sequence
  Description of Artificial Sequence: Synthetic oligonucleotide
ugguaaaauucauggaaua

SEQ ID NO: 834802 - RNA, 19 nt, Artificial Sequence
  Description of Artificial Sequence: Synthetic oligonucleotide
aauagcuagcuagcuuguc

SEQ ID NO: 834803 - RNA, 19 nt, Artificial Sequence
  Description of Artificial Sequence: Synthetic oligonucleotide
uuuguuugaauggggauuu

SEQ ID NO: 834804 - RNA, 19 nt, Artificial Sequence
  Description of Artificial Sequence: Synthetic oligonucleotide
auauccgucacgugagcug

SEQ ID NO: 834805 - RNA, 19 nt, Artificial Sequence
  Description of Artificial Sequence: Synthetic oligonucleotide
uauauggcugaaaguuugu

SEQ ID NO: 834806 - RNA, 19 nt, Artificial Sequence
  Description of Artificial Sequence: Synthetic oligonucleotide
uguuuguuugaauggggau

SEQ ID NO: 834807 - RNA, 19 nt, Artificial Sequence
  Description of Artificial Sequence: Synthetic oligonucleotide
caaggcuuacacauuuaac

SEQ ID NO: 834808 - RNA, 19 nt, Artificial Sequence
  Description of Artificial Sequence: Synthetic oligonucleotide
ugcgacggucucaagcucc

SEQ ID NO: 834809 - RNA, 19 nt, Artificial Sequence
  Description of Artificial Sequence: Synthetic oligonucleotide
acggucucaagcuccuacg

SEQ ID NO: 834810 - RNA, 19 nt, Artificial Sequence
  Description of Artificial Sequence: Synthetic oligonucleotide
aaguuuguggaagaucuua

SEQ ID NO: 834811 - RNA, 19 nt, Artificial Sequence
  Description of Artificial Sequence: Synthetic oligonucleotide
ucucuuguaucucgagaac

SEQ ID NO: 834812 - RNA, 19 nt, Artificial Sequence
  Description of Artificial Sequence: Synthetic oligonucleotide
ucucgguccuucaucaaaa

SEQ ID NO: 834813 - RNA, 19 nt, Artificial Sequence
  Description of Artificial Sequence: Synthetic oligonucleotide
cacccaaccaacccucucg

SEQ ID NO: 834814 - RNA, 19 nt, Artificial Sequence
  Description of Artificial Sequence: Synthetic oligonucleotide
ugacgcuaggacgacugcg

SEQ ID NO: 834815 - RNA, 19 nt, Artificial Sequence
  Description of Artificial Sequence: Synthetic oligonucleotide
aggacgacugcgcaacgag

SEQ ID NO: 834816 - RNA, 19 nt, Artificial Sequence
  Description of Artificial Sequence: Synthetic oligonucleotide
uaccaacgcgaucacgacc

SEQ ID NO: 834817 - RNA, 19 nt, Artificial Sequence
  Description of Artificial Sequence: Synthetic oligonucleotide
uauccgucacgugagcugc

SEQ ID NO: 834818 - RNA, 19 nt, Artificial Sequence
  Description of Artificial Sequence: Synthetic oligonucleotide
agcuagcuagcuugucuac

SEQ ID NO: 834819 - RNA, 19 nt, Artificial Sequence
  Description of Artificial Sequence: Synthetic oligonucleotide
uuaguauucuguaguuguu

SEQ ID NO: 834820 - RNA, 19 nt, Artificial Sequence
  Description of Artificial Sequence: Synthetic oligonucleotide
cugucuuuaguggaauagc

SEQ ID NO: 834821 - RNA, 19 nt, Artificial Sequence
  Description of Artificial Sequence: Synthetic oligonucleotide
uggucuuauacuugugaau

SEQ ID NO: 834822 - RNA, 19 nt, Artificial Sequence
  Description of Artificial Sequence: Synthetic oligonucleotide
cuuuaguggaauagccauc

SEQ ID NO: 834823 - RNA, 19 nt, Artificial Sequence
  Description of Artificial Sequence: Synthetic oligonucleotide
uucucgguccuucaucaaa

SEQ ID NO: 834824 - RNA, 19 nt, Artificial Sequence
  Description of Artificial Sequence: Synthetic oligonucleotide
agaguagcacacccaacca

SEQ ID NO: 834825 - RNA, 19 nt, Artificial Sequence
  Description of Artificial Sequence: Synthetic oligonucleotide
uaagaguagcacacccaac

SEQ ID NO: 834826 - RNA, 19 nt, Artificial Sequence
  Description of Artificial Sequence: Synthetic oligonucleotide
gagucuggaaacggaacag

SEQ ID NO: 834827 - RNA, 19 nt, Artificial Sequence
  Description of Artificial Sequence: Synthetic oligonucleotide
auaggcagggcaauucauc

SEQ ID NO: 834828 - RNA, 19 nt, Artificial Sequence
  Description of Artificial Sequence: Synthetic oligonucleotide
agcacacccaaccaacccu

SEQ ID NO: 834829 - RNA, 19 nt, Artificial Sequence
  Description of Artificial Sequence: Synthetic oligonucleotide
uuuccaucuaaggacuuuc

SEQ ID NO: 834830 - RNA, 19 nt, Artificial Sequence
  Description of Artificial Sequence: Synthetic oligonucleotide
ggaaacggaacagaaauga

SEQ ID NO: 834831 - RNA, 19 nt, Artificial Sequence
  Description of Artificial Sequence: Synthetic oligonucleotide
auugccgagucuggaaacg

SEQ ID NO: 834832 - RNA, 19 nt, Artificial Sequence
  Description of Artificial Sequence: Synthetic oligonucleotide
aauggagaccaaaggacau

SEQ ID NO: 834833 - RNA, 19 nt, Artificial Sequence
  Description of Artificial Sequence: Synthetic oligonucleotide
ugcgcaacgagggcgaaca

SEQ ID NO: 834834 - RNA, 19 nt, Artificial Sequence
  Description of Artificial Sequence: Synthetic oligonucleotide
uuaggauugcuuuccucau

SEQ ID NO: 834835 - RNA, 19 nt, Artificial Sequence
  Description of Artificial Sequence: Synthetic oligonucleotide
ucuuauacuugugaauauu

SEQ ID NO: 834836 - RNA, 19 nt, Artificial Sequence
  Description of Artificial Sequence: Synthetic oligonucleotide
ugggauggucugaauaguc

SEQ ID NO: 834837 - RNA, 19 nt, Artificial Sequence
  Description of Artificial Sequence: Synthetic oligonucleotide
aggauugcuuuccucauuu

SEQ ID NO: 834838 - RNA, 19 nt, Artificial Sequence
  Description of Artificial Sequence: Synthetic oligonucleotide
acgacugcgcaacgagggc

SEQ ID NO: 834839 - RNA, 19 nt, Artificial Sequence
  Description of Artificial Sequence: Synthetic oligonucleotide
augacgcuaggacgacugc

SEQ ID NO: 834840 - RNA, 19 nt, Artificial Sequence
  Description of Artificial Sequence: Synthetic oligonucleotide
gcaauucaucccucaaugg

SEQ ID NO: 834841 - RNA, 19 nt, Artificial Sequence
  Description of Artificial Sequence: Synthetic oligonucleotide
uggguaguuuaugacagaa

SEQ ID NO: 834842 - RNA, 19 nt, Artificial Sequence
  Description of Artificial Sequence: Synthetic oligonucleotide
ggagcugaucuuuuaggag

SEQ ID NO: 834843 - RNA, 19 nt, Artificial Sequence
  Description of Artificial Sequence: Synthetic oligonucleotide
gaaacggaacagaaaugac

SEQ ID NO: 834844 - RNA, 19 nt, Artificial Sequence
  Description of Artificial Sequence: Synthetic oligonucleotide
agagcuuuccuggucuauc

SEQ ID NO: 834845 - RNA, 19 nt, Artificial Sequence
  Description of Artificial Sequence: Synthetic oligonucleotide
auccaugugcccuccacgu

SEQ ID NO: 834846 - RNA, 19 nt, Artificial Sequence
  Description of Artificial Sequence: Synthetic oligonucleotide
ucgaauagcuagcuagcuu

SEQ ID NO: 834847 - RNA, 19 nt, Artificial Sequence
  Description of Artificial Sequence: Synthetic oligonucleotide
uauugagaucucaguugga

SEQ ID NO: 834848 - RNA, 19 nt, Artificial Sequence
  Description of Artificial Sequence: Synthetic oligonucleotide
gaccaaaggacaucuauau

SEQ ID NO: 834849 - RNA, 19 nt, Artificial Sequence
  Description of Artificial Sequence: Synthetic oligonucleotide
cgaauagcuagcuagcuug

SEQ ID NO: 834850 - RNA, 19 nt, Artificial Sequence
  Description of Artificial Sequence: Synthetic oligonucleotide
acgagggcgaacaaaggag

SEQ ID NO: 834851 - RNA, 19 nt, Artificial Sequence
  Description of Artificial Sequence: Synthetic oligonucleotide
uugucucuguauugagccc

SEQ ID NO: 834852 - RNA, 19 nt, Artificial Sequence
  Description of Artificial Sequence: Synthetic oligonucleotide
augguaaaauucauggaau

SEQ ID NO: 834853 - RNA, 19 nt, Artificial Sequence
  Description of Artificial Sequence: Synthetic oligonucleotide
agcaccgcaccacugacaa

SEQ ID NO: 834854 - RNA, 19 nt, Artificial Sequence
  Description of Artificial Sequence: Synthetic oligonucleotide
caccauauccgucacguga

SEQ ID NO: 834855 - RNA, 19 nt, Artificial Sequence
  Description of Artificial Sequence: Synthetic oligonucleotide
acaauugccgagucuggaa

SEQ ID NO: 834856 - RNA, 19 nt, Artificial Sequence
  Description of Artificial Sequence: Synthetic oligonucleotide
auauccgucucugucauua

SEQ ID NO: 834857 - RNA, 19 nt, Artificial Sequence
  Description of Artificial Sequence: Synthetic oligonucleotide
gacgcuaggacgacugcgc

SEQ ID NO: 834858 - RNA, 19 nt, Artificial Sequence
  Description of Artificial Sequence: Synthetic oligonucleotide
ugccucaagcgcuuucuca

SEQ ID NO: 834859 - RNA, 19 nt, Artificial Sequence
  Description of Artificial Sequence: Synthetic oligonucleotide
uagcuagcuagcuugucua

SEQ ID NO: 834860 - RNA, 19 nt, Artificial Sequence
  Description of Artificial Sequence: Synthetic oligonucleotide
accauauccgucacgugag

SEQ ID NO: 834861 - RNA, 19 nt, Artificial Sequence
  Description of Artificial Sequence: Synthetic oligonucleotide
gcaacgagggcgaacaaag

SEQ ID NO: 834862 - RNA, 19 nt, Artificial Sequence
  Description of Artificial Sequence: Synthetic oligonucleotide
acugacaauugccgagucu

SEQ ID NO: 834863 - RNA, 19 nt, Artificial Sequence
  Description of Artificial Sequence: Synthetic oligonucleotide
gagaucucaguuggaagac

SEQ ID NO: 834864 - RNA, 19 nt, Artificial Sequence
  Description of Artificial Sequence: Synthetic oligonucleotide
cuuccgagcagcaccgcac

SEQ ID NO: 834865 - RNA, 19 nt, Artificial Sequence
  Description of Artificial Sequence: Synthetic oligonucleotide
acuuuccauucaugucucg

SEQ ID NO: 834866 - RNA, 19 nt, Artificial Sequence
  Description of Artificial Sequence: Synthetic oligonucleotide
uuccgagcagcaccgcacc

SEQ ID NO: 834867 - RNA, 19 nt, Artificial Sequence
  Description of Artificial Sequence: Synthetic oligonucleotide
caucccucaauggagacca

SEQ ID NO: 834868 - RNA, 19 nt, Artificial Sequence
  Description of Artificial Sequence: Synthetic oligonucleotide
gggcgaacaaaggagacag

SEQ ID NO: 834869 - RNA, 19 nt, Artificial Sequence
  Description of Artificial Sequence: Synthetic oligonucleotide
ccuuuuaguaguccuuggg

SEQ ID NO: 834870 - RNA, 19 nt, Artificial Sequence
  Description of Artificial Sequence: Synthetic oligonucleotide
uacauaggcagggcaauuc

SEQ ID NO: 834871 - RNA, 19 nt, Artificial Sequence
  Description of Artificial Sequence: Synthetic oligonucleotide
auauggcugaaaguuugug

SEQ ID NO: 834872 - RNA, 19 nt, Artificial Sequence
  Description of Artificial Sequence: Synthetic oligonucleotide
uuccaaccgauaggaaucc

SEQ ID NO: 834873 - RNA, 19 nt, Artificial Sequence
  Description of Artificial Sequence: Synthetic oligonucleotide
uuccaccauauccgucacg

SEQ ID NO: 834874 - RNA, 19 nt, Artificial Sequence
  Description of Artificial Sequence: Synthetic oligonucleotide
caacgagggcgaacaaagg

SEQ ID NO: 834875 - RNA, 19 nt, Artificial Sequence
  Description of Artificial Sequence: Synthetic oligonucleotide
uugccgagucuggaaacgg

SEQ ID NO: 834876 - RNA, 19 nt, Artificial Sequence
  Description of Artificial Sequence: Synthetic oligonucleotide
ucuacauaggcagggcaau

SEQ ID NO: 834877 - RNA, 19 nt, Artificial Sequence
  Description of Artificial Sequence: Synthetic oligonucleotide
cuuuuaguaguccuugggu

SEQ ID NO: 834878 - RNA, 19 nt, Artificial Sequence
  Description of Artificial Sequence: Synthetic oligonucleotide
ucaucccucaauggagacc

SEQ ID NO: 834879 - RNA, 19 nt, Artificial Sequence
  Description of Artificial Sequence: Synthetic oligonucleotide
aaagagcuuuccuggucua

SEQ ID NO: 834880 - RNA, 19 nt, Artificial Sequence
  Description of Artificial Sequence: Synthetic oligonucleotide
auaaucucuuguaucucga

SEQ ID NO: 834881 - RNA, 19 nt, Artificial Sequence
  Description of Artificial Sequence: Synthetic oligonucleotide
ugaaggagcugaucuuuua

SEQ ID NO: 834882 - RNA, 19 nt, Artificial Sequence
  Description of Artificial Sequence: Synthetic oligonucleotide
cuuccaccauaagauggcg

SEQ ID NO: 834883 - RNA, 19 nt, Artificial Sequence
  Description of Artificial Sequence: Synthetic oligonucleotide
acacccaaccaacccucuc

SEQ ID NO: 834884 - RNA, 19 nt, Artificial Sequence
  Description of Artificial Sequence: Synthetic oligonucleotide
uuggguaguuuaugacaga

SEQ ID NO: 834885 - RNA, 19 nt, Artificial Sequence
  Description of Artificial Sequence: Synthetic oligonucleotide
aggagaacaggaaauuuua

SEQ ID NO: 834886 - RNA, 19 nt, Artificial Sequence
  Description of Artificial Sequence: Synthetic oligonucleotide
cuaccaacgcgaucacgac

SEQ ID NO: 834887 - RNA, 19 nt, Artificial Sequence
  Description of Artificial Sequence: Synthetic oligonucleotide
gaguagcacacccaaccaa

SEQ ID NO: 834888 - RNA, 19 nt, Artificial Sequence
  Description of Artificial Sequence: Synthetic oligonucleotide
ugccgagucuggaaacgga

SEQ ID NO: 834889 - RNA, 19 nt, Artificial Sequence
  Description of Artificial Sequence: Synthetic oligonucleotide
ucugucauuauagccucuu

SEQ ID NO: 834890 - RNA, 19 nt, Artificial Sequence
  Description of Artificial Sequence: Synthetic oligonucleotide
gucuuuaguggaauagcca

SEQ ID NO: 834891 - RNA, 19 nt, Artificial Sequence
  Description of Artificial Sequence: Synthetic oligonucleotide
aaaugacgcuaggacgacu

SEQ ID NO: 834892 - RNA, 19 nt, Artificial Sequence
  Description of Artificial Sequence: Synthetic oligonucleotide
acccucucgaauagcuagc

SEQ ID NO: 834893 - RNA, 19 nt, Artificial Sequence
  Description of Artificial Sequence: Synthetic oligonucleotide
auucaugucucgggcagca

SEQ ID NO: 834894 - RNA, 19 nt, Artificial Sequence
  Description of Artificial Sequence: Synthetic oligonucleotide
accgucauccaugugcccu

SEQ ID NO: 834895 - RNA, 19 nt, Artificial Sequence
  Description of Artificial Sequence: Synthetic oligonucleotide
ggucucaagcuccuacgag

SEQ ID NO: 834896 - RNA, 19 nt, Artificial Sequence
  Description of Artificial Sequence: Synthetic oligonucleotide
cugucauuauagccucuug

SEQ ID NO: 834897 - RNA, 19 nt, Artificial Sequence
  Description of Artificial Sequence: Synthetic oligonucleotide
accaacccucucgaauagc

SEQ ID NO: 834898 - RNA, 19 nt, Artificial Sequence
  Description of Artificial Sequence: Synthetic oligonucleotide
acgagcucgcccacggggc

SEQ ID NO: 834899 - RNA, 19 nt, Artificial Sequence
  Description of Artificial Sequence: Synthetic oligonucleotide
gaaaugacgcuaggacgac

SEQ ID NO: 834900 - RNA, 19 nt, Artificial Sequence
  Description of Artificial Sequence: Synthetic oligonucleotide
cccucaauggagaccaaag

SEQ ID NO: 834901 - RNA, 19 nt, Artificial Sequence
  Description of Artificial Sequence: Synthetic oligonucleotide
guagcacacccaaccaacc

SEQ ID NO: 834902 - RNA, 19 nt, Artificial Sequence
  Description of Artificial Sequence: Synthetic oligonucleotide
aguuuaugacagaaaguuu

SEQ ID NO: 834903 - RNA, 19 nt, Artificial Sequence
  Description of Artificial Sequence: Synthetic oligonucleotide
gacaauugccgagucugga

SEQ ID NO: 834904 - RNA, 19 nt, Artificial Sequence
  Description of Artificial Sequence: Synthetic oligonucleotide
uaguuucucgguccuucau

SEQ ID NO: 834905 - RNA, 19 nt, Artificial Sequence
  Description of Artificial Sequence: Synthetic oligonucleotide
uccaaccgauaggaauccg

SEQ ID NO: 834906 - RNA, 19 nt, Artificial Sequence
  Description of Artificial Sequence: Synthetic oligonucleotide
acggaacagaaaugacgcu

SEQ ID NO: 834907 - RNA, 19 nt, Artificial Sequence
  Description of Artificial Sequence: Synthetic oligonucleotide
ggcugcgacggucucaagc

SEQ ID NO: 834908 - RNA, 19 nt, Artificial Sequence
  Description of Artificial Sequence: Synthetic oligonucleotide
caauugccgagucuggaaa

SEQ ID NO: 834909 - RNA, 19 nt, Artificial Sequence
  Description of Artificial Sequence: Synthetic oligonucleotide
uucuuccaaccgauaggaa

SEQ ID NO: 834910 - RNA, 19 nt, Artificial Sequence
  Description of Artificial Sequence: Synthetic oligonucleotide
guaguuuaugacagaaagu

SEQ ID NO: 834911 - RNA, 19 nt, Artificial Sequence
  Description of Artificial Sequence: Synthetic oligonucleotide
ccauucaugucucgggcag

SEQ ID NO: 834912 - RNA, 19 nt, Artificial Sequence
  Description of Artificial Sequence: Synthetic oligonucleotide
agaccaaaggacaucuaua

SEQ ID NO: 834913 - RNA, 19 nt, Artificial Sequence
  Description of Artificial Sequence: Synthetic oligonucleotide
aagacacccugaaaucuua

SEQ ID NO: 834914 - RNA, 19 nt, Artificial Sequence
  Description of Artificial Sequence: Synthetic oligonucleotide
agcugaucuuuuaggagga

SEQ ID NO: 834915 - RNA, 19 nt, Artificial Sequence
  Description of Artificial Sequence: Synthetic oligonucleotide
guccucgucuaccacuuuc

SEQ ID NO: 834916 - RNA, 19 nt, Artificial Sequence
  Description of Artificial Sequence: Synthetic oligonucleotide
aaaguuuguggaagaucuu

SEQ ID NO: 834917 - RNA, 19 nt, Artificial Sequence
  Description of Artificial Sequence: Synthetic oligonucleotide
guggaauagccaucaucuc

SEQ ID NO: 834918 - RNA, 19 nt, Artificial Sequence
  Description of Artificial Sequence: Synthetic oligonucleotide
gagggcgaacaaaggagac

SEQ ID NO: 834919 - RNA, 19 nt, Artificial Sequence
  Description of Artificial Sequence: Synthetic oligonucleotide
cgucucugucauuauagcc

SEQ ID NO: 834920 - RNA, 19 nt, Artificial Sequence
  Description of Artificial Sequence: Synthetic oligonucleotide
gaaguggccuucagggaca

SEQ ID NO: 834921 - RNA, 19 nt, Artificial Sequence
  Description of Artificial Sequence: Synthetic oligonucleotide
guaguccucgucuaccacu

SEQ ID NO: 834922 - RNA, 19 nt, Artificial Sequence
  Description of Artificial Sequence: Synthetic oligonucleotide
acacuuaaauggucuuaua

SEQ ID NO: 834923 - RNA, 19 nt, Artificial Sequence
  Description of Artificial Sequence: Synthetic oligonucleotide
cuaggacgacugcgcaacg

SEQ ID NO: 834924 - RNA, 19 nt, Artificial Sequence
  Description of Artificial Sequence: Synthetic oligonucleotide
agggcaauucaucccucaa

SEQ ID NO: 834925 - RNA, 19 nt, Artificial Sequence
  Description of Artificial Sequence: Synthetic oligonucleotide
gcuccuacgagcucgccca

SEQ ID NO: 834926 - RNA, 19 nt, Artificial Sequence
  Description of Artificial Sequence: Synthetic oligonucleotide
aagagcuuuccuggucuau

SEQ ID NO: 834927 - RNA, 19 nt, Artificial Sequence
  Description of Artificial Sequence: Synthetic oligonucleotide
uaggacgacugcgcaacga

SEQ ID NO: 834928 - RNA, 19 nt, Artificial Sequence
  Description of Artificial Sequence: Synthetic oligonucleotide
ucauagcgacugcuuccac

SEQ ID NO: 834929 - RNA, 19 nt, Artificial Sequence
  Description of Artificial Sequence: Synthetic oligonucleotide
agggcgaacaaaggagaca

SEQ ID NO: 834930 - RNA, 19 nt, Artificial Sequence
  Description of Artificial Sequence: Synthetic oligonucleotide
cauucaugucucgggcagc

SEQ ID NO: 834931 - RNA, 19 nt, Artificial Sequence
  Description of Artificial Sequence: Synthetic oligonucleotide
ucacuucggcugcuugagu

SEQ ID NO: 834932 - RNA, 19 nt, Artificial Sequence
  Description of Artificial Sequence: Synthetic oligonucleotide
gucuaccaacgcgaucacg

SEQ ID NO: 834933 - RNA, 19 nt, Artificial Sequence
  Description of Artificial Sequence: Synthetic oligonucleotide
ccaccgucauccaugugcc

SEQ ID NO: 834934 - RNA, 19 nt, Artificial Sequence
  Description of Artificial Sequence: Synthetic oligonucleotide
gucuacauaggcagggcaa

SEQ ID NO: 834935 - RNA, 19 nt, Artificial Sequence
  Description of Artificial Sequence: Synthetic oligonucleotide
uagcuagcuugucuacaua

SEQ ID NO: 834936 - RNA, 19 nt, Artificial Sequence
  Description of Artificial Sequence: Synthetic oligonucleotide
uccuacgagcucgcccacg

SEQ ID NO: 834937 - RNA, 19 nt, Artificial Sequence
  Description of Artificial Sequence: Synthetic oligonucleotide
gcuaggacgacugcgcaac

SEQ ID NO: 834938 - RNA, 19 nt, Artificial Sequence
  Description of Artificial Sequence: Synthetic oligonucleotide
uuucucgguccuucaucaa

SEQ ID NO: 834939 - RNA, 19 nt, Artificial Sequence
  Description of Artificial Sequence: Synthetic oligonucleotide
guuuguuugaauggggauu

SEQ ID NO: 834940 - RNA, 19 nt, Artificial Sequence
  Description of Artificial Sequence: Synthetic oligonucleotide
ggccauauccgucucuguc

SEQ ID NO: 834941 - RNA, 19 nt, Artificial Sequence
  Description of Artificial Sequence: Synthetic oligonucleotide
guuguuuaacacacacuua

SEQ ID NO: 834942 - RNA, 19 nt, Artificial Sequence
  Description of Artificial Sequence: Synthetic oligonucleotide
caucuauauggcugaaagu

SEQ ID NO: 834943 - RNA, 19 nt, Artificial Sequence
  Description of Artificial Sequence: Synthetic oligonucleotide
ccuacgagcucgcccacgg

SEQ ID NO: 834944 - RNA, 19 nt, Artificial Sequence
  Description of Artificial Sequence: Synthetic oligonucleotide
cuggucuaucugcuucaac

SEQ ID NO: 834945 - RNA, 19 nt, Artificial Sequence
  Description of Artificial Sequence: Synthetic oligonucleotide
ccgauaggaauccgagggg

SEQ ID NO: 834946 - RNA, 19 nt, Artificial Sequence
  Description of Artificial Sequence: Synthetic oligonucleotide
ggagcacuacgugaguuac

SEQ ID NO: 834947 - RNA, 19 nt, Artificial Sequence
  Description of Artificial Sequence: Synthetic oligonucleotide
acgcuaggacgacugcgca

SEQ ID NO: 834948 - RNA, 19 nt, Artificial Sequence
  Description of Artificial Sequence: Synthetic oligonucleotide
gacaucuauauggcugaaa

SEQ ID NO: 834949 - RNA, 19 nt, Artificial Sequence
  Description of Artificial Sequence: Synthetic oligonucleotide
ucccucaauggagaccaaa

SEQ ID NO: 834950 - RNA, 19 nt, Artificial Sequence
  Description of Artificial Sequence: Synthetic oligonucleotide
ggaaggggcucccuucgug

SEQ ID NO: 834951 - RNA, 19 nt, Artificial Sequence
  Description of Artificial Sequence: Synthetic oligonucleotide
uauccgucucugucauuau

SEQ ID NO: 834952 - RNA, 19 nt, Artificial Sequence
  Description of Artificial Sequence: Synthetic oligonucleotide
cuagcuagcuugucuacau

SEQ ID NO: 834953 - RNA, 19 nt, Artificial Sequence
  Description of Artificial Sequence: Synthetic oligonucleotide
gagcacuacgugaguuacc

SEQ ID NO: 834954 - RNA, 19 nt, Artificial Sequence
  Description of Artificial Sequence: Synthetic oligonucleotide
cuacgagcucgcccacggg

SEQ ID NO: 834955 - RNA, 19 nt, Artificial Sequence
  Description of Artificial Sequence: Synthetic oligonucleotide
caccacugacaauugccga

SEQ ID NO: 834956 - RNA, 19 nt, Artificial Sequence
  Description of Artificial Sequence: Synthetic oligonucleotide
cuaaggacuuuccauucau

SEQ ID NO: 834957 - RNA, 19 nt, Artificial Sequence
  Description of Artificial Sequence: Synthetic oligonucleotide
gaagaucuuaggauugcuu

SEQ ID NO: 834958 - RNA, 19 nt, Artificial Sequence
  Description of Artificial Sequence: Synthetic oligonucleotide
gucuuauacuugugaauau

SEQ ID NO: 834959 - RNA, 19 nt, Artificial Sequence
  Description of Artificial Sequence: Synthetic oligonucleotide
cacugacaauugccgaguc

SEQ ID NO: 834960 - RNA, 19 nt, Artificial Sequence
  Description of Artificial Sequence: Synthetic oligonucleotide
ggacgacugcgcaacgagg

SEQ ID NO: 834961 - RNA, 19 nt, Artificial Sequence
  Description of Artificial Sequence: Synthetic oligonucleotide
gacugcgcaacgagggcga

SEQ ID NO: 834962 - RNA, 19 nt, Artificial Sequence
  Description of Artificial Sequence: Synthetic oligonucleotide
gaauagcuagcuagcuugu

SEQ ID NO: 834963 - RNA, 19 nt, Artificial Sequence
  Description of Artificial Sequence: Synthetic oligonucleotide
ccgucucugucauuauagc

SEQ ID NO: 834964 - RNA, 19 nt, Artificial Sequence
  Description of Artificial Sequence: Synthetic oligonucleotide
cgagaacuuggauagucuc

SEQ ID NO: 834965 - RNA, 19 nt, Artificial Sequence
  Description of Artificial Sequence: Synthetic oligonucleotide
ugucucgggcagcauccuu

SEQ ID NO: 834966 - RNA, 19 nt, Artificial Sequence
  Description of Artificial Sequence: Synthetic oligonucleotide
cagggcaauucaucccuca

SEQ ID NO: 834967 - RNA, 19 nt, Artificial Sequence
  Description of Artificial Sequence: Synthetic oligonucleotide
cuuuuaggaggaggaccuc

SEQ ID NO: 834968 - RNA, 19 nt, Artificial Sequence
  Description of Artificial Sequence: Synthetic oligonucleotide
ucucgagaacuuggauagu

SEQ ID NO: 834969 - RNA, 19 nt, Artificial Sequence
  Description of Artificial Sequence: Synthetic oligonucleotide
guaucucgagaacuuggau

SEQ ID NO: 834970 - RNA, 19 nt, Artificial Sequence
  Description of Artificial Sequence: Synthetic oligonucleotide
gcugcgacggucucaagcu

SEQ ID NO: 834971 - RNA, 19 nt, Artificial Sequence
  Description of Artificial Sequence: Synthetic oligonucleotide
gagguccccucgaagaacu

SEQ ID NO: 834972 - RNA, 19 nt, Artificial Sequence
  Description of Artificial Sequence: Synthetic oligonucleotide
ccaaccgauaggaauccga

SEQ ID NO: 834973 - RNA, 19 nt, Artificial Sequence
  Description of Artificial Sequence: Synthetic oligonucleotide
ccgagucuggaaacggaac

SEQ ID NO: 834974 - RNA, 19 nt, Artificial Sequence
  Description of Artificial Sequence: Synthetic oligonucleotide
cucgggcagcauccuuugc

SEQ ID NO: 834975 - RNA, 19 nt, Artificial Sequence
  Description of Artificial Sequence: Synthetic oligonucleotide
caagcgcuuucucauuugu

SEQ ID NO: 834976 - RNA, 19 nt, Artificial Sequence
  Description of Artificial Sequence: Synthetic oligonucleotide
caccgucauccaugugccc

SEQ ID NO: 834977 - RNA, 19 nt, Artificial Sequence
  Description of Artificial Sequence: Synthetic oligonucleotide
cauaggcagggcaauucau

SEQ ID NO: 834978 - RNA, 19 nt, Artificial Sequence
  Description of Artificial Sequence: Synthetic oligonucleotide
ccaugugcccuccacguga

SEQ ID NO: 834979 - RNA, 19 nt, Artificial Sequence
  Description of Artificial Sequence: Synthetic oligonucleotide
cugcgacggucucaagcuc

SEQ ID NO: 834980 - RNA, 19 nt, Artificial Sequence
  Description of Artificial Sequence: Synthetic oligonucleotide
ggggaagcccucguucuug

SEQ ID NO: 834981 - RNA, 19 nt, Artificial Sequence
  Description of Artificial Sequence: Synthetic oligonucleotide
agacacccugaaaucuuaa

SEQ ID NO: 834982 - RNA, 19 nt, Artificial Sequence
  Description of Artificial Sequence: Synthetic oligonucleotide
accgcaccacugacaauug

SEQ ID NO: 834983 - RNA, 19 nt, Artificial Sequence
  Description of Artificial Sequence: Synthetic oligonucleotide
cucgaauagcuagcuagcu

SEQ ID NO: 834984 - RNA, 19 nt, Artificial Sequence
  Description of Artificial Sequence: Synthetic oligonucleotide
gcagcaccgcaccacugac

SEQ ID NO: 834985 - RNA, 19 nt, Artificial Sequence
  Description of Artificial Sequence: Synthetic oligonucleotide
ccauauccgucacgugagc

SEQ ID NO: 834986 - RNA, 19 nt, Artificial Sequence
  Description of Artificial Sequence: Synthetic oligonucleotide
caccgcaccacugacaauu

SEQ ID NO: 834987 - RNA, 19 nt, Artificial Sequence
  Description of Artificial Sequence: Synthetic oligonucleotide
ggaggaggaccuccacuuc

SEQ ID NO: 834988 - RNA, 19 nt, Artificial Sequence
  Description of Artificial Sequence: Synthetic oligonucleotide
gcccacggggccuuccgag

SEQ ID NO: 834989 - RNA, 19 nt, Artificial Sequence
  Description of Artificial Sequence: Synthetic oligonucleotide
gcugaucuuuuaggaggag

SEQ ID NO: 834990 - RNA, 19 nt, Artificial Sequence
  Description of Artificial Sequence: Synthetic oligonucleotide
cagcaccgcaccacugaca

SEQ ID NO: 834991 - RNA, 19 nt, Artificial Sequence
  Description of Artificial Sequence: Synthetic oligonucleotide
ccucuugcuccucgaaguc

SEQ ID NO: 834992 - RNA, 19 nt, Artificial Sequence
  Description of Artificial Sequence: Synthetic oligonucleotide
cgacugcgcaacgagggcg

SEQ ID NO: 834993 - RNA, 19 nt, Artificial Sequence
  Description of Artificial Sequence: Synthetic oligonucleotide
ccaacccucucgaauagcu

SEQ ID NO: 834994 - RNA, 19 nt, Artificial Sequence
  Description of Artificial Sequence: Synthetic oligonucleotide
cccauuccgcugcugcuac

SEQ ID NO: 834995 - RNA, 19 nt, Artificial Sequence
  Description of Artificial Sequence: Synthetic oligonucleotide
aggcggagguaguccucgu

SEQ ID NO: 834996 - RNA, 19 nt, Artificial Sequence
  Description of Artificial Sequence: Synthetic oligonucleotide
cugaaaguuuguggaagau

SEQ ID NO: 834997 - RNA, 19 nt, Artificial Sequence
  Description of Artificial Sequence: Synthetic oligonucleotide
augucucgggcagcauccu

SEQ ID NO: 834998 - RNA, 19 nt, Artificial Sequence
  Description of Artificial Sequence: Synthetic oligonucleotide
cuccuacgagcucgcccac

SEQ ID NO: 834999 - RNA, 19 nt, Artificial Sequence
  Description of Artificial Sequence: Synthetic oligonucleotide
ggaagaucuuaggauugcu

SEQ ID NO: 835000 - RNA, 19 nt, Artificial Sequence
  Description of Artificial Sequence: Synthetic oligonucleotide
gcgagagggaaggggcucc

SEQ ID NO: 835001 - RNA, 19 nt, Artificial Sequence
  Description of Artificial Sequence: Synthetic oligonucleotide
gggcaauucaucccucaau

SEQ ID NO: 835002 - RNA, 19 nt, Artificial Sequence
  Description of Artificial Sequence: Synthetic oligonucleotide
aguccucgucuaccacuuu

SEQ ID NO: 835003 - RNA, 19 nt, Artificial Sequence
  Description of Artificial Sequence: Synthetic oligonucleotide
ccgucauccaugugcccuc

SEQ ID NO: 835004 - RNA, 19 nt, Artificial Sequence
  Description of Artificial Sequence: Synthetic oligonucleotide
cugcgcaacgagggcgaac

SEQ ID NO: 835005 - RNA, 19 nt, Artificial Sequence
  Description of Artificial Sequence: Synthetic oligonucleotide
ccggccauauccgucucug

SEQ ID NO: 835006 - RNA, 19 nt, Artificial Sequence
  Description of Artificial Sequence: Synthetic oligonucleotide
cugggauggucugaauagu

SEQ ID NO: 835007 - RNA, 19 nt, Artificial Sequence
  Description of Artificial Sequence: Synthetic oligonucleotide
ccaaccaacccucucgaau

SEQ ID NO: 835008 - RNA, 19 nt, Artificial Sequence
  Description of Artificial Sequence: Synthetic oligonucleotide
gccgagucuggaaacggaa

SEQ ID NO: 835009 - RNA, 19 nt, Artificial Sequence
  Description of Artificial Sequence: Synthetic oligonucleotide
cucugucauuauagccucu

SEQ ID NO: 835010 - RNA, 19 nt, Artificial Sequence
  Description of Artificial Sequence: Synthetic oligonucleotide
cggaacagaaaugacgcua

SEQ ID NO: 835011 - RNA, 19 nt, Artificial Sequence
  Description of Artificial Sequence: Synthetic oligonucleotide
ccgagcagcaccgcaccac

SEQ ID NO: 835012 - RNA, 19 nt, Artificial Sequence
  Description of Artificial Sequence: Synthetic oligonucleotide
gguggagcacuacgugagu

SEQ ID NO: 835013 - RNA, 19 nt, Artificial Sequence
  Description of Artificial Sequence: Synthetic oligonucleotide
ggggcugcgacggucucaa

SEQ ID NO: 835014 - RNA, 19 nt, Artificial Sequence
  Description of Artificial Sequence: Synthetic oligonucleotide
auccgucacgugagcugcu

SEQ ID NO: 835015 - RNA, 19 nt, Artificial Sequence
  Description of Artificial Sequence: Synthetic oligonucleotide
acugcgcaacgagggcgaa

SEQ ID NO: 835016 - RNA, 19 nt, Artificial Sequence
  Description of Artificial Sequence: Synthetic oligonucleotide
auacugccucaagcgcuuu

SEQ ID NO: 835017 - RNA, 19 nt, Artificial Sequence
  Description of Artificial Sequence: Synthetic oligonucleotide
aguggccuucagggacacu

SEQ ID NO: 835018 - RNA, 19 nt, Artificial Sequence
  Description of Artificial Sequence: Synthetic oligonucleotide
cuacauaggcagggcaauu

SEQ ID NO: 835019 - RNA, 19 nt, Artificial Sequence
  Description of Artificial Sequence: Synthetic oligonucleotide
ggacaucuauauggcugaa

SEQ ID NO: 835020 - RNA, 19 nt, Artificial Sequence
  Description of Artificial Sequence: Synthetic oligonucleotide
gcagggcaauucaucccuc

SEQ ID NO: 835021 - RNA, 19 nt, Artificial Sequence
  Description of Artificial Sequence: Synthetic oligonucleotide
ggaggcggagguaguccuc

SEQ ID NO: 835022 - RNA, 19 nt, Artificial Sequence
  Description of Artificial Sequence: Synthetic oligonucleotide
ccacggggccuuccgagca

SEQ ID NO: 835023 - RNA, 19 nt, Artificial Sequence
  Description of Artificial Sequence: Synthetic oligonucleotide
cggucucaagcuccuacga

SEQ ID NO: 835024 - RNA, 19 nt, Artificial Sequence
  Description of Artificial Sequence: Synthetic oligonucleotide
cguguagguggagcacuac

SEQ ID NO: 835025 - RNA, 19 nt, Artificial Sequence
  Description of Artificial Sequence: Synthetic oligonucleotide
ccacugacaauugccgagu

SEQ ID NO: 835026 - RNA, 19 nt, Artificial Sequence
  Description of Artificial Sequence: Synthetic oligonucleotide
cauauccgucucugucauu

SEQ ID NO: 835027 - RNA, 19 nt, Artificial Sequence
  Description of Artificial Sequence: Synthetic oligonucleotide
cccaaccaacccucucgaa

SEQ ID NO: 835028 - RNA, 19 nt, Artificial Sequence
  Description of Artificial Sequence: Synthetic oligonucleotide
cgcaacgagggcgaacaaa

SEQ ID NO: 835029 - RNA, 19 nt, Artificial Sequence
  Description of Artificial Sequence: Synthetic oligonucleotide
cggagguaguccucgucua

SEQ ID NO: 835030 - RNA, 19 nt, Artificial Sequence
  Description of Artificial Sequence: Synthetic oligonucleotide
cgcuaggacgacugcgcaa

SEQ ID NO: 835031 - RNA, 19 nt, Artificial Sequence
  Description of Artificial Sequence: Synthetic oligonucleotide
gccuuccgagcagcaccgc

SEQ ID NO: 835032 - RNA, 19 nt, Artificial Sequence
  Description of Artificial Sequence: Synthetic oligonucleotide
cgacuuccaccauauccgu

SEQ ID NO: 835033 - RNA, 19 nt, Artificial Sequence
  Description of Artificial Sequence: Synthetic oligonucleotide
gcgacggucucaagcuccu

SEQ ID NO: 835034 - RNA, 19 nt, Artificial Sequence
  Description of Artificial Sequence: Synthetic oligonucleotide
gcgcaacgagggcgaacaa

SEQ ID NO: 835035 - RNA, 19 nt, Artificial Sequence
  Description of Artificial Sequence: Synthetic oligonucleotide
cgaucccggccauauccgu

SEQ ID NO: 835036 - RNA, 19 nt, Artificial Sequence
  Description of Artificial Sequence: Synthetic oligonucleotide
gcaccgcaccacugacaau

SEQ ID NO: 835037 - RNA, 19 nt, Artificial Sequence
  Description of Artificial Sequence: Synthetic oligonucleotide
cggggccuuccgagcagca

SEQ ID NO: 835038 - RNA, 19 nt, Artificial Sequence
  Description of Artificial Sequence: Synthetic oligonucleotide
cccggccauauccgucucu

SEQ ID NO: 835039 - RNA, 19 nt, Artificial Sequence
  Description of Artificial Sequence: Synthetic oligonucleotide
cggccauauccgucucugu

SEQ ID NO: 835040 - RNA, 19 nt, Artificial Sequence
  Description of Artificial Sequence: Synthetic oligonucleotide
aaacaagauacacagaugu

SEQ ID NO: 835041 - RNA, 19 nt, Artificial Sequence
  Description of Artificial Sequence: Synthetic oligonucleotide
aauuuagaggccaauaugg

SEQ ID NO: 835042 - RNA, 19 nt, Artificial Sequence
  Description of Artificial Sequence: Synthetic oligonucleotide
agcuuuaucauguuuacac

SEQ ID NO: 835043 - RNA, 19 nt, Artificial Sequence
  Description of Artificial Sequence: Synthetic oligonucleotide
uaaaauugcguuuauuuag

SEQ ID NO: 835044 - RNA, 19 nt, Artificial Sequence
  Description of Artificial Sequence: Synthetic oligonucleotide
aagcagauuaacaacauac

SEQ ID NO: 835045 - RNA, 19 nt, Artificial Sequence
  Description of Artificial Sequence: Synthetic oligonucleotide
ugauuaacaaugauguaag

SEQ ID NO: 835046 - RNA, 19 nt, Artificial Sequence
  Description of Artificial Sequence: Synthetic oligonucleotide
aacagaaaccccuagguca

SEQ ID NO: 835047 - RNA, 19 nt, Artificial Sequence
  Description of Artificial Sequence: Synthetic oligonucleotide
uggauuacaaaauuucuag

SEQ ID NO: 835048 - RNA, 19 nt, Artificial Sequence
  Description of Artificial Sequence: Synthetic oligonucleotide
ugaaauugugucuuuaggc

SEQ ID NO: 835049 - RNA, 19 nt, Artificial Sequence
  Description of Artificial Sequence: Synthetic oligonucleotide
aaauuuagaggccaauaug

SEQ ID NO: 835050 - RNA, 19 nt, Artificial Sequence
  Description of Artificial Sequence: Synthetic oligonucleotide
auuuugaucuccuaugcuc

SEQ ID NO: 835051 - RNA, 19 nt, Artificial Sequence
  Description of Artificial Sequence: Synthetic oligonucleotide
cuagaaaugaaauuguguc

SEQ ID NO: 835052 - RNA, 19 nt, Artificial Sequence
  Description of Artificial Sequence: Synthetic oligonucleotide
aaggugauacacaagacgg

SEQ ID NO: 835053 - RNA, 19 nt, Artificial Sequence
  Description of Artificial Sequence: Synthetic oligonucleotide
uaaauuacgagcuauccaa

SEQ ID NO: 835054 - RNA, 19 nt, Artificial Sequence
  Description of Artificial Sequence: Synthetic oligonucleotide
uuuaguuaccccuuaacac

SEQ ID NO: 835055 - RNA, 19 nt, Artificial Sequence
  Description of Artificial Sequence: Synthetic oligonucleotide
ucauauaugaggaagucau

SEQ ID NO: 835056 - RNA, 19 nt, Artificial Sequence
  Description of Artificial Sequence: Synthetic oligonucleotide
ucaaauaugagauggcgac

SEQ ID NO: 835057 - RNA, 19 nt, Artificial Sequence
  Description of Artificial Sequence: Synthetic oligonucleotide
aucuuauuaucucagcuuc

SEQ ID NO: 835058 - RNA, 19 nt, Artificial Sequence
  Description of Artificial Sequence: Synthetic oligonucleotide
uuugaucuuauuaucucag

SEQ ID NO: 835059 - RNA, 19 nt, Artificial Sequence
  Description of Artificial Sequence: Synthetic oligonucleotide
aauucggaacaauacaaca

SEQ ID NO: 835060 - RNA, 19 nt, Artificial Sequence
  Description of Artificial Sequence: Synthetic oligonucleotide
uuaagcaguaagcagauua

SEQ ID NO: 835061 - RNA, 19 nt, Artificial Sequence
  Description of Artificial Sequence: Synthetic oligonucleotide
uuaucucagcuucaguugg

SEQ ID NO: 835062 - RNA, 19 nt, Artificial Sequence
  Description of Artificial Sequence: Synthetic oligonucleotide
aagaugggagguuuucggc

SEQ ID NO: 835063 - RNA, 19 nt, Artificial Sequence
  Description of Artificial Sequence: Synthetic oligonucleotide
uaugagauggcgacagugg

SEQ ID NO: 835064 - RNA, 19 nt, Artificial Sequence
  Description of Artificial Sequence: Synthetic oligonucleotide
uguaagagauguuagaaua

SEQ ID NO: 835065 - RNA, 19 nt, Artificial Sequence
  Description of Artificial Sequence: Synthetic oligonucleotide
uccauucuaaauuacgagc

SEQ ID NO: 835066 - RNA, 19 nt, Artificial Sequence
  Description of Artificial Sequence: Synthetic oligonucleotide
ucuagaaaugaaauugugu

SEQ ID NO: 835067 - RNA, 19 nt, Artificial Sequence
  Description of Artificial Sequence: Synthetic oligonucleotide
uuaguuaccccuuaacaca

SEQ ID NO: 835068 - RNA, 19 nt, Artificial Sequence
  Description of Artificial Sequence: Synthetic oligonucleotide
aaauaugagauggcgacag

SEQ ID NO: 835069 - RNA, 19 nt, Artificial Sequence
  Description of Artificial Sequence: Synthetic oligonucleotide
gacucugucaggcagcugg

SEQ ID NO: 835070 - RNA, 19 nt, Artificial Sequence
  Description of Artificial Sequence: Synthetic oligonucleotide
uuuagauaagucuguacug

SEQ ID NO: 835071 - RNA, 19 nt, Artificial Sequence
  Description of Artificial Sequence: Synthetic oligonucleotide
agaguucagguucauaggg

SEQ ID NO: 835072 - RNA, 19 nt, Artificial Sequence
  Description of Artificial Sequence: Synthetic oligonucleotide
ugaaagagcaguuucugca

SEQ ID NO: 835073 - RNA, 19 nt, Artificial Sequence
  Description of Artificial Sequence: Synthetic oligonucleotide
aaguggauuacaaaauuuc

SEQ ID NO: 835074 - RNA, 19 nt, Artificial Sequence
  Description of Artificial Sequence: Synthetic oligonucleotide
uuuugaucuccuaugcucc

SEQ ID NO: 835075 - RNA, 19 nt, Artificial Sequence
  Description of Artificial Sequence: Synthetic oligonucleotide
agauguauguaguaaaagu

SEQ ID NO: 835076 - RNA, 19 nt, Artificial Sequence
  Description of Artificial Sequence: Synthetic oligonucleotide
agagcaaccaccgucaccg

SEQ ID NO: 835077 - RNA, 19 nt, Artificial Sequence
  Description of Artificial Sequence: Synthetic oligonucleotide
uguuaaagauuuaauuggu

SEQ ID NO: 835078 - RNA, 19 nt, Artificial Sequence
  Description of Artificial Sequence: Synthetic oligonucleotide
uaaauuuagaggccaauau

SEQ ID NO: 835079 - RNA, 19 nt, Artificial Sequence
  Description of Artificial Sequence: Synthetic oligonucleotide
ugauuaauuaaguggauua

SEQ ID NO: 835080 - RNA, 19 nt, Artificial Sequence
  Description of Artificial Sequence: Synthetic oligonucleotide
uacguuucuguucucauca

SEQ ID NO: 835081 - RNA, 19 nt, Artificial Sequence
  Description of Artificial Sequence: Synthetic oligonucleotide
ucuccuaugcuccaggcug

SEQ ID NO: 835082 - RNA, 19 nt, Artificial Sequence
  Description of Artificial Sequence: Synthetic oligonucleotide
augaaauugugucuuuagg

SEQ ID NO: 835083 - RNA, 19 nt, Artificial Sequence
  Description of Artificial Sequence: Synthetic oligonucleotide
uucggaacaauacaacaca

SEQ ID NO: 835084 - RNA, 19 nt, Artificial Sequence
  Description of Artificial Sequence: Synthetic oligonucleotide
uucacugauuaauuaagug

SEQ ID NO: 835085 - RNA, 19 nt, Artificial Sequence
  Description of Artificial Sequence: Synthetic oligonucleotide
uuagcauuggauuuugauc

SEQ ID NO: 835086 - RNA, 19 nt, Artificial Sequence
  Description of Artificial Sequence: Synthetic oligonucleotide
caaggugauacacaagacg

SEQ ID NO: 835087 - RNA, 19 nt, Artificial Sequence
  Description of Artificial Sequence: Synthetic oligonucleotide
uauuaucucagcuucaguu

SEQ ID NO: 835088 - RNA, 19 nt, Artificial Sequence
  Description of Artificial Sequence: Synthetic oligonucleotide
uauugaaccaucauugauu

SEQ ID NO: 835089 - RNA, 19 nt, Artificial Sequence
  Description of Artificial Sequence: Synthetic oligonucleotide
uuucuagaaaugaaauugu

SEQ ID NO: 835090 - RNA, 19 nt, Artificial Sequence
  Description of Artificial Sequence: Synthetic oligonucleotide
aaccaaaagcugcaaucac

SEQ ID NO: 835091 - RNA, 19 nt, Artificial Sequence
  Description of Artificial Sequence: Synthetic oligonucleotide
acuuagggaguuuacaucu

SEQ ID NO: 835092 - RNA, 19 nt, Artificial Sequence
  Description of Artificial Sequence: Synthetic oligonucleotide
ucaacauaugggaaaguga

SEQ ID NO: 835093 - RNA, 19 nt, Artificial Sequence
  Description of Artificial Sequence: Synthetic oligonucleotide
uuaugcaucccuuucgaca

SEQ ID NO: 835094 - RNA, 19 nt, Artificial Sequence
  Description of Artificial Sequence: Synthetic oligonucleotide
caguaggcaaucuuaauag

SEQ ID NO: 835095 - RNA, 19 nt, Artificial Sequence
  Description of Artificial Sequence: Synthetic oligonucleotide
ucuucaagacucgugaaag

SEQ ID NO: 835096 - RNA, 19 nt, Artificial Sequence
  Description of Artificial Sequence: Synthetic oligonucleotide
agcuauccaacagaaaccc

SEQ ID NO: 835097 - RNA, 19 nt, Artificial Sequence
  Description of Artificial Sequence: Synthetic oligonucleotide
aguaggcaaucuuaauagc

SEQ ID NO: 835098 - RNA, 19 nt, Artificial Sequence
  Description of Artificial Sequence: Synthetic oligonucleotide
uaguuuacguuucuguucu

SEQ ID NO: 835099 - RNA, 19 nt, Artificial Sequence
  Description of Artificial Sequence: Synthetic oligonucleotide
uguauguaguaaaaguaaa

SEQ ID NO: 835100 - RNA, 19 nt, Artificial Sequence
  Description of Artificial Sequence: Synthetic oligonucleotide
ucuaaauuacgagcuaucc

SEQ ID NO: 835101 - RNA, 19 nt, Artificial Sequence
  Description of Artificial Sequence: Synthetic oligonucleotide
auuaucucagcuucaguug

SEQ ID NO: 835102 - RNA, 19 nt, Artificial Sequence
  Description of Artificial Sequence: Synthetic oligonucleotide
aauuacgagcuauccaaca

SEQ ID NO: 835103 - RNA, 19 nt, Artificial Sequence
  Description of Artificial Sequence: Synthetic oligonucleotide
ucacaauucggaacaauac

SEQ ID NO: 835104 - RNA, 19 nt, Artificial Sequence
  Description of Artificial Sequence: Synthetic oligonucleotide
auuacgagcuauccaacag

SEQ ID NO: 835105 - RNA, 19 nt, Artificial Sequence
  Description of Artificial Sequence: Synthetic oligonucleotide
uaagucuguacugugacca

SEQ ID NO: 835106 - RNA, 19 nt, Artificial Sequence
  Description of Artificial Sequence: Synthetic oligonucleotide
uuaguugagaaggggaucc

SEQ ID NO: 835107 - RNA, 19 nt, Artificial Sequence
  Description of Artificial Sequence: Synthetic oligonucleotide
augagauggcgacaguggc

SEQ ID NO: 835108 - RNA, 19 nt, Artificial Sequence
  Description of Artificial Sequence: Synthetic oligonucleotide
uuuuaguugagaaggggau

SEQ ID NO: 835109 - RNA, 19 nt, Artificial Sequence
  Description of Artificial Sequence: Synthetic oligonucleotide
augauuaacaaugauguaa

SEQ ID NO: 835110 - RNA, 19 nt, Artificial Sequence
  Description of Artificial Sequence: Synthetic oligonucleotide
aagagcaaccaccgucacc

SEQ ID NO: 835111 - RNA, 19 nt, Artificial Sequence
  Description of Artificial Sequence: Synthetic oligonucleotide
agugauugcagacccugac

SEQ ID NO: 835112 - RNA, 19 nt, Artificial Sequence
  Description of Artificial Sequence: Synthetic oligonucleotide
uguuuuaguugagaagggg

SEQ ID NO: 835113 - RNA, 19 nt, Artificial Sequence
  Description of Artificial Sequence: Synthetic oligonucleotide
ugucucagcucucuaagug

SEQ ID NO: 835114 - RNA, 19 nt, Artificial Sequence
  Description of Artificial Sequence: Synthetic oligonucleotide
ucccuuucgacaaaguuuc

SEQ ID NO: 835115 - RNA, 19 nt, Artificial Sequence
  Description of Artificial Sequence: Synthetic oligonucleotide
uucaacauaugggaaagug

SEQ ID NO: 835116 - RNA, 19 nt, Artificial Sequence
  Description of Artificial Sequence: Synthetic oligonucleotide
uuaaguggauuacaaaauu

SEQ ID NO: 835117 - RNA, 19 nt, Artificial Sequence
  Description of Artificial Sequence: Synthetic oligonucleotide
uaagccuacaggaggaaga

SEQ ID NO: 835118 - RNA, 19 nt, Artificial Sequence
  Description of Artificial Sequence: Synthetic oligonucleotide
auucggaacaauacaacac

SEQ ID NO: 835119 - RNA, 19 nt, Artificial Sequence
  Description of Artificial Sequence: Synthetic oligonucleotide
ucaagacucgugaaagagc

SEQ ID NO: 835120 - RNA, 19 nt, Artificial Sequence
  Description of Artificial Sequence: Synthetic oligonucleotide
uuagauaagucuguacugu

SEQ ID NO: 835121 - RNA, 19 nt, Artificial Sequence
  Description of Artificial Sequence: Synthetic oligonucleotide
ucucuauugaaccaucauu

SEQ ID NO: 835122 - RNA, 19 nt, Artificial Sequence
  Description of Artificial Sequence: Synthetic oligonucleotide
guuccuacuguuuugagaa

SEQ ID NO: 835123 - RNA, 19 nt, Artificial Sequence
  Description of Artificial Sequence: Synthetic oligonucleotide
uaaagaugggagguuuucg

SEQ ID NO: 835124 - RNA, 19 nt, Artificial Sequence
  Description of Artificial Sequence: Synthetic oligonucleotide
agcuacauaaagaugggag

SEQ ID NO: 835125 - RNA, 19 nt, Artificial Sequence
  Description of Artificial Sequence: Synthetic oligonucleotide
aaaauugcguuuauuuaga

SEQ ID NO: 835126 - RNA, 19 nt, Artificial Sequence
  Description of Artificial Sequence: Synthetic oligonucleotide
aaauuacgagcuauccaac

SEQ ID NO: 835127 - RNA, 19 nt, Artificial Sequence
  Description of Artificial Sequence: Synthetic oligonucleotide
uuagaauauccuugguucu

SEQ ID NO: 835128 - RNA, 19 nt, Artificial Sequence
  Description of Artificial Sequence: Synthetic oligonucleotide
aaagauuuaauugguuaaa

SEQ ID NO: 835129 - RNA, 19 nt, Artificial Sequence
  Description of Artificial Sequence: Synthetic oligonucleotide
gguauuugccauaaaagag

SEQ ID NO: 835130 - RNA, 19 nt, Artificial Sequence
  Description of Artificial Sequence: Synthetic oligonucleotide
ucgucuuucaagacaguca

SEQ ID NO: 835131 - RNA, 19 nt, Artificial Sequence
  Description of Artificial Sequence: Synthetic oligonucleotide
gauuaauuaaguggauuac

SEQ ID NO: 835132 - RNA, 19 nt, Artificial Sequence
  Description of Artificial Sequence: Synthetic oligonucleotide
ucuauugaaccaucauuga

SEQ ID NO: 835133 - RNA, 19 nt, Artificial Sequence
  Description of Artificial Sequence: Synthetic oligonucleotide
cucuaagugacccugccug

SEQ ID NO: 835134 - RNA, 19 nt, Artificial Sequence
  Description of Artificial Sequence: Synthetic oligonucleotide
uuacgagcuauccaacaga

SEQ ID NO: 835135 - RNA, 19 nt, Artificial Sequence
  Description of Artificial Sequence: Synthetic oligonucleotide
guauguaguaaaaguaaag

SEQ ID NO: 835136 - RNA, 19 nt, Artificial Sequence
  Description of Artificial Sequence: Synthetic oligonucleotide
auugaaccaucauugauua

SEQ ID NO: 835137 - RNA, 19 nt, Artificial Sequence
  Description of Artificial Sequence: Synthetic oligonucleotide
uaugguggugauguaagcc

SEQ ID NO: 835138 - RNA, 19 nt, Artificial Sequence
  Description of Artificial Sequence: Synthetic oligonucleotide
ugauacacaagacggccac

SEQ ID NO: 835139 - RNA, 19 nt, Artificial Sequence
  Description of Artificial Sequence: Synthetic oligonucleotide
gucaagugauugcagaccc

SEQ ID NO: 835140 - RNA, 19 nt, Artificial Sequence
  Description of Artificial Sequence: Synthetic oligonucleotide
auaugguagcuuuaucaug

SEQ ID NO: 835141 - RNA, 19 nt, Artificial Sequence
  Description of Artificial Sequence: Synthetic oligonucleotide
uaauuaaguggauuacaaa

SEQ ID NO: 835142 - RNA, 19 nt, Artificial Sequence
  Description of Artificial Sequence: Synthetic oligonucleotide
uuagggaguuuacaucuca

SEQ ID NO: 835143 - RNA, 19 nt, Artificial Sequence
  Description of Artificial Sequence: Synthetic oligonucleotide
aggugaucgacacugacaa

SEQ ID NO: 835144 - RNA, 19 nt, Artificial Sequence
  Description of Artificial Sequence: Synthetic oligonucleotide
gauguauguaguaaaagua

SEQ ID NO: 835145 - RNA, 19 nt, Artificial Sequence
  Description of Artificial Sequence: Synthetic oligonucleotide
ugggucaaauucucugugg

SEQ ID NO: 835146 - RNA, 19 nt, Artificial Sequence
  Description of Artificial Sequence: Synthetic oligonucleotide
agcuacugguaguuguccc

SEQ ID NO: 835147 - RNA, 19 nt, Artificial Sequence
  Description of Artificial Sequence: Synthetic oligonucleotide
uaguggcugacucugucag

SEQ ID NO: 835148 - RNA, 19 nt, Artificial Sequence
  Description of Artificial Sequence: Synthetic oligonucleotide
aguucacugauuaauuaag

SEQ ID NO: 835149 - RNA, 19 nt, Artificial Sequence
  Description of Artificial Sequence: Synthetic oligonucleotide
uaguucacugauuaauuaa

SEQ ID NO: 835150 - RNA, 19 nt, Artificial Sequence
  Description of Artificial Sequence: Synthetic oligonucleotide
aagccaaggugauacacaa

SEQ ID NO: 835151 - RNA, 19 nt, Artificial Sequence
  Description of Artificial Sequence: Synthetic oligonucleotide
aacauaugggaaagugagg

SEQ ID NO: 835152 - RNA, 19 nt, Artificial Sequence
  Description of Artificial Sequence: Synthetic oligonucleotide
uauuugccauaaaagaguu

SEQ ID NO: 835153 - RNA, 19 nt, Artificial Sequence
  Description of Artificial Sequence: Synthetic oligonucleotide
acaguaggcaaucuuaaua

SEQ ID NO: 835154 - RNA, 19 nt, Artificial Sequence
  Description of Artificial Sequence: Synthetic oligonucleotide
ugcauucuugcuuaauggu

SEQ ID NO: 835155 - RNA, 19 nt, Artificial Sequence
  Description of Artificial Sequence: Synthetic oligonucleotide
caagacucgugaaagagca

SEQ ID NO: 835156 - RNA, 19 nt, Artificial Sequence
  Description of Artificial Sequence: Synthetic oligonucleotide
agauacaaguuccuacugu

SEQ ID NO: 835157 - RNA, 19 nt, Artificial Sequence
  Description of Artificial Sequence: Synthetic oligonucleotide
uccauaggggaggagacag

SEQ ID NO: 835158 - RNA, 19 nt, Artificial Sequence
  Description of Artificial Sequence: Synthetic oligonucleotide
ucuuauuaucucagcuuca

SEQ ID NO: 835159 - RNA, 19 nt, Artificial Sequence
  Description of Artificial Sequence: Synthetic oligonucleotide
agucgucuuagauauaaaa

SEQ ID NO: 835160 - RNA, 19 nt, Artificial Sequence
  Description of Artificial Sequence: Synthetic oligonucleotide
caagugaaagcuguagacc

SEQ ID NO: 835161 - RNA, 19 nt, Artificial Sequence
  Description of Artificial Sequence: Synthetic oligonucleotide
caguaagcagauuaacaac

SEQ ID NO: 835162 - RNA, 19 nt, Artificial Sequence
  Description of Artificial Sequence: Synthetic oligonucleotide
aauugugucuuuaggcuga

SEQ ID NO: 835163 - RNA, 19 nt, Artificial Sequence
  Description of Artificial Sequence: Synthetic oligonucleotide
gguuuaugcaucccuuucg

SEQ ID NO: 835164 - RNA, 19 nt, Artificial Sequence
  Description of Artificial Sequence: Synthetic oligonucleotide
guguguuuuaguugagaag

SEQ ID NO: 835165 - RNA, 19 nt, Artificial Sequence
  Description of Artificial Sequence: Synthetic oligonucleotide
aaaccccuaggucauaguu

SEQ ID NO: 835166 - RNA, 19 nt, Artificial Sequence
  Description of Artificial Sequence: Synthetic oligonucleotide
ugucaagugauugcagacc

SEQ ID NO: 835167 - RNA, 19 nt, Artificial Sequence
  Description of Artificial Sequence: Synthetic oligonucleotide
uuacaagcagggcuuuggc

SEQ ID NO: 835168 - RNA, 19 nt, Artificial Sequence
  Description of Artificial Sequence: Synthetic oligonucleotide
agguuuucggcgcacuguc

SEQ ID NO: 835169 - RNA, 19 nt, Artificial Sequence
  Description of Artificial Sequence: Synthetic oligonucleotide
aguuccuacuguuuugaga

SEQ ID NO: 835170 - RNA, 19 nt, Artificial Sequence
  Description of Artificial Sequence: Synthetic oligonucleotide
ccccuuaacacaaauuugg

SEQ ID NO: 835171 - RNA, 19 nt, Artificial Sequence
  Description of Artificial Sequence: Synthetic oligonucleotide
guugcuuacaagcagggcu

SEQ ID NO: 835172 - RNA, 19 nt, Artificial Sequence
  Description of Artificial Sequence: Synthetic oligonucleotide
uacgagcuauccaacagaa

SEQ ID NO: 835173 - RNA, 19 nt, Artificial Sequence
  Description of Artificial Sequence: Synthetic oligonucleotide
ucaccguacccucagaguu

SEQ ID NO: 835174 - RNA, 19 nt, Artificial Sequence
  Description of Artificial Sequence: Synthetic oligonucleotide
uuaaugguauuugccauaa

SEQ ID NO: 835175 - RNA, 19 nt, Artificial Sequence
  Description of Artificial Sequence: Synthetic oligonucleotide
aaauugcguuuauuuagau

SEQ ID NO: 835176 - RNA, 19 nt, Artificial Sequence
  Description of Artificial Sequence: Synthetic oligonucleotide
auuaaguggauuacaaaau

SEQ ID NO: 835177 - RNA, 19 nt, Artificial Sequence
  Description of Artificial Sequence: Synthetic oligonucleotide
caacuuacacaggagcugg

SEQ ID NO: 835178 - RNA, 19 nt, Artificial Sequence
  Description of Artificial Sequence: Synthetic oligonucleotide
ucgugaaagagcaguuucu

SEQ ID NO: 835179 - RNA, 19 nt, Artificial Sequence
  Description of Artificial Sequence: Synthetic oligonucleotide
cuaaauuacgagcuaucca

SEQ ID NO: 835180 - RNA, 19 nt, Artificial Sequence
  Description of Artificial Sequence: Synthetic oligonucleotide
uuauuaucucagcuucagu

SEQ ID NO: 835181 - RNA, 19 nt, Artificial Sequence
  Description of Artificial Sequence: Synthetic oligonucleotide
agagauguuagaauauccu

SEQ ID NO: 835182 - RNA, 19 nt, Artificial Sequence
  Description of Artificial Sequence: Synthetic oligonucleotide
gagcuauccaacagaaacc

SEQ ID NO: 835183 - RNA, 19 nt, Artificial Sequence
  Description of Artificial Sequence: Synthetic oligonucleotide
uuaugguggugauguaagc

SEQ ID NO: 835184 - RNA, 19 nt, Artificial Sequence
  Description of Artificial Sequence: Synthetic oligonucleotide
aaguuccuacuguuuugag

SEQ ID NO: 835185 - RNA, 19 nt, Artificial Sequence
  Description of Artificial Sequence: Synthetic oligonucleotide
aguggauuacaaaauuucu

SEQ ID NO: 835186 - RNA, 19 nt, Artificial Sequence
  Description of Artificial Sequence: Synthetic oligonucleotide
aagucuguacugugaccag

SEQ ID NO: 835187 - RNA, 19 nt, Artificial Sequence
  Description of Artificial Sequence: Synthetic oligonucleotide
ugcguuuauuuagauaagu

SEQ ID NO: 835188 - RNA, 19 nt, Artificial Sequence
  Description of Artificial Sequence: Synthetic oligonucleotide
cauuuaggagaguccagac

SEQ ID NO: 835189 - RNA, 19 nt, Artificial Sequence
  Description of Artificial Sequence: Synthetic oligonucleotide
uaguuaccccuuaacacaa

SEQ ID NO: 835190 - RNA, 19 nt, Artificial Sequence
  Description of Artificial Sequence: Synthetic oligonucleotide
ucggaacaauacaacacaa

SEQ ID NO: 835191 - RNA, 19 nt, Artificial Sequence
  Description of Artificial Sequence: Synthetic oligonucleotide
auauuaaccaaaagcugca

SEQ ID NO: 835192 - RNA, 19 nt, Artificial Sequence
  Description of Artificial Sequence: Synthetic oligonucleotide
auacaacacaagaugagga

SEQ ID NO: 835193 - RNA, 19 nt, Artificial Sequence
  Description of Artificial Sequence: Synthetic oligonucleotide
aauaugagauggcgacagu

SEQ ID NO: 835194 - RNA, 19 nt, Artificial Sequence
  Description of Artificial Sequence: Synthetic oligonucleotide
ugguuuaugcaucccuuuc

SEQ ID NO: 835195 - RNA, 19 nt, Artificial Sequence
  Description of Artificial Sequence: Synthetic oligonucleotide
cucaaauaugagauggcga

SEQ ID NO: 835196 - RNA, 19 nt, Artificial Sequence
  Description of Artificial Sequence: Synthetic oligonucleotide
uugccauaaaagaguucag

SEQ ID NO: 835197 - RNA, 19 nt, Artificial Sequence
  Description of Artificial Sequence: Synthetic oligonucleotide
ugucccggacuccugagac

SEQ ID NO: 835198 - RNA, 19 nt, Artificial Sequence
  Description of Artificial Sequence: Synthetic oligonucleotide
cagcaaucuggucugacac

SEQ ID NO: 835199 - RNA, 19 nt, Artificial Sequence
  Description of Artificial Sequence: Synthetic oligonucleotide
gugaaagagcaguuucugc

SEQ ID NO: 835200 - RNA, 19 nt, Artificial Sequence
  Description of Artificial Sequence: Synthetic oligonucleotide
cacaauucggaacaauaca

SEQ ID NO: 835201 - RNA, 19 nt, Artificial Sequence
  Description of Artificial Sequence: Synthetic oligonucleotide
gugaucgacacugacaaga

SEQ ID NO: 835202 - RNA, 19 nt, Artificial Sequence
  Description of Artificial Sequence: Synthetic oligonucleotide
uguagacccucacuugccu

SEQ ID NO: 835203 - RNA, 19 nt, Artificial Sequence
  Description of Artificial Sequence: Synthetic oligonucleotide
uuuaugcaucccuuucgac

SEQ ID NO: 835204 - RNA, 19 nt, Artificial Sequence
  Description of Artificial Sequence: Synthetic oligonucleotide
guggcauaaaauuuuaaau

SEQ ID NO: 835205 - RNA, 19 nt, Artificial Sequence
  Description of Artificial Sequence: Synthetic oligonucleotide
ugguaguugucccggacuc

SEQ ID NO: 835206 - RNA, 19 nt, Artificial Sequence
  Description of Artificial Sequence: Synthetic oligonucleotide
agcauuggauuuugaucuc

SEQ ID NO: 835207 - RNA, 19 nt, Artificial Sequence
  Description of Artificial Sequence: Synthetic oligonucleotide
uugcuuacaagcagggcuu

SEQ ID NO: 835208 - RNA, 19 nt, Artificial Sequence
  Description of Artificial Sequence: Synthetic oligonucleotide
guuuaugcaucccuuucga

SEQ ID NO: 835209 - RNA, 19 nt, Artificial Sequence
  Description of Artificial Sequence: Synthetic oligonucleotide
uuuaguugagaaggggauc

SEQ ID NO: 835210 - RNA, 19 nt, Artificial Sequence
  Description of Artificial Sequence: Synthetic oligonucleotide
aggugauacacaagacggc

SEQ ID NO: 835211 - RNA, 19 nt, Artificial Sequence
  Description of Artificial Sequence: Synthetic oligonucleotide
cgagcuauccaacagaaac

SEQ ID NO: 835212 - RNA, 19 nt, Artificial Sequence
  Description of Artificial Sequence: Synthetic oligonucleotide
uugccgguaaacagcaauc

SEQ ID NO: 835213 - RNA, 19 nt, Artificial Sequence
  Description of Artificial Sequence: Synthetic oligonucleotide
gccguuuuacccuuaguag

SEQ ID NO: 835214 - RNA, 19 nt, Artificial Sequence
  Description of Artificial Sequence: Synthetic oligonucleotide
ucuaguggcugacucuguc

SEQ ID NO: 835215 - RNA, 19 nt, Artificial Sequence
  Description of Artificial Sequence: Synthetic oligonucleotide
uuauuuagauaagucugua

SEQ ID NO: 835216 - RNA, 19 nt, Artificial Sequence
  Description of Artificial Sequence: Synthetic oligonucleotide
gaucuccuaugcuccaggc

SEQ ID NO: 835217 - RNA, 19 nt, Artificial Sequence
  Description of Artificial Sequence: Synthetic oligonucleotide
ugaucgacacugacaagau

SEQ ID NO: 835218 - RNA, 19 nt, Artificial Sequence
  Description of Artificial Sequence: Synthetic oligonucleotide
ggugauacacaagacggcc

SEQ ID NO: 835219 - RNA, 19 nt, Artificial Sequence
  Description of Artificial Sequence: Synthetic oligonucleotide
agacucgugaaagagcagu

SEQ ID NO: 835220 - RNA, 19 nt, Artificial Sequence
  Description of Artificial Sequence: Synthetic oligonucleotide
uuacguuucuguucucauc

SEQ ID NO: 835221 - RNA, 19 nt, Artificial Sequence
  Description of Artificial Sequence: Synthetic oligonucleotide
uuucgacaaaguuuccuuu

SEQ ID NO: 835222 - RNA, 19 nt, Artificial Sequence
  Description of Artificial Sequence: Synthetic oligonucleotide
guacccucagaguuuagca

SEQ ID NO: 835223 - RNA, 19 nt, Artificial Sequence
  Description of Artificial Sequence: Synthetic oligonucleotide
gugaccaguucucuucugc

SEQ ID NO: 835224 - RNA, 19 nt, Artificial Sequence
  Description of Artificial Sequence: Synthetic oligonucleotide
cauauaugaggaagucauc

SEQ ID NO: 835225 - RNA, 19 nt, Artificial Sequence
  Description of Artificial Sequence: Synthetic oligonucleotide
uuuucggcgcacugucaag

SEQ ID NO: 835226 - RNA, 19 nt, Artificial Sequence
  Description of Artificial Sequence: Synthetic oligonucleotide
cacaagacggccacaucug

SEQ ID NO: 835227 - RNA, 19 nt, Artificial Sequence
  Description of Artificial Sequence: Synthetic oligonucleotide
ccguuuuacccuuaguagc

SEQ ID NO: 835228 - RNA, 19 nt, Artificial Sequence
  Description of Artificial Sequence: Synthetic oligonucleotide
aguaaaaguaaagcuggua

SEQ ID NO: 835229 - RNA, 19 nt, Artificial Sequence
  Description of Artificial Sequence: Synthetic oligonucleotide
agaauauccuugguucucu

SEQ ID NO: 835230 - RNA, 19 nt, Artificial Sequence
  Description of Artificial Sequence: Synthetic oligonucleotide
gcuacugguaguugucccg

SEQ ID NO: 835231 - RNA, 19 nt, Artificial Sequence
  Description of Artificial Sequence: Synthetic oligonucleotide
gggucaaauucucuguggc

SEQ ID NO: 835232 - RNA, 19 nt, Artificial Sequence
  Description of Artificial Sequence: Synthetic oligonucleotide
uagaauauccuugguucuc

SEQ ID NO: 835233 - RNA, 19 nt, Artificial Sequence
  Description of Artificial Sequence: Synthetic oligonucleotide
agggcuccgccguuuuacc

SEQ ID NO: 835234 - RNA, 19 nt, Artificial Sequence
  Description of Artificial Sequence: Synthetic oligonucleotide
ucaagugauugcagacccu

SEQ ID NO: 835235 - RNA, 19 nt, Artificial Sequence
  Description of Artificial Sequence: Synthetic oligonucleotide
acacaagaugaggaaaaca

SEQ ID NO: 835236 - RNA, 19 nt, Artificial Sequence
  Description of Artificial Sequence: Synthetic oligonucleotide
aggucauaguuuacguuuc

SEQ ID NO: 835237 - RNA, 19 nt, Artificial Sequence
  Description of Artificial Sequence: Synthetic oligonucleotide
ugugcuuaugguggugaug

SEQ ID NO: 835238 - RNA, 19 nt, Artificial Sequence
  Description of Artificial Sequence: Synthetic oligonucleotide
accccuaggucauaguuua

SEQ ID NO: 835239 - RNA, 19 nt, Artificial Sequence
  Description of Artificial Sequence: Synthetic oligonucleotide
aggccaauaugguagcuuu

SEQ ID NO: 835240 - RNA, 19 nt, Artificial Sequence
  Description of Artificial Sequence: Synthetic oligonucleotide
ggauuacaaaauuucuaga

SEQ ID NO: 835241 - RNA, 19 nt, Artificial Sequence
  Description of Artificial Sequence: Synthetic oligonucleotide
aaggggauccuugaugauu

SEQ ID NO: 835242 - RNA, 19 nt, Artificial Sequence
  Description of Artificial Sequence: Synthetic oligonucleotide
agauaagucuguacuguga

SEQ ID NO: 835243 - RNA, 19 nt, Artificial Sequence
  Description of Artificial Sequence: Synthetic oligonucleotide
acauaaagaugggagguuu

SEQ ID NO: 835244 - RNA, 19 nt, Artificial Sequence
  Description of Artificial Sequence: Synthetic oligonucleotide
uuucagucgcaggucuucc

SEQ ID NO: 835245 - RNA, 19 nt, Artificial Sequence
  Description of Artificial Sequence: Synthetic oligonucleotide
agacccugacuucucaaau

SEQ ID NO: 835246 - RNA, 19 nt, Artificial Sequence
  Description of Artificial Sequence: Synthetic oligonucleotide
uuucggcgcacugucaagu

SEQ ID NO: 835247 - RNA, 19 nt, Artificial Sequence
  Description of Artificial Sequence: Synthetic oligonucleotide
aacaagauacacagaugua

SEQ ID NO: 835248 - RNA, 19 nt, Artificial Sequence
  Description of Artificial Sequence: Synthetic oligonucleotide
guaagccuacaggaggaag

SEQ ID NO: 835249 - RNA, 19 nt, Artificial Sequence
  Description of Artificial Sequence: Synthetic oligonucleotide
cuuagggaguuuacaucuc

SEQ ID NO: 835250 - RNA, 19 nt, Artificial Sequence
  Description of Artificial Sequence: Synthetic oligonucleotide
gaggugaucgacacugaca

SEQ ID NO: 835251 - RNA, 19 nt, Artificial Sequence
  Description of Artificial Sequence: Synthetic oligonucleotide
ugccgguaaacagcaaucu

SEQ ID NO: 835252 - RNA, 19 nt, Artificial Sequence
  Description of Artificial Sequence: Synthetic oligonucleotide
cugagacaacuuacacagg

SEQ ID NO: 835253 - RNA, 19 nt, Artificial Sequence
  Description of Artificial Sequence: Synthetic oligonucleotide
uccgccguuuuacccuuag

SEQ ID NO: 835254 - RNA, 19 nt, Artificial Sequence
  Description of Artificial Sequence: Synthetic oligonucleotide
guaggcaaucuuaauagcu

SEQ ID NO: 835255 - RNA, 19 nt, Artificial Sequence
  Description of Artificial Sequence: Synthetic oligonucleotide
auacacaagacggccacau

SEQ ID NO: 835256 - RNA, 19 nt, Artificial Sequence
  Description of Artificial Sequence: Synthetic oligonucleotide
agucuguuaaagauuuaau

SEQ ID NO: 835257 - RNA, 19 nt, Artificial Sequence
  Description of Artificial Sequence: Synthetic oligonucleotide
auguaagccuacaggagga

SEQ ID NO: 835258 - RNA, 19 nt, Artificial Sequence
  Description of Artificial Sequence: Synthetic oligonucleotide
ugguagcuuuaucauguuu

SEQ ID NO: 835259 - RNA, 19 nt, Artificial Sequence
  Description of Artificial Sequence: Synthetic oligonucleotide
guagacccucacuugccug

SEQ ID NO: 835260 - RNA, 19 nt, Artificial Sequence
  Description of Artificial Sequence: Synthetic oligonucleotide
cuaguuucagucgcagguc

SEQ ID NO: 835261 - RNA, 19 nt, Artificial Sequence
  Description of Artificial Sequence: Synthetic oligonucleotide
aguuuacguuucuguucuc

SEQ ID NO: 835262 - RNA, 19 nt, Artificial Sequence
  Description of Artificial Sequence: Synthetic oligonucleotide
uucagucgcaggucuucca

SEQ ID NO: 835263 - RNA, 19 nt, Artificial Sequence
  Description of Artificial Sequence: Synthetic oligonucleotide
ucggcgcacugucaaguga

SEQ ID NO: 835264 - RNA, 19 nt, Artificial Sequence
  Description of Artificial Sequence: Synthetic oligonucleotide
guuuucggcgcacugucaa

SEQ ID NO: 835265 - RNA, 19 nt, Artificial Sequence
  Description of Artificial Sequence: Synthetic oligonucleotide
uucggcgcacugucaagug

SEQ ID NO: 835266 - RNA, 19 nt, Artificial Sequence
  Description of Artificial Sequence: Synthetic oligonucleotide
aagacucgugaaagagcag

SEQ ID NO: 835267 - RNA, 19 nt, Artificial Sequence
  Description of Artificial Sequence: Synthetic oligonucleotide
cuacauaaagaugggaggu

SEQ ID NO: 835268 - RNA, 19 nt, Artificial Sequence
  Description of Artificial Sequence: Synthetic oligonucleotide
cuaguggcugacucuguca

SEQ ID NO: 835269 - RNA, 19 nt, Artificial Sequence
  Description of Artificial Sequence: Synthetic oligonucleotide
gugcuuaugguggugaugu

SEQ ID NO: 835270 - RNA, 19 nt, Artificial Sequence
  Description of Artificial Sequence: Synthetic oligonucleotide
gccauaaaagaguucaggu

SEQ ID NO: 835271 - RNA, 19 nt, Artificial Sequence
  Description of Artificial Sequence: Synthetic oligonucleotide
aaccccuaggucauaguuu

SEQ ID NO: 835272 - RNA, 19 nt, Artificial Sequence
  Description of Artificial Sequence: Synthetic oligonucleotide
uagggcaagccaaggugau

SEQ ID NO: 835273 - RNA, 19 nt, Artificial Sequence
  Description of Artificial Sequence: Synthetic oligonucleotide
aagugauugcagacccuga

SEQ ID NO: 835274 - RNA, 19 nt, Artificial Sequence
  Description of Artificial Sequence: Synthetic oligonucleotide
guuuuacccuuaguagcug

SEQ ID NO: 835275 - RNA, 19 nt, Artificial Sequence
  Description of Artificial Sequence: Synthetic oligonucleotide
acugauuaauuaaguggau

SEQ ID NO: 835276 - RNA, 19 nt, Artificial Sequence
  Description of Artificial Sequence: Synthetic oligonucleotide
ggucuaguggcugacucug

SEQ ID NO: 835277 - RNA, 19 nt, Artificial Sequence
  Description of Artificial Sequence: Synthetic oligonucleotide
gagggcuccgccguuuuac

SEQ ID NO: 835278 - RNA, 19 nt, Artificial Sequence
  Description of Artificial Sequence: Synthetic oligonucleotide
guuugugauggugcuugug

SEQ ID NO: 835279 - RNA, 19 nt, Artificial Sequence
  Description of Artificial Sequence: Synthetic oligonucleotide
cuauugaaccaucauugau

SEQ ID NO: 835280 - RNA, 19 nt, Artificial Sequence
  Description of Artificial Sequence: Synthetic oligonucleotide
agucuguacugugaccagu

SEQ ID NO: 835281 - RNA, 19 nt, Artificial Sequence
  Description of Artificial Sequence: Synthetic oligonucleotide
guuucagucgcaggucuuc

SEQ ID NO: 835282 - RNA, 19 nt, Artificial Sequence
  Description of Artificial Sequence: Synthetic oligonucleotide
ugucaggcagcuggaggug

SEQ ID NO: 835283 - RNA, 19 nt, Artificial Sequence
  Description of Artificial Sequence: Synthetic oligonucleotide
uguaagccuacaggaggaa

SEQ ID NO: 835284 - RNA, 19 nt, Artificial Sequence
  Description of Artificial Sequence: Synthetic oligonucleotide
cauucuaaauuacgagcua

SEQ ID NO: 835285 - RNA, 19 nt, Artificial Sequence
  Description of Artificial Sequence: Synthetic oligonucleotide
cuuucgacaaaguuuccuu

SEQ ID NO: 835286 - RNA, 19 nt, Artificial Sequence
  Description of Artificial Sequence: Synthetic oligonucleotide
ccauucuaaauuacgagcu

SEQ ID NO: 835287 - RNA, 19 nt, Artificial Sequence
  Description of Artificial Sequence: Synthetic oligonucleotide
acccugccugugcuugccc

SEQ ID NO: 835288 - RNA, 19 nt, Artificial Sequence
  Description of Artificial Sequence: Synthetic oligonucleotide
cccuaggucauaguuuacg

SEQ ID NO: 835289 - RNA, 19 nt, Artificial Sequence
  Description of Artificial Sequence: Synthetic oligonucleotide
gcguuuauuuagauaaguc

SEQ ID NO: 835290 - RNA, 19 nt, Artificial Sequence
  Description of Artificial Sequence: Synthetic oligonucleotide
caucauugauuauggaaau

SEQ ID NO: 835291 - RNA, 19 nt, Artificial Sequence
  Description of Artificial Sequence: Synthetic oligonucleotide
gauacacaagacggccaca

SEQ ID NO: 835292 - RNA, 19 nt, Artificial Sequence
  Description of Artificial Sequence: Synthetic oligonucleotide
aacuuacacaggagcuggu

SEQ ID NO: 835293 - RNA, 19 nt, Artificial Sequence
  Description of Artificial Sequence: Synthetic oligonucleotide
gugauacacaagacggcca

SEQ ID NO: 835294 - RNA, 19 nt, Artificial Sequence
  Description of Artificial Sequence: Synthetic oligonucleotide
guaagagauguuagaauau

SEQ ID NO: 835295 - RNA, 19 nt, Artificial Sequence
  Description of Artificial Sequence: Synthetic oligonucleotide
uugaaccaucauugauuau

SEQ ID NO: 835296 - RNA, 19 nt, Artificial Sequence
  Description of Artificial Sequence: Synthetic oligonucleotide
gugacccugccugugcuug

SEQ ID NO: 835297 - RNA, 19 nt, Artificial Sequence
  Description of Artificial Sequence: Synthetic oligonucleotide
caaccaccgucaccguacc

SEQ ID NO: 835298 - RNA, 19 nt, Artificial Sequence
  Description of Artificial Sequence: Synthetic oligonucleotide
cugucaggcagcuggaggu

SEQ ID NO: 835299 - RNA, 19 nt, Artificial Sequence
  Description of Artificial Sequence: Synthetic oligonucleotide
uuccuacuguuuugagaau

SEQ ID NO: 835300 - RNA, 19 nt, Artificial Sequence
  Description of Artificial Sequence: Synthetic oligonucleotide
uaguugagaaggggauccu

SEQ ID NO: 835301 - RNA, 19 nt, Artificial Sequence
  Description of Artificial Sequence: Synthetic oligonucleotide
ggagguuuucggcgcacug

SEQ ID NO: 835302 - RNA, 19 nt, Artificial Sequence
  Description of Artificial Sequence: Synthetic oligonucleotide
ggaguuuacaucucauuuu

SEQ ID NO: 835303 - RNA, 19 nt, Artificial Sequence
  Description of Artificial Sequence: Synthetic oligonucleotide
cuugccgguaaacagcaau

SEQ ID NO: 835304 - RNA, 19 nt, Artificial Sequence
  Description of Artificial Sequence: Synthetic oligonucleotide
gcaaccaccgucaccguac

SEQ ID NO: 835305 - RNA, 19 nt, Artificial Sequence
  Description of Artificial Sequence: Synthetic oligonucleotide
ggugaucgacacugacaag

SEQ ID NO: 835306 - RNA, 19 nt, Artificial Sequence
  Description of Artificial Sequence: Synthetic oligonucleotide
agcaaccaccgucaccgua

SEQ ID NO: 835307 - RNA, 19 nt, Artificial Sequence
  Description of Artificial Sequence: Synthetic oligonucleotide
cagacccugacuucucaaa

SEQ ID NO: 835308 - RNA, 19 nt, Artificial Sequence
  Description of Artificial Sequence: Synthetic oligonucleotide
auacugacuuaagcaguaa

SEQ ID NO: 835309 - RNA, 19 nt, Artificial Sequence
  Description of Artificial Sequence: Synthetic oligonucleotide
gaaaccccuaggucauagu

SEQ ID NO: 835310 - RNA, 19 nt, Artificial Sequence
  Description of Artificial Sequence: Synthetic oligonucleotide
gagguuuucggcgcacugu

SEQ ID NO: 835311 - RNA, 19 nt, Artificial Sequence
  Description of Artificial Sequence: Synthetic oligonucleotide
gagcugguuuaugcauccc

SEQ ID NO: 835312 - RNA, 19 nt, Artificial Sequence
  Description of Artificial Sequence: Synthetic oligonucleotide
cccuuaguagcugaggaca

SEQ ID NO: 835313 - RNA, 19 nt, Artificial Sequence
  Description of Artificial Sequence: Synthetic oligonucleotide
cugauuaauuaaguggauu

SEQ ID NO: 835314 - RNA, 19 nt, Artificial Sequence
  Description of Artificial Sequence: Synthetic oligonucleotide
gcacugucaagugauugca

SEQ ID NO: 835315 - RNA, 19 nt, Artificial Sequence
  Description of Artificial Sequence: Synthetic oligonucleotide
gacccugccugugcuugcc

SEQ ID NO: 835316 - RNA, 19 nt, Artificial Sequence
  Description of Artificial Sequence: Synthetic oligonucleotide
agaggccaauaugguagcu

SEQ ID NO: 835317 - RNA, 19 nt, Artificial Sequence
  Description of Artificial Sequence: Synthetic oligonucleotide
gguaguugucccggacucc

SEQ ID NO: 835318 - RNA, 19 nt, Artificial Sequence
  Description of Artificial Sequence: Synthetic oligonucleotide
gcuauccaacagaaacccc

SEQ ID NO: 835319 - RNA, 19 nt, Artificial Sequence
  Description of Artificial Sequence: Synthetic oligonucleotide
cagcuacauaaagauggga

SEQ ID NO: 835320 - RNA, 19 nt, Artificial Sequence
  Description of Artificial Sequence: Synthetic oligonucleotide
accguacccucagaguuua

SEQ ID NO: 835321 - RNA, 19 nt, Artificial Sequence
  Description of Artificial Sequence: Synthetic oligonucleotide
gucgcaggucuuccaaucu

SEQ ID NO: 835322 - RNA, 19 nt, Artificial Sequence
  Description of Artificial Sequence: Synthetic oligonucleotide
uggggucuaguggcugacu

SEQ ID NO: 835323 - RNA, 19 nt, Artificial Sequence
  Description of Artificial Sequence: Synthetic oligonucleotide
cguacccucagaguuuagc

SEQ ID NO: 835324 - RNA, 19 nt, Artificial Sequence
  Description of Artificial Sequence: Synthetic oligonucleotide
gaucgacacugacaagauu

SEQ ID NO: 835325 - RNA, 19 nt, Artificial Sequence
  Description of Artificial Sequence: Synthetic oligonucleotide
ugggagguuuucggcgcac

SEQ ID NO: 835326 - RNA, 19 nt, Artificial Sequence
  Description of Artificial Sequence: Synthetic oligonucleotide
ccuacuguuuugagaauua

SEQ ID NO: 835327 - RNA, 19 nt, Artificial Sequence
  Description of Artificial Sequence: Synthetic oligonucleotide
cgucaccguacccucagag

SEQ ID NO: 835328 - RNA, 19 nt, Artificial Sequence
  Description of Artificial Sequence: Synthetic oligonucleotide
gggcuccgccguuuuaccc

SEQ ID NO: 835329 - RNA, 19 nt, Artificial Sequence
  Description of Artificial Sequence: Synthetic oligonucleotide
aguuucagucgcaggucuu

SEQ ID NO: 835330 - RNA, 19 nt, Artificial Sequence
  Description of Artificial Sequence: Synthetic oligonucleotide
gucccggacuccugagaca

SEQ ID NO: 835331 - RNA, 19 nt, Artificial Sequence
  Description of Artificial Sequence: Synthetic oligonucleotide
cagacaucuguuugguguu

SEQ ID NO: 835332 - RNA, 19 nt, Artificial Sequence
  Description of Artificial Sequence: Synthetic oligonucleotide
cccugacuucucaaauaug

SEQ ID NO: 835333 - RNA, 19 nt, Artificial Sequence
  Description of Artificial Sequence: Synthetic oligonucleotide
gaggccaauaugguagcuu

SEQ ID NO: 835334 - RNA, 19 nt, Artificial Sequence
  Description of Artificial Sequence: Synthetic oligonucleotide
cugguuuaugcaucccuuu

SEQ ID NO: 835335 - RNA, 19 nt, Artificial Sequence
  Description of Artificial Sequence: Synthetic oligonucleotide
cguuuuacccuuaguagcu

SEQ ID NO: 835336 - RNA, 19 nt, Artificial Sequence
  Description of Artificial Sequence: Synthetic oligonucleotide
gacucgugaaagagcaguu

SEQ ID NO: 835337 - RNA, 19 nt, Artificial Sequence
  Description of Artificial Sequence: Synthetic oligonucleotide
ggucauaguuuacguuucu

SEQ ID NO: 835338 - RNA, 19 nt, Artificial Sequence
  Description of Artificial Sequence: Synthetic oligonucleotide
acgagcuauccaacagaaa

SEQ ID NO: 835339 - RNA, 19 nt, Artificial Sequence
  Description of Artificial Sequence: Synthetic oligonucleotide
aguuaccccuuaacacaaa

SEQ ID NO: 835340 - RNA, 19 nt, Artificial Sequence
  Description of Artificial Sequence: Synthetic oligonucleotide
caagacagucacucacaau

SEQ ID NO: 835341 - RNA, 19 nt, Artificial Sequence
  Description of Artificial Sequence: Synthetic oligonucleotide
cccuuucgacaaaguuucc

SEQ ID NO: 835342 - RNA, 19 nt, Artificial Sequence
  Description of Artificial Sequence: Synthetic oligonucleotide
cgccguuuuacccuuagua

SEQ ID NO: 835343 - RNA, 19 nt, Artificial Sequence
  Description of Artificial Sequence: Synthetic oligonucleotide
gggucuaguggcugacucu

SEQ ID NO: 835344 - RNA, 19 nt, Artificial Sequence
  Description of Artificial Sequence: Synthetic oligonucleotide
gguuuucggcgcacuguca

SEQ ID NO: 835345 - RNA, 19 nt, Artificial Sequence
  Description of Artificial Sequence: Synthetic oligonucleotide
ccuuucgacaaaguuuccu

SEQ ID NO: 835346 - RNA, 19 nt, Artificial Sequence
  Description of Artificial Sequence: Synthetic oligonucleotide
caccguacccucagaguuu

SEQ ID NO: 835347 - RNA, 19 nt, Artificial Sequence
  Description of Artificial Sequence: Synthetic oligonucleotide
cagcucucuaagugacccu

SEQ ID NO: 835348 - RNA, 19 nt, Artificial Sequence
  Description of Artificial Sequence: Synthetic oligonucleotide
ccauaggggaggagacaga

SEQ ID NO: 835349 - RNA, 19 nt, Artificial Sequence
  Description of Artificial Sequence: Synthetic oligonucleotide
gaagcccgugcccguguuu

SEQ ID NO: 835350 - RNA, 19 nt, Artificial Sequence
  Description of Artificial Sequence: Synthetic oligonucleotide
gagcaaccaccgucaccgu

SEQ ID NO: 835351 - RNA, 19 nt, Artificial Sequence
  Description of Artificial Sequence: Synthetic oligonucleotide
gcccgugcccguguuugug

SEQ ID NO: 835352 - RNA, 19 nt, Artificial Sequence
  Description of Artificial Sequence: Synthetic oligonucleotide
gucuaguggcugacucugu

SEQ ID NO: 835353 - RNA, 19 nt, Artificial Sequence
  Description of Artificial Sequence: Synthetic oligonucleotide
ccguguuugugauggugcu

SEQ ID NO: 835354 - RNA, 19 nt, Artificial Sequence
  Description of Artificial Sequence: Synthetic oligonucleotide
ccccugucagcuacauaaa

SEQ ID NO: 835355 - RNA, 19 nt, Artificial Sequence
  Description of Artificial Sequence: Synthetic oligonucleotide
gguagucgucuuagauaua

SEQ ID NO: 835356 - RNA, 19 nt, Artificial Sequence
  Description of Artificial Sequence: Synthetic oligonucleotide
cagaaaccccuaggucaua

SEQ ID NO: 835357 - RNA, 19 nt, Artificial Sequence
  Description of Artificial Sequence: Synthetic oligonucleotide
gcacagguaucagcuggcu

SEQ ID NO: 835358 - RNA, 19 nt, Artificial Sequence
  Description of Artificial Sequence: Synthetic oligonucleotide
gggagguuuucggcgcacu

SEQ ID NO: 835359 - RNA, 19 nt, Artificial Sequence
  Description of Artificial Sequence: Synthetic oligonucleotide
cuccgccguuuuacccuua

SEQ ID NO: 835360 - RNA, 19 nt, Artificial Sequence
  Description of Artificial Sequence: Synthetic oligonucleotide
ggcaagcccuaggcuucuc

SEQ ID NO: 835361 - RNA, 19 nt, Artificial Sequence
  Description of Artificial Sequence: Synthetic oligonucleotide
ggcgcacugucaagugauu

SEQ ID NO: 835362 - RNA, 19 nt, Artificial Sequence
  Description of Artificial Sequence: Synthetic oligonucleotide
ccgccguuuuacccuuagu

SEQ ID NO: 835363 - RNA, 19 nt, Artificial Sequence
  Description of Artificial Sequence: Synthetic oligonucleotide
cguguuugugauggugcuu

SEQ ID NO: 835364 - RNA, 19 nt, Artificial Sequence
  Description of Artificial Sequence: Synthetic oligonucleotide
cccuaggcuucuccacauu

SEQ ID NO: 835365 - RNA, 19 nt, Artificial Sequence
  Description of Artificial Sequence: Synthetic oligonucleotide
aacguaaaauguuaaaggc

SEQ ID NO: 835366 - RNA, 19 nt, Artificial Sequence
  Description of Artificial Sequence: Synthetic oligonucleotide
aaauuaguuguuuucaagg

SEQ ID NO: 835367 - RNA, 19 nt, Artificial Sequence
  Description of Artificial Sequence: Synthetic oligonucleotide
aaacguaaaauguuaaagg

SEQ ID NO: 835368 - RNA, 19 nt, Artificial Sequence
  Description of Artificial Sequence: Synthetic oligonucleotide
aucuacaucagucugaccc

SEQ ID NO: 835369 - RNA, 19 nt, Artificial Sequence
  Description of Artificial Sequence: Synthetic oligonucleotide
aauuaguuguuuucaaggg

SEQ ID NO: 835370 - RNA, 19 nt, Artificial Sequence
  Description of Artificial Sequence: Synthetic oligonucleotide
aacuugagcgcuuucgucc

SEQ ID NO: 835371 - RNA, 19 nt, Artificial Sequence
  Description of Artificial Sequence: Synthetic oligonucleotide
agugaaaacacaucaaugu

SEQ ID NO: 835372 - RNA, 19 nt, Artificial Sequence
  Description of Artificial Sequence: Synthetic oligonucleotide
aaagaguuagacauccagc

SEQ ID NO: 835373 - RNA, 19 nt, Artificial Sequence
  Description of Artificial Sequence: Synthetic oligonucleotide
aagaguuagacauccagcu

SEQ ID NO: 835374 - RNA, 19 nt, Artificial Sequence
  Description of Artificial Sequence: Synthetic oligonucleotide
aguuucaauaaacggcucc

SEQ ID NO: 835375 - RNA, 19 nt, Artificial Sequence
  Description of Artificial Sequence: Synthetic oligonucleotide
cuuguuauagaacugugag

SEQ ID NO: 835376 - RNA, 19 nt, Artificial Sequence
  Description of Artificial Sequence: Synthetic oligonucleotide
agcaaauuuaaauuaguug

SEQ ID NO: 835377 - RNA, 19 nt, Artificial Sequence
  Description of Artificial Sequence: Synthetic oligonucleotide
gaagguugcauuaaagacg

SEQ ID NO: 835378 - RNA, 19 nt, Artificial Sequence
  Description of Artificial Sequence: Synthetic oligonucleotide
uauacaguagcucuggaaa

SEQ ID NO: 835379 - RNA, 19 nt, Artificial Sequence
  Description of Artificial Sequence: Synthetic oligonucleotide
cuaggauuuccaaacagcg

SEQ ID NO: 835380 - RNA, 19 nt, Artificial Sequence
  Description of Artificial Sequence: Synthetic oligonucleotide
agagauaaaauccagugaa

SEQ ID NO: 835381 - RNA, 19 nt, Artificial Sequence
  Description of Artificial Sequence: Synthetic oligonucleotide
uuccaaaccaaacaaacgu

SEQ ID NO: 835382 - RNA, 19 nt, Artificial Sequence
  Description of Artificial Sequence: Synthetic oligonucleotide
aacaguauaauggcaacuc

SEQ ID NO: 835383 - RNA, 19 nt, Artificial Sequence
  Description of Artificial Sequence: Synthetic oligonucleotide
uuaaaggcgacaucccucg

SEQ ID NO: 835384 - RNA, 19 nt, Artificial Sequence
  Description of Artificial Sequence: Synthetic oligonucleotide
auuaguuguuuucaagggg

SEQ ID NO: 835385 - RNA, 19 nt, Artificial Sequence
  Description of Artificial Sequence: Synthetic oligonucleotide
gaaagaguuagacauccag

SEQ ID NO: 835386 - RNA, 19 nt, Artificial Sequence
  Description of Artificial Sequence: Synthetic oligonucleotide
aauaaacggcuccucuccc

SEQ ID NO: 835387 - RNA, 19 nt, Artificial Sequence
  Description of Artificial Sequence: Synthetic oligonucleotide
auagggaacaagucgguac

SEQ ID NO: 835388 - RNA, 19 nt, Artificial Sequence
  Description of Artificial Sequence: Synthetic oligonucleotide
ucgagagacaccauccugg

SEQ ID NO: 835389 - RNA, 19 nt, Artificial Sequence
  Description of Artificial Sequence: Synthetic oligonucleotide
aagauuugucagcaugaac

SEQ ID NO: 835390 - RNA, 19 nt, Artificial Sequence
  Description of Artificial Sequence: Synthetic oligonucleotide
ucugucauaagauauuuua

SEQ ID NO: 835391 - RNA, 19 nt, Artificial Sequence
  Description of Artificial Sequence: Synthetic oligonucleotide
agucacuuguuauagaacu

SEQ ID NO: 835392 - RNA, 19 nt, Artificial Sequence
  Description of Artificial Sequence: Synthetic oligonucleotide
ugagucagaacuauggcaa

SEQ ID NO: 835393 - RNA, 19 nt, Artificial Sequence
  Description of Artificial Sequence: Synthetic oligonucleotide
uccacauccauccuguaug

SEQ ID NO: 835394 - RNA, 19 nt, Artificial Sequence
  Description of Artificial Sequence: Synthetic oligonucleotide
auaaaguggcuuuugucuc

SEQ ID NO: 835395 - RNA, 19 nt, Artificial Sequence
  Description of Artificial Sequence: Synthetic oligonucleotide
ugaaguuauugauugugcc

SEQ ID NO: 835396 - RNA, 19 nt, Artificial Sequence
  Description of Artificial Sequence: Synthetic oligonucleotide
agauuugucagcaugaacu

SEQ ID NO: 835397 - RNA, 19 nt, Artificial Sequence
  Description of Artificial Sequence: Synthetic oligonucleotide
cuuaagauuugucagcaug

SEQ ID NO: 835398 - RNA, 19 nt, Artificial Sequence
  Description of Artificial Sequence: Synthetic oligonucleotide
cucguguccagcuugagag

SEQ ID NO: 835399 - RNA, 19 nt, Artificial Sequence
  Description of Artificial Sequence: Synthetic oligonucleotide
ucuucgagagacaccaucc

SEQ ID NO: 835400 - RNA, 19 nt, Artificial Sequence
  Description of Artificial Sequence: Synthetic oligonucleotide
acaaaaucgagucucgccu

SEQ ID NO: 835401 - RNA, 19 nt, Artificial Sequence
  Description of Artificial Sequence: Synthetic oligonucleotide
uggaauaggagccaccacu

SEQ ID NO: 835402 - RNA, 19 nt, Artificial Sequence
  Description of Artificial Sequence: Synthetic oligonucleotide
agaacaguauaauggcaac

SEQ ID NO: 835403 - RNA, 19 nt, Artificial Sequence
  Description of Artificial Sequence: Synthetic oligonucleotide
aaguaauggagcuguaagu

SEQ ID NO: 835404 - RNA, 19 nt, Artificial Sequence
  Description of Artificial Sequence: Synthetic oligonucleotide
agagugaagcuauuagcac

SEQ ID NO: 835405 - RNA, 19 nt, Artificial Sequence
  Description of Artificial Sequence: Synthetic oligonucleotide
ugugguaaguaauggagcu

SEQ ID NO: 835406 - RNA, 19 nt, Artificial Sequence
  Description of Artificial Sequence: Synthetic oligonucleotide
ucagaugccuccccgauca

SEQ ID NO: 835407 - RNA, 19 nt, Artificial Sequence
  Description of Artificial Sequence: Synthetic oligonucleotide
aaggcgacaucccucgagg

SEQ ID NO: 835408 - RNA, 19 nt, Artificial Sequence
  Description of Artificial Sequence: Synthetic oligonucleotide
uuccaaacagcguuuguag

SEQ ID NO: 835409 - RNA, 19 nt, Artificial Sequence
  Description of Artificial Sequence: Synthetic oligonucleotide
ugugagaaagaguuagaca

SEQ ID NO: 835410 - RNA, 19 nt, Artificial Sequence
  Description of Artificial Sequence: Synthetic oligonucleotide
aacugugugagaaagaguu

SEQ ID NO: 835411 - RNA, 19 nt, Artificial Sequence
  Description of Artificial Sequence: Synthetic oligonucleotide
guugcauuaaagacguugg

SEQ ID NO: 835412 - RNA, 19 nt, Artificial Sequence
  Description of Artificial Sequence: Synthetic oligonucleotide
uggaagguugcauuaaaga

SEQ ID NO: 835413 - RNA, 19 nt, Artificial Sequence
  Description of Artificial Sequence: Synthetic oligonucleotide
uugauuucguuccauucca

SEQ ID NO: 835414 - RNA, 19 nt, Artificial Sequence
  Description of Artificial Sequence: Synthetic oligonucleotide
ugucaauucaacuuacuuu

SEQ ID NO: 835415 - RNA, 19 nt, Artificial Sequence
  Description of Artificial Sequence: Synthetic oligonucleotide
ugggcaagcgaccuaaucu

SEQ ID NO: 835416 - RNA, 19 nt, Artificial Sequence
  Description of Artificial Sequence: Synthetic oligonucleotide
uggcgaguuucaauaaacg

SEQ ID NO: 835417 - RNA, 19 nt, Artificial Sequence
  Description of Artificial Sequence: Synthetic oligonucleotide
aggacacccaagcaaggcc

SEQ ID NO: 835418 - RNA, 19 nt, Artificial Sequence
  Description of Artificial Sequence: Synthetic oligonucleotide
acguaaaauguuaaaggcg

SEQ ID NO: 835419 - RNA, 19 nt, Artificial Sequence
  Description of Artificial Sequence: Synthetic oligonucleotide
aagguugcauuaaagacgu

SEQ ID NO: 835420 - RNA, 19 nt, Artificial Sequence
  Description of Artificial Sequence: Synthetic oligonucleotide
acgaagcucaccugcaugg

SEQ ID NO: 835421 - RNA, 19 nt, Artificial Sequence
  Description of Artificial Sequence: Synthetic oligonucleotide
aaguuauugauugugccaa

SEQ ID NO: 835422 - RNA, 19 nt, Artificial Sequence
  Description of Artificial Sequence: Synthetic oligonucleotide
auggcaacuccuuagauuu

SEQ ID NO: 835423 - RNA, 19 nt, Artificial Sequence
  Description of Artificial Sequence: Synthetic oligonucleotide
aaaggcgacaucccucgag

SEQ ID NO: 835424 - RNA, 19 nt, Artificial Sequence
  Description of Artificial Sequence: Synthetic oligonucleotide
uuaagugcaggaaguugag

SEQ ID NO: 835425 - RNA, 19 nt, Artificial Sequence
  Description of Artificial Sequence: Synthetic oligonucleotide
caauaaacggcuccucucc

SEQ ID NO: 835426 - RNA, 19 nt, Artificial Sequence
  Description of Artificial Sequence: Synthetic oligonucleotide
uagggaacaagucgguacc

SEQ ID NO: 835427 - RNA, 19 nt, Artificial Sequence
  Description of Artificial Sequence: Synthetic oligonucleotide
agagacuccagauaugaau

SEQ ID NO: 835428 - RNA, 19 nt, Artificial Sequence
  Description of Artificial Sequence: Synthetic oligonucleotide
gagucuucggcugagauuc

SEQ ID NO: 835429 - RNA, 19 nt, Artificial Sequence
  Description of Artificial Sequence: Synthetic oligonucleotide
uacgcucuucagcucaucg

SEQ ID NO: 835430 - RNA, 19 nt, Artificial Sequence
  Description of Artificial Sequence: Synthetic oligonucleotide
aucuucgagagacaccauc

SEQ ID NO: 835431 - RNA, 19 nt, Artificial Sequence
  Description of Artificial Sequence: Synthetic oligonucleotide
auacugucuggccccaagc

SEQ ID NO: 835432 - RNA, 19 nt, Artificial Sequence
  Description of Artificial Sequence: Synthetic oligonucleotide
accgcaucugguuuucuac

SEQ ID NO: 835433 - RNA, 19 nt, Artificial Sequence
  Description of Artificial Sequence: Synthetic oligonucleotide
ccagauaugaaugauuucc

SEQ ID NO: 835434 - RNA, 19 nt, Artificial Sequence
  Description of Artificial Sequence: Synthetic oligonucleotide
aauauuacccagauuuaau

SEQ ID NO: 835435 - RNA, 19 nt, Artificial Sequence
  Description of Artificial Sequence: Synthetic oligonucleotide
aagucacuuguuauagaac

SEQ ID NO: 835436 - RNA, 19 nt, Artificial Sequence
  Description of Artificial Sequence: Synthetic oligonucleotide
uaauauuacccagauuuaa

SEQ ID NO: 835437 - RNA, 19 nt, Artificial Sequence
  Description of Artificial Sequence: Synthetic oligonucleotide
auuaaagacguugguuuuc

SEQ ID NO: 835438 - RNA, 19 nt, Artificial Sequence
  Description of Artificial Sequence: Synthetic oligonucleotide
ucaauaaacggcuccucuc

SEQ ID NO: 835439 - RNA, 19 nt, Artificial Sequence
  Description of Artificial Sequence: Synthetic oligonucleotide
uucuacgcucuucagcuca

SEQ ID NO: 835440 - RNA, 19 nt, Artificial Sequence
  Description of Artificial Sequence: Synthetic oligonucleotide
auaauggcaacuccuuaga

SEQ ID NO: 835441 - RNA, 19 nt, Artificial Sequence
  Description of Artificial Sequence: Synthetic oligonucleotide
auaaacggcuccucucccg

SEQ ID NO: 835442 - RNA, 19 nt, Artificial Sequence
  Description of Artificial Sequence: Synthetic oligonucleotide
aaacaaacguaaaauguua

SEQ ID NO: 835443 - RNA, 19 nt, Artificial Sequence
  Description of Artificial Sequence: Synthetic oligonucleotide
ugguaaguaauggagcugu

SEQ ID NO: 835444 - RNA, 19 nt, Artificial Sequence
  Description of Artificial Sequence: Synthetic oligonucleotide
aauucacuguauucccgcu

SEQ ID NO: 835445 - RNA, 19 nt, Artificial Sequence
  Description of Artificial Sequence: Synthetic oligonucleotide
cagagugaagcuauuagca

SEQ ID NO: 835446 - RNA, 19 nt, Artificial Sequence
  Description of Artificial Sequence: Synthetic oligonucleotide
ugcuauacaguagcucugg

SEQ ID NO: 835447 - RNA, 19 nt, Artificial Sequence
  Description of Artificial Sequence: Synthetic oligonucleotide
ucagaacuauggcaagggc

SEQ ID NO: 835448 - RNA, 19 nt, Artificial Sequence
  Description of Artificial Sequence: Synthetic oligonucleotide
agucucgccuuucuccacc

SEQ ID NO: 835449 - RNA, 19 nt, Artificial Sequence
  Description of Artificial Sequence: Synthetic oligonucleotide
uccagaguucccaucgccc

SEQ ID NO: 835450 - RNA, 19 nt, Artificial Sequence
  Description of Artificial Sequence: Synthetic oligonucleotide
uucgagagacaccauccug

SEQ ID NO: 835451 - RNA, 19 nt, Artificial Sequence
  Description of Artificial Sequence: Synthetic oligonucleotide
uggcacacgaagcucaccu

SEQ ID NO: 835452 - RNA, 19 nt, Artificial Sequence
  Description of Artificial Sequence: Synthetic oligonucleotide
ugaccuugagucuucggcu

SEQ ID NO: 835453 - RNA, 19 nt, Artificial Sequence
  Description of Artificial Sequence: Synthetic oligonucleotide
ugacauucguuuucaguga

SEQ ID NO: 835454 - RNA, 19 nt, Artificial Sequence
  Description of Artificial Sequence: Synthetic oligonucleotide
uugguauuguaaacaugug

SEQ ID NO: 835455 - RNA, 19 nt, Artificial Sequence
  Description of Artificial Sequence: Synthetic oligonucleotide
uggucuaacagaguaucug

SEQ ID NO: 835456 - RNA, 19 nt, Artificial Sequence
  Description of Artificial Sequence: Synthetic oligonucleotide
ucccgagugagccucuucc

SEQ ID NO: 835457 - RNA, 19 nt, Artificial Sequence
  Description of Artificial Sequence: Synthetic oligonucleotide
ggaugaaucuucgagagac

SEQ ID NO: 835458 - RNA, 19 nt, Artificial Sequence
  Description of Artificial Sequence: Synthetic oligonucleotide
ccccagaacaguauaaugg

SEQ ID NO: 835459 - RNA, 19 nt, Artificial Sequence
  Description of Artificial Sequence: Synthetic oligonucleotide
ugcuccucagaguuaaacu

SEQ ID NO: 835460 - RNA, 19 nt, Artificial Sequence
  Description of Artificial Sequence: Synthetic oligonucleotide
cauccagcuucugacaugg

SEQ ID NO: 835461 - RNA, 19 nt, Artificial Sequence
  Description of Artificial Sequence: Synthetic oligonucleotide
uuaaagacguugguuuucu

SEQ ID NO: 835462 - RNA, 19 nt, Artificial Sequence
  Description of Artificial Sequence: Synthetic oligonucleotide
gucagaacuauggcaaggg

SEQ ID NO: 835463 - RNA, 19 nt, Artificial Sequence
  Description of Artificial Sequence: Synthetic oligonucleotide
uggucgaacuuguuguccc

SEQ ID NO: 835464 - RNA, 19 nt, Artificial Sequence
  Description of Artificial Sequence: Synthetic oligonucleotide
cuggcgaguuucaauaaac

SEQ ID NO: 835465 - RNA, 19 nt, Artificial Sequence
  Description of Artificial Sequence: Synthetic oligonucleotide
acagaguaucugugcauuc

SEQ ID NO: 835466 - RNA, 19 nt, Artificial Sequence
  Description of Artificial Sequence: Synthetic oligonucleotide
aagcaaauuuaaauuaguu

SEQ ID NO: 835467 - RNA, 19 nt, Artificial Sequence
  Description of Artificial Sequence: Synthetic oligonucleotide
ucagucugacccgacauga

SEQ ID NO: 835468 - RNA, 19 nt, Artificial Sequence
  Description of Artificial Sequence: Synthetic oligonucleotide
aguaauggagcuguaaguu

SEQ ID NO: 835469 - RNA, 19 nt, Artificial Sequence
  Description of Artificial Sequence: Synthetic oligonucleotide
augucaauucaacuuacuu

SEQ ID NO: 835470 - RNA, 19 nt, Artificial Sequence
  Description of Artificial Sequence: Synthetic oligonucleotide
cauugcauggucgaacuug

SEQ ID NO: 835471 - RNA, 19 nt, Artificial Sequence
  Description of Artificial Sequence: Synthetic oligonucleotide
aauuucagacccaucuuau

SEQ ID NO: 835472 - RNA, 19 nt, Artificial Sequence
  Description of Artificial Sequence: Synthetic oligonucleotide
aacaaacguaaaauguuaa

SEQ ID NO: 835473 - RNA, 19 nt, Artificial Sequence
  Description of Artificial Sequence: Synthetic oligonucleotide
accaucagaugccuccccg

SEQ ID NO: 835474 - RNA, 19 nt, Artificial Sequence
  Description of Artificial Sequence: Synthetic oligonucleotide
gacauggcguccuuucccc

SEQ ID NO: 835475 - RNA, 19 nt, Artificial Sequence
  Description of Artificial Sequence: Synthetic oligonucleotide
accuaaucugaaguuauug

SEQ ID NO: 835476 - RNA, 19 nt, Artificial Sequence
  Description of Artificial Sequence: Synthetic oligonucleotide
ugacauugagcugaguguc

SEQ ID NO: 835477 - RNA, 19 nt, Artificial Sequence
  Description of Artificial Sequence: Synthetic oligonucleotide
auggucgaacuuguugucc

SEQ ID NO: 835478 - RNA, 19 nt, Artificial Sequence
  Description of Artificial Sequence: Synthetic oligonucleotide
uugcuauacaguagcucug

SEQ ID NO: 835479 - RNA, 19 nt, Artificial Sequence
  Description of Artificial Sequence: Synthetic oligonucleotide
caaugucaauucaacuuac

SEQ ID NO: 835480 - RNA, 19 nt, Artificial Sequence
  Description of Artificial Sequence: Synthetic oligonucleotide
gauuucguuccauuccaca

SEQ ID NO: 835481 - RNA, 19 nt, Artificial Sequence
  Description of Artificial Sequence: Synthetic oligonucleotide
ugccuccccgaucagagug

SEQ ID NO: 835482 - RNA, 19 nt, Artificial Sequence
  Description of Artificial Sequence: Synthetic oligonucleotide
uguuugcuauacaguagcu

SEQ ID NO: 835483 - RNA, 19 nt, Artificial Sequence
  Description of Artificial Sequence: Synthetic oligonucleotide
cucgauuccgccccggagc

SEQ ID NO: 835484 - RNA, 19 nt, Artificial Sequence
  Description of Artificial Sequence: Synthetic oligonucleotide
agucagaacuauggcaagg

SEQ ID NO: 835485 - RNA, 19 nt, Artificial Sequence
  Description of Artificial Sequence: Synthetic oligonucleotide
aaacagcguuuguaguucu

SEQ ID NO: 835486 - RNA, 19 nt, Artificial Sequence
  Description of Artificial Sequence: Synthetic oligonucleotide
gacauucguuuucagugac

SEQ ID NO: 835487 - RNA, 19 nt, Artificial Sequence
  Description of Artificial Sequence: Synthetic oligonucleotide
cugagucagaacuauggca

SEQ ID NO: 835488 - RNA, 19 nt, Artificial Sequence
  Description of Artificial Sequence: Synthetic oligonucleotide
aaucgagucucgccuuucu

SEQ ID NO: 835489 - RNA, 19 nt, Artificial Sequence
  Description of Artificial Sequence: Synthetic oligonucleotide
ugcauuaaagacguugguu

SEQ ID NO: 835490 - RNA, 19 nt, Artificial Sequence
  Description of Artificial Sequence: Synthetic oligonucleotide
caagcgaccuaaucugaag

SEQ ID NO: 835491 - RNA, 19 nt, Artificial Sequence
  Description of Artificial Sequence: Synthetic oligonucleotide
ucccucgaggaacaaguca

SEQ ID NO: 835492 - RNA, 19 nt, Artificial Sequence
  Description of Artificial Sequence: Synthetic oligonucleotide
ucaauucaacuuacuuuaa

SEQ ID NO: 835493 - RNA, 19 nt, Artificial Sequence
  Description of Artificial Sequence: Synthetic oligonucleotide
ugacccgacaugaugucaa

SEQ ID NO: 835494 - RNA, 19 nt, Artificial Sequence
  Description of Artificial Sequence: Synthetic oligonucleotide
agcguuuguaguucugaca

SEQ ID NO: 835495 - RNA, 19 nt, Artificial Sequence
  Description of Artificial Sequence: Synthetic oligonucleotide
uccaaacagcguuuguagu

SEQ ID NO: 835496 - RNA, 19 nt, Artificial Sequence
  Description of Artificial Sequence: Synthetic oligonucleotide
uguagcuguucacugucau

SEQ ID NO: 835497 - RNA, 19 nt, Artificial Sequence
  Description of Artificial Sequence: Synthetic oligonucleotide
gagucagaacuauggcaag

SEQ ID NO: 835498 - RNA, 19 nt, Artificial Sequence
  Description of Artificial Sequence: Synthetic oligonucleotide
ucguuuucagugacauuga

SEQ ID NO: 835499 - RNA, 19 nt, Artificial Sequence
  Description of Artificial Sequence: Synthetic oligonucleotide
aaaucgagucucgccuuuc

SEQ ID NO: 835500 - RNA, 19 nt, Artificial Sequence
  Description of Artificial Sequence: Synthetic oligonucleotide
aaaaucgagucucgccuuu

SEQ ID NO: 835501 - RNA, 19 nt, Artificial Sequence
  Description of Artificial Sequence: Synthetic oligonucleotide
cauccuguauggaagacaa

SEQ ID NO: 835502 - RNA, 19 nt, Artificial Sequence
  Description of Artificial Sequence: Synthetic oligonucleotide
aggaacaagucacuuguua

SEQ ID NO: 835503 - RNA, 19 nt, Artificial Sequence
  Description of Artificial Sequence: Synthetic oligonucleotide
gaccuugagucuucggcug

SEQ ID NO: 835504 - RNA, 19 nt, Artificial Sequence
  Description of Artificial Sequence: Synthetic oligonucleotide
gaagcucaccugcauggug

SEQ ID NO: 835505 - RNA, 19 nt, Artificial Sequence
  Description of Artificial Sequence: Synthetic oligonucleotide
gagugaagcuauuagcacu

SEQ ID NO: 835506 - RNA, 19 nt, Artificial Sequence
  Description of Artificial Sequence: Synthetic oligonucleotide
gugugagaaagaguuagac

SEQ ID NO: 835507 - RNA, 19 nt, Artificial Sequence
  Description of Artificial Sequence: Synthetic oligonucleotide
cacacagugggugaucuac

SEQ ID NO: 835508 - RNA, 19 nt, Artificial Sequence
  Description of Artificial Sequence: Synthetic oligonucleotide
guaaguuccuggaugguga

SEQ ID NO: 835509 - RNA, 19 nt, Artificial Sequence
  Description of Artificial Sequence: Synthetic oligonucleotide
aucagaugccuccccgauc

SEQ ID NO: 835510 - RNA, 19 nt, Artificial Sequence
  Description of Artificial Sequence: Synthetic oligonucleotide
gguauuguaaacauguggu

SEQ ID NO: 835511 - RNA, 19 nt, Artificial Sequence
  Description of Artificial Sequence: Synthetic oligonucleotide
guuauagaacugugaggac

SEQ ID NO: 835512 - RNA, 19 nt, Artificial Sequence
  Description of Artificial Sequence: Synthetic oligonucleotide
ucgauuccgccccggagca

SEQ ID NO: 835513 - RNA, 19 nt, Artificial Sequence
  Description of Artificial Sequence: Synthetic oligonucleotide
ugaguguccagcuggucua

SEQ ID NO: 835514 - RNA, 19 nt, Artificial Sequence
  Description of Artificial Sequence: Synthetic oligonucleotide
uagcacucucuguagacau

SEQ ID NO: 835515 - RNA, 19 nt, Artificial Sequence
  Description of Artificial Sequence: Synthetic oligonucleotide
ugauuucguuccauuccac

SEQ ID NO: 835516 - RNA, 19 nt, Artificial Sequence
  Description of Artificial Sequence: Synthetic oligonucleotide
gaacaagucgguaccucug

SEQ ID NO: 835517 - RNA, 19 nt, Artificial Sequence
  Description of Artificial Sequence: Synthetic oligonucleotide
uccagauaugaaugauuuc

SEQ ID NO: 835518 - RNA, 19 nt, Artificial Sequence
  Description of Artificial Sequence: Synthetic oligonucleotide
caaacagcguuuguaguuc

SEQ ID NO: 835519 - RNA, 19 nt, Artificial Sequence
  Description of Artificial Sequence: Synthetic oligonucleotide
gguuuugauggaauaggag

SEQ ID NO: 835520 - RNA, 19 nt, Artificial Sequence
  Description of Artificial Sequence: Synthetic oligonucleotide
uaccgcggaggcacggugg

SEQ ID NO: 835521 - RNA, 19 nt, Artificial Sequence
  Description of Artificial Sequence: Synthetic oligonucleotide
uagauuugucugucagaga

SEQ ID NO: 835522 - RNA, 19 nt, Artificial Sequence
  Description of Artificial Sequence: Synthetic oligonucleotide
uguagacaucauccuggcu

SEQ ID NO: 835523 - RNA, 19 nt, Artificial Sequence
  Description of Artificial Sequence: Synthetic oligonucleotide
accgcggaggcacgguggc

SEQ ID NO: 835524 - RNA, 19 nt, Artificial Sequence
  Description of Artificial Sequence: Synthetic oligonucleotide
ugagcgcuuucguccauug

SEQ ID NO: 835525 - RNA, 19 nt, Artificial Sequence
  Description of Artificial Sequence: Synthetic oligonucleotide
uaccauugcauggucgaac

SEQ ID NO: 835526 - RNA, 19 nt, Artificial Sequence
  Description of Artificial Sequence: Synthetic oligonucleotide
guuugcuauacaguagcuc

SEQ ID NO: 835527 - RNA, 19 nt, Artificial Sequence
  Description of Artificial Sequence: Synthetic oligonucleotide
gacauugagcugagugucc

SEQ ID NO: 835528 - RNA, 19 nt, Artificial Sequence
  Description of Artificial Sequence: Synthetic oligonucleotide
guggccucgauuccgcccc

SEQ ID NO: 835529 - RNA, 19 nt, Artificial Sequence
  Description of Artificial Sequence: Synthetic oligonucleotide
guaaaauguuaaaggcgac

SEQ ID NO: 835530 - RNA, 19 nt, Artificial Sequence
  Description of Artificial Sequence: Synthetic oligonucleotide
cugcaucugggcauaccgc

SEQ ID NO: 835531 - RNA, 19 nt, Artificial Sequence
  Description of Artificial Sequence: Synthetic oligonucleotide
agaguuagacauccagcuu

SEQ ID NO: 835532 - RNA, 19 nt, Artificial Sequence
  Description of Artificial Sequence: Synthetic oligonucleotide
uucgccugggcugugguaa

SEQ ID NO: 835533 - RNA, 19 nt, Artificial Sequence
  Description of Artificial Sequence: Synthetic oligonucleotide
acguugguuuucuucaguu

SEQ ID NO: 835534 - RNA, 19 nt, Artificial Sequence
  Description of Artificial Sequence: Synthetic oligonucleotide
aaggccccacuuaagauuu

SEQ ID NO: 835535 - RNA, 19 nt, Artificial Sequence
  Description of Artificial Sequence: Synthetic oligonucleotide
gggcaagcgaccuaaucug

SEQ ID NO: 835536 - RNA, 19 nt, Artificial Sequence
  Description of Artificial Sequence: Synthetic oligonucleotide
cauuugcucuaggauuucc

SEQ ID NO: 835537 - RNA, 19 nt, Artificial Sequence
  Description of Artificial Sequence: Synthetic oligonucleotide
auuucagacccaucuuauu

SEQ ID NO: 835538 - RNA, 19 nt, Artificial Sequence
  Description of Artificial Sequence: Synthetic oligonucleotide
cuccucucccgagugagcc

SEQ ID NO: 835539 - RNA, 19 nt, Artificial Sequence
  Description of Artificial Sequence: Synthetic oligonucleotide
cagcguuuguaguucugac

SEQ ID NO: 835540 - RNA, 19 nt, Artificial Sequence
  Description of Artificial Sequence: Synthetic oligonucleotide
cccucgaggaacaagucac

SEQ ID NO: 835541 - RNA, 19 nt, Artificial Sequence
  Description of Artificial Sequence: Synthetic oligonucleotide
ccuaaucugaaguuauuga

SEQ ID NO: 835542 - RNA, 19 nt, Artificial Sequence
  Description of Artificial Sequence: Synthetic oligonucleotide
aguuauugauugugccaaa

SEQ ID NO: 835543 - RNA, 19 nt, Artificial Sequence
  Description of Artificial Sequence: Synthetic oligonucleotide
uccuggauggugacccggu

SEQ ID NO: 835544 - RNA, 19 nt, Artificial Sequence
  Description of Artificial Sequence: Synthetic oligonucleotide
acuuaagauuugucagcau

SEQ ID NO: 835545 - RNA, 19 nt, Artificial Sequence
  Description of Artificial Sequence: Synthetic oligonucleotide
gcauuaaagacguugguuu

SEQ ID NO: 835546 - RNA, 19 nt, Artificial Sequence
  Description of Artificial Sequence: Synthetic oligonucleotide
gcacacgaagcucaccugc

SEQ ID NO: 835547 - RNA, 19 nt, Artificial Sequence
  Description of Artificial Sequence: Synthetic oligonucleotide
gauuccgccccggagcaac

SEQ ID NO: 835548 - RNA, 19 nt, Artificial Sequence
  Description of Artificial Sequence: Synthetic oligonucleotide
uaguucugacauucguuuu

SEQ ID NO: 835549 - RNA, 19 nt, Artificial Sequence
  Description of Artificial Sequence: Synthetic oligonucleotide
cucgcucuaccgcggaggc

SEQ ID NO: 835550 - RNA, 19 nt, Artificial Sequence
  Description of Artificial Sequence: Synthetic oligonucleotide
gacgccuuagaccccucca

SEQ ID NO: 835551 - RNA, 19 nt, Artificial Sequence
  Description of Artificial Sequence: Synthetic oligonucleotide
cuccagauaugaaugauuu

SEQ ID NO: 835552 - RNA, 19 nt, Artificial Sequence
  Description of Artificial Sequence: Synthetic oligonucleotide
uggcaacuccuuagauuug

SEQ ID NO: 835553 - RNA, 19 nt, Artificial Sequence
  Description of Artificial Sequence: Synthetic oligonucleotide
aacagcguuuguaguucug

SEQ ID NO: 835554 - RNA, 19 nt, Artificial Sequence
  Description of Artificial Sequence: Synthetic oligonucleotide
gcaucuuuccaaaccaaac

SEQ ID NO: 835555 - RNA, 19 nt, Artificial Sequence
  Description of Artificial Sequence: Synthetic oligonucleotide
gccuuagaccccuccaugc

SEQ ID NO: 835556 - RNA, 19 nt, Artificial Sequence
  Description of Artificial Sequence: Synthetic oligonucleotide
cagcuucugacauggcguc

SEQ ID NO: 835557 - RNA, 19 nt, Artificial Sequence
  Description of Artificial Sequence: Synthetic oligonucleotide
uuucuacgcucuucagcuc

SEQ ID NO: 835558 - RNA, 19 nt, Artificial Sequence
  Description of Artificial Sequence: Synthetic oligonucleotide
ucgcccggucuucagcuac

SEQ ID NO: 835559 - RNA, 19 nt, Artificial Sequence
  Description of Artificial Sequence: Synthetic oligonucleotide
uaaaggcgacaucccucga

SEQ ID NO: 835560 - RNA, 19 nt, Artificial Sequence
  Description of Artificial Sequence: Synthetic oligonucleotide
cacgucaccccacugugca

SEQ ID NO: 835561 - RNA, 19 nt, Artificial Sequence
  Description of Artificial Sequence: Synthetic oligonucleotide
ggacacccaagcaaggccc

SEQ ID NO: 835562 - RNA, 19 nt, Artificial Sequence
  Description of Artificial Sequence: Synthetic oligonucleotide
gguuuaauauuacccagau

SEQ ID NO: 835563 - RNA, 19 nt, Artificial Sequence
  Description of Artificial Sequence: Synthetic oligonucleotide
gucgaacuuguugucccag

SEQ ID NO: 835564 - RNA, 19 nt, Artificial Sequence
  Description of Artificial Sequence: Synthetic oligonucleotide
ggucuaacagaguaucugu

SEQ ID NO: 835565 - RNA, 19 nt, Artificial Sequence
  Description of Artificial Sequence: Synthetic oligonucleotide
acgucaccccacugugcac

SEQ ID NO: 835566 - RNA, 19 nt, Artificial Sequence
  Description of Artificial Sequence: Synthetic oligonucleotide
ggaacaagucacuuguuau

SEQ ID NO: 835567 - RNA, 19 nt, Artificial Sequence
  Description of Artificial Sequence: Synthetic oligonucleotide
uucggcugagauucuccau

SEQ ID NO: 835568 - RNA, 19 nt, Artificial Sequence
  Description of Artificial Sequence: Synthetic oligonucleotide
agucgguaccucugaaauu

SEQ ID NO: 835569 - RNA, 19 nt, Artificial Sequence
  Description of Artificial Sequence: Synthetic oligonucleotide
gcauggucgaacuuguugu

SEQ ID NO: 835570 - RNA, 19 nt, Artificial Sequence
  Description of Artificial Sequence: Synthetic oligonucleotide
gagcgcuuucguccauugc

SEQ ID NO: 835571 - RNA, 19 nt, Artificial Sequence
  Description of Artificial Sequence: Synthetic oligonucleotide
ccaggcucgcucuaccgcg

SEQ ID NO: 835572 - RNA, 19 nt, Artificial Sequence
  Description of Artificial Sequence: Synthetic oligonucleotide
cugggcaagcgaccuaauc

SEQ ID NO: 835573 - RNA, 19 nt, Artificial Sequence
  Description of Artificial Sequence: Synthetic oligonucleotide
agugggugaucuacaucag

SEQ ID NO: 835574 - RNA, 19 nt, Artificial Sequence
  Description of Artificial Sequence: Synthetic oligonucleotide
acccaucuuauuggcuagg

SEQ ID NO: 835575 - RNA, 19 nt, Artificial Sequence
  Description of Artificial Sequence: Synthetic oligonucleotide
ucgguaccucugaaauuuc

SEQ ID NO: 835576 - RNA, 19 nt, Artificial Sequence
  Description of Artificial Sequence: Synthetic oligonucleotide
acgccuuagaccccuccau

SEQ ID NO: 835577 - RNA, 19 nt, Artificial Sequence
  Description of Artificial Sequence: Synthetic oligonucleotide
cguccauugcuccucagag

SEQ ID NO: 835578 - RNA, 19 nt, Artificial Sequence
  Description of Artificial Sequence: Synthetic oligonucleotide
gaguuucaauaaacggcuc

SEQ ID NO: 835579 - RNA, 19 nt, Artificial Sequence
  Description of Artificial Sequence: Synthetic oligonucleotide
caagucgguaccucugaaa

SEQ ID NO: 835580 - RNA, 19 nt, Artificial Sequence
  Description of Artificial Sequence: Synthetic oligonucleotide
ccgcaucugguuuucuacg

SEQ ID NO: 835581 - RNA, 19 nt, Artificial Sequence
  Description of Artificial Sequence: Synthetic oligonucleotide
acgguggccucgauuccgc

SEQ ID NO: 835582 - RNA, 19 nt, Artificial Sequence
  Description of Artificial Sequence: Synthetic oligonucleotide
agaaagaguuagacaucca

SEQ ID NO: 835583 - RNA, 19 nt, Artificial Sequence
  Description of Artificial Sequence: Synthetic oligonucleotide
ccaucuuauuggcuagggc

SEQ ID NO: 835584 - RNA, 19 nt, Artificial Sequence
  Description of Artificial Sequence: Synthetic oligonucleotide
gcguuuguaguucugacau

SEQ ID NO: 835585 - RNA, 19 nt, Artificial Sequence
  Description of Artificial Sequence: Synthetic oligonucleotide
ccuuagaccccuccaugcc

SEQ ID NO: 835586 - RNA, 19 nt, Artificial Sequence
  Description of Artificial Sequence: Synthetic oligonucleotide
gucgguaccucugaaauuu

SEQ ID NO: 835587 - RNA, 19 nt, Artificial Sequence
  Description of Artificial Sequence: Synthetic oligonucleotide
agcauugauuucguuccau

SEQ ID NO: 835588 - RNA, 19 nt, Artificial Sequence
  Description of Artificial Sequence: Synthetic oligonucleotide
ccccacuuaagauuuguca

SEQ ID NO: 835589 - RNA, 19 nt, Artificial Sequence
  Description of Artificial Sequence: Synthetic oligonucleotide
acaguagcucuggaaacua

SEQ ID NO: 835590 - RNA, 19 nt, Artificial Sequence
  Description of Artificial Sequence: Synthetic oligonucleotide
gacguugguuuucuucagu

SEQ ID NO: 835591 - RNA, 19 nt, Artificial Sequence
  Description of Artificial Sequence: Synthetic oligonucleotide
ggguuuugauggaauagga

SEQ ID NO: 835592 - RNA, 19 nt, Artificial Sequence
  Description of Artificial Sequence: Synthetic oligonucleotide
gucugacccgacaugaugu

SEQ ID NO: 835593 - RNA, 19 nt, Artificial Sequence
  Description of Artificial Sequence: Synthetic oligonucleotide
gguggccucgauuccgccc

SEQ ID NO: 835594 - RNA, 19 nt, Artificial Sequence
  Description of Artificial Sequence: Synthetic oligonucleotide
gagucucgccuuucuccac

SEQ ID NO: 835595 - RNA, 19 nt, Artificial Sequence
  Description of Artificial Sequence: Synthetic oligonucleotide
aagcucguguccagcuuga

SEQ ID NO: 835596 - RNA, 19 nt, Artificial Sequence
  Description of Artificial Sequence: Synthetic oligonucleotide
cuaccgcggaggcacggug

SEQ ID NO: 835597 - RNA, 19 nt, Artificial Sequence
  Description of Artificial Sequence: Synthetic oligonucleotide
ucgccugggcugugguaag

SEQ ID NO: 835598 - RNA, 19 nt, Artificial Sequence
  Description of Artificial Sequence: Synthetic oligonucleotide
aggcgacaucccucgagga

SEQ ID NO: 835599 - RNA, 19 nt, Artificial Sequence
  Description of Artificial Sequence: Synthetic oligonucleotide
ggaacaagucgguaccucu

SEQ ID NO: 835600 - RNA, 19 nt, Artificial Sequence
  Description of Artificial Sequence: Synthetic oligonucleotide
gagcaacaccuccagaguu

SEQ ID NO: 835601 - RNA, 19 nt, Artificial Sequence
  Description of Artificial Sequence: Synthetic oligonucleotide
uagaccccuccaugccuca

SEQ ID NO: 835602 - RNA, 19 nt, Artificial Sequence
  Description of Artificial Sequence: Synthetic oligonucleotide
cgaguuucaauaaacggcu

SEQ ID NO: 835603 - RNA, 19 nt, Artificial Sequence
  Description of Artificial Sequence: Synthetic oligonucleotide
agggaacaagucgguaccu

SEQ ID NO: 835604 - RNA, 19 nt, Artificial Sequence
  Description of Artificial Sequence: Synthetic oligonucleotide
uuucgccugggcuguggua

SEQ ID NO: 835605 - RNA, 19 nt, Artificial Sequence
  Description of Artificial Sequence: Synthetic oligonucleotide
uggccucgauuccgccccg

SEQ ID NO: 835606 - RNA, 19 nt, Artificial Sequence
  Description of Artificial Sequence: Synthetic oligonucleotide
gcauucagugcuggaacug

SEQ ID NO: 835607 - RNA, 19 nt, Artificial Sequence
  Description of Artificial Sequence: Synthetic oligonucleotide
ucguuccauuccacaggaa

SEQ ID NO: 835608 - RNA, 19 nt, Artificial Sequence
  Description of Artificial Sequence: Synthetic oligonucleotide
caccauccuggcgaguuuc

SEQ ID NO: 835609 - RNA, 19 nt, Artificial Sequence
  Description of Artificial Sequence: Synthetic oligonucleotide
cgcaucugguuuucuacgc

SEQ ID NO: 835610 - RNA, 19 nt, Artificial Sequence
  Description of Artificial Sequence: Synthetic oligonucleotide
ggcacacgaagcucaccug

SEQ ID NO: 835611 - RNA, 19 nt, Artificial Sequence
  Description of Artificial Sequence: Synthetic oligonucleotide
acugugugagaaagaguua

SEQ ID NO: 835612 - RNA, 19 nt, Artificial Sequence
  Description of Artificial Sequence: Synthetic oligonucleotide
uccccacgucaccccacug

SEQ ID NO: 835613 - RNA, 19 nt, Artificial Sequence
  Description of Artificial Sequence: Synthetic oligonucleotide
caaggccccacuuaagauu

SEQ ID NO: 835614 - RNA, 19 nt, Artificial Sequence
  Description of Artificial Sequence: Synthetic oligonucleotide
cuucgagagacaccauccu

SEQ ID NO: 835615 - RNA, 19 nt, Artificial Sequence
  Description of Artificial Sequence: Synthetic oligonucleotide
gacaccauccuggcgaguu

SEQ ID NO: 835616 - RNA, 19 nt, Artificial Sequence
  Description of Artificial Sequence: Synthetic oligonucleotide
uugcauggucgaacuuguu

SEQ ID NO: 835617 - RNA, 19 nt, Artificial Sequence
  Description of Artificial Sequence: Synthetic oligonucleotide
gacccgacaugaugucaaa

SEQ ID NO: 835618 - RNA, 19 nt, Artificial Sequence
  Description of Artificial Sequence: Synthetic oligonucleotide
cucuaccgcggaggcacgg

SEQ ID NO: 835619 - RNA, 19 nt, Artificial Sequence
  Description of Artificial Sequence: Synthetic oligonucleotide
cucgccuuucuccaccucu

SEQ ID NO: 835620 - RNA, 19 nt, Artificial Sequence
  Description of Artificial Sequence: Synthetic oligonucleotide
cagagacuccagauaugaa

SEQ ID NO: 835621 - RNA, 19 nt, Artificial Sequence
  Description of Artificial Sequence: Synthetic oligonucleotide
agccuggcgcccaggcucg

SEQ ID NO: 835622 - RNA, 19 nt, Artificial Sequence
  Description of Artificial Sequence: Synthetic oligonucleotide
gcuauacaguagcucugga

SEQ ID NO: 835623 - RNA, 19 nt, Artificial Sequence
  Description of Artificial Sequence: Synthetic oligonucleotide
caucgcccggucuucagcu

SEQ ID NO: 835624 - RNA, 19 nt, Artificial Sequence
  Description of Artificial Sequence: Synthetic oligonucleotide
acaccauccuggcgaguuu

SEQ ID NO: 835625 - RNA, 19 nt, Artificial Sequence
  Description of Artificial Sequence: Synthetic oligonucleotide
gguuucgccugggcugugg

SEQ ID NO: 835626 - RNA, 19 nt, Artificial Sequence
  Description of Artificial Sequence: Synthetic oligonucleotide
ggucgaacuuguuguccca

SEQ ID NO: 835627 - RNA, 19 nt, Artificial Sequence
  Description of Artificial Sequence: Synthetic oligonucleotide
guucccaucgcccggucuu

SEQ ID NO: 835628 - RNA, 19 nt, Artificial Sequence
  Description of Artificial Sequence: Synthetic oligonucleotide
cagcauugauuucguucca

SEQ ID NO: 835629 - RNA, 19 nt, Artificial Sequence
  Description of Artificial Sequence: Synthetic oligonucleotide
gcucguguccagcuugaga

SEQ ID NO: 835630 - RNA, 19 nt, Artificial Sequence
  Description of Artificial Sequence: Synthetic oligonucleotide
uggcgcccaggcucgcucu

SEQ ID NO: 835631 - RNA, 19 nt, Artificial Sequence
  Description of Artificial Sequence: Synthetic oligonucleotide
ggacgccuuagaccccucc

SEQ ID NO: 835632 - RNA, 19 nt, Artificial Sequence
  Description of Artificial Sequence: Synthetic oligonucleotide
gucuucggcugagauucuc

SEQ ID NO: 835633 - RNA, 19 nt, Artificial Sequence
  Description of Artificial Sequence: Synthetic oligonucleotide
ggcgacaucccucgaggaa

SEQ ID NO: 835634 - RNA, 19 nt, Artificial Sequence
  Description of Artificial Sequence: Synthetic oligonucleotide
uucccaucgcccggucuuc

SEQ ID NO: 835635 - RNA, 19 nt, Artificial Sequence
  Description of Artificial Sequence: Synthetic oligonucleotide
cccaggcucgcucuaccgc

SEQ ID NO: 835636 - RNA, 19 nt, Artificial Sequence
  Description of Artificial Sequence: Synthetic oligonucleotide
ccucgauuccgccccggag

SEQ ID NO: 835637 - RNA, 19 nt, Artificial Sequence
  Description of Artificial Sequence: Synthetic oligonucleotide
ccaucgcccggucuucagc

SEQ ID NO: 835638 - RNA, 19 nt, Artificial Sequence
  Description of Artificial Sequence: Synthetic oligonucleotide
cucccgagugagccucuuc

SEQ ID NO: 835639 - RNA, 19 nt, Artificial Sequence
  Description of Artificial Sequence: Synthetic oligonucleotide
cagaugccuccccgaucag

SEQ ID NO: 835640 - RNA, 19 nt, Artificial Sequence
  Description of Artificial Sequence: Synthetic oligonucleotide
agcaugaacuugagcgcuu

SEQ ID NO: 835641 - RNA, 19 nt, Artificial Sequence
  Description of Artificial Sequence: Synthetic oligonucleotide
ggcaagcgaccuaaucuga

SEQ ID NO: 835642 - RNA, 19 nt, Artificial Sequence
  Description of Artificial Sequence: Synthetic oligonucleotide
auaccgcaucugguuuucu

SEQ ID NO: 835643 - RNA, 19 nt, Artificial Sequence
  Description of Artificial Sequence: Synthetic oligonucleotide
ccacgucaccccacugugc

SEQ ID NO: 835644 - RNA, 19 nt, Artificial Sequence
  Description of Artificial Sequence: Synthetic oligonucleotide
ucgcucuaccgcggaggca

SEQ ID NO: 835645 - RNA, 19 nt, Artificial Sequence
  Description of Artificial Sequence: Synthetic oligonucleotide
cagacccaucuuauuggcu

SEQ ID NO: 835646 - RNA, 19 nt, Artificial Sequence
  Description of Artificial Sequence: Synthetic oligonucleotide
guuucgccugggcuguggu

SEQ ID NO: 835647 - RNA, 19 nt, Artificial Sequence
  Description of Artificial Sequence: Synthetic oligonucleotide
gcgaccuaaucugaaguua

SEQ ID NO: 835648 - RNA, 19 nt, Artificial Sequence
  Description of Artificial Sequence: Synthetic oligonucleotide
uuccgccccggagcaacac

SEQ ID NO: 835649 - RNA, 19 nt, Artificial Sequence
  Description of Artificial Sequence: Synthetic oligonucleotide
cuacgcucuucagcucauc

SEQ ID NO: 835650 - RNA, 19 nt, Artificial Sequence
  Description of Artificial Sequence: Synthetic oligonucleotide
uggacgccuuagaccccuc

SEQ ID NO: 835651 - RNA, 19 nt, Artificial Sequence
  Description of Artificial Sequence: Synthetic oligonucleotide
uggccccaagcagcauuga

SEQ ID NO: 835652 - RNA, 19 nt, Artificial Sequence
  Description of Artificial Sequence: Synthetic oligonucleotide
ccauccuguauggaagaca

SEQ ID NO: 835653 - RNA, 19 nt, Artificial Sequence
  Description of Artificial Sequence: Synthetic oligonucleotide
gaccuaaucugaaguuauu

SEQ ID NO: 835654 - RNA, 19 nt, Artificial Sequence
  Description of Artificial Sequence: Synthetic oligonucleotide
gcgcuuucguccauugcuc

SEQ ID NO: 835655 - RNA, 19 nt, Artificial Sequence
  Description of Artificial Sequence: Synthetic oligonucleotide
gcaagcgaccuaaucugaa

SEQ ID NO: 835656 - RNA, 19 nt, Artificial Sequence
  Description of Artificial Sequence: Synthetic oligonucleotide
cgagucucgccuuucucca

SEQ ID NO: 835657 - RNA, 19 nt, Artificial Sequence
  Description of Artificial Sequence: Synthetic oligonucleotide
ccgaucagagugaagcuau

SEQ ID NO: 835658 - RNA, 19 nt, Artificial Sequence
  Description of Artificial Sequence: Synthetic oligonucleotide
gcuuucguccauugcuccu

SEQ ID NO: 835659 - RNA, 19 nt, Artificial Sequence
  Description of Artificial Sequence: Synthetic oligonucleotide
ccuggcgaguuucaauaaa

SEQ ID NO: 835660 - RNA, 19 nt, Artificial Sequence
  Description of Artificial Sequence: Synthetic oligonucleotide
ggcauaccgcaucugguuu

SEQ ID NO: 835661 - RNA, 19 nt, Artificial Sequence
  Description of Artificial Sequence: Synthetic oligonucleotide
caguagcucuggaaacuau

SEQ ID NO: 835662 - RNA, 19 nt, Artificial Sequence
  Description of Artificial Sequence: Synthetic oligonucleotide
agucuucggcugagauucu

SEQ ID NO: 835663 - RNA, 19 nt, Artificial Sequence
  Description of Artificial Sequence: Synthetic oligonucleotide
auuccgccccggagcaaca

SEQ ID NO: 835664 - RNA, 19 nt, Artificial Sequence
  Description of Artificial Sequence: Synthetic oligonucleotide
gggcauaccgcaucugguu

SEQ ID NO: 835665 - RNA, 19 nt, Artificial Sequence
  Description of Artificial Sequence: Synthetic oligonucleotide
cugguuucgccugggcugu

SEQ ID NO: 835666 - RNA, 19 nt, Artificial Sequence
  Description of Artificial Sequence: Synthetic oligonucleotide
agacaccauccuggcgagu

SEQ ID NO: 835667 - RNA, 19 nt, Artificial Sequence
  Description of Artificial Sequence: Synthetic oligonucleotide
cccaagcagcauugauuuc

SEQ ID NO: 835668 - RNA, 19 nt, Artificial Sequence
  Description of Artificial Sequence: Synthetic oligonucleotide
cuggacgccuuagaccccu

SEQ ID NO: 835669 - RNA, 19 nt, Artificial Sequence
  Description of Artificial Sequence: Synthetic oligonucleotide
gccccacuuaagauuuguc

SEQ ID NO: 835670 - RNA, 19 nt, Artificial Sequence
  Description of Artificial Sequence: Synthetic oligonucleotide
cagucugacccgacaugau

SEQ ID NO: 835671 - RNA, 19 nt, Artificial Sequence
  Description of Artificial Sequence: Synthetic oligonucleotide
gcucuaccgcggaggcacg

SEQ ID NO: 835672 - RNA, 19 nt, Artificial Sequence
  Description of Artificial Sequence: Synthetic oligonucleotide
cgaccuaaucugaaguuau

SEQ ID NO: 835673 - RNA, 19 nt, Artificial Sequence
  Description of Artificial Sequence: Synthetic oligonucleotide
gccacuaccuugcgguuuu

SEQ ID NO: 835674 - RNA, 19 nt, Artificial Sequence
  Description of Artificial Sequence: Synthetic oligonucleotide
gccucgauuccgccccgga

SEQ ID NO: 835675 - RNA, 19 nt, Artificial Sequence
  Description of Artificial Sequence: Synthetic oligonucleotide
gcuggacgccuuagacccc

SEQ ID NO: 835676 - RNA, 19 nt, Artificial Sequence
  Description of Artificial Sequence: Synthetic oligonucleotide
cccgaucagagugaagcua

SEQ ID NO: 835677 - RNA, 19 nt, Artificial Sequence
  Description of Artificial Sequence: Synthetic oligonucleotide
ggccucgauuccgccccgg

SEQ ID NO: 835678 - RNA, 19 nt, Artificial Sequence
  Description of Artificial Sequence: Synthetic oligonucleotide
caauacugucuggccccaa

SEQ ID NO: 835679 - RNA, 19 nt, Artificial Sequence
  Description of Artificial Sequence: Synthetic oligonucleotide
cacucucuguagacaucau

SEQ ID NO: 835680 - RNA, 19 nt, Artificial Sequence
  Description of Artificial Sequence: Synthetic oligonucleotide
ccucgaggaacaagucacu

SEQ ID NO: 835681 - RNA, 19 nt, Artificial Sequence
  Description of Artificial Sequence: Synthetic oligonucleotide
ccauugcuccucagaguua

SEQ ID NO: 835682 - RNA, 19 nt, Artificial Sequence
  Description of Artificial Sequence: Synthetic oligonucleotide
gcgcuggcacacgaagcuc

SEQ ID NO: 835683 - RNA, 19 nt, Artificial Sequence
  Description of Artificial Sequence: Synthetic oligonucleotide
cuugagcgcuuucguccau

SEQ ID NO: 835684 - RNA, 19 nt, Artificial Sequence
  Description of Artificial Sequence: Synthetic oligonucleotide
gcggaggcacgguggccuc

SEQ ID NO: 835685 - RNA, 19 nt, Artificial Sequence
  Description of Artificial Sequence: Synthetic oligonucleotide
cugccacuaccuugcgguu

SEQ ID NO: 835686 - RNA, 19 nt, Artificial Sequence
  Description of Artificial Sequence: Synthetic oligonucleotide
gcaugaacuugagcgcuuu

SEQ ID NO: 835687 - RNA, 19 nt, Artificial Sequence
  Description of Artificial Sequence: Synthetic oligonucleotide
cccgagugagccucuuccu

SEQ ID NO: 835688 - RNA, 19 nt, Artificial Sequence
  Description of Artificial Sequence: Synthetic oligonucleotide
cgguggccucgauuccgcc

SEQ ID NO: 835689 - RNA, 19 nt, Artificial Sequence
  Description of Artificial Sequence: Synthetic oligonucleotide
gaggcacgguggccucgau

SEQ ID NO: 835690 - RNA, 19 nt, Artificial Sequence
  Description of Artificial Sequence: Synthetic oligonucleotide
gcgcccaggcucgcucuac

SEQ ID NO: 835691 - RNA, 19 nt, Artificial Sequence
  Description of Artificial Sequence: Synthetic oligonucleotide
ccauugcauggucgaacuu

SEQ ID NO: 835692 - RNA, 19 nt, Artificial Sequence
  Description of Artificial Sequence: Synthetic oligonucleotide
cgaucagagugaagcuauu

SEQ ID NO: 835693 - RNA, 19 nt, Artificial Sequence
  Description of Artificial Sequence: Synthetic oligonucleotide
cgcccggucuucagcuacu

SEQ ID NO: 835694 - RNA, 19 nt, Artificial Sequence
  Description of Artificial Sequence: Synthetic oligonucleotide
cgauuccgccccggagcaa

SEQ ID NO: 835695 - RNA, 19 nt, Artificial Sequence
  Description of Artificial Sequence: Synthetic oligonucleotide
ucauugaaaagcuugcugg

SEQ ID NO: 835696 - RNA, 19 nt, Artificial Sequence
  Description of Artificial Sequence: Synthetic oligonucleotide
ucuaccacugacuugcugg

SEQ ID NO: 835697 - RNA, 19 nt, Artificial Sequence
  Description of Artificial Sequence: Synthetic oligonucleotide
aaagcccucacccugcuuc

SEQ ID NO: 835698 - RNA, 19 nt, Artificial Sequence
  Description of Artificial Sequence: Synthetic oligonucleotide
ugagaagcgaggaauaggc

SEQ ID NO: 835699 - RNA, 19 nt, Artificial Sequence
  Description of Artificial Sequence: Synthetic oligonucleotide
ucuguaaacgccuugccug

SEQ ID NO: 835700 - RNA, 19 nt, Artificial Sequence
  Description of Artificial Sequence: Synthetic oligonucleotide
acuacagugguccuugagg

SEQ ID NO: 835701 - RNA, 19 nt, Artificial Sequence
  Description of Artificial Sequence: Synthetic oligonucleotide
ucggguacgggccagagag

SEQ ID NO: 835702 - RNA, 19 nt, Artificial Sequence
  Description of Artificial Sequence: Synthetic oligonucleotide
cauaauuuaacacucuuca

SEQ ID NO: 835703 - RNA, 19 nt, Artificial Sequence
  Description of Artificial Sequence: Synthetic oligonucleotide
uaguauaaauaagaggucc

SEQ ID NO: 835704 - RNA, 19 nt, Artificial Sequence
  Description of Artificial Sequence: Synthetic oligonucleotide
agaagcgaggaauaggcuc

SEQ ID NO: 835705 - RNA, 19 nt, Artificial Sequence
  Description of Artificial Sequence: Synthetic oligonucleotide
gauucgagggcacagugcc

SEQ ID NO: 835706 - RNA, 19 nt, Artificial Sequence
  Description of Artificial Sequence: Synthetic oligonucleotide
gaaauggucucuguggcgg

SEQ ID NO: 835707 - RNA, 19 nt, Artificial Sequence
  Description of Artificial Sequence: Synthetic oligonucleotide
ucacccaccgcccacuugg

SEQ ID NO: 835708 - RNA, 19 nt, Artificial Sequence
  Description of Artificial Sequence: Synthetic oligonucleotide
gacuuuaguauaaauaaga

SEQ ID NO: 835709 - RNA, 19 nt, Artificial Sequence
  Description of Artificial Sequence: Synthetic oligonucleotide
ugagcgaucuucuugcaca

SEQ ID NO: 835710 - RNA, 19 nt, Artificial Sequence
  Description of Artificial Sequence: Synthetic oligonucleotide
ucacgauuagucuuguuac

SEQ ID NO: 835711 - RNA, 19 nt, Artificial Sequence
  Description of Artificial Sequence: Synthetic oligonucleotide
caaaucauagcaaggggug

SEQ ID NO: 835712 - RNA, 19 nt, Artificial Sequence
  Description of Artificial Sequence: Synthetic oligonucleotide
uuaguauaaauaagagguc

SEQ ID NO: 835713 - RNA, 19 nt, Artificial Sequence
  Description of Artificial Sequence: Synthetic oligonucleotide
aaggcuguuggaccgugac

SEQ ID NO: 835714 - RNA, 19 nt, Artificial Sequence
  Description of Artificial Sequence: Synthetic oligonucleotide
aaaucauagcaaggggugg

SEQ ID NO: 835715 - RNA, 19 nt, Artificial Sequence
  Description of Artificial Sequence: Synthetic oligonucleotide
aagcaugcugucaaagugg

SEQ ID NO: 835716 - RNA, 19 nt, Artificial Sequence
  Description of Artificial Sequence: Synthetic oligonucleotide
aaucagccgcucuucauug

SEQ ID NO: 835717 - RNA, 19 nt, Artificial Sequence
  Description of Artificial Sequence: Synthetic oligonucleotide
aaauggucucuguggcggc

SEQ ID NO: 835718 - RNA, 19 nt, Artificial Sequence
  Description of Artificial Sequence: Synthetic oligonucleotide
aaacaaggacuuuaguaua

SEQ ID NO: 835719 - RNA, 19 nt, Artificial Sequence
  Description of Artificial Sequence: Synthetic oligonucleotide
aaaguggaagacacgcagg

SEQ ID NO: 835720 - RNA, 19 nt, Artificial Sequence
  Description of Artificial Sequence: Synthetic oligonucleotide
aucacgauuagucuuguua

SEQ ID NO: 835721 - RNA, 19 nt, Artificial Sequence
  Description of Artificial Sequence: Synthetic oligonucleotide
uaaacgccuugccuggccg

SEQ ID NO: 835722 - RNA, 19 nt, Artificial Sequence
  Description of Artificial Sequence: Synthetic oligonucleotide
aggagauacccucuaccac

SEQ ID NO: 835723 - RNA, 19 nt, Artificial Sequence
  Description of Artificial Sequence: Synthetic oligonucleotide
cuuggcuggguccaggcgg

SEQ ID NO: 835724 - RNA, 19 nt, Artificial Sequence
  Description of Artificial Sequence: Synthetic oligonucleotide
gauuagucuuguuacuaca

SEQ ID NO: 835725 - RNA, 19 nt, Artificial Sequence
  Description of Artificial Sequence: Synthetic oligonucleotide
ugggacaugggacauccga

SEQ ID NO: 835726 - RNA, 19 nt, Artificial Sequence
  Description of Artificial Sequence: Synthetic oligonucleotide
guggggugcaugcacaggg

SEQ ID NO: 835727 - RNA, 19 nt, Artificial Sequence
  Description of Artificial Sequence: Synthetic oligonucleotide
uuauguuccuucucggcuc

SEQ ID NO: 835728 - RNA, 19 nt, Artificial Sequence
  Description of Artificial Sequence: Synthetic oligonucleotide
cuugcucuuggcugcauag

SEQ ID NO: 835729 - RNA, 19 nt, Artificial Sequence
  Description of Artificial Sequence: Synthetic oligonucleotide
agcaaacucgguugagggg

SEQ ID NO: 835730 - RNA, 19 nt, Artificial Sequence
  Description of Artificial Sequence: Synthetic oligonucleotide
cuguaaacgccuugccugg

SEQ ID NO: 835731 - RNA, 19 nt, Artificial Sequence
  Description of Artificial Sequence: Synthetic oligonucleotide
uggauucgagggcacagug

SEQ ID NO: 835732 - RNA, 19 nt, Artificial Sequence
  Description of Artificial Sequence: Synthetic oligonucleotide
guugacccaggacuugugg

SEQ ID NO: 835733 - RNA, 19 nt, Artificial Sequence
  Description of Artificial Sequence: Synthetic oligonucleotide
ucuguggcggccgugaacu

SEQ ID NO: 835734 - RNA, 19 nt, Artificial Sequence
  Description of Artificial Sequence: Synthetic oligonucleotide
aguauaaauaagaggucca

SEQ ID NO: 835735 - RNA, 19 nt, Artificial Sequence
  Description of Artificial Sequence: Synthetic oligonucleotide
uggguccccuuguagaugc

SEQ ID NO: 835736 - RNA, 19 nt, Artificial Sequence
  Description of Artificial Sequence: Synthetic oligonucleotide
agcgggaccucguggauuc

SEQ ID NO: 835737 - RNA, 19 nt, Artificial Sequence
  Description of Artificial Sequence: Synthetic oligonucleotide
caguccucgaggaagagca

SEQ ID NO: 835738 - RNA, 19 nt, Artificial Sequence
  Description of Artificial Sequence: Synthetic oligonucleotide
gaugcugaacggugggccc

SEQ ID NO: 835739 - RNA, 19 nt, Artificial Sequence
  Description of Artificial Sequence: Synthetic oligonucleotide
aauaggcucucggacucag

SEQ ID NO: 835740 - RNA, 19 nt, Artificial Sequence
  Description of Artificial Sequence: Synthetic oligonucleotide
uggucuugucaaucagccg

SEQ ID NO: 835741 - RNA, 19 nt, Artificial Sequence
  Description of Artificial Sequence: Synthetic oligonucleotide
cauagcaagggguggggug

SEQ ID NO: 835742 - RNA, 19 nt, Artificial Sequence
  Description of Artificial Sequence: Synthetic oligonucleotide
uguuggaccgugacaggga

SEQ ID NO: 835743 - RNA, 19 nt, Artificial Sequence
  Description of Artificial Sequence: Synthetic oligonucleotide
gguguagggaucaaaggcc

SEQ ID NO: 835744 - RNA, 19 nt, Artificial Sequence
  Description of Artificial Sequence: Synthetic oligonucleotide
guuauggcuaggaggcugg

SEQ ID NO: 835745 - RNA, 19 nt, Artificial Sequence
  Description of Artificial Sequence: Synthetic oligonucleotide
ucgucuguaaacgccuugc

SEQ ID NO: 835746 - RNA, 19 nt, Artificial Sequence
  Description of Artificial Sequence: Synthetic oligonucleotide
agcgcuuauguuccuucuc

SEQ ID NO: 835747 - RNA, 19 nt, Artificial Sequence
  Description of Artificial Sequence: Synthetic oligonucleotide
aacaaggacuuuaguauaa

SEQ ID NO: 835748 - RNA, 19 nt, Artificial Sequence
  Description of Artificial Sequence: Synthetic oligonucleotide
ugaacggugggcccggcuc

SEQ ID NO: 835749 - RNA, 19 nt, Artificial Sequence
  Description of Artificial Sequence: Synthetic oligonucleotide
ggucaggcgcuccugagcg

SEQ ID NO: 835750 - RNA, 19 nt, Artificial Sequence
  Description of Artificial Sequence: Synthetic oligonucleotide
guuggaccgugacagggag

SEQ ID NO: 835751 - RNA, 19 nt, Artificial Sequence
  Description of Artificial Sequence: Synthetic oligonucleotide
gggguuauggcuaggaggc

SEQ ID NO: 835752 - RNA, 19 nt, Artificial Sequence
  Description of Artificial Sequence: Synthetic oligonucleotide
ugaggggcgagcacguccu

SEQ ID NO: 835753 - RNA, 19 nt, Artificial Sequence
  Description of Artificial Sequence: Synthetic oligonucleotide
agcacguccucugugaggu

SEQ ID NO: 835754 - RNA, 19 nt, Artificial Sequence
  Description of Artificial Sequence: Synthetic oligonucleotide
cuucucggcuccucggucc

SEQ ID NO: 835755 - RNA, 19 nt, Artificial Sequence
  Description of Artificial Sequence: Synthetic oligonucleotide
auagcggccaucagggcuc

SEQ ID NO: 835756 - RNA, 19 nt, Artificial Sequence
  Description of Artificial Sequence: Synthetic oligonucleotide
cugccgucaggugagaaag

SEQ ID NO: 835757 - RNA, 19 nt, Artificial Sequence
  Description of Artificial Sequence: Synthetic oligonucleotide
gaaagcaaacucgguugag

SEQ ID NO: 835758 - RNA, 19 nt, Artificial Sequence
  Description of Artificial Sequence: Synthetic oligonucleotide
agggucaggguggcgaagc

SEQ ID NO: 835759 - RNA, 19 nt, Artificial Sequence
  Description of Artificial Sequence: Synthetic oligonucleotide
ggaguugccugguugggag

SEQ ID NO: 835760 - RNA, 19 nt, Artificial Sequence
  Description of Artificial Sequence: Synthetic oligonucleotide
uagagguacagguggccac

SEQ ID NO: 835761 - RNA, 19 nt, Artificial Sequence
  Description of Artificial Sequence: Synthetic oligonucleotide
ggacuuuaguauaaauaag

SEQ ID NO: 835762 - RNA, 19 nt, Artificial Sequence
  Description of Artificial Sequence: Synthetic oligonucleotide
gcgcuuauguuccuucucg

SEQ ID NO: 835763 - RNA, 19 nt, Artificial Sequence
  Description of Artificial Sequence: Synthetic oligonucleotide
ugucauuguugcugcugcc

SEQ ID NO: 835764 - RNA, 19 nt, Artificial Sequence
  Description of Artificial Sequence: Synthetic oligonucleotide
gugguagcgcuuauguucc

SEQ ID NO: 835765 - RNA, 19 nt, Artificial Sequence
  Description of Artificial Sequence: Synthetic oligonucleotide
guacagguggccacuggcg

SEQ ID NO: 835766 - RNA, 19 nt, Artificial Sequence
  Description of Artificial Sequence: Synthetic oligonucleotide
uguggcggccgugaacugg

SEQ ID NO: 835767 - RNA, 19 nt, Artificial Sequence
  Description of Artificial Sequence: Synthetic oligonucleotide
guagaugcgcuugucgaug

SEQ ID NO: 835768 - RNA, 19 nt, Artificial Sequence
  Description of Artificial Sequence: Synthetic oligonucleotide
ucugccgucaggugagaaa

SEQ ID NO: 835769 - RNA, 19 nt, Artificial Sequence
  Description of Artificial Sequence: Synthetic oligonucleotide
uucaugagcccgcgcagaa

SEQ ID NO: 835770 - RNA, 19 nt, Artificial Sequence
  Description of Artificial Sequence: Synthetic oligonucleotide
cuauacugggguggggugc

SEQ ID NO: 835771 - RNA, 19 nt, Artificial Sequence
  Description of Artificial Sequence: Synthetic oligonucleotide
acacgacccuccgugaagg

SEQ ID NO: 835772 - RNA, 19 nt, Artificial Sequence
  Description of Artificial Sequence: Synthetic oligonucleotide
uucgagggcacagugccgu

SEQ ID NO: 835773 - RNA, 19 nt, Artificial Sequence
  Description of Artificial Sequence: Synthetic oligonucleotide
acuggcgugagaagcgagg

SEQ ID NO: 835774 - RNA, 19 nt, Artificial Sequence
  Description of Artificial Sequence: Synthetic oligonucleotide
guaaacgccuugccuggcc

SEQ ID NO: 835775 - RNA, 19 nt, Artificial Sequence
  Description of Artificial Sequence: Synthetic oligonucleotide
gacauccgagcuucacacc

SEQ ID NO: 835776 - RNA, 19 nt, Artificial Sequence
  Description of Artificial Sequence: Synthetic oligonucleotide
gagauacccucuaccacug

SEQ ID NO: 835777 - RNA, 19 nt, Artificial Sequence
  Description of Artificial Sequence: Synthetic oligonucleotide
agcagcgggaccucgugga

SEQ ID NO: 835778 - RNA, 19 nt, Artificial Sequence
  Description of Artificial Sequence: Synthetic oligonucleotide
cucggacucaggcagccac

SEQ ID NO: 835779 - RNA, 19 nt, Artificial Sequence
  Description of Artificial Sequence: Synthetic oligonucleotide
agccgcucuucauugaaaa

SEQ ID NO: 835780 - RNA, 19 nt, Artificial Sequence
  Description of Artificial Sequence: Synthetic oligonucleotide
ccgagcuugucauuguugc

SEQ ID NO: 835781 - RNA, 19 nt, Artificial Sequence
  Description of Artificial Sequence: Synthetic oligonucleotide
aaacgccuugccuggccga

SEQ ID NO: 835782 - RNA, 19 nt, Artificial Sequence
  Description of Artificial Sequence: Synthetic oligonucleotide
guggcgaagcggccgaugc

SEQ ID NO: 835783 - RNA, 19 nt, Artificial Sequence
  Description of Artificial Sequence: Synthetic oligonucleotide
guagcgcuuauguuccuuc

SEQ ID NO: 835784 - RNA, 19 nt, Artificial Sequence
  Description of Artificial Sequence: Synthetic oligonucleotide
gaacggugggcccggcucc

SEQ ID NO: 835785 - RNA, 19 nt, Artificial Sequence
  Description of Artificial Sequence: Synthetic oligonucleotide
gagcgaucuucuugcacac

SEQ ID NO: 835786 - RNA, 19 nt, Artificial Sequence
  Description of Artificial Sequence: Synthetic oligonucleotide
gcuuauguuccuucucggc

SEQ ID NO: 835787 - RNA, 19 nt, Artificial Sequence
  Description of Artificial Sequence: Synthetic oligonucleotide
acgcaggcuaggugucugc

SEQ ID NO: 835788 - RNA, 19 nt, Artificial Sequence
  Description of Artificial Sequence: Synthetic oligonucleotide
uggccggcagagaagccca

SEQ ID NO: 835789 - RNA, 19 nt, Artificial Sequence
  Description of Artificial Sequence: Synthetic oligonucleotide
gggaugaggggcgagcacg

SEQ ID NO: 835790 - RNA, 19 nt, Artificial Sequence
  Description of Artificial Sequence: Synthetic oligonucleotide
cagcucgcggcccagguug

SEQ ID NO: 835791 - RNA, 19 nt, Artificial Sequence
  Description of Artificial Sequence: Synthetic oligonucleotide
gaagcgaggaauaggcucu

SEQ ID NO: 835792 - RNA, 19 nt, Artificial Sequence
  Description of Artificial Sequence: Synthetic oligonucleotide
aagcccucacccugcuuca

SEQ ID NO: 835793 - RNA, 19 nt, Artificial Sequence
  Description of Artificial Sequence: Synthetic oligonucleotide
cacacgagcggcuccagca

SEQ ID NO: 835794 - RNA, 19 nt, Artificial Sequence
  Description of Artificial Sequence: Synthetic oligonucleotide
cacguccucugugaggucc

SEQ ID NO: 835795 - RNA, 19 nt, Artificial Sequence
  Description of Artificial Sequence: Synthetic oligonucleotide
acgauuagucuuguuacua

SEQ ID NO: 835796 - RNA, 19 nt, Artificial Sequence
  Description of Artificial Sequence: Synthetic oligonucleotide
uagcgcuuauguuccuucu

SEQ ID NO: 835797 - RNA, 19 nt, Artificial Sequence
  Description of Artificial Sequence: Synthetic oligonucleotide
ggagauacccucuaccacu

SEQ ID NO: 835798 - RNA, 19 nt, Artificial Sequence
  Description of Artificial Sequence: Synthetic oligonucleotide
acgacccuccgugaaggac

SEQ ID NO: 835799 - RNA, 19 nt, Artificial Sequence
  Description of Artificial Sequence: Synthetic oligonucleotide
uucuugcacacgagcggcu

SEQ ID NO: 835800 - RNA, 19 nt, Artificial Sequence
  Description of Artificial Sequence: Synthetic oligonucleotide
aacgccuugccuggccgag

SEQ ID NO: 835801 - RNA, 19 nt, Artificial Sequence
  Description of Artificial Sequence: Synthetic oligonucleotide
aagcgaggaauaggcucuc

SEQ ID NO: 835802 - RNA, 19 nt, Artificial Sequence
  Description of Artificial Sequence: Synthetic oligonucleotide
cugagcgaucuucuugcac

SEQ ID NO: 835803 - RNA, 19 nt, Artificial Sequence
  Description of Artificial Sequence: Synthetic oligonucleotide
cucgagccaccacacgacc

SEQ ID NO: 835804 - RNA, 19 nt, Artificial Sequence
  Description of Artificial Sequence: Synthetic oligonucleotide
cacacgacccuccgugaag

SEQ ID NO: 835805 - RNA, 19 nt, Artificial Sequence
  Description of Artificial Sequence: Synthetic oligonucleotide
uuggaccgugacagggagc

SEQ ID NO: 835806 - RNA, 19 nt, Artificial Sequence
  Description of Artificial Sequence: Synthetic oligonucleotide
gaaguacagcucgcggccc

SEQ ID NO: 835807 - RNA, 19 nt, Artificial Sequence
  Description of Artificial Sequence: Synthetic oligonucleotide
gacaugggacauccgagcu

SEQ ID NO: 835808 - RNA, 19 nt, Artificial Sequence
  Description of Artificial Sequence: Synthetic oligonucleotide
agcaugcugucaaagugga

SEQ ID NO: 835809 - RNA, 19 nt, Artificial Sequence
  Description of Artificial Sequence: Synthetic oligonucleotide
gcagugaugaugcaguccu

SEQ ID NO: 835810 - RNA, 19 nt, Artificial Sequence
  Description of Artificial Sequence: Synthetic oligonucleotide
gccgacauuguagagguac

SEQ ID NO: 835811 - RNA, 19 nt, Artificial Sequence
  Description of Artificial Sequence: Synthetic oligonucleotide
ggguacgggccagagaggg

SEQ ID NO: 835812 - RNA, 19 nt, Artificial Sequence
  Description of Artificial Sequence: Synthetic oligonucleotide
augcugaacggugggcccg

SEQ ID NO: 835813 - RNA, 19 nt, Artificial Sequence
  Description of Artificial Sequence: Synthetic oligonucleotide
gguuauggcuaggaggcug

SEQ ID NO: 835814 - RNA, 19 nt, Artificial Sequence
  Description of Artificial Sequence: Synthetic oligonucleotide
uguaaacgccuugccuggc

SEQ ID NO: 835815 - RNA, 19 nt, Artificial Sequence
  Description of Artificial Sequence: Synthetic oligonucleotide
gcaggcuauacuggggugg

SEQ ID NO: 835816 - RNA, 19 nt, Artificial Sequence
  Description of Artificial Sequence: Synthetic oligonucleotide
caauggaccgcuggcuccc

SEQ ID NO: 835817 - RNA, 19 nt, Artificial Sequence
  Description of Artificial Sequence: Synthetic oligonucleotide
auccgagcuucacaccaca

SEQ ID NO: 835818 - RNA, 19 nt, Artificial Sequence
  Description of Artificial Sequence: Synthetic oligonucleotide
gauaugucaccuuggucuu

SEQ ID NO: 835819 - RNA, 19 nt, Artificial Sequence
  Description of Artificial Sequence: Synthetic oligonucleotide
ugccgucaggugagaaagc

SEQ ID NO: 835820 - RNA, 19 nt, Artificial Sequence
  Description of Artificial Sequence: Synthetic oligonucleotide
agggcacagugccgugccc

SEQ ID NO: 835821 - RNA, 19 nt, Artificial Sequence
  Description of Artificial Sequence: Synthetic oligonucleotide
cacagcguugacccaggac

SEQ ID NO: 835822 - RNA, 19 nt, Artificial Sequence
  Description of Artificial Sequence: Synthetic oligonucleotide
gaacaaggagggccccgug

SEQ ID NO: 835823 - RNA, 19 nt, Artificial Sequence
  Description of Artificial Sequence: Synthetic oligonucleotide
agagguacagguggccacu

SEQ ID NO: 835824 - RNA, 19 nt, Artificial Sequence
  Description of Artificial Sequence: Synthetic oligonucleotide
cucgucuguaaacgccuug

SEQ ID NO: 835825 - RNA, 19 nt, Artificial Sequence
  Description of Artificial Sequence: Synthetic oligonucleotide
cauccgagcuucacaccac

SEQ ID NO: 835826 - RNA, 19 nt, Artificial Sequence
  Description of Artificial Sequence: Synthetic oligonucleotide
agggccgccgagcuuguca

SEQ ID NO: 835827 - RNA, 19 nt, Artificial Sequence
  Description of Artificial Sequence: Synthetic oligonucleotide
ggccuccauaauuuaacac

SEQ ID NO: 835828 - RNA, 19 nt, Artificial Sequence
  Description of Artificial Sequence: Synthetic oligonucleotide
gucaccaguggccggcgug

SEQ ID NO: 835829 - RNA, 19 nt, Artificial Sequence
  Description of Artificial Sequence: Synthetic oligonucleotide
acagugccgugcccagcac

SEQ ID NO: 835830 - RNA, 19 nt, Artificial Sequence
  Description of Artificial Sequence: Synthetic oligonucleotide
ucaucacgauuagucuugu

SEQ ID NO: 835831 - RNA, 19 nt, Artificial Sequence
  Description of Artificial Sequence: Synthetic oligonucleotide
cagugaccaggucaucuuc

SEQ ID NO: 835832 - RNA, 19 nt, Artificial Sequence
  Description of Artificial Sequence: Synthetic oligonucleotide
gcaugcacagggguggccg

SEQ ID NO: 835833 - RNA, 19 nt, Artificial Sequence
  Description of Artificial Sequence: Synthetic oligonucleotide
ugcugaacggugggcccgg

SEQ ID NO: 835834 - RNA, 19 nt, Artificial Sequence
  Description of Artificial Sequence: Synthetic oligonucleotide
uggccucgagccaccacac

SEQ ID NO: 835835 - RNA, 19 nt, Artificial Sequence
  Description of Artificial Sequence: Synthetic oligonucleotide
ugccugguugggaggagau

SEQ ID NO: 835836 - RNA, 19 nt, Artificial Sequence
  Description of Artificial Sequence: Synthetic oligonucleotide
acggucaggcgcuccugag

SEQ ID NO: 835837 - RNA, 19 nt, Artificial Sequence
  Description of Artificial Sequence: Synthetic oligonucleotide
ucuugcacacgagcggcuc

SEQ ID NO: 835838 - RNA, 19 nt, Artificial Sequence
  Description of Artificial Sequence: Synthetic oligonucleotide
aggcucucggacucaggca

SEQ ID NO: 835839 - RNA, 19 nt, Artificial Sequence
  Description of Artificial Sequence: Synthetic oligonucleotide
cauagcggccaucagggcu

SEQ ID NO: 835840 - RNA, 19 nt, Artificial Sequence
  Description of Artificial Sequence: Synthetic oligonucleotide
gcaggcuaggugucugccg

SEQ ID NO: 835841 - RNA, 19 nt, Artificial Sequence
  Description of Artificial Sequence: Synthetic oligonucleotide
agugccgugcccagcaccu

SEQ ID NO: 835842 - RNA, 19 nt, Artificial Sequence
  Description of Artificial Sequence: Synthetic oligonucleotide
agccuugggcaguggggag

SEQ ID NO: 835843 - RNA, 19 nt, Artificial Sequence
  Description of Artificial Sequence: Synthetic oligonucleotide
gacgcaggcuaggugucug

SEQ ID NO: 835844 - RNA, 19 nt, Artificial Sequence
  Description of Artificial Sequence: Synthetic oligonucleotide
auucgagggcacagugccg

SEQ ID NO: 835845 - RNA, 19 nt, Artificial Sequence
  Description of Artificial Sequence: Synthetic oligonucleotide
cacagugccgugcccagca

SEQ ID NO: 835846 - RNA, 19 nt, Artificial Sequence
  Description of Artificial Sequence: Synthetic oligonucleotide
agcccgcgcagaagcaugc

SEQ ID NO: 835847 - RNA, 19 nt, Artificial Sequence
  Description of Artificial Sequence: Synthetic oligonucleotide
caggguggcgaagcggccg

SEQ ID NO: 835848 - RNA, 19 nt, Artificial Sequence
  Description of Artificial Sequence: Synthetic oligonucleotide
cacuggcgugagaagcgag

SEQ ID NO: 835849 - RNA, 19 nt, Artificial Sequence
  Description of Artificial Sequence: Synthetic oligonucleotide
cugacgcaggcuagguguc

SEQ ID NO: 835850 - RNA, 19 nt, Artificial Sequence
  Description of Artificial Sequence: Synthetic oligonucleotide
gccgaugcugaacgguggg

SEQ ID NO: 835851 - RNA, 19 nt, Artificial Sequence
  Description of Artificial Sequence: Synthetic oligonucleotide
cgauuagucuuguuacuac

SEQ ID NO: 835852 - RNA, 19 nt, Artificial Sequence
  Description of Artificial Sequence: Synthetic oligonucleotide
accacacgacccuccguga

SEQ ID NO: 835853 - RNA, 19 nt, Artificial Sequence
  Description of Artificial Sequence: Synthetic oligonucleotide
gcugagccaaagcgguagg

SEQ ID NO: 835854 - RNA, 19 nt, Artificial Sequence
  Description of Artificial Sequence: Synthetic oligonucleotide
gggguggccgacauuguag

SEQ ID NO: 835855 - RNA, 19 nt, Artificial Sequence
  Description of Artificial Sequence: Synthetic oligonucleotide
ugggacauccgagcuucac

SEQ ID NO: 835856 - RNA, 19 nt, Artificial Sequence
  Description of Artificial Sequence: Synthetic oligonucleotide
caguggguugcggggagcc

SEQ ID NO: 835857 - RNA, 19 nt, Artificial Sequence
  Description of Artificial Sequence: Synthetic oligonucleotide
auaugucaccuuggucuug

SEQ ID NO: 835858 - RNA, 19 nt, Artificial Sequence
  Description of Artificial Sequence: Synthetic oligonucleotide
agcgaggaauaggcucucg

SEQ ID NO: 835859 - RNA, 19 nt, Artificial Sequence
  Description of Artificial Sequence: Synthetic oligonucleotide
uucacaccacagugccacu

SEQ ID NO: 835860 - RNA, 19 nt, Artificial Sequence
  Description of Artificial Sequence: Synthetic oligonucleotide
augcgcuugucgaugggcu

SEQ ID NO: 835861 - RNA, 19 nt, Artificial Sequence
  Description of Artificial Sequence: Synthetic oligonucleotide
ggagaguggggcuccugug

SEQ ID NO: 835862 - RNA, 19 nt, Artificial Sequence
  Description of Artificial Sequence: Synthetic oligonucleotide
ggauucgagggcacagugc

SEQ ID NO: 835863 - RNA, 19 nt, Artificial Sequence
  Description of Artificial Sequence: Synthetic oligonucleotide
gcugucaaaguggaagaca

SEQ ID NO: 835864 - RNA, 19 nt, Artificial Sequence
  Description of Artificial Sequence: Synthetic oligonucleotide
gggacauccgagcuucaca

SEQ ID NO: 835865 - RNA, 19 nt, Artificial Sequence
  Description of Artificial Sequence: Synthetic oligonucleotide
cuugccuggccgagcccag

SEQ ID NO: 835866 - RNA, 19 nt, Artificial Sequence
  Description of Artificial Sequence: Synthetic oligonucleotide
uccugcccgagagcugccg

SEQ ID NO: 835867 - RNA, 19 nt, Artificial Sequence
  Description of Artificial Sequence: Synthetic oligonucleotide
ugugccuggcaggguucgg

SEQ ID NO: 835868 - RNA, 19 nt, Artificial Sequence
  Description of Artificial Sequence: Synthetic oligonucleotide
gccacuggcgugagaagcg

SEQ ID NO: 835869 - RNA, 19 nt, Artificial Sequence
  Description of Artificial Sequence: Synthetic oligonucleotide
gccgcucuucauugaaaag

SEQ ID NO: 835870 - RNA, 19 nt, Artificial Sequence
  Description of Artificial Sequence: Synthetic oligonucleotide
cgacccuccgugaaggacc

SEQ ID NO: 835871 - RNA, 19 nt, Artificial Sequence
  Description of Artificial Sequence: Synthetic oligonucleotide
gagguacagguggccacug

SEQ ID NO: 835872 - RNA, 19 nt, Artificial Sequence
  Description of Artificial Sequence: Synthetic oligonucleotide
ucguggauucgagggcaca

SEQ ID NO: 835873 - RNA, 19 nt, Artificial Sequence
  Description of Artificial Sequence: Synthetic oligonucleotide
gccucgagccaccacacga

SEQ ID NO: 835874 - RNA, 19 nt, Artificial Sequence
  Description of Artificial Sequence: Synthetic oligonucleotide
cacgauuagucuuguuacu

SEQ ID NO: 835875 - RNA, 19 nt, Artificial Sequence
  Description of Artificial Sequence: Synthetic oligonucleotide
ugcacagggguggccgaca

SEQ ID NO: 835876 - RNA, 19 nt, Artificial Sequence
  Description of Artificial Sequence: Synthetic oligonucleotide
agggguggccgacauugua

SEQ ID NO: 835877 - RNA, 19 nt, Artificial Sequence
  Description of Artificial Sequence: Synthetic oligonucleotide
ucgagggcacagugccgug

SEQ ID NO: 835878 - RNA, 19 nt, Artificial Sequence
  Description of Artificial Sequence: Synthetic oligonucleotide
ucaccccugggauccccgu

SEQ ID NO: 835879 - RNA, 19 nt, Artificial Sequence
  Description of Artificial Sequence: Synthetic oligonucleotide
cuggcgugagaagcgagga

SEQ ID NO: 835880 - RNA, 19 nt, Artificial Sequence
  Description of Artificial Sequence: Synthetic oligonucleotide
ugacgcaggcuaggugucu

SEQ ID NO: 835881 - RNA, 19 nt, Artificial Sequence
  Description of Artificial Sequence: Synthetic oligonucleotide
ggguggccgacauuguaga

SEQ ID NO: 835882 - RNA, 19 nt, Artificial Sequence
  Description of Artificial Sequence: Synthetic oligonucleotide
gggucaggguggcgaagcg

SEQ ID NO: 835883 - RNA, 19 nt, Artificial Sequence
  Description of Artificial Sequence: Synthetic oligonucleotide
aggcuauacuggggugggg

SEQ ID NO: 835884 - RNA, 19 nt, Artificial Sequence
  Description of Artificial Sequence: Synthetic oligonucleotide
gugaacugguugaagucgu

SEQ ID NO: 835885 - RNA, 19 nt, Artificial Sequence
  Description of Artificial Sequence: Synthetic oligonucleotide
ccucgagccaccacacgac

SEQ ID NO: 835886 - RNA, 19 nt, Artificial Sequence
  Description of Artificial Sequence: Synthetic oligonucleotide
agccgggguagaaguacag

SEQ ID NO: 835887 - RNA, 19 nt, Artificial Sequence
  Description of Artificial Sequence: Synthetic oligonucleotide
gggaggagauacccucuac

SEQ ID NO: 835888 - RNA, 19 nt, Artificial Sequence
  Description of Artificial Sequence: Synthetic oligonucleotide
cauggccucgagccaccac

SEQ ID NO: 835889 - RNA, 19 nt, Artificial Sequence
  Description of Artificial Sequence: Synthetic oligonucleotide
guugccugguugggaggag

SEQ ID NO: 835890 - RNA, 19 nt, Artificial Sequence
  Description of Artificial Sequence: Synthetic oligonucleotide
caggcuaggugucugccgu

SEQ ID NO: 835891 - RNA, 19 nt, Artificial Sequence
  Description of Artificial Sequence: Synthetic oligonucleotide
acgccuugccuggccgagc

SEQ ID NO: 835892 - RNA, 19 nt, Artificial Sequence
  Description of Artificial Sequence: Synthetic oligonucleotide
caaucagccgcucuucauu

SEQ ID NO: 835893 - RNA, 19 nt, Artificial Sequence
  Description of Artificial Sequence: Synthetic oligonucleotide
uggucuccucugcccgugu

SEQ ID NO: 835894 - RNA, 19 nt, Artificial Sequence
  Description of Artificial Sequence: Synthetic oligonucleotide
agagagggaugaggggcga

SEQ ID NO: 835895 - RNA, 19 nt, Artificial Sequence
  Description of Artificial Sequence: Synthetic oligonucleotide
aguccucgaggaagagcag

SEQ ID NO: 835896 - RNA, 19 nt, Artificial Sequence
  Description of Artificial Sequence: Synthetic oligonucleotide
aacggugggcccggcucca

SEQ ID NO: 835897 - RNA, 19 nt, Artificial Sequence
  Description of Artificial Sequence: Synthetic oligonucleotide
ugguagcgcuuauguuccu

SEQ ID NO: 835898 - RNA, 19 nt, Artificial Sequence
  Description of Artificial Sequence: Synthetic oligonucleotide
gagaagcgaggaauaggcu

SEQ ID NO: 835899 - RNA, 19 nt, Artificial Sequence
  Description of Artificial Sequence: Synthetic oligonucleotide
guacagcucgcggcccagg

SEQ ID NO: 835900 - RNA, 19 nt, Artificial Sequence
  Description of Artificial Sequence: Synthetic oligonucleotide
cucgcggcccagguugaag

SEQ ID NO: 835901 - RNA, 19 nt, Artificial Sequence
  Description of Artificial Sequence: Synthetic oligonucleotide
gggugcaugcacaggggug

SEQ ID NO: 835902 - RNA, 19 nt, Artificial Sequence
  Description of Artificial Sequence: Synthetic oligonucleotide
gacccuccgugaaggacca

SEQ ID NO: 835903 - RNA, 19 nt, Artificial Sequence
  Description of Artificial Sequence: Synthetic oligonucleotide
cgaugcugaacggugggcc

SEQ ID NO: 835904 - RNA, 19 nt, Artificial Sequence
  Description of Artificial Sequence: Synthetic oligonucleotide
ggcgagcacguccucugug

SEQ ID NO: 835905 - RNA, 19 nt, Artificial Sequence
  Description of Artificial Sequence: Synthetic oligonucleotide
caugcacagggguggccga

SEQ ID NO: 835906 - RNA, 19 nt, Artificial Sequence
  Description of Artificial Sequence: Synthetic oligonucleotide
gcggcuucggggagcaggg

SEQ ID NO: 835907 - RNA, 19 nt, Artificial Sequence
  Description of Artificial Sequence: Synthetic oligonucleotide
gcuaggugucugccgucag

SEQ ID NO: 835908 - RNA, 19 nt, Artificial Sequence
  Description of Artificial Sequence: Synthetic oligonucleotide
ggcugacgcaggcuaggug

SEQ ID NO: 835909 - RNA, 19 nt, Artificial Sequence
  Description of Artificial Sequence: Synthetic oligonucleotide
gcagccgggguagaaguac

SEQ ID NO: 835910 - RNA, 19 nt, Artificial Sequence
  Description of Artificial Sequence: Synthetic oligonucleotide
cucggcuccucggucccgc

SEQ ID NO: 835911 - RNA, 19 nt, Artificial Sequence
  Description of Artificial Sequence: Synthetic oligonucleotide
cugugaggucccacaggca

SEQ ID NO: 835912 - RNA, 19 nt, Artificial Sequence
  Description of Artificial Sequence: Synthetic oligonucleotide
cagccgggguagaaguaca

SEQ ID NO: 835913 - RNA, 19 nt, Artificial Sequence
  Description of Artificial Sequence: Synthetic oligonucleotide
gccgccgagcuugucauug

SEQ ID NO: 835914 - RNA, 19 nt, Artificial Sequence
  Description of Artificial Sequence: Synthetic oligonucleotide
cacccaccgcccacuuggc

SEQ ID NO: 835915 - RNA, 19 nt, Artificial Sequence
  Description of Artificial Sequence: Synthetic oligonucleotide
guacgggccagagagggau

SEQ ID NO: 835916 - RNA, 19 nt, Artificial Sequence
  Description of Artificial Sequence: Synthetic oligonucleotide
gccgucaggugagaaagca

SEQ ID NO: 835917 - RNA, 19 nt, Artificial Sequence
  Description of Artificial Sequence: Synthetic oligonucleotide
gccgagcuugucauuguug

SEQ ID NO: 835918 - RNA, 19 nt, Artificial Sequence
  Description of Artificial Sequence: Synthetic oligonucleotide
cgaucuucuugcacacgag

SEQ ID NO: 835919 - RNA, 19 nt, Artificial Sequence
  Description of Artificial Sequence: Synthetic oligonucleotide
cuccgugaaggaccacaca

SEQ ID NO: 835920 - RNA, 19 nt, Artificial Sequence
  Description of Artificial Sequence: Synthetic oligonucleotide
ccuggcugacgcaggcuag

SEQ ID NO: 835921 - RNA, 19 nt, Artificial Sequence
  Description of Artificial Sequence: Synthetic oligonucleotide
cacggucaggcgcuccuga

SEQ ID NO: 835922 - RNA, 19 nt, Artificial Sequence
  Description of Artificial Sequence: Synthetic oligonucleotide
cgacauuguagagguacag

SEQ ID NO: 835923 - RNA, 19 nt, Artificial Sequence
  Description of Artificial Sequence: Synthetic oligonucleotide
gugggcccggcuccauggc

SEQ ID NO: 835924 - RNA, 19 nt, Artificial Sequence
  Description of Artificial Sequence: Synthetic oligonucleotide
cgaggaauaggcucucgga

SEQ ID NO: 835925 - RNA, 19 nt, Artificial Sequence
  Description of Artificial Sequence: Synthetic oligonucleotide
aguggguugcggggagccu

SEQ ID NO: 835926 - RNA, 19 nt, Artificial Sequence
  Description of Artificial Sequence: Synthetic oligonucleotide
gccaguggguugcggggag

SEQ ID NO: 835927 - RNA, 19 nt, Artificial Sequence
  Description of Artificial Sequence: Synthetic oligonucleotide
gugcaugcacagggguggc

SEQ ID NO: 835928 - RNA, 19 nt, Artificial Sequence
  Description of Artificial Sequence: Synthetic oligonucleotide
ccgggguagaaguacagcu

SEQ ID NO: 835929 - RNA, 19 nt, Artificial Sequence
  Description of Artificial Sequence: Synthetic oligonucleotide
cugcccgagagcugccgga

SEQ ID NO: 835930 - RNA, 19 nt, Artificial Sequence
  Description of Artificial Sequence: Synthetic oligonucleotide
gccgggguagaaguacagc

SEQ ID NO: 835931 - RNA, 19 nt, Artificial Sequence
  Description of Artificial Sequence: Synthetic oligonucleotide
ugcggggagccuugcucuu

SEQ ID NO: 835932 - RNA, 19 nt, Artificial Sequence
  Description of Artificial Sequence: Synthetic oligonucleotide
gugugguguagggaucaaa

SEQ ID NO: 835933 - RNA, 19 nt, Artificial Sequence
  Description of Artificial Sequence: Synthetic oligonucleotide
ccgacauuguagagguaca

SEQ ID NO: 835934 - RNA, 19 nt, Artificial Sequence
  Description of Artificial Sequence: Synthetic oligonucleotide
cguggauucgagggcacag

SEQ ID NO: 835935 - RNA, 19 nt, Artificial Sequence
  Description of Artificial Sequence: Synthetic oligonucleotide
cuguggcggccgugaacug

SEQ ID NO: 835936 - RNA, 19 nt, Artificial Sequence
  Description of Artificial Sequence: Synthetic oligonucleotide
cagccgcucuucauugaaa

SEQ ID NO: 835937 - RNA, 19 nt, Artificial Sequence
  Description of Artificial Sequence: Synthetic oligonucleotide
ggcuauacugggguggggu

SEQ ID NO: 835938 - RNA, 19 nt, Artificial Sequence
  Description of Artificial Sequence: Synthetic oligonucleotide
gccggcguggucuccucug

SEQ ID NO: 835939 - RNA, 19 nt, Artificial Sequence
  Description of Artificial Sequence: Synthetic oligonucleotide
cgcccacuuggccaguggg

SEQ ID NO: 835940 - RNA, 19 nt, Artificial Sequence
  Description of Artificial Sequence: Synthetic oligonucleotide
cgcagaagcaugcugucaa

SEQ ID NO: 835941 - RNA, 19 nt, Artificial Sequence
  Description of Artificial Sequence: Synthetic oligonucleotide
ggcuaggugucugccguca

SEQ ID NO: 835942 - RNA, 19 nt, Artificial Sequence
  Description of Artificial Sequence: Synthetic oligonucleotide
gcccgagagcugccggagg

SEQ ID NO: 835943 - RNA, 19 nt, Artificial Sequence
  Description of Artificial Sequence: Synthetic oligonucleotide
guggauucgagggcacagu

SEQ ID NO: 835944 - RNA, 19 nt, Artificial Sequence
  Description of Artificial Sequence: Synthetic oligonucleotide
ggggcuugcagagcccuuc

SEQ ID NO: 835945 - RNA, 19 nt, Artificial Sequence
  Description of Artificial Sequence: Synthetic oligonucleotide
cacgacccuccgugaagga

SEQ ID NO: 835946 - RNA, 19 nt, Artificial Sequence
  Description of Artificial Sequence: Synthetic oligonucleotide
cucggucccgccgcuccug

SEQ ID NO: 835947 - RNA, 19 nt, Artificial Sequence
  Description of Artificial Sequence: Synthetic oligonucleotide
gcccgugugguguagggau

SEQ ID NO: 835948 - RNA, 19 nt, Artificial Sequence
  Description of Artificial Sequence: Synthetic oligonucleotide
ggacucaggcagccacuuc

SEQ ID NO: 835949 - RNA, 19 nt, Artificial Sequence
  Description of Artificial Sequence: Synthetic oligonucleotide
ccgaugcugaacggugggc

SEQ ID NO: 835950 - RNA, 19 nt, Artificial Sequence
  Description of Artificial Sequence: Synthetic oligonucleotide
cccgucaccaguggccggc

SEQ ID NO: 835951 - RNA, 19 nt, Artificial Sequence
  Description of Artificial Sequence: Synthetic oligonucleotide
accgcccacuuggccagug

SEQ ID NO: 835952 - RNA, 19 nt, Artificial Sequence
  Description of Artificial Sequence: Synthetic oligonucleotide
ggggugcaugcacaggggu

SEQ ID NO: 835953 - RNA, 19 nt, Artificial Sequence
  Description of Artificial Sequence: Synthetic oligonucleotide
cugggugaccugggccaac

SEQ ID NO: 835954 - RNA, 19 nt, Artificial Sequence
  Description of Artificial Sequence: Synthetic oligonucleotide
ccggcuccauggcugcacc

SEQ ID NO: 835955 - RNA, 19 nt, Artificial Sequence
  Description of Artificial Sequence: Synthetic oligonucleotide
ggggaacaaggagggcccc

SEQ ID NO: 835956 - RNA, 19 nt, Artificial Sequence
  Description of Artificial Sequence: Synthetic oligonucleotide
gggccaacuugcuuccccu

SEQ ID NO: 835957 - RNA, 19 nt, Artificial Sequence
  Description of Artificial Sequence: Synthetic oligonucleotide
ggugugccuggcaggguuc

SEQ ID NO: 835958 - RNA, 19 nt, Artificial Sequence
  Description of Artificial Sequence: Synthetic oligonucleotide
guggcggccgugaacuggu

SEQ ID NO: 835959 - RNA, 19 nt, Artificial Sequence
  Description of Artificial Sequence: Synthetic oligonucleotide
cagcguugacccaggacuu

SEQ ID NO: 835960 - RNA, 19 nt, Artificial Sequence
  Description of Artificial Sequence: Synthetic oligonucleotide
gaccugggccaacuugcuu

SEQ ID NO: 835961 - RNA, 19 nt, Artificial Sequence
  Description of Artificial Sequence: Synthetic oligonucleotide
gcggcguggccccaggugu

SEQ ID NO: 835962 - RNA, 19 nt, Artificial Sequence
  Description of Artificial Sequence: Synthetic oligonucleotide
gccggcagagaagcccacc

SEQ ID NO: 835963 - RNA, 19 nt, Artificial Sequence
  Description of Artificial Sequence: Synthetic oligonucleotide
gucugccgucaggugagaa

SEQ ID NO: 835964 - RNA, 19 nt, Artificial Sequence
  Description of Artificial Sequence: Synthetic oligonucleotide
caggugcagaugaggcccu

SEQ ID NO: 835965 - RNA, 19 nt, Artificial Sequence
  Description of Artificial Sequence: Synthetic oligonucleotide
ccgcgcagaagcaugcugu

SEQ ID NO: 835966 - RNA, 19 nt, Artificial Sequence
  Description of Artificial Sequence: Synthetic oligonucleotide
gcgugagaagcgaggaaua

SEQ ID NO: 835967 - RNA, 19 nt, Artificial Sequence
  Description of Artificial Sequence: Synthetic oligonucleotide
agcucgcggcccagguuga

SEQ ID NO: 835968 - RNA, 19 nt, Artificial Sequence
  Description of Artificial Sequence: Synthetic oligonucleotide
acccuccgugaaggaccac

SEQ ID NO: 835969 - RNA, 19 nt, Artificial Sequence
  Description of Artificial Sequence: Synthetic oligonucleotide
ccgucaggugagaaagcaa

SEQ ID NO: 835970 - RNA, 19 nt, Artificial Sequence
  Description of Artificial Sequence: Synthetic oligonucleotide
gguacgggccagagaggga

SEQ ID NO: 835971 - RNA, 19 nt, Artificial Sequence
  Description of Artificial Sequence: Synthetic oligonucleotide
cggguacgggccagagagg

SEQ ID NO: 835972 - RNA, 19 nt, Artificial Sequence
  Description of Artificial Sequence: Synthetic oligonucleotide
ccgcccacuuggccagugg

SEQ ID NO: 835973 - RNA, 19 nt, Artificial Sequence
  Description of Artificial Sequence: Synthetic oligonucleotide
ggcccagguugaagcagac

SEQ ID NO: 835974 - RNA, 19 nt, Artificial Sequence
  Description of Artificial Sequence: Synthetic oligonucleotide
cgcaggcuaggugucugcc

SEQ ID NO: 835975 - RNA, 19 nt, Artificial Sequence
  Description of Artificial Sequence: Synthetic oligonucleotide
ccgugugguguagggauca

SEQ ID NO: 835976 - RNA, 19 nt, Artificial Sequence
  Description of Artificial Sequence: Synthetic oligonucleotide
ggaugaggggcgagcacgu

SEQ ID NO: 835977 - RNA, 19 nt, Artificial Sequence
  Description of Artificial Sequence: Synthetic oligonucleotide
ccaguggguugcggggagc

SEQ ID NO: 835978 - RNA, 19 nt, Artificial Sequence
  Description of Artificial Sequence: Synthetic oligonucleotide
cccugcuucagcaggcuau

SEQ ID NO: 835979 - RNA, 19 nt, Artificial Sequence
  Description of Artificial Sequence: Synthetic oligonucleotide
caucacgauuagucuuguu

SEQ ID NO: 835980 - RNA, 19 nt, Artificial Sequence
  Description of Artificial Sequence: Synthetic oligonucleotide
gccuugccuggccgagccc

SEQ ID NO: 835981 - RNA, 19 nt, Artificial Sequence
  Description of Artificial Sequence: Synthetic oligonucleotide
gcacggucaggcgcuccug

SEQ ID NO: 835982 - RNA, 19 nt, Artificial Sequence
  Description of Artificial Sequence: Synthetic oligonucleotide
ccacacgacccuccgugaa

SEQ ID NO: 835983 - RNA, 19 nt, Artificial Sequence
  Description of Artificial Sequence: Synthetic oligonucleotide
gguugcggggagccuugcu

SEQ ID NO: 835984 - RNA, 19 nt, Artificial Sequence
  Description of Artificial Sequence: Synthetic oligonucleotide
cccggcuccauggcugcac

SEQ ID NO: 835985 - RNA, 19 nt, Artificial Sequence
  Description of Artificial Sequence: Synthetic oligonucleotide
cuccucggucccgccgcuc

SEQ ID NO: 835986 - RNA, 19 nt, Artificial Sequence
  Description of Artificial Sequence: Synthetic oligonucleotide
gguagcgcuuauguuccuu

SEQ ID NO: 835987 - RNA, 19 nt, Artificial Sequence
  Description of Artificial Sequence: Synthetic oligonucleotide
gggccgccgagcuugucau

SEQ ID NO: 835988 - RNA, 19 nt, Artificial Sequence
  Description of Artificial Sequence: Synthetic oligonucleotide
ccgugggccuccauaauuu

SEQ ID NO: 835989 - RNA, 19 nt, Artificial Sequence
  Description of Artificial Sequence: Synthetic oligonucleotide
ggccgagcccaggugcaga

SEQ ID NO: 835990 - RNA, 19 nt, Artificial Sequence
  Description of Artificial Sequence: Synthetic oligonucleotide
cggcccagguugaagcaga

SEQ ID NO: 835991 - RNA, 19 nt, Artificial Sequence
  Description of Artificial Sequence: Synthetic oligonucleotide
gcgggaccucguggauucg

SEQ ID NO: 835992 - RNA, 19 nt, Artificial Sequence
  Description of Artificial Sequence: Synthetic oligonucleotide
gcguggccccaggugugcc

SEQ ID NO: 835993 - RNA, 19 nt, Artificial Sequence
  Description of Artificial Sequence: Synthetic oligonucleotide
gcugaacggugggcccggc

SEQ ID NO: 835994 - RNA, 19 nt, Artificial Sequence
  Description of Artificial Sequence: Synthetic oligonucleotide
gcggccgaugcugaacggu

SEQ ID NO: 835995 - RNA, 19 nt, Artificial Sequence
  Description of Artificial Sequence: Synthetic oligonucleotide
cgugggccuccauaauuua

SEQ ID NO: 835996 - RNA, 19 nt, Artificial Sequence
  Description of Artificial Sequence: Synthetic oligonucleotide
acggugggcccggcuccau

SEQ ID NO: 835997 - RNA, 19 nt, Artificial Sequence
  Description of Artificial Sequence: Synthetic oligonucleotide
cggcguggccccaggugug

SEQ ID NO: 835998 - RNA, 19 nt, Artificial Sequence
  Description of Artificial Sequence: Synthetic oligonucleotide
ccgagcccaggugcagaug

SEQ ID NO: 835999 - RNA, 19 nt, Artificial Sequence
  Description of Artificial Sequence: Synthetic oligonucleotide
cccgugggccuccauaauu

SEQ ID NO: 836000 - RNA, 19 nt, Artificial Sequence
  Description of Artificial Sequence: Synthetic oligonucleotide
cgcggcccagguugaagca

SEQ ID NO: 836001 - RNA, 19 nt, Artificial Sequence
  Description of Artificial Sequence: Synthetic oligonucleotide
gcagcgggaccucguggau

SEQ ID NO: 836002 - RNA, 19 nt, Artificial Sequence
  Description of Artificial Sequence: Synthetic oligonucleotide
cagggccgccgagcuuguc

SEQ ID NO: 836003 - RNA, 19 nt, Artificial Sequence
  Description of Artificial Sequence: Synthetic oligonucleotide
ccgcccgcuggggugagga

SEQ ID NO: 836004 - RNA, 19 nt, Artificial Sequence
  Description of Artificial Sequence: Synthetic oligonucleotide
cacagggguggccgacauu

SEQ ID NO: 836005 - RNA, 19 nt, Artificial Sequence
  Description of Artificial Sequence: Synthetic oligonucleotide
gcccuucaucacgauuagu

SEQ ID NO: 836006 - RNA, 19 nt, Artificial Sequence
  Description of Artificial Sequence: Synthetic oligonucleotide
ggccggcguggucuccucu

SEQ ID NO: 836007 - RNA, 19 nt, Artificial Sequence
  Description of Artificial Sequence: Synthetic oligonucleotide
ccucgucuguaaacgccuu

SEQ ID NO: 836008 - RNA, 19 nt, Artificial Sequence
  Description of Artificial Sequence: Synthetic oligonucleotide
cgggaccucguggauucga

SEQ ID NO: 836009 - RNA, 19 nt, Artificial Sequence
  Description of Artificial Sequence: Synthetic oligonucleotide
ccgccgagcuugucauugu

SEQ ID NO: 836010 - RNA, 19 nt, Artificial Sequence
  Description of Artificial Sequence: Synthetic oligonucleotide
ggccgacauuguagaggua

SEQ ID NO: 836011 - RNA, 19 nt, Artificial Sequence
  Description of Artificial Sequence: Synthetic oligonucleotide
cgugugguguagggaucaa

SEQ ID NO: 836012 - RNA, 19 nt, Artificial Sequence
  Description of Artificial Sequence: Synthetic oligonucleotide
cccgcccgcuggggugagg

SEQ ID NO: 836013 - RNA, 19 nt, Artificial Sequence
  Description of Artificial Sequence: Synthetic oligonucleotide
gcccgcgcagaagcaugcu

SEQ ID NO: 836014 - RNA, 19 nt, Artificial Sequence
  Description of Artificial Sequence: Synthetic oligonucleotide
ggccgccgagcuugucauu

SEQ ID NO: 836015 - RNA, 19 nt, Artificial Sequence
  Description of Artificial Sequence: Synthetic oligonucleotide
cgccgagcuugucauuguu

SEQ ID NO: 836016 - RNA, 19 nt, Artificial Sequence
  Description of Artificial Sequence: Synthetic oligonucleotide
caccgcccacuuggccagu

SEQ ID NO: 836017 - RNA, 19 nt, Artificial Sequence
  Description of Artificial Sequence: Synthetic oligonucleotide
ggguggcgaagcggccgau

SEQ ID NO: 836018 - RNA, 19 nt, Artificial Sequence
  Description of Artificial Sequence: Synthetic oligonucleotide
aauauuaugagagugacuu

SEQ ID NO: 836019 - RNA, 19 nt, Artificial Sequence
  Description of Artificial Sequence: Synthetic oligonucleotide
uguauauacaacuuaacaa

SEQ ID NO: 836020 - RNA, 19 nt, Artificial Sequence
  Description of Artificial Sequence: Synthetic oligonucleotide
uauuagaugucuuuaacug

SEQ ID NO: 836021 - RNA, 19 nt, Artificial Sequence
  Description of Artificial Sequence: Synthetic oligonucleotide
acaacuuucauacccugcc

SEQ ID NO: 836022 - RNA, 19 nt, Artificial Sequence
  Description of Artificial Sequence: Synthetic oligonucleotide
aacuuaacaacauuuuaca

SEQ ID NO: 836023 - RNA, 19 nt, Artificial Sequence
  Description of Artificial Sequence: Synthetic oligonucleotide
aguuauuugagaaauuugg

SEQ ID NO: 836024 - RNA, 19 nt, Artificial Sequence
  Description of Artificial Sequence: Synthetic oligonucleotide
aaagccuccaauauuauga

SEQ ID NO: 836025 - RNA, 19 nt, Artificial Sequence
  Description of Artificial Sequence: Synthetic oligonucleotide
uauauuagaugucuuuaac

SEQ ID NO: 836026 - RNA, 19 nt, Artificial Sequence
  Description of Artificial Sequence: Synthetic oligonucleotide
aguccaagcucucauaauc

SEQ ID NO: 836027 - RNA, 19 nt, Artificial Sequence
  Description of Artificial Sequence: Synthetic oligonucleotide
cuuaagucggacuccaggg

SEQ ID NO: 836028 - RNA, 19 nt, Artificial Sequence
  Description of Artificial Sequence: Synthetic oligonucleotide
caacuuaacaacauuuuac

SEQ ID NO: 836029 - RNA, 19 nt, Artificial Sequence
  Description of Artificial Sequence: Synthetic oligonucleotide
uauuaugagagugacuuug

SEQ ID NO: 836030 - RNA, 19 nt, Artificial Sequence
  Description of Artificial Sequence: Synthetic oligonucleotide
aguacuauggccggggagc

SEQ ID NO: 836031 - RNA, 19 nt, Artificial Sequence
  Description of Artificial Sequence: Synthetic oligonucleotide
auauuagaugucuuuaacu

SEQ ID NO: 836032 - RNA, 19 nt, Artificial Sequence
  Description of Artificial Sequence: Synthetic oligonucleotide
aauaguacuauggccgggg

SEQ ID NO: 836033 - RNA, 19 nt, Artificial Sequence
  Description of Artificial Sequence: Synthetic oligonucleotide
ucaucuucgugccuugacg

SEQ ID NO: 836034 - RNA, 19 nt, Artificial Sequence
  Description of Artificial Sequence: Synthetic oligonucleotide
gaugucuuuaacuguaaac

SEQ ID NO: 836035 - RNA, 19 nt, Artificial Sequence
  Description of Artificial Sequence: Synthetic oligonucleotide
uuuacacagcaucauggag

SEQ ID NO: 836036 - RNA, 19 nt, Artificial Sequence
  Description of Artificial Sequence: Synthetic oligonucleotide
uaagcuagugccagcaaag

SEQ ID NO: 836037 - RNA, 19 nt, Artificial Sequence
  Description of Artificial Sequence: Synthetic oligonucleotide
uuuauucucaccccacuga

SEQ ID NO: 836038 - RNA, 19 nt, Artificial Sequence
  Description of Artificial Sequence: Synthetic oligonucleotide
agguguguauuucuaaagg

SEQ ID NO: 836039 - RNA, 19 nt, Artificial Sequence
  Description of Artificial Sequence: Synthetic oligonucleotide
cuuguaacagcaagguccg

SEQ ID NO: 836040 - RNA, 19 nt, Artificial Sequence
  Description of Artificial Sequence: Synthetic oligonucleotide
cuuggauacaagcaccgcg

SEQ ID NO: 836041 - RNA, 19 nt, Artificial Sequence
  Description of Artificial Sequence: Synthetic oligonucleotide
auaaucaaaagaacugggg

SEQ ID NO: 836042 - RNA, 19 nt, Artificial Sequence
  Description of Artificial Sequence: Synthetic oligonucleotide
ugcauacggaaccaaaaca

SEQ ID NO: 836043 - RNA, 19 nt, Artificial Sequence
  Description of Artificial Sequence: Synthetic oligonucleotide
agcgaaacuucguugcccc

SEQ ID NO: 836044 - RNA, 19 nt, Artificial Sequence
  Description of Artificial Sequence: Synthetic oligonucleotide
augcauacggaaccaaaac

SEQ ID NO: 836045 - RNA, 19 nt, Artificial Sequence
  Description of Artificial Sequence: Synthetic oligonucleotide
caucucagagccaaaagug

SEQ ID NO: 836046 - RNA, 19 nt, Artificial Sequence
  Description of Artificial Sequence: Synthetic oligonucleotide
ucauggaguacacucuuug

SEQ ID NO: 836047 - RNA, 19 nt, Artificial Sequence
  Description of Artificial Sequence: Synthetic oligonucleotide
agcuagugccagcaaagcc

SEQ ID NO: 836048 - RNA, 19 nt, Artificial Sequence
  Description of Artificial Sequence: Synthetic oligonucleotide
aaagcuaaggucgcccagg

SEQ ID NO: 836049 - RNA, 19 nt, Artificial Sequence
  Description of Artificial Sequence: Synthetic oligonucleotide
aucauugccaaagcuaagg

SEQ ID NO: 836050 - RNA, 19 nt, Artificial Sequence
  Description of Artificial Sequence: Synthetic oligonucleotide
gggaauaguacuauggccg

SEQ ID NO: 836051 - RNA, 19 nt, Artificial Sequence
  Description of Artificial Sequence: Synthetic oligonucleotide
auuagaugucuuuaacugu

SEQ ID NO: 836052 - RNA, 19 nt, Artificial Sequence
  Description of Artificial Sequence: Synthetic oligonucleotide
cucgauagagcucucacug

SEQ ID NO: 836053 - RNA, 19 nt, Artificial Sequence
  Description of Artificial Sequence: Synthetic oligonucleotide
uacgcagcggcacuagagg

SEQ ID NO: 836054 - RNA, 19 nt, Artificial Sequence
  Description of Artificial Sequence: Synthetic oligonucleotide
auagagccuagcuugggag

SEQ ID NO: 836055 - RNA, 19 nt, Artificial Sequence
  Description of Artificial Sequence: Synthetic oligonucleotide
gagguguguauuucuaaag

SEQ ID NO: 836056 - RNA, 19 nt, Artificial Sequence
  Description of Artificial Sequence: Synthetic oligonucleotide
gaagacuuugggcagccgc

SEQ ID NO: 836057 - RNA, 19 nt, Artificial Sequence
  Description of Artificial Sequence: Synthetic oligonucleotide
caucuucgugccuugacgg

SEQ ID NO: 836058 - RNA, 19 nt, Artificial Sequence
  Description of Artificial Sequence: Synthetic oligonucleotide
ugcacagcaaaagauauau

SEQ ID NO: 836059 - RNA, 19 nt, Artificial Sequence
  Description of Artificial Sequence: Synthetic oligonucleotide
aggaaguuaccccuccuuc

SEQ ID NO: 836060 - RNA, 19 nt, Artificial Sequence
  Description of Artificial Sequence: Synthetic oligonucleotide
uaagucggacuccagggug

SEQ ID NO: 836061 - RNA, 19 nt, Artificial Sequence
  Description of Artificial Sequence: Synthetic oligonucleotide
uaugagagugacuuuguua

SEQ ID NO: 836062 - RNA, 19 nt, Artificial Sequence
  Description of Artificial Sequence: Synthetic oligonucleotide
uucgccuuuuccaacuuca

SEQ ID NO: 836063 - RNA, 19 nt, Artificial Sequence
  Description of Artificial Sequence: Synthetic oligonucleotide
uacaacuuaacaacauuuu

SEQ ID NO: 836064 - RNA, 19 nt, Artificial Sequence
  Description of Artificial Sequence: Synthetic oligonucleotide
uagcauuacugccuugugc

SEQ ID NO: 836065 - RNA, 19 nt, Artificial Sequence
  Description of Artificial Sequence: Synthetic oligonucleotide
ugggaauuccaaacucagg

SEQ ID NO: 836066 - RNA, 19 nt, Artificial Sequence
  Description of Artificial Sequence: Synthetic oligonucleotide
cauuuccauagucucaccc

SEQ ID NO: 836067 - RNA, 19 nt, Artificial Sequence
  Description of Artificial Sequence: Synthetic oligonucleotide
agacguuuaaacucugcca

SEQ ID NO: 836068 - RNA, 19 nt, Artificial Sequence
  Description of Artificial Sequence: Synthetic oligonucleotide
uuacgcagcggcacuagag

SEQ ID NO: 836069 - RNA, 19 nt, Artificial Sequence
  Description of Artificial Sequence: Synthetic oligonucleotide
cucucauaaucaaaagaac

SEQ ID NO: 836070 - RNA, 19 nt, Artificial Sequence
  Description of Artificial Sequence: Synthetic oligonucleotide
ucacccuuaagucggacuc

SEQ ID NO: 836071 - RNA, 19 nt, Artificial Sequence
  Description of Artificial Sequence: Synthetic oligonucleotide
ucuggagaggaaguuaccc

SEQ ID NO: 836072 - RNA, 19 nt, Artificial Sequence
  Description of Artificial Sequence: Synthetic oligonucleotide
aagcuagugccagcaaagc

SEQ ID NO: 836073 - RNA, 19 nt, Artificial Sequence
  Description of Artificial Sequence: Synthetic oligonucleotide
aauacuucacaaaggugca

SEQ ID NO: 836074 - RNA, 19 nt, Artificial Sequence
  Description of Artificial Sequence: Synthetic oligonucleotide
aagacuuugggcagccgcg

SEQ ID NO: 836075 - RNA, 19 nt, Artificial Sequence
  Description of Artificial Sequence: Synthetic oligonucleotide
uaauaagcugcgacaguug

SEQ ID NO: 836076 - RNA, 19 nt, Artificial Sequence
  Description of Artificial Sequence: Synthetic oligonucleotide
guaacagcaagguccgugc

SEQ ID NO: 836077 - RNA, 19 nt, Artificial Sequence
  Description of Artificial Sequence: Synthetic oligonucleotide
cauggaguacacucuuugg

SEQ ID NO: 836078 - RNA, 19 nt, Artificial Sequence
  Description of Artificial Sequence: Synthetic oligonucleotide
uuaaacucugccagagcgu

SEQ ID NO: 836079 - RNA, 19 nt, Artificial Sequence
  Description of Artificial Sequence: Synthetic oligonucleotide
gaauuccaaacucaggucu

SEQ ID NO: 836080 - RNA, 19 nt, Artificial Sequence
  Description of Artificial Sequence: Synthetic oligonucleotide
agaacaacaguuauguaaa

SEQ ID NO: 836081 - RNA, 19 nt, Artificial Sequence
  Description of Artificial Sequence: Synthetic oligonucleotide
agcggguccagcaaguccc

SEQ ID NO: 836082 - RNA, 19 nt, Artificial Sequence
  Description of Artificial Sequence: Synthetic oligonucleotide
uuuagacguuuaaacucug

SEQ ID NO: 836083 - RNA, 19 nt, Artificial Sequence
  Description of Artificial Sequence: Synthetic oligonucleotide
ugccgguacacccaggcga

SEQ ID NO: 836084 - RNA, 19 nt, Artificial Sequence
  Description of Artificial Sequence: Synthetic oligonucleotide
uccggcuuggauacaagca

SEQ ID NO: 836085 - RNA, 19 nt, Artificial Sequence
  Description of Artificial Sequence: Synthetic oligonucleotide
augccuugcgcgcucaccg

SEQ ID NO: 836086 - RNA, 19 nt, Artificial Sequence
  Description of Artificial Sequence: Synthetic oligonucleotide
uuaagucggacuccagggu

SEQ ID NO: 836087 - RNA, 19 nt, Artificial Sequence
  Description of Artificial Sequence: Synthetic oligonucleotide
aagucggacuccagggugc

SEQ ID NO: 836088 - RNA, 19 nt, Artificial Sequence
  Description of Artificial Sequence: Synthetic oligonucleotide
cacacaguaggugacgcgg

SEQ ID NO: 836089 - RNA, 19 nt, Artificial Sequence
  Description of Artificial Sequence: Synthetic oligonucleotide
aguauauuagaugucuuua

SEQ ID NO: 836090 - RNA, 19 nt, Artificial Sequence
  Description of Artificial Sequence: Synthetic oligonucleotide
aucuucgugccuugacggc

SEQ ID NO: 836091 - RNA, 19 nt, Artificial Sequence
  Description of Artificial Sequence: Synthetic oligonucleotide
ucggcgugcaccaugcgga

SEQ ID NO: 836092 - RNA, 19 nt, Artificial Sequence
  Description of Artificial Sequence: Synthetic oligonucleotide
ucggugauagagccuagcu

SEQ ID NO: 836093 - RNA, 19 nt, Artificial Sequence
  Description of Artificial Sequence: Synthetic oligonucleotide
gacgcggugcagcagguag

SEQ ID NO: 836094 - RNA, 19 nt, Artificial Sequence
  Description of Artificial Sequence: Synthetic oligonucleotide
ggaauaguacuauggccgg

SEQ ID NO: 836095 - RNA, 19 nt, Artificial Sequence
  Description of Artificial Sequence: Synthetic oligonucleotide
guauauuagaugucuuuaa

SEQ ID NO: 836096 - RNA, 19 nt, Artificial Sequence
  Description of Artificial Sequence: Synthetic oligonucleotide
gaaacuggcugcugggcac

SEQ ID NO: 836097 - RNA, 19 nt, Artificial Sequence
  Description of Artificial Sequence: Synthetic oligonucleotide
gcuaaggucgcccagguca

SEQ ID NO: 836098 - RNA, 19 nt, Artificial Sequence
  Description of Artificial Sequence: Synthetic oligonucleotide
cccacugacaugcauacgg

SEQ ID NO: 836099 - RNA, 19 nt, Artificial Sequence
  Description of Artificial Sequence: Synthetic oligonucleotide
gcgucugccacacaguagg

SEQ ID NO: 836100 - RNA, 19 nt, Artificial Sequence
  Description of Artificial Sequence: Synthetic oligonucleotide
cacaacuuucauacccugc

SEQ ID NO: 836101 - RNA, 19 nt, Artificial Sequence
  Description of Artificial Sequence: Synthetic oligonucleotide
gugugcacccaccagcucc

SEQ ID NO: 836102 - RNA, 19 nt, Artificial Sequence
  Description of Artificial Sequence: Synthetic oligonucleotide
cuggugacgcgcaucgucc

SEQ ID NO: 836103 - RNA, 19 nt, Artificial Sequence
  Description of Artificial Sequence: Synthetic oligonucleotide
acuauggccggggagccac

SEQ ID NO: 836104 - RNA, 19 nt, Artificial Sequence
  Description of Artificial Sequence: Synthetic oligonucleotide
agagccuagcuugggagcg

SEQ ID NO: 836105 - RNA, 19 nt, Artificial Sequence
  Description of Artificial Sequence: Synthetic oligonucleotide
ggggaauaguacuauggcc

SEQ ID NO: 836106 - RNA, 19 nt, Artificial Sequence
  Description of Artificial Sequence: Synthetic oligonucleotide
uaaacaguccaagcucuca

SEQ ID NO: 836107 - RNA, 19 nt, Artificial Sequence
  Description of Artificial Sequence: Synthetic oligonucleotide
ucgauagagcucucacugc

SEQ ID NO: 836108 - RNA, 19 nt, Artificial Sequence
  Description of Artificial Sequence: Synthetic oligonucleotide
gagauauugaugacagaga

SEQ ID NO: 836109 - RNA, 19 nt, Artificial Sequence
  Description of Artificial Sequence: Synthetic oligonucleotide
uagagccuagcuugggagc

SEQ ID NO: 836110 - RNA, 19 nt, Artificial Sequence
  Description of Artificial Sequence: Synthetic oligonucleotide
caugccgguacacccaggc

SEQ ID NO: 836111 - RNA, 19 nt, Artificial Sequence
  Description of Artificial Sequence: Synthetic oligonucleotide
uacacccaggcgaagacuu

SEQ ID NO: 836112 - RNA, 19 nt, Artificial Sequence
  Description of Artificial Sequence: Synthetic oligonucleotide
acggaaccaaaacaaugcu

SEQ ID NO: 836113 - RNA, 19 nt, Artificial Sequence
  Description of Artificial Sequence: Synthetic oligonucleotide
gaauaguacuauggccggg

SEQ ID NO: 836114 - RNA, 19 nt, Artificial Sequence
  Description of Artificial Sequence: Synthetic oligonucleotide
gagaggaaguuaccccucc

SEQ ID NO: 836115 - RNA, 19 nt, Artificial Sequence
  Description of Artificial Sequence: Synthetic oligonucleotide
cuuuagacguuuaaacucu

SEQ ID NO: 836116 - RNA, 19 nt, Artificial Sequence
  Description of Artificial Sequence: Synthetic oligonucleotide
gggcagguaagcuagugcc

SEQ ID NO: 836117 - RNA, 19 nt, Artificial Sequence
  Description of Artificial Sequence: Synthetic oligonucleotide
gacugcgcuccacuggcgg

SEQ ID NO: 836118 - RNA, 19 nt, Artificial Sequence
  Description of Artificial Sequence: Synthetic oligonucleotide
ucuucgugccuugacggcc

SEQ ID NO: 836119 - RNA, 19 nt, Artificial Sequence
  Description of Artificial Sequence: Synthetic oligonucleotide
caagugcauagccaccacc

SEQ ID NO: 836120 - RNA, 19 nt, Artificial Sequence
  Description of Artificial Sequence: Synthetic oligonucleotide
acuagagggauggugugug

SEQ ID NO: 836121 - RNA, 19 nt, Artificial Sequence
  Description of Artificial Sequence: Synthetic oligonucleotide
acugcgcuccacuggcggc

SEQ ID NO: 836122 - RNA, 19 nt, Artificial Sequence
  Description of Artificial Sequence: Synthetic oligonucleotide
agcaaagccuccaauauua

SEQ ID NO: 836123 - RNA, 19 nt, Artificial Sequence
  Description of Artificial Sequence: Synthetic oligonucleotide
acgcagcggcacuagaggg

SEQ ID NO: 836124 - RNA, 19 nt, Artificial Sequence
  Description of Artificial Sequence: Synthetic oligonucleotide
uuaccccuccuucccaagc

SEQ ID NO: 836125 - RNA, 19 nt, Artificial Sequence
  Description of Artificial Sequence: Synthetic oligonucleotide
ggaaguuaccccuccuucc

SEQ ID NO: 836126 - RNA, 19 nt, Artificial Sequence
  Description of Artificial Sequence: Synthetic oligonucleotide
uuaugagagugacuuuguu

SEQ ID NO: 836127 - RNA, 19 nt, Artificial Sequence
  Description of Artificial Sequence: Synthetic oligonucleotide
cccaguacaguuauuugag

SEQ ID NO: 836128 - RNA, 19 nt, Artificial Sequence
  Description of Artificial Sequence: Synthetic oligonucleotide
uagaugucuuuaacuguaa

SEQ ID NO: 836129 - RNA, 19 nt, Artificial Sequence
  Description of Artificial Sequence: Synthetic oligonucleotide
aggaccagaggguuugcca

SEQ ID NO: 836130 - RNA, 19 nt, Artificial Sequence
  Description of Artificial Sequence: Synthetic oligonucleotide
aaguccccacauuccaagu

SEQ ID NO: 836131 - RNA, 19 nt, Artificial Sequence
  Description of Artificial Sequence: Synthetic oligonucleotide
aaguuaccccuccuuccca

SEQ ID NO: 836132 - RNA, 19 nt, Artificial Sequence
  Description of Artificial Sequence: Synthetic oligonucleotide
uccccaguacaguuauuug

SEQ ID NO: 836133 - RNA, 19 nt, Artificial Sequence
  Description of Artificial Sequence: Synthetic oligonucleotide
cuugggagcgcugcgacug

SEQ ID NO: 836134 - RNA, 19 nt, Artificial Sequence
  Description of Artificial Sequence: Synthetic oligonucleotide
ugucgugccugucucuccu

SEQ ID NO: 836135 - RNA, 19 nt, Artificial Sequence
  Description of Artificial Sequence: Synthetic oligonucleotide
guaagcuagugccagcaaa

SEQ ID NO: 836136 - RNA, 19 nt, Artificial Sequence
  Description of Artificial Sequence: Synthetic oligonucleotide
caugcauacggaaccaaaa

SEQ ID NO: 836137 - RNA, 19 nt, Artificial Sequence
  Description of Artificial Sequence: Synthetic oligonucleotide
uggcagcguagcauuacug

SEQ ID NO: 836138 - RNA, 19 nt, Artificial Sequence
  Description of Artificial Sequence: Synthetic oligonucleotide
auaagcugcgacaguuggg

SEQ ID NO: 836139 - RNA, 19 nt, Artificial Sequence
  Description of Artificial Sequence: Synthetic oligonucleotide
gauggugugugcacccacc

SEQ ID NO: 836140 - RNA, 19 nt, Artificial Sequence
  Description of Artificial Sequence: Synthetic oligonucleotide
ggaccagaggguuugccag

SEQ ID NO: 836141 - RNA, 19 nt, Artificial Sequence
  Description of Artificial Sequence: Synthetic oligonucleotide
ugucucucgcuugucgugc

SEQ ID NO: 836142 - RNA, 19 nt, Artificial Sequence
  Description of Artificial Sequence: Synthetic oligonucleotide
uacaguuauuugagaaauu

SEQ ID NO: 836143 - RNA, 19 nt, Artificial Sequence
  Description of Artificial Sequence: Synthetic oligonucleotide
accucuagcccgcccuucg

SEQ ID NO: 836144 - RNA, 19 nt, Artificial Sequence
  Description of Artificial Sequence: Synthetic oligonucleotide
cuaaggucgcccaggucac

SEQ ID NO: 836145 - RNA, 19 nt, Artificial Sequence
  Description of Artificial Sequence: Synthetic oligonucleotide
aaacucaggucuggaccuc

SEQ ID NO: 836146 - RNA, 19 nt, Artificial Sequence
  Description of Artificial Sequence: Synthetic oligonucleotide
caucauugccaaagcuaag

SEQ ID NO: 836147 - RNA, 19 nt, Artificial Sequence
  Description of Artificial Sequence: Synthetic oligonucleotide
cuagcuugggagcgcugcg

SEQ ID NO: 836148 - RNA, 19 nt, Artificial Sequence
  Description of Artificial Sequence: Synthetic oligonucleotide
caaagcuaaggucgcccag

SEQ ID NO: 836149 - RNA, 19 nt, Artificial Sequence
  Description of Artificial Sequence: Synthetic oligonucleotide
auuaugagagugacuuugu

SEQ ID NO: 836150 - RNA, 19 nt, Artificial Sequence
  Description of Artificial Sequence: Synthetic oligonucleotide
agcaagguccgugcaagag

SEQ ID NO: 836151 - RNA, 19 nt, Artificial Sequence
  Description of Artificial Sequence: Synthetic oligonucleotide
uccccacauuccaagugca

SEQ ID NO: 836152 - RNA, 19 nt, Artificial Sequence
  Description of Artificial Sequence: Synthetic oligonucleotide
ugacaugcauacggaacca

SEQ ID NO: 836153 - RNA, 19 nt, Artificial Sequence
  Description of Artificial Sequence: Synthetic oligonucleotide
ugcgcgcucaccgucagcu

SEQ ID NO: 836154 - RNA, 19 nt, Artificial Sequence
  Description of Artificial Sequence: Synthetic oligonucleotide
guaggugacgcggugcagc

SEQ ID NO: 836155 - RNA, 19 nt, Artificial Sequence
  Description of Artificial Sequence: Synthetic oligonucleotide
aggcgaagacuuugggcag

SEQ ID NO: 836156 - RNA, 19 nt, Artificial Sequence
  Description of Artificial Sequence: Synthetic oligonucleotide
uccucggugauagagccua

SEQ ID NO: 836157 - RNA, 19 nt, Artificial Sequence
  Description of Artificial Sequence: Synthetic oligonucleotide
cacggagaaguugucuggg

SEQ ID NO: 836158 - RNA, 19 nt, Artificial Sequence
  Description of Artificial Sequence: Synthetic oligonucleotide
auauuaugagagugacuuu

SEQ ID NO: 836159 - RNA, 19 nt, Artificial Sequence
  Description of Artificial Sequence: Synthetic oligonucleotide
ugucggaggcacagcccgg

SEQ ID NO: 836160 - RNA, 19 nt, Artificial Sequence
  Description of Artificial Sequence: Synthetic oligonucleotide
ucuagcccgcccuucgccu

SEQ ID NO: 836161 - RNA, 19 nt, Artificial Sequence
  Description of Artificial Sequence: Synthetic oligonucleotide
gcagcguagcauuacugcc

SEQ ID NO: 836162 - RNA, 19 nt, Artificial Sequence
  Description of Artificial Sequence: Synthetic oligonucleotide
ccgcuuuagacguuuaaac

SEQ ID NO: 836163 - RNA, 19 nt, Artificial Sequence
  Description of Artificial Sequence: Synthetic oligonucleotide
auaguacuauggccgggga

SEQ ID NO: 836164 - RNA, 19 nt, Artificial Sequence
  Description of Artificial Sequence: Synthetic oligonucleotide
agguaagcuagugccagca

SEQ ID NO: 836165 - RNA, 19 nt, Artificial Sequence
  Description of Artificial Sequence: Synthetic oligonucleotide
cuuagccggaguagggcuc

SEQ ID NO: 836166 - RNA, 19 nt, Artificial Sequence
  Description of Artificial Sequence: Synthetic oligonucleotide
augagauauugaugacaga

SEQ ID NO: 836167 - RNA, 19 nt, Artificial Sequence
  Description of Artificial Sequence: Synthetic oligonucleotide
cccagcgaaacuucguugc

SEQ ID NO: 836168 - RNA, 19 nt, Artificial Sequence
  Description of Artificial Sequence: Synthetic oligonucleotide
uggcagacgucugguagag

SEQ ID NO: 836169 - RNA, 19 nt, Artificial Sequence
  Description of Artificial Sequence: Synthetic oligonucleotide
cagacgucugguagagcag

SEQ ID NO: 836170 - RNA, 19 nt, Artificial Sequence
  Description of Artificial Sequence: Synthetic oligonucleotide
agaggaaguuaccccuccu

SEQ ID NO: 836171 - RNA, 19 nt, Artificial Sequence
  Description of Artificial Sequence: Synthetic oligonucleotide
gagaaguugucugggagcu

SEQ ID NO: 836172 - RNA, 19 nt, Artificial Sequence
  Description of Artificial Sequence: Synthetic oligonucleotide
ggcuuggauacaagcaccg

SEQ ID NO: 836173 - RNA, 19 nt, Artificial Sequence
  Description of Artificial Sequence: Synthetic oligonucleotide
ucaugccgguacacccagg

SEQ ID NO: 836174 - RNA, 19 nt, Artificial Sequence
  Description of Artificial Sequence: Synthetic oligonucleotide
ccuucuccggcuuggauac

SEQ ID NO: 836175 - RNA, 19 nt, Artificial Sequence
  Description of Artificial Sequence: Synthetic oligonucleotide
ucgcccgacagcaggcgug

SEQ ID NO: 836176 - RNA, 19 nt, Artificial Sequence
  Description of Artificial Sequence: Synthetic oligonucleotide
acuuugggcagccgcgcgu

SEQ ID NO: 836177 - RNA, 19 nt, Artificial Sequence
  Description of Artificial Sequence: Synthetic oligonucleotide
cagcgaaacuucguugccc

SEQ ID NO: 836178 - RNA, 19 nt, Artificial Sequence
  Description of Artificial Sequence: Synthetic oligonucleotide
agcuaaggucgcccagguc

SEQ ID NO: 836179 - RNA, 19 nt, Artificial Sequence
  Description of Artificial Sequence: Synthetic oligonucleotide
guuaccccuccuucccaag

SEQ ID NO: 836180 - RNA, 19 nt, Artificial Sequence
  Description of Artificial Sequence: Synthetic oligonucleotide
aguuaccccuccuucccaa

SEQ ID NO: 836181 - RNA, 19 nt, Artificial Sequence
  Description of Artificial Sequence: Synthetic oligonucleotide
uccgugcaagagcagcuua

SEQ ID NO: 836182 - RNA, 19 nt, Artificial Sequence
  Description of Artificial Sequence: Synthetic oligonucleotide
uggugacgcgcaucguccc

SEQ ID NO: 836183 - RNA, 19 nt, Artificial Sequence
  Description of Artificial Sequence: Synthetic oligonucleotide
ggcgugucacccuuaaguc

SEQ ID NO: 836184 - RNA, 19 nt, Artificial Sequence
  Description of Artificial Sequence: Synthetic oligonucleotide
uuccaaacucaggucugga

SEQ ID NO: 836185 - RNA, 19 nt, Artificial Sequence
  Description of Artificial Sequence: Synthetic oligonucleotide
cacaguaggugacgcggug

SEQ ID NO: 836186 - RNA, 19 nt, Artificial Sequence
  Description of Artificial Sequence: Synthetic oligonucleotide
cagcggguccagcaagucc

SEQ ID NO: 836187 - RNA, 19 nt, Artificial Sequence
  Description of Artificial Sequence: Synthetic oligonucleotide
cucaggucuggaccucaag

SEQ ID NO: 836188 - RNA, 19 nt, Artificial Sequence
  Description of Artificial Sequence: Synthetic oligonucleotide
gguacacccaggcgaagac

SEQ ID NO: 836189 - RNA, 19 nt, Artificial Sequence
  Description of Artificial Sequence: Synthetic oligonucleotide
guacuauggccggggagcc

SEQ ID NO: 836190 - RNA, 19 nt, Artificial Sequence
  Description of Artificial Sequence: Synthetic oligonucleotide
acaugcauacggaaccaaa

SEQ ID NO: 836191 - RNA, 19 nt, Artificial Sequence
  Description of Artificial Sequence: Synthetic oligonucleotide
cucggugauagagccuagc

SEQ ID NO: 836192 - RNA, 19 nt, Artificial Sequence
  Description of Artificial Sequence: Synthetic oligonucleotide
agucggacuccagggugcg

SEQ ID NO: 836193 - RNA, 19 nt, Artificial Sequence
  Description of Artificial Sequence: Synthetic oligonucleotide
uugggagcgcugcgacugc

SEQ ID NO: 836194 - RNA, 19 nt, Artificial Sequence
  Description of Artificial Sequence: Synthetic oligonucleotide
cacccuuaagucggacucc

SEQ ID NO: 836195 - RNA, 19 nt, Artificial Sequence
  Description of Artificial Sequence: Synthetic oligonucleotide
acccuuaagucggacucca

SEQ ID NO: 836196 - RNA, 19 nt, Artificial Sequence
  Description of Artificial Sequence: Synthetic oligonucleotide
uagagcucucacugcccgu

SEQ ID NO: 836197 - RNA, 19 nt, Artificial Sequence
  Description of Artificial Sequence: Synthetic oligonucleotide
cguuuaaacucugccagag

SEQ ID NO: 836198 - RNA, 19 nt, Artificial Sequence
  Description of Artificial Sequence: Synthetic oligonucleotide
ugccaaagcuaaggucgcc

SEQ ID NO: 836199 - RNA, 19 nt, Artificial Sequence
  Description of Artificial Sequence: Synthetic oligonucleotide
aggcgcacggagaaguugu

SEQ ID NO: 836200 - RNA, 19 nt, Artificial Sequence
  Description of Artificial Sequence: Synthetic oligonucleotide
gcgacugcgcuccacuggc

SEQ ID NO: 836201 - RNA, 19 nt, Artificial Sequence
  Description of Artificial Sequence: Synthetic oligonucleotide
ggugacgcgcaucgucccg

SEQ ID NO: 836202 - RNA, 19 nt, Artificial Sequence
  Description of Artificial Sequence: Synthetic oligonucleotide
acccaggcgaagacuuugg

SEQ ID NO: 836203 - RNA, 19 nt, Artificial Sequence
  Description of Artificial Sequence: Synthetic oligonucleotide
guaaacaguccaagcucuc

SEQ ID NO: 836204 - RNA, 19 nt, Artificial Sequence
  Description of Artificial Sequence: Synthetic oligonucleotide
ugggagcgcugcgacugcg

SEQ ID NO: 836205 - RNA, 19 nt, Artificial Sequence
  Description of Artificial Sequence: Synthetic oligonucleotide
gcuagugccagcaaagccu

SEQ ID NO: 836206 - RNA, 19 nt, Artificial Sequence
  Description of Artificial Sequence: Synthetic oligonucleotide
ugacgcgcaucgucccgcc

SEQ ID NO: 836207 - RNA, 19 nt, Artificial Sequence
  Description of Artificial Sequence: Synthetic oligonucleotide
cgucugguagagcagcagg

SEQ ID NO: 836208 - RNA, 19 nt, Artificial Sequence
  Description of Artificial Sequence: Synthetic oligonucleotide
cacugacaugcauacggaa

SEQ ID NO: 836209 - RNA, 19 nt, Artificial Sequence
  Description of Artificial Sequence: Synthetic oligonucleotide
gccaaagcuaaggucgccc

SEQ ID NO: 836210 - RNA, 19 nt, Artificial Sequence
  Description of Artificial Sequence: Synthetic oligonucleotide
cuugcgcgcucaccgucag

SEQ ID NO: 836211 - RNA, 19 nt, Artificial Sequence
  Description of Artificial Sequence: Synthetic oligonucleotide
ccccaguacaguuauuuga

SEQ ID NO: 836212 - RNA, 19 nt, Artificial Sequence
  Description of Artificial Sequence: Synthetic oligonucleotide
gacgcgcaucgucccgccg

SEQ ID NO: 836213 - RNA, 19 nt, Artificial Sequence
  Description of Artificial Sequence: Synthetic oligonucleotide
gcuggugacgcgcaucguc

SEQ ID NO: 836214 - RNA, 19 nt, Artificial Sequence
  Description of Artificial Sequence: Synthetic oligonucleotide
agcaccgcguggcagcgua

SEQ ID NO: 836215 - RNA, 19 nt, Artificial Sequence
  Description of Artificial Sequence: Synthetic oligonucleotide
gcacuagagggauggugug

SEQ ID NO: 836216 - RNA, 19 nt, Artificial Sequence
  Description of Artificial Sequence: Synthetic oligonucleotide
cagagcguuggcagacguc

SEQ ID NO: 836217 - RNA, 19 nt, Artificial Sequence
  Description of Artificial Sequence: Synthetic oligonucleotide
gacaugcauacggaaccaa

SEQ ID NO: 836218 - RNA, 19 nt, Artificial Sequence
  Description of Artificial Sequence: Synthetic oligonucleotide
caggaccagaggguuugcc

SEQ ID NO: 836219 - RNA, 19 nt, Artificial Sequence
  Description of Artificial Sequence: Synthetic oligonucleotide
gaucuugcccacgcuaggu

SEQ ID NO: 836220 - RNA, 19 nt, Artificial Sequence
  Description of Artificial Sequence: Synthetic oligonucleotide
cugcgacugcgcuccacug

SEQ ID NO: 836221 - RNA, 19 nt, Artificial Sequence
  Description of Artificial Sequence: Synthetic oligonucleotide
uucgugccuugacggccug

SEQ ID NO: 836222 - RNA, 19 nt, Artificial Sequence
  Description of Artificial Sequence: Synthetic oligonucleotide
ggugcgcacaucauugcca

SEQ ID NO: 836223 - RNA, 19 nt, Artificial Sequence
  Description of Artificial Sequence: Synthetic oligonucleotide
gcagcuuacgcagcggcac

SEQ ID NO: 836224 - RNA, 19 nt, Artificial Sequence
  Description of Artificial Sequence: Synthetic oligonucleotide
ugccuugcgcgcucaccgu

SEQ ID NO: 836225 - RNA, 19 nt, Artificial Sequence
  Description of Artificial Sequence: Synthetic oligonucleotide
acacaguaggugacgcggu

SEQ ID NO: 836226 - RNA, 19 nt, Artificial Sequence
  Description of Artificial Sequence: Synthetic oligonucleotide
cuuacgcagcggcacuaga

SEQ ID NO: 836227 - RNA, 19 nt, Artificial Sequence
  Description of Artificial Sequence: Synthetic oligonucleotide
ucgaggugcuccucuucuu

SEQ ID NO: 836228 - RNA, 19 nt, Artificial Sequence
  Description of Artificial Sequence: Synthetic oligonucleotide
ccagcgaaacuucguugcc

SEQ ID NO: 836229 - RNA, 19 nt, Artificial Sequence
  Description of Artificial Sequence: Synthetic oligonucleotide
agccgcgcgucugccacac

SEQ ID NO: 836230 - RNA, 19 nt, Artificial Sequence
  Description of Artificial Sequence: Synthetic oligonucleotide
gcccagcgaaacuucguug

SEQ ID NO: 836231 - RNA, 19 nt, Artificial Sequence
  Description of Artificial Sequence: Synthetic oligonucleotide
uguggggugccaggcgcac

SEQ ID NO: 836232 - RNA, 19 nt, Artificial Sequence
  Description of Artificial Sequence: Synthetic oligonucleotide
ggcacuagagggauggugu

SEQ ID NO: 836233 - RNA, 19 nt, Artificial Sequence
  Description of Artificial Sequence: Synthetic oligonucleotide
caggcgcacggagaaguug

SEQ ID NO: 836234 - RNA, 19 nt, Artificial Sequence
  Description of Artificial Sequence: Synthetic oligonucleotide
accgcguggcagcguagca

SEQ ID NO: 836235 - RNA, 19 nt, Artificial Sequence
  Description of Artificial Sequence: Synthetic oligonucleotide
guacacucuuugggacagg

SEQ ID NO: 836236 - RNA, 19 nt, Artificial Sequence
  Description of Artificial Sequence: Synthetic oligonucleotide
cccucgauagagcucucac

SEQ ID NO: 836237 - RNA, 19 nt, Artificial Sequence
  Description of Artificial Sequence: Synthetic oligonucleotide
cacuggcggcuuguaacag

SEQ ID NO: 836238 - RNA, 19 nt, Artificial Sequence
  Description of Artificial Sequence: Synthetic oligonucleotide
ccgugcaagagcagcuuac

SEQ ID NO: 836239 - RNA, 19 nt, Artificial Sequence
  Description of Artificial Sequence: Synthetic oligonucleotide
gagccuagcuugggagcgc

SEQ ID NO: 836240 - RNA, 19 nt, Artificial Sequence
  Description of Artificial Sequence: Synthetic oligonucleotide
uacuauggccggggagcca

SEQ ID NO: 836241 - RNA, 19 nt, Artificial Sequence
  Description of Artificial Sequence: Synthetic oligonucleotide
gucccgccgcuuuagacgu

SEQ ID NO: 836242 - RNA, 19 nt, Artificial Sequence
  Description of Artificial Sequence: Synthetic oligonucleotide
gagcgcugcgacugcgcuc

SEQ ID NO: 836243 - RNA, 19 nt, Artificial Sequence
  Description of Artificial Sequence: Synthetic oligonucleotide
uugcgcgcucaccgucagc

SEQ ID NO: 836244 - RNA, 19 nt, Artificial Sequence
  Description of Artificial Sequence: Synthetic oligonucleotide
aucauggaguacacucuuu

SEQ ID NO: 836245 - RNA, 19 nt, Artificial Sequence
  Description of Artificial Sequence: Synthetic oligonucleotide
ggggcaagaugggagagaa

SEQ ID NO: 836246 - RNA, 19 nt, Artificial Sequence
  Description of Artificial Sequence: Synthetic oligonucleotide
caccgcguggcagcguagc

SEQ ID NO: 836247 - RNA, 19 nt, Artificial Sequence
  Description of Artificial Sequence: Synthetic oligonucleotide
cucgaggugcuccucuucu

SEQ ID NO: 836248 - RNA, 19 nt, Artificial Sequence
  Description of Artificial Sequence: Synthetic oligonucleotide
gcuuggauacaagcaccgc

SEQ ID NO: 836249 - RNA, 19 nt, Artificial Sequence
  Description of Artificial Sequence: Synthetic oligonucleotide
caucuaggcuggugccauc

SEQ ID NO: 836250 - RNA, 19 nt, Artificial Sequence
  Description of Artificial Sequence: Synthetic oligonucleotide
ugcgacaguugggccuuca

SEQ ID NO: 836251 - RNA, 19 nt, Artificial Sequence
  Description of Artificial Sequence: Synthetic oligonucleotide
ccaaagcuaaggucgccca

SEQ ID NO: 836252 - RNA, 19 nt, Artificial Sequence
  Description of Artificial Sequence: Synthetic oligonucleotide
agccuagcuugggagcgcu

SEQ ID NO: 836253 - RNA, 19 nt, Artificial Sequence
  Description of Artificial Sequence: Synthetic oligonucleotide
guggcagcguagcauuacu

SEQ ID NO: 836254 - RNA, 19 nt, Artificial Sequence
  Description of Artificial Sequence: Synthetic oligonucleotide
uuguaacagcaagguccgu

SEQ ID NO: 836255 - RNA, 19 nt, Artificial Sequence
  Description of Artificial Sequence: Synthetic oligonucleotide
cacugcccgugcucucgcc

SEQ ID NO: 836256 - RNA, 19 nt, Artificial Sequence
  Description of Artificial Sequence: Synthetic oligonucleotide
ggcgaagacuuugggcagc

SEQ ID NO: 836257 - RNA, 19 nt, Artificial Sequence
  Description of Artificial Sequence: Synthetic oligonucleotide
gguaagcuagugccagcaa

SEQ ID NO: 836258 - RNA, 19 nt, Artificial Sequence
  Description of Artificial Sequence: Synthetic oligonucleotide
ggggcccagcgaaacuucg

SEQ ID NO: 836259 - RNA, 19 nt, Artificial Sequence
  Description of Artificial Sequence: Synthetic oligonucleotide
gcuuagccggaguagggcu

SEQ ID NO: 836260 - RNA, 19 nt, Artificial Sequence
  Description of Artificial Sequence: Synthetic oligonucleotide
gcacaucauugccaaagcu

SEQ ID NO: 836261 - RNA, 19 nt, Artificial Sequence
  Description of Artificial Sequence: Synthetic oligonucleotide
ccgcgcgucugccacacag

SEQ ID NO: 836262 - RNA, 19 nt, Artificial Sequence
  Description of Artificial Sequence: Synthetic oligonucleotide
acccucgauagagcucuca

SEQ ID NO: 836263 - RNA, 19 nt, Artificial Sequence
  Description of Artificial Sequence: Synthetic oligonucleotide
gcgaagacuuugggcagcc

SEQ ID NO: 836264 - RNA, 19 nt, Artificial Sequence
  Description of Artificial Sequence: Synthetic oligonucleotide
ccacugacaugcauacgga

SEQ ID NO: 836265 - RNA, 19 nt, Artificial Sequence
  Description of Artificial Sequence: Synthetic oligonucleotide
ucgugccuugacggccugc

SEQ ID NO: 836266 - RNA, 19 nt, Artificial Sequence
  Description of Artificial Sequence: Synthetic oligonucleotide
cgcuuuagacguuuaaacu

SEQ ID NO: 836267 - RNA, 19 nt, Artificial Sequence
  Description of Artificial Sequence: Synthetic oligonucleotide
cagcaagguccgugcaaga

SEQ ID NO: 836268 - RNA, 19 nt, Artificial Sequence
  Description of Artificial Sequence: Synthetic oligonucleotide
ccucguggccauucuccag

SEQ ID NO: 836269 - RNA, 19 nt, Artificial Sequence
  Description of Artificial Sequence: Synthetic oligonucleotide
guugggccuucaugucgga

SEQ ID NO: 836270 - RNA, 19 nt, Artificial Sequence
  Description of Artificial Sequence: Synthetic oligonucleotide
agcuuacgcagcggcacua

SEQ ID NO: 836271 - RNA, 19 nt, Artificial Sequence
  Description of Artificial Sequence: Synthetic oligonucleotide
cucgcuugucgugccuguc

SEQ ID NO: 836272 - RNA, 19 nt, Artificial Sequence
  Description of Artificial Sequence: Synthetic oligonucleotide
ccagaucuugcccacgcua

SEQ ID NO: 836273 - RNA, 19 nt, Artificial Sequence
  Description of Artificial Sequence: Synthetic oligonucleotide
ggucacuaauaagcugcga

SEQ ID NO: 836274 - RNA, 19 nt, Artificial Sequence
  Description of Artificial Sequence: Synthetic oligonucleotide
guacacccaggcgaagacu

SEQ ID NO: 836275 - RNA, 19 nt, Artificial Sequence
  Description of Artificial Sequence: Synthetic oligonucleotide
gccagagcguuggcagacg

SEQ ID NO: 836276 - RNA, 19 nt, Artificial Sequence
  Description of Artificial Sequence: Synthetic oligonucleotide
cgugccuugacggccugcc

SEQ ID NO: 836277 - RNA, 19 nt, Artificial Sequence
  Description of Artificial Sequence: Synthetic oligonucleotide
ccuccaauauuaugagagu

SEQ ID NO: 836278 - RNA, 19 nt, Artificial Sequence
  Description of Artificial Sequence: Synthetic oligonucleotide
cacuagagggauggugugu

SEQ ID NO: 836279 - RNA, 19 nt, Artificial Sequence
  Description of Artificial Sequence: Synthetic oligonucleotide
ccucuagcccgcccuucgc

SEQ ID NO: 836280 - RNA, 19 nt, Artificial Sequence
  Description of Artificial Sequence: Synthetic oligonucleotide
gcugcgacugcgcuccacu

SEQ ID NO: 836281 - RNA, 19 nt, Artificial Sequence
  Description of Artificial Sequence: Synthetic oligonucleotide
gucgcccaggucacuaaua

SEQ ID NO: 836282 - RNA, 19 nt, Artificial Sequence
  Description of Artificial Sequence: Synthetic oligonucleotide
ccggcaaaggaggugaugu

SEQ ID NO: 836283 - RNA, 19 nt, Artificial Sequence
  Description of Artificial Sequence: Synthetic oligonucleotide
gggcaagaugggagagaag

SEQ ID NO: 836284 - RNA, 19 nt, Artificial Sequence
  Description of Artificial Sequence: Synthetic oligonucleotide
cgcgucugccacacaguag

SEQ ID NO: 836285 - RNA, 19 nt, Artificial Sequence
  Description of Artificial Sequence: Synthetic oligonucleotide
gcccugggaauuccaaacu

SEQ ID NO: 836286 - RNA, 19 nt, Artificial Sequence
  Description of Artificial Sequence: Synthetic oligonucleotide
gccuugcgcgcucaccguc

SEQ ID NO: 836287 - RNA, 19 nt, Artificial Sequence
  Description of Artificial Sequence: Synthetic oligonucleotide
cccgcccuucgccuuuucc

SEQ ID NO: 836288 - RNA, 19 nt, Artificial Sequence
  Description of Artificial Sequence: Synthetic oligonucleotide
gcauccuuucaagaguuuu

SEQ ID NO: 836289 - RNA, 19 nt, Artificial Sequence
  Description of Artificial Sequence: Synthetic oligonucleotide
ccucgauagagcucucacu

SEQ ID NO: 836290 - RNA, 19 nt, Artificial Sequence
  Description of Artificial Sequence: Synthetic oligonucleotide
gcguagcauuacugccuug

SEQ ID NO: 836291 - RNA, 19 nt, Artificial Sequence
  Description of Artificial Sequence: Synthetic oligonucleotide
cccacauuccaagugcaua

SEQ ID NO: 836292 - RNA, 19 nt, Artificial Sequence
  Description of Artificial Sequence: Synthetic oligonucleotide
gguccgugcaagagcagcu

SEQ ID NO: 836293 - RNA, 19 nt, Artificial Sequence
  Description of Artificial Sequence: Synthetic oligonucleotide
gcgcgucugccacacagua

SEQ ID NO: 836294 - RNA, 19 nt, Artificial Sequence
  Description of Artificial Sequence: Synthetic oligonucleotide
ccucggugauagagccuag

SEQ ID NO: 836295 - RNA, 19 nt, Artificial Sequence
  Description of Artificial Sequence: Synthetic oligonucleotide
ccacccucgauagagcucu

SEQ ID NO: 836296 - RNA, 19 nt, Artificial Sequence
  Description of Artificial Sequence: Synthetic oligonucleotide
ccuccucguggccauucuc

SEQ ID NO: 836297 - RNA, 19 nt, Artificial Sequence
  Description of Artificial Sequence: Synthetic oligonucleotide
ccuugcgcgcucaccguca

SEQ ID NO: 836298 - RNA, 19 nt, Artificial Sequence
  Description of Artificial Sequence: Synthetic oligonucleotide
cgcuugucgugccugucuc

SEQ ID NO: 836299 - RNA, 19 nt, Artificial Sequence
  Description of Artificial Sequence: Synthetic oligonucleotide
cagcuuacgcagcggcacu

SEQ ID NO: 836300 - RNA, 19 nt, Artificial Sequence
  Description of Artificial Sequence: Synthetic oligonucleotide
cccgacagcaggcguguca

SEQ ID NO: 836301 - RNA, 19 nt, Artificial Sequence
  Description of Artificial Sequence: Synthetic oligonucleotide
cacccucgauagagcucuc

SEQ ID NO: 836302 - RNA, 19 nt, Artificial Sequence
  Description of Artificial Sequence: Synthetic oligonucleotide
ggcccagcgaaacuucguu

SEQ ID NO: 836303 - RNA, 19 nt, Artificial Sequence
  Description of Artificial Sequence: Synthetic oligonucleotide
cggcacuagagggauggug

SEQ ID NO: 836304 - RNA, 19 nt, Artificial Sequence
  Description of Artificial Sequence: Synthetic oligonucleotide
cguggcagcguagcauuac

SEQ ID NO: 836305 - RNA, 19 nt, Artificial Sequence
  Description of Artificial Sequence: Synthetic oligonucleotide
agggcucaucuaggcuggu

SEQ ID NO: 836306 - RNA, 19 nt, Artificial Sequence
  Description of Artificial Sequence: Synthetic oligonucleotide
gccgguacacccaggcgaa

SEQ ID NO: 836307 - RNA, 19 nt, Artificial Sequence
  Description of Artificial Sequence: Synthetic oligonucleotide
ccccacugacaugcauacg

SEQ ID NO: 836308 - RNA, 19 nt, Artificial Sequence
  Description of Artificial Sequence: Synthetic oligonucleotide
gggcaccucuagcccgccc

SEQ ID NO: 836309 - RNA, 19 nt, Artificial Sequence
  Description of Artificial Sequence: Synthetic oligonucleotide
gugccuugacggccugccu

SEQ ID NO: 836310 - RNA, 19 nt, Artificial Sequence
  Description of Artificial Sequence: Synthetic oligonucleotide
ucccgccgcuuuagacguu

SEQ ID NO: 836311 - RNA, 19 nt, Artificial Sequence
  Description of Artificial Sequence: Synthetic oligonucleotide
cucgcccgacagcaggcgu

SEQ ID NO: 836312 - RNA, 19 nt, Artificial Sequence
  Description of Artificial Sequence: Synthetic oligonucleotide
gcaucgucccgccgcuuua

SEQ ID NO: 836313 - RNA, 19 nt, Artificial Sequence
  Description of Artificial Sequence: Synthetic oligonucleotide
gcgcucgcuccucggcgug

SEQ ID NO: 836314 - RNA, 19 nt, Artificial Sequence
  Description of Artificial Sequence: Synthetic oligonucleotide
ggucgcccaggucacuaau

SEQ ID NO: 836315 - RNA, 19 nt, Artificial Sequence
  Description of Artificial Sequence: Synthetic oligonucleotide
cuucuccggcuuggauaca

SEQ ID NO: 836316 - RNA, 19 nt, Artificial Sequence
  Description of Artificial Sequence: Synthetic oligonucleotide
guccgugcaagagcagcuu

SEQ ID NO: 836317 - RNA, 19 nt, Artificial Sequence
  Description of Artificial Sequence: Synthetic oligonucleotide
gugcaccaugcggaugccu

SEQ ID NO: 836318 - RNA, 19 nt, Artificial Sequence
  Description of Artificial Sequence: Synthetic oligonucleotide
gugacgcggugcagcaggu

SEQ ID NO: 836319 - RNA, 19 nt, Artificial Sequence
  Description of Artificial Sequence: Synthetic oligonucleotide
cuauggccggggagccacu

SEQ ID NO: 836320 - RNA, 19 nt, Artificial Sequence
  Description of Artificial Sequence: Synthetic oligonucleotide
ccuugacggccugccucgc

SEQ ID NO: 836321 - RNA, 19 nt, Artificial Sequence
  Description of Artificial Sequence: Synthetic oligonucleotide
caccucugagggccugccu

SEQ ID NO: 836322 - RNA, 19 nt, Artificial Sequence
  Description of Artificial Sequence: Synthetic oligonucleotide
ccagagcguuggcagacgu

SEQ ID NO: 836323 - RNA, 19 nt, Artificial Sequence
  Description of Artificial Sequence: Synthetic oligonucleotide
gcaccgcguggcagcguag

SEQ ID NO: 836324 - RNA, 19 nt, Artificial Sequence
  Description of Artificial Sequence: Synthetic oligonucleotide
cgguacacccaggcgaaga

SEQ ID NO: 836325 - RNA, 19 nt, Artificial Sequence
  Description of Artificial Sequence: Synthetic oligonucleotide
cggugauagagccuagcuu

SEQ ID NO: 836326 - RNA, 19 nt, Artificial Sequence
  Description of Artificial Sequence: Synthetic oligonucleotide
gggcccagcgaaacuucgu

SEQ ID NO: 836327 - RNA, 19 nt, Artificial Sequence
  Description of Artificial Sequence: Synthetic oligonucleotide
cacccaccucugagggccu

SEQ ID NO: 836328 - RNA, 19 nt, Artificial Sequence
  Description of Artificial Sequence: Synthetic oligonucleotide
agcccgcccuucgccuuuu

SEQ ID NO: 836329 - RNA, 19 nt, Artificial Sequence
  Description of Artificial Sequence: Synthetic oligonucleotide
cgccgcuuuagacguuuaa

SEQ ID NO: 836330 - RNA, 19 nt, Artificial Sequence
  Description of Artificial Sequence: Synthetic oligonucleotide
cgcguggcagcguagcauu

SEQ ID NO: 836331 - RNA, 19 nt, Artificial Sequence
  Description of Artificial Sequence: Synthetic oligonucleotide
gcccgugcucucgcccgac

SEQ ID NO: 836332 - RNA, 19 nt, Artificial Sequence
  Description of Artificial Sequence: Synthetic oligonucleotide
gcguggcagcguagcauua

SEQ ID NO: 836333 - RNA, 19 nt, Artificial Sequence
  Description of Artificial Sequence: Synthetic oligonucleotide
cgcucgcuccucggcgugc

SEQ ID NO: 836334 - RNA, 19 nt, Artificial Sequence
  Description of Artificial Sequence: Synthetic oligonucleotide
ccaggcgcacggagaaguu

SEQ ID NO: 836335 - RNA, 19 nt, Artificial Sequence
  Description of Artificial Sequence: Synthetic oligonucleotide
gcgcccucugugccucagu

SEQ ID NO: 836336 - RNA, 19 nt, Artificial Sequence
  Description of Artificial Sequence: Synthetic oligonucleotide
cgcgcgucugccacacagu

SEQ ID NO: 836337 - RNA, 19 nt, Artificial Sequence
  Description of Artificial Sequence: Synthetic oligonucleotide
ccgcguggcagcguagcau

SEQ ID NO: 836338 - RNA, 19 nt, Artificial Sequence
  Description of Artificial Sequence: Synthetic oligonucleotide
gcggcacuagagggauggu

SEQ ID NO: 836339 - RNA, 19 nt, Artificial Sequence
  Description of Artificial Sequence: Synthetic oligonucleotide
cccucgaggugcuccucuu

SEQ ID NO: 836340 - RNA, 19 nt, Artificial Sequence
  Description of Artificial Sequence: Synthetic oligonucleotide
gccgcgcgucugccacaca

SEQ ID NO: 836341 - RNA, 19 nt, Artificial Sequence
  Description of Artificial Sequence: Synthetic oligonucleotide
cgcaucgucccgccgcuuu

SEQ ID NO: 836342 - RNA, 19 nt, Artificial Sequence
  Description of Artificial Sequence: Synthetic oligonucleotide
gcgcgcucaccgucagcuu

SEQ ID NO: 836343 - RNA, 19 nt, Artificial Sequence
  Description of Artificial Sequence: Synthetic oligonucleotide
gcgcugcgacugcgcucca

SEQ ID NO: 836344 - RNA, 19 nt, Artificial Sequence
  Description of Artificial Sequence: Synthetic oligonucleotide
gcccggcaaaggaggugau

SEQ ID NO: 836345 - RNA, 19 nt, Artificial Sequence
  Description of Artificial Sequence: Synthetic oligonucleotide
cgcccgacagcaggcgugu

SEQ ID NO: 836346 - RNA, 19 nt, Artificial Sequence
  Description of Artificial Sequence: Synthetic oligonucleotide
gcgcaucgucccgccgcuu

SEQ ID NO: 836347 - RNA, 19 nt, Artificial Sequence
  Description of Artificial Sequence: Synthetic oligonucleotide
cgcucaccgucagcuucau

SEQ ID NO: 836348 - RNA, 19 nt, Artificial Sequence
  Description of Artificial Sequence: Synthetic oligonucleotide
uguuagaccggcaagacgg

SEQ ID NO: 836349 - RNA, 19 nt, Artificial Sequence
  Description of Artificial Sequence: Synthetic oligonucleotide
aaaggaugaauacauuuac

SEQ ID NO: 836350 - RNA, 19 nt, Artificial Sequence
  Description of Artificial Sequence: Synthetic oligonucleotide
acuaaaucaagauaugcac

SEQ ID NO: 836351 - RNA, 19 nt, Artificial Sequence
  Description of Artificial Sequence: Synthetic oligonucleotide
aaauugauacuugagaauc

SEQ ID NO: 836352 - RNA, 19 nt, Artificial Sequence
  Description of Artificial Sequence: Synthetic oligonucleotide
uuuccuuuacacaaugacg

SEQ ID NO: 836353 - RNA, 19 nt, Artificial Sequence
  Description of Artificial Sequence: Synthetic oligonucleotide
augaucuuaaucuucauug

SEQ ID NO: 836354 - RNA, 19 nt, Artificial Sequence
  Description of Artificial Sequence: Synthetic oligonucleotide
augacuaaggacuaaauca

SEQ ID NO: 836355 - RNA, 19 nt, Artificial Sequence
  Description of Artificial Sequence: Synthetic oligonucleotide
aaugacguguugcuggggc

SEQ ID NO: 836356 - RNA, 19 nt, Artificial Sequence
  Description of Artificial Sequence: Synthetic oligonucleotide
cuuacauaaauuaaaagga

SEQ ID NO: 836357 - RNA, 19 nt, Artificial Sequence
  Description of Artificial Sequence: Synthetic oligonucleotide
guauuaaacauauaccaag

SEQ ID NO: 836358 - RNA, 19 nt, Artificial Sequence
  Description of Artificial Sequence: Synthetic oligonucleotide
aacguucccaacucaaggc

SEQ ID NO: 836359 - RNA, 19 nt, Artificial Sequence
  Description of Artificial Sequence: Synthetic oligonucleotide
aauacauuuacaguuguca

SEQ ID NO: 836360 - RNA, 19 nt, Artificial Sequence
  Description of Artificial Sequence: Synthetic oligonucleotide
ugauacuugagaaucagcu

SEQ ID NO: 836361 - RNA, 19 nt, Artificial Sequence
  Description of Artificial Sequence: Synthetic oligonucleotide
aguuaacuugaauacaagg

SEQ ID NO: 836362 - RNA, 19 nt, Artificial Sequence
  Description of Artificial Sequence: Synthetic oligonucleotide
caaguaacaacccacggcg

SEQ ID NO: 836363 - RNA, 19 nt, Artificial Sequence
  Description of Artificial Sequence: Synthetic oligonucleotide
uuaacuugaauacaagguc

SEQ ID NO: 836364 - RNA, 19 nt, Artificial Sequence
  Description of Artificial Sequence: Synthetic oligonucleotide
aaacguucccaacucaagg

SEQ ID NO: 836365 - RNA, 19 nt, Artificial Sequence
  Description of Artificial Sequence: Synthetic oligonucleotide
acggugcucacacagaucc

SEQ ID NO: 836366 - RNA, 19 nt, Artificial Sequence
  Description of Artificial Sequence: Synthetic oligonucleotide
uuccuuuacacaaugacgu

SEQ ID NO: 836367 - RNA, 19 nt, Artificial Sequence
  Description of Artificial Sequence: Synthetic oligonucleotide
aguucuacgauccagugcu

SEQ ID NO: 836368 - RNA, 19 nt, Artificial Sequence
  Description of Artificial Sequence: Synthetic oligonucleotide
cucaaggcaaguaacaacc

SEQ ID NO: 836369 - RNA, 19 nt, Artificial Sequence
  Description of Artificial Sequence: Synthetic oligonucleotide
uauuccaguuucaugaggc

SEQ ID NO: 836370 - RNA, 19 nt, Artificial Sequence
  Description of Artificial Sequence: Synthetic oligonucleotide
auuaaacauauaccaaggg

SEQ ID NO: 836371 - RNA, 19 nt, Artificial Sequence
  Description of Artificial Sequence: Synthetic oligonucleotide
aaguucuacgauccagugc

SEQ ID NO: 836372 - RNA, 19 nt, Artificial Sequence
  Description of Artificial Sequence: Synthetic oligonucleotide
caggguauuaaacauauac

SEQ ID NO: 836373 - RNA, 19 nt, Artificial Sequence
  Description of Artificial Sequence: Synthetic oligonucleotide
ucuuccauugcgaucggcg

SEQ ID NO: 836374 - RNA, 19 nt, Artificial Sequence
  Description of Artificial Sequence: Synthetic oligonucleotide
ugucauuucuuaaagaauu

SEQ ID NO: 836375 - RNA, 19 nt, Artificial Sequence
  Description of Artificial Sequence: Synthetic oligonucleotide
aaggacuaaaucaagauau

SEQ ID NO: 836376 - RNA, 19 nt, Artificial Sequence
  Description of Artificial Sequence: Synthetic oligonucleotide
gaacaguuaacuugaauac

SEQ ID NO: 836377 - RNA, 19 nt, Artificial Sequence
  Description of Artificial Sequence: Synthetic oligonucleotide
augacaaugccaguggugc

SEQ ID NO: 836378 - RNA, 19 nt, Artificial Sequence
  Description of Artificial Sequence: Synthetic oligonucleotide
ucagcaacaaguucuacga

SEQ ID NO: 836379 - RNA, 19 nt, Artificial Sequence
  Description of Artificial Sequence: Synthetic oligonucleotide
aacaguagaaaaccaaaau

SEQ ID NO: 836380 - RNA, 19 nt, Artificial Sequence
  Description of Artificial Sequence: Synthetic oligonucleotide
uaauacccugcacagauca

SEQ ID NO: 836381 - RNA, 19 nt, Artificial Sequence
  Description of Artificial Sequence: Synthetic oligonucleotide
aggguauuaaacauauacc

SEQ ID NO: 836382 - RNA, 19 nt, Artificial Sequence
  Description of Artificial Sequence: Synthetic oligonucleotide
acaguugucaaugcaaacg

SEQ ID NO: 836383 - RNA, 19 nt, Artificial Sequence
  Description of Artificial Sequence: Synthetic oligonucleotide
aaggcaaguaacaacccac

SEQ ID NO: 836384 - RNA, 19 nt, Artificial Sequence
  Description of Artificial Sequence: Synthetic oligonucleotide
uucuuaaagaauugaguac

SEQ ID NO: 836385 - RNA, 19 nt, Artificial Sequence
  Description of Artificial Sequence: Synthetic oligonucleotide
gcugauauuggauacaagc

SEQ ID NO: 836386 - RNA, 19 nt, Artificial Sequence
  Description of Artificial Sequence: Synthetic oligonucleotide
caagggaacaguuaacuug

SEQ ID NO: 836387 - RNA, 19 nt, Artificial Sequence
  Description of Artificial Sequence: Synthetic oligonucleotide
uccaguuucaugaggcuag

SEQ ID NO: 836388 - RNA, 19 nt, Artificial Sequence
  Description of Artificial Sequence: Synthetic oligonucleotide
cacaaugacguguugcugg

SEQ ID NO: 836389 - RNA, 19 nt, Artificial Sequence
  Description of Artificial Sequence: Synthetic oligonucleotide
ugacuaaggacuaaaucaa

SEQ ID NO: 836390 - RNA, 19 nt, Artificial Sequence
  Description of Artificial Sequence: Synthetic oligonucleotide
acucaaggcaaguaacaac

SEQ ID NO: 836391 - RNA, 19 nt, Artificial Sequence
  Description of Artificial Sequence: Synthetic oligonucleotide
ugauauuggauacaagcuu

SEQ ID NO: 836392 - RNA, 19 nt, Artificial Sequence
  Description of Artificial Sequence: Synthetic oligonucleotide
auugcgaucggcgaaggac

SEQ ID NO: 836393 - RNA, 19 nt, Artificial Sequence
  Description of Artificial Sequence: Synthetic oligonucleotide
augagguguguacauuugc

SEQ ID NO: 836394 - RNA, 19 nt, Artificial Sequence
  Description of Artificial Sequence: Synthetic oligonucleotide
uugcgaucggcgaaggacg

SEQ ID NO: 836395 - RNA, 19 nt, Artificial Sequence
  Description of Artificial Sequence: Synthetic oligonucleotide
aacaaguucuacgauccag

SEQ ID NO: 836396 - RNA, 19 nt, Artificial Sequence
  Description of Artificial Sequence: Synthetic oligonucleotide
ucacucaacaguagaaaac

SEQ ID NO: 836397 - RNA, 19 nt, Artificial Sequence
  Description of Artificial Sequence: Synthetic oligonucleotide
accuuacauaaauuaaaag

SEQ ID NO: 836398 - RNA, 19 nt, Artificial Sequence
  Description of Artificial Sequence: Synthetic oligonucleotide
uaaggacuaaaucaagaua

SEQ ID NO: 836399 - RNA, 19 nt, Artificial Sequence
  Description of Artificial Sequence: Synthetic oligonucleotide
gauauuggauacaagcuuc

SEQ ID NO: 836400 - RNA, 19 nt, Artificial Sequence
  Description of Artificial Sequence: Synthetic oligonucleotide
aaaccuuacauaaauuaaa

SEQ ID NO: 836401 - RNA, 19 nt, Artificial Sequence
  Description of Artificial Sequence: Synthetic oligonucleotide
aguagaaaaccaaaauuug

SEQ ID NO: 836402 - RNA, 19 nt, Artificial Sequence
  Description of Artificial Sequence: Synthetic oligonucleotide
uacacaaugacguguugcu

SEQ ID NO: 836403 - RNA, 19 nt, Artificial Sequence
  Description of Artificial Sequence: Synthetic oligonucleotide
cuguuaauacccugcacag

SEQ ID NO: 836404 - RNA, 19 nt, Artificial Sequence
  Description of Artificial Sequence: Synthetic oligonucleotide
uuacacaaugacguguugc

SEQ ID NO: 836405 - RNA, 19 nt, Artificial Sequence
  Description of Artificial Sequence: Synthetic oligonucleotide
ugguaacugguucaggaac

SEQ ID NO: 836406 - RNA, 19 nt, Artificial Sequence
  Description of Artificial Sequence: Synthetic oligonucleotide
gacuaaaucaagauaugca

SEQ ID NO: 836407 - RNA, 19 nt, Artificial Sequence
  Description of Artificial Sequence: Synthetic oligonucleotide
gauggcguggggaagggcg

SEQ ID NO: 836408 - RNA, 19 nt, Artificial Sequence
  Description of Artificial Sequence: Synthetic oligonucleotide
cuaaaucaagauaugcaca

SEQ ID NO: 836409 - RNA, 19 nt, Artificial Sequence
  Description of Artificial Sequence: Synthetic oligonucleotide
agguguguacauuugccag

SEQ ID NO: 836410 - RNA, 19 nt, Artificial Sequence
  Description of Artificial Sequence: Synthetic oligonucleotide
caugacuaaggacuaaauc

SEQ ID NO: 836411 - RNA, 19 nt, Artificial Sequence
  Description of Artificial Sequence: Synthetic oligonucleotide
acggaaugguaacugguuc

SEQ ID NO: 836412 - RNA, 19 nt, Artificial Sequence
  Description of Artificial Sequence: Synthetic oligonucleotide
auaccaagggaacaguuaa

SEQ ID NO: 836413 - RNA, 19 nt, Artificial Sequence
  Description of Artificial Sequence: Synthetic oligonucleotide
uugauacuugagaaucagc

SEQ ID NO: 836414 - RNA, 19 nt, Artificial Sequence
  Description of Artificial Sequence: Synthetic oligonucleotide
auugauacuugagaaucag

SEQ ID NO: 836415 - RNA, 19 nt, Artificial Sequence
  Description of Artificial Sequence: Synthetic oligonucleotide
uauaccaagggaacaguua

SEQ ID NO: 836416 - RNA, 19 nt, Artificial Sequence
  Description of Artificial Sequence: Synthetic oligonucleotide
ugucaaugcaaacguuccc

SEQ ID NO: 836417 - RNA, 19 nt, Artificial Sequence
  Description of Artificial Sequence: Synthetic oligonucleotide
agacacgcagcgcaggccg

SEQ ID NO: 836418 - RNA, 19 nt, Artificial Sequence
  Description of Artificial Sequence: Synthetic oligonucleotide
uacauuuacaguugucaau

SEQ ID NO: 836419 - RNA, 19 nt, Artificial Sequence
  Description of Artificial Sequence: Synthetic oligonucleotide
ucaaggcaaguaacaaccc

SEQ ID NO: 836420 - RNA, 19 nt, Artificial Sequence
  Description of Artificial Sequence: Synthetic oligonucleotide
uguucucacucaacaguag

SEQ ID NO: 836421 - RNA, 19 nt, Artificial Sequence
  Description of Artificial Sequence: Synthetic oligonucleotide
cucucuguucgcuuugggg

SEQ ID NO: 836422 - RNA, 19 nt, Artificial Sequence
  Description of Artificial Sequence: Synthetic oligonucleotide
aauugauacuugagaauca

SEQ ID NO: 836423 - RNA, 19 nt, Artificial Sequence
  Description of Artificial Sequence: Synthetic oligonucleotide
uucucacucaacaguagaa

SEQ ID NO: 836424 - RNA, 19 nt, Artificial Sequence
  Description of Artificial Sequence: Synthetic oligonucleotide
aaacauuaucugcgucauc

SEQ ID NO: 836425 - RNA, 19 nt, Artificial Sequence
  Description of Artificial Sequence: Synthetic oligonucleotide
uggauacaagcuucaagga

SEQ ID NO: 836426 - RNA, 19 nt, Artificial Sequence
  Description of Artificial Sequence: Synthetic oligonucleotide
cucccacccuguuagaccg

SEQ ID NO: 836427 - RNA, 19 nt, Artificial Sequence
  Description of Artificial Sequence: Synthetic oligonucleotide
acaagcuucaaggacaaau

SEQ ID NO: 836428 - RNA, 19 nt, Artificial Sequence
  Description of Artificial Sequence: Synthetic oligonucleotide
uuaaaaggaugaauacauu

SEQ ID NO: 836429 - RNA, 19 nt, Artificial Sequence
  Description of Artificial Sequence: Synthetic oligonucleotide
augacguguugcuggggcc

SEQ ID NO: 836430 - RNA, 19 nt, Artificial Sequence
  Description of Artificial Sequence: Synthetic oligonucleotide
aagacacgcagcgcaggcc

SEQ ID NO: 836431 - RNA, 19 nt, Artificial Sequence
  Description of Artificial Sequence: Synthetic oligonucleotide
aguaacaacccacggcggu

SEQ ID NO: 836432 - RNA, 19 nt, Artificial Sequence
  Description of Artificial Sequence: Synthetic oligonucleotide
ugccacacgacuccaugcc

SEQ ID NO: 836433 - RNA, 19 nt, Artificial Sequence
  Description of Artificial Sequence: Synthetic oligonucleotide
ggcaaauugauacuugaga

SEQ ID NO: 836434 - RNA, 19 nt, Artificial Sequence
  Description of Artificial Sequence: Synthetic oligonucleotide
caaacguucccaacucaag

SEQ ID NO: 836435 - RNA, 19 nt, Artificial Sequence
  Description of Artificial Sequence: Synthetic oligonucleotide
gcuguuaauacccugcaca

SEQ ID NO: 836436 - RNA, 19 nt, Artificial Sequence
  Description of Artificial Sequence: Synthetic oligonucleotide
aaaccggguccuaaggcuc

SEQ ID NO: 836437 - RNA, 19 nt, Artificial Sequence
  Description of Artificial Sequence: Synthetic oligonucleotide
agggcaaauugauacuuga

SEQ ID NO: 836438 - RNA, 19 nt, Artificial Sequence
  Description of Artificial Sequence: Synthetic oligonucleotide
acuaaggacuaaaucaaga

SEQ ID NO: 836439 - RNA, 19 nt, Artificial Sequence
  Description of Artificial Sequence: Synthetic oligonucleotide
acaguuaacuugaauacaa

SEQ ID NO: 836440 - RNA, 19 nt, Artificial Sequence
  Description of Artificial Sequence: Synthetic oligonucleotide
cagaacggaaaccgggucc

SEQ ID NO: 836441 - RNA, 19 nt, Artificial Sequence
  Description of Artificial Sequence: Synthetic oligonucleotide
uccagugcugauauuggau

SEQ ID NO: 836442 - RNA, 19 nt, Artificial Sequence
  Description of Artificial Sequence: Synthetic oligonucleotide
auuaucugcgucaucuucu

SEQ ID NO: 836443 - RNA, 19 nt, Artificial Sequence
  Description of Artificial Sequence: Synthetic oligonucleotide
cugcucaaaauccagggca

SEQ ID NO: 836444 - RNA, 19 nt, Artificial Sequence
  Description of Artificial Sequence: Synthetic oligonucleotide
caguuaacuugaauacaag

SEQ ID NO: 836445 - RNA, 19 nt, Artificial Sequence
  Description of Artificial Sequence: Synthetic oligonucleotide
guguacauuugccagggca

SEQ ID NO: 836446 - RNA, 19 nt, Artificial Sequence
  Description of Artificial Sequence: Synthetic oligonucleotide
gagguguguacauuugcca

SEQ ID NO: 836447 - RNA, 19 nt, Artificial Sequence
  Description of Artificial Sequence: Synthetic oligonucleotide
gacuaaggacuaaaucaag

SEQ ID NO: 836448 - RNA, 19 nt, Artificial Sequence
  Description of Artificial Sequence: Synthetic oligonucleotide
gcaaguaacaacccacggc

SEQ ID NO: 836449 - RNA, 19 nt, Artificial Sequence
  Description of Artificial Sequence: Synthetic oligonucleotide
ugcgcccggaugcauacag

SEQ ID NO: 836450 - RNA, 19 nt, Artificial Sequence
  Description of Artificial Sequence: Synthetic oligonucleotide
agaccggcaagacggaaug

SEQ ID NO: 836451 - RNA, 19 nt, Artificial Sequence
  Description of Artificial Sequence: Synthetic oligonucleotide
cuugaauacaaggucaaaa

SEQ ID NO: 836452 - RNA, 19 nt, Artificial Sequence
  Description of Artificial Sequence: Synthetic oligonucleotide
uccuuuacacaaugacgug

SEQ ID NO: 836453 - RNA, 19 nt, Artificial Sequence
  Description of Artificial Sequence: Synthetic oligonucleotide
accaagggaacaguuaacu

SEQ ID NO: 836454 - RNA, 19 nt, Artificial Sequence
  Description of Artificial Sequence: Synthetic oligonucleotide
gucaaugacgagcgcggcg

SEQ ID NO: 836455 - RNA, 19 nt, Artificial Sequence
  Description of Artificial Sequence: Synthetic oligonucleotide
ucaaugcaaacguucccaa

SEQ ID NO: 836456 - RNA, 19 nt, Artificial Sequence
  Description of Artificial Sequence: Synthetic oligonucleotide
aaguaacaacccacggcgg

SEQ ID NO: 836457 - RNA, 19 nt, Artificial Sequence
  Description of Artificial Sequence: Synthetic oligonucleotide
ugcaaacguucccaacuca

SEQ ID NO: 836458 - RNA, 19 nt, Artificial Sequence
  Description of Artificial Sequence: Synthetic oligonucleotide
aauacccugcacagaucac

SEQ ID NO: 836459 - RNA, 19 nt, Artificial Sequence
  Description of Artificial Sequence: Synthetic oligonucleotide
ucgucgccagcaaagccag

SEQ ID NO: 836460 - RNA, 19 nt, Artificial Sequence
  Description of Artificial Sequence: Synthetic oligonucleotide
ugcugauauuggauacaag

SEQ ID NO: 836461 - RNA, 19 nt, Artificial Sequence
  Description of Artificial Sequence: Synthetic oligonucleotide
cuguuagaccggcaagacg

SEQ ID NO: 836462 - RNA, 19 nt, Artificial Sequence
  Description of Artificial Sequence: Synthetic oligonucleotide
gcaacaaguucuacgaucc

SEQ ID NO: 836463 - RNA, 19 nt, Artificial Sequence
  Description of Artificial Sequence: Synthetic oligonucleotide
ucugcgucaucuucucucu

SEQ ID NO: 836464 - RNA, 19 nt, Artificial Sequence
  Description of Artificial Sequence: Synthetic oligonucleotide
ucucacucaacaguagaaa

SEQ ID NO: 836465 - RNA, 19 nt, Artificial Sequence
  Description of Artificial Sequence: Synthetic oligonucleotide
ugcgaucggcgaaggacgg

SEQ ID NO: 836466 - RNA, 19 nt, Artificial Sequence
  Description of Artificial Sequence: Synthetic oligonucleotide
ggacuaaaucaagauaugc

SEQ ID NO: 836467 - RNA, 19 nt, Artificial Sequence
  Description of Artificial Sequence: Synthetic oligonucleotide
gccauugucaaugacgagc

SEQ ID NO: 836468 - RNA, 19 nt, Artificial Sequence
  Description of Artificial Sequence: Synthetic oligonucleotide
aacuugaauacaaggucaa

SEQ ID NO: 836469 - RNA, 19 nt, Artificial Sequence
  Description of Artificial Sequence: Synthetic oligonucleotide
uccauugcgaucggcgaag

SEQ ID NO: 836470 - RNA, 19 nt, Artificial Sequence
  Description of Artificial Sequence: Synthetic oligonucleotide
ugugugaccccgucaccag

SEQ ID NO: 836471 - RNA, 19 nt, Artificial Sequence
  Description of Artificial Sequence: Synthetic oligonucleotide
uuaucugcgucaucuucuc

SEQ ID NO: 836472 - RNA, 19 nt, Artificial Sequence
  Description of Artificial Sequence: Synthetic oligonucleotide
cugauauuggauacaagcu

SEQ ID NO: 836473 - RNA, 19 nt, Artificial Sequence
  Description of Artificial Sequence: Synthetic oligonucleotide
ggugccgccagacagcacc

SEQ ID NO: 836474 - RNA, 19 nt, Artificial Sequence
  Description of Artificial Sequence: Synthetic oligonucleotide
uauuuacugcagcacuuuu

SEQ ID NO: 836475 - RNA, 19 nt, Artificial Sequence
  Description of Artificial Sequence: Synthetic oligonucleotide
cuaaggcucggacucuccc

SEQ ID NO: 836476 - RNA, 19 nt, Artificial Sequence
  Description of Artificial Sequence: Synthetic oligonucleotide
uaaggcucggacucuccca

SEQ ID NO: 836477 - RNA, 19 nt, Artificial Sequence
  Description of Artificial Sequence: Synthetic oligonucleotide
caagacggaaugguaacug

SEQ ID NO: 836478 - RNA, 19 nt, Artificial Sequence
  Description of Artificial Sequence: Synthetic oligonucleotide
uuaauacccugcacagauc

SEQ ID NO: 836479 - RNA, 19 nt, Artificial Sequence
  Description of Artificial Sequence: Synthetic oligonucleotide
gugugugugaccccgucac

SEQ ID NO: 836480 - RNA, 19 nt, Artificial Sequence
  Description of Artificial Sequence: Synthetic oligonucleotide
acguucccaacucaaggca

SEQ ID NO: 836481 - RNA, 19 nt, Artificial Sequence
  Description of Artificial Sequence: Synthetic oligonucleotide
uguuaauacccugcacaga

SEQ ID NO: 836482 - RNA, 19 nt, Artificial Sequence
  Description of Artificial Sequence: Synthetic oligonucleotide
ggcaaguaacaacccacgg

SEQ ID NO: 836483 - RNA, 19 nt, Artificial Sequence
  Description of Artificial Sequence: Synthetic oligonucleotide
aggcaaguaacaacccacg

SEQ ID NO: 836484 - RNA, 19 nt, Artificial Sequence
  Description of Artificial Sequence: Synthetic oligonucleotide
guucucacucaacaguaga

SEQ ID NO: 836485 - RNA, 19 nt, Artificial Sequence
  Description of Artificial Sequence: Synthetic oligonucleotide
caacaguagaaaaccaaaa

SEQ ID NO: 836486 - RNA, 19 nt, Artificial Sequence
  Description of Artificial Sequence: Synthetic oligonucleotide
gaucacugcacggugcuca

SEQ ID NO: 836487 - RNA, 19 nt, Artificial Sequence
  Description of Artificial Sequence: Synthetic oligonucleotide
gaaaccggguccuaaggcu

SEQ ID NO: 836488 - RNA, 19 nt, Artificial Sequence
  Description of Artificial Sequence: Synthetic oligonucleotide
caacucaaggcaaguaaca

SEQ ID NO: 836489 - RNA, 19 nt, Artificial Sequence
  Description of Artificial Sequence: Synthetic oligonucleotide
cucacucaacaguagaaaa

SEQ ID NO: 836490 - RNA, 19 nt, Artificial Sequence
  Description of Artificial Sequence: Synthetic oligonucleotide
acggaaaccggguccuaag

SEQ ID NO: 836491 - RNA, 19 nt, Artificial Sequence
  Description of Artificial Sequence: Synthetic oligonucleotide
aucggcgaaggacggggcg

SEQ ID NO: 836492 - RNA, 19 nt, Artificial Sequence
  Description of Artificial Sequence: Synthetic oligonucleotide
ucuacgauccagugcugau

SEQ ID NO: 836493 - RNA, 19 nt, Artificial Sequence
  Description of Artificial Sequence: Synthetic oligonucleotide
acccugcacagaucacugc

SEQ ID NO: 836494 - RNA, 19 nt, Artificial Sequence
  Description of Artificial Sequence: Synthetic oligonucleotide
cuaaggacuaaaucaagau

SEQ ID NO: 836495 - RNA, 19 nt, Artificial Sequence
  Description of Artificial Sequence: Synthetic oligonucleotide
gaagguggucucguggaug

SEQ ID NO: 836496 - RNA, 19 nt, Artificial Sequence
  Description of Artificial Sequence: Synthetic oligonucleotide
gguaacugguucaggaacc

SEQ ID NO: 836497 - RNA, 19 nt, Artificial Sequence
  Description of Artificial Sequence: Synthetic oligonucleotide
uagaccggcaagacggaau

SEQ ID NO: 836498 - RNA, 19 nt, Artificial Sequence
  Description of Artificial Sequence: Synthetic oligonucleotide
gguccuaaggcucggacuc

SEQ ID NO: 836499 - RNA, 19 nt, Artificial Sequence
  Description of Artificial Sequence: Synthetic oligonucleotide
cacugugugugugaccccg

SEQ ID NO: 836500 - RNA, 19 nt, Artificial Sequence
  Description of Artificial Sequence: Synthetic oligonucleotide
ggaaaccggguccuaaggc

SEQ ID NO: 836501 - RNA, 19 nt, Artificial Sequence
  Description of Artificial Sequence: Synthetic oligonucleotide
auacccugcacagaucacu

SEQ ID NO: 836502 - RNA, 19 nt, Artificial Sequence
  Description of Artificial Sequence: Synthetic oligonucleotide
gacgcaagauggcgugggg

SEQ ID NO: 836503 - RNA, 19 nt, Artificial Sequence
  Description of Artificial Sequence: Synthetic oligonucleotide
ggaagucagcuguuaauac

SEQ ID NO: 836504 - RNA, 19 nt, Artificial Sequence
  Description of Artificial Sequence: Synthetic oligonucleotide
caguggugcgcccggaugc

SEQ ID NO: 836505 - RNA, 19 nt, Artificial Sequence
  Description of Artificial Sequence: Synthetic oligonucleotide
gaagagcgccucuggacac

SEQ ID NO: 836506 - RNA, 19 nt, Artificial Sequence
  Description of Artificial Sequence: Synthetic oligonucleotide
aguugaagguggucucgug

SEQ ID NO: 836507 - RNA, 19 nt, Artificial Sequence
  Description of Artificial Sequence: Synthetic oligonucleotide
uucuacgauccagugcuga

SEQ ID NO: 836508 - RNA, 19 nt, Artificial Sequence
  Description of Artificial Sequence: Synthetic oligonucleotide
gcuagcaugagguguguac

SEQ ID NO: 836509 - RNA, 19 nt, Artificial Sequence
  Description of Artificial Sequence: Synthetic oligonucleotide
guaacugguucaggaaccc

SEQ ID NO: 836510 - RNA, 19 nt, Artificial Sequence
  Description of Artificial Sequence: Synthetic oligonucleotide
ccucgagaaauccuggaag

SEQ ID NO: 836511 - RNA, 19 nt, Artificial Sequence
  Description of Artificial Sequence: Synthetic oligonucleotide
aaggcuuauuccaguuuca

SEQ ID NO: 836512 - RNA, 19 nt, Artificial Sequence
  Description of Artificial Sequence: Synthetic oligonucleotide
acccuguuagaccggcaag

SEQ ID NO: 836513 - RNA, 19 nt, Artificial Sequence
  Description of Artificial Sequence: Synthetic oligonucleotide
uaacaacccacggcgguca

SEQ ID NO: 836514 - RNA, 19 nt, Artificial Sequence
  Description of Artificial Sequence: Synthetic oligonucleotide
uucaugaggcuagcaugag

SEQ ID NO: 836515 - RNA, 19 nt, Artificial Sequence
  Description of Artificial Sequence: Synthetic oligonucleotide
aaccggguccuaaggcucg

SEQ ID NO: 836516 - RNA, 19 nt, Artificial Sequence
  Description of Artificial Sequence: Synthetic oligonucleotide
ugcacggugcucacacaga

SEQ ID NO: 836517 - RNA, 19 nt, Artificial Sequence
  Description of Artificial Sequence: Synthetic oligonucleotide
agugcugauauuggauaca

SEQ ID NO: 836518 - RNA, 19 nt, Artificial Sequence
  Description of Artificial Sequence: Synthetic oligonucleotide
gucucguggaugccacacg

SEQ ID NO: 836519 - RNA, 19 nt, Artificial Sequence
  Description of Artificial Sequence: Synthetic oligonucleotide
uguguacauuugccagggc

SEQ ID NO: 836520 - RNA, 19 nt, Artificial Sequence
  Description of Artificial Sequence: Synthetic oligonucleotide
aacaacccacggcggucag

SEQ ID NO: 836521 - RNA, 19 nt, Artificial Sequence
  Description of Artificial Sequence: Synthetic oligonucleotide
cuagcaugagguguguaca

SEQ ID NO: 836522 - RNA, 19 nt, Artificial Sequence
  Description of Artificial Sequence: Synthetic oligonucleotide
cagccucgagaaauccugg

SEQ ID NO: 836523 - RNA, 19 nt, Artificial Sequence
  Description of Artificial Sequence: Synthetic oligonucleotide
guucccaacucaaggcaag

SEQ ID NO: 836524 - RNA, 19 nt, Artificial Sequence
  Description of Artificial Sequence: Synthetic oligonucleotide
uagcaugagguguguacau

SEQ ID NO: 836525 - RNA, 19 nt, Artificial Sequence
  Description of Artificial Sequence: Synthetic oligonucleotide
ugaagguggucucguggau

SEQ ID NO: 836526 - RNA, 19 nt, Artificial Sequence
  Description of Artificial Sequence: Synthetic oligonucleotide
ucgagaaauccuggaaguc

SEQ ID NO: 836527 - RNA, 19 nt, Artificial Sequence
  Description of Artificial Sequence: Synthetic oligonucleotide
ucuggacaccggaaccgcu

SEQ ID NO: 836528 - RNA, 19 nt, Artificial Sequence
  Description of Artificial Sequence: Synthetic oligonucleotide
gaccaagccacaugacuaa

SEQ ID NO: 836529 - RNA, 19 nt, Artificial Sequence
  Description of Artificial Sequence: Synthetic oligonucleotide
ggcuuauuccaguuucaug

SEQ ID NO: 836530 - RNA, 19 nt, Artificial Sequence
  Description of Artificial Sequence: Synthetic oligonucleotide
ggcaagacggaaugguaac

SEQ ID NO: 836531 - RNA, 19 nt, Artificial Sequence
  Description of Artificial Sequence: Synthetic oligonucleotide
uggggccuaauguucucac

SEQ ID NO: 836532 - RNA, 19 nt, Artificial Sequence
  Description of Artificial Sequence: Synthetic oligonucleotide
gggccuaauguucucacuc

SEQ ID NO: 836533 - RNA, 19 nt, Artificial Sequence
  Description of Artificial Sequence: Synthetic oligonucleotide
uaucugcgucaucuucucu

SEQ ID NO: 836534 - RNA, 19 nt, Artificial Sequence
  Description of Artificial Sequence: Synthetic oligonucleotide
cacaggguauuaaacauau

SEQ ID NO: 836535 - RNA, 19 nt, Artificial Sequence
  Description of Artificial Sequence: Synthetic oligonucleotide
ugucaaugacgagcgcggc

SEQ ID NO: 836536 - RNA, 19 nt, Artificial Sequence
  Description of Artificial Sequence: Synthetic oligonucleotide
acacaaugacguguugcug

SEQ ID NO: 836537 - RNA, 19 nt, Artificial Sequence
  Description of Artificial Sequence: Synthetic oligonucleotide
ugacguguugcuggggccu

SEQ ID NO: 836538 - RNA, 19 nt, Artificial Sequence
  Description of Artificial Sequence: Synthetic oligonucleotide
caugacgcccuggugccgg

SEQ ID NO: 836539 - RNA, 19 nt, Artificial Sequence
  Description of Artificial Sequence: Synthetic oligonucleotide
aacggaaaccggguccuaa

SEQ ID NO: 836540 - RNA, 19 nt, Artificial Sequence
  Description of Artificial Sequence: Synthetic oligonucleotide
acaccagaacggaaaccgg

SEQ ID NO: 836541 - RNA, 19 nt, Artificial Sequence
  Description of Artificial Sequence: Synthetic oligonucleotide
ccagccucgagaaauccug

SEQ ID NO: 836542 - RNA, 19 nt, Artificial Sequence
  Description of Artificial Sequence: Synthetic oligonucleotide
uggugaagcuguagccccu

SEQ ID NO: 836543 - RNA, 19 nt, Artificial Sequence
  Description of Artificial Sequence: Synthetic oligonucleotide
cuggacaccggaaccgcuc

SEQ ID NO: 836544 - RNA, 19 nt, Artificial Sequence
  Description of Artificial Sequence: Synthetic oligonucleotide
caguugucaaugcaaacgu

SEQ ID NO: 836545 - RNA, 19 nt, Artificial Sequence
  Description of Artificial Sequence: Synthetic oligonucleotide
accggcaagacggaauggu

SEQ ID NO: 836546 - RNA, 19 nt, Artificial Sequence
  Description of Artificial Sequence: Synthetic oligonucleotide
agccauugucaaugacgag

SEQ ID NO: 836547 - RNA, 19 nt, Artificial Sequence
  Description of Artificial Sequence: Synthetic oligonucleotide
gcuggaagagcgccucugg

SEQ ID NO: 836548 - RNA, 19 nt, Artificial Sequence
  Description of Artificial Sequence: Synthetic oligonucleotide
agccucgagaaauccugga

SEQ ID NO: 836549 - RNA, 19 nt, Artificial Sequence
  Description of Artificial Sequence: Synthetic oligonucleotide
auauaccaagggaacaguu

SEQ ID NO: 836550 - RNA, 19 nt, Artificial Sequence
  Description of Artificial Sequence: Synthetic oligonucleotide
cccggaugcauacagggac

SEQ ID NO: 836551 - RNA, 19 nt, Artificial Sequence
  Description of Artificial Sequence: Synthetic oligonucleotide
aggcucggacucucccacc

SEQ ID NO: 836552 - RNA, 19 nt, Artificial Sequence
  Description of Artificial Sequence: Synthetic oligonucleotide
uucuuuucaaaggcuuauu

SEQ ID NO: 836553 - RNA, 19 nt, Artificial Sequence
  Description of Artificial Sequence: Synthetic oligonucleotide
ccuaauguucucacucaac

SEQ ID NO: 836554 - RNA, 19 nt, Artificial Sequence
  Description of Artificial Sequence: Synthetic oligonucleotide
cacagcgugcucuccccag

SEQ ID NO: 836555 - RNA, 19 nt, Artificial Sequence
  Description of Artificial Sequence: Synthetic oligonucleotide
agagcgccucuggacaccg

SEQ ID NO: 836556 - RNA, 19 nt, Artificial Sequence
  Description of Artificial Sequence: Synthetic oligonucleotide
accagaacggaaaccgggu

SEQ ID NO: 836557 - RNA, 19 nt, Artificial Sequence
  Description of Artificial Sequence: Synthetic oligonucleotide
cuuuacacaaugacguguu

SEQ ID NO: 836558 - RNA, 19 nt, Artificial Sequence
  Description of Artificial Sequence: Synthetic oligonucleotide
cacgacuccaugcccagga

SEQ ID NO: 836559 - RNA, 19 nt, Artificial Sequence
  Description of Artificial Sequence: Synthetic oligonucleotide
ucggacucucccacccugu

SEQ ID NO: 836560 - RNA, 19 nt, Artificial Sequence
  Description of Artificial Sequence: Synthetic oligonucleotide
augccaguggugcgcccgg

SEQ ID NO: 836561 - RNA, 19 nt, Artificial Sequence
  Description of Artificial Sequence: Synthetic oligonucleotide
guaacaacccacggcgguc

SEQ ID NO: 836562 - RNA, 19 nt, Artificial Sequence
  Description of Artificial Sequence: Synthetic oligonucleotide
acaugacuaaggacuaaau

SEQ ID NO: 836563 - RNA, 19 nt, Artificial Sequence
  Description of Artificial Sequence: Synthetic oligonucleotide
agauggcguggggaagggc

SEQ ID NO: 836564 - RNA, 19 nt, Artificial Sequence
  Description of Artificial Sequence: Synthetic oligonucleotide
gggcaaauugauacuugag

SEQ ID NO: 836565 - RNA, 19 nt, Artificial Sequence
  Description of Artificial Sequence: Synthetic oligonucleotide
augacgagcgcggcgauuu

SEQ ID NO: 836566 - RNA, 19 nt, Artificial Sequence
  Description of Artificial Sequence: Synthetic oligonucleotide
cagccaccaaaugaccaag

SEQ ID NO: 836567 - RNA, 19 nt, Artificial Sequence
  Description of Artificial Sequence: Synthetic oligonucleotide
acuugaauacaaggucaaa

SEQ ID NO: 836568 - RNA, 19 nt, Artificial Sequence
  Description of Artificial Sequence: Synthetic oligonucleotide
ugccagccucgagaaaucc

SEQ ID NO: 836569 - RNA, 19 nt, Artificial Sequence
  Description of Artificial Sequence: Synthetic oligonucleotide
gugugugaccccgucacca

SEQ ID NO: 836570 - RNA, 19 nt, Artificial Sequence
  Description of Artificial Sequence: Synthetic oligonucleotide
gccggagccauugucaaug

SEQ ID NO: 836571 - RNA, 19 nt, Artificial Sequence
  Description of Artificial Sequence: Synthetic oligonucleotide
caagcuucaaggacaaauu

SEQ ID NO: 836572 - RNA, 19 nt, Artificial Sequence
  Description of Artificial Sequence: Synthetic oligonucleotide
gaccggcaagacggaaugg

SEQ ID NO: 836573 - RNA, 19 nt, Artificial Sequence
  Description of Artificial Sequence: Synthetic oligonucleotide
uuagaccggcaagacggaa

SEQ ID NO: 836574 - RNA, 19 nt, Artificial Sequence
  Description of Artificial Sequence: Synthetic oligonucleotide
gacggggcggcggagcagc

SEQ ID NO: 836575 - RNA, 19 nt, Artificial Sequence
  Description of Artificial Sequence: Synthetic oligonucleotide
cacaugacuaaggacuaaa

SEQ ID NO: 836576 - RNA, 19 nt, Artificial Sequence
  Description of Artificial Sequence: Synthetic oligonucleotide
ucuguucgcuuugggguuc

SEQ ID NO: 836577 - RNA, 19 nt, Artificial Sequence
  Description of Artificial Sequence: Synthetic oligonucleotide
gugcugauauuggauacaa

SEQ ID NO: 836578 - RNA, 19 nt, Artificial Sequence
  Description of Artificial Sequence: Synthetic oligonucleotide
cuucuuccauugcgaucgg

SEQ ID NO: 836579 - RNA, 19 nt, Artificial Sequence
  Description of Artificial Sequence: Synthetic oligonucleotide
cagcuguuaauacccugca

SEQ ID NO: 836580 - RNA, 19 nt, Artificial Sequence
  Description of Artificial Sequence: Synthetic oligonucleotide
cagcgugcucuccccagcc

SEQ ID NO: 836581 - RNA, 19 nt, Artificial Sequence
  Description of Artificial Sequence: Synthetic oligonucleotide
cuugccagccucgagaaau

SEQ ID NO: 836582 - RNA, 19 nt, Artificial Sequence
  Description of Artificial Sequence: Synthetic oligonucleotide
ggccuaauguucucacuca

SEQ ID NO: 836583 - RNA, 19 nt, Artificial Sequence
  Description of Artificial Sequence: Synthetic oligonucleotide
agcgcggcgauuucuucuu

SEQ ID NO: 836584 - RNA, 19 nt, Artificial Sequence
  Description of Artificial Sequence: Synthetic oligonucleotide
caaugacguguugcugggg

SEQ ID NO: 836585 - RNA, 19 nt, Artificial Sequence
  Description of Artificial Sequence: Synthetic oligonucleotide
acgcaagauggcgugggga

SEQ ID NO: 836586 - RNA, 19 nt, Artificial Sequence
  Description of Artificial Sequence: Synthetic oligonucleotide
ggcgucgucgccagcaaag

SEQ ID NO: 836587 - RNA, 19 nt, Artificial Sequence
  Description of Artificial Sequence: Synthetic oligonucleotide
ggcucggacucucccaccc

SEQ ID NO: 836588 - RNA, 19 nt, Artificial Sequence
  Description of Artificial Sequence: Synthetic oligonucleotide
gacacgcagcgcaggccgg

SEQ ID NO: 836589 - RNA, 19 nt, Artificial Sequence
  Description of Artificial Sequence: Synthetic oligonucleotide
gaucggcgaaggacggggc

SEQ ID NO: 836590 - RNA, 19 nt, Artificial Sequence
  Description of Artificial Sequence: Synthetic oligonucleotide
cuggaagagcgccucugga

SEQ ID NO: 836591 - RNA, 19 nt, Artificial Sequence
  Description of Artificial Sequence: Synthetic oligonucleotide
uccuaaggcucggacucuc

SEQ ID NO: 836592 - RNA, 19 nt, Artificial Sequence
  Description of Artificial Sequence: Synthetic oligonucleotide
aaugacgagcgcggcgauu

SEQ ID NO: 836593 - RNA, 19 nt, Artificial Sequence
  Description of Artificial Sequence: Synthetic oligonucleotide
aguugucaaugcaaacguu

SEQ ID NO: 836594 - RNA, 19 nt, Artificial Sequence
  Description of Artificial Sequence: Synthetic oligonucleotide
cacggugcucacacagauc

SEQ ID NO: 836595 - RNA, 19 nt, Artificial Sequence
  Description of Artificial Sequence: Synthetic oligonucleotide
ccaccaaaugaccaagcca

SEQ ID NO: 836596 - RNA, 19 nt, Artificial Sequence
  Description of Artificial Sequence: Synthetic oligonucleotide
cgcccggaugcauacaggg

SEQ ID NO: 836597 - RNA, 19 nt, Artificial Sequence
  Description of Artificial Sequence: Synthetic oligonucleotide
cacccuguuagaccggcaa

SEQ ID NO: 836598 - RNA, 19 nt, Artificial Sequence
  Description of Artificial Sequence: Synthetic oligonucleotide
uggugcgcccggaugcaua

SEQ ID NO: 836599 - RNA, 19 nt, Artificial Sequence
  Description of Artificial Sequence: Synthetic oligonucleotide
caacaaguucuacgaucca

SEQ ID NO: 836600 - RNA, 19 nt, Artificial Sequence
  Description of Artificial Sequence: Synthetic oligonucleotide
gccucggucaggagcacgg

SEQ ID NO: 836601 - RNA, 19 nt, Artificial Sequence
  Description of Artificial Sequence: Synthetic oligonucleotide
ggugcgcccggaugcauac

SEQ ID NO: 836602 - RNA, 19 nt, Artificial Sequence
  Description of Artificial Sequence: Synthetic oligonucleotide
agcgugcucuccccagcca

SEQ ID NO: 836603 - RNA, 19 nt, Artificial Sequence
  Description of Artificial Sequence: Synthetic oligonucleotide
gagcgcggcgauuucuucu

SEQ ID NO: 836604 - RNA, 19 nt, Artificial Sequence
  Description of Artificial Sequence: Synthetic oligonucleotide
guggucucguggaugccac

SEQ ID NO: 836605 - RNA, 19 nt, Artificial Sequence
  Description of Artificial Sequence: Synthetic oligonucleotide
gccacacgacuccaugccc

SEQ ID NO: 836606 - RNA, 19 nt, Artificial Sequence
  Description of Artificial Sequence: Synthetic oligonucleotide
cauauaccaagggaacagu

SEQ ID NO: 836607 - RNA, 19 nt, Artificial Sequence
  Description of Artificial Sequence: Synthetic oligonucleotide
guuagaccggcaagacgga

SEQ ID NO: 836608 - RNA, 19 nt, Artificial Sequence
  Description of Artificial Sequence: Synthetic oligonucleotide
gcggucaggagggaaaaca

SEQ ID NO: 836609 - RNA, 19 nt, Artificial Sequence
  Description of Artificial Sequence: Synthetic oligonucleotide
gcaaacguucccaacucaa

SEQ ID NO: 836610 - RNA, 19 nt, Artificial Sequence
  Description of Artificial Sequence: Synthetic oligonucleotide
ccagugcugauauuggaua

SEQ ID NO: 836611 - RNA, 19 nt, Artificial Sequence
  Description of Artificial Sequence: Synthetic oligonucleotide
aguggugcgcccggaugca

SEQ ID NO: 836612 - RNA, 19 nt, Artificial Sequence
  Description of Artificial Sequence: Synthetic oligonucleotide
gaguugaagguggucucgu

SEQ ID NO: 836613 - RNA, 19 nt, Artificial Sequence
  Description of Artificial Sequence: Synthetic oligonucleotide
ggcgcccgacgauggaagg

SEQ ID NO: 836614 - RNA, 19 nt, Artificial Sequence
  Description of Artificial Sequence: Synthetic oligonucleotide
cugcgucaucuucucucug

SEQ ID NO: 836615 - RNA, 19 nt, Artificial Sequence
  Description of Artificial Sequence: Synthetic oligonucleotide
ccuguuagaccggcaagac

SEQ ID NO: 836616 - RNA, 19 nt, Artificial Sequence
  Description of Artificial Sequence: Synthetic oligonucleotide
ugacgagcgcggcgauuuc

SEQ ID NO: 836617 - RNA, 19 nt, Artificial Sequence
  Description of Artificial Sequence: Synthetic oligonucleotide
ccuaaggcucggacucucc

SEQ ID NO: 836618 - RNA, 19 nt, Artificial Sequence
  Description of Artificial Sequence: Synthetic oligonucleotide
cggaaaccggguccuaagg

SEQ ID NO: 836619 - RNA, 19 nt, Artificial Sequence
  Description of Artificial Sequence: Synthetic oligonucleotide
guucuacgauccagugcug

SEQ ID NO: 836620 - RNA, 19 nt, Artificial Sequence
  Description of Artificial Sequence: Synthetic oligonucleotide
ccagaacggaaaccggguc

SEQ ID NO: 836621 - RNA, 19 nt, Artificial Sequence
  Description of Artificial Sequence: Synthetic oligonucleotide
gguggucucguggaugcca

SEQ ID NO: 836622 - RNA, 19 nt, Artificial Sequence
  Description of Artificial Sequence: Synthetic oligonucleotide
gccuaauguucucacucaa

SEQ ID NO: 836623 - RNA, 19 nt, Artificial Sequence
  Description of Artificial Sequence: Synthetic oligonucleotide
ugccggagccauugucaau

SEQ ID NO: 836624 - RNA, 19 nt, Artificial Sequence
  Description of Artificial Sequence: Synthetic oligonucleotide
ugacgcccuggugccgggg

SEQ ID NO: 836625 - RNA, 19 nt, Artificial Sequence
  Description of Artificial Sequence: Synthetic oligonucleotide
ggcgauuucuucuuccauu

SEQ ID NO: 836626 - RNA, 19 nt, Artificial Sequence
  Description of Artificial Sequence: Synthetic oligonucleotide
gccucgagaaauccuggaa

SEQ ID NO: 836627 - RNA, 19 nt, Artificial Sequence
  Description of Artificial Sequence: Synthetic oligonucleotide
cgaucggcgaaggacgggg

SEQ ID NO: 836628 - RNA, 19 nt, Artificial Sequence
  Description of Artificial Sequence: Synthetic oligonucleotide
cauugcgaucggcgaagga

SEQ ID NO: 836629 - RNA, 19 nt, Artificial Sequence
  Description of Artificial Sequence: Synthetic oligonucleotide
accggguccuaaggcucgg

SEQ ID NO: 836630 - RNA, 19 nt, Artificial Sequence
  Description of Artificial Sequence: Synthetic oligonucleotide
cggaaugguaacugguuca

SEQ ID NO: 836631 - RNA, 19 nt, Artificial Sequence
  Description of Artificial Sequence: Synthetic oligonucleotide
auggcguggggaagggcgu

SEQ ID NO: 836632 - RNA, 19 nt, Artificial Sequence
  Description of Artificial Sequence: Synthetic oligonucleotide
gcggcgauuucuucuucca

SEQ ID NO: 836633 - RNA, 19 nt, Artificial Sequence
  Description of Artificial Sequence: Synthetic oligonucleotide
ccgacgauggaagggaaca

SEQ ID NO: 836634 - RNA, 19 nt, Artificial Sequence
  Description of Artificial Sequence: Synthetic oligonucleotide
acggcggucaggagggaaa

SEQ ID NO: 836635 - RNA, 19 nt, Artificial Sequence
  Description of Artificial Sequence: Synthetic oligonucleotide
gcaugagguguguacauuu

SEQ ID NO: 836636 - RNA, 19 nt, Artificial Sequence
  Description of Artificial Sequence: Synthetic oligonucleotide
gcgugcucuccccagccac

SEQ ID NO: 836637 - RNA, 19 nt, Artificial Sequence
  Description of Artificial Sequence: Synthetic oligonucleotide
ccacacgacuccaugccca

SEQ ID NO: 836638 - RNA, 19 nt, Artificial Sequence
  Description of Artificial Sequence: Synthetic oligonucleotide
cccgucaccagaguccaug

SEQ ID NO: 836639 - RNA, 19 nt, Artificial Sequence
  Description of Artificial Sequence: Synthetic oligonucleotide
ggguccuaaggcucggacu

SEQ ID NO: 836640 - RNA, 19 nt, Artificial Sequence
  Description of Artificial Sequence: Synthetic oligonucleotide
gggaacaguuaacuugaau

SEQ ID NO: 836641 - RNA, 19 nt, Artificial Sequence
  Description of Artificial Sequence: Synthetic oligonucleotide
gaagggcguagcccucgua

SEQ ID NO: 836642 - RNA, 19 nt, Artificial Sequence
  Description of Artificial Sequence: Synthetic oligonucleotide
cucuguucgcuuugggguu

SEQ ID NO: 836643 - RNA, 19 nt, Artificial Sequence
  Description of Artificial Sequence: Synthetic oligonucleotide
cccgacgauggaagggaac

SEQ ID NO: 836644 - RNA, 19 nt, Artificial Sequence
  Description of Artificial Sequence: Synthetic oligonucleotide
ccuuuacacaaugacgugu

SEQ ID NO: 836645 - RNA, 19 nt, Artificial Sequence
  Description of Artificial Sequence: Synthetic oligonucleotide
cgcggcgauuucuucuucc

SEQ ID NO: 836646 - RNA, 19 nt, Artificial Sequence
  Description of Artificial Sequence: Synthetic oligonucleotide
acgauccagugcugauauu

SEQ ID NO: 836647 - RNA, 19 nt, Artificial Sequence
  Description of Artificial Sequence: Synthetic oligonucleotide
ccggaugcauacagggaca

SEQ ID NO: 836648 - RNA, 19 nt, Artificial Sequence
  Description of Artificial Sequence: Synthetic oligonucleotide
gcgcccgacgauggaaggg

SEQ ID NO: 836649 - RNA, 19 nt, Artificial Sequence
  Description of Artificial Sequence: Synthetic oligonucleotide
ccuggaagucagcuguuaa

SEQ ID NO: 836650 - RNA, 19 nt, Artificial Sequence
  Description of Artificial Sequence: Synthetic oligonucleotide
cgucgucgccagcaaagcc

SEQ ID NO: 836651 - RNA, 19 nt, Artificial Sequence
  Description of Artificial Sequence: Synthetic oligonucleotide
gagcgccucuggacaccgg

SEQ ID NO: 836652 - RNA, 19 nt, Artificial Sequence
  Description of Artificial Sequence: Synthetic oligonucleotide
acgagcgcggcgauuucuu

SEQ ID NO: 836653 - RNA, 19 nt, Artificial Sequence
  Description of Artificial Sequence: Synthetic oligonucleotide
agggaacaguuaacuugaa

SEQ ID NO: 836654 - RNA, 19 nt, Artificial Sequence
  Description of Artificial Sequence: Synthetic oligonucleotide
cguggggaagggcguagcc

SEQ ID NO: 836655 - RNA, 19 nt, Artificial Sequence
  Description of Artificial Sequence: Synthetic oligonucleotide
ccauugcgaucggcgaagg

SEQ ID NO: 836656 - RNA, 19 nt, Artificial Sequence
  Description of Artificial Sequence: Synthetic oligonucleotide
gcgucgucgccagcaaagc

SEQ ID NO: 836657 - RNA, 19 nt, Artificial Sequence
  Description of Artificial Sequence: Synthetic oligonucleotide
gccacaugacuaaggacua

SEQ ID NO: 836658 - RNA, 19 nt, Artificial Sequence
  Description of Artificial Sequence: Synthetic oligonucleotide
gcuggggccuaauguucuc

SEQ ID NO: 836659 - RNA, 19 nt, Artificial Sequence
  Description of Artificial Sequence: Synthetic oligonucleotide
ggcguggggaagggcguag

SEQ ID NO: 836660 - RNA, 19 nt, Artificial Sequence
  Description of Artificial Sequence: Synthetic oligonucleotide
gacaccggaaccgcucauu

SEQ ID NO: 836661 - RNA, 19 nt, Artificial Sequence
  Description of Artificial Sequence: Synthetic oligonucleotide
gcgaucggcgaaggacggg

SEQ ID NO: 836662 - RNA, 19 nt, Artificial Sequence
  Description of Artificial Sequence: Synthetic oligonucleotide
ggacucucccacccuguua

SEQ ID NO: 836663 - RNA, 19 nt, Artificial Sequence
  Description of Artificial Sequence: Synthetic oligonucleotide
cccacccuguuagaccggc

SEQ ID NO: 836664 - RNA, 19 nt, Artificial Sequence
  Description of Artificial Sequence: Synthetic oligonucleotide
cccucguagaugggcacug

SEQ ID NO: 836665 - RNA, 19 nt, Artificial Sequence
  Description of Artificial Sequence: Synthetic oligonucleotide
cggcaagacggaaugguaa

SEQ ID NO: 836666 - RNA, 19 nt, Artificial Sequence
  Description of Artificial Sequence: Synthetic oligonucleotide
gcaagacggaaugguaacu

SEQ ID NO: 836667 - RNA, 19 nt, Artificial Sequence
  Description of Artificial Sequence: Synthetic oligonucleotide
cagcagaugccuggcaccu

SEQ ID NO: 836668 - RNA, 19 nt, Artificial Sequence
  Description of Artificial Sequence: Synthetic oligonucleotide
ggcggagcagcgggaagac

SEQ ID NO: 836669 - RNA, 19 nt, Artificial Sequence
  Description of Artificial Sequence: Synthetic oligonucleotide
uggcguggggaagggcgua

SEQ ID NO: 836670 - RNA, 19 nt, Artificial Sequence
  Description of Artificial Sequence: Synthetic oligonucleotide
cagcaacaaguucuacgau

SEQ ID NO: 836671 - RNA, 19 nt, Artificial Sequence
  Description of Artificial Sequence: Synthetic oligonucleotide
gcgcccggaugcauacagg

SEQ ID NO: 836672 - RNA, 19 nt, Artificial Sequence
  Description of Artificial Sequence: Synthetic oligonucleotide
gaacggaaaccggguccua

SEQ ID NO: 836673 - RNA, 19 nt, Artificial Sequence
  Description of Artificial Sequence: Synthetic oligonucleotide
ggggccuaauguucucacu

SEQ ID NO: 836674 - RNA, 19 nt, Artificial Sequence
  Description of Artificial Sequence: Synthetic oligonucleotide
cggguccuaaggcucggac

SEQ ID NO: 836675 - RNA, 19 nt, Artificial Sequence
  Description of Artificial Sequence: Synthetic oligonucleotide
ccaagggaacaguuaacuu

SEQ ID NO: 836676 - RNA, 19 nt, Artificial Sequence
  Description of Artificial Sequence: Synthetic oligonucleotide
cgacgauggaagggaacac

SEQ ID NO: 836677 - RNA, 19 nt, Artificial Sequence
  Description of Artificial Sequence: Synthetic oligonucleotide
ccggcaagacggaauggua

SEQ ID NO: 836678 - RNA, 19 nt, Artificial Sequence
  Description of Artificial Sequence: Synthetic oligonucleotide
acguguugcuggggccuaa

SEQ ID NO: 836679 - RNA, 19 nt, Artificial Sequence
  Description of Artificial Sequence: Synthetic oligonucleotide
gcguggggaagggcguagc

SEQ ID NO: 836680 - RNA, 19 nt, Artificial Sequence
  Description of Artificial Sequence: Synthetic oligonucleotide
caaugacgagcgcggcgau

SEQ ID NO: 836681 - RNA, 19 nt, Artificial Sequence
  Description of Artificial Sequence: Synthetic oligonucleotide
cgagcgcggcgauuucuuc

SEQ ID NO: 836682 - RNA, 19 nt, Artificial Sequence
  Description of Artificial Sequence: Synthetic oligonucleotide
ggggcgcccgacgauggaa

SEQ ID NO: 836683 - RNA, 19 nt, Artificial Sequence
  Description of Artificial Sequence: Synthetic oligonucleotide
gggcgucgucgccagcaaa

SEQ ID NO: 836684 - RNA, 19 nt, Artificial Sequence
  Description of Artificial Sequence: Synthetic oligonucleotide
ggggcgucgucgccagcaa

SEQ ID NO: 836685 - RNA, 19 nt, Artificial Sequence
  Description of Artificial Sequence: Synthetic oligonucleotide
ggcuagcaugaggugugua

SEQ ID NO: 836686 - RNA, 19 nt, Artificial Sequence
  Description of Artificial Sequence: Synthetic oligonucleotide
gugcgcccggaugcauaca

SEQ ID NO: 836687 - RNA, 19 nt, Artificial Sequence
  Description of Artificial Sequence: Synthetic oligonucleotide
ccacagcgugcucucccca

SEQ ID NO: 836688 - RNA, 19 nt, Artificial Sequence
  Description of Artificial Sequence: Synthetic oligonucleotide
gcgcggcgauuucuucuuc

SEQ ID NO: 836689 - RNA, 19 nt, Artificial Sequence
  Description of Artificial Sequence: Synthetic oligonucleotide
cgcccgacgauggaaggga

SEQ ID NO: 836690 - RNA, 19 nt, Artificial Sequence
  Description of Artificial Sequence: Synthetic oligonucleotide
ccacaugacuaaggacuaa

SEQ ID NO: 836691 - RNA, 19 nt, Artificial Sequence
  Description of Artificial Sequence: Synthetic oligonucleotide
ccacccuguuagaccggca

SEQ ID NO: 836692 - RNA, 19 nt, Artificial Sequence
  Description of Artificial Sequence: Synthetic oligonucleotide
gcucggacucucccacccu

SEQ ID NO: 836693 - RNA, 19 nt, Artificial Sequence
  Description of Artificial Sequence: Synthetic oligonucleotide
gcgccucuggacaccggaa

SEQ ID NO: 836694 - RNA, 19 nt, Artificial Sequence
  Description of Artificial Sequence: Synthetic oligonucleotide
ggacaccggaaccgcucau

SEQ ID NO: 836695 - RNA, 19 nt, Artificial Sequence
  Description of Artificial Sequence: Synthetic oligonucleotide
gcccgacgauggaagggaa

SEQ ID NO: 836696 - RNA, 19 nt, Artificial Sequence
  Description of Artificial Sequence: Synthetic oligonucleotide
cggugcucacacagaucca

SEQ ID NO: 836697 - RNA, 19 nt, Artificial Sequence
  Description of Artificial Sequence: Synthetic oligonucleotide
gccaguggugcgcccggau

SEQ ID NO: 836698 - RNA, 19 nt, Artificial Sequence
  Description of Artificial Sequence: Synthetic oligonucleotide
guggugcgcccggaugcau

SEQ ID NO: 836699 - RNA, 19 nt, Artificial Sequence
  Description of Artificial Sequence: Synthetic oligonucleotide
ccuuaaugucacgcacaau

SEQ ID NO: 836700 - RNA, 19 nt, Artificial Sequence
  Description of Artificial Sequence: Synthetic oligonucleotide
ccggguccuaaggcucgga

SEQ ID NO: 836701 - RNA, 19 nt, Artificial Sequence
  Description of Artificial Sequence: Synthetic oligonucleotide
cggcggucaggagggaaaa

SEQ ID NO: 836702 - RNA, 19 nt, Artificial Sequence
  Description of Artificial Sequence: Synthetic oligonucleotide
cggacucucccacccuguu

SEQ ID NO: 836703 - RNA, 19 nt, Artificial Sequence
  Description of Artificial Sequence: Synthetic oligonucleotide
cguguugcuggggccuaau

SEQ ID NO: 836704 - RNA, 19 nt, Artificial Sequence
  Description of Artificial Sequence: Synthetic oligonucleotide
ccccgucaccagaguccau

SEQ ID NO: 836705 - RNA, 19 nt, Artificial Sequence
  Description of Artificial Sequence: Synthetic oligonucleotide
ucuuaaucaacacagaggg

SEQ ID NO: 836706 - RNA, 19 nt, Artificial Sequence
  Description of Artificial Sequence: Synthetic oligonucleotide
ugugcauacacuuagauca

SEQ ID NO: 836707 - RNA, 19 nt, Artificial Sequence
  Description of Artificial Sequence: Synthetic oligonucleotide
uuaauuuccgauaaaagca

SEQ ID NO: 836708 - RNA, 19 nt, Artificial Sequence
  Description of Artificial Sequence: Synthetic oligonucleotide
aaaagcaugacucucgaag

SEQ ID NO: 836709 - RNA, 19 nt, Artificial Sequence
  Description of Artificial Sequence: Synthetic oligonucleotide
uuuggauguacaauuaugg

SEQ ID NO: 836710 - RNA, 19 nt, Artificial Sequence
  Description of Artificial Sequence: Synthetic oligonucleotide
aacuuaaccagucuagccg

SEQ ID NO: 836711 - RNA, 19 nt, Artificial Sequence
  Description of Artificial Sequence: Synthetic oligonucleotide
aauuauggcugguucaucg

SEQ ID NO: 836712 - RNA, 19 nt, Artificial Sequence
  Description of Artificial Sequence: Synthetic oligonucleotide
aaacuuaaccagucuagcc

SEQ ID NO: 836713 - RNA, 19 nt, Artificial Sequence
  Description of Artificial Sequence: Synthetic oligonucleotide
aaagaugcaauccaagagu

SEQ ID NO: 836714 - RNA, 19 nt, Artificial Sequence
  Description of Artificial Sequence: Synthetic oligonucleotide
ucuccuuaucuuuagaggg

SEQ ID NO: 836715 - RNA, 19 nt, Artificial Sequence
  Description of Artificial Sequence: Synthetic oligonucleotide
uauaaauucugauaacggc

SEQ ID NO: 836716 - RNA, 19 nt, Artificial Sequence
  Description of Artificial Sequence: Synthetic oligonucleotide
auaacggcgccuuaguucc

SEQ ID NO: 836717 - RNA, 19 nt, Artificial Sequence
  Description of Artificial Sequence: Synthetic oligonucleotide
uuuguuaucuuccaaucug

SEQ ID NO: 836718 - RNA, 19 nt, Artificial Sequence
  Description of Artificial Sequence: Synthetic oligonucleotide
auuuguauauucugacucc

SEQ ID NO: 836719 - RNA, 19 nt, Artificial Sequence
  Description of Artificial Sequence: Synthetic oligonucleotide
cuugcguucacccugaagc

SEQ ID NO: 836720 - RNA, 19 nt, Artificial Sequence
  Description of Artificial Sequence: Synthetic oligonucleotide
uccgauaaaagcaugacuc

SEQ ID NO: 836721 - RNA, 19 nt, Artificial Sequence
  Description of Artificial Sequence: Synthetic oligonucleotide
uccuuuggaacuaagagcu

SEQ ID NO: 836722 - RNA, 19 nt, Artificial Sequence
  Description of Artificial Sequence: Synthetic oligonucleotide
uuuggaucaaguuuagacc

SEQ ID NO: 836723 - RNA, 19 nt, Artificial Sequence
  Description of Artificial Sequence: Synthetic oligonucleotide
aaagcauccacccauguaa

SEQ ID NO: 836724 - RNA, 19 nt, Artificial Sequence
  Description of Artificial Sequence: Synthetic oligonucleotide
auugaaaaguucugcaaac

SEQ ID NO: 836725 - RNA, 19 nt, Artificial Sequence
  Description of Artificial Sequence: Synthetic oligonucleotide
guaauaaucuguuuccuag

SEQ ID NO: 836726 - RNA, 19 nt, Artificial Sequence
  Description of Artificial Sequence: Synthetic oligonucleotide
gaaagaugcaauccaagag

SEQ ID NO: 836727 - RNA, 19 nt, Artificial Sequence
  Description of Artificial Sequence: Synthetic oligonucleotide
aaccagucuagccggaugc

SEQ ID NO: 836728 - RNA, 19 nt, Artificial Sequence
  Description of Artificial Sequence: Synthetic oligonucleotide
uuaaucaacacagaggggu

SEQ ID NO: 836729 - RNA, 19 nt, Artificial Sequence
  Description of Artificial Sequence: Synthetic oligonucleotide
aagaagguaaccgcaaugg

SEQ ID NO: 836730 - RNA, 19 nt, Artificial Sequence
  Description of Artificial Sequence: Synthetic oligonucleotide
cuuuggaucaaguuuagac

SEQ ID NO: 836731 - RNA, 19 nt, Artificial Sequence
  Description of Artificial Sequence: Synthetic oligonucleotide
auaaauucugauaacggcg

SEQ ID NO: 836732 - RNA, 19 nt, Artificial Sequence
  Description of Artificial Sequence: Synthetic oligonucleotide
accgcaauggcuuugauca

SEQ ID NO: 836733 - RNA, 19 nt, Artificial Sequence
  Description of Artificial Sequence: Synthetic oligonucleotide
guuuagaccaaugaguagg

SEQ ID NO: 836734 - RNA, 19 nt, Artificial Sequence
  Description of Artificial Sequence: Synthetic oligonucleotide
aaugaaugcucuuuguuau

SEQ ID NO: 836735 - RNA, 19 nt, Artificial Sequence
  Description of Artificial Sequence: Synthetic oligonucleotide
uaaauucugauaacggcgc

SEQ ID NO: 836736 - RNA, 19 nt, Artificial Sequence
  Description of Artificial Sequence: Synthetic oligonucleotide
uuuucaagaagguaaccgc

SEQ ID NO: 836737 - RNA, 19 nt, Artificial Sequence
  Description of Artificial Sequence: Synthetic oligonucleotide
gacuuucuaauucuuuucg

SEQ ID NO: 836738 - RNA, 19 nt, Artificial Sequence
  Description of Artificial Sequence: Synthetic oligonucleotide
uuaucuuccaaucuguaau

SEQ ID NO: 836739 - RNA, 19 nt, Artificial Sequence
  Description of Artificial Sequence: Synthetic oligonucleotide
gauaaaagcaugacucucg

SEQ ID NO: 836740 - RNA, 19 nt, Artificial Sequence
  Description of Artificial Sequence: Synthetic oligonucleotide
aaauaaacaaaggccauca

SEQ ID NO: 836741 - RNA, 19 nt, Artificial Sequence
  Description of Artificial Sequence: Synthetic oligonucleotide
uuuucggagaucauuuacc

SEQ ID NO: 836742 - RNA, 19 nt, Artificial Sequence
  Description of Artificial Sequence: Synthetic oligonucleotide
uuggaucaaguuuagacca

SEQ ID NO: 836743 - RNA, 19 nt, Artificial Sequence
  Description of Artificial Sequence: Synthetic oligonucleotide
gauuuuaguccuuuggaac

SEQ ID NO: 836744 - RNA, 19 nt, Artificial Sequence
  Description of Artificial Sequence: Synthetic oligonucleotide
uacaaauccuccauacuag

SEQ ID NO: 836745 - RNA, 19 nt, Artificial Sequence
  Description of Artificial Sequence: Synthetic oligonucleotide
agucuuaaucaacacagag

SEQ ID NO: 836746 - RNA, 19 nt, Artificial Sequence
  Description of Artificial Sequence: Synthetic oligonucleotide
acaguaaugauuuguauau

SEQ ID NO: 836747 - RNA, 19 nt, Artificial Sequence
  Description of Artificial Sequence: Synthetic oligonucleotide
aaaugaaugcucuuuguua

SEQ ID NO: 836748 - RNA, 19 nt, Artificial Sequence
  Description of Artificial Sequence: Synthetic oligonucleotide
aucaagaacagccauauuu

SEQ ID NO: 836749 - RNA, 19 nt, Artificial Sequence
  Description of Artificial Sequence: Synthetic oligonucleotide
uuguucuucuacuuuaagc

SEQ ID NO: 836750 - RNA, 19 nt, Artificial Sequence
  Description of Artificial Sequence: Synthetic oligonucleotide
aaagcaugacucucgaagu

SEQ ID NO: 836751 - RNA, 19 nt, Artificial Sequence
  Description of Artificial Sequence: Synthetic oligonucleotide
ucgaaguacuacuuuauug

SEQ ID NO: 836752 - RNA, 19 nt, Artificial Sequence
  Description of Artificial Sequence: Synthetic oligonucleotide
aagagcacaugacuuauga

SEQ ID NO: 836753 - RNA, 19 nt, Artificial Sequence
  Description of Artificial Sequence: Synthetic oligonucleotide
acuagggcuagccaucagc

SEQ ID NO: 836754 - RNA, 19 nt, Artificial Sequence
  Description of Artificial Sequence: Synthetic oligonucleotide
aaacgguaccauugugugc

SEQ ID NO: 836755 - RNA, 19 nt, Artificial Sequence
  Description of Artificial Sequence: Synthetic oligonucleotide
acuuaaccagucuagccgg

SEQ ID NO: 836756 - RNA, 19 nt, Artificial Sequence
  Description of Artificial Sequence: Synthetic oligonucleotide
aguggaaauuucuuuaacu

SEQ ID NO: 836757 - RNA, 19 nt, Artificial Sequence
  Description of Artificial Sequence: Synthetic oligonucleotide
ucggagaucauuuaccuuc

SEQ ID NO: 836758 - RNA, 19 nt, Artificial Sequence
  Description of Artificial Sequence: Synthetic oligonucleotide
uugguuuuggaucaucagu

SEQ ID NO: 836759 - RNA, 19 nt, Artificial Sequence
  Description of Artificial Sequence: Synthetic oligonucleotide
ucagcauuaccuuugcacu

SEQ ID NO: 836760 - RNA, 19 nt, Artificial Sequence
  Description of Artificial Sequence: Synthetic oligonucleotide
ugauuauuaucuucuucag

SEQ ID NO: 836761 - RNA, 19 nt, Artificial Sequence
  Description of Artificial Sequence: Synthetic oligonucleotide
ugguucaucgggcaaaaug

SEQ ID NO: 836762 - RNA, 19 nt, Artificial Sequence
  Description of Artificial Sequence: Synthetic oligonucleotide
gaaguacuacuuuauugag

SEQ ID NO: 836763 - RNA, 19 nt, Artificial Sequence
  Description of Artificial Sequence: Synthetic oligonucleotide
ugcaguaucgguuaacauc

SEQ ID NO: 836764 - RNA, 19 nt, Artificial Sequence
  Description of Artificial Sequence: Synthetic oligonucleotide
aacgguaccauugugugca

SEQ ID NO: 836765 - RNA, 19 nt, Artificial Sequence
  Description of Artificial Sequence: Synthetic oligonucleotide
agaaagaugcaauccaaga

SEQ ID NO: 836766 - RNA, 19 nt, Artificial Sequence
  Description of Artificial Sequence: Synthetic oligonucleotide
agaagguaaccgcaauggc

SEQ ID NO: 836767 - RNA, 19 nt, Artificial Sequence
  Description of Artificial Sequence: Synthetic oligonucleotide
uuuucuaaggacucuacuu

SEQ ID NO: 836768 - RNA, 19 nt, Artificial Sequence
  Description of Artificial Sequence: Synthetic oligonucleotide
caagcgagcuauuaacugg

SEQ ID NO: 836769 - RNA, 19 nt, Artificial Sequence
  Description of Artificial Sequence: Synthetic oligonucleotide
aaugaaaccucaaaugaau

SEQ ID NO: 836770 - RNA, 19 nt, Artificial Sequence
  Description of Artificial Sequence: Synthetic oligonucleotide
ucgguuaacaucucuuuug

SEQ ID NO: 836771 - RNA, 19 nt, Artificial Sequence
  Description of Artificial Sequence: Synthetic oligonucleotide
agucacuaggaauauauaa

SEQ ID NO: 836772 - RNA, 19 nt, Artificial Sequence
  Description of Artificial Sequence: Synthetic oligonucleotide
uuaccugagcccgagaaag

SEQ ID NO: 836773 - RNA, 19 nt, Artificial Sequence
  Description of Artificial Sequence: Synthetic oligonucleotide
auacaaauccuccauacua

SEQ ID NO: 836774 - RNA, 19 nt, Artificial Sequence
  Description of Artificial Sequence: Synthetic oligonucleotide
aagagcucgacuuucuaau

SEQ ID NO: 836775 - RNA, 19 nt, Artificial Sequence
  Description of Artificial Sequence: Synthetic oligonucleotide
gucuuaaucaacacagagg

SEQ ID NO: 836776 - RNA, 19 nt, Artificial Sequence
  Description of Artificial Sequence: Synthetic oligonucleotide
uuugguccauccaacgaag

SEQ ID NO: 836777 - RNA, 19 nt, Artificial Sequence
  Description of Artificial Sequence: Synthetic oligonucleotide
uguauauucugacuccaaa

SEQ ID NO: 836778 - RNA, 19 nt, Artificial Sequence
  Description of Artificial Sequence: Synthetic oligonucleotide
uuggauguacaauuauggc

SEQ ID NO: 836779 - RNA, 19 nt, Artificial Sequence
  Description of Artificial Sequence: Synthetic oligonucleotide
uuugcacuguacaaguggu

SEQ ID NO: 836780 - RNA, 19 nt, Artificial Sequence
  Description of Artificial Sequence: Synthetic oligonucleotide
gaugguagcgaaucucugc

SEQ ID NO: 836781 - RNA, 19 nt, Artificial Sequence
  Description of Artificial Sequence: Synthetic oligonucleotide
ugucaagcgagcuauuaac

SEQ ID NO: 836782 - RNA, 19 nt, Artificial Sequence
  Description of Artificial Sequence: Synthetic oligonucleotide
acaaauccuccauacuagg

SEQ ID NO: 836783 - RNA, 19 nt, Artificial Sequence
  Description of Artificial Sequence: Synthetic oligonucleotide
gauaacggcgccuuaguuc

SEQ ID NO: 836784 - RNA, 19 nt, Artificial Sequence
  Description of Artificial Sequence: Synthetic oligonucleotide
uacaauuauggcugguuca

SEQ ID NO: 836785 - RNA, 19 nt, Artificial Sequence
  Description of Artificial Sequence: Synthetic oligonucleotide
uuaucauccucagacuucc

SEQ ID NO: 836786 - RNA, 19 nt, Artificial Sequence
  Description of Artificial Sequence: Synthetic oligonucleotide
aguugaaauggucuugaca

SEQ ID NO: 836787 - RNA, 19 nt, Artificial Sequence
  Description of Artificial Sequence: Synthetic oligonucleotide
uuuagaccaaugaguagga

SEQ ID NO: 836788 - RNA, 19 nt, Artificial Sequence
  Description of Artificial Sequence: Synthetic oligonucleotide
caacgaaggagaccaaugg

SEQ ID NO: 836789 - RNA, 19 nt, Artificial Sequence
  Description of Artificial Sequence: Synthetic oligonucleotide
ucuuuguuaucuuccaauc

SEQ ID NO: 836790 - RNA, 19 nt, Artificial Sequence
  Description of Artificial Sequence: Synthetic oligonucleotide
ugauuuguauauucugacu

SEQ ID NO: 836791 - RNA, 19 nt, Artificial Sequence
  Description of Artificial Sequence: Synthetic oligonucleotide
aacuaagagcucgacuuuc

SEQ ID NO: 836792 - RNA, 19 nt, Artificial Sequence
  Description of Artificial Sequence: Synthetic oligonucleotide
aaggacucuacuucucugu

SEQ ID NO: 836793 - RNA, 19 nt, Artificial Sequence
  Description of Artificial Sequence: Synthetic oligonucleotide
uccaucacgaaguucuugu

SEQ ID NO: 836794 - RNA, 19 nt, Artificial Sequence
  Description of Artificial Sequence: Synthetic oligonucleotide
gauguacaauuauggcugg

SEQ ID NO: 836795 - RNA, 19 nt, Artificial Sequence
  Description of Artificial Sequence: Synthetic oligonucleotide
uuacaacaacgaauggcag

SEQ ID NO: 836796 - RNA, 19 nt, Artificial Sequence
  Description of Artificial Sequence: Synthetic oligonucleotide
uauugagaagcuucuuuac

SEQ ID NO: 836797 - RNA, 19 nt, Artificial Sequence
  Description of Artificial Sequence: Synthetic oligonucleotide
acuuagaucaaugccuguc

SEQ ID NO: 836798 - RNA, 19 nt, Artificial Sequence
  Description of Artificial Sequence: Synthetic oligonucleotide
uguucuuuaucgucgccug

SEQ ID NO: 836799 - RNA, 19 nt, Artificial Sequence
  Description of Artificial Sequence: Synthetic oligonucleotide
caucacgaaguucuugugg

SEQ ID NO: 836800 - RNA, 19 nt, Artificial Sequence
  Description of Artificial Sequence: Synthetic oligonucleotide
uuguuaucuuccaaucugu

SEQ ID NO: 836801 - RNA, 19 nt, Artificial Sequence
  Description of Artificial Sequence: Synthetic oligonucleotide
auuauggcugguucaucgg

SEQ ID NO: 836802 - RNA, 19 nt, Artificial Sequence
  Description of Artificial Sequence: Synthetic oligonucleotide
uuccgauaaaagcaugacu

SEQ ID NO: 836803 - RNA, 19 nt, Artificial Sequence
  Description of Artificial Sequence: Synthetic oligonucleotide
ggauguacaauuauggcug

SEQ ID NO: 836804 - RNA, 19 nt, Artificial Sequence
  Description of Artificial Sequence: Synthetic oligonucleotide
gacaguaaugauuuguaua

SEQ ID NO: 836805 - RNA, 19 nt, Artificial Sequence
  Description of Artificial Sequence: Synthetic oligonucleotide
aagcgagcuauuaacuggg

SEQ ID NO: 836806 - RNA, 19 nt, Artificial Sequence
  Description of Artificial Sequence: Synthetic oligonucleotide
ucaucgggcaaaauguauc

SEQ ID NO: 836807 - RNA, 19 nt, Artificial Sequence
  Description of Artificial Sequence: Synthetic oligonucleotide
ugcaaaacgguaccauugu

SEQ ID NO: 836808 - RNA, 19 nt, Artificial Sequence
  Description of Artificial Sequence: Synthetic oligonucleotide
uuuguauauucugacucca

SEQ ID NO: 836809 - RNA, 19 nt, Artificial Sequence
  Description of Artificial Sequence: Synthetic oligonucleotide
uccuuuucaagaagguaac

SEQ ID NO: 836810 - RNA, 19 nt, Artificial Sequence
  Description of Artificial Sequence: Synthetic oligonucleotide
ucugauaacggcgccuuag

SEQ ID NO: 836811 - RNA, 19 nt, Artificial Sequence
  Description of Artificial Sequence: Synthetic oligonucleotide
aguuuagaccaaugaguag

SEQ ID NO: 836812 - RNA, 19 nt, Artificial Sequence
  Description of Artificial Sequence: Synthetic oligonucleotide
cuuuucggagaucauuuac

SEQ ID NO: 836813 - RNA, 19 nt, Artificial Sequence
  Description of Artificial Sequence: Synthetic oligonucleotide
acccugaagcuucucgacc

SEQ ID NO: 836814 - RNA, 19 nt, Artificial Sequence
  Description of Artificial Sequence: Synthetic oligonucleotide
aucuguuaauuuccgauaa

SEQ ID NO: 836815 - RNA, 19 nt, Artificial Sequence
  Description of Artificial Sequence: Synthetic oligonucleotide
ugcaaacaaugaaaccuca

SEQ ID NO: 836816 - RNA, 19 nt, Artificial Sequence
  Description of Artificial Sequence: Synthetic oligonucleotide
ucuuccaaucuguaaucca

SEQ ID NO: 836817 - RNA, 19 nt, Artificial Sequence
  Description of Artificial Sequence: Synthetic oligonucleotide
agcagaucccuguuaacug

SEQ ID NO: 836818 - RNA, 19 nt, Artificial Sequence
  Description of Artificial Sequence: Synthetic oligonucleotide
ugacucucgaaguacuacu

SEQ ID NO: 836819 - RNA, 19 nt, Artificial Sequence
  Description of Artificial Sequence: Synthetic oligonucleotide
uucaagaagguaaccgcaa

SEQ ID NO: 836820 - RNA, 19 nt, Artificial Sequence
  Description of Artificial Sequence: Synthetic oligonucleotide
agagacaguaaugauuugu

SEQ ID NO: 836821 - RNA, 19 nt, Artificial Sequence
  Description of Artificial Sequence: Synthetic oligonucleotide
caaguuuagaccaaugagu

SEQ ID NO: 836822 - RNA, 19 nt, Artificial Sequence
  Description of Artificial Sequence: Synthetic oligonucleotide
augguagcgaaucucugca

SEQ ID NO: 836823 - RNA, 19 nt, Artificial Sequence
  Description of Artificial Sequence: Synthetic oligonucleotide
agcaugacucucgaaguac

SEQ ID NO: 836824 - RNA, 19 nt, Artificial Sequence
  Description of Artificial Sequence: Synthetic oligonucleotide
ucgggcaaaauguaucuuc

SEQ ID NO: 836825 - RNA, 19 nt, Artificial Sequence
  Description of Artificial Sequence: Synthetic oligonucleotide
aaauccuuuucaagaaggu

SEQ ID NO: 836826 - RNA, 19 nt, Artificial Sequence
  Description of Artificial Sequence: Synthetic oligonucleotide
uugguguuggaaguaauaa

SEQ ID NO: 836827 - RNA, 19 nt, Artificial Sequence
  Description of Artificial Sequence: Synthetic oligonucleotide
ucuagccggaugcugaaau

SEQ ID NO: 836828 - RNA, 19 nt, Artificial Sequence
  Description of Artificial Sequence: Synthetic oligonucleotide
uaaggacucuacuucucug

SEQ ID NO: 836829 - RNA, 19 nt, Artificial Sequence
  Description of Artificial Sequence: Synthetic oligonucleotide
uaaucaacacagagggguc

SEQ ID NO: 836830 - RNA, 19 nt, Artificial Sequence
  Description of Artificial Sequence: Synthetic oligonucleotide
guauauucugacuccaaaa

SEQ ID NO: 836831 - RNA, 19 nt, Artificial Sequence
  Description of Artificial Sequence: Synthetic oligonucleotide
uacuuuaagcuguuuuguc

SEQ ID NO: 836832 - RNA, 19 nt, Artificial Sequence
  Description of Artificial Sequence: Synthetic oligonucleotide
uugguccauccaacgaagg

SEQ ID NO: 836833 - RNA, 19 nt, Artificial Sequence
  Description of Artificial Sequence: Synthetic oligonucleotide
uuuaucgucgccugauuuu

SEQ ID NO: 836834 - RNA, 19 nt, Artificial Sequence
  Description of Artificial Sequence: Synthetic oligonucleotide
aagguaaccgcaauggcuu

SEQ ID NO: 836835 - RNA, 19 nt, Artificial Sequence
  Description of Artificial Sequence: Synthetic oligonucleotide
augaaugcucuuuguuauc

SEQ ID NO: 836836 - RNA, 19 nt, Artificial Sequence
  Description of Artificial Sequence: Synthetic oligonucleotide
aguaucgguuaacaucucu

SEQ ID NO: 836837 - RNA, 19 nt, Artificial Sequence
  Description of Artificial Sequence: Synthetic oligonucleotide
aaguacuacuuuauugaga

SEQ ID NO: 836838 - RNA, 19 nt, Artificial Sequence
  Description of Artificial Sequence: Synthetic oligonucleotide
cauccaacgaaggagacca

SEQ ID NO: 836839 - RNA, 19 nt, Artificial Sequence
  Description of Artificial Sequence: Synthetic oligonucleotide
uugucaagcgagcuauuaa

SEQ ID NO: 836840 - RNA, 19 nt, Artificial Sequence
  Description of Artificial Sequence: Synthetic oligonucleotide
uuaguccuuuggaacuaag

SEQ ID NO: 836841 - RNA, 19 nt, Artificial Sequence
  Description of Artificial Sequence: Synthetic oligonucleotide
auaucuuccugcaaugacu

SEQ ID NO: 836842 - RNA, 19 nt, Artificial Sequence
  Description of Artificial Sequence: Synthetic oligonucleotide
cauacuagggcuagccauc

SEQ ID NO: 836843 - RNA, 19 nt, Artificial Sequence
  Description of Artificial Sequence: Synthetic oligonucleotide
guacaauuauggcugguuc

SEQ ID NO: 836844 - RNA, 19 nt, Artificial Sequence
  Description of Artificial Sequence: Synthetic oligonucleotide
caagaagguaaccgcaaug

SEQ ID NO: 836845 - RNA, 19 nt, Artificial Sequence
  Description of Artificial Sequence: Synthetic oligonucleotide
uuuccgauaaaagcaugac

SEQ ID NO: 836846 - RNA, 19 nt, Artificial Sequence
  Description of Artificial Sequence: Synthetic oligonucleotide
aacaacgaauggcagucuu

SEQ ID NO: 836847 - RNA, 19 nt, Artificial Sequence
  Description of Artificial Sequence: Synthetic oligonucleotide
agcucgacuuucuaauucu

SEQ ID NO: 836848 - RNA, 19 nt, Artificial Sequence
  Description of Artificial Sequence: Synthetic oligonucleotide
caucaugucacaacuggga

SEQ ID NO: 836849 - RNA, 19 nt, Artificial Sequence
  Description of Artificial Sequence: Synthetic oligonucleotide
gaugcaauccaagaguaua

SEQ ID NO: 836850 - RNA, 19 nt, Artificial Sequence
  Description of Artificial Sequence: Synthetic oligonucleotide
uaaccagucuagccggaug

SEQ ID NO: 836851 - RNA, 19 nt, Artificial Sequence
  Description of Artificial Sequence: Synthetic oligonucleotide
ucuaaggacucuacuucuc

SEQ ID NO: 836852 - RNA, 19 nt, Artificial Sequence
  Description of Artificial Sequence: Synthetic oligonucleotide
guuucgucgucaucuuuag

SEQ ID NO: 836853 - RNA, 19 nt, Artificial Sequence
  Description of Artificial Sequence: Synthetic oligonucleotide
ugucagagccuuacaacaa

SEQ ID NO: 836854 - RNA, 19 nt, Artificial Sequence
  Description of Artificial Sequence: Synthetic oligonucleotide
ugguguuggaaguaauaau

SEQ ID NO: 836855 - RNA, 19 nt, Artificial Sequence
  Description of Artificial Sequence: Synthetic oligonucleotide
agggcgaugguagcgaauc

SEQ ID NO: 836856 - RNA, 19 nt, Artificial Sequence
  Description of Artificial Sequence: Synthetic oligonucleotide
uaucgguuaacaucucuuu

SEQ ID NO: 836857 - RNA, 19 nt, Artificial Sequence
  Description of Artificial Sequence: Synthetic oligonucleotide
uaucuuuagagggucuuuc

SEQ ID NO: 836858 - RNA, 19 nt, Artificial Sequence
  Description of Artificial Sequence: Synthetic oligonucleotide
uccauacuagggcuagcca

SEQ ID NO: 836859 - RNA, 19 nt, Artificial Sequence
  Description of Artificial Sequence: Synthetic oligonucleotide
ucuugcguucacccugaag

SEQ ID NO: 836860 - RNA, 19 nt, Artificial Sequence
  Description of Artificial Sequence: Synthetic oligonucleotide
uguuaucuuccaaucugua

SEQ ID NO: 836861 - RNA, 19 nt, Artificial Sequence
  Description of Artificial Sequence: Synthetic oligonucleotide
uguacaauuauggcugguu

SEQ ID NO: 836862 - RNA, 19 nt, Artificial Sequence
  Description of Artificial Sequence: Synthetic oligonucleotide
auuuccgauaaaagcauga

SEQ ID NO: 836863 - RNA, 19 nt, Artificial Sequence
  Description of Artificial Sequence: Synthetic oligonucleotide
auaaucuguuuccuagcau

SEQ ID NO: 836864 - RNA, 19 nt, Artificial Sequence
  Description of Artificial Sequence: Synthetic oligonucleotide
guuugguccauccaacgaa

SEQ ID NO: 836865 - RNA, 19 nt, Artificial Sequence
  Description of Artificial Sequence: Synthetic oligonucleotide
uggaucaagaacagccaua

SEQ ID NO: 836866 - RNA, 19 nt, Artificial Sequence
  Description of Artificial Sequence: Synthetic oligonucleotide
uuagagggucuuuccuugc

SEQ ID NO: 836867 - RNA, 19 nt, Artificial Sequence
  Description of Artificial Sequence: Synthetic oligonucleotide
gaucaaugccugucagagc

SEQ ID NO: 836868 - RNA, 19 nt, Artificial Sequence
  Description of Artificial Sequence: Synthetic oligonucleotide
uuguauauucugacuccaa

SEQ ID NO: 836869 - RNA, 19 nt, Artificial Sequence
  Description of Artificial Sequence: Synthetic oligonucleotide
guaucuguuaauuuccgau

SEQ ID NO: 836870 - RNA, 19 nt, Artificial Sequence
  Description of Artificial Sequence: Synthetic oligonucleotide
uuaucgucgccugauuuuc

SEQ ID NO: 836871 - RNA, 19 nt, Artificial Sequence
  Description of Artificial Sequence: Synthetic oligonucleotide
aagcaugacucucgaagua

SEQ ID NO: 836872 - RNA, 19 nt, Artificial Sequence
  Description of Artificial Sequence: Synthetic oligonucleotide
gagcucgacuuucuaauuc

SEQ ID NO: 836873 - RNA, 19 nt, Artificial Sequence
  Description of Artificial Sequence: Synthetic oligonucleotide
auggcagucuuaaucaaca

SEQ ID NO: 836874 - RNA, 19 nt, Artificial Sequence
  Description of Artificial Sequence: Synthetic oligonucleotide
ccuuacaacaacgaauggc

SEQ ID NO: 836875 - RNA, 19 nt, Artificial Sequence
  Description of Artificial Sequence: Synthetic oligonucleotide
augccaaacauccgggaaa

SEQ ID NO: 836876 - RNA, 19 nt, Artificial Sequence
  Description of Artificial Sequence: Synthetic oligonucleotide
aggacucuacuucucugug

SEQ ID NO: 836877 - RNA, 19 nt, Artificial Sequence
  Description of Artificial Sequence: Synthetic oligonucleotide
cacccauguaaacugagca

SEQ ID NO: 836878 - RNA, 19 nt, Artificial Sequence
  Description of Artificial Sequence: Synthetic oligonucleotide
uggaacuguacgccccuug

SEQ ID NO: 836879 - RNA, 19 nt, Artificial Sequence
  Description of Artificial Sequence: Synthetic oligonucleotide
acacuuagaucaaugccug

SEQ ID NO: 836880 - RNA, 19 nt, Artificial Sequence
  Description of Artificial Sequence: Synthetic oligonucleotide
gaacuguacgccccuugug

SEQ ID NO: 836881 - RNA, 19 nt, Artificial Sequence
  Description of Artificial Sequence: Synthetic oligonucleotide
cuagggcuagccaucagca

SEQ ID NO: 836882 - RNA, 19 nt, Artificial Sequence
  Description of Artificial Sequence: Synthetic oligonucleotide
acaauuauggcugguucau

SEQ ID NO: 836883 - RNA, 19 nt, Artificial Sequence
  Description of Artificial Sequence: Synthetic oligonucleotide
gguccauccaacgaaggag

SEQ ID NO: 836884 - RNA, 19 nt, Artificial Sequence
  Description of Artificial Sequence: Synthetic oligonucleotide
uucucagacuucucuaauu

SEQ ID NO: 836885 - RNA, 19 nt, Artificial Sequence
  Description of Artificial Sequence: Synthetic oligonucleotide
cuccauacuagggcuagcc

SEQ ID NO: 836886 - RNA, 19 nt, Artificial Sequence
  Description of Artificial Sequence: Synthetic oligonucleotide
uuugucaagcgagcuauua

SEQ ID NO: 836887 - RNA, 19 nt, Artificial Sequence
  Description of Artificial Sequence: Synthetic oligonucleotide
gaagguaaccgcaauggcu

SEQ ID NO: 836888 - RNA, 19 nt, Artificial Sequence
  Description of Artificial Sequence: Synthetic oligonucleotide
gcgaaucucugcaaaacgg

SEQ ID NO: 836889 - RNA, 19 nt, Artificial Sequence
  Description of Artificial Sequence: Synthetic oligonucleotide
uagcgaaucucugcaaaac

SEQ ID NO: 836890 - RNA, 19 nt, Artificial Sequence
  Description of Artificial Sequence: Synthetic oligonucleotide
ggaacuaagagcucgacuu

SEQ ID NO: 836891 - RNA, 19 nt, Artificial Sequence
  Description of Artificial Sequence: Synthetic oligonucleotide
cuuucgagguaucuguuaa

SEQ ID NO: 836892 - RNA, 19 nt, Artificial Sequence
  Description of Artificial Sequence: Synthetic oligonucleotide
acccauguaaacugagcau

SEQ ID NO: 836893 - RNA, 19 nt, Artificial Sequence
  Description of Artificial Sequence: Synthetic oligonucleotide
uaaaagcaugacucucgaa

SEQ ID NO: 836894 - RNA, 19 nt, Artificial Sequence
  Description of Artificial Sequence: Synthetic oligonucleotide
ugagcgggugggaaggcaa

SEQ ID NO: 836895 - RNA, 19 nt, Artificial Sequence
  Description of Artificial Sequence: Synthetic oligonucleotide
ugauaacggcgccuuaguu

SEQ ID NO: 836896 - RNA, 19 nt, Artificial Sequence
  Description of Artificial Sequence: Synthetic oligonucleotide
uccuccauacuagggcuag

SEQ ID NO: 836897 - RNA, 19 nt, Artificial Sequence
  Description of Artificial Sequence: Synthetic oligonucleotide
gagacaguaaugauuugua

SEQ ID NO: 836898 - RNA, 19 nt, Artificial Sequence
  Description of Artificial Sequence: Synthetic oligonucleotide
ggauuuuaguccuuuggaa

SEQ ID NO: 836899 - RNA, 19 nt, Artificial Sequence
  Description of Artificial Sequence: Synthetic oligonucleotide
ucgagguaucuguuaauuu

SEQ ID NO: 836900 - RNA, 19 nt, Artificial Sequence
  Description of Artificial Sequence: Synthetic oligonucleotide
cuugcaguaucgguuaaca

SEQ ID NO: 836901 - RNA, 19 nt, Artificial Sequence
  Description of Artificial Sequence: Synthetic oligonucleotide
uuuuaguccuuuggaacua

SEQ ID NO: 836902 - RNA, 19 nt, Artificial Sequence
  Description of Artificial Sequence: Synthetic oligonucleotide
gagcuggaacuguacgccc

SEQ ID NO: 836903 - RNA, 19 nt, Artificial Sequence
  Description of Artificial Sequence: Synthetic oligonucleotide
gucgccugauuuucuuccg

SEQ ID NO: 836904 - RNA, 19 nt, Artificial Sequence
  Description of Artificial Sequence: Synthetic oligonucleotide
uggucuugacaaagggaaa

SEQ ID NO: 836905 - RNA, 19 nt, Artificial Sequence
  Description of Artificial Sequence: Synthetic oligonucleotide
accaaugaguaggagugga

SEQ ID NO: 836906 - RNA, 19 nt, Artificial Sequence
  Description of Artificial Sequence: Synthetic oligonucleotide
agagcacaugacuuaugau

SEQ ID NO: 836907 - RNA, 19 nt, Artificial Sequence
  Description of Artificial Sequence: Synthetic oligonucleotide
caucgggucauacucaucu

SEQ ID NO: 836908 - RNA, 19 nt, Artificial Sequence
  Description of Artificial Sequence: Synthetic oligonucleotide
uaacaucucuuuugucauc

SEQ ID NO: 836909 - RNA, 19 nt, Artificial Sequence
  Description of Artificial Sequence: Synthetic oligonucleotide
ggaauauauaaauucugau

SEQ ID NO: 836910 - RNA, 19 nt, Artificial Sequence
  Description of Artificial Sequence: Synthetic oligonucleotide
uugcaguaauuucccaguu

SEQ ID NO: 836911 - RNA, 19 nt, Artificial Sequence
  Description of Artificial Sequence: Synthetic oligonucleotide
ucaucucguuuguucauuu

SEQ ID NO: 836912 - RNA, 19 nt, Artificial Sequence
  Description of Artificial Sequence: Synthetic oligonucleotide
ugccaaacauccgggaaaa

SEQ ID NO: 836913 - RNA, 19 nt, Artificial Sequence
  Description of Artificial Sequence: Synthetic oligonucleotide
ucuuuaucgucgccugauu

SEQ ID NO: 836914 - RNA, 19 nt, Artificial Sequence
  Description of Artificial Sequence: Synthetic oligonucleotide
uggcagucuuaaucaacac

SEQ ID NO: 836915 - RNA, 19 nt, Artificial Sequence
  Description of Artificial Sequence: Synthetic oligonucleotide
cuuguauccucgggagagg

SEQ ID NO: 836916 - RNA, 19 nt, Artificial Sequence
  Description of Artificial Sequence: Synthetic oligonucleotide
uugcacuguacaagugguc

SEQ ID NO: 836917 - RNA, 19 nt, Artificial Sequence
  Description of Artificial Sequence: Synthetic oligonucleotide
uugcaguaucgguuaacau

SEQ ID NO: 836918 - RNA, 19 nt, Artificial Sequence
  Description of Artificial Sequence: Synthetic oligonucleotide
uaccugagcccgagaaaga

SEQ ID NO: 836919 - RNA, 19 nt, Artificial Sequence
  Description of Artificial Sequence: Synthetic oligonucleotide
caagagcacaugacuuaug

SEQ ID NO: 836920 - RNA, 19 nt, Artificial Sequence
  Description of Artificial Sequence: Synthetic oligonucleotide
uaucgucgccugauuuucu

SEQ ID NO: 836921 - RNA, 19 nt, Artificial Sequence
  Description of Artificial Sequence: Synthetic oligonucleotide
guagcgaaucucugcaaaa

SEQ ID NO: 836922 - RNA, 19 nt, Artificial Sequence
  Description of Artificial Sequence: Synthetic oligonucleotide
uuuaguccuuuggaacuaa

SEQ ID NO: 836923 - RNA, 19 nt, Artificial Sequence
  Description of Artificial Sequence: Synthetic oligonucleotide
cuucuuucuugacgcuggc

SEQ ID NO: 836924 - RNA, 19 nt, Artificial Sequence
  Description of Artificial Sequence: Synthetic oligonucleotide
ucgccugauuuucuuccgu

SEQ ID NO: 836925 - RNA, 19 nt, Artificial Sequence
  Description of Artificial Sequence: Synthetic oligonucleotide
cacgaaguucuuguggguc

SEQ ID NO: 836926 - RNA, 19 nt, Artificial Sequence
  Description of Artificial Sequence: Synthetic oligonucleotide
cuagccggaugcugaaauc

SEQ ID NO: 836927 - RNA, 19 nt, Artificial Sequence
  Description of Artificial Sequence: Synthetic oligonucleotide
gacgcuggcguuccauuuc

SEQ ID NO: 836928 - RNA, 19 nt, Artificial Sequence
  Description of Artificial Sequence: Synthetic oligonucleotide
gguucaucgggcaaaaugu

SEQ ID NO: 836929 - RNA, 19 nt, Artificial Sequence
  Description of Artificial Sequence: Synthetic oligonucleotide
acuaagagcucgacuuucu

SEQ ID NO: 836930 - RNA, 19 nt, Artificial Sequence
  Description of Artificial Sequence: Synthetic oligonucleotide
gcaauccaagaguauauaa

SEQ ID NO: 836931 - RNA, 19 nt, Artificial Sequence
  Description of Artificial Sequence: Synthetic oligonucleotide
caucucguuuguucauuuc

SEQ ID NO: 836932 - RNA, 19 nt, Artificial Sequence
  Description of Artificial Sequence: Synthetic oligonucleotide
cagucuagccggaugcuga

SEQ ID NO: 836933 - RNA, 19 nt, Artificial Sequence
  Description of Artificial Sequence: Synthetic oligonucleotide
gcaguaucgguuaacaucu

SEQ ID NO: 836934 - RNA, 19 nt, Artificial Sequence
  Description of Artificial Sequence: Synthetic oligonucleotide
gagcuauuaacugggauuu

SEQ ID NO: 836935 - RNA, 19 nt, Artificial Sequence
  Description of Artificial Sequence: Synthetic oligonucleotide
auucugauaacggcgccuu

SEQ ID NO: 836936 - RNA, 19 nt, Artificial Sequence
  Description of Artificial Sequence: Synthetic oligonucleotide
agagcucgacuuucuaauu

SEQ ID NO: 836937 - RNA, 19 nt, Artificial Sequence
  Description of Artificial Sequence: Synthetic oligonucleotide
caguugaaauggucuugac

SEQ ID NO: 836938 - RNA, 19 nt, Artificial Sequence
  Description of Artificial Sequence: Synthetic oligonucleotide
guccauccaacgaaggaga

SEQ ID NO: 836939 - RNA, 19 nt, Artificial Sequence
  Description of Artificial Sequence: Synthetic oligonucleotide
gguuugguccauccaacga

SEQ ID NO: 836940 - RNA, 19 nt, Artificial Sequence
  Description of Artificial Sequence: Synthetic oligonucleotide
ugaccaucugagucuucuc

SEQ ID NO: 836941 - RNA, 19 nt, Artificial Sequence
  Description of Artificial Sequence: Synthetic oligonucleotide
gcaaaacgguaccauugug

SEQ ID NO: 836942 - RNA, 19 nt, Artificial Sequence
  Description of Artificial Sequence: Synthetic oligonucleotide
uuuugucaagcgagcuauu

SEQ ID NO: 836943 - RNA, 19 nt, Artificial Sequence
  Description of Artificial Sequence: Synthetic oligonucleotide
auacuagggcuagccauca

SEQ ID NO: 836944 - RNA, 19 nt, Artificial Sequence
  Description of Artificial Sequence: Synthetic oligonucleotide
gagaucauuuaccuucauu

SEQ ID NO: 836945 - RNA, 19 nt, Artificial Sequence
  Description of Artificial Sequence: Synthetic oligonucleotide
cauugugugcauacacuua

SEQ ID NO: 836946 - RNA, 19 nt, Artificial Sequence
  Description of Artificial Sequence: Synthetic oligonucleotide
uuaaccagucuagccggau

SEQ ID NO: 836947 - RNA, 19 nt, Artificial Sequence
  Description of Artificial Sequence: Synthetic oligonucleotide
ugguagcgaaucucugcaa

SEQ ID NO: 836948 - RNA, 19 nt, Artificial Sequence
  Description of Artificial Sequence: Synthetic oligonucleotide
uucauugccuuuggaucaa

SEQ ID NO: 836949 - RNA, 19 nt, Artificial Sequence
  Description of Artificial Sequence: Synthetic oligonucleotide
ucgucgccugauuuucuuc

SEQ ID NO: 836950 - RNA, 19 nt, Artificial Sequence
  Description of Artificial Sequence: Synthetic oligonucleotide
cccgagaaagaugcaaucc

SEQ ID NO: 836951 - RNA, 19 nt, Artificial Sequence
  Description of Artificial Sequence: Synthetic oligonucleotide
ucauugccuuuggaucaag

SEQ ID NO: 836952 - RNA, 19 nt, Artificial Sequence
  Description of Artificial Sequence: Synthetic oligonucleotide
caucgggcaaaauguaucu

SEQ ID NO: 836953 - RNA, 19 nt, Artificial Sequence
  Description of Artificial Sequence: Synthetic oligonucleotide
agucuagccggaugcugaa

SEQ ID NO: 836954 - RNA, 19 nt, Artificial Sequence
  Description of Artificial Sequence: Synthetic oligonucleotide
ugccugucagagccuuaca

SEQ ID NO: 836955 - RNA, 19 nt, Artificial Sequence
  Description of Artificial Sequence: Synthetic oligonucleotide
ugacgcuggcguuccauuu

SEQ ID NO: 836956 - RNA, 19 nt, Artificial Sequence
  Description of Artificial Sequence: Synthetic oligonucleotide
cuacuuuaagcuguuuugu

SEQ ID NO: 836957 - RNA, 19 nt, Artificial Sequence
  Description of Artificial Sequence: Synthetic oligonucleotide
guugguguuggaaguaaua

SEQ ID NO: 836958 - RNA, 19 nt, Artificial Sequence
  Description of Artificial Sequence: Synthetic oligonucleotide
gccuuacaacaacgaaugg

SEQ ID NO: 836959 - RNA, 19 nt, Artificial Sequence
  Description of Artificial Sequence: Synthetic oligonucleotide
aucgucgccugauuuucuu

SEQ ID NO: 836960 - RNA, 19 nt, Artificial Sequence
  Description of Artificial Sequence: Synthetic oligonucleotide
uagggcuagccaucagcau

SEQ ID NO: 836961 - RNA, 19 nt, Artificial Sequence
  Description of Artificial Sequence: Synthetic oligonucleotide
uccuugcaguaucgguuaa

SEQ ID NO: 836962 - RNA, 19 nt, Artificial Sequence
  Description of Artificial Sequence: Synthetic oligonucleotide
cuuaaccagucuagccgga

SEQ ID NO: 836963 - RNA, 19 nt, Artificial Sequence
  Description of Artificial Sequence: Synthetic oligonucleotide
uauccucgggagaggguuu

SEQ ID NO: 836964 - RNA, 19 nt, Artificial Sequence
  Description of Artificial Sequence: Synthetic oligonucleotide
caucaguaucaucaucucu

SEQ ID NO: 836965 - RNA, 19 nt, Artificial Sequence
  Description of Artificial Sequence: Synthetic oligonucleotide
cuagcauaucuuccugcaa

SEQ ID NO: 836966 - RNA, 19 nt, Artificial Sequence
  Description of Artificial Sequence: Synthetic oligonucleotide
ccuagcauaucuuccugca

SEQ ID NO: 836967 - RNA, 19 nt, Artificial Sequence
  Description of Artificial Sequence: Synthetic oligonucleotide
uucugauaacggcgccuua

SEQ ID NO: 836968 - RNA, 19 nt, Artificial Sequence
  Description of Artificial Sequence: Synthetic oligonucleotide
cuccaucgggucauacuca

SEQ ID NO: 836969 - RNA, 19 nt, Artificial Sequence
  Description of Artificial Sequence: Synthetic oligonucleotide
gaacuaagagcucgacuuu

SEQ ID NO: 836970 - RNA, 19 nt, Artificial Sequence
  Description of Artificial Sequence: Synthetic oligonucleotide
gucaagcgagcuauuaacu

SEQ ID NO: 836971 - RNA, 19 nt, Artificial Sequence
  Description of Artificial Sequence: Synthetic oligonucleotide
ccauguaaacugagcauca

SEQ ID NO: 836972 - RNA, 19 nt, Artificial Sequence
  Description of Artificial Sequence: Synthetic oligonucleotide
ggugggaaggcaaugccaa

SEQ ID NO: 836973 - RNA, 19 nt, Artificial Sequence
  Description of Artificial Sequence: Synthetic oligonucleotide
auguacaauuauggcuggu

SEQ ID NO: 836974 - RNA, 19 nt, Artificial Sequence
  Description of Artificial Sequence: Synthetic oligonucleotide
cgucgccugauuuucuucc

SEQ ID NO: 836975 - RNA, 19 nt, Artificial Sequence
  Description of Artificial Sequence: Synthetic oligonucleotide
ccuuucaugcccacuagaa

SEQ ID NO: 836976 - RNA, 19 nt, Artificial Sequence
  Description of Artificial Sequence: Synthetic oligonucleotide
cucgggagaggguuuccca

SEQ ID NO: 836977 - RNA, 19 nt, Artificial Sequence
  Description of Artificial Sequence: Synthetic oligonucleotide
caugacucucgaaguacua

SEQ ID NO: 836978 - RNA, 19 nt, Artificial Sequence
  Description of Artificial Sequence: Synthetic oligonucleotide
acaacgaauggcagucuua

SEQ ID NO: 836979 - RNA, 19 nt, Artificial Sequence
  Description of Artificial Sequence: Synthetic oligonucleotide
aacggcgccuuaguuccau

SEQ ID NO: 836980 - RNA, 19 nt, Artificial Sequence
  Description of Artificial Sequence: Synthetic oligonucleotide
gcgccuuaguuccaucaug

SEQ ID NO: 836981 - RNA, 19 nt, Artificial Sequence
  Description of Artificial Sequence: Synthetic oligonucleotide
uaaccgcaauggcuuugau

SEQ ID NO: 836982 - RNA, 19 nt, Artificial Sequence
  Description of Artificial Sequence: Synthetic oligonucleotide
ggaucaagaacagccauau

SEQ ID NO: 836983 - RNA, 19 nt, Artificial Sequence
  Description of Artificial Sequence: Synthetic oligonucleotide
gugaccaucugagucuucu

SEQ ID NO: 836984 - RNA, 19 nt, Artificial Sequence
  Description of Artificial Sequence: Synthetic oligonucleotide
cuuuaucgucgccugauuu

SEQ ID NO: 836985 - RNA, 19 nt, Artificial Sequence
  Description of Artificial Sequence: Synthetic oligonucleotide
cuaagagcucgacuuucua

SEQ ID NO: 836986 - RNA, 19 nt, Artificial Sequence
  Description of Artificial Sequence: Synthetic oligonucleotide
ugcguucacccugaagcuu

SEQ ID NO: 836987 - RNA, 19 nt, Artificial Sequence
  Description of Artificial Sequence: Synthetic oligonucleotide
acggcgccuuaguuccauc

SEQ ID NO: 836988 - RNA, 19 nt, Artificial Sequence
  Description of Artificial Sequence: Synthetic oligonucleotide
guaucgguuaacaucucuu

SEQ ID NO: 836989 - RNA, 19 nt, Artificial Sequence
  Description of Artificial Sequence: Synthetic oligonucleotide
guucaucgggcaaaaugua

SEQ ID NO: 836990 - RNA, 19 nt, Artificial Sequence
  Description of Artificial Sequence: Synthetic oligonucleotide
ucuugacgcuggcguucca

SEQ ID NO: 836991 - RNA, 19 nt, Artificial Sequence
  Description of Artificial Sequence: Synthetic oligonucleotide
ccugagcccgagaaagaug

SEQ ID NO: 836992 - RNA, 19 nt, Artificial Sequence
  Description of Artificial Sequence: Synthetic oligonucleotide
agcccaguuuggauguaca

SEQ ID NO: 836993 - RNA, 19 nt, Artificial Sequence
  Description of Artificial Sequence: Synthetic oligonucleotide
uaacggcgccuuaguucca

SEQ ID NO: 836994 - RNA, 19 nt, Artificial Sequence
  Description of Artificial Sequence: Synthetic oligonucleotide
agguaaccgcaauggcuuu

SEQ ID NO: 836995 - RNA, 19 nt, Artificial Sequence
  Description of Artificial Sequence: Synthetic oligonucleotide
ccaguuuggauguacaauu

SEQ ID NO: 836996 - RNA, 19 nt, Artificial Sequence
  Description of Artificial Sequence: Synthetic oligonucleotide
gccugucagagccuuacaa

SEQ ID NO: 836997 - RNA, 19 nt, Artificial Sequence
  Description of Artificial Sequence: Synthetic oligonucleotide
cgauaaaagcaugacucuc

SEQ ID NO: 836998 - RNA, 19 nt, Artificial Sequence
  Description of Artificial Sequence: Synthetic oligonucleotide
ccauccaacgaaggagacc

SEQ ID NO: 836999 - RNA, 19 nt, Artificial Sequence
  Description of Artificial Sequence: Synthetic oligonucleotide
ggcgaugguagcgaaucuc

SEQ ID NO: 837000 - RNA, 19 nt, Artificial Sequence
  Description of Artificial Sequence: Synthetic oligonucleotide
cugauaacggcgccuuagu

SEQ ID NO: 837001 - RNA, 19 nt, Artificial Sequence
  Description of Artificial Sequence: Synthetic oligonucleotide
guauccucgggagaggguu

SEQ ID NO: 837002 - RNA, 19 nt, Artificial Sequence
  Description of Artificial Sequence: Synthetic oligonucleotide
cauugccuuuggaucaagu

SEQ ID NO: 837003 - RNA, 19 nt, Artificial Sequence
  Description of Artificial Sequence: Synthetic oligonucleotide
cuuaucuuuagagggucuu

SEQ ID NO: 837004 - RNA, 19 nt, Artificial Sequence
  Description of Artificial Sequence: Synthetic oligonucleotide
uucuugcguucacccugaa

SEQ ID NO: 837005 - RNA, 19 nt, Artificial Sequence
  Description of Artificial Sequence: Synthetic oligonucleotide
gacucucgaaguacuacuu

SEQ ID NO: 837006 - RNA, 19 nt, Artificial Sequence
  Description of Artificial Sequence: Synthetic oligonucleotide
cauuuaccuucauugccuu

SEQ ID NO: 837007 - RNA, 19 nt, Artificial Sequence
  Description of Artificial Sequence: Synthetic oligonucleotide
gcguucacccugaagcuuc

SEQ ID NO: 837008 - RNA, 19 nt, Artificial Sequence
  Description of Artificial Sequence: Synthetic oligonucleotide
cucgaaguacuacuuuauu

SEQ ID NO: 837009 - RNA, 19 nt, Artificial Sequence
  Description of Artificial Sequence: Synthetic oligonucleotide
agcgagcuauuaacuggga

SEQ ID NO: 837010 - RNA, 19 nt, Artificial Sequence
  Description of Artificial Sequence: Synthetic oligonucleotide
agcuauuaacugggauuuu

SEQ ID NO: 837011 - RNA, 19 nt, Artificial Sequence
  Description of Artificial Sequence: Synthetic oligonucleotide
gccuuaguuccaucauguc

SEQ ID NO: 837012 - RNA, 19 nt, Artificial Sequence
  Description of Artificial Sequence: Synthetic oligonucleotide
gccaucagcagaucccugu

SEQ ID NO: 837013 - RNA, 19 nt, Artificial Sequence
  Description of Artificial Sequence: Synthetic oligonucleotide
ccauacuagggcuagccau

SEQ ID NO: 837014 - RNA, 19 nt, Artificial Sequence
  Description of Artificial Sequence: Synthetic oligonucleotide
ccgauaaaagcaugacucu

SEQ ID NO: 837015 - RNA, 19 nt, Artificial Sequence
  Description of Artificial Sequence: Synthetic oligonucleotide
acgguaccauugugugcau

SEQ ID NO: 837016 - RNA, 19 nt, Artificial Sequence
  Description of Artificial Sequence: Synthetic oligonucleotide
cacucugagcgggugggaa

SEQ ID NO: 837017 - RNA, 19 nt, Artificial Sequence
  Description of Artificial Sequence: Synthetic oligonucleotide
cacuuagaucaaugccugu

SEQ ID NO: 837018 - RNA, 19 nt, Artificial Sequence
  Description of Artificial Sequence: Synthetic oligonucleotide
acgccccuugugggucucc

SEQ ID NO: 837019 - RNA, 19 nt, Artificial Sequence
  Description of Artificial Sequence: Synthetic oligonucleotide
ccauugugugcauacacuu

SEQ ID NO: 837020 - RNA, 19 nt, Artificial Sequence
  Description of Artificial Sequence: Synthetic oligonucleotide
cgagcuauuaacugggauu

SEQ ID NO: 837021 - RNA, 19 nt, Artificial Sequence
  Description of Artificial Sequence: Synthetic oligonucleotide
cgaaucucugcaaaacggu

SEQ ID NO: 837022 - RNA, 19 nt, Artificial Sequence
  Description of Artificial Sequence: Synthetic oligonucleotide
gucaucucguuuguucauu

SEQ ID NO: 837023 - RNA, 19 nt, Artificial Sequence
  Description of Artificial Sequence: Synthetic oligonucleotide
ccucgggagaggguuuccc

SEQ ID NO: 837024 - RNA, 19 nt, Artificial Sequence
  Description of Artificial Sequence: Synthetic oligonucleotide
gcaagagcacaugacuuau

SEQ ID NO: 837025 - RNA, 19 nt, Artificial Sequence
  Description of Artificial Sequence: Synthetic oligonucleotide
gcgagcuauuaacugggau

SEQ ID NO: 837026 - RNA, 19 nt, Artificial Sequence
  Description of Artificial Sequence: Synthetic oligonucleotide
gcuggaacuguacgccccu

SEQ ID NO: 837027 - RNA, 19 nt, Artificial Sequence
  Description of Artificial Sequence: Synthetic oligonucleotide
ccaucgggucauacucauc

SEQ ID NO: 837028 - RNA, 19 nt, Artificial Sequence
  Description of Artificial Sequence: Synthetic oligonucleotide
gccuccaucgggucauacu

SEQ ID NO: 837029 - RNA, 19 nt, Artificial Sequence
  Description of Artificial Sequence: Synthetic oligonucleotide
ccuuaucuuuagagggucu

SEQ ID NO: 837030 - RNA, 19 nt, Artificial Sequence
  Description of Artificial Sequence: Synthetic oligonucleotide
caacaacgaauggcagucu

SEQ ID NO: 837031 - RNA, 19 nt, Artificial Sequence
  Description of Artificial Sequence: Synthetic oligonucleotide
ggcgccuuaguuccaucau

SEQ ID NO: 837032 - RNA, 19 nt, Artificial Sequence
  Description of Artificial Sequence: Synthetic oligonucleotide
uacgccccuugugggucuc

SEQ ID NO: 837033 - RNA, 19 nt, Artificial Sequence
  Description of Artificial Sequence: Synthetic oligonucleotide
gggcaaaauguaucuucuu

SEQ ID NO: 837034 - RNA, 19 nt, Artificial Sequence
  Description of Artificial Sequence: Synthetic oligonucleotide
guacgccccuugugggucu

SEQ ID NO: 837035 - RNA, 19 nt, Artificial Sequence
  Description of Artificial Sequence: Synthetic oligonucleotide
auccaacgaaggagaccaa

SEQ ID NO: 837036 - RNA, 19 nt, Artificial Sequence
  Description of Artificial Sequence: Synthetic oligonucleotide
ccuccauacuagggcuagc

SEQ ID NO: 837037 - RNA, 19 nt, Artificial Sequence
  Description of Artificial Sequence: Synthetic oligonucleotide
ccuuuggaucaaguuuaga

SEQ ID NO: 837038 - RNA, 19 nt, Artificial Sequence
  Description of Artificial Sequence: Synthetic oligonucleotide
gggcgaugguagcgaaucu

SEQ ID NO: 837039 - RNA, 19 nt, Artificial Sequence
  Description of Artificial Sequence: Synthetic oligonucleotide
cggcgccuuaguuccauca

SEQ ID NO: 837040 - RNA, 19 nt, Artificial Sequence
  Description of Artificial Sequence: Synthetic oligonucleotide
cagggcgaugguagcgaau

SEQ ID NO: 837041 - RNA, 19 nt, Artificial Sequence
  Description of Artificial Sequence: Synthetic oligonucleotide
ccacaugagcuggaacugu

SEQ ID NO: 837042 - RNA, 19 nt, Artificial Sequence
  Description of Artificial Sequence: Synthetic oligonucleotide
ccgcaauggcuuugaucaa

SEQ ID NO: 837043 - RNA, 19 nt, Artificial Sequence
  Description of Artificial Sequence: Synthetic oligonucleotide
cugguucaucgggcaaaau

SEQ ID NO: 837044 - RNA, 19 nt, Artificial Sequence
  Description of Artificial Sequence: Synthetic oligonucleotide
cuggaacuguacgccccuu

SEQ ID NO: 837045 - RNA, 19 nt, Artificial Sequence
  Description of Artificial Sequence: Synthetic oligonucleotide
aauuaguuuaagcacaugg

SEQ ID NO: 837046 - RNA, 19 nt, Artificial Sequence
  Description of Artificial Sequence: Synthetic oligonucleotide
ugcuauacuaccaaaaggg

SEQ ID NO: 837047 - RNA, 19 nt, Artificial Sequence
  Description of Artificial Sequence: Synthetic oligonucleotide
  modified_base (10)..(10): a, c, u, g, unknown or other
guuauuauunacccaagcg

SEQ ID NO: 837048 - RNA, 19 nt, Artificial Sequence
  Description of Artificial Sequence: Synthetic oligonucleotide
guaaggaaauccuagaugg

SEQ ID NO: 837049 - RNA, 19 nt, Artificial Sequence
  Description of Artificial Sequence: Synthetic oligonucleotide
uuauaaggaauuauuacag

SEQ ID NO: 837050 - RNA, 19 nt, Artificial Sequence
  Description of Artificial Sequence: Synthetic oligonucleotide
  modified_base (9)..(9): a, c, u, g, unknown or other
uuauuauunacccaagcga

SEQ ID NO: 837051 - RNA, 19 nt, Artificial Sequence
  Description of Artificial Sequence: Synthetic oligonucleotide
gaauauucagacuugacug

SEQ ID NO: 837052 - RNA, 19 nt, Artificial Sequence
  Description of Artificial Sequence: Synthetic oligonucleotide
  modified_base (8)..(8): a, c, u, g, unknown or other
uauuauunacccaagcgag

SEQ ID NO: 837053 - RNA, 19 nt, Artificial Sequence
  Description of Artificial Sequence: Synthetic oligonucleotide
uguguucuaacacucaccg

SEQ ID NO: 837054 - RNA, 19 nt, Artificial Sequence
  Description of Artificial Sequence: Synthetic oligonucleotide
ugcauuaaaggccauagcc

SEQ ID NO: 837055 - RNA, 19 nt, Artificial Sequence
  Description of Artificial Sequence: Synthetic oligonucleotide
auuauaaggaauuauuaca

SEQ ID NO: 837056 - RNA, 19 nt, Artificial Sequence
  Description of Artificial Sequence: Synthetic oligonucleotide
aauugaggacuccacagac

SEQ ID NO: 837057 - RNA, 19 nt, Artificial Sequence
  Description of Artificial Sequence: Synthetic oligonucleotide
aaagaugucugcugcauuc

SEQ ID NO: 837058 - RNA, 19 nt, Artificial Sequence
  Description of Artificial Sequence: Synthetic oligonucleotide
auugggguggaauaggccc

SEQ ID NO: 837059 - RNA, 19 nt, Artificial Sequence
  Description of Artificial Sequence: Synthetic oligonucleotide
ugaauauucagacuugacu

SEQ ID NO: 837060 - RNA, 19 nt, Artificial Sequence
  Description of Artificial Sequence: Synthetic oligonucleotide
uuggauucaccaaugaugc

SEQ ID NO: 837061 - RNA, 19 nt, Artificial Sequence
  Description of Artificial Sequence: Synthetic oligonucleotide
aacauaaguauguagcagu

SEQ ID NO: 837062 - RNA, 19 nt, Artificial Sequence
  Description of Artificial Sequence: Synthetic oligonucleotide
agaaauaaugcugcuaagc

SEQ ID NO: 837063 - RNA, 19 nt, Artificial Sequence
  Description of Artificial Sequence: Synthetic oligonucleotide
uagcaaauuaguuuaagca

SEQ ID NO: 837064 - RNA, 19 nt, Artificial Sequence
  Description of Artificial Sequence: Synthetic oligonucleotide
ugguaauugaaaauguuga

SEQ ID NO: 837065 - RNA, 19 nt, Artificial Sequence
  Description of Artificial Sequence: Synthetic oligonucleotide
aauggcacggcacaaguug

SEQ ID NO: 837066 - RNA, 19 nt, Artificial Sequence
  Description of Artificial Sequence: Synthetic oligonucleotide
agauggaugcuauacuacc

SEQ ID NO: 837067 - RNA, 19 nt, Artificial Sequence
  Description of Artificial Sequence: Synthetic oligonucleotide
gacugaauugguuauuggg

SEQ ID NO: 837068 - RNA, 19 nt, Artificial Sequence
  Description of Artificial Sequence: Synthetic oligonucleotide
ucuuuaugaaaacacugug

SEQ ID NO: 837069 - RNA, 19 nt, Artificial Sequence
  Description of Artificial Sequence: Synthetic oligonucleotide
auaaguauguagcaguuca

SEQ ID NO: 837070 - RNA, 19 nt, Artificial Sequence
  Description of Artificial Sequence: Synthetic oligonucleotide
gaugcuauacuaccaaaag

SEQ ID NO: 837071 - RNA, 19 nt, Artificial Sequence
  Description of Artificial Sequence: Synthetic oligonucleotide
aauuauguuucagugaagu

SEQ ID NO: 837072 - RNA, 19 nt, Artificial Sequence
  Description of Artificial Sequence: Synthetic oligonucleotide
ugaaguuuauucuuccugc

SEQ ID NO: 837073 - RNA, 19 nt, Artificial Sequence
  Description of Artificial Sequence: Synthetic oligonucleotide
aaagcuuucgguuguuaag

SEQ ID NO: 837074 - RNA, 19 nt, Artificial Sequence
  Description of Artificial Sequence: Synthetic oligonucleotide
  modified_base (13)..(13): a, c, u, g, unknown or other
uugguuauuauunacccaa

SEQ ID NO: 837075 - RNA, 19 nt, Artificial Sequence
  Description of Artificial Sequence: Synthetic oligonucleotide
uaaucuaaacagaagcugu

SEQ ID NO: 837076 - RNA, 19 nt, Artificial Sequence
  Description of Artificial Sequence: Synthetic oligonucleotide
ugcacugacaccauagcag

SEQ ID NO: 837077 - RNA, 19 nt, Artificial Sequence
  Description of Artificial Sequence: Synthetic oligonucleotide
gaauauggcaggcaaacug

SEQ ID NO: 837078 - RNA, 19 nt, Artificial Sequence
  Description of Artificial Sequence: Synthetic oligonucleotide
aauguugacuccuugguua

SEQ ID NO: 837079 - RNA, 19 nt, Artificial Sequence
  Description of Artificial Sequence: Synthetic oligonucleotide
aauauucagacuugacuga

SEQ ID NO: 837080 - RNA, 19 nt, Artificial Sequence
  Description of Artificial Sequence: Synthetic oligonucleotide
aauuauuacagaaaaugaa

SEQ ID NO: 837081 - RNA, 19 nt, Artificial Sequence
  Description of Artificial Sequence: Synthetic oligonucleotide
ugggacaucacuguuagag

SEQ ID NO: 837082 - RNA, 19 nt, Artificial Sequence
  Description of Artificial Sequence: Synthetic oligonucleotide
aguagaucuauccaaacau

SEQ ID NO: 837083 - RNA, 19 nt, Artificial Sequence
  Description of Artificial Sequence: Synthetic oligonucleotide
ucaguguaggcacuuaagc

SEQ ID NO: 837084 - RNA, 19 nt, Artificial Sequence
  Description of Artificial Sequence: Synthetic oligonucleotide
cuuagaguagccaccaccc

SEQ ID NO: 837085 - RNA, 19 nt, Artificial Sequence
  Description of Artificial Sequence: Synthetic oligonucleotide
caagacgagagaaugagac

SEQ ID NO: 837086 - RNA, 19 nt, Artificial Sequence
  Description of Artificial Sequence: Synthetic oligonucleotide
agugcauuucuucugucac

SEQ ID NO: 837087 - RNA, 19 nt, Artificial Sequence
  Description of Artificial Sequence: Synthetic oligonucleotide
aguuuaagcacaugguuug

SEQ ID NO: 837088 - RNA, 19 nt, Artificial Sequence
  Description of Artificial Sequence: Synthetic oligonucleotide
ucauauaugccaagagcag

SEQ ID NO: 837089 - RNA, 19 nt, Artificial Sequence
  Description of Artificial Sequence: Synthetic oligonucleotide
auaagacuagugcuggaac

SEQ ID NO: 837090 - RNA, 19 nt, Artificial Sequence
  Description of Artificial Sequence: Synthetic oligonucleotide
auaaggaauuauuacagaa

SEQ ID NO: 837091 - RNA, 19 nt, Artificial Sequence
  Description of Artificial Sequence: Synthetic oligonucleotide
aaacauaaguauguagcag

SEQ ID NO: 837092 - RNA, 19 nt, Artificial Sequence
  Description of Artificial Sequence: Synthetic oligonucleotide
uuaaaacaagcuagguaag

SEQ ID NO: 837093 - RNA, 19 nt, Artificial Sequence
  Description of Artificial Sequence: Synthetic oligonucleotide
  modified_base (7)..(7): a, c, u, g, unknown or other
auuauunacccaagcgagc

SEQ ID NO: 837094 - RNA, 19 nt, Artificial Sequence
  Description of Artificial Sequence: Synthetic oligonucleotide
aaaggaguagcucacuaaa

SEQ ID NO: 837095 - RNA, 19 nt, Artificial Sequence
  Description of Artificial Sequence: Synthetic oligonucleotide
cugaaagcccacuucaagg

SEQ ID NO: 837096 - RNA, 19 nt, Artificial Sequence
  Description of Artificial Sequence: Synthetic oligonucleotide
uugaauuggauucaccaau

SEQ ID NO: 837097 - RNA, 19 nt, Artificial Sequence
  Description of Artificial Sequence: Synthetic oligonucleotide
cugguaauugaaaauguug

SEQ ID NO: 837098 - RNA, 19 nt, Artificial Sequence
  Description of Artificial Sequence: Synthetic oligonucleotide
uguuagaggaucauagcaa

SEQ ID NO: 837099 - RNA, 19 nt, Artificial Sequence
  Description of Artificial Sequence: Synthetic oligonucleotide
  modified_base (6)..(6): a, c, u, g, unknown or other
uuauunacccaagcgagcc

SEQ ID NO: 837100 - RNA, 19 nt, Artificial Sequence
  Description of Artificial Sequence: Synthetic oligonucleotide
aggagagauacacaguaag

SEQ ID NO: 837101 - RNA, 19 nt, Artificial Sequence
  Description of Artificial Sequence: Synthetic oligonucleotide
auaaucuaaacagaagcug

SEQ ID NO: 837102 - RNA, 19 nt, Artificial Sequence
  Description of Artificial Sequence: Synthetic oligonucleotide
aaaacaagcuagguaagca

SEQ ID NO: 837103 - RNA, 19 nt, Artificial Sequence
  Description of Artificial Sequence: Synthetic oligonucleotide
uuuuaaaggaguagcucac

SEQ ID NO: 837104 - RNA, 19 nt, Artificial Sequence
  Description of Artificial Sequence: Synthetic oligonucleotide
cacuguuagaggaucauag

SEQ ID NO: 837105 - RNA, 19 nt, Artificial Sequence
  Description of Artificial Sequence: Synthetic oligonucleotide
cugaauaagaacagcuaag

SEQ ID NO: 837106 - RNA, 19 nt, Artificial Sequence
  Description of Artificial Sequence: Synthetic oligonucleotide
acugaauaagaacagcuaa

SEQ ID NO: 837107 - RNA, 19 nt, Artificial Sequence
  Description of Artificial Sequence: Synthetic oligonucleotide
aagaaauaaugcugcuaag

SEQ ID NO: 837108 - RNA, 19 nt, Artificial Sequence
  Description of Artificial Sequence: Synthetic oligonucleotide
aagcacaugguuuguaccu

SEQ ID NO: 837109 - RNA, 19 nt, Artificial Sequence
  Description of Artificial Sequence: Synthetic oligonucleotide
uagaucuauccaaacauaa

SEQ ID NO: 837110 - RNA, 19 nt, Artificial Sequence
  Description of Artificial Sequence: Synthetic oligonucleotide
uauaaggaauuauuacaga

SEQ ID NO: 837111 - RNA, 19 nt, Artificial Sequence
  Description of Artificial Sequence: Synthetic oligonucleotide
agacgagagaaugagacag

SEQ ID NO: 837112 - RNA, 19 nt, Artificial Sequence
  Description of Artificial Sequence: Synthetic oligonucleotide
gaauugguuauuggggugg

SEQ ID NO: 837113 - RNA, 19 nt, Artificial Sequence
  Description of Artificial Sequence: Synthetic oligonucleotide
aacaacucagggcucugag

SEQ ID NO: 837114 - RNA, 19 nt, Artificial Sequence
  Description of Artificial Sequence: Synthetic oligonucleotide
cuaacacucaccgagugag

SEQ ID NO: 837115 - RNA, 19 nt, Artificial Sequence
  Description of Artificial Sequence: Synthetic oligonucleotide
aggauacucaggcaugcac

SEQ ID NO: 837116 - RNA, 19 nt, Artificial Sequence
  Description of Artificial Sequence: Synthetic oligonucleotide
aacuuguguucuaacacuc

SEQ ID NO: 837117 - RNA, 19 nt, Artificial Sequence
  Description of Artificial Sequence: Synthetic oligonucleotide
aauguguaguggugacugg

SEQ ID NO: 837118 - RNA, 19 nt, Artificial Sequence
  Description of Artificial Sequence: Synthetic oligonucleotide
uuugcaacuggcaacuuuu

SEQ ID NO: 837119 - RNA, 19 nt, Artificial Sequence
  Description of Artificial Sequence: Synthetic oligonucleotide
agccacuuagaguagccac

SEQ ID NO: 837120 - RNA, 19 nt, Artificial Sequence
  Description of Artificial Sequence: Synthetic oligonucleotide
cugcuaagcgccauggucc

SEQ ID NO: 837121 - RNA, 19 nt, Artificial Sequence
  Description of Artificial Sequence: Synthetic oligonucleotide
uaaguauguagcaguucag

SEQ ID NO: 837122 - RNA, 19 nt, Artificial Sequence
  Description of Artificial Sequence: Synthetic oligonucleotide
guuuagaaagauuucaccu

SEQ ID NO: 837123 - RNA, 19 nt, Artificial Sequence
  Description of Artificial Sequence: Synthetic oligonucleotide
agcacaguagugcuaacug

SEQ ID NO: 837124 - RNA, 19 nt, Artificial Sequence
  Description of Artificial Sequence: Synthetic oligonucleotide
uaagcacaugguuuguacc

SEQ ID NO: 837125 - RNA, 19 nt, Artificial Sequence
  Description of Artificial Sequence: Synthetic oligonucleotide
gagagauacacaguaaguc

SEQ ID NO: 837126 - RNA, 19 nt, Artificial Sequence
  Description of Artificial Sequence: Synthetic oligonucleotide
ucagugaaguuuauucuuc

SEQ ID NO: 837127 - RNA, 19 nt, Artificial Sequence
  Description of Artificial Sequence: Synthetic oligonucleotide
agugcuaacugaugcagca

SEQ ID NO: 837128 - RNA, 19 nt, Artificial Sequence
  Description of Artificial Sequence: Synthetic oligonucleotide
ugagauggaugcuauacua

SEQ ID NO: 837129 - RNA, 19 nt, Artificial Sequence
  Description of Artificial Sequence: Synthetic oligonucleotide
uuguguucuaacacucacc

SEQ ID NO: 837130 - RNA, 19 nt, Artificial Sequence
  Description of Artificial Sequence: Synthetic oligonucleotide
aguguaggcacuuaagcuu

SEQ ID NO: 837131 - RNA, 19 nt, Artificial Sequence
  Description of Artificial Sequence: Synthetic oligonucleotide
ugcuaggugucaaacugcc

SEQ ID NO: 837132 - RNA, 19 nt, Artificial Sequence
  Description of Artificial Sequence: Synthetic oligonucleotide
caguagugcuaacugaugc

SEQ ID NO: 837133 - RNA, 19 nt, Artificial Sequence
  Description of Artificial Sequence: Synthetic oligonucleotide
ugaauugguuauuggggug

SEQ ID NO: 837134 - RNA, 19 nt, Artificial Sequence
  Description of Artificial Sequence: Synthetic oligonucleotide
aagacgagagaaugagaca

SEQ ID NO: 837135 - RNA, 19 nt, Artificial Sequence
  Description of Artificial Sequence: Synthetic oligonucleotide
agcuuucgguuguuaaggc

SEQ ID NO: 837136 - RNA, 19 nt, Artificial Sequence
  Description of Artificial Sequence: Synthetic oligonucleotide
uccuauuaucuuuaugaaa

SEQ ID NO: 837137 - RNA, 19 nt, Artificial Sequence
  Description of Artificial Sequence: Synthetic oligonucleotide
acaccauagcaguaucaac

SEQ ID NO: 837138 - RNA, 19 nt, Artificial Sequence
  Description of Artificial Sequence: Synthetic oligonucleotide
ucucaagguacugauuaag

SEQ ID NO: 837139 - RNA, 19 nt, Artificial Sequence
  Description of Artificial Sequence: Synthetic oligonucleotide
caccauagcaguaucaaca

SEQ ID NO: 837140 - RNA, 19 nt, Artificial Sequence
  Description of Artificial Sequence: Synthetic oligonucleotide
cauauaugccaagagcagc

SEQ ID NO: 837141 - RNA, 19 nt, Artificial Sequence
  Description of Artificial Sequence: Synthetic oligonucleotide
auuaguuuaagcacauggu

SEQ ID NO: 837142 - RNA, 19 nt, Artificial Sequence
  Description of Artificial Sequence: Synthetic oligonucleotide
agcaagacgagagaaugag

SEQ ID NO: 837143 - RNA, 19 nt, Artificial Sequence
  Description of Artificial Sequence: Synthetic oligonucleotide
agaggauacucaggcaugc

SEQ ID NO: 837144 - RNA, 19 nt, Artificial Sequence
  Description of Artificial Sequence: Synthetic oligonucleotide
uucuaacacucaccgagug

SEQ ID NO: 837145 - RNA, 19 nt, Artificial Sequence
  Description of Artificial Sequence: Synthetic oligonucleotide
ucuaacacucaccgaguga

SEQ ID NO: 837146 - RNA, 19 nt, Artificial Sequence
  Description of Artificial Sequence: Synthetic oligonucleotide
aggcccaaaacuuguguuc

SEQ ID NO: 837147 - RNA, 19 nt, Artificial Sequence
  Description of Artificial Sequence: Synthetic oligonucleotide
  modified_base (5)..(5): a, c, u, g, unknown or other
uauunacccaagcgagccc

SEQ ID NO: 837148 - RNA, 19 nt, Artificial Sequence
  Description of Artificial Sequence: Synthetic oligonucleotide
aaauccuagauggaggcuu

SEQ ID NO: 837149 - RNA, 19 nt, Artificial Sequence
  Description of Artificial Sequence: Synthetic oligonucleotide
gaggaucauagcaaauuag

SEQ ID NO: 837150 - RNA, 19 nt, Artificial Sequence
  Description of Artificial Sequence: Synthetic oligonucleotide
aguagugcuaacugaugca

SEQ ID NO: 837151 - RNA, 19 nt, Artificial Sequence
  Description of Artificial Sequence: Synthetic oligonucleotide
agugguuuggaagccaaag

SEQ ID NO: 837152 - RNA, 19 nt, Artificial Sequence
  Description of Artificial Sequence: Synthetic oligonucleotide
uaaaggaguagcucacuaa

SEQ ID NO: 837153 - RNA, 19 nt, Artificial Sequence
  Description of Artificial Sequence: Synthetic oligonucleotide
guuauugggguggaauagg

SEQ ID NO: 837154 - RNA, 19 nt, Artificial Sequence
  Description of Artificial Sequence: Synthetic oligonucleotide
aauugucuccaaauguccu

SEQ ID NO: 837155 - RNA, 19 nt, Artificial Sequence
  Description of Artificial Sequence: Synthetic oligonucleotide
uaggcacuuaagcuuguug

SEQ ID NO: 837156 - RNA, 19 nt, Artificial Sequence
  Description of Artificial Sequence: Synthetic oligonucleotide
ucacguggaccccacagcu

SEQ ID NO: 837157 - RNA, 19 nt, Artificial Sequence
  Description of Artificial Sequence: Synthetic oligonucleotide
ggaaauccuagauggaggc

SEQ ID NO: 837158 - RNA, 19 nt, Artificial Sequence
  Description of Artificial Sequence: Synthetic oligonucleotide
uaagcuuguugggacauca

SEQ ID NO: 837159 - RNA, 19 nt, Artificial Sequence
  Description of Artificial Sequence: Synthetic oligonucleotide
gugaagucuggucagcaug

SEQ ID NO: 837160 - RNA, 19 nt, Artificial Sequence
  Description of Artificial Sequence: Synthetic oligonucleotide
ggauucaccaaugaugcag

SEQ ID NO: 837161 - RNA, 19 nt, Artificial Sequence
  Description of Artificial Sequence: Synthetic oligonucleotide
ugaacccuguuuagaaaga

SEQ ID NO: 837162 - RNA, 19 nt, Artificial Sequence
  Description of Artificial Sequence: Synthetic oligonucleotide
guagugcuaacugaugcag

SEQ ID NO: 837163 - RNA, 19 nt, Artificial Sequence
  Description of Artificial Sequence: Synthetic oligonucleotide
cugcuaguucucaagguac

SEQ ID NO: 837164 - RNA, 19 nt, Artificial Sequence
  Description of Artificial Sequence: Synthetic oligonucleotide
auucagacuugacugaauu

SEQ ID NO: 837165 - RNA, 19 nt, Artificial Sequence
  Description of Artificial Sequence: Synthetic oligonucleotide
gguaauugaaaauguugac

SEQ ID NO: 837166 - RNA, 19 nt, Artificial Sequence
  Description of Artificial Sequence: Synthetic oligonucleotide
ugcuaacugaugcagcaau

SEQ ID NO: 837167 - RNA, 19 nt, Artificial Sequence
  Description of Artificial Sequence: Synthetic oligonucleotide
cacuuaagcuuguugggac

SEQ ID NO: 837168 - RNA, 19 nt, Artificial Sequence
  Description of Artificial Sequence: Synthetic oligonucleotide
  modified_base (4)..(4): a, c, u, g, unknown or other
auunacccaagcgagccca

SEQ ID NO: 837169 - RNA, 19 nt, Artificial Sequence
  Description of Artificial Sequence: Synthetic oligonucleotide
cuaagcaguuucaugguga

SEQ ID NO: 837170 - RNA, 19 nt, Artificial Sequence
  Description of Artificial Sequence: Synthetic oligonucleotide
agaggaucauagcaaauua

SEQ ID NO: 837171 - RNA, 19 nt, Artificial Sequence
  Description of Artificial Sequence: Synthetic oligonucleotide
  modified_base (11)..(11): a, c, u, g, unknown or other
gguuauuauunacccaagc

SEQ ID NO: 837172 - RNA, 19 nt, Artificial Sequence
  Description of Artificial Sequence: Synthetic oligonucleotide
acuggccuagagcauaucu

SEQ ID NO: 837173 - RNA, 19 nt, Artificial Sequence
  Description of Artificial Sequence: Synthetic oligonucleotide
uuugaacccuguuuagaaa

SEQ ID NO: 837174 - RNA, 19 nt, Artificial Sequence
  Description of Artificial Sequence: Synthetic oligonucleotide
acccaagcgagcccagacc

SEQ ID NO: 837175 - RNA, 19 nt, Artificial Sequence
  Description of Artificial Sequence: Synthetic oligonucleotide
cagugaaguuuauucuucc

SEQ ID NO: 837176 - RNA, 19 nt, Artificial Sequence
  Description of Artificial Sequence: Synthetic oligonucleotide
uggccuagagcauaucuaa

SEQ ID NO: 837177 - RNA, 19 nt, Artificial Sequence
  Description of Artificial Sequence: Synthetic oligonucleotide
cucaguguaggcacuuaag

SEQ ID NO: 837178 - RNA, 19 nt, Artificial Sequence
  Description of Artificial Sequence: Synthetic oligonucleotide
gacuugacugaauugguua

SEQ ID NO: 837179 - RNA, 19 nt, Artificial Sequence
  Description of Artificial Sequence: Synthetic oligonucleotide
auauaugccaagagcagca

SEQ ID NO: 837180 - RNA, 19 nt, Artificial Sequence
  Description of Artificial Sequence: Synthetic oligonucleotide
guuagaggaucauagcaaa

SEQ ID NO: 837181 - RNA, 19 nt, Artificial Sequence
  Description of Artificial Sequence: Synthetic oligonucleotide
uauuuugaauuggauucac

SEQ ID NO: 837182 - RNA, 19 nt, Artificial Sequence
  Description of Artificial Sequence: Synthetic oligonucleotide
cacucaccgagugagauac

SEQ ID NO: 837183 - RNA, 19 nt, Artificial Sequence
  Description of Artificial Sequence: Synthetic oligonucleotide
gcaguaucaacauugguaa

SEQ ID NO: 837184 - RNA, 19 nt, Artificial Sequence
  Description of Artificial Sequence: Synthetic oligonucleotide
ugccagguaaggaaauccu

SEQ ID NO: 837185 - RNA, 19 nt, Artificial Sequence
  Description of Artificial Sequence: Synthetic oligonucleotide
agguaaggaaauccuagau

SEQ ID NO: 837186 - RNA, 19 nt, Artificial Sequence
  Description of Artificial Sequence: Synthetic oligonucleotide
acuugacugaauugguuau

SEQ ID NO: 837187 - RNA, 19 nt, Artificial Sequence
  Description of Artificial Sequence: Synthetic oligonucleotide
gccauagccacuuagagua

SEQ ID NO: 837188 - RNA, 19 nt, Artificial Sequence
  Description of Artificial Sequence: Synthetic oligonucleotide
ggcacuuaagcuuguuggg

SEQ ID NO: 837189 - RNA, 19 nt, Artificial Sequence
  Description of Artificial Sequence: Synthetic oligonucleotide
aagccaaaguagaucuauc

SEQ ID NO: 837190 - RNA, 19 nt, Artificial Sequence
  Description of Artificial Sequence: Synthetic oligonucleotide
gguggaauaggcccaaaac

SEQ ID NO: 837191 - RNA, 19 nt, Artificial Sequence
  Description of Artificial Sequence: Synthetic oligonucleotide
gaagcuguuugguuggcaa

SEQ ID NO: 837192 - RNA, 19 nt, Artificial Sequence
  Description of Artificial Sequence: Synthetic oligonucleotide
ucucagauuaaaggcuuca

SEQ ID NO: 837193 - RNA, 19 nt, Artificial Sequence
  Description of Artificial Sequence: Synthetic oligonucleotide
cuaagucagcccaggcagg

SEQ ID NO: 837194 - RNA, 19 nt, Artificial Sequence
  Description of Artificial Sequence: Synthetic oligonucleotide
cuagcugauuccuaucaca

SEQ ID NO: 837195 - RNA, 19 nt, Artificial Sequence
  Description of Artificial Sequence: Synthetic oligonucleotide
guggaauaggcccaaaacu

SEQ ID NO: 837196 - RNA, 19 nt, Artificial Sequence
  Description of Artificial Sequence: Synthetic oligonucleotide
agacaacuggaaacaaagg

SEQ ID NO: 837197 - RNA, 19 nt, Artificial Sequence
  Description of Artificial Sequence: Synthetic oligonucleotide
uuuaaaggaguagcucacu

SEQ ID NO: 837198 - RNA, 19 nt, Artificial Sequence
  Description of Artificial Sequence: Synthetic oligonucleotide
aauaggcccaaaacuugug

SEQ ID NO: 837199 - RNA, 19 nt, Artificial Sequence
  Description of Artificial Sequence: Synthetic oligonucleotide
agcagugaauauucagacu

SEQ ID NO: 837200 - RNA, 19 nt, Artificial Sequence
  Description of Artificial Sequence: Synthetic oligonucleotide
aagcacaguagugcuaacu

SEQ ID NO: 837201 - RNA, 19 nt, Artificial Sequence
  Description of Artificial Sequence: Synthetic oligonucleotide
ugcacucuaagaagagauc

SEQ ID NO: 837202 - RNA, 19 nt, Artificial Sequence
  Description of Artificial Sequence: Synthetic oligonucleotide
agaguagccaccacccuag

SEQ ID NO: 837203 - RNA, 19 nt, Artificial Sequence
  Description of Artificial Sequence: Synthetic oligonucleotide
accacccuagaguaaucag

SEQ ID NO: 837204 - RNA, 19 nt, Artificial Sequence
  Description of Artificial Sequence: Synthetic oligonucleotide
gagauggaugcuauacuac

SEQ ID NO: 837205 - RNA, 19 nt, Artificial Sequence
  Description of Artificial Sequence: Synthetic oligonucleotide
uugguuauugggguggaau

SEQ ID NO: 837206 - RNA, 19 nt, Artificial Sequence
  Description of Artificial Sequence: Synthetic oligonucleotide
gguagucagaaacaacuca

SEQ ID NO: 837207 - RNA, 19 nt, Artificial Sequence
  Description of Artificial Sequence: Synthetic oligonucleotide
ccagguaaggaaauccuag

SEQ ID NO: 837208 - RNA, 19 nt, Artificial Sequence
  Description of Artificial Sequence: Synthetic oligonucleotide
cugcuaggugucaaacugc

SEQ ID NO: 837209 - RNA, 19 nt, Artificial Sequence
  Description of Artificial Sequence: Synthetic oligonucleotide
guuuguaccugucuuuaaa

SEQ ID NO: 837210 - RNA, 19 nt, Artificial Sequence
  Description of Artificial Sequence: Synthetic oligonucleotide
gauggaugcuauacuacca

SEQ ID NO: 837211 - RNA, 19 nt, Artificial Sequence
  Description of Artificial Sequence: Synthetic oligonucleotide
uuucgguuguuaaggccac

SEQ ID NO: 837212 - RNA, 19 nt, Artificial Sequence
  Description of Artificial Sequence: Synthetic oligonucleotide
acaagcuagguaagcacag

SEQ ID NO: 837213 - RNA, 19 nt, Artificial Sequence
  Description of Artificial Sequence: Synthetic oligonucleotide
uagaguaaucagcucucau

SEQ ID NO: 837214 - RNA, 19 nt, Artificial Sequence
  Description of Artificial Sequence: Synthetic oligonucleotide
  modified_base (3)..(3): a, c, u, g, unknown or other
uunacccaagcgagcccag

SEQ ID NO: 837215 - RNA, 19 nt, Artificial Sequence
  Description of Artificial Sequence: Synthetic oligonucleotide
agaaacaacucagggcucu

SEQ ID NO: 837216 - RNA, 19 nt, Artificial Sequence
  Description of Artificial Sequence: Synthetic oligonucleotide
aacaucacguggaccccac

SEQ ID NO: 837217 - RNA, 19 nt, Artificial Sequence
  Description of Artificial Sequence: Synthetic oligonucleotide
acuagugcuggaacaguuc

SEQ ID NO: 837218 - RNA, 19 nt, Artificial Sequence
  Description of Artificial Sequence: Synthetic oligonucleotide
auaugccaagagcagcacu

SEQ ID NO: 837219 - RNA, 19 nt, Artificial Sequence
  Description of Artificial Sequence: Synthetic oligonucleotide
agguagucagaaacaacuc

SEQ ID NO: 837220 - RNA, 19 nt, Artificial Sequence
  Description of Artificial Sequence: Synthetic oligonucleotide
cuagugcuggaacaguuca

SEQ ID NO: 837221 - RNA, 19 nt, Artificial Sequence
  Description of Artificial Sequence: Synthetic oligonucleotide
aacagcuaagcaguuucau

SEQ ID NO: 837222 - RNA, 19 nt, Artificial Sequence
  Description of Artificial Sequence: Synthetic oligonucleotide
ugcuaagcgccaugguccc

SEQ ID NO: 837223 - RNA, 19 nt, Artificial Sequence
  Description of Artificial Sequence: Synthetic oligonucleotide
ugcugcuaguucucaaggu

SEQ ID NO: 837224 - RNA, 19 nt, Artificial Sequence
  Description of Artificial Sequence: Synthetic oligonucleotide
cagaccgaacaauggcacg

SEQ ID NO: 837225 - RNA, 19 nt, Artificial Sequence
  Description of Artificial Sequence: Synthetic oligonucleotide
agcgccauggucccagaug

SEQ ID NO: 837226 - RNA, 19 nt, Artificial Sequence
  Description of Artificial Sequence: Synthetic oligonucleotide
cucagauuaaaggcuucag

SEQ ID NO: 837227 - RNA, 19 nt, Artificial Sequence
  Description of Artificial Sequence: Synthetic oligonucleotide
guguaggcacuuaagcuug

SEQ ID NO: 837228 - RNA, 19 nt, Artificial Sequence
  Description of Artificial Sequence: Synthetic oligonucleotide
uggaugcuauacuaccaaa

SEQ ID NO: 837229 - RNA, 19 nt, Artificial Sequence
  Description of Artificial Sequence: Synthetic oligonucleotide
augcacucuaagaagagau

SEQ ID NO: 837230 - RNA, 19 nt, Artificial Sequence
  Description of Artificial Sequence: Synthetic oligonucleotide
gguuauugggguggaauag

SEQ ID NO: 837231 - RNA, 19 nt, Artificial Sequence
  Description of Artificial Sequence: Synthetic oligonucleotide
uggcucuacucugucaggc

SEQ ID NO: 837232 - RNA, 19 nt, Artificial Sequence
  Description of Artificial Sequence: Synthetic oligonucleotide
aauugguuauuggggugga

SEQ ID NO: 837233 - RNA, 19 nt, Artificial Sequence
  Description of Artificial Sequence: Synthetic oligonucleotide
aaacaucacguggacccca

SEQ ID NO: 837234 - RNA, 19 nt, Artificial Sequence
  Description of Artificial Sequence: Synthetic oligonucleotide
acgagagaaugagacagcu

SEQ ID NO: 837235 - RNA, 19 nt, Artificial Sequence
  Description of Artificial Sequence: Synthetic oligonucleotide
cuuugugaauucucugaga

SEQ ID NO: 837236 - RNA, 19 nt, Artificial Sequence
  Description of Artificial Sequence: Synthetic oligonucleotide
aagcuuguugggacaucac

SEQ ID NO: 837237 - RNA, 19 nt, Artificial Sequence
  Description of Artificial Sequence: Synthetic oligonucleotide
accccuugucuacaaauaa

SEQ ID NO: 837238 - RNA, 19 nt, Artificial Sequence
  Description of Artificial Sequence: Synthetic oligonucleotide
cauaaguauguagcaguuc

SEQ ID NO: 837239 - RNA, 19 nt, Artificial Sequence
  Description of Artificial Sequence: Synthetic oligonucleotide
cugaauugguuauuggggu

SEQ ID NO: 837240 - RNA, 19 nt, Artificial Sequence
  Description of Artificial Sequence: Synthetic oligonucleotide
ugguuggcaaccugguaau

SEQ ID NO: 837241 - RNA, 19 nt, Artificial Sequence
  Description of Artificial Sequence: Synthetic oligonucleotide
cuaagcgccauggucccag

SEQ ID NO: 837242 - RNA, 19 nt, Artificial Sequence
  Description of Artificial Sequence: Synthetic oligonucleotide
aaacaacucagggcucuga

SEQ ID NO: 837243 - RNA, 19 nt, Artificial Sequence
  Description of Artificial Sequence: Synthetic oligonucleotide
aaggaguagcucacuaaaa

SEQ ID NO: 837244 - RNA, 19 nt, Artificial Sequence
  Description of Artificial Sequence: Synthetic oligonucleotide
gcuuguugggacaucacug

SEQ ID NO: 837245 - RNA, 19 nt, Artificial Sequence
  Description of Artificial Sequence: Synthetic oligonucleotide
ccacccuagaguaaucagc

SEQ ID NO: 837246 - RNA, 19 nt, Artificial Sequence
  Description of Artificial Sequence: Synthetic oligonucleotide
uaacacucaccgagugaga

SEQ ID NO: 837247 - RNA, 19 nt, Artificial Sequence
  Description of Artificial Sequence: Synthetic oligonucleotide
uauaugccaagagcagcac

SEQ ID NO: 837248 - RNA, 19 nt, Artificial Sequence
  Description of Artificial Sequence: Synthetic oligonucleotide
acccuagaguaaucagcuc

SEQ ID NO: 837249 - RNA, 19 nt, Artificial Sequence
  Description of Artificial Sequence: Synthetic oligonucleotide
gacgagagaaugagacagc

SEQ ID NO: 837250 - RNA, 19 nt, Artificial Sequence
  Description of Artificial Sequence: Synthetic oligonucleotide
auguugacuccuugguuau

SEQ ID NO: 837251 - RNA, 19 nt, Artificial Sequence
  Description of Artificial Sequence: Synthetic oligonucleotide
cagguaaggaaauccuaga

SEQ ID NO: 837252 - RNA, 19 nt, Artificial Sequence
  Description of Artificial Sequence: Synthetic oligonucleotide
cagcaauugaggacuccac

SEQ ID NO: 837253 - RNA, 19 nt, Artificial Sequence
  Description of Artificial Sequence: Synthetic oligonucleotide
cauugguaaagcuuucggu

SEQ ID NO: 837254 - RNA, 19 nt, Artificial Sequence
  Description of Artificial Sequence: Synthetic oligonucleotide
gcaaccugguaauugaaaa

SEQ ID NO: 837255 - RNA, 19 nt, Artificial Sequence
  Description of Artificial Sequence: Synthetic oligonucleotide
accugguaauugaaaaugu

SEQ ID NO: 837256 - RNA, 19 nt, Artificial Sequence
  Description of Artificial Sequence: Synthetic oligonucleotide
cuguacacucugucagaag

SEQ ID NO: 837257 - RNA, 19 nt, Artificial Sequence
  Description of Artificial Sequence: Synthetic oligonucleotide
cugccucuaagucagccca

SEQ ID NO: 837258 - RNA, 19 nt, Artificial Sequence
  Description of Artificial Sequence: Synthetic oligonucleotide
ucgguuguuaaggccacaa

SEQ ID NO: 837259 - RNA, 19 nt, Artificial Sequence
  Description of Artificial Sequence: Synthetic oligonucleotide
ccuagauggaggcuuugcc

SEQ ID NO: 837260 - RNA, 19 nt, Artificial Sequence
  Description of Artificial Sequence: Synthetic oligonucleotide
cccaagcgagcccagaccg

SEQ ID NO: 837261 - RNA, 19 nt, Artificial Sequence
  Description of Artificial Sequence: Synthetic oligonucleotide
gcugcuaagcgccaugguc

SEQ ID NO: 837262 - RNA, 19 nt, Artificial Sequence
  Description of Artificial Sequence: Synthetic oligonucleotide
aggugucaaacugccacug

SEQ ID NO: 837263 - RNA, 19 nt, Artificial Sequence
  Description of Artificial Sequence: Synthetic oligonucleotide
agcacaugguuuguaccug

SEQ ID NO: 837264 - RNA, 19 nt, Artificial Sequence
  Description of Artificial Sequence: Synthetic oligonucleotide
caguguaggcacuuaagcu

SEQ ID NO: 837265 - RNA, 19 nt, Artificial Sequence
  Description of Artificial Sequence: Synthetic oligonucleotide
acauaaguauguagcaguu

SEQ ID NO: 837266 - RNA, 19 nt, Artificial Sequence
  Description of Artificial Sequence: Synthetic oligonucleotide
cugcacugacaccauagca

SEQ ID NO: 837267 - RNA, 19 nt, Artificial Sequence
  Description of Artificial Sequence: Synthetic oligonucleotide
agcccagaccgaacaaugg

SEQ ID NO: 837268 - RNA, 19 nt, Artificial Sequence
  Description of Artificial Sequence: Synthetic oligonucleotide
gaauaggcccaaaacuugu

SEQ ID NO: 837269 - RNA, 19 nt, Artificial Sequence
  Description of Artificial Sequence: Synthetic oligonucleotide
ucacuguuagaggaucaua

SEQ ID NO: 837270 - RNA, 19 nt, Artificial Sequence
  Description of Artificial Sequence: Synthetic oligonucleotide
uagccacuuagaguagcca

SEQ ID NO: 837271 - RNA, 19 nt, Artificial Sequence
  Description of Artificial Sequence: Synthetic oligonucleotide
guagaucuauccaaacaua

SEQ ID NO: 837272 - RNA, 19 nt, Artificial Sequence
  Description of Artificial Sequence: Synthetic oligonucleotide
gaccgaacaauggcacggc

SEQ ID NO: 837273 - RNA, 19 nt, Artificial Sequence
  Description of Artificial Sequence: Synthetic oligonucleotide
aauccuagauggaggcuuu

SEQ ID NO: 837274 - RNA, 19 nt, Artificial Sequence
  Description of Artificial Sequence: Synthetic oligonucleotide
acggcacaaguuggcauuc

SEQ ID NO: 837275 - RNA, 19 nt, Artificial Sequence
  Description of Artificial Sequence: Synthetic oligonucleotide
ugcugcuaagcgccauggu

SEQ ID NO: 837276 - RNA, 19 nt, Artificial Sequence
  Description of Artificial Sequence: Synthetic oligonucleotide
uucaccaaugaugcagcuu

SEQ ID NO: 837277 - RNA, 19 nt, Artificial Sequence
  Description of Artificial Sequence: Synthetic oligonucleotide
accgaacaauggcacggca

SEQ ID NO: 837278 - RNA, 19 nt, Artificial Sequence
  Description of Artificial Sequence: Synthetic oligonucleotide
uggcauucccuuucauaua

SEQ ID NO: 837279 - RNA, 19 nt, Artificial Sequence
  Description of Artificial Sequence: Synthetic oligonucleotide
agggcaagagguuccuauu

SEQ ID NO: 837280 - RNA, 19 nt, Artificial Sequence
  Description of Artificial Sequence: Synthetic oligonucleotide
cuguuugguuggcaaccug

SEQ ID NO: 837281 - RNA, 19 nt, Artificial Sequence
  Description of Artificial Sequence: Synthetic oligonucleotide
agacuagugcuggaacagu

SEQ ID NO: 837282 - RNA, 19 nt, Artificial Sequence
  Description of Artificial Sequence: Synthetic oligonucleotide
gcuauacuaccaaaaggga

SEQ ID NO: 837283 - RNA, 19 nt, Artificial Sequence
  Description of Artificial Sequence: Synthetic oligonucleotide
caugcacucuaagaagaga

SEQ ID NO: 837284 - RNA, 19 nt, Artificial Sequence
  Description of Artificial Sequence: Synthetic oligonucleotide
cagcaagacgagagaauga

SEQ ID NO: 837285 - RNA, 19 nt, Artificial Sequence
  Description of Artificial Sequence: Synthetic oligonucleotide
gccacuuagaguagccacc

SEQ ID NO: 837286 - RNA, 19 nt, Artificial Sequence
  Description of Artificial Sequence: Synthetic oligonucleotide
ggaugcuauacuaccaaaa

SEQ ID NO: 837287 - RNA, 19 nt, Artificial Sequence
  Description of Artificial Sequence: Synthetic oligonucleotide
gcuagcugauuccuaucac

SEQ ID NO: 837288 - RNA, 19 nt, Artificial Sequence
  Description of Artificial Sequence: Synthetic oligonucleotide
gcugcuaguucucaaggua

SEQ ID NO: 837289 - RNA, 19 nt, Artificial Sequence
  Description of Artificial Sequence: Synthetic oligonucleotide
gcacaguagugcuaacuga

SEQ ID NO: 837290 - RNA, 19 nt, Artificial Sequence
  Description of Artificial Sequence: Synthetic oligonucleotide
  modified_base (2)..(2): a, c, u, g, unknown or other
unacccaagcgagcccaga

SEQ ID NO: 837291 - RNA, 19 nt, Artificial Sequence
  Description of Artificial Sequence: Synthetic oligonucleotide
guguucuaacacucaccga

SEQ ID NO: 837292 - RNA, 19 nt, Artificial Sequence
  Description of Artificial Sequence: Synthetic oligonucleotide
cuagaguaaucagcucuca

SEQ ID NO: 837293 - RNA, 19 nt, Artificial Sequence
  Description of Artificial Sequence: Synthetic oligonucleotide
acacucaccgagugagaua

SEQ ID NO: 837294 - RNA, 19 nt, Artificial Sequence
  Description of Artificial Sequence: Synthetic oligonucleotide
aagcgccauggucccagau

SEQ ID NO: 837295 - RNA, 19 nt, Artificial Sequence
  Description of Artificial Sequence: Synthetic oligonucleotide
guagcaguucagccacauc

SEQ ID NO: 837296 - RNA, 19 nt, Artificial Sequence
  Description of Artificial Sequence: Synthetic oligonucleotide
gaacaauggcacggcacaa

SEQ ID NO: 837297 - RNA, 19 nt, Artificial Sequence
  Description of Artificial Sequence: Synthetic oligonucleotide
gaaauccuagauggaggcu

SEQ ID NO: 837298 - RNA, 19 nt, Artificial Sequence
  Description of Artificial Sequence: Synthetic oligonucleotide
uaagcgccauggucccaga

SEQ ID NO: 837299 - RNA, 19 nt, Artificial Sequence
  Description of Artificial Sequence: Synthetic oligonucleotide
uucgguuguuaaggccaca

SEQ ID NO: 837300 - RNA, 19 nt, Artificial Sequence
  Description of Artificial Sequence: Synthetic oligonucleotide
caccccuugucuacaaaua

SEQ ID NO: 837301 - RNA, 19 nt, Artificial Sequence
  Description of Artificial Sequence: Synthetic oligonucleotide
accgagugagauaccagua

SEQ ID NO: 837302 - RNA, 19 nt, Artificial Sequence
  Description of Artificial Sequence: Synthetic oligonucleotide
acucaccgagugagauacc

SEQ ID NO: 837303 - RNA, 19 nt, Artificial Sequence
  Description of Artificial Sequence: Synthetic oligonucleotide
gcacuuaagcuuguuggga

SEQ ID NO: 837304 - RNA, 19 nt, Artificial Sequence
  Description of Artificial Sequence: Synthetic oligonucleotide
aguucucaagguacugauu

SEQ ID NO: 837305 - RNA, 19 nt, Artificial Sequence
  Description of Artificial Sequence: Synthetic oligonucleotide
caguaucaacauugguaaa

SEQ ID NO: 837306 - RNA, 19 nt, Artificial Sequence
  Description of Artificial Sequence: Synthetic oligonucleotide
guaguggugacuggccucu

SEQ ID NO: 837307 - RNA, 19 nt, Artificial Sequence
  Description of Artificial Sequence: Synthetic oligonucleotide
gccucuaagucagcccagg

SEQ ID NO: 837308 - RNA, 19 nt, Artificial Sequence
  Description of Artificial Sequence: Synthetic oligonucleotide
ccuuucauauaugccaaga

SEQ ID NO: 837309 - RNA, 19 nt, Artificial Sequence
  Description of Artificial Sequence: Synthetic oligonucleotide
auugguuauugggguggaa

SEQ ID NO: 837310 - RNA, 19 nt, Artificial Sequence
  Description of Artificial Sequence: Synthetic oligonucleotide
aggacgcagcaagacgaga

SEQ ID NO: 837311 - RNA, 19 nt, Artificial Sequence
  Description of Artificial Sequence: Synthetic oligonucleotide
cccuagaguaaucagcucu

SEQ ID NO: 837312 - RNA, 19 nt, Artificial Sequence
  Description of Artificial Sequence: Synthetic oligonucleotide
gugaauucucugagaugga

SEQ ID NO: 837313 - RNA, 19 nt, Artificial Sequence
  Description of Artificial Sequence: Synthetic oligonucleotide
guacugauuaagacugaau

SEQ ID NO: 837314 - RNA, 19 nt, Artificial Sequence
  Description of Artificial Sequence: Synthetic oligonucleotide
gacuagugcuggaacaguu

SEQ ID NO: 837315 - RNA, 19 nt, Artificial Sequence
  Description of Artificial Sequence: Synthetic oligonucleotide
gucagcccaggcaggaaga

SEQ ID NO: 837316 - RNA, 19 nt, Artificial Sequence
  Description of Artificial Sequence: Synthetic oligonucleotide
caagcgagcccagaccgaa

SEQ ID NO: 837317 - RNA, 19 nt, Artificial Sequence
  Description of Artificial Sequence: Synthetic oligonucleotide
cuuaagcuuguugggacau

SEQ ID NO: 837318 - RNA, 19 nt, Artificial Sequence
  Description of Artificial Sequence: Synthetic oligonucleotide
gcaggcaaacugagcagug

SEQ ID NO: 837319 - RNA, 19 nt, Artificial Sequence
  Description of Artificial Sequence: Synthetic oligonucleotide
ggcaagagguuccuauuau

SEQ ID NO: 837320 - RNA, 19 nt, Artificial Sequence
  Description of Artificial Sequence: Synthetic oligonucleotide
gcaagacgagagaaugaga

SEQ ID NO: 837321 - RNA, 19 nt, Artificial Sequence
  Description of Artificial Sequence: Synthetic oligonucleotide
gguucuggccagggcagug

SEQ ID NO: 837322 - RNA, 19 nt, Artificial Sequence
  Description of Artificial Sequence: Synthetic oligonucleotide
cacggcacaaguuggcauu

SEQ ID NO: 837323 - RNA, 19 nt, Artificial Sequence
  Description of Artificial Sequence: Synthetic oligonucleotide
ccgagugagauaccaguaa

SEQ ID NO: 837324 - RNA, 19 nt, Artificial Sequence
  Description of Artificial Sequence: Synthetic oligonucleotide
ggcccaaaacuuguguucu

SEQ ID NO: 837325 - RNA, 19 nt, Artificial Sequence
  Description of Artificial Sequence: Synthetic oligonucleotide
gcucucaucuuugaacccu

SEQ ID NO: 837326 - RNA, 19 nt, Artificial Sequence
  Description of Artificial Sequence: Synthetic oligonucleotide
cgagugagauaccaguaaa

SEQ ID NO: 837327 - RNA, 19 nt, Artificial Sequence
  Description of Artificial Sequence: Synthetic oligonucleotide
ggugaagucuggucagcau

SEQ ID NO: 837328 - RNA, 19 nt, Artificial Sequence
  Description of Artificial Sequence: Synthetic oligonucleotide
ggcaggcaaacugagcagu

SEQ ID NO: 837329 - RNA, 19 nt, Artificial Sequence
  Description of Artificial Sequence: Synthetic oligonucleotide
cuugacugaauugguuauu

SEQ ID NO: 837330 - RNA, 19 nt, Artificial Sequence
  Description of Artificial Sequence: Synthetic oligonucleotide
uucccacacugagcaccac

SEQ ID NO: 837331 - RNA, 19 nt, Artificial Sequence
  Description of Artificial Sequence: Synthetic oligonucleotide
cccaaaacuuguguucuaa

SEQ ID NO: 837332 - RNA, 19 nt, Artificial Sequence
  Description of Artificial Sequence: Synthetic oligonucleotide
ccucaguguaggcacuuaa

SEQ ID NO: 837333 - RNA, 19 nt, Artificial Sequence
  Description of Artificial Sequence: Synthetic oligonucleotide
ccugguaauugaaaauguu

SEQ ID NO: 837334 - RNA, 19 nt, Artificial Sequence
  Description of Artificial Sequence: Synthetic oligonucleotide
gcuaggugucaaacugcca

SEQ ID NO: 837335 - RNA, 19 nt, Artificial Sequence
  Description of Artificial Sequence: Synthetic oligonucleotide
gggguauuuugaauuggau

SEQ ID NO: 837336 - RNA, 19 nt, Artificial Sequence
  Description of Artificial Sequence: Synthetic oligonucleotide
ccaccccuugucuacaaau

SEQ ID NO: 837337 - RNA, 19 nt, Artificial Sequence
  Description of Artificial Sequence: Synthetic oligonucleotide
gcuaacugaugcagcaauu

SEQ ID NO: 837338 - RNA, 19 nt, Artificial Sequence
  Description of Artificial Sequence: Synthetic oligonucleotide
ccaagcgagcccagaccga

SEQ ID NO: 837339 - RNA, 19 nt, Artificial Sequence
  Description of Artificial Sequence: Synthetic oligonucleotide
gcccaaaacuuguguucua

SEQ ID NO: 837340 - RNA, 19 nt, Artificial Sequence
  Description of Artificial Sequence: Synthetic oligonucleotide
gcgagcccagaccgaacaa

SEQ ID NO: 837341 - RNA, 19 nt, Artificial Sequence
  Description of Artificial Sequence: Synthetic oligonucleotide
guaggcacuuaagcuuguu

SEQ ID NO: 837342 - RNA, 19 nt, Artificial Sequence
  Description of Artificial Sequence: Synthetic oligonucleotide
gcuaagcgccaugguccca

SEQ ID NO: 837343 - RNA, 19 nt, Artificial Sequence
  Description of Artificial Sequence: Synthetic oligonucleotide
cauuugcaacuggcaacuu

SEQ ID NO: 837344 - RNA, 19 nt, Artificial Sequence
  Description of Artificial Sequence: Synthetic oligonucleotide
cccaccccuugucuacaaa

SEQ ID NO: 837345 - RNA, 19 nt, Artificial Sequence
  Description of Artificial Sequence: Synthetic oligonucleotide
cgguuguuaaggccacaau

SEQ ID NO: 837346 - RNA, 19 nt, Artificial Sequence
  Description of Artificial Sequence: Synthetic oligonucleotide
aaugcgaucagguagcacg

SEQ ID NO: 837347 - RNA, 19 nt, Artificial Sequence
  Description of Artificial Sequence: Synthetic oligonucleotide
aaugugacgcucuaaauag

SEQ ID NO: 837348 - RNA, 19 nt, Artificial Sequence
  Description of Artificial Sequence: Synthetic oligonucleotide
aauaacauuggagagugac

SEQ ID NO: 837349 - RNA, 19 nt, Artificial Sequence
  Description of Artificial Sequence: Synthetic oligonucleotide
ugugcaauaacauuggaga

SEQ ID NO: 837350 - RNA, 19 nt, Artificial Sequence
  Description of Artificial Sequence: Synthetic oligonucleotide
aacuaaugcgaucagguag

SEQ ID NO: 837351 - RNA, 19 nt, Artificial Sequence
  Description of Artificial Sequence: Synthetic oligonucleotide
uucgauugaaugcagagcc

SEQ ID NO: 837352 - RNA, 19 nt, Artificial Sequence
  Description of Artificial Sequence: Synthetic oligonucleotide
uauuucaugugcaauaaca

SEQ ID NO: 837353 - RNA, 19 nt, Artificial Sequence
  Description of Artificial Sequence: Synthetic oligonucleotide
cuuuaagaauccuagaaac

SEQ ID NO: 837354 - RNA, 19 nt, Artificial Sequence
  Description of Artificial Sequence: Synthetic oligonucleotide
uauauuugacuucuugucc

SEQ ID NO: 837355 - RNA, 19 nt, Artificial Sequence
  Description of Artificial Sequence: Synthetic oligonucleotide
uugaucaugagauuuguca

SEQ ID NO: 837356 - RNA, 19 nt, Artificial Sequence
  Description of Artificial Sequence: Synthetic oligonucleotide
uaugggauauuucaugugc

SEQ ID NO: 837357 - RNA, 19 nt, Artificial Sequence
  Description of Artificial Sequence: Synthetic oligonucleotide
uauaacaaccucuugauuu

SEQ ID NO: 837358 - RNA, 19 nt, Artificial Sequence
  Description of Artificial Sequence: Synthetic oligonucleotide
uuugggagaggucucauag

SEQ ID NO: 837359 - RNA, 19 nt, Artificial Sequence
  Description of Artificial Sequence: Synthetic oligonucleotide
uaagcauagauucagucuc

SEQ ID NO: 837360 - RNA, 19 nt, Artificial Sequence
  Description of Artificial Sequence: Synthetic oligonucleotide
ugacgcucuaaauagacag

SEQ ID NO: 837361 - RNA, 19 nt, Artificial Sequence
  Description of Artificial Sequence: Synthetic oligonucleotide
gaacucauucagcugaugg

SEQ ID NO: 837362 - RNA, 19 nt, Artificial Sequence
  Description of Artificial Sequence: Synthetic oligonucleotide
accaauagaucguacugcc

SEQ ID NO: 837363 - RNA, 19 nt, Artificial Sequence
  Description of Artificial Sequence: Synthetic oligonucleotide
aaccaauagaucguacugc

SEQ ID NO: 837364 - RNA, 19 nt, Artificial Sequence
  Description of Artificial Sequence: Synthetic oligonucleotide
agguuaguuucacagaagg

SEQ ID NO: 837365 - RNA, 19 nt, Artificial Sequence
  Description of Artificial Sequence: Synthetic oligonucleotide
auaggaaauuucuauaaca

SEQ ID NO: 837366 - RNA, 19 nt, Artificial Sequence
  Description of Artificial Sequence: Synthetic oligonucleotide
cuugguaaagggaugagac

SEQ ID NO: 837367 - RNA, 19 nt, Artificial Sequence
  Description of Artificial Sequence: Synthetic oligonucleotide
uuuuguauccaaagucagg

SEQ ID NO: 837368 - RNA, 19 nt, Artificial Sequence
  Description of Artificial Sequence: Synthetic oligonucleotide
ucaagguagaagaguaggg

SEQ ID NO: 837369 - RNA, 19 nt, Artificial Sequence
  Description of Artificial Sequence: Synthetic oligonucleotide
uuuuaucguauucuguagc

SEQ ID NO: 837370 - RNA, 19 nt, Artificial Sequence
  Description of Artificial Sequence: Synthetic oligonucleotide
uuaagcauagauucagucu

SEQ ID NO: 837371 - RNA, 19 nt, Artificial Sequence
  Description of Artificial Sequence: Synthetic oligonucleotide
aaaugugacgcucuaaaua

SEQ ID NO: 837372 - RNA, 19 nt, Artificial Sequence
  Description of Artificial Sequence: Synthetic oligonucleotide
ugaaucguauuucagaauu

SEQ ID NO: 837373 - RNA, 19 nt, Artificial Sequence
  Description of Artificial Sequence: Synthetic oligonucleotide
uuaugugccccaaugggag

SEQ ID NO: 837374 - RNA, 19 nt, Artificial Sequence
  Description of Artificial Sequence: Synthetic oligonucleotide
ucauuuaaccaaaagugau

SEQ ID NO: 837375 - RNA, 19 nt, Artificial Sequence
  Description of Artificial Sequence: Synthetic oligonucleotide
ugacuuaaggcgaugcaag

SEQ ID NO: 837376 - RNA, 19 nt, Artificial Sequence
  Description of Artificial Sequence: Synthetic oligonucleotide
ucuauuguaaggucuuuug

SEQ ID NO: 837377 - RNA, 19 nt, Artificial Sequence
  Description of Artificial Sequence: Synthetic oligonucleotide
uuuuagagccaaaggaaug

SEQ ID NO: 837378 - RNA, 19 nt, Artificial Sequence
  Description of Artificial Sequence: Synthetic oligonucleotide
cuuuaugugccccaauggg

SEQ ID NO: 837379 - RNA, 19 nt, Artificial Sequence
  Description of Artificial Sequence: Synthetic oligonucleotide
uugauugagaagauccacc

SEQ ID NO: 837380 - RNA, 19 nt, Artificial Sequence
  Description of Artificial Sequence: Synthetic oligonucleotide
aaguccuccucuuuggcag

SEQ ID NO: 837381 - RNA, 19 nt, Artificial Sequence
  Description of Artificial Sequence: Synthetic oligonucleotide
caauagaucguacugcccc

SEQ ID NO: 837382 - RNA, 19 nt, Artificial Sequence
  Description of Artificial Sequence: Synthetic oligonucleotide
agagugacuugucaccugc

SEQ ID NO: 837383 - RNA, 19 nt, Artificial Sequence
  Description of Artificial Sequence: Synthetic oligonucleotide
ggucguguaaauuucaucc

SEQ ID NO: 837384 - RNA, 19 nt, Artificial Sequence
  Description of Artificial Sequence: Synthetic oligonucleotide
uuugacuggaggcaggcca

SEQ ID NO: 837385 - RNA, 19 nt, Artificial Sequence
  Description of Artificial Sequence: Synthetic oligonucleotide
ugcugaacgaacuuaaguc

SEQ ID NO: 837386 - RNA, 19 nt, Artificial Sequence
  Description of Artificial Sequence: Synthetic oligonucleotide
ucggauugcacucaugaga

SEQ ID NO: 837387 - RNA, 19 nt, Artificial Sequence
  Description of Artificial Sequence: Synthetic oligonucleotide
uuuaugugccccaauggga

SEQ ID NO: 837388 - RNA, 19 nt, Artificial Sequence
  Description of Artificial Sequence: Synthetic oligonucleotide
ucuuuccccaccagcaucg

SEQ ID NO: 837389 - RNA, 19 nt, Artificial Sequence
  Description of Artificial Sequence: Synthetic oligonucleotide
acuaaugcgaucagguagc

SEQ ID NO: 837390 - RNA, 19 nt, Artificial Sequence
  Description of Artificial Sequence: Synthetic oligonucleotide
ucuauaacaaccucuugau

SEQ ID NO: 837391 - RNA, 19 nt, Artificial Sequence
  Description of Artificial Sequence: Synthetic oligonucleotide
uuuaagcauagauucaguc

SEQ ID NO: 837392 - RNA, 19 nt, Artificial Sequence
  Description of Artificial Sequence: Synthetic oligonucleotide
ucguacgucagccagcacc

SEQ ID NO: 837393 - RNA, 19 nt, Artificial Sequence
  Description of Artificial Sequence: Synthetic oligonucleotide
ucguauuucagaauuguua

SEQ ID NO: 837394 - RNA, 19 nt, Artificial Sequence
  Description of Artificial Sequence: Synthetic oligonucleotide
ucuugcauucgcuuuaugu

SEQ ID NO: 837395 - RNA, 19 nt, Artificial Sequence
  Description of Artificial Sequence: Synthetic oligonucleotide
gaaccaauagaucguacug

SEQ ID NO: 837396 - RNA, 19 nt, Artificial Sequence
  Description of Artificial Sequence: Synthetic oligonucleotide
gguuuuguuagucacuagg

SEQ ID NO: 837397 - RNA, 19 nt, Artificial Sequence
  Description of Artificial Sequence: Synthetic oligonucleotide
uuuaucguauucuguagcu

SEQ ID NO: 837398 - RNA, 19 nt, Artificial Sequence
  Description of Artificial Sequence: Synthetic oligonucleotide
uaucguauucuguagcucu

SEQ ID NO: 837399 - RNA, 19 nt, Artificial Sequence
  Description of Artificial Sequence: Synthetic oligonucleotide
agguccgagaugcugaacg

SEQ ID NO: 837400 - RNA, 19 nt, Artificial Sequence
  Description of Artificial Sequence: Synthetic oligonucleotide
aucggugacccuuuguaac

SEQ ID NO: 837401 - RNA, 19 nt, Artificial Sequence
  Description of Artificial Sequence: Synthetic oligonucleotide
uugcauucgcuuuaugugc

SEQ ID NO: 837402 - RNA, 19 nt, Artificial Sequence
  Description of Artificial Sequence: Synthetic oligonucleotide
uccaagaguauauuugacu

SEQ ID NO: 837403 - RNA, 19 nt, Artificial Sequence
  Description of Artificial Sequence: Synthetic oligonucleotide
cuuaaguccuccucuuugg

SEQ ID NO: 837404 - RNA, 19 nt, Artificial Sequence
  Description of Artificial Sequence: Synthetic oligonucleotide
agaauuguuaauggcauug

SEQ ID NO: 837405 - RNA, 19 nt, Artificial Sequence
  Description of Artificial Sequence: Synthetic oligonucleotide
agugggaauacaggaaacc

SEQ ID NO: 837406 - RNA, 19 nt, Artificial Sequence
  Description of Artificial Sequence: Synthetic oligonucleotide
ggaagggagauuuccaucg

SEQ ID NO: 837407 - RNA, 19 nt, Artificial Sequence
  Description of Artificial Sequence: Synthetic oligonucleotide
uuagucacuagguuuccug

SEQ ID NO: 837408 - RNA, 19 nt, Artificial Sequence
  Description of Artificial Sequence: Synthetic oligonucleotide
agaaccaauagaucguacu

SEQ ID NO: 837409 - RNA, 19 nt, Artificial Sequence
  Description of Artificial Sequence: Synthetic oligonucleotide
ugugacgcucuaaauagac

SEQ ID NO: 837410 - RNA, 19 nt, Artificial Sequence
  Description of Artificial Sequence: Synthetic oligonucleotide
aggcauuccaaucaacuug

SEQ ID NO: 837411 - RNA, 19 nt, Artificial Sequence
  Description of Artificial Sequence: Synthetic oligonucleotide
ucagugguuacacucuugu

SEQ ID NO: 837412 - RNA, 19 nt, Artificial Sequence
  Description of Artificial Sequence: Synthetic oligonucleotide
ugaauaaaggucguguaaa

SEQ ID NO: 837413 - RNA, 19 nt, Artificial Sequence
  Description of Artificial Sequence: Synthetic oligonucleotide
gggcagaaccaauagaucg

SEQ ID NO: 837414 - RNA, 19 nt, Artificial Sequence
  Description of Artificial Sequence: Synthetic oligonucleotide
uaggagucacaaauguaag

SEQ ID NO: 837415 - RNA, 19 nt, Artificial Sequence
  Description of Artificial Sequence: Synthetic oligonucleotide
ugaucccagguuuuguuag

SEQ ID NO: 837416 - RNA, 19 nt, Artificial Sequence
  Description of Artificial Sequence: Synthetic oligonucleotide
uaaaggucguguaaauuuc

SEQ ID NO: 837417 - RNA, 19 nt, Artificial Sequence
  Description of Artificial Sequence: Synthetic oligonucleotide
ugcgguguagguuaguuuc

SEQ ID NO: 837418 - RNA, 19 nt, Artificial Sequence
  Description of Artificial Sequence: Synthetic oligonucleotide
aauagacaguauguccuuc

SEQ ID NO: 837419 - RNA, 19 nt, Artificial Sequence
  Description of Artificial Sequence: Synthetic oligonucleotide
ucaccugccaguagaguag

SEQ ID NO: 837420 - RNA, 19 nt, Artificial Sequence
  Description of Artificial Sequence: Synthetic oligonucleotide
ugggaauacaggaaacccu

SEQ ID NO: 837421 - RNA, 19 nt, Artificial Sequence
  Description of Artificial Sequence: Synthetic oligonucleotide
agauuuccaucggugaccc

SEQ ID NO: 837422 - RNA, 19 nt, Artificial Sequence
  Description of Artificial Sequence: Synthetic oligonucleotide
uuuuaagcauagauucagu

SEQ ID NO: 837423 - RNA, 19 nt, Artificial Sequence
  Description of Artificial Sequence: Synthetic oligonucleotide
uucuuguccauugaucacc

SEQ ID NO: 837424 - RNA, 19 nt, Artificial Sequence
  Description of Artificial Sequence: Synthetic oligonucleotide
acgaacuuaaguccuccuc

SEQ ID NO: 837425 - RNA, 19 nt, Artificial Sequence
  Description of Artificial Sequence: Synthetic oligonucleotide
caaucguccacaaauguga

SEQ ID NO: 837426 - RNA, 19 nt, Artificial Sequence
  Description of Artificial Sequence: Synthetic oligonucleotide
agcauggaaaugucugaac

SEQ ID NO: 837427 - RNA, 19 nt, Artificial Sequence
  Description of Artificial Sequence: Synthetic oligonucleotide
agcuaugggauauuucaug

SEQ ID NO: 837428 - RNA, 19 nt, Artificial Sequence
  Description of Artificial Sequence: Synthetic oligonucleotide
uaagccuuuaagaauccua

SEQ ID NO: 837429 - RNA, 19 nt, Artificial Sequence
  Description of Artificial Sequence: Synthetic oligonucleotide
ucuugguaggcgcggacag

SEQ ID NO: 837430 - RNA, 19 nt, Artificial Sequence
  Description of Artificial Sequence: Synthetic oligonucleotide
agagccaggcauuccaauc

SEQ ID NO: 837431 - RNA, 19 nt, Artificial Sequence
  Description of Artificial Sequence: Synthetic oligonucleotide
uuaugcucuugguaggcgc

SEQ ID NO: 837432 - RNA, 19 nt, Artificial Sequence
  Description of Artificial Sequence: Synthetic oligonucleotide
gaugcaagcauuugucaga

SEQ ID NO: 837433 - RNA, 19 nt, Artificial Sequence
  Description of Artificial Sequence: Synthetic oligonucleotide
gccguaaccaucugaaucg

SEQ ID NO: 837434 - RNA, 19 nt, Artificial Sequence
  Description of Artificial Sequence: Synthetic oligonucleotide
aauccuagaaacaccucug

SEQ ID NO: 837435 - RNA, 19 nt, Artificial Sequence
  Description of Artificial Sequence: Synthetic oligonucleotide
ucgauugaaugcagagccg

SEQ ID NO: 837436 - RNA, 19 nt, Artificial Sequence
  Description of Artificial Sequence: Synthetic oligonucleotide
ugcucaagguagaagagua

SEQ ID NO: 837437 - RNA, 19 nt, Artificial Sequence
  Description of Artificial Sequence: Synthetic oligonucleotide
aaacaaucguccacaaaug

SEQ ID NO: 837438 - RNA, 19 nt, Artificial Sequence
  Description of Artificial Sequence: Synthetic oligonucleotide
uuuguaaccuugucuuucu

SEQ ID NO: 837439 - RNA, 19 nt, Artificial Sequence
  Description of Artificial Sequence: Synthetic oligonucleotide
gaugggaagggagauuucc

SEQ ID NO: 837440 - RNA, 19 nt, Artificial Sequence
  Description of Artificial Sequence: Synthetic oligonucleotide
uuucgauugaaugcagagc

SEQ ID NO: 837441 - RNA, 19 nt, Artificial Sequence
  Description of Artificial Sequence: Synthetic oligonucleotide
ugcauucgcuuuaugugcc

SEQ ID NO: 837442 - RNA, 19 nt, Artificial Sequence
  Description of Artificial Sequence: Synthetic oligonucleotide
agucacgggaugcauacug

SEQ ID NO: 837443 - RNA, 19 nt, Artificial Sequence
  Description of Artificial Sequence: Synthetic oligonucleotide
ugcaauaacauuggagagu

SEQ ID NO: 837444 - RNA, 19 nt, Artificial Sequence
  Description of Artificial Sequence: Synthetic oligonucleotide
ucucagaccacaccagagu

SEQ ID NO: 837445 - RNA, 19 nt, Artificial Sequence
  Description of Artificial Sequence: Synthetic oligonucleotide
agauccgucguacgucagc

SEQ ID NO: 837446 - RNA, 19 nt, Artificial Sequence
  Description of Artificial Sequence: Synthetic oligonucleotide
uuggagagugacuugucac

SEQ ID NO: 837447 - RNA, 19 nt, Artificial Sequence
  Description of Artificial Sequence: Synthetic oligonucleotide
gacaguauguccuucauuu

SEQ ID NO: 837448 - RNA, 19 nt, Artificial Sequence
  Description of Artificial Sequence: Synthetic oligonucleotide
augcugaacgaacuuaagu

SEQ ID NO: 837449 - RNA, 19 nt, Artificial Sequence
  Description of Artificial Sequence: Synthetic oligonucleotide
auagggcccucccagaucu

SEQ ID NO: 837450 - RNA, 19 nt, Artificial Sequence
  Description of Artificial Sequence: Synthetic oligonucleotide
uuugcucagagcgauggga

SEQ ID NO: 837451 - RNA, 19 nt, Artificial Sequence
  Description of Artificial Sequence: Synthetic oligonucleotide
gcugaacgaacuuaagucc

SEQ ID NO: 837452 - RNA, 19 nt, Artificial Sequence
  Description of Artificial Sequence: Synthetic oligonucleotide
gaugcauacuggcuuuaug

SEQ ID NO: 837453 - RNA, 19 nt, Artificial Sequence
  Description of Artificial Sequence: Synthetic oligonucleotide
gacuuaaggcgaugcaagc

SEQ ID NO: 837454 - RNA, 19 nt, Artificial Sequence
  Description of Artificial Sequence: Synthetic oligonucleotide
uccgagaugcugaacgaac

SEQ ID NO: 837455 - RNA, 19 nt, Artificial Sequence
  Description of Artificial Sequence: Synthetic oligonucleotide
caaggguucuccauuccgc

SEQ ID NO: 837456 - RNA, 19 nt, Artificial Sequence
  Description of Artificial Sequence: Synthetic oligonucleotide
gaagggagauuuccaucgg

SEQ ID NO: 837457 - RNA, 19 nt, Artificial Sequence
  Description of Artificial Sequence: Synthetic oligonucleotide
auaacaaccucuugauuuu

SEQ ID NO: 837458 - RNA, 19 nt, Artificial Sequence
  Description of Artificial Sequence: Synthetic oligonucleotide
ucuuuaaagugggaauaca

SEQ ID NO: 837459 - RNA, 19 nt, Artificial Sequence
  Description of Artificial Sequence: Synthetic oligonucleotide
cuugauugagaagauccac

SEQ ID NO: 837460 - RNA, 19 nt, Artificial Sequence
  Description of Artificial Sequence: Synthetic oligonucleotide
ugccaguagaguaggaguc

SEQ ID NO: 837461 - RNA, 19 nt, Artificial Sequence
  Description of Artificial Sequence: Synthetic oligonucleotide
uugacuuaaggcgaugcaa

SEQ ID NO: 837462 - RNA, 19 nt, Artificial Sequence
  Description of Artificial Sequence: Synthetic oligonucleotide
ggaggaauaggcuacaucu

SEQ ID NO: 837463 - RNA, 19 nt, Artificial Sequence
  Description of Artificial Sequence: Synthetic oligonucleotide
agaauagagccaggcauuc

SEQ ID NO: 837464 - RNA, 19 nt, Artificial Sequence
  Description of Artificial Sequence: Synthetic oligonucleotide
cuuucucuauuguaagguc

SEQ ID NO: 837465 - RNA, 19 nt, Artificial Sequence
  Description of Artificial Sequence: Synthetic oligonucleotide
ucggugacccuuuguaacc

SEQ ID NO: 837466 - RNA, 19 nt, Artificial Sequence
  Description of Artificial Sequence: Synthetic oligonucleotide
caggcugcgcagauuaucc

SEQ ID NO: 837467 - RNA, 19 nt, Artificial Sequence
  Description of Artificial Sequence: Synthetic oligonucleotide
aagggagauuuccaucggu

SEQ ID NO: 837468 - RNA, 19 nt, Artificial Sequence
  Description of Artificial Sequence: Synthetic oligonucleotide
uugguaaagggaugagacu

SEQ ID NO: 837469 - RNA, 19 nt, Artificial Sequence
  Description of Artificial Sequence: Synthetic oligonucleotide
ggagucacaaauguaagac

SEQ ID NO: 837470 - RNA, 19 nt, Artificial Sequence
  Description of Artificial Sequence: Synthetic oligonucleotide
ucgggagugagccacugaa

SEQ ID NO: 837471 - RNA, 19 nt, Artificial Sequence
  Description of Artificial Sequence: Synthetic oligonucleotide
gcaauaacauuggagagug

SEQ ID NO: 837472 - RNA, 19 nt, Artificial Sequence
  Description of Artificial Sequence: Synthetic oligonucleotide
aacgaacuuaaguccuccu

SEQ ID NO: 837473 - RNA, 19 nt, Artificial Sequence
  Description of Artificial Sequence: Synthetic oligonucleotide
cugaugggacgagagaucc

SEQ ID NO: 837474 - RNA, 19 nt, Artificial Sequence
  Description of Artificial Sequence: Synthetic oligonucleotide
uucuccauuccgccguaag

SEQ ID NO: 837475 - RNA, 19 nt, Artificial Sequence
  Description of Artificial Sequence: Synthetic oligonucleotide
aguagaguaggagucacaa

SEQ ID NO: 837476 - RNA, 19 nt, Artificial Sequence
  Description of Artificial Sequence: Synthetic oligonucleotide
auuucuauaacaaccucuu

SEQ ID NO: 837477 - RNA, 19 nt, Artificial Sequence
  Description of Artificial Sequence: Synthetic oligonucleotide
gaaucguauuucagaauug

SEQ ID NO: 837478 - RNA, 19 nt, Artificial Sequence
  Description of Artificial Sequence: Synthetic oligonucleotide
uguuaauggcauugaaguu

SEQ ID NO: 837479 - RNA, 19 nt, Artificial Sequence
  Description of Artificial Sequence: Synthetic oligonucleotide
agauuauccuccugagacu

SEQ ID NO: 837480 - RNA, 19 nt, Artificial Sequence
  Description of Artificial Sequence: Synthetic oligonucleotide
cccaucuuugacuuaaggc

SEQ ID NO: 837481 - RNA, 19 nt, Artificial Sequence
  Description of Artificial Sequence: Synthetic oligonucleotide
cuaugggauauuucaugug

SEQ ID NO: 837482 - RNA, 19 nt, Artificial Sequence
  Description of Artificial Sequence: Synthetic oligonucleotide
guuacacucuuguaggaaa

SEQ ID NO: 837483 - RNA, 19 nt, Artificial Sequence
  Description of Artificial Sequence: Synthetic oligonucleotide
agugacccaucuuugacuu

SEQ ID NO: 837484 - RNA, 19 nt, Artificial Sequence
  Description of Artificial Sequence: Synthetic oligonucleotide
aggagaauagagccaggca

SEQ ID NO: 837485 - RNA, 19 nt, Artificial Sequence
  Description of Artificial Sequence: Synthetic oligonucleotide
ugggagauccgucguacgu

SEQ ID NO: 837486 - RNA, 19 nt, Artificial Sequence
  Description of Artificial Sequence: Synthetic oligonucleotide
uggacggugagcgcggcgg

SEQ ID NO: 837487 - RNA, 19 nt, Artificial Sequence
  Description of Artificial Sequence: Synthetic oligonucleotide
aaaggucguguaaauuuca

SEQ ID NO: 837488 - RNA, 19 nt, Artificial Sequence
  Description of Artificial Sequence: Synthetic oligonucleotide
gauccgucguacgucagcc

SEQ ID NO: 837489 - RNA, 19 nt, Artificial Sequence
  Description of Artificial Sequence: Synthetic oligonucleotide
uagggcgaagcccuucuca

SEQ ID NO: 837490 - RNA, 19 nt, Artificial Sequence
  Description of Artificial Sequence: Synthetic oligonucleotide
uccaucucggauugcacuc

SEQ ID NO: 837491 - RNA, 19 nt, Artificial Sequence
  Description of Artificial Sequence: Synthetic oligonucleotide
ugaacgaacuuaaguccuc

SEQ ID NO: 837492 - RNA, 19 nt, Artificial Sequence
  Description of Artificial Sequence: Synthetic oligonucleotide
auagggaauggaggaauag

SEQ ID NO: 837493 - RNA, 19 nt, Artificial Sequence
  Description of Artificial Sequence: Synthetic oligonucleotide
cauuccgccguaagggaag

SEQ ID NO: 837494 - RNA, 19 nt, Artificial Sequence
  Description of Artificial Sequence: Synthetic oligonucleotide
ugggauauuucaugugcaa

SEQ ID NO: 837495 - RNA, 19 nt, Artificial Sequence
  Description of Artificial Sequence: Synthetic oligonucleotide
uugcucagagcgaugggaa

SEQ ID NO: 837496 - RNA, 19 nt, Artificial Sequence
  Description of Artificial Sequence: Synthetic oligonucleotide
gaacgaacuuaaguccucc

SEQ ID NO: 837497 - RNA, 19 nt, Artificial Sequence
  Description of Artificial Sequence: Synthetic oligonucleotide
ugacuucuuguccauugau

SEQ ID NO: 837498 - RNA, 19 nt, Artificial Sequence
  Description of Artificial Sequence: Synthetic oligonucleotide
uucggcagaccgaggcugg

SEQ ID NO: 837499 - RNA, 19 nt, Artificial Sequence
  Description of Artificial Sequence: Synthetic oligonucleotide
ggacgagagauccuucagg

SEQ ID NO: 837500 - RNA, 19 nt, Artificial Sequence
  Description of Artificial Sequence: Synthetic oligonucleotide
gaggauuugggagaggucu

SEQ ID NO: 837501 - RNA, 19 nt, Artificial Sequence
  Description of Artificial Sequence: Synthetic oligonucleotide
ugacccaucuuugacuuaa

SEQ ID NO: 837502 - RNA, 19 nt, Artificial Sequence
  Description of Artificial Sequence: Synthetic oligonucleotide
ggcgaagcccuucucauag

SEQ ID NO: 837503 - RNA, 19 nt, Artificial Sequence
  Description of Artificial Sequence: Synthetic oligonucleotide
gacgagagauccuucaggu

SEQ ID NO: 837504 - RNA, 19 nt, Artificial Sequence
  Description of Artificial Sequence: Synthetic oligonucleotide
acgagagauccuucagguc

SEQ ID NO: 837505 - RNA, 19 nt, Artificial Sequence
  Description of Artificial Sequence: Synthetic oligonucleotide
ucccagaagucuguucggg

SEQ ID NO: 837506 - RNA, 19 nt, Artificial Sequence
  Description of Artificial Sequence: Synthetic oligonucleotide
uccaacaacuaaugcgauc

SEQ ID NO: 837507 - RNA, 19 nt, Artificial Sequence
  Description of Artificial Sequence: Synthetic oligonucleotide
aggguucuccauuccgccg

SEQ ID NO: 837508 - RNA, 19 nt, Artificial Sequence
  Description of Artificial Sequence: Synthetic oligonucleotide
ggcgcggacagcuugauca

SEQ ID NO: 837509 - RNA, 19 nt, Artificial Sequence
  Description of Artificial Sequence: Synthetic oligonucleotide
auaacauuggagagugacu

SEQ ID NO: 837510 - RNA, 19 nt, Artificial Sequence
  Description of Artificial Sequence: Synthetic oligonucleotide
ugcucagagcgaugggaag

SEQ ID NO: 837511 - RNA, 19 nt, Artificial Sequence
  Description of Artificial Sequence: Synthetic oligonucleotide
cuugaauaaaggucgugua

SEQ ID NO: 837512 - RNA, 19 nt, Artificial Sequence
  Description of Artificial Sequence: Synthetic oligonucleotide
caggagaauagagccaggc

SEQ ID NO: 837513 - RNA, 19 nt, Artificial Sequence
  Description of Artificial Sequence: Synthetic oligonucleotide
acuuaaggcgaugcaagca

SEQ ID NO: 837514 - RNA, 19 nt, Artificial Sequence
  Description of Artificial Sequence: Synthetic oligonucleotide
uccaaagcuccaacaacua

SEQ ID NO: 837515 - RNA, 19 nt, Artificial Sequence
  Description of Artificial Sequence: Synthetic oligonucleotide
ggauauuucaugugcaaua

SEQ ID NO: 837516 - RNA, 19 nt, Artificial Sequence
  Description of Artificial Sequence: Synthetic oligonucleotide
cucauaggaaauuucuaua

SEQ ID NO: 837517 - RNA, 19 nt, Artificial Sequence
  Description of Artificial Sequence: Synthetic oligonucleotide
ugguuacacucuuguagga

SEQ ID NO: 837518 - RNA, 19 nt, Artificial Sequence
  Description of Artificial Sequence: Synthetic oligonucleotide
uguacaccucuugcauucg

SEQ ID NO: 837519 - RNA, 19 nt, Artificial Sequence
  Description of Artificial Sequence: Synthetic oligonucleotide
uuaucguauucuguagcuc

SEQ ID NO: 837520 - RNA, 19 nt, Artificial Sequence
  Description of Artificial Sequence: Synthetic oligonucleotide
cucagagcgaugggaaggg

SEQ ID NO: 837521 - RNA, 19 nt, Artificial Sequence
  Description of Artificial Sequence: Synthetic oligonucleotide
ggaauaggcuacaucuggg

SEQ ID NO: 837522 - RNA, 19 nt, Artificial Sequence
  Description of Artificial Sequence: Synthetic oligonucleotide
ccagcuaugggauauuuca

SEQ ID NO: 837523 - RNA, 19 nt, Artificial Sequence
  Description of Artificial Sequence: Synthetic oligonucleotide
ucugggagauccgucguac

SEQ ID NO: 837524 - RNA, 19 nt, Artificial Sequence
  Description of Artificial Sequence: Synthetic oligonucleotide
auugaaugcagagccguaa

SEQ ID NO: 837525 - RNA, 19 nt, Artificial Sequence
  Description of Artificial Sequence: Synthetic oligonucleotide
uuaaggcgaugcaagcauu

SEQ ID NO: 837526 - RNA, 19 nt, Artificial Sequence
  Description of Artificial Sequence: Synthetic oligonucleotide
uguuagucacuagguuucc

SEQ ID NO: 837527 - RNA, 19 nt, Artificial Sequence
  Description of Artificial Sequence: Synthetic oligonucleotide
gguagcacgguaugggaac

SEQ ID NO: 837528 - RNA, 19 nt, Artificial Sequence
  Description of Artificial Sequence: Synthetic oligonucleotide
gaauaggcuacaucugggu

SEQ ID NO: 837529 - RNA, 19 nt, Artificial Sequence
  Description of Artificial Sequence: Synthetic oligonucleotide
guaaagggaugagacuccc

SEQ ID NO: 837530 - RNA, 19 nt, Artificial Sequence
  Description of Artificial Sequence: Synthetic oligonucleotide
ucguauucuguagcucucc

SEQ ID NO: 837531 - RNA, 19 nt, Artificial Sequence
  Description of Artificial Sequence: Synthetic oligonucleotide
acgggaugcauacuggcuu

SEQ ID NO: 837532 - RNA, 19 nt, Artificial Sequence
  Description of Artificial Sequence: Synthetic oligonucleotide
agucuguucgggagugagc

SEQ ID NO: 837533 - RNA, 19 nt, Artificial Sequence
  Description of Artificial Sequence: Synthetic oligonucleotide
aggucucauaggaaauuuc

SEQ ID NO: 837534 - RNA, 19 nt, Artificial Sequence
  Description of Artificial Sequence: Synthetic oligonucleotide
ucccggucagcacccggcg

SEQ ID NO: 837535 - RNA, 19 nt, Artificial Sequence
  Description of Artificial Sequence: Synthetic oligonucleotide
gccuuuaagaauccuagaa

SEQ ID NO: 837536 - RNA, 19 nt, Artificial Sequence
  Description of Artificial Sequence: Synthetic oligonucleotide
cacucaugagagcuaccag

SEQ ID NO: 837537 - RNA, 19 nt, Artificial Sequence
  Description of Artificial Sequence: Synthetic oligonucleotide
ugucugaacuucuccccaa

SEQ ID NO: 837538 - RNA, 19 nt, Artificial Sequence
  Description of Artificial Sequence: Synthetic oligonucleotide
gucacgggaugcauacugg

SEQ ID NO: 837539 - RNA, 19 nt, Artificial Sequence
  Description of Artificial Sequence: Synthetic oligonucleotide
ccaacaacuaaugcgauca

SEQ ID NO: 837540 - RNA, 19 nt, Artificial Sequence
  Description of Artificial Sequence: Synthetic oligonucleotide
cggauugcacucaugagag

SEQ ID NO: 837541 - RNA, 19 nt, Artificial Sequence
  Description of Artificial Sequence: Synthetic oligonucleotide
aucguauucuguagcucuc

SEQ ID NO: 837542 - RNA, 19 nt, Artificial Sequence
  Description of Artificial Sequence: Synthetic oligonucleotide
cagaaccaauagaucguac

SEQ ID NO: 837543 - RNA, 19 nt, Artificial Sequence
  Description of Artificial Sequence: Synthetic oligonucleotide
augcgaucagguagcacgg

SEQ ID NO: 837544 - RNA, 19 nt, Artificial Sequence
  Description of Artificial Sequence: Synthetic oligonucleotide
cuggguucggcagaccgag

SEQ ID NO: 837545 - RNA, 19 nt, Artificial Sequence
  Description of Artificial Sequence: Synthetic oligonucleotide
aaggucuuuuguauccaaa

SEQ ID NO: 837546 - RNA, 19 nt, Artificial Sequence
  Description of Artificial Sequence: Synthetic oligonucleotide
cauucgcuuuaugugcccc

SEQ ID NO: 837547 - RNA, 19 nt, Artificial Sequence
  Description of Artificial Sequence: Synthetic oligonucleotide
augggauauuucaugugca

SEQ ID NO: 837548 - RNA, 19 nt, Artificial Sequence
  Description of Artificial Sequence: Synthetic oligonucleotide
ugcgcagauuauccuccug

SEQ ID NO: 837549 - RNA, 19 nt, Artificial Sequence
  Description of Artificial Sequence: Synthetic oligonucleotide
cuguucgggagugagccac

SEQ ID NO: 837550 - RNA, 19 nt, Artificial Sequence
  Description of Artificial Sequence: Synthetic oligonucleotide
cugggagauccgucguacg

SEQ ID NO: 837551 - RNA, 19 nt, Artificial Sequence
  Description of Artificial Sequence: Synthetic oligonucleotide
uccaucggugacccuuugu

SEQ ID NO: 837552 - RNA, 19 nt, Artificial Sequence
  Description of Artificial Sequence: Synthetic oligonucleotide
acauagggcccucccagau

SEQ ID NO: 837553 - RNA, 19 nt, Artificial Sequence
  Description of Artificial Sequence: Synthetic oligonucleotide
gcagucacgggaugcauac

SEQ ID NO: 837554 - RNA, 19 nt, Artificial Sequence
  Description of Artificial Sequence: Synthetic oligonucleotide
cuauuguaaggucuuuugu

SEQ ID NO: 837555 - RNA, 19 nt, Artificial Sequence
  Description of Artificial Sequence: Synthetic oligonucleotide
acgcucuaaauagacagua

SEQ ID NO: 837556 - RNA, 19 nt, Artificial Sequence
  Description of Artificial Sequence: Synthetic oligonucleotide
ugaugggacgagagauccu

SEQ ID NO: 837557 - RNA, 19 nt, Artificial Sequence
  Description of Artificial Sequence: Synthetic oligonucleotide
guacaccucuugcauucgc

SEQ ID NO: 837558 - RNA, 19 nt, Artificial Sequence
  Description of Artificial Sequence: Synthetic oligonucleotide
guucggcagaccgaggcug

SEQ ID NO: 837559 - RNA, 19 nt, Artificial Sequence
  Description of Artificial Sequence: Synthetic oligonucleotide
guaaccaucugaaucguau

SEQ ID NO: 837560 - RNA, 19 nt, Artificial Sequence
  Description of Artificial Sequence: Synthetic oligonucleotide
cacuagguuuccuguccag

SEQ ID NO: 837561 - RNA, 19 nt, Artificial Sequence
  Description of Artificial Sequence: Synthetic oligonucleotide
acaguauguccuucauuua

SEQ ID NO: 837562 - RNA, 19 nt, Artificial Sequence
  Description of Artificial Sequence: Synthetic oligonucleotide
agggcgaagcccuucucau

SEQ ID NO: 837563 - RNA, 19 nt, Artificial Sequence
  Description of Artificial Sequence: Synthetic oligonucleotide
cuuaaggcgaugcaagcau

SEQ ID NO: 837564 - RNA, 19 nt, Artificial Sequence
  Description of Artificial Sequence: Synthetic oligonucleotide
uucgggagugagccacuga

SEQ ID NO: 837565 - RNA, 19 nt, Artificial Sequence
  Description of Artificial Sequence: Synthetic oligonucleotide
cacccggcgagcgaagucc

SEQ ID NO: 837566 - RNA, 19 nt, Artificial Sequence
  Description of Artificial Sequence: Synthetic oligonucleotide
caucgcagucacgggaugc

SEQ ID NO: 837567 - RNA, 19 nt, Artificial Sequence
  Description of Artificial Sequence: Synthetic oligonucleotide
ggguucggcagaccgaggc

SEQ ID NO: 837568 - RNA, 19 nt, Artificial Sequence
  Description of Artificial Sequence: Synthetic oligonucleotide
ugugccccaaugggagagg

SEQ ID NO: 837569 - RNA, 19 nt, Artificial Sequence
  Description of Artificial Sequence: Synthetic oligonucleotide
uccgccguaagggaaggau

SEQ ID NO: 837570 - RNA, 19 nt, Artificial Sequence
  Description of Artificial Sequence: Synthetic oligonucleotide
cgaugcaagcauuugucag

SEQ ID NO: 837571 - RNA, 19 nt, Artificial Sequence
  Description of Artificial Sequence: Synthetic oligonucleotide
ggcauuccaaucaacuuga

SEQ ID NO: 837572 - RNA, 19 nt, Artificial Sequence
  Description of Artificial Sequence: Synthetic oligonucleotide
uucugggagauccgucgua

SEQ ID NO: 837573 - RNA, 19 nt, Artificial Sequence
  Description of Artificial Sequence: Synthetic oligonucleotide
acgguaugggaacccucug

SEQ ID NO: 837574 - RNA, 19 nt, Artificial Sequence
  Description of Artificial Sequence: Synthetic oligonucleotide
cauucagcugaugggacga

SEQ ID NO: 837575 - RNA, 19 nt, Artificial Sequence
  Description of Artificial Sequence: Synthetic oligonucleotide
uguucgggagugagccacu

SEQ ID NO: 837576 - RNA, 19 nt, Artificial Sequence
  Description of Artificial Sequence: Synthetic oligonucleotide
gguaggcgcggacagcuug

SEQ ID NO: 837577 - RNA, 19 nt, Artificial Sequence
  Description of Artificial Sequence: Synthetic oligonucleotide
guagcacgguaugggaacc

SEQ ID NO: 837578 - RNA, 19 nt, Artificial Sequence
  Description of Artificial Sequence: Synthetic oligonucleotide
auuccgccguaagggaagg

SEQ ID NO: 837579 - RNA, 19 nt, Artificial Sequence
  Description of Artificial Sequence: Synthetic oligonucleotide
gucagagucauaucauaau

SEQ ID NO: 837580 - RNA, 19 nt, Artificial Sequence
  Description of Artificial Sequence: Synthetic oligonucleotide
ccaauagaucguacugccc

SEQ ID NO: 837581 - RNA, 19 nt, Artificial Sequence
  Description of Artificial Sequence: Synthetic oligonucleotide
uucgcuuuaugugccccaa

SEQ ID NO: 837582 - RNA, 19 nt, Artificial Sequence
  Description of Artificial Sequence: Synthetic oligonucleotide
agcgaaguccacgcugcag

SEQ ID NO: 837583 - RNA, 19 nt, Artificial Sequence
  Description of Artificial Sequence: Synthetic oligonucleotide
gaaguccacgcugcagcgc

SEQ ID NO: 837584 - RNA, 19 nt, Artificial Sequence
  Description of Artificial Sequence: Synthetic oligonucleotide
uggguucggcagaccgagg

SEQ ID NO: 837585 - RNA, 19 nt, Artificial Sequence
  Description of Artificial Sequence: Synthetic oligonucleotide
gggacgagagauccuucag

SEQ ID NO: 837586 - RNA, 19 nt, Artificial Sequence
  Description of Artificial Sequence: Synthetic oligonucleotide
guagaguaggagucacaaa

SEQ ID NO: 837587 - RNA, 19 nt, Artificial Sequence
  Description of Artificial Sequence: Synthetic oligonucleotide
gcugcagcgcagauggagg

SEQ ID NO: 837588 - RNA, 19 nt, Artificial Sequence
  Description of Artificial Sequence: Synthetic oligonucleotide
uaggcuacaucugggucua

SEQ ID NO: 837589 - RNA, 19 nt, Artificial Sequence
  Description of Artificial Sequence: Synthetic oligonucleotide
uaaugcgaucagguagcac

SEQ ID NO: 837590 - RNA, 19 nt, Artificial Sequence
  Description of Artificial Sequence: Synthetic oligonucleotide
cgccguaagggaaggaugg

SEQ ID NO: 837591 - RNA, 19 nt, Artificial Sequence
  Description of Artificial Sequence: Synthetic oligonucleotide
caacuaaugcgaucaggua

SEQ ID NO: 837592 - RNA, 19 nt, Artificial Sequence
  Description of Artificial Sequence: Synthetic oligonucleotide
ugccccaaugggagaggug

SEQ ID NO: 837593 - RNA, 19 nt, Artificial Sequence
  Description of Artificial Sequence: Synthetic oligonucleotide
cauagggcccucccagauc

SEQ ID NO: 837594 - RNA, 19 nt, Artificial Sequence
  Description of Artificial Sequence: Synthetic oligonucleotide
gguuugacuggaggcaggc

SEQ ID NO: 837595 - RNA, 19 nt, Artificial Sequence
  Description of Artificial Sequence: Synthetic oligonucleotide
cuugguaggcgcggacagc

SEQ ID NO: 837596 - RNA, 19 nt, Artificial Sequence
  Description of Artificial Sequence: Synthetic oligonucleotide
gaacuuaaguccuccucuu

SEQ ID NO: 837597 - RNA, 19 nt, Artificial Sequence
  Description of Artificial Sequence: Synthetic oligonucleotide
uuccaucggugacccuuug

SEQ ID NO: 837598 - RNA, 19 nt, Artificial Sequence
  Description of Artificial Sequence: Synthetic oligonucleotide
gugaucccagguuuuguua

SEQ ID NO: 837599 - RNA, 19 nt, Artificial Sequence
  Description of Artificial Sequence: Synthetic oligonucleotide
cauagggaauggaggaaua

SEQ ID NO: 837600 - RNA, 19 nt, Artificial Sequence
  Description of Artificial Sequence: Synthetic oligonucleotide
caucggugacccuuuguaa

SEQ ID NO: 837601 - RNA, 19 nt, Artificial Sequence
  Description of Artificial Sequence: Synthetic oligonucleotide
aucgcagucacgggaugca

SEQ ID NO: 837602 - RNA, 19 nt, Artificial Sequence
  Description of Artificial Sequence: Synthetic oligonucleotide
gcugcgcagauuauccucc

SEQ ID NO: 837603 - RNA, 19 nt, Artificial Sequence
  Description of Artificial Sequence: Synthetic oligonucleotide
ccaaucaacuugauugaga

SEQ ID NO: 837604 - RNA, 19 nt, Artificial Sequence
  Description of Artificial Sequence: Synthetic oligonucleotide
agccaggcauuccaaucaa

SEQ ID NO: 837605 - RNA, 19 nt, Artificial Sequence
  Description of Artificial Sequence: Synthetic oligonucleotide
gguuaguuucacagaagga

SEQ ID NO: 837606 - RNA, 19 nt, Artificial Sequence
  Description of Artificial Sequence: Synthetic oligonucleotide
uagcacgguaugggaaccc

SEQ ID NO: 837607 - RNA, 19 nt, Artificial Sequence
  Description of Artificial Sequence: Synthetic oligonucleotide
gcgcagauuauccuccuga

SEQ ID NO: 837608 - RNA, 19 nt, Artificial Sequence
  Description of Artificial Sequence: Synthetic oligonucleotide
gguaugggaacccucuggu

SEQ ID NO: 837609 - RNA, 19 nt, Artificial Sequence
  Description of Artificial Sequence: Synthetic oligonucleotide
acuugcgccaggaacucau

SEQ ID NO: 837610 - RNA, 19 nt, Artificial Sequence
  Description of Artificial Sequence: Synthetic oligonucleotide
uggaccaauuugccugcuu

SEQ ID NO: 837611 - RNA, 19 nt, Artificial Sequence
  Description of Artificial Sequence: Synthetic oligonucleotide
gaugggacgagagauccuu

SEQ ID NO: 837612 - RNA, 19 nt, Artificial Sequence
  Description of Artificial Sequence: Synthetic oligonucleotide
gcaguggauggccuggcac

SEQ ID NO: 837613 - RNA, 19 nt, Artificial Sequence
  Description of Artificial Sequence: Synthetic oligonucleotide
ucucuauuguaaggucuuu

SEQ ID NO: 837614 - RNA, 19 nt, Artificial Sequence
  Description of Artificial Sequence: Synthetic oligonucleotide
aggcugcgcagauuauccu

SEQ ID NO: 837615 - RNA, 19 nt, Artificial Sequence
  Description of Artificial Sequence: Synthetic oligonucleotide
cgaagcccuucucauaggg

SEQ ID NO: 837616 - RNA, 19 nt, Artificial Sequence
  Description of Artificial Sequence: Synthetic oligonucleotide
gaagcacuugcgccaggaa

SEQ ID NO: 837617 - RNA, 19 nt, Artificial Sequence
  Description of Artificial Sequence: Synthetic oligonucleotide
cagcaucgcagucacggga

SEQ ID NO: 837618 - RNA, 19 nt, Artificial Sequence
  Description of Artificial Sequence: Synthetic oligonucleotide
cccauuucgauugaaugca

SEQ ID NO: 837619 - RNA, 19 nt, Artificial Sequence
  Description of Artificial Sequence: Synthetic oligonucleotide
ccauuucgauugaaugcag

SEQ ID NO: 837620 - RNA, 19 nt, Artificial Sequence
  Description of Artificial Sequence: Synthetic oligonucleotide
gccaaggagcaagugucgg

SEQ ID NO: 837621 - RNA, 19 nt, Artificial Sequence
  Description of Artificial Sequence: Synthetic oligonucleotide
agcacgguaugggaacccu

SEQ ID NO: 837622 - RNA, 19 nt, Artificial Sequence
  Description of Artificial Sequence: Synthetic oligonucleotide
ccaagaguauauuugacuu

SEQ ID NO: 837623 - RNA, 19 nt, Artificial Sequence
  Description of Artificial Sequence: Synthetic oligonucleotide
agcaucgcagucacgggau

SEQ ID NO: 837624 - RNA, 19 nt, Artificial Sequence
  Description of Artificial Sequence: Synthetic oligonucleotide
cacgguaugggaacccucu

SEQ ID NO: 837625 - RNA, 19 nt, Artificial Sequence
  Description of Artificial Sequence: Synthetic oligonucleotide
ucgcuuuaugugccccaau

SEQ ID NO: 837626 - RNA, 19 nt, Artificial Sequence
  Description of Artificial Sequence: Synthetic oligonucleotide
augugacgcucuaaauaga

SEQ ID NO: 837627 - RNA, 19 nt, Artificial Sequence
  Description of Artificial Sequence: Synthetic oligonucleotide
aggcgcggacagcuugauc

SEQ ID NO: 837628 - RNA, 19 nt, Artificial Sequence
  Description of Artificial Sequence: Synthetic oligonucleotide
caguagaguaggagucaca

SEQ ID NO: 837629 - RNA, 19 nt, Artificial Sequence
  Description of Artificial Sequence: Synthetic oligonucleotide
ggcagugacccaucuuuga

SEQ ID NO: 837630 - RNA, 19 nt, Artificial Sequence
  Description of Artificial Sequence: Synthetic oligonucleotide
agguagcacgguaugggaa

SEQ ID NO: 837631 - RNA, 19 nt, Artificial Sequence
  Description of Artificial Sequence: Synthetic oligonucleotide
uggaggugcuggguucggc

SEQ ID NO: 837632 - RNA, 19 nt, Artificial Sequence
  Description of Artificial Sequence: Synthetic oligonucleotide
gcuugguaaagggaugaga

SEQ ID NO: 837633 - RNA, 19 nt, Artificial Sequence
  Description of Artificial Sequence: Synthetic oligonucleotide
gacgcucuaaauagacagu

SEQ ID NO: 837634 - RNA, 19 nt, Artificial Sequence
  Description of Artificial Sequence: Synthetic oligonucleotide
cccaaagcauggaaauguc

SEQ ID NO: 837635 - RNA, 19 nt, Artificial Sequence
  Description of Artificial Sequence: Synthetic oligonucleotide
auccgucguacgucagcca

SEQ ID NO: 837636 - RNA, 19 nt, Artificial Sequence
  Description of Artificial Sequence: Synthetic oligonucleotide
cacauagggcccucccaga

SEQ ID NO: 837637 - RNA, 19 nt, Artificial Sequence
  Description of Artificial Sequence: Synthetic oligonucleotide
ggagugucuuggcauggga

SEQ ID NO: 837638 - RNA, 19 nt, Artificial Sequence
  Description of Artificial Sequence: Synthetic oligonucleotide
gguccgagaugcugaacga

SEQ ID NO: 837639 - RNA, 19 nt, Artificial Sequence
  Description of Artificial Sequence: Synthetic oligonucleotide
gcauucgcuuuaugugccc

SEQ ID NO: 837640 - RNA, 19 nt, Artificial Sequence
  Description of Artificial Sequence: Synthetic oligonucleotide
gguuacacucuuguaggaa

SEQ ID NO: 837641 - RNA, 19 nt, Artificial Sequence
  Description of Artificial Sequence: Synthetic oligonucleotide
caauaacauuggagaguga

SEQ ID NO: 837642 - RNA, 19 nt, Artificial Sequence
  Description of Artificial Sequence: Synthetic oligonucleotide
ccagcaucgcagucacggg

SEQ ID NO: 837643 - RNA, 19 nt, Artificial Sequence
  Description of Artificial Sequence: Synthetic oligonucleotide
cucuugguaggcgcggaca

SEQ ID NO: 837644 - RNA, 19 nt, Artificial Sequence
  Description of Artificial Sequence: Synthetic oligonucleotide
ggcagaccgaggcuggaga

SEQ ID NO: 837645 - RNA, 19 nt, Artificial Sequence
  Description of Artificial Sequence: Synthetic oligonucleotide
ugcgaucagguagcacggu

SEQ ID NO: 837646 - RNA, 19 nt, Artificial Sequence
  Description of Artificial Sequence: Synthetic oligonucleotide
guucgggagugagccacug

SEQ ID NO: 837647 - RNA, 19 nt, Artificial Sequence
  Description of Artificial Sequence: Synthetic oligonucleotide
cugaaucguauuucagaau

SEQ ID NO: 837648 - RNA, 19 nt, Artificial Sequence
  Description of Artificial Sequence: Synthetic oligonucleotide
cuaaugcgaucagguagca

SEQ ID NO: 837649 - RNA, 19 nt, Artificial Sequence
  Description of Artificial Sequence: Synthetic oligonucleotide
gggaggacugcucugcagu

SEQ ID NO: 837650 - RNA, 19 nt, Artificial Sequence
  Description of Artificial Sequence: Synthetic oligonucleotide
uuggaccaauuugccugcu

SEQ ID NO: 837651 - RNA, 19 nt, Artificial Sequence
  Description of Artificial Sequence: Synthetic oligonucleotide
cuuuccccaccagcaucgc

SEQ ID NO: 837652 - RNA, 19 nt, Artificial Sequence
  Description of Artificial Sequence: Synthetic oligonucleotide
gagcgaaguccacgcugca

SEQ ID NO: 837653 - RNA, 19 nt, Artificial Sequence
  Description of Artificial Sequence: Synthetic oligonucleotide
gagcaagugucggcgaccu

SEQ ID NO: 837654 - RNA, 19 nt, Artificial Sequence
  Description of Artificial Sequence: Synthetic oligonucleotide
cacgggaugcauacuggcu

SEQ ID NO: 837655 - RNA, 19 nt, Artificial Sequence
  Description of Artificial Sequence: Synthetic oligonucleotide
ccggucagcacccggcgag

SEQ ID NO: 837656 - RNA, 19 nt, Artificial Sequence
  Description of Artificial Sequence: Synthetic oligonucleotide
ccgccguaagggaaggaug

SEQ ID NO: 837657 - RNA, 19 nt, Artificial Sequence
  Description of Artificial Sequence: Synthetic oligonucleotide
gggagauccgucguacguc

SEQ ID NO: 837658 - RNA, 19 nt, Artificial Sequence
  Description of Artificial Sequence: Synthetic oligonucleotide
gccguaagggaaggauggg

SEQ ID NO: 837659 - RNA, 19 nt, Artificial Sequence
  Description of Artificial Sequence: Synthetic oligonucleotide
guaggcgcggacagcuuga

SEQ ID NO: 837660 - RNA, 19 nt, Artificial Sequence
  Description of Artificial Sequence: Synthetic oligonucleotide
ggaccaauuugccugcuuu

SEQ ID NO: 837661 - RNA, 19 nt, Artificial Sequence
  Description of Artificial Sequence: Synthetic oligonucleotide
guucugggagauccgucgu

SEQ ID NO: 837662 - RNA, 19 nt, Artificial Sequence
  Description of Artificial Sequence: Synthetic oligonucleotide
gcggacagcuugaucauga

SEQ ID NO: 837663 - RNA, 19 nt, Artificial Sequence
  Description of Artificial Sequence: Synthetic oligonucleotide
gggaauacaggaaacccuu

SEQ ID NO: 837664 - RNA, 19 nt, Artificial Sequence
  Description of Artificial Sequence: Synthetic oligonucleotide
ggcagaaccaauagaucgu

SEQ ID NO: 837665 - RNA, 19 nt, Artificial Sequence
  Description of Artificial Sequence: Synthetic oligonucleotide
cagcacccagacacuccac

SEQ ID NO: 837666 - RNA, 19 nt, Artificial Sequence
  Description of Artificial Sequence: Synthetic oligonucleotide
guccgagaugcugaacgaa

SEQ ID NO: 837667 - RNA, 19 nt, Artificial Sequence
  Description of Artificial Sequence: Synthetic oligonucleotide
ugucggcgaccucgggcau

SEQ ID NO: 837668 - RNA, 19 nt, Artificial Sequence
  Description of Artificial Sequence: Synthetic oligonucleotide
ccaucggugacccuuugua

SEQ ID NO: 837669 - RNA, 19 nt, Artificial Sequence
  Description of Artificial Sequence: Synthetic oligonucleotide
ggcccucccagaucuucug

SEQ ID NO: 837670 - RNA, 19 nt, Artificial Sequence
  Description of Artificial Sequence: Synthetic oligonucleotide
cugcaauuuuaagcauaga

SEQ ID NO: 837671 - RNA, 19 nt, Artificial Sequence
  Description of Artificial Sequence: Synthetic oligonucleotide
cgaacuuaaguccuccucu

SEQ ID NO: 837672 - RNA, 19 nt, Artificial Sequence
  Description of Artificial Sequence: Synthetic oligonucleotide
ugguaggcgcggacagcuu

SEQ ID NO: 837673 - RNA, 19 nt, Artificial Sequence
  Description of Artificial Sequence: Synthetic oligonucleotide
gccaguagaguaggaguca

SEQ ID NO: 837674 - RNA, 19 nt, Artificial Sequence
  Description of Artificial Sequence: Synthetic oligonucleotide
gauuugggagaggucucau

SEQ ID NO: 837675 - RNA, 19 nt, Artificial Sequence
  Description of Artificial Sequence: Synthetic oligonucleotide
ggguucuccauuccgccgu

SEQ ID NO: 837676 - RNA, 19 nt, Artificial Sequence
  Description of Artificial Sequence: Synthetic oligonucleotide
gcagaaccaauagaucgua

SEQ ID NO: 837677 - RNA, 19 nt, Artificial Sequence
  Description of Artificial Sequence: Synthetic oligonucleotide
ccgucguacgucagccagc

SEQ ID NO: 837678 - RNA, 19 nt, Artificial Sequence
  Description of Artificial Sequence: Synthetic oligonucleotide
guccaccaagaaguugcuc

SEQ ID NO: 837679 - RNA, 19 nt, Artificial Sequence
  Description of Artificial Sequence: Synthetic oligonucleotide
gcaucgcagucacgggaug

SEQ ID NO: 837680 - RNA, 19 nt, Artificial Sequence
  Description of Artificial Sequence: Synthetic oligonucleotide
agcacccggcgagcgaagu

SEQ ID NO: 837681 - RNA, 19 nt, Artificial Sequence
  Description of Artificial Sequence: Synthetic oligonucleotide
gggauauuucaugugcaau

SEQ ID NO: 837682 - RNA, 19 nt, Artificial Sequence
  Description of Artificial Sequence: Synthetic oligonucleotide
ccggcgagcgaaguccacg

SEQ ID NO: 837683 - RNA, 19 nt, Artificial Sequence
  Description of Artificial Sequence: Synthetic oligonucleotide
guaugggaacccucugguu

SEQ ID NO: 837684 - RNA, 19 nt, Artificial Sequence
  Description of Artificial Sequence: Synthetic oligonucleotide
gagcgcggcggucccgguc

SEQ ID NO: 837685 - RNA, 19 nt, Artificial Sequence
  Description of Artificial Sequence: Synthetic oligonucleotide
gacggugagcgcggcgguc

SEQ ID NO: 837686 - RNA, 19 nt, Artificial Sequence
  Description of Artificial Sequence: Synthetic oligonucleotide
cuccaacaacuaaugcgau

SEQ ID NO: 837687 - RNA, 19 nt, Artificial Sequence
  Description of Artificial Sequence: Synthetic oligonucleotide
cccagaagucuguucggga

SEQ ID NO: 837688 - RNA, 19 nt, Artificial Sequence
  Description of Artificial Sequence: Synthetic oligonucleotide
cgggagugagccacugaag

SEQ ID NO: 837689 - RNA, 19 nt, Artificial Sequence
  Description of Artificial Sequence: Synthetic oligonucleotide
gcgaucagguagcacggua

SEQ ID NO: 837690 - RNA, 19 nt, Artificial Sequence
  Description of Artificial Sequence: Synthetic oligonucleotide
cggcgagcgaaguccacgc

SEQ ID NO: 837691 - RNA, 19 nt, Artificial Sequence
  Description of Artificial Sequence: Synthetic oligonucleotide
gucggcgaccucgggcaug

SEQ ID NO: 837692 - RNA, 19 nt, Artificial Sequence
  Description of Artificial Sequence: Synthetic oligonucleotide
cagguccgagaugcugaac

SEQ ID NO: 837693 - RNA, 19 nt, Artificial Sequence
  Description of Artificial Sequence: Synthetic oligonucleotide
ugagcgcggcggucccggu

SEQ ID NO: 837694 - RNA, 19 nt, Artificial Sequence
  Description of Artificial Sequence: Synthetic oligonucleotide
gauuuccaucggugacccu

SEQ ID NO: 837695 - RNA, 19 nt, Artificial Sequence
  Description of Artificial Sequence: Synthetic oligonucleotide
caccucuugcauucgcuuu

SEQ ID NO: 837696 - RNA, 19 nt, Artificial Sequence
  Description of Artificial Sequence: Synthetic oligonucleotide
gguucggcagaccgaggcu

SEQ ID NO: 837697 - RNA, 19 nt, Artificial Sequence
  Description of Artificial Sequence: Synthetic oligonucleotide
gugacccaucuuugacuua

SEQ ID NO: 837698 - RNA, 19 nt, Artificial Sequence
  Description of Artificial Sequence: Synthetic oligonucleotide
gucguacgucagccagcac

SEQ ID NO: 837699 - RNA, 19 nt, Artificial Sequence
  Description of Artificial Sequence: Synthetic oligonucleotide
ccgagaugcugaacgaacu

SEQ ID NO: 837700 - RNA, 19 nt, Artificial Sequence
  Description of Artificial Sequence: Synthetic oligonucleotide
ccuucucauagggaaugga

SEQ ID NO: 837701 - RNA, 19 nt, Artificial Sequence
  Description of Artificial Sequence: Synthetic oligonucleotide
gccaggcauuccaaucaac

SEQ ID NO: 837702 - RNA, 19 nt, Artificial Sequence
  Description of Artificial Sequence: Synthetic oligonucleotide
acccggcgagcgaagucca

SEQ ID NO: 837703 - RNA, 19 nt, Artificial Sequence
  Description of Artificial Sequence: Synthetic oligonucleotide
ccucugcgguguagguuag

SEQ ID NO: 837704 - RNA, 19 nt, Artificial Sequence
  Description of Artificial Sequence: Synthetic oligonucleotide
gcuggguucggcagaccga

SEQ ID NO: 837705 - RNA, 19 nt, Artificial Sequence
  Description of Artificial Sequence: Synthetic oligonucleotide
cugcgcagauuauccuccu

SEQ ID NO: 837706 - RNA, 19 nt, Artificial Sequence
  Description of Artificial Sequence: Synthetic oligonucleotide
caucucggauugcacucau

SEQ ID NO: 837707 - RNA, 19 nt, Artificial Sequence
  Description of Artificial Sequence: Synthetic oligonucleotide
ggcacugacugaagaggua

SEQ ID NO: 837708 - RNA, 19 nt, Artificial Sequence
  Description of Artificial Sequence: Synthetic oligonucleotide
gcacccggcgagcgaaguc

SEQ ID NO: 837709 - RNA, 19 nt, Artificial Sequence
  Description of Artificial Sequence: Synthetic oligonucleotide
cacuugcgccaggaacuca

SEQ ID NO: 837710 - RNA, 19 nt, Artificial Sequence
  Description of Artificial Sequence: Synthetic oligonucleotide
guucuccauuccgccguaa

SEQ ID NO: 837711 - RNA, 19 nt, Artificial Sequence
  Description of Artificial Sequence: Synthetic oligonucleotide
gcggcggucccggucagca

SEQ ID NO: 837712 - RNA, 19 nt, Artificial Sequence
  Description of Artificial Sequence: Synthetic oligonucleotide
gguucuccauuccgccgua

SEQ ID NO: 837713 - RNA, 19 nt, Artificial Sequence
  Description of Artificial Sequence: Synthetic oligonucleotide
gcggucccggucagcaccc

SEQ ID NO: 837714 - RNA, 19 nt, Artificial Sequence
  Description of Artificial Sequence: Synthetic oligonucleotide
gggcgaagcccuucucaua

SEQ ID NO: 837715 - RNA, 19 nt, Artificial Sequence
  Description of Artificial Sequence: Synthetic oligonucleotide
gugccccaaugggagaggu

SEQ ID NO: 837716 - RNA, 19 nt, Artificial Sequence
  Description of Artificial Sequence: Synthetic oligonucleotide
cgauugaaugcagagccgu

SEQ ID NO: 837717 - RNA, 19 nt, Artificial Sequence
  Description of Artificial Sequence: Synthetic oligonucleotide
cgucguacgucagccagca

SEQ ID NO: 837718 - RNA, 19 nt, Artificial Sequence
  Description of Artificial Sequence: Synthetic oligonucleotide
cuugcgccaggaacucauu

SEQ ID NO: 837719 - RNA, 19 nt, Artificial Sequence
  Description of Artificial Sequence: Synthetic oligonucleotide
cgaucagguagcacgguau

SEQ ID NO: 837720 - RNA, 19 nt, Artificial Sequence
  Description of Artificial Sequence: Synthetic oligonucleotide
gggaugcauacuggcuuua

SEQ ID NO: 837721 - RNA, 19 nt, Artificial Sequence
  Description of Artificial Sequence: Synthetic oligonucleotide
cagacaccucugcggugua

SEQ ID NO: 837722 - RNA, 19 nt, Artificial Sequence
  Description of Artificial Sequence: Synthetic oligonucleotide
ggcgagcgaaguccacgcu

SEQ ID NO: 837723 - RNA, 19 nt, Artificial Sequence
  Description of Artificial Sequence: Synthetic oligonucleotide
cguaaccaucugaaucgua

SEQ ID NO: 837724 - RNA, 19 nt, Artificial Sequence
  Description of Artificial Sequence: Synthetic oligonucleotide
cccggcgagcgaaguccac

SEQ ID NO: 837725 - RNA, 19 nt, Artificial Sequence
  Description of Artificial Sequence: Synthetic oligonucleotide
ggacggugagcgcggcggu

SEQ ID NO: 837726 - RNA, 19 nt, Artificial Sequence
  Description of Artificial Sequence: Synthetic oligonucleotide
cgcggacagcuugaucaug

SEQ ID NO: 837727 - RNA, 19 nt, Artificial Sequence
  Description of Artificial Sequence: Synthetic oligonucleotide
cagucacgggaugcauacu

SEQ ID NO: 837728 - RNA, 19 nt, Artificial Sequence
  Description of Artificial Sequence: Synthetic oligonucleotide
cggcagaccgaggcuggag

SEQ ID NO: 837729 - RNA, 19 nt, Artificial Sequence
  Description of Artificial Sequence: Synthetic oligonucleotide
gcgcggacagcuugaucau

SEQ ID NO: 837730 - RNA, 19 nt, Artificial Sequence
  Description of Artificial Sequence: Synthetic oligonucleotide
gggcccucccagaucuucu

SEQ ID NO: 837731 - RNA, 19 nt, Artificial Sequence
  Description of Artificial Sequence: Synthetic oligonucleotide
cccggucagcacccggcga

SEQ ID NO: 837732 - RNA, 19 nt, Artificial Sequence
  Description of Artificial Sequence: Synthetic oligonucleotide
cccagaucuucugcaauuu

SEQ ID NO: 837733 - RNA, 19 nt, Artificial Sequence
  Description of Artificial Sequence: Synthetic oligonucleotide
ccguaaccaucugaaucgu

SEQ ID NO: 837734 - RNA, 19 nt, Artificial Sequence
  Description of Artificial Sequence: Synthetic oligonucleotide
gcgcggcggucccggucag

SEQ ID NO: 837735 - RNA, 19 nt, Artificial Sequence
  Description of Artificial Sequence: Synthetic oligonucleotide
cgggaugcauacuggcuuu

SEQ ID NO: 837736 - RNA, 19 nt, Artificial Sequence
  Description of Artificial Sequence: Synthetic oligonucleotide
cccaaugggagaggugcuu

SEQ ID NO: 837737 - RNA, 19 nt, Artificial Sequence
  Description of Artificial Sequence: Synthetic oligonucleotide
cgcggcggucccggucagc

SEQ ID NO: 837738 - RNA, 19 nt, Artificial Sequence
  Description of Artificial Sequence: Synthetic oligonucleotide
aguuccauaauccggauac

SEQ ID NO: 837739 - RNA, 19 nt, Artificial Sequence
  Description of Artificial Sequence: Synthetic oligonucleotide
auuuguuaguuccuggggc

SEQ ID NO: 837740 - RNA, 19 nt, Artificial Sequence
  Description of Artificial Sequence: Synthetic oligonucleotide
aauucugacguccaguugu

SEQ ID NO: 837741 - RNA, 19 nt, Artificial Sequence
  Description of Artificial Sequence: Synthetic oligonucleotide
agcggcaucaaucacacac

SEQ ID NO: 837742 - RNA, 19 nt, Artificial Sequence
  Description of Artificial Sequence: Synthetic oligonucleotide
auagggugaacaucaaagc

SEQ ID NO: 837743 - RNA, 19 nt, Artificial Sequence
  Description of Artificial Sequence: Synthetic oligonucleotide
ucauaacuacuucuggagg

SEQ ID NO: 837744 - RNA, 19 nt, Artificial Sequence
  Description of Artificial Sequence: Synthetic oligonucleotide
ugugcaagcggucaaaagu

SEQ ID NO: 837745 - RNA, 19 nt, Artificial Sequence
  Description of Artificial Sequence: Synthetic oligonucleotide
ucuacaauccgacguacag

SEQ ID NO: 837746 - RNA, 19 nt, Artificial Sequence
  Description of Artificial Sequence: Synthetic oligonucleotide
cugagcaacacuuuauggg

SEQ ID NO: 837747 - RNA, 19 nt, Artificial Sequence
  Description of Artificial Sequence: Synthetic oligonucleotide
ggugugauugaccagacgg

SEQ ID NO: 837748 - RNA, 19 nt, Artificial Sequence
  Description of Artificial Sequence: Synthetic oligonucleotide
cuagguguuguuuaacagg

SEQ ID NO: 837749 - RNA, 19 nt, Artificial Sequence
  Description of Artificial Sequence: Synthetic oligonucleotide
gauuuguuaguuccugggg

SEQ ID NO: 837750 - RNA, 19 nt, Artificial Sequence
  Description of Artificial Sequence: Synthetic oligonucleotide
accauauucugccagccgg

SEQ ID NO: 837751 - RNA, 19 nt, Artificial Sequence
  Description of Artificial Sequence: Synthetic oligonucleotide
cugguauaaggcaaguucc

SEQ ID NO: 837752 - RNA, 19 nt, Artificial Sequence
  Description of Artificial Sequence: Synthetic oligonucleotide
uucaacagaucuuugucug

SEQ ID NO: 837753 - RNA, 19 nt, Artificial Sequence
  Description of Artificial Sequence: Synthetic oligonucleotide
ggucugaugagucuuaggg

SEQ ID NO: 837754 - RNA, 19 nt, Artificial Sequence
  Description of Artificial Sequence: Synthetic oligonucleotide
acagcuuagcuugaggccc

SEQ ID NO: 837755 - RNA, 19 nt, Artificial Sequence
  Description of Artificial Sequence: Synthetic oligonucleotide
ucuagguguuguuuaacag

SEQ ID NO: 837756 - RNA, 19 nt, Artificial Sequence
  Description of Artificial Sequence: Synthetic oligonucleotide
uguacuggcucccauccag

SEQ ID NO: 837757 - RNA, 19 nt, Artificial Sequence
  Description of Artificial Sequence: Synthetic oligonucleotide
uuuggcaccacagaaaauc

SEQ ID NO: 837758 - RNA, 19 nt, Artificial Sequence
  Description of Artificial Sequence: Synthetic oligonucleotide
cuuucccuuagucacagcc

SEQ ID NO: 837759 - RNA, 19 nt, Artificial Sequence
  Description of Artificial Sequence: Synthetic oligonucleotide
ugagcuacugagcuuuucc

SEQ ID NO: 837760 - RNA, 19 nt, Artificial Sequence
  Description of Artificial Sequence: Synthetic oligonucleotide
gauacagcaagacacuaga

SEQ ID NO: 837761 - RNA, 19 nt, Artificial Sequence
  Description of Artificial Sequence: Synthetic oligonucleotide
ugauucugguccuucauca

SEQ ID NO: 837762 - RNA, 19 nt, Artificial Sequence
  Description of Artificial Sequence: Synthetic oligonucleotide
uuuauggagaauaucuguu

SEQ ID NO: 837763 - RNA, 19 nt, Artificial Sequence
  Description of Artificial Sequence: Synthetic oligonucleotide
auaauccggauacagcaag

SEQ ID NO: 837764 - RNA, 19 nt, Artificial Sequence
  Description of Artificial Sequence: Synthetic oligonucleotide
cucacugcuggccaaaugc

SEQ ID NO: 837765 - RNA, 19 nt, Artificial Sequence
  Description of Artificial Sequence: Synthetic oligonucleotide
uuguaucugguauaaggca

SEQ ID NO: 837766 - RNA, 19 nt, Artificial Sequence
  Description of Artificial Sequence: Synthetic oligonucleotide
uagagggugugauugacca

SEQ ID NO: 837767 - RNA, 19 nt, Artificial Sequence
  Description of Artificial Sequence: Synthetic oligonucleotide
uccgucauaacuacuucug

SEQ ID NO: 837768 - RNA, 19 nt, Artificial Sequence
  Description of Artificial Sequence: Synthetic oligonucleotide
guacagcuuagcuugaggc

SEQ ID NO: 837769 - RNA, 19 nt, Artificial Sequence
  Description of Artificial Sequence: Synthetic oligonucleotide
aacuacuucuggaggaugg

SEQ ID NO: 837770 - RNA, 19 nt, Artificial Sequence
  Description of Artificial Sequence: Synthetic oligonucleotide
uccauaauccggauacagc

SEQ ID NO: 837771 - RNA, 19 nt, Artificial Sequence
  Description of Artificial Sequence: Synthetic oligonucleotide
uggucaguaaaauucugac

SEQ ID NO: 837772 - RNA, 19 nt, Artificial Sequence
  Description of Artificial Sequence: Synthetic oligonucleotide
uguagaagacuccaggcuu

SEQ ID NO: 837773 - RNA, 19 nt, Artificial Sequence
  Description of Artificial Sequence: Synthetic oligonucleotide
uuaacaggguuguacuggc

SEQ ID NO: 837774 - RNA, 19 nt, Artificial Sequence
  Description of Artificial Sequence: Synthetic oligonucleotide
uguaccauauucugccagc

SEQ ID NO: 837775 - RNA, 19 nt, Artificial Sequence
  Description of Artificial Sequence: Synthetic oligonucleotide
aaggcaaguuccuccuuuc

SEQ ID NO: 837776 - RNA, 19 nt, Artificial Sequence
  Description of Artificial Sequence: Synthetic oligonucleotide
uguuguuuaacaggguugu

SEQ ID NO: 837777 - RNA, 19 nt, Artificial Sequence
  Description of Artificial Sequence: Synthetic oligonucleotide
aaguccauuuccucccgag

SEQ ID NO: 837778 - RNA, 19 nt, Artificial Sequence
  Description of Artificial Sequence: Synthetic oligonucleotide
uacagcuuagcuugaggcc

SEQ ID NO: 837779 - RNA, 19 nt, Artificial Sequence
  Description of Artificial Sequence: Synthetic oligonucleotide
gauuuggaggcugaagcag

SEQ ID NO: 837780 - RNA, 19 nt, Artificial Sequence
  Description of Artificial Sequence: Synthetic oligonucleotide
caguacacaugcaacacug

SEQ ID NO: 837781 - RNA, 19 nt, Artificial Sequence
  Description of Artificial Sequence: Synthetic oligonucleotide
uggaaguccgucauaacua

SEQ ID NO: 837782 - RNA, 19 nt, Artificial Sequence
  Description of Artificial Sequence: Synthetic oligonucleotide
ccaaaugccagcaugcuag

SEQ ID NO: 837783 - RNA, 19 nt, Artificial Sequence
  Description of Artificial Sequence: Synthetic oligonucleotide
agcauagcggcaucaauca

SEQ ID NO: 837784 - RNA, 19 nt, Artificial Sequence
  Description of Artificial Sequence: Synthetic oligonucleotide
aacacugagcaacacuuua

SEQ ID NO: 837785 - RNA, 19 nt, Artificial Sequence
  Description of Artificial Sequence: Synthetic oligonucleotide
ugcuaggcagacuuccggg

SEQ ID NO: 837786 - RNA, 19 nt, Artificial Sequence
  Description of Artificial Sequence: Synthetic oligonucleotide
acucggggacuccacaggc

SEQ ID NO: 837787 - RNA, 19 nt, Artificial Sequence
  Description of Artificial Sequence: Synthetic oligonucleotide
ggauuuguuaguuccuggg

SEQ ID NO: 837788 - RNA, 19 nt, Artificial Sequence
  Description of Artificial Sequence: Synthetic oligonucleotide
cacauagagggugugauug

SEQ ID NO: 837789 - RNA, 19 nt, Artificial Sequence
  Description of Artificial Sequence: Synthetic oligonucleotide
ggucaguaaaauucugacg

SEQ ID NO: 837790 - RNA, 19 nt, Artificial Sequence
  Description of Artificial Sequence: Synthetic oligonucleotide
ugguccacaccucauguac

SEQ ID NO: 837791 - RNA, 19 nt, Artificial Sequence
  Description of Artificial Sequence: Synthetic oligonucleotide
ugugauugaccagacgggc

SEQ ID NO: 837792 - RNA, 19 nt, Artificial Sequence
  Description of Artificial Sequence: Synthetic oligonucleotide
uuuccaauaacuggccaca

SEQ ID NO: 837793 - RNA, 19 nt, Artificial Sequence
  Description of Artificial Sequence: Synthetic oligonucleotide
ggcccgauggcccagaagg

SEQ ID NO: 837794 - RNA, 19 nt, Artificial Sequence
  Description of Artificial Sequence: Synthetic oligonucleotide
acaacugguggcauagcgc

SEQ ID NO: 837795 - RNA, 19 nt, Artificial Sequence
  Description of Artificial Sequence: Synthetic oligonucleotide
aagacacuagacaacugug

SEQ ID NO: 837796 - RNA, 19 nt, Artificial Sequence
  Description of Artificial Sequence: Synthetic oligonucleotide
gggagcauaggcccgaugg

SEQ ID NO: 837797 - RNA, 19 nt, Artificial Sequence
  Description of Artificial Sequence: Synthetic oligonucleotide
gacagaacccuacgagggg

SEQ ID NO: 837798 - RNA, 19 nt, Artificial Sequence
  Description of Artificial Sequence: Synthetic oligonucleotide
ucuccguaaggcuggagca

SEQ ID NO: 837799 - RNA, 19 nt, Artificial Sequence
  Description of Artificial Sequence: Synthetic oligonucleotide
aacccuacgaggggacugc

SEQ ID NO: 837800 - RNA, 19 nt, Artificial Sequence
  Description of Artificial Sequence: Synthetic oligonucleotide
ugguauaaggcaaguuccu

SEQ ID NO: 837801 - RNA, 19 nt, Artificial Sequence
  Description of Artificial Sequence: Synthetic oligonucleotide
aggguaagagggcacucgg

SEQ ID NO: 837802 - RNA, 19 nt, Artificial Sequence
  Description of Artificial Sequence: Synthetic oligonucleotide
cucuccguaaggcuggagc

SEQ ID NO: 837803 - RNA, 19 nt, Artificial Sequence
  Description of Artificial Sequence: Synthetic oligonucleotide
ugaugagucuuagggaggc

SEQ ID NO: 837804 - RNA, 19 nt, Artificial Sequence
  Description of Artificial Sequence: Synthetic oligonucleotide
aguccgucauaacuacuuc

SEQ ID NO: 837805 - RNA, 19 nt, Artificial Sequence
  Description of Artificial Sequence: Synthetic oligonucleotide
uucccuuagucacagccaa

SEQ ID NO: 837806 - RNA, 19 nt, Artificial Sequence
  Description of Artificial Sequence: Synthetic oligonucleotide
uggcaaccggugaagcugg

SEQ ID NO: 837807 - RNA, 19 nt, Artificial Sequence
  Description of Artificial Sequence: Synthetic oligonucleotide
agcaagacacuagacaacu

SEQ ID NO: 837808 - RNA, 19 nt, Artificial Sequence
  Description of Artificial Sequence: Synthetic oligonucleotide
agaauccgcugacguaagc

SEQ ID NO: 837809 - RNA, 19 nt, Artificial Sequence
  Description of Artificial Sequence: Synthetic oligonucleotide
ugcaagcggucaaaagugc

SEQ ID NO: 837810 - RNA, 19 nt, Artificial Sequence
  Description of Artificial Sequence: Synthetic oligonucleotide
cagcauagcggcaucaauc

SEQ ID NO: 837811 - RNA, 19 nt, Artificial Sequence
  Description of Artificial Sequence: Synthetic oligonucleotide
ugauggugccaucuuuaug

SEQ ID NO: 837812 - RNA, 19 nt, Artificial Sequence
  Description of Artificial Sequence: Synthetic oligonucleotide
uuccggguuucucucugcg

SEQ ID NO: 837813 - RNA, 19 nt, Artificial Sequence
  Description of Artificial Sequence: Synthetic oligonucleotide
aggcggaagcgguugacgg

SEQ ID NO: 837814 - RNA, 19 nt, Artificial Sequence
  Description of Artificial Sequence: Synthetic oligonucleotide
uaauccggauacagcaaga

SEQ ID NO: 837815 - RNA, 19 nt, Artificial Sequence
  Description of Artificial Sequence: Synthetic oligonucleotide
uugugcaagcggucaaaag

SEQ ID NO: 837816 - RNA, 19 nt, Artificial Sequence
  Description of Artificial Sequence: Synthetic oligonucleotide
augcccgguugccaggugc

SEQ ID NO: 837817 - RNA, 19 nt, Artificial Sequence
  Description of Artificial Sequence: Synthetic oligonucleotide
gacaaugguccacaccuca

SEQ ID NO: 837818 - RNA, 19 nt, Artificial Sequence
  Description of Artificial Sequence: Synthetic oligonucleotide
aaggcggaagcgguugacg

SEQ ID NO: 837819 - RNA, 19 nt, Artificial Sequence
  Description of Artificial Sequence: Synthetic oligonucleotide
cuagacaacugugaacaac

SEQ ID NO: 837820 - RNA, 19 nt, Artificial Sequence
  Description of Artificial Sequence: Synthetic oligonucleotide
uuaugggcauugugcaagc

SEQ ID NO: 837821 - RNA, 19 nt, Artificial Sequence
  Description of Artificial Sequence: Synthetic oligonucleotide
ucaccgcgggauuuguuag

SEQ ID NO: 837822 - RNA, 19 nt, Artificial Sequence
  Description of Artificial Sequence: Synthetic oligonucleotide
gugugauugaccagacggg

SEQ ID NO: 837823 - RNA, 19 nt, Artificial Sequence
  Description of Artificial Sequence: Synthetic oligonucleotide
caauccgacguacagccuc

SEQ ID NO: 837824 - RNA, 19 nt, Artificial Sequence
  Description of Artificial Sequence: Synthetic oligonucleotide
ugcuucgcucaauccaucc

SEQ ID NO: 837825 - RNA, 19 nt, Artificial Sequence
  Description of Artificial Sequence: Synthetic oligonucleotide
ugagucuuagggaggcggu

SEQ ID NO: 837826 - RNA, 19 nt, Artificial Sequence
  Description of Artificial Sequence: Synthetic oligonucleotide
uggagaauaucuguuccaa

SEQ ID NO: 837827 - RNA, 19 nt, Artificial Sequence
  Description of Artificial Sequence: Synthetic oligonucleotide
agcggucaaaagugccacc

SEQ ID NO: 837828 - RNA, 19 nt, Artificial Sequence
  Description of Artificial Sequence: Synthetic oligonucleotide
gugcaagcggucaaaagug

SEQ ID NO: 837829 - RNA, 19 nt, Artificial Sequence
  Description of Artificial Sequence: Synthetic oligonucleotide
ccaagguggggucagaccc

SEQ ID NO: 837830 - RNA, 19 nt, Artificial Sequence
  Description of Artificial Sequence: Synthetic oligonucleotide
ugugacuugcggcucccac

SEQ ID NO: 837831 - RNA, 19 nt, Artificial Sequence
  Description of Artificial Sequence: Synthetic oligonucleotide
ggacagaacccuacgaggg

SEQ ID NO: 837832 - RNA, 19 nt, Artificial Sequence
  Description of Artificial Sequence: Synthetic oligonucleotide
ucccucucuacaauccgac

SEQ ID NO: 837833 - RNA, 19 nt, Artificial Sequence
  Description of Artificial Sequence: Synthetic oligonucleotide
uguaacaacugguggcaua

SEQ ID NO: 837834 - RNA, 19 nt, Artificial Sequence
  Description of Artificial Sequence: Synthetic oligonucleotide
gcuacugagcuuuucccag

SEQ ID NO: 837835 - RNA, 19 nt, Artificial Sequence
  Description of Artificial Sequence: Synthetic oligonucleotide
gaggccagagcggaauacg

SEQ ID NO: 837836 - RNA, 19 nt, Artificial Sequence
  Description of Artificial Sequence: Synthetic oligonucleotide
gagcauaggcccgauggcc

SEQ ID NO: 837837 - RNA, 19 nt, Artificial Sequence
  Description of Artificial Sequence: Synthetic oligonucleotide
gaacuucaaagguggccug

SEQ ID NO: 837838 - RNA, 19 nt, Artificial Sequence
  Description of Artificial Sequence: Synthetic oligonucleotide
aaguccgucauaacuacuu

SEQ ID NO: 837839 - RNA, 19 nt, Artificial Sequence
  Description of Artificial Sequence: Synthetic oligonucleotide
ucuggcaaccggugaagcu

SEQ ID NO: 837840 - RNA, 19 nt, Artificial Sequence
  Description of Artificial Sequence: Synthetic oligonucleotide
cucuagguguuguuuaaca

SEQ ID NO: 837841 - RNA, 19 nt, Artificial Sequence
  Description of Artificial Sequence: Synthetic oligonucleotide
cacauggcuaugcuccacc

SEQ ID NO: 837842 - RNA, 19 nt, Artificial Sequence
  Description of Artificial Sequence: Synthetic oligonucleotide
aggaacuccaagguggggu

SEQ ID NO: 837843 - RNA, 19 nt, Artificial Sequence
  Description of Artificial Sequence: Synthetic oligonucleotide
accuuccuauugauggugc

SEQ ID NO: 837844 - RNA, 19 nt, Artificial Sequence
  Description of Artificial Sequence: Synthetic oligonucleotide
accgcuguagaagugugug

SEQ ID NO: 837845 - RNA, 19 nt, Artificial Sequence
  Description of Artificial Sequence: Synthetic oligonucleotide
ugcccgucagcccaagcac

SEQ ID NO: 837846 - RNA, 19 nt, Artificial Sequence
  Description of Artificial Sequence: Synthetic oligonucleotide
augcccgucagcccaagca

SEQ ID NO: 837847 - RNA, 19 nt, Artificial Sequence
  Description of Artificial Sequence: Synthetic oligonucleotide
uuccuauugauggugccau

SEQ ID NO: 837848 - RNA, 19 nt, Artificial Sequence
  Description of Artificial Sequence: Synthetic oligonucleotide
cagcccaagcacauagagc

SEQ ID NO: 837849 - RNA, 19 nt, Artificial Sequence
  Description of Artificial Sequence: Synthetic oligonucleotide
uccaucccucucuacaauc

SEQ ID NO: 837850 - RNA, 19 nt, Artificial Sequence
  Description of Artificial Sequence: Synthetic oligonucleotide
aucuggcaaccggugaagc

SEQ ID NO: 837851 - RNA, 19 nt, Artificial Sequence
  Description of Artificial Sequence: Synthetic oligonucleotide
auccggauacagcaagaca

SEQ ID NO: 837852 - RNA, 19 nt, Artificial Sequence
  Description of Artificial Sequence: Synthetic oligonucleotide
ucggcaccgcuguagaagu

SEQ ID NO: 837853 - RNA, 19 nt, Artificial Sequence
  Description of Artificial Sequence: Synthetic oligonucleotide
cuggcaaccggugaagcug

SEQ ID NO: 837854 - RNA, 19 nt, Artificial Sequence
  Description of Artificial Sequence: Synthetic oligonucleotide
acauagagggugugauuga

SEQ ID NO: 837855 - RNA, 19 nt, Artificial Sequence
  Description of Artificial Sequence: Synthetic oligonucleotide
gaucuggcaaccggugaag

SEQ ID NO: 837856 - RNA, 19 nt, Artificial Sequence
  Description of Artificial Sequence: Synthetic oligonucleotide
uccguaaggcuggagcagc

SEQ ID NO: 837857 - RNA, 19 nt, Artificial Sequence
  Description of Artificial Sequence: Synthetic oligonucleotide
agacacuagacaacuguga

SEQ ID NO: 837858 - RNA, 19 nt, Artificial Sequence
  Description of Artificial Sequence: Synthetic oligonucleotide
caagacacuagacaacugu

SEQ ID NO: 837859 - RNA, 19 nt, Artificial Sequence
  Description of Artificial Sequence: Synthetic oligonucleotide
cauagagggugugauugac

SEQ ID NO: 837860 - RNA, 19 nt, Artificial Sequence
  Description of Artificial Sequence: Synthetic oligonucleotide
uccgcugacguaagcugga

SEQ ID NO: 837861 - RNA, 19 nt, Artificial Sequence
  Description of Artificial Sequence: Synthetic oligonucleotide
guaccauauucugccagcc

SEQ ID NO: 837862 - RNA, 19 nt, Artificial Sequence
  Description of Artificial Sequence: Synthetic oligonucleotide
gguugccaggugcacauag

SEQ ID NO: 837863 - RNA, 19 nt, Artificial Sequence
  Description of Artificial Sequence: Synthetic oligonucleotide
gguagccacgcacaggcug

SEQ ID NO: 837864 - RNA, 19 nt, Artificial Sequence
  Description of Artificial Sequence: Synthetic oligonucleotide
ucucuacaauccgacguac

SEQ ID NO: 837865 - RNA, 19 nt, Artificial Sequence
  Description of Artificial Sequence: Synthetic oligonucleotide
gaugagucuuagggaggcg

SEQ ID NO: 837866 - RNA, 19 nt, Artificial Sequence
  Description of Artificial Sequence: Synthetic oligonucleotide
uucgcucaauccaucccuc

SEQ ID NO: 837867 - RNA, 19 nt, Artificial Sequence
  Description of Artificial Sequence: Synthetic oligonucleotide
ucaaggcggaagcgguuga

SEQ ID NO: 837868 - RNA, 19 nt, Artificial Sequence
  Description of Artificial Sequence: Synthetic oligonucleotide
guuggucaguaaaauucug

SEQ ID NO: 837869 - RNA, 19 nt, Artificial Sequence
  Description of Artificial Sequence: Synthetic oligonucleotide
cauggcuaugcuccaccag

SEQ ID NO: 837870 - RNA, 19 nt, Artificial Sequence
  Description of Artificial Sequence: Synthetic oligonucleotide
cuugaggccccuuaggccu

SEQ ID NO: 837871 - RNA, 19 nt, Artificial Sequence
  Description of Artificial Sequence: Synthetic oligonucleotide
ucuggaaguccgucauaac

SEQ ID NO: 837872 - RNA, 19 nt, Artificial Sequence
  Description of Artificial Sequence: Synthetic oligonucleotide
gggugaacaucaaagcccc

SEQ ID NO: 837873 - RNA, 19 nt, Artificial Sequence
  Description of Artificial Sequence: Synthetic oligonucleotide
ucccuuagucacagccaag

SEQ ID NO: 837874 - RNA, 19 nt, Artificial Sequence
  Description of Artificial Sequence: Synthetic oligonucleotide
cacacgcucuccguaaggc

SEQ ID NO: 837875 - RNA, 19 nt, Artificial Sequence
  Description of Artificial Sequence: Synthetic oligonucleotide
aauccgacguacagccuca

SEQ ID NO: 837876 - RNA, 19 nt, Artificial Sequence
  Description of Artificial Sequence: Synthetic oligonucleotide
gggacugcuccccacuuag

SEQ ID NO: 837877 - RNA, 19 nt, Artificial Sequence
  Description of Artificial Sequence: Synthetic oligonucleotide
gaacccuacgaggggacug

SEQ ID NO: 837878 - RNA, 19 nt, Artificial Sequence
  Description of Artificial Sequence: Synthetic oligonucleotide
cuggaaguccgucauaacu

SEQ ID NO: 837879 - RNA, 19 nt, Artificial Sequence
  Description of Artificial Sequence: Synthetic oligonucleotide
guccaugcccgguugccag

SEQ ID NO: 837880 - RNA, 19 nt, Artificial Sequence
  Description of Artificial Sequence: Synthetic oligonucleotide
acagaacccuacgagggga

SEQ ID NO: 837881 - RNA, 19 nt, Artificial Sequence
  Description of Artificial Sequence: Synthetic oligonucleotide
auucugacguccaguuguc

SEQ ID NO: 837882 - RNA, 19 nt, Artificial Sequence
  Description of Artificial Sequence: Synthetic oligonucleotide
cauaauccggauacagcaa

SEQ ID NO: 837883 - RNA, 19 nt, Artificial Sequence
  Description of Artificial Sequence: Synthetic oligonucleotide
guagccacgcacaggcugc

SEQ ID NO: 837884 - RNA, 19 nt, Artificial Sequence
  Description of Artificial Sequence: Synthetic oligonucleotide
ccacaaggugcugagaacc

SEQ ID NO: 837885 - RNA, 19 nt, Artificial Sequence
  Description of Artificial Sequence: Synthetic oligonucleotide
ugcguccuguacagcuuag

SEQ ID NO: 837886 - RNA, 19 nt, Artificial Sequence
  Description of Artificial Sequence: Synthetic oligonucleotide
aggccagagcggaauacgg

SEQ ID NO: 837887 - RNA, 19 nt, Artificial Sequence
  Description of Artificial Sequence: Synthetic oligonucleotide
guccacaccucauguacca

SEQ ID NO: 837888 - RNA, 19 nt, Artificial Sequence
  Description of Artificial Sequence: Synthetic oligonucleotide
caacugguggcauagcgcu

SEQ ID NO: 837889 - RNA, 19 nt, Artificial Sequence
  Description of Artificial Sequence: Synthetic oligonucleotide
cuacgaggggacugcuccc

SEQ ID NO: 837890 - RNA, 19 nt, Artificial Sequence
  Description of Artificial Sequence: Synthetic oligonucleotide
caaguccaugcccgguugc

SEQ ID NO: 837891 - RNA, 19 nt, Artificial Sequence
  Description of Artificial Sequence: Synthetic oligonucleotide
acuagacaacugugaacaa

SEQ ID NO: 837892 - RNA, 19 nt, Artificial Sequence
  Description of Artificial Sequence: Synthetic oligonucleotide
aaccggugaagcuggccuu

SEQ ID NO: 837893 - RNA, 19 nt, Artificial Sequence
  Description of Artificial Sequence: Synthetic oligonucleotide
ucaccgugauucugguccu

SEQ ID NO: 837894 - RNA, 19 nt, Artificial Sequence
  Description of Artificial Sequence: Synthetic oligonucleotide
gcuuuggagaucuggcaac

SEQ ID NO: 837895 - RNA, 19 nt, Artificial Sequence
  Description of Artificial Sequence: Synthetic oligonucleotide
accgugauucugguccuuc

SEQ ID NO: 837896 - RNA, 19 nt, Artificial Sequence
  Description of Artificial Sequence: Synthetic oligonucleotide
cagcuuagcuugaggcccc

SEQ ID NO: 837897 - RNA, 19 nt, Artificial Sequence
  Description of Artificial Sequence: Synthetic oligonucleotide
gaauccgcugacguaagcu

SEQ ID NO: 837898 - RNA, 19 nt, Artificial Sequence
  Description of Artificial Sequence: Synthetic oligonucleotide
gugacuugcggcucccaca

SEQ ID NO: 837899 - RNA, 19 nt, Artificial Sequence
  Description of Artificial Sequence: Synthetic oligonucleotide
ugcccgguugccaggugca

SEQ ID NO: 837900 - RNA, 19 nt, Artificial Sequence
  Description of Artificial Sequence: Synthetic oligonucleotide
uugaccagacgggccgccg

SEQ ID NO: 837901 - RNA, 19 nt, Artificial Sequence
  Description of Artificial Sequence: Synthetic oligonucleotide
cgcgggauuuguuaguucc

SEQ ID NO: 837902 - RNA, 19 nt, Artificial Sequence
  Description of Artificial Sequence: Synthetic oligonucleotide
cuuaugguggaggguaaga

SEQ ID NO: 837903 - RNA, 19 nt, Artificial Sequence
  Description of Artificial Sequence: Synthetic oligonucleotide
cagaacccuacgaggggac

SEQ ID NO: 837904 - RNA, 19 nt, Artificial Sequence
  Description of Artificial Sequence: Synthetic oligonucleotide
ccgacguacagccucaguc

SEQ ID NO: 837905 - RNA, 19 nt, Artificial Sequence
  Description of Artificial Sequence: Synthetic oligonucleotide
cuuccuauugauggugcca

SEQ ID NO: 837906 - RNA, 19 nt, Artificial Sequence
  Description of Artificial Sequence: Synthetic oligonucleotide
caucaguuguaucugguau

SEQ ID NO: 837907 - RNA, 19 nt, Artificial Sequence
  Description of Artificial Sequence: Synthetic oligonucleotide
gauugaccagacgggccgc

SEQ ID NO: 837908 - RNA, 19 nt, Artificial Sequence
  Description of Artificial Sequence: Synthetic oligonucleotide
acugugaacaacagcugua

SEQ ID NO: 837909 - RNA, 19 nt, Artificial Sequence
  Description of Artificial Sequence: Synthetic oligonucleotide
ggccaguacacaugcaaca

SEQ ID NO: 837910 - RNA, 19 nt, Artificial Sequence
  Description of Artificial Sequence: Synthetic oligonucleotide
ucgcucaauccaucccucu

SEQ ID NO: 837911 - RNA, 19 nt, Artificial Sequence
  Description of Artificial Sequence: Synthetic oligonucleotide
cuacucccaccacaagcug

SEQ ID NO: 837912 - RNA, 19 nt, Artificial Sequence
  Description of Artificial Sequence: Synthetic oligonucleotide
uccggguuucucucugcgu

SEQ ID NO: 837913 - RNA, 19 nt, Artificial Sequence
  Description of Artificial Sequence: Synthetic oligonucleotide
cacggcgguagccacgcac

SEQ ID NO: 837914 - RNA, 19 nt, Artificial Sequence
  Description of Artificial Sequence: Synthetic oligonucleotide
gguuguacuggcucccauc

SEQ ID NO: 837915 - RNA, 19 nt, Artificial Sequence
  Description of Artificial Sequence: Synthetic oligonucleotide
cucuacaauccgacguaca

SEQ ID NO: 837916 - RNA, 19 nt, Artificial Sequence
  Description of Artificial Sequence: Synthetic oligonucleotide
cuucgcucaauccaucccu

SEQ ID NO: 837917 - RNA, 19 nt, Artificial Sequence
  Description of Artificial Sequence: Synthetic oligonucleotide
ggcguugucagcaccagga

SEQ ID NO: 837918 - RNA, 19 nt, Artificial Sequence
  Description of Artificial Sequence: Synthetic oligonucleotide
cuccguaaggcuggagcag

SEQ ID NO: 837919 - RNA, 19 nt, Artificial Sequence
  Description of Artificial Sequence: Synthetic oligonucleotide
ucuuucccuuagucacagc

SEQ ID NO: 837920 - RNA, 19 nt, Artificial Sequence
  Description of Artificial Sequence: Synthetic oligonucleotide
auagcgcucuagguguugu

SEQ ID NO: 837921 - RNA, 19 nt, Artificial Sequence
  Description of Artificial Sequence: Synthetic oligonucleotide
cucucuacaauccgacgua

SEQ ID NO: 837922 - RNA, 19 nt, Artificial Sequence
  Description of Artificial Sequence: Synthetic oligonucleotide
cucaccgcgggauuuguua

SEQ ID NO: 837923 - RNA, 19 nt, Artificial Sequence
  Description of Artificial Sequence: Synthetic oligonucleotide
gcgguugacggccaucccc

SEQ ID NO: 837924 - RNA, 19 nt, Artificial Sequence
  Description of Artificial Sequence: Synthetic oligonucleotide
agccagcuuuccaauaacu

SEQ ID NO: 837925 - RNA, 19 nt, Artificial Sequence
  Description of Artificial Sequence: Synthetic oligonucleotide
gcuucgcucaauccauccc

SEQ ID NO: 837926 - RNA, 19 nt, Artificial Sequence
  Description of Artificial Sequence: Synthetic oligonucleotide
gcggucaaaagugccaccc

SEQ ID NO: 837927 - RNA, 19 nt, Artificial Sequence
  Description of Artificial Sequence: Synthetic oligonucleotide
cugugaacaacagcuguaa

SEQ ID NO: 837928 - RNA, 19 nt, Artificial Sequence
  Description of Artificial Sequence: Synthetic oligonucleotide
auauucugccagccggcuu

SEQ ID NO: 837929 - RNA, 19 nt, Artificial Sequence
  Description of Artificial Sequence: Synthetic oligonucleotide
uccgacguacagccucagu

SEQ ID NO: 837930 - RNA, 19 nt, Artificial Sequence
  Description of Artificial Sequence: Synthetic oligonucleotide
aggucggcaccgcuguaga

SEQ ID NO: 837931 - RNA, 19 nt, Artificial Sequence
  Description of Artificial Sequence: Synthetic oligonucleotide
cugccauagggugaacauc

SEQ ID NO: 837932 - RNA, 19 nt, Artificial Sequence
  Description of Artificial Sequence: Synthetic oligonucleotide
gaugcccgucagcccaagc

SEQ ID NO: 837933 - RNA, 19 nt, Artificial Sequence
  Description of Artificial Sequence: Synthetic oligonucleotide
gauaucugugagggucuuc

SEQ ID NO: 837934 - RNA, 19 nt, Artificial Sequence
  Description of Artificial Sequence: Synthetic oligonucleotide
agcaugcuaggcagacuuc

SEQ ID NO: 837935 - RNA, 19 nt, Artificial Sequence
  Description of Artificial Sequence: Synthetic oligonucleotide
uccuauugauggugccauc

SEQ ID NO: 837936 - RNA, 19 nt, Artificial Sequence
  Description of Artificial Sequence: Synthetic oligonucleotide
agucuuucccuuagucaca

SEQ ID NO: 837937 - RNA, 19 nt, Artificial Sequence
  Description of Artificial Sequence: Synthetic oligonucleotide
gugugugaugaaauccaga

SEQ ID NO: 837938 - RNA, 19 nt, Artificial Sequence
  Description of Artificial Sequence: Synthetic oligonucleotide
guccgucauaacuacuucu

SEQ ID NO: 837939 - RNA, 19 nt, Artificial Sequence
  Description of Artificial Sequence: Synthetic oligonucleotide
ugagaaccacauggcuaug

SEQ ID NO: 837940 - RNA, 19 nt, Artificial Sequence
  Description of Artificial Sequence: Synthetic oligonucleotide
uuccaauaacuggccacau

SEQ ID NO: 837941 - RNA, 19 nt, Artificial Sequence
  Description of Artificial Sequence: Synthetic oligonucleotide
agucuuagggaggcgguuu

SEQ ID NO: 837942 - RNA, 19 nt, Artificial Sequence
  Description of Artificial Sequence: Synthetic oligonucleotide
gcaagcggucaaaagugcc

SEQ ID NO: 837943 - RNA, 19 nt, Artificial Sequence
  Description of Artificial Sequence: Synthetic oligonucleotide
gggugugauugaccagacg

SEQ ID NO: 837944 - RNA, 19 nt, Artificial Sequence
  Description of Artificial Sequence: Synthetic oligonucleotide
ccuuccuauugauggugcc

SEQ ID NO: 837945 - RNA, 19 nt, Artificial Sequence
  Description of Artificial Sequence: Synthetic oligonucleotide
caaccggugaagcuggccu

SEQ ID NO: 837946 - RNA, 19 nt, Artificial Sequence
  Description of Artificial Sequence: Synthetic oligonucleotide
gcacucggggacuccacag

SEQ ID NO: 837947 - RNA, 19 nt, Artificial Sequence
  Description of Artificial Sequence: Synthetic oligonucleotide
gccgccgaugucaggaugg

SEQ ID NO: 837948 - RNA, 19 nt, Artificial Sequence
  Description of Artificial Sequence: Synthetic oligonucleotide
gacguaagcuggaggagcu

SEQ ID NO: 837949 - RNA, 19 nt, Artificial Sequence
  Description of Artificial Sequence: Synthetic oligonucleotide
uucugacguccaguugucu

SEQ ID NO: 837950 - RNA, 19 nt, Artificial Sequence
  Description of Artificial Sequence: Synthetic oligonucleotide
cccgaugggagcuccggcc

SEQ ID NO: 837951 - RNA, 19 nt, Artificial Sequence
  Description of Artificial Sequence: Synthetic oligonucleotide
ggguaagagggcacucggg

SEQ ID NO: 837952 - RNA, 19 nt, Artificial Sequence
  Description of Artificial Sequence: Synthetic oligonucleotide
acaaugguccacaccucau

SEQ ID NO: 837953 - RNA, 19 nt, Artificial Sequence
  Description of Artificial Sequence: Synthetic oligonucleotide
ugcuccccacuuagcuaug

SEQ ID NO: 837954 - RNA, 19 nt, Artificial Sequence
  Description of Artificial Sequence: Synthetic oligonucleotide
gguccacaccucauguacc

SEQ ID NO: 837955 - RNA, 19 nt, Artificial Sequence
  Description of Artificial Sequence: Synthetic oligonucleotide
ccggguuucucucugcguc

SEQ ID NO: 837956 - RNA, 19 nt, Artificial Sequence
  Description of Artificial Sequence: Synthetic oligonucleotide
ccaguuuggcaccacagaa

SEQ ID NO: 837957 - RNA, 19 nt, Artificial Sequence
  Description of Artificial Sequence: Synthetic oligonucleotide
agaacccuacgaggggacu

SEQ ID NO: 837958 - RNA, 19 nt, Artificial Sequence
  Description of Artificial Sequence: Synthetic oligonucleotide
ugauaucugugagggucuu

SEQ ID NO: 837959 - RNA, 19 nt, Artificial Sequence
  Description of Artificial Sequence: Synthetic oligonucleotide
guacagccucagucucagg

SEQ ID NO: 837960 - RNA, 19 nt, Artificial Sequence
  Description of Artificial Sequence: Synthetic oligonucleotide
cauagcgcucuagguguug

SEQ ID NO: 837961 - RNA, 19 nt, Artificial Sequence
  Description of Artificial Sequence: Synthetic oligonucleotide
uucagccgcugagcuacug

SEQ ID NO: 837962 - RNA, 19 nt, Artificial Sequence
  Description of Artificial Sequence: Synthetic oligonucleotide
cugcuucgcucaauccauc

SEQ ID NO: 837963 - RNA, 19 nt, Artificial Sequence
  Description of Artificial Sequence: Synthetic oligonucleotide
guccacacgcucuccguaa

SEQ ID NO: 837964 - RNA, 19 nt, Artificial Sequence
  Description of Artificial Sequence: Synthetic oligonucleotide
cagaugguccacacgcucu

SEQ ID NO: 837965 - RNA, 19 nt, Artificial Sequence
  Description of Artificial Sequence: Synthetic oligonucleotide
cacaccucauguaccauau

SEQ ID NO: 837966 - RNA, 19 nt, Artificial Sequence
  Description of Artificial Sequence: Synthetic oligonucleotide
guugccaggugcacauaga

SEQ ID NO: 837967 - RNA, 19 nt, Artificial Sequence
  Description of Artificial Sequence: Synthetic oligonucleotide
acggcgguagccacgcaca

SEQ ID NO: 837968 - RNA, 19 nt, Artificial Sequence
  Description of Artificial Sequence: Synthetic oligonucleotide
cccucucuacaauccgacg

SEQ ID NO: 837969 - RNA, 19 nt, Artificial Sequence
  Description of Artificial Sequence: Synthetic oligonucleotide
cugcuacucccaccacaag

SEQ ID NO: 837970 - RNA, 19 nt, Artificial Sequence
  Description of Artificial Sequence: Synthetic oligonucleotide
cucaauccaucccucucua

SEQ ID NO: 837971 - RNA, 19 nt, Artificial Sequence
  Description of Artificial Sequence: Synthetic oligonucleotide
agcggcguugucagcacca

SEQ ID NO: 837972 - RNA, 19 nt, Artificial Sequence
  Description of Artificial Sequence: Synthetic oligonucleotide
caaggcggaagcgguugac

SEQ ID NO: 837973 - RNA, 19 nt, Artificial Sequence
  Description of Artificial Sequence: Synthetic oligonucleotide
cugcuccccacuuagcuau

SEQ ID NO: 837974 - RNA, 19 nt, Artificial Sequence
  Description of Artificial Sequence: Synthetic oligonucleotide
gacgggccgccgaugucag

SEQ ID NO: 837975 - RNA, 19 nt, Artificial Sequence
  Description of Artificial Sequence: Synthetic oligonucleotide
cugagcuacugagcuuuuc

SEQ ID NO: 837976 - RNA, 19 nt, Artificial Sequence
  Description of Artificial Sequence: Synthetic oligonucleotide
gcuacucccaccacaagcu

SEQ ID NO: 837977 - RNA, 19 nt, Artificial Sequence
  Description of Artificial Sequence: Synthetic oligonucleotide
gcucaauccaucccucucu

SEQ ID NO: 837978 - RNA, 19 nt, Artificial Sequence
  Description of Artificial Sequence: Synthetic oligonucleotide
gggccaguacacaugcaac

SEQ ID NO: 837979 - RNA, 19 nt, Artificial Sequence
  Description of Artificial Sequence: Synthetic oligonucleotide
acguacagccucagucuca

SEQ ID NO: 837980 - RNA, 19 nt, Artificial Sequence
  Description of Artificial Sequence: Synthetic oligonucleotide
gcccacgaccuuccuauug

SEQ ID NO: 837981 - RNA, 19 nt, Artificial Sequence
  Description of Artificial Sequence: Synthetic oligonucleotide
cucggggacuccacaggca

SEQ ID NO: 837982 - RNA, 19 nt, Artificial Sequence
  Description of Artificial Sequence: Synthetic oligonucleotide
ugaugcccgucagcccaag

SEQ ID NO: 837983 - RNA, 19 nt, Artificial Sequence
  Description of Artificial Sequence: Synthetic oligonucleotide
ggccagagcggaauacggc

SEQ ID NO: 837984 - RNA, 19 nt, Artificial Sequence
  Description of Artificial Sequence: Synthetic oligonucleotide
gccgcugagcuacugagcu

SEQ ID NO: 837985 - RNA, 19 nt, Artificial Sequence
  Description of Artificial Sequence: Synthetic oligonucleotide
ggccuuaugguggagggua

SEQ ID NO: 837986 - RNA, 19 nt, Artificial Sequence
  Description of Artificial Sequence: Synthetic oligonucleotide
accgcgggauuuguuaguu

SEQ ID NO: 837987 - RNA, 19 nt, Artificial Sequence
  Description of Artificial Sequence: Synthetic oligonucleotide
gcucuuggucugaugaguc

SEQ ID NO: 837988 - RNA, 19 nt, Artificial Sequence
  Description of Artificial Sequence: Synthetic oligonucleotide
ccagagccgcugaugcccg

SEQ ID NO: 837989 - RNA, 19 nt, Artificial Sequence
  Description of Artificial Sequence: Synthetic oligonucleotide
uccucaccgcgggauuugu

SEQ ID NO: 837990 - RNA, 19 nt, Artificial Sequence
  Description of Artificial Sequence: Synthetic oligonucleotide
cagcggcguugucagcacc

SEQ ID NO: 837991 - RNA, 19 nt, Artificial Sequence
  Description of Artificial Sequence: Synthetic oligonucleotide
gugaugaaauccagaacuu

SEQ ID NO: 837992 - RNA, 19 nt, Artificial Sequence
  Description of Artificial Sequence: Synthetic oligonucleotide
gcauagcggcaucaaucac

SEQ ID NO: 837993 - RNA, 19 nt, Artificial Sequence
  Description of Artificial Sequence: Synthetic oligonucleotide
gcaagacacuagacaacug

SEQ ID NO: 837994 - RNA, 19 nt, Artificial Sequence
  Description of Artificial Sequence: Synthetic oligonucleotide
gggagacgauuucaaaagu

SEQ ID NO: 837995 - RNA, 19 nt, Artificial Sequence
  Description of Artificial Sequence: Synthetic oligonucleotide
ccgauggcccagaagguca

SEQ ID NO: 837996 - RNA, 19 nt, Artificial Sequence
  Description of Artificial Sequence: Synthetic oligonucleotide
acaauccgacguacagccu

SEQ ID NO: 837997 - RNA, 19 nt, Artificial Sequence
  Description of Artificial Sequence: Synthetic oligonucleotide
cucagaugguccacacgcu

SEQ ID NO: 837998 - RNA, 19 nt, Artificial Sequence
  Description of Artificial Sequence: Synthetic oligonucleotide
caguuccauaauccggaua

SEQ ID NO: 837999 - RNA, 19 nt, Artificial Sequence
  Description of Artificial Sequence: Synthetic oligonucleotide
uagcgcucuagguguuguu

SEQ ID NO: 838000 - RNA, 19 nt, Artificial Sequence
  Description of Artificial Sequence: Synthetic oligonucleotide
cccacgaccuuccuauuga

SEQ ID NO: 838001 - RNA, 19 nt, Artificial Sequence
  Description of Artificial Sequence: Synthetic oligonucleotide
cuccucaccgcgggauuug

SEQ ID NO: 838002 - RNA, 19 nt, Artificial Sequence
  Description of Artificial Sequence: Synthetic oligonucleotide
guuguuuaacaggguugua

SEQ ID NO: 838003 - RNA, 19 nt, Artificial Sequence
  Description of Artificial Sequence: Synthetic oligonucleotide
ggauguuggucaguaaaau

SEQ ID NO: 838004 - RNA, 19 nt, Artificial Sequence
  Description of Artificial Sequence: Synthetic oligonucleotide
ccuuaugguggaggguaag

SEQ ID NO: 838005 - RNA, 19 nt, Artificial Sequence
  Description of Artificial Sequence: Synthetic oligonucleotide
ccccuuaggccugccauag

SEQ ID NO: 838006 - RNA, 19 nt, Artificial Sequence
  Description of Artificial Sequence: Synthetic oligonucleotide
ggcacucggggacuccaca

SEQ ID NO: 838007 - RNA, 19 nt, Artificial Sequence
  Description of Artificial Sequence: Synthetic oligonucleotide
uagccacgcacaggcugcu

SEQ ID NO: 838008 - RNA, 19 nt, Artificial Sequence
  Description of Artificial Sequence: Synthetic oligonucleotide
ccagagcggaauacggcca

SEQ ID NO: 838009 - RNA, 19 nt, Artificial Sequence
  Description of Artificial Sequence: Synthetic oligonucleotide
gcaaccggugaagcuggcc

SEQ ID NO: 838010 - RNA, 19 nt, Artificial Sequence
  Description of Artificial Sequence: Synthetic oligonucleotide
caugcccgguugccaggug

SEQ ID NO: 838011 - RNA, 19 nt, Artificial Sequence
  Description of Artificial Sequence: Synthetic oligonucleotide
accagacgggccgccgaug

SEQ ID NO: 838012 - RNA, 19 nt, Artificial Sequence
  Description of Artificial Sequence: Synthetic oligonucleotide
cgcugacguaagcuggagg

SEQ ID NO: 838013 - RNA, 19 nt, Artificial Sequence
  Description of Artificial Sequence: Synthetic oligonucleotide
gcuaggcagacuuccgggu

SEQ ID NO: 838014 - RNA, 19 nt, Artificial Sequence
  Description of Artificial Sequence: Synthetic oligonucleotide
cagccggcuuccagcagca

SEQ ID NO: 838015 - RNA, 19 nt, Artificial Sequence
  Description of Artificial Sequence: Synthetic oligonucleotide
accggugaagcuggccuua

SEQ ID NO: 838016 - RNA, 19 nt, Artificial Sequence
  Description of Artificial Sequence: Synthetic oligonucleotide
caagcacauagagccccga

SEQ ID NO: 838017 - RNA, 19 nt, Artificial Sequence
  Description of Artificial Sequence: Synthetic oligonucleotide
ccccacuuagcuauguccu

SEQ ID NO: 838018 - RNA, 19 nt, Artificial Sequence
  Description of Artificial Sequence: Synthetic oligonucleotide
cuaggcagacuuccggguu

SEQ ID NO: 838019 - RNA, 19 nt, Artificial Sequence
  Description of Artificial Sequence: Synthetic oligonucleotide
ggaggguaagagggcacuc

SEQ ID NO: 838020 - RNA, 19 nt, Artificial Sequence
  Description of Artificial Sequence: Synthetic oligonucleotide
cacgguaggucuccucgcu

SEQ ID NO: 838021 - RNA, 19 nt, Artificial Sequence
  Description of Artificial Sequence: Synthetic oligonucleotide
ccuauugauggugccaucu

SEQ ID NO: 838022 - RNA, 19 nt, Artificial Sequence
  Description of Artificial Sequence: Synthetic oligonucleotide
cgggauuuguuaguuccug

SEQ ID NO: 838023 - RNA, 19 nt, Artificial Sequence
  Description of Artificial Sequence: Synthetic oligonucleotide
gucuuagggaggcgguuuu

SEQ ID NO: 838024 - RNA, 19 nt, Artificial Sequence
  Description of Artificial Sequence: Synthetic oligonucleotide
gcgcucuagguguuguuua

SEQ ID NO: 838025 - RNA, 19 nt, Artificial Sequence
  Description of Artificial Sequence: Synthetic oligonucleotide
ugcccacgaccuuccuauu

SEQ ID NO: 838026 - RNA, 19 nt, Artificial Sequence
  Description of Artificial Sequence: Synthetic oligonucleotide
cugaugcccgucagcccaa

SEQ ID NO: 838027 - RNA, 19 nt, Artificial Sequence
  Description of Artificial Sequence: Synthetic oligonucleotide
cgcucaauccaucccucuc

SEQ ID NO: 838028 - RNA, 19 nt, Artificial Sequence
  Description of Artificial Sequence: Synthetic oligonucleotide
acccuacgaggggacugcu

SEQ ID NO: 838029 - RNA, 19 nt, Artificial Sequence
  Description of Artificial Sequence: Synthetic oligonucleotide
ggacugcuccccacuuagc

SEQ ID NO: 838030 - RNA, 19 nt, Artificial Sequence
  Description of Artificial Sequence: Synthetic oligonucleotide
gcugcuucgcucaauccau

SEQ ID NO: 838031 - RNA, 19 nt, Artificial Sequence
  Description of Artificial Sequence: Synthetic oligonucleotide
agccccgaugggagcuccg

SEQ ID NO: 838032 - RNA, 19 nt, Artificial Sequence
  Description of Artificial Sequence: Synthetic oligonucleotide
ggcaccgcuguagaagugu

SEQ ID NO: 838033 - RNA, 19 nt, Artificial Sequence
  Description of Artificial Sequence: Synthetic oligonucleotide
cccgauggcccagaagguc

SEQ ID NO: 838034 - RNA, 19 nt, Artificial Sequence
  Description of Artificial Sequence: Synthetic oligonucleotide
ccacaccucauguaccaua

SEQ ID NO: 838035 - RNA, 19 nt, Artificial Sequence
  Description of Artificial Sequence: Synthetic oligonucleotide
gagucuuagggaggcgguu

SEQ ID NO: 838036 - RNA, 19 nt, Artificial Sequence
  Description of Artificial Sequence: Synthetic oligonucleotide
ccaguacacaugcaacacu

SEQ ID NO: 838037 - RNA, 19 nt, Artificial Sequence
  Description of Artificial Sequence: Synthetic oligonucleotide
ccugccauagggugaacau

SEQ ID NO: 838038 - RNA, 19 nt, Artificial Sequence
  Description of Artificial Sequence: Synthetic oligonucleotide
ccgugauucugguccuuca

SEQ ID NO: 838039 - RNA, 19 nt, Artificial Sequence
  Description of Artificial Sequence: Synthetic oligonucleotide
ccccgaugggagcuccggc

SEQ ID NO: 838040 - RNA, 19 nt, Artificial Sequence
  Description of Artificial Sequence: Synthetic oligonucleotide
gcggcguugucagcaccag

SEQ ID NO: 838041 - RNA, 19 nt, Artificial Sequence
  Description of Artificial Sequence: Synthetic oligonucleotide
ccccacggcgguagccacg

SEQ ID NO: 838042 - RNA, 19 nt, Artificial Sequence
  Description of Artificial Sequence: Synthetic oligonucleotide
ccgcuguagaaguguguga

SEQ ID NO: 838043 - RNA, 19 nt, Artificial Sequence
  Description of Artificial Sequence: Synthetic oligonucleotide
guccucacugcuggccaaa

SEQ ID NO: 838044 - RNA, 19 nt, Artificial Sequence
  Description of Artificial Sequence: Synthetic oligonucleotide
caccgcgggauuuguuagu

SEQ ID NO: 838045 - RNA, 19 nt, Artificial Sequence
  Description of Artificial Sequence: Synthetic oligonucleotide
cccuacgaggggacugcuc

SEQ ID NO: 838046 - RNA, 19 nt, Artificial Sequence
  Description of Artificial Sequence: Synthetic oligonucleotide
gaggccccuuaggccugcc

SEQ ID NO: 838047 - RNA, 19 nt, Artificial Sequence
  Description of Artificial Sequence: Synthetic oligonucleotide
caggcguuggggccagggu

SEQ ID NO: 838048 - RNA, 19 nt, Artificial Sequence
  Description of Artificial Sequence: Synthetic oligonucleotide
ggccccacggcgguagcca

SEQ ID NO: 838049 - RNA, 19 nt, Artificial Sequence
  Description of Artificial Sequence: Synthetic oligonucleotide
gugugacuugcggcuccca

SEQ ID NO: 838050 - RNA, 19 nt, Artificial Sequence
  Description of Artificial Sequence: Synthetic oligonucleotide
ccgccgaugucaggauggg

SEQ ID NO: 838051 - RNA, 19 nt, Artificial Sequence
  Description of Artificial Sequence: Synthetic oligonucleotide
gcccgucagcccaagcaca

SEQ ID NO: 838052 - RNA, 19 nt, Artificial Sequence
  Description of Artificial Sequence: Synthetic oligonucleotide
ggggacugcuccccacuua

SEQ ID NO: 838053 - RNA, 19 nt, Artificial Sequence
  Description of Artificial Sequence: Synthetic oligonucleotide
ccgcgggauuuguuaguuc

SEQ ID NO: 838054 - RNA, 19 nt, Artificial Sequence
  Description of Artificial Sequence: Synthetic oligonucleotide
cggcguugucagcaccagg

SEQ ID NO: 838055 - RNA, 19 nt, Artificial Sequence
  Description of Artificial Sequence: Synthetic oligonucleotide
cuccggccucagauuugga

SEQ ID NO: 838056 - RNA, 19 nt, Artificial Sequence
  Description of Artificial Sequence: Synthetic oligonucleotide
gccccuuaggccugccaua

SEQ ID NO: 838057 - RNA, 19 nt, Artificial Sequence
  Description of Artificial Sequence: Synthetic oligonucleotide
gcucuccguaaggcuggag

SEQ ID NO: 838058 - RNA, 19 nt, Artificial Sequence
  Description of Artificial Sequence: Synthetic oligonucleotide
ggcaaccggugaagcuggc

SEQ ID NO: 838059 - RNA, 19 nt, Artificial Sequence
  Description of Artificial Sequence: Synthetic oligonucleotide
ccgcugacguaagcuggag

SEQ ID NO: 838060 - RNA, 19 nt, Artificial Sequence
  Description of Artificial Sequence: Synthetic oligonucleotide
gccuuaugguggaggguaa

SEQ ID NO: 838061 - RNA, 19 nt, Artificial Sequence
  Description of Artificial Sequence: Synthetic oligonucleotide
cgcucuagguguuguuuaa

SEQ ID NO: 838062 - RNA, 19 nt, Artificial Sequence
  Description of Artificial Sequence: Synthetic oligonucleotide
cggucaaaagugccaccca

SEQ ID NO: 838063 - RNA, 19 nt, Artificial Sequence
  Description of Artificial Sequence: Synthetic oligonucleotide
gccacgcacaggcugcuuu

SEQ ID NO: 838064 - RNA, 19 nt, Artificial Sequence
  Description of Artificial Sequence: Synthetic oligonucleotide
gcgggauuuguuaguuccu

SEQ ID NO: 838065 - RNA, 19 nt, Artificial Sequence
  Description of Artificial Sequence: Synthetic oligonucleotide
gccauagggugaacaucaa

SEQ ID NO: 838066 - RNA, 19 nt, Artificial Sequence
  Description of Artificial Sequence: Synthetic oligonucleotide
cuucagccgcugagcuacu

SEQ ID NO: 838067 - RNA, 19 nt, Artificial Sequence
  Description of Artificial Sequence: Synthetic oligonucleotide
ccagacgggccgccgaugu

SEQ ID NO: 838068 - RNA, 19 nt, Artificial Sequence
  Description of Artificial Sequence: Synthetic oligonucleotide
cggugaagcuggccuuaug

SEQ ID NO: 838069 - RNA, 19 nt, Artificial Sequence
  Description of Artificial Sequence: Synthetic oligonucleotide
cgaugggagcuccggccuc

SEQ ID NO: 838070 - RNA, 19 nt, Artificial Sequence
  Description of Artificial Sequence: Synthetic oligonucleotide
ccgaugggagcuccggccu

SEQ ID NO: 838071 - RNA, 19 nt, Artificial Sequence
  Description of Artificial Sequence: Synthetic oligonucleotide
cgggccgccgaugucagga

SEQ ID NO: 838072 - RNA, 19 nt, Artificial Sequence
  Description of Artificial Sequence: Synthetic oligonucleotide
ccgagccagcuuuccaaua

SEQ ID NO: 838073 - RNA, 19 nt, Artificial Sequence
  Description of Artificial Sequence: Synthetic oligonucleotide
cgaccuuccuauugauggu

SEQ ID NO: 838074 - RNA, 19 nt, Artificial Sequence
  Description of Artificial Sequence: Synthetic oligonucleotide
ccucagucucagggaugac

SEQ ID NO: 838075 - RNA, 19 nt, Artificial Sequence
  Description of Artificial Sequence: Synthetic oligonucleotide
gcccgguugccaggugcac

SEQ ID NO: 838076 - RNA, 19 nt, Artificial Sequence
  Description of Artificial Sequence: Synthetic oligonucleotide
cggcaccgcuguagaagug

SEQ ID NO: 838077 - RNA, 19 nt, Artificial Sequence
  Description of Artificial Sequence: Synthetic oligonucleotide
cgggagcauaggcccgaug

SEQ ID NO: 838078 - RNA, 19 nt, Artificial Sequence
  Description of Artificial Sequence: Synthetic oligonucleotide
ccacgaccuuccuauugau

SEQ ID NO: 838079 - RNA, 19 nt, Artificial Sequence
  Description of Artificial Sequence: Synthetic oligonucleotide
cgcugagcuacugagcuuu

SEQ ID NO: 838080 - RNA, 19 nt, Artificial Sequence
  Description of Artificial Sequence: Synthetic oligonucleotide
cagagccgcugaugcccgu

SEQ ID NO: 838081 - RNA, 19 nt, Artificial Sequence
  Description of Artificial Sequence: Synthetic oligonucleotide
gcccgauggcccagaaggu

SEQ ID NO: 838082 - RNA, 19 nt, Artificial Sequence
  Description of Artificial Sequence: Synthetic oligonucleotide
ggcagacuuccggguuucu

SEQ ID NO: 838083 - RNA, 19 nt, Artificial Sequence
  Description of Artificial Sequence: Synthetic oligonucleotide
gggccgccgaugucaggau

SEQ ID NO: 838084 - RNA, 19 nt, Artificial Sequence
  Description of Artificial Sequence: Synthetic oligonucleotide
gcauagcgcucuagguguu

SEQ ID NO: 838085 - RNA, 19 nt, Artificial Sequence
  Description of Artificial Sequence: Synthetic oligonucleotide
ggccugccauagggugaac

SEQ ID NO: 838086 - RNA, 19 nt, Artificial Sequence
  Description of Artificial Sequence: Synthetic oligonucleotide
ccaugcccgguugccaggu

SEQ ID NO: 838087 - RNA, 19 nt, Artificial Sequence
  Description of Artificial Sequence: Synthetic oligonucleotide
caccgugauucugguccuu

SEQ ID NO: 838088 - RNA, 19 nt, Artificial Sequence
  Description of Artificial Sequence: Synthetic oligonucleotide
gcugagcuacugagcuuuu

SEQ ID NO: 838089 - RNA, 19 nt, Artificial Sequence
  Description of Artificial Sequence: Synthetic oligonucleotide
ccgucagcccaagcacaua

SEQ ID NO: 838090 - RNA, 19 nt, Artificial Sequence
  Description of Artificial Sequence: Synthetic oligonucleotide
ccuccucaccgcgggauuu

SEQ ID NO: 838091 - RNA, 19 nt, Artificial Sequence
  Description of Artificial Sequence: Synthetic oligonucleotide
ccucaccgcgggauuuguu

SEQ ID NO: 838092 - RNA, 19 nt, Artificial Sequence
  Description of Artificial Sequence: Synthetic oligonucleotide
ccgcugagcuacugagcuu

SEQ ID NO: 838093 - RNA, 19 nt, Artificial Sequence
  Description of Artificial Sequence: Synthetic oligonucleotide
cgcucuccguaaggcugga

SEQ ID NO: 838094 - RNA, 19 nt, Artificial Sequence
  Description of Artificial Sequence: Synthetic oligonucleotide
ccggugaagcuggccuuau

SEQ ID NO: 838095 - RNA, 19 nt, Artificial Sequence
  Description of Artificial Sequence: Synthetic oligonucleotide
cgguugccaggugcacaua

SEQ ID NO: 838096 - RNA, 19 nt, Artificial Sequence
  Description of Artificial Sequence: Synthetic oligonucleotide
ccgggagcauaggcccgau

SEQ ID NO: 838097 - RNA, 19 nt, Artificial Sequence
  Description of Artificial Sequence: Synthetic oligonucleotide
aauagauaguacuaaaugg

SEQ ID NO: 838098 - RNA, 19 nt, Artificial Sequence
  Description of Artificial Sequence: Synthetic oligonucleotide
aaaaggacggacuaagacc

SEQ ID NO: 838099 - RNA, 19 nt, Artificial Sequence
  Description of Artificial Sequence: Synthetic oligonucleotide
aaugguaauaaacagggug

SEQ ID NO: 838100 - RNA, 19 nt, Artificial Sequence
  Description of Artificial Sequence: Synthetic oligonucleotide
auaaauuagcucuucgggc

SEQ ID NO: 838101 - RNA, 19 nt, Artificial Sequence
  Description of Artificial Sequence: Synthetic oligonucleotide
aauagcauugcccaucauc

SEQ ID NO: 838102 - RNA, 19 nt, Artificial Sequence
  Description of Artificial Sequence: Synthetic oligonucleotide
aauguuaauguacacguca

SEQ ID NO: 838103 - RNA, 19 nt, Artificial Sequence
  Description of Artificial Sequence: Synthetic oligonucleotide
aauugaucagaugugcucc

SEQ ID NO: 838104 - RNA, 19 nt, Artificial Sequence
  Description of Artificial Sequence: Synthetic oligonucleotide
uguuguaaggcacugacgc

SEQ ID NO: 838105 - RNA, 19 nt, Artificial Sequence
  Description of Artificial Sequence: Synthetic oligonucleotide
aaauugaucagaugugcuc

SEQ ID NO: 838106 - RNA, 19 nt, Artificial Sequence
  Description of Artificial Sequence: Synthetic oligonucleotide
cuuacuauagcccagaaga

SEQ ID NO: 838107 - RNA, 19 nt, Artificial Sequence
  Description of Artificial Sequence: Synthetic oligonucleotide
auuaaggacacauaucgag

SEQ ID NO: 838108 - RNA, 19 nt, Artificial Sequence
  Description of Artificial Sequence: Synthetic oligonucleotide
uuuggguagacauugagga

SEQ ID NO: 838109 - RNA, 19 nt, Artificial Sequence
  Description of Artificial Sequence: Synthetic oligonucleotide
cuaaguuaagcacauaggc

SEQ ID NO: 838110 - RNA, 19 nt, Artificial Sequence
  Description of Artificial Sequence: Synthetic oligonucleotide
ggauuaaggacacauaucg

SEQ ID NO: 838111 - RNA, 19 nt, Artificial Sequence
  Description of Artificial Sequence: Synthetic oligonucleotide
auaucgagcuaccaguucc

SEQ ID NO: 838112 - RNA, 19 nt, Artificial Sequence
  Description of Artificial Sequence: Synthetic oligonucleotide
ugauaaauuagcucuucgg

SEQ ID NO: 838113 - RNA, 19 nt, Artificial Sequence
  Description of Artificial Sequence: Synthetic oligonucleotide
aauguauauacuaguaguc

SEQ ID NO: 838114 - RNA, 19 nt, Artificial Sequence
  Description of Artificial Sequence: Synthetic oligonucleotide
uacaguaccuguuccaucg

SEQ ID NO: 838115 - RNA, 19 nt, Artificial Sequence
  Description of Artificial Sequence: Synthetic oligonucleotide
ugugcguugauaaauuagc

SEQ ID NO: 838116 - RNA, 19 nt, Artificial Sequence
  Description of Artificial Sequence: Synthetic oligonucleotide
auagauaguacuaaauggg

SEQ ID NO: 838117 - RNA, 19 nt, Artificial Sequence
  Description of Artificial Sequence: Synthetic oligonucleotide
aaggcuuagucccaaaaug

SEQ ID NO: 838118 - RNA, 19 nt, Artificial Sequence
  Description of Artificial Sequence: Synthetic oligonucleotide
gaaaacgugugauaaacac

SEQ ID NO: 838119 - RNA, 19 nt, Artificial Sequence
  Description of Artificial Sequence: Synthetic oligonucleotide
aguucaaguucuucguucc

SEQ ID NO: 838120 - RNA, 19 nt, Artificial Sequence
  Description of Artificial Sequence: Synthetic oligonucleotide
aaacgugugauaaacacug

SEQ ID NO: 838121 - RNA, 19 nt, Artificial Sequence
  Description of Artificial Sequence: Synthetic oligonucleotide
aacauagauccaaacagac

SEQ ID NO: 838122 - RNA, 19 nt, Artificial Sequence
  Description of Artificial Sequence: Synthetic oligonucleotide
uaaguuaagcacauaggca

SEQ ID NO: 838123 - RNA, 19 nt, Artificial Sequence
  Description of Artificial Sequence: Synthetic oligonucleotide
gauaaggguggauauauac

SEQ ID NO: 838124 - RNA, 19 nt, Artificial Sequence
  Description of Artificial Sequence: Synthetic oligonucleotide
gaauaaggcaugugaaggg

SEQ ID NO: 838125 - RNA, 19 nt, Artificial Sequence
  Description of Artificial Sequence: Synthetic oligonucleotide
gauguaagagccuucacuc

SEQ ID NO: 838126 - RNA, 19 nt, Artificial Sequence
  Description of Artificial Sequence: Synthetic oligonucleotide
uauaccgcuucaaucaaag

SEQ ID NO: 838127 - RNA, 19 nt, Artificial Sequence
  Description of Artificial Sequence: Synthetic oligonucleotide
aauccagagaaccuguagu

SEQ ID NO: 838128 - RNA, 19 nt, Artificial Sequence
  Description of Artificial Sequence: Synthetic oligonucleotide
uuaaaugugccaucaauuc

SEQ ID NO: 838129 - RNA, 19 nt, Artificial Sequence
  Description of Artificial Sequence: Synthetic oligonucleotide
acuccagugcuauauaccg

SEQ ID NO: 838130 - RNA, 19 nt, Artificial Sequence
  Description of Artificial Sequence: Synthetic oligonucleotide
uuaaggacacauaucgagc

SEQ ID NO: 838131 - RNA, 19 nt, Artificial Sequence
  Description of Artificial Sequence: Synthetic oligonucleotide
uaaauuagcucuucgggcu

SEQ ID NO: 838132 - RNA, 19 nt, Artificial Sequence
  Description of Artificial Sequence: Synthetic oligonucleotide
augucuauuuuaaaugugc

SEQ ID NO: 838133 - RNA, 19 nt, Artificial Sequence
  Description of Artificial Sequence: Synthetic oligonucleotide
uaagcacauaggcaguugg

SEQ ID NO: 838134 - RNA, 19 nt, Artificial Sequence
  Description of Artificial Sequence: Synthetic oligonucleotide
augguguugaauauuaaac

SEQ ID NO: 838135 - RNA, 19 nt, Artificial Sequence
  Description of Artificial Sequence: Synthetic oligonucleotide
guuaauguacacgucaucc

SEQ ID NO: 838136 - RNA, 19 nt, Artificial Sequence
  Description of Artificial Sequence: Synthetic oligonucleotide
uuaaaggcuugagaaaacg

SEQ ID NO: 838137 - RNA, 19 nt, Artificial Sequence
  Description of Artificial Sequence: Synthetic oligonucleotide
uauccggcaaagaaagggg

SEQ ID NO: 838138 - RNA, 19 nt, Artificial Sequence
  Description of Artificial Sequence: Synthetic oligonucleotide
uuucccuaaguuaagcaca

SEQ ID NO: 838139 - RNA, 19 nt, Artificial Sequence
  Description of Artificial Sequence: Synthetic oligonucleotide
guuccaucgagucagauga

SEQ ID NO: 838140 - RNA, 19 nt, Artificial Sequence
  Description of Artificial Sequence: Synthetic oligonucleotide
cuauauaccgcuucaauca

SEQ ID NO: 838141 - RNA, 19 nt, Artificial Sequence
  Description of Artificial Sequence: Synthetic oligonucleotide
uaccgcuucaaucaaaggu

SEQ ID NO: 838142 - RNA, 19 nt, Artificial Sequence
  Description of Artificial Sequence: Synthetic oligonucleotide
guaguuguguggcagauug

SEQ ID NO: 838143 - RNA, 19 nt, Artificial Sequence
  Description of Artificial Sequence: Synthetic oligonucleotide
aguaauugcauagcaguac

SEQ ID NO: 838144 - RNA, 19 nt, Artificial Sequence
  Description of Artificial Sequence: Synthetic oligonucleotide
uagauaguacuaaauggga

SEQ ID NO: 838145 - RNA, 19 nt, Artificial Sequence
  Description of Artificial Sequence: Synthetic oligonucleotide
ucaaucaaagguuucacuu

SEQ ID NO: 838146 - RNA, 19 nt, Artificial Sequence
  Description of Artificial Sequence: Synthetic oligonucleotide
uguuguguacuccagugcu

SEQ ID NO: 838147 - RNA, 19 nt, Artificial Sequence
  Description of Artificial Sequence: Synthetic oligonucleotide
uuuucccuaaguuaagcac

SEQ ID NO: 838148 - RNA, 19 nt, Artificial Sequence
  Description of Artificial Sequence: Synthetic oligonucleotide
ucuaggauaucaugcagca

SEQ ID NO: 838149 - RNA, 19 nt, Artificial Sequence
  Description of Artificial Sequence: Synthetic oligonucleotide
gacuucuacaaaaggacgg

SEQ ID NO: 838150 - RNA, 19 nt, Artificial Sequence
  Description of Artificial Sequence: Synthetic oligonucleotide
aaaggcuugagaaaacgug

SEQ ID NO: 838151 - RNA, 19 nt, Artificial Sequence
  Description of Artificial Sequence: Synthetic oligonucleotide
aggggaaauccagagaacc

SEQ ID NO: 838152 - RNA, 19 nt, Artificial Sequence
  Description of Artificial Sequence: Synthetic oligonucleotide
agcaacauagauccaaaca

SEQ ID NO: 838153 - RNA, 19 nt, Artificial Sequence
  Description of Artificial Sequence: Synthetic oligonucleotide
uacaaaaggacggacuaag

SEQ ID NO: 838154 - RNA, 19 nt, Artificial Sequence
  Description of Artificial Sequence: Synthetic oligonucleotide
accaguugaggcucaaugg

SEQ ID NO: 838155 - RNA, 19 nt, Artificial Sequence
  Description of Artificial Sequence: Synthetic oligonucleotide
acaucaauguuguguacuc

SEQ ID NO: 838156 - RNA, 19 nt, Artificial Sequence
  Description of Artificial Sequence: Synthetic oligonucleotide
uacuaguagucuuuaaggu

SEQ ID NO: 838157 - RNA, 19 nt, Artificial Sequence
  Description of Artificial Sequence: Synthetic oligonucleotide
uacacgucauccuucacug

SEQ ID NO: 838158 - RNA, 19 nt, Artificial Sequence
  Description of Artificial Sequence: Synthetic oligonucleotide
uaaggacacauaucgagcu

SEQ ID NO: 838159 - RNA, 19 nt, Artificial Sequence
  Description of Artificial Sequence: Synthetic oligonucleotide
uuggaaauagauaguacua

SEQ ID NO: 838160 - RNA, 19 nt, Artificial Sequence
  Description of Artificial Sequence: Synthetic oligonucleotide
aguggcgcaagguagaggu

SEQ ID NO: 838161 - RNA, 19 nt, Artificial Sequence
  Description of Artificial Sequence: Synthetic oligonucleotide
aauuuauccuuaguggcga

SEQ ID NO: 838162 - RNA, 19 nt, Artificial Sequence
  Description of Artificial Sequence: Synthetic oligonucleotide
auguuguguacuccagugc

SEQ ID NO: 838163 - RNA, 19 nt, Artificial Sequence
  Description of Artificial Sequence: Synthetic oligonucleotide
uguucguuccauaguaaug

SEQ ID NO: 838164 - RNA, 19 nt, Artificial Sequence
  Description of Artificial Sequence: Synthetic oligonucleotide
uaucaggaccaauuaagca

SEQ ID NO: 838165 - RNA, 19 nt, Artificial Sequence
  Description of Artificial Sequence: Synthetic oligonucleotide
ggaaccguaaggcacaucc

SEQ ID NO: 838166 - RNA, 19 nt, Artificial Sequence
  Description of Artificial Sequence: Synthetic oligonucleotide
guauccggcaaagaaaggg

SEQ ID NO: 838167 - RNA, 19 nt, Artificial Sequence
  Description of Artificial Sequence: Synthetic oligonucleotide
acacauaucgagcuaccag

SEQ ID NO: 838168 - RNA, 19 nt, Artificial Sequence
  Description of Artificial Sequence: Synthetic oligonucleotide
uugagaaaacgugugauaa

SEQ ID NO: 838169 - RNA, 19 nt, Artificial Sequence
  Description of Artificial Sequence: Synthetic oligonucleotide
uguaucaaauuguccauaa

SEQ ID NO: 838170 - RNA, 19 nt, Artificial Sequence
  Description of Artificial Sequence: Synthetic oligonucleotide
cucgaauugguucuccagg

SEQ ID NO: 838171 - RNA, 19 nt, Artificial Sequence
  Description of Artificial Sequence: Synthetic oligonucleotide
cacagauaccagcaaaagg

SEQ ID NO: 838172 - RNA, 19 nt, Artificial Sequence
  Description of Artificial Sequence: Synthetic oligonucleotide
acacauccuaaccaguguc

SEQ ID NO: 838173 - RNA, 19 nt, Artificial Sequence
  Description of Artificial Sequence: Synthetic oligonucleotide
uuaauguacacgucauccu

SEQ ID NO: 838174 - RNA, 19 nt, Artificial Sequence
  Description of Artificial Sequence: Synthetic oligonucleotide
guaaggcacauccugaaac

SEQ ID NO: 838175 - RNA, 19 nt, Artificial Sequence
  Description of Artificial Sequence: Synthetic oligonucleotide
uguauauacuaguagucuu

SEQ ID NO: 838176 - RNA, 19 nt, Artificial Sequence
  Description of Artificial Sequence: Synthetic oligonucleotide
agaugugcuccauagguca

SEQ ID NO: 838177 - RNA, 19 nt, Artificial Sequence
  Description of Artificial Sequence: Synthetic oligonucleotide
uguaagagccuucacucaa

SEQ ID NO: 838178 - RNA, 19 nt, Artificial Sequence
  Description of Artificial Sequence: Synthetic oligonucleotide
cuagcuaugggcuuucuca

SEQ ID NO: 838179 - RNA, 19 nt, Artificial Sequence
  Description of Artificial Sequence: Synthetic oligonucleotide
uggacccucaggaauagca

SEQ ID NO: 838180 - RNA, 19 nt, Artificial Sequence
  Description of Artificial Sequence: Synthetic oligonucleotide
uaaaggcuugagaaaacgu

SEQ ID NO: 838181 - RNA, 19 nt, Artificial Sequence
  Description of Artificial Sequence: Synthetic oligonucleotide
aggguggauauauacagcu

SEQ ID NO: 838182 - RNA, 19 nt, Artificial Sequence
  Description of Artificial Sequence: Synthetic oligonucleotide
aaauuagcucuucgggcug

SEQ ID NO: 838183 - RNA, 19 nt, Artificial Sequence
  Description of Artificial Sequence: Synthetic oligonucleotide
auagcauugcccaucauca

SEQ ID NO: 838184 - RNA, 19 nt, Artificial Sequence
  Description of Artificial Sequence: Synthetic oligonucleotide
aaaacgugugauaaacacu

SEQ ID NO: 838185 - RNA, 19 nt, Artificial Sequence
  Description of Artificial Sequence: Synthetic oligonucleotide
uacuccagugcuauauacc

SEQ ID NO: 838186 - RNA, 19 nt, Artificial Sequence
  Description of Artificial Sequence: Synthetic oligonucleotide
uucgcuccuuacuauagcc

SEQ ID NO: 838187 - RNA, 19 nt, Artificial Sequence
  Description of Artificial Sequence: Synthetic oligonucleotide
uaucgagcuaccaguuccg

SEQ ID NO: 838188 - RNA, 19 nt, Artificial Sequence
  Description of Artificial Sequence: Synthetic oligonucleotide
uuuucacugaaaguccuug

SEQ ID NO: 838189 - RNA, 19 nt, Artificial Sequence
  Description of Artificial Sequence: Synthetic oligonucleotide
gaugacguggccuccaguc

SEQ ID NO: 838190 - RNA, 19 nt, Artificial Sequence
  Description of Artificial Sequence: Synthetic oligonucleotide
uccuuaguggcgaaucaug

SEQ ID NO: 838191 - RNA, 19 nt, Artificial Sequence
  Description of Artificial Sequence: Synthetic oligonucleotide
cuauagcccagaagaaccg

SEQ ID NO: 838192 - RNA, 19 nt, Artificial Sequence
  Description of Artificial Sequence: Synthetic oligonucleotide
gguguugaauauuaaacca

SEQ ID NO: 838193 - RNA, 19 nt, Artificial Sequence
  Description of Artificial Sequence: Synthetic oligonucleotide
uucacugaaaguccuugaa

SEQ ID NO: 838194 - RNA, 19 nt, Artificial Sequence
  Description of Artificial Sequence: Synthetic oligonucleotide
ucucgaauugguucuccag

SEQ ID NO: 838195 - RNA, 19 nt, Artificial Sequence
  Description of Artificial Sequence: Synthetic oligonucleotide
ugcguugauaaauuagcuc

SEQ ID NO: 838196 - RNA, 19 nt, Artificial Sequence
  Description of Artificial Sequence: Synthetic oligonucleotide
ccaaauauuaucaggacca

SEQ ID NO: 838197 - RNA, 19 nt, Artificial Sequence
  Description of Artificial Sequence: Synthetic oligonucleotide
aggacacauaucgagcuac

SEQ ID NO: 838198 - RNA, 19 nt, Artificial Sequence
  Description of Artificial Sequence: Synthetic oligonucleotide
aaggggauuaaggacacau

SEQ ID NO: 838199 - RNA, 19 nt, Artificial Sequence
  Description of Artificial Sequence: Synthetic oligonucleotide
auguauauacuaguagucu

SEQ ID NO: 838200 - RNA, 19 nt, Artificial Sequence
  Description of Artificial Sequence: Synthetic oligonucleotide
uggaaauagauaguacuaa

SEQ ID NO: 838201 - RNA, 19 nt, Artificial Sequence
  Description of Artificial Sequence: Synthetic oligonucleotide
uauauaccgcuucaaucaa

SEQ ID NO: 838202 - RNA, 19 nt, Artificial Sequence
  Description of Artificial Sequence: Synthetic oligonucleotide
cugugcguugauaaauuag

SEQ ID NO: 838203 - RNA, 19 nt, Artificial Sequence
  Description of Artificial Sequence: Synthetic oligonucleotide
auaguaauguuucgcuccu

SEQ ID NO: 838204 - RNA, 19 nt, Artificial Sequence
  Description of Artificial Sequence: Synthetic oligonucleotide
ucaauacggguauggauuc

SEQ ID NO: 838205 - RNA, 19 nt, Artificial Sequence
  Description of Artificial Sequence: Synthetic oligonucleotide
caggagaucaagaaauuga

SEQ ID NO: 838206 - RNA, 19 nt, Artificial Sequence
  Description of Artificial Sequence: Synthetic oligonucleotide
aauacggguauggauucca

SEQ ID NO: 838207 - RNA, 19 nt, Artificial Sequence
  Description of Artificial Sequence: Synthetic oligonucleotide
uccaucgagucagaugacg

SEQ ID NO: 838208 - RNA, 19 nt, Artificial Sequence
  Description of Artificial Sequence: Synthetic oligonucleotide
uauccuuaguggcgaauca

SEQ ID NO: 838209 - RNA, 19 nt, Artificial Sequence
  Description of Artificial Sequence: Synthetic oligonucleotide
cuaagaccuggccaagggg

SEQ ID NO: 838210 - RNA, 19 nt, Artificial Sequence
  Description of Artificial Sequence: Synthetic oligonucleotide
aggaauagcauugcccauc

SEQ ID NO: 838211 - RNA, 19 nt, Artificial Sequence
  Description of Artificial Sequence: Synthetic oligonucleotide
accuguuacguacaaggga

SEQ ID NO: 838212 - RNA, 19 nt, Artificial Sequence
  Description of Artificial Sequence: Synthetic oligonucleotide
auaucuuccccuugacucu

SEQ ID NO: 838213 - RNA, 19 nt, Artificial Sequence
  Description of Artificial Sequence: Synthetic oligonucleotide
uuucgcuccuuacuauagc

SEQ ID NO: 838214 - RNA, 19 nt, Artificial Sequence
  Description of Artificial Sequence: Synthetic oligonucleotide
uguuaauguacacgucauc

SEQ ID NO: 838215 - RNA, 19 nt, Artificial Sequence
  Description of Artificial Sequence: Synthetic oligonucleotide
ccuaaguuaagcacauagg

SEQ ID NO: 838216 - RNA, 19 nt, Artificial Sequence
  Description of Artificial Sequence: Synthetic oligonucleotide
uuucacugaaaguccuuga

SEQ ID NO: 838217 - RNA, 19 nt, Artificial Sequence
  Description of Artificial Sequence: Synthetic oligonucleotide
auaagcccggauaauguuc

SEQ ID NO: 838218 - RNA, 19 nt, Artificial Sequence
  Description of Artificial Sequence: Synthetic oligonucleotide
uacuauagcccagaagaac

SEQ ID NO: 838219 - RNA, 19 nt, Artificial Sequence
  Description of Artificial Sequence: Synthetic oligonucleotide
aggaaugucauaagcccgg

SEQ ID NO: 838220 - RNA, 19 nt, Artificial Sequence
  Description of Artificial Sequence: Synthetic oligonucleotide
agugucucucaauacgggu

SEQ ID NO: 838221 - RNA, 19 nt, Artificial Sequence
  Description of Artificial Sequence: Synthetic oligonucleotide
aaccuguagucucccagcu

SEQ ID NO: 838222 - RNA, 19 nt, Artificial Sequence
  Description of Artificial Sequence: Synthetic oligonucleotide
cuaccaguuccgcaguugc

SEQ ID NO: 838223 - RNA, 19 nt, Artificial Sequence
  Description of Artificial Sequence: Synthetic oligonucleotide
uuacguacaagggaagcaa

SEQ ID NO: 838224 - RNA, 19 nt, Artificial Sequence
  Description of Artificial Sequence: Synthetic oligonucleotide
cauucggggcucugaaugg

SEQ ID NO: 838225 - RNA, 19 nt, Artificial Sequence
  Description of Artificial Sequence: Synthetic oligonucleotide
uuauccuuaguggcgaauc

SEQ ID NO: 838226 - RNA, 19 nt, Artificial Sequence
  Description of Artificial Sequence: Synthetic oligonucleotide
uaguggcgaaucauggugu

SEQ ID NO: 838227 - RNA, 19 nt, Artificial Sequence
  Description of Artificial Sequence: Synthetic oligonucleotide
acggacuaagaccuggcca

SEQ ID NO: 838228 - RNA, 19 nt, Artificial Sequence
  Description of Artificial Sequence: Synthetic oligonucleotide
auauuaaaccaaauauuau

SEQ ID NO: 838229 - RNA, 19 nt, Artificial Sequence
  Description of Artificial Sequence: Synthetic oligonucleotide
uggcgaaucaugguguuga

SEQ ID NO: 838230 - RNA, 19 nt, Artificial Sequence
  Description of Artificial Sequence: Synthetic oligonucleotide
gucauaagcccggauaaug

SEQ ID NO: 838231 - RNA, 19 nt, Artificial Sequence
  Description of Artificial Sequence: Synthetic oligonucleotide
ucgcuccuuacuauagccc

SEQ ID NO: 838232 - RNA, 19 nt, Artificial Sequence
  Description of Artificial Sequence: Synthetic oligonucleotide
uugggauaaggguggauau

SEQ ID NO: 838233 - RNA, 19 nt, Artificial Sequence
  Description of Artificial Sequence: Synthetic oligonucleotide
cccuaaguuaagcacauag

SEQ ID NO: 838234 - RNA, 19 nt, Artificial Sequence
  Description of Artificial Sequence: Synthetic oligonucleotide
uauauacuaguagucuuua

SEQ ID NO: 838235 - RNA, 19 nt, Artificial Sequence
  Description of Artificial Sequence: Synthetic oligonucleotide
aaaguggcgcaagguagag

SEQ ID NO: 838236 - RNA, 19 nt, Artificial Sequence
  Description of Artificial Sequence: Synthetic oligonucleotide
auaccgcuucaaucaaagg

SEQ ID NO: 838237 - RNA, 19 nt, Artificial Sequence
  Description of Artificial Sequence: Synthetic oligonucleotide
auuacuguuguaaggcacu

SEQ ID NO: 838238 - RNA, 19 nt, Artificial Sequence
  Description of Artificial Sequence: Synthetic oligonucleotide
ucgagucagaugacguggc

SEQ ID NO: 838239 - RNA, 19 nt, Artificial Sequence
  Description of Artificial Sequence: Synthetic oligonucleotide
acggguauggauuccacuu

SEQ ID NO: 838240 - RNA, 19 nt, Artificial Sequence
  Description of Artificial Sequence: Synthetic oligonucleotide
caagcuucgggcagaauca

SEQ ID NO: 838241 - RNA, 19 nt, Artificial Sequence
  Description of Artificial Sequence: Synthetic oligonucleotide
guaccuguuccaucgaguc

SEQ ID NO: 838242 - RNA, 19 nt, Artificial Sequence
  Description of Artificial Sequence: Synthetic oligonucleotide
auguucguuccauaguaau

SEQ ID NO: 838243 - RNA, 19 nt, Artificial Sequence
  Description of Artificial Sequence: Synthetic oligonucleotide
uucccuaaguuaagcacau

SEQ ID NO: 838244 - RNA, 19 nt, Artificial Sequence
  Description of Artificial Sequence: Synthetic oligonucleotide
guacuccagugcuauauac

SEQ ID NO: 838245 - RNA, 19 nt, Artificial Sequence
  Description of Artificial Sequence: Synthetic oligonucleotide
cagugucucucaauacggg

SEQ ID NO: 838246 - RNA, 19 nt, Artificial Sequence
  Description of Artificial Sequence: Synthetic oligonucleotide
ugucugugcguugauaaau

SEQ ID NO: 838247 - RNA, 19 nt, Artificial Sequence
  Description of Artificial Sequence: Synthetic oligonucleotide
auugaucagaugugcucca

SEQ ID NO: 838248 - RNA, 19 nt, Artificial Sequence
  Description of Artificial Sequence: Synthetic oligonucleotide
uuaagcacauaggcaguug

SEQ ID NO: 838249 - RNA, 19 nt, Artificial Sequence
  Description of Artificial Sequence: Synthetic oligonucleotide
ugugcacuggacugugugu

SEQ ID NO: 838250 - RNA, 19 nt, Artificial Sequence
  Description of Artificial Sequence: Synthetic oligonucleotide
ggaccaauuaagcagccca

SEQ ID NO: 838251 - RNA, 19 nt, Artificial Sequence
  Description of Artificial Sequence: Synthetic oligonucleotide
aaguaauugcauagcagua

SEQ ID NO: 838252 - RNA, 19 nt, Artificial Sequence
  Description of Artificial Sequence: Synthetic oligonucleotide
ccuuaguggcgaaucaugg

SEQ ID NO: 838253 - RNA, 19 nt, Artificial Sequence
  Description of Artificial Sequence: Synthetic oligonucleotide
gaaauagauaguacuaaau

SEQ ID NO: 838254 - RNA, 19 nt, Artificial Sequence
  Description of Artificial Sequence: Synthetic oligonucleotide
gacggacuaagaccuggcc

SEQ ID NO: 838255 - RNA, 19 nt, Artificial Sequence
  Description of Artificial Sequence: Synthetic oligonucleotide
uguuucgcuccuuacuaua

SEQ ID NO: 838256 - RNA, 19 nt, Artificial Sequence
  Description of Artificial Sequence: Synthetic oligonucleotide
cuucgggcagaaucaaaug

SEQ ID NO: 838257 - RNA, 19 nt, Artificial Sequence
  Description of Artificial Sequence: Synthetic oligonucleotide
  modified_base (19)..(19): a, c, u, g, unknown or other
uaguagucuuuaagguagn

SEQ ID NO: 838258 - RNA, 19 nt, Artificial Sequence
  Description of Artificial Sequence: Synthetic oligonucleotide
augugaaggggaaauccag

SEQ ID NO: 838259 - RNA, 19 nt, Artificial Sequence
  Description of Artificial Sequence: Synthetic oligonucleotide
gauuaaggacacauaucga

SEQ ID NO: 838260 - RNA, 19 nt, Artificial Sequence
  Description of Artificial Sequence: Synthetic oligonucleotide
aggaccaauuaagcagccc

SEQ ID NO: 838261 - RNA, 19 nt, Artificial Sequence
  Description of Artificial Sequence: Synthetic oligonucleotide
gcguugauaaauuagcucu

SEQ ID NO: 838262 - RNA, 19 nt, Artificial Sequence
  Description of Artificial Sequence: Synthetic oligonucleotide
gacuaagaccuggccaagg

SEQ ID NO: 838263 - RNA, 19 nt, Artificial Sequence
  Description of Artificial Sequence: Synthetic oligonucleotide
agauaguacuaaaugggau

SEQ ID NO: 838264 - RNA, 19 nt, Artificial Sequence
  Description of Artificial Sequence: Synthetic oligonucleotide
ggcucaaugguaauaaaca

SEQ ID NO: 838265 - RNA, 19 nt, Artificial Sequence
  Description of Artificial Sequence: Synthetic oligonucleotide
guuucgcuccuuacuauag

SEQ ID NO: 838266 - RNA, 19 nt, Artificial Sequence
  Description of Artificial Sequence: Synthetic oligonucleotide
ggaaauagauaguacuaaa

SEQ ID NO: 838267 - RNA, 19 nt, Artificial Sequence
  Description of Artificial Sequence: Synthetic oligonucleotide
uuacuguuguaaggcacug

SEQ ID NO: 838268 - RNA, 19 nt, Artificial Sequence
  Description of Artificial Sequence: Synthetic oligonucleotide
gucaguacugugcacugga

SEQ ID NO: 838269 - RNA, 19 nt, Artificial Sequence
  Description of Artificial Sequence: Synthetic oligonucleotide
ugcagggauuccauauuaa

SEQ ID NO: 838270 - RNA, 19 nt, Artificial Sequence
  Description of Artificial Sequence: Synthetic oligonucleotide
ucaugguguugaauauuaa

SEQ ID NO: 838271 - RNA, 19 nt, Artificial Sequence
  Description of Artificial Sequence: Synthetic oligonucleotide
aggacggacuaagaccugg

SEQ ID NO: 838272 - RNA, 19 nt, Artificial Sequence
  Description of Artificial Sequence: Synthetic oligonucleotide
aagcccggauaauguucac

SEQ ID NO: 838273 - RNA, 19 nt, Artificial Sequence
  Description of Artificial Sequence: Synthetic oligonucleotide
ucguuccauaguaauguuu

SEQ ID NO: 838274 - RNA, 19 nt, Artificial Sequence
  Description of Artificial Sequence: Synthetic oligonucleotide
ucugugcguugauaaauua

SEQ ID NO: 838275 - RNA, 19 nt, Artificial Sequence
  Description of Artificial Sequence: Synthetic oligonucleotide
auauacuaguagucuuuaa

SEQ ID NO: 838276 - RNA, 19 nt, Artificial Sequence
  Description of Artificial Sequence: Synthetic oligonucleotide
uacggguauggauuccacu

SEQ ID NO: 838277 - RNA, 19 nt, Artificial Sequence
  Description of Artificial Sequence: Synthetic oligonucleotide
uggcgcaagguagagguac

SEQ ID NO: 838278 - RNA, 19 nt, Artificial Sequence
  Description of Artificial Sequence: Synthetic oligonucleotide
guucguuccauaguaaugu

SEQ ID NO: 838279 - RNA, 19 nt, Artificial Sequence
  Description of Artificial Sequence: Synthetic oligonucleotide
uguagcucagcagcagcca

SEQ ID NO: 838280 - RNA, 19 nt, Artificial Sequence
  Description of Artificial Sequence: Synthetic oligonucleotide
cacauaucgagcuaccagu

SEQ ID NO: 838281 - RNA, 19 nt, Artificial Sequence
  Description of Artificial Sequence: Synthetic oligonucleotide
agaaaacgugugauaaaca

SEQ ID NO: 838282 - RNA, 19 nt, Artificial Sequence
  Description of Artificial Sequence: Synthetic oligonucleotide
uccggcaaagaaaggggau

SEQ ID NO: 838283 - RNA, 19 nt, Artificial Sequence
  Description of Artificial Sequence: Synthetic oligonucleotide
ugaucagaugugcuccaua

SEQ ID NO: 838284 - RNA, 19 nt, Artificial Sequence
  Description of Artificial Sequence: Synthetic oligonucleotide
acgugugauaaacacuguu

SEQ ID NO: 838285 - RNA, 19 nt, Artificial Sequence
  Description of Artificial Sequence: Synthetic oligonucleotide
cuccagugcuauauaccgc

SEQ ID NO: 838286 - RNA, 19 nt, Artificial Sequence
  Description of Artificial Sequence: Synthetic oligonucleotide
ucgcuuuuguucugccagc

SEQ ID NO: 838287 - RNA, 19 nt, Artificial Sequence
  Description of Artificial Sequence: Synthetic oligonucleotide
uuguuuggguagacauuga

SEQ ID NO: 838288 - RNA, 19 nt, Artificial Sequence
  Description of Artificial Sequence: Synthetic oligonucleotide
cuugagaaaacgugugaua

SEQ ID NO: 838289 - RNA, 19 nt, Artificial Sequence
  Description of Artificial Sequence: Synthetic oligonucleotide
ucccgcucaugucaauuac

SEQ ID NO: 838290 - RNA, 19 nt, Artificial Sequence
  Description of Artificial Sequence: Synthetic oligonucleotide
cucuucgggcugaacacug

SEQ ID NO: 838291 - RNA, 19 nt, Artificial Sequence
  Description of Artificial Sequence: Synthetic oligonucleotide
ucgagcuaccaguuccgca

SEQ ID NO: 838292 - RNA, 19 nt, Artificial Sequence
  Description of Artificial Sequence: Synthetic oligonucleotide
guaagagccuucacucaag

SEQ ID NO: 838293 - RNA, 19 nt, Artificial Sequence
  Description of Artificial Sequence: Synthetic oligonucleotide
cauaucgagcuaccaguuc

SEQ ID NO: 838294 - RNA, 19 nt, Artificial Sequence
  Description of Artificial Sequence: Synthetic oligonucleotide
uaguuugggcuuuguuaca

SEQ ID NO: 838295 - RNA, 19 nt, Artificial Sequence
  Description of Artificial Sequence: Synthetic oligonucleotide
gaaauugaucagaugugcu

SEQ ID NO: 838296 - RNA, 19 nt, Artificial Sequence
  Description of Artificial Sequence: Synthetic oligonucleotide
gcaugugaaggggaaaucc

SEQ ID NO: 838297 - RNA, 19 nt, Artificial Sequence
  Description of Artificial Sequence: Synthetic oligonucleotide
aucgagcuaccaguuccgc

SEQ ID NO: 838298 - RNA, 19 nt, Artificial Sequence
  Description of Artificial Sequence: Synthetic oligonucleotide
ccggauaauguucaccagc

SEQ ID NO: 838299 - RNA, 19 nt, Artificial Sequence
  Description of Artificial Sequence: Synthetic oligonucleotide
guacuaaaugggauuuuca

SEQ ID NO: 838300 - RNA, 19 nt, Artificial Sequence
  Description of Artificial Sequence: Synthetic oligonucleotide
aagcacauaggcaguugga

SEQ ID NO: 838301 - RNA, 19 nt, Artificial Sequence
  Description of Artificial Sequence: Synthetic oligonucleotide
agucaguacugugcacugg

SEQ ID NO: 838302 - RNA, 19 nt, Artificial Sequence
  Description of Artificial Sequence: Synthetic oligonucleotide
ugcccaucaucagccaugc

SEQ ID NO: 838303 - RNA, 19 nt, Artificial Sequence
  Description of Artificial Sequence: Synthetic oligonucleotide
aguauccggcaaagaaagg

SEQ ID NO: 838304 - RNA, 19 nt, Artificial Sequence
  Description of Artificial Sequence: Synthetic oligonucleotide
uuuauccuuaguggcgaau

SEQ ID NO: 838305 - RNA, 19 nt, Artificial Sequence
  Description of Artificial Sequence: Synthetic oligonucleotide
gugcacuggacugugugug

SEQ ID NO: 838306 - RNA, 19 nt, Artificial Sequence
  Description of Artificial Sequence: Synthetic oligonucleotide
ccuguuacguacaagggaa

SEQ ID NO: 838307 - RNA, 19 nt, Artificial Sequence
  Description of Artificial Sequence: Synthetic oligonucleotide
ccauucggggcucugaaug

SEQ ID NO: 838308 - RNA, 19 nt, Artificial Sequence
  Description of Artificial Sequence: Synthetic oligonucleotide
cagugcuauauaccgcuuc

SEQ ID NO: 838309 - RNA, 19 nt, Artificial Sequence
  Description of Artificial Sequence: Synthetic oligonucleotide
gggcagaaucaaauguucg

SEQ ID NO: 838310 - RNA, 19 nt, Artificial Sequence
  Description of Artificial Sequence: Synthetic oligonucleotide
ggauaauguucaccagcag

SEQ ID NO: 838311 - RNA, 19 nt, Artificial Sequence
  Description of Artificial Sequence: Synthetic oligonucleotide
agcccacacuuuucagggg

SEQ ID NO: 838312 - RNA, 19 nt, Artificial Sequence
  Description of Artificial Sequence: Synthetic oligonucleotide
ccuucacucaagcuucggg

SEQ ID NO: 838313 - RNA, 19 nt, Artificial Sequence
  Description of Artificial Sequence: Synthetic oligonucleotide
uucccgcucaugucaauua

SEQ ID NO: 838314 - RNA, 19 nt, Artificial Sequence
  Description of Artificial Sequence: Synthetic oligonucleotide
auacggguauggauuccac

SEQ ID NO: 838315 - RNA, 19 nt, Artificial Sequence
  Description of Artificial Sequence: Synthetic oligonucleotide
cuguaagcuggcugugcug

SEQ ID NO: 838316 - RNA, 19 nt, Artificial Sequence
  Description of Artificial Sequence: Synthetic oligonucleotide
gggguagucaguacugugc

SEQ ID NO: 838317 - RNA, 19 nt, Artificial Sequence
  Description of Artificial Sequence: Synthetic oligonucleotide
ccaauuaagcagcccacac

SEQ ID NO: 838318 - RNA, 19 nt, Artificial Sequence
  Description of Artificial Sequence: Synthetic oligonucleotide
uccuaaccagugucucuca

SEQ ID NO: 838319 - RNA, 19 nt, Artificial Sequence
  Description of Artificial Sequence: Synthetic oligonucleotide
cgagcuaccaguuccgcag

SEQ ID NO: 838320 - RNA, 19 nt, Artificial Sequence
  Description of Artificial Sequence: Synthetic oligonucleotide
aaccggaggaaugucuauu

SEQ ID NO: 838321 - RNA, 19 nt, Artificial Sequence
  Description of Artificial Sequence: Synthetic oligonucleotide
cugaauggaaguucaaguu

SEQ ID NO: 838322 - RNA, 19 nt, Artificial Sequence
  Description of Artificial Sequence: Synthetic oligonucleotide
acaaaaggacggacuaaga

SEQ ID NO: 838323 - RNA, 19 nt, Artificial Sequence
  Description of Artificial Sequence: Synthetic oligonucleotide
guacaguaccuguuccauc

SEQ ID NO: 838324 - RNA, 19 nt, Artificial Sequence
  Description of Artificial Sequence: Synthetic oligonucleotide
uucguuccagcugggauuu

SEQ ID NO: 838325 - RNA, 19 nt, Artificial Sequence
  Description of Artificial Sequence: Synthetic oligonucleotide
auuuauccuuaguggcgaa

SEQ ID NO: 838326 - RNA, 19 nt, Artificial Sequence
  Description of Artificial Sequence: Synthetic oligonucleotide
ccuuacuauagcccagaag

SEQ ID NO: 838327 - RNA, 19 nt, Artificial Sequence
  Description of Artificial Sequence: Synthetic oligonucleotide
ggaaacaguauccggcaaa

SEQ ID NO: 838328 - RNA, 19 nt, Artificial Sequence
  Description of Artificial Sequence: Synthetic oligonucleotide
guuggacccucaggaauag

SEQ ID NO: 838329 - RNA, 19 nt, Artificial Sequence
  Description of Artificial Sequence: Synthetic oligonucleotide
ggggauuaaggacacauau

SEQ ID NO: 838330 - RNA, 19 nt, Artificial Sequence
  Description of Artificial Sequence: Synthetic oligonucleotide
uggucgcuuuuguucugcc

SEQ ID NO: 838331 - RNA, 19 nt, Artificial Sequence
  Description of Artificial Sequence: Synthetic oligonucleotide
aggcaugugaaggggaaau

SEQ ID NO: 838332 - RNA, 19 nt, Artificial Sequence
  Description of Artificial Sequence: Synthetic oligonucleotide
ugucauaagcccggauaau

SEQ ID NO: 838333 - RNA, 19 nt, Artificial Sequence
  Description of Artificial Sequence: Synthetic oligonucleotide
acuugcuagcuaugggcuu

SEQ ID NO: 838334 - RNA, 19 nt, Artificial Sequence
  Description of Artificial Sequence: Synthetic oligonucleotide
uuuccauaguuugggcuuu

SEQ ID NO: 838335 - RNA, 19 nt, Artificial Sequence
  Description of Artificial Sequence: Synthetic oligonucleotide
ccgcucaugucaauuacug

SEQ ID NO: 838336 - RNA, 19 nt, Artificial Sequence
  Description of Artificial Sequence: Synthetic oligonucleotide
uuuguucugccagcuugaa

SEQ ID NO: 838337 - RNA, 19 nt, Artificial Sequence
  Description of Artificial Sequence: Synthetic oligonucleotide
uuccaucgagucagaugac

SEQ ID NO: 838338 - RNA, 19 nt, Artificial Sequence
  Description of Artificial Sequence: Synthetic oligonucleotide
caaauguucguuccauagu

SEQ ID NO: 838339 - RNA, 19 nt, Artificial Sequence
  Description of Artificial Sequence: Synthetic oligonucleotide
accguaaggcacauccuga

SEQ ID NO: 838340 - RNA, 19 nt, Artificial Sequence
  Description of Artificial Sequence: Synthetic oligonucleotide
aguccaugauuuugucuuu

SEQ ID NO: 838341 - RNA, 19 nt, Artificial Sequence
  Description of Artificial Sequence: Synthetic oligonucleotide
caauacggguauggauucc

SEQ ID NO: 838342 - RNA, 19 nt, Artificial Sequence
  Description of Artificial Sequence: Synthetic oligonucleotide
guuguguggcagauuguuc

SEQ ID NO: 838343 - RNA, 19 nt, Artificial Sequence
  Description of Artificial Sequence: Synthetic oligonucleotide
aguggcgaaucaugguguu

SEQ ID NO: 838344 - RNA, 19 nt, Artificial Sequence
  Description of Artificial Sequence: Synthetic oligonucleotide
gcucaugucaauuacuguu

SEQ ID NO: 838345 - RNA, 19 nt, Artificial Sequence
  Description of Artificial Sequence: Synthetic oligonucleotide
ggcagaaucaaauguucgu

SEQ ID NO: 838346 - RNA, 19 nt, Artificial Sequence
  Description of Artificial Sequence: Synthetic oligonucleotide
ggagaucaagaaauugauc

SEQ ID NO: 838347 - RNA, 19 nt, Artificial Sequence
  Description of Artificial Sequence: Synthetic oligonucleotide
auccggcaaagaaagggga

SEQ ID NO: 838348 - RNA, 19 nt, Artificial Sequence
  Description of Artificial Sequence: Synthetic oligonucleotide
ugggauaaggguggauaua

SEQ ID NO: 838349 - RNA, 19 nt, Artificial Sequence
  Description of Artificial Sequence: Synthetic oligonucleotide
cuuaguggcgaaucauggu

SEQ ID NO: 838350 - RNA, 19 nt, Artificial Sequence
  Description of Artificial Sequence: Synthetic oligonucleotide
agaaccggaggaaugucua

SEQ ID NO: 838351 - RNA, 19 nt, Artificial Sequence
  Description of Artificial Sequence: Synthetic oligonucleotide
ggauuuggccuucagcugu

SEQ ID NO: 838352 - RNA, 19 nt, Artificial Sequence
  Description of Artificial Sequence: Synthetic oligonucleotide
ucuuuccaacagaggcaaa

SEQ ID NO: 838353 - RNA, 19 nt, Artificial Sequence
  Description of Artificial Sequence: Synthetic oligonucleotide
guggauauauacagcuaaa

SEQ ID NO: 838354 - RNA, 19 nt, Artificial Sequence
  Description of Artificial Sequence: Synthetic oligonucleotide
guauauacuaguagucuuu

SEQ ID NO: 838355 - RNA, 19 nt, Artificial Sequence
  Description of Artificial Sequence: Synthetic oligonucleotide
auccuuaguggcgaaucau

SEQ ID NO: 838356 - RNA, 19 nt, Artificial Sequence
  Description of Artificial Sequence: Synthetic oligonucleotide
uuuugggauaaggguggau

SEQ ID NO: 838357 - RNA, 19 nt, Artificial Sequence
  Description of Artificial Sequence: Synthetic oligonucleotide
cuauaucuuccccuugacu

SEQ ID NO: 838358 - RNA, 19 nt, Artificial Sequence
  Description of Artificial Sequence: Synthetic oligonucleotide
gggauuaaggacacauauc

SEQ ID NO: 838359 - RNA, 19 nt, Artificial Sequence
  Description of Artificial Sequence: Synthetic oligonucleotide
acauaucgagcuaccaguu

SEQ ID NO: 838360 - RNA, 19 nt, Artificial Sequence
  Description of Artificial Sequence: Synthetic oligonucleotide
caguugaggcucaauggua

SEQ ID NO: 838361 - RNA, 19 nt, Artificial Sequence
  Description of Artificial Sequence: Synthetic oligonucleotide
aagcuucgggcagaaucaa

SEQ ID NO: 838362 - RNA, 19 nt, Artificial Sequence
  Description of Artificial Sequence: Synthetic oligonucleotide
ccaggagaucaagaaauug

SEQ ID NO: 838363 - RNA, 19 nt, Artificial Sequence
  Description of Artificial Sequence: Synthetic oligonucleotide
gguagucaguacugugcac

SEQ ID NO: 838364 - RNA, 19 nt, Artificial Sequence
  Description of Artificial Sequence: Synthetic oligonucleotide
uugaucagaugugcuccau

SEQ ID NO: 838365 - RNA, 19 nt, Artificial Sequence
  Description of Artificial Sequence: Synthetic oligonucleotide
auauaccgcuucaaucaaa

SEQ ID NO: 838366 - RNA, 19 nt, Artificial Sequence
  Description of Artificial Sequence: Synthetic oligonucleotide
cucucaauacggguaugga

SEQ ID NO: 838367 - RNA, 19 nt, Artificial Sequence
  Description of Artificial Sequence: Synthetic oligonucleotide
cugccuguaagcuggcugu

SEQ ID NO: 838368 - RNA, 19 nt, Artificial Sequence
  Description of Artificial Sequence: Synthetic oligonucleotide
aaggacggacuaagaccug

SEQ ID NO: 838369 - RNA, 19 nt, Artificial Sequence
  Description of Artificial Sequence: Synthetic oligonucleotide
aggauaucaugcagcacuu

SEQ ID NO: 838370 - RNA, 19 nt, Artificial Sequence
  Description of Artificial Sequence: Synthetic oligonucleotide
uuuucccgcucaugucaau

SEQ ID NO: 838371 - RNA, 19 nt, Artificial Sequence
  Description of Artificial Sequence: Synthetic oligonucleotide
cugcagggauuccauauua

SEQ ID NO: 838372 - RNA, 19 nt, Artificial Sequence
  Description of Artificial Sequence: Synthetic oligonucleotide
cuacaaaaggacggacuaa

SEQ ID NO: 838373 - RNA, 19 nt, Artificial Sequence
  Description of Artificial Sequence: Synthetic oligonucleotide
ccagcuugaaaaggcuuag

SEQ ID NO: 838374 - RNA, 19 nt, Artificial Sequence
  Description of Artificial Sequence: Synthetic oligonucleotide
cuggaaaggccaggauaug

SEQ ID NO: 838375 - RNA, 19 nt, Artificial Sequence
  Description of Artificial Sequence: Synthetic oligonucleotide
caguacugugcacuggacu

SEQ ID NO: 838376 - RNA, 19 nt, Artificial Sequence
  Description of Artificial Sequence: Synthetic oligonucleotide
guggcgaaucaugguguug

SEQ ID NO: 838377 - RNA, 19 nt, Artificial Sequence
  Description of Artificial Sequence: Synthetic oligonucleotide
caauucuugcuuggaaaua

SEQ ID NO: 838378 - RNA, 19 nt, Artificial Sequence
  Description of Artificial Sequence: Synthetic oligonucleotide
cacugacgcugugggaacc

SEQ ID NO: 838379 - RNA, 19 nt, Artificial Sequence
  Description of Artificial Sequence: Synthetic oligonucleotide
gugcguugauaaauuagcu

SEQ ID NO: 838380 - RNA, 19 nt, Artificial Sequence
  Description of Artificial Sequence: Synthetic oligonucleotide
  modified_base (17)..(17): a, c, u, g, unknown or other
guagucuuuaagguagnuu

SEQ ID NO: 838381 - RNA, 19 nt, Artificial Sequence
  Description of Artificial Sequence: Synthetic oligonucleotide
ggacacauaucgagcuacc

SEQ ID NO: 838382 - RNA, 19 nt, Artificial Sequence
  Description of Artificial Sequence: Synthetic oligonucleotide
cauaagcccggauaauguu

SEQ ID NO: 838383 - RNA, 19 nt, Artificial Sequence
  Description of Artificial Sequence: Synthetic oligonucleotide
gcuagcuaugggcuuucuc

SEQ ID NO: 838384 - RNA, 19 nt, Artificial Sequence
  Description of Artificial Sequence: Synthetic oligonucleotide
guuuucccgcucaugucaa

SEQ ID NO: 838385 - RNA, 19 nt, Artificial Sequence
  Description of Artificial Sequence: Synthetic oligonucleotide
auuaagcagcccacacuuu

SEQ ID NO: 838386 - RNA, 19 nt, Artificial Sequence
  Description of Artificial Sequence: Synthetic oligonucleotide
aauguccgcugcagggauu

SEQ ID NO: 838387 - RNA, 19 nt, Artificial Sequence
  Description of Artificial Sequence: Synthetic oligonucleotide
uugcuagcuaugggcuuuc

SEQ ID NO: 838388 - RNA, 19 nt, Artificial Sequence
  Description of Artificial Sequence: Synthetic oligonucleotide
ggucgcuuuuguucugcca

SEQ ID NO: 838389 - RNA, 19 nt, Artificial Sequence
  Description of Artificial Sequence: Synthetic oligonucleotide
gaaccggaggaaugucuau

SEQ ID NO: 838390 - RNA, 19 nt, Artificial Sequence
  Description of Artificial Sequence: Synthetic oligonucleotide
aggggauuaaggacacaua

SEQ ID NO: 838391 - RNA, 19 nt, Artificial Sequence
  Description of Artificial Sequence: Synthetic oligonucleotide
ggaaauccagagaaccugu

SEQ ID NO: 838392 - RNA, 19 nt, Artificial Sequence
  Description of Artificial Sequence: Synthetic oligonucleotide
cuuccgaccuuuucuccgu

SEQ ID NO: 838393 - RNA, 19 nt, Artificial Sequence
  Description of Artificial Sequence: Synthetic oligonucleotide
gaaccguaaggcacauccu

SEQ ID NO: 838394 - RNA, 19 nt, Artificial Sequence
  Description of Artificial Sequence: Synthetic oligonucleotide
cccggauaauguucaccag

SEQ ID NO: 838395 - RNA, 19 nt, Artificial Sequence
  Description of Artificial Sequence: Synthetic oligonucleotide
guuaagcacauaggcaguu

SEQ ID NO: 838396 - RNA, 19 nt, Artificial Sequence
  Description of Artificial Sequence: Synthetic oligonucleotide
ggacggacuaagaccuggc

SEQ ID NO: 838397 - RNA, 19 nt, Artificial Sequence
  Description of Artificial Sequence: Synthetic oligonucleotide
uaguaauguuucgcuccuu

SEQ ID NO: 838398 - RNA, 19 nt, Artificial Sequence
  Description of Artificial Sequence: Synthetic oligonucleotide
gccugaaguaauuucucau

SEQ ID NO: 838399 - RNA, 19 nt, Artificial Sequence
  Description of Artificial Sequence: Synthetic oligonucleotide
guugaggcucaaugguaau

SEQ ID NO: 838400 - RNA, 19 nt, Artificial Sequence
  Description of Artificial Sequence: Synthetic oligonucleotide
acucaagcuucgggcagaa

SEQ ID NO: 838401 - RNA, 19 nt, Artificial Sequence
  Description of Artificial Sequence: Synthetic oligonucleotide
gcacugacgcugugggaac

SEQ ID NO: 838402 - RNA, 19 nt, Artificial Sequence
  Description of Artificial Sequence: Synthetic oligonucleotide
ggcaugugaaggggaaauc

SEQ ID NO: 838403 - RNA, 19 nt, Artificial Sequence
  Description of Artificial Sequence: Synthetic oligonucleotide
ccaguugaggcucaauggu

SEQ ID NO: 838404 - RNA, 19 nt, Artificial Sequence
  Description of Artificial Sequence: Synthetic oligonucleotide
ugcuagcuaugggcuuucu

SEQ ID NO: 838405 - RNA, 19 nt, Artificial Sequence
  Description of Artificial Sequence: Synthetic oligonucleotide
cgcuccuuacuauagccca

SEQ ID NO: 838406 - RNA, 19 nt, Artificial Sequence
  Description of Artificial Sequence: Synthetic oligonucleotide
cacucaagcuucgggcaga

SEQ ID NO: 838407 - RNA, 19 nt, Artificial Sequence
  Description of Artificial Sequence: Synthetic oligonucleotide
ggaaugucauaagcccgga

SEQ ID NO: 838408 - RNA, 19 nt, Artificial Sequence
  Description of Artificial Sequence: Synthetic oligonucleotide
ggauaucaugcagcacuuc

SEQ ID NO: 838409 - RNA, 19 nt, Artificial Sequence
  Description of Artificial Sequence: Synthetic oligonucleotide
ucccuaaguuaagcacaua

SEQ ID NO: 838410 - RNA, 19 nt, Artificial Sequence
  Description of Artificial Sequence: Synthetic oligonucleotide
gcuucgggcagaaucaaau

SEQ ID NO: 838411 - RNA, 19 nt, Artificial Sequence
  Description of Artificial Sequence: Synthetic oligonucleotide
caguuccgcccugugguca

SEQ ID NO: 838412 - RNA, 19 nt, Artificial Sequence
  Description of Artificial Sequence: Synthetic oligonucleotide
gcgcaagguagagguacag

SEQ ID NO: 838413 - RNA, 19 nt, Artificial Sequence
  Description of Artificial Sequence: Synthetic oligonucleotide
ggcaaagaaaggggauuaa

SEQ ID NO: 838414 - RNA, 19 nt, Artificial Sequence
  Description of Artificial Sequence: Synthetic oligonucleotide
gccuucuuacccagggaca

SEQ ID NO: 838415 - RNA, 19 nt, Artificial Sequence
  Description of Artificial Sequence: Synthetic oligonucleotide
gucugugcguugauaaauu

SEQ ID NO: 838416 - RNA, 19 nt, Artificial Sequence
  Description of Artificial Sequence: Synthetic oligonucleotide
ggggaaauccagagaaccu

SEQ ID NO: 838417 - RNA, 19 nt, Artificial Sequence
  Description of Artificial Sequence: Synthetic oligonucleotide
cgagucagaugacguggcc

SEQ ID NO: 838418 - RNA, 19 nt, Artificial Sequence
  Description of Artificial Sequence: Synthetic oligonucleotide
ccaucgagucagaugacgu

SEQ ID NO: 838419 - RNA, 19 nt, Artificial Sequence
  Description of Artificial Sequence: Synthetic oligonucleotide
gaauagcauugcccaucau

SEQ ID NO: 838420 - RNA, 19 nt, Artificial Sequence
  Description of Artificial Sequence: Synthetic oligonucleotide
cggguauggauuccacuuc

SEQ ID NO: 838421 - RNA, 19 nt, Artificial Sequence
  Description of Artificial Sequence: Synthetic oligonucleotide
caggaauagcauugcccau

SEQ ID NO: 838422 - RNA, 19 nt, Artificial Sequence
  Description of Artificial Sequence: Synthetic oligonucleotide
cucaguggucgcuuuuguu

SEQ ID NO: 838423 - RNA, 19 nt, Artificial Sequence
  Description of Artificial Sequence: Synthetic oligonucleotide
gcaguuccgcccugugguc

SEQ ID NO: 838424 - RNA, 19 nt, Artificial Sequence
  Description of Artificial Sequence: Synthetic oligonucleotide
ggcgaaucaugguguugaa

SEQ ID NO: 838425 - RNA, 19 nt, Artificial Sequence
  Description of Artificial Sequence: Synthetic oligonucleotide
ccguaaggcacauccugaa

SEQ ID NO: 838426 - RNA, 19 nt, Artificial Sequence
  Description of Artificial Sequence: Synthetic oligonucleotide
ggauaaggguggauauaua

SEQ ID NO: 838427 - RNA, 19 nt, Artificial Sequence
  Description of Artificial Sequence: Synthetic oligonucleotide
ccuguaagcuggcugugcu

SEQ ID NO: 838428 - RNA, 19 nt, Artificial Sequence
  Description of Artificial Sequence: Synthetic oligonucleotide
ggcgcaagguagagguaca

SEQ ID NO: 838429 - RNA, 19 nt, Artificial Sequence
  Description of Artificial Sequence: Synthetic oligonucleotide
gggugauguaagagccuuc

SEQ ID NO: 838430 - RNA, 19 nt, Artificial Sequence
  Description of Artificial Sequence: Synthetic oligonucleotide
uccgcccuguggucaucuu

SEQ ID NO: 838431 - RNA, 19 nt, Artificial Sequence
  Description of Artificial Sequence: Synthetic oligonucleotide
gguuguuuggguagacauu

SEQ ID NO: 838432 - RNA, 19 nt, Artificial Sequence
  Description of Artificial Sequence: Synthetic oligonucleotide
cgaauugguucuccaggaa

SEQ ID NO: 838433 - RNA, 19 nt, Artificial Sequence
  Description of Artificial Sequence: Synthetic oligonucleotide
ggaaccaguugaggcucaa

SEQ ID NO: 838434 - RNA, 19 nt, Artificial Sequence
  Description of Artificial Sequence: Synthetic oligonucleotide
cccgcucaugucaauuacu

SEQ ID NO: 838435 - RNA, 19 nt, Artificial Sequence
  Description of Artificial Sequence: Synthetic oligonucleotide
ggggcucugaauggaaguu

SEQ ID NO: 838436 - RNA, 19 nt, Artificial Sequence
  Description of Artificial Sequence: Synthetic oligonucleotide
gcucuucgggcugaacacu

SEQ ID NO: 838437 - RNA, 19 nt, Artificial Sequence
  Description of Artificial Sequence: Synthetic oligonucleotide
guggcgcaagguagaggua

SEQ ID NO: 838438 - RNA, 19 nt, Artificial Sequence
  Description of Artificial Sequence: Synthetic oligonucleotide
ccccauucggggcucugaa

SEQ ID NO: 838439 - RNA, 19 nt, Artificial Sequence
  Description of Artificial Sequence: Synthetic oligonucleotide
gcgaaucaugguguugaau

SEQ ID NO: 838440 - RNA, 19 nt, Artificial Sequence
  Description of Artificial Sequence: Synthetic oligonucleotide
gcuccugaggaggguuuaa

SEQ ID NO: 838441 - RNA, 19 nt, Artificial Sequence
  Description of Artificial Sequence: Synthetic oligonucleotide
cugacgcugugggaaccgu

SEQ ID NO: 838442 - RNA, 19 nt, Artificial Sequence
  Description of Artificial Sequence: Synthetic oligonucleotide
cggcaaagaaaggggauua

SEQ ID NO: 838443 - RNA, 19 nt, Artificial Sequence
  Description of Artificial Sequence: Synthetic oligonucleotide
gccaggagaucaagaaauu

SEQ ID NO: 838444 - RNA, 19 nt, Artificial Sequence
  Description of Artificial Sequence: Synthetic oligonucleotide
ccggcaaagaaaggggauu

SEQ ID NO: 838445 - RNA, 19 nt, Artificial Sequence
  Description of Artificial Sequence: Synthetic oligonucleotide
cccauucggggcucugaau

SEQ ID NO: 838446 - RNA, 19 nt, Artificial Sequence
  Description of Artificial Sequence: Synthetic oligonucleotide
ccagugcuauauaccgcuu

SEQ ID NO: 838447 - RNA, 19 nt, Artificial Sequence
  Description of Artificial Sequence: Synthetic oligonucleotide
aucauaugcauucagaagc

SEQ ID NO: 838448 - RNA, 19 nt, Artificial Sequence
  Description of Artificial Sequence: Synthetic oligonucleotide
auuucaaugauucuguguc

SEQ ID NO: 838449 - RNA, 19 nt, Artificial Sequence
  Description of Artificial Sequence: Synthetic oligonucleotide
aauacaacaagcuuaugcu

SEQ ID NO: 838450 - RNA, 19 nt, Artificial Sequence
  Description of Artificial Sequence: Synthetic oligonucleotide
aauccugaggauuaguuuc

SEQ ID NO: 838451 - RNA, 19 nt, Artificial Sequence
  Description of Artificial Sequence: Synthetic oligonucleotide
aguaaauugagguauaacu

SEQ ID NO: 838452 - RNA, 19 nt, Artificial Sequence
  Description of Artificial Sequence: Synthetic oligonucleotide
ucaaacguucucaagauag

SEQ ID NO: 838453 - RNA, 19 nt, Artificial Sequence
  Description of Artificial Sequence: Synthetic oligonucleotide
uguaauuauaugcagcuug

SEQ ID NO: 838454 - RNA, 19 nt, Artificial Sequence
  Description of Artificial Sequence: Synthetic oligonucleotide
uucuauuucaguaauuagc

SEQ ID NO: 838455 - RNA, 19 nt, Artificial Sequence
  Description of Artificial Sequence: Synthetic oligonucleotide
aauuuuaguaaaauuaaug

SEQ ID NO: 838456 - RNA, 19 nt, Artificial Sequence
  Description of Artificial Sequence: Synthetic oligonucleotide
aaaaugaugauucauuauu

SEQ ID NO: 838457 - RNA, 19 nt, Artificial Sequence
  Description of Artificial Sequence: Synthetic oligonucleotide
uuuuccaguaaccauagca

SEQ ID NO: 838458 - RNA, 19 nt, Artificial Sequence
  Description of Artificial Sequence: Synthetic oligonucleotide
uccaauauaaaguaaauuu

SEQ ID NO: 838459 - RNA, 19 nt, Artificial Sequence
  Description of Artificial Sequence: Synthetic oligonucleotide
agagguauugccugaagcc

SEQ ID NO: 838460 - RNA, 19 nt, Artificial Sequence
  Description of Artificial Sequence: Synthetic oligonucleotide
uuaugcuauguuuacaucc

SEQ ID NO: 838461 - RNA, 19 nt, Artificial Sequence
  Description of Artificial Sequence: Synthetic oligonucleotide
uguacugauaccaagcacu

SEQ ID NO: 838462 - RNA, 19 nt, Artificial Sequence
  Description of Artificial Sequence: Synthetic oligonucleotide
aauucucauuuuaauaggc

SEQ ID NO: 838463 - RNA, 19 nt, Artificial Sequence
  Description of Artificial Sequence: Synthetic oligonucleotide
uuuaauguugucaugucgu

SEQ ID NO: 838464 - RNA, 19 nt, Artificial Sequence
  Description of Artificial Sequence: Synthetic oligonucleotide
ucuucaaacguucucaaga

SEQ ID NO: 838465 - RNA, 19 nt, Artificial Sequence
  Description of Artificial Sequence: Synthetic oligonucleotide
gaugcauucacgcugggag

SEQ ID NO: 838466 - RNA, 19 nt, Artificial Sequence
  Description of Artificial Sequence: Synthetic oligonucleotide
acuaauugacauuuucuac

SEQ ID NO: 838467 - RNA, 19 nt, Artificial Sequence
  Description of Artificial Sequence: Synthetic oligonucleotide
uuuguuugaggucacaacu

SEQ ID NO: 838468 - RNA, 19 nt, Artificial Sequence
  Description of Artificial Sequence: Synthetic oligonucleotide
uuugauagcauaaaaugau

SEQ ID NO: 838469 - RNA, 19 nt, Artificial Sequence
  Description of Artificial Sequence: Synthetic oligonucleotide
ucaauuucgaauucuaagu

SEQ ID NO: 838470 - RNA, 19 nt, Artificial Sequence
  Description of Artificial Sequence: Synthetic oligonucleotide
uguagaugcauucacgcug

SEQ ID NO: 838471 - RNA, 19 nt, Artificial Sequence
  Description of Artificial Sequence: Synthetic oligonucleotide
uagcauaaaaugaugauuc

SEQ ID NO: 838472 - RNA, 19 nt, Artificial Sequence
  Description of Artificial Sequence: Synthetic oligonucleotide
aaugaugauucauuauuug

SEQ ID NO: 838473 - RNA, 19 nt, Artificial Sequence
  Description of Artificial Sequence: Synthetic oligonucleotide
caguaauuagcuuugcugg

SEQ ID NO: 838474 - RNA, 19 nt, Artificial Sequence
  Description of Artificial Sequence: Synthetic oligonucleotide
ucuguaacguucauaaucu

SEQ ID NO: 838475 - RNA, 19 nt, Artificial Sequence
  Description of Artificial Sequence: Synthetic oligonucleotide
aauugaggauauuuucuuc

SEQ ID NO: 838476 - RNA, 19 nt, Artificial Sequence
  Description of Artificial Sequence: Synthetic oligonucleotide
uaauucucauuuuaauagg

SEQ ID NO: 838477 - RNA, 19 nt, Artificial Sequence
  Description of Artificial Sequence: Synthetic oligonucleotide
aauguuacacagaaacugg

SEQ ID NO: 838478 - RNA, 19 nt, Artificial Sequence
  Description of Artificial Sequence: Synthetic oligonucleotide
aaucucaguacuaaaaucu

SEQ ID NO: 838479 - RNA, 19 nt, Artificial Sequence
  Description of Artificial Sequence: Synthetic oligonucleotide
acuacuaauugacauuuuc

SEQ ID NO: 838480 - RNA, 19 nt, Artificial Sequence
  Description of Artificial Sequence: Synthetic oligonucleotide
ugaauuucaaugauucugu

SEQ ID NO: 838481 - RNA, 19 nt, Artificial Sequence
  Description of Artificial Sequence: Synthetic oligonucleotide
aacuuacucuucucaaucg

SEQ ID NO: 838482 - RNA, 19 nt, Artificial Sequence
  Description of Artificial Sequence: Synthetic oligonucleotide
ucucaaucgaaccauugcc

SEQ ID NO: 838483 - RNA, 19 nt, Artificial Sequence
  Description of Artificial Sequence: Synthetic oligonucleotide
uuccauauuuccaugacgu

SEQ ID NO: 838484 - RNA, 19 nt, Artificial Sequence
  Description of Artificial Sequence: Synthetic oligonucleotide
gauucugauaauuguacug

SEQ ID NO: 838485 - RNA, 19 nt, Artificial Sequence
  Description of Artificial Sequence: Synthetic oligonucleotide
agcaauugaggauauuuuc

SEQ ID NO: 838486 - RNA, 19 nt, Artificial Sequence
  Description of Artificial Sequence: Synthetic oligonucleotide
agaugaacaguacaagcuc

SEQ ID NO: 838487 - RNA, 19 nt, Artificial Sequence
  Description of Artificial Sequence: Synthetic oligonucleotide
aaucgaaccauugccaauc

SEQ ID NO: 838488 - RNA, 19 nt, Artificial Sequence
  Description of Artificial Sequence: Synthetic oligonucleotide
uucauuauuugauuuggca

SEQ ID NO: 838489 - RNA, 19 nt, Artificial Sequence
  Description of Artificial Sequence: Synthetic oligonucleotide
acuguaauuauaugcagcu

SEQ ID NO: 838490 - RNA, 19 nt, Artificial Sequence
  Description of Artificial Sequence: Synthetic oligonucleotide
uggaggauaauacugucca

SEQ ID NO: 838491 - RNA, 19 nt, Artificial Sequence
  Description of Artificial Sequence: Synthetic oligonucleotide
acguucauaaucucaguac

SEQ ID NO: 838492 - RNA, 19 nt, Artificial Sequence
  Description of Artificial Sequence: Synthetic oligonucleotide
ucaguuaugucuucaauuc

SEQ ID NO: 838493 - RNA, 19 nt, Artificial Sequence
  Description of Artificial Sequence: Synthetic oligonucleotide
ugucgggcuaguuugauag

SEQ ID NO: 838494 - RNA, 19 nt, Artificial Sequence
  Description of Artificial Sequence: Synthetic oligonucleotide
gacauuuucuacuauuaac

SEQ ID NO: 838495 - RNA, 19 nt, Artificial Sequence
  Description of Artificial Sequence: Synthetic oligonucleotide
ucucaguacuaaaaucugg

SEQ ID NO: 838496 - RNA, 19 nt, Artificial Sequence
  Description of Artificial Sequence: Synthetic oligonucleotide
uguaacguucauaaucuca

SEQ ID NO: 838497 - RNA, 19 nt, Artificial Sequence
  Description of Artificial Sequence: Synthetic oligonucleotide
uuugauuuggcauucuuua

SEQ ID NO: 838498 - RNA, 19 nt, Artificial Sequence
  Description of Artificial Sequence: Synthetic oligonucleotide
auaguuaaacauuucuuga

SEQ ID NO: 838499 - RNA, 19 nt, Artificial Sequence
  Description of Artificial Sequence: Synthetic oligonucleotide
aauuucgaauucuaaguau

SEQ ID NO: 838500 - RNA, 19 nt, Artificial Sequence
  Description of Artificial Sequence: Synthetic oligonucleotide
auuaauguuccccugcugu

SEQ ID NO: 838501 - RNA, 19 nt, Artificial Sequence
  Description of Artificial Sequence: Synthetic oligonucleotide
ucuucaaauguccaccucu

SEQ ID NO: 838502 - RNA, 19 nt, Artificial Sequence
  Description of Artificial Sequence: Synthetic oligonucleotide
ugaggauuaguuucuacug

SEQ ID NO: 838503 - RNA, 19 nt, Artificial Sequence
  Description of Artificial Sequence: Synthetic oligonucleotide
ugaugauucauuauuugau

SEQ ID NO: 838504 - RNA, 19 nt, Artificial Sequence
  Description of Artificial Sequence: Synthetic oligonucleotide
aagcuuaugcuauguuuac

SEQ ID NO: 838505 - RNA, 19 nt, Artificial Sequence
  Description of Artificial Sequence: Synthetic oligonucleotide
uuuaguugggccuuuucca

SEQ ID NO: 838506 - RNA, 19 nt, Artificial Sequence
  Description of Artificial Sequence: Synthetic oligonucleotide
aauccuagaacacauucuu

SEQ ID NO: 838507 - RNA, 19 nt, Artificial Sequence
  Description of Artificial Sequence: Synthetic oligonucleotide
aauuauaugcagcuugauu

SEQ ID NO: 838508 - RNA, 19 nt, Artificial Sequence
  Description of Artificial Sequence: Synthetic oligonucleotide
uccuagaacacauucuuca

SEQ ID NO: 838509 - RNA, 19 nt, Artificial Sequence
  Description of Artificial Sequence: Synthetic oligonucleotide
ugauucauuauuugauuug

SEQ ID NO: 838510 - RNA, 19 nt, Artificial Sequence
  Description of Artificial Sequence: Synthetic oligonucleotide
uuuccaguaaccauagcaa

SEQ ID NO: 838511 - RNA, 19 nt, Artificial Sequence
  Description of Artificial Sequence: Synthetic oligonucleotide
agaaccaucgggugauugc

SEQ ID NO: 838512 - RNA, 19 nt, Artificial Sequence
  Description of Artificial Sequence: Synthetic oligonucleotide
ucuuucaugaguuccauuu

SEQ ID NO: 838513 - RNA, 19 nt, Artificial Sequence
  Description of Artificial Sequence: Synthetic oligonucleotide
acuaacuucaugcucauua

SEQ ID NO: 838514 - RNA, 19 nt, Artificial Sequence
  Description of Artificial Sequence: Synthetic oligonucleotide
uauggguaauguaugaaaa

SEQ ID NO: 838515 - RNA, 19 nt, Artificial Sequence
  Description of Artificial Sequence: Synthetic oligonucleotide
uucauuaauguuccccugc

SEQ ID NO: 838516 - RNA, 19 nt, Artificial Sequence
  Description of Artificial Sequence: Synthetic oligonucleotide
uucuguagaugcauucacg

SEQ ID NO: 838517 - RNA, 19 nt, Artificial Sequence
  Description of Artificial Sequence: Synthetic oligonucleotide
aagcauaugugccaugggu

SEQ ID NO: 838518 - RNA, 19 nt, Artificial Sequence
  Description of Artificial Sequence: Synthetic oligonucleotide
uugauagcauaaaaugaug

SEQ ID NO: 838519 - RNA, 19 nt, Artificial Sequence
  Description of Artificial Sequence: Synthetic oligonucleotide
ugguacacuacuaauugac

SEQ ID NO: 838520 - RNA, 19 nt, Artificial Sequence
  Description of Artificial Sequence: Synthetic oligonucleotide
uaauuguacugauaccaag

SEQ ID NO: 838521 - RNA, 19 nt, Artificial Sequence
  Description of Artificial Sequence: Synthetic oligonucleotide
augaguuccauuuucaauu

SEQ ID NO: 838522 - RNA, 19 nt, Artificial Sequence
  Description of Artificial Sequence: Synthetic oligonucleotide
uugauuugccuguaagucc

SEQ ID NO: 838523 - RNA, 19 nt, Artificial Sequence
  Description of Artificial Sequence: Synthetic oligonucleotide
uguucuacguacugaagca

SEQ ID NO: 838524 - RNA, 19 nt, Artificial Sequence
  Description of Artificial Sequence: Synthetic oligonucleotide
cuuuaguugggccuuuucc

SEQ ID NO: 838525 - RNA, 19 nt, Artificial Sequence
  Description of Artificial Sequence: Synthetic oligonucleotide
uucucaaucgaaccauugc

SEQ ID NO: 838526 - RNA, 19 nt, Artificial Sequence
  Description of Artificial Sequence: Synthetic oligonucleotide
uuauaugcagcuugauuug

SEQ ID NO: 838527 - RNA, 19 nt, Artificial Sequence
  Description of Artificial Sequence: Synthetic oligonucleotide
uauccuguucuuuuaggag

SEQ ID NO: 838528 - RNA, 19 nt, Artificial Sequence
  Description of Artificial Sequence: Synthetic oligonucleotide
aaacugggaagacaaauua

SEQ ID NO: 838529 - RNA, 19 nt, Artificial Sequence
  Description of Artificial Sequence: Synthetic oligonucleotide
aaagcauaugugccauggg

SEQ ID NO: 838530 - RNA, 19 nt, Artificial Sequence
  Description of Artificial Sequence: Synthetic oligonucleotide
uuccaaugguuucacauga

SEQ ID NO: 838531 - RNA, 19 nt, Artificial Sequence
  Description of Artificial Sequence: Synthetic oligonucleotide
ugauuguuuaauguuguca

SEQ ID NO: 838532 - RNA, 19 nt, Artificial Sequence
  Description of Artificial Sequence: Synthetic oligonucleotide
uugagguauaacuuugugu

SEQ ID NO: 838533 - RNA, 19 nt, Artificial Sequence
  Description of Artificial Sequence: Synthetic oligonucleotide
aggaaaguuucuaugguac

SEQ ID NO: 838534 - RNA, 19 nt, Artificial Sequence
  Description of Artificial Sequence: Synthetic oligonucleotide
uacccagccuguaaaaucc

SEQ ID NO: 838535 - RNA, 19 nt, Artificial Sequence
  Description of Artificial Sequence: Synthetic oligonucleotide
guaacguucauaaucucag

SEQ ID NO: 838536 - RNA, 19 nt, Artificial Sequence
  Description of Artificial Sequence: Synthetic oligonucleotide
aaaguaccuuucuugauuu

SEQ ID NO: 838537 - RNA, 19 nt, Artificial Sequence
  Description of Artificial Sequence: Synthetic oligonucleotide
guuaaacauuucuugauga

SEQ ID NO: 838538 - RNA, 19 nt, Artificial Sequence
  Description of Artificial Sequence: Synthetic oligonucleotide
gauaauacuguccauaauu

SEQ ID NO: 838539 - RNA, 19 nt, Artificial Sequence
  Description of Artificial Sequence: Synthetic oligonucleotide
uacaacaagcuuaugcuau

SEQ ID NO: 838540 - RNA, 19 nt, Artificial Sequence
  Description of Artificial Sequence: Synthetic oligonucleotide
cuguucuacguacugaagc

SEQ ID NO: 838541 - RNA, 19 nt, Artificial Sequence
  Description of Artificial Sequence: Synthetic oligonucleotide
uaucaaauacaacaagcuu

SEQ ID NO: 838542 - RNA, 19 nt, Artificial Sequence
  Description of Artificial Sequence: Synthetic oligonucleotide
aacguucucaagauaguuc

SEQ ID NO: 838543 - RNA, 19 nt, Artificial Sequence
  Description of Artificial Sequence: Synthetic oligonucleotide
auacccagccuguaaaauc

SEQ ID NO: 838544 - RNA, 19 nt, Artificial Sequence
  Description of Artificial Sequence: Synthetic oligonucleotide
ugauaauuguacugauacc

SEQ ID NO: 838545 - RNA, 19 nt, Artificial Sequence
  Description of Artificial Sequence: Synthetic oligonucleotide
uguuacacagaaacuggga

SEQ ID NO: 838546 - RNA, 19 nt, Artificial Sequence
  Description of Artificial Sequence: Synthetic oligonucleotide
acguucucaagauaguucu

SEQ ID NO: 838547 - RNA, 19 nt, Artificial Sequence
  Description of Artificial Sequence: Synthetic oligonucleotide
aggauucugauaauuguac

SEQ ID NO: 838548 - RNA, 19 nt, Artificial Sequence
  Description of Artificial Sequence: Synthetic oligonucleotide
aagauaugacacaucuuuc

SEQ ID NO: 838549 - RNA, 19 nt, Artificial Sequence
  Description of Artificial Sequence: Synthetic oligonucleotide
ucucaagagguauugccug

SEQ ID NO: 838550 - RNA, 19 nt, Artificial Sequence
  Description of Artificial Sequence: Synthetic oligonucleotide
ucuuacuaacuucaugcuc

SEQ ID NO: 838551 - RNA, 19 nt, Artificial Sequence
  Description of Artificial Sequence: Synthetic oligonucleotide
aaauauacccagccuguaa

SEQ ID NO: 838552 - RNA, 19 nt, Artificial Sequence
  Description of Artificial Sequence: Synthetic oligonucleotide
aacguucauaaucucagua

SEQ ID NO: 838553 - RNA, 19 nt, Artificial Sequence
  Description of Artificial Sequence: Synthetic oligonucleotide
ucauaugcauucagaagcu

SEQ ID NO: 838554 - RNA, 19 nt, Artificial Sequence
  Description of Artificial Sequence: Synthetic oligonucleotide
accaucgggugauugcucc

SEQ ID NO: 838555 - RNA, 19 nt, Artificial Sequence
  Description of Artificial Sequence: Synthetic oligonucleotide
uguaaguccccgucaauga

SEQ ID NO: 838556 - RNA, 19 nt, Artificial Sequence
  Description of Artificial Sequence: Synthetic oligonucleotide
ugguuucacaugaaaauau

SEQ ID NO: 838557 - RNA, 19 nt, Artificial Sequence
  Description of Artificial Sequence: Synthetic oligonucleotide
cuugauuugccuguaaguc

SEQ ID NO: 838558 - RNA, 19 nt, Artificial Sequence
  Description of Artificial Sequence: Synthetic oligonucleotide
gaagcuaauucccuucuca

SEQ ID NO: 838559 - RNA, 19 nt, Artificial Sequence
  Description of Artificial Sequence: Synthetic oligonucleotide
auauggguaauguaugaaa

SEQ ID NO: 838560 - RNA, 19 nt, Artificial Sequence
  Description of Artificial Sequence: Synthetic oligonucleotide
agcaauauggguaauguau

SEQ ID NO: 838561 - RNA, 19 nt, Artificial Sequence
  Description of Artificial Sequence: Synthetic oligonucleotide
auugagguauaacuuugug

SEQ ID NO: 838562 - RNA, 19 nt, Artificial Sequence
  Description of Artificial Sequence: Synthetic oligonucleotide
uuucgaauucuaaguauuc

SEQ ID NO: 838563 - RNA, 19 nt, Artificial Sequence
  Description of Artificial Sequence: Synthetic oligonucleotide
cugcccaaagcauaugugc

SEQ ID NO: 838564 - RNA, 19 nt, Artificial Sequence
  Description of Artificial Sequence: Synthetic oligonucleotide
acugauaccaagcacugua

SEQ ID NO: 838565 - RNA, 19 nt, Artificial Sequence
  Description of Artificial Sequence: Synthetic oligonucleotide
ugacauaucuucggugugg

SEQ ID NO: 838566 - RNA, 19 nt, Artificial Sequence
  Description of Artificial Sequence: Synthetic oligonucleotide
ucauuaauguuccccugcu

SEQ ID NO: 838567 - RNA, 19 nt, Artificial Sequence
  Description of Artificial Sequence: Synthetic oligonucleotide
ucauauaaccaaucugaaa

SEQ ID NO: 838568 - RNA, 19 nt, Artificial Sequence
  Description of Artificial Sequence: Synthetic oligonucleotide
uuaauaggcaaugaaccau

SEQ ID NO: 838569 - RNA, 19 nt, Artificial Sequence
  Description of Artificial Sequence: Synthetic oligonucleotide
ucuaugguacacuacuaau

SEQ ID NO: 838570 - RNA, 19 nt, Artificial Sequence
  Description of Artificial Sequence: Synthetic oligonucleotide
guuugauagcauaaaauga

SEQ ID NO: 838571 - RNA, 19 nt, Artificial Sequence
  Description of Artificial Sequence: Synthetic oligonucleotide
uaauccaaaacuccucaua

SEQ ID NO: 838572 - RNA, 19 nt, Artificial Sequence
  Description of Artificial Sequence: Synthetic oligonucleotide
cacgcugggagaaccaucg

SEQ ID NO: 838573 - RNA, 19 nt, Artificial Sequence
  Description of Artificial Sequence: Synthetic oligonucleotide
ucauagagggcacaagaua

SEQ ID NO: 838574 - RNA, 19 nt, Artificial Sequence
  Description of Artificial Sequence: Synthetic oligonucleotide
gaugacauaucuucggugu

SEQ ID NO: 838575 - RNA, 19 nt, Artificial Sequence
  Description of Artificial Sequence: Synthetic oligonucleotide
ucgucugauuguuuaaugu

SEQ ID NO: 838576 - RNA, 19 nt, Artificial Sequence
  Description of Artificial Sequence: Synthetic oligonucleotide
auagcaauauggguaaugu

SEQ ID NO: 838577 - RNA, 19 nt, Artificial Sequence
  Description of Artificial Sequence: Synthetic oligonucleotide
uaaacuuacucuucucaau

SEQ ID NO: 838578 - RNA, 19 nt, Artificial Sequence
  Description of Artificial Sequence: Synthetic oligonucleotide
uucauaaucucaguacuaa

SEQ ID NO: 838579 - RNA, 19 nt, Artificial Sequence
  Description of Artificial Sequence: Synthetic oligonucleotide
ugaucugcgcugaugacau

SEQ ID NO: 838580 - RNA, 19 nt, Artificial Sequence
  Description of Artificial Sequence: Synthetic oligonucleotide
agcuugauuugccuguaag

SEQ ID NO: 838581 - RNA, 19 nt, Artificial Sequence
  Description of Artificial Sequence: Synthetic oligonucleotide
aguaauuagcuuugcugga

SEQ ID NO: 838582 - RNA, 19 nt, Artificial Sequence
  Description of Artificial Sequence: Synthetic oligonucleotide
aauuccugauggaagguca

SEQ ID NO: 838583 - RNA, 19 nt, Artificial Sequence
  Description of Artificial Sequence: Synthetic oligonucleotide
aagcuuauuaacaucugaa

SEQ ID NO: 838584 - RNA, 19 nt, Artificial Sequence
  Description of Artificial Sequence: Synthetic oligonucleotide
aaugguaggaaaguuucua

SEQ ID NO: 838585 - RNA, 19 nt, Artificial Sequence
  Description of Artificial Sequence: Synthetic oligonucleotide
uucucaagauaguucuggc

SEQ ID NO: 838586 - RNA, 19 nt, Artificial Sequence
  Description of Artificial Sequence: Synthetic oligonucleotide
ucaaucgaaccauugccaa

SEQ ID NO: 838587 - RNA, 19 nt, Artificial Sequence
  Description of Artificial Sequence: Synthetic oligonucleotide
uuucuacuauuaacuaaac

SEQ ID NO: 838588 - RNA, 19 nt, Artificial Sequence
  Description of Artificial Sequence: Synthetic oligonucleotide
cuuuggaagaugaacagua

SEQ ID NO: 838589 - RNA, 19 nt, Artificial Sequence
  Description of Artificial Sequence: Synthetic oligonucleotide
aauauggguaauguaugaa

SEQ ID NO: 838590 - RNA, 19 nt, Artificial Sequence
  Description of Artificial Sequence: Synthetic oligonucleotide
gaaccauugccaauccuag

SEQ ID NO: 838591 - RNA, 19 nt, Artificial Sequence
  Description of Artificial Sequence: Synthetic oligonucleotide
agcuaauucccuucucaag

SEQ ID NO: 838592 - RNA, 19 nt, Artificial Sequence
  Description of Artificial Sequence: Synthetic oligonucleotide
ucgaauucuaaguauucuu

SEQ ID NO: 838593 - RNA, 19 nt, Artificial Sequence
  Description of Artificial Sequence: Synthetic oligonucleotide
acaagcuuaugcuauguuu

SEQ ID NO: 838594 - RNA, 19 nt, Artificial Sequence
  Description of Artificial Sequence: Synthetic oligonucleotide
aagcuaauucccuucucaa

SEQ ID NO: 838595 - RNA, 19 nt, Artificial Sequence
  Description of Artificial Sequence: Synthetic oligonucleotide
cucaguacuaaaaucugga

SEQ ID NO: 838596 - RNA, 19 nt, Artificial Sequence
  Description of Artificial Sequence: Synthetic oligonucleotide
ugaggucacaacuguauuc

SEQ ID NO: 838597 - RNA, 19 nt, Artificial Sequence
  Description of Artificial Sequence: Synthetic oligonucleotide
ucucaagauaguucuggcu

SEQ ID NO: 838598 - RNA, 19 nt, Artificial Sequence
  Description of Artificial Sequence: Synthetic oligonucleotide
ugaaaagaugucgggcuag

SEQ ID NO: 838599 - RNA, 19 nt, Artificial Sequence
  Description of Artificial Sequence: Synthetic oligonucleotide
guuucuaugguacacuacu

SEQ ID NO: 838600 - RNA, 19 nt, Artificial Sequence
  Description of Artificial Sequence: Synthetic oligonucleotide
auagcauaaaaugaugauu

SEQ ID NO: 838601 - RNA, 19 nt, Artificial Sequence
  Description of Artificial Sequence: Synthetic oligonucleotide
uuguacugauaccaagcac

SEQ ID NO: 838602 - RNA, 19 nt, Artificial Sequence
  Description of Artificial Sequence: Synthetic oligonucleotide
auaccaagcacuguaauua

SEQ ID NO: 838603 - RNA, 19 nt, Artificial Sequence
  Description of Artificial Sequence: Synthetic oligonucleotide
uuaugucuucaauuccuga

SEQ ID NO: 838604 - RNA, 19 nt, Artificial Sequence
  Description of Artificial Sequence: Synthetic oligonucleotide
aaaauccugaggauuaguu

SEQ ID NO: 838605 - RNA, 19 nt, Artificial Sequence
  Description of Artificial Sequence: Synthetic oligonucleotide
ugcuauguuuacauccuuc

SEQ ID NO: 838606 - RNA, 19 nt, Artificial Sequence
  Description of Artificial Sequence: Synthetic oligonucleotide
guagaugcauucacgcugg

SEQ ID NO: 838607 - RNA, 19 nt, Artificial Sequence
  Description of Artificial Sequence: Synthetic oligonucleotide
agccuguaaaauccugagg

SEQ ID NO: 838608 - RNA, 19 nt, Artificial Sequence
  Description of Artificial Sequence: Synthetic oligonucleotide
ucguucuaaacuuacucuu

SEQ ID NO: 838609 - RNA, 19 nt, Artificial Sequence
  Description of Artificial Sequence: Synthetic oligonucleotide
gagguauugccugaagccc

SEQ ID NO: 838610 - RNA, 19 nt, Artificial Sequence
  Description of Artificial Sequence: Synthetic oligonucleotide
ucaagauaguucuggcuuc

SEQ ID NO: 838611 - RNA, 19 nt, Artificial Sequence
  Description of Artificial Sequence: Synthetic oligonucleotide
gacauaucuucgguguggg

SEQ ID NO: 838612 - RNA, 19 nt, Artificial Sequence
  Description of Artificial Sequence: Synthetic oligonucleotide
uguuuaauguugucauguc

SEQ ID NO: 838613 - RNA, 19 nt, Artificial Sequence
  Description of Artificial Sequence: Synthetic oligonucleotide
uucgaauucuaaguauucu

SEQ ID NO: 838614 - RNA, 19 nt, Artificial Sequence
  Description of Artificial Sequence: Synthetic oligonucleotide
uccaguaaccauagcaaua

SEQ ID NO: 838615 - RNA, 19 nt, Artificial Sequence
  Description of Artificial Sequence: Synthetic oligonucleotide
uguucuuuuaggaguguuu

SEQ ID NO: 838616 - RNA, 19 nt, Artificial Sequence
  Description of Artificial Sequence: Synthetic oligonucleotide
uauaaccaaucugaaauuu

SEQ ID NO: 838617 - RNA, 19 nt, Artificial Sequence
  Description of Artificial Sequence: Synthetic oligonucleotide
ugcagcuugauuugccugu

SEQ ID NO: 838618 - RNA, 19 nt, Artificial Sequence
  Description of Artificial Sequence: Synthetic oligonucleotide
gauugcuccaucucuguaa

SEQ ID NO: 838619 - RNA, 19 nt, Artificial Sequence
  Description of Artificial Sequence: Synthetic oligonucleotide
uuaguugggccuuuuccaa

SEQ ID NO: 838620 - RNA, 19 nt, Artificial Sequence
  Description of Artificial Sequence: Synthetic oligonucleotide
agcauaaaaugaugauuca

SEQ ID NO: 838621 - RNA, 19 nt, Artificial Sequence
  Description of Artificial Sequence: Synthetic oligonucleotide
uaggaaaguuucuauggua

SEQ ID NO: 838622 - RNA, 19 nt, Artificial Sequence
  Description of Artificial Sequence: Synthetic oligonucleotide
cuuucgauugcuuccaaaa

SEQ ID NO: 838623 - RNA, 19 nt, Artificial Sequence
  Description of Artificial Sequence: Synthetic oligonucleotide
augacgucguucuaaacuu

SEQ ID NO: 838624 - RNA, 19 nt, Artificial Sequence
  Description of Artificial Sequence: Synthetic oligonucleotide
uccuguucuacguacugaa

SEQ ID NO: 838625 - RNA, 19 nt, Artificial Sequence
  Description of Artificial Sequence: Synthetic oligonucleotide
agaagcuaauucccuucuc

SEQ ID NO: 838626 - RNA, 19 nt, Artificial Sequence
  Description of Artificial Sequence: Synthetic oligonucleotide
uaauucugaauuucucaua

SEQ ID NO: 838627 - RNA, 19 nt, Artificial Sequence
  Description of Artificial Sequence: Synthetic oligonucleotide
acaacaagcuuaugcuaug

SEQ ID NO: 838628 - RNA, 19 nt, Artificial Sequence
  Description of Artificial Sequence: Synthetic oligonucleotide
auguauggcuuugucaaag

SEQ ID NO: 838629 - RNA, 19 nt, Artificial Sequence
  Description of Artificial Sequence: Synthetic oligonucleotide
guauccuguucuuuuagga

SEQ ID NO: 838630 - RNA, 19 nt, Artificial Sequence
  Description of Artificial Sequence: Synthetic oligonucleotide
uguccauuuacagaagcua

SEQ ID NO: 838631 - RNA, 19 nt, Artificial Sequence
  Description of Artificial Sequence: Synthetic oligonucleotide
aauugagguauaacuuugu

SEQ ID NO: 838632 - RNA, 19 nt, Artificial Sequence
  Description of Artificial Sequence: Synthetic oligonucleotide
auauggucuuuuaauaccu

SEQ ID NO: 838633 - RNA, 19 nt, Artificial Sequence
  Description of Artificial Sequence: Synthetic oligonucleotide
aguugggccuuuuccaaug

SEQ ID NO: 838634 - RNA, 19 nt, Artificial Sequence
  Description of Artificial Sequence: Synthetic oligonucleotide
caagauaugacacaucuuu

SEQ ID NO: 838635 - RNA, 19 nt, Artificial Sequence
  Description of Artificial Sequence: Synthetic oligonucleotide
cuucucaaucgaaccauug

SEQ ID NO: 838636 - RNA, 19 nt, Artificial Sequence
  Description of Artificial Sequence: Synthetic oligonucleotide
uuggcauacuuaauccaaa

SEQ ID NO: 838637 - RNA, 19 nt, Artificial Sequence
  Description of Artificial Sequence: Synthetic oligonucleotide
gcuaauucccuucucaaga

SEQ ID NO: 838638 - RNA, 19 nt, Artificial Sequence
  Description of Artificial Sequence: Synthetic oligonucleotide
uuucuaugguacacuacua

SEQ ID NO: 838639 - RNA, 19 nt, Artificial Sequence
  Description of Artificial Sequence: Synthetic oligonucleotide
uggauguucuacugcuacc

SEQ ID NO: 838640 - RNA, 19 nt, Artificial Sequence
  Description of Artificial Sequence: Synthetic oligonucleotide
ccauauuuccaugacgucg

SEQ ID NO: 838641 - RNA, 19 nt, Artificial Sequence
  Description of Artificial Sequence: Synthetic oligonucleotide
cuuaugcuauguuuacauc

SEQ ID NO: 838642 - RNA, 19 nt, Artificial Sequence
  Description of Artificial Sequence: Synthetic oligonucleotide
acauaucuucggugugggc

SEQ ID NO: 838643 - RNA, 19 nt, Artificial Sequence
  Description of Artificial Sequence: Synthetic oligonucleotide
caagcuuaugcuauguuua

SEQ ID NO: 838644 - RNA, 19 nt, Artificial Sequence
  Description of Artificial Sequence: Synthetic oligonucleotide
cuaaacuuacucuucucaa

SEQ ID NO: 838645 - RNA, 19 nt, Artificial Sequence
  Description of Artificial Sequence: Synthetic oligonucleotide
ugccaauccuagaacacau

SEQ ID NO: 838646 - RNA, 19 nt, Artificial Sequence
  Description of Artificial Sequence: Synthetic oligonucleotide
aaccucgucugauuguuua

SEQ ID NO: 838647 - RNA, 19 nt, Artificial Sequence
  Description of Artificial Sequence: Synthetic oligonucleotide
ugaacaguacaagcucugc

SEQ ID NO: 838648 - RNA, 19 nt, Artificial Sequence
  Description of Artificial Sequence: Synthetic oligonucleotide
uaggaguguuugauguuca

SEQ ID NO: 838649 - RNA, 19 nt, Artificial Sequence
  Description of Artificial Sequence: Synthetic oligonucleotide
cacaagauaugacacaucu

SEQ ID NO: 838650 - RNA, 19 nt, Artificial Sequence
  Description of Artificial Sequence: Synthetic oligonucleotide
aguuucuacuguuuuccaa

SEQ ID NO: 838651 - RNA, 19 nt, Artificial Sequence
  Description of Artificial Sequence: Synthetic oligonucleotide
aaacguucucaagauaguu

SEQ ID NO: 838652 - RNA, 19 nt, Artificial Sequence
  Description of Artificial Sequence: Synthetic oligonucleotide
aacaagcuuaugcuauguu

SEQ ID NO: 838653 - RNA, 19 nt, Artificial Sequence
  Description of Artificial Sequence: Synthetic oligonucleotide
cucaaucgaaccauugcca

SEQ ID NO: 838654 - RNA, 19 nt, Artificial Sequence
  Description of Artificial Sequence: Synthetic oligonucleotide
guaauuauaugcagcuuga

SEQ ID NO: 838655 - RNA, 19 nt, Artificial Sequence
  Description of Artificial Sequence: Synthetic oligonucleotide
aggauuaguuucuacuguu

SEQ ID NO: 838656 - RNA, 19 nt, Artificial Sequence
  Description of Artificial Sequence: Synthetic oligonucleotide
ucaaagcaauugaggauau

SEQ ID NO: 838657 - RNA, 19 nt, Artificial Sequence
  Description of Artificial Sequence: Synthetic oligonucleotide
uugauuuggcauucuuuau

SEQ ID NO: 838658 - RNA, 19 nt, Artificial Sequence
  Description of Artificial Sequence: Synthetic oligonucleotide
cauagcaauauggguaaug

SEQ ID NO: 838659 - RNA, 19 nt, Artificial Sequence
  Description of Artificial Sequence: Synthetic oligonucleotide
cucgucugauuguuuaaug

SEQ ID NO: 838660 - RNA, 19 nt, Artificial Sequence
  Description of Artificial Sequence: Synthetic oligonucleotide
augacauaucuucggugug

SEQ ID NO: 838661 - RNA, 19 nt, Artificial Sequence
  Description of Artificial Sequence: Synthetic oligonucleotide
caagcacuguaauuauaug

SEQ ID NO: 838662 - RNA, 19 nt, Artificial Sequence
  Description of Artificial Sequence: Synthetic oligonucleotide
cagaagcuuauuaacaucu

SEQ ID NO: 838663 - RNA, 19 nt, Artificial Sequence
  Description of Artificial Sequence: Synthetic oligonucleotide
uacugcuaccucugaacug

SEQ ID NO: 838664 - RNA, 19 nt, Artificial Sequence
  Description of Artificial Sequence: Synthetic oligonucleotide
augguacacuacuaauuga

SEQ ID NO: 838665 - RNA, 19 nt, Artificial Sequence
  Description of Artificial Sequence: Synthetic oligonucleotide
ucaaugcuaugguuuucca

SEQ ID NO: 838666 - RNA, 19 nt, Artificial Sequence
  Description of Artificial Sequence: Synthetic oligonucleotide
augguaggaaaguuucuau

SEQ ID NO: 838667 - RNA, 19 nt, Artificial Sequence
  Description of Artificial Sequence: Synthetic oligonucleotide
acacuacuaauugacauuu

SEQ ID NO: 838668 - RNA, 19 nt, Artificial Sequence
  Description of Artificial Sequence: Synthetic oligonucleotide
aagguauccuguucuuuua

SEQ ID NO: 838669 - RNA, 19 nt, Artificial Sequence
  Description of Artificial Sequence: Synthetic oligonucleotide
uggcauacuuaauccaaaa

SEQ ID NO: 838670 - RNA, 19 nt, Artificial Sequence
  Description of Artificial Sequence: Synthetic oligonucleotide
caauauggguaauguauga

SEQ ID NO: 838671 - RNA, 19 nt, Artificial Sequence
  Description of Artificial Sequence: Synthetic oligonucleotide
gaugauucauuauuugauu

SEQ ID NO: 838672 - RNA, 19 nt, Artificial Sequence
  Description of Artificial Sequence: Synthetic oligonucleotide
uuaauguuccccugcuguu

SEQ ID NO: 838673 - RNA, 19 nt, Artificial Sequence
  Description of Artificial Sequence: Synthetic oligonucleotide
aggcaaugaaccauguaug

SEQ ID NO: 838674 - RNA, 19 nt, Artificial Sequence
  Description of Artificial Sequence: Synthetic oligonucleotide
auuucgaauucuaaguauu

SEQ ID NO: 838675 - RNA, 19 nt, Artificial Sequence
  Description of Artificial Sequence: Synthetic oligonucleotide
guuaugucuucaauuccug

SEQ ID NO: 838676 - RNA, 19 nt, Artificial Sequence
  Description of Artificial Sequence: Synthetic oligonucleotide
auuuuguuugaggucacaa

SEQ ID NO: 838677 - RNA, 19 nt, Artificial Sequence
  Description of Artificial Sequence: Synthetic oligonucleotide
ucgggcuaguuugauagca

SEQ ID NO: 838678 - RNA, 19 nt, Artificial Sequence
  Description of Artificial Sequence: Synthetic oligonucleotide
aagcaauugaggauauuuu

SEQ ID NO: 838679 - RNA, 19 nt, Artificial Sequence
  Description of Artificial Sequence: Synthetic oligonucleotide
uaaaauccugaggauuagu

SEQ ID NO: 838680 - RNA, 19 nt, Artificial Sequence
  Description of Artificial Sequence: Synthetic oligonucleotide
uucaaacguucucaagaua

SEQ ID NO: 838681 - RNA, 19 nt, Artificial Sequence
  Description of Artificial Sequence: Synthetic oligonucleotide
uaacguucauaaucucagu

SEQ ID NO: 838682 - RNA, 19 nt, Artificial Sequence
  Description of Artificial Sequence: Synthetic oligonucleotide
uaguuucuacuguuuucca

SEQ ID NO: 838683 - RNA, 19 nt, Artificial Sequence
  Description of Artificial Sequence: Synthetic oligonucleotide
aaugaaccauguauggcuu

SEQ ID NO: 838684 - RNA, 19 nt, Artificial Sequence
  Description of Artificial Sequence: Synthetic oligonucleotide
aagugauucuccuguucua

SEQ ID NO: 838685 - RNA, 19 nt, Artificial Sequence
  Description of Artificial Sequence: Synthetic oligonucleotide
caugacgucguucuaaacu

SEQ ID NO: 838686 - RNA, 19 nt, Artificial Sequence
  Description of Artificial Sequence: Synthetic oligonucleotide
cauuuucuacuauuaacua

SEQ ID NO: 838687 - RNA, 19 nt, Artificial Sequence
  Description of Artificial Sequence: Synthetic oligonucleotide
uuuaggaguguuugauguu

SEQ ID NO: 838688 - RNA, 19 nt, Artificial Sequence
  Description of Artificial Sequence: Synthetic oligonucleotide
caauuucgaauucuaagua

SEQ ID NO: 838689 - RNA, 19 nt, Artificial Sequence
  Description of Artificial Sequence: Synthetic oligonucleotide
aucucaguacuaaaaucug

SEQ ID NO: 838690 - RNA, 19 nt, Artificial Sequence
  Description of Artificial Sequence: Synthetic oligonucleotide
gugccauggguuucuuugg

SEQ ID NO: 838691 - RNA, 19 nt, Artificial Sequence
  Description of Artificial Sequence: Synthetic oligonucleotide
auauacccagccuguaaaa

SEQ ID NO: 838692 - RNA, 19 nt, Artificial Sequence
  Description of Artificial Sequence: Synthetic oligonucleotide
gcuauguuuacauccuuca

SEQ ID NO: 838693 - RNA, 19 nt, Artificial Sequence
  Description of Artificial Sequence: Synthetic oligonucleotide
ucuuucgauugcuuccaaa

SEQ ID NO: 838694 - RNA, 19 nt, Artificial Sequence
  Description of Artificial Sequence: Synthetic oligonucleotide
guugggccuuuuccaaugg

SEQ ID NO: 838695 - RNA, 19 nt, Artificial Sequence
  Description of Artificial Sequence: Synthetic oligonucleotide
auaucuucggugugggcuu

SEQ ID NO: 838696 - RNA, 19 nt, Artificial Sequence
  Description of Artificial Sequence: Synthetic oligonucleotide
cauauuuccaugacgucgu

SEQ ID NO: 838697 - RNA, 19 nt, Artificial Sequence
  Description of Artificial Sequence: Synthetic oligonucleotide
ugccauggguuucuuugga

SEQ ID NO: 838698 - RNA, 19 nt, Artificial Sequence
  Description of Artificial Sequence: Synthetic oligonucleotide
uauacccagccuguaaaau

SEQ ID NO: 838699 - RNA, 19 nt, Artificial Sequence
  Description of Artificial Sequence: Synthetic oligonucleotide
cauucacgcugggagaacc

SEQ ID NO: 838700 - RNA, 19 nt, Artificial Sequence
  Description of Artificial Sequence: Synthetic oligonucleotide
uucuccuguucuacguacu

SEQ ID NO: 838701 - RNA, 19 nt, Artificial Sequence
  Description of Artificial Sequence: Synthetic oligonucleotide
uggaucaguuaugucuuca

SEQ ID NO: 838702 - RNA, 19 nt, Artificial Sequence
  Description of Artificial Sequence: Synthetic oligonucleotide
cauuauuugauuuggcauu

SEQ ID NO: 838703 - RNA, 19 nt, Artificial Sequence
  Description of Artificial Sequence: Synthetic oligonucleotide
ucgggugauugcuccaucu

SEQ ID NO: 838704 - RNA, 19 nt, Artificial Sequence
  Description of Artificial Sequence: Synthetic oligonucleotide
guacugauaccaagcacug

SEQ ID NO: 838705 - RNA, 19 nt, Artificial Sequence
  Description of Artificial Sequence: Synthetic oligonucleotide
uccauauuuccaugacguc

SEQ ID NO: 838706 - RNA, 19 nt, Artificial Sequence
  Description of Artificial Sequence: Synthetic oligonucleotide
ugggccuuuuccaaugguu

SEQ ID NO: 838707 - RNA, 19 nt, Artificial Sequence
  Description of Artificial Sequence: Synthetic oligonucleotide
cauuaauguuccccugcug

SEQ ID NO: 838708 - RNA, 19 nt, Artificial Sequence
  Description of Artificial Sequence: Synthetic oligonucleotide
cucauauaaccaaucugaa

SEQ ID NO: 838709 - RNA, 19 nt, Artificial Sequence
  Description of Artificial Sequence: Synthetic oligonucleotide
gcaauauggguaauguaug

SEQ ID NO: 838710 - RNA, 19 nt, Artificial Sequence
  Description of Artificial Sequence: Synthetic oligonucleotide
guggaggauaauacugucc

SEQ ID NO: 838711 - RNA, 19 nt, Artificial Sequence
  Description of Artificial Sequence: Synthetic oligonucleotide
ggcauacuuaauccaaaac

SEQ ID NO: 838712 - RNA, 19 nt, Artificial Sequence
  Description of Artificial Sequence: Synthetic oligonucleotide
cugaggauuaguuucuacu

SEQ ID NO: 838713 - RNA, 19 nt, Artificial Sequence
  Description of Artificial Sequence: Synthetic oligonucleotide
gucguucuaaacuuacucu

SEQ ID NO: 838714 - RNA, 19 nt, Artificial Sequence
  Description of Artificial Sequence: Synthetic oligonucleotide
ugccuguaaguccccguca

SEQ ID NO: 838715 - RNA, 19 nt, Artificial Sequence
  Description of Artificial Sequence: Synthetic oligonucleotide
gacgucguucuaaacuuac

SEQ ID NO: 838716 - RNA, 19 nt, Artificial Sequence
  Description of Artificial Sequence: Synthetic oligonucleotide
ucgauaaaccucgucugau

SEQ ID NO: 838717 - RNA, 19 nt, Artificial Sequence
  Description of Artificial Sequence: Synthetic oligonucleotide
uagcaauauggguaaugua

SEQ ID NO: 838718 - RNA, 19 nt, Artificial Sequence
  Description of Artificial Sequence: Synthetic oligonucleotide
ggcuucauuaauguucccc

SEQ ID NO: 838719 - RNA, 19 nt, Artificial Sequence
  Description of Artificial Sequence: Synthetic oligonucleotide
uaccaagcacuguaauuau

SEQ ID NO: 838720 - RNA, 19 nt, Artificial Sequence
  Description of Artificial Sequence: Synthetic oligonucleotide
ugcauucacgcugggagaa

SEQ ID NO: 838721 - RNA, 19 nt, Artificial Sequence
  Description of Artificial Sequence: Synthetic oligonucleotide
ugcgcugaugacauaucuu

SEQ ID NO: 838722 - RNA, 19 nt, Artificial Sequence
  Description of Artificial Sequence: Synthetic oligonucleotide
ccaauccuagaacacauuc

SEQ ID NO: 838723 - RNA, 19 nt, Artificial Sequence
  Description of Artificial Sequence: Synthetic oligonucleotide
uaauuauaugcagcuugau

SEQ ID NO: 838724 - RNA, 19 nt, Artificial Sequence
  Description of Artificial Sequence: Synthetic oligonucleotide
auuugccuguaaguccccg

SEQ ID NO: 838725 - RNA, 19 nt, Artificial Sequence
  Description of Artificial Sequence: Synthetic oligonucleotide
augcauucacgcugggaga

SEQ ID NO: 838726 - RNA, 19 nt, Artificial Sequence
  Description of Artificial Sequence: Synthetic oligonucleotide
uuaagguauccuguucuuu

SEQ ID NO: 838727 - RNA, 19 nt, Artificial Sequence
  Description of Artificial Sequence: Synthetic oligonucleotide
uccaccuuucuuugagaaa

SEQ ID NO: 838728 - RNA, 19 nt, Artificial Sequence
  Description of Artificial Sequence: Synthetic oligonucleotide
uagaugcauucacgcuggg

SEQ ID NO: 838729 - RNA, 19 nt, Artificial Sequence
  Description of Artificial Sequence: Synthetic oligonucleotide
guaggaaaguuucuauggu

SEQ ID NO: 838730 - RNA, 19 nt, Artificial Sequence
  Description of Artificial Sequence: Synthetic oligonucleotide
gcgcugaugacauaucuuc

SEQ ID NO: 838731 - RNA, 19 nt, Artificial Sequence
  Description of Artificial Sequence: Synthetic oligonucleotide
augaacaguacaagcucug

SEQ ID NO: 838732 - RNA, 19 nt, Artificial Sequence
  Description of Artificial Sequence: Synthetic oligonucleotide
agauaguucuggcuucauu

SEQ ID NO: 838733 - RNA, 19 nt, Artificial Sequence
  Description of Artificial Sequence: Synthetic oligonucleotide
aaccaucgggugauugcuc

SEQ ID NO: 838734 - RNA, 19 nt, Artificial Sequence
  Description of Artificial Sequence: Synthetic oligonucleotide
cucaagauaguucuggcuu

SEQ ID NO: 838735 - RNA, 19 nt, Artificial Sequence
  Description of Artificial Sequence: Synthetic oligonucleotide
gagaaccaucgggugauug

SEQ ID NO: 838736 - RNA, 19 nt, Artificial Sequence
  Description of Artificial Sequence: Synthetic oligonucleotide
agguggaggauaauacugu

SEQ ID NO: 838737 - RNA, 19 nt, Artificial Sequence
  Description of Artificial Sequence: Synthetic oligonucleotide
caagugauucuccuguucu

SEQ ID NO: 838738 - RNA, 19 nt, Artificial Sequence
  Description of Artificial Sequence: Synthetic oligonucleotide
ucggugugggcuuucuuuu

SEQ ID NO: 838739 - RNA, 19 nt, Artificial Sequence
  Description of Artificial Sequence: Synthetic oligonucleotide
aucgggugauugcuccauc

SEQ ID NO: 838740 - RNA, 19 nt, Artificial Sequence
  Description of Artificial Sequence: Synthetic oligonucleotide
aucugcgcugaugacauau

SEQ ID NO: 838741 - RNA, 19 nt, Artificial Sequence
  Description of Artificial Sequence: Synthetic oligonucleotide
ggaaaguuucuaugguaca

SEQ ID NO: 838742 - RNA, 19 nt, Artificial Sequence
  Description of Artificial Sequence: Synthetic oligonucleotide
gauucuccuguucuacgua

SEQ ID NO: 838743 - RNA, 19 nt, Artificial Sequence
  Description of Artificial Sequence: Synthetic oligonucleotide
auaugugccauggguuucu

SEQ ID NO: 838744 - RNA, 19 nt, Artificial Sequence
  Description of Artificial Sequence: Synthetic oligonucleotide
uugggccuuuuccaauggu

SEQ ID NO: 838745 - RNA, 19 nt, Artificial Sequence
  Description of Artificial Sequence: Synthetic oligonucleotide
ggugauugcuccaucucug

SEQ ID NO: 838746 - RNA, 19 nt, Artificial Sequence
  Description of Artificial Sequence: Synthetic oligonucleotide
auaggcaaugaaccaugua

SEQ ID NO: 838747 - RNA, 19 nt, Artificial Sequence
  Description of Artificial Sequence: Synthetic oligonucleotide
agcauaugugccauggguu

SEQ ID NO: 838748 - RNA, 19 nt, Artificial Sequence
  Description of Artificial Sequence: Synthetic oligonucleotide
ucacgcugggagaaccauc

SEQ ID NO: 838749 - RNA, 19 nt, Artificial Sequence
  Description of Artificial Sequence: Synthetic oligonucleotide
guccauuuacagaagcuaa

SEQ ID NO: 838750 - RNA, 19 nt, Artificial Sequence
  Description of Artificial Sequence: Synthetic oligonucleotide
cuaugguacacuacuaauu

SEQ ID NO: 838751 - RNA, 19 nt, Artificial Sequence
  Description of Artificial Sequence: Synthetic oligonucleotide
caauccuagaacacauucu

SEQ ID NO: 838752 - RNA, 19 nt, Artificial Sequence
  Description of Artificial Sequence: Synthetic oligonucleotide
agccgucaagugauucucc

SEQ ID NO: 838753 - RNA, 19 nt, Artificial Sequence
  Description of Artificial Sequence: Synthetic oligonucleotide
ccaguucuuuaguugggcc

SEQ ID NO: 838754 - RNA, 19 nt, Artificial Sequence
  Description of Artificial Sequence: Synthetic oligonucleotide
ugacgucguucuaaacuua

SEQ ID NO: 838755 - RNA, 19 nt, Artificial Sequence
  Description of Artificial Sequence: Synthetic oligonucleotide
ucugaaccauuuucagcuu

SEQ ID NO: 838756 - RNA, 19 nt, Artificial Sequence
  Description of Artificial Sequence: Synthetic oligonucleotide
cucaagagguauugccuga

SEQ ID NO: 838757 - RNA, 19 nt, Artificial Sequence
  Description of Artificial Sequence: Synthetic oligonucleotide
cuguaacguucauaaucuc

SEQ ID NO: 838758 - RNA, 19 nt, Artificial Sequence
  Description of Artificial Sequence: Synthetic oligonucleotide
cuucaaacguucucaagau

SEQ ID NO: 838759 - RNA, 19 nt, Artificial Sequence
  Description of Artificial Sequence: Synthetic oligonucleotide
uaguugggccuuuuccaau

SEQ ID NO: 838760 - RNA, 19 nt, Artificial Sequence
  Description of Artificial Sequence: Synthetic oligonucleotide
gcuucauuaauguuccccu

SEQ ID NO: 838761 - RNA, 19 nt, Artificial Sequence
  Description of Artificial Sequence: Synthetic oligonucleotide
ccgucaaugaucugcgcug

SEQ ID NO: 838762 - RNA, 19 nt, Artificial Sequence
  Description of Artificial Sequence: Synthetic oligonucleotide
agcuuugcuggaucaguua

SEQ ID NO: 838763 - RNA, 19 nt, Artificial Sequence
  Description of Artificial Sequence: Synthetic oligonucleotide
cugauaccaagcacuguaa

SEQ ID NO: 838764 - RNA, 19 nt, Artificial Sequence
  Description of Artificial Sequence: Synthetic oligonucleotide
gcuuaugcuauguuuacau

SEQ ID NO: 838765 - RNA, 19 nt, Artificial Sequence
  Description of Artificial Sequence: Synthetic oligonucleotide
gaaccaucgggugauugcu

SEQ ID NO: 838766 - RNA, 19 nt, Artificial Sequence
  Description of Artificial Sequence: Synthetic oligonucleotide
cucuuacuaacuucaugcu

SEQ ID NO: 838767 - RNA, 19 nt, Artificial Sequence
  Description of Artificial Sequence: Synthetic oligonucleotide
cgucguucuaaacuuacuc

SEQ ID NO: 838768 - RNA, 19 nt, Artificial Sequence
  Description of Artificial Sequence: Synthetic oligonucleotide
uguuccccugcuguucuuc

SEQ ID NO: 838769 - RNA, 19 nt, Artificial Sequence
  Description of Artificial Sequence: Synthetic oligonucleotide
uucacgcugggagaaccau

SEQ ID NO: 838770 - RNA, 19 nt, Artificial Sequence
  Description of Artificial Sequence: Synthetic oligonucleotide
gucgggcuaguuugauagc

SEQ ID NO: 838771 - RNA, 19 nt, Artificial Sequence
  Description of Artificial Sequence: Synthetic oligonucleotide
gcaauugaggauauuuucu

SEQ ID NO: 838772 - RNA, 19 nt, Artificial Sequence
  Description of Artificial Sequence: Synthetic oligonucleotide
cuucaaugcuaugguuuuc

SEQ ID NO: 838773 - RNA, 19 nt, Artificial Sequence
  Description of Artificial Sequence: Synthetic oligonucleotide
acgcugggagaaccaucgg

SEQ ID NO: 838774 - RNA, 19 nt, Artificial Sequence
  Description of Artificial Sequence: Synthetic oligonucleotide
acucuuucaugaguuccau

SEQ ID NO: 838775 - RNA, 19 nt, Artificial Sequence
  Description of Artificial Sequence: Synthetic oligonucleotide
cagccgucaagugauucuc

SEQ ID NO: 838776 - RNA, 19 nt, Artificial Sequence
  Description of Artificial Sequence: Synthetic oligonucleotide
acaagauaugacacaucuu

SEQ ID NO: 838777 - RNA, 19 nt, Artificial Sequence
  Description of Artificial Sequence: Synthetic oligonucleotide
cgucgauaaaccucgucug

SEQ ID NO: 838778 - RNA, 19 nt, Artificial Sequence
  Description of Artificial Sequence: Synthetic oligonucleotide
gcuugauuugccuguaagu

SEQ ID NO: 838779 - RNA, 19 nt, Artificial Sequence
  Description of Artificial Sequence: Synthetic oligonucleotide
guucuccaauauaaaguaa

SEQ ID NO: 838780 - RNA, 19 nt, Artificial Sequence
  Description of Artificial Sequence: Synthetic oligonucleotide
caaacguucucaagauagu

SEQ ID NO: 838781 - RNA, 19 nt, Artificial Sequence
  Description of Artificial Sequence: Synthetic oligonucleotide
ggaguguuugauguucauc

SEQ ID NO: 838782 - RNA, 19 nt, Artificial Sequence
  Description of Artificial Sequence: Synthetic oligonucleotide
ucuucggugugggcuuucu

SEQ ID NO: 838783 - RNA, 19 nt, Artificial Sequence
  Description of Artificial Sequence: Synthetic oligonucleotide
guucuacguacugaagcaa

SEQ ID NO: 838784 - RNA, 19 nt, Artificial Sequence
  Description of Artificial Sequence: Synthetic oligonucleotide
ccuguucuacguacugaag

SEQ ID NO: 838785 - RNA, 19 nt, Artificial Sequence
  Description of Artificial Sequence: Synthetic oligonucleotide
gcuaguuugauagcauaaa

SEQ ID NO: 838786 - RNA, 19 nt, Artificial Sequence
  Description of Artificial Sequence: Synthetic oligonucleotide
gaaaagaugucgggcuagu

SEQ ID NO: 838787 - RNA, 19 nt, Artificial Sequence
  Description of Artificial Sequence: Synthetic oligonucleotide
cuguagaugcauucacgcu

SEQ ID NO: 838788 - RNA, 19 nt, Artificial Sequence
  Description of Artificial Sequence: Synthetic oligonucleotide
cuggcagccgucaagugau

SEQ ID NO: 838789 - RNA, 19 nt, Artificial Sequence
  Description of Artificial Sequence: Synthetic oligonucleotide
guaauuagcuuugcuggau

SEQ ID NO: 838790 - RNA, 19 nt, Artificial Sequence
  Description of Artificial Sequence: Synthetic oligonucleotide
ccugaggauuaguuucuac

SEQ ID NO: 838791 - RNA, 19 nt, Artificial Sequence
  Description of Artificial Sequence: Synthetic oligonucleotide
gggcacaagauaugacaca

SEQ ID NO: 838792 - RNA, 19 nt, Artificial Sequence
  Description of Artificial Sequence: Synthetic oligonucleotide
auucacgcugggagaacca

SEQ ID NO: 838793 - RNA, 19 nt, Artificial Sequence
  Description of Artificial Sequence: Synthetic oligonucleotide
cuacguacugaagcaaaua

SEQ ID NO: 838794 - RNA, 19 nt, Artificial Sequence
  Description of Artificial Sequence: Synthetic oligonucleotide
acgucguucuaaacuuacu

SEQ ID NO: 838795 - RNA, 19 nt, Artificial Sequence
  Description of Artificial Sequence: Synthetic oligonucleotide
gugauugcuccaucucugu

SEQ ID NO: 838796 - RNA, 19 nt, Artificial Sequence
  Description of Artificial Sequence: Synthetic oligonucleotide
ggcuaguuugauagcauaa

SEQ ID NO: 838797 - RNA, 19 nt, Artificial Sequence
  Description of Artificial Sequence: Synthetic oligonucleotide
agaugucgggcuaguuuga

SEQ ID NO: 838798 - RNA, 19 nt, Artificial Sequence
  Description of Artificial Sequence: Synthetic oligonucleotide
gcaaauauacccagccugu

SEQ ID NO: 838799 - RNA, 19 nt, Artificial Sequence
  Description of Artificial Sequence: Synthetic oligonucleotide
caguacaagcucugcugaa

SEQ ID NO: 838800 - RNA, 19 nt, Artificial Sequence
  Description of Artificial Sequence: Synthetic oligonucleotide
cuccuguucuacguacuga

SEQ ID NO: 838801 - RNA, 19 nt, Artificial Sequence
  Description of Artificial Sequence: Synthetic oligonucleotide
gggugauugcuccaucucu

SEQ ID NO: 838802 - RNA, 19 nt, Artificial Sequence
  Description of Artificial Sequence: Synthetic oligonucleotide
ccaaugguuucacaugaaa

SEQ ID NO: 838803 - RNA, 19 nt, Artificial Sequence
  Description of Artificial Sequence: Synthetic oligonucleotide
uccugaggauuaguuucua

SEQ ID NO: 838804 - RNA, 19 nt, Artificial Sequence
  Description of Artificial Sequence: Synthetic oligonucleotide
caaauauacccagccugua

SEQ ID NO: 838805 - RNA, 19 nt, Artificial Sequence
  Description of Artificial Sequence: Synthetic oligonucleotide
caugcucauuauaguuaaa

SEQ ID NO: 838806 - RNA, 19 nt, Artificial Sequence
  Description of Artificial Sequence: Synthetic oligonucleotide
accaagcacuguaauuaua

SEQ ID NO: 838807 - RNA, 19 nt, Artificial Sequence
  Description of Artificial Sequence: Synthetic oligonucleotide
ccgucgauaaaccucgucu

SEQ ID NO: 838808 - RNA, 19 nt, Artificial Sequence
  Description of Artificial Sequence: Synthetic oligonucleotide
cccuucucaagagguauug

SEQ ID NO: 838809 - RNA, 19 nt, Artificial Sequence
  Description of Artificial Sequence: Synthetic oligonucleotide
gggcuaguuugauagcaua

SEQ ID NO: 838810 - RNA, 19 nt, Artificial Sequence
  Description of Artificial Sequence: Synthetic oligonucleotide
gaaccauguauggcuuugu

SEQ ID NO: 838811 - RNA, 19 nt, Artificial Sequence
  Description of Artificial Sequence: Synthetic oligonucleotide
cagcauuugccauuucauu

SEQ ID NO: 838812 - RNA, 19 nt, Artificial Sequence
  Description of Artificial Sequence: Synthetic oligonucleotide
caaucgaaccauugccaau

SEQ ID NO: 838813 - RNA, 19 nt, Artificial Sequence
  Description of Artificial Sequence: Synthetic oligonucleotide
ccaaagcauaugugccaug

SEQ ID NO: 838814 - RNA, 19 nt, Artificial Sequence
  Description of Artificial Sequence: Synthetic oligonucleotide
caacaagcuuaugcuaugu

SEQ ID NO: 838815 - RNA, 19 nt, Artificial Sequence
  Description of Artificial Sequence: Synthetic oligonucleotide
ggauaauacuguccauaau

SEQ ID NO: 838816 - RNA, 19 nt, Artificial Sequence
  Description of Artificial Sequence: Synthetic oligonucleotide
gccuguaaguccccgucaa

SEQ ID NO: 838817 - RNA, 19 nt, Artificial Sequence
  Description of Artificial Sequence: Synthetic oligonucleotide
uaucuucggugugggcuuu

SEQ ID NO: 838818 - RNA, 19 nt, Artificial Sequence
  Description of Artificial Sequence: Synthetic oligonucleotide
uaugugccauggguuucuu

SEQ ID NO: 838819 - RNA, 19 nt, Artificial Sequence
  Description of Artificial Sequence: Synthetic oligonucleotide
ccaugacgucguucuaaac

SEQ ID NO: 838820 - RNA, 19 nt, Artificial Sequence
  Description of Artificial Sequence: Synthetic oligonucleotide
gaugucgggcuaguuugau

SEQ ID NO: 838821 - RNA, 19 nt, Artificial Sequence
  Description of Artificial Sequence: Synthetic oligonucleotide
ccaguaaccauagcaauau

SEQ ID NO: 838822 - RNA, 19 nt, Artificial Sequence
  Description of Artificial Sequence: Synthetic oligonucleotide
gcacaagauaugacacauc

SEQ ID NO: 838823 - RNA, 19 nt, Artificial Sequence
  Description of Artificial Sequence: Synthetic oligonucleotide
ggcagccgucaagugauuc

SEQ ID NO: 838824 - RNA, 19 nt, Artificial Sequence
  Description of Artificial Sequence: Synthetic oligonucleotide
ggaggauaauacuguccau

SEQ ID NO: 838825 - RNA, 19 nt, Artificial Sequence
  Description of Artificial Sequence: Synthetic oligonucleotide
ggauuaguuucuacuguuu

SEQ ID NO: 838826 - RNA, 19 nt, Artificial Sequence
  Description of Artificial Sequence: Synthetic oligonucleotide
cccgucgauaaaccucguc

SEQ ID NO: 838827 - RNA, 19 nt, Artificial Sequence
  Description of Artificial Sequence: Synthetic oligonucleotide
cccgucaaugaucugcgcu

SEQ ID NO: 838828 - RNA, 19 nt, Artificial Sequence
  Description of Artificial Sequence: Synthetic oligonucleotide
gcauucacgcugggagaac

SEQ ID NO: 838829 - RNA, 19 nt, Artificial Sequence
  Description of Artificial Sequence: Synthetic oligonucleotide
ccacaacucuuucaugagu

SEQ ID NO: 838830 - RNA, 19 nt, Artificial Sequence
  Description of Artificial Sequence: Synthetic oligonucleotide
ccccgucaaugaucugcgc

SEQ ID NO: 838831 - RNA, 19 nt, Artificial Sequence
  Description of Artificial Sequence: Synthetic oligonucleotide
caucgggugauugcuccau

SEQ ID NO: 838832 - RNA, 19 nt, Artificial Sequence
  Description of Artificial Sequence: Synthetic oligonucleotide
cggugugggcuuucuuuuc

SEQ ID NO: 838833 - RNA, 19 nt, Artificial Sequence
  Description of Artificial Sequence: Synthetic oligonucleotide
cuucggugugggcuuucuu

SEQ ID NO: 838834 - RNA, 19 nt, Artificial Sequence
  Description of Artificial Sequence: Synthetic oligonucleotide
cgauaaaccucgucugauu

SEQ ID NO: 838835 - RNA, 19 nt, Artificial Sequence
  Description of Artificial Sequence: Synthetic oligonucleotide
cugcuaccucugaacuguu

SEQ ID NO: 838836 - RNA, 19 nt, Artificial Sequence
  Description of Artificial Sequence: Synthetic oligonucleotide
gccaauccuagaacacauu

SEQ ID NO: 838837 - RNA, 19 nt, Artificial Sequence
  Description of Artificial Sequence: Synthetic oligonucleotide
ccuguaaguccccgucaau

SEQ ID NO: 838838 - RNA, 19 nt, Artificial Sequence
  Description of Artificial Sequence: Synthetic oligonucleotide
cgggcuaguuugauagcau

SEQ ID NO: 838839 - RNA, 19 nt, Artificial Sequence
  Description of Artificial Sequence: Synthetic oligonucleotide
ccccgucgauaaaccucgu

SEQ ID NO: 838840 - RNA, 19 nt, Artificial Sequence
  Description of Artificial Sequence: Synthetic oligonucleotide
aaaccuauguacuuggucc

SEQ ID NO: 838841 - RNA, 19 nt, Artificial Sequence
  Description of Artificial Sequence: Synthetic oligonucleotide
  modified_base (7)..(7): a, c, u, g, unknown or other
uuaaagnggccauauaugg

SEQ ID NO: 838842 - RNA, 19 nt, Artificial Sequence
  Description of Artificial Sequence: Synthetic oligonucleotide
uaauuugccaauuaaaagc

SEQ ID NO: 838843 - RNA, 19 nt, Artificial Sequence
  Description of Artificial Sequence: Synthetic oligonucleotide
aacaagggagguuugauac

SEQ ID NO: 838844 - RNA, 19 nt, Artificial Sequence
  Description of Artificial Sequence: Synthetic oligonucleotide
uaaagauauacuuaccagg

SEQ ID NO: 838845 - RNA, 19 nt, Artificial Sequence
  Description of Artificial Sequence: Synthetic oligonucleotide
aacuagauagaucugcaac

SEQ ID NO: 838846 - RNA, 19 nt, Artificial Sequence
  Description of Artificial Sequence: Synthetic oligonucleotide
  modified_base (5)..(5): a, c, u, g, unknown or other
aaagnggccauauauggag

SEQ ID NO: 838847 - RNA, 19 nt, Artificial Sequence
  Description of Artificial Sequence: Synthetic oligonucleotide
auuacuaauauauuucaag

SEQ ID NO: 838848 - RNA, 19 nt, Artificial Sequence
  Description of Artificial Sequence: Synthetic oligonucleotide
aaagguaggauuaauacug

SEQ ID NO: 838849 - RNA, 19 nt, Artificial Sequence
  Description of Artificial Sequence: Synthetic oligonucleotide
aaagauauacuuaccaggg

SEQ ID NO: 838850 - RNA, 19 nt, Artificial Sequence
  Description of Artificial Sequence: Synthetic oligonucleotide
uuuagaaaugucugggugg

SEQ ID NO: 838851 - RNA, 19 nt, Artificial Sequence
  Description of Artificial Sequence: Synthetic oligonucleotide
uacuaauauauuucaaggg

SEQ ID NO: 838852 - RNA, 19 nt, Artificial Sequence
  Description of Artificial Sequence: Synthetic oligonucleotide
gauacuaagccacaauuag

SEQ ID NO: 838853 - RNA, 19 nt, Artificial Sequence
  Description of Artificial Sequence: Synthetic oligonucleotide
acuaauauauuucaaggga

SEQ ID NO: 838854 - RNA, 19 nt, Artificial Sequence
  Description of Artificial Sequence: Synthetic oligonucleotide
aaaaccuauguacuugguc

SEQ ID NO: 838855 - RNA, 19 nt, Artificial Sequence
  Description of Artificial Sequence: Synthetic oligonucleotide
auauauggaguauacaucu

SEQ ID NO: 838856 - RNA, 19 nt, Artificial Sequence
  Description of Artificial Sequence: Synthetic oligonucleotide
auaaagauauacuuaccag

SEQ ID NO: 838857 - RNA, 19 nt, Artificial Sequence
  Description of Artificial Sequence: Synthetic oligonucleotide
aaaccuguaaaaccuaugu

SEQ ID NO: 838858 - RNA, 19 nt, Artificial Sequence
  Description of Artificial Sequence: Synthetic oligonucleotide
auggacagaucacaaaacc

SEQ ID NO: 838859 - RNA, 19 nt, Artificial Sequence
  Description of Artificial Sequence: Synthetic oligonucleotide
auuuaaauucaacagggca

SEQ ID NO: 838860 - RNA, 19 nt, Artificial Sequence
  Description of Artificial Sequence: Synthetic oligonucleotide
ucaaagguaggauuaauac

SEQ ID NO: 838861 - RNA, 19 nt, Artificial Sequence
  Description of Artificial Sequence: Synthetic oligonucleotide
acagauguacccaagaaac

SEQ ID NO: 838862 - RNA, 19 nt, Artificial Sequence
  Description of Artificial Sequence: Synthetic oligonucleotide
uauagccuuaaucaaaagu

SEQ ID NO: 838863 - RNA, 19 nt, Artificial Sequence
  Description of Artificial Sequence: Synthetic oligonucleotide
agaucugcaacuuacaaau

SEQ ID NO: 838864 - RNA, 19 nt, Artificial Sequence
  Description of Artificial Sequence: Synthetic oligonucleotide
ugagaucuaggucugaaga

SEQ ID NO: 838865 - RNA, 19 nt, Artificial Sequence
  Description of Artificial Sequence: Synthetic oligonucleotide
agagauuaagcacaauaag

SEQ ID NO: 838866 - RNA, 19 nt, Artificial Sequence
  Description of Artificial Sequence: Synthetic oligonucleotide
guaggauuaauacugacca

SEQ ID NO: 838867 - RNA, 19 nt, Artificial Sequence
  Description of Artificial Sequence: Synthetic oligonucleotide
uggaguauacaucuaacac

SEQ ID NO: 838868 - RNA, 19 nt, Artificial Sequence
  Description of Artificial Sequence: Synthetic oligonucleotide
accagguauugauauagcc

SEQ ID NO: 838869 - RNA, 19 nt, Artificial Sequence
  Description of Artificial Sequence: Synthetic oligonucleotide
aagcauuagcuguauggac

SEQ ID NO: 838870 - RNA, 19 nt, Artificial Sequence
  Description of Artificial Sequence: Synthetic oligonucleotide
uacuaagccacaauuaguc

SEQ ID NO: 838871 - RNA, 19 nt, Artificial Sequence
  Description of Artificial Sequence: Synthetic oligonucleotide
ucaguuuuaacuugcacau

SEQ ID NO: 838872 - RNA, 19 nt, Artificial Sequence
  Description of Artificial Sequence: Synthetic oligonucleotide
uagggcauacauuucaaag

SEQ ID NO: 838873 - RNA, 19 nt, Artificial Sequence
  Description of Artificial Sequence: Synthetic oligonucleotide
aaauuaguacccaggaaag

SEQ ID NO: 838874 - RNA, 19 nt, Artificial Sequence
  Description of Artificial Sequence: Synthetic oligonucleotide
aggauuaauacugaccagg

SEQ ID NO: 838875 - RNA, 19 nt, Artificial Sequence
  Description of Artificial Sequence: Synthetic oligonucleotide
uacucaauaggagagaggu

SEQ ID NO: 838876 - RNA, 19 nt, Artificial Sequence
  Description of Artificial Sequence: Synthetic oligonucleotide
cacuagaucuuucugauac

SEQ ID NO: 838877 - RNA, 19 nt, Artificial Sequence
  Description of Artificial Sequence: Synthetic oligonucleotide
aauuaccaauucuuccuag

SEQ ID NO: 838878 - RNA, 19 nt, Artificial Sequence
  Description of Artificial Sequence: Synthetic oligonucleotide
  modified_base (8)..(8): a, c, u, g, unknown or other
cuuaaagnggccauauaug

SEQ ID NO: 838879 - RNA, 19 nt, Artificial Sequence
  Description of Artificial Sequence: Synthetic oligonucleotide
aucuuggugacccuaguuc

SEQ ID NO: 838880 - RNA, 19 nt, Artificial Sequence
  Description of Artificial Sequence: Synthetic oligonucleotide
acuagauagaucugcaacu

SEQ ID NO: 838881 - RNA, 19 nt, Artificial Sequence
  Description of Artificial Sequence: Synthetic oligonucleotide
uguguaagccucaccaugc

SEQ ID NO: 838882 - RNA, 19 nt, Artificial Sequence
  Description of Artificial Sequence: Synthetic oligonucleotide
uuagaaaugucuggguggg

SEQ ID NO: 838883 - RNA, 19 nt, Artificial Sequence
  Description of Artificial Sequence: Synthetic oligonucleotide
aaccguggcauggaaaagc

SEQ ID NO: 838884 - RNA, 19 nt, Artificial Sequence
  Description of Artificial Sequence: Synthetic oligonucleotide
aaauacuggugacucagga

SEQ ID NO: 838885 - RNA, 19 nt, Artificial Sequence
  Description of Artificial Sequence: Synthetic oligonucleotide
cauggcuacuuucaaaggg

SEQ ID NO: 838886 - RNA, 19 nt, Artificial Sequence
  Description of Artificial Sequence: Synthetic oligonucleotide
uuuucuuaggggcugggac

SEQ ID NO: 838887 - RNA, 19 nt, Artificial Sequence
  Description of Artificial Sequence: Synthetic oligonucleotide
ggagguuugauacuaagcc

SEQ ID NO: 838888 - RNA, 19 nt, Artificial Sequence
  Description of Artificial Sequence: Synthetic oligonucleotide
agauuaagcacaauaagca

SEQ ID NO: 838889 - RNA, 19 nt, Artificial Sequence
  Description of Artificial Sequence: Synthetic oligonucleotide
uuucgagaaagcuuggagu

SEQ ID NO: 838890 - RNA, 19 nt, Artificial Sequence
  Description of Artificial Sequence: Synthetic oligonucleotide
uguaaaaccuauguacuug

SEQ ID NO: 838891 - RNA, 19 nt, Artificial Sequence
  Description of Artificial Sequence: Synthetic oligonucleotide
uauguaacacacacuguca

SEQ ID NO: 838892 - RNA, 19 nt, Artificial Sequence
  Description of Artificial Sequence: Synthetic oligonucleotide
gcccauuuagccuagaggg

SEQ ID NO: 838893 - RNA, 19 nt, Artificial Sequence
  Description of Artificial Sequence: Synthetic oligonucleotide
cauaaagauauacuuacca

SEQ ID NO: 838894 - RNA, 19 nt, Artificial Sequence
  Description of Artificial Sequence: Synthetic oligonucleotide
cuuucagagauuaagcaca

SEQ ID NO: 838895 - RNA, 19 nt, Artificial Sequence
  Description of Artificial Sequence: Synthetic oligonucleotide
ugucccaccaugaagcuac

SEQ ID NO: 838896 - RNA, 19 nt, Artificial Sequence
  Description of Artificial Sequence: Synthetic oligonucleotide
guauguaacacacacuguc

SEQ ID NO: 838897 - RNA, 19 nt, Artificial Sequence
  Description of Artificial Sequence: Synthetic oligonucleotide
aacugaucuaccccagaag

SEQ ID NO: 838898 - RNA, 19 nt, Artificial Sequence
  Description of Artificial Sequence: Synthetic oligonucleotide
aaagcccauaucugguggg

SEQ ID NO: 838899 - RNA, 19 nt, Artificial Sequence
  Description of Artificial Sequence: Synthetic oligonucleotide
cauauauggaguauacauc

SEQ ID NO: 838900 - RNA, 19 nt, Artificial Sequence
  Description of Artificial Sequence: Synthetic oligonucleotide
uugauacuaagccacaauu

SEQ ID NO: 838901 - RNA, 19 nt, Artificial Sequence
  Description of Artificial Sequence: Synthetic oligonucleotide
agguuugauacuaagccac

SEQ ID NO: 838902 - RNA, 19 nt, Artificial Sequence
  Description of Artificial Sequence: Synthetic oligonucleotide
uccuaagcaccacacaucu

SEQ ID NO: 838903 - RNA, 19 nt, Artificial Sequence
  Description of Artificial Sequence: Synthetic oligonucleotide
gaugugagaacugaucuac

SEQ ID NO: 838904 - RNA, 19 nt, Artificial Sequence
  Description of Artificial Sequence: Synthetic oligonucleotide
aucugcaacuuacaaauca

SEQ ID NO: 838905 - RNA, 19 nt, Artificial Sequence
  Description of Artificial Sequence: Synthetic oligonucleotide
ugacaaacacccagcaacc

SEQ ID NO: 838906 - RNA, 19 nt, Artificial Sequence
  Description of Artificial Sequence: Synthetic oligonucleotide
auacuuaccagggacaucu

SEQ ID NO: 838907 - RNA, 19 nt, Artificial Sequence
  Description of Artificial Sequence: Synthetic oligonucleotide
uacagauguacccaagaaa

SEQ ID NO: 838908 - RNA, 19 nt, Artificial Sequence
  Description of Artificial Sequence: Synthetic oligonucleotide
gcaagcauuagcuguaugg

SEQ ID NO: 838909 - RNA, 19 nt, Artificial Sequence
  Description of Artificial Sequence: Synthetic oligonucleotide
aaggaugugagaacugauc

SEQ ID NO: 838910 - RNA, 19 nt, Artificial Sequence
  Description of Artificial Sequence: Synthetic oligonucleotide
aagcuacugucucugaacu

SEQ ID NO: 838911 - RNA, 19 nt, Artificial Sequence
  Description of Artificial Sequence: Synthetic oligonucleotide
ucacuuguguuccagccca

SEQ ID NO: 838912 - RNA, 19 nt, Artificial Sequence
  Description of Artificial Sequence: Synthetic oligonucleotide
aggaauuugagauggcaga

SEQ ID NO: 838913 - RNA, 19 nt, Artificial Sequence
  Description of Artificial Sequence: Synthetic oligonucleotide
  modified_base (6)..(6): a, c, u, g, unknown or other
uaaagnggccauauaugga

SEQ ID NO: 838914 - RNA, 19 nt, Artificial Sequence
  Description of Artificial Sequence: Synthetic oligonucleotide
ugauacuaagccacaauua

SEQ ID NO: 838915 - RNA, 19 nt, Artificial Sequence
  Description of Artificial Sequence: Synthetic oligonucleotide
cuuguguccagacugaaca

SEQ ID NO: 838916 - RNA, 19 nt, Artificial Sequence
  Description of Artificial Sequence: Synthetic oligonucleotide
uguaacacacacugucaag

SEQ ID NO: 838917 - RNA, 19 nt, Artificial Sequence
  Description of Artificial Sequence: Synthetic oligonucleotide
aguggacugauauauuacu

SEQ ID NO: 838918 - RNA, 19 nt, Artificial Sequence
  Description of Artificial Sequence: Synthetic oligonucleotide
uuagucaccuacaugucau

SEQ ID NO: 838919 - RNA, 19 nt, Artificial Sequence
  Description of Artificial Sequence: Synthetic oligonucleotide
aauaagcaugcucaagaua

SEQ ID NO: 838920 - RNA, 19 nt, Artificial Sequence
  Description of Artificial Sequence: Synthetic oligonucleotide
ugagauggcagaacuagau

SEQ ID NO: 838921 - RNA, 19 nt, Artificial Sequence
  Description of Artificial Sequence: Synthetic oligonucleotide
aagcuacuaaauuuagaaa

SEQ ID NO: 838922 - RNA, 19 nt, Artificial Sequence
  Description of Artificial Sequence: Synthetic oligonucleotide
ucucacuuguguuccagcc

SEQ ID NO: 838923 - RNA, 19 nt, Artificial Sequence
  Description of Artificial Sequence: Synthetic oligonucleotide
uggacugauauauuacuaa

SEQ ID NO: 838924 - RNA, 19 nt, Artificial Sequence
  Description of Artificial Sequence: Synthetic oligonucleotide
agguagggcaaucaaaggu

SEQ ID NO: 838925 - RNA, 19 nt, Artificial Sequence
  Description of Artificial Sequence: Synthetic oligonucleotide
auagccuuaaucaaaagua

SEQ ID NO: 838926 - RNA, 19 nt, Artificial Sequence
  Description of Artificial Sequence: Synthetic oligonucleotide
aagauauacuuaccaggga

SEQ ID NO: 838927 - RNA, 19 nt, Artificial Sequence
  Description of Artificial Sequence: Synthetic oligonucleotide
aacacugucccaacaauca

SEQ ID NO: 838928 - RNA, 19 nt, Artificial Sequence
  Description of Artificial Sequence: Synthetic oligonucleotide
uucgagaaagcuuggagua

SEQ ID NO: 838929 - RNA, 19 nt, Artificial Sequence
  Description of Artificial Sequence: Synthetic oligonucleotide
aaaaugaccuggucccuga

SEQ ID NO: 838930 - RNA, 19 nt, Artificial Sequence
  Description of Artificial Sequence: Synthetic oligonucleotide
cuaauauauuucaagggaa

SEQ ID NO: 838931 - RNA, 19 nt, Artificial Sequence
  Description of Artificial Sequence: Synthetic oligonucleotide
agguuuaguggacugauau

SEQ ID NO: 838932 - RNA, 19 nt, Artificial Sequence
  Description of Artificial Sequence: Synthetic oligonucleotide
ggugguauguaacacacac

SEQ ID NO: 838933 - RNA, 19 nt, Artificial Sequence
  Description of Artificial Sequence: Synthetic oligonucleotide
auauggaguauacaucuaa

SEQ ID NO: 838934 - RNA, 19 nt, Artificial Sequence
  Description of Artificial Sequence: Synthetic oligonucleotide
ucauggcuacuuucaaagg

SEQ ID NO: 838935 - RNA, 19 nt, Artificial Sequence
  Description of Artificial Sequence: Synthetic oligonucleotide
aauaggagagaggugguau

SEQ ID NO: 838936 - RNA, 19 nt, Artificial Sequence
  Description of Artificial Sequence: Synthetic oligonucleotide
uggaaaagcuuacacuauc

SEQ ID NO: 838937 - RNA, 19 nt, Artificial Sequence
  Description of Artificial Sequence: Synthetic oligonucleotide
uuacacuaucagcagcagc

SEQ ID NO: 838938 - RNA, 19 nt, Artificial Sequence
  Description of Artificial Sequence: Synthetic oligonucleotide
gugacuagugaacaaauaa

SEQ ID NO: 838939 - RNA, 19 nt, Artificial Sequence
  Description of Artificial Sequence: Synthetic oligonucleotide
ucacaguuagggcauacau

SEQ ID NO: 838940 - RNA, 19 nt, Artificial Sequence
  Description of Artificial Sequence: Synthetic oligonucleotide
cagaacuagauagaucugc

SEQ ID NO: 838941 - RNA, 19 nt, Artificial Sequence
  Description of Artificial Sequence: Synthetic oligonucleotide
aaguauaauuugccaauua

SEQ ID NO: 838942 - RNA, 19 nt, Artificial Sequence
  Description of Artificial Sequence: Synthetic oligonucleotide
ugcucaagauauauuaauu

SEQ ID NO: 838943 - RNA, 19 nt, Artificial Sequence
  Description of Artificial Sequence: Synthetic oligonucleotide
gaucuaggucugaagaugc

SEQ ID NO: 838944 - RNA, 19 nt, Artificial Sequence
  Description of Artificial Sequence: Synthetic oligonucleotide
agguaggauuaauacugac

SEQ ID NO: 838945 - RNA, 19 nt, Artificial Sequence
  Description of Artificial Sequence: Synthetic oligonucleotide
aucugaaauuaguacccag

SEQ ID NO: 838946 - RNA, 19 nt, Artificial Sequence
  Description of Artificial Sequence: Synthetic oligonucleotide
acaaaacccacccuucccu

SEQ ID NO: 838947 - RNA, 19 nt, Artificial Sequence
  Description of Artificial Sequence: Synthetic oligonucleotide
ugcugcuacucaauaggag

SEQ ID NO: 838948 - RNA, 19 nt, Artificial Sequence
  Description of Artificial Sequence: Synthetic oligonucleotide
auuaccaauucuuccuaga

SEQ ID NO: 838949 - RNA, 19 nt, Artificial Sequence
  Description of Artificial Sequence: Synthetic oligonucleotide
caguuagucaccuacaugu

SEQ ID NO: 838950 - RNA, 19 nt, Artificial Sequence
  Description of Artificial Sequence: Synthetic oligonucleotide
auggcuacuuucaaagggg

SEQ ID NO: 838951 - RNA, 19 nt, Artificial Sequence
  Description of Artificial Sequence: Synthetic oligonucleotide
cugcuacucaauaggagag

SEQ ID NO: 838952 - RNA, 19 nt, Artificial Sequence
  Description of Artificial Sequence: Synthetic oligonucleotide
acuacagauguacccaaga

SEQ ID NO: 838953 - RNA, 19 nt, Artificial Sequence
  Description of Artificial Sequence: Synthetic oligonucleotide
auacaccagguauugauau

SEQ ID NO: 838954 - RNA, 19 nt, Artificial Sequence
  Description of Artificial Sequence: Synthetic oligonucleotide
gagguuugauacuaagcca

SEQ ID NO: 838955 - RNA, 19 nt, Artificial Sequence
  Description of Artificial Sequence: Synthetic oligonucleotide
ugcacuuuaugaccagcca

SEQ ID NO: 838956 - RNA, 19 nt, Artificial Sequence
  Description of Artificial Sequence: Synthetic oligonucleotide
caagcuacugucucugaac

SEQ ID NO: 838957 - RNA, 19 nt, Artificial Sequence
  Description of Artificial Sequence: Synthetic oligonucleotide
aaaggggcaaaggcccacc

SEQ ID NO: 838958 - RNA, 19 nt, Artificial Sequence
  Description of Artificial Sequence: Synthetic oligonucleotide
agaucuaggucugaagaug

SEQ ID NO: 838959 - RNA, 19 nt, Artificial Sequence
  Description of Artificial Sequence: Synthetic oligonucleotide
uuucacuccacggaauuac

SEQ ID NO: 838960 - RNA, 19 nt, Artificial Sequence
  Description of Artificial Sequence: Synthetic oligonucleotide
augcucaagauauauuaau

SEQ ID NO: 838961 - RNA, 19 nt, Artificial Sequence
  Description of Artificial Sequence: Synthetic oligonucleotide
caaugcugcuacucaauag

SEQ ID NO: 838962 - RNA, 19 nt, Artificial Sequence
  Description of Artificial Sequence: Synthetic oligonucleotide
uguauggacagaucacaaa

SEQ ID NO: 838963 - RNA, 19 nt, Artificial Sequence
  Description of Artificial Sequence: Synthetic oligonucleotide
aaucugaccagaaucugaa

SEQ ID NO: 838964 - RNA, 19 nt, Artificial Sequence
  Description of Artificial Sequence: Synthetic oligonucleotide
uuaugaccagccagaagcu

SEQ ID NO: 838965 - RNA, 19 nt, Artificial Sequence
  Description of Artificial Sequence: Synthetic oligonucleotide
ugcucugcgcacacagugg

SEQ ID NO: 838966 - RNA, 19 nt, Artificial Sequence
  Description of Artificial Sequence: Synthetic oligonucleotide
aaccuguaaaaccuaugua

SEQ ID NO: 838967 - RNA, 19 nt, Artificial Sequence
  Description of Artificial Sequence: Synthetic oligonucleotide
auguacuugguccucgggu

SEQ ID NO: 838968 - RNA, 19 nt, Artificial Sequence
  Description of Artificial Sequence: Synthetic oligonucleotide
acacugucaagagggaaac

SEQ ID NO: 838969 - RNA, 19 nt, Artificial Sequence
  Description of Artificial Sequence: Synthetic oligonucleotide
cugcacuuuaugaccagcc

SEQ ID NO: 838970 - RNA, 19 nt, Artificial Sequence
  Description of Artificial Sequence: Synthetic oligonucleotide
cugaucuaccccagaaggc

SEQ ID NO: 838971 - RNA, 19 nt, Artificial Sequence
  Description of Artificial Sequence: Synthetic oligonucleotide
gaugcuacaagccauuguu

SEQ ID NO: 838972 - RNA, 19 nt, Artificial Sequence
  Description of Artificial Sequence: Synthetic oligonucleotide
aggagcaacagacacugaa

SEQ ID NO: 838973 - RNA, 19 nt, Artificial Sequence
  Description of Artificial Sequence: Synthetic oligonucleotide
cuacucaauaggagagagg

SEQ ID NO: 838974 - RNA, 19 nt, Artificial Sequence
  Description of Artificial Sequence: Synthetic oligonucleotide
aacauagguagggcaauca

SEQ ID NO: 838975 - RNA, 19 nt, Artificial Sequence
  Description of Artificial Sequence: Synthetic oligonucleotide
auauagccuuaaucaaaag

SEQ ID NO: 838976 - RNA, 19 nt, Artificial Sequence
  Description of Artificial Sequence: Synthetic oligonucleotide
aacuugcacaucuucccaa

SEQ ID NO: 838977 - RNA, 19 nt, Artificial Sequence
  Description of Artificial Sequence: Synthetic oligonucleotide
uggcuacuuucaaaggggc

SEQ ID NO: 838978 - RNA, 19 nt, Artificial Sequence
  Description of Artificial Sequence: Synthetic oligonucleotide
gacacuacagauguaccca

SEQ ID NO: 838979 - RNA, 19 nt, Artificial Sequence
  Description of Artificial Sequence: Synthetic oligonucleotide
uucacuccacggaauuacc

SEQ ID NO: 838980 - RNA, 19 nt, Artificial Sequence
  Description of Artificial Sequence: Synthetic oligonucleotide
agcauuagcuguauggaca

SEQ ID NO: 838981 - RNA, 19 nt, Artificial Sequence
  Description of Artificial Sequence: Synthetic oligonucleotide
gguaggauuaauacugacc

SEQ ID NO: 838982 - RNA, 19 nt, Artificial Sequence
  Description of Artificial Sequence: Synthetic oligonucleotide
gguguaaguauaauuugcc

SEQ ID NO: 838983 - RNA, 19 nt, Artificial Sequence
  Description of Artificial Sequence: Synthetic oligonucleotide
uaaaaccuauguacuuggu

SEQ ID NO: 838984 - RNA, 19 nt, Artificial Sequence
  Description of Artificial Sequence: Synthetic oligonucleotide
guuagucaccuacauguca

SEQ ID NO: 838985 - RNA, 19 nt, Artificial Sequence
  Description of Artificial Sequence: Synthetic oligonucleotide
ucuuccuagaggagucaca

SEQ ID NO: 838986 - RNA, 19 nt, Artificial Sequence
  Description of Artificial Sequence: Synthetic oligonucleotide
cuauguacuugguccucgg

SEQ ID NO: 838987 - RNA, 19 nt, Artificial Sequence
  Description of Artificial Sequence: Synthetic oligonucleotide
cacaaaacccacccuuccc

SEQ ID NO: 838988 - RNA, 19 nt, Artificial Sequence
  Description of Artificial Sequence: Synthetic oligonucleotide
cuguaagagccaauugcug

SEQ ID NO: 838989 - RNA, 19 nt, Artificial Sequence
  Description of Artificial Sequence: Synthetic oligonucleotide
agggcaaucaaagguagga

SEQ ID NO: 838990 - RNA, 19 nt, Artificial Sequence
  Description of Artificial Sequence: Synthetic oligonucleotide
gguucagcucuccuuaaag

SEQ ID NO: 838991 - RNA, 19 nt, Artificial Sequence
  Description of Artificial Sequence: Synthetic oligonucleotide
cuuggugacccuaguuccc

SEQ ID NO: 838992 - RNA, 19 nt, Artificial Sequence
  Description of Artificial Sequence: Synthetic oligonucleotide
cacuuuaugaccagccaga

SEQ ID NO: 838993 - RNA, 19 nt, Artificial Sequence
  Description of Artificial Sequence: Synthetic oligonucleotide
gauuaagcacaauaagcau

SEQ ID NO: 838994 - RNA, 19 nt, Artificial Sequence
  Description of Artificial Sequence: Synthetic oligonucleotide
uauauggaguauacaucua

SEQ ID NO: 838995 - RNA, 19 nt, Artificial Sequence
  Description of Artificial Sequence: Synthetic oligonucleotide
agggguguaaguauaauuu

SEQ ID NO: 838996 - RNA, 19 nt, Artificial Sequence
  Description of Artificial Sequence: Synthetic oligonucleotide
uuuaguggacugauauauu

SEQ ID NO: 838997 - RNA, 19 nt, Artificial Sequence
  Description of Artificial Sequence: Synthetic oligonucleotide
ggacacuacagauguaccc

SEQ ID NO: 838998 - RNA, 19 nt, Artificial Sequence
  Description of Artificial Sequence: Synthetic oligonucleotide
uuagggcauacauuucaaa

SEQ ID NO: 838999 - RNA, 19 nt, Artificial Sequence
  Description of Artificial Sequence: Synthetic oligonucleotide
aucacgugaagggcaaggg

SEQ ID NO: 839000 - RNA, 19 nt, Artificial Sequence
  Description of Artificial Sequence: Synthetic oligonucleotide
uccacggaauuaccaauuc

SEQ ID NO: 839001 - RNA, 19 nt, Artificial Sequence
  Description of Artificial Sequence: Synthetic oligonucleotide
  modified_base (19)..(19): a, c, u, g, unknown or other
guucagcucuccuuaaagn

SEQ ID NO: 839002 - RNA, 19 nt, Artificial Sequence
  Description of Artificial Sequence: Synthetic oligonucleotide
gucagguuaaaaguguguc

SEQ ID NO: 839003 - RNA, 19 nt, Artificial Sequence
  Description of Artificial Sequence: Synthetic oligonucleotide
acuuaagcaaacauaggua

SEQ ID NO: 839004 - RNA, 19 nt, Artificial Sequence
  Description of Artificial Sequence: Synthetic oligonucleotide
ccuagugagaaccagagaa

SEQ ID NO: 839005 - RNA, 19 nt, Artificial Sequence
  Description of Artificial Sequence: Synthetic oligonucleotide
auaucuggugggaucauca

SEQ ID NO: 839006 - RNA, 19 nt, Artificial Sequence
  Description of Artificial Sequence: Synthetic oligonucleotide
gcacuuuaugaccagccag

SEQ ID NO: 839007 - RNA, 19 nt, Artificial Sequence
  Description of Artificial Sequence: Synthetic oligonucleotide
uuagccuagaggggaagga

SEQ ID NO: 839008 - RNA, 19 nt, Artificial Sequence
  Description of Artificial Sequence: Synthetic oligonucleotide
acuagaucuuucugauacu

SEQ ID NO: 839009 - RNA, 19 nt, Artificial Sequence
  Description of Artificial Sequence: Synthetic oligonucleotide
gcauuagcuguauggacag

SEQ ID NO: 839010 - RNA, 19 nt, Artificial Sequence
  Description of Artificial Sequence: Synthetic oligonucleotide
uccccuagugagaaccaga

SEQ ID NO: 839011 - RNA, 19 nt, Artificial Sequence
  Description of Artificial Sequence: Synthetic oligonucleotide
gcugcuacucaauaggaga

SEQ ID NO: 839012 - RNA, 19 nt, Artificial Sequence
  Description of Artificial Sequence: Synthetic oligonucleotide
ggaauuaccaauucuuccu

SEQ ID NO: 839013 - RNA, 19 nt, Artificial Sequence
  Description of Artificial Sequence: Synthetic oligonucleotide
  modified_base (10)..(10): a, c, u, g, unknown or other
uccuuaaagnggccauaua

SEQ ID NO: 839014 - RNA, 19 nt, Artificial Sequence
  Description of Artificial Sequence: Synthetic oligonucleotide
auauacuuaccagggacau

SEQ ID NO: 839015 - RNA, 19 nt, Artificial Sequence
  Description of Artificial Sequence: Synthetic oligonucleotide
gugacucaggacuuguguc

SEQ ID NO: 839016 - RNA, 19 nt, Artificial Sequence
  Description of Artificial Sequence: Synthetic oligonucleotide
acuuccuaagcaccacaca

SEQ ID NO: 839017 - RNA, 19 nt, Artificial Sequence
  Description of Artificial Sequence: Synthetic oligonucleotide
gggguguaaguauaauuug

SEQ ID NO: 839018 - RNA, 19 nt, Artificial Sequence
  Description of Artificial Sequence: Synthetic oligonucleotide
ugacccuaguucccacucc

SEQ ID NO: 839019 - RNA, 19 nt, Artificial Sequence
  Description of Artificial Sequence: Synthetic oligonucleotide
agugagaaccagagaacag

SEQ ID NO: 839020 - RNA, 19 nt, Artificial Sequence
  Description of Artificial Sequence: Synthetic oligonucleotide
auacuaagccacaauuagu

SEQ ID NO: 839021 - RNA, 19 nt, Artificial Sequence
  Description of Artificial Sequence: Synthetic oligonucleotide
agccacaauuaguccgugg

SEQ ID NO: 839022 - RNA, 19 nt, Artificial Sequence
  Description of Artificial Sequence: Synthetic oligonucleotide
ggguguaaguauaauuugc

SEQ ID NO: 839023 - RNA, 19 nt, Artificial Sequence
  Description of Artificial Sequence: Synthetic oligonucleotide
cugaaucugaccagaaucu

SEQ ID NO: 839024 - RNA, 19 nt, Artificial Sequence
  Description of Artificial Sequence: Synthetic oligonucleotide
ggugggaucaucaggugcc

SEQ ID NO: 839025 - RNA, 19 nt, Artificial Sequence
  Description of Artificial Sequence: Synthetic oligonucleotide
  modified_base (4)..(4): a, c, u, g, unknown or other
aagnggccauauauggagu

SEQ ID NO: 839026 - RNA, 19 nt, Artificial Sequence
  Description of Artificial Sequence: Synthetic oligonucleotide
aacaagggguguaaguaua

SEQ ID NO: 839027 - RNA, 19 nt, Artificial Sequence
  Description of Artificial Sequence: Synthetic oligonucleotide
caagcauuagcuguaugga

SEQ ID NO: 839028 - RNA, 19 nt, Artificial Sequence
  Description of Artificial Sequence: Synthetic oligonucleotide
aucuaacacugucccaaca

SEQ ID NO: 839029 - RNA, 19 nt, Artificial Sequence
  Description of Artificial Sequence: Synthetic oligonucleotide
gcuacucaauaggagagag

SEQ ID NO: 839030 - RNA, 19 nt, Artificial Sequence
  Description of Artificial Sequence: Synthetic oligonucleotide
caugcucaagauauauuaa

SEQ ID NO: 839031 - RNA, 19 nt, Artificial Sequence
  Description of Artificial Sequence: Synthetic oligonucleotide
ugaggaauucugggugucc

SEQ ID NO: 839032 - RNA, 19 nt, Artificial Sequence
  Description of Artificial Sequence: Synthetic oligonucleotide
uggcagaacuagauagauc

SEQ ID NO: 839033 - RNA, 19 nt, Artificial Sequence
  Description of Artificial Sequence: Synthetic oligonucleotide
cagagaacagggucuugac

SEQ ID NO: 839034 - RNA, 19 nt, Artificial Sequence
  Description of Artificial Sequence: Synthetic oligonucleotide
ggaaacggcacagaggaca

SEQ ID NO: 839035 - RNA, 19 nt, Artificial Sequence
  Description of Artificial Sequence: Synthetic oligonucleotide
ugccaagcuacugucucug

SEQ ID NO: 839036 - RNA, 19 nt, Artificial Sequence
  Description of Artificial Sequence: Synthetic oligonucleotide
guaagagccaauugcugua

SEQ ID NO: 839037 - RNA, 19 nt, Artificial Sequence
  Description of Artificial Sequence: Synthetic oligonucleotide
cacuacagauguacccaag

SEQ ID NO: 839038 - RNA, 19 nt, Artificial Sequence
  Description of Artificial Sequence: Synthetic oligonucleotide
  modified_base (3)..(3): a, c, u, g, unknown or other
agnggccauauauggagua

SEQ ID NO: 839039 - RNA, 19 nt, Artificial Sequence
  Description of Artificial Sequence: Synthetic oligonucleotide
augaccagccagaagcuca

SEQ ID NO: 839040 - RNA, 19 nt, Artificial Sequence
  Description of Artificial Sequence: Synthetic oligonucleotide
acuugcacaucuucccaaa

SEQ ID NO: 839041 - RNA, 19 nt, Artificial Sequence
  Description of Artificial Sequence: Synthetic oligonucleotide
caucuaacacugucccaac

SEQ ID NO: 839042 - RNA, 19 nt, Artificial Sequence
  Description of Artificial Sequence: Synthetic oligonucleotide
ugcuacucaauaggagaga

SEQ ID NO: 839043 - RNA, 19 nt, Artificial Sequence
  Description of Artificial Sequence: Synthetic oligonucleotide
cuacagauguacccaagaa

SEQ ID NO: 839044 - RNA, 19 nt, Artificial Sequence
  Description of Artificial Sequence: Synthetic oligonucleotide
cagguauugauauagccuu

SEQ ID NO: 839045 - RNA, 19 nt, Artificial Sequence
  Description of Artificial Sequence: Synthetic oligonucleotide
gagauggcagaacuagaua

SEQ ID NO: 839046 - RNA, 19 nt, Artificial Sequence
  Description of Artificial Sequence: Synthetic oligonucleotide
acaagccauuguuuucacu

SEQ ID NO: 839047 - RNA, 19 nt, Artificial Sequence
  Description of Artificial Sequence: Synthetic oligonucleotide
agagauagucacaggaauu

SEQ ID NO: 839048 - RNA, 19 nt, Artificial Sequence
  Description of Artificial Sequence: Synthetic oligonucleotide
cuagaaggaugugagaacu

SEQ ID NO: 839049 - RNA, 19 nt, Artificial Sequence
  Description of Artificial Sequence: Synthetic oligonucleotide
gaucuaccccagaaggcac

SEQ ID NO: 839050 - RNA, 19 nt, Artificial Sequence
  Description of Artificial Sequence: Synthetic oligonucleotide
ccuccuagcccauucuugc

SEQ ID NO: 839051 - RNA, 19 nt, Artificial Sequence
  Description of Artificial Sequence: Synthetic oligonucleotide
uaagagccaauugcuguau

SEQ ID NO: 839052 - RNA, 19 nt, Artificial Sequence
  Description of Artificial Sequence: Synthetic oligonucleotide
uacaccagguauugauaua

SEQ ID NO: 839053 - RNA, 19 nt, Artificial Sequence
  Description of Artificial Sequence: Synthetic oligonucleotide
acugucccaccaugaagcu

SEQ ID NO: 839054 - RNA, 19 nt, Artificial Sequence
  Description of Artificial Sequence: Synthetic oligonucleotide
uauacuuaccagggacauc

SEQ ID NO: 839055 - RNA, 19 nt, Artificial Sequence
  Description of Artificial Sequence: Synthetic oligonucleotide
uggcuagaaggaugugaga

SEQ ID NO: 839056 - RNA, 19 nt, Artificial Sequence
  Description of Artificial Sequence: Synthetic oligonucleotide
agaaaccaaugcugcuacu

SEQ ID NO: 839057 - RNA, 19 nt, Artificial Sequence
  Description of Artificial Sequence: Synthetic oligonucleotide
aagagccaauugcuguauu

SEQ ID NO: 839058 - RNA, 19 nt, Artificial Sequence
  Description of Artificial Sequence: Synthetic oligonucleotide
gcaguuagucaccuacaug

SEQ ID NO: 839059 - RNA, 19 nt, Artificial Sequence
  Description of Artificial Sequence: Synthetic oligonucleotide
gagauagucacaggaauuu

SEQ ID NO: 839060 - RNA, 19 nt, Artificial Sequence
  Description of Artificial Sequence: Synthetic oligonucleotide
cccauuuagccuagagggg

SEQ ID NO: 839061 - RNA, 19 nt, Artificial Sequence
  Description of Artificial Sequence: Synthetic oligonucleotide
gaaaugucugggugggccu

SEQ ID NO: 839062 - RNA, 19 nt, Artificial Sequence
  Description of Artificial Sequence: Synthetic oligonucleotide
ggcuagaaggaugugagaa

SEQ ID NO: 839063 - RNA, 19 nt, Artificial Sequence
  Description of Artificial Sequence: Synthetic oligonucleotide
ucgagaaagcuuggaguaa

SEQ ID NO: 839064 - RNA, 19 nt, Artificial Sequence
  Description of Artificial Sequence: Synthetic oligonucleotide
cacggaauuaccaauucuu

SEQ ID NO: 839065 - RNA, 19 nt, Artificial Sequence
  Description of Artificial Sequence: Synthetic oligonucleotide
agcucaugucaaucugccu

SEQ ID NO: 839066 - RNA, 19 nt, Artificial Sequence
  Description of Artificial Sequence: Synthetic oligonucleotide
gguggaggugccaagcuac

SEQ ID NO: 839067 - RNA, 19 nt, Artificial Sequence
  Description of Artificial Sequence: Synthetic oligonucleotide
uguccgacugucccaccau

SEQ ID NO: 839068 - RNA, 19 nt, Artificial Sequence
  Description of Artificial Sequence: Synthetic oligonucleotide
gccuuaaucaaaaguaaaa

SEQ ID NO: 839069 - RNA, 19 nt, Artificial Sequence
  Description of Artificial Sequence: Synthetic oligonucleotide
gguuaaaagugugucccca

SEQ ID NO: 839070 - RNA, 19 nt, Artificial Sequence
  Description of Artificial Sequence: Synthetic oligonucleotide
gcaaucaaagguaggauua

SEQ ID NO: 839071 - RNA, 19 nt, Artificial Sequence
  Description of Artificial Sequence: Synthetic oligonucleotide
  modified_base (15)..(15): a, c, u, g, unknown or other
agcucuccuuaaagnggcc

SEQ ID NO: 839072 - RNA, 19 nt, Artificial Sequence
  Description of Artificial Sequence: Synthetic oligonucleotide
guggcauggaaaagcuuac

SEQ ID NO: 839073 - RNA, 19 nt, Artificial Sequence
  Description of Artificial Sequence: Synthetic oligonucleotide
acaaucacgugaagggcaa

SEQ ID NO: 839074 - RNA, 19 nt, Artificial Sequence
  Description of Artificial Sequence: Synthetic oligonucleotide
acccuaguucccacucccc

SEQ ID NO: 839075 - RNA, 19 nt, Artificial Sequence
  Description of Artificial Sequence: Synthetic oligonucleotide
cauaucuggugggaucauc

SEQ ID NO: 839076 - RNA, 19 nt, Artificial Sequence
  Description of Artificial Sequence: Synthetic oligonucleotide
caguuagggcauacauuuc

SEQ ID NO: 839077 - RNA, 19 nt, Artificial Sequence
  Description of Artificial Sequence: Synthetic oligonucleotide
agucuaaacugcacuuuau

SEQ ID NO: 839078 - RNA, 19 nt, Artificial Sequence
  Description of Artificial Sequence: Synthetic oligonucleotide
augcugcuacucaauagga

SEQ ID NO: 839079 - RNA, 19 nt, Artificial Sequence
  Description of Artificial Sequence: Synthetic oligonucleotide
gcucaagauauauuaauuu

SEQ ID NO: 839080 - RNA, 19 nt, Artificial Sequence
  Description of Artificial Sequence: Synthetic oligonucleotide
gaucugcaacuuacaaauc

SEQ ID NO: 839081 - RNA, 19 nt, Artificial Sequence
  Description of Artificial Sequence: Synthetic oligonucleotide
aagccacaauuaguccgug

SEQ ID NO: 839082 - RNA, 19 nt, Artificial Sequence
  Description of Artificial Sequence: Synthetic oligonucleotide
cacugucaagagggaaacg

SEQ ID NO: 839083 - RNA, 19 nt, Artificial Sequence
  Description of Artificial Sequence: Synthetic oligonucleotide
  modified_base (9)..(9): a, c, u, g, unknown or other
ccuuaaagnggccauauau

SEQ ID NO: 839084 - RNA, 19 nt, Artificial Sequence
  Description of Artificial Sequence: Synthetic oligonucleotide
caauaagcaugcucaagau

SEQ ID NO: 839085 - RNA, 19 nt, Artificial Sequence
  Description of Artificial Sequence: Synthetic oligonucleotide
cauuuagccuagaggggaa

SEQ ID NO: 839086 - RNA, 19 nt, Artificial Sequence
  Description of Artificial Sequence: Synthetic oligonucleotide
accguggcauggaaaagcu

SEQ ID NO: 839087 - RNA, 19 nt, Artificial Sequence
  Description of Artificial Sequence: Synthetic oligonucleotide
ggaauucuggguguccgac

SEQ ID NO: 839088 - RNA, 19 nt, Artificial Sequence
  Description of Artificial Sequence: Synthetic oligonucleotide
ccuauguacuugguccucg

SEQ ID NO: 839089 - RNA, 19 nt, Artificial Sequence
  Description of Artificial Sequence: Synthetic oligonucleotide
caagggagguuugauacua

SEQ ID NO: 839090 - RNA, 19 nt, Artificial Sequence
  Description of Artificial Sequence: Synthetic oligonucleotide
guccgacugucccaccaug

SEQ ID NO: 839091 - RNA, 19 nt, Artificial Sequence
  Description of Artificial Sequence: Synthetic oligonucleotide
gguauugauauagccuuaa

SEQ ID NO: 839092 - RNA, 19 nt, Artificial Sequence
  Description of Artificial Sequence: Synthetic oligonucleotide
ggacugauauauuacuaau

SEQ ID NO: 839093 - RNA, 19 nt, Artificial Sequence
  Description of Artificial Sequence: Synthetic oligonucleotide
acaagggguguaaguauaa

SEQ ID NO: 839094 - RNA, 19 nt, Artificial Sequence
  Description of Artificial Sequence: Synthetic oligonucleotide
ggagagauagucacaggaa

SEQ ID NO: 839095 - RNA, 19 nt, Artificial Sequence
  Description of Artificial Sequence: Synthetic oligonucleotide
ccuagcccauucuugcuug

SEQ ID NO: 839096 - RNA, 19 nt, Artificial Sequence
  Description of Artificial Sequence: Synthetic oligonucleotide
uacuuaccagggacaucuc

SEQ ID NO: 839097 - RNA, 19 nt, Artificial Sequence
  Description of Artificial Sequence: Synthetic oligonucleotide
ccagguauugauauagccu

SEQ ID NO: 839098 - RNA, 19 nt, Artificial Sequence
  Description of Artificial Sequence: Synthetic oligonucleotide
agccagaagcucaugucaa

SEQ ID NO: 839099 - RNA, 19 nt, Artificial Sequence
  Description of Artificial Sequence: Synthetic oligonucleotide
gguuuaguggacugauaua

SEQ ID NO: 839100 - RNA, 19 nt, Artificial Sequence
  Description of Artificial Sequence: Synthetic oligonucleotide
caguuuuaacuugcacauc

SEQ ID NO: 839101 - RNA, 19 nt, Artificial Sequence
  Description of Artificial Sequence: Synthetic oligonucleotide
aagggagguuugauacuaa

SEQ ID NO: 839102 - RNA, 19 nt, Artificial Sequence
  Description of Artificial Sequence: Synthetic oligonucleotide
gggacacuacagauguacc

SEQ ID NO: 839103 - RNA, 19 nt, Artificial Sequence
  Description of Artificial Sequence: Synthetic oligonucleotide
cugaggaauucuggguguc

SEQ ID NO: 839104 - RNA, 19 nt, Artificial Sequence
  Description of Artificial Sequence: Synthetic oligonucleotide
ugggaucaucaggugccug

SEQ ID NO: 839105 - RNA, 19 nt, Artificial Sequence
  Description of Artificial Sequence: Synthetic oligonucleotide
cuccccuagugagaaccag

SEQ ID NO: 839106 - RNA, 19 nt, Artificial Sequence
  Description of Artificial Sequence: Synthetic oligonucleotide
gagggugucuucacaguua

SEQ ID NO: 839107 - RNA, 19 nt, Artificial Sequence
  Description of Artificial Sequence: Synthetic oligonucleotide
ggcaaucaaagguaggauu

SEQ ID NO: 839108 - RNA, 19 nt, Artificial Sequence
  Description of Artificial Sequence: Synthetic oligonucleotide
ccuagaggagucacagauc

SEQ ID NO: 839109 - RNA, 19 nt, Artificial Sequence
  Description of Artificial Sequence: Synthetic oligonucleotide
ggauuaauacugaccaggu

SEQ ID NO: 839110 - RNA, 19 nt, Artificial Sequence
  Description of Artificial Sequence: Synthetic oligonucleotide
uucccacuccccagauguc

SEQ ID NO: 839111 - RNA, 19 nt, Artificial Sequence
  Description of Artificial Sequence: Synthetic oligonucleotide
ccauuuagccuagagggga

SEQ ID NO: 839112 - RNA, 19 nt, Artificial Sequence
  Description of Artificial Sequence: Synthetic oligonucleotide
cacaguuagggcauacauu

SEQ ID NO: 839113 - RNA, 19 nt, Artificial Sequence
  Description of Artificial Sequence: Synthetic oligonucleotide
ccaccaugaagcuacuaaa

SEQ ID NO: 839114 - RNA, 19 nt, Artificial Sequence
  Description of Artificial Sequence: Synthetic oligonucleotide
ggcaagcauuagcuguaug

SEQ ID NO: 839115 - RNA, 19 nt, Artificial Sequence
  Description of Artificial Sequence: Synthetic oligonucleotide
  modified_base (14)..(14): a, c, u, g, unknown or other
gcucuccuuaaagnggcca

SEQ ID NO: 839116 - RNA, 19 nt, Artificial Sequence
  Description of Artificial Sequence: Synthetic oligonucleotide
cugucccaacaaucacgug

SEQ ID NO: 839117 - RNA, 19 nt, Artificial Sequence
  Description of Artificial Sequence: Synthetic oligonucleotide
gacuuguguccagacugaa

SEQ ID NO: 839118 - RNA, 19 nt, Artificial Sequence
  Description of Artificial Sequence: Synthetic oligonucleotide
augcuacaagccauuguuu

SEQ ID NO: 839119 - RNA, 19 nt, Artificial Sequence
  Description of Artificial Sequence: Synthetic oligonucleotide
cccaccaugaagcuacuaa

SEQ ID NO: 839120 - RNA, 19 nt, Artificial Sequence
  Description of Artificial Sequence: Synthetic oligonucleotide
gcagaacuagauagaucug

SEQ ID NO: 839121 - RNA, 19 nt, Artificial Sequence
  Description of Artificial Sequence: Synthetic oligonucleotide
agcaaccguggcauggaaa

SEQ ID NO: 839122 - RNA, 19 nt, Artificial Sequence
  Description of Artificial Sequence: Synthetic oligonucleotide
gcccauaucuggugggauc

SEQ ID NO: 839123 - RNA, 19 nt, Artificial Sequence
  Description of Artificial Sequence: Synthetic oligonucleotide
agguauugauauagccuua

SEQ ID NO: 839124 - RNA, 19 nt, Artificial Sequence
  Description of Artificial Sequence: Synthetic oligonucleotide
aggagagaggugguaugua

SEQ ID NO: 839125 - RNA, 19 nt, Artificial Sequence
  Description of Artificial Sequence: Synthetic oligonucleotide
ggaguggcuagaaggaugu

SEQ ID NO: 839126 - RNA, 19 nt, Artificial Sequence
  Description of Artificial Sequence: Synthetic oligonucleotide
gagguuuaguggacugaua

SEQ ID NO: 839127 - RNA, 19 nt, Artificial Sequence
  Description of Artificial Sequence: Synthetic oligonucleotide
  modified_base (2)..(2): a, c, u, g, unknown or other
gnggccauauauggaguau

SEQ ID NO: 839128 - RNA, 19 nt, Artificial Sequence
  Description of Artificial Sequence: Synthetic oligonucleotide
agcccauaucuggugggau

SEQ ID NO: 839129 - RNA, 19 nt, Artificial Sequence
  Description of Artificial Sequence: Synthetic oligonucleotide
ggucuugacccacuuccua

SEQ ID NO: 839130 - RNA, 19 nt, Artificial Sequence
  Description of Artificial Sequence: Synthetic oligonucleotide
guggacaguccugugugua

SEQ ID NO: 839131 - RNA, 19 nt, Artificial Sequence
  Description of Artificial Sequence: Synthetic oligonucleotide
gguggccuaccagggcugg

SEQ ID NO: 839132 - RNA, 19 nt, Artificial Sequence
  Description of Artificial Sequence: Synthetic oligonucleotide
cuccacggaauuaccaauu

SEQ ID NO: 839133 - RNA, 19 nt, Artificial Sequence
  Description of Artificial Sequence: Synthetic oligonucleotide
cucugcgcacacaguggga

SEQ ID NO: 839134 - RNA, 19 nt, Artificial Sequence
  Description of Artificial Sequence: Synthetic oligonucleotide
gcuuucgagaaagcuugga

SEQ ID NO: 839135 - RNA, 19 nt, Artificial Sequence
  Description of Artificial Sequence: Synthetic oligonucleotide
gguauguaacacacacugu

SEQ ID NO: 839136 - RNA, 19 nt, Artificial Sequence
  Description of Artificial Sequence: Synthetic oligonucleotide
gggagguuuaguggacuga

SEQ ID NO: 839137 - RNA, 19 nt, Artificial Sequence
  Description of Artificial Sequence: Synthetic oligonucleotide
ggagcaacagacacugaau

SEQ ID NO: 839138 - RNA, 19 nt, Artificial Sequence
  Description of Artificial Sequence: Synthetic oligonucleotide
caucuuggugacccuaguu

SEQ ID NO: 839139 - RNA, 19 nt, Artificial Sequence
  Description of Artificial Sequence: Synthetic oligonucleotide
gggugucuucacaguuagg

SEQ ID NO: 839140 - RNA, 19 nt, Artificial Sequence
  Description of Artificial Sequence: Synthetic oligonucleotide
gguguccgacugucccacc

SEQ ID NO: 839141 - RNA, 19 nt, Artificial Sequence
  Description of Artificial Sequence: Synthetic oligonucleotide
ggccuaccagggcugggga

SEQ ID NO: 839142 - RNA, 19 nt, Artificial Sequence
  Description of Artificial Sequence: Synthetic oligonucleotide
caagggguguaaguauaau

SEQ ID NO: 839143 - RNA, 19 nt, Artificial Sequence
  Description of Artificial Sequence: Synthetic oligonucleotide
cagcaaccguggcauggaa

SEQ ID NO: 839144 - RNA, 19 nt, Artificial Sequence
  Description of Artificial Sequence: Synthetic oligonucleotide
ccacggaauuaccaauucu

SEQ ID NO: 839145 - RNA, 19 nt, Artificial Sequence
  Description of Artificial Sequence: Synthetic oligonucleotide
gggaaacggcacagaggac

SEQ ID NO: 839146 - RNA, 19 nt, Artificial Sequence
  Description of Artificial Sequence: Synthetic oligonucleotide
cugucccaccaugaagcua

SEQ ID NO: 839147 - RNA, 19 nt, Artificial Sequence
  Description of Artificial Sequence: Synthetic oligonucleotide
gggcaaucaaagguaggau

SEQ ID NO: 839148 - RNA, 19 nt, Artificial Sequence
  Description of Artificial Sequence: Synthetic oligonucleotide
cccuagugagaaccagaga

SEQ ID NO: 839149 - RNA, 19 nt, Artificial Sequence
  Description of Artificial Sequence: Synthetic oligonucleotide
guggaggugccaagcuacu

SEQ ID NO: 839150 - RNA, 19 nt, Artificial Sequence
  Description of Artificial Sequence: Synthetic oligonucleotide
gcagucuaaacugcacuuu

SEQ ID NO: 839151 - RNA, 19 nt, Artificial Sequence
  Description of Artificial Sequence: Synthetic oligonucleotide
gccagaagcucaugucaau

SEQ ID NO: 839152 - RNA, 19 nt, Artificial Sequence
  Description of Artificial Sequence: Synthetic oligonucleotide
gggcuuuugcugcccacau

SEQ ID NO: 839153 - RNA, 19 nt, Artificial Sequence
  Description of Artificial Sequence: Synthetic oligonucleotide
ggccauugagggcccauuu

SEQ ID NO: 839154 - RNA, 19 nt, Artificial Sequence
  Description of Artificial Sequence: Synthetic oligonucleotide
ccagcaaccguggcaugga

SEQ ID NO: 839155 - RNA, 19 nt, Artificial Sequence
  Description of Artificial Sequence: Synthetic oligonucleotide
gggcaagcauuagcuguau

SEQ ID NO: 839156 - RNA, 19 nt, Artificial Sequence
  Description of Artificial Sequence: Synthetic oligonucleotide
ccuaagcaccacacaucuu

SEQ ID NO: 839157 - RNA, 19 nt, Artificial Sequence
  Description of Artificial Sequence: Synthetic oligonucleotide
aaugacuuggcuuagaagu

SEQ ID NO: 839158 - RNA, 19 nt, Artificial Sequence
  Description of Artificial Sequence: Synthetic oligonucleotide
uuuuagauugcgcagaucc

SEQ ID NO: 839159 - RNA, 19 nt, Artificial Sequence
  Description of Artificial Sequence: Synthetic oligonucleotide
auuuauaucccacaggcag

SEQ ID NO: 839160 - RNA, 19 nt, Artificial Sequence
  Description of Artificial Sequence: Synthetic oligonucleotide
aacgguguauucuucuucc

SEQ ID NO: 839161 - RNA, 19 nt, Artificial Sequence
  Description of Artificial Sequence: Synthetic oligonucleotide
ugacaguuuaaucaaaggc

SEQ ID NO: 839162 - RNA, 19 nt, Artificial Sequence
  Description of Artificial Sequence: Synthetic oligonucleotide
uacuuuggguuuaagaucc

SEQ ID NO: 839163 - RNA, 19 nt, Artificial Sequence
  Description of Artificial Sequence: Synthetic oligonucleotide
aaucaagaaguguuggaag

SEQ ID NO: 839164 - RNA, 19 nt, Artificial Sequence
  Description of Artificial Sequence: Synthetic oligonucleotide
aaaguauggaguuuuaguu

SEQ ID NO: 839165 - RNA, 19 nt, Artificial Sequence
  Description of Artificial Sequence: Synthetic oligonucleotide
ugaacgguaagacugggcc

SEQ ID NO: 839166 - RNA, 19 nt, Artificial Sequence
  Description of Artificial Sequence: Synthetic oligonucleotide
aaugagaggcaguugaccu

SEQ ID NO: 839167 - RNA, 19 nt, Artificial Sequence
  Description of Artificial Sequence: Synthetic oligonucleotide
cucaaauuagaauuccagg

SEQ ID NO: 839168 - RNA, 19 nt, Artificial Sequence
  Description of Artificial Sequence: Synthetic oligonucleotide
uaugauacaguacgcaaca

SEQ ID NO: 839169 - RNA, 19 nt, Artificial Sequence
  Description of Artificial Sequence: Synthetic oligonucleotide
guagcaauacauucaauag

SEQ ID NO: 839170 - RNA, 19 nt, Artificial Sequence
  Description of Artificial Sequence: Synthetic oligonucleotide
ugauaaaucaagcauucau

SEQ ID NO: 839171 - RNA, 19 nt, Artificial Sequence
  Description of Artificial Sequence: Synthetic oligonucleotide
aaaggcaauacccagcgau

SEQ ID NO: 839172 - RNA, 19 nt, Artificial Sequence
  Description of Artificial Sequence: Synthetic oligonucleotide
uaugcgauucaaaaguaug

SEQ ID NO: 839173 - RNA, 19 nt, Artificial Sequence
  Description of Artificial Sequence: Synthetic oligonucleotide
aaucaagcauucauguagc

SEQ ID NO: 839174 - RNA, 19 nt, Artificial Sequence
  Description of Artificial Sequence: Synthetic oligonucleotide
uuaguuuuagauugcgcag

SEQ ID NO: 839175 - RNA, 19 nt, Artificial Sequence
  Description of Artificial Sequence: Synthetic oligonucleotide
auaaacaggaguucuggag

SEQ ID NO: 839176 - RNA, 19 nt, Artificial Sequence
  Description of Artificial Sequence: Synthetic oligonucleotide
uggcauauaacgagcacgg

SEQ ID NO: 839177 - RNA, 19 nt, Artificial Sequence
  Description of Artificial Sequence: Synthetic oligonucleotide
gauaaaucaagcauucaug

SEQ ID NO: 839178 - RNA, 19 nt, Artificial Sequence
  Description of Artificial Sequence: Synthetic oligonucleotide
uucagcaagcacuuaaaag

SEQ ID NO: 839179 - RNA, 19 nt, Artificial Sequence
  Description of Artificial Sequence: Synthetic oligonucleotide
uguagggauugaaugagag

SEQ ID NO: 839180 - RNA, 19 nt, Artificial Sequence
  Description of Artificial Sequence: Synthetic oligonucleotide
aacgccauaagccauccca

SEQ ID NO: 839181 - RNA, 19 nt, Artificial Sequence
  Description of Artificial Sequence: Synthetic oligonucleotide
uaagaucaggauuacauuc

SEQ ID NO: 839182 - RNA, 19 nt, Artificial Sequence
  Description of Artificial Sequence: Synthetic oligonucleotide
uacaguacgcaacagcuca

SEQ ID NO: 839183 - RNA, 19 nt, Artificial Sequence
  Description of Artificial Sequence: Synthetic oligonucleotide
ucucaaucuaagaucagga

SEQ ID NO: 839184 - RNA, 19 nt, Artificial Sequence
  Description of Artificial Sequence: Synthetic oligonucleotide
aaugacaguuuaaucaaag

SEQ ID NO: 839185 - RNA, 19 nt, Artificial Sequence
  Description of Artificial Sequence: Synthetic oligonucleotide
uuaucuucagacacugagc

SEQ ID NO: 839186 - RNA, 19 nt, Artificial Sequence
  Description of Artificial Sequence: Synthetic oligonucleotide
ucaaucuaagaucaggauu

SEQ ID NO: 839187 - RNA, 19 nt, Artificial Sequence
  Description of Artificial Sequence: Synthetic oligonucleotide
uacgcaacagcucacuuga

SEQ ID NO: 839188 - RNA, 19 nt, Artificial Sequence
  Description of Artificial Sequence: Synthetic oligonucleotide
ugauacaguacgcaacagc

SEQ ID NO: 839189 - RNA, 19 nt, Artificial Sequence
  Description of Artificial Sequence: Synthetic oligonucleotide
uagcaauacauucaauaga

SEQ ID NO: 839190 - RNA, 19 nt, Artificial Sequence
  Description of Artificial Sequence: Synthetic oligonucleotide
agcucggauagccugagcg

SEQ ID NO: 839191 - RNA, 19 nt, Artificial Sequence
  Description of Artificial Sequence: Synthetic oligonucleotide
aguugcuagaaugaacucg

SEQ ID NO: 839192 - RNA, 19 nt, Artificial Sequence
  Description of Artificial Sequence: Synthetic oligonucleotide
uuucauuauguggagacca

SEQ ID NO: 839193 - RNA, 19 nt, Artificial Sequence
  Description of Artificial Sequence: Synthetic oligonucleotide
auagccuuccuuuugguga

SEQ ID NO: 839194 - RNA, 19 nt, Artificial Sequence
  Description of Artificial Sequence: Synthetic oligonucleotide
aacugugcaucaucauugg

SEQ ID NO: 839195 - RNA, 19 nt, Artificial Sequence
  Description of Artificial Sequence: Synthetic oligonucleotide
gagauguccacucaaauua

SEQ ID NO: 839196 - RNA, 19 nt, Artificial Sequence
  Description of Artificial Sequence: Synthetic oligonucleotide
uuuggcgcuugauaaauca

SEQ ID NO: 839197 - RNA, 19 nt, Artificial Sequence
  Description of Artificial Sequence: Synthetic oligonucleotide
agcacuagccaaugaaggg

SEQ ID NO: 839198 - RNA, 19 nt, Artificial Sequence
  Description of Artificial Sequence: Synthetic oligonucleotide
uuauguggagaccagugaa

SEQ ID NO: 839199 - RNA, 19 nt, Artificial Sequence
  Description of Artificial Sequence: Synthetic oligonucleotide
auaugauacaguacgcaac

SEQ ID NO: 839200 - RNA, 19 nt, Artificial Sequence
  Description of Artificial Sequence: Synthetic oligonucleotide
uccuuaugcgauucaaaag

SEQ ID NO: 839201 - RNA, 19 nt, Artificial Sequence
  Description of Artificial Sequence: Synthetic oligonucleotide
auaaugauguccuuucuua

SEQ ID NO: 839202 - RNA, 19 nt, Artificial Sequence
  Description of Artificial Sequence: Synthetic oligonucleotide
uuuggugaccucucaaucu

SEQ ID NO: 839203 - RNA, 19 nt, Artificial Sequence
  Description of Artificial Sequence: Synthetic oligonucleotide
aaguauggaguuuuaguuu

SEQ ID NO: 839204 - RNA, 19 nt, Artificial Sequence
  Description of Artificial Sequence: Synthetic oligonucleotide
aacgagcacgguuuacuuc

SEQ ID NO: 839205 - RNA, 19 nt, Artificial Sequence
  Description of Artificial Sequence: Synthetic oligonucleotide
uuuagauugcgcagauccc

SEQ ID NO: 839206 - RNA, 19 nt, Artificial Sequence
  Description of Artificial Sequence: Synthetic oligonucleotide
aaguuauccuugcauauuu

SEQ ID NO: 839207 - RNA, 19 nt, Artificial Sequence
  Description of Artificial Sequence: Synthetic oligonucleotide
gguaaagaacgccauaagc

SEQ ID NO: 839208 - RNA, 19 nt, Artificial Sequence
  Description of Artificial Sequence: Synthetic oligonucleotide
uccccuaauagcuacaaua

SEQ ID NO: 839209 - RNA, 19 nt, Artificial Sequence
  Description of Artificial Sequence: Synthetic oligonucleotide
uccuguuacggaaccaaag

SEQ ID NO: 839210 - RNA, 19 nt, Artificial Sequence
  Description of Artificial Sequence: Synthetic oligonucleotide
acaauaugauacaguacgc

SEQ ID NO: 839211 - RNA, 19 nt, Artificial Sequence
  Description of Artificial Sequence: Synthetic oligonucleotide
uugcgcagaucccauaaag

SEQ ID NO: 839212 - RNA, 19 nt, Artificial Sequence
  Description of Artificial Sequence: Synthetic oligonucleotide
ugguuuagucacuucagga

SEQ ID NO: 839213 - RNA, 19 nt, Artificial Sequence
  Description of Artificial Sequence: Synthetic oligonucleotide
uggcgcuugauaaaucaag

SEQ ID NO: 839214 - RNA, 19 nt, Artificial Sequence
  Description of Artificial Sequence: Synthetic oligonucleotide
caaucuaagaucaggauua

SEQ ID NO: 839215 - RNA, 19 nt, Artificial Sequence
  Description of Artificial Sequence: Synthetic oligonucleotide
acucguagcucggauagcc

SEQ ID NO: 839216 - RNA, 19 nt, Artificial Sequence
  Description of Artificial Sequence: Synthetic oligonucleotide
acacucguagcucggauag

SEQ ID NO: 839217 - RNA, 19 nt, Artificial Sequence
  Description of Artificial Sequence: Synthetic oligonucleotide
ggguuuaagauccuugucc

SEQ ID NO: 839218 - RNA, 19 nt, Artificial Sequence
  Description of Artificial Sequence: Synthetic oligonucleotide
uucguugaugacacgcucc

SEQ ID NO: 839219 - RNA, 19 nt, Artificial Sequence
  Description of Artificial Sequence: Synthetic oligonucleotide
ugggaauaugaacucgagc

SEQ ID NO: 839220 - RNA, 19 nt, Artificial Sequence
  Description of Artificial Sequence: Synthetic oligonucleotide
guugcuagaaugaacucgc

SEQ ID NO: 839221 - RNA, 19 nt, Artificial Sequence
  Description of Artificial Sequence: Synthetic oligonucleotide
agcgauguguauuuuaaaa

SEQ ID NO: 839222 - RNA, 19 nt, Artificial Sequence
  Description of Artificial Sequence: Synthetic oligonucleotide
cucgucagauguaugagug

SEQ ID NO: 839223 - RNA, 19 nt, Artificial Sequence
  Description of Artificial Sequence: Synthetic oligonucleotide
cuguuacggaaccaaagcc

SEQ ID NO: 839224 - RNA, 19 nt, Artificial Sequence
  Description of Artificial Sequence: Synthetic oligonucleotide
cagcacuagccaaugaagg

SEQ ID NO: 839225 - RNA, 19 nt, Artificial Sequence
  Description of Artificial Sequence: Synthetic oligonucleotide
aguauggaguuuuaguuuu

SEQ ID NO: 839226 - RNA, 19 nt, Artificial Sequence
  Description of Artificial Sequence: Synthetic oligonucleotide
cauuuccuacuauacaaug

SEQ ID NO: 839227 - RNA, 19 nt, Artificial Sequence
  Description of Artificial Sequence: Synthetic oligonucleotide
auacagaaacgguguauuc

SEQ ID NO: 839228 - RNA, 19 nt, Artificial Sequence
  Description of Artificial Sequence: Synthetic oligonucleotide
uucuucguugaugacacgc

SEQ ID NO: 839229 - RNA, 19 nt, Artificial Sequence
  Description of Artificial Sequence: Synthetic oligonucleotide
uuagauugcgcagauccca

SEQ ID NO: 839230 - RNA, 19 nt, Artificial Sequence
  Description of Artificial Sequence: Synthetic oligonucleotide
ucuugcgucgggucguucg

SEQ ID NO: 839231 - RNA, 19 nt, Artificial Sequence
  Description of Artificial Sequence: Synthetic oligonucleotide
uccacucaaauuagaauuc

SEQ ID NO: 839232 - RNA, 19 nt, Artificial Sequence
  Description of Artificial Sequence: Synthetic oligonucleotide
uuugguccugcauuuauau

SEQ ID NO: 839233 - RNA, 19 nt, Artificial Sequence
  Description of Artificial Sequence: Synthetic oligonucleotide
gguuuaagauccuuguccc

SEQ ID NO: 839234 - RNA, 19 nt, Artificial Sequence
  Description of Artificial Sequence: Synthetic oligonucleotide
ugcgcagaucccauaaagc

SEQ ID NO: 839235 - RNA, 19 nt, Artificial Sequence
  Description of Artificial Sequence: Synthetic oligonucleotide
agcaauacauucaauagaa

SEQ ID NO: 839236 - RNA, 19 nt, Artificial Sequence
  Description of Artificial Sequence: Synthetic oligonucleotide
auuauguggagaccaguga

SEQ ID NO: 839237 - RNA, 19 nt, Artificial Sequence
  Description of Artificial Sequence: Synthetic oligonucleotide
guagggauugaaugagagg

SEQ ID NO: 839238 - RNA, 19 nt, Artificial Sequence
  Description of Artificial Sequence: Synthetic oligonucleotide
uuaagauccuugucccucc

SEQ ID NO: 839239 - RNA, 19 nt, Artificial Sequence
  Description of Artificial Sequence: Synthetic oligonucleotide
agaccagugaaccuggaaa

SEQ ID NO: 839240 - RNA, 19 nt, Artificial Sequence
  Description of Artificial Sequence: Synthetic oligonucleotide
uugggaauaugaacucgag

SEQ ID NO: 839241 - RNA, 19 nt, Artificial Sequence
  Description of Artificial Sequence: Synthetic oligonucleotide
uuuaagauccuugucccuc

SEQ ID NO: 839242 - RNA, 19 nt, Artificial Sequence
  Description of Artificial Sequence: Synthetic oligonucleotide
uuacucgccaucuugcguc

SEQ ID NO: 839243 - RNA, 19 nt, Artificial Sequence
  Description of Artificial Sequence: Synthetic oligonucleotide
augcgauucaaaaguaugg

SEQ ID NO: 839244 - RNA, 19 nt, Artificial Sequence
  Description of Artificial Sequence: Synthetic oligonucleotide
cauucaauagaaacaccuc

SEQ ID NO: 839245 - RNA, 19 nt, Artificial Sequence
  Description of Artificial Sequence: Synthetic oligonucleotide
acgagcacgguuuacuucu

SEQ ID NO: 839246 - RNA, 19 nt, Artificial Sequence
  Description of Artificial Sequence: Synthetic oligonucleotide
cucucaaucuaagaucagg

SEQ ID NO: 839247 - RNA, 19 nt, Artificial Sequence
  Description of Artificial Sequence: Synthetic oligonucleotide
aagaucaggauuacauucu

SEQ ID NO: 839248 - RNA, 19 nt, Artificial Sequence
  Description of Artificial Sequence: Synthetic oligonucleotide
gaccucucaaucuaagauc

SEQ ID NO: 839249 - RNA, 19 nt, Artificial Sequence
  Description of Artificial Sequence: Synthetic oligonucleotide
ucuuuuccaagcacgucac

SEQ ID NO: 839250 - RNA, 19 nt, Artificial Sequence
  Description of Artificial Sequence: Synthetic oligonucleotide
cuuuacucgccaucuugcg

SEQ ID NO: 839251 - RNA, 19 nt, Artificial Sequence
  Description of Artificial Sequence: Synthetic oligonucleotide
acggagacuuuucaacccg

SEQ ID NO: 839252 - RNA, 19 nt, Artificial Sequence
  Description of Artificial Sequence: Synthetic oligonucleotide
uuaugcgauucaaaaguau

SEQ ID NO: 839253 - RNA, 19 nt, Artificial Sequence
  Description of Artificial Sequence: Synthetic oligonucleotide
agaaacgguguauucuucu

SEQ ID NO: 839254 - RNA, 19 nt, Artificial Sequence
  Description of Artificial Sequence: Synthetic oligonucleotide
ucuucguugaugacacgcu

SEQ ID NO: 839255 - RNA, 19 nt, Artificial Sequence
  Description of Artificial Sequence: Synthetic oligonucleotide
uuuacucgccaucuugcgu

SEQ ID NO: 839256 - RNA, 19 nt, Artificial Sequence
  Description of Artificial Sequence: Synthetic oligonucleotide
gauacaguacgcaacagcu

SEQ ID NO: 839257 - RNA, 19 nt, Artificial Sequence
  Description of Artificial Sequence: Synthetic oligonucleotide
ucuuaagcaacauccuuuu

SEQ ID NO: 839258 - RNA, 19 nt, Artificial Sequence
  Description of Artificial Sequence: Synthetic oligonucleotide
ugcgauucaaaaguaugga

SEQ ID NO: 839259 - RNA, 19 nt, Artificial Sequence
  Description of Artificial Sequence: Synthetic oligonucleotide
ucuucucucucuccucucc

SEQ ID NO: 839260 - RNA, 19 nt, Artificial Sequence
  Description of Artificial Sequence: Synthetic oligonucleotide
gaaugagaggcaguugacc

SEQ ID NO: 839261 - RNA, 19 nt, Artificial Sequence
  Description of Artificial Sequence: Synthetic oligonucleotide
gccaagagcagcccgaacg

SEQ ID NO: 839262 - RNA, 19 nt, Artificial Sequence
  Description of Artificial Sequence: Synthetic oligonucleotide
uaguuuuagauugcgcaga

SEQ ID NO: 839263 - RNA, 19 nt, Artificial Sequence
  Description of Artificial Sequence: Synthetic oligonucleotide
ugggucauaaccaggucau

SEQ ID NO: 839264 - RNA, 19 nt, Artificial Sequence
  Description of Artificial Sequence: Synthetic oligonucleotide
ucauugggaauaugaacuc

SEQ ID NO: 839265 - RNA, 19 nt, Artificial Sequence
  Description of Artificial Sequence: Synthetic oligonucleotide
agccaucccacuuacauuu

SEQ ID NO: 839266 - RNA, 19 nt, Artificial Sequence
  Description of Artificial Sequence: Synthetic oligonucleotide
uaaaucaagcauucaugua

SEQ ID NO: 839267 - RNA, 19 nt, Artificial Sequence
  Description of Artificial Sequence: Synthetic oligonucleotide
aagaacgccauaagccauc

SEQ ID NO: 839268 - RNA, 19 nt, Artificial Sequence
  Description of Artificial Sequence: Synthetic oligonucleotide
uuggaacggagacuuuuca

SEQ ID NO: 839269 - RNA, 19 nt, Artificial Sequence
  Description of Artificial Sequence: Synthetic oligonucleotide
uuagcaggguguuuuguau

SEQ ID NO: 839270 - RNA, 19 nt, Artificial Sequence
  Description of Artificial Sequence: Synthetic oligonucleotide
auguaugagugcccagcac

SEQ ID NO: 839271 - RNA, 19 nt, Artificial Sequence
  Description of Artificial Sequence: Synthetic oligonucleotide
gauugcuuuagcauccaca

SEQ ID NO: 839272 - RNA, 19 nt, Artificial Sequence
  Description of Artificial Sequence: Synthetic oligonucleotide
acagaaacgguguauucuu

SEQ ID NO: 839273 - RNA, 19 nt, Artificial Sequence
  Description of Artificial Sequence: Synthetic oligonucleotide
uuauaucccacaggcagac

SEQ ID NO: 839274 - RNA, 19 nt, Artificial Sequence
  Description of Artificial Sequence: Synthetic oligonucleotide
cauugggaauaugaacucg

SEQ ID NO: 839275 - RNA, 19 nt, Artificial Sequence
  Description of Artificial Sequence: Synthetic oligonucleotide
ugucgugacaucugacucu

SEQ ID NO: 839276 - RNA, 19 nt, Artificial Sequence
  Description of Artificial Sequence: Synthetic oligonucleotide
uuagucacuucaggaagcc

SEQ ID NO: 839277 - RNA, 19 nt, Artificial Sequence
  Description of Artificial Sequence: Synthetic oligonucleotide
uauuucugcaaagccaauc

SEQ ID NO: 839278 - RNA, 19 nt, Artificial Sequence
  Description of Artificial Sequence: Synthetic oligonucleotide
ucaggauuacauucuccac

SEQ ID NO: 839279 - RNA, 19 nt, Artificial Sequence
  Description of Artificial Sequence: Synthetic oligonucleotide
aggucauacagaaacggug

SEQ ID NO: 839280 - RNA, 19 nt, Artificial Sequence
  Description of Artificial Sequence: Synthetic oligonucleotide
uuccuacuauacaaugccu

SEQ ID NO: 839281 - RNA, 19 nt, Artificial Sequence
  Description of Artificial Sequence: Synthetic oligonucleotide
cacugaacgguaagacugg

SEQ ID NO: 839282 - RNA, 19 nt, Artificial Sequence
  Description of Artificial Sequence: Synthetic oligonucleotide
uggcuuagaagugguauug

SEQ ID NO: 839283 - RNA, 19 nt, Artificial Sequence
  Description of Artificial Sequence: Synthetic oligonucleotide
auaacgagcacgguuuacu

SEQ ID NO: 839284 - RNA, 19 nt, Artificial Sequence
  Description of Artificial Sequence: Synthetic oligonucleotide
ucguagcucggauagccug

SEQ ID NO: 839285 - RNA, 19 nt, Artificial Sequence
  Description of Artificial Sequence: Synthetic oligonucleotide
guacgcaacagcucacuug

SEQ ID NO: 839286 - RNA, 19 nt, Artificial Sequence
  Description of Artificial Sequence: Synthetic oligonucleotide
agaacgccauaagccaucc

SEQ ID NO: 839287 - RNA, 19 nt, Artificial Sequence
  Description of Artificial Sequence: Synthetic oligonucleotide
agauugcuuuagcauccac

SEQ ID NO: 839288 - RNA, 19 nt, Artificial Sequence
  Description of Artificial Sequence: Synthetic oligonucleotide
caugaauaaacaggaguuc

SEQ ID NO: 839289 - RNA, 19 nt, Artificial Sequence
  Description of Artificial Sequence: Synthetic oligonucleotide
agccacugaacgguaagac

SEQ ID NO: 839290 - RNA, 19 nt, Artificial Sequence
  Description of Artificial Sequence: Synthetic oligonucleotide
ucccacuuacauuuccuac

SEQ ID NO: 839291 - RNA, 19 nt, Artificial Sequence
  Description of Artificial Sequence: Synthetic oligonucleotide
agauccuugucccuccagu

SEQ ID NO: 839292 - RNA, 19 nt, Artificial Sequence
  Description of Artificial Sequence: Synthetic oligonucleotide
guuacggaaccaaagccac

SEQ ID NO: 839293 - RNA, 19 nt, Artificial Sequence
  Description of Artificial Sequence: Synthetic oligonucleotide
uuuccuguuacggaaccaa

SEQ ID NO: 839294 - RNA, 19 nt, Artificial Sequence
  Description of Artificial Sequence: Synthetic oligonucleotide
aaggcaauacccagcgaug

SEQ ID NO: 839295 - RNA, 19 nt, Artificial Sequence
  Description of Artificial Sequence: Synthetic oligonucleotide
ucaagcauucauguagcaa

SEQ ID NO: 839296 - RNA, 19 nt, Artificial Sequence
  Description of Artificial Sequence: Synthetic oligonucleotide
auugggaauaugaacucga

SEQ ID NO: 839297 - RNA, 19 nt, Artificial Sequence
  Description of Artificial Sequence: Synthetic oligonucleotide
uccgaugucgugacaucug

SEQ ID NO: 839298 - RNA, 19 nt, Artificial Sequence
  Description of Artificial Sequence: Synthetic oligonucleotide
cauagccuuccuuuuggug

SEQ ID NO: 839299 - RNA, 19 nt, Artificial Sequence
  Description of Artificial Sequence: Synthetic oligonucleotide
caguaaagauugcuuuagc

SEQ ID NO: 839300 - RNA, 19 nt, Artificial Sequence
  Description of Artificial Sequence: Synthetic oligonucleotide
uggguuuaagauccuuguc

SEQ ID NO: 839301 - RNA, 19 nt, Artificial Sequence
  Description of Artificial Sequence: Synthetic oligonucleotide
uccucuacaacagcugagu

SEQ ID NO: 839302 - RNA, 19 nt, Artificial Sequence
  Description of Artificial Sequence: Synthetic oligonucleotide
gcgauguguauuuuaaaac

SEQ ID NO: 839303 - RNA, 19 nt, Artificial Sequence
  Description of Artificial Sequence: Synthetic oligonucleotide
cuuggaacggagacuuuuc

SEQ ID NO: 839304 - RNA, 19 nt, Artificial Sequence
  Description of Artificial Sequence: Synthetic oligonucleotide
uuacggaaccaaagccacc

SEQ ID NO: 839305 - RNA, 19 nt, Artificial Sequence
  Description of Artificial Sequence: Synthetic oligonucleotide
uauuggaucugguguccca

SEQ ID NO: 839306 - RNA, 19 nt, Artificial Sequence
  Description of Artificial Sequence: Synthetic oligonucleotide
cauucauguagcaauacau

SEQ ID NO: 839307 - RNA, 19 nt, Artificial Sequence
  Description of Artificial Sequence: Synthetic oligonucleotide
ucgucagauguaugagugc

SEQ ID NO: 839308 - RNA, 19 nt, Artificial Sequence
  Description of Artificial Sequence: Synthetic oligonucleotide
gcgauucaaaaguauggag

SEQ ID NO: 839309 - RNA, 19 nt, Artificial Sequence
  Description of Artificial Sequence: Synthetic oligonucleotide
uuccagauuuuauauucuu

SEQ ID NO: 839310 - RNA, 19 nt, Artificial Sequence
  Description of Artificial Sequence: Synthetic oligonucleotide
aggguaaagaacgccauaa

SEQ ID NO: 839311 - RNA, 19 nt, Artificial Sequence
  Description of Artificial Sequence: Synthetic oligonucleotide
agcaaccaccagaugauuc

SEQ ID NO: 839312 - RNA, 19 nt, Artificial Sequence
  Description of Artificial Sequence: Synthetic oligonucleotide
aaagaacgccauaagccau

SEQ ID NO: 839313 - RNA, 19 nt, Artificial Sequence
  Description of Artificial Sequence: Synthetic oligonucleotide
uggaacggagacuuuucaa

SEQ ID NO: 839314 - RNA, 19 nt, Artificial Sequence
  Description of Artificial Sequence: Synthetic oligonucleotide
ugcucgucagauguaugag

SEQ ID NO: 839315 - RNA, 19 nt, Artificial Sequence
  Description of Artificial Sequence: Synthetic oligonucleotide
cauauaacgagcacgguuu

SEQ ID NO: 839316 - RNA, 19 nt, Artificial Sequence
  Description of Artificial Sequence: Synthetic oligonucleotide
ugcauccaccaaaugacuu

SEQ ID NO: 839317 - RNA, 19 nt, Artificial Sequence
  Description of Artificial Sequence: Synthetic oligonucleotide
uguggagaccagugaaccu

SEQ ID NO: 839318 - RNA, 19 nt, Artificial Sequence
  Description of Artificial Sequence: Synthetic oligonucleotide
gguuuagucacuucaggaa

SEQ ID NO: 839319 - RNA, 19 nt, Artificial Sequence
  Description of Artificial Sequence: Synthetic oligonucleotide
gcucacuugaaagugcuag

SEQ ID NO: 839320 - RNA, 19 nt, Artificial Sequence
  Description of Artificial Sequence: Synthetic oligonucleotide
cacgguuuacuucuccuuc

SEQ ID NO: 839321 - RNA, 19 nt, Artificial Sequence
  Description of Artificial Sequence: Synthetic oligonucleotide
cugaacgguaagacugggc

SEQ ID NO: 839322 - RNA, 19 nt, Artificial Sequence
  Description of Artificial Sequence: Synthetic oligonucleotide
ugauucugcucgucagaug

SEQ ID NO: 839323 - RNA, 19 nt, Artificial Sequence
  Description of Artificial Sequence: Synthetic oligonucleotide
uuuuggcgcuugauaaauc

SEQ ID NO: 839324 - RNA, 19 nt, Artificial Sequence
  Description of Artificial Sequence: Synthetic oligonucleotide
auacaguacgcaacagcuc

SEQ ID NO: 839325 - RNA, 19 nt, Artificial Sequence
  Description of Artificial Sequence: Synthetic oligonucleotide
acgguuuacuucuccuuca

SEQ ID NO: 839326 - RNA, 19 nt, Artificial Sequence
  Description of Artificial Sequence: Synthetic oligonucleotide
uacucgccaucuugcgucg

SEQ ID NO: 839327 - RNA, 19 nt, Artificial Sequence
  Description of Artificial Sequence: Synthetic oligonucleotide
auugaaugagaggcaguug

SEQ ID NO: 839328 - RNA, 19 nt, Artificial Sequence
  Description of Artificial Sequence: Synthetic oligonucleotide
aggagauguccacucaaau

SEQ ID NO: 839329 - RNA, 19 nt, Artificial Sequence
  Description of Artificial Sequence: Synthetic oligonucleotide
uuggcgcuugauaaaucaa

SEQ ID NO: 839330 - RNA, 19 nt, Artificial Sequence
  Description of Artificial Sequence: Synthetic oligonucleotide
cugagcgugcucuggcugc

SEQ ID NO: 839331 - RNA, 19 nt, Artificial Sequence
  Description of Artificial Sequence: Synthetic oligonucleotide
ugaggauucuguggcauau

SEQ ID NO: 839332 - RNA, 19 nt, Artificial Sequence
  Description of Artificial Sequence: Synthetic oligonucleotide
ugaagggcauaauccuuuc

SEQ ID NO: 839333 - RNA, 19 nt, Artificial Sequence
  Description of Artificial Sequence: Synthetic oligonucleotide
uagauugcgcagaucccau

SEQ ID NO: 839334 - RNA, 19 nt, Artificial Sequence
  Description of Artificial Sequence: Synthetic oligonucleotide
ugcuagaaucagaggguaa

SEQ ID NO: 839335 - RNA, 19 nt, Artificial Sequence
  Description of Artificial Sequence: Synthetic oligonucleotide
ggugucgaggucugagacg

SEQ ID NO: 839336 - RNA, 19 nt, Artificial Sequence
  Description of Artificial Sequence: Synthetic oligonucleotide
gaacucgcuguagggauug

SEQ ID NO: 839337 - RNA, 19 nt, Artificial Sequence
  Description of Artificial Sequence: Synthetic oligonucleotide
caaaugacuuggcuuagaa

SEQ ID NO: 839338 - RNA, 19 nt, Artificial Sequence
  Description of Artificial Sequence: Synthetic oligonucleotide
acugaacgguaagacuggg

SEQ ID NO: 839339 - RNA, 19 nt, Artificial Sequence
  Description of Artificial Sequence: Synthetic oligonucleotide
auaugaacucgagcaacca

SEQ ID NO: 839340 - RNA, 19 nt, Artificial Sequence
  Description of Artificial Sequence: Synthetic oligonucleotide
cuuaugcgauucaaaagua

SEQ ID NO: 839341 - RNA, 19 nt, Artificial Sequence
  Description of Artificial Sequence: Synthetic oligonucleotide
uuuuccuguuacggaacca

SEQ ID NO: 839342 - RNA, 19 nt, Artificial Sequence
  Description of Artificial Sequence: Synthetic oligonucleotide
uugcauauuugggaacuuc

SEQ ID NO: 839343 - RNA, 19 nt, Artificial Sequence
  Description of Artificial Sequence: Synthetic oligonucleotide
uauaacgagcacgguuuac

SEQ ID NO: 839344 - RNA, 19 nt, Artificial Sequence
  Description of Artificial Sequence: Synthetic oligonucleotide
agcuacaauaugauacagu

SEQ ID NO: 839345 - RNA, 19 nt, Artificial Sequence
  Description of Artificial Sequence: Synthetic oligonucleotide
ucucucucuccucuccaaa

SEQ ID NO: 839346 - RNA, 19 nt, Artificial Sequence
  Description of Artificial Sequence: Synthetic oligonucleotide
acgccauaagccaucccac

SEQ ID NO: 839347 - RNA, 19 nt, Artificial Sequence
  Description of Artificial Sequence: Synthetic oligonucleotide
cacuagccaaugaagggca

SEQ ID NO: 839348 - RNA, 19 nt, Artificial Sequence
  Description of Artificial Sequence: Synthetic oligonucleotide
ccagcacuagccaaugaag

SEQ ID NO: 839349 - RNA, 19 nt, Artificial Sequence
  Description of Artificial Sequence: Synthetic oligonucleotide
guaagacugggccacugaa

SEQ ID NO: 839350 - RNA, 19 nt, Artificial Sequence
  Description of Artificial Sequence: Synthetic oligonucleotide
uaacgagcacgguuuacuu

SEQ ID NO: 839351 - RNA, 19 nt, Artificial Sequence
  Description of Artificial Sequence: Synthetic oligonucleotide
cuuagaagugguauuggau

SEQ ID NO: 839352 - RNA, 19 nt, Artificial Sequence
  Description of Artificial Sequence: Synthetic oligonucleotide
ggguaaagaacgccauaag

SEQ ID NO: 839353 - RNA, 19 nt, Artificial Sequence
  Description of Artificial Sequence: Synthetic oligonucleotide
cugcucgucagauguauga

SEQ ID NO: 839354 - RNA, 19 nt, Artificial Sequence
  Description of Artificial Sequence: Synthetic oligonucleotide
auucuucguugaugacacg

SEQ ID NO: 839355 - RNA, 19 nt, Artificial Sequence
  Description of Artificial Sequence: Synthetic oligonucleotide
cuugcgucgggucguucgc

SEQ ID NO: 839356 - RNA, 19 nt, Artificial Sequence
  Description of Artificial Sequence: Synthetic oligonucleotide
uacccagcgauguguauuu

SEQ ID NO: 839357 - RNA, 19 nt, Artificial Sequence
  Description of Artificial Sequence: Synthetic oligonucleotide
augauacaguacgcaacag

SEQ ID NO: 839358 - RNA, 19 nt, Artificial Sequence
  Description of Artificial Sequence: Synthetic oligonucleotide
gcuagccaagagcagcccg

SEQ ID NO: 839359 - RNA, 19 nt, Artificial Sequence
  Description of Artificial Sequence: Synthetic oligonucleotide
ggcgcuugauaaaucaagc

SEQ ID NO: 839360 - RNA, 19 nt, Artificial Sequence
  Description of Artificial Sequence: Synthetic oligonucleotide
ccaguaaagauugcuuuag

SEQ ID NO: 839361 - RNA, 19 nt, Artificial Sequence
  Description of Artificial Sequence: Synthetic oligonucleotide
gagcacgguuuacuucucc

SEQ ID NO: 839362 - RNA, 19 nt, Artificial Sequence
  Description of Artificial Sequence: Synthetic oligonucleotide
gagccaguugcuagaauga

SEQ ID NO: 839363 - RNA, 19 nt, Artificial Sequence
  Description of Artificial Sequence: Synthetic oligonucleotide
uucugcucgucagauguau

SEQ ID NO: 839364 - RNA, 19 nt, Artificial Sequence
  Description of Artificial Sequence: Synthetic oligonucleotide
auauaacgagcacgguuua

SEQ ID NO: 839365 - RNA, 19 nt, Artificial Sequence
  Description of Artificial Sequence: Synthetic oligonucleotide
ccuuaugcgauucaaaagu

SEQ ID NO: 839366 - RNA, 19 nt, Artificial Sequence
  Description of Artificial Sequence: Synthetic oligonucleotide
gcacuagccaaugaagggc

SEQ ID NO: 839367 - RNA, 19 nt, Artificial Sequence
  Description of Artificial Sequence: Synthetic oligonucleotide
agagcagcccgaacgcagg

SEQ ID NO: 839368 - RNA, 19 nt, Artificial Sequence
  Description of Artificial Sequence: Synthetic oligonucleotide
acaguacgcaacagcucac

SEQ ID NO: 839369 - RNA, 19 nt, Artificial Sequence
  Description of Artificial Sequence: Synthetic oligonucleotide
uucucucucuccucuccaa

SEQ ID NO: 839370 - RNA, 19 nt, Artificial Sequence
  Description of Artificial Sequence: Synthetic oligonucleotide
caguugcuagaaugaacuc

SEQ ID NO: 839371 - RNA, 19 nt, Artificial Sequence
  Description of Artificial Sequence: Synthetic oligonucleotide
ugcgucgggucguucgccc

SEQ ID NO: 839372 - RNA, 19 nt, Artificial Sequence
  Description of Artificial Sequence: Synthetic oligonucleotide
accaaaugacuuggcuuag

SEQ ID NO: 839373 - RNA, 19 nt, Artificial Sequence
  Description of Artificial Sequence: Synthetic oligonucleotide
auugcgcagaucccauaaa

SEQ ID NO: 839374 - RNA, 19 nt, Artificial Sequence
  Description of Artificial Sequence: Synthetic oligonucleotide
cucgccaucuugcgucggg

SEQ ID NO: 839375 - RNA, 19 nt, Artificial Sequence
  Description of Artificial Sequence: Synthetic oligonucleotide
gcauucauguagcaauaca

SEQ ID NO: 839376 - RNA, 19 nt, Artificial Sequence
  Description of Artificial Sequence: Synthetic oligonucleotide
ugucuuuuccaagcacguc

SEQ ID NO: 839377 - RNA, 19 nt, Artificial Sequence
  Description of Artificial Sequence: Synthetic oligonucleotide
uggugaccucucaaucuaa

SEQ ID NO: 839378 - RNA, 19 nt, Artificial Sequence
  Description of Artificial Sequence: Synthetic oligonucleotide
guauuggaucugguguccc

SEQ ID NO: 839379 - RNA, 19 nt, Artificial Sequence
  Description of Artificial Sequence: Synthetic oligonucleotide
ggcuuagaagugguauugg

SEQ ID NO: 839380 - RNA, 19 nt, Artificial Sequence
  Description of Artificial Sequence: Synthetic oligonucleotide
gggcauaauccuuuccuuc

SEQ ID NO: 839381 - RNA, 19 nt, Artificial Sequence
  Description of Artificial Sequence: Synthetic oligonucleotide
gagaccagugaaccuggaa

SEQ ID NO: 839382 - RNA, 19 nt, Artificial Sequence
  Description of Artificial Sequence: Synthetic oligonucleotide
aucuaagaucaggauuaca

SEQ ID NO: 839383 - RNA, 19 nt, Artificial Sequence
  Description of Artificial Sequence: Synthetic oligonucleotide
auacccagcgauguguauu

SEQ ID NO: 839384 - RNA, 19 nt, Artificial Sequence
  Description of Artificial Sequence: Synthetic oligonucleotide
acgguguauucuucuucca

SEQ ID NO: 839385 - RNA, 19 nt, Artificial Sequence
  Description of Artificial Sequence: Synthetic oligonucleotide
uuccccuaauagcuacaau

SEQ ID NO: 839386 - RNA, 19 nt, Artificial Sequence
  Description of Artificial Sequence: Synthetic oligonucleotide
acauucaggcggcgaucag

SEQ ID NO: 839387 - RNA, 19 nt, Artificial Sequence
  Description of Artificial Sequence: Synthetic oligonucleotide
agauccaaacaaggacuca

SEQ ID NO: 839388 - RNA, 19 nt, Artificial Sequence
  Description of Artificial Sequence: Synthetic oligonucleotide
ggcucauugggguuccaac

SEQ ID NO: 839389 - RNA, 19 nt, Artificial Sequence
  Description of Artificial Sequence: Synthetic oligonucleotide
caggcggcgaucaguacca

SEQ ID NO: 839390 - RNA, 19 nt, Artificial Sequence
  Description of Artificial Sequence: Synthetic oligonucleotide
acacacucguagcucggau

SEQ ID NO: 839391 - RNA, 19 nt, Artificial Sequence
  Description of Artificial Sequence: Synthetic oligonucleotide
gggugucgaggucugagac

SEQ ID NO: 839392 - RNA, 19 nt, Artificial Sequence
  Description of Artificial Sequence: Synthetic oligonucleotide
caaccaccagaugauucug

SEQ ID NO: 839393 - RNA, 19 nt, Artificial Sequence
  Description of Artificial Sequence: Synthetic oligonucleotide
guagcucggauagccugag

SEQ ID NO: 839394 - RNA, 19 nt, Artificial Sequence
  Description of Artificial Sequence: Synthetic oligonucleotide
auucaggcggcgaucagua

SEQ ID NO: 839395 - RNA, 19 nt, Artificial Sequence
  Description of Artificial Sequence: Synthetic oligonucleotide
gaacgccauaagccauccc

SEQ ID NO: 839396 - RNA, 19 nt, Artificial Sequence
  Description of Artificial Sequence: Synthetic oligonucleotide
gaaacgguguauucuucuu

SEQ ID NO: 839397 - RNA, 19 nt, Artificial Sequence
  Description of Artificial Sequence: Synthetic oligonucleotide
gcgcuugauaaaucaagca

SEQ ID NO: 839398 - RNA, 19 nt, Artificial Sequence
  Description of Artificial Sequence: Synthetic oligonucleotide
gcuagaaucagaggguaaa

SEQ ID NO: 839399 - RNA, 19 nt, Artificial Sequence
  Description of Artificial Sequence: Synthetic oligonucleotide
ugagcgugcucuggcugcc

SEQ ID NO: 839400 - RNA, 19 nt, Artificial Sequence
  Description of Artificial Sequence: Synthetic oligonucleotide
ggcaauacccagcgaugug

SEQ ID NO: 839401 - RNA, 19 nt, Artificial Sequence
  Description of Artificial Sequence: Synthetic oligonucleotide
cacauucaggcggcgauca

SEQ ID NO: 839402 - RNA, 19 nt, Artificial Sequence
  Description of Artificial Sequence: Synthetic oligonucleotide
ugcccagcacuagccaaug

SEQ ID NO: 839403 - RNA, 19 nt, Artificial Sequence
  Description of Artificial Sequence: Synthetic oligonucleotide
gguaagacugggccacuga

SEQ ID NO: 839404 - RNA, 19 nt, Artificial Sequence
  Description of Artificial Sequence: Synthetic oligonucleotide
gaacgcaggcgcuccuguc

SEQ ID NO: 839405 - RNA, 19 nt, Artificial Sequence
  Description of Artificial Sequence: Synthetic oligonucleotide
cuucucucucuccucucca

SEQ ID NO: 839406 - RNA, 19 nt, Artificial Sequence
  Description of Artificial Sequence: Synthetic oligonucleotide
cucuucucucucuccucuc

SEQ ID NO: 839407 - RNA, 19 nt, Artificial Sequence
  Description of Artificial Sequence: Synthetic oligonucleotide
uagcucggauagccugagc

SEQ ID NO: 839408 - RNA, 19 nt, Artificial Sequence
  Description of Artificial Sequence: Synthetic oligonucleotide
cauacagaaacgguguauu

SEQ ID NO: 839409 - RNA, 19 nt, Artificial Sequence
  Description of Artificial Sequence: Synthetic oligonucleotide
guaugagugcccagcacua

SEQ ID NO: 839410 - RNA, 19 nt, Artificial Sequence
  Description of Artificial Sequence: Synthetic oligonucleotide
gcauauaacgagcacgguu

SEQ ID NO: 839411 - RNA, 19 nt, Artificial Sequence
  Description of Artificial Sequence: Synthetic oligonucleotide
ccaguuccgaugucgugac

SEQ ID NO: 839412 - RNA, 19 nt, Artificial Sequence
  Description of Artificial Sequence: Synthetic oligonucleotide
ccagcgauguguauuuuaa

SEQ ID NO: 839413 - RNA, 19 nt, Artificial Sequence
  Description of Artificial Sequence: Synthetic oligonucleotide
agcccgaacgcaggcgcuc

SEQ ID NO: 839414 - RNA, 19 nt, Artificial Sequence
  Description of Artificial Sequence: Synthetic oligonucleotide
uugcgucgggucguucgcc

SEQ ID NO: 839415 - RNA, 19 nt, Artificial Sequence
  Description of Artificial Sequence: Synthetic oligonucleotide
cacacucguagcucggaua

SEQ ID NO: 839416 - RNA, 19 nt, Artificial Sequence
  Description of Artificial Sequence: Synthetic oligonucleotide
ccauaaagcaacagucuua

SEQ ID NO: 839417 - RNA, 19 nt, Artificial Sequence
  Description of Artificial Sequence: Synthetic oligonucleotide
gaggucugagacgcucuuc

SEQ ID NO: 839418 - RNA, 19 nt, Artificial Sequence
  Description of Artificial Sequence: Synthetic oligonucleotide
cagcugaguggccaguaaa

SEQ ID NO: 839419 - RNA, 19 nt, Artificial Sequence
  Description of Artificial Sequence: Synthetic oligonucleotide
cacuuggaucugguuuagc

SEQ ID NO: 839420 - RNA, 19 nt, Artificial Sequence
  Description of Artificial Sequence: Synthetic oligonucleotide
gcucauugggguuccaacu

SEQ ID NO: 839421 - RNA, 19 nt, Artificial Sequence
  Description of Artificial Sequence: Synthetic oligonucleotide
cagcgauguguauuuuaaa

SEQ ID NO: 839422 - RNA, 19 nt, Artificial Sequence
  Description of Artificial Sequence: Synthetic oligonucleotide
cacucguagcucggauagc

SEQ ID NO: 839423 - RNA, 19 nt, Artificial Sequence
  Description of Artificial Sequence: Synthetic oligonucleotide
guuuagcaggguguuuugu

SEQ ID NO: 839424 - RNA, 19 nt, Artificial Sequence
  Description of Artificial Sequence: Synthetic oligonucleotide
caguuuaaucaaaggcaau

SEQ ID NO: 839425 - RNA, 19 nt, Artificial Sequence
  Description of Artificial Sequence: Synthetic oligonucleotide
ccucucaaucuaagaucag

SEQ ID NO: 839426 - RNA, 19 nt, Artificial Sequence
  Description of Artificial Sequence: Synthetic oligonucleotide
ccugagcgugcucuggcug

SEQ ID NO: 839427 - RNA, 19 nt, Artificial Sequence
  Description of Artificial Sequence: Synthetic oligonucleotide
cgcuguagggauugaauga

SEQ ID NO: 839428 - RNA, 19 nt, Artificial Sequence
  Description of Artificial Sequence: Synthetic oligonucleotide
gcgugcucuggcugccugg

SEQ ID NO: 839429 - RNA, 19 nt, Artificial Sequence
  Description of Artificial Sequence: Synthetic oligonucleotide
acucgccaucuugcgucgg

SEQ ID NO: 839430 - RNA, 19 nt, Artificial Sequence
  Description of Artificial Sequence: Synthetic oligonucleotide
cauucaggcggcgaucagu

SEQ ID NO: 839431 - RNA, 19 nt, Artificial Sequence
  Description of Artificial Sequence: Synthetic oligonucleotide
aucuugcgucgggucguuc

SEQ ID NO: 839432 - RNA, 19 nt, Artificial Sequence
  Description of Artificial Sequence: Synthetic oligonucleotide
cccagcacuagccaaugaa

SEQ ID NO: 839433 - RNA, 19 nt, Artificial Sequence
  Description of Artificial Sequence: Synthetic oligonucleotide
cagugugugcauccaccaa

SEQ ID NO: 839434 - RNA, 19 nt, Artificial Sequence
  Description of Artificial Sequence: Synthetic oligonucleotide
gcucgucagauguaugagu

SEQ ID NO: 839435 - RNA, 19 nt, Artificial Sequence
  Description of Artificial Sequence: Synthetic oligonucleotide
aacuuggaacggagacuuu

SEQ ID NO: 839436 - RNA, 19 nt, Artificial Sequence
  Description of Artificial Sequence: Synthetic oligonucleotide
acuagccaaugaagggcau

SEQ ID NO: 839437 - RNA, 19 nt, Artificial Sequence
  Description of Artificial Sequence: Synthetic oligonucleotide
cagaugcacucaggagaug

SEQ ID NO: 839438 - RNA, 19 nt, Artificial Sequence
  Description of Artificial Sequence: Synthetic oligonucleotide
ccgaugucgugacaucuga

SEQ ID NO: 839439 - RNA, 19 nt, Artificial Sequence
  Description of Artificial Sequence: Synthetic oligonucleotide
cucguagcucggauagccu

SEQ ID NO: 839440 - RNA, 19 nt, Artificial Sequence
  Description of Artificial Sequence: Synthetic oligonucleotide
acgguaagacugggccacu

SEQ ID NO: 839441 - RNA, 19 nt, Artificial Sequence
  Description of Artificial Sequence: Synthetic oligonucleotide
cucgcgggugucgaggucu

SEQ ID NO: 839442 - RNA, 19 nt, Artificial Sequence
  Description of Artificial Sequence: Synthetic oligonucleotide
aggcggcgaucaguaccac

SEQ ID NO: 839443 - RNA, 19 nt, Artificial Sequence
  Description of Artificial Sequence: Synthetic oligonucleotide
agcucacuugaaagugcua

SEQ ID NO: 839444 - RNA, 19 nt, Artificial Sequence
  Description of Artificial Sequence: Synthetic oligonucleotide
ccccuuugccgccucggac

SEQ ID NO: 839445 - RNA, 19 nt, Artificial Sequence
  Description of Artificial Sequence: Synthetic oligonucleotide
cguagcucggauagccuga

SEQ ID NO: 839446 - RNA, 19 nt, Artificial Sequence
  Description of Artificial Sequence: Synthetic oligonucleotide
ccagaugauucugcucguc

SEQ ID NO: 839447 - RNA, 19 nt, Artificial Sequence
  Description of Artificial Sequence: Synthetic oligonucleotide
cagacgccgcguccuucuc

SEQ ID NO: 839448 - RNA, 19 nt, Artificial Sequence
  Description of Artificial Sequence: Synthetic oligonucleotide
caguacgcaacagcucacu

SEQ ID NO: 839449 - RNA, 19 nt, Artificial Sequence
  Description of Artificial Sequence: Synthetic oligonucleotide
gcguccuucucuccggccu

SEQ ID NO: 839450 - RNA, 19 nt, Artificial Sequence
  Description of Artificial Sequence: Synthetic oligonucleotide
gcgucgggucguucgcccc

SEQ ID NO: 839451 - RNA, 19 nt, Artificial Sequence
  Description of Artificial Sequence: Synthetic oligonucleotide
cccagcgauguguauuuua

SEQ ID NO: 839452 - RNA, 19 nt, Artificial Sequence
  Description of Artificial Sequence: Synthetic oligonucleotide
cuuugccgccucggacuuc

SEQ ID NO: 839453 - RNA, 19 nt, Artificial Sequence
  Description of Artificial Sequence: Synthetic oligonucleotide
cgccgcguccuucucuccg

SEQ ID NO: 839454 - RNA, 19 nt, Artificial Sequence
  Description of Artificial Sequence: Synthetic oligonucleotide
ccaaaugacuuggcuuaga

SEQ ID NO: 839455 - RNA, 19 nt, Artificial Sequence
  Description of Artificial Sequence: Synthetic oligonucleotide
caguuccgaugucgugaca

SEQ ID NO: 839456 - RNA, 19 nt, Artificial Sequence
  Description of Artificial Sequence: Synthetic oligonucleotide
gcacgguuuacuucuccuu

SEQ ID NO: 839457 - RNA, 19 nt, Artificial Sequence
  Description of Artificial Sequence: Synthetic oligonucleotide
ccgcucgcgggugucgagg

SEQ ID NO: 839458 - RNA, 19 nt, Artificial Sequence
  Description of Artificial Sequence: Synthetic oligonucleotide
gcccgaacgcaggcgcucc

SEQ ID NO: 839459 - RNA, 19 nt, Artificial Sequence
  Description of Artificial Sequence: Synthetic oligonucleotide
acgcaacagcucacuugaa

SEQ ID NO: 839460 - RNA, 19 nt, Artificial Sequence
  Description of Artificial Sequence: Synthetic oligonucleotide
ggcauauaacgagcacggu

SEQ ID NO: 839461 - RNA, 19 nt, Artificial Sequence
  Description of Artificial Sequence: Synthetic oligonucleotide
acccagcgauguguauuuu

SEQ ID NO: 839462 - RNA, 19 nt, Artificial Sequence
  Description of Artificial Sequence: Synthetic oligonucleotide
ggcggcgaucaguaccacu

SEQ ID NO: 839463 - RNA, 19 nt, Artificial Sequence
  Description of Artificial Sequence: Synthetic oligonucleotide
ccucggacuucucucgcua

SEQ ID NO: 839464 - RNA, 19 nt, Artificial Sequence
  Description of Artificial Sequence: Synthetic oligonucleotide
ccgaacgcaggcgcuccug

SEQ ID NO: 839465 - RNA, 19 nt, Artificial Sequence
  Description of Artificial Sequence: Synthetic oligonucleotide
ccauagccuuccuuuuggu

SEQ ID NO: 839466 - RNA, 19 nt, Artificial Sequence
  Description of Artificial Sequence: Synthetic oligonucleotide
cagcccgaacgcaggcgcu

SEQ ID NO: 839467 - RNA, 19 nt, Artificial Sequence
  Description of Artificial Sequence: Synthetic oligonucleotide
cgguaagacugggccacug

SEQ ID NO: 839468 - RNA, 19 nt, Artificial Sequence
  Description of Artificial Sequence: Synthetic oligonucleotide
gggucauaaccaggucaua

SEQ ID NO: 839469 - RNA, 19 nt, Artificial Sequence
  Description of Artificial Sequence: Synthetic oligonucleotide
gcaggguguuuuguauagu

SEQ ID NO: 839470 - RNA, 19 nt, Artificial Sequence
  Description of Artificial Sequence: Synthetic oligonucleotide
gcucgcgggugucgagguc

SEQ ID NO: 839471 - RNA, 19 nt, Artificial Sequence
  Description of Artificial Sequence: Synthetic oligonucleotide
ccucauacuuuggguuuaa

SEQ ID NO: 839472 - RNA, 19 nt, Artificial Sequence
  Description of Artificial Sequence: Synthetic oligonucleotide
cccagacgccgcguccuuc

SEQ ID NO: 839473 - RNA, 19 nt, Artificial Sequence
  Description of Artificial Sequence: Synthetic oligonucleotide
ccuuugccgccucggacuu

SEQ ID NO: 839474 - RNA, 19 nt, Artificial Sequence
  Description of Artificial Sequence: Synthetic oligonucleotide
cgcucgcgggugucgaggu

SEQ ID NO: 839475 - RNA, 19 nt, Artificial Sequence
  Description of Artificial Sequence: Synthetic oligonucleotide
ccccgcucgcgggugucga

SEQ ID NO: 839476 - RNA, 19 nt, Artificial Sequence
  Description of Artificial Sequence: Synthetic oligonucleotide
cccgaacgcaggcgcuccu

SEQ ID NO: 839477 - RNA, 19 nt, Artificial Sequence
  Description of Artificial Sequence: Synthetic oligonucleotide
ccccagacgccgcguccuu

SEQ ID NO: 839478 - RNA, 19 nt, Artificial Sequence
  Description of Artificial Sequence: Synthetic oligonucleotide
cgcaggcgcuccugucuuu

SEQ ID NO: 839479 - RNA, 19 nt, Artificial Sequence
  Description of Artificial Sequence: Synthetic oligonucleotide
uagucuucagccauaaucg

SEQ ID NO: 839480 - RNA, 19 nt, Artificial Sequence
  Description of Artificial Sequence: Synthetic oligonucleotide
aguaucucgguucugacac

SEQ ID NO: 839481 - RNA, 19 nt, Artificial Sequence
  Description of Artificial Sequence: Synthetic oligonucleotide
acuaccgggaaccuaaugc

SEQ ID NO: 839482 - RNA, 19 nt, Artificial Sequence
  Description of Artificial Sequence: Synthetic oligonucleotide
gaaccuaaugcacugauag

SEQ ID NO: 839483 - RNA, 19 nt, Artificial Sequence
  Description of Artificial Sequence: Synthetic oligonucleotide
uucagaguguugaauaugg

SEQ ID NO: 839484 - RNA, 19 nt, Artificial Sequence
  Description of Artificial Sequence: Synthetic oligonucleotide
aaugcuaacccgcuuguuc

SEQ ID NO: 839485 - RNA, 19 nt, Artificial Sequence
  Description of Artificial Sequence: Synthetic oligonucleotide
uauaacugaccacaggaag

SEQ ID NO: 839486 - RNA, 19 nt, Artificial Sequence
  Description of Artificial Sequence: Synthetic oligonucleotide
uugaacaagacugugaugu

SEQ ID NO: 839487 - RNA, 19 nt, Artificial Sequence
  Description of Artificial Sequence: Synthetic oligonucleotide
uguagcuggaaguaucucg

SEQ ID NO: 839488 - RNA, 19 nt, Artificial Sequence
  Description of Artificial Sequence: Synthetic oligonucleotide
aaaugcuugaucagcaaac

SEQ ID NO: 839489 - RNA, 19 nt, Artificial Sequence
  Description of Artificial Sequence: Synthetic oligonucleotide
ugucacagggucaugcucg

SEQ ID NO: 839490 - RNA, 19 nt, Artificial Sequence
  Description of Artificial Sequence: Synthetic oligonucleotide
cuugcaaugggcaaugaac

SEQ ID NO: 839491 - RNA, 19 nt, Artificial Sequence
  Description of Artificial Sequence: Synthetic oligonucleotide
uuugccaaugcuaacccgc

SEQ ID NO: 839492 - RNA, 19 nt, Artificial Sequence
  Description of Artificial Sequence: Synthetic oligonucleotide
aguuucuacagccuucgac

SEQ ID NO: 839493 - RNA, 19 nt, Artificial Sequence
  Description of Artificial Sequence: Synthetic oligonucleotide
aaaacagaucucuccaugu

SEQ ID NO: 839494 - RNA, 19 nt, Artificial Sequence
  Description of Artificial Sequence: Synthetic oligonucleotide
gucugaauaagccacucgg

SEQ ID NO: 839495 - RNA, 19 nt, Artificial Sequence
  Description of Artificial Sequence: Synthetic oligonucleotide
ucaaaaugcuugaucagca

SEQ ID NO: 839496 - RNA, 19 nt, Artificial Sequence
  Description of Artificial Sequence: Synthetic oligonucleotide
auuauguagucucgggugg

SEQ ID NO: 839497 - RNA, 19 nt, Artificial Sequence
  Description of Artificial Sequence: Synthetic oligonucleotide
uuaacaagcagcugcagaa

SEQ ID NO: 839498 - RNA, 19 nt, Artificial Sequence
  Description of Artificial Sequence: Synthetic oligonucleotide
aauugggcccagcagguuc

SEQ ID NO: 839499 - RNA, 19 nt, Artificial Sequence
  Description of Artificial Sequence: Synthetic oligonucleotide
gaaguagcgaaugagugag

SEQ ID NO: 839500 - RNA, 19 nt, Artificial Sequence
  Description of Artificial Sequence: Synthetic oligonucleotide
cauugcaacacaaauugug

SEQ ID NO: 839501 - RNA, 19 nt, Artificial Sequence
  Description of Artificial Sequence: Synthetic oligonucleotide
ucagccauaaucguacccg

SEQ ID NO: 839502 - RNA, 19 nt, Artificial Sequence
  Description of Artificial Sequence: Synthetic oligonucleotide
ugagcaucaaacagucagg

SEQ ID NO: 839503 - RNA, 19 nt, Artificial Sequence
  Description of Artificial Sequence: Synthetic oligonucleotide
uagcgaaugagugagaugu

SEQ ID NO: 839504 - RNA, 19 nt, Artificial Sequence
  Description of Artificial Sequence: Synthetic oligonucleotide
auaacugaccacaggaagc

SEQ ID NO: 839505 - RNA, 19 nt, Artificial Sequence
  Description of Artificial Sequence: Synthetic oligonucleotide
aacuuaugcagacacuccu

SEQ ID NO: 839506 - RNA, 19 nt, Artificial Sequence
  Description of Artificial Sequence: Synthetic oligonucleotide
acugauagaguguacucag

SEQ ID NO: 839507 - RNA, 19 nt, Artificial Sequence
  Description of Artificial Sequence: Synthetic oligonucleotide
ucggcuaccagcucggagg

SEQ ID NO: 839508 - RNA, 19 nt, Artificial Sequence
  Description of Artificial Sequence: Synthetic oligonucleotide
aucuuugccaaugcuaacc

SEQ ID NO: 839509 - RNA, 19 nt, Artificial Sequence
  Description of Artificial Sequence: Synthetic oligonucleotide
uucggugaaaauagaaucu

SEQ ID NO: 839510 - RNA, 19 nt, Artificial Sequence
  Description of Artificial Sequence: Synthetic oligonucleotide
cuucggugaaaauagaauc

SEQ ID NO: 839511 - RNA, 19 nt, Artificial Sequence
  Description of Artificial Sequence: Synthetic oligonucleotide
ucgcccucugcuuugaugg

SEQ ID NO: 839512 - RNA, 19 nt, Artificial Sequence
  Description of Artificial Sequence: Synthetic oligonucleotide
aacaccugucugaauaagc

SEQ ID NO: 839513 - RNA, 19 nt, Artificial Sequence
  Description of Artificial Sequence: Synthetic oligonucleotide
cauuauguagucucgggug

SEQ ID NO: 839514 - RNA, 19 nt, Artificial Sequence
  Description of Artificial Sequence: Synthetic oligonucleotide
uaugcagacacuccugcug

SEQ ID NO: 839515 - RNA, 19 nt, Artificial Sequence
  Description of Artificial Sequence: Synthetic oligonucleotide
ucuacagccuucgacgugg

SEQ ID NO: 839516 - RNA, 19 nt, Artificial Sequence
  Description of Artificial Sequence: Synthetic oligonucleotide
aauauggagggcuccauua

SEQ ID NO: 839517 - RNA, 19 nt, Artificial Sequence
  Description of Artificial Sequence: Synthetic oligonucleotide
ucagugacgaaguagcgaa

SEQ ID NO: 839518 - RNA, 19 nt, Artificial Sequence
  Description of Artificial Sequence: Synthetic oligonucleotide
uugcggauauaacugacca

SEQ ID NO: 839519 - RNA, 19 nt, Artificial Sequence
  Description of Artificial Sequence: Synthetic oligonucleotide
uccauuauguagucucggg

SEQ ID NO: 839520 - RNA, 19 nt, Artificial Sequence
  Description of Artificial Sequence: Synthetic oligonucleotide
ucugaauaagccacucggc

SEQ ID NO: 839521 - RNA, 19 nt, Artificial Sequence
  Description of Artificial Sequence: Synthetic oligonucleotide
ugacugcaugaacagaucc

SEQ ID NO: 839522 - RNA, 19 nt, Artificial Sequence
  Description of Artificial Sequence: Synthetic oligonucleotide
cuaaugcacugauagagug

SEQ ID NO: 839523 - RNA, 19 nt, Artificial Sequence
  Description of Artificial Sequence: Synthetic oligonucleotide
uucgacguggacuucagcu

SEQ ID NO: 839524 - RNA, 19 nt, Artificial Sequence
  Description of Artificial Sequence: Synthetic oligonucleotide
ugaauaagccacucggcca

SEQ ID NO: 839525 - RNA, 19 nt, Artificial Sequence
  Description of Artificial Sequence: Synthetic oligonucleotide
cugaauaagccacucggcc

SEQ ID NO: 839526 - RNA, 19 nt, Artificial Sequence
  Description of Artificial Sequence: Synthetic oligonucleotide
ugaucagcaaacucuucag

SEQ ID NO: 839527 - RNA, 19 nt, Artificial Sequence
  Description of Artificial Sequence: Synthetic oligonucleotide
ugucugaauaagccacucg

SEQ ID NO: 839528 - RNA, 19 nt, Artificial Sequence
  Description of Artificial Sequence: Synthetic oligonucleotide
uuucaacucgagcugcucc

SEQ ID NO: 839529 - RNA, 19 nt, Artificial Sequence
  Description of Artificial Sequence: Synthetic oligonucleotide
ucuucggugaaaauagaau

SEQ ID NO: 839530 - RNA, 19 nt, Artificial Sequence
  Description of Artificial Sequence: Synthetic oligonucleotide
uuuagaaaagcugccugcc

SEQ ID NO: 839531 - RNA, 19 nt, Artificial Sequence
  Description of Artificial Sequence: Synthetic oligonucleotide
ugaacucugucacaggguc

SEQ ID NO: 839532 - RNA, 19 nt, Artificial Sequence
  Description of Artificial Sequence: Synthetic oligonucleotide
uccauuacguccagcuggg

SEQ ID NO: 839533 - RNA, 19 nt, Artificial Sequence
  Description of Artificial Sequence: Synthetic oligonucleotide
ggcgaugacauccaaaacc

SEQ ID NO: 839534 - RNA, 19 nt, Artificial Sequence
  Description of Artificial Sequence: Synthetic oligonucleotide
aacagguaugugugcuccc

SEQ ID NO: 839535 - RNA, 19 nt, Artificial Sequence
  Description of Artificial Sequence: Synthetic oligonucleotide
ucggguggagaacuuaugc

SEQ ID NO: 839536 - RNA, 19 nt, Artificial Sequence
  Description of Artificial Sequence: Synthetic oligonucleotide
aucgccacuaccgggaacc

SEQ ID NO: 839537 - RNA, 19 nt, Artificial Sequence
  Description of Artificial Sequence: Synthetic oligonucleotide
uuagaaaagcugccugccc

SEQ ID NO: 839538 - RNA, 19 nt, Artificial Sequence
  Description of Artificial Sequence: Synthetic oligonucleotide
aguugagcaucaaacaguc

SEQ ID NO: 839539 - RNA, 19 nt, Artificial Sequence
  Description of Artificial Sequence: Synthetic oligonucleotide
cauccaaaaccucagugac

SEQ ID NO: 839540 - RNA, 19 nt, Artificial Sequence
  Description of Artificial Sequence: Synthetic oligonucleotide
uaugguggggcgaugacau

SEQ ID NO: 839541 - RNA, 19 nt, Artificial Sequence
  Description of Artificial Sequence: Synthetic oligonucleotide
aaaaccucagugacgaagu

SEQ ID NO: 839542 - RNA, 19 nt, Artificial Sequence
  Description of Artificial Sequence: Synthetic oligonucleotide
caaaguccgagguguaugg

SEQ ID NO: 839543 - RNA, 19 nt, Artificial Sequence
  Description of Artificial Sequence: Synthetic oligonucleotide
aaguccgagguguauggug

SEQ ID NO: 839544 - RNA, 19 nt, Artificial Sequence
  Description of Artificial Sequence: Synthetic oligonucleotide
acaagcagcuucgggaacc

SEQ ID NO: 839545 - RNA, 19 nt, Artificial Sequence
  Description of Artificial Sequence: Synthetic oligonucleotide
ucgggaaccaguccucuag

SEQ ID NO: 839546 - RNA, 19 nt, Artificial Sequence
  Description of Artificial Sequence: Synthetic oligonucleotide
guagcuggaaguaucucgg

SEQ ID NO: 839547 - RNA, 19 nt, Artificial Sequence
  Description of Artificial Sequence: Synthetic oligonucleotide
aaguaucucgguucugaca

SEQ ID NO: 839548 - RNA, 19 nt, Artificial Sequence
  Description of Artificial Sequence: Synthetic oligonucleotide
ugacguuuucuggagagcc

SEQ ID NO: 839549 - RNA, 19 nt, Artificial Sequence
  Description of Artificial Sequence: Synthetic oligonucleotide
ucagucuguagcuggaagu

SEQ ID NO: 839550 - RNA, 19 nt, Artificial Sequence
  Description of Artificial Sequence: Synthetic oligonucleotide
ucugacaccguccaaucua

SEQ ID NO: 839551 - RNA, 19 nt, Artificial Sequence
  Description of Artificial Sequence: Synthetic oligonucleotide
gacaccguccaaucuaccc

SEQ ID NO: 839552 - RNA, 19 nt, Artificial Sequence
  Description of Artificial Sequence: Synthetic oligonucleotide
uagaguguacucagcucgg

SEQ ID NO: 839553 - RNA, 19 nt, Artificial Sequence
  Description of Artificial Sequence: Synthetic oligonucleotide
agcggcguaagccaggaug

SEQ ID NO: 839554 - RNA, 19 nt, Artificial Sequence
  Description of Artificial Sequence: Synthetic oligonucleotide
uccugagcgacccugcgca

SEQ ID NO: 839555 - RNA, 19 nt, Artificial Sequence
  Description of Artificial Sequence: Synthetic oligonucleotide
ugagaugucgguguccagc

SEQ ID NO: 839556 - RNA, 19 nt, Artificial Sequence
  Description of Artificial Sequence: Synthetic oligonucleotide
uauggagggcuccauuaug

SEQ ID NO: 839557 - RNA, 19 nt, Artificial Sequence
  Description of Artificial Sequence: Synthetic oligonucleotide
cuugcggauauaacugacc

SEQ ID NO: 839558 - RNA, 19 nt, Artificial Sequence
  Description of Artificial Sequence: Synthetic oligonucleotide
caucuuugcaaacucagga

SEQ ID NO: 839559 - RNA, 19 nt, Artificial Sequence
  Description of Artificial Sequence: Synthetic oligonucleotide
cauaaucguacccggcgcg

SEQ ID NO: 839560 - RNA, 19 nt, Artificial Sequence
  Description of Artificial Sequence: Synthetic oligonucleotide
ucggugaaaauagaaucug

SEQ ID NO: 839561 - RNA, 19 nt, Artificial Sequence
  Description of Artificial Sequence: Synthetic oligonucleotide
uucagccauaaucguaccc

SEQ ID NO: 839562 - RNA, 19 nt, Artificial Sequence
  Description of Artificial Sequence: Synthetic oligonucleotide
ugacgaaguagcgaaugag

SEQ ID NO: 839563 - RNA, 19 nt, Artificial Sequence
  Description of Artificial Sequence: Synthetic oligonucleotide
aaucguacccggcgcgggg

SEQ ID NO: 839564 - RNA, 19 nt, Artificial Sequence
  Description of Artificial Sequence: Synthetic oligonucleotide
agcugcacaaaguccgagg

SEQ ID NO: 839565 - RNA, 19 nt, Artificial Sequence
  Description of Artificial Sequence: Synthetic oligonucleotide
cauuacguccagcugggag

SEQ ID NO: 839566 - RNA, 19 nt, Artificial Sequence
  Description of Artificial Sequence: Synthetic oligonucleotide
ggagaacuuaugcagacac

SEQ ID NO: 839567 - RNA, 19 nt, Artificial Sequence
  Description of Artificial Sequence: Synthetic oligonucleotide
uucaacucgagcugcucca

SEQ ID NO: 839568 - RNA, 19 nt, Artificial Sequence
  Description of Artificial Sequence: Synthetic oligonucleotide
augcuaacccgcuuguucu

SEQ ID NO: 839569 - RNA, 19 nt, Artificial Sequence
  Description of Artificial Sequence: Synthetic oligonucleotide
acagguaugugugcucccc

SEQ ID NO: 839570 - RNA, 19 nt, Artificial Sequence
  Description of Artificial Sequence: Synthetic oligonucleotide
cacucuggagaacacuucc

SEQ ID NO: 839571 - RNA, 19 nt, Artificial Sequence
  Description of Artificial Sequence: Synthetic oligonucleotide
ucgagcugcuccauuacgu

SEQ ID NO: 839572 - RNA, 19 nt, Artificial Sequence
  Description of Artificial Sequence: Synthetic oligonucleotide
gaugucgguguccagcuuc

SEQ ID NO: 839573 - RNA, 19 nt, Artificial Sequence
  Description of Artificial Sequence: Synthetic oligonucleotide
ucccgaaguagucuucagc

SEQ ID NO: 839574 - RNA, 19 nt, Artificial Sequence
  Description of Artificial Sequence: Synthetic oligonucleotide
uggcacaccaucuuugcaa

SEQ ID NO: 839575 - RNA, 19 nt, Artificial Sequence
  Description of Artificial Sequence: Synthetic oligonucleotide
ugcacugauagaguguacu

SEQ ID NO: 839576 - RNA, 19 nt, Artificial Sequence
  Description of Artificial Sequence: Synthetic oligonucleotide
uguagucucggguggagaa

SEQ ID NO: 839577 - RNA, 19 nt, Artificial Sequence
  Description of Artificial Sequence: Synthetic oligonucleotide
guggucagucuguagcugg

SEQ ID NO: 839578 - RNA, 19 nt, Artificial Sequence
  Description of Artificial Sequence: Synthetic oligonucleotide
ucuccauguggugugcgcg

SEQ ID NO: 839579 - RNA, 19 nt, Artificial Sequence
  Description of Artificial Sequence: Synthetic oligonucleotide
uccugaauugggcccagca

SEQ ID NO: 839580 - RNA, 19 nt, Artificial Sequence
  Description of Artificial Sequence: Synthetic oligonucleotide
cuuugccaaugcuaacccg

SEQ ID NO: 839581 - RNA, 19 nt, Artificial Sequence
  Description of Artificial Sequence: Synthetic oligonucleotide
caggucuccaccacgcuag

SEQ ID NO: 839582 - RNA, 19 nt, Artificial Sequence
  Description of Artificial Sequence: Synthetic oligonucleotide
aguccgagguguauggugg

SEQ ID NO: 839583 - RNA, 19 nt, Artificial Sequence
  Description of Artificial Sequence: Synthetic oligonucleotide
agcgugaucugacuggcgu

SEQ ID NO: 839584 - RNA, 19 nt, Artificial Sequence
  Description of Artificial Sequence: Synthetic oligonucleotide
uguggacaguuucuacagc

SEQ ID NO: 839585 - RNA, 19 nt, Artificial Sequence
  Description of Artificial Sequence: Synthetic oligonucleotide
cacgcuagcggcguaagcc

SEQ ID NO: 839586 - RNA, 19 nt, Artificial Sequence
  Description of Artificial Sequence: Synthetic oligonucleotide
ucgguucugacaccgucca

SEQ ID NO: 839587 - RNA, 19 nt, Artificial Sequence
  Description of Artificial Sequence: Synthetic oligonucleotide
ucaucaugaugaaguuagc

SEQ ID NO: 839588 - RNA, 19 nt, Artificial Sequence
  Description of Artificial Sequence: Synthetic oligonucleotide
uuagccuugcaaugggcaa

SEQ ID NO: 839589 - RNA, 19 nt, Artificial Sequence
  Description of Artificial Sequence: Synthetic oligonucleotide
agugacgaaguagcgaaug

SEQ ID NO: 839590 - RNA, 19 nt, Artificial Sequence
  Description of Artificial Sequence: Synthetic oligonucleotide
agguacccggaugagcucc

SEQ ID NO: 839591 - RNA, 19 nt, Artificial Sequence
  Description of Artificial Sequence: Synthetic oligonucleotide
ugguuuggccucuucacaa

SEQ ID NO: 839592 - RNA, 19 nt, Artificial Sequence
  Description of Artificial Sequence: Synthetic oligonucleotide
acgaaguagcgaaugagug

SEQ ID NO: 839593 - RNA, 19 nt, Artificial Sequence
  Description of Artificial Sequence: Synthetic oligonucleotide
gccauaaucguacccggcg

SEQ ID NO: 839594 - RNA, 19 nt, Artificial Sequence
  Description of Artificial Sequence: Synthetic oligonucleotide
cccggaaucaucuuccugc

SEQ ID NO: 839595 - RNA, 19 nt, Artificial Sequence
  Description of Artificial Sequence: Synthetic oligonucleotide
ucggaggccccuuuguucu

SEQ ID NO: 839596 - RNA, 19 nt, Artificial Sequence
  Description of Artificial Sequence: Synthetic oligonucleotide
gaaggcagguacccggaug

SEQ ID NO: 839597 - RNA, 19 nt, Artificial Sequence
  Description of Artificial Sequence: Synthetic oligonucleotide
cucgguucugacaccgucc

SEQ ID NO: 839598 - RNA, 19 nt, Artificial Sequence
  Description of Artificial Sequence: Synthetic oligonucleotide
agcagacccggcuuccuuc

SEQ ID NO: 839599 - RNA, 19 nt, Artificial Sequence
  Description of Artificial Sequence: Synthetic oligonucleotide
ugguggggcgaugacaucc

SEQ ID NO: 839600 - RNA, 19 nt, Artificial Sequence
  Description of Artificial Sequence: Synthetic oligonucleotide
ucuagcccuccugaauugg

SEQ ID NO: 839601 - RNA, 19 nt, Artificial Sequence
  Description of Artificial Sequence: Synthetic oligonucleotide
acguuuucuggagagccuc

SEQ ID NO: 839602 - RNA, 19 nt, Artificial Sequence
  Description of Artificial Sequence: Synthetic oligonucleotide
gucagucuguagcuggaag

SEQ ID NO: 839603 - RNA, 19 nt, Artificial Sequence
  Description of Artificial Sequence: Synthetic oligonucleotide
cugauagaguguacucagc

SEQ ID NO: 839604 - RNA, 19 nt, Artificial Sequence
  Description of Artificial Sequence: Synthetic oligonucleotide
aguguacucagcucggcua

SEQ ID NO: 839605 - RNA, 19 nt, Artificial Sequence
  Description of Artificial Sequence: Synthetic oligonucleotide
cagccauaaucguacccgg

SEQ ID NO: 839606 - RNA, 19 nt, Artificial Sequence
  Description of Artificial Sequence: Synthetic oligonucleotide
uccuguaccugcacuggcu

SEQ ID NO: 839607 - RNA, 19 nt, Artificial Sequence
  Description of Artificial Sequence: Synthetic oligonucleotide
ugcgcgaucaucugcucaa

SEQ ID NO: 839608 - RNA, 19 nt, Artificial Sequence
  Description of Artificial Sequence: Synthetic oligonucleotide
aguccucuagcccuccuga

SEQ ID NO: 839609 - RNA, 19 nt, Artificial Sequence
  Description of Artificial Sequence: Synthetic oligonucleotide
auaaucguacccggcgcgg

SEQ ID NO: 839610 - RNA, 19 nt, Artificial Sequence
  Description of Artificial Sequence: Synthetic oligonucleotide
ugagcgacccugcgcacug

SEQ ID NO: 839611 - RNA, 19 nt, Artificial Sequence
  Description of Artificial Sequence: Synthetic oligonucleotide
cugacaccguccaaucuac

SEQ ID NO: 839612 - RNA, 19 nt, Artificial Sequence
  Description of Artificial Sequence: Synthetic oligonucleotide
aguagcgaaugagugagau

SEQ ID NO: 839613 - RNA, 19 nt, Artificial Sequence
  Description of Artificial Sequence: Synthetic oligonucleotide
agaguguacucagcucggc

SEQ ID NO: 839614 - RNA, 19 nt, Artificial Sequence
  Description of Artificial Sequence: Synthetic oligonucleotide
uucuacagccuucgacgug

SEQ ID NO: 839615 - RNA, 19 nt, Artificial Sequence
  Description of Artificial Sequence: Synthetic oligonucleotide
ucgacguggacuucagcuc

SEQ ID NO: 839616 - RNA, 19 nt, Artificial Sequence
  Description of Artificial Sequence: Synthetic oligonucleotide
uagcccuccugaauugggc

SEQ ID NO: 839617 - RNA, 19 nt, Artificial Sequence
  Description of Artificial Sequence: Synthetic oligonucleotide
cuaccgggaaccuaaugca

SEQ ID NO: 839618 - RNA, 19 nt, Artificial Sequence
  Description of Artificial Sequence: Synthetic oligonucleotide
ucuccuucuucggugaaaa

SEQ ID NO: 839619 - RNA, 19 nt, Artificial Sequence
  Description of Artificial Sequence: Synthetic oligonucleotide
cuggagaacacuuccaacu

SEQ ID NO: 839620 - RNA, 19 nt, Artificial Sequence
  Description of Artificial Sequence: Synthetic oligonucleotide
augugugcuccccauggca

SEQ ID NO: 839621 - RNA, 19 nt, Artificial Sequence
  Description of Artificial Sequence: Synthetic oligonucleotide
ugcggauauaacugaccac

SEQ ID NO: 839622 - RNA, 19 nt, Artificial Sequence
  Description of Artificial Sequence: Synthetic oligonucleotide
uugccaaugcuaacccgcu

SEQ ID NO: 839623 - RNA, 19 nt, Artificial Sequence
  Description of Artificial Sequence: Synthetic oligonucleotide
uccuggcuugaacagugac

SEQ ID NO: 839624 - RNA, 19 nt, Artificial Sequence
  Description of Artificial Sequence: Synthetic oligonucleotide
uaccgggaaccuaaugcac

SEQ ID NO: 839625 - RNA, 19 nt, Artificial Sequence
  Description of Artificial Sequence: Synthetic oligonucleotide
ugaacaagacugugauguc

SEQ ID NO: 839626 - RNA, 19 nt, Artificial Sequence
  Description of Artificial Sequence: Synthetic oligonucleotide
gaacagauccaggaaggca

SEQ ID NO: 839627 - RNA, 19 nt, Artificial Sequence
  Description of Artificial Sequence: Synthetic oligonucleotide
auauggagggcuccauuau

SEQ ID NO: 839628 - RNA, 19 nt, Artificial Sequence
  Description of Artificial Sequence: Synthetic oligonucleotide
cuccauuauguagucucgg

SEQ ID NO: 839629 - RNA, 19 nt, Artificial Sequence
  Description of Artificial Sequence: Synthetic oligonucleotide
uaaucguacccggcgcggg

SEQ ID NO: 839630 - RNA, 19 nt, Artificial Sequence
  Description of Artificial Sequence: Synthetic oligonucleotide
uuccugagcgacccugcgc

SEQ ID NO: 839631 - RNA, 19 nt, Artificial Sequence
  Description of Artificial Sequence: Synthetic oligonucleotide
guagcgaaugagugagaug

SEQ ID NO: 839632 - RNA, 19 nt, Artificial Sequence
  Description of Artificial Sequence: Synthetic oligonucleotide
ucuucgccccacuccggcg

SEQ ID NO: 839633 - RNA, 19 nt, Artificial Sequence
  Description of Artificial Sequence: Synthetic oligonucleotide
uaccccgcaucagaaauga

SEQ ID NO: 839634 - RNA, 19 nt, Artificial Sequence
  Description of Artificial Sequence: Synthetic oligonucleotide
guccggagcacucuggaga

SEQ ID NO: 839635 - RNA, 19 nt, Artificial Sequence
  Description of Artificial Sequence: Synthetic oligonucleotide
auauaacugaccacaggaa

SEQ ID NO: 839636 - RNA, 19 nt, Artificial Sequence
  Description of Artificial Sequence: Synthetic oligonucleotide
uuauguagucucgggugga

SEQ ID NO: 839637 - RNA, 19 nt, Artificial Sequence
  Description of Artificial Sequence: Synthetic oligonucleotide
uccccauggcacaccaucu

SEQ ID NO: 839638 - RNA, 19 nt, Artificial Sequence
  Description of Artificial Sequence: Synthetic oligonucleotide
gaagcacauagccacggcu

SEQ ID NO: 839639 - RNA, 19 nt, Artificial Sequence
  Description of Artificial Sequence: Synthetic oligonucleotide
gacccggcuuccuuccagg

SEQ ID NO: 839640 - RNA, 19 nt, Artificial Sequence
  Description of Artificial Sequence: Synthetic oligonucleotide
gcuggaaguaucucgguuc

SEQ ID NO: 839641 - RNA, 19 nt, Artificial Sequence
  Description of Artificial Sequence: Synthetic oligonucleotide
acuuaugcagacacuccug

SEQ ID NO: 839642 - RNA, 19 nt, Artificial Sequence
  Description of Artificial Sequence: Synthetic oligonucleotide
guuagccuugcaaugggca

SEQ ID NO: 839643 - RNA, 19 nt, Artificial Sequence
  Description of Artificial Sequence: Synthetic oligonucleotide
ucucgagguuuuccucucc

SEQ ID NO: 839644 - RNA, 19 nt, Artificial Sequence
  Description of Artificial Sequence: Synthetic oligonucleotide
gcggauauaacugaccaca

SEQ ID NO: 839645 - RNA, 19 nt, Artificial Sequence
  Description of Artificial Sequence: Synthetic oligonucleotide
gcgaaugagugagaugucg

SEQ ID NO: 839646 - RNA, 19 nt, Artificial Sequence
  Description of Artificial Sequence: Synthetic oligonucleotide
uccucuagcccuccugaau

SEQ ID NO: 839647 - RNA, 19 nt, Artificial Sequence
  Description of Artificial Sequence: Synthetic oligonucleotide
agccauaaucguacccggc

SEQ ID NO: 839648 - RNA, 19 nt, Artificial Sequence
  Description of Artificial Sequence: Synthetic oligonucleotide
gggcaaugaacucugucac

SEQ ID NO: 839649 - RNA, 19 nt, Artificial Sequence
  Description of Artificial Sequence: Synthetic oligonucleotide
uguggugugcgcgaucauc

SEQ ID NO: 839650 - RNA, 19 nt, Artificial Sequence
  Description of Artificial Sequence: Synthetic oligonucleotide
acggcgguauaguucucag

SEQ ID NO: 839651 - RNA, 19 nt, Artificial Sequence
  Description of Artificial Sequence: Synthetic oligonucleotide
caccguccaaucuacccac

SEQ ID NO: 839652 - RNA, 19 nt, Artificial Sequence
  Description of Artificial Sequence: Synthetic oligonucleotide
gccaaugcuaacccgcuug

SEQ ID NO: 839653 - RNA, 19 nt, Artificial Sequence
  Description of Artificial Sequence: Synthetic oligonucleotide
ccccgcaucagaaaugagc

SEQ ID NO: 839654 - RNA, 19 nt, Artificial Sequence
  Description of Artificial Sequence: Synthetic oligonucleotide
aaagcugcacaaaguccga

SEQ ID NO: 839655 - RNA, 19 nt, Artificial Sequence
  Description of Artificial Sequence: Synthetic oligonucleotide
cuuccugagcgacccugcg

SEQ ID NO: 839656 - RNA, 19 nt, Artificial Sequence
  Description of Artificial Sequence: Synthetic oligonucleotide
uguaccugcacuggcucaa

SEQ ID NO: 839657 - RNA, 19 nt, Artificial Sequence
  Description of Artificial Sequence: Synthetic oligonucleotide
gccagcgugaucugacugg

SEQ ID NO: 839658 - RNA, 19 nt, Artificial Sequence
  Description of Artificial Sequence: Synthetic oligonucleotide
acuggcgucauggccuuuc

SEQ ID NO: 839659 - RNA, 19 nt, Artificial Sequence
  Description of Artificial Sequence: Synthetic oligonucleotide
gacaagagcuggaugacgu

SEQ ID NO: 839660 - RNA, 19 nt, Artificial Sequence
  Description of Artificial Sequence: Synthetic oligonucleotide
aaaguccgagguguauggu

SEQ ID NO: 839661 - RNA, 19 nt, Artificial Sequence
  Description of Artificial Sequence: Synthetic oligonucleotide
cucggaggccccuuuguuc

SEQ ID NO: 839662 - RNA, 19 nt, Artificial Sequence
  Description of Artificial Sequence: Synthetic oligonucleotide
ucucuccauguggugugcg

SEQ ID NO: 839663 - RNA, 19 nt, Artificial Sequence
  Description of Artificial Sequence: Synthetic oligonucleotide
acgcuagcggcguaagcca

SEQ ID NO: 839664 - RNA, 19 nt, Artificial Sequence
  Description of Artificial Sequence: Synthetic oligonucleotide
cuggacuuccugagcgacc

SEQ ID NO: 839665 - RNA, 19 nt, Artificial Sequence
  Description of Artificial Sequence: Synthetic oligonucleotide
gcacuugcggauauaacug

SEQ ID NO: 839666 - RNA, 19 nt, Artificial Sequence
  Description of Artificial Sequence: Synthetic oligonucleotide
gugacgaaguagcgaauga

SEQ ID NO: 839667 - RNA, 19 nt, Artificial Sequence
  Description of Artificial Sequence: Synthetic oligonucleotide
cucuagcccuccugaauug

SEQ ID NO: 839668 - RNA, 19 nt, Artificial Sequence
  Description of Artificial Sequence: Synthetic oligonucleotide
uucucgagguuuuccucuc

SEQ ID NO: 839669 - RNA, 19 nt, Artificial Sequence
  Description of Artificial Sequence: Synthetic oligonucleotide
cuucgccccacuccggcgc

SEQ ID NO: 839670 - RNA, 19 nt, Artificial Sequence
  Description of Artificial Sequence: Synthetic oligonucleotide
agcuggaaguaucucgguu

SEQ ID NO: 839671 - RNA, 19 nt, Artificial Sequence
  Description of Artificial Sequence: Synthetic oligonucleotide
gcgcuggacuuccugagcg

SEQ ID NO: 839672 - RNA, 19 nt, Artificial Sequence
  Description of Artificial Sequence: Synthetic oligonucleotide
aucguacccggcgcggggc

SEQ ID NO: 839673 - RNA, 19 nt, Artificial Sequence
  Description of Artificial Sequence: Synthetic oligonucleotide
caaaaugcuugaucagcaa

SEQ ID NO: 839674 - RNA, 19 nt, Artificial Sequence
  Description of Artificial Sequence: Synthetic oligonucleotide
ggaaguaucucgguucuga

SEQ ID NO: 839675 - RNA, 19 nt, Artificial Sequence
  Description of Artificial Sequence: Synthetic oligonucleotide
gguuuggccucuucacaag

SEQ ID NO: 839676 - RNA, 19 nt, Artificial Sequence
  Description of Artificial Sequence: Synthetic oligonucleotide
acggcucagcagguggacc

SEQ ID NO: 839677 - RNA, 19 nt, Artificial Sequence
  Description of Artificial Sequence: Synthetic oligonucleotide
ggggucaaaaugcuugauc

SEQ ID NO: 839678 - RNA, 19 nt, Artificial Sequence
  Description of Artificial Sequence: Synthetic oligonucleotide
cuggcucaacaccugucug

SEQ ID NO: 839679 - RNA, 19 nt, Artificial Sequence
  Description of Artificial Sequence: Synthetic oligonucleotide
caacaccugucugaauaag

SEQ ID NO: 839680 - RNA, 19 nt, Artificial Sequence
  Description of Artificial Sequence: Synthetic oligonucleotide
uccggcgcgcucccgaagu

SEQ ID NO: 839681 - RNA, 19 nt, Artificial Sequence
  Description of Artificial Sequence: Synthetic oligonucleotide
cucggguggagaacuuaug

SEQ ID NO: 839682 - RNA, 19 nt, Artificial Sequence
  Description of Artificial Sequence: Synthetic oligonucleotide
uucgccccacuccggcgcg

SEQ ID NO: 839683 - RNA, 19 nt, Artificial Sequence
  Description of Artificial Sequence: Synthetic oligonucleotide
ucgagguuuuccucuccuc

SEQ ID NO: 839684 - RNA, 19 nt, Artificial Sequence
  Description of Artificial Sequence: Synthetic oligonucleotide
ugggcgaagcgcuggacuu

SEQ ID NO: 839685 - RNA, 19 nt, Artificial Sequence
  Description of Artificial Sequence: Synthetic oligonucleotide
cauguggugugcgcgauca

SEQ ID NO: 839686 - RNA, 19 nt, Artificial Sequence
  Description of Artificial Sequence: Synthetic oligonucleotide
cucgcccucugcuuugaug

SEQ ID NO: 839687 - RNA, 19 nt, Artificial Sequence
  Description of Artificial Sequence: Synthetic oligonucleotide
ggcuagagagguccggagc

SEQ ID NO: 839688 - RNA, 19 nt, Artificial Sequence
  Description of Artificial Sequence: Synthetic oligonucleotide
ucacagucugggccacggc

SEQ ID NO: 839689 - RNA, 19 nt, Artificial Sequence
  Description of Artificial Sequence: Synthetic oligonucleotide
uggacagcauggcgccgag

SEQ ID NO: 839690 - RNA, 19 nt, Artificial Sequence
  Description of Artificial Sequence: Synthetic oligonucleotide
uacccacuucaggacaccc

SEQ ID NO: 839691 - RNA, 19 nt, Artificial Sequence
  Description of Artificial Sequence: Synthetic oligonucleotide
ggcguaagccaggaugugg

SEQ ID NO: 839692 - RNA, 19 nt, Artificial Sequence
  Description of Artificial Sequence: Synthetic oligonucleotide
ggugugcgcgaucaucugc

SEQ ID NO: 839693 - RNA, 19 nt, Artificial Sequence
  Description of Artificial Sequence: Synthetic oligonucleotide
ccugaauugggcccagcag

SEQ ID NO: 839694 - RNA, 19 nt, Artificial Sequence
  Description of Artificial Sequence: Synthetic oligonucleotide
acggacaucauggccugug

SEQ ID NO: 839695 - RNA, 19 nt, Artificial Sequence
  Description of Artificial Sequence: Synthetic oligonucleotide
ccauaaucguacccggcgc

SEQ ID NO: 839696 - RNA, 19 nt, Artificial Sequence
  Description of Artificial Sequence: Synthetic oligonucleotide
uacccggaugagcuccaca

SEQ ID NO: 839697 - RNA, 19 nt, Artificial Sequence
  Description of Artificial Sequence: Synthetic oligonucleotide
guguugaauauggagggcu

SEQ ID NO: 839698 - RNA, 19 nt, Artificial Sequence
  Description of Artificial Sequence: Synthetic oligonucleotide
gcuaccagcucggaggccc

SEQ ID NO: 839699 - RNA, 19 nt, Artificial Sequence
  Description of Artificial Sequence: Synthetic oligonucleotide
guaugguggggcgaugaca

SEQ ID NO: 839700 - RNA, 19 nt, Artificial Sequence
  Description of Artificial Sequence: Synthetic oligonucleotide
accgggaaccuaaugcacu

SEQ ID NO: 839701 - RNA, 19 nt, Artificial Sequence
  Description of Artificial Sequence: Synthetic oligonucleotide
cuucgacguggacuucagc

SEQ ID NO: 839702 - RNA, 19 nt, Artificial Sequence
  Description of Artificial Sequence: Synthetic oligonucleotide
uagccuugcaaugggcaau

SEQ ID NO: 839703 - RNA, 19 nt, Artificial Sequence
  Description of Artificial Sequence: Synthetic oligonucleotide
acaagagcuggaugacguu

SEQ ID NO: 839704 - RNA, 19 nt, Artificial Sequence
  Description of Artificial Sequence: Synthetic oligonucleotide
agcgaaugagugagauguc

SEQ ID NO: 839705 - RNA, 19 nt, Artificial Sequence
  Description of Artificial Sequence: Synthetic oligonucleotide
cacaggaggaggguccaug

SEQ ID NO: 839706 - RNA, 19 nt, Artificial Sequence
  Description of Artificial Sequence: Synthetic oligonucleotide
gcacugauagaguguacuc

SEQ ID NO: 839707 - RNA, 19 nt, Artificial Sequence
  Description of Artificial Sequence: Synthetic oligonucleotide
gcuggugaucuccccuugg

SEQ ID NO: 839708 - RNA, 19 nt, Artificial Sequence
  Description of Artificial Sequence: Synthetic oligonucleotide
gaguguacucagcucggcu

SEQ ID NO: 839709 - RNA, 19 nt, Artificial Sequence
  Description of Artificial Sequence: Synthetic oligonucleotide
cggugaaaauagaaucugc

SEQ ID NO: 839710 - RNA, 19 nt, Artificial Sequence
  Description of Artificial Sequence: Synthetic oligonucleotide
augguggggcgaugacauc

SEQ ID NO: 839711 - RNA, 19 nt, Artificial Sequence
  Description of Artificial Sequence: Synthetic oligonucleotide
agccagcuuauaaaacaga

SEQ ID NO: 839712 - RNA, 19 nt, Artificial Sequence
  Description of Artificial Sequence: Synthetic oligonucleotide
cacaagcagcuucgggaac

SEQ ID NO: 839713 - RNA, 19 nt, Artificial Sequence
  Description of Artificial Sequence: Synthetic oligonucleotide
cagcgugaucugacuggcg

SEQ ID NO: 839714 - RNA, 19 nt, Artificial Sequence
  Description of Artificial Sequence: Synthetic oligonucleotide
agucuguagcuggaaguau

SEQ ID NO: 839715 - RNA, 19 nt, Artificial Sequence
  Description of Artificial Sequence: Synthetic oligonucleotide
ugguaccccgcaucagaaa

SEQ ID NO: 839716 - RNA, 19 nt, Artificial Sequence
  Description of Artificial Sequence: Synthetic oligonucleotide
guaccccgcaucagaaaug

SEQ ID NO: 839717 - RNA, 19 nt, Artificial Sequence
  Description of Artificial Sequence: Synthetic oligonucleotide
ugggccacggcgguauagu

SEQ ID NO: 839718 - RNA, 19 nt, Artificial Sequence
  Description of Artificial Sequence: Synthetic oligonucleotide
gaaguagucuucagccaua

SEQ ID NO: 839719 - RNA, 19 nt, Artificial Sequence
  Description of Artificial Sequence: Synthetic oligonucleotide
ucguacccggcgcggggcc

SEQ ID NO: 839720 - RNA, 19 nt, Artificial Sequence
  Description of Artificial Sequence: Synthetic oligonucleotide
aaguagcgaaugagugaga

SEQ ID NO: 839721 - RNA, 19 nt, Artificial Sequence
  Description of Artificial Sequence: Synthetic oligonucleotide
guagucucggguggagaac

SEQ ID NO: 839722 - RNA, 19 nt, Artificial Sequence
  Description of Artificial Sequence: Synthetic oligonucleotide
ggcaaugaacucugucaca

SEQ ID NO: 839723 - RNA, 19 nt, Artificial Sequence
  Description of Artificial Sequence: Synthetic oligonucleotide
uacagccuucgacguggac

SEQ ID NO: 839724 - RNA, 19 nt, Artificial Sequence
  Description of Artificial Sequence: Synthetic oligonucleotide
auguagucucggguggaga

SEQ ID NO: 839725 - RNA, 19 nt, Artificial Sequence
  Description of Artificial Sequence: Synthetic oligonucleotide
ucaacucgagcugcuccau

SEQ ID NO: 839726 - RNA, 19 nt, Artificial Sequence
  Description of Artificial Sequence: Synthetic oligonucleotide
augcucgcccucugcuuug

SEQ ID NO: 839727 - RNA, 19 nt, Artificial Sequence
  Description of Artificial Sequence: Synthetic oligonucleotide
cagcuucgggaaccagucc

SEQ ID NO: 839728 - RNA, 19 nt, Artificial Sequence
  Description of Artificial Sequence: Synthetic oligonucleotide
ugugcgcgaucaucugcuc

SEQ ID NO: 839729 - RNA, 19 nt, Artificial Sequence
  Description of Artificial Sequence: Synthetic oligonucleotide
uucgggaaccaguccucua

SEQ ID NO: 839730 - RNA, 19 nt, Artificial Sequence
  Description of Artificial Sequence: Synthetic oligonucleotide
ugcuaacccgcuuguucuu

SEQ ID NO: 839731 - RNA, 19 nt, Artificial Sequence
  Description of Artificial Sequence: Synthetic oligonucleotide
aggguucagugcuccccug

SEQ ID NO: 839732 - RNA, 19 nt, Artificial Sequence
  Description of Artificial Sequence: Synthetic oligonucleotide
aggccagcgugaucugacu

SEQ ID NO: 839733 - RNA, 19 nt, Artificial Sequence
  Description of Artificial Sequence: Synthetic oligonucleotide
ggcuucagccagcuuauaa

SEQ ID NO: 839734 - RNA, 19 nt, Artificial Sequence
  Description of Artificial Sequence: Synthetic oligonucleotide
agggucaugcucgcccucu

SEQ ID NO: 839735 - RNA, 19 nt, Artificial Sequence
  Description of Artificial Sequence: Synthetic oligonucleotide
cuccauguggugugcgcga

SEQ ID NO: 839736 - RNA, 19 nt, Artificial Sequence
  Description of Artificial Sequence: Synthetic oligonucleotide
gugcgcgaucaucugcuca

SEQ ID NO: 839737 - RNA, 19 nt, Artificial Sequence
  Description of Artificial Sequence: Synthetic oligonucleotide
gguaccccgcaucagaaau

SEQ ID NO: 839738 - RNA, 19 nt, Artificial Sequence
  Description of Artificial Sequence: Synthetic oligonucleotide
ggccagcgugaucugacug

SEQ ID NO: 839739 - RNA, 19 nt, Artificial Sequence
  Description of Artificial Sequence: Synthetic oligonucleotide
gugugcuccccauggcaca

SEQ ID NO: 839740 - RNA, 19 nt, Artificial Sequence
  Description of Artificial Sequence: Synthetic oligonucleotide
cuguagcuggaaguaucuc

SEQ ID NO: 839741 - RNA, 19 nt, Artificial Sequence
  Description of Artificial Sequence: Synthetic oligonucleotide
ugacuggcgucauggccuu

SEQ ID NO: 839742 - RNA, 19 nt, Artificial Sequence
  Description of Artificial Sequence: Synthetic oligonucleotide
cuguaccugcacuggcuca

SEQ ID NO: 839743 - RNA, 19 nt, Artificial Sequence
  Description of Artificial Sequence: Synthetic oligonucleotide
acgcuggugaucuccccuu

SEQ ID NO: 839744 - RNA, 19 nt, Artificial Sequence
  Description of Artificial Sequence: Synthetic oligonucleotide
gcagacccggcuuccuucc

SEQ ID NO: 839745 - RNA, 19 nt, Artificial Sequence
  Description of Artificial Sequence: Synthetic oligonucleotide
gccugugcaaacagguaug

SEQ ID NO: 839746 - RNA, 19 nt, Artificial Sequence
  Description of Artificial Sequence: Synthetic oligonucleotide
accacgcuagcggcguaag

SEQ ID NO: 839747 - RNA, 19 nt, Artificial Sequence
  Description of Artificial Sequence: Synthetic oligonucleotide
guggugugcgcgaucaucu

SEQ ID NO: 839748 - RNA, 19 nt, Artificial Sequence
  Description of Artificial Sequence: Synthetic oligonucleotide
cagucuccuguaccugcac

SEQ ID NO: 839749 - RNA, 19 nt, Artificial Sequence
  Description of Artificial Sequence: Synthetic oligonucleotide
cgguauaguucucagacaa

SEQ ID NO: 839750 - RNA, 19 nt, Artificial Sequence
  Description of Artificial Sequence: Synthetic oligonucleotide
ccgggaaccuaaugcacug

SEQ ID NO: 839751 - RNA, 19 nt, Artificial Sequence
  Description of Artificial Sequence: Synthetic oligonucleotide
cagucuguagcuggaagua

SEQ ID NO: 839752 - RNA, 19 nt, Artificial Sequence
  Description of Artificial Sequence: Synthetic oligonucleotide
augucgguguccagcuucu

SEQ ID NO: 839753 - RNA, 19 nt, Artificial Sequence
  Description of Artificial Sequence: Synthetic oligonucleotide
ugggaguguucagucucaa

SEQ ID NO: 839754 - RNA, 19 nt, Artificial Sequence
  Description of Artificial Sequence: Synthetic oligonucleotide
cagguaugugugcucccca

SEQ ID NO: 839755 - RNA, 19 nt, Artificial Sequence
  Description of Artificial Sequence: Synthetic oligonucleotide
cgaaguagcgaaugaguga

SEQ ID NO: 839756 - RNA, 19 nt, Artificial Sequence
  Description of Artificial Sequence: Synthetic oligonucleotide
ggcagguacccggaugagc

SEQ ID NO: 839757 - RNA, 19 nt, Artificial Sequence
  Description of Artificial Sequence: Synthetic oligonucleotide
gcacggacaucauggccug

SEQ ID NO: 839758 - RNA, 19 nt, Artificial Sequence
  Description of Artificial Sequence: Synthetic oligonucleotide
acccggcuuccuuccagga

SEQ ID NO: 839759 - RNA, 19 nt, Artificial Sequence
  Description of Artificial Sequence: Synthetic oligonucleotide
caucgccacuaccgggaac

SEQ ID NO: 839760 - RNA, 19 nt, Artificial Sequence
  Description of Artificial Sequence: Synthetic oligonucleotide
gcguaagccaggaugugga

SEQ ID NO: 839761 - RNA, 19 nt, Artificial Sequence
  Description of Artificial Sequence: Synthetic oligonucleotide
gccacuaccgggaaccuaa

SEQ ID NO: 839762 - RNA, 19 nt, Artificial Sequence
  Description of Artificial Sequence: Synthetic oligonucleotide
ccuguaccugcacuggcuc

SEQ ID NO: 839763 - RNA, 19 nt, Artificial Sequence
  Description of Artificial Sequence: Synthetic oligonucleotide
uggcgccgagagcuuggca

SEQ ID NO: 839764 - RNA, 19 nt, Artificial Sequence
  Description of Artificial Sequence: Synthetic oligonucleotide
cuagcggcguaagccagga

SEQ ID NO: 839765 - RNA, 19 nt, Artificial Sequence
  Description of Artificial Sequence: Synthetic oligonucleotide
gggcgaugacauccaaaac

SEQ ID NO: 839766 - RNA, 19 nt, Artificial Sequence
  Description of Artificial Sequence: Synthetic oligonucleotide
gacguuuucuggagagccu

SEQ ID NO: 839767 - RNA, 19 nt, Artificial Sequence
  Description of Artificial Sequence: Synthetic oligonucleotide
gcuagcggcguaagccagg

SEQ ID NO: 839768 - RNA, 19 nt, Artificial Sequence
  Description of Artificial Sequence: Synthetic oligonucleotide
ccuucgacguggacuucag

SEQ ID NO: 839769 - RNA, 19 nt, Artificial Sequence
  Description of Artificial Sequence: Synthetic oligonucleotide
gguucugacaccguccaau

SEQ ID NO: 839770 - RNA, 19 nt, Artificial Sequence
  Description of Artificial Sequence: Synthetic oligonucleotide
gugugcgcgaucaucugcu

SEQ ID NO: 839771 - RNA, 19 nt, Artificial Sequence
  Description of Artificial Sequence: Synthetic oligonucleotide
cacggcgguauaguucuca

SEQ ID NO: 839772 - RNA, 19 nt, Artificial Sequence
  Description of Artificial Sequence: Synthetic oligonucleotide
cuccccuugguaccccgca

SEQ ID NO: 839773 - RNA, 19 nt, Artificial Sequence
  Description of Artificial Sequence: Synthetic oligonucleotide
ccgcuuguucuucuuccag

SEQ ID NO: 839774 - RNA, 19 nt, Artificial Sequence
  Description of Artificial Sequence: Synthetic oligonucleotide
ugcuucggcucuggaugcu

SEQ ID NO: 839775 - RNA, 19 nt, Artificial Sequence
  Description of Artificial Sequence: Synthetic oligonucleotide
ccgagguguaugguggggc

SEQ ID NO: 839776 - RNA, 19 nt, Artificial Sequence
  Description of Artificial Sequence: Synthetic oligonucleotide
cagccuucgacguggacuu

SEQ ID NO: 839777 - RNA, 19 nt, Artificial Sequence
  Description of Artificial Sequence: Synthetic oligonucleotide
cucgagguuuuccucuccu

SEQ ID NO: 839778 - RNA, 19 nt, Artificial Sequence
  Description of Artificial Sequence: Synthetic oligonucleotide
ccauuauguagucucgggu

SEQ ID NO: 839779 - RNA, 19 nt, Artificial Sequence
  Description of Artificial Sequence: Synthetic oligonucleotide
cccaucgccacuaccggga

SEQ ID NO: 839780 - RNA, 19 nt, Artificial Sequence
  Description of Artificial Sequence: Synthetic oligonucleotide
guacccggcgcggggcccg

SEQ ID NO: 839781 - RNA, 19 nt, Artificial Sequence
  Description of Artificial Sequence: Synthetic oligonucleotide
cagugcuccccuggacagc

SEQ ID NO: 839782 - RNA, 19 nt, Artificial Sequence
  Description of Artificial Sequence: Synthetic oligonucleotide
ugcucgcccucugcuuuga

SEQ ID NO: 839783 - RNA, 19 nt, Artificial Sequence
  Description of Artificial Sequence: Synthetic oligonucleotide
guccucuagcccuccugaa

SEQ ID NO: 839784 - RNA, 19 nt, Artificial Sequence
  Description of Artificial Sequence: Synthetic oligonucleotide
cguccaaucuacccacuuc

SEQ ID NO: 839785 - RNA, 19 nt, Artificial Sequence
  Description of Artificial Sequence: Synthetic oligonucleotide
gagcuggaugacguuuucu

SEQ ID NO: 839786 - RNA, 19 nt, Artificial Sequence
  Description of Artificial Sequence: Synthetic oligonucleotide
cugggcgaagcgcuggacu

SEQ ID NO: 839787 - RNA, 19 nt, Artificial Sequence
  Description of Artificial Sequence: Synthetic oligonucleotide
gcgugaucugacuggcguc

SEQ ID NO: 839788 - RNA, 19 nt, Artificial Sequence
  Description of Artificial Sequence: Synthetic oligonucleotide
gggaaccuaaugcacugau

SEQ ID NO: 839789 - RNA, 19 nt, Artificial Sequence
  Description of Artificial Sequence: Synthetic oligonucleotide
auguggugugcgcgaucau

SEQ ID NO: 839790 - RNA, 19 nt, Artificial Sequence
  Description of Artificial Sequence: Synthetic oligonucleotide
caggguucagugcuccccu

SEQ ID NO: 839791 - RNA, 19 nt, Artificial Sequence
  Description of Artificial Sequence: Synthetic oligonucleotide
cgagagcuuggcaggcccg

SEQ ID NO: 839792 - RNA, 19 nt, Artificial Sequence
  Description of Artificial Sequence: Synthetic oligonucleotide
caguuucuacagccuucga

SEQ ID NO: 839793 - RNA, 19 nt, Artificial Sequence
  Description of Artificial Sequence: Synthetic oligonucleotide
cuacagccuucgacgugga

SEQ ID NO: 839794 - RNA, 19 nt, Artificial Sequence
  Description of Artificial Sequence: Synthetic oligonucleotide
gcgcacugcagagccaccc

SEQ ID NO: 839795 - RNA, 19 nt, Artificial Sequence
  Description of Artificial Sequence: Synthetic oligonucleotide
ucgccacuaccgggaaccu

SEQ ID NO: 839796 - RNA, 19 nt, Artificial Sequence
  Description of Artificial Sequence: Synthetic oligonucleotide
cccggcuuccuuccaggag

SEQ ID NO: 839797 - RNA, 19 nt, Artificial Sequence
  Description of Artificial Sequence: Synthetic oligonucleotide
gcuaacccgcuuguucuuc

SEQ ID NO: 839798 - RNA, 19 nt, Artificial Sequence
  Description of Artificial Sequence: Synthetic oligonucleotide
gcucccgaaguagucuuca

SEQ ID NO: 839799 - RNA, 19 nt, Artificial Sequence
  Description of Artificial Sequence: Synthetic oligonucleotide
ccuugcaaugggcaaugaa

SEQ ID NO: 839800 - RNA, 19 nt, Artificial Sequence
  Description of Artificial Sequence: Synthetic oligonucleotide
cuccggcgcgcucccgaag

SEQ ID NO: 839801 - RNA, 19 nt, Artificial Sequence
  Description of Artificial Sequence: Synthetic oligonucleotide
cgcgaucaucugcucaagc

SEQ ID NO: 839802 - RNA, 19 nt, Artificial Sequence
  Description of Artificial Sequence: Synthetic oligonucleotide
cacuccggcgcgcucccga

SEQ ID NO: 839803 - RNA, 19 nt, Artificial Sequence
  Description of Artificial Sequence: Synthetic oligonucleotide
uagcggcguaagccaggau

SEQ ID NO: 839804 - RNA, 19 nt, Artificial Sequence
  Description of Artificial Sequence: Synthetic oligonucleotide
gguggggcgaugacaucca

SEQ ID NO: 839805 - RNA, 19 nt, Artificial Sequence
  Description of Artificial Sequence: Synthetic oligonucleotide
accccgcaucagaaaugag

SEQ ID NO: 839806 - RNA, 19 nt, Artificial Sequence
  Description of Artificial Sequence: Synthetic oligonucleotide
accguccaaucuacccacu

SEQ ID NO: 839807 - RNA, 19 nt, Artificial Sequence
  Description of Artificial Sequence: Synthetic oligonucleotide
gucucggguggagaacuua

SEQ ID NO: 839808 - RNA, 19 nt, Artificial Sequence
  Description of Artificial Sequence: Synthetic oligonucleotide
cgacguggacuucagcuca

SEQ ID NO: 839809 - RNA, 19 nt, Artificial Sequence
  Description of Artificial Sequence: Synthetic oligonucleotide
gcgucauggccuuucuccu

SEQ ID NO: 839810 - RNA, 19 nt, Artificial Sequence
  Description of Artificial Sequence: Synthetic oligonucleotide
gaacugguguguggucagu

SEQ ID NO: 839811 - RNA, 19 nt, Artificial Sequence
  Description of Artificial Sequence: Synthetic oligonucleotide
ccccuugguaccccgcauc

SEQ ID NO: 839812 - RNA, 19 nt, Artificial Sequence
  Description of Artificial Sequence: Synthetic oligonucleotide
ccacgcuagcggcguaagc

SEQ ID NO: 839813 - RNA, 19 nt, Artificial Sequence
  Description of Artificial Sequence: Synthetic oligonucleotide
ccccggaaucaucuuccug

SEQ ID NO: 839814 - RNA, 19 nt, Artificial Sequence
  Description of Artificial Sequence: Synthetic oligonucleotide
gcggcguaagccaggaugu

SEQ ID NO: 839815 - RNA, 19 nt, Artificial Sequence
  Description of Artificial Sequence: Synthetic oligonucleotide
cggcuaccagcucggaggc

SEQ ID NO: 839816 - RNA, 19 nt, Artificial Sequence
  Description of Artificial Sequence: Synthetic oligonucleotide
cgugaucugacuggcguca

SEQ ID NO: 839817 - RNA, 19 nt, Artificial Sequence
  Description of Artificial Sequence: Synthetic oligonucleotide
cuucgggaaccaguccucu

SEQ ID NO: 839818 - RNA, 19 nt, Artificial Sequence
  Description of Artificial Sequence: Synthetic oligonucleotide
cgcuagcggcguaagccag

SEQ ID NO: 839819 - RNA, 19 nt, Artificial Sequence
  Description of Artificial Sequence: Synthetic oligonucleotide
cacaaaguccgagguguau

SEQ ID NO: 839820 - RNA, 19 nt, Artificial Sequence
  Description of Artificial Sequence: Synthetic oligonucleotide
guacccggaugagcuccac

SEQ ID NO: 839821 - RNA, 19 nt, Artificial Sequence
  Description of Artificial Sequence: Synthetic oligonucleotide
aagccacgcuggggucucu

SEQ ID NO: 839822 - RNA, 19 nt, Artificial Sequence
  Description of Artificial Sequence: Synthetic oligonucleotide
gcgcgaucaucugcucaag

SEQ ID NO: 839823 - RNA, 19 nt, Artificial Sequence
  Description of Artificial Sequence: Synthetic oligonucleotide
gguacccggaugagcucca

SEQ ID NO: 839824 - RNA, 19 nt, Artificial Sequence
  Description of Artificial Sequence: Synthetic oligonucleotide
cagacccggcuuccuucca

SEQ ID NO: 839825 - RNA, 19 nt, Artificial Sequence
  Description of Artificial Sequence: Synthetic oligonucleotide
cagugacgaaguagcgaau

SEQ ID NO: 839826 - RNA, 19 nt, Artificial Sequence
  Description of Artificial Sequence: Synthetic oligonucleotide
ccucuagcccuccugaauu

SEQ ID NO: 839827 - RNA, 19 nt, Artificial Sequence
  Description of Artificial Sequence: Synthetic oligonucleotide
agccuccugccuggaaaua

SEQ ID NO: 839828 - RNA, 19 nt, Artificial Sequence
  Description of Artificial Sequence: Synthetic oligonucleotide
ccugagcgacccugcgcac

SEQ ID NO: 839829 - RNA, 19 nt, Artificial Sequence
  Description of Artificial Sequence: Synthetic oligonucleotide
ccccacuccggcgcgcucc

SEQ ID NO: 839830 - RNA, 19 nt, Artificial Sequence
  Description of Artificial Sequence: Synthetic oligonucleotide
ccauguggugugcgcgauc

SEQ ID NO: 839831 - RNA, 19 nt, Artificial Sequence
  Description of Artificial Sequence: Synthetic oligonucleotide
gcgacccugcgcacugcag

SEQ ID NO: 839832 - RNA, 19 nt, Artificial Sequence
  Description of Artificial Sequence: Synthetic oligonucleotide
caccacgcuagcggcguaa

SEQ ID NO: 839833 - RNA, 19 nt, Artificial Sequence
  Description of Artificial Sequence: Synthetic oligonucleotide
cugagcgacccugcgcacu

SEQ ID NO: 839834 - RNA, 19 nt, Artificial Sequence
  Description of Artificial Sequence: Synthetic oligonucleotide
cagauccaggaaggcaggu

SEQ ID NO: 839835 - RNA, 19 nt, Artificial Sequence
  Description of Artificial Sequence: Synthetic oligonucleotide
ccggaaucaucuuccugcu

SEQ ID NO: 839836 - RNA, 19 nt, Artificial Sequence
  Description of Artificial Sequence: Synthetic oligonucleotide
cuccaggcacuugcggaua

SEQ ID NO: 839837 - RNA, 19 nt, Artificial Sequence
  Description of Artificial Sequence: Synthetic oligonucleotide
agucugggccacggcggua

SEQ ID NO: 839838 - RNA, 19 nt, Artificial Sequence
  Description of Artificial Sequence: Synthetic oligonucleotide
gccuuucuccugggcgaag

SEQ ID NO: 839839 - RNA, 19 nt, Artificial Sequence
  Description of Artificial Sequence: Synthetic oligonucleotide
ggcuaccagcucggaggcc

SEQ ID NO: 839840 - RNA, 19 nt, Artificial Sequence
  Description of Artificial Sequence: Synthetic oligonucleotide
gugaucugacuggcgucau

SEQ ID NO: 839841 - RNA, 19 nt, Artificial Sequence
  Description of Artificial Sequence: Synthetic oligonucleotide
cgcucccgaaguagucuuc

SEQ ID NO: 839842 - RNA, 19 nt, Artificial Sequence
  Description of Artificial Sequence: Synthetic oligonucleotide
ggcgcgcucccgaaguagu

SEQ ID NO: 839843 - RNA, 19 nt, Artificial Sequence
  Description of Artificial Sequence: Synthetic oligonucleotide
gcucggaggccccuuuguu

SEQ ID NO: 839844 - RNA, 19 nt, Artificial Sequence
  Description of Artificial Sequence: Synthetic oligonucleotide
gccuugcaaugggcaauga

SEQ ID NO: 839845 - RNA, 19 nt, Artificial Sequence
  Description of Artificial Sequence: Synthetic oligonucleotide
cggcgguauaguucucaga

SEQ ID NO: 839846 - RNA, 19 nt, Artificial Sequence
  Description of Artificial Sequence: Synthetic oligonucleotide
ggacagcauggcgccgaga

SEQ ID NO: 839847 - RNA, 19 nt, Artificial Sequence
  Description of Artificial Sequence: Synthetic oligonucleotide
gcuggccgccguccgccuc

SEQ ID NO: 839848 - RNA, 19 nt, Artificial Sequence
  Description of Artificial Sequence: Synthetic oligonucleotide
gcgcgcucccgaaguaguc

SEQ ID NO: 839849 - RNA, 19 nt, Artificial Sequence
  Description of Artificial Sequence: Synthetic oligonucleotide
cgcuggacuuccugagcga

SEQ ID NO: 839850 - RNA, 19 nt, Artificial Sequence
  Description of Artificial Sequence: Synthetic oligonucleotide
gcgcucccgaaguagucuu

SEQ ID NO: 839851 - RNA, 19 nt, Artificial Sequence
  Description of Artificial Sequence: Synthetic oligonucleotide
ccaucgccacuaccgggaa

SEQ ID NO: 839852 - RNA, 19 nt, Artificial Sequence
  Description of Artificial Sequence: Synthetic oligonucleotide
gcucaacaccugucugaau

SEQ ID NO: 839853 - RNA, 19 nt, Artificial Sequence
  Description of Artificial Sequence: Synthetic oligonucleotide
cggcgcgcucccgaaguag

SEQ ID NO: 839854 - RNA, 19 nt, Artificial Sequence
  Description of Artificial Sequence: Synthetic oligonucleotide
ccggagcacucuggagaac

SEQ ID NO: 839855 - RNA, 19 nt, Artificial Sequence
  Description of Artificial Sequence: Synthetic oligonucleotide
gggccacggcgguauaguu

SEQ ID NO: 839856 - RNA, 19 nt, Artificial Sequence
  Description of Artificial Sequence: Synthetic oligonucleotide
ccacggcgguauaguucuc

SEQ ID NO: 839857 - RNA, 19 nt, Artificial Sequence
  Description of Artificial Sequence: Synthetic oligonucleotide
cggcguaagccaggaugug

SEQ ID NO: 839858 - RNA, 19 nt, Artificial Sequence
  Description of Artificial Sequence: Synthetic oligonucleotide
cgggaaccuaaugcacuga

SEQ ID NO: 839859 - RNA, 19 nt, Artificial Sequence
  Description of Artificial Sequence: Synthetic oligonucleotide
ccauuacguccagcuggga

SEQ ID NO: 839860 - RNA, 19 nt, Artificial Sequence
  Description of Artificial Sequence: Synthetic oligonucleotide
ccguccaaucuacccacuu

SEQ ID NO: 839861 - RNA, 19 nt, Artificial Sequence
  Description of Artificial Sequence: Synthetic oligonucleotide
cacggacaucauggccugu

SEQ ID NO: 839862 - RNA, 19 nt, Artificial Sequence
  Description of Artificial Sequence: Synthetic oligonucleotide
ccacuccggcgcgcucccg

SEQ ID NO: 839863 - RNA, 19 nt, Artificial Sequence
  Description of Artificial Sequence: Synthetic oligonucleotide
ccacuaccgggaaccuaau

SEQ ID NO: 839864 - RNA, 19 nt, Artificial Sequence
  Description of Artificial Sequence: Synthetic oligonucleotide
cgcgcucccgaaguagucu

SEQ ID NO: 839865 - RNA, 19 nt, Artificial Sequence
  Description of Artificial Sequence: Synthetic oligonucleotide
gacuggcgucauggccuuu

SEQ ID NO: 839866 - RNA, 19 nt, Artificial Sequence
  Description of Artificial Sequence: Synthetic oligonucleotide
cgguucugacaccguccaa

SEQ ID NO: 839867 - RNA, 19 nt, Artificial Sequence
  Description of Artificial Sequence: Synthetic oligonucleotide
ccaccacgcuagcggcgua

SEQ ID NO: 839868 - RNA, 19 nt, Artificial Sequence
  Description of Artificial Sequence: Synthetic oligonucleotide
cgccacuaccgggaaccua

SEQ ID NO: 839869 - RNA, 19 nt, Artificial Sequence
  Description of Artificial Sequence: Synthetic oligonucleotide
cggcgcggggcccgccaua

SEQ ID NO: 839870 - RNA, 19 nt, Artificial Sequence
  Description of Artificial Sequence: Synthetic oligonucleotide
uguacuauguccaaaacca

SEQ ID NO: 839871 - RNA, 19 nt, Artificial Sequence
  Description of Artificial Sequence: Synthetic oligonucleotide
uggauaaucgagaagacca

SEQ ID NO: 839872 - RNA, 19 nt, Artificial Sequence
  Description of Artificial Sequence: Synthetic oligonucleotide
uuguguuuaaauuuaaagu

SEQ ID NO: 839873 - RNA, 19 nt, Artificial Sequence
  Description of Artificial Sequence: Synthetic oligonucleotide
aacaccaaccauuauuauc

SEQ ID NO: 839874 - RNA, 19 nt, Artificial Sequence
  Description of Artificial Sequence: Synthetic oligonucleotide
auagucgucauauuugggg

SEQ ID NO: 839875 - RNA, 19 nt, Artificial Sequence
  Description of Artificial Sequence: Synthetic oligonucleotide
ucuaggauccauuaguccc

SEQ ID NO: 839876 - RNA, 19 nt, Artificial Sequence
  Description of Artificial Sequence: Synthetic oligonucleotide
aaucgagaagaccaguguc

SEQ ID NO: 839877 - RNA, 19 nt, Artificial Sequence
  Description of Artificial Sequence: Synthetic oligonucleotide
gaugcuaugcaaauggagg

SEQ ID NO: 839878 - RNA, 19 nt, Artificial Sequence
  Description of Artificial Sequence: Synthetic oligonucleotide
ugcaaauggagguagguag

SEQ ID NO: 839879 - RNA, 19 nt, Artificial Sequence
  Description of Artificial Sequence: Synthetic oligonucleotide
aaaccaugccggcagagac

SEQ ID NO: 839880 - RNA, 19 nt, Artificial Sequence
  Description of Artificial Sequence: Synthetic oligonucleotide
aaagccaaccacuguggcc

SEQ ID NO: 839881 - RNA, 19 nt, Artificial Sequence
  Description of Artificial Sequence: Synthetic oligonucleotide
aacaacgaagacaacaguc

SEQ ID NO: 839882 - RNA, 19 nt, Artificial Sequence
  Description of Artificial Sequence: Synthetic oligonucleotide
accaaauugccaccgauac

SEQ ID NO: 839883 - RNA, 19 nt, Artificial Sequence
  Description of Artificial Sequence: Synthetic oligonucleotide
acugcuagagcacagaagu

SEQ ID NO: 839884 - RNA, 19 nt, Artificial Sequence
  Description of Artificial Sequence: Synthetic oligonucleotide
ucuugcaagugacagaucu

SEQ ID NO: 839885 - RNA, 19 nt, Artificial Sequence
  Description of Artificial Sequence: Synthetic oligonucleotide
agauaaagagcuuugggga

SEQ ID NO: 839886 - RNA, 19 nt, Artificial Sequence
  Description of Artificial Sequence: Synthetic oligonucleotide
  modified_base (6)..(6): a, c, u, g, unknown or other
acguunucgggguuuaugc

SEQ ID NO: 839887 - RNA, 19 nt, Artificial Sequence
  Description of Artificial Sequence: Synthetic oligonucleotide
uaaacggguaggaacaacc

SEQ ID NO: 839888 - RNA, 19 nt, Artificial Sequence
  Description of Artificial Sequence: Synthetic oligonucleotide
uuagauuccacuuuucaau

SEQ ID NO: 839889 - RNA, 19 nt, Artificial Sequence
  Description of Artificial Sequence: Synthetic oligonucleotide
uacaguuguauccagaaua

SEQ ID NO: 839890 - RNA, 19 nt, Artificial Sequence
  Description of Artificial Sequence: Synthetic oligonucleotide
auuaguccccaacaucucc

SEQ ID NO: 839891 - RNA, 19 nt, Artificial Sequence
  Description of Artificial Sequence: Synthetic oligonucleotide
guaauaaugucucaagaca

SEQ ID NO: 839892 - RNA, 19 nt, Artificial Sequence
  Description of Artificial Sequence: Synthetic oligonucleotide
uuugagccaacaauaacac

SEQ ID NO: 839893 - RNA, 19 nt, Artificial Sequence
  Description of Artificial Sequence: Synthetic oligonucleotide
uuauuguucacuccugaac

SEQ ID NO: 839894 - RNA, 19 nt, Artificial Sequence
  Description of Artificial Sequence: Synthetic oligonucleotide
aaugauuagauuccacuuu

SEQ ID NO: 839895 - RNA, 19 nt, Artificial Sequence
  Description of Artificial Sequence: Synthetic oligonucleotide
aauaaugucucaagacagg

SEQ ID NO: 839896 - RNA, 19 nt, Artificial Sequence
  Description of Artificial Sequence: Synthetic oligonucleotide
cauuuauggagucagggug

SEQ ID NO: 839897 - RNA, 19 nt, Artificial Sequence
  Description of Artificial Sequence: Synthetic oligonucleotide
guaaacgacaaucccaacc

SEQ ID NO: 839898 - RNA, 19 nt, Artificial Sequence
  Description of Artificial Sequence: Synthetic oligonucleotide
ugaauuguguuuaaauuua

SEQ ID NO: 839899 - RNA, 19 nt, Artificial Sequence
  Description of Artificial Sequence: Synthetic oligonucleotide
gaugcaaugaaggcagucg

SEQ ID NO: 839900 - RNA, 19 nt, Artificial Sequence
  Description of Artificial Sequence: Synthetic oligonucleotide
uguuuggcagcuauuauaa

SEQ ID NO: 839901 - RNA, 19 nt, Artificial Sequence
  Description of Artificial Sequence: Synthetic oligonucleotide
aaagaauguccuaaacggg

SEQ ID NO: 839902 - RNA, 19 nt, Artificial Sequence
  Description of Artificial Sequence: Synthetic oligonucleotide
aucacggucuccaauaagc

SEQ ID NO: 839903 - RNA, 19 nt, Artificial Sequence
  Description of Artificial Sequence: Synthetic oligonucleotide
aacuugucagacugaauug

SEQ ID NO: 839904 - RNA, 19 nt, Artificial Sequence
  Description of Artificial Sequence: Synthetic oligonucleotide
aggugaauuguguagagga

SEQ ID NO: 839905 - RNA, 19 nt, Artificial Sequence
  Description of Artificial Sequence: Synthetic oligonucleotide
uccuaaacggguaggaaca

SEQ ID NO: 839906 - RNA, 19 nt, Artificial Sequence
  Description of Artificial Sequence: Synthetic oligonucleotide
uccacaauaacaucaucac

SEQ ID NO: 839907 - RNA, 19 nt, Artificial Sequence
  Description of Artificial Sequence: Synthetic oligonucleotide
uacuauguccaaaaccaug

SEQ ID NO: 839908 - RNA, 19 nt, Artificial Sequence
  Description of Artificial Sequence: Synthetic oligonucleotide
uuuuaugccugucuuccug

SEQ ID NO: 839909 - RNA, 19 nt, Artificial Sequence
  Description of Artificial Sequence: Synthetic oligonucleotide
aacccagccagcaagaaug

SEQ ID NO: 839910 - RNA, 19 nt, Artificial Sequence
  Description of Artificial Sequence: Synthetic oligonucleotide
uccaaucuacaaaaccucc

SEQ ID NO: 839911 - RNA, 19 nt, Artificial Sequence
  Description of Artificial Sequence: Synthetic oligonucleotide
gguaggaacaaccuuuggg

SEQ ID NO: 839912 - RNA, 19 nt, Artificial Sequence
  Description of Artificial Sequence: Synthetic oligonucleotide
acaaaccugacuuagcaau

SEQ ID NO: 839913 - RNA, 19 nt, Artificial Sequence
  Description of Artificial Sequence: Synthetic oligonucleotide
uggagguagguagagaucc

SEQ ID NO: 839914 - RNA, 19 nt, Artificial Sequence
  Description of Artificial Sequence: Synthetic oligonucleotide
acgaagacaacagucagag

SEQ ID NO: 839915 - RNA, 19 nt, Artificial Sequence
  Description of Artificial Sequence: Synthetic oligonucleotide
agacuuauuguucacuccu

SEQ ID NO: 839916 - RNA, 19 nt, Artificial Sequence
  Description of Artificial Sequence: Synthetic oligonucleotide
gaugccacuagacuccuug

SEQ ID NO: 839917 - RNA, 19 nt, Artificial Sequence
  Description of Artificial Sequence: Synthetic oligonucleotide
aaagccaaguugccaauga

SEQ ID NO: 839918 - RNA, 19 nt, Artificial Sequence
  Description of Artificial Sequence: Synthetic oligonucleotide
auaccauucauugugauuu

SEQ ID NO: 839919 - RNA, 19 nt, Artificial Sequence
  Description of Artificial Sequence: Synthetic oligonucleotide
ccaaguuugggucagauac

SEQ ID NO: 839920 - RNA, 19 nt, Artificial Sequence
  Description of Artificial Sequence: Synthetic oligonucleotide
caagccacaagccagauaa

SEQ ID NO: 839921 - RNA, 19 nt, Artificial Sequence
  Description of Artificial Sequence: Synthetic oligonucleotide
uauuaaggccauuuaugga

SEQ ID NO: 839922 - RNA, 19 nt, Artificial Sequence
  Description of Artificial Sequence: Synthetic oligonucleotide
cagauacacaacaacgaag

SEQ ID NO: 839923 - RNA, 19 nt, Artificial Sequence
  Description of Artificial Sequence: Synthetic oligonucleotide
aauggcacgaguaucugca

SEQ ID NO: 839924 - RNA, 19 nt, Artificial Sequence
  Description of Artificial Sequence: Synthetic oligonucleotide
uauuaucccugcagaagag

SEQ ID NO: 839925 - RNA, 19 nt, Artificial Sequence
  Description of Artificial Sequence: Synthetic oligonucleotide
gaagcgguggaccauccag

SEQ ID NO: 839926 - RNA, 19 nt, Artificial Sequence
  Description of Artificial Sequence: Synthetic oligonucleotide
uagucgucauauuuggggc

SEQ ID NO: 839927 - RNA, 19 nt, Artificial Sequence
  Description of Artificial Sequence: Synthetic oligonucleotide
aauguccuaaacggguagg

SEQ ID NO: 839928 - RNA, 19 nt, Artificial Sequence
  Description of Artificial Sequence: Synthetic oligonucleotide
uaaucgagaagaccagugu

SEQ ID NO: 839929 - RNA, 19 nt, Artificial Sequence
  Description of Artificial Sequence: Synthetic oligonucleotide
aagccaaccacuguggccu

SEQ ID NO: 839930 - RNA, 19 nt, Artificial Sequence
  Description of Artificial Sequence: Synthetic oligonucleotide
  modified_base (13)..(13): a, c, u, g, unknown or other
uguggccacguunucgggg

SEQ ID NO: 839931 - RNA, 19 nt, Artificial Sequence
  Description of Artificial Sequence: Synthetic oligonucleotide
auaccauugauaacuggcg

SEQ ID NO: 839932 - RNA, 19 nt, Artificial Sequence
  Description of Artificial Sequence: Synthetic oligonucleotide
aaccugacuuagcaauggg

SEQ ID NO: 839933 - RNA, 19 nt, Artificial Sequence
  Description of Artificial Sequence: Synthetic oligonucleotide
  modified_base (3)..(3): a, c, u, g, unknown or other
uunucgggguuuaugccug

SEQ ID NO: 839934 - RNA, 19 nt, Artificial Sequence
  Description of Artificial Sequence: Synthetic oligonucleotide
ucauugugauuucaacaca

SEQ ID NO: 839935 - RNA, 19 nt, Artificial Sequence
  Description of Artificial Sequence: Synthetic oligonucleotide
ugacagaucuuccuuuacu

SEQ ID NO: 839936 - RNA, 19 nt, Artificial Sequence
  Description of Artificial Sequence: Synthetic oligonucleotide
uucccuuugagaccaagaa

SEQ ID NO: 839937 - RNA, 19 nt, Artificial Sequence
  Description of Artificial Sequence: Synthetic oligonucleotide
agagccaugaugccacuag

SEQ ID NO: 839938 - RNA, 19 nt, Artificial Sequence
  Description of Artificial Sequence: Synthetic oligonucleotide
ucguccuguaacauggcug

SEQ ID NO: 839939 - RNA, 19 nt, Artificial Sequence
  Description of Artificial Sequence: Synthetic oligonucleotide
uucuaggauccauuagucc

SEQ ID NO: 839940 - RNA, 19 nt, Artificial Sequence
  Description of Artificial Sequence: Synthetic oligonucleotide
gauccauuaguccccaaca

SEQ ID NO: 839941 - RNA, 19 nt, Artificial Sequence
  Description of Artificial Sequence: Synthetic oligonucleotide
guagcaggauguuuggcag

SEQ ID NO: 839942 - RNA, 19 nt, Artificial Sequence
  Description of Artificial Sequence: Synthetic oligonucleotide
uggacugccacuugucuug

SEQ ID NO: 839943 - RNA, 19 nt, Artificial Sequence
  Description of Artificial Sequence: Synthetic oligonucleotide
gaguacaaaccugacuuag

SEQ ID NO: 839944 - RNA, 19 nt, Artificial Sequence
  Description of Artificial Sequence: Synthetic oligonucleotide
uuaucccugcagaagagau

SEQ ID NO: 839945 - RNA, 19 nt, Artificial Sequence
  Description of Artificial Sequence: Synthetic oligonucleotide
accauugauaacuggcgug

SEQ ID NO: 839946 - RNA, 19 nt, Artificial Sequence
  Description of Artificial Sequence: Synthetic oligonucleotide
gugaauuguguagaggaag

SEQ ID NO: 839947 - RNA, 19 nt, Artificial Sequence
  Description of Artificial Sequence: Synthetic oligonucleotide
agacuacccuggcacaagc

SEQ ID NO: 839948 - RNA, 19 nt, Artificial Sequence
  Description of Artificial Sequence: Synthetic oligonucleotide
aguacaaaccugacuuagc

SEQ ID NO: 839949 - RNA, 19 nt, Artificial Sequence
  Description of Artificial Sequence: Synthetic oligonucleotide
augcuaugcaaauggaggu

SEQ ID NO: 839950 - RNA, 19 nt, Artificial Sequence
  Description of Artificial Sequence: Synthetic oligonucleotide
guacaaaccugacuuagca

SEQ ID NO: 839951 - RNA, 19 nt, Artificial Sequence
  Description of Artificial Sequence: Synthetic oligonucleotide
uaggagcaagagaaccugg

SEQ ID NO: 839952 - RNA, 19 nt, Artificial Sequence
  Description of Artificial Sequence: Synthetic oligonucleotide
acaaucccaaccaaguuug

SEQ ID NO: 839953 - RNA, 19 nt, Artificial Sequence
  Description of Artificial Sequence: Synthetic oligonucleotide
aucccaaccaaguuugggu

SEQ ID NO: 839954 - RNA, 19 nt, Artificial Sequence
  Description of Artificial Sequence: Synthetic oligonucleotide
agcuauuauaauccaaaua

SEQ ID NO: 839955 - RNA, 19 nt, Artificial Sequence
  Description of Artificial Sequence: Synthetic oligonucleotide
cugguaaaugacuggcacc

SEQ ID NO: 839956 - RNA, 19 nt, Artificial Sequence
  Description of Artificial Sequence: Synthetic oligonucleotide
uaccauugauaacuggcgu

SEQ ID NO: 839957 - RNA, 19 nt, Artificial Sequence
  Description of Artificial Sequence: Synthetic oligonucleotide
aacugacaguccauccugc

SEQ ID NO: 839958 - RNA, 19 nt, Artificial Sequence
  Description of Artificial Sequence: Synthetic oligonucleotide
cacgaguaucugcagagcc

SEQ ID NO: 839959 - RNA, 19 nt, Artificial Sequence
  Description of Artificial Sequence: Synthetic oligonucleotide
cuucuaggauccauuaguc

SEQ ID NO: 839960 - RNA, 19 nt, Artificial Sequence
  Description of Artificial Sequence: Synthetic oligonucleotide
aaacuaauggagaaaugua

SEQ ID NO: 839961 - RNA, 19 nt, Artificial Sequence
  Description of Artificial Sequence: Synthetic oligonucleotide
ugcagaagagaugcaauga

SEQ ID NO: 839962 - RNA, 19 nt, Artificial Sequence
  Description of Artificial Sequence: Synthetic oligonucleotide
ugcaacugacaguccaucc

SEQ ID NO: 839963 - RNA, 19 nt, Artificial Sequence
  Description of Artificial Sequence: Synthetic oligonucleotide
agaucagguggcccggaac

SEQ ID NO: 839964 - RNA, 19 nt, Artificial Sequence
  Description of Artificial Sequence: Synthetic oligonucleotide
caacgaagacaacagucag

SEQ ID NO: 839965 - RNA, 19 nt, Artificial Sequence
  Description of Artificial Sequence: Synthetic oligonucleotide
guccuaaacggguaggaac

SEQ ID NO: 839966 - RNA, 19 nt, Artificial Sequence
  Description of Artificial Sequence: Synthetic oligonucleotide
ugacuuagcaaugggugug

SEQ ID NO: 839967 - RNA, 19 nt, Artificial Sequence
  Description of Artificial Sequence: Synthetic oligonucleotide
cuuugagaccaagaagugc

SEQ ID NO: 839968 - RNA, 19 nt, Artificial Sequence
  Description of Artificial Sequence: Synthetic oligonucleotide
auaaucgagaagaccagug

SEQ ID NO: 839969 - RNA, 19 nt, Artificial Sequence
  Description of Artificial Sequence: Synthetic oligonucleotide
ugauaacuggcguguaaac

SEQ ID NO: 839970 - RNA, 19 nt, Artificial Sequence
  Description of Artificial Sequence: Synthetic oligonucleotide
caaccauuauuaucccugc

SEQ ID NO: 839971 - RNA, 19 nt, Artificial Sequence
  Description of Artificial Sequence: Synthetic oligonucleotide
agcgccgucagguagggga

SEQ ID NO: 839972 - RNA, 19 nt, Artificial Sequence
  Description of Artificial Sequence: Synthetic oligonucleotide
agcccaagaugaucgcagc

SEQ ID NO: 839973 - RNA, 19 nt, Artificial Sequence
  Description of Artificial Sequence: Synthetic oligonucleotide
acuacccuggcacaagcca

SEQ ID NO: 839974 - RNA, 19 nt, Artificial Sequence
  Description of Artificial Sequence: Synthetic oligonucleotide
uugauaacuggcguguaaa

SEQ ID NO: 839975 - RNA, 19 nt, Artificial Sequence
  Description of Artificial Sequence: Synthetic oligonucleotide
uggcguguaaacgacaauc

SEQ ID NO: 839976 - RNA, 19 nt, Artificial Sequence
  Description of Artificial Sequence: Synthetic oligonucleotide
cacuaggagcaagagaacc

SEQ ID NO: 839977 - RNA, 19 nt, Artificial Sequence
  Description of Artificial Sequence: Synthetic oligonucleotide
uggcauagucgucauauuu

SEQ ID NO: 839978 - RNA, 19 nt, Artificial Sequence
  Description of Artificial Sequence: Synthetic oligonucleotide
aaccgcagacuacccuggc

SEQ ID NO: 839979 - RNA, 19 nt, Artificial Sequence
  Description of Artificial Sequence: Synthetic oligonucleotide
aaccauuauuaucccugca

SEQ ID NO: 839980 - RNA, 19 nt, Artificial Sequence
  Description of Artificial Sequence: Synthetic oligonucleotide
auguuuggcagcuauuaua

SEQ ID NO: 839981 - RNA, 19 nt, Artificial Sequence
  Description of Artificial Sequence: Synthetic oligonucleotide
ggaaacuuaaggccaggag

SEQ ID NO: 839982 - RNA, 19 nt, Artificial Sequence
  Description of Artificial Sequence: Synthetic oligonucleotide
cagaaguacagaguggcug

SEQ ID NO: 839983 - RNA, 19 nt, Artificial Sequence
  Description of Artificial Sequence: Synthetic oligonucleotide
gagaacucgugguagucca

SEQ ID NO: 839984 - RNA, 19 nt, Artificial Sequence
  Description of Artificial Sequence: Synthetic oligonucleotide
agguagguagagauccugc

SEQ ID NO: 839985 - RNA, 19 nt, Artificial Sequence
  Description of Artificial Sequence: Synthetic oligonucleotide
cacuagacuccuuggguag

SEQ ID NO: 839986 - RNA, 19 nt, Artificial Sequence
  Description of Artificial Sequence: Synthetic oligonucleotide
agaugaucgcagccacggc

SEQ ID NO: 839987 - RNA, 19 nt, Artificial Sequence
  Description of Artificial Sequence: Synthetic oligonucleotide
uaacuggcguguaaacgac

SEQ ID NO: 839988 - RNA, 19 nt, Artificial Sequence
  Description of Artificial Sequence: Synthetic oligonucleotide
aaacccagccagcaagaau

SEQ ID NO: 839989 - RNA, 19 nt, Artificial Sequence
  Description of Artificial Sequence: Synthetic oligonucleotide
uacaaaccugacuuagcaa

SEQ ID NO: 839990 - RNA, 19 nt, Artificial Sequence
  Description of Artificial Sequence: Synthetic oligonucleotide
aaaaccaugccggcagaga

SEQ ID NO: 839991 - RNA, 19 nt, Artificial Sequence
  Description of Artificial Sequence: Synthetic oligonucleotide
ccugacuuagcaaugggug

SEQ ID NO: 839992 - RNA, 19 nt, Artificial Sequence
  Description of Artificial Sequence: Synthetic oligonucleotide
auugauaacuggcguguaa

SEQ ID NO: 839993 - RNA, 19 nt, Artificial Sequence
  Description of Artificial Sequence: Synthetic oligonucleotide
ucgccacacugcuagagca

SEQ ID NO: 839994 - RNA, 19 nt, Artificial Sequence
  Description of Artificial Sequence: Synthetic oligonucleotide
caaacuaauggagaaaugu

SEQ ID NO: 839995 - RNA, 19 nt, Artificial Sequence
  Description of Artificial Sequence: Synthetic oligonucleotide
ucccaaugcuguacuaugu

SEQ ID NO: 839996 - RNA, 19 nt, Artificial Sequence
  Description of Artificial Sequence: Synthetic oligonucleotide
uucguccuguaacauggcu

SEQ ID NO: 839997 - RNA, 19 nt, Artificial Sequence
  Description of Artificial Sequence: Synthetic oligonucleotide
cauauaccauucauuguga

SEQ ID NO: 839998 - RNA, 19 nt, Artificial Sequence
  Description of Artificial Sequence: Synthetic oligonucleotide
aacggguaggaacaaccuu

SEQ ID NO: 839999 - RNA, 19 nt, Artificial Sequence
  Description of Artificial Sequence: Synthetic oligonucleotide
ugucugugucaaauuauuu

SEQ ID NO: 840000 - RNA, 19 nt, Artificial Sequence
  Description of Artificial Sequence: Synthetic oligonucleotide
cucccaaugcuguacuaug

SEQ ID NO: 840001 - RNA, 19 nt, Artificial Sequence
  Description of Artificial Sequence: Synthetic oligonucleotide
guggauaaucgagaagacc

SEQ ID NO: 840002 - RNA, 19 nt, Artificial Sequence
  Description of Artificial Sequence: Synthetic oligonucleotide
  modified_base (4)..(4): a, c, u, g, unknown or other
guunucgggguuuaugccu

SEQ ID NO: 840003 - RNA, 19 nt, Artificial Sequence
  Description of Artificial Sequence: Synthetic oligonucleotide
aagaagugcagggacuaaa

SEQ ID NO: 840004 - RNA, 19 nt, Artificial Sequence
  Description of Artificial Sequence: Synthetic oligonucleotide
aaacggguaggaacaaccu

SEQ ID NO: 840005 - RNA, 19 nt, Artificial Sequence
  Description of Artificial Sequence: Synthetic oligonucleotide
agcugucccaagcaaguca

SEQ ID NO: 840006 - RNA, 19 nt, Artificial Sequence
  Description of Artificial Sequence: Synthetic oligonucleotide
augacgggcucccagccug

SEQ ID NO: 840007 - RNA, 19 nt, Artificial Sequence
  Description of Artificial Sequence: Synthetic oligonucleotide
cacugcuagagcacagaag

SEQ ID NO: 840008 - RNA, 19 nt, Artificial Sequence
  Description of Artificial Sequence: Synthetic oligonucleotide
acaauaacaccaaccauua

SEQ ID NO: 840009 - RNA, 19 nt, Artificial Sequence
  Description of Artificial Sequence: Synthetic oligonucleotide
agccaugaugccacuagac

SEQ ID NO: 840010 - RNA, 19 nt, Artificial Sequence
  Description of Artificial Sequence: Synthetic oligonucleotide
gaugaucgcagccacggcu

SEQ ID NO: 840011 - RNA, 19 nt, Artificial Sequence
  Description of Artificial Sequence: Synthetic oligonucleotide
cauuauuaucccugcagaa

SEQ ID NO: 840012 - RNA, 19 nt, Artificial Sequence
  Description of Artificial Sequence: Synthetic oligonucleotide
gguagcaggauguuuggca

SEQ ID NO: 840013 - RNA, 19 nt, Artificial Sequence
  Description of Artificial Sequence: Synthetic oligonucleotide
augccacuagacuccuugg

SEQ ID NO: 840014 - RNA, 19 nt, Artificial Sequence
  Description of Artificial Sequence: Synthetic oligonucleotide
aggagcaagagaaccuggg

SEQ ID NO: 840015 - RNA, 19 nt, Artificial Sequence
  Description of Artificial Sequence: Synthetic oligonucleotide
gccauuuauggagucaggg

SEQ ID NO: 840016 - RNA, 19 nt, Artificial Sequence
  Description of Artificial Sequence: Synthetic oligonucleotide
aucgagaagaccaguguca

SEQ ID NO: 840017 - RNA, 19 nt, Artificial Sequence
  Description of Artificial Sequence: Synthetic oligonucleotide
ccugaaccugcuuuaaagc

SEQ ID NO: 840018 - RNA, 19 nt, Artificial Sequence
  Description of Artificial Sequence: Synthetic oligonucleotide
cuacccuggcacaagccac

SEQ ID NO: 840019 - RNA, 19 nt, Artificial Sequence
  Description of Artificial Sequence: Synthetic oligonucleotide
acuaggagcaagagaaccu

SEQ ID NO: 840020 - RNA, 19 nt, Artificial Sequence
  Description of Artificial Sequence: Synthetic oligonucleotide
ccaaugcuguacuaugucc

SEQ ID NO: 840021 - RNA, 19 nt, Artificial Sequence
  Description of Artificial Sequence: Synthetic oligonucleotide
cucgugguaguccagaugu

SEQ ID NO: 840022 - RNA, 19 nt, Artificial Sequence
  Description of Artificial Sequence: Synthetic oligonucleotide
gacuuauuguucacuccug

SEQ ID NO: 840023 - RNA, 19 nt, Artificial Sequence
  Description of Artificial Sequence: Synthetic oligonucleotide
aauugccaccgauaccauu

SEQ ID NO: 840024 - RNA, 19 nt, Artificial Sequence
  Description of Artificial Sequence: Synthetic oligonucleotide
uggcccggaaccacuagga

SEQ ID NO: 840025 - RNA, 19 nt, Artificial Sequence
  Description of Artificial Sequence: Synthetic oligonucleotide
auccauuaguccccaacau

SEQ ID NO: 840026 - RNA, 19 nt, Artificial Sequence
  Description of Artificial Sequence: Synthetic oligonucleotide
cuaugucugugucaaauua

SEQ ID NO: 840027 - RNA, 19 nt, Artificial Sequence
  Description of Artificial Sequence: Synthetic oligonucleotide
uguaaacgacaaucccaac

SEQ ID NO: 840028 - RNA, 19 nt, Artificial Sequence
  Description of Artificial Sequence: Synthetic oligonucleotide
gaaccgcagacuacccugg

SEQ ID NO: 840029 - RNA, 19 nt, Artificial Sequence
  Description of Artificial Sequence: Synthetic oligonucleotide
uggaaacuuaaggccagga

SEQ ID NO: 840030 - RNA, 19 nt, Artificial Sequence
  Description of Artificial Sequence: Synthetic oligonucleotide
guguaaacgacaaucccaa

SEQ ID NO: 840031 - RNA, 19 nt, Artificial Sequence
  Description of Artificial Sequence: Synthetic oligonucleotide
accaaccauuauuaucccu

SEQ ID NO: 840032 - RNA, 19 nt, Artificial Sequence
  Description of Artificial Sequence: Synthetic oligonucleotide
gagguagguagagauccug

SEQ ID NO: 840033 - RNA, 19 nt, Artificial Sequence
  Description of Artificial Sequence: Synthetic oligonucleotide
acaaacuaauggagaaaug

SEQ ID NO: 840034 - RNA, 19 nt, Artificial Sequence
  Description of Artificial Sequence: Synthetic oligonucleotide
acucgugguaguccagaug

SEQ ID NO: 840035 - RNA, 19 nt, Artificial Sequence
  Description of Artificial Sequence: Synthetic oligonucleotide
ggcacaagccacaagccag

SEQ ID NO: 840036 - RNA, 19 nt, Artificial Sequence
  Description of Artificial Sequence: Synthetic oligonucleotide
auaauccaaauagguguca

SEQ ID NO: 840037 - RNA, 19 nt, Artificial Sequence
  Description of Artificial Sequence: Synthetic oligonucleotide
gaaguacagaguggcugag

SEQ ID NO: 840038 - RNA, 19 nt, Artificial Sequence
  Description of Artificial Sequence: Synthetic oligonucleotide
accaugccggcagagacug

SEQ ID NO: 840039 - RNA, 19 nt, Artificial Sequence
  Description of Artificial Sequence: Synthetic oligonucleotide
auauuuggggcugcagcug

SEQ ID NO: 840040 - RNA, 19 nt, Artificial Sequence
  Description of Artificial Sequence: Synthetic oligonucleotide
auuaucccugcagaagaga

SEQ ID NO: 840041 - RNA, 19 nt, Artificial Sequence
  Description of Artificial Sequence: Synthetic oligonucleotide
uaugacgggcucccagccu

SEQ ID NO: 840042 - RNA, 19 nt, Artificial Sequence
  Description of Artificial Sequence: Synthetic oligonucleotide
guccaaucuacaaaaccuc

SEQ ID NO: 840043 - RNA, 19 nt, Artificial Sequence
  Description of Artificial Sequence: Synthetic oligonucleotide
guaaaugacuggcaccaua

SEQ ID NO: 840044 - RNA, 19 nt, Artificial Sequence
  Description of Artificial Sequence: Synthetic oligonucleotide
cauuaguccccaacaucuc

SEQ ID NO: 840045 - RNA, 19 nt, Artificial Sequence
  Description of Artificial Sequence: Synthetic oligonucleotide
agaaccugggcagacuuau

SEQ ID NO: 840046 - RNA, 19 nt, Artificial Sequence
  Description of Artificial Sequence: Synthetic oligonucleotide
uggaccauccagucagcaa

SEQ ID NO: 840047 - RNA, 19 nt, Artificial Sequence
  Description of Artificial Sequence: Synthetic oligonucleotide
gaugaccauggcuguuaug

SEQ ID NO: 840048 - RNA, 19 nt, Artificial Sequence
  Description of Artificial Sequence: Synthetic oligonucleotide
gugguaguccagauguggc

SEQ ID NO: 840049 - RNA, 19 nt, Artificial Sequence
  Description of Artificial Sequence: Synthetic oligonucleotide
ggauccauuaguccccaac

SEQ ID NO: 840050 - RNA, 19 nt, Artificial Sequence
  Description of Artificial Sequence: Synthetic oligonucleotide
caucacggucuccaauaag

SEQ ID NO: 840051 - RNA, 19 nt, Artificial Sequence
  Description of Artificial Sequence: Synthetic oligonucleotide
agagagguguggccgcucu

SEQ ID NO: 840052 - RNA, 19 nt, Artificial Sequence
  Description of Artificial Sequence: Synthetic oligonucleotide
ggauaaucgagaagaccag

SEQ ID NO: 840053 - RNA, 19 nt, Artificial Sequence
  Description of Artificial Sequence: Synthetic oligonucleotide
gucgccacacugcuagagc

SEQ ID NO: 840054 - RNA, 19 nt, Artificial Sequence
  Description of Artificial Sequence: Synthetic oligonucleotide
aagaucagguggcccggaa

SEQ ID NO: 840055 - RNA, 19 nt, Artificial Sequence
  Description of Artificial Sequence: Synthetic oligonucleotide
agcaagaauggcacgagua

SEQ ID NO: 840056 - RNA, 19 nt, Artificial Sequence
  Description of Artificial Sequence: Synthetic oligonucleotide
aguccaucuucccaacauu

SEQ ID NO: 840057 - RNA, 19 nt, Artificial Sequence
  Description of Artificial Sequence: Synthetic oligonucleotide
uguccuaaacggguaggaa

SEQ ID NO: 840058 - RNA, 19 nt, Artificial Sequence
  Description of Artificial Sequence: Synthetic oligonucleotide
caaguuugggucagauaca

SEQ ID NO: 840059 - RNA, 19 nt, Artificial Sequence
  Description of Artificial Sequence: Synthetic oligonucleotide
ugaucgcagccacggcugc

SEQ ID NO: 840060 - RNA, 19 nt, Artificial Sequence
  Description of Artificial Sequence: Synthetic oligonucleotide
agucgccacacugcuagag

SEQ ID NO: 840061 - RNA, 19 nt, Artificial Sequence
  Description of Artificial Sequence: Synthetic oligonucleotide
ugcuaugcaaauggaggua

SEQ ID NO: 840062 - RNA, 19 nt, Artificial Sequence
  Description of Artificial Sequence: Synthetic oligonucleotide
acggguaggaacaaccuuu

SEQ ID NO: 840063 - RNA, 19 nt, Artificial Sequence
  Description of Artificial Sequence: Synthetic oligonucleotide
guagagauccugcuagccu

SEQ ID NO: 840064 - RNA, 19 nt, Artificial Sequence
  Description of Artificial Sequence: Synthetic oligonucleotide
cuaaacggguaggaacaac

SEQ ID NO: 840065 - RNA, 19 nt, Artificial Sequence
  Description of Artificial Sequence: Synthetic oligonucleotide
augaucgcagccacggcug

SEQ ID NO: 840066 - RNA, 19 nt, Artificial Sequence
  Description of Artificial Sequence: Synthetic oligonucleotide
caaugauuagauuccacuu

SEQ ID NO: 840067 - RNA, 19 nt, Artificial Sequence
  Description of Artificial Sequence: Synthetic oligonucleotide
gcguguaaacgacaauccc

SEQ ID NO: 840068 - RNA, 19 nt, Artificial Sequence
  Description of Artificial Sequence: Synthetic oligonucleotide
ucgugguaguccagaugug

SEQ ID NO: 840069 - RNA, 19 nt, Artificial Sequence
  Description of Artificial Sequence: Synthetic oligonucleotide
cacuuuucaauggguugag

SEQ ID NO: 840070 - RNA, 19 nt, Artificial Sequence
  Description of Artificial Sequence: Synthetic oligonucleotide
ggcaccauacuuaaaagua

SEQ ID NO: 840071 - RNA, 19 nt, Artificial Sequence
  Description of Artificial Sequence: Synthetic oligonucleotide
auguccuaaacggguagga

SEQ ID NO: 840072 - RNA, 19 nt, Artificial Sequence
  Description of Artificial Sequence: Synthetic oligonucleotide
guagguagagauccugcua

SEQ ID NO: 840073 - RNA, 19 nt, Artificial Sequence
  Description of Artificial Sequence: Synthetic oligonucleotide
uaccauucauugugauuuc

SEQ ID NO: 840074 - RNA, 19 nt, Artificial Sequence
  Description of Artificial Sequence: Synthetic oligonucleotide
gauaaucgagaagaccagu

SEQ ID NO: 840075 - RNA, 19 nt, Artificial Sequence
  Description of Artificial Sequence: Synthetic oligonucleotide
gcagauacacaacaacgaa

SEQ ID NO: 840076 - RNA, 19 nt, Artificial Sequence
  Description of Artificial Sequence: Synthetic oligonucleotide
gcaauccacagcaagguga

SEQ ID NO: 840077 - RNA, 19 nt, Artificial Sequence
  Description of Artificial Sequence: Synthetic oligonucleotide
cuucguccuguaacauggc

SEQ ID NO: 840078 - RNA, 19 nt, Artificial Sequence
  Description of Artificial Sequence: Synthetic oligonucleotide
gguagagauccugcuagcc

SEQ ID NO: 840079 - RNA, 19 nt, Artificial Sequence
  Description of Artificial Sequence: Synthetic oligonucleotide
agccagauaaagagcuuug

SEQ ID NO: 840080 - RNA, 19 nt, Artificial Sequence
  Description of Artificial Sequence: Synthetic oligonucleotide
accugacuuagcaaugggu

SEQ ID NO: 840081 - RNA, 19 nt, Artificial Sequence
  Description of Artificial Sequence: Synthetic oligonucleotide
gacuacccuggcacaagcc

SEQ ID NO: 840082 - RNA, 19 nt, Artificial Sequence
  Description of Artificial Sequence: Synthetic oligonucleotide
aguucccuuugagaccaag

SEQ ID NO: 840083 - RNA, 19 nt, Artificial Sequence
  Description of Artificial Sequence: Synthetic oligonucleotide
gcagaagagaugcaaugaa

SEQ ID NO: 840084 - RNA, 19 nt, Artificial Sequence
  Description of Artificial Sequence: Synthetic oligonucleotide
acuggcguguaaacgacaa

SEQ ID NO: 840085 - RNA, 19 nt, Artificial Sequence
  Description of Artificial Sequence: Synthetic oligonucleotide
gggugaaccgcagacuacc

SEQ ID NO: 840086 - RNA, 19 nt, Artificial Sequence
  Description of Artificial Sequence: Synthetic oligonucleotide
cccggaaccacuaggagca

SEQ ID NO: 840087 - RNA, 19 nt, Artificial Sequence
  Description of Artificial Sequence: Synthetic oligonucleotide
ucacccucacuggacagau

SEQ ID NO: 840088 - RNA, 19 nt, Artificial Sequence
  Description of Artificial Sequence: Synthetic oligonucleotide
ggugaacaccuguagcaca

SEQ ID NO: 840089 - RNA, 19 nt, Artificial Sequence
  Description of Artificial Sequence: Synthetic oligonucleotide
agggugaaccgcagacuac

SEQ ID NO: 840090 - RNA, 19 nt, Artificial Sequence
  Description of Artificial Sequence: Synthetic oligonucleotide
gcccggaaccacuaggagc

SEQ ID NO: 840091 - RNA, 19 nt, Artificial Sequence
  Description of Artificial Sequence: Synthetic oligonucleotide
cguguaaacgacaauccca

SEQ ID NO: 840092 - RNA, 19 nt, Artificial Sequence
  Description of Artificial Sequence: Synthetic oligonucleotide
agaauguccuaaacgggua

SEQ ID NO: 840093 - RNA, 19 nt, Artificial Sequence
  Description of Artificial Sequence: Synthetic oligonucleotide
aacuggcguguaaacgaca

SEQ ID NO: 840094 - RNA, 19 nt, Artificial Sequence
  Description of Artificial Sequence: Synthetic oligonucleotide
accaaguuugggucagaua

SEQ ID NO: 840095 - RNA, 19 nt, Artificial Sequence
  Description of Artificial Sequence: Synthetic oligonucleotide
augcaaauggagguaggua

SEQ ID NO: 840096 - RNA, 19 nt, Artificial Sequence
  Description of Artificial Sequence: Synthetic oligonucleotide
ugaaaacuucugucacguu

SEQ ID NO: 840097 - RNA, 19 nt, Artificial Sequence
  Description of Artificial Sequence: Synthetic oligonucleotide
accgcagacuacccuggca

SEQ ID NO: 840098 - RNA, 19 nt, Artificial Sequence
  Description of Artificial Sequence: Synthetic oligonucleotide
cugacuuagcaaugggugu

SEQ ID NO: 840099 - RNA, 19 nt, Artificial Sequence
  Description of Artificial Sequence: Synthetic oligonucleotide
uaggauccauuagucccca

SEQ ID NO: 840100 - RNA, 19 nt, Artificial Sequence
  Description of Artificial Sequence: Synthetic oligonucleotide
ccaaguugccaaugauuag

SEQ ID NO: 840101 - RNA, 19 nt, Artificial Sequence
  Description of Artificial Sequence: Synthetic oligonucleotide
ccaaauugccaccgauacc

SEQ ID NO: 840102 - RNA, 19 nt, Artificial Sequence
  Description of Artificial Sequence: Synthetic oligonucleotide
ggguaggaacaaccuuugg

SEQ ID NO: 840103 - RNA, 19 nt, Artificial Sequence
  Description of Artificial Sequence: Synthetic oligonucleotide
acagaaguacagaguggcu

SEQ ID NO: 840104 - RNA, 19 nt, Artificial Sequence
  Description of Artificial Sequence: Synthetic oligonucleotide
gcaaugaaggcagucgcca

SEQ ID NO: 840105 - RNA, 19 nt, Artificial Sequence
  Description of Artificial Sequence: Synthetic oligonucleotide
ucgucauauuuggggcugc

SEQ ID NO: 840106 - RNA, 19 nt, Artificial Sequence
  Description of Artificial Sequence: Synthetic oligonucleotide
  modified_base (5)..(5): a, c, u, g, unknown or other
cguunucgggguuuaugcc

SEQ ID NO: 840107 - RNA, 19 nt, Artificial Sequence
  Description of Artificial Sequence: Synthetic oligonucleotide
agcaaggugaacaccugua

SEQ ID NO: 840108 - RNA, 19 nt, Artificial Sequence
  Description of Artificial Sequence: Synthetic oligonucleotide
cagggaugcuaugcaaaug

SEQ ID NO: 840109 - RNA, 19 nt, Artificial Sequence
  Description of Artificial Sequence: Synthetic oligonucleotide
cuagccugaauggccacca

SEQ ID NO: 840110 - RNA, 19 nt, Artificial Sequence
  Description of Artificial Sequence: Synthetic oligonucleotide
caccaaauugccaccgaua

SEQ ID NO: 840111 - RNA, 19 nt, Artificial Sequence
  Description of Artificial Sequence: Synthetic oligonucleotide
  modified_base (2)..(2): a, c, u, g, unknown or other
unucgggguuuaugccugu

SEQ ID NO: 840112 - RNA, 19 nt, Artificial Sequence
  Description of Artificial Sequence: Synthetic oligonucleotide
aaauugccaccgauaccau

SEQ ID NO: 840113 - RNA, 19 nt, Artificial Sequence
  Description of Artificial Sequence: Synthetic oligonucleotide
ggauguuuggcagcuauua

SEQ ID NO: 840114 - RNA, 19 nt, Artificial Sequence
  Description of Artificial Sequence: Synthetic oligonucleotide
ugcuagccugaauggccac

SEQ ID NO: 840115 - RNA, 19 nt, Artificial Sequence
  Description of Artificial Sequence: Synthetic oligonucleotide
gcuagagcacagaaguaca

SEQ ID NO: 840116 - RNA, 19 nt, Artificial Sequence
  Description of Artificial Sequence: Synthetic oligonucleotide
gguagguagagauccugcu

SEQ ID NO: 840117 - RNA, 19 nt, Artificial Sequence
  Description of Artificial Sequence: Synthetic oligonucleotide
gaauuguguagaggaagau

SEQ ID NO: 840118 - RNA, 19 nt, Artificial Sequence
  Description of Artificial Sequence: Synthetic oligonucleotide
cgauaccauugauaacugg

SEQ ID NO: 840119 - RNA, 19 nt, Artificial Sequence
  Description of Artificial Sequence: Synthetic oligonucleotide
cccaaugcuguacuauguc

SEQ ID NO: 840120 - RNA, 19 nt, Artificial Sequence
  Description of Artificial Sequence: Synthetic oligonucleotide
ccgauaccauugauaacug

SEQ ID NO: 840121 - RNA, 19 nt, Artificial Sequence
  Description of Artificial Sequence: Synthetic oligonucleotide
gacaguccauccugccaaa

SEQ ID NO: 840122 - RNA, 19 nt, Artificial Sequence
  Description of Artificial Sequence: Synthetic oligonucleotide
ggagucagggugaaccgca

SEQ ID NO: 840123 - RNA, 19 nt, Artificial Sequence
  Description of Artificial Sequence: Synthetic oligonucleotide
cuccugaaccaaagaaugu

SEQ ID NO: 840124 - RNA, 19 nt, Artificial Sequence
  Description of Artificial Sequence: Synthetic oligonucleotide
cagcuauuauaauccaaau

SEQ ID NO: 840125 - RNA, 19 nt, Artificial Sequence
  Description of Artificial Sequence: Synthetic oligonucleotide
ggugaauuguguagaggaa

SEQ ID NO: 840126 - RNA, 19 nt, Artificial Sequence
  Description of Artificial Sequence: Synthetic oligonucleotide
ggguugaguccaucuuccc

SEQ ID NO: 840127 - RNA, 19 nt, Artificial Sequence
  Description of Artificial Sequence: Synthetic oligonucleotide
gcaccauacuuaaaaguaa

SEQ ID NO: 840128 - RNA, 19 nt, Artificial Sequence
  Description of Artificial Sequence: Synthetic oligonucleotide
ggaguacaaaccugacuua

SEQ ID NO: 840129 - RNA, 19 nt, Artificial Sequence
  Description of Artificial Sequence: Synthetic oligonucleotide
caacaacgaagacaacagu

SEQ ID NO: 840130 - RNA, 19 nt, Artificial Sequence
  Description of Artificial Sequence: Synthetic oligonucleotide
gaagaucagguggcccgga

SEQ ID NO: 840131 - RNA, 19 nt, Artificial Sequence
  Description of Artificial Sequence: Synthetic oligonucleotide
ggcccggaaccacuaggag

SEQ ID NO: 840132 - RNA, 19 nt, Artificial Sequence
  Description of Artificial Sequence: Synthetic oligonucleotide
ccacuugucuugcaaguga

SEQ ID NO: 840133 - RNA, 19 nt, Artificial Sequence
  Description of Artificial Sequence: Synthetic oligonucleotide
ccugggugaccccacaaca

SEQ ID NO: 840134 - RNA, 19 nt, Artificial Sequence
  Description of Artificial Sequence: Synthetic oligonucleotide
caguaguuauagcuggcau

SEQ ID NO: 840135 - RNA, 19 nt, Artificial Sequence
  Description of Artificial Sequence: Synthetic oligonucleotide
cagcacauauaccauucau

SEQ ID NO: 840136 - RNA, 19 nt, Artificial Sequence
  Description of Artificial Sequence: Synthetic oligonucleotide
caggauguuuggcagcuau

SEQ ID NO: 840137 - RNA, 19 nt, Artificial Sequence
  Description of Artificial Sequence: Synthetic oligonucleotide
agccaaccacuguggccug

SEQ ID NO: 840138 - RNA, 19 nt, Artificial Sequence
  Description of Artificial Sequence: Synthetic oligonucleotide
ccauuuauggagucagggu

SEQ ID NO: 840139 - RNA, 19 nt, Artificial Sequence
  Description of Artificial Sequence: Synthetic oligonucleotide
guggaccauccagucagca

SEQ ID NO: 840140 - RNA, 19 nt, Artificial Sequence
  Description of Artificial Sequence: Synthetic oligonucleotide
accucccaaugcuguacua

SEQ ID NO: 840141 - RNA, 19 nt, Artificial Sequence
  Description of Artificial Sequence: Synthetic oligonucleotide
ggcagcuauuauaauccaa

SEQ ID NO: 840142 - RNA, 19 nt, Artificial Sequence
  Description of Artificial Sequence: Synthetic oligonucleotide
gcacgaguaucugcagagc

SEQ ID NO: 840143 - RNA, 19 nt, Artificial Sequence
  Description of Artificial Sequence: Synthetic oligonucleotide
cggguaggaacaaccuuug

SEQ ID NO: 840144 - RNA, 19 nt, Artificial Sequence
  Description of Artificial Sequence: Synthetic oligonucleotide
guacuauguccaaaaccau

SEQ ID NO: 840145 - RNA, 19 nt, Artificial Sequence
  Description of Artificial Sequence: Synthetic oligonucleotide
cauccugccaaaugccauu

SEQ ID NO: 840146 - RNA, 19 nt, Artificial Sequence
  Description of Artificial Sequence: Synthetic oligonucleotide
cccaaccaaguuuggguca

SEQ ID NO: 840147 - RNA, 19 nt, Artificial Sequence
  Description of Artificial Sequence: Synthetic oligonucleotide
guccuguaacauggcugug

SEQ ID NO: 840148 - RNA, 19 nt, Artificial Sequence
  Description of Artificial Sequence: Synthetic oligonucleotide
cagcaaggugaacaccugu

SEQ ID NO: 840149 - RNA, 19 nt, Artificial Sequence
  Description of Artificial Sequence: Synthetic oligonucleotide
cauugauaacuggcgugua

SEQ ID NO: 840150 - RNA, 19 nt, Artificial Sequence
  Description of Artificial Sequence: Synthetic oligonucleotide
gccaccgauaccauugaua

SEQ ID NO: 840151 - RNA, 19 nt, Artificial Sequence
  Description of Artificial Sequence: Synthetic oligonucleotide
aggauccauuaguccccaa

SEQ ID NO: 840152 - RNA, 19 nt, Artificial Sequence
  Description of Artificial Sequence: Synthetic oligonucleotide
cuagacuccuuggguagcu

SEQ ID NO: 840153 - RNA, 19 nt, Artificial Sequence
  Description of Artificial Sequence: Synthetic oligonucleotide
  modified_base (11)..(11): a, c, u, g, unknown or other
uggccacguunucgggguu

SEQ ID NO: 840154 - RNA, 19 nt, Artificial Sequence
  Description of Artificial Sequence: Synthetic oligonucleotide
ccauugauaacuggcgugu

SEQ ID NO: 840155 - RNA, 19 nt, Artificial Sequence
  Description of Artificial Sequence: Synthetic oligonucleotide
ccuguaacauggcuguggu

SEQ ID NO: 840156 - RNA, 19 nt, Artificial Sequence
  Description of Artificial Sequence: Synthetic oligonucleotide
caauaacaccaaccauuau

SEQ ID NO: 840157 - RNA, 19 nt, Artificial Sequence
  Description of Artificial Sequence: Synthetic oligonucleotide
cguccuguaacauggcugu

SEQ ID NO: 840158 - RNA, 19 nt, Artificial Sequence
  Description of Artificial Sequence: Synthetic oligonucleotide
gccaccaaauugccaccga

SEQ ID NO: 840159 - RNA, 19 nt, Artificial Sequence
  Description of Artificial Sequence: Synthetic oligonucleotide
gccggcagagacuguucca

SEQ ID NO: 840160 - RNA, 19 nt, Artificial Sequence
  Description of Artificial Sequence: Synthetic oligonucleotide
gcgguggaccauccaguca

SEQ ID NO: 840161 - RNA, 19 nt, Artificial Sequence
  Description of Artificial Sequence: Synthetic oligonucleotide
ccgcucuucaucaggugaa

SEQ ID NO: 840162 - RNA, 19 nt, Artificial Sequence
  Description of Artificial Sequence: Synthetic oligonucleotide
caugccggcagagacuguu

SEQ ID NO: 840163 - RNA, 19 nt, Artificial Sequence
  Description of Artificial Sequence: Synthetic oligonucleotide
ccccaaugcugcugaugac

SEQ ID NO: 840164 - RNA, 19 nt, Artificial Sequence
  Description of Artificial Sequence: Synthetic oligonucleotide
cagucgccacacugcuaga

SEQ ID NO: 840165 - RNA, 19 nt, Artificial Sequence
  Description of Artificial Sequence: Synthetic oligonucleotide
cuguuaugacgggcuccca

SEQ ID NO: 840166 - RNA, 19 nt, Artificial Sequence
  Description of Artificial Sequence: Synthetic oligonucleotide
ccaacaucuccaucacggu

SEQ ID NO: 840167 - RNA, 19 nt, Artificial Sequence
  Description of Artificial Sequence: Synthetic oligonucleotide
cuggcguguaaacgacaau

SEQ ID NO: 840168 - RNA, 19 nt, Artificial Sequence
  Description of Artificial Sequence: Synthetic oligonucleotide
ccggcagagacuguuccaa

SEQ ID NO: 840169 - RNA, 19 nt, Artificial Sequence
  Description of Artificial Sequence: Synthetic oligonucleotide
cacccagcgccgucaggua

SEQ ID NO: 840170 - RNA, 19 nt, Artificial Sequence
  Description of Artificial Sequence: Synthetic oligonucleotide
ccuaaacggguaggaacaa

SEQ ID NO: 840171 - RNA, 19 nt, Artificial Sequence
  Description of Artificial Sequence: Synthetic oligonucleotide
  modified_base (9)..(9): a, c, u, g, unknown or other
gccacguunucgggguuua

SEQ ID NO: 840172 - RNA, 19 nt, Artificial Sequence
  Description of Artificial Sequence: Synthetic oligonucleotide
gaaccugggcagacuuauu

SEQ ID NO: 840173 - RNA, 19 nt, Artificial Sequence
  Description of Artificial Sequence: Synthetic oligonucleotide
ccaccaaauugccaccgau

SEQ ID NO: 840174 - RNA, 19 nt, Artificial Sequence
  Description of Artificial Sequence: Synthetic oligonucleotide
  modified_base (10)..(10): a, c, u, g, unknown or other
ggccacguunucgggguuu

SEQ ID NO: 840175 - RNA, 19 nt, Artificial Sequence
  Description of Artificial Sequence: Synthetic oligonucleotide
caauggguguggccacguu

SEQ ID NO: 840176 - RNA, 19 nt, Artificial Sequence
  Description of Artificial Sequence: Synthetic oligonucleotide
ggcagucgccacacugcua

SEQ ID NO: 840177 - RNA, 19 nt, Artificial Sequence
  Description of Artificial Sequence: Synthetic oligonucleotide
gcgccgucagguaggggau

SEQ ID NO: 840178 - RNA, 19 nt, Artificial Sequence
  Description of Artificial Sequence: Synthetic oligonucleotide
ccgucagguaggggaugga

SEQ ID NO: 840179 - RNA, 19 nt, Artificial Sequence
  Description of Artificial Sequence: Synthetic oligonucleotide
ccggaaccacuaggagcaa

SEQ ID NO: 840180 - RNA, 19 nt, Artificial Sequence
  Description of Artificial Sequence: Synthetic oligonucleotide
ccaugccggcagagacugu

SEQ ID NO: 840181 - RNA, 19 nt, Artificial Sequence
  Description of Artificial Sequence: Synthetic oligonucleotide
uauauauauauauauauag

SEQ ID NO: 840182 - RNA, 19 nt, Artificial Sequence
  Description of Artificial Sequence: Synthetic oligonucleotide
auaucaugaaauuacauuc

SEQ ID NO: 840183 - RNA, 19 nt, Artificial Sequence
  Description of Artificial Sequence: Synthetic oligonucleotide
ucuacggucauacaaacgg

SEQ ID NO: 840184 - RNA, 19 nt, Artificial Sequence
  Description of Artificial Sequence: Synthetic oligonucleotide
uuaauucucaauuuggucc

SEQ ID NO: 840185 - RNA, 19 nt, Artificial Sequence
  Description of Artificial Sequence: Synthetic oligonucleotide
uauauauauauauauauau

SEQ ID NO: 840186 - RNA, 19 nt, Artificial Sequence
  Description of Artificial Sequence: Synthetic oligonucleotide
auaacauaggaugugaagc

SEQ ID NO: 840187 - RNA, 19 nt, Artificial Sequence
  Description of Artificial Sequence: Synthetic oligonucleotide
uguauauauauauauauau

SEQ ID NO: 840188 - RNA, 19 nt, Artificial Sequence
  Description of Artificial Sequence: Synthetic oligonucleotide
uuaagagcaaaccucauca

SEQ ID NO: 840189 - RNA, 19 nt, Artificial Sequence
  Description of Artificial Sequence: Synthetic oligonucleotide
aauaacauaggaugugaag

SEQ ID NO: 840190 - RNA, 19 nt, Artificial Sequence
  Description of Artificial Sequence: Synthetic oligonucleotide
uauauauauauauaguuau

SEQ ID NO: 840191 - RNA, 19 nt, Artificial Sequence
  Description of Artificial Sequence: Synthetic oligonucleotide
acuaucaaaacauccacuc

SEQ ID NO: 840192 - RNA, 19 nt, Artificial Sequence
  Description of Artificial Sequence: Synthetic oligonucleotide
uauauauauauauauaguu

SEQ ID NO: 840193 - RNA, 19 nt, Artificial Sequence
  Description of Artificial Sequence: Synthetic oligonucleotide
agauauaggaucuugggug

SEQ ID NO: 840194 - RNA, 19 nt, Artificial Sequence
  Description of Artificial Sequence: Synthetic oligonucleotide
ugcauuuauaacuaggcug

SEQ ID NO: 840195 - RNA, 19 nt, Artificial Sequence
  Description of Artificial Sequence: Synthetic oligonucleotide
ucuggauugaaacugagaa

SEQ ID NO: 840196 - RNA, 19 nt, Artificial Sequence
  Description of Artificial Sequence: Synthetic oligonucleotide
uguguauauauauauauau

SEQ ID NO: 840197 - RNA, 19 nt, Artificial Sequence
  Description of Artificial Sequence: Synthetic oligonucleotide
auagucguuaggcaaaugg

SEQ ID NO: 840198 - RNA, 19 nt, Artificial Sequence
  Description of Artificial Sequence: Synthetic oligonucleotide
aaagcauucugaaauuggc

SEQ ID NO: 840199 - RNA, 19 nt, Artificial Sequence
  Description of Artificial Sequence: Synthetic oligonucleotide
cauaaaguaaucuucagca

SEQ ID NO: 840200 - RNA, 19 nt, Artificial Sequence
  Description of Artificial Sequence: Synthetic oligonucleotide
uagaccauguguauagucg

SEQ ID NO: 840201 - RNA, 19 nt, Artificial Sequence
  Description of Artificial Sequence: Synthetic oligonucleotide
uuaaacaagacauucccgu

SEQ ID NO: 840202 - RNA, 19 nt, Artificial Sequence
  Description of Artificial Sequence: Synthetic oligonucleotide
uuaccuauuucaaaugcag

SEQ ID NO: 840203 - RNA, 19 nt, Artificial Sequence
  Description of Artificial Sequence: Synthetic oligonucleotide
agauacugauuuuaagagc

SEQ ID NO: 840204 - RNA, 19 nt, Artificial Sequence
  Description of Artificial Sequence: Synthetic oligonucleotide
uauuaccuauuucaaaugc

SEQ ID NO: 840205 - RNA, 19 nt, Artificial Sequence
  Description of Artificial Sequence: Synthetic oligonucleotide
uugcuaauaggcuacacgc

SEQ ID NO: 840206 - RNA, 19 nt, Artificial Sequence
  Description of Artificial Sequence: Synthetic oligonucleotide
auguguauagucguuaggc

SEQ ID NO: 840207 - RNA, 19 nt, Artificial Sequence
  Description of Artificial Sequence: Synthetic oligonucleotide
aauaccuauaucaugaaau

SEQ ID NO: 840208 - RNA, 19 nt, Artificial Sequence
  Description of Artificial Sequence: Synthetic oligonucleotide
uuaaacuggcaacaaagca

SEQ ID NO: 840209 - RNA, 19 nt, Artificial Sequence
  Description of Artificial Sequence: Synthetic oligonucleotide
uacacaauggacaaaugac

SEQ ID NO: 840210 - RNA, 19 nt, Artificial Sequence
  Description of Artificial Sequence: Synthetic oligonucleotide
uugcaaaccgccaaccucg

SEQ ID NO: 840211 - RNA, 19 nt, Artificial Sequence
  Description of Artificial Sequence: Synthetic oligonucleotide
auugcuaauaggcuacacg

SEQ ID NO: 840212 - RNA, 19 nt, Artificial Sequence
  Description of Artificial Sequence: Synthetic oligonucleotide
uguguguauauauauauau

SEQ ID NO: 840213 - RNA, 19 nt, Artificial Sequence
  Description of Artificial Sequence: Synthetic oligonucleotide
agagauauaggaucuuggg

SEQ ID NO: 840214 - RNA, 19 nt, Artificial Sequence
  Description of Artificial Sequence: Synthetic oligonucleotide
gaacacaagaaguuugucc

SEQ ID NO: 840215 - RNA, 19 nt, Artificial Sequence
  Description of Artificial Sequence: Synthetic oligonucleotide
uguauauugucauggauuc

SEQ ID NO: 840216 - RNA, 19 nt, Artificial Sequence
  Description of Artificial Sequence: Synthetic oligonucleotide
aaccaugcuaggcaauggc

SEQ ID NO: 840217 - RNA, 19 nt, Artificial Sequence
  Description of Artificial Sequence: Synthetic oligonucleotide
aacaagacauucccgucac

SEQ ID NO: 840218 - RNA, 19 nt, Artificial Sequence
  Description of Artificial Sequence: Synthetic oligonucleotide
uuuuaagcguaccaguucu

SEQ ID NO: 840219 - RNA, 19 nt, Artificial Sequence
  Description of Artificial Sequence: Synthetic oligonucleotide
ucauuaaacaagacauucc

SEQ ID NO: 840220 - RNA, 19 nt, Artificial Sequence
  Description of Artificial Sequence: Synthetic oligonucleotide
cacaaauuauuguagcagg

SEQ ID NO: 840221 - RNA, 19 nt, Artificial Sequence
  Description of Artificial Sequence: Synthetic oligonucleotide
aagacuagacuauuguaga

SEQ ID NO: 840222 - RNA, 19 nt, Artificial Sequence
  Description of Artificial Sequence: Synthetic oligonucleotide
uuaagugcgguauauauuu

SEQ ID NO: 840223 - RNA, 19 nt, Artificial Sequence
  Description of Artificial Sequence: Synthetic oligonucleotide
ugcaguuuagaccaugugu

SEQ ID NO: 840224 - RNA, 19 nt, Artificial Sequence
  Description of Artificial Sequence: Synthetic oligonucleotide
cacauagugggucauaacc

SEQ ID NO: 840225 - RNA, 19 nt, Artificial Sequence
  Description of Artificial Sequence: Synthetic oligonucleotide
agaguuacucucugcauac

SEQ ID NO: 840226 - RNA, 19 nt, Artificial Sequence
  Description of Artificial Sequence: Synthetic oligonucleotide
guuuagaccauguguauag

SEQ ID NO: 840227 - RNA, 19 nt, Artificial Sequence
  Description of Artificial Sequence: Synthetic oligonucleotide
agcaagauuucacuucagc

SEQ ID NO: 840228 - RNA, 19 nt, Artificial Sequence
  Description of Artificial Sequence: Synthetic oligonucleotide
aguguucucuaucaguagg

SEQ ID NO: 840229 - RNA, 19 nt, Artificial Sequence
  Description of Artificial Sequence: Synthetic oligonucleotide
aaaauagcuccugugaacu

SEQ ID NO: 840230 - RNA, 19 nt, Artificial Sequence
  Description of Artificial Sequence: Synthetic oligonucleotide
aaggccgaugcacuguccc

SEQ ID NO: 840231 - RNA, 19 nt, Artificial Sequence
  Description of Artificial Sequence: Synthetic oligonucleotide
aaugccgacaagaaaaugu

SEQ ID NO: 840232 - RNA, 19 nt, Artificial Sequence
  Description of Artificial Sequence: Synthetic oligonucleotide
uauauauauauaguuauuu

SEQ ID NO: 840233 - RNA, 19 nt, Artificial Sequence
  Description of Artificial Sequence: Synthetic oligonucleotide
uggauugaaacugagaaau

SEQ ID NO: 840234 - RNA, 19 nt, Artificial Sequence
  Description of Artificial Sequence: Synthetic oligonucleotide
augauaucccaucugaaca

SEQ ID NO: 840235 - RNA, 19 nt, Artificial Sequence
  Description of Artificial Sequence: Synthetic oligonucleotide
ugggucauaaccagacugg

SEQ ID NO: 840236 - RNA, 19 nt, Artificial Sequence
  Description of Artificial Sequence: Synthetic oligonucleotide
caagcuuauaguagggucc

SEQ ID NO: 840237 - RNA, 19 nt, Artificial Sequence
  Description of Artificial Sequence: Synthetic oligonucleotide
ucuaucaguaggaaguuau

SEQ ID NO: 840238 - RNA, 19 nt, Artificial Sequence
  Description of Artificial Sequence: Synthetic oligonucleotide
ugugcaacucuccucgggg

SEQ ID NO: 840239 - RNA, 19 nt, Artificial Sequence
  Description of Artificial Sequence: Synthetic oligonucleotide
caauguacugagcaaaggc

SEQ ID NO: 840240 - RNA, 19 nt, Artificial Sequence
  Description of Artificial Sequence: Synthetic oligonucleotide
uaucaugaaauuacauucu

SEQ ID NO: 840241 - RNA, 19 nt, Artificial Sequence
  Description of Artificial Sequence: Synthetic oligonucleotide
uuaagcacaagcugacaag

SEQ ID NO: 840242 - RNA, 19 nt, Artificial Sequence
  Description of Artificial Sequence: Synthetic oligonucleotide
auugcaaaccgccaaccuc

SEQ ID NO: 840243 - RNA, 19 nt, Artificial Sequence
  Description of Artificial Sequence: Synthetic oligonucleotide
aauaggcuacacgcuaugc

SEQ ID NO: 840244 - RNA, 19 nt, Artificial Sequence
  Description of Artificial Sequence: Synthetic oligonucleotide
uugaagcuccgcuuuaagg

SEQ ID NO: 840245 - RNA, 19 nt, Artificial Sequence
  Description of Artificial Sequence: Synthetic oligonucleotide
agaaauugaguaugaacca

SEQ ID NO: 840246 - RNA, 19 nt, Artificial Sequence
  Description of Artificial Sequence: Synthetic oligonucleotide
uuaucuucacuccaaacuu

SEQ ID NO: 840247 - RNA, 19 nt, Artificial Sequence
  Description of Artificial Sequence: Synthetic oligonucleotide
uaauucucaauuuggucca

SEQ ID NO: 840248 - RNA, 19 nt, Artificial Sequence
  Description of Artificial Sequence: Synthetic oligonucleotide
uguuaagugcgguauauau

SEQ ID NO: 840249 - RNA, 19 nt, Artificial Sequence
  Description of Artificial Sequence: Synthetic oligonucleotide
ucaugguuaggaauuaaaa

SEQ ID NO: 840250 - RNA, 19 nt, Artificial Sequence
  Description of Artificial Sequence: Synthetic oligonucleotide
aagcaaguuuagcugagug

SEQ ID NO: 840251 - RNA, 19 nt, Artificial Sequence
  Description of Artificial Sequence: Synthetic oligonucleotide
uucucuacuguaauuauuu

SEQ ID NO: 840252 - RNA, 19 nt, Artificial Sequence
  Description of Artificial Sequence: Synthetic oligonucleotide
auaguagggucccauaaug

SEQ ID NO: 840253 - RNA, 19 nt, Artificial Sequence
  Description of Artificial Sequence: Synthetic oligonucleotide
agcaaaccucaucaugucc

SEQ ID NO: 840254 - RNA, 19 nt, Artificial Sequence
  Description of Artificial Sequence: Synthetic oligonucleotide
ucuuaauucucuacuguaa

SEQ ID NO: 840255 - RNA, 19 nt, Artificial Sequence
  Description of Artificial Sequence: Synthetic oligonucleotide
uuuaagagcaaaccucauc

SEQ ID NO: 840256 - RNA, 19 nt, Artificial Sequence
  Description of Artificial Sequence: Synthetic oligonucleotide
aacauaggggaguaggaaa

SEQ ID NO: 840257 - RNA, 19 nt, Artificial Sequence
  Description of Artificial Sequence: Synthetic oligonucleotide
guaauuauuuacugauagc

SEQ ID NO: 840258 - RNA, 19 nt, Artificial Sequence
  Description of Artificial Sequence: Synthetic oligonucleotide
auuuauaacuaggcuggcc

SEQ ID NO: 840259 - RNA, 19 nt, Artificial Sequence
  Description of Artificial Sequence: Synthetic oligonucleotide
uuauuuacugauagcuaga

SEQ ID NO: 840260 - RNA, 19 nt, Artificial Sequence
  Description of Artificial Sequence: Synthetic oligonucleotide
uuaacaauacagacauacu

SEQ ID NO: 840261 - RNA, 19 nt, Artificial Sequence
  Description of Artificial Sequence: Synthetic oligonucleotide
aagagagcgaaguaagcau

SEQ ID NO: 840262 - RNA, 19 nt, Artificial Sequence
  Description of Artificial Sequence: Synthetic oligonucleotide
agcauguuaauucucaauu

SEQ ID NO: 840263 - RNA, 19 nt, Artificial Sequence
  Description of Artificial Sequence: Synthetic oligonucleotide
gaaauugaguaugaaccag

SEQ ID NO: 840264 - RNA, 19 nt, Artificial Sequence
  Description of Artificial Sequence: Synthetic oligonucleotide
aauugaguaugaaccagag

SEQ ID NO: 840265 - RNA, 19 nt, Artificial Sequence
  Description of Artificial Sequence: Synthetic oligonucleotide
ggaaaagcaagauuguaug

SEQ ID NO: 840266 - RNA, 19 nt, Artificial Sequence
  Description of Artificial Sequence: Synthetic oligonucleotide
acccaauuuaaauaagacu

SEQ ID NO: 840267 - RNA, 19 nt, Artificial Sequence
  Description of Artificial Sequence: Synthetic oligonucleotide
uauaaaccaugcuaggcaa

SEQ ID NO: 840268 - RNA, 19 nt, Artificial Sequence
  Description of Artificial Sequence: Synthetic oligonucleotide
caugauaucccaucugaac

SEQ ID NO: 840269 - RNA, 19 nt, Artificial Sequence
  Description of Artificial Sequence: Synthetic oligonucleotide
auauauauauauauauagu

SEQ ID NO: 840270 - RNA, 19 nt, Artificial Sequence
  Description of Artificial Sequence: Synthetic oligonucleotide
aaauaccuauaucaugaaa

SEQ ID NO: 840271 - RNA, 19 nt, Artificial Sequence
  Description of Artificial Sequence: Synthetic oligonucleotide
uaucaguaggaaguuauug

SEQ ID NO: 840272 - RNA, 19 nt, Artificial Sequence
  Description of Artificial Sequence: Synthetic oligonucleotide
aauucucuacuguaauuau

SEQ ID NO: 840273 - RNA, 19 nt, Artificial Sequence
  Description of Artificial Sequence: Synthetic oligonucleotide
auucccgucacacauuuga

SEQ ID NO: 840274 - RNA, 19 nt, Artificial Sequence
  Description of Artificial Sequence: Synthetic oligonucleotide
agucuacggucauacaaac

SEQ ID NO: 840275 - RNA, 19 nt, Artificial Sequence
  Description of Artificial Sequence: Synthetic oligonucleotide
aaaccucaacucaugaaag

SEQ ID NO: 840276 - RNA, 19 nt, Artificial Sequence
  Description of Artificial Sequence: Synthetic oligonucleotide
aaaacacauacagaacacu

SEQ ID NO: 840277 - RNA, 19 nt, Artificial Sequence
  Description of Artificial Sequence: Synthetic oligonucleotide
ugauagcuagaauauuuac

SEQ ID NO: 840278 - RNA, 19 nt, Artificial Sequence
  Description of Artificial Sequence: Synthetic oligonucleotide
aagaguuacucucugcaua

SEQ ID NO: 840279 - RNA, 19 nt, Artificial Sequence
  Description of Artificial Sequence: Synthetic oligonucleotide
cagagauauaggaucuugg

SEQ ID NO: 840280 - RNA, 19 nt, Artificial Sequence
  Description of Artificial Sequence: Synthetic oligonucleotide
uauugucauggauucucgg

SEQ ID NO: 840281 - RNA, 19 nt, Artificial Sequence
  Description of Artificial Sequence: Synthetic oligonucleotide
uguguauagucguuaggca

SEQ ID NO: 840282 - RNA, 19 nt, Artificial Sequence
  Description of Artificial Sequence: Synthetic oligonucleotide
aguuauugcuaauaggcua

SEQ ID NO: 840283 - RNA, 19 nt, Artificial Sequence
  Description of Artificial Sequence: Synthetic oligonucleotide
aguaggaaguuauugcuaa

SEQ ID NO: 840284 - RNA, 19 nt, Artificial Sequence
  Description of Artificial Sequence: Synthetic oligonucleotide
ugcgguauauauuuauagu

SEQ ID NO: 840285 - RNA, 19 nt, Artificial Sequence
  Description of Artificial Sequence: Synthetic oligonucleotide
uaagcacaagcugacaagc

SEQ ID NO: 840286 - RNA, 19 nt, Artificial Sequence
  Description of Artificial Sequence: Synthetic oligonucleotide
ugauaucccaucugaacac

SEQ ID NO: 840287 - RNA, 19 nt, Artificial Sequence
  Description of Artificial Sequence: Synthetic oligonucleotide
ucguuaggcaaauggacug

SEQ ID NO: 840288 - RNA, 19 nt, Artificial Sequence
  Description of Artificial Sequence: Synthetic oligonucleotide
aaaauaacacauagugggu

SEQ ID NO: 840289 - RNA, 19 nt, Artificial Sequence
  Description of Artificial Sequence: Synthetic oligonucleotide
auugucauggauucucgga

SEQ ID NO: 840290 - RNA, 19 nt, Artificial Sequence
  Description of Artificial Sequence: Synthetic oligonucleotide
gugcgguauauauuuauag

SEQ ID NO: 840291 - RNA, 19 nt, Artificial Sequence
  Description of Artificial Sequence: Synthetic oligonucleotide
guagacauugcaaaccgcc

SEQ ID NO: 840292 - RNA, 19 nt, Artificial Sequence
  Description of Artificial Sequence: Synthetic oligonucleotide
cuuaguugaauguagucaa

SEQ ID NO: 840293 - RNA, 19 nt, Artificial Sequence
  Description of Artificial Sequence: Synthetic oligonucleotide
auauauauauauauaguua

SEQ ID NO: 840294 - RNA, 19 nt, Artificial Sequence
  Description of Artificial Sequence: Synthetic oligonucleotide
caacuaucaaaacauccac

SEQ ID NO: 840295 - RNA, 19 nt, Artificial Sequence
  Description of Artificial Sequence: Synthetic oligonucleotide
aguaagcaugcauuuauaa

SEQ ID NO: 840296 - RNA, 19 nt, Artificial Sequence
  Description of Artificial Sequence: Synthetic oligonucleotide
acaacuaucaaaacaucca

SEQ ID NO: 840297 - RNA, 19 nt, Artificial Sequence
  Description of Artificial Sequence: Synthetic oligonucleotide
aaauugaguaugaaccaga

SEQ ID NO: 840298 - RNA, 19 nt, Artificial Sequence
  Description of Artificial Sequence: Synthetic oligonucleotide
uaguagggucccauaaugc

SEQ ID NO: 840299 - RNA, 19 nt, Artificial Sequence
  Description of Artificial Sequence: Synthetic oligonucleotide
uggccauaaaguaaucuuc

SEQ ID NO: 840300 - RNA, 19 nt, Artificial Sequence
  Description of Artificial Sequence: Synthetic oligonucleotide
uguguguguguguauauau

SEQ ID NO: 840301 - RNA, 19 nt, Artificial Sequence
  Description of Artificial Sequence: Synthetic oligonucleotide
uagucuacggucauacaaa

SEQ ID NO: 840302 - RNA, 19 nt, Artificial Sequence
  Description of Artificial Sequence: Synthetic oligonucleotide
gacaagcaaguuuagcuga

SEQ ID NO: 840303 - RNA, 19 nt, Artificial Sequence
  Description of Artificial Sequence: Synthetic oligonucleotide
uuuauaguauauacacauu

SEQ ID NO: 840304 - RNA, 19 nt, Artificial Sequence
  Description of Artificial Sequence: Synthetic oligonucleotide
aaaccgccaaccucgguca

SEQ ID NO: 840305 - RNA, 19 nt, Artificial Sequence
  Description of Artificial Sequence: Synthetic oligonucleotide
aaccucaacucaugaaaga

SEQ ID NO: 840306 - RNA, 19 nt, Artificial Sequence
  Description of Artificial Sequence: Synthetic oligonucleotide
cuaugcacggacacggaag

SEQ ID NO: 840307 - RNA, 19 nt, Artificial Sequence
  Description of Artificial Sequence: Synthetic oligonucleotide
cuaccaaacuccacuacac

SEQ ID NO: 840308 - RNA, 19 nt, Artificial Sequence
  Description of Artificial Sequence: Synthetic oligonucleotide
ugaucauucuggauugaaa

SEQ ID NO: 840309 - RNA, 19 nt, Artificial Sequence
  Description of Artificial Sequence: Synthetic oligonucleotide
aagugcgguauauauuuau

SEQ ID NO: 840310 - RNA, 19 nt, Artificial Sequence
  Description of Artificial Sequence: Synthetic oligonucleotide
acacggaagccacaauaac

SEQ ID NO: 840311 - RNA, 19 nt, Artificial Sequence
  Description of Artificial Sequence: Synthetic oligonucleotide
uuggcucacaaauuauugu

SEQ ID NO: 840312 - RNA, 19 nt, Artificial Sequence
  Description of Artificial Sequence: Synthetic oligonucleotide
aaauagcuccugugaacug

SEQ ID NO: 840313 - RNA, 19 nt, Artificial Sequence
  Description of Artificial Sequence: Synthetic oligonucleotide
caaacuccacuacacaaug

SEQ ID NO: 840314 - RNA, 19 nt, Artificial Sequence
  Description of Artificial Sequence: Synthetic oligonucleotide
guuauugcuaauaggcuac

SEQ ID NO: 840315 - RNA, 19 nt, Artificial Sequence
  Description of Artificial Sequence: Synthetic oligonucleotide
uuaagcguaccaguucucc

SEQ ID NO: 840316 - RNA, 19 nt, Artificial Sequence
  Description of Artificial Sequence: Synthetic oligonucleotide
aacuaucaaaacauccacu

SEQ ID NO: 840317 - RNA, 19 nt, Artificial Sequence
  Description of Artificial Sequence: Synthetic oligonucleotide
uagacauugcaaaccgcca

SEQ ID NO: 840318 - RNA, 19 nt, Artificial Sequence
  Description of Artificial Sequence: Synthetic oligonucleotide
augcauuuauaacuaggcu

SEQ ID NO: 840319 - RNA, 19 nt, Artificial Sequence
  Description of Artificial Sequence: Synthetic oligonucleotide
agcaagauuguauguaaaa

SEQ ID NO: 840320 - RNA, 19 nt, Artificial Sequence
  Description of Artificial Sequence: Synthetic oligonucleotide
agcaaguuuagcugaguga

SEQ ID NO: 840321 - RNA, 19 nt, Artificial Sequence
  Description of Artificial Sequence: Synthetic oligonucleotide
agacauucccgucacacau

SEQ ID NO: 840322 - RNA, 19 nt, Artificial Sequence
  Description of Artificial Sequence: Synthetic oligonucleotide
uaaacaagacauucccguc

SEQ ID NO: 840323 - RNA, 19 nt, Artificial Sequence
  Description of Artificial Sequence: Synthetic oligonucleotide
uaugaaccagaguuuugca

SEQ ID NO: 840324 - RNA, 19 nt, Artificial Sequence
  Description of Artificial Sequence: Synthetic oligonucleotide
auaggcuacacgcuaugca

SEQ ID NO: 840325 - RNA, 19 nt, Artificial Sequence
  Description of Artificial Sequence: Synthetic oligonucleotide
uuagaccauguguauaguc

SEQ ID NO: 840326 - RNA, 19 nt, Artificial Sequence
  Description of Artificial Sequence: Synthetic oligonucleotide
guucucuaucaguaggaag

SEQ ID NO: 840327 - RNA, 19 nt, Artificial Sequence
  Description of Artificial Sequence: Synthetic oligonucleotide
accugaucauucuggauug

SEQ ID NO: 840328 - RNA, 19 nt, Artificial Sequence
  Description of Artificial Sequence: Synthetic oligonucleotide
uccaguucaccacaaguua

SEQ ID NO: 840329 - RNA, 19 nt, Artificial Sequence
  Description of Artificial Sequence: Synthetic oligonucleotide
auauauauauauauauaua

SEQ ID NO: 840330 - RNA, 19 nt, Artificial Sequence
  Description of Artificial Sequence: Synthetic oligonucleotide
caaaccucaacucaugaaa

SEQ ID NO: 840331 - RNA, 19 nt, Artificial Sequence
  Description of Artificial Sequence: Synthetic oligonucleotide
acaauaacauaggauguga

SEQ ID NO: 840332 - RNA, 19 nt, Artificial Sequence
  Description of Artificial Sequence: Synthetic oligonucleotide
uucucggaugaaccaagcc

SEQ ID NO: 840333 - RNA, 19 nt, Artificial Sequence
  Description of Artificial Sequence: Synthetic oligonucleotide
uuagcugagugaugggaga

SEQ ID NO: 840334 - RNA, 19 nt, Artificial Sequence
  Description of Artificial Sequence: Synthetic oligonucleotide
accucaacucaugaaagag

SEQ ID NO: 840335 - RNA, 19 nt, Artificial Sequence
  Description of Artificial Sequence: Synthetic oligonucleotide
agaccauguguauagucgu

SEQ ID NO: 840336 - RNA, 19 nt, Artificial Sequence
  Description of Artificial Sequence: Synthetic oligonucleotide
acacgcuaugcacggacac

SEQ ID NO: 840337 - RNA, 19 nt, Artificial Sequence
  Description of Artificial Sequence: Synthetic oligonucleotide
ugcuaauaggcuacacgcu

SEQ ID NO: 840338 - RNA, 19 nt, Artificial Sequence
  Description of Artificial Sequence: Synthetic oligonucleotide
uagggucccauaaugccga

SEQ ID NO: 840339 - RNA, 19 nt, Artificial Sequence
  Description of Artificial Sequence: Synthetic oligonucleotide
guagggucccauaaugccg

SEQ ID NO: 840340 - RNA, 19 nt, Artificial Sequence
  Description of Artificial Sequence: Synthetic oligonucleotide
ucccgucacacauuugaag

SEQ ID NO: 840341 - RNA, 19 nt, Artificial Sequence
  Description of Artificial Sequence: Synthetic oligonucleotide
cuucaauucaugguuagga

SEQ ID NO: 840342 - RNA, 19 nt, Artificial Sequence
  Description of Artificial Sequence: Synthetic oligonucleotide
uggcagagauauaggaucu

SEQ ID NO: 840343 - RNA, 19 nt, Artificial Sequence
  Description of Artificial Sequence: Synthetic oligonucleotide
aagcguaccaguucuccaa

SEQ ID NO: 840344 - RNA, 19 nt, Artificial Sequence
  Description of Artificial Sequence: Synthetic oligonucleotide
aaacuccacuacacaaugg

SEQ ID NO: 840345 - RNA, 19 nt, Artificial Sequence
  Description of Artificial Sequence: Synthetic oligonucleotide
uccggccugaucuagcaca

SEQ ID NO: 840346 - RNA, 19 nt, Artificial Sequence
  Description of Artificial Sequence: Synthetic oligonucleotide
uaaauaccuauaucaugaa

SEQ ID NO: 840347 - RNA, 19 nt, Artificial Sequence
  Description of Artificial Sequence: Synthetic oligonucleotide
caagacauucccgucacac

SEQ ID NO: 840348 - RNA, 19 nt, Artificial Sequence
  Description of Artificial Sequence: Synthetic oligonucleotide
acacauagugggucauaac

SEQ ID NO: 840349 - RNA, 19 nt, Artificial Sequence
  Description of Artificial Sequence: Synthetic oligonucleotide
caaaccgccaaccucgguc

SEQ ID NO: 840350 - RNA, 19 nt, Artificial Sequence
  Description of Artificial Sequence: Synthetic oligonucleotide
uagacucaguuagauacug

SEQ ID NO: 840351 - RNA, 19 nt, Artificial Sequence
  Description of Artificial Sequence: Synthetic oligonucleotide
uguccucucuuaauucucu

SEQ ID NO: 840352 - RNA, 19 nt, Artificial Sequence
  Description of Artificial Sequence: Synthetic oligonucleotide
aauucucaauuugguccac

SEQ ID NO: 840353 - RNA, 19 nt, Artificial Sequence
  Description of Artificial Sequence: Synthetic oligonucleotide
gaaguguucucuaucagua

SEQ ID NO: 840354 - RNA, 19 nt, Artificial Sequence
  Description of Artificial Sequence: Synthetic oligonucleotide
auguauauugucauggauu

SEQ ID NO: 840355 - RNA, 19 nt, Artificial Sequence
  Description of Artificial Sequence: Synthetic oligonucleotide
cuggacaccccuuaguuga

SEQ ID NO: 840356 - RNA, 19 nt, Artificial Sequence
  Description of Artificial Sequence: Synthetic oligonucleotide
guagugaugugugugugug

SEQ ID NO: 840357 - RNA, 19 nt, Artificial Sequence
  Description of Artificial Sequence: Synthetic oligonucleotide
aguagacauugcaaaccgc

SEQ ID NO: 840358 - RNA, 19 nt, Artificial Sequence
  Description of Artificial Sequence: Synthetic oligonucleotide
cuagucuacggucauacaa

SEQ ID NO: 840359 - RNA, 19 nt, Artificial Sequence
  Description of Artificial Sequence: Synthetic oligonucleotide
guauauauauauauauaua

SEQ ID NO: 840360 - RNA, 19 nt, Artificial Sequence
  Description of Artificial Sequence: Synthetic oligonucleotide
acugauagcuagaauauuu

SEQ ID NO: 840361 - RNA, 19 nt, Artificial Sequence
  Description of Artificial Sequence: Synthetic oligonucleotide
gcaacuugaguagacauug

SEQ ID NO: 840362 - RNA, 19 nt, Artificial Sequence
  Description of Artificial Sequence: Synthetic oligonucleotide
agcuccugugaacuguguc

SEQ ID NO: 840363 - RNA, 19 nt, Artificial Sequence
  Description of Artificial Sequence: Synthetic oligonucleotide
aucaugaaauuacauucuu

SEQ ID NO: 840364 - RNA, 19 nt, Artificial Sequence
  Description of Artificial Sequence: Synthetic oligonucleotide
acacaagaaguuuguccag

SEQ ID NO: 840365 - RNA, 19 nt, Artificial Sequence
  Description of Artificial Sequence: Synthetic oligonucleotide
gagauauaggaucuugggu

SEQ ID NO: 840366 - RNA, 19 nt, Artificial Sequence
  Description of Artificial Sequence: Synthetic oligonucleotide
uuuuaagagcaaaccucau

SEQ ID NO: 840367 - RNA, 19 nt, Artificial Sequence
  Description of Artificial Sequence: Synthetic oligonucleotide
aaaccaaucucagccuacu

SEQ ID NO: 840368 - RNA, 19 nt, Artificial Sequence
  Description of Artificial Sequence: Synthetic oligonucleotide
gauauaggaucuugggugu

SEQ ID NO: 840369 - RNA, 19 nt, Artificial Sequence
  Description of Artificial Sequence: Synthetic oligonucleotide
acgcuaugcacggacacgg

SEQ ID NO: 840370 - RNA, 19 nt, Artificial Sequence
  Description of Artificial Sequence: Synthetic oligonucleotide
cugaaauuggcucacaaau

SEQ ID NO: 840371 - RNA, 19 nt, Artificial Sequence
  Description of Artificial Sequence: Synthetic oligonucleotide
uccucucuuaauucucuac

SEQ ID NO: 840372 - RNA, 19 nt, Artificial Sequence
  Description of Artificial Sequence: Synthetic oligonucleotide
acauagugggucauaacca

SEQ ID NO: 840373 - RNA, 19 nt, Artificial Sequence
  Description of Artificial Sequence: Synthetic oligonucleotide
cacggaagccacaauaaca

SEQ ID NO: 840374 - RNA, 19 nt, Artificial Sequence
  Description of Artificial Sequence: Synthetic oligonucleotide
cuccaagcuuauaguaggg

SEQ ID NO: 840375 - RNA, 19 nt, Artificial Sequence
  Description of Artificial Sequence: Synthetic oligonucleotide
ccacaaguuaagcacaagc

SEQ ID NO: 840376 - RNA, 19 nt, Artificial Sequence
  Description of Artificial Sequence: Synthetic oligonucleotide
guguauagucguuaggcaa

SEQ ID NO: 840377 - RNA, 19 nt, Artificial Sequence
  Description of Artificial Sequence: Synthetic oligonucleotide
accaaucucagccuacuuu

SEQ ID NO: 840378 - RNA, 19 nt, Artificial Sequence
  Description of Artificial Sequence: Synthetic oligonucleotide
agacauugcaaaccgccaa

SEQ ID NO: 840379 - RNA, 19 nt, Artificial Sequence
  Description of Artificial Sequence: Synthetic oligonucleotide
gagagcgaaguaagcaugc

SEQ ID NO: 840380 - RNA, 19 nt, Artificial Sequence
  Description of Artificial Sequence: Synthetic oligonucleotide
uaguugaauguagucaaau

SEQ ID NO: 840381 - RNA, 19 nt, Artificial Sequence
  Description of Artificial Sequence: Synthetic oligonucleotide
uauugcaguuuagaccaug

SEQ ID NO: 840382 - RNA, 19 nt, Artificial Sequence
  Description of Artificial Sequence: Synthetic oligonucleotide
agaguuuugcauggcaacu

SEQ ID NO: 840383 - RNA, 19 nt, Artificial Sequence
  Description of Artificial Sequence: Synthetic oligonucleotide
cccgucacacauuugaagc

SEQ ID NO: 840384 - RNA, 19 nt, Artificial Sequence
  Description of Artificial Sequence: Synthetic oligonucleotide
cacaagaaguuuguccagc

SEQ ID NO: 840385 - RNA, 19 nt, Artificial Sequence
  Description of Artificial Sequence: Synthetic oligonucleotide
uuauaacuaggcuggccua

SEQ ID NO: 840386 - RNA, 19 nt, Artificial Sequence
  Description of Artificial Sequence: Synthetic oligonucleotide
ggucauacaaacggaauac

SEQ ID NO: 840387 - RNA, 19 nt, Artificial Sequence
  Description of Artificial Sequence: Synthetic oligonucleotide
uggcaucuaccaaacucca

SEQ ID NO: 840388 - RNA, 19 nt, Artificial Sequence
  Description of Artificial Sequence: Synthetic oligonucleotide
guagucagcaagauuucac

SEQ ID NO: 840389 - RNA, 19 nt, Artificial Sequence
  Description of Artificial Sequence: Synthetic oligonucleotide
cagauauauugcaguuuag

SEQ ID NO: 840390 - RNA, 19 nt, Artificial Sequence
  Description of Artificial Sequence: Synthetic oligonucleotide
cuacacgcuaugcacggac

SEQ ID NO: 840391 - RNA, 19 nt, Artificial Sequence
  Description of Artificial Sequence: Synthetic oligonucleotide
uuuaagcguaccaguucuc

SEQ ID NO: 840392 - RNA, 19 nt, Artificial Sequence
  Description of Artificial Sequence: Synthetic oligonucleotide
auucucggaugaaccaagc

SEQ ID NO: 840393 - RNA, 19 nt, Artificial Sequence
  Description of Artificial Sequence: Synthetic oligonucleotide
agacuagacuauuguagaa

SEQ ID NO: 840394 - RNA, 19 nt, Artificial Sequence
  Description of Artificial Sequence: Synthetic oligonucleotide
gaagcuccgcuuuaaggaa

SEQ ID NO: 840395 - RNA, 19 nt, Artificial Sequence
  Description of Artificial Sequence: Synthetic oligonucleotide
uacacgcuaugcacggaca

SEQ ID NO: 840396 - RNA, 19 nt, Artificial Sequence
  Description of Artificial Sequence: Synthetic oligonucleotide
ggccugaucuagcacaucc

SEQ ID NO: 840397 - RNA, 19 nt, Artificial Sequence
  Description of Artificial Sequence: Synthetic oligonucleotide
agagagcgaaguaagcaug

SEQ ID NO: 840398 - RNA, 19 nt, Artificial Sequence
  Description of Artificial Sequence: Synthetic oligonucleotide
cauugcagugagaacaaaa

SEQ ID NO: 840399 - RNA, 19 nt, Artificial Sequence
  Description of Artificial Sequence: Synthetic oligonucleotide
ggaugugaagcugcuauag

SEQ ID NO: 840400 - RNA, 19 nt, Artificial Sequence
  Description of Artificial Sequence: Synthetic oligonucleotide
auauauauauauaguuauu

SEQ ID NO: 840401 - RNA, 19 nt, Artificial Sequence
  Description of Artificial Sequence: Synthetic oligonucleotide
uagcuagaauauuuacuua

SEQ ID NO: 840402 - RNA, 19 nt, Artificial Sequence
  Description of Artificial Sequence: Synthetic oligonucleotide
uaaugccgacaagaaaaug

SEQ ID NO: 840403 - RNA, 19 nt, Artificial Sequence
  Description of Artificial Sequence: Synthetic oligonucleotide
aguuagauacugauuuuaa

SEQ ID NO: 840404 - RNA, 19 nt, Artificial Sequence
  Description of Artificial Sequence: Synthetic oligonucleotide
ugauguguguguguguaua

SEQ ID NO: 840405 - RNA, 19 nt, Artificial Sequence
  Description of Artificial Sequence: Synthetic oligonucleotide
caaguuuagcugagugaug

SEQ ID NO: 840406 - RNA, 19 nt, Artificial Sequence
  Description of Artificial Sequence: Synthetic oligonucleotide
uccaagcuuauaguagggu

SEQ ID NO: 840407 - RNA, 19 nt, Artificial Sequence
  Description of Artificial Sequence: Synthetic oligonucleotide
uguucucuaucaguaggaa

SEQ ID NO: 840408 - RNA, 19 nt, Artificial Sequence
  Description of Artificial Sequence: Synthetic oligonucleotide
auaaccagacugguuuuca

SEQ ID NO: 840409 - RNA, 19 nt, Artificial Sequence
  Description of Artificial Sequence: Synthetic oligonucleotide
uuuagaccauguguauagu

SEQ ID NO: 840410 - RNA, 19 nt, Artificial Sequence
  Description of Artificial Sequence: Synthetic oligonucleotide
uuauugcuaauaggcuaca

SEQ ID NO: 840411 - RNA, 19 nt, Artificial Sequence
  Description of Artificial Sequence: Synthetic oligonucleotide
agugaugugugugugugua

SEQ ID NO: 840412 - RNA, 19 nt, Artificial Sequence
  Description of Artificial Sequence: Synthetic oligonucleotide
aguagucagcaagauuuca

SEQ ID NO: 840413 - RNA, 19 nt, Artificial Sequence
  Description of Artificial Sequence: Synthetic oligonucleotide
cugugcaacucuccucggg

SEQ ID NO: 840414 - RNA, 19 nt, Artificial Sequence
  Description of Artificial Sequence: Synthetic oligonucleotide
agcgaaguaagcaugcauu

SEQ ID NO: 840415 - RNA, 19 nt, Artificial Sequence
  Description of Artificial Sequence: Synthetic oligonucleotide
guguauauauauauauaua

SEQ ID NO: 840416 - RNA, 19 nt, Artificial Sequence
  Description of Artificial Sequence: Synthetic oligonucleotide
uauugcuaauaggcuacac

SEQ ID NO: 840417 - RNA, 19 nt, Artificial Sequence
  Description of Artificial Sequence: Synthetic oligonucleotide
cugauagcuagaauauuua

SEQ ID NO: 840418 - RNA, 19 nt, Artificial Sequence
  Description of Artificial Sequence: Synthetic oligonucleotide
ccaagcuuauaguaggguc

SEQ ID NO: 840419 - RNA, 19 nt, Artificial Sequence
  Description of Artificial Sequence: Synthetic oligonucleotide
ugccgacaagaaaauguau

SEQ ID NO: 840420 - RNA, 19 nt, Artificial Sequence
  Description of Artificial Sequence: Synthetic oligonucleotide
gacacggaagccacaauaa

SEQ ID NO: 840421 - RNA, 19 nt, Artificial Sequence
  Description of Artificial Sequence: Synthetic oligonucleotide
gucuacggucauacaaacg

SEQ ID NO: 840422 - RNA, 19 nt, Artificial Sequence
  Description of Artificial Sequence: Synthetic oligonucleotide
uaagugcgguauauauuua

SEQ ID NO: 840423 - RNA, 19 nt, Artificial Sequence
  Description of Artificial Sequence: Synthetic oligonucleotide
cauuuauaacuaggcuggc

SEQ ID NO: 840424 - RNA, 19 nt, Artificial Sequence
  Description of Artificial Sequence: Synthetic oligonucleotide
cuauagugcugguguuagc

SEQ ID NO: 840425 - RNA, 19 nt, Artificial Sequence
  Description of Artificial Sequence: Synthetic oligonucleotide
gaugcacugucccuuacau

SEQ ID NO: 840426 - RNA, 19 nt, Artificial Sequence
  Description of Artificial Sequence: Synthetic oligonucleotide
aagcaagauuguauguaaa

SEQ ID NO: 840427 - RNA, 19 nt, Artificial Sequence
  Description of Artificial Sequence: Synthetic oligonucleotide
aggcuacacgcuaugcacg

SEQ ID NO: 840428 - RNA, 19 nt, Artificial Sequence
  Description of Artificial Sequence: Synthetic oligonucleotide
cuggauugaaacugagaaa

SEQ ID NO: 840429 - RNA, 19 nt, Artificial Sequence
  Description of Artificial Sequence: Synthetic oligonucleotide
ggcaauggcacaugaagaa

SEQ ID NO: 840430 - RNA, 19 nt, Artificial Sequence
  Description of Artificial Sequence: Synthetic oligonucleotide
aguuuagaccauguguaua

SEQ ID NO: 840431 - RNA, 19 nt, Artificial Sequence
  Description of Artificial Sequence: Synthetic oligonucleotide
auaaugccgacaagaaaau

SEQ ID NO: 840432 - RNA, 19 nt, Artificial Sequence
  Description of Artificial Sequence: Synthetic oligonucleotide
uaacuaggcuggccuaguc

SEQ ID NO: 840433 - RNA, 19 nt, Artificial Sequence
  Description of Artificial Sequence: Synthetic oligonucleotide
acagacauacuggguaaga

SEQ ID NO: 840434 - RNA, 19 nt, Artificial Sequence
  Description of Artificial Sequence: Synthetic oligonucleotide
aaguaagcaugcauuuaua

SEQ ID NO: 840435 - RNA, 19 nt, Artificial Sequence
  Description of Artificial Sequence: Synthetic oligonucleotide
aaccaaucucagccuacuu

SEQ ID NO: 840436 - RNA, 19 nt, Artificial Sequence
  Description of Artificial Sequence: Synthetic oligonucleotide
cacgcuaugcacggacacg

SEQ ID NO: 840437 - RNA, 19 nt, Artificial Sequence
  Description of Artificial Sequence: Synthetic oligonucleotide
gaugugaagcugcuauagu

SEQ ID NO: 840438 - RNA, 19 nt, Artificial Sequence
  Description of Artificial Sequence: Synthetic oligonucleotide
uauagucguuaggcaaaug

SEQ ID NO: 840439 - RNA, 19 nt, Artificial Sequence
  Description of Artificial Sequence: Synthetic oligonucleotide
uacuugaagcuccgcuuua

SEQ ID NO: 840440 - RNA, 19 nt, Artificial Sequence
  Description of Artificial Sequence: Synthetic oligonucleotide
uagugaugugugugugugu

SEQ ID NO: 840441 - RNA, 19 nt, Artificial Sequence
  Description of Artificial Sequence: Synthetic oligonucleotide
gcugguguuagcagcaggc

SEQ ID NO: 840442 - RNA, 19 nt, Artificial Sequence
  Description of Artificial Sequence: Synthetic oligonucleotide
guguguauauauauauaua

SEQ ID NO: 840443 - RNA, 19 nt, Artificial Sequence
  Description of Artificial Sequence: Synthetic oligonucleotide
ccgcuuuaaggaaauacuc

SEQ ID NO: 840444 - RNA, 19 nt, Artificial Sequence
  Description of Artificial Sequence: Synthetic oligonucleotide
auggcaacuugaguagaca

SEQ ID NO: 840445 - RNA, 19 nt, Artificial Sequence
  Description of Artificial Sequence: Synthetic oligonucleotide
ucucuaucaguaggaaguu

SEQ ID NO: 840446 - RNA, 19 nt, Artificial Sequence
  Description of Artificial Sequence: Synthetic oligonucleotide
cuaucagcccuccggccug

SEQ ID NO: 840447 - RNA, 19 nt, Artificial Sequence
  Description of Artificial Sequence: Synthetic oligonucleotide
cucaucauguccucucuua

SEQ ID NO: 840448 - RNA, 19 nt, Artificial Sequence
  Description of Artificial Sequence: Synthetic oligonucleotide
cuggccuagucuacgguca

SEQ ID NO: 840449 - RNA, 19 nt, Artificial Sequence
  Description of Artificial Sequence: Synthetic oligonucleotide
ccauguguauagucguuag

SEQ ID NO: 840450 - RNA, 19 nt, Artificial Sequence
  Description of Artificial Sequence: Synthetic oligonucleotide
gcuaauaggcuacacgcua

SEQ ID NO: 840451 - RNA, 19 nt, Artificial Sequence
  Description of Artificial Sequence: Synthetic oligonucleotide
gcaucuaccaaacuccacu

SEQ ID NO: 840452 - RNA, 19 nt, Artificial Sequence
  Description of Artificial Sequence: Synthetic oligonucleotide
aacucaugaaagagugaua

SEQ ID NO: 840453 - RNA, 19 nt, Artificial Sequence
  Description of Artificial Sequence: Synthetic oligonucleotide
gcagagauauaggaucuug

SEQ ID NO: 840454 - RNA, 19 nt, Artificial Sequence
  Description of Artificial Sequence: Synthetic oligonucleotide
augcacggacacggaagcc

SEQ ID NO: 840455 - RNA, 19 nt, Artificial Sequence
  Description of Artificial Sequence: Synthetic oligonucleotide
ccuuaguugaauguaguca

SEQ ID NO: 840456 - RNA, 19 nt, Artificial Sequence
  Description of Artificial Sequence: Synthetic oligonucleotide
gcaguuuagaccaugugua

SEQ ID NO: 840457 - RNA, 19 nt, Artificial Sequence
  Description of Artificial Sequence: Synthetic oligonucleotide
auauaggaucuugggugug

SEQ ID NO: 840458 - RNA, 19 nt, Artificial Sequence
  Description of Artificial Sequence: Synthetic oligonucleotide
ugcuauagugcugguguua

SEQ ID NO: 840459 - RNA, 19 nt, Artificial Sequence
  Description of Artificial Sequence: Synthetic oligonucleotide
guguagugaugugugugug

SEQ ID NO: 840460 - RNA, 19 nt, Artificial Sequence
  Description of Artificial Sequence: Synthetic oligonucleotide
auaacuaggcuggccuagu

SEQ ID NO: 840461 - RNA, 19 nt, Artificial Sequence
  Description of Artificial Sequence: Synthetic oligonucleotide
uacugauagcuagaauauu

SEQ ID NO: 840462 - RNA, 19 nt, Artificial Sequence
  Description of Artificial Sequence: Synthetic oligonucleotide
aggaugugaagcugcuaua

SEQ ID NO: 840463 - RNA, 19 nt, Artificial Sequence
  Description of Artificial Sequence: Synthetic oligonucleotide
ugcccauacugagaucaac

SEQ ID NO: 840464 - RNA, 19 nt, Artificial Sequence
  Description of Artificial Sequence: Synthetic oligonucleotide
gauguguguguguguauau

SEQ ID NO: 840465 - RNA, 19 nt, Artificial Sequence
  Description of Artificial Sequence: Synthetic oligonucleotide
accauguguauagucguua

SEQ ID NO: 840466 - RNA, 19 nt, Artificial Sequence
  Description of Artificial Sequence: Synthetic oligonucleotide
agugcgguauauauuuaua

SEQ ID NO: 840467 - RNA, 19 nt, Artificial Sequence
  Description of Artificial Sequence: Synthetic oligonucleotide
augccgacaagaaaaugua

SEQ ID NO: 840468 - RNA, 19 nt, Artificial Sequence
  Description of Artificial Sequence: Synthetic oligonucleotide
gucguuaggcaaauggacu

SEQ ID NO: 840469 - RNA, 19 nt, Artificial Sequence
  Description of Artificial Sequence: Synthetic oligonucleotide
agagcgaaguaagcaugca

SEQ ID NO: 840470 - RNA, 19 nt, Artificial Sequence
  Description of Artificial Sequence: Synthetic oligonucleotide
cacuccuucaauucauggu

SEQ ID NO: 840471 - RNA, 19 nt, Artificial Sequence
  Description of Artificial Sequence: Synthetic oligonucleotide
gucccauaaugccgacaag

SEQ ID NO: 840472 - RNA, 19 nt, Artificial Sequence
  Description of Artificial Sequence: Synthetic oligonucleotide
cuaauaggcuacacgcuau

SEQ ID NO: 840473 - RNA, 19 nt, Artificial Sequence
  Description of Artificial Sequence: Synthetic oligonucleotide
gcaaguuuagcugagugau

SEQ ID NO: 840474 - RNA, 19 nt, Artificial Sequence
  Description of Artificial Sequence: Synthetic oligonucleotide
auaaaccaugcuaggcaau

SEQ ID NO: 840475 - RNA, 19 nt, Artificial Sequence
  Description of Artificial Sequence: Synthetic oligonucleotide
cacuacacaauggacaaau

SEQ ID NO: 840476 - RNA, 19 nt, Artificial Sequence
  Description of Artificial Sequence: Synthetic oligonucleotide
aagcuccgcuuuaaggaaa

SEQ ID NO: 840477 - RNA, 19 nt, Artificial Sequence
  Description of Artificial Sequence: Synthetic oligonucleotide
gagcgaaguaagcaugcau

SEQ ID NO: 840478 - RNA, 19 nt, Artificial Sequence
  Description of Artificial Sequence: Synthetic oligonucleotide
acggucauacaaacggaau

SEQ ID NO: 840479 - RNA, 19 nt, Artificial Sequence
  Description of Artificial Sequence: Synthetic oligonucleotide
uggacaccccuuaguugaa

SEQ ID NO: 840480 - RNA, 19 nt, Artificial Sequence
  Description of Artificial Sequence: Synthetic oligonucleotide
guguguguauauauauaua

SEQ ID NO: 840481 - RNA, 19 nt, Artificial Sequence
  Description of Artificial Sequence: Synthetic oligonucleotide
cccuuaguugaauguaguc

SEQ ID NO: 840482 - RNA, 19 nt, Artificial Sequence
  Description of Artificial Sequence: Synthetic oligonucleotide
auacugauuuuaagagcaa

SEQ ID NO: 840483 - RNA, 19 nt, Artificial Sequence
  Description of Artificial Sequence: Synthetic oligonucleotide
acggacacggaagccacaa

SEQ ID NO: 840484 - RNA, 19 nt, Artificial Sequence
  Description of Artificial Sequence: Synthetic oligonucleotide
auguguguguguguauaua

SEQ ID NO: 840485 - RNA, 19 nt, Artificial Sequence
  Description of Artificial Sequence: Synthetic oligonucleotide
gcauacuugaagcuccgcu

SEQ ID NO: 840486 - RNA, 19 nt, Artificial Sequence
  Description of Artificial Sequence: Synthetic oligonucleotide
cccaauaauuaaacuggca

SEQ ID NO: 840487 - RNA, 19 nt, Artificial Sequence
  Description of Artificial Sequence: Synthetic oligonucleotide
agcugacaagcaaguuuag

SEQ ID NO: 840488 - RNA, 19 nt, Artificial Sequence
  Description of Artificial Sequence: Synthetic oligonucleotide
cauucccgucacacauuug

SEQ ID NO: 840489 - RNA, 19 nt, Artificial Sequence
  Description of Artificial Sequence: Synthetic oligonucleotide
gcuaggcaauggcacauga

SEQ ID NO: 840490 - RNA, 19 nt, Artificial Sequence
  Description of Artificial Sequence: Synthetic oligonucleotide
cuaaguagucagcaagauu

SEQ ID NO: 840491 - RNA, 19 nt, Artificial Sequence
  Description of Artificial Sequence: Synthetic oligonucleotide
acaagcugacaagcaaguu

SEQ ID NO: 840492 - RNA, 19 nt, Artificial Sequence
  Description of Artificial Sequence: Synthetic oligonucleotide
cugaucauucuggauugaa

SEQ ID NO: 840493 - RNA, 19 nt, Artificial Sequence
  Description of Artificial Sequence: Synthetic oligonucleotide
gccgacaagaaaauguaua

SEQ ID NO: 840494 - RNA, 19 nt, Artificial Sequence
  Description of Artificial Sequence: Synthetic oligonucleotide
caggcaucagauggacaac

SEQ ID NO: 840495 - RNA, 19 nt, Artificial Sequence
  Description of Artificial Sequence: Synthetic oligonucleotide
gcuccugugaacugugucu

SEQ ID NO: 840496 - RNA, 19 nt, Artificial Sequence
  Description of Artificial Sequence: Synthetic oligonucleotide
cauugcaaaccgccaaccu

SEQ ID NO: 840497 - RNA, 19 nt, Artificial Sequence
  Description of Artificial Sequence: Synthetic oligonucleotide
gcccauacugagaucaaca

SEQ ID NO: 840498 - RNA, 19 nt, Artificial Sequence
  Description of Artificial Sequence: Synthetic oligonucleotide
guguguguguguauauaua

SEQ ID NO: 840499 - RNA, 19 nt, Artificial Sequence
  Description of Artificial Sequence: Synthetic oligonucleotide
gcuagaauauuuacuuacu

SEQ ID NO: 840500 - RNA, 19 nt, Artificial Sequence
  Description of Artificial Sequence: Synthetic oligonucleotide
gcuaugcacggacacggaa

SEQ ID NO: 840501 - RNA, 19 nt, Artificial Sequence
  Description of Artificial Sequence: Synthetic oligonucleotide
cuaucaguaggaaguuauu

SEQ ID NO: 840502 - RNA, 19 nt, Artificial Sequence
  Description of Artificial Sequence: Synthetic oligonucleotide
ccgacaagaaaauguauau

SEQ ID NO: 840503 - RNA, 19 nt, Artificial Sequence
  Description of Artificial Sequence: Synthetic oligonucleotide
ccacaauaacauaggaugu

SEQ ID NO: 840504 - RNA, 19 nt, Artificial Sequence
  Description of Artificial Sequence: Synthetic oligonucleotide
agcuccgcuuuaaggaaau

SEQ ID NO: 840505 - RNA, 19 nt, Artificial Sequence
  Description of Artificial Sequence: Synthetic oligonucleotide
cuccggccugaucuagcac

SEQ ID NO: 840506 - RNA, 19 nt, Artificial Sequence
  Description of Artificial Sequence: Synthetic oligonucleotide
gcuaucagcccuccggccu

SEQ ID NO: 840507 - RNA, 19 nt, Artificial Sequence
  Description of Artificial Sequence: Synthetic oligonucleotide
ccucucuuaauucucuacu

SEQ ID NO: 840508 - RNA, 19 nt, Artificial Sequence
  Description of Artificial Sequence: Synthetic oligonucleotide
uaucagcccuccggccuga

SEQ ID NO: 840509 - RNA, 19 nt, Artificial Sequence
  Description of Artificial Sequence: Synthetic oligonucleotide
caccccuuaguugaaugua

SEQ ID NO: 840510 - RNA, 19 nt, Artificial Sequence
  Description of Artificial Sequence: Synthetic oligonucleotide
guauagucguuaggcaaau

SEQ ID NO: 840511 - RNA, 19 nt, Artificial Sequence
  Description of Artificial Sequence: Synthetic oligonucleotide
ccaugauaucccaucugaa

SEQ ID NO: 840512 - RNA, 19 nt, Artificial Sequence
  Description of Artificial Sequence: Synthetic oligonucleotide
cgguauauauuuauaguau

SEQ ID NO: 840513 - RNA, 19 nt, Artificial Sequence
  Description of Artificial Sequence: Synthetic oligonucleotide
cucuaucaguaggaaguua

SEQ ID NO: 840514 - RNA, 19 nt, Artificial Sequence
  Description of Artificial Sequence: Synthetic oligonucleotide
ccucaacucaugaaagagu

SEQ ID NO: 840515 - RNA, 19 nt, Artificial Sequence
  Description of Artificial Sequence: Synthetic oligonucleotide
gccaaccucggucagcuau

SEQ ID NO: 840516 - RNA, 19 nt, Artificial Sequence
  Description of Artificial Sequence: Synthetic oligonucleotide
gugauguguguguguguau

SEQ ID NO: 840517 - RNA, 19 nt, Artificial Sequence
  Description of Artificial Sequence: Synthetic oligonucleotide
cggucauacaaacggaaua

SEQ ID NO: 840518 - RNA, 19 nt, Artificial Sequence
  Description of Artificial Sequence: Synthetic oligonucleotide
caagcaaguuuagcugagu

SEQ ID NO: 840519 - RNA, 19 nt, Artificial Sequence
  Description of Artificial Sequence: Synthetic oligonucleotide
gcugcccacccaauaauua

SEQ ID NO: 840520 - RNA, 19 nt, Artificial Sequence
  Description of Artificial Sequence: Synthetic oligonucleotide
gaccauguguauagucguu

SEQ ID NO: 840521 - RNA, 19 nt, Artificial Sequence
  Description of Artificial Sequence: Synthetic oligonucleotide
cuauugcuuuggccauaaa

SEQ ID NO: 840522 - RNA, 19 nt, Artificial Sequence
  Description of Artificial Sequence: Synthetic oligonucleotide
ccuagucuacggucauaca

SEQ ID NO: 840523 - RNA, 19 nt, Artificial Sequence
  Description of Artificial Sequence: Synthetic oligonucleotide
cccuccggccugaucuagc

SEQ ID NO: 840524 - RNA, 19 nt, Artificial Sequence
  Description of Artificial Sequence: Synthetic oligonucleotide
ccuccggccugaucuagca

SEQ ID NO: 840525 - RNA, 19 nt, Artificial Sequence
  Description of Artificial Sequence: Synthetic oligonucleotide
cugcuauagugcugguguu

SEQ ID NO: 840526 - RNA, 19 nt, Artificial Sequence
  Description of Artificial Sequence: Synthetic oligonucleotide
ccgaugcacugucccuuac

SEQ ID NO: 840527 - RNA, 19 nt, Artificial Sequence
  Description of Artificial Sequence: Synthetic oligonucleotide
gccgaugcacugucccuua

SEQ ID NO: 840528 - RNA, 19 nt, Artificial Sequence
  Description of Artificial Sequence: Synthetic oligonucleotide
gccugaucuagcacauccu

SEQ ID NO: 840529 - RNA, 19 nt, Artificial Sequence
  Description of Artificial Sequence: Synthetic oligonucleotide
gcccuccggccugaucuag

SEQ ID NO: 840530 - RNA, 19 nt, Artificial Sequence
  Description of Artificial Sequence: Synthetic oligonucleotide
ccugaucauucuggauuga

SEQ ID NO: 840531 - RNA, 19 nt, Artificial Sequence
  Description of Artificial Sequence: Synthetic oligonucleotide
gcaaauggacuggcucagu

SEQ ID NO: 840532 - RNA, 19 nt, Artificial Sequence
  Description of Artificial Sequence: Synthetic oligonucleotide
gcaaaccgccaaccucggu

SEQ ID NO: 840533 - RNA, 19 nt, Artificial Sequence
  Description of Artificial Sequence: Synthetic oligonucleotide
ggcagagauauaggaucuu

SEQ ID NO: 840534 - RNA, 19 nt, Artificial Sequence
  Description of Artificial Sequence: Synthetic oligonucleotide
cgcuaugcacggacacgga

SEQ ID NO: 840535 - RNA, 19 nt, Artificial Sequence
  Description of Artificial Sequence: Synthetic oligonucleotide
ccgccaaccucggucagcu

SEQ ID NO: 840536 - RNA, 19 nt, Artificial Sequence
  Description of Artificial Sequence: Synthetic oligonucleotide
gcuccgcuuuaaggaaaua

SEQ ID NO: 840537 - RNA, 19 nt, Artificial Sequence
  Description of Artificial Sequence: Synthetic oligonucleotide
ccggccugaucuagcacau

SEQ ID NO: 840538 - RNA, 19 nt, Artificial Sequence
  Description of Artificial Sequence: Synthetic oligonucleotide
cgccaaccucggucagcua

SEQ ID NO: 840539 - RNA, 19 nt, Artificial Sequence
  Description of Artificial Sequence: Synthetic oligonucleotide
ucaaauuuagagcaaauag

SEQ ID NO: 840540 - RNA, 19 nt, Artificial Sequence
  Description of Artificial Sequence: Synthetic oligonucleotide
aaagugaggacacucaagg

SEQ ID NO: 840541 - RNA, 19 nt, Artificial Sequence
  Description of Artificial Sequence: Synthetic oligonucleotide
cugacuuugacuuauaccc

SEQ ID NO: 840542 - RNA, 19 nt, Artificial Sequence
  Description of Artificial Sequence: Synthetic oligonucleotide
aaacauuucugccccaccc

SEQ ID NO: 840543 - RNA, 19 nt, Artificial Sequence
  Description of Artificial Sequence: Synthetic oligonucleotide
auuuagagcaaauaggucu

SEQ ID NO: 840544 - RNA, 19 nt, Artificial Sequence
  Description of Artificial Sequence: Synthetic oligonucleotide
ugagcuagaaccagcaggg

SEQ ID NO: 840545 - RNA, 19 nt, Artificial Sequence
  Description of Artificial Sequence: Synthetic oligonucleotide
aaauuuagagcaaauaggu

SEQ ID NO: 840546 - RNA, 19 nt, Artificial Sequence
  Description of Artificial Sequence: Synthetic oligonucleotide
caguuaguaaaauagauuc

SEQ ID NO: 840547 - RNA, 19 nt, Artificial Sequence
  Description of Artificial Sequence: Synthetic oligonucleotide
cuuagauuucgauaaagag

SEQ ID NO: 840548 - RNA, 19 nt, Artificial Sequence
  Description of Artificial Sequence: Synthetic oligonucleotide
agcgucaacaugcagggcc

SEQ ID NO: 840549 - RNA, 19 nt, Artificial Sequence
  Description of Artificial Sequence: Synthetic oligonucleotide
auagauucuacagaguacg

SEQ ID NO: 840550 - RNA, 19 nt, Artificial Sequence
  Description of Artificial Sequence: Synthetic oligonucleotide
uaacaugucccaaaauagg

SEQ ID NO: 840551 - RNA, 19 nt, Artificial Sequence
  Description of Artificial Sequence: Synthetic oligonucleotide
gauucuacagaguacgccc

SEQ ID NO: 840552 - RNA, 19 nt, Artificial Sequence
  Description of Artificial Sequence: Synthetic oligonucleotide
cuucgaagcacacagacag

SEQ ID NO: 840553 - RNA, 19 nt, Artificial Sequence
  Description of Artificial Sequence: Synthetic oligonucleotide
aaaguuguaccuacuuucc

SEQ ID NO: 840554 - RNA, 19 nt, Artificial Sequence
  Description of Artificial Sequence: Synthetic oligonucleotide
uuuacuccagaccaguuca

SEQ ID NO: 840555 - RNA, 19 nt, Artificial Sequence
  Description of Artificial Sequence: Synthetic oligonucleotide
uucgauaaagagcaggcca

SEQ ID NO: 840556 - RNA, 19 nt, Artificial Sequence
  Description of Artificial Sequence: Synthetic oligonucleotide
gaagcgucaacaugcaggg

SEQ ID NO: 840557 - RNA, 19 nt, Artificial Sequence
  Description of Artificial Sequence: Synthetic oligonucleotide
aauuguggggcucaaauuu

SEQ ID NO: 840558 - RNA, 19 nt, Artificial Sequence
  Description of Artificial Sequence: Synthetic oligonucleotide
acagaguacgccccuaugc

SEQ ID NO: 840559 - RNA, 19 nt, Artificial Sequence
  Description of Artificial Sequence: Synthetic oligonucleotide
uuauuuggguaacaugucc

SEQ ID NO: 840560 - RNA, 19 nt, Artificial Sequence
  Description of Artificial Sequence: Synthetic oligonucleotide
aaguuguaccuacuuuccc

SEQ ID NO: 840561 - RNA, 19 nt, Artificial Sequence
  Description of Artificial Sequence: Synthetic oligonucleotide
auuucgauaaagagcaggc

SEQ ID NO: 840562 - RNA, 19 nt, Artificial Sequence
  Description of Artificial Sequence: Synthetic oligonucleotide
uucccuuuacuccagacca

SEQ ID NO: 840563 - RNA, 19 nt, Artificial Sequence
  Description of Artificial Sequence: Synthetic oligonucleotide
gaagcuauugcuucugggc

SEQ ID NO: 840564 - RNA, 19 nt, Artificial Sequence
  Description of Artificial Sequence: Synthetic oligonucleotide
uuaagcaccuuagauuucg

SEQ ID NO: 840565 - RNA, 19 nt, Artificial Sequence
  Description of Artificial Sequence: Synthetic oligonucleotide
auuauucacaguccaaaug

SEQ ID NO: 840566 - RNA, 19 nt, Artificial Sequence
  Description of Artificial Sequence: Synthetic oligonucleotide
uuuggcacuagucccuugg

SEQ ID NO: 840567 - RNA, 19 nt, Artificial Sequence
  Description of Artificial Sequence: Synthetic oligonucleotide
ugugucuuaucuccaagcc

SEQ ID NO: 840568 - RNA, 19 nt, Artificial Sequence
  Description of Artificial Sequence: Synthetic oligonucleotide
ugcgaagcagcuuacuagg

SEQ ID NO: 840569 - RNA, 19 nt, Artificial Sequence
  Description of Artificial Sequence: Synthetic oligonucleotide
ucgauaaagagcaggccag

SEQ ID NO: 840570 - RNA, 19 nt, Artificial Sequence
  Description of Artificial Sequence: Synthetic oligonucleotide
uuguaagccagugugaucu

SEQ ID NO: 840571 - RNA, 19 nt, Artificial Sequence
  Description of Artificial Sequence: Synthetic oligonucleotide
aauuuagagcaaauagguc

SEQ ID NO: 840572 - RNA, 19 nt, Artificial Sequence
  Description of Artificial Sequence: Synthetic oligonucleotide
ugaacucuugcaaaaggga

SEQ ID NO: 840573 - RNA, 19 nt, Artificial Sequence
  Description of Artificial Sequence: Synthetic oligonucleotide
guaaaauagauucuacaga

SEQ ID NO: 840574 - RNA, 19 nt, Artificial Sequence
  Description of Artificial Sequence: Synthetic oligonucleotide
ugucucuagauguagucgc

SEQ ID NO: 840575 - RNA, 19 nt, Artificial Sequence
  Description of Artificial Sequence: Synthetic oligonucleotide
ucuuuaagcaccuuagauu

SEQ ID NO: 840576 - RNA, 19 nt, Artificial Sequence
  Description of Artificial Sequence: Synthetic oligonucleotide
guaacaugucccaaaauag

SEQ ID NO: 840577 - RNA, 19 nt, Artificial Sequence
  Description of Artificial Sequence: Synthetic oligonucleotide
aaggcuagagagaagacca

SEQ ID NO: 840578 - RNA, 19 nt, Artificial Sequence
  Description of Artificial Sequence: Synthetic oligonucleotide
uuuagagcaaauaggucuc

SEQ ID NO: 840579 - RNA, 19 nt, Artificial Sequence
  Description of Artificial Sequence: Synthetic oligonucleotide
aggucaguuaguaaaauag

SEQ ID NO: 840580 - RNA, 19 nt, Artificial Sequence
  Description of Artificial Sequence: Synthetic oligonucleotide
agauucuacagaguacgcc

SEQ ID NO: 840581 - RNA, 19 nt, Artificial Sequence
  Description of Artificial Sequence: Synthetic oligonucleotide
accuacuuucccuuuacuc

SEQ ID NO: 840582 - RNA, 19 nt, Artificial Sequence
  Description of Artificial Sequence: Synthetic oligonucleotide
ucaguuaguaaaauagauu

SEQ ID NO: 840583 - RNA, 19 nt, Artificial Sequence
  Description of Artificial Sequence: Synthetic oligonucleotide
aaaagggaauugaagcguc

SEQ ID NO: 840584 - RNA, 19 nt, Artificial Sequence
  Description of Artificial Sequence: Synthetic oligonucleotide
uguuucuuaucuaggugug

SEQ ID NO: 840585 - RNA, 19 nt, Artificial Sequence
  Description of Artificial Sequence: Synthetic oligonucleotide
cuuuuauuuggguaacaug

SEQ ID NO: 840586 - RNA, 19 nt, Artificial Sequence
  Description of Artificial Sequence: Synthetic oligonucleotide
gaauugaagcgucaacaug

SEQ ID NO: 840587 - RNA, 19 nt, Artificial Sequence
  Description of Artificial Sequence: Synthetic oligonucleotide
cuacuucccacaaacuggg

SEQ ID NO: 840588 - RNA, 19 nt, Artificial Sequence
  Description of Artificial Sequence: Synthetic oligonucleotide
aaacacaccuccugcgaag

SEQ ID NO: 840589 - RNA, 19 nt, Artificial Sequence
  Description of Artificial Sequence: Synthetic oligonucleotide
uuucuuucuacuucccaca

SEQ ID NO: 840590 - RNA, 19 nt, Artificial Sequence
  Description of Artificial Sequence: Synthetic oligonucleotide
aaugagcuagaaccagcag

SEQ ID NO: 840591 - RNA, 19 nt, Artificial Sequence
  Description of Artificial Sequence: Synthetic oligonucleotide
agcuauugcuucugggcgc

SEQ ID NO: 840592 - RNA, 19 nt, Artificial Sequence
  Description of Artificial Sequence: Synthetic oligonucleotide
uggugagccauacauggug

SEQ ID NO: 840593 - RNA, 19 nt, Artificial Sequence
  Description of Artificial Sequence: Synthetic oligonucleotide
agcaaagcuaggcacagcu

SEQ ID NO: 840594 - RNA, 19 nt, Artificial Sequence
  Description of Artificial Sequence: Synthetic oligonucleotide
ugucaaaaguuguaccuac

SEQ ID NO: 840595 - RNA, 19 nt, Artificial Sequence
  Description of Artificial Sequence: Synthetic oligonucleotide
aucccuaccuuucagagaa

SEQ ID NO: 840596 - RNA, 19 nt, Artificial Sequence
  Description of Artificial Sequence: Synthetic oligonucleotide
aguuguaccuacuuucccu

SEQ ID NO: 840597 - RNA, 19 nt, Artificial Sequence
  Description of Artificial Sequence: Synthetic oligonucleotide
aguuuuggcaggucaaugu

SEQ ID NO: 840598 - RNA, 19 nt, Artificial Sequence
  Description of Artificial Sequence: Synthetic oligonucleotide
uugucucuagauguagucg

SEQ ID NO: 840599 - RNA, 19 nt, Artificial Sequence
  Description of Artificial Sequence: Synthetic oligonucleotide
uuuggcaggucaauguuuc

SEQ ID NO: 840600 - RNA, 19 nt, Artificial Sequence
  Description of Artificial Sequence: Synthetic oligonucleotide
ucauacaugagaagaggau

SEQ ID NO: 840601 - RNA, 19 nt, Artificial Sequence
  Description of Artificial Sequence: Synthetic oligonucleotide
ucuuaucuagguguggggc

SEQ ID NO: 840602 - RNA, 19 nt, Artificial Sequence
  Description of Artificial Sequence: Synthetic oligonucleotide
uucuuaucuaggugugggg

SEQ ID NO: 840603 - RNA, 19 nt, Artificial Sequence
  Description of Artificial Sequence: Synthetic oligonucleotide
acaaagaaagaccugucua

SEQ ID NO: 840604 - RNA, 19 nt, Artificial Sequence
  Description of Artificial Sequence: Synthetic oligonucleotide
uuugacuuauacccucugu

SEQ ID NO: 840605 - RNA, 19 nt, Artificial Sequence
  Description of Artificial Sequence: Synthetic oligonucleotide
gcuggugagccauacaugg

SEQ ID NO: 840606 - RNA, 19 nt, Artificial Sequence
  Description of Artificial Sequence: Synthetic oligonucleotide
acuuauacccucugugucu

SEQ ID NO: 840607 - RNA, 19 nt, Artificial Sequence
  Description of Artificial Sequence: Synthetic oligonucleotide
caugagaagaggaucccac

SEQ ID NO: 840608 - RNA, 19 nt, Artificial Sequence
  Description of Artificial Sequence: Synthetic oligonucleotide
aaaugagcuagaaccagca

SEQ ID NO: 840609 - RNA, 19 nt, Artificial Sequence
  Description of Artificial Sequence: Synthetic oligonucleotide
aaccgccucaucuauggca

SEQ ID NO: 840610 - RNA, 19 nt, Artificial Sequence
  Description of Artificial Sequence: Synthetic oligonucleotide
ccuacuuucccuuuacucc

SEQ ID NO: 840611 - RNA, 19 nt, Artificial Sequence
  Description of Artificial Sequence: Synthetic oligonucleotide
ggucagggagaauagagag

SEQ ID NO: 840612 - RNA, 19 nt, Artificial Sequence
  Description of Artificial Sequence: Synthetic oligonucleotide
agaguacgccccuaugcac

SEQ ID NO: 840613 - RNA, 19 nt, Artificial Sequence
  Description of Artificial Sequence: Synthetic oligonucleotide
ucucgcugcaaccccacag

SEQ ID NO: 840614 - RNA, 19 nt, Artificial Sequence
  Description of Artificial Sequence: Synthetic oligonucleotide
uagugguuggugucaaaag

SEQ ID NO: 840615 - RNA, 19 nt, Artificial Sequence
  Description of Artificial Sequence: Synthetic oligonucleotide
ucgaagcacacagacaggc

SEQ ID NO: 840616 - RNA, 19 nt, Artificial Sequence
  Description of Artificial Sequence: Synthetic oligonucleotide
cauacaugagaagaggauc

SEQ ID NO: 840617 - RNA, 19 nt, Artificial Sequence
  Description of Artificial Sequence: Synthetic oligonucleotide
cuagagagaagaccaguac

SEQ ID NO: 840618 - RNA, 19 nt, Artificial Sequence
  Description of Artificial Sequence: Synthetic oligonucleotide
accacuucaauuggcagag

SEQ ID NO: 840619 - RNA, 19 nt, Artificial Sequence
  Description of Artificial Sequence: Synthetic oligonucleotide
cuugucucuagauguaguc

SEQ ID NO: 840620 - RNA, 19 nt, Artificial Sequence
  Description of Artificial Sequence: Synthetic oligonucleotide
gacuuauacccucuguguc

SEQ ID NO: 840621 - RNA, 19 nt, Artificial Sequence
  Description of Artificial Sequence: Synthetic oligonucleotide
aaagaaagaccugucuaaa

SEQ ID NO: 840622 - RNA, 19 nt, Artificial Sequence
  Description of Artificial Sequence: Synthetic oligonucleotide
uuguggggcucaaauuuag

SEQ ID NO: 840623 - RNA, 19 nt, Artificial Sequence
  Description of Artificial Sequence: Synthetic oligonucleotide
cucuagauguagucgcccg

SEQ ID NO: 840624 - RNA, 19 nt, Artificial Sequence
  Description of Artificial Sequence: Synthetic oligonucleotide
cugcgaagcagcuuacuag

SEQ ID NO: 840625 - RNA, 19 nt, Artificial Sequence
  Description of Artificial Sequence: Synthetic oligonucleotide
cugggguaagauuuccagg

SEQ ID NO: 840626 - RNA, 19 nt, Artificial Sequence
  Description of Artificial Sequence: Synthetic oligonucleotide
aggauuuucuggccugagg

SEQ ID NO: 840627 - RNA, 19 nt, Artificial Sequence
  Description of Artificial Sequence: Synthetic oligonucleotide
gagagauauagaagaguag

SEQ ID NO: 840628 - RNA, 19 nt, Artificial Sequence
  Description of Artificial Sequence: Synthetic oligonucleotide
agagagauauagaagagua

SEQ ID NO: 840629 - RNA, 19 nt, Artificial Sequence
  Description of Artificial Sequence: Synthetic oligonucleotide
ggccagauaaauuauaaaa

SEQ ID NO: 840630 - RNA, 19 nt, Artificial Sequence
  Description of Artificial Sequence: Synthetic oligonucleotide
cacggaucccagcagagcc

SEQ ID NO: 840631 - RNA, 19 nt, Artificial Sequence
  Description of Artificial Sequence: Synthetic oligonucleotide
aacucacugguccucacua

SEQ ID NO: 840632 - RNA, 19 nt, Artificial Sequence
  Description of Artificial Sequence: Synthetic oligonucleotide
ugacuuugacuuauacccu

SEQ ID NO: 840633 - RNA, 19 nt, Artificial Sequence
  Description of Artificial Sequence: Synthetic oligonucleotide
gguaacaugucccaaaaua

SEQ ID NO: 840634 - RNA, 19 nt, Artificial Sequence
  Description of Artificial Sequence: Synthetic oligonucleotide
uucgaagcacacagacagg

SEQ ID NO: 840635 - RNA, 19 nt, Artificial Sequence
  Description of Artificial Sequence: Synthetic oligonucleotide
aaaaguuuuggcaggucaa

SEQ ID NO: 840636 - RNA, 19 nt, Artificial Sequence
  Description of Artificial Sequence: Synthetic oligonucleotide
uucacggaucccagcagag

SEQ ID NO: 840637 - RNA, 19 nt, Artificial Sequence
  Description of Artificial Sequence: Synthetic oligonucleotide
auucuacagaguacgcccc

SEQ ID NO: 840638 - RNA, 19 nt, Artificial Sequence
  Description of Artificial Sequence: Synthetic oligonucleotide
uagauucuacagaguacgc

SEQ ID NO: 840639 - RNA, 19 nt, Artificial Sequence
  Description of Artificial Sequence: Synthetic oligonucleotide
gacuuugacuuauacccuc

SEQ ID NO: 840640 - RNA, 19 nt, Artificial Sequence
  Description of Artificial Sequence: Synthetic oligonucleotide
uuucgauaaagagcaggcc

SEQ ID NO: 840641 - RNA, 19 nt, Artificial Sequence
  Description of Artificial Sequence: Synthetic oligonucleotide
uacgccccuaugcacagcc

SEQ ID NO: 840642 - RNA, 19 nt, Artificial Sequence
  Description of Artificial Sequence: Synthetic oligonucleotide
uucccacaaacugggaagg

SEQ ID NO: 840643 - RNA, 19 nt, Artificial Sequence
  Description of Artificial Sequence: Synthetic oligonucleotide
cuuuacuccagaccaguuc

SEQ ID NO: 840644 - RNA, 19 nt, Artificial Sequence
  Description of Artificial Sequence: Synthetic oligonucleotide
cuuuaagcaccuuagauuu

SEQ ID NO: 840645 - RNA, 19 nt, Artificial Sequence
  Description of Artificial Sequence: Synthetic oligonucleotide
ugcuaggagcagaaugacc

SEQ ID NO: 840646 - RNA, 19 nt, Artificial Sequence
  Description of Artificial Sequence: Synthetic oligonucleotide
caaagaaagaccugucuaa

SEQ ID NO: 840647 - RNA, 19 nt, Artificial Sequence
  Description of Artificial Sequence: Synthetic oligonucleotide
cuaggcacagcuccauugc

SEQ ID NO: 840648 - RNA, 19 nt, Artificial Sequence
  Description of Artificial Sequence: Synthetic oligonucleotide
ggggcucaaauuuagagca

SEQ ID NO: 840649 - RNA, 19 nt, Artificial Sequence
  Description of Artificial Sequence: Synthetic oligonucleotide
uuucuacuucccacaaacu

SEQ ID NO: 840650 - RNA, 19 nt, Artificial Sequence
  Description of Artificial Sequence: Synthetic oligonucleotide
agcaccuuagauuucgaua

SEQ ID NO: 840651 - RNA, 19 nt, Artificial Sequence
  Description of Artificial Sequence: Synthetic oligonucleotide
uucugggcgccacaccagg

SEQ ID NO: 840652 - RNA, 19 nt, Artificial Sequence
  Description of Artificial Sequence: Synthetic oligonucleotide
accuuagauuucgauaaag

SEQ ID NO: 840653 - RNA, 19 nt, Artificial Sequence
  Description of Artificial Sequence: Synthetic oligonucleotide
uccuuguaagccaguguga

SEQ ID NO: 840654 - RNA, 19 nt, Artificial Sequence
  Description of Artificial Sequence: Synthetic oligonucleotide
uccagaccaguucagcaaa

SEQ ID NO: 840655 - RNA, 19 nt, Artificial Sequence
  Description of Artificial Sequence: Synthetic oligonucleotide
ugcagacaagugucaacag

SEQ ID NO: 840656 - RNA, 19 nt, Artificial Sequence
  Description of Artificial Sequence: Synthetic oligonucleotide
acuccagaccaguucagca

SEQ ID NO: 840657 - RNA, 19 nt, Artificial Sequence
  Description of Artificial Sequence: Synthetic oligonucleotide
uugaagcgucaacaugcag

SEQ ID NO: 840658 - RNA, 19 nt, Artificial Sequence
  Description of Artificial Sequence: Synthetic oligonucleotide
gaaccagcaggguacugac

SEQ ID NO: 840659 - RNA, 19 nt, Artificial Sequence
  Description of Artificial Sequence: Synthetic oligonucleotide
ugacagucuaccuccccug

SEQ ID NO: 840660 - RNA, 19 nt, Artificial Sequence
  Description of Artificial Sequence: Synthetic oligonucleotide
uguaccuacuuucccuuua

SEQ ID NO: 840661 - RNA, 19 nt, Artificial Sequence
  Description of Artificial Sequence: Synthetic oligonucleotide
uggggagaucuucaacccc

SEQ ID NO: 840662 - RNA, 19 nt, Artificial Sequence
  Description of Artificial Sequence: Synthetic oligonucleotide
acaggggcaccugacaguc

SEQ ID NO: 840663 - RNA, 19 nt, Artificial Sequence
  Description of Artificial Sequence: Synthetic oligonucleotide
caggauacccuuguggaac

SEQ ID NO: 840664 - RNA, 19 nt, Artificial Sequence
  Description of Artificial Sequence: Synthetic oligonucleotide
gcugcaaccccacagccag

SEQ ID NO: 840665 - RNA, 19 nt, Artificial Sequence
  Description of Artificial Sequence: Synthetic oligonucleotide
guuucuuaucuaggugugg

SEQ ID NO: 840666 - RNA, 19 nt, Artificial Sequence
  Description of Artificial Sequence: Synthetic oligonucleotide
uuuaagcaccuuagauuuc

SEQ ID NO: 840667 - RNA, 19 nt, Artificial Sequence
  Description of Artificial Sequence: Synthetic oligonucleotide
ucucuagauguagucgccc

SEQ ID NO: 840668 - RNA, 19 nt, Artificial Sequence
  Description of Artificial Sequence: Synthetic oligonucleotide
cuuaucuagguguggggca

SEQ ID NO: 840669 - RNA, 19 nt, Artificial Sequence
  Description of Artificial Sequence: Synthetic oligonucleotide
uuaucuagguguggggcac

SEQ ID NO: 840670 - RNA, 19 nt, Artificial Sequence
  Description of Artificial Sequence: Synthetic oligonucleotide
aagcaccuuagauuucgau

SEQ ID NO: 840671 - RNA, 19 nt, Artificial Sequence
  Description of Artificial Sequence: Synthetic oligonucleotide
gucagggagaauagagagg

SEQ ID NO: 840672 - RNA, 19 nt, Artificial Sequence
  Description of Artificial Sequence: Synthetic oligonucleotide
gcaccuuagauuucgauaa

SEQ ID NO: 840673 - RNA, 19 nt, Artificial Sequence
  Description of Artificial Sequence: Synthetic oligonucleotide
uguggggcucaaauuuaga

SEQ ID NO: 840674 - RNA, 19 nt, Artificial Sequence
  Description of Artificial Sequence: Synthetic oligonucleotide
aguacgccccuaugcacag

SEQ ID NO: 840675 - RNA, 19 nt, Artificial Sequence
  Description of Artificial Sequence: Synthetic oligonucleotide
cucgcugcaaccccacagc

SEQ ID NO: 840676 - RNA, 19 nt, Artificial Sequence
  Description of Artificial Sequence: Synthetic oligonucleotide
accaccuguacccguaggu

SEQ ID NO: 840677 - RNA, 19 nt, Artificial Sequence
  Description of Artificial Sequence: Synthetic oligonucleotide
aauuggcagagugcuaaaa

SEQ ID NO: 840678 - RNA, 19 nt, Artificial Sequence
  Description of Artificial Sequence: Synthetic oligonucleotide
ucccuuuacuccagaccag

SEQ ID NO: 840679 - RNA, 19 nt, Artificial Sequence
  Description of Artificial Sequence: Synthetic oligonucleotide
aucccugguccaucaugcc

SEQ ID NO: 840680 - RNA, 19 nt, Artificial Sequence
  Description of Artificial Sequence: Synthetic oligonucleotide
aggugucauacaugagaag

SEQ ID NO: 840681 - RNA, 19 nt, Artificial Sequence
  Description of Artificial Sequence: Synthetic oligonucleotide
gaccaguacacaggcacgc

SEQ ID NO: 840682 - RNA, 19 nt, Artificial Sequence
  Description of Artificial Sequence: Synthetic oligonucleotide
uaccaccuguacccguagg

SEQ ID NO: 840683 - RNA, 19 nt, Artificial Sequence
  Description of Artificial Sequence: Synthetic oligonucleotide
aagggaauugaagcgucaa

SEQ ID NO: 840684 - RNA, 19 nt, Artificial Sequence
  Description of Artificial Sequence: Synthetic oligonucleotide
gucauacaugagaagagga

SEQ ID NO: 840685 - RNA, 19 nt, Artificial Sequence
  Description of Artificial Sequence: Synthetic oligonucleotide
ggcccucaaacacugagug

SEQ ID NO: 840686 - RNA, 19 nt, Artificial Sequence
  Description of Artificial Sequence: Synthetic oligonucleotide
agcuagaaccagcagggua

SEQ ID NO: 840687 - RNA, 19 nt, Artificial Sequence
  Description of Artificial Sequence: Synthetic oligonucleotide
aaaguaggaggaaccacuu

SEQ ID NO: 840688 - RNA, 19 nt, Artificial Sequence
  Description of Artificial Sequence: Synthetic oligonucleotide
aguaggaggcaagaaagua

SEQ ID NO: 840689 - RNA, 19 nt, Artificial Sequence
  Description of Artificial Sequence: Synthetic oligonucleotide
agcuuacuaggcuuaggau

SEQ ID NO: 840690 - RNA, 19 nt, Artificial Sequence
  Description of Artificial Sequence: Synthetic oligonucleotide
caacugugcuuucagaaaa

SEQ ID NO: 840691 - RNA, 19 nt, Artificial Sequence
  Description of Artificial Sequence: Synthetic oligonucleotide
cagcuuacuaggcuuagga

SEQ ID NO: 840692 - RNA, 19 nt, Artificial Sequence
  Description of Artificial Sequence: Synthetic oligonucleotide
aagaaacccauggccagaa

SEQ ID NO: 840693 - RNA, 19 nt, Artificial Sequence
  Description of Artificial Sequence: Synthetic oligonucleotide
cuuugacuuauacccucug

SEQ ID NO: 840694 - RNA, 19 nt, Artificial Sequence
  Description of Artificial Sequence: Synthetic oligonucleotide
caauguuucuuaucuaggu

SEQ ID NO: 840695 - RNA, 19 nt, Artificial Sequence
  Description of Artificial Sequence: Synthetic oligonucleotide
ucaacaugcagggccgcca

SEQ ID NO: 840696 - RNA, 19 nt, Artificial Sequence
  Description of Artificial Sequence: Synthetic oligonucleotide
cuuacuaggcuuaggauuu

SEQ ID NO: 840697 - RNA, 19 nt, Artificial Sequence
  Description of Artificial Sequence: Synthetic oligonucleotide
gcuagaaccagcaggguac

SEQ ID NO: 840698 - RNA, 19 nt, Artificial Sequence
  Description of Artificial Sequence: Synthetic oligonucleotide
guauagaaauaucuuuuau

SEQ ID NO: 840699 - RNA, 19 nt, Artificial Sequence
  Description of Artificial Sequence: Synthetic oligonucleotide
acauuucugccccacccaa

SEQ ID NO: 840700 - RNA, 19 nt, Artificial Sequence
  Description of Artificial Sequence: Synthetic oligonucleotide
cauucacggaucccagcag

SEQ ID NO: 840701 - RNA, 19 nt, Artificial Sequence
  Description of Artificial Sequence: Synthetic oligonucleotide
aggccagauaaauuauaaa

SEQ ID NO: 840702 - RNA, 19 nt, Artificial Sequence
  Description of Artificial Sequence: Synthetic oligonucleotide
guugaggcccgccauucac

SEQ ID NO: 840703 - RNA, 19 nt, Artificial Sequence
  Description of Artificial Sequence: Synthetic oligonucleotide
gugaggacacucaaggcca

SEQ ID NO: 840704 - RNA, 19 nt, Artificial Sequence
  Description of Artificial Sequence: Synthetic oligonucleotide
uagcgccuggccuucgaag

SEQ ID NO: 840705 - RNA, 19 nt, Artificial Sequence
  Description of Artificial Sequence: Synthetic oligonucleotide
agcuugucucuagauguag

SEQ ID NO: 840706 - RNA, 19 nt, Artificial Sequence
  Description of Artificial Sequence: Synthetic oligonucleotide
aagcgucaacaugcagggc

SEQ ID NO: 840707 - RNA, 19 nt, Artificial Sequence
  Description of Artificial Sequence: Synthetic oligonucleotide
aauaauccuggggcagggu

SEQ ID NO: 840708 - RNA, 19 nt, Artificial Sequence
  Description of Artificial Sequence: Synthetic oligonucleotide
accgccucaucuauggcag

SEQ ID NO: 840709 - RNA, 19 nt, Artificial Sequence
  Description of Artificial Sequence: Synthetic oligonucleotide
ggugagccauacauggugg

SEQ ID NO: 840710 - RNA, 19 nt, Artificial Sequence
  Description of Artificial Sequence: Synthetic oligonucleotide
uuuggguaacaugucccaa

SEQ ID NO: 840711 - RNA, 19 nt, Artificial Sequence
  Description of Artificial Sequence: Synthetic oligonucleotide
uguugaggcccgccauuca

SEQ ID NO: 840712 - RNA, 19 nt, Artificial Sequence
  Description of Artificial Sequence: Synthetic oligonucleotide
cugagugcaaggcuagaga

SEQ ID NO: 840713 - RNA, 19 nt, Artificial Sequence
  Description of Artificial Sequence: Synthetic oligonucleotide
ugucccaaaauaggucagu

SEQ ID NO: 840714 - RNA, 19 nt, Artificial Sequence
  Description of Artificial Sequence: Synthetic oligonucleotide
uuggcacuagucccuuggu

SEQ ID NO: 840715 - RNA, 19 nt, Artificial Sequence
  Description of Artificial Sequence: Synthetic oligonucleotide
gagcuggugagccauacau

SEQ ID NO: 840716 - RNA, 19 nt, Artificial Sequence
  Description of Artificial Sequence: Synthetic oligonucleotide
caaauuguggggcucaaau

SEQ ID NO: 840717 - RNA, 19 nt, Artificial Sequence
  Description of Artificial Sequence: Synthetic oligonucleotide
cagaguacgccccuaugca

SEQ ID NO: 840718 - RNA, 19 nt, Artificial Sequence
  Description of Artificial Sequence: Synthetic oligonucleotide
uguacccguagguggcucu

SEQ ID NO: 840719 - RNA, 19 nt, Artificial Sequence
  Description of Artificial Sequence: Synthetic oligonucleotide
uugcccgagcccugucucg

SEQ ID NO: 840720 - RNA, 19 nt, Artificial Sequence
  Description of Artificial Sequence: Synthetic oligonucleotide
uggaugccgguuucuccag

SEQ ID NO: 840721 - RNA, 19 nt, Artificial Sequence
  Description of Artificial Sequence: Synthetic oligonucleotide
cuucaauuggcagagugcu

SEQ ID NO: 840722 - RNA, 19 nt, Artificial Sequence
  Description of Artificial Sequence: Synthetic oligonucleotide
uccaagccacuggaugccg

SEQ ID NO: 840723 - RNA, 19 nt, Artificial Sequence
  Description of Artificial Sequence: Synthetic oligonucleotide
uagucgcccggccuucuca

SEQ ID NO: 840724 - RNA, 19 nt, Artificial Sequence
  Description of Artificial Sequence: Synthetic oligonucleotide
ccuuagauuucgauaaaga

SEQ ID NO: 840725 - RNA, 19 nt, Artificial Sequence
  Description of Artificial Sequence: Synthetic oligonucleotide
gaguacgccccuaugcaca

SEQ ID NO: 840726 - RNA, 19 nt, Artificial Sequence
  Description of Artificial Sequence: Synthetic oligonucleotide
ccaucccuaccuuucagag

SEQ ID NO: 840727 - RNA, 19 nt, Artificial Sequence
  Description of Artificial Sequence: Synthetic oligonucleotide
auugaagcgucaacaugca

SEQ ID NO: 840728 - RNA, 19 nt, Artificial Sequence
  Description of Artificial Sequence: Synthetic oligonucleotide
gccuucgaagcacacagac

SEQ ID NO: 840729 - RNA, 19 nt, Artificial Sequence
  Description of Artificial Sequence: Synthetic oligonucleotide
gagggcucugaagcuauug

SEQ ID NO: 840730 - RNA, 19 nt, Artificial Sequence
  Description of Artificial Sequence: Synthetic oligonucleotide
auggcuagcgccuggccuu

SEQ ID NO: 840731 - RNA, 19 nt, Artificial Sequence
  Description of Artificial Sequence: Synthetic oligonucleotide
acuaggcuuaggauuuucu

SEQ ID NO: 840732 - RNA, 19 nt, Artificial Sequence
  Description of Artificial Sequence: Synthetic oligonucleotide
uggcacuagucccuuggua

SEQ ID NO: 840733 - RNA, 19 nt, Artificial Sequence
  Description of Artificial Sequence: Synthetic oligonucleotide
ucacggaucccagcagagc

SEQ ID NO: 840734 - RNA, 19 nt, Artificial Sequence
  Description of Artificial Sequence: Synthetic oligonucleotide
ucaugccaguguugaggcc

SEQ ID NO: 840735 - RNA, 19 nt, Artificial Sequence
  Description of Artificial Sequence: Synthetic oligonucleotide
acuuugacuuauacccucu

SEQ ID NO: 840736 - RNA, 19 nt, Artificial Sequence
  Description of Artificial Sequence: Synthetic oligonucleotide
ggucaguuaguaaaauaga

SEQ ID NO: 840737 - RNA, 19 nt, Artificial Sequence
  Description of Artificial Sequence: Synthetic oligonucleotide
ggcagcuagguagucaggc

SEQ ID NO: 840738 - RNA, 19 nt, Artificial Sequence
  Description of Artificial Sequence: Synthetic oligonucleotide
ccaaaauaauccuggggca

SEQ ID NO: 840739 - RNA, 19 nt, Artificial Sequence
  Description of Artificial Sequence: Synthetic oligonucleotide
gucucuagauguagucgcc

SEQ ID NO: 840740 - RNA, 19 nt, Artificial Sequence
  Description of Artificial Sequence: Synthetic oligonucleotide
cccuccaacacagacuggg

SEQ ID NO: 840741 - RNA, 19 nt, Artificial Sequence
  Description of Artificial Sequence: Synthetic oligonucleotide
cuccaagccacuggaugcc

SEQ ID NO: 840742 - RNA, 19 nt, Artificial Sequence
  Description of Artificial Sequence: Synthetic oligonucleotide
aggggcaccugacagucua

SEQ ID NO: 840743 - RNA, 19 nt, Artificial Sequence
  Description of Artificial Sequence: Synthetic oligonucleotide
gagugcaaggcuagagaga

SEQ ID NO: 840744 - RNA, 19 nt, Artificial Sequence
  Description of Artificial Sequence: Synthetic oligonucleotide
aacguggcagagaccauuu

SEQ ID NO: 840745 - RNA, 19 nt, Artificial Sequence
  Description of Artificial Sequence: Synthetic oligonucleotide
ggcuuaggauuuucuggcc

SEQ ID NO: 840746 - RNA, 19 nt, Artificial Sequence
  Description of Artificial Sequence: Synthetic oligonucleotide
uguagugguuggugucaaa

SEQ ID NO: 840747 - RNA, 19 nt, Artificial Sequence
  Description of Artificial Sequence: Synthetic oligonucleotide
gcuuacuaggcuuaggauu

SEQ ID NO: 840748 - RNA, 19 nt, Artificial Sequence
  Description of Artificial Sequence: Synthetic oligonucleotide
ggagcagaaugaccuugag

SEQ ID NO: 840749 - RNA, 19 nt, Artificial Sequence
  Description of Artificial Sequence: Synthetic oligonucleotide
cuaccaccuguacccguag

SEQ ID NO: 840750 - RNA, 19 nt, Artificial Sequence
  Description of Artificial Sequence: Synthetic oligonucleotide
cagcccaaugcccagaggu

SEQ ID NO: 840751 - RNA, 19 nt, Artificial Sequence
  Description of Artificial Sequence: Synthetic oligonucleotide
uaucuagguguggggcacc

SEQ ID NO: 840752 - RNA, 19 nt, Artificial Sequence
  Description of Artificial Sequence: Synthetic oligonucleotide
cugcuaggagcagaaugac

SEQ ID NO: 840753 - RNA, 19 nt, Artificial Sequence
  Description of Artificial Sequence: Synthetic oligonucleotide
agcuggugagccauacaug

SEQ ID NO: 840754 - RNA, 19 nt, Artificial Sequence
  Description of Artificial Sequence: Synthetic oligonucleotide
uuucugccccacccaaauu

SEQ ID NO: 840755 - RNA, 19 nt, Artificial Sequence
  Description of Artificial Sequence: Synthetic oligonucleotide
caucccuaccuuucagaga

SEQ ID NO: 840756 - RNA, 19 nt, Artificial Sequence
  Description of Artificial Sequence: Synthetic oligonucleotide
aggagcagaaugaccuuga

SEQ ID NO: 840757 - RNA, 19 nt, Artificial Sequence
  Description of Artificial Sequence: Synthetic oligonucleotide
auuguggggcucaaauuua

SEQ ID NO: 840758 - RNA, 19 nt, Artificial Sequence
  Description of Artificial Sequence: Synthetic oligonucleotide
cucuugcaaaagggaauug

SEQ ID NO: 840759 - RNA, 19 nt, Artificial Sequence
  Description of Artificial Sequence: Synthetic oligonucleotide
cugacucugacagagcagu

SEQ ID NO: 840760 - RNA, 19 nt, Artificial Sequence
  Description of Artificial Sequence: Synthetic oligonucleotide
uuguaccuacuuucccuuu

SEQ ID NO: 840761 - RNA, 19 nt, Artificial Sequence
  Description of Artificial Sequence: Synthetic oligonucleotide
gcugacugccaggauaccc

SEQ ID NO: 840762 - RNA, 19 nt, Artificial Sequence
  Description of Artificial Sequence: Synthetic oligonucleotide
ccucaucuauggcagcuag

SEQ ID NO: 840763 - RNA, 19 nt, Artificial Sequence
  Description of Artificial Sequence: Synthetic oligonucleotide
cuccugggguaagauuucc

SEQ ID NO: 840764 - RNA, 19 nt, Artificial Sequence
  Description of Artificial Sequence: Synthetic oligonucleotide
cuagguagucaggcagcag

SEQ ID NO: 840765 - RNA, 19 nt, Artificial Sequence
  Description of Artificial Sequence: Synthetic oligonucleotide
aagcuaggcacagcuccau

SEQ ID NO: 840766 - RNA, 19 nt, Artificial Sequence
  Description of Artificial Sequence: Synthetic oligonucleotide
acccaaauuguggggcuca

SEQ ID NO: 840767 - RNA, 19 nt, Artificial Sequence
  Description of Artificial Sequence: Synthetic oligonucleotide
acguggcagagaccauuug

SEQ ID NO: 840768 - RNA, 19 nt, Artificial Sequence
  Description of Artificial Sequence: Synthetic oligonucleotide
guuguaccuacuuucccuu

SEQ ID NO: 840769 - RNA, 19 nt, Artificial Sequence
  Description of Artificial Sequence: Synthetic oligonucleotide
cagggagaauagagaggac

SEQ ID NO: 840770 - RNA, 19 nt, Artificial Sequence
  Description of Artificial Sequence: Synthetic oligonucleotide
caaccgccucaucuauggc

SEQ ID NO: 840771 - RNA, 19 nt, Artificial Sequence
  Description of Artificial Sequence: Synthetic oligonucleotide
gcgucaacaugcagggccg

SEQ ID NO: 840772 - RNA, 19 nt, Artificial Sequence
  Description of Artificial Sequence: Synthetic oligonucleotide
cagugccacccaacugugc

SEQ ID NO: 840773 - RNA, 19 nt, Artificial Sequence
  Description of Artificial Sequence: Synthetic oligonucleotide
ccauucacggaucccagca

SEQ ID NO: 840774 - RNA, 19 nt, Artificial Sequence
  Description of Artificial Sequence: Synthetic oligonucleotide
gcuauugcuucugggcgcc

SEQ ID NO: 840775 - RNA, 19 nt, Artificial Sequence
  Description of Artificial Sequence: Synthetic oligonucleotide
cugacagucuaccuccccu

SEQ ID NO: 840776 - RNA, 19 nt, Artificial Sequence
  Description of Artificial Sequence: Synthetic oligonucleotide
accuuucagagaacucacu

SEQ ID NO: 840777 - RNA, 19 nt, Artificial Sequence
  Description of Artificial Sequence: Synthetic oligonucleotide
agucgcccggccuucucau

SEQ ID NO: 840778 - RNA, 19 nt, Artificial Sequence
  Description of Artificial Sequence: Synthetic oligonucleotide
cugaggcggaggcuucaug

SEQ ID NO: 840779 - RNA, 19 nt, Artificial Sequence
  Description of Artificial Sequence: Synthetic oligonucleotide
agaaacccauggccagaau

SEQ ID NO: 840780 - RNA, 19 nt, Artificial Sequence
  Description of Artificial Sequence: Synthetic oligonucleotide
cugcaaccccacagccagg

SEQ ID NO: 840781 - RNA, 19 nt, Artificial Sequence
  Description of Artificial Sequence: Synthetic oligonucleotide
acuagucccuugguagaaa

SEQ ID NO: 840782 - RNA, 19 nt, Artificial Sequence
  Description of Artificial Sequence: Synthetic oligonucleotide
gcaggguacugacuuugac

SEQ ID NO: 840783 - RNA, 19 nt, Artificial Sequence
  Description of Artificial Sequence: Synthetic oligonucleotide
gaguuccgcuggccugggg

SEQ ID NO: 840784 - RNA, 19 nt, Artificial Sequence
  Description of Artificial Sequence: Synthetic oligonucleotide
aucuagguguggggcacca

SEQ ID NO: 840785 - RNA, 19 nt, Artificial Sequence
  Description of Artificial Sequence: Synthetic oligonucleotide
uccugcgaagcagcuuacu

SEQ ID NO: 840786 - RNA, 19 nt, Artificial Sequence
  Description of Artificial Sequence: Synthetic oligonucleotide
gcugacucugacagagcag

SEQ ID NO: 840787 - RNA, 19 nt, Artificial Sequence
  Description of Artificial Sequence: Synthetic oligonucleotide
gcacuagucccuugguaga

SEQ ID NO: 840788 - RNA, 19 nt, Artificial Sequence
  Description of Artificial Sequence: Synthetic oligonucleotide
cauggcuagcgccuggccu

SEQ ID NO: 840789 - RNA, 19 nt, Artificial Sequence
  Description of Artificial Sequence: Synthetic oligonucleotide
uuauacccucugugucuua

SEQ ID NO: 840790 - RNA, 19 nt, Artificial Sequence
  Description of Artificial Sequence: Synthetic oligonucleotide
cacuggaugccgguuucuc

SEQ ID NO: 840791 - RNA, 19 nt, Artificial Sequence
  Description of Artificial Sequence: Synthetic oligonucleotide
ucccuaccuuucagagaac

SEQ ID NO: 840792 - RNA, 19 nt, Artificial Sequence
  Description of Artificial Sequence: Synthetic oligonucleotide
ggucaauguuucuuaucua

SEQ ID NO: 840793 - RNA, 19 nt, Artificial Sequence
  Description of Artificial Sequence: Synthetic oligonucleotide
cuccugcgaagcagcuuac

SEQ ID NO: 840794 - RNA, 19 nt, Artificial Sequence
  Description of Artificial Sequence: Synthetic oligonucleotide
uguagucgcccggccuucu

SEQ ID NO: 840795 - RNA, 19 nt, Artificial Sequence
  Description of Artificial Sequence: Synthetic oligonucleotide
agcuaggcacagcuccauu

SEQ ID NO: 840796 - RNA, 19 nt, Artificial Sequence
  Description of Artificial Sequence: Synthetic oligonucleotide
caauuggcagagugcuaaa

SEQ ID NO: 840797 - RNA, 19 nt, Artificial Sequence
  Description of Artificial Sequence: Synthetic oligonucleotide
guacccguagguggcucug

SEQ ID NO: 840798 - RNA, 19 nt, Artificial Sequence
  Description of Artificial Sequence: Synthetic oligonucleotide
cacucaaggccagauaaau

SEQ ID NO: 840799 - RNA, 19 nt, Artificial Sequence
  Description of Artificial Sequence: Synthetic oligonucleotide
uuacuaggcuuaggauuuu

SEQ ID NO: 840800 - RNA, 19 nt, Artificial Sequence
  Description of Artificial Sequence: Synthetic oligonucleotide
gucggaucucugacaaaga

SEQ ID NO: 840801 - RNA, 19 nt, Artificial Sequence
  Description of Artificial Sequence: Synthetic oligonucleotide
agcaggguacugacuuuga

SEQ ID NO: 840802 - RNA, 19 nt, Artificial Sequence
  Description of Artificial Sequence: Synthetic oligonucleotide
gcggaggcuucauggcuag

SEQ ID NO: 840803 - RNA, 19 nt, Artificial Sequence
  Description of Artificial Sequence: Synthetic oligonucleotide
ccugacagucuaccucccc

SEQ ID NO: 840804 - RNA, 19 nt, Artificial Sequence
  Description of Artificial Sequence: Synthetic oligonucleotide
uacccguagguggcucugu

SEQ ID NO: 840805 - RNA, 19 nt, Artificial Sequence
  Description of Artificial Sequence: Synthetic oligonucleotide
caccuuagauuucgauaaa

SEQ ID NO: 840806 - RNA, 19 nt, Artificial Sequence
  Description of Artificial Sequence: Synthetic oligonucleotide
acccguagguggcucugua

SEQ ID NO: 840807 - RNA, 19 nt, Artificial Sequence
  Description of Artificial Sequence: Synthetic oligonucleotide
gcaaggcuagagagaagac

SEQ ID NO: 840808 - RNA, 19 nt, Artificial Sequence
  Description of Artificial Sequence: Synthetic oligonucleotide
gcgaagcagcuuacuaggc

SEQ ID NO: 840809 - RNA, 19 nt, Artificial Sequence
  Description of Artificial Sequence: Synthetic oligonucleotide
cacuagucccuugguagaa

SEQ ID NO: 840810 - RNA, 19 nt, Artificial Sequence
  Description of Artificial Sequence: Synthetic oligonucleotide
guagucgcccggccuucuc

SEQ ID NO: 840811 - RNA, 19 nt, Artificial Sequence
  Description of Artificial Sequence: Synthetic oligonucleotide
cuuauacccucugugucuu

SEQ ID NO: 840812 - RNA, 19 nt, Artificial Sequence
  Description of Artificial Sequence: Synthetic oligonucleotide
cuaccuccccugcccuuuc

SEQ ID NO: 840813 - RNA, 19 nt, Artificial Sequence
  Description of Artificial Sequence: Synthetic oligonucleotide
cccggccuucucauuauuc

SEQ ID NO: 840814 - RNA, 19 nt, Artificial Sequence
  Description of Artificial Sequence: Synthetic oligonucleotide
cuagcgccuggccuucgaa

SEQ ID NO: 840815 - RNA, 19 nt, Artificial Sequence
  Description of Artificial Sequence: Synthetic oligonucleotide
cauugcccgagcccugucu

SEQ ID NO: 840816 - RNA, 19 nt, Artificial Sequence
  Description of Artificial Sequence: Synthetic oligonucleotide
cuacagaguacgccccuau

SEQ ID NO: 840817 - RNA, 19 nt, Artificial Sequence
  Description of Artificial Sequence: Synthetic oligonucleotide
ccugcgaagcagcuuacua

SEQ ID NO: 840818 - RNA, 19 nt, Artificial Sequence
  Description of Artificial Sequence: Synthetic oligonucleotide
cuguagugguuggugucaa

SEQ ID NO: 840819 - RNA, 19 nt, Artificial Sequence
  Description of Artificial Sequence: Synthetic oligonucleotide
ccgagcccugucucgcugc

SEQ ID NO: 840820 - RNA, 19 nt, Artificial Sequence
  Description of Artificial Sequence: Synthetic oligonucleotide
cuagaaccagcaggguacu

SEQ ID NO: 840821 - RNA, 19 nt, Artificial Sequence
  Description of Artificial Sequence: Synthetic oligonucleotide
uggcuagcgccuggccuuc

SEQ ID NO: 840822 - RNA, 19 nt, Artificial Sequence
  Description of Artificial Sequence: Synthetic oligonucleotide
ggcaccugacagucuaccu

SEQ ID NO: 840823 - RNA, 19 nt, Artificial Sequence
  Description of Artificial Sequence: Synthetic oligonucleotide
cccuaugcacagcccuccc

SEQ ID NO: 840824 - RNA, 19 nt, Artificial Sequence
  Description of Artificial Sequence: Synthetic oligonucleotide
aggucuccacugaggugcu

SEQ ID NO: 840825 - RNA, 19 nt, Artificial Sequence
  Description of Artificial Sequence: Synthetic oligonucleotide
ggaguuccgcuggccuggg

SEQ ID NO: 840826 - RNA, 19 nt, Artificial Sequence
  Description of Artificial Sequence: Synthetic oligonucleotide
guacgccccuaugcacagc

SEQ ID NO: 840827 - RNA, 19 nt, Artificial Sequence
  Description of Artificial Sequence: Synthetic oligonucleotide
ccuggccuucgaagcacac

SEQ ID NO: 840828 - RNA, 19 nt, Artificial Sequence
  Description of Artificial Sequence: Synthetic oligonucleotide
aggaucccacagccagcua

SEQ ID NO: 840829 - RNA, 19 nt, Artificial Sequence
  Description of Artificial Sequence: Synthetic oligonucleotide
gucuuaucuccaagccacu

SEQ ID NO: 840830 - RNA, 19 nt, Artificial Sequence
  Description of Artificial Sequence: Synthetic oligonucleotide
gagcuagaaccagcagggu

SEQ ID NO: 840831 - RNA, 19 nt, Artificial Sequence
  Description of Artificial Sequence: Synthetic oligonucleotide
gcuugucucuagauguagu

SEQ ID NO: 840832 - RNA, 19 nt, Artificial Sequence
  Description of Artificial Sequence: Synthetic oligonucleotide
gccaaccgccucaucuaug

SEQ ID NO: 840833 - RNA, 19 nt, Artificial Sequence
  Description of Artificial Sequence: Synthetic oligonucleotide
ccgccauucacggauccca

SEQ ID NO: 840834 - RNA, 19 nt, Artificial Sequence
  Description of Artificial Sequence: Synthetic oligonucleotide
ggacuggacugcuccuugu

SEQ ID NO: 840835 - RNA, 19 nt, Artificial Sequence
  Description of Artificial Sequence: Synthetic oligonucleotide
gcuagcgccuggccuucga

SEQ ID NO: 840836 - RNA, 19 nt, Artificial Sequence
  Description of Artificial Sequence: Synthetic oligonucleotide
cuauugcuucugggcgcca

SEQ ID NO: 840837 - RNA, 19 nt, Artificial Sequence
  Description of Artificial Sequence: Synthetic oligonucleotide
cccgccauucacggauccc

SEQ ID NO: 840838 - RNA, 19 nt, Artificial Sequence
  Description of Artificial Sequence: Synthetic oligonucleotide
gccccuaugcacagcccuc

SEQ ID NO: 840839 - RNA, 19 nt, Artificial Sequence
  Description of Artificial Sequence: Synthetic oligonucleotide
ccgccucaucuauggcagc

SEQ ID NO: 840840 - RNA, 19 nt, Artificial Sequence
  Description of Artificial Sequence: Synthetic oligonucleotide
cauuuggcacuagucccuu

SEQ ID NO: 840841 - RNA, 19 nt, Artificial Sequence
  Description of Artificial Sequence: Synthetic oligonucleotide
ggccuucgaagcacacaga

SEQ ID NO: 840842 - RNA, 19 nt, Artificial Sequence
  Description of Artificial Sequence: Synthetic oligonucleotide
cccuaccuuucagagaacu

SEQ ID NO: 840843 - RNA, 19 nt, Artificial Sequence
  Description of Artificial Sequence: Synthetic oligonucleotide
ggcgccacaccaggagcuc

SEQ ID NO: 840844 - RNA, 19 nt, Artificial Sequence
  Description of Artificial Sequence: Synthetic oligonucleotide
ggaugccgguuucuccagu

SEQ ID NO: 840845 - RNA, 19 nt, Artificial Sequence
  Description of Artificial Sequence: Synthetic oligonucleotide
ggcuagcgccuggccuucg

SEQ ID NO: 840846 - RNA, 19 nt, Artificial Sequence
  Description of Artificial Sequence: Synthetic oligonucleotide
gagcaguacccagcccaau

SEQ ID NO: 840847 - RNA, 19 nt, Artificial Sequence
  Description of Artificial Sequence: Synthetic oligonucleotide
ccuaugcacagcccucccu

SEQ ID NO: 840848 - RNA, 19 nt, Artificial Sequence
  Description of Artificial Sequence: Synthetic oligonucleotide
ggcacgcagggcagaggga

SEQ ID NO: 840849 - RNA, 19 nt, Artificial Sequence
  Description of Artificial Sequence: Synthetic oligonucleotide
ccaaauuguggggcucaaa

SEQ ID NO: 840850 - RNA, 19 nt, Artificial Sequence
  Description of Artificial Sequence: Synthetic oligonucleotide
cccuuuacuccagaccagu

SEQ ID NO: 840851 - RNA, 19 nt, Artificial Sequence
  Description of Artificial Sequence: Synthetic oligonucleotide
cgucaacaugcagggccgc

SEQ ID NO: 840852 - RNA, 19 nt, Artificial Sequence
  Description of Artificial Sequence: Synthetic oligonucleotide
ccauugcccgagcccuguc

SEQ ID NO: 840853 - RNA, 19 nt, Artificial Sequence
  Description of Artificial Sequence: Synthetic oligonucleotide
cgccuggccuucgaagcac

SEQ ID NO: 840854 - RNA, 19 nt, Artificial Sequence
  Description of Artificial Sequence: Synthetic oligonucleotide
ccuguacccguagguggcu

SEQ ID NO: 840855 - RNA, 19 nt, Artificial Sequence
  Description of Artificial Sequence: Synthetic oligonucleotide
gcccgagcccugucucgcu

SEQ ID NO: 840856 - RNA, 19 nt, Artificial Sequence
  Description of Artificial Sequence: Synthetic oligonucleotide
gcccggccuucucauuauu

SEQ ID NO: 840857 - RNA, 19 nt, Artificial Sequence
  Description of Artificial Sequence: Synthetic oligonucleotide
cgccaaccgccucaucuau

SEQ ID NO: 840858 - RNA, 19 nt, Artificial Sequence
  Description of Artificial Sequence: Synthetic oligonucleotide
cgcccggccuucucauuau

SEQ ID NO: 840859 - RNA, 19 nt, Artificial Sequence
  Description of Artificial Sequence: Synthetic oligonucleotide
aaaucaauacugcauuugc

SEQ ID NO: 840860 - RNA, 19 nt, Artificial Sequence
  Description of Artificial Sequence: Synthetic oligonucleotide
acuaggaacuuccugaagc

SEQ ID NO: 840861 - RNA, 19 nt, Artificial Sequence
  Description of Artificial Sequence: Synthetic oligonucleotide
aaugguaucacaacacggc

SEQ ID NO: 840862 - RNA, 19 nt, Artificial Sequence
  Description of Artificial Sequence: Synthetic oligonucleotide
aacccgaucuuuuacauag

SEQ ID NO: 840863 - RNA, 19 nt, Artificial Sequence
  Description of Artificial Sequence: Synthetic oligonucleotide
aaguacuguaucaaaaggc

SEQ ID NO: 840864 - RNA, 19 nt, Artificial Sequence
  Description of Artificial Sequence: Synthetic oligonucleotide
ucuuuagguacaaagaggu

SEQ ID NO: 840865 - RNA, 19 nt, Artificial Sequence
  Description of Artificial Sequence: Synthetic oligonucleotide
auaguacggguucugaucc

SEQ ID NO: 840866 - RNA, 19 nt, Artificial Sequence
  Description of Artificial Sequence: Synthetic oligonucleotide
aauuuagagucccaauauc

SEQ ID NO: 840867 - RNA, 19 nt, Artificial Sequence
  Description of Artificial Sequence: Synthetic oligonucleotide
cuaauuacauaauauguac

SEQ ID NO: 840868 - RNA, 19 nt, Artificial Sequence
  Description of Artificial Sequence: Synthetic oligonucleotide
ucuauuaaugguaucacaa

SEQ ID NO: 840869 - RNA, 19 nt, Artificial Sequence
  Description of Artificial Sequence: Synthetic oligonucleotide
uuugaaauccauauagcga

SEQ ID NO: 840870 - RNA, 19 nt, Artificial Sequence
  Description of Artificial Sequence: Synthetic oligonucleotide
aaucgcaaaggcuacaacu

SEQ ID NO: 840871 - RNA, 19 nt, Artificial Sequence
  Description of Artificial Sequence: Synthetic oligonucleotide
ucugguuaaacuaaacaga

SEQ ID NO: 840872 - RNA, 19 nt, Artificial Sequence
  Description of Artificial Sequence: Synthetic oligonucleotide
uccuaauuacauaauaugu

SEQ ID NO: 840873 - RNA, 19 nt, Artificial Sequence
  Description of Artificial Sequence: Synthetic oligonucleotide
aauccauauagcgagugac

SEQ ID NO: 840874 - RNA, 19 nt, Artificial Sequence
  Description of Artificial Sequence: Synthetic oligonucleotide
uuuaaguuuguccuaauua

SEQ ID NO: 840875 - RNA, 19 nt, Artificial Sequence
  Description of Artificial Sequence: Synthetic oligonucleotide
aaggauacagaucacucug

SEQ ID NO: 840876 - RNA, 19 nt, Artificial Sequence
  Description of Artificial Sequence: Synthetic oligonucleotide
uggcuaaggauacagauca

SEQ ID NO: 840877 - RNA, 19 nt, Artificial Sequence
  Description of Artificial Sequence: Synthetic oligonucleotide
auacagaucacucugauua

SEQ ID NO: 840878 - RNA, 19 nt, Artificial Sequence
  Description of Artificial Sequence: Synthetic oligonucleotide
auagauaucugacuuccgg

SEQ ID NO: 840879 - RNA, 19 nt, Artificial Sequence
  Description of Artificial Sequence: Synthetic oligonucleotide
uaaugguaucacaacacgg

SEQ ID NO: 840880 - RNA, 19 nt, Artificial Sequence
  Description of Artificial Sequence: Synthetic oligonucleotide
aaauuguauagaucuagcu

SEQ ID NO: 840881 - RNA, 19 nt, Artificial Sequence
  Description of Artificial Sequence: Synthetic oligonucleotide
uuuuacauagcuggggucg

SEQ ID NO: 840882 - RNA, 19 nt, Artificial Sequence
  Description of Artificial Sequence: Synthetic oligonucleotide
uuuagguacaaagagguca

SEQ ID NO: 840883 - RNA, 19 nt, Artificial Sequence
  Description of Artificial Sequence: Synthetic oligonucleotide
aauucugacuagccauucc

SEQ ID NO: 840884 - RNA, 19 nt, Artificial Sequence
  Description of Artificial Sequence: Synthetic oligonucleotide
aucaauacugcauuugcag

SEQ ID NO: 840885 - RNA, 19 nt, Artificial Sequence
  Description of Artificial Sequence: Synthetic oligonucleotide
aguauuuacugguauagca

SEQ ID NO: 840886 - RNA, 19 nt, Artificial Sequence
  Description of Artificial Sequence: Synthetic oligonucleotide
agaucuggcucucuguucc

SEQ ID NO: 840887 - RNA, 19 nt, Artificial Sequence
  Description of Artificial Sequence: Synthetic oligonucleotide
gauacacuccgucaggccg

SEQ ID NO: 840888 - RNA, 19 nt, Artificial Sequence
  Description of Artificial Sequence: Synthetic oligonucleotide
uuauagaugcgcuuucucc

SEQ ID NO: 840889 - RNA, 19 nt, Artificial Sequence
  Description of Artificial Sequence: Synthetic oligonucleotide
uuacauaauauguacugcu

SEQ ID NO: 840890 - RNA, 19 nt, Artificial Sequence
  Description of Artificial Sequence: Synthetic oligonucleotide
aguggaaggaaccuuguag

SEQ ID NO: 840891 - RNA, 19 nt, Artificial Sequence
  Description of Artificial Sequence: Synthetic oligonucleotide
aagauacaaguacuguauc

SEQ ID NO: 840892 - RNA, 19 nt, Artificial Sequence
  Description of Artificial Sequence: Synthetic oligonucleotide
auauauagcacuuaaccuu

SEQ ID NO: 840893 - RNA, 19 nt, Artificial Sequence
  Description of Artificial Sequence: Synthetic oligonucleotide
uguucaauugguuccaaga

SEQ ID NO: 840894 - RNA, 19 nt, Artificial Sequence
  Description of Artificial Sequence: Synthetic oligonucleotide
gacaucauugaaucaaggc

SEQ ID NO: 840895 - RNA, 19 nt, Artificial Sequence
  Description of Artificial Sequence: Synthetic oligonucleotide
uuccaugaaaacaaguuaa

SEQ ID NO: 840896 - RNA, 19 nt, Artificial Sequence
  Description of Artificial Sequence: Synthetic oligonucleotide
agugguguuauagaugcgc

SEQ ID NO: 840897 - RNA, 19 nt, Artificial Sequence
  Description of Artificial Sequence: Synthetic oligonucleotide
ucaacauguagguaccucc

SEQ ID NO: 840898 - RNA, 19 nt, Artificial Sequence
  Description of Artificial Sequence: Synthetic oligonucleotide
auauguacugcuguuaguc

SEQ ID NO: 840899 - RNA, 19 nt, Artificial Sequence
  Description of Artificial Sequence: Synthetic oligonucleotide
ucaauuuagagucccaaua

SEQ ID NO: 840900 - RNA, 19 nt, Artificial Sequence
  Description of Artificial Sequence: Synthetic oligonucleotide
uuaauacaugauauuagaa

SEQ ID NO: 840901 - RNA, 19 nt, Artificial Sequence
  Description of Artificial Sequence: Synthetic oligonucleotide
uagaucuagcucuugagca

SEQ ID NO: 840902 - RNA, 19 nt, Artificial Sequence
  Description of Artificial Sequence: Synthetic oligonucleotide
ugaaucaaggcucugucaa

SEQ ID NO: 840903 - RNA, 19 nt, Artificial Sequence
  Description of Artificial Sequence: Synthetic oligonucleotide
aagcgagaaguccugccgc

SEQ ID NO: 840904 - RNA, 19 nt, Artificial Sequence
  Description of Artificial Sequence: Synthetic oligonucleotide
caucauugaaucaaggcuc

SEQ ID NO: 840905 - RNA, 19 nt, Artificial Sequence
  Description of Artificial Sequence: Synthetic oligonucleotide
aaguuggcgacauaaacua

SEQ ID NO: 840906 - RNA, 19 nt, Artificial Sequence
  Description of Artificial Sequence: Synthetic oligonucleotide
uguagguaccuccauauau

SEQ ID NO: 840907 - RNA, 19 nt, Artificial Sequence
  Description of Artificial Sequence: Synthetic oligonucleotide
ugucaaaucaauacugcau

SEQ ID NO: 840908 - RNA, 19 nt, Artificial Sequence
  Description of Artificial Sequence: Synthetic oligonucleotide
aacacaaucgcaaaggcua

SEQ ID NO: 840909 - RNA, 19 nt, Artificial Sequence
  Description of Artificial Sequence: Synthetic oligonucleotide
gacauuaucccugacagga

SEQ ID NO: 840910 - RNA, 19 nt, Artificial Sequence
  Description of Artificial Sequence: Synthetic oligonucleotide
aaauccuuguggcaauucu

SEQ ID NO: 840911 - RNA, 19 nt, Artificial Sequence
  Description of Artificial Sequence: Synthetic oligonucleotide
cacuuaaccuugcaaaucc

SEQ ID NO: 840912 - RNA, 19 nt, Artificial Sequence
  Description of Artificial Sequence: Synthetic oligonucleotide
gaagcgagaaguccugccg

SEQ ID NO: 840913 - RNA, 19 nt, Artificial Sequence
  Description of Artificial Sequence: Synthetic oligonucleotide
aucacaacacggcugaucu

SEQ ID NO: 840914 - RNA, 19 nt, Artificial Sequence
  Description of Artificial Sequence: Synthetic oligonucleotide
ugaucuggcaggaauuggc

SEQ ID NO: 840915 - RNA, 19 nt, Artificial Sequence
  Description of Artificial Sequence: Synthetic oligonucleotide
cacgguuguacuaacaaug

SEQ ID NO: 840916 - RNA, 19 nt, Artificial Sequence
  Description of Artificial Sequence: Synthetic oligonucleotide
uauaaaucuuccaguggug

SEQ ID NO: 840917 - RNA, 19 nt, Artificial Sequence
  Description of Artificial Sequence: Synthetic oligonucleotide
ugaagucuacaacaucuug

SEQ ID NO: 840918 - RNA, 19 nt, Artificial Sequence
  Description of Artificial Sequence: Synthetic oligonucleotide
aaggcagucugguuaaacu

SEQ ID NO: 840919 - RNA, 19 nt, Artificial Sequence
  Description of Artificial Sequence: Synthetic oligonucleotide
uuauuuugucaguacagaa

SEQ ID NO: 840920 - RNA, 19 nt, Artificial Sequence
  Description of Artificial Sequence: Synthetic oligonucleotide
uucaauugguuuauucaac

SEQ ID NO: 840921 - RNA, 19 nt, Artificial Sequence
  Description of Artificial Sequence: Synthetic oligonucleotide
gguaccuccauauauagca

SEQ ID NO: 840922 - RNA, 19 nt, Artificial Sequence
  Description of Artificial Sequence: Synthetic oligonucleotide
agaagcgagaaguccugcc

SEQ ID NO: 840923 - RNA, 19 nt, Artificial Sequence
  Description of Artificial Sequence: Synthetic oligonucleotide
cuauuaaugguaucacaac

SEQ ID NO: 840924 - RNA, 19 nt, Artificial Sequence
  Description of Artificial Sequence: Synthetic oligonucleotide
acaggauacacuccgucag

SEQ ID NO: 840925 - RNA, 19 nt, Artificial Sequence
  Description of Artificial Sequence: Synthetic oligonucleotide
uucgcuguaaaguuuaauu

SEQ ID NO: 840926 - RNA, 19 nt, Artificial Sequence
  Description of Artificial Sequence: Synthetic oligonucleotide
agauacaaguacuguauca

SEQ ID NO: 840927 - RNA, 19 nt, Artificial Sequence
  Description of Artificial Sequence: Synthetic oligonucleotide
cucugucaaaucaauacug

SEQ ID NO: 840928 - RNA, 19 nt, Artificial Sequence
  Description of Artificial Sequence: Synthetic oligonucleotide
ggcgacauaaacuaggaac

SEQ ID NO: 840929 - RNA, 19 nt, Artificial Sequence
  Description of Artificial Sequence: Synthetic oligonucleotide
gaagggaaggaguauuuac

SEQ ID NO: 840930 - RNA, 19 nt, Artificial Sequence
  Description of Artificial Sequence: Synthetic oligonucleotide
auaaaagcgggcuugcaau

SEQ ID NO: 840931 - RNA, 19 nt, Artificial Sequence
  Description of Artificial Sequence: Synthetic oligonucleotide
cuaaggauacagaucacuc

SEQ ID NO: 840932 - RNA, 19 nt, Artificial Sequence
  Description of Artificial Sequence: Synthetic oligonucleotide
ugguauagcacucuucaau

SEQ ID NO: 840933 - RNA, 19 nt, Artificial Sequence
  Description of Artificial Sequence: Synthetic oligonucleotide
caauauauuugcccugugc

SEQ ID NO: 840934 - RNA, 19 nt, Artificial Sequence
  Description of Artificial Sequence: Synthetic oligonucleotide
uaaggauacagaucacucu

SEQ ID NO: 840935 - RNA, 19 nt, Artificial Sequence
  Description of Artificial Sequence: Synthetic oligonucleotide
cagguugucucaaagugag

SEQ ID NO: 840936 - RNA, 19 nt, Artificial Sequence
  Description of Artificial Sequence: Synthetic oligonucleotide
auagcacucuucaaucucc

SEQ ID NO: 840937 - RNA, 19 nt, Artificial Sequence
  Description of Artificial Sequence: Synthetic oligonucleotide
auaggcacgggaaauaaag

SEQ ID NO: 840938 - RNA, 19 nt, Artificial Sequence
  Description of Artificial Sequence: Synthetic oligonucleotide
uucuauuaaugguaucaca

SEQ ID NO: 840939 - RNA, 19 nt, Artificial Sequence
  Description of Artificial Sequence: Synthetic oligonucleotide
acuaacaauggcaauauau

SEQ ID NO: 840940 - RNA, 19 nt, Artificial Sequence
  Description of Artificial Sequence: Synthetic oligonucleotide
uagcacuuaaccuugcaaa

SEQ ID NO: 840941 - RNA, 19 nt, Artificial Sequence
  Description of Artificial Sequence: Synthetic oligonucleotide
aaauccauauagcgaguga

SEQ ID NO: 840942 - RNA, 19 nt, Artificial Sequence
  Description of Artificial Sequence: Synthetic oligonucleotide
uagguaccuccauauauag

SEQ ID NO: 840943 - RNA, 19 nt, Artificial Sequence
  Description of Artificial Sequence: Synthetic oligonucleotide
ucgcuguaaaguuuaauuc

SEQ ID NO: 840944 - RNA, 19 nt, Artificial Sequence
  Description of Artificial Sequence: Synthetic oligonucleotide
uuuaccauaucuugccaaa

SEQ ID NO: 840945 - RNA, 19 nt, Artificial Sequence
  Description of Artificial Sequence: Synthetic oligonucleotide
uacaccaaccacuuuucca

SEQ ID NO: 840946 - RNA, 19 nt, Artificial Sequence
  Description of Artificial Sequence: Synthetic oligonucleotide
agaucuagcucuugagcag

SEQ ID NO: 840947 - RNA, 19 nt, Artificial Sequence
  Description of Artificial Sequence: Synthetic oligonucleotide
acgggaaauaaagaucugg

SEQ ID NO: 840948 - RNA, 19 nt, Artificial Sequence
  Description of Artificial Sequence: Synthetic oligonucleotide
ugcaucauaggcacgggaa

SEQ ID NO: 840949 - RNA, 19 nt, Artificial Sequence
  Description of Artificial Sequence: Synthetic oligonucleotide
guugacuugguucugugga

SEQ ID NO: 840950 - RNA, 19 nt, Artificial Sequence
  Description of Artificial Sequence: Synthetic oligonucleotide
cauaguacggguucugauc

SEQ ID NO: 840951 - RNA, 19 nt, Artificial Sequence
  Description of Artificial Sequence: Synthetic oligonucleotide
uucaacccgaucuuuuaca

SEQ ID NO: 840952 - RNA, 19 nt, Artificial Sequence
  Description of Artificial Sequence: Synthetic oligonucleotide
auuaaacuagaugccagug

SEQ ID NO: 840953 - RNA, 19 nt, Artificial Sequence
  Description of Artificial Sequence: Synthetic oligonucleotide
ccauuuugaucauaaaagc

SEQ ID NO: 840954 - RNA, 19 nt, Artificial Sequence
  Description of Artificial Sequence: Synthetic oligonucleotide
auagaugcgcuuucuccuc

SEQ ID NO: 840955 - RNA, 19 nt, Artificial Sequence
  Description of Artificial Sequence: Synthetic oligonucleotide
ucuaaguagucaucuguuc

SEQ ID NO: 840956 - RNA, 19 nt, Artificial Sequence
  Description of Artificial Sequence: Synthetic oligonucleotide
uuucaacccgaucuuuuac

SEQ ID NO: 840957 - RNA, 19 nt, Artificial Sequence
  Description of Artificial Sequence: Synthetic oligonucleotide
aucauaaaagcgggcuugc

SEQ ID NO: 840958 - RNA, 19 nt, Artificial Sequence
  Description of Artificial Sequence: Synthetic oligonucleotide
ugucaguacagaaaucauu

SEQ ID NO: 840959 - RNA, 19 nt, Artificial Sequence
  Description of Artificial Sequence: Synthetic oligonucleotide
gaggggauaaagguauggg

SEQ ID NO: 840960 - RNA, 19 nt, Artificial Sequence
  Description of Artificial Sequence: Synthetic oligonucleotide
uccacgguuguacuaacaa

SEQ ID NO: 840961 - RNA, 19 nt, Artificial Sequence
  Description of Artificial Sequence: Synthetic oligonucleotide
aaguuuguccuaauuacau

SEQ ID NO: 840962 - RNA, 19 nt, Artificial Sequence
  Description of Artificial Sequence: Synthetic oligonucleotide
uaaagaucuggcucucugu

SEQ ID NO: 840963 - RNA, 19 nt, Artificial Sequence
  Description of Artificial Sequence: Synthetic oligonucleotide
ugacauuaucccugacagg

SEQ ID NO: 840964 - RNA, 19 nt, Artificial Sequence
  Description of Artificial Sequence: Synthetic oligonucleotide
guauuuacugguauagcac

SEQ ID NO: 840965 - RNA, 19 nt, Artificial Sequence
  Description of Artificial Sequence: Synthetic oligonucleotide
aucaaaguuggcgacauaa

SEQ ID NO: 840966 - RNA, 19 nt, Artificial Sequence
  Description of Artificial Sequence: Synthetic oligonucleotide
augaugaucuggcaggaau

SEQ ID NO: 840967 - RNA, 19 nt, Artificial Sequence
  Description of Artificial Sequence: Synthetic oligonucleotide
cccaauaucaggauggcac

SEQ ID NO: 840968 - RNA, 19 nt, Artificial Sequence
  Description of Artificial Sequence: Synthetic oligonucleotide
uugaaucaaggcucuguca

SEQ ID NO: 840969 - RNA, 19 nt, Artificial Sequence
  Description of Artificial Sequence: Synthetic oligonucleotide
uucaauuuagagucccaau

SEQ ID NO: 840970 - RNA, 19 nt, Artificial Sequence
  Description of Artificial Sequence: Synthetic oligonucleotide
uccaugaaaacaaguuaau

SEQ ID NO: 840971 - RNA, 19 nt, Artificial Sequence
  Description of Artificial Sequence: Synthetic oligonucleotide
agcacgaucacaucguauu

SEQ ID NO: 840972 - RNA, 19 nt, Artificial Sequence
  Description of Artificial Sequence: Synthetic oligonucleotide
caccguagagaaagaagcg

SEQ ID NO: 840973 - RNA, 19 nt, Artificial Sequence
  Description of Artificial Sequence: Synthetic oligonucleotide
cuuccgguugacuugguuc

SEQ ID NO: 840974 - RNA, 19 nt, Artificial Sequence
  Description of Artificial Sequence: Synthetic oligonucleotide
cuacaacuguauuaaaaga

SEQ ID NO: 840975 - RNA, 19 nt, Artificial Sequence
  Description of Artificial Sequence: Synthetic oligonucleotide
cauauauagcacuuaaccu

SEQ ID NO: 840976 - RNA, 19 nt, Artificial Sequence
  Description of Artificial Sequence: Synthetic oligonucleotide
gugguugcaucauaggcac

SEQ ID NO: 840977 - RNA, 19 nt, Artificial Sequence
  Description of Artificial Sequence: Synthetic oligonucleotide
caaaucaauacugcauuug

SEQ ID NO: 840978 - RNA, 19 nt, Artificial Sequence
  Description of Artificial Sequence: Synthetic oligonucleotide
uucugauccaugugaagaa

SEQ ID NO: 840979 - RNA, 19 nt, Artificial Sequence
  Description of Artificial Sequence: Synthetic oligonucleotide
gaugaucuggcaggaauug

SEQ ID NO: 840980 - RNA, 19 nt, Artificial Sequence
  Description of Artificial Sequence: Synthetic oligonucleotide
auagaggggauaaagguau

SEQ ID NO: 840981 - RNA, 19 nt, Artificial Sequence
  Description of Artificial Sequence: Synthetic oligonucleotide
auagcgagugaccucugug

SEQ ID NO: 840982 - RNA, 19 nt, Artificial Sequence
  Description of Artificial Sequence: Synthetic oligonucleotide
aaagaagcgagaaguccug

SEQ ID NO: 840983 - RNA, 19 nt, Artificial Sequence
  Description of Artificial Sequence: Synthetic oligonucleotide
gcuucauaacaaaauagag

SEQ ID NO: 840984 - RNA, 19 nt, Artificial Sequence
  Description of Artificial Sequence: Synthetic oligonucleotide
uuuacugguauagcacucu

SEQ ID NO: 840985 - RNA, 19 nt, Artificial Sequence
  Description of Artificial Sequence: Synthetic oligonucleotide
gguauagcacucuucaauc

SEQ ID NO: 840986 - RNA, 19 nt, Artificial Sequence
  Description of Artificial Sequence: Synthetic oligonucleotide
uaggcacgggaaauaaaga

SEQ ID NO: 840987 - RNA, 19 nt, Artificial Sequence
  Description of Artificial Sequence: Synthetic oligonucleotide
gacaggauacacuccguca

SEQ ID NO: 840988 - RNA, 19 nt, Artificial Sequence
  Description of Artificial Sequence: Synthetic oligonucleotide
agcacuuaaccuugcaaau

SEQ ID NO: 840989 - RNA, 19 nt, Artificial Sequence
  Description of Artificial Sequence: Synthetic oligonucleotide
acgguuguacuaacaaugg

SEQ ID NO: 840990 - RNA, 19 nt, Artificial Sequence
  Description of Artificial Sequence: Synthetic oligonucleotide
aucgcaaaggcuacaacug

SEQ ID NO: 840991 - RNA, 19 nt, Artificial Sequence
  Description of Artificial Sequence: Synthetic oligonucleotide
uuaccauaucuugccaaag

SEQ ID NO: 840992 - RNA, 19 nt, Artificial Sequence
  Description of Artificial Sequence: Synthetic oligonucleotide
gguugcaucauaggcacgg

SEQ ID NO: 840993 - RNA, 19 nt, Artificial Sequence
  Description of Artificial Sequence: Synthetic oligonucleotide
uuccagugguguuauagau

SEQ ID NO: 840994 - RNA, 19 nt, Artificial Sequence
  Description of Artificial Sequence: Synthetic oligonucleotide
aggcacgggaaauaaagau

SEQ ID NO: 840995 - RNA, 19 nt, Artificial Sequence
  Description of Artificial Sequence: Synthetic oligonucleotide
uugcaaauccuuguggcaa

SEQ ID NO: 840996 - RNA, 19 nt, Artificial Sequence
  Description of Artificial Sequence: Synthetic oligonucleotide
gacauaaacuaggaacuuc

SEQ ID NO: 840997 - RNA, 19 nt, Artificial Sequence
  Description of Artificial Sequence: Synthetic oligonucleotide
agggucaaugcccucaaaa

SEQ ID NO: 840998 - RNA, 19 nt, Artificial Sequence
  Description of Artificial Sequence: Synthetic oligonucleotide
accaaaggauucaauuuag

SEQ ID NO: 840999 - RNA, 19 nt, Artificial Sequence
  Description of Artificial Sequence: Synthetic oligonucleotide
ucaacccgaucuuuuacau

SEQ ID NO: 841000 - RNA, 19 nt, Artificial Sequence
  Description of Artificial Sequence: Synthetic oligonucleotide
cagugcaagagaauggcca

SEQ ID NO: 841001 - RNA, 19 nt, Artificial Sequence
  Description of Artificial Sequence: Synthetic oligonucleotide
aauaucaggauggcacaaa

SEQ ID NO: 841002 - RNA, 19 nt, Artificial Sequence
  Description of Artificial Sequence: Synthetic oligonucleotide
cuuuuacauagcugggguc

SEQ ID NO: 841003 - RNA, 19 nt, Artificial Sequence
  Description of Artificial Sequence: Synthetic oligonucleotide
guuguacuaacaauggcaa

SEQ ID NO: 841004 - RNA, 19 nt, Artificial Sequence
  Description of Artificial Sequence: Synthetic oligonucleotide
aaagcucccuucaaucacu

SEQ ID NO: 841005 - RNA, 19 nt, Artificial Sequence
  Description of Artificial Sequence: Synthetic oligonucleotide
ucgcaaaggcuacaacugu

SEQ ID NO: 841006 - RNA, 19 nt, Artificial Sequence
  Description of Artificial Sequence: Synthetic oligonucleotide
auaucuugccaaagauucg

SEQ ID NO: 841007 - RNA, 19 nt, Artificial Sequence
  Description of Artificial Sequence: Synthetic oligonucleotide
uggcaauauauuugcccug

SEQ ID NO: 841008 - RNA, 19 nt, Artificial Sequence
  Description of Artificial Sequence: Synthetic oligonucleotide
ucgcagaugagcugcuuac

SEQ ID NO: 841009 - RNA, 19 nt, Artificial Sequence
  Description of Artificial Sequence: Synthetic oligonucleotide
gguaucacaacacggcuga

SEQ ID NO: 841010 - RNA, 19 nt, Artificial Sequence
  Description of Artificial Sequence: Synthetic oligonucleotide
aggauucaauuuagagucc

SEQ ID NO: 841011 - RNA, 19 nt, Artificial Sequence
  Description of Artificial Sequence: Synthetic oligonucleotide
uugcaucauaggcacggga

SEQ ID NO: 841012 - RNA, 19 nt, Artificial Sequence
  Description of Artificial Sequence: Synthetic oligonucleotide
uuuacauagcuggggucgc

SEQ ID NO: 841013 - RNA, 19 nt, Artificial Sequence
  Description of Artificial Sequence: Synthetic oligonucleotide
uauagcgagugaccucugu

SEQ ID NO: 841014 - RNA, 19 nt, Artificial Sequence
  Description of Artificial Sequence: Synthetic oligonucleotide
auucaauuuagagucccaa

SEQ ID NO: 841015 - RNA, 19 nt, Artificial Sequence
  Description of Artificial Sequence: Synthetic oligonucleotide
cuuuagguacaaagagguc

SEQ ID NO: 841016 - RNA, 19 nt, Artificial Sequence
  Description of Artificial Sequence: Synthetic oligonucleotide
uacagcgagcaaucucucc

SEQ ID NO: 841017 - RNA, 19 nt, Artificial Sequence
  Description of Artificial Sequence: Synthetic oligonucleotide
agaggcaacacaaucgcaa

SEQ ID NO: 841018 - RNA, 19 nt, Artificial Sequence
  Description of Artificial Sequence: Synthetic oligonucleotide
uguuagucuucuccauaaa

SEQ ID NO: 841019 - RNA, 19 nt, Artificial Sequence
  Description of Artificial Sequence: Synthetic oligonucleotide
uacugguauagcacucuuc

SEQ ID NO: 841020 - RNA, 19 nt, Artificial Sequence
  Description of Artificial Sequence: Synthetic oligonucleotide
aggaaccuuguagauuuuc

SEQ ID NO: 841021 - RNA, 19 nt, Artificial Sequence
  Description of Artificial Sequence: Synthetic oligonucleotide
ucauaggcacgggaaauaa

SEQ ID NO: 841022 - RNA, 19 nt, Artificial Sequence
  Description of Artificial Sequence: Synthetic oligonucleotide
cuaaguagucaucuguucu

SEQ ID NO: 841023 - RNA, 19 nt, Artificial Sequence
  Description of Artificial Sequence: Synthetic oligonucleotide
cuguucaauugguuccaag

SEQ ID NO: 841024 - RNA, 19 nt, Artificial Sequence
  Description of Artificial Sequence: Synthetic oligonucleotide
agcgagcaaucucuccuuc

SEQ ID NO: 841025 - RNA, 19 nt, Artificial Sequence
  Description of Artificial Sequence: Synthetic oligonucleotide
uucaacauguagguaccuc

SEQ ID NO: 841026 - RNA, 19 nt, Artificial Sequence
  Description of Artificial Sequence: Synthetic oligonucleotide
aagcgggcuugcaauauug

SEQ ID NO: 841027 - RNA, 19 nt, Artificial Sequence
  Description of Artificial Sequence: Synthetic oligonucleotide
uagcacucuucaaucucca

SEQ ID NO: 841028 - RNA, 19 nt, Artificial Sequence
  Description of Artificial Sequence: Synthetic oligonucleotide
acacaaucgcaaaggcuac

SEQ ID NO: 841029 - RNA, 19 nt, Artificial Sequence
  Description of Artificial Sequence: Synthetic oligonucleotide
agguaccuccauauauagc

SEQ ID NO: 841030 - RNA, 19 nt, Artificial Sequence
  Description of Artificial Sequence: Synthetic oligonucleotide
cacuccgucaggccggugc

SEQ ID NO: 841031 - RNA, 19 nt, Artificial Sequence
  Description of Artificial Sequence: Synthetic oligonucleotide
gucaaaucaauacugcauu

SEQ ID NO: 841032 - RNA, 19 nt, Artificial Sequence
  Description of Artificial Sequence: Synthetic oligonucleotide
aaagcgggcuugcaauauu

SEQ ID NO: 841033 - RNA, 19 nt, Artificial Sequence
  Description of Artificial Sequence: Synthetic oligonucleotide
aggcagucugguuaaacua

SEQ ID NO: 841034 - RNA, 19 nt, Artificial Sequence
  Description of Artificial Sequence: Synthetic oligonucleotide
ccguagagaaagaagcgag

SEQ ID NO: 841035 - RNA, 19 nt, Artificial Sequence
  Description of Artificial Sequence: Synthetic oligonucleotide
aucauugaaucaaggcucu

SEQ ID NO: 841036 - RNA, 19 nt, Artificial Sequence
  Description of Artificial Sequence: Synthetic oligonucleotide
auacacuccgucaggccgg

SEQ ID NO: 841037 - RNA, 19 nt, Artificial Sequence
  Description of Artificial Sequence: Synthetic oligonucleotide
uuacugguauagcacucuu

SEQ ID NO: 841038 - RNA, 19 nt, Artificial Sequence
  Description of Artificial Sequence: Synthetic oligonucleotide
uuguacuaacaauggcaau

SEQ ID NO: 841039 - RNA, 19 nt, Artificial Sequence
  Description of Artificial Sequence: Synthetic oligonucleotide
cuugccaaagauucgcugu

SEQ ID NO: 841040 - RNA, 19 nt, Artificial Sequence
  Description of Artificial Sequence: Synthetic oligonucleotide
ccuaauuacauaauaugua

SEQ ID NO: 841041 - RNA, 19 nt, Artificial Sequence
  Description of Artificial Sequence: Synthetic oligonucleotide
gaucuagcucuugagcaga

SEQ ID NO: 841042 - RNA, 19 nt, Artificial Sequence
  Description of Artificial Sequence: Synthetic oligonucleotide
ucauaaaagcgggcuugca

SEQ ID NO: 841043 - RNA, 19 nt, Artificial Sequence
  Description of Artificial Sequence: Synthetic oligonucleotide
cauauagcgagugaccucu

SEQ ID NO: 841044 - RNA, 19 nt, Artificial Sequence
  Description of Artificial Sequence: Synthetic oligonucleotide
ggaaggaguauuuacuggu

SEQ ID NO: 841045 - RNA, 19 nt, Artificial Sequence
  Description of Artificial Sequence: Synthetic oligonucleotide
uuacagcgagcaaucucuc

SEQ ID NO: 841046 - RNA, 19 nt, Artificial Sequence
  Description of Artificial Sequence: Synthetic oligonucleotide
caauuuagagucccaauau

SEQ ID NO: 841047 - RNA, 19 nt, Artificial Sequence
  Description of Artificial Sequence: Synthetic oligonucleotide
ugaagggaaggaguauuua

SEQ ID NO: 841048 - RNA, 19 nt, Artificial Sequence
  Description of Artificial Sequence: Synthetic oligonucleotide
agguaugggcuuuuaccau

SEQ ID NO: 841049 - RNA, 19 nt, Artificial Sequence
  Description of Artificial Sequence: Synthetic oligonucleotide
gguucugauccaugugaag

SEQ ID NO: 841050 - RNA, 19 nt, Artificial Sequence
  Description of Artificial Sequence: Synthetic oligonucleotide
acaaucgcaaaggcuacaa

SEQ ID NO: 841051 - RNA, 19 nt, Artificial Sequence
  Description of Artificial Sequence: Synthetic oligonucleotide
caaucgcaaaggcuacaac

SEQ ID NO: 841052 - RNA, 19 nt, Artificial Sequence
  Description of Artificial Sequence: Synthetic oligonucleotide
aagugaagggaaggaguau

SEQ ID NO: 841053 - RNA, 19 nt, Artificial Sequence
  Description of Artificial Sequence: Synthetic oligonucleotide
guugcaucauaggcacggg

SEQ ID NO: 841054 - RNA, 19 nt, Artificial Sequence
  Description of Artificial Sequence: Synthetic oligonucleotide
agcgagaaguccugccgcu

SEQ ID NO: 841055 - RNA, 19 nt, Artificial Sequence
  Description of Artificial Sequence: Synthetic oligonucleotide
uggcgacauaaacuaggaa

SEQ ID NO: 841056 - RNA, 19 nt, Artificial Sequence
  Description of Artificial Sequence: Synthetic oligonucleotide
cauguagguaccuccauau

SEQ ID NO: 841057 - RNA, 19 nt, Artificial Sequence
  Description of Artificial Sequence: Synthetic oligonucleotide
ugguuguccugguaacuua

SEQ ID NO: 841058 - RNA, 19 nt, Artificial Sequence
  Description of Artificial Sequence: Synthetic oligonucleotide
aacuuccugaagcggcguu

SEQ ID NO: 841059 - RNA, 19 nt, Artificial Sequence
  Description of Artificial Sequence: Synthetic oligonucleotide
auggcacaaauuguauaga

SEQ ID NO: 841060 - RNA, 19 nt, Artificial Sequence
  Description of Artificial Sequence: Synthetic oligonucleotide
ggccauaaggaacuuggga

SEQ ID NO: 841061 - RNA, 19 nt, Artificial Sequence
  Description of Artificial Sequence: Synthetic oligonucleotide
cauaauauguacugcuguu

SEQ ID NO: 841062 - RNA, 19 nt, Artificial Sequence
  Description of Artificial Sequence: Synthetic oligonucleotide
guagguaccuccauauaua

SEQ ID NO: 841063 - RNA, 19 nt, Artificial Sequence
  Description of Artificial Sequence: Synthetic oligonucleotide
ucugauuaccuggcccacu

SEQ ID NO: 841064 - RNA, 19 nt, Artificial Sequence
  Description of Artificial Sequence: Synthetic oligonucleotide
ucccaauaucaggauggca

SEQ ID NO: 841065 - RNA, 19 nt, Artificial Sequence
  Description of Artificial Sequence: Synthetic oligonucleotide
auaaggaacuugggaauua

SEQ ID NO: 841066 - RNA, 19 nt, Artificial Sequence
  Description of Artificial Sequence: Synthetic oligonucleotide
ucauugaaucaaggcucug

SEQ ID NO: 841067 - RNA, 19 nt, Artificial Sequence
  Description of Artificial Sequence: Synthetic oligonucleotide
agcgagugaccucugugua

SEQ ID NO: 841068 - RNA, 19 nt, Artificial Sequence
  Description of Artificial Sequence: Synthetic oligonucleotide
ggauacacuccgucaggcc

SEQ ID NO: 841069 - RNA, 19 nt, Artificial Sequence
  Description of Artificial Sequence: Synthetic oligonucleotide
uccagaguuuggcuuuauu

SEQ ID NO: 841070 - RNA, 19 nt, Artificial Sequence
  Description of Artificial Sequence: Synthetic oligonucleotide
aaugcccucaaaaguucua

SEQ ID NO: 841071 - RNA, 19 nt, Artificial Sequence
  Description of Artificial Sequence: Synthetic oligonucleotide
cagugguguuauagaugcg

SEQ ID NO: 841072 - RNA, 19 nt, Artificial Sequence
  Description of Artificial Sequence: Synthetic oligonucleotide
ucuccacgguuguacuaac

SEQ ID NO: 841073 - RNA, 19 nt, Artificial Sequence
  Description of Artificial Sequence: Synthetic oligonucleotide
uaguacggguucugaucca

SEQ ID NO: 841074 - RNA, 19 nt, Artificial Sequence
  Description of Artificial Sequence: Synthetic oligonucleotide
caaucucuccuucagacuu

SEQ ID NO: 841075 - RNA, 19 nt, Artificial Sequence
  Description of Artificial Sequence: Synthetic oligonucleotide
ggcacgggaaauaaagauc

SEQ ID NO: 841076 - RNA, 19 nt, Artificial Sequence
  Description of Artificial Sequence: Synthetic oligonucleotide
cacaaauuguauagaucua

SEQ ID NO: 841077 - RNA, 19 nt, Artificial Sequence
  Description of Artificial Sequence: Synthetic oligonucleotide
aaacuagaugccagugcuu

SEQ ID NO: 841078 - RNA, 19 nt, Artificial Sequence
  Description of Artificial Sequence: Synthetic oligonucleotide
aggauacagaucacucuga

SEQ ID NO: 841079 - RNA, 19 nt, Artificial Sequence
  Description of Artificial Sequence: Synthetic oligonucleotide
auucauggcgggagaagga

SEQ ID NO: 841080 - RNA, 19 nt, Artificial Sequence
  Description of Artificial Sequence: Synthetic oligonucleotide
uuacauagcuggggucgca

SEQ ID NO: 841081 - RNA, 19 nt, Artificial Sequence
  Description of Artificial Sequence: Synthetic oligonucleotide
guaccuccauauauagcac

SEQ ID NO: 841082 - RNA, 19 nt, Artificial Sequence
  Description of Artificial Sequence: Synthetic oligonucleotide
caaauccuuguggcaauuc

SEQ ID NO: 841083 - RNA, 19 nt, Artificial Sequence
  Description of Artificial Sequence: Synthetic oligonucleotide
uaugggcuuuuaccauauc

SEQ ID NO: 841084 - RNA, 19 nt, Artificial Sequence
  Description of Artificial Sequence: Synthetic oligonucleotide
guacuaacaauggcaauau

SEQ ID NO: 841085 - RNA, 19 nt, Artificial Sequence
  Description of Artificial Sequence: Synthetic oligonucleotide
ugauuaccuggcccacuuu

SEQ ID NO: 841086 - RNA, 19 nt, Artificial Sequence
  Description of Artificial Sequence: Synthetic oligonucleotide
ugccaaagauucgcuguaa

SEQ ID NO: 841087 - RNA, 19 nt, Artificial Sequence
  Description of Artificial Sequence: Synthetic oligonucleotide
gcgacauaaacuaggaacu

SEQ ID NO: 841088 - RNA, 19 nt, Artificial Sequence
  Description of Artificial Sequence: Synthetic oligonucleotide
gucccaauaucaggauggc

SEQ ID NO: 841089 - RNA, 19 nt, Artificial Sequence
  Description of Artificial Sequence: Synthetic oligonucleotide
gguaugggcuuuuaccaua

SEQ ID NO: 841090 - RNA, 19 nt, Artificial Sequence
  Description of Artificial Sequence: Synthetic oligonucleotide
cauaggcacgggaaauaaa

SEQ ID NO: 841091 - RNA, 19 nt, Artificial Sequence
  Description of Artificial Sequence: Synthetic oligonucleotide
cauugaaucaaggcucugu

SEQ ID NO: 841092 - RNA, 19 nt, Artificial Sequence
  Description of Artificial Sequence: Synthetic oligonucleotide
gcaauauauuugcccugug

SEQ ID NO: 841093 - RNA, 19 nt, Artificial Sequence
  Description of Artificial Sequence: Synthetic oligonucleotide
ccaauaucaggauggcaca

SEQ ID NO: 841094 - RNA, 19 nt, Artificial Sequence
  Description of Artificial Sequence: Synthetic oligonucleotide
acuuccgguugacuugguu

SEQ ID NO: 841095 - RNA, 19 nt, Artificial Sequence
  Description of Artificial Sequence: Synthetic oligonucleotide
auaaagguaugggcuuuua

SEQ ID NO: 841096 - RNA, 19 nt, Artificial Sequence
  Description of Artificial Sequence: Synthetic oligonucleotide
cagaggcaacacaaucgca

SEQ ID NO: 841097 - RNA, 19 nt, Artificial Sequence
  Description of Artificial Sequence: Synthetic oligonucleotide
uuuccagaguuuggcuuua

SEQ ID NO: 841098 - RNA, 19 nt, Artificial Sequence
  Description of Artificial Sequence: Synthetic oligonucleotide
cucugauuaccuggcccac

SEQ ID NO: 841099 - RNA, 19 nt, Artificial Sequence
  Description of Artificial Sequence: Synthetic oligonucleotide
cugguauagcacucuucaa

SEQ ID NO: 841100 - RNA, 19 nt, Artificial Sequence
  Description of Artificial Sequence: Synthetic oligonucleotide
caauaucaggauggcacaa

SEQ ID NO: 841101 - RNA, 19 nt, Artificial Sequence
  Description of Artificial Sequence: Synthetic oligonucleotide
gcacuuaaccuugcaaauc

SEQ ID NO: 841102 - RNA, 19 nt, Artificial Sequence
  Description of Artificial Sequence: Synthetic oligonucleotide
acauuaucccugacaggau

SEQ ID NO: 841103 - RNA, 19 nt, Artificial Sequence
  Description of Artificial Sequence: Synthetic oligonucleotide
gcacgaucacaucguauuc

SEQ ID NO: 841104 - RNA, 19 nt, Artificial Sequence
  Description of Artificial Sequence: Synthetic oligonucleotide
gcuaaggauacagaucacu

SEQ ID NO: 841105 - RNA, 19 nt, Artificial Sequence
  Description of Artificial Sequence: Synthetic oligonucleotide
gauucgcuguaaaguuuaa

SEQ ID NO: 841106 - RNA, 19 nt, Artificial Sequence
  Description of Artificial Sequence: Synthetic oligonucleotide
cuccacgguuguacuaaca

SEQ ID NO: 841107 - RNA, 19 nt, Artificial Sequence
  Description of Artificial Sequence: Synthetic oligonucleotide
gccgcucugggcuccgggg

SEQ ID NO: 841108 - RNA, 19 nt, Artificial Sequence
  Description of Artificial Sequence: Synthetic oligonucleotide
gugguguuauagaugcgcu

SEQ ID NO: 841109 - RNA, 19 nt, Artificial Sequence
  Description of Artificial Sequence: Synthetic oligonucleotide
gcuguuagucuucuccaua

SEQ ID NO: 841110 - RNA, 19 nt, Artificial Sequence
  Description of Artificial Sequence: Synthetic oligonucleotide
agcgggcuugcaauauuga

SEQ ID NO: 841111 - RNA, 19 nt, Artificial Sequence
  Description of Artificial Sequence: Synthetic oligonucleotide
ggcaauauauuugcccugu

SEQ ID NO: 841112 - RNA, 19 nt, Artificial Sequence
  Description of Artificial Sequence: Synthetic oligonucleotide
caacccgaucuuuuacaua

SEQ ID NO: 841113 - RNA, 19 nt, Artificial Sequence
  Description of Artificial Sequence: Synthetic oligonucleotide
caucacagguugucucaaa

SEQ ID NO: 841114 - RNA, 19 nt, Artificial Sequence
  Description of Artificial Sequence: Synthetic oligonucleotide
ggauacagaucacucugau

SEQ ID NO: 841115 - RNA, 19 nt, Artificial Sequence
  Description of Artificial Sequence: Synthetic oligonucleotide
cacaaucgcaaaggcuaca

SEQ ID NO: 841116 - RNA, 19 nt, Artificial Sequence
  Description of Artificial Sequence: Synthetic oligonucleotide
gcgagcaaucucuccuuca

SEQ ID NO: 841117 - RNA, 19 nt, Artificial Sequence
  Description of Artificial Sequence: Synthetic oligonucleotide
gggagaaggagcgcacgca

SEQ ID NO: 841118 - RNA, 19 nt, Artificial Sequence
  Description of Artificial Sequence: Synthetic oligonucleotide
ggguucugauccaugugaa

SEQ ID NO: 841119 - RNA, 19 nt, Artificial Sequence
  Description of Artificial Sequence: Synthetic oligonucleotide
gcgagugaccucuguguaa

SEQ ID NO: 841120 - RNA, 19 nt, Artificial Sequence
  Description of Artificial Sequence: Synthetic oligonucleotide
gcuucaguggaaggaaccu

SEQ ID NO: 841121 - RNA, 19 nt, Artificial Sequence
  Description of Artificial Sequence: Synthetic oligonucleotide
cgggagaaggagcgcacgc

SEQ ID NO: 841122 - RNA, 19 nt, Artificial Sequence
  Description of Artificial Sequence: Synthetic oligonucleotide
ggcuaaggauacagaucac

SEQ ID NO: 841123 - RNA, 19 nt, Artificial Sequence
  Description of Artificial Sequence: Synthetic oligonucleotide
agcgcacgcagaggcucug

SEQ ID NO: 841124 - RNA, 19 nt, Artificial Sequence
  Description of Artificial Sequence: Synthetic oligonucleotide
ggaaggaaccuuguagauu

SEQ ID NO: 841125 - RNA, 19 nt, Artificial Sequence
  Description of Artificial Sequence: Synthetic oligonucleotide
caagagcuccaaagcuggu

SEQ ID NO: 841126 - RNA, 19 nt, Artificial Sequence
  Description of Artificial Sequence: Synthetic oligonucleotide
cuucaguggaaggaaccuu

SEQ ID NO: 841127 - RNA, 19 nt, Artificial Sequence
  Description of Artificial Sequence: Synthetic oligonucleotide
cagcacgaucacaucguau

SEQ ID NO: 841128 - RNA, 19 nt, Artificial Sequence
  Description of Artificial Sequence: Synthetic oligonucleotide
ggugguuguccugguaacu

SEQ ID NO: 841129 - RNA, 19 nt, Artificial Sequence
  Description of Artificial Sequence: Synthetic oligonucleotide
cgguugacuugguucugug

SEQ ID NO: 841130 - RNA, 19 nt, Artificial Sequence
  Description of Artificial Sequence: Synthetic oligonucleotide
ggauaaagguaugggcuuu

SEQ ID NO: 841131 - RNA, 19 nt, Artificial Sequence
  Description of Artificial Sequence: Synthetic oligonucleotide
ggccaccguagagaaagaa

SEQ ID NO: 841132 - RNA, 19 nt, Artificial Sequence
  Description of Artificial Sequence: Synthetic oligonucleotide
ccauaguacggguucugau

SEQ ID NO: 841133 - RNA, 19 nt, Artificial Sequence
  Description of Artificial Sequence: Synthetic oligonucleotide
cagcgagcaaucucuccuu

SEQ ID NO: 841134 - RNA, 19 nt, Artificial Sequence
  Description of Artificial Sequence: Synthetic oligonucleotide
cagucccauuaaacuagau

SEQ ID NO: 841135 - RNA, 19 nt, Artificial Sequence
  Description of Artificial Sequence: Synthetic oligonucleotide
gagcgcacgcagaggcucu

SEQ ID NO: 841136 - RNA, 19 nt, Artificial Sequence
  Description of Artificial Sequence: Synthetic oligonucleotide
ccacgguuguacuaacaau

SEQ ID NO: 841137 - RNA, 19 nt, Artificial Sequence
  Description of Artificial Sequence: Synthetic oligonucleotide
ccucuguguaaaguaacau

SEQ ID NO: 841138 - RNA, 19 nt, Artificial Sequence
  Description of Artificial Sequence: Synthetic oligonucleotide
ccagcacgaucacaucgua

SEQ ID NO: 841139 - RNA, 19 nt, Artificial Sequence
  Description of Artificial Sequence: Synthetic oligonucleotide
acacuccgucaggccggug

SEQ ID NO: 841140 - RNA, 19 nt, Artificial Sequence
  Description of Artificial Sequence: Synthetic oligonucleotide
gcaaauccuuguggcaauu

SEQ ID NO: 841141 - RNA, 19 nt, Artificial Sequence
  Description of Artificial Sequence: Synthetic oligonucleotide
gggccaccguagagaaaga

SEQ ID NO: 841142 - RNA, 19 nt, Artificial Sequence
  Description of Artificial Sequence: Synthetic oligonucleotide
ccgguugacuugguucugu

SEQ ID NO: 841143 - RNA, 19 nt, Artificial Sequence
  Description of Artificial Sequence: Synthetic oligonucleotide
ccaaggccauagaggggau

SEQ ID NO: 841144 - RNA, 19 nt, Artificial Sequence
  Description of Artificial Sequence: Synthetic oligonucleotide
aacauggcgacuucgaugc

SEQ ID NO: 841145 - RNA, 19 nt, Artificial Sequence
  Description of Artificial Sequence: Synthetic oligonucleotide
aagauuucgucguauuugg

SEQ ID NO: 841146 - RNA, 19 nt, Artificial Sequence
  Description of Artificial Sequence: Synthetic oligonucleotide
agcaguuucggcuucagcg

SEQ ID NO: 841147 - RNA, 19 nt, Artificial Sequence
  Description of Artificial Sequence: Synthetic oligonucleotide
ucgauaagugcuuugacug

SEQ ID NO: 841148 - RNA, 19 nt, Artificial Sequence
  Description of Artificial Sequence: Synthetic oligonucleotide
aguuguagaagauuucguc

SEQ ID NO: 841149 - RNA, 19 nt, Artificial Sequence
  Description of Artificial Sequence: Synthetic oligonucleotide
cuuagaaccgcucagcuug

SEQ ID NO: 841150 - RNA, 19 nt, Artificial Sequence
  Description of Artificial Sequence: Synthetic oligonucleotide
uuuugugcgguacaacucc

SEQ ID NO: 841151 - RNA, 19 nt, Artificial Sequence
  Description of Artificial Sequence: Synthetic oligonucleotide
uguggcgucgcuuggaagg

SEQ ID NO: 841152 - RNA, 19 nt, Artificial Sequence
  Description of Artificial Sequence: Synthetic oligonucleotide
acagccacgaagcagucgg

SEQ ID NO: 841153 - RNA, 19 nt, Artificial Sequence
  Description of Artificial Sequence: Synthetic oligonucleotide
gaagcgguaauguuccucc

SEQ ID NO: 841154 - RNA, 19 nt, Artificial Sequence
  Description of Artificial Sequence: Synthetic oligonucleotide
augauguaagcgugcaccc

SEQ ID NO: 841155 - RNA, 19 nt, Artificial Sequence
  Description of Artificial Sequence: Synthetic oligonucleotide
uuguccggcacaaggagcg

SEQ ID NO: 841156 - RNA, 19 nt, Artificial Sequence
  Description of Artificial Sequence: Synthetic oligonucleotide
aaaaguuuugugcgguaca

SEQ ID NO: 841157 - RNA, 19 nt, Artificial Sequence
  Description of Artificial Sequence: Synthetic oligonucleotide
uggauaucacggaagaggu

SEQ ID NO: 841158 - RNA, 19 nt, Artificial Sequence
  Description of Artificial Sequence: Synthetic oligonucleotide
aacuccuugagggaugagg

SEQ ID NO: 841159 - RNA, 19 nt, Artificial Sequence
  Description of Artificial Sequence: Synthetic oligonucleotide
augagcgccccguagacac

SEQ ID NO: 841160 - RNA, 19 nt, Artificial Sequence
  Description of Artificial Sequence: Synthetic oligonucleotide
gaagucaugggccaucaac

SEQ ID NO: 841161 - RNA, 19 nt, Artificial Sequence
  Description of Artificial Sequence: Synthetic oligonucleotide
auuucgucguauuuggacu

SEQ ID NO: 841162 - RNA, 19 nt, Artificial Sequence
  Description of Artificial Sequence: Synthetic oligonucleotide
ugcuggguuacccaaggag

SEQ ID NO: 841163 - RNA, 19 nt, Artificial Sequence
  Description of Artificial Sequence: Synthetic oligonucleotide
ugcgguacaacuccuugag

SEQ ID NO: 841164 - RNA, 19 nt, Artificial Sequence
  Description of Artificial Sequence: Synthetic oligonucleotide
ucgagcuuggacucgauga

SEQ ID NO: 841165 - RNA, 19 nt, Artificial Sequence
  Description of Artificial Sequence: Synthetic oligonucleotide
uaauguuccuccgaggggc

SEQ ID NO: 841166 - RNA, 19 nt, Artificial Sequence
  Description of Artificial Sequence: Synthetic oligonucleotide
gauguaagcgugcacccgc

SEQ ID NO: 841167 - RNA, 19 nt, Artificial Sequence
  Description of Artificial Sequence: Synthetic oligonucleotide
uuacccaaggagacuacag

SEQ ID NO: 841168 - RNA, 19 nt, Artificial Sequence
  Description of Artificial Sequence: Synthetic oligonucleotide
uguuguccggcacaaggag

SEQ ID NO: 841169 - RNA, 19 nt, Artificial Sequence
  Description of Artificial Sequence: Synthetic oligonucleotide
cuuugacugaaaugucugg

SEQ ID NO: 841170 - RNA, 19 nt, Artificial Sequence
  Description of Artificial Sequence: Synthetic oligonucleotide
aguugggcacacauaaacc

SEQ ID NO: 841171 - RNA, 19 nt, Artificial Sequence
  Description of Artificial Sequence: Synthetic oligonucleotide
gaggucacggugcggaugg

SEQ ID NO: 841172 - RNA, 19 nt, Artificial Sequence
  Description of Artificial Sequence: Synthetic oligonucleotide
agcggcaugagcuuggcga

SEQ ID NO: 841173 - RNA, 19 nt, Artificial Sequence
  Description of Artificial Sequence: Synthetic oligonucleotide
cacacauaaaccuguugag

SEQ ID NO: 841174 - RNA, 19 nt, Artificial Sequence
  Description of Artificial Sequence: Synthetic oligonucleotide
aucggaaaucuccagcuug

SEQ ID NO: 841175 - RNA, 19 nt, Artificial Sequence
  Description of Artificial Sequence: Synthetic oligonucleotide
uaagcgugcacccgcacca

SEQ ID NO: 841176 - RNA, 19 nt, Artificial Sequence
  Description of Artificial Sequence: Synthetic oligonucleotide
aaggauugaguuugcggga

SEQ ID NO: 841177 - RNA, 19 nt, Artificial Sequence
  Description of Artificial Sequence: Synthetic oligonucleotide
ugcgcaaggccgcauggcg

SEQ ID NO: 841178 - RNA, 19 nt, Artificial Sequence
  Description of Artificial Sequence: Synthetic oligonucleotide
aacgcaccgcccugcacgc

SEQ ID NO: 841179 - RNA, 19 nt, Artificial Sequence
  Description of Artificial Sequence: Synthetic oligonucleotide
aagucaugggccaucaaca

SEQ ID NO: 841180 - RNA, 19 nt, Artificial Sequence
  Description of Artificial Sequence: Synthetic oligonucleotide
gauugaguuugcgggaagg

SEQ ID NO: 841181 - RNA, 19 nt, Artificial Sequence
  Description of Artificial Sequence: Synthetic oligonucleotide
ucgaagagaugccuguugu

SEQ ID NO: 841182 - RNA, 19 nt, Artificial Sequence
  Description of Artificial Sequence: Synthetic oligonucleotide
uuugacugaaaugucuggu

SEQ ID NO: 841183 - RNA, 19 nt, Artificial Sequence
  Description of Artificial Sequence: Synthetic oligonucleotide
uucccgaacaccgagggca

SEQ ID NO: 841184 - RNA, 19 nt, Artificial Sequence
  Description of Artificial Sequence: Synthetic oligonucleotide
uuguugaguaccacgcgga

SEQ ID NO: 841185 - RNA, 19 nt, Artificial Sequence
  Description of Artificial Sequence: Synthetic oligonucleotide
gauaucacggaagaggucu

SEQ ID NO: 841186 - RNA, 19 nt, Artificial Sequence
  Description of Artificial Sequence: Synthetic oligonucleotide
uuggccuuagaaccgcuca

SEQ ID NO: 841187 - RNA, 19 nt, Artificial Sequence
  Description of Artificial Sequence: Synthetic oligonucleotide
cacuaggucauugagcuug

SEQ ID NO: 841188 - RNA, 19 nt, Artificial Sequence
  Description of Artificial Sequence: Synthetic oligonucleotide
gacugaaaugucuggugug

SEQ ID NO: 841189 - RNA, 19 nt, Artificial Sequence
  Description of Artificial Sequence: Synthetic oligonucleotide
ugcggauggccucaggcug

SEQ ID NO: 841190 - RNA, 19 nt, Artificial Sequence
  Description of Artificial Sequence: Synthetic oligonucleotide
acgcaaggcaccgauggcc

SEQ ID NO: 841191 - RNA, 19 nt, Artificial Sequence
  Description of Artificial Sequence: Synthetic oligonucleotide
uuggacucgaugagguggc

SEQ ID NO: 841192 - RNA, 19 nt, Artificial Sequence
  Description of Artificial Sequence: Synthetic oligonucleotide
ugguagaccuuggauauca

SEQ ID NO: 841193 - RNA, 19 nt, Artificial Sequence
  Description of Artificial Sequence: Synthetic oligonucleotide
uguuuggcacccgacagga

SEQ ID NO: 841194 - RNA, 19 nt, Artificial Sequence
  Description of Artificial Sequence: Synthetic oligonucleotide
caguguagccaacuggagc

SEQ ID NO: 841195 - RNA, 19 nt, Artificial Sequence
  Description of Artificial Sequence: Synthetic oligonucleotide
auggguuugccgucgaagu

SEQ ID NO: 841196 - RNA, 19 nt, Artificial Sequence
  Description of Artificial Sequence: Synthetic oligonucleotide
aagcgguaauguuccuccg

SEQ ID NO: 841197 - RNA, 19 nt, Artificial Sequence
  Description of Artificial Sequence: Synthetic oligonucleotide
ugauguaagcgugcacccg

SEQ ID NO: 841198 - RNA, 19 nt, Artificial Sequence
  Description of Artificial Sequence: Synthetic oligonucleotide
uacaacuccuugagggaug

SEQ ID NO: 841199 - RNA, 19 nt, Artificial Sequence
  Description of Artificial Sequence: Synthetic oligonucleotide
agaaccgcucagcuugccg

SEQ ID NO: 841200 - RNA, 19 nt, Artificial Sequence
  Description of Artificial Sequence: Synthetic oligonucleotide
uugagggaugaggucacgg

SEQ ID NO: 841201 - RNA, 19 nt, Artificial Sequence
  Description of Artificial Sequence: Synthetic oligonucleotide
uuggcgaugucguggguca

SEQ ID NO: 841202 - RNA, 19 nt, Artificial Sequence
  Description of Artificial Sequence: Synthetic oligonucleotide
gcacacauaaaccuguuga

SEQ ID NO: 841203 - RNA, 19 nt, Artificial Sequence
  Description of Artificial Sequence: Synthetic oligonucleotide
uuggcagucggggaagucc

SEQ ID NO: 841204 - RNA, 19 nt, Artificial Sequence
  Description of Artificial Sequence: Synthetic oligonucleotide
gaagucguagccccggcuc

SEQ ID NO: 841205 - RNA, 19 nt, Artificial Sequence
  Description of Artificial Sequence: Synthetic oligonucleotide
gagagcauugccgggcacg

SEQ ID NO: 841206 - RNA, 19 nt, Artificial Sequence
  Description of Artificial Sequence: Synthetic oligonucleotide
acauaaaccuguugaggaa

SEQ ID NO: 841207 - RNA, 19 nt, Artificial Sequence
  Description of Artificial Sequence: Synthetic oligonucleotide
uggccuuagaaccgcucag

SEQ ID NO: 841208 - RNA, 19 nt, Artificial Sequence
  Description of Artificial Sequence: Synthetic oligonucleotide
ugaacauggcgacuucgau

SEQ ID NO: 841209 - RNA, 19 nt, Artificial Sequence
  Description of Artificial Sequence: Synthetic oligonucleotide
cucagcuugccgucggccg

SEQ ID NO: 841210 - RNA, 19 nt, Artificial Sequence
  Description of Artificial Sequence: Synthetic oligonucleotide
ugcuauacuggccggccac

SEQ ID NO: 841211 - RNA, 19 nt, Artificial Sequence
  Description of Artificial Sequence: Synthetic oligonucleotide
ucacucucuguuuggcacc

SEQ ID NO: 841212 - RNA, 19 nt, Artificial Sequence
  Description of Artificial Sequence: Synthetic oligonucleotide
ucucggucgacgucgcuca

SEQ ID NO: 841213 - RNA, 19 nt, Artificial Sequence
  Description of Artificial Sequence: Synthetic oligonucleotide
gacuucgaugccugcuggg

SEQ ID NO: 841214 - RNA, 19 nt, Artificial Sequence
  Description of Artificial Sequence: Synthetic oligonucleotide
aagucguagccccggcuca

SEQ ID NO: 841215 - RNA, 19 nt, Artificial Sequence
  Description of Artificial Sequence: Synthetic oligonucleotide
uggaaggccccgaagcggu

SEQ ID NO: 841216 - RNA, 19 nt, Artificial Sequence
  Description of Artificial Sequence: Synthetic oligonucleotide
uuagaaccgcucagcuugc

SEQ ID NO: 841217 - RNA, 19 nt, Artificial Sequence
  Description of Artificial Sequence: Synthetic oligonucleotide
uuugugcgguacaacuccu

SEQ ID NO: 841218 - RNA, 19 nt, Artificial Sequence
  Description of Artificial Sequence: Synthetic oligonucleotide
cgguacaacuccuugaggg

SEQ ID NO: 841219 - RNA, 19 nt, Artificial Sequence
  Description of Artificial Sequence: Synthetic oligonucleotide
aaguccuuacagccaggca

SEQ ID NO: 841220 - RNA, 19 nt, Artificial Sequence
  Description of Artificial Sequence: Synthetic oligonucleotide
guugggcacacauaaaccu

SEQ ID NO: 841221 - RNA, 19 nt, Artificial Sequence
  Description of Artificial Sequence: Synthetic oligonucleotide
guaagcgugcacccgcacc

SEQ ID NO: 841222 - RNA, 19 nt, Artificial Sequence
  Description of Artificial Sequence: Synthetic oligonucleotide
gauaagugcuuugacugaa

SEQ ID NO: 841223 - RNA, 19 nt, Artificial Sequence
  Description of Artificial Sequence: Synthetic oligonucleotide
gacgagagcauugccgggc

SEQ ID NO: 841224 - RNA, 19 nt, Artificial Sequence
  Description of Artificial Sequence: Synthetic oligonucleotide
uuucgucguauuuggacuu

SEQ ID NO: 841225 - RNA, 19 nt, Artificial Sequence
  Description of Artificial Sequence: Synthetic oligonucleotide
uagaagauuucgucguauu

SEQ ID NO: 841226 - RNA, 19 nt, Artificial Sequence
  Description of Artificial Sequence: Synthetic oligonucleotide
ggugcccucaaacgcaccg

SEQ ID NO: 841227 - RNA, 19 nt, Artificial Sequence
  Description of Artificial Sequence: Synthetic oligonucleotide
uccgucucgccaugcauga

SEQ ID NO: 841228 - RNA, 19 nt, Artificial Sequence
  Description of Artificial Sequence: Synthetic oligonucleotide
cugcguguagccaguguag

SEQ ID NO: 841229 - RNA, 19 nt, Artificial Sequence
  Description of Artificial Sequence: Synthetic oligonucleotide
gauacccggugugucaaug

SEQ ID NO: 841230 - RNA, 19 nt, Artificial Sequence
  Description of Artificial Sequence: Synthetic oligonucleotide
ucucuguuuggcacccgac

SEQ ID NO: 841231 - RNA, 19 nt, Artificial Sequence
  Description of Artificial Sequence: Synthetic oligonucleotide
gaggggcaaaaguuuugug

SEQ ID NO: 841232 - RNA, 19 nt, Artificial Sequence
  Description of Artificial Sequence: Synthetic oligonucleotide
cuugccgucggccggcgcc

SEQ ID NO: 841233 - RNA, 19 nt, Artificial Sequence
  Description of Artificial Sequence: Synthetic oligonucleotide
agucggggaaguccccagg

SEQ ID NO: 841234 - RNA, 19 nt, Artificial Sequence
  Description of Artificial Sequence: Synthetic oligonucleotide
ugccgucgaagucagcauc

SEQ ID NO: 841235 - RNA, 19 nt, Artificial Sequence
  Description of Artificial Sequence: Synthetic oligonucleotide
accgagggcaucucuuucu

SEQ ID NO: 841236 - RNA, 19 nt, Artificial Sequence
  Description of Artificial Sequence: Synthetic oligonucleotide
ggcgccaaguuguagaaga

SEQ ID NO: 841237 - RNA, 19 nt, Artificial Sequence
  Description of Artificial Sequence: Synthetic oligonucleotide
cuccgucucgccaugcaug

SEQ ID NO: 841238 - RNA, 19 nt, Artificial Sequence
  Description of Artificial Sequence: Synthetic oligonucleotide
caugccgucucggucgacg

SEQ ID NO: 841239 - RNA, 19 nt, Artificial Sequence
  Description of Artificial Sequence: Synthetic oligonucleotide
uggguuugccgucgaaguc

SEQ ID NO: 841240 - RNA, 19 nt, Artificial Sequence
  Description of Artificial Sequence: Synthetic oligonucleotide
acgucgcucaguuuccaga

SEQ ID NO: 841241 - RNA, 19 nt, Artificial Sequence
  Description of Artificial Sequence: Synthetic oligonucleotide
uccgaggggcaaaaguuuu

SEQ ID NO: 841242 - RNA, 19 nt, Artificial Sequence
  Description of Artificial Sequence: Synthetic oligonucleotide
gcugggaccagaaggagcc

SEQ ID NO: 841243 - RNA, 19 nt, Artificial Sequence
  Description of Artificial Sequence: Synthetic oligonucleotide
cucgauaagugcuuugacu

SEQ ID NO: 841244 - RNA, 19 nt, Artificial Sequence
  Description of Artificial Sequence: Synthetic oligonucleotide
gacuacaggguggagagcu

SEQ ID NO: 841245 - RNA, 19 nt, Artificial Sequence
  Description of Artificial Sequence: Synthetic oligonucleotide
accuuggauaucacggaag

SEQ ID NO: 841246 - RNA, 19 nt, Artificial Sequence
  Description of Artificial Sequence: Synthetic oligonucleotide
cccgaagcgguaauguucc

SEQ ID NO: 841247 - RNA, 19 nt, Artificial Sequence
  Description of Artificial Sequence: Synthetic oligonucleotide
guuuugugcgguacaacuc

SEQ ID NO: 841248 - RNA, 19 nt, Artificial Sequence
  Description of Artificial Sequence: Synthetic oligonucleotide
acgaaggggcccauguggg

SEQ ID NO: 841249 - RNA, 19 nt, Artificial Sequence
  Description of Artificial Sequence: Synthetic oligonucleotide
cccagcgcccacaugagcg

SEQ ID NO: 841250 - RNA, 19 nt, Artificial Sequence
  Description of Artificial Sequence: Synthetic oligonucleotide
ucgccaugcaugacagcca

SEQ ID NO: 841251 - RNA, 19 nt, Artificial Sequence
  Description of Artificial Sequence: Synthetic oligonucleotide
uugcgggaagggcuucucc

SEQ ID NO: 841252 - RNA, 19 nt, Artificial Sequence
  Description of Artificial Sequence: Synthetic oligonucleotide
gacgucgcucaguuuccag

SEQ ID NO: 841253 - RNA, 19 nt, Artificial Sequence
  Description of Artificial Sequence: Synthetic oligonucleotide
auacccggugugucaauga

SEQ ID NO: 841254 - RNA, 19 nt, Artificial Sequence
  Description of Artificial Sequence: Synthetic oligonucleotide
caggcgucggggcagguug

SEQ ID NO: 841255 - RNA, 19 nt, Artificial Sequence
  Description of Artificial Sequence: Synthetic oligonucleotide
uacuggccggccaccagca

SEQ ID NO: 841256 - RNA, 19 nt, Artificial Sequence
  Description of Artificial Sequence: Synthetic oligonucleotide
gcgguaauguuccuccgag

SEQ ID NO: 841257 - RNA, 19 nt, Artificial Sequence
  Description of Artificial Sequence: Synthetic oligonucleotide
uguaagcgugcacccgcac

SEQ ID NO: 841258 - RNA, 19 nt, Artificial Sequence
  Description of Artificial Sequence: Synthetic oligonucleotide
gcuuugacugaaaugucug

SEQ ID NO: 841259 - RNA, 19 nt, Artificial Sequence
  Description of Artificial Sequence: Synthetic oligonucleotide
uccggcacaaggagcggcu

SEQ ID NO: 841260 - RNA, 19 nt, Artificial Sequence
  Description of Artificial Sequence: Synthetic oligonucleotide
ucggcgucgucuuccgagc

SEQ ID NO: 841261 - RNA, 19 nt, Artificial Sequence
  Description of Artificial Sequence: Synthetic oligonucleotide
uacccggugugucaaugau

SEQ ID NO: 841262 - RNA, 19 nt, Artificial Sequence
  Description of Artificial Sequence: Synthetic oligonucleotide
ucgcuuggaaggcggcacc

SEQ ID NO: 841263 - RNA, 19 nt, Artificial Sequence
  Description of Artificial Sequence: Synthetic oligonucleotide
guuguccggcacaaggagc

SEQ ID NO: 841264 - RNA, 19 nt, Artificial Sequence
  Description of Artificial Sequence: Synthetic oligonucleotide
uaucacggaagaggucuug

SEQ ID NO: 841265 - RNA, 19 nt, Artificial Sequence
  Description of Artificial Sequence: Synthetic oligonucleotide
uuguggcgucgcuuggaag

SEQ ID NO: 841266 - RNA, 19 nt, Artificial Sequence
  Description of Artificial Sequence: Synthetic oligonucleotide
aguaccacgcggaucuugu

SEQ ID NO: 841267 - RNA, 19 nt, Artificial Sequence
  Description of Artificial Sequence: Synthetic oligonucleotide
gacagccacgaagcagucg

SEQ ID NO: 841268 - RNA, 19 nt, Artificial Sequence
  Description of Artificial Sequence: Synthetic oligonucleotide
guuucggcuucagcgagug

SEQ ID NO: 841269 - RNA, 19 nt, Artificial Sequence
  Description of Artificial Sequence: Synthetic oligonucleotide
ugagcgccccguagacacg

SEQ ID NO: 841270 - RNA, 19 nt, Artificial Sequence
  Description of Artificial Sequence: Synthetic oligonucleotide
gacgcgcaggaccucgggc

SEQ ID NO: 841271 - RNA, 19 nt, Artificial Sequence
  Description of Artificial Sequence: Synthetic oligonucleotide
gguuuugccggugcuauac

SEQ ID NO: 841272 - RNA, 19 nt, Artificial Sequence
  Description of Artificial Sequence: Synthetic oligonucleotide
ugggugcccucaaacgcac

SEQ ID NO: 841273 - RNA, 19 nt, Artificial Sequence
  Description of Artificial Sequence: Synthetic oligonucleotide
acgcgcucugcaaaccagc

SEQ ID NO: 841274 - RNA, 19 nt, Artificial Sequence
  Description of Artificial Sequence: Synthetic oligonucleotide
uucgucguauuuggacuug

SEQ ID NO: 841275 - RNA, 19 nt, Artificial Sequence
  Description of Artificial Sequence: Synthetic oligonucleotide
agacgcgcaggaccucggg

SEQ ID NO: 841276 - RNA, 19 nt, Artificial Sequence
  Description of Artificial Sequence: Synthetic oligonucleotide
ccuucccgaacaccgaggg

SEQ ID NO: 841277 - RNA, 19 nt, Artificial Sequence
  Description of Artificial Sequence: Synthetic oligonucleotide
aucacggaagaggucuugu

SEQ ID NO: 841278 - RNA, 19 nt, Artificial Sequence
  Description of Artificial Sequence: Synthetic oligonucleotide
gcaucuuuuggcagucggg

SEQ ID NO: 841279 - RNA, 19 nt, Artificial Sequence
  Description of Artificial Sequence: Synthetic oligonucleotide
cagaugcgccccagcacgg

SEQ ID NO: 841280 - RNA, 19 nt, Artificial Sequence
  Description of Artificial Sequence: Synthetic oligonucleotide
gacccggagagcggcagag

SEQ ID NO: 841281 - RNA, 19 nt, Artificial Sequence
  Description of Artificial Sequence: Synthetic oligonucleotide
gcggcuguguucuucacuc

SEQ ID NO: 841282 - RNA, 19 nt, Artificial Sequence
  Description of Artificial Sequence: Synthetic oligonucleotide
cuuguccucguggccacgc

SEQ ID NO: 841283 - RNA, 19 nt, Artificial Sequence
  Description of Artificial Sequence: Synthetic oligonucleotide
cucgagcuuggacucgaug

SEQ ID NO: 841284 - RNA, 19 nt, Artificial Sequence
  Description of Artificial Sequence: Synthetic oligonucleotide
agccgauguagacgcgcag

SEQ ID NO: 841285 - RNA, 19 nt, Artificial Sequence
  Description of Artificial Sequence: Synthetic oligonucleotide
gcaguuucggcuucagcga

SEQ ID NO: 841286 - RNA, 19 nt, Artificial Sequence
  Description of Artificial Sequence: Synthetic oligonucleotide
agucguagccccggcucac

SEQ ID NO: 841287 - RNA, 19 nt, Artificial Sequence
  Description of Artificial Sequence: Synthetic oligonucleotide
ugaagucaugggccaucaa

SEQ ID NO: 841288 - RNA, 19 nt, Artificial Sequence
  Description of Artificial Sequence: Synthetic oligonucleotide
cuucccgaacaccgagggc

SEQ ID NO: 841289 - RNA, 19 nt, Artificial Sequence
  Description of Artificial Sequence: Synthetic oligonucleotide
guuacccaaggagacuaca

SEQ ID NO: 841290 - RNA, 19 nt, Artificial Sequence
  Description of Artificial Sequence: Synthetic oligonucleotide
cacucucuguuuggcaccc

SEQ ID NO: 841291 - RNA, 19 nt, Artificial Sequence
  Description of Artificial Sequence: Synthetic oligonucleotide
aggauugaguuugcgggaa

SEQ ID NO: 841292 - RNA, 19 nt, Artificial Sequence
  Description of Artificial Sequence: Synthetic oligonucleotide
gugcgguacaacuccuuga

SEQ ID NO: 841293 - RNA, 19 nt, Artificial Sequence
  Description of Artificial Sequence: Synthetic oligonucleotide
augucgugggucagcaucu

SEQ ID NO: 841294 - RNA, 19 nt, Artificial Sequence
  Description of Artificial Sequence: Synthetic oligonucleotide
uugccgucgaagucagcau

SEQ ID NO: 841295 - RNA, 19 nt, Artificial Sequence
  Description of Artificial Sequence: Synthetic oligonucleotide
guagccccggcucacucuc

SEQ ID NO: 841296 - RNA, 19 nt, Artificial Sequence
  Description of Artificial Sequence: Synthetic oligonucleotide
aucugcguguagccagugu

SEQ ID NO: 841297 - RNA, 19 nt, Artificial Sequence
  Description of Artificial Sequence: Synthetic oligonucleotide
aggaccucgggcgugccca

SEQ ID NO: 841298 - RNA, 19 nt, Artificial Sequence
  Description of Artificial Sequence: Synthetic oligonucleotide
agcgccucgucagggcccc

SEQ ID NO: 841299 - RNA, 19 nt, Artificial Sequence
  Description of Artificial Sequence: Synthetic oligonucleotide
ggauugaguuugcgggaag

SEQ ID NO: 841300 - RNA, 19 nt, Artificial Sequence
  Description of Artificial Sequence: Synthetic oligonucleotide
caaggagcggcugggacca

SEQ ID NO: 841301 - RNA, 19 nt, Artificial Sequence
  Description of Artificial Sequence: Synthetic oligonucleotide
caggauacccgguguguca

SEQ ID NO: 841302 - RNA, 19 nt, Artificial Sequence
  Description of Artificial Sequence: Synthetic oligonucleotide
agcagucgguggugggcuc

SEQ ID NO: 841303 - RNA, 19 nt, Artificial Sequence
  Description of Artificial Sequence: Synthetic oligonucleotide
cacucggcgucgucuuccg

SEQ ID NO: 841304 - RNA, 19 nt, Artificial Sequence
  Description of Artificial Sequence: Synthetic oligonucleotide
ggugcuauacuggccggcc

SEQ ID NO: 841305 - RNA, 19 nt, Artificial Sequence
  Description of Artificial Sequence: Synthetic oligonucleotide
aaggccccgaagcgguaau

SEQ ID NO: 841306 - RNA, 19 nt, Artificial Sequence
  Description of Artificial Sequence: Synthetic oligonucleotide
gccgauguagacgcgcagg

SEQ ID NO: 841307 - RNA, 19 nt, Artificial Sequence
  Description of Artificial Sequence: Synthetic oligonucleotide
ggcaccgauggccucugag

SEQ ID NO: 841308 - RNA, 19 nt, Artificial Sequence
  Description of Artificial Sequence: Synthetic oligonucleotide
ucgucguauuuggacuugu

SEQ ID NO: 841309 - RNA, 19 nt, Artificial Sequence
  Description of Artificial Sequence: Synthetic oligonucleotide
caccauggguuugccgucg

SEQ ID NO: 841310 - RNA, 19 nt, Artificial Sequence
  Description of Artificial Sequence: Synthetic oligonucleotide
uugcgcaaggccgcauggc

SEQ ID NO: 841311 - RNA, 19 nt, Artificial Sequence
  Description of Artificial Sequence: Synthetic oligonucleotide
ggagccggggaccuccugc

SEQ ID NO: 841312 - RNA, 19 nt, Artificial Sequence
  Description of Artificial Sequence: Synthetic oligonucleotide
gcgacuucgaugccugcug

SEQ ID NO: 841313 - RNA, 19 nt, Artificial Sequence
  Description of Artificial Sequence: Synthetic oligonucleotide
cagucggggaaguccccag

SEQ ID NO: 841314 - RNA, 19 nt, Artificial Sequence
  Description of Artificial Sequence: Synthetic oligonucleotide
gucgcuuggaaggcggcac

SEQ ID NO: 841315 - RNA, 19 nt, Artificial Sequence
  Description of Artificial Sequence: Synthetic oligonucleotide
uugugcgguacaacuccuu

SEQ ID NO: 841316 - RNA, 19 nt, Artificial Sequence
  Description of Artificial Sequence: Synthetic oligonucleotide
aagcgugcacccgcaccag

SEQ ID NO: 841317 - RNA, 19 nt, Artificial Sequence
  Description of Artificial Sequence: Synthetic oligonucleotide
cauugccgggcacggugcc

SEQ ID NO: 841318 - RNA, 19 nt, Artificial Sequence
  Description of Artificial Sequence: Synthetic oligonucleotide
ccuuggauaucacggaaga

SEQ ID NO: 841319 - RNA, 19 nt, Artificial Sequence
  Description of Artificial Sequence: Synthetic oligonucleotide
gagcgccccguagacacgc

SEQ ID NO: 841320 - RNA, 19 nt, Artificial Sequence
  Description of Artificial Sequence: Synthetic oligonucleotide
ucccgaacaccgagggcau

SEQ ID NO: 841321 - RNA, 19 nt, Artificial Sequence
  Description of Artificial Sequence: Synthetic oligonucleotide
ggguuugccgucgaaguca

SEQ ID NO: 841322 - RNA, 19 nt, Artificial Sequence
  Description of Artificial Sequence: Synthetic oligonucleotide
gcgguacaacuccuugagg

SEQ ID NO: 841323 - RNA, 19 nt, Artificial Sequence
  Description of Artificial Sequence: Synthetic oligonucleotide
ucguagccccggcucacuc

SEQ ID NO: 841324 - RNA, 19 nt, Artificial Sequence
  Description of Artificial Sequence: Synthetic oligonucleotide
auaagugcuuugacugaaa

SEQ ID NO: 841325 - RNA, 19 nt, Artificial Sequence
  Description of Artificial Sequence: Synthetic oligonucleotide
guccacgacgagagcauug

SEQ ID NO: 841326 - RNA, 19 nt, Artificial Sequence
  Description of Artificial Sequence: Synthetic oligonucleotide
agauuucgucguauuugga

SEQ ID NO: 841327 - RNA, 19 nt, Artificial Sequence
  Description of Artificial Sequence: Synthetic oligonucleotide
aggauacccggugugucaa

SEQ ID NO: 841328 - RNA, 19 nt, Artificial Sequence
  Description of Artificial Sequence: Synthetic oligonucleotide
gcgugguagaccuuggaua

SEQ ID NO: 841329 - RNA, 19 nt, Artificial Sequence
  Description of Artificial Sequence: Synthetic oligonucleotide
accgcucagcuugccgucg

SEQ ID NO: 841330 - RNA, 19 nt, Artificial Sequence
  Description of Artificial Sequence: Synthetic oligonucleotide
gguuugccgucgaagucag

SEQ ID NO: 841331 - RNA, 19 nt, Artificial Sequence
  Description of Artificial Sequence: Synthetic oligonucleotide
gucucggucgacgucgcuc

SEQ ID NO: 841332 - RNA, 19 nt, Artificial Sequence
  Description of Artificial Sequence: Synthetic oligonucleotide
cagggacccggagagcggc

SEQ ID NO: 841333 - RNA, 19 nt, Artificial Sequence
  Description of Artificial Sequence: Synthetic oligonucleotide
uuuggcagucggggaaguc

SEQ ID NO: 841334 - RNA, 19 nt, Artificial Sequence
  Description of Artificial Sequence: Synthetic oligonucleotide
ccccgaagcgguaauguuc

SEQ ID NO: 841335 - RNA, 19 nt, Artificial Sequence
  Description of Artificial Sequence: Synthetic oligonucleotide
gaucugcguguagccagug

SEQ ID NO: 841336 - RNA, 19 nt, Artificial Sequence
  Description of Artificial Sequence: Synthetic oligonucleotide
gcgcaggacagcugggaag

SEQ ID NO: 841337 - RNA, 19 nt, Artificial Sequence
  Description of Artificial Sequence: Synthetic oligonucleotide
uggcgucgcuuggaaggcg

SEQ ID NO: 841338 - RNA, 19 nt, Artificial Sequence
  Description of Artificial Sequence: Synthetic oligonucleotide
cacgaagcagucgguggug

SEQ ID NO: 841339 - RNA, 19 nt, Artificial Sequence
  Description of Artificial Sequence: Synthetic oligonucleotide
cuuguggcgucgcuuggaa

SEQ ID NO: 841340 - RNA, 19 nt, Artificial Sequence
  Description of Artificial Sequence: Synthetic oligonucleotide
cgucggggcagguuggugg

SEQ ID NO: 841341 - RNA, 19 nt, Artificial Sequence
  Description of Artificial Sequence: Synthetic oligonucleotide
cucgggcgugcccaccacc

SEQ ID NO: 841342 - RNA, 19 nt, Artificial Sequence
  Description of Artificial Sequence: Synthetic oligonucleotide
uagaaccgcucagcuugcc

SEQ ID NO: 841343 - RNA, 19 nt, Artificial Sequence
  Description of Artificial Sequence: Synthetic oligonucleotide
acccggugugucaaugaug

SEQ ID NO: 841344 - RNA, 19 nt, Artificial Sequence
  Description of Artificial Sequence: Synthetic oligonucleotide
ggccuuagaaccgcucagc

SEQ ID NO: 841345 - RNA, 19 nt, Artificial Sequence
  Description of Artificial Sequence: Synthetic oligonucleotide
acuacaggguggagagcug

SEQ ID NO: 841346 - RNA, 19 nt, Artificial Sequence
  Description of Artificial Sequence: Synthetic oligonucleotide
ccucgauaagugcuuugac

SEQ ID NO: 841347 - RNA, 19 nt, Artificial Sequence
  Description of Artificial Sequence: Synthetic oligonucleotide
ggcgucgcuuggaaggcgg

SEQ ID NO: 841348 - RNA, 19 nt, Artificial Sequence
  Description of Artificial Sequence: Synthetic oligonucleotide
guagaagauuucgucguau

SEQ ID NO: 841349 - RNA, 19 nt, Artificial Sequence
  Description of Artificial Sequence: Synthetic oligonucleotide
auguaagcgugcacccgca

SEQ ID NO: 841350 - RNA, 19 nt, Artificial Sequence
  Description of Artificial Sequence: Synthetic oligonucleotide
ggcggcaccaggcgucggg

SEQ ID NO: 841351 - RNA, 19 nt, Artificial Sequence
  Description of Artificial Sequence: Synthetic oligonucleotide
gugcuauacuggccggcca

SEQ ID NO: 841352 - RNA, 19 nt, Artificial Sequence
  Description of Artificial Sequence: Synthetic oligonucleotide
gccgucgaagucagcaucc

SEQ ID NO: 841353 - RNA, 19 nt, Artificial Sequence
  Description of Artificial Sequence: Synthetic oligonucleotide
cuggucccacucgggagcc

SEQ ID NO: 841354 - RNA, 19 nt, Artificial Sequence
  Description of Artificial Sequence: Synthetic oligonucleotide
ugguuuugccggugcuaua

SEQ ID NO: 841355 - RNA, 19 nt, Artificial Sequence
  Description of Artificial Sequence: Synthetic oligonucleotide
gucggccggcgccaaguug

SEQ ID NO: 841356 - RNA, 19 nt, Artificial Sequence
  Description of Artificial Sequence: Synthetic oligonucleotide
guccggcacaaggagcggc

SEQ ID NO: 841357 - RNA, 19 nt, Artificial Sequence
  Description of Artificial Sequence: Synthetic oligonucleotide
aaccagcgcaggacagcug

SEQ ID NO: 841358 - RNA, 19 nt, Artificial Sequence
  Description of Artificial Sequence: Synthetic oligonucleotide
ccgggaucugcguguagcc

SEQ ID NO: 841359 - RNA, 19 nt, Artificial Sequence
  Description of Artificial Sequence: Synthetic oligonucleotide
gaacaccgagggcaucucu

SEQ ID NO: 841360 - RNA, 19 nt, Artificial Sequence
  Description of Artificial Sequence: Synthetic oligonucleotide
cuauacuggccggccacca

SEQ ID NO: 841361 - RNA, 19 nt, Artificial Sequence
  Description of Artificial Sequence: Synthetic oligonucleotide
gccgggaucugcguguagc

SEQ ID NO: 841362 - RNA, 19 nt, Artificial Sequence
  Description of Artificial Sequence: Synthetic oligonucleotide
aggccgcauggcgugguag

SEQ ID NO: 841363 - RNA, 19 nt, Artificial Sequence
  Description of Artificial Sequence: Synthetic oligonucleotide
ugccgucucggucgacguc

SEQ ID NO: 841364 - RNA, 19 nt, Artificial Sequence
  Description of Artificial Sequence: Synthetic oligonucleotide
ucggucgacgucgcucagu

SEQ ID NO: 841365 - RNA, 19 nt, Artificial Sequence
  Description of Artificial Sequence: Synthetic oligonucleotide
gccggcgccaaguuguaga

SEQ ID NO: 841366 - RNA, 19 nt, Artificial Sequence
  Description of Artificial Sequence: Synthetic oligonucleotide
acucucuguuuggcacccg

SEQ ID NO: 841367 - RNA, 19 nt, Artificial Sequence
  Description of Artificial Sequence: Synthetic oligonucleotide
uggcgacuucgaugccugc

SEQ ID NO: 841368 - RNA, 19 nt, Artificial Sequence
  Description of Artificial Sequence: Synthetic oligonucleotide
ggcgucgucuuccgagccc

SEQ ID NO: 841369 - RNA, 19 nt, Artificial Sequence
  Description of Artificial Sequence: Synthetic oligonucleotide
uggugaagucaugggccau

SEQ ID NO: 841370 - RNA, 19 nt, Artificial Sequence
  Description of Artificial Sequence: Synthetic oligonucleotide
cccgacaggauacccggug

SEQ ID NO: 841371 - RNA, 19 nt, Artificial Sequence
  Description of Artificial Sequence: Synthetic oligonucleotide
guuuugccggugcuauacu

SEQ ID NO: 841372 - RNA, 19 nt, Artificial Sequence
  Description of Artificial Sequence: Synthetic oligonucleotide
gcuauacuggccggccacc

SEQ ID NO: 841373 - RNA, 19 nt, Artificial Sequence
  Description of Artificial Sequence: Synthetic oligonucleotide
ggucacggugcggauggcc

SEQ ID NO: 841374 - RNA, 19 nt, Artificial Sequence
  Description of Artificial Sequence: Synthetic oligonucleotide
uggcacccgacaggauacc

SEQ ID NO: 841375 - RNA, 19 nt, Artificial Sequence
  Description of Artificial Sequence: Synthetic oligonucleotide
auaucacggaagaggucuu

SEQ ID NO: 841376 - RNA, 19 nt, Artificial Sequence
  Description of Artificial Sequence: Synthetic oligonucleotide
ggguuacccaaggagacua

SEQ ID NO: 841377 - RNA, 19 nt, Artificial Sequence
  Description of Artificial Sequence: Synthetic oligonucleotide
agucgguggugggcucugg

SEQ ID NO: 841378 - RNA, 19 nt, Artificial Sequence
  Description of Artificial Sequence: Synthetic oligonucleotide
uggcgaugucgugggucag

SEQ ID NO: 841379 - RNA, 19 nt, Artificial Sequence
  Description of Artificial Sequence: Synthetic oligonucleotide
gggagaugugaugcuccag

SEQ ID NO: 841380 - RNA, 19 nt, Artificial Sequence
  Description of Artificial Sequence: Synthetic oligonucleotide
aggucacggugcggauggc

SEQ ID NO: 841381 - RNA, 19 nt, Artificial Sequence
  Description of Artificial Sequence: Synthetic oligonucleotide
ccgagcuccgcccuucuuc

SEQ ID NO: 841382 - RNA, 19 nt, Artificial Sequence
  Description of Artificial Sequence: Synthetic oligonucleotide
cguagacacgcaucagcug

SEQ ID NO: 841383 - RNA, 19 nt, Artificial Sequence
  Description of Artificial Sequence: Synthetic oligonucleotide
ccgaggggcaaaaguuuug

SEQ ID NO: 841384 - RNA, 19 nt, Artificial Sequence
  Description of Artificial Sequence: Synthetic oligonucleotide
uggccccgagcuccgcccu

SEQ ID NO: 841385 - RNA, 19 nt, Artificial Sequence
  Description of Artificial Sequence: Synthetic oligonucleotide
ggauaucacggaagagguc

SEQ ID NO: 841386 - RNA, 19 nt, Artificial Sequence
  Description of Artificial Sequence: Synthetic oligonucleotide
uggacucgaugagguggcu

SEQ ID NO: 841387 - RNA, 19 nt, Artificial Sequence
  Description of Artificial Sequence: Synthetic oligonucleotide
cagcuugccgucggccggc

SEQ ID NO: 841388 - RNA, 19 nt, Artificial Sequence
  Description of Artificial Sequence: Synthetic oligonucleotide
aggcgucggggcagguugg

SEQ ID NO: 841389 - RNA, 19 nt, Artificial Sequence
  Description of Artificial Sequence: Synthetic oligonucleotide
agaugcgccccagcacgga

SEQ ID NO: 841390 - RNA, 19 nt, Artificial Sequence
  Description of Artificial Sequence: Synthetic oligonucleotide
caugagcgccccguagaca

SEQ ID NO: 841391 - RNA, 19 nt, Artificial Sequence
  Description of Artificial Sequence: Synthetic oligonucleotide
gcaacggcggcuguguucu

SEQ ID NO: 841392 - RNA, 19 nt, Artificial Sequence
  Description of Artificial Sequence: Synthetic oligonucleotide
ccgauguagacgcgcagga

SEQ ID NO: 841393 - RNA, 19 nt, Artificial Sequence
  Description of Artificial Sequence: Synthetic oligonucleotide
gugguagaccuuggauauc

SEQ ID NO: 841394 - RNA, 19 nt, Artificial Sequence
  Description of Artificial Sequence: Synthetic oligonucleotide
cggagagcggcagagcaag

SEQ ID NO: 841395 - RNA, 19 nt, Artificial Sequence
  Description of Artificial Sequence: Synthetic oligonucleotide
ggcgaugucgugggucagc

SEQ ID NO: 841396 - RNA, 19 nt, Artificial Sequence
  Description of Artificial Sequence: Synthetic oligonucleotide
cucggucgacgucgcucag

SEQ ID NO: 841397 - RNA, 19 nt, Artificial Sequence
  Description of Artificial Sequence: Synthetic oligonucleotide
uuggggaguugggcacaca

SEQ ID NO: 841398 - RNA, 19 nt, Artificial Sequence
  Description of Artificial Sequence: Synthetic oligonucleotide
cgauaagugcuuugacuga

SEQ ID NO: 841399 - RNA, 19 nt, Artificial Sequence
  Description of Artificial Sequence: Synthetic oligonucleotide
cuccgaggggcaaaaguuu

SEQ ID NO: 841400 - RNA, 19 nt, Artificial Sequence
  Description of Artificial Sequence: Synthetic oligonucleotide
cugcuggguuacccaagga

SEQ ID NO: 841401 - RNA, 19 nt, Artificial Sequence
  Description of Artificial Sequence: Synthetic oligonucleotide
ccacgacgagagcauugcc

SEQ ID NO: 841402 - RNA, 19 nt, Artificial Sequence
  Description of Artificial Sequence: Synthetic oligonucleotide
ccggugcuauacuggccgg

SEQ ID NO: 841403 - RNA, 19 nt, Artificial Sequence
  Description of Artificial Sequence: Synthetic oligonucleotide
ccguagacacgcaucagcu

SEQ ID NO: 841404 - RNA, 19 nt, Artificial Sequence
  Description of Artificial Sequence: Synthetic oligonucleotide
aggccccgaagcgguaaug

SEQ ID NO: 841405 - RNA, 19 nt, Artificial Sequence
  Description of Artificial Sequence: Synthetic oligonucleotide
acgcaccgcccugcacgcc

SEQ ID NO: 841406 - RNA, 19 nt, Artificial Sequence
  Description of Artificial Sequence: Synthetic oligonucleotide
cgacaggauacccggugug

SEQ ID NO: 841407 - RNA, 19 nt, Artificial Sequence
  Description of Artificial Sequence: Synthetic oligonucleotide
gcgaugucgugggucagca

SEQ ID NO: 841408 - RNA, 19 nt, Artificial Sequence
  Description of Artificial Sequence: Synthetic oligonucleotide
cacggugcggauggccuca

SEQ ID NO: 841409 - RNA, 19 nt, Artificial Sequence
  Description of Artificial Sequence: Synthetic oligonucleotide
cgugguagaccuuggauau

SEQ ID NO: 841410 - RNA, 19 nt, Artificial Sequence
  Description of Artificial Sequence: Synthetic oligonucleotide
cgucucgccaugcaugaca

SEQ ID NO: 841411 - RNA, 19 nt, Artificial Sequence
  Description of Artificial Sequence: Synthetic oligonucleotide
gaccucgggcgugcccacc

SEQ ID NO: 841412 - RNA, 19 nt, Artificial Sequence
  Description of Artificial Sequence: Synthetic oligonucleotide
ggcaugagcuuggcgaugu

SEQ ID NO: 841413 - RNA, 19 nt, Artificial Sequence
  Description of Artificial Sequence: Synthetic oligonucleotide
gccgcgcccucuucacuag

SEQ ID NO: 841414 - RNA, 19 nt, Artificial Sequence
  Description of Artificial Sequence: Synthetic oligonucleotide
gcaaggccgcauggcgugg

SEQ ID NO: 841415 - RNA, 19 nt, Artificial Sequence
  Description of Artificial Sequence: Synthetic oligonucleotide
cccgcuccacgaaggggcc

SEQ ID NO: 841416 - RNA, 19 nt, Artificial Sequence
  Description of Artificial Sequence: Synthetic oligonucleotide
gucgguggugggcucuggu

SEQ ID NO: 841417 - RNA, 19 nt, Artificial Sequence
  Description of Artificial Sequence: Synthetic oligonucleotide
cgucguauuuggacuuguc

SEQ ID NO: 841418 - RNA, 19 nt, Artificial Sequence
  Description of Artificial Sequence: Synthetic oligonucleotide
cacccgcaccagccgcgcc

SEQ ID NO: 841419 - RNA, 19 nt, Artificial Sequence
  Description of Artificial Sequence: Synthetic oligonucleotide
ccgauggccucugagaacu

SEQ ID NO: 841420 - RNA, 19 nt, Artificial Sequence
  Description of Artificial Sequence: Synthetic oligonucleotide
gcccagcgcccacaugagc

SEQ ID NO: 841421 - RNA, 19 nt, Artificial Sequence
  Description of Artificial Sequence: Synthetic oligonucleotide
gcgcccucuucacuagguc

SEQ ID NO: 841422 - RNA, 19 nt, Artificial Sequence
  Description of Artificial Sequence: Synthetic oligonucleotide
gcagucggggaagucccca

SEQ ID NO: 841423 - RNA, 19 nt, Artificial Sequence
  Description of Artificial Sequence: Synthetic oligonucleotide
gggcacggugcccuccguc

SEQ ID NO: 841424 - RNA, 19 nt, Artificial Sequence
  Description of Artificial Sequence: Synthetic oligonucleotide
ggcagucggggaagucccc

SEQ ID NO: 841425 - RNA, 19 nt, Artificial Sequence
  Description of Artificial Sequence: Synthetic oligonucleotide
cgucgaagucagcauccuc

SEQ ID NO: 841426 - RNA, 19 nt, Artificial Sequence
  Description of Artificial Sequence: Synthetic oligonucleotide
gccacgcaaggcaccgaug

SEQ ID NO: 841427 - RNA, 19 nt, Artificial Sequence
  Description of Artificial Sequence: Synthetic oligonucleotide
ggcgacuucgaugccugcu

SEQ ID NO: 841428 - RNA, 19 nt, Artificial Sequence
  Description of Artificial Sequence: Synthetic oligonucleotide
cccucaaacgcaccgcccu

SEQ ID NO: 841429 - RNA, 19 nt, Artificial Sequence
  Description of Artificial Sequence: Synthetic oligonucleotide
gcccucgagcuuggacucg

SEQ ID NO: 841430 - RNA, 19 nt, Artificial Sequence
  Description of Artificial Sequence: Synthetic oligonucleotide
cacccacucggcgucgucu

SEQ ID NO: 841431 - RNA, 19 nt, Artificial Sequence
  Description of Artificial Sequence: Synthetic oligonucleotide
ggccccgaagcgguaaugu

SEQ ID NO: 841432 - RNA, 19 nt, Artificial Sequence
  Description of Artificial Sequence: Synthetic oligonucleotide
ggccacgcaaggcaccgau

SEQ ID NO: 841433 - RNA, 19 nt, Artificial Sequence
  Description of Artificial Sequence: Synthetic oligonucleotide
ccggcgccaaguuguagaa

SEQ ID NO: 841434 - RNA, 19 nt, Artificial Sequence
  Description of Artificial Sequence: Synthetic oligonucleotide
gcgcccacaugagcgcccc

SEQ ID NO: 841435 - RNA, 19 nt, Artificial Sequence
  Description of Artificial Sequence: Synthetic oligonucleotide
ccgcgcccucuucacuagg

SEQ ID NO: 841436 - RNA, 19 nt, Artificial Sequence
  Description of Artificial Sequence: Synthetic oligonucleotide
gcgucgcuuggaaggcggc

SEQ ID NO: 841437 - RNA, 19 nt, Artificial Sequence
  Description of Artificial Sequence: Synthetic oligonucleotide
gggugcccucaaacgcacc

SEQ ID NO: 841438 - RNA, 19 nt, Artificial Sequence
  Description of Artificial Sequence: Synthetic oligonucleotide
ccggagagcggcagagcaa

SEQ ID NO: 841439 - RNA, 19 nt, Artificial Sequence
  Description of Artificial Sequence: Synthetic oligonucleotide
agcgccccguagacacgca

SEQ ID NO: 841440 - RNA, 19 nt, Artificial Sequence
  Description of Artificial Sequence: Synthetic oligonucleotide
ccucgucagggccccgcuc

SEQ ID NO: 841441 - RNA, 19 nt, Artificial Sequence
  Description of Artificial Sequence: Synthetic oligonucleotide
ccgacaggauacccggugu

SEQ ID NO: 841442 - RNA, 19 nt, Artificial Sequence
  Description of Artificial Sequence: Synthetic oligonucleotide
cggcgucgucuuccgagcc

SEQ ID NO: 841443 - RNA, 19 nt, Artificial Sequence
  Description of Artificial Sequence: Synthetic oligonucleotide
gcuugccgucggccggcgc

SEQ ID NO: 841444 - RNA, 19 nt, Artificial Sequence
  Description of Artificial Sequence: Synthetic oligonucleotide
gcgucggggcagguuggug

SEQ ID NO: 841445 - RNA, 19 nt, Artificial Sequence
  Description of Artificial Sequence: Synthetic oligonucleotide
ccggguccacgacgagagc

SEQ ID NO: 841446 - RNA, 19 nt, Artificial Sequence
  Description of Artificial Sequence: Synthetic oligonucleotide
ccgaacaccgagggcaucu

SEQ ID NO: 841447 - RNA, 19 nt, Artificial Sequence
  Description of Artificial Sequence: Synthetic oligonucleotide
ccggcacaaggagcggcug

SEQ ID NO: 841448 - RNA, 19 nt, Artificial Sequence
  Description of Artificial Sequence: Synthetic oligonucleotide
ccaugugggugcccucaaa

SEQ ID NO: 841449 - RNA, 19 nt, Artificial Sequence
  Description of Artificial Sequence: Synthetic oligonucleotide
caaggccgcauggcguggu

SEQ ID NO: 841450 - RNA, 19 nt, Artificial Sequence
  Description of Artificial Sequence: Synthetic oligonucleotide
ccucgggcgugcccaccac

SEQ ID NO: 841451 - RNA, 19 nt, Artificial Sequence
  Description of Artificial Sequence: Synthetic oligonucleotide
gcccacaugagcgccccgu

SEQ ID NO: 841452 - RNA, 19 nt, Artificial Sequence
  Description of Artificial Sequence: Synthetic oligonucleotide
ggauacccggugugucaau

SEQ ID NO: 841453 - RNA, 19 nt, Artificial Sequence
  Description of Artificial Sequence: Synthetic oligonucleotide
cgaggggcaaaaguuuugu

SEQ ID NO: 841454 - RNA, 19 nt, Artificial Sequence
  Description of Artificial Sequence: Synthetic oligonucleotide
cccucgagcuuggacucga

SEQ ID NO: 841455 - RNA, 19 nt, Artificial Sequence
  Description of Artificial Sequence: Synthetic oligonucleotide
cgaacaccgagggcaucuc

SEQ ID NO: 841456 - RNA, 19 nt, Artificial Sequence
  Description of Artificial Sequence: Synthetic oligonucleotide
gcgcaggaccucgggcgug

SEQ ID NO: 841457 - RNA, 19 nt, Artificial Sequence
  Description of Artificial Sequence: Synthetic oligonucleotide
cccuccgucucgccaugca

SEQ ID NO: 841458 - RNA, 19 nt, Artificial Sequence
  Description of Artificial Sequence: Synthetic oligonucleotide
gccccgaagcgguaauguu

SEQ ID NO: 841459 - RNA, 19 nt, Artificial Sequence
  Description of Artificial Sequence: Synthetic oligonucleotide
cggcgccaaguuguagaag

SEQ ID NO: 841460 - RNA, 19 nt, Artificial Sequence
  Description of Artificial Sequence: Synthetic oligonucleotide
gcccuccgucucgccaugc

SEQ ID NO: 841461 - RNA, 19 nt, Artificial Sequence
  Description of Artificial Sequence: Synthetic oligonucleotide
gcgccaaguuguagaagau

SEQ ID NO: 841462 - RNA, 19 nt, Artificial Sequence
  Description of Artificial Sequence: Synthetic oligonucleotide
ccgucucgccaugcaugac

SEQ ID NO: 841463 - RNA, 19 nt, Artificial Sequence
  Description of Artificial Sequence: Synthetic oligonucleotide
gcccugcacgccggccucc

SEQ ID NO: 841464 - RNA, 19 nt, Artificial Sequence
  Description of Artificial Sequence: Synthetic oligonucleotide
ccuccgucucgccaugcau

SEQ ID NO: 841465 - RNA, 19 nt, Artificial Sequence
  Description of Artificial Sequence: Synthetic oligonucleotide
gccccgagcuccgcccuuc

SEQ ID NO: 841466 - RNA, 19 nt, Artificial Sequence
  Description of Artificial Sequence: Synthetic oligonucleotide
gccucgucagggccccgcu

SEQ ID NO: 841467 - RNA, 19 nt, Artificial Sequence
  Description of Artificial Sequence: Synthetic oligonucleotide
cgccucgucagggccccgc

SEQ ID NO: 841468 - RNA, 19 nt, Artificial Sequence
  Description of Artificial Sequence: Synthetic oligonucleotide
cgaugccugcuggguuacc

SEQ ID NO: 841469 - RNA, 19 nt, Artificial Sequence
  Description of Artificial Sequence: Synthetic oligonucleotide
ggucgacgucgcucaguuu

SEQ ID NO: 841470 - RNA, 19 nt, Artificial Sequence
  Description of Artificial Sequence: Synthetic oligonucleotide
cgcccacaugagcgccccg

SEQ ID NO: 841471 - RNA, 19 nt, Artificial Sequence
  Description of Artificial Sequence: Synthetic oligonucleotide
cgcccugcacgccggccuc

SEQ ID NO: 841472 - RNA, 19 nt, Artificial Sequence
  Description of Artificial Sequence: Synthetic oligonucleotide
gcgccccguagacacgcau

SEQ ID NO: 841473 - RNA, 19 nt, Artificial Sequence
  Description of Artificial Sequence: Synthetic oligonucleotide
cggucgacgucgcucaguu

SEQ ID NO: 841474 - RNA, 19 nt, Artificial Sequence
  Description of Artificial Sequence: Synthetic oligonucleotide
cgcgcccucuucacuaggu

SEQ ID NO: 841475 - RNA, 19 nt, Artificial Sequence
  Description of Artificial Sequence: Synthetic oligonucleotide
ccggcaacggcggcugugu

SEQ ID NO: 841476 - RNA, 19 nt, Artificial Sequence
  Description of Artificial Sequence: Synthetic oligonucleotide
gcaugccgucucggucgac

SEQ ID NO: 841477 - RNA, 19 nt, Artificial Sequence
  Description of Artificial Sequence: Synthetic oligonucleotide
cccggcucacucucuguuu

SEQ ID NO: 841478 - RNA, 19 nt, Artificial Sequence
  Description of Artificial Sequence: Synthetic oligonucleotide
ccgagcccuccucgccguc

SEQ ID NO: 841479 - RNA, 19 nt, Artificial Sequence
  Description of Artificial Sequence: Synthetic oligonucleotide
cgacgucgcucaguuucca

SEQ ID NO: 841480 - RNA, 19 nt, Artificial Sequence
  Description of Artificial Sequence: Synthetic oligonucleotide
ccgaagcgguaauguuccu

SEQ ID NO: 841481 - RNA, 19 nt, Artificial Sequence
  Description of Artificial Sequence: Synthetic oligonucleotide
gcgccucgucagggccccg

SEQ ID NO: 841482 - RNA, 19 nt, Artificial Sequence
  Description of Artificial Sequence: Synthetic oligonucleotide
ccccgagcuccgcccuucu

SEQ ID NO: 841483 - RNA, 19 nt, Artificial Sequence
  Description of Artificial Sequence: Synthetic oligonucleotide
cccgagcuccgcccuucuu

SEQ ID NO: 841484 - RNA, 19 nt, Artificial Sequence
  Description of Artificial Sequence: Synthetic oligonucleotide
cgucucggucgacgucgcu

SEQ ID NO: 841485 - RNA, 19 nt, Artificial Sequence
  Description of Artificial Sequence: Synthetic oligonucleotide
cgggagccggggaccuccu

SEQ ID NO: 841486 - RNA, 19 nt, Artificial Sequence
  Description of Artificial Sequence: Synthetic oligonucleotide
cgggcgugcccaccaccuu

SEQ ID NO: 841487 - RNA, 19 nt, Artificial Sequence
  Description of Artificial Sequence: Synthetic oligonucleotide
cggcaacggcggcuguguu

SEQ ID NO: 841488 - RNA, 19 nt, Artificial Sequence
  Description of Artificial Sequence: Synthetic oligonucleotide
uugaauacaauaaucagcc

SEQ ID NO: 841489 - RNA, 19 nt, Artificial Sequence
  Description of Artificial Sequence: Synthetic oligonucleotide
uaacaaauccaacaaaacg

SEQ ID NO: 841490 - RNA, 19 nt, Artificial Sequence
  Description of Artificial Sequence: Synthetic oligonucleotide
uuugaauacaauaaucagc

SEQ ID NO: 841491 - RNA, 19 nt, Artificial Sequence
  Description of Artificial Sequence: Synthetic oligonucleotide
aacaaaacgacagguaucc

SEQ ID NO: 841492 - RNA, 19 nt, Artificial Sequence
  Description of Artificial Sequence: Synthetic oligonucleotide
agaaucaucaaacaauuuc

SEQ ID NO: 841493 - RNA, 19 nt, Artificial Sequence
  Description of Artificial Sequence: Synthetic oligonucleotide
aaaggauuacauuucauca

SEQ ID NO: 841494 - RNA, 19 nt, Artificial Sequence
  Description of Artificial Sequence: Synthetic oligonucleotide
gacacauuuaaauucauug

SEQ ID NO: 841495 - RNA, 19 nt, Artificial Sequence
  Description of Artificial Sequence: Synthetic oligonucleotide
auauacaacuucuucuucc

SEQ ID NO: 841496 - RNA, 19 nt, Artificial Sequence
  Description of Artificial Sequence: Synthetic oligonucleotide
aaguuuuaacugaagaacc

SEQ ID NO: 841497 - RNA, 19 nt, Artificial Sequence
  Description of Artificial Sequence: Synthetic oligonucleotide
ugauguaacacuacuacug

SEQ ID NO: 841498 - RNA, 19 nt, Artificial Sequence
  Description of Artificial Sequence: Synthetic oligonucleotide
aucaauuuaucuuuauuuc

SEQ ID NO: 841499 - RNA, 19 nt, Artificial Sequence
  Description of Artificial Sequence: Synthetic oligonucleotide
uucagcagugauuugacgg

SEQ ID NO: 841500 - RNA, 19 nt, Artificial Sequence
  Description of Artificial Sequence: Synthetic oligonucleotide
uuaaauucauuguuauagg

SEQ ID NO: 841501 - RNA, 19 nt, Artificial Sequence
  Description of Artificial Sequence: Synthetic oligonucleotide
agagacagaauccauccgc

SEQ ID NO: 841502 - RNA, 19 nt, Artificial Sequence
  Description of Artificial Sequence: Synthetic oligonucleotide
uuaucuuuauuucugaaua

SEQ ID NO: 841503 - RNA, 19 nt, Artificial Sequence
  Description of Artificial Sequence: Synthetic oligonucleotide
cuugcguuaaacuaugaag

SEQ ID NO: 841504 - RNA, 19 nt, Artificial Sequence
  Description of Artificial Sequence: Synthetic oligonucleotide
acaauaaucagccuccucu

SEQ ID NO: 841505 - RNA, 19 nt, Artificial Sequence
  Description of Artificial Sequence: Synthetic oligonucleotide
uugcguuaaacuaugaagu

SEQ ID NO: 841506 - RNA, 19 nt, Artificial Sequence
  Description of Artificial Sequence: Synthetic oligonucleotide
ucuucuaauuccuugucag

SEQ ID NO: 841507 - RNA, 19 nt, Artificial Sequence
  Description of Artificial Sequence: Synthetic oligonucleotide
uuuugaugaugacaacucg

SEQ ID NO: 841508 - RNA, 19 nt, Artificial Sequence
  Description of Artificial Sequence: Synthetic oligonucleotide
cuaacacucuuucagagcc

SEQ ID NO: 841509 - RNA, 19 nt, Artificial Sequence
  Description of Artificial Sequence: Synthetic oligonucleotide
ucucauugagcaccaaugg

SEQ ID NO: 841510 - RNA, 19 nt, Artificial Sequence
  Description of Artificial Sequence: Synthetic oligonucleotide
ugacaacucgcucaugucg

SEQ ID NO: 841511 - RNA, 19 nt, Artificial Sequence
  Description of Artificial Sequence: Synthetic oligonucleotide
auugguaucuucaucuugc

SEQ ID NO: 841512 - RNA, 19 nt, Artificial Sequence
  Description of Artificial Sequence: Synthetic oligonucleotide
aauuuaucuuuauuucuga

SEQ ID NO: 841513 - RNA, 19 nt, Artificial Sequence
  Description of Artificial Sequence: Synthetic oligonucleotide
aauaaucagccuccucugg

SEQ ID NO: 841514 - RNA, 19 nt, Artificial Sequence
  Description of Artificial Sequence: Synthetic oligonucleotide
aacacuacuacugauccug

SEQ ID NO: 841515 - RNA, 19 nt, Artificial Sequence
  Description of Artificial Sequence: Synthetic oligonucleotide
aaaccuucgagacauuagu

SEQ ID NO: 841516 - RNA, 19 nt, Artificial Sequence
  Description of Artificial Sequence: Synthetic oligonucleotide
uugcauauuaucaauuuau

SEQ ID NO: 841517 - RNA, 19 nt, Artificial Sequence
  Description of Artificial Sequence: Synthetic oligonucleotide
acaaacuccaauuaggaua

SEQ ID NO: 841518 - RNA, 19 nt, Artificial Sequence
  Description of Artificial Sequence: Synthetic oligonucleotide
guugauguaacacuacuac

SEQ ID NO: 841519 - RNA, 19 nt, Artificial Sequence
  Description of Artificial Sequence: Synthetic oligonucleotide
aggauuacauuucaucauc

SEQ ID NO: 841520 - RNA, 19 nt, Artificial Sequence
  Description of Artificial Sequence: Synthetic oligonucleotide
guaacacuacuacugaucc

SEQ ID NO: 841521 - RNA, 19 nt, Artificial Sequence
  Description of Artificial Sequence: Synthetic oligonucleotide
ucaaacaauuucucacugg

SEQ ID NO: 841522 - RNA, 19 nt, Artificial Sequence
  Description of Artificial Sequence: Synthetic oligonucleotide
agaaccaauagacacauuu

SEQ ID NO: 841523 - RNA, 19 nt, Artificial Sequence
  Description of Artificial Sequence: Synthetic oligonucleotide
acuaugaaguuuuaacuga

SEQ ID NO: 841524 - RNA, 19 nt, Artificial Sequence
  Description of Artificial Sequence: Synthetic oligonucleotide
aaauccauggggugaaaca

SEQ ID NO: 841525 - RNA, 19 nt, Artificial Sequence
  Description of Artificial Sequence: Synthetic oligonucleotide
aaccaauagacacauuuaa

SEQ ID NO: 841526 - RNA, 19 nt, Artificial Sequence
  Description of Artificial Sequence: Synthetic oligonucleotide
cuacuacugauccugaagc

SEQ ID NO: 841527 - RNA, 19 nt, Artificial Sequence
  Description of Artificial Sequence: Synthetic oligonucleotide
aucggagucaucaaagagc

SEQ ID NO: 841528 - RNA, 19 nt, Artificial Sequence
  Description of Artificial Sequence: Synthetic oligonucleotide
caaacuccaauuaggauac

SEQ ID NO: 841529 - RNA, 19 nt, Artificial Sequence
  Description of Artificial Sequence: Synthetic oligonucleotide
aagaguuugaauacaauaa

SEQ ID NO: 841530 - RNA, 19 nt, Artificial Sequence
  Description of Artificial Sequence: Synthetic oligonucleotide
aguuugaauacaauaauca

SEQ ID NO: 841531 - RNA, 19 nt, Artificial Sequence
  Description of Artificial Sequence: Synthetic oligonucleotide
uguaacacuacuacugauc

SEQ ID NO: 841532 - RNA, 19 nt, Artificial Sequence
  Description of Artificial Sequence: Synthetic oligonucleotide
gaauccauccgcuggaggc

SEQ ID NO: 841533 - RNA, 19 nt, Artificial Sequence
  Description of Artificial Sequence: Synthetic oligonucleotide
uucuaauuccuugucagag

SEQ ID NO: 841534 - RNA, 19 nt, Artificial Sequence
  Description of Artificial Sequence: Synthetic oligonucleotide
agucugauggcauccuacc

SEQ ID NO: 841535 - RNA, 19 nt, Artificial Sequence
  Description of Artificial Sequence: Synthetic oligonucleotide
uugcuuuacaucucuaucu

SEQ ID NO: 841536 - RNA, 19 nt, Artificial Sequence
  Description of Artificial Sequence: Synthetic oligonucleotide
cuuaaucuguccaaacuug

SEQ ID NO: 841537 - RNA, 19 nt, Artificial Sequence
  Description of Artificial Sequence: Synthetic oligonucleotide
ucaagugcuauuccaguug

SEQ ID NO: 841538 - RNA, 19 nt, Artificial Sequence
  Description of Artificial Sequence: Synthetic oligonucleotide
acgacagguauccaguuuc

SEQ ID NO: 841539 - RNA, 19 nt, Artificial Sequence
  Description of Artificial Sequence: Synthetic oligonucleotide
gucagagguauccuggucg

SEQ ID NO: 841540 - RNA, 19 nt, Artificial Sequence
  Description of Artificial Sequence: Synthetic oligonucleotide
aaaauccauggggugaaac

SEQ ID NO: 841541 - RNA, 19 nt, Artificial Sequence
  Description of Artificial Sequence: Synthetic oligonucleotide
uucuuauaaucuuugcacu

SEQ ID NO: 841542 - RNA, 19 nt, Artificial Sequence
  Description of Artificial Sequence: Synthetic oligonucleotide
auaauuaucuuugccuuuc

SEQ ID NO: 841543 - RNA, 19 nt, Artificial Sequence
  Description of Artificial Sequence: Synthetic oligonucleotide
ucggagucaucaaagagcu

SEQ ID NO: 841544 - RNA, 19 nt, Artificial Sequence
  Description of Artificial Sequence: Synthetic oligonucleotide
aauggaucauccucaaaau

SEQ ID NO: 841545 - RNA, 19 nt, Artificial Sequence
  Description of Artificial Sequence: Synthetic oligonucleotide
acuacuacugauccugaag

SEQ ID NO: 841546 - RNA, 19 nt, Artificial Sequence
  Description of Artificial Sequence: Synthetic oligonucleotide
ucaggugcucugaaaaugc

SEQ ID NO: 841547 - RNA, 19 nt, Artificial Sequence
  Description of Artificial Sequence: Synthetic oligonucleotide
ugccuuucuucuuagauuc

SEQ ID NO: 841548 - RNA, 19 nt, Artificial Sequence
  Description of Artificial Sequence: Synthetic oligonucleotide
ugauuugucagugucauuu

SEQ ID NO: 841549 - RNA, 19 nt, Artificial Sequence
  Description of Artificial Sequence: Synthetic oligonucleotide
agagucaucuucauacagc

SEQ ID NO: 841550 - RNA, 19 nt, Artificial Sequence
  Description of Artificial Sequence: Synthetic oligonucleotide
ucuuagauucucugucagg

SEQ ID NO: 841551 - RNA, 19 nt, Artificial Sequence
  Description of Artificial Sequence: Synthetic oligonucleotide
aucgauaggcucuucaagu

SEQ ID NO: 841552 - RNA, 19 nt, Artificial Sequence
  Description of Artificial Sequence: Synthetic oligonucleotide
aaucagccuccucugguuc

SEQ ID NO: 841553 - RNA, 19 nt, Artificial Sequence
  Description of Artificial Sequence: Synthetic oligonucleotide
ugucgguggacugagaccc

SEQ ID NO: 841554 - RNA, 19 nt, Artificial Sequence
  Description of Artificial Sequence: Synthetic oligonucleotide
uaggauuccccucuucaag

SEQ ID NO: 841555 - RNA, 19 nt, Artificial Sequence
  Description of Artificial Sequence: Synthetic oligonucleotide
uuuccuugcguuaaacuau

SEQ ID NO: 841556 - RNA, 19 nt, Artificial Sequence
  Description of Artificial Sequence: Synthetic oligonucleotide
agaguuugaauacaauaau

SEQ ID NO: 841557 - RNA, 19 nt, Artificial Sequence
  Description of Artificial Sequence: Synthetic oligonucleotide
ugcauauuaucaauuuauc

SEQ ID NO: 841558 - RNA, 19 nt, Artificial Sequence
  Description of Artificial Sequence: Synthetic oligonucleotide
ucagcagugauuugacggc

SEQ ID NO: 841559 - RNA, 19 nt, Artificial Sequence
  Description of Artificial Sequence: Synthetic oligonucleotide
aaaacgacagguauccagu

SEQ ID NO: 841560 - RNA, 19 nt, Artificial Sequence
  Description of Artificial Sequence: Synthetic oligonucleotide
acuuggcacauucuacucg

SEQ ID NO: 841561 - RNA, 19 nt, Artificial Sequence
  Description of Artificial Sequence: Synthetic oligonucleotide
ucugcugagcucauugucu

SEQ ID NO: 841562 - RNA, 19 nt, Artificial Sequence
  Description of Artificial Sequence: Synthetic oligonucleotide
uugacggccaccaaaccac

SEQ ID NO: 841563 - RNA, 19 nt, Artificial Sequence
  Description of Artificial Sequence: Synthetic oligonucleotide
aaaaccuucgagacauuag

SEQ ID NO: 841564 - RNA, 19 nt, Artificial Sequence
  Description of Artificial Sequence: Synthetic oligonucleotide
uggaaaggauuacauuuca

SEQ ID NO: 841565 - RNA, 19 nt, Artificial Sequence
  Description of Artificial Sequence: Synthetic oligonucleotide
cuucacauuccccauaguc

SEQ ID NO: 841566 - RNA, 19 nt, Artificial Sequence
  Description of Artificial Sequence: Synthetic oligonucleotide
uccucucucucucuugagg

SEQ ID NO: 841567 - RNA, 19 nt, Artificial Sequence
  Description of Artificial Sequence: Synthetic oligonucleotide
acuacugauccugaagcac

SEQ ID NO: 841568 - RNA, 19 nt, Artificial Sequence
  Description of Artificial Sequence: Synthetic oligonucleotide
ucuucaagcuugcucucag

SEQ ID NO: 841569 - RNA, 19 nt, Artificial Sequence
  Description of Artificial Sequence: Synthetic oligonucleotide
uugauguaacacuacuacu

SEQ ID NO: 841570 - RNA, 19 nt, Artificial Sequence
  Description of Artificial Sequence: Synthetic oligonucleotide
uugcaugcauuuaacaaau

SEQ ID NO: 841571 - RNA, 19 nt, Artificial Sequence
  Description of Artificial Sequence: Synthetic oligonucleotide
caagcuugcucucagggug

SEQ ID NO: 841572 - RNA, 19 nt, Artificial Sequence
  Description of Artificial Sequence: Synthetic oligonucleotide
uucuuuucaucgauaggcu

SEQ ID NO: 841573 - RNA, 19 nt, Artificial Sequence
  Description of Artificial Sequence: Synthetic oligonucleotide
ucuaccugguaaucuguag

SEQ ID NO: 841574 - RNA, 19 nt, Artificial Sequence
  Description of Artificial Sequence: Synthetic oligonucleotide
aacucgcucaugucgcauc

SEQ ID NO: 841575 - RNA, 19 nt, Artificial Sequence
  Description of Artificial Sequence: Synthetic oligonucleotide
uguugauguaacacuacua

SEQ ID NO: 841576 - RNA, 19 nt, Artificial Sequence
  Description of Artificial Sequence: Synthetic oligonucleotide
cagguauccaguuuccuug

SEQ ID NO: 841577 - RNA, 19 nt, Artificial Sequence
  Description of Artificial Sequence: Synthetic oligonucleotide
uacucgaaggucuucucug

SEQ ID NO: 841578 - RNA, 19 nt, Artificial Sequence
  Description of Artificial Sequence: Synthetic oligonucleotide
cauauuaucaauuuaucuu

SEQ ID NO: 841579 - RNA, 19 nt, Artificial Sequence
  Description of Artificial Sequence: Synthetic oligonucleotide
cucauuggaauuaucuuca

SEQ ID NO: 841580 - RNA, 19 nt, Artificial Sequence
  Description of Artificial Sequence: Synthetic oligonucleotide
acauuagucugauggcauc

SEQ ID NO: 841581 - RNA, 19 nt, Artificial Sequence
  Description of Artificial Sequence: Synthetic oligonucleotide
ucuugcauauuaucaauuu

SEQ ID NO: 841582 - RNA, 19 nt, Artificial Sequence
  Description of Artificial Sequence: Synthetic oligonucleotide
ucuaauuccuugucagagu

SEQ ID NO: 841583 - RNA, 19 nt, Artificial Sequence
  Description of Artificial Sequence: Synthetic oligonucleotide
gauuugacggccaccaaac

SEQ ID NO: 841584 - RNA, 19 nt, Artificial Sequence
  Description of Artificial Sequence: Synthetic oligonucleotide
gaguuugaauacaauaauc

SEQ ID NO: 841585 - RNA, 19 nt, Artificial Sequence
  Description of Artificial Sequence: Synthetic oligonucleotide
aaagcaaguggaaaggauu

SEQ ID NO: 841586 - RNA, 19 nt, Artificial Sequence
  Description of Artificial Sequence: Synthetic oligonucleotide
uuguuauagguaagaacaa

SEQ ID NO: 841587 - RNA, 19 nt, Artificial Sequence
  Description of Artificial Sequence: Synthetic oligonucleotide
cuugcuuuacaucucuauc

SEQ ID NO: 841588 - RNA, 19 nt, Artificial Sequence
  Description of Artificial Sequence: Synthetic oligonucleotide
uuuccucucucucucuuga

SEQ ID NO: 841589 - RNA, 19 nt, Artificial Sequence
  Description of Artificial Sequence: Synthetic oligonucleotide
acucgcucaugucgcaucc

SEQ ID NO: 841590 - RNA, 19 nt, Artificial Sequence
  Description of Artificial Sequence: Synthetic oligonucleotide
ucgauaggcucuucaagug

SEQ ID NO: 841591 - RNA, 19 nt, Artificial Sequence
  Description of Artificial Sequence: Synthetic oligonucleotide
uuaaacuaugaaguuuuaa

SEQ ID NO: 841592 - RNA, 19 nt, Artificial Sequence
  Description of Artificial Sequence: Synthetic oligonucleotide
uuucaucggagucaucaaa

SEQ ID NO: 841593 - RNA, 19 nt, Artificial Sequence
  Description of Artificial Sequence: Synthetic oligonucleotide
ucuuuugccaggccauucu

SEQ ID NO: 841594 - RNA, 19 nt, Artificial Sequence
  Description of Artificial Sequence: Synthetic oligonucleotide
uuagauucucugucagggc

SEQ ID NO: 841595 - RNA, 19 nt, Artificial Sequence
  Description of Artificial Sequence: Synthetic oligonucleotide
auaucacaaacuccaauua

SEQ ID NO: 841596 - RNA, 19 nt, Artificial Sequence
  Description of Artificial Sequence: Synthetic oligonucleotide
aacuccuugucagagguau

SEQ ID NO: 841597 - RNA, 19 nt, Artificial Sequence
  Description of Artificial Sequence: Synthetic oligonucleotide
uguagucccaucccaggcu

SEQ ID NO: 841598 - RNA, 19 nt, Artificial Sequence
  Description of Artificial Sequence: Synthetic oligonucleotide
aaccuucgagacauuaguc

SEQ ID NO: 841599 - RNA, 19 nt, Artificial Sequence
  Description of Artificial Sequence: Synthetic oligonucleotide
uccucuaccugguaaucug

SEQ ID NO: 841600 - RNA, 19 nt, Artificial Sequence
  Description of Artificial Sequence: Synthetic oligonucleotide
caagaguuugaauacaaua

SEQ ID NO: 841601 - RNA, 19 nt, Artificial Sequence
  Description of Artificial Sequence: Synthetic oligonucleotide
ucugauuugucagugucau

SEQ ID NO: 841602 - RNA, 19 nt, Artificial Sequence
  Description of Artificial Sequence: Synthetic oligonucleotide
caauaaucagccuccucug

SEQ ID NO: 841603 - RNA, 19 nt, Artificial Sequence
  Description of Artificial Sequence: Synthetic oligonucleotide
uuccuugcguuaaacuaug

SEQ ID NO: 841604 - RNA, 19 nt, Artificial Sequence
  Description of Artificial Sequence: Synthetic oligonucleotide
ucuugcuuuacaucucuau

SEQ ID NO: 841605 - RNA, 19 nt, Artificial Sequence
  Description of Artificial Sequence: Synthetic oligonucleotide
caccaaaccaccuuccauc

SEQ ID NO: 841606 - RNA, 19 nt, Artificial Sequence
  Description of Artificial Sequence: Synthetic oligonucleotide
agggcaaagcugcugucgg

SEQ ID NO: 841607 - RNA, 19 nt, Artificial Sequence
  Description of Artificial Sequence: Synthetic oligonucleotide
ucgcucaugucgcauccgg

SEQ ID NO: 841608 - RNA, 19 nt, Artificial Sequence
  Description of Artificial Sequence: Synthetic oligonucleotide
uguuauagguaagaacaaa

SEQ ID NO: 841609 - RNA, 19 nt, Artificial Sequence
  Description of Artificial Sequence: Synthetic oligonucleotide
uggcauccuaccacuaugc

SEQ ID NO: 841610 - RNA, 19 nt, Artificial Sequence
  Description of Artificial Sequence: Synthetic oligonucleotide
caucggagucaucaaagag

SEQ ID NO: 841611 - RNA, 19 nt, Artificial Sequence
  Description of Artificial Sequence: Synthetic oligonucleotide
gaugacaacucgcucaugu

SEQ ID NO: 841612 - RNA, 19 nt, Artificial Sequence
  Description of Artificial Sequence: Synthetic oligonucleotide
gaagcagagacagaaucca

SEQ ID NO: 841613 - RNA, 19 nt, Artificial Sequence
  Description of Artificial Sequence: Synthetic oligonucleotide
uagucugauggcauccuac

SEQ ID NO: 841614 - RNA, 19 nt, Artificial Sequence
  Description of Artificial Sequence: Synthetic oligonucleotide
cauugagcaccaauggauc

SEQ ID NO: 841615 - RNA, 19 nt, Artificial Sequence
  Description of Artificial Sequence: Synthetic oligonucleotide
aucugggugccuaucaaac

SEQ ID NO: 841616 - RNA, 19 nt, Artificial Sequence
  Description of Artificial Sequence: Synthetic oligonucleotide
guuuccuugcguuaaacua

SEQ ID NO: 841617 - RNA, 19 nt, Artificial Sequence
  Description of Artificial Sequence: Synthetic oligonucleotide
auugagcaccaauggauca

SEQ ID NO: 841618 - RNA, 19 nt, Artificial Sequence
  Description of Artificial Sequence: Synthetic oligonucleotide
ucaucggagucaucaaaga

SEQ ID NO: 841619 - RNA, 19 nt, Artificial Sequence
  Description of Artificial Sequence: Synthetic oligonucleotide
ccuaucaaacagaaggagc

SEQ ID NO: 841620 - RNA, 19 nt, Artificial Sequence
  Description of Artificial Sequence: Synthetic oligonucleotide
ucuuuucaucgauaggcuc

SEQ ID NO: 841621 - RNA, 19 nt, Artificial Sequence
  Description of Artificial Sequence: Synthetic oligonucleotide
guacccaccuucuuuagca

SEQ ID NO: 841622 - RNA, 19 nt, Artificial Sequence
  Description of Artificial Sequence: Synthetic oligonucleotide
caucgauaggcucuucaag

SEQ ID NO: 841623 - RNA, 19 nt, Artificial Sequence
  Description of Artificial Sequence: Synthetic oligonucleotide
uacuacugauccugaagca

SEQ ID NO: 841624 - RNA, 19 nt, Artificial Sequence
  Description of Artificial Sequence: Synthetic oligonucleotide
caggcaaacagagacgcag

SEQ ID NO: 841625 - RNA, 19 nt, Artificial Sequence
  Description of Artificial Sequence: Synthetic oligonucleotide
gacaacucgcucaugucgc

SEQ ID NO: 841626 - RNA, 19 nt, Artificial Sequence
  Description of Artificial Sequence: Synthetic oligonucleotide
agaauccauccgcuggagg

SEQ ID NO: 841627 - RNA, 19 nt, Artificial Sequence
  Description of Artificial Sequence: Synthetic oligonucleotide
ucucaacauuuucagggaa

SEQ ID NO: 841628 - RNA, 19 nt, Artificial Sequence
  Description of Artificial Sequence: Synthetic oligonucleotide
uucagacucuuuugccagg

SEQ ID NO: 841629 - RNA, 19 nt, Artificial Sequence
  Description of Artificial Sequence: Synthetic oligonucleotide
aggguggcccucuucacuc

SEQ ID NO: 841630 - RNA, 19 nt, Artificial Sequence
  Description of Artificial Sequence: Synthetic oligonucleotide
ucaucgauaggcucuucaa

SEQ ID NO: 841631 - RNA, 19 nt, Artificial Sequence
  Description of Artificial Sequence: Synthetic oligonucleotide
auggcauccuaccacuaug

SEQ ID NO: 841632 - RNA, 19 nt, Artificial Sequence
  Description of Artificial Sequence: Synthetic oligonucleotide
ugcacuuguugauguaaca

SEQ ID NO: 841633 - RNA, 19 nt, Artificial Sequence
  Description of Artificial Sequence: Synthetic oligonucleotide
uaccugguaaucuguaguc

SEQ ID NO: 841634 - RNA, 19 nt, Artificial Sequence
  Description of Artificial Sequence: Synthetic oligonucleotide
aguuuuaacugaagaacca

SEQ ID NO: 841635 - RNA, 19 nt, Artificial Sequence
  Description of Artificial Sequence: Synthetic oligonucleotide
cauuagucugauggcaucc

SEQ ID NO: 841636 - RNA, 19 nt, Artificial Sequence
  Description of Artificial Sequence: Synthetic oligonucleotide
ucaugucgcauccgggaug

SEQ ID NO: 841637 - RNA, 19 nt, Artificial Sequence
  Description of Artificial Sequence: Synthetic oligonucleotide
uuaggauuccccucuucaa

SEQ ID NO: 841638 - RNA, 19 nt, Artificial Sequence
  Description of Artificial Sequence: Synthetic oligonucleotide
ucuugaggucuccucuacc

SEQ ID NO: 841639 - RNA, 19 nt, Artificial Sequence
  Description of Artificial Sequence: Synthetic oligonucleotide
aaacuucucauuggaauua

SEQ ID NO: 841640 - RNA, 19 nt, Artificial Sequence
  Description of Artificial Sequence: Synthetic oligonucleotide
cuugcucucaggguggccc

SEQ ID NO: 841641 - RNA, 19 nt, Artificial Sequence
  Description of Artificial Sequence: Synthetic oligonucleotide
ugugguagacaugcucagg

SEQ ID NO: 841642 - RNA, 19 nt, Artificial Sequence
  Description of Artificial Sequence: Synthetic oligonucleotide
agcagagacagaauccauc

SEQ ID NO: 841643 - RNA, 19 nt, Artificial Sequence
  Description of Artificial Sequence: Synthetic oligonucleotide
ugacucucugcugagcuca

SEQ ID NO: 841644 - RNA, 19 nt, Artificial Sequence
  Description of Artificial Sequence: Synthetic oligonucleotide
ugaauacaauaaucagccu

SEQ ID NO: 841645 - RNA, 19 nt, Artificial Sequence
  Description of Artificial Sequence: Synthetic oligonucleotide
uaugcacuuguugauguaa

SEQ ID NO: 841646 - RNA, 19 nt, Artificial Sequence
  Description of Artificial Sequence: Synthetic oligonucleotide
agacauuagucugauggca

SEQ ID NO: 841647 - RNA, 19 nt, Artificial Sequence
  Description of Artificial Sequence: Synthetic oligonucleotide
cauacagcuuuucugggca

SEQ ID NO: 841648 - RNA, 19 nt, Artificial Sequence
  Description of Artificial Sequence: Synthetic oligonucleotide
cauagucccucucucauca

SEQ ID NO: 841649 - RNA, 19 nt, Artificial Sequence
  Description of Artificial Sequence: Synthetic oligonucleotide
gagggcaaagcugcugucg

SEQ ID NO: 841650 - RNA, 19 nt, Artificial Sequence
  Description of Artificial Sequence: Synthetic oligonucleotide
ucaggucuccaauccaacu

SEQ ID NO: 841651 - RNA, 19 nt, Artificial Sequence
  Description of Artificial Sequence: Synthetic oligonucleotide
cuuuugcaugcauuuaaca

SEQ ID NO: 841652 - RNA, 19 nt, Artificial Sequence
  Description of Artificial Sequence: Synthetic oligonucleotide
gagcuucuuaaucugucca

SEQ ID NO: 841653 - RNA, 19 nt, Artificial Sequence
  Description of Artificial Sequence: Synthetic oligonucleotide
caauuaggauacuuuaaaa

SEQ ID NO: 841654 - RNA, 19 nt, Artificial Sequence
  Description of Artificial Sequence: Synthetic oligonucleotide
aaacagagacgcagggcuc

SEQ ID NO: 841655 - RNA, 19 nt, Artificial Sequence
  Description of Artificial Sequence: Synthetic oligonucleotide
uuuucaucggagucaucaa

SEQ ID NO: 841656 - RNA, 19 nt, Artificial Sequence
  Description of Artificial Sequence: Synthetic oligonucleotide
uuugccaggccauucuuuu

SEQ ID NO: 841657 - RNA, 19 nt, Artificial Sequence
  Description of Artificial Sequence: Synthetic oligonucleotide
acauucuacucgaaggucu

SEQ ID NO: 841658 - RNA, 19 nt, Artificial Sequence
  Description of Artificial Sequence: Synthetic oligonucleotide
caggucuccaauccaacug

SEQ ID NO: 841659 - RNA, 19 nt, Artificial Sequence
  Description of Artificial Sequence: Synthetic oligonucleotide
ugcguuaaacuaugaaguu

SEQ ID NO: 841660 - RNA, 19 nt, Artificial Sequence
  Description of Artificial Sequence: Synthetic oligonucleotide
uucaagugcuauuccaguu

SEQ ID NO: 841661 - RNA, 19 nt, Artificial Sequence
  Description of Artificial Sequence: Synthetic oligonucleotide
cagaaggagcuucuuaauc

SEQ ID NO: 841662 - RNA, 19 nt, Artificial Sequence
  Description of Artificial Sequence: Synthetic oligonucleotide
accaaaccaccuuccauca

SEQ ID NO: 841663 - RNA, 19 nt, Artificial Sequence
  Description of Artificial Sequence: Synthetic oligonucleotide
caugucgcauccgggaugg

SEQ ID NO: 841664 - RNA, 19 nt, Artificial Sequence
  Description of Artificial Sequence: Synthetic oligonucleotide
cuacugauccugaagcaca

SEQ ID NO: 841665 - RNA, 19 nt, Artificial Sequence
  Description of Artificial Sequence: Synthetic oligonucleotide
uuuuaggauuccccucuuc

SEQ ID NO: 841666 - RNA, 19 nt, Artificial Sequence
  Description of Artificial Sequence: Synthetic oligonucleotide
agcaaguggaaaggauuac

SEQ ID NO: 841667 - RNA, 19 nt, Artificial Sequence
  Description of Artificial Sequence: Synthetic oligonucleotide
caaacagagacgcagggcu

SEQ ID NO: 841668 - RNA, 19 nt, Artificial Sequence
  Description of Artificial Sequence: Synthetic oligonucleotide
auccaacaaaacgacaggu

SEQ ID NO: 841669 - RNA, 19 nt, Artificial Sequence
  Description of Artificial Sequence: Synthetic oligonucleotide
aacagagacgcagggcucu

SEQ ID NO: 841670 - RNA, 19 nt, Artificial Sequence
  Description of Artificial Sequence: Synthetic oligonucleotide
cugagacccaucuuccuuc

SEQ ID NO: 841671 - RNA, 19 nt, Artificial Sequence
  Description of Artificial Sequence: Synthetic oligonucleotide
uacaauaaucagccuccuc

SEQ ID NO: 841672 - RNA, 19 nt, Artificial Sequence
  Description of Artificial Sequence: Synthetic oligonucleotide
ucagacucuuuugccaggc

SEQ ID NO: 841673 - RNA, 19 nt, Artificial Sequence
  Description of Artificial Sequence: Synthetic oligonucleotide
aacgacagguauccaguuu

SEQ ID NO: 841674 - RNA, 19 nt, Artificial Sequence
  Description of Artificial Sequence: Synthetic oligonucleotide
aaacgacagguauccaguu

SEQ ID NO: 841675 - RNA, 19 nt, Artificial Sequence
  Description of Artificial Sequence: Synthetic oligonucleotide
cagagacagaauccauccg

SEQ ID NO: 841676 - RNA, 19 nt, Artificial Sequence
  Description of Artificial Sequence: Synthetic oligonucleotide
cucaggugcucugaaaaug

SEQ ID NO: 841677 - RNA, 19 nt, Artificial Sequence
  Description of Artificial Sequence: Synthetic oligonucleotide
aagcuugcucucagggugg

SEQ ID NO: 841678 - RNA, 19 nt, Artificial Sequence
  Description of Artificial Sequence: Synthetic oligonucleotide
caggccauucuuuucauaa

SEQ ID NO: 841679 - RNA, 19 nt, Artificial Sequence
  Description of Artificial Sequence: Synthetic oligonucleotide
ccugguaaucuguaguccc

SEQ ID NO: 841680 - RNA, 19 nt, Artificial Sequence
  Description of Artificial Sequence: Synthetic oligonucleotide
aacuccaauuaggauacuu

SEQ ID NO: 841681 - RNA, 19 nt, Artificial Sequence
  Description of Artificial Sequence: Synthetic oligonucleotide
uugguaucuucaucuugcu

SEQ ID NO: 841682 - RNA, 19 nt, Artificial Sequence
  Description of Artificial Sequence: Synthetic oligonucleotide
gucgcauccgggauggucc

SEQ ID NO: 841683 - RNA, 19 nt, Artificial Sequence
  Description of Artificial Sequence: Synthetic oligonucleotide
uaacacuacuacugauccu

SEQ ID NO: 841684 - RNA, 19 nt, Artificial Sequence
  Description of Artificial Sequence: Synthetic oligonucleotide
agacagaauccauccgcug

SEQ ID NO: 841685 - RNA, 19 nt, Artificial Sequence
  Description of Artificial Sequence: Synthetic oligonucleotide
auucucuugagaucccauu

SEQ ID NO: 841686 - RNA, 19 nt, Artificial Sequence
  Description of Artificial Sequence: Synthetic oligonucleotide
uuuugccaggccauucuuu

SEQ ID NO: 841687 - RNA, 19 nt, Artificial Sequence
  Description of Artificial Sequence: Synthetic oligonucleotide
agaggccacaccaucuggg

SEQ ID NO: 841688 - RNA, 19 nt, Artificial Sequence
  Description of Artificial Sequence: Synthetic oligonucleotide
cugucgguggacugagacc

SEQ ID NO: 841689 - RNA, 19 nt, Artificial Sequence
  Description of Artificial Sequence: Synthetic oligonucleotide
aaauagcuugucauuggua

SEQ ID NO: 841690 - RNA, 19 nt, Artificial Sequence
  Description of Artificial Sequence: Synthetic oligonucleotide
caccaauggaucauccuca

SEQ ID NO: 841691 - RNA, 19 nt, Artificial Sequence
  Description of Artificial Sequence: Synthetic oligonucleotide
acuuguugauguaacacua

SEQ ID NO: 841692 - RNA, 19 nt, Artificial Sequence
  Description of Artificial Sequence: Synthetic oligonucleotide
ucgaaggucuucucugauc

SEQ ID NO: 841693 - RNA, 19 nt, Artificial Sequence
  Description of Artificial Sequence: Synthetic oligonucleotide
auguaacacuacuacugau

SEQ ID NO: 841694 - RNA, 19 nt, Artificial Sequence
  Description of Artificial Sequence: Synthetic oligonucleotide
agcaccaauggaucauccu

SEQ ID NO: 841695 - RNA, 19 nt, Artificial Sequence
  Description of Artificial Sequence: Synthetic oligonucleotide
uccaauccaacugcuucug

SEQ ID NO: 841696 - RNA, 19 nt, Artificial Sequence
  Description of Artificial Sequence: Synthetic oligonucleotide
uccaguuuccuugcguuaa

SEQ ID NO: 841697 - RNA, 19 nt, Artificial Sequence
  Description of Artificial Sequence: Synthetic oligonucleotide
cuuuccucucucucucuug

SEQ ID NO: 841698 - RNA, 19 nt, Artificial Sequence
  Description of Artificial Sequence: Synthetic oligonucleotide
cacacuccuuuucuucugc

SEQ ID NO: 841699 - RNA, 19 nt, Artificial Sequence
  Description of Artificial Sequence: Synthetic oligonucleotide
uuagucugauggcauccua

SEQ ID NO: 841700 - RNA, 19 nt, Artificial Sequence
  Description of Artificial Sequence: Synthetic oligonucleotide
uauccuggucgaaaucuuu

SEQ ID NO: 841701 - RNA, 19 nt, Artificial Sequence
  Description of Artificial Sequence: Synthetic oligonucleotide
gcauauuaucaauuuaucu

SEQ ID NO: 841702 - RNA, 19 nt, Artificial Sequence
  Description of Artificial Sequence: Synthetic oligonucleotide
agagccuuccucaccuaac

SEQ ID NO: 841703 - RNA, 19 nt, Artificial Sequence
  Description of Artificial Sequence: Synthetic oligonucleotide
ugagacccaucuuccuuca

SEQ ID NO: 841704 - RNA, 19 nt, Artificial Sequence
  Description of Artificial Sequence: Synthetic oligonucleotide
ucucucuugaggucuccuc

SEQ ID NO: 841705 - RNA, 19 nt, Artificial Sequence
  Description of Artificial Sequence: Synthetic oligonucleotide
caggugcucugaaaaugcc

SEQ ID NO: 841706 - RNA, 19 nt, Artificial Sequence
  Description of Artificial Sequence: Synthetic oligonucleotide
cuuccucguacccaccuuc

SEQ ID NO: 841707 - RNA, 19 nt, Artificial Sequence
  Description of Artificial Sequence: Synthetic oligonucleotide
agaucccauuuuaggauuc

SEQ ID NO: 841708 - RNA, 19 nt, Artificial Sequence
  Description of Artificial Sequence: Synthetic oligonucleotide
ccuucgagacauuagucug

SEQ ID NO: 841709 - RNA, 19 nt, Artificial Sequence
  Description of Artificial Sequence: Synthetic oligonucleotide
ucauuggaauuaucuucaa

SEQ ID NO: 841710 - RNA, 19 nt, Artificial Sequence
  Description of Artificial Sequence: Synthetic oligonucleotide
gaaccaauagacacauuua

SEQ ID NO: 841711 - RNA, 19 nt, Artificial Sequence
  Description of Artificial Sequence: Synthetic oligonucleotide
cauggggugaaacauauuu

SEQ ID NO: 841712 - RNA, 19 nt, Artificial Sequence
  Description of Artificial Sequence: Synthetic oligonucleotide
auuccccucuucaagcuug

SEQ ID NO: 841713 - RNA, 19 nt, Artificial Sequence
  Description of Artificial Sequence: Synthetic oligonucleotide
cccaucuuccuucacauuc

SEQ ID NO: 841714 - RNA, 19 nt, Artificial Sequence
  Description of Artificial Sequence: Synthetic oligonucleotide
cucaggucuccaauccaac

SEQ ID NO: 841715 - RNA, 19 nt, Artificial Sequence
  Description of Artificial Sequence: Synthetic oligonucleotide
accuucugauuugucagug

SEQ ID NO: 841716 - RNA, 19 nt, Artificial Sequence
  Description of Artificial Sequence: Synthetic oligonucleotide
gguucccugaaggacacag

SEQ ID NO: 841717 - RNA, 19 nt, Artificial Sequence
  Description of Artificial Sequence: Synthetic oligonucleotide
guuguagcuuccugagcac

SEQ ID NO: 841718 - RNA, 19 nt, Artificial Sequence
  Description of Artificial Sequence: Synthetic oligonucleotide
accaauagacacauuuaaa

SEQ ID NO: 841719 - RNA, 19 nt, Artificial Sequence
  Description of Artificial Sequence: Synthetic oligonucleotide
uuccucguacccaccuucu

SEQ ID NO: 841720 - RNA, 19 nt, Artificial Sequence
  Description of Artificial Sequence: Synthetic oligonucleotide
aggcaaacagagacgcagg

SEQ ID NO: 841721 - RNA, 19 nt, Artificial Sequence
  Description of Artificial Sequence: Synthetic oligonucleotide
ugacggccaccaaaccacc

SEQ ID NO: 841722 - RNA, 19 nt, Artificial Sequence
  Description of Artificial Sequence: Synthetic oligonucleotide
uuuucaucgauaggcucuu

SEQ ID NO: 841723 - RNA, 19 nt, Artificial Sequence
  Description of Artificial Sequence: Synthetic oligonucleotide
ucucuugaggucuccucua

SEQ ID NO: 841724 - RNA, 19 nt, Artificial Sequence
  Description of Artificial Sequence: Synthetic oligonucleotide
auuagucugauggcauccu

SEQ ID NO: 841725 - RNA, 19 nt, Artificial Sequence
  Description of Artificial Sequence: Synthetic oligonucleotide
uuccucucucucucuugag

SEQ ID NO: 841726 - RNA, 19 nt, Artificial Sequence
  Description of Artificial Sequence: Synthetic oligonucleotide
ugcaugcauuuaacaaauc

SEQ ID NO: 841727 - RNA, 19 nt, Artificial Sequence
  Description of Artificial Sequence: Synthetic oligonucleotide
auauucuuuugcaugcauu

SEQ ID NO: 841728 - RNA, 19 nt, Artificial Sequence
  Description of Artificial Sequence: Synthetic oligonucleotide
agagguauccuggucgaaa

SEQ ID NO: 841729 - RNA, 19 nt, Artificial Sequence
  Description of Artificial Sequence: Synthetic oligonucleotide
ucaucacuacugagggcaa

SEQ ID NO: 841730 - RNA, 19 nt, Artificial Sequence
  Description of Artificial Sequence: Synthetic oligonucleotide
uucgagacauuagucugau

SEQ ID NO: 841731 - RNA, 19 nt, Artificial Sequence
  Description of Artificial Sequence: Synthetic oligonucleotide
cugguucccugaaggacac

SEQ ID NO: 841732 - RNA, 19 nt, Artificial Sequence
  Description of Artificial Sequence: Synthetic oligonucleotide
caguuguagcuuccugagc

SEQ ID NO: 841733 - RNA, 19 nt, Artificial Sequence
  Description of Artificial Sequence: Synthetic oligonucleotide
auucuacucgaaggucuuc

SEQ ID NO: 841734 - RNA, 19 nt, Artificial Sequence
  Description of Artificial Sequence: Synthetic oligonucleotide
uugagcaccaauggaucau

SEQ ID NO: 841735 - RNA, 19 nt, Artificial Sequence
  Description of Artificial Sequence: Synthetic oligonucleotide
cacauucuacucgaagguc

SEQ ID NO: 841736 - RNA, 19 nt, Artificial Sequence
  Description of Artificial Sequence: Synthetic oligonucleotide
cucuugaggucuccucuac

SEQ ID NO: 841737 - RNA, 19 nt, Artificial Sequence
  Description of Artificial Sequence: Synthetic oligonucleotide
cucaccuaacacucuuuca

SEQ ID NO: 841738 - RNA, 19 nt, Artificial Sequence
  Description of Artificial Sequence: Synthetic oligonucleotide
cugguaaucuguaguccca

SEQ ID NO: 841739 - RNA, 19 nt, Artificial Sequence
  Description of Artificial Sequence: Synthetic oligonucleotide
uccuugcguuaaacuauga

SEQ ID NO: 841740 - RNA, 19 nt, Artificial Sequence
  Description of Artificial Sequence: Synthetic oligonucleotide
caccuaacacucuuucaga

SEQ ID NO: 841741 - RNA, 19 nt, Artificial Sequence
  Description of Artificial Sequence: Synthetic oligonucleotide
uuccccucuucaagcuugc

SEQ ID NO: 841742 - RNA, 19 nt, Artificial Sequence
  Description of Artificial Sequence: Synthetic oligonucleotide
gccuaucaaacagaaggag

SEQ ID NO: 841743 - RNA, 19 nt, Artificial Sequence
  Description of Artificial Sequence: Synthetic oligonucleotide
accaauggaucauccucaa

SEQ ID NO: 841744 - RNA, 19 nt, Artificial Sequence
  Description of Artificial Sequence: Synthetic oligonucleotide
gguauccaguuuccuugcg

SEQ ID NO: 841745 - RNA, 19 nt, Artificial Sequence
  Description of Artificial Sequence: Synthetic oligonucleotide
cauuggaauuaucuucaaa

SEQ ID NO: 841746 - RNA, 19 nt, Artificial Sequence
  Description of Artificial Sequence: Synthetic oligonucleotide
acaacucgcucaugucgca

SEQ ID NO: 841747 - RNA, 19 nt, Artificial Sequence
  Description of Artificial Sequence: Synthetic oligonucleotide
acacuccuuuucuucugcu

SEQ ID NO: 841748 - RNA, 19 nt, Artificial Sequence
  Description of Artificial Sequence: Synthetic oligonucleotide
gcugucgguggacugagac

SEQ ID NO: 841749 - RNA, 19 nt, Artificial Sequence
  Description of Artificial Sequence: Synthetic oligonucleotide
agauucucugucagggcca

SEQ ID NO: 841750 - RNA, 19 nt, Artificial Sequence
  Description of Artificial Sequence: Synthetic oligonucleotide
cucucucucucuugagguc

SEQ ID NO: 841751 - RNA, 19 nt, Artificial Sequence
  Description of Artificial Sequence: Synthetic oligonucleotide
gucugauggcauccuacca

SEQ ID NO: 841752 - RNA, 19 nt, Artificial Sequence
  Description of Artificial Sequence: Synthetic oligonucleotide
ugaggcucucuuccccuuc

SEQ ID NO: 841753 - RNA, 19 nt, Artificial Sequence
  Description of Artificial Sequence: Synthetic oligonucleotide
cagcagugauuugacggcc

SEQ ID NO: 841754 - RNA, 19 nt, Artificial Sequence
  Description of Artificial Sequence: Synthetic oligonucleotide
cuaccugguaaucuguagu

SEQ ID NO: 841755 - RNA, 19 nt, Artificial Sequence
  Description of Artificial Sequence: Synthetic oligonucleotide
ugguaaucuguagucccau

SEQ ID NO: 841756 - RNA, 19 nt, Artificial Sequence
  Description of Artificial Sequence: Synthetic oligonucleotide
caaauagcuugucauuggu

SEQ ID NO: 841757 - RNA, 19 nt, Artificial Sequence
  Description of Artificial Sequence: Synthetic oligonucleotide
auucuuuugcaugcauuua

SEQ ID NO: 841758 - RNA, 19 nt, Artificial Sequence
  Description of Artificial Sequence: Synthetic oligonucleotide
uccgcuggaggccucuguu

SEQ ID NO: 841759 - RNA, 19 nt, Artificial Sequence
  Description of Artificial Sequence: Synthetic oligonucleotide
caauuucucacuggcaucu

SEQ ID NO: 841760 - RNA, 19 nt, Artificial Sequence
  Description of Artificial Sequence: Synthetic oligonucleotide
ggcagucuuccuuggauuc

SEQ ID NO: 841761 - RNA, 19 nt, Artificial Sequence
  Description of Artificial Sequence: Synthetic oligonucleotide
aggugcucugaaaaugccu

SEQ ID NO: 841762 - RNA, 19 nt, Artificial Sequence
  Description of Artificial Sequence: Synthetic oligonucleotide
cucguacccaccuucuuua

SEQ ID NO: 841763 - RNA, 19 nt, Artificial Sequence
  Description of Artificial Sequence: Synthetic oligonucleotide
agacaugcucaggugcucu

SEQ ID NO: 841764 - RNA, 19 nt, Artificial Sequence
  Description of Artificial Sequence: Synthetic oligonucleotide
ggauuacauuucaucauca

SEQ ID NO: 841765 - RNA, 19 nt, Artificial Sequence
  Description of Artificial Sequence: Synthetic oligonucleotide
agcuugcucucaggguggc

SEQ ID NO: 841766 - RNA, 19 nt, Artificial Sequence
  Description of Artificial Sequence: Synthetic oligonucleotide
cugacucucugcugagcuc

SEQ ID NO: 841767 - RNA, 19 nt, Artificial Sequence
  Description of Artificial Sequence: Synthetic oligonucleotide
cagacucuuuugccaggcc

SEQ ID NO: 841768 - RNA, 19 nt, Artificial Sequence
  Description of Artificial Sequence: Synthetic oligonucleotide
uccucaccuaacacucuuu

SEQ ID NO: 841769 - RNA, 19 nt, Artificial Sequence
  Description of Artificial Sequence: Synthetic oligonucleotide
gggguagcccucuucacuc

SEQ ID NO: 841770 - RNA, 19 nt, Artificial Sequence
  Description of Artificial Sequence: Synthetic oligonucleotide
ucgagacauuagucugaug

SEQ ID NO: 841771 - RNA, 19 nt, Artificial Sequence
  Description of Artificial Sequence: Synthetic oligonucleotide
cuucaaauagcuugucauu

SEQ ID NO: 841772 - RNA, 19 nt, Artificial Sequence
  Description of Artificial Sequence: Synthetic oligonucleotide
gagacagaauccauccgcu

SEQ ID NO: 841773 - RNA, 19 nt, Artificial Sequence
  Description of Artificial Sequence: Synthetic oligonucleotide
ggcaaagcugcugucggug

SEQ ID NO: 841774 - RNA, 19 nt, Artificial Sequence
  Description of Artificial Sequence: Synthetic oligonucleotide
ggacugagacccaucuucc

SEQ ID NO: 841775 - RNA, 19 nt, Artificial Sequence
  Description of Artificial Sequence: Synthetic oligonucleotide
agacgcagggcucucccua

SEQ ID NO: 841776 - RNA, 19 nt, Artificial Sequence
  Description of Artificial Sequence: Synthetic oligonucleotide
gacauuagucugauggcau

SEQ ID NO: 841777 - RNA, 19 nt, Artificial Sequence
  Description of Artificial Sequence: Synthetic oligonucleotide
auggggugaaacauauuuu

SEQ ID NO: 841778 - RNA, 19 nt, Artificial Sequence
  Description of Artificial Sequence: Synthetic oligonucleotide
uaggcucuucaagugcuau

SEQ ID NO: 841779 - RNA, 19 nt, Artificial Sequence
  Description of Artificial Sequence: Synthetic oligonucleotide
ucucucuugggguggccuu

SEQ ID NO: 841780 - RNA, 19 nt, Artificial Sequence
  Description of Artificial Sequence: Synthetic oligonucleotide
guauccaguuuccuugcgu

SEQ ID NO: 841781 - RNA, 19 nt, Artificial Sequence
  Description of Artificial Sequence: Synthetic oligonucleotide
cagugauuugacggccacc

SEQ ID NO: 841782 - RNA, 19 nt, Artificial Sequence
  Description of Artificial Sequence: Synthetic oligonucleotide
ucucucucuugggguagcc

SEQ ID NO: 841783 - RNA, 19 nt, Artificial Sequence
  Description of Artificial Sequence: Synthetic oligonucleotide
uacccaccuucuuuagcau

SEQ ID NO: 841784 - RNA, 19 nt, Artificial Sequence
  Description of Artificial Sequence: Synthetic oligonucleotide
caagugcuauuccaguugu

SEQ ID NO: 841785 - RNA, 19 nt, Artificial Sequence
  Description of Artificial Sequence: Synthetic oligonucleotide
caucugggugccuaucaaa

SEQ ID NO: 841786 - RNA, 19 nt, Artificial Sequence
  Description of Artificial Sequence: Synthetic oligonucleotide
ucgcauccgggauggucca

SEQ ID NO: 841787 - RNA, 19 nt, Artificial Sequence
  Description of Artificial Sequence: Synthetic oligonucleotide
guagacaugcucaggugcu

SEQ ID NO: 841788 - RNA, 19 nt, Artificial Sequence
  Description of Artificial Sequence: Synthetic oligonucleotide
agucccaucccaggcuuca

SEQ ID NO: 841789 - RNA, 19 nt, Artificial Sequence
  Description of Artificial Sequence: Synthetic oligonucleotide
gguaaucuguagucccauc

SEQ ID NO: 841790 - RNA, 19 nt, Artificial Sequence
  Description of Artificial Sequence: Synthetic oligonucleotide
ugaugacaacucgcucaug

SEQ ID NO: 841791 - RNA, 19 nt, Artificial Sequence
  Description of Artificial Sequence: Synthetic oligonucleotide
acaaaacgacagguaucca

SEQ ID NO: 841792 - RNA, 19 nt, Artificial Sequence
  Description of Artificial Sequence: Synthetic oligonucleotide
aggcucuucaagugcuauu

SEQ ID NO: 841793 - RNA, 19 nt, Artificial Sequence
  Description of Artificial Sequence: Synthetic oligonucleotide
ggcauugaggaaggacucc

SEQ ID NO: 841794 - RNA, 19 nt, Artificial Sequence
  Description of Artificial Sequence: Synthetic oligonucleotide
agcagugauuugacggcca

SEQ ID NO: 841795 - RNA, 19 nt, Artificial Sequence
  Description of Artificial Sequence: Synthetic oligonucleotide
ggugccuaucaaacagaag

SEQ ID NO: 841796 - RNA, 19 nt, Artificial Sequence
  Description of Artificial Sequence: Synthetic oligonucleotide
gcugagcucauugucuuca

SEQ ID NO: 841797 - RNA, 19 nt, Artificial Sequence
  Description of Artificial Sequence: Synthetic oligonucleotide
gguggacugagacccaucu

SEQ ID NO: 841798 - RNA, 19 nt, Artificial Sequence
  Description of Artificial Sequence: Synthetic oligonucleotide
aaacuccaauuaggauacu

SEQ ID NO: 841799 - RNA, 19 nt, Artificial Sequence
  Description of Artificial Sequence: Synthetic oligonucleotide
cuacucgaaggucuucucu

SEQ ID NO: 841800 - RNA, 19 nt, Artificial Sequence
  Description of Artificial Sequence: Synthetic oligonucleotide
cacaaacuccaauuaggau

SEQ ID NO: 841801 - RNA, 19 nt, Artificial Sequence
  Description of Artificial Sequence: Synthetic oligonucleotide
ccucaccuaacacucuuuc

SEQ ID NO: 841802 - RNA, 19 nt, Artificial Sequence
  Description of Artificial Sequence: Synthetic oligonucleotide
acacucuuucagagccuuc

SEQ ID NO: 841803 - RNA, 19 nt, Artificial Sequence
  Description of Artificial Sequence: Synthetic oligonucleotide
ccaacaaaacgacagguau

SEQ ID NO: 841804 - RNA, 19 nt, Artificial Sequence
  Description of Artificial Sequence: Synthetic oligonucleotide
uccucguacccaccuucuu

SEQ ID NO: 841805 - RNA, 19 nt, Artificial Sequence
  Description of Artificial Sequence: Synthetic oligonucleotide
uagucccaucccaggcuuc

SEQ ID NO: 841806 - RNA, 19 nt, Artificial Sequence
  Description of Artificial Sequence: Synthetic oligonucleotide
uugaggcucucuuccccuu

SEQ ID NO: 841807 - RNA, 19 nt, Artificial Sequence
  Description of Artificial Sequence: Synthetic oligonucleotide
cucgcucaugucgcauccg

SEQ ID NO: 841808 - RNA, 19 nt, Artificial Sequence
  Description of Artificial Sequence: Synthetic oligonucleotide
cucuaccugguaaucugua

SEQ ID NO: 841809 - RNA, 19 nt, Artificial Sequence
  Description of Artificial Sequence: Synthetic oligonucleotide
gguggccuuccucguaccc

SEQ ID NO: 841810 - RNA, 19 nt, Artificial Sequence
  Description of Artificial Sequence: Synthetic oligonucleotide
gacgcagggcucucccuaa

SEQ ID NO: 841811 - RNA, 19 nt, Artificial Sequence
  Description of Artificial Sequence: Synthetic oligonucleotide
acacuacuacugauccuga

SEQ ID NO: 841812 - RNA, 19 nt, Artificial Sequence
  Description of Artificial Sequence: Synthetic oligonucleotide
cagggaacuccuugucaga

SEQ ID NO: 841813 - RNA, 19 nt, Artificial Sequence
  Description of Artificial Sequence: Synthetic oligonucleotide
auccgcuggaggccucugu

SEQ ID NO: 841814 - RNA, 19 nt, Artificial Sequence
  Description of Artificial Sequence: Synthetic oligonucleotide
gacucuuucucaacauuuu

SEQ ID NO: 841815 - RNA, 19 nt, Artificial Sequence
  Description of Artificial Sequence: Synthetic oligonucleotide
gcccugccuguucugaagc

SEQ ID NO: 841816 - RNA, 19 nt, Artificial Sequence
  Description of Artificial Sequence: Synthetic oligonucleotide
gggguggccuuccucguac

SEQ ID NO: 841817 - RNA, 19 nt, Artificial Sequence
  Description of Artificial Sequence: Synthetic oligonucleotide
uguccaaacuuggcacauu

SEQ ID NO: 841818 - RNA, 19 nt, Artificial Sequence
  Description of Artificial Sequence: Synthetic oligonucleotide
ucucucucuugggguggcc

SEQ ID NO: 841819 - RNA, 19 nt, Artificial Sequence
  Description of Artificial Sequence: Synthetic oligonucleotide
guggccuuccucguaccca

SEQ ID NO: 841820 - RNA, 19 nt, Artificial Sequence
  Description of Artificial Sequence: Synthetic oligonucleotide
ucgguggacugagacccau

SEQ ID NO: 841821 - RNA, 19 nt, Artificial Sequence
  Description of Artificial Sequence: Synthetic oligonucleotide
cccauuuuaggauuccccu

SEQ ID NO: 841822 - RNA, 19 nt, Artificial Sequence
  Description of Artificial Sequence: Synthetic oligonucleotide
ccuaccacuaugcacuugu

SEQ ID NO: 841823 - RNA, 19 nt, Artificial Sequence
  Description of Artificial Sequence: Synthetic oligonucleotide
acaggcaaacagagacgca

SEQ ID NO: 841824 - RNA, 19 nt, Artificial Sequence
  Description of Artificial Sequence: Synthetic oligonucleotide
cagagacgcagggcucucc

SEQ ID NO: 841825 - RNA, 19 nt, Artificial Sequence
  Description of Artificial Sequence: Synthetic oligonucleotide
cagagccuuccucaccuaa

SEQ ID NO: 841826 - RNA, 19 nt, Artificial Sequence
  Description of Artificial Sequence: Synthetic oligonucleotide
ccuugcguuaaacuaugaa

SEQ ID NO: 841827 - RNA, 19 nt, Artificial Sequence
  Description of Artificial Sequence: Synthetic oligonucleotide
guagucccaucccaggcuu

SEQ ID NO: 841828 - RNA, 19 nt, Artificial Sequence
  Description of Artificial Sequence: Synthetic oligonucleotide
ugaucucauugagcaccaa

SEQ ID NO: 841829 - RNA, 19 nt, Artificial Sequence
  Description of Artificial Sequence: Synthetic oligonucleotide
ccauagucccucucucauc

SEQ ID NO: 841830 - RNA, 19 nt, Artificial Sequence
  Description of Artificial Sequence: Synthetic oligonucleotide
cguacccaccuucuuuagc

SEQ ID NO: 841831 - RNA, 19 nt, Artificial Sequence
  Description of Artificial Sequence: Synthetic oligonucleotide
cagaaucaucaaacaauuu

SEQ ID NO: 841832 - RNA, 19 nt, Artificial Sequence
  Description of Artificial Sequence: Synthetic oligonucleotide
gcauccgggaugguccagc

SEQ ID NO: 841833 - RNA, 19 nt, Artificial Sequence
  Description of Artificial Sequence: Synthetic oligonucleotide
cucaugucgcauccgggau

SEQ ID NO: 841834 - RNA, 19 nt, Artificial Sequence
  Description of Artificial Sequence: Synthetic oligonucleotide
ggccaccaaaccaccuucc

SEQ ID NO: 841835 - RNA, 19 nt, Artificial Sequence
  Description of Artificial Sequence: Synthetic oligonucleotide
uccauccgcuggaggccuc

SEQ ID NO: 841836 - RNA, 19 nt, Artificial Sequence
  Description of Artificial Sequence: Synthetic oligonucleotide
gggugccuaucaaacagaa

SEQ ID NO: 841837 - RNA, 19 nt, Artificial Sequence
  Description of Artificial Sequence: Synthetic oligonucleotide
gagacgcagggcucucccu

SEQ ID NO: 841838 - RNA, 19 nt, Artificial Sequence
  Description of Artificial Sequence: Synthetic oligonucleotide
cgcucaugucgcauccggg

SEQ ID NO: 841839 - RNA, 19 nt, Artificial Sequence
  Description of Artificial Sequence: Synthetic oligonucleotide
ccucucucucucuugaggu

SEQ ID NO: 841840 - RNA, 19 nt, Artificial Sequence
  Description of Artificial Sequence: Synthetic oligonucleotide
caccaucugggugccuauc

SEQ ID NO: 841841 - RNA, 19 nt, Artificial Sequence
  Description of Artificial Sequence: Synthetic oligonucleotide
uccccucuucaagcuugcu

SEQ ID NO: 841842 - RNA, 19 nt, Artificial Sequence
  Description of Artificial Sequence: Synthetic oligonucleotide
acgcagggcucucccuaaa

SEQ ID NO: 841843 - RNA, 19 nt, Artificial Sequence
  Description of Artificial Sequence: Synthetic oligonucleotide
ugcucucaggguggcccuc

SEQ ID NO: 841844 - RNA, 19 nt, Artificial Sequence
  Description of Artificial Sequence: Synthetic oligonucleotide
gcguuaaacuaugaaguuu

SEQ ID NO: 841845 - RNA, 19 nt, Artificial Sequence
  Description of Artificial Sequence: Synthetic oligonucleotide
caggguggcccucuucacu

SEQ ID NO: 841846 - RNA, 19 nt, Artificial Sequence
  Description of Artificial Sequence: Synthetic oligonucleotide
guauccuggucgaaaucuu

SEQ ID NO: 841847 - RNA, 19 nt, Artificial Sequence
  Description of Artificial Sequence: Synthetic oligonucleotide
cauccgcuggaggccucug

SEQ ID NO: 841848 - RNA, 19 nt, Artificial Sequence
  Description of Artificial Sequence: Synthetic oligonucleotide
cuguccaaacuuggcacau

SEQ ID NO: 841849 - RNA, 19 nt, Artificial Sequence
  Description of Artificial Sequence: Synthetic oligonucleotide
guggacugagacccaucuu

SEQ ID NO: 841850 - RNA, 19 nt, Artificial Sequence
  Description of Artificial Sequence: Synthetic oligonucleotide
gcuauuccaguuguagcuu

SEQ ID NO: 841851 - RNA, 19 nt, Artificial Sequence
  Description of Artificial Sequence: Synthetic oligonucleotide
gggcagucuuccuuggauu

SEQ ID NO: 841852 - RNA, 19 nt, Artificial Sequence
  Description of Artificial Sequence: Synthetic oligonucleotide
gucgguggacugagaccca

SEQ ID NO: 841853 - RNA, 19 nt, Artificial Sequence
  Description of Artificial Sequence: Synthetic oligonucleotide
cugauuugucagugucauu

SEQ ID NO: 841854 - RNA, 19 nt, Artificial Sequence
  Description of Artificial Sequence: Synthetic oligonucleotide
cuaccacuaugcacuuguu

SEQ ID NO: 841855 - RNA, 19 nt, Artificial Sequence
  Description of Artificial Sequence: Synthetic oligonucleotide
ccucuaccugguaaucugu

SEQ ID NO: 841856 - RNA, 19 nt, Artificial Sequence
  Description of Artificial Sequence: Synthetic oligonucleotide
gccuuccucguacccaccu

SEQ ID NO: 841857 - RNA, 19 nt, Artificial Sequence
  Description of Artificial Sequence: Synthetic oligonucleotide
cagagguauccuggucgaa

SEQ ID NO: 841858 - RNA, 19 nt, Artificial Sequence
  Description of Artificial Sequence: Synthetic oligonucleotide
gggcaaagcugcugucggu

SEQ ID NO: 841859 - RNA, 19 nt, Artificial Sequence
  Description of Artificial Sequence: Synthetic oligonucleotide
ccgggaugguccagcucuc

SEQ ID NO: 841860 - RNA, 19 nt, Artificial Sequence
  Description of Artificial Sequence: Synthetic oligonucleotide
ccucguacccaccuucuuu

SEQ ID NO: 841861 - RNA, 19 nt, Artificial Sequence
  Description of Artificial Sequence: Synthetic oligonucleotide
ggccuuccucguacccacc

SEQ ID NO: 841862 - RNA, 19 nt, Artificial Sequence
  Description of Artificial Sequence: Synthetic oligonucleotide
augucgcauccgggauggu

SEQ ID NO: 841863 - RNA, 19 nt, Artificial Sequence
  Description of Artificial Sequence: Synthetic oligonucleotide
gccuuuccucucucucucu

SEQ ID NO: 841864 - RNA, 19 nt, Artificial Sequence
  Description of Artificial Sequence: Synthetic oligonucleotide
cgguggacugagacccauc

SEQ ID NO: 841865 - RNA, 19 nt, Artificial Sequence
  Description of Artificial Sequence: Synthetic oligonucleotide
ccuuuccucucucucucuu

SEQ ID NO: 841866 - RNA, 19 nt, Artificial Sequence
  Description of Artificial Sequence: Synthetic oligonucleotide
ccucuggaaggcccugccu

SEQ ID NO: 841867 - RNA, 19 nt, Artificial Sequence
  Description of Artificial Sequence: Synthetic oligonucleotide
ccuucacauuccccauagu

SEQ ID NO: 841868 - RNA, 19 nt, Artificial Sequence
  Description of Artificial Sequence: Synthetic oligonucleotide
cucucaggguggcccucuu

SEQ ID NO: 841869 - RNA, 19 nt, Artificial Sequence
  Description of Artificial Sequence: Synthetic oligonucleotide
cgcauccgggaugguccag

SEQ ID NO: 841870 - RNA, 19 nt, Artificial Sequence
  Description of Artificial Sequence: Synthetic oligonucleotide
ccuuccucguacccaccuu

SEQ ID NO: 841871 - RNA, 19 nt, Artificial Sequence
  Description of Artificial Sequence: Synthetic oligonucleotide
aagucagucagaaagaggc

SEQ ID NO: 841872 - RNA, 19 nt, Artificial Sequence
  Description of Artificial Sequence: Synthetic oligonucleotide
uucacaacugaacaaaacg

SEQ ID NO: 841873 - RNA, 19 nt, Artificial Sequence
  Description of Artificial Sequence: Synthetic oligonucleotide
uaaauuagggucaucuggg

SEQ ID NO: 841874 - RNA, 19 nt, Artificial Sequence
  Description of Artificial Sequence: Synthetic oligonucleotide
aauaaguggaacgauguuc

SEQ ID NO: 841875 - RNA, 19 nt, Artificial Sequence
  Description of Artificial Sequence: Synthetic oligonucleotide
ucacaacugaacaaaacgg

SEQ ID NO: 841876 - RNA, 19 nt, Artificial Sequence
  Description of Artificial Sequence: Synthetic oligonucleotide
auauucuuccgguugaggc

SEQ ID NO: 841877 - RNA, 19 nt, Artificial Sequence
  Description of Artificial Sequence: Synthetic oligonucleotide
cugagaauaaauuaggguc

SEQ ID NO: 841878 - RNA, 19 nt, Artificial Sequence
  Description of Artificial Sequence: Synthetic oligonucleotide
uugacguucaccaacuuug

SEQ ID NO: 841879 - RNA, 19 nt, Artificial Sequence
  Description of Artificial Sequence: Synthetic oligonucleotide
uuggguaaggguuaggucc

SEQ ID NO: 841880 - RNA, 19 nt, Artificial Sequence
  Description of Artificial Sequence: Synthetic oligonucleotide
aacuuuguucuccugucac

SEQ ID NO: 841881 - RNA, 19 nt, Artificial Sequence
  Description of Artificial Sequence: Synthetic oligonucleotide
ucgaagcuucacaaaaucg

SEQ ID NO: 841882 - RNA, 19 nt, Artificial Sequence
  Description of Artificial Sequence: Synthetic oligonucleotide
guugcugccgauaacagcg

SEQ ID NO: 841883 - RNA, 19 nt, Artificial Sequence
  Description of Artificial Sequence: Synthetic oligonucleotide
cuauccauggcguuguggg

SEQ ID NO: 841884 - RNA, 19 nt, Artificial Sequence
  Description of Artificial Sequence: Synthetic oligonucleotide
uauaagucagucagaaaga

SEQ ID NO: 841885 - RNA, 19 nt, Artificial Sequence
  Description of Artificial Sequence: Synthetic oligonucleotide
guugaugcguuccucagcg

SEQ ID NO: 841886 - RNA, 19 nt, Artificial Sequence
  Description of Artificial Sequence: Synthetic oligonucleotide
augaaaguaggggacaccc

SEQ ID NO: 841887 - RNA, 19 nt, Artificial Sequence
  Description of Artificial Sequence: Synthetic oligonucleotide
aacuuguucccuuacgaca

SEQ ID NO: 841888 - RNA, 19 nt, Artificial Sequence
  Description of Artificial Sequence: Synthetic oligonucleotide
acguucaccaacuuuguuc

SEQ ID NO: 841889 - RNA, 19 nt, Artificial Sequence
  Description of Artificial Sequence: Synthetic oligonucleotide
uugacccaaaaguagauga

SEQ ID NO: 841890 - RNA, 19 nt, Artificial Sequence
  Description of Artificial Sequence: Synthetic oligonucleotide
ggagauaaaguacaggcag

SEQ ID NO: 841891 - RNA, 19 nt, Artificial Sequence
  Description of Artificial Sequence: Synthetic oligonucleotide
aaguggaacgauguucacc

SEQ ID NO: 841892 - RNA, 19 nt, Artificial Sequence
  Description of Artificial Sequence: Synthetic oligonucleotide
aaucucgacugucugguug

SEQ ID NO: 841893 - RNA, 19 nt, Artificial Sequence
  Description of Artificial Sequence: Synthetic oligonucleotide
uucggauuagcauguuucg

SEQ ID NO: 841894 - RNA, 19 nt, Artificial Sequence
  Description of Artificial Sequence: Synthetic oligonucleotide
ucuggucaaagccacuuug

SEQ ID NO: 841895 - RNA, 19 nt, Artificial Sequence
  Description of Artificial Sequence: Synthetic oligonucleotide
caauccguguccaaagggg

SEQ ID NO: 841896 - RNA, 19 nt, Artificial Sequence
  Description of Artificial Sequence: Synthetic oligonucleotide
ucggaaauacugcucaaac

SEQ ID NO: 841897 - RNA, 19 nt, Artificial Sequence
  Description of Artificial Sequence: Synthetic oligonucleotide
aaaacggaaaauggggugu

SEQ ID NO: 841898 - RNA, 19 nt, Artificial Sequence
  Description of Artificial Sequence: Synthetic oligonucleotide
ucaacgguguguuucagaa

SEQ ID NO: 841899 - RNA, 19 nt, Artificial Sequence
  Description of Artificial Sequence: Synthetic oligonucleotide
agcgcaacagugcugcugg

SEQ ID NO: 841900 - RNA, 19 nt, Artificial Sequence
  Description of Artificial Sequence: Synthetic oligonucleotide
gauuaugcacaacuuguuc

SEQ ID NO: 841901 - RNA, 19 nt, Artificial Sequence
  Description of Artificial Sequence: Synthetic oligonucleotide
cacaucgcaugucacaucc

SEQ ID NO: 841902 - RNA, 19 nt, Artificial Sequence
  Description of Artificial Sequence: Synthetic oligonucleotide
aaaugggguguaaagggag

SEQ ID NO: 841903 - RNA, 19 nt, Artificial Sequence
  Description of Artificial Sequence: Synthetic oligonucleotide
guucccuuacgacaggcgg

SEQ ID NO: 841904 - RNA, 19 nt, Artificial Sequence
  Description of Artificial Sequence: Synthetic oligonucleotide
uucgaagcuucacaaaauc

SEQ ID NO: 841905 - RNA, 19 nt, Artificial Sequence
  Description of Artificial Sequence: Synthetic oligonucleotide
ugcgcauucacaacugaac

SEQ ID NO: 841906 - RNA, 19 nt, Artificial Sequence
  Description of Artificial Sequence: Synthetic oligonucleotide
auaagucagucagaaagag

SEQ ID NO: 841907 - RNA, 19 nt, Artificial Sequence
  Description of Artificial Sequence: Synthetic oligonucleotide
caaaacggaaaauggggug

SEQ ID NO: 841908 - RNA, 19 nt, Artificial Sequence
  Description of Artificial Sequence: Synthetic oligonucleotide
ucggguugacccaggaagg

SEQ ID NO: 841909 - RNA, 19 nt, Artificial Sequence
  Description of Artificial Sequence: Synthetic oligonucleotide
uuggcaauaaguggaacga

SEQ ID NO: 841910 - RNA, 19 nt, Artificial Sequence
  Description of Artificial Sequence: Synthetic oligonucleotide
ugugaguucggauuagcau

SEQ ID NO: 841911 - RNA, 19 nt, Artificial Sequence
  Description of Artificial Sequence: Synthetic oligonucleotide
gaguuugcuggucaucugc

SEQ ID NO: 841912 - RNA, 19 nt, Artificial Sequence
  Description of Artificial Sequence: Synthetic oligonucleotide
acgguaauucucguagugc

SEQ ID NO: 841913 - RNA, 19 nt, Artificial Sequence
  Description of Artificial Sequence: Synthetic oligonucleotide
auaaguggaacgauguuca

SEQ ID NO: 841914 - RNA, 19 nt, Artificial Sequence
  Description of Artificial Sequence: Synthetic oligonucleotide
agcagauacaaaugaccag

SEQ ID NO: 841915 - RNA, 19 nt, Artificial Sequence
  Description of Artificial Sequence: Synthetic oligonucleotide
uacaaaugaccaggaaggg

SEQ ID NO: 841916 - RNA, 19 nt, Artificial Sequence
  Description of Artificial Sequence: Synthetic oligonucleotide
ugaugcguuccucagcgcu

SEQ ID NO: 841917 - RNA, 19 nt, Artificial Sequence
  Description of Artificial Sequence: Synthetic oligonucleotide
ucagucagaaagaggcugu

SEQ ID NO: 841918 - RNA, 19 nt, Artificial Sequence
  Description of Artificial Sequence: Synthetic oligonucleotide
cuggucaaagccacuuugg

SEQ ID NO: 841919 - RNA, 19 nt, Artificial Sequence
  Description of Artificial Sequence: Synthetic oligonucleotide
cugccgauaacagcgaagg

SEQ ID NO: 841920 - RNA, 19 nt, Artificial Sequence
  Description of Artificial Sequence: Synthetic oligonucleotide
guuucgaagcuucacaaaa

SEQ ID NO: 841921 - RNA, 19 nt, Artificial Sequence
  Description of Artificial Sequence: Synthetic oligonucleotide
ggagauuaugcacaacuug

SEQ ID NO: 841922 - RNA, 19 nt, Artificial Sequence
  Description of Artificial Sequence: Synthetic oligonucleotide
gauauucuuccgguugagg

SEQ ID NO: 841923 - RNA, 19 nt, Artificial Sequence
  Description of Artificial Sequence: Synthetic oligonucleotide
aggaugcgcauucacaacu

SEQ ID NO: 841924 - RNA, 19 nt, Artificial Sequence
  Description of Artificial Sequence: Synthetic oligonucleotide
aaaugaccaggaagggugg

SEQ ID NO: 841925 - RNA, 19 nt, Artificial Sequence
  Description of Artificial Sequence: Synthetic oligonucleotide
cagcuuacggaucucacug

SEQ ID NO: 841926 - RNA, 19 nt, Artificial Sequence
  Description of Artificial Sequence: Synthetic oligonucleotide
ugaaaguaggggacacccc

SEQ ID NO: 841927 - RNA, 19 nt, Artificial Sequence
  Description of Artificial Sequence: Synthetic oligonucleotide
ccgauaacagcgaagggcg

SEQ ID NO: 841928 - RNA, 19 nt, Artificial Sequence
  Description of Artificial Sequence: Synthetic oligonucleotide
uuugacguucaccaacuuu

SEQ ID NO: 841929 - RNA, 19 nt, Artificial Sequence
  Description of Artificial Sequence: Synthetic oligonucleotide
acauccacuggccgcaauc

SEQ ID NO: 841930 - RNA, 19 nt, Artificial Sequence
  Description of Artificial Sequence: Synthetic oligonucleotide
ucgcaugucacauccuuga

SEQ ID NO: 841931 - RNA, 19 nt, Artificial Sequence
  Description of Artificial Sequence: Synthetic oligonucleotide
uuucgaagcuucacaaaau

SEQ ID NO: 841932 - RNA, 19 nt, Artificial Sequence
  Description of Artificial Sequence: Synthetic oligonucleotide
guagaugaaaguaggggac

SEQ ID NO: 841933 - RNA, 19 nt, Artificial Sequence
  Description of Artificial Sequence: Synthetic oligonucleotide
caggguagaauccaggaca

SEQ ID NO: 841934 - RNA, 19 nt, Artificial Sequence
  Description of Artificial Sequence: Synthetic oligonucleotide
uguugcugccgauaacagc

SEQ ID NO: 841935 - RNA, 19 nt, Artificial Sequence
  Description of Artificial Sequence: Synthetic oligonucleotide
gagauaaaguacaggcagc

SEQ ID NO: 841936 - RNA, 19 nt, Artificial Sequence
  Description of Artificial Sequence: Synthetic oligonucleotide
ucagcuuacggaucucacu

SEQ ID NO: 841937 - RNA, 19 nt, Artificial Sequence
  Description of Artificial Sequence: Synthetic oligonucleotide
ugcgucuuagcucuucauc

SEQ ID NO: 841938 - RNA, 19 nt, Artificial Sequence
  Description of Artificial Sequence: Synthetic oligonucleotide
guaggggacaccccguucc

SEQ ID NO: 841939 - RNA, 19 nt, Artificial Sequence
  Description of Artificial Sequence: Synthetic oligonucleotide
agaaucucgacugucuggu

SEQ ID NO: 841940 - RNA, 19 nt, Artificial Sequence
  Description of Artificial Sequence: Synthetic oligonucleotide
aggucaugcaugugaguuc

SEQ ID NO: 841941 - RNA, 19 nt, Artificial Sequence
  Description of Artificial Sequence: Synthetic oligonucleotide
aaaaucgcagugcgccuga

SEQ ID NO: 841942 - RNA, 19 nt, Artificial Sequence
  Description of Artificial Sequence: Synthetic oligonucleotide
auguuucgaagcuucacaa

SEQ ID NO: 841943 - RNA, 19 nt, Artificial Sequence
  Description of Artificial Sequence: Synthetic oligonucleotide
acccaaaaguagaugaaag

SEQ ID NO: 841944 - RNA, 19 nt, Artificial Sequence
  Description of Artificial Sequence: Synthetic oligonucleotide
uggguaaggguuaggucca

SEQ ID NO: 841945 - RNA, 19 nt, Artificial Sequence
  Description of Artificial Sequence: Synthetic oligonucleotide
acaaaacggaaaauggggu

SEQ ID NO: 841946 - RNA, 19 nt, Artificial Sequence
  Description of Artificial Sequence: Synthetic oligonucleotide
cauacggcuguccugugug

SEQ ID NO: 841947 - RNA, 19 nt, Artificial Sequence
  Description of Artificial Sequence: Synthetic oligonucleotide
guucggauuagcauguuuc

SEQ ID NO: 841948 - RNA, 19 nt, Artificial Sequence
  Description of Artificial Sequence: Synthetic oligonucleotide
agcgggaggauagggaugg

SEQ ID NO: 841949 - RNA, 19 nt, Artificial Sequence
  Description of Artificial Sequence: Synthetic oligonucleotide
ucuugcauuugcugcuuca

SEQ ID NO: 841950 - RNA, 19 nt, Artificial Sequence
  Description of Artificial Sequence: Synthetic oligonucleotide
auaacagcgaagggcgcac

SEQ ID NO: 841951 - RNA, 19 nt, Artificial Sequence
  Description of Artificial Sequence: Synthetic oligonucleotide
caacuuguucccuuacgac

SEQ ID NO: 841952 - RNA, 19 nt, Artificial Sequence
  Description of Artificial Sequence: Synthetic oligonucleotide
agcuuacggaucucacugg

SEQ ID NO: 841953 - RNA, 19 nt, Artificial Sequence
  Description of Artificial Sequence: Synthetic oligonucleotide
uggagauuaugcacaacuu

SEQ ID NO: 841954 - RNA, 19 nt, Artificial Sequence
  Description of Artificial Sequence: Synthetic oligonucleotide
augcaugugaguucggauu

SEQ ID NO: 841955 - RNA, 19 nt, Artificial Sequence
  Description of Artificial Sequence: Synthetic oligonucleotide
uguuucgaagcuucacaaa

SEQ ID NO: 841956 - RNA, 19 nt, Artificial Sequence
  Description of Artificial Sequence: Synthetic oligonucleotide
ggucaugcaugugaguucg

SEQ ID NO: 841957 - RNA, 19 nt, Artificial Sequence
  Description of Artificial Sequence: Synthetic oligonucleotide
ucagaguuguucacagcau

SEQ ID NO: 841958 - RNA, 19 nt, Artificial Sequence
  Description of Artificial Sequence: Synthetic oligonucleotide
gcgucuuagcucuucaucc

SEQ ID NO: 841959 - RNA, 19 nt, Artificial Sequence
  Description of Artificial Sequence: Synthetic oligonucleotide
cacauggaucccaaacuug

SEQ ID NO: 841960 - RNA, 19 nt, Artificial Sequence
  Description of Artificial Sequence: Synthetic oligonucleotide
uccgguugaggccacuuuc

SEQ ID NO: 841961 - RNA, 19 nt, Artificial Sequence
  Description of Artificial Sequence: Synthetic oligonucleotide
agcgcucagaagcuuccgg

SEQ ID NO: 841962 - RNA, 19 nt, Artificial Sequence
  Description of Artificial Sequence: Synthetic oligonucleotide
gugggcacgguaauucucg

SEQ ID NO: 841963 - RNA, 19 nt, Artificial Sequence
  Description of Artificial Sequence: Synthetic oligonucleotide
gaagggcgcacuuuccuuc

SEQ ID NO: 841964 - RNA, 19 nt, Artificial Sequence
  Description of Artificial Sequence: Synthetic oligonucleotide
aucucgacugucugguuga

SEQ ID NO: 841965 - RNA, 19 nt, Artificial Sequence
  Description of Artificial Sequence: Synthetic oligonucleotide
ucccguauccuauccuuca

SEQ ID NO: 841966 - RNA, 19 nt, Artificial Sequence
  Description of Artificial Sequence: Synthetic oligonucleotide
aguaggggacaccccguuc

SEQ ID NO: 841967 - RNA, 19 nt, Artificial Sequence
  Description of Artificial Sequence: Synthetic oligonucleotide
ugacguucaccaacuuugu

SEQ ID NO: 841968 - RNA, 19 nt, Artificial Sequence
  Description of Artificial Sequence: Synthetic oligonucleotide
cacgguaauucucguagug

SEQ ID NO: 841969 - RNA, 19 nt, Artificial Sequence
  Description of Artificial Sequence: Synthetic oligonucleotide
gauaacagcgaagggcgca

SEQ ID NO: 841970 - RNA, 19 nt, Artificial Sequence
  Description of Artificial Sequence: Synthetic oligonucleotide
ucaugcaugugaguucgga

SEQ ID NO: 841971 - RNA, 19 nt, Artificial Sequence
  Description of Artificial Sequence: Synthetic oligonucleotide
uguccuucggguugaccca

SEQ ID NO: 841972 - RNA, 19 nt, Artificial Sequence
  Description of Artificial Sequence: Synthetic oligonucleotide
uacagucguccccggaccc

SEQ ID NO: 841973 - RNA, 19 nt, Artificial Sequence
  Description of Artificial Sequence: Synthetic oligonucleotide
ugcggguggagagauggag

SEQ ID NO: 841974 - RNA, 19 nt, Artificial Sequence
  Description of Artificial Sequence: Synthetic oligonucleotide
gguagaauccaggacaguc

SEQ ID NO: 841975 - RNA, 19 nt, Artificial Sequence
  Description of Artificial Sequence: Synthetic oligonucleotide
ugcacaucgcaugucacau

SEQ ID NO: 841976 - RNA, 19 nt, Artificial Sequence
  Description of Artificial Sequence: Synthetic oligonucleotide
uaauucucguagugcacau

SEQ ID NO: 841977 - RNA, 19 nt, Artificial Sequence
  Description of Artificial Sequence: Synthetic oligonucleotide
agcgugagcggucuaggga

SEQ ID NO: 841978 - RNA, 19 nt, Artificial Sequence
  Description of Artificial Sequence: Synthetic oligonucleotide
gagcgugagcggucuaggg

SEQ ID NO: 841979 - RNA, 19 nt, Artificial Sequence
  Description of Artificial Sequence: Synthetic oligonucleotide
gccgauaacagcgaagggc

SEQ ID NO: 841980 - RNA, 19 nt, Artificial Sequence
  Description of Artificial Sequence: Synthetic oligonucleotide
gcuuacggaucucacuggg

SEQ ID NO: 841981 - RNA, 19 nt, Artificial Sequence
  Description of Artificial Sequence: Synthetic oligonucleotide
aaucaugcggguggagaga

SEQ ID NO: 841982 - RNA, 19 nt, Artificial Sequence
  Description of Artificial Sequence: Synthetic oligonucleotide
aagggcgcacuuuccuuca

SEQ ID NO: 841983 - RNA, 19 nt, Artificial Sequence
  Description of Artificial Sequence: Synthetic oligonucleotide
ucggauuagcauguuucga

SEQ ID NO: 841984 - RNA, 19 nt, Artificial Sequence
  Description of Artificial Sequence: Synthetic oligonucleotide
guacagucguccccggacc

SEQ ID NO: 841985 - RNA, 19 nt, Artificial Sequence
  Description of Artificial Sequence: Synthetic oligonucleotide
ggcguugugggccuggggc

SEQ ID NO: 841986 - RNA, 19 nt, Artificial Sequence
  Description of Artificial Sequence: Synthetic oligonucleotide
gacaggaugcgcauucaca

SEQ ID NO: 841987 - RNA, 19 nt, Artificial Sequence
  Description of Artificial Sequence: Synthetic oligonucleotide
caccugauugggcagugug

SEQ ID NO: 841988 - RNA, 19 nt, Artificial Sequence
  Description of Artificial Sequence: Synthetic oligonucleotide
ggcaauaaguggaacgaug

SEQ ID NO: 841989 - RNA, 19 nt, Artificial Sequence
  Description of Artificial Sequence: Synthetic oligonucleotide
uguggacaagagucgacuu

SEQ ID NO: 841990 - RNA, 19 nt, Artificial Sequence
  Description of Artificial Sequence: Synthetic oligonucleotide
aaaguaggggacaccccgu

SEQ ID NO: 841991 - RNA, 19 nt, Artificial Sequence
  Description of Artificial Sequence: Synthetic oligonucleotide
gccaacguacugcuugucg

SEQ ID NO: 841992 - RNA, 19 nt, Artificial Sequence
  Description of Artificial Sequence: Synthetic oligonucleotide
uccgguccuuguauaaguc

SEQ ID NO: 841993 - RNA, 19 nt, Artificial Sequence
  Description of Artificial Sequence: Synthetic oligonucleotide
cuggccgcaauccgugucc

SEQ ID NO: 841994 - RNA, 19 nt, Artificial Sequence
  Description of Artificial Sequence: Synthetic oligonucleotide
uucccguauccuauccuuc

SEQ ID NO: 841995 - RNA, 19 nt, Artificial Sequence
  Description of Artificial Sequence: Synthetic oligonucleotide
ugguacacauggaucccaa

SEQ ID NO: 841996 - RNA, 19 nt, Artificial Sequence
  Description of Artificial Sequence: Synthetic oligonucleotide
gcgugagcggucuagggag

SEQ ID NO: 841997 - RNA, 19 nt, Artificial Sequence
  Description of Artificial Sequence: Synthetic oligonucleotide
guggacaagagucgacuuc

SEQ ID NO: 841998 - RNA, 19 nt, Artificial Sequence
  Description of Artificial Sequence: Synthetic oligonucleotide
guacaggcagcagugcacc

SEQ ID NO: 841999 - RNA, 19 nt, Artificial Sequence
  Description of Artificial Sequence: Synthetic oligonucleotide
caugaaacccacauccacu

SEQ ID NO: 842000 - RNA, 19 nt, Artificial Sequence
  Description of Artificial Sequence: Synthetic oligonucleotide
caaaaucgcagugcgccug

SEQ ID NO: 842001 - RNA, 19 nt, Artificial Sequence
  Description of Artificial Sequence: Synthetic oligonucleotide
agugcacccgguugucuug

SEQ ID NO: 842002 - RNA, 19 nt, Artificial Sequence
  Description of Artificial Sequence: Synthetic oligonucleotide
acccgguugucuuggauau

SEQ ID NO: 842003 - RNA, 19 nt, Artificial Sequence
  Description of Artificial Sequence: Synthetic oligonucleotide
uuccaacacucagaguugu

SEQ ID NO: 842004 - RNA, 19 nt, Artificial Sequence
  Description of Artificial Sequence: Synthetic oligonucleotide
auagucggugaugggcuuc

SEQ ID NO: 842005 - RNA, 19 nt, Artificial Sequence
  Description of Artificial Sequence: Synthetic oligonucleotide
agugggcacgguaauucuc

SEQ ID NO: 842006 - RNA, 19 nt, Artificial Sequence
  Description of Artificial Sequence: Synthetic oligonucleotide
aaagccggguguguccaca

SEQ ID NO: 842007 - RNA, 19 nt, Artificial Sequence
  Description of Artificial Sequence: Synthetic oligonucleotide
aaacggaaaauggggugua

SEQ ID NO: 842008 - RNA, 19 nt, Artificial Sequence
  Description of Artificial Sequence: Synthetic oligonucleotide
acgguguugcugccgauaa

SEQ ID NO: 842009 - RNA, 19 nt, Artificial Sequence
  Description of Artificial Sequence: Synthetic oligonucleotide
gguugacccaggaaggagc

SEQ ID NO: 842010 - RNA, 19 nt, Artificial Sequence
  Description of Artificial Sequence: Synthetic oligonucleotide
ugugaguuugcuggucauc

SEQ ID NO: 842011 - RNA, 19 nt, Artificial Sequence
  Description of Artificial Sequence: Synthetic oligonucleotide
agcgaagggcgcacuuucc

SEQ ID NO: 842012 - RNA, 19 nt, Artificial Sequence
  Description of Artificial Sequence: Synthetic oligonucleotide
uuuugacguucaccaacuu

SEQ ID NO: 842013 - RNA, 19 nt, Artificial Sequence
  Description of Artificial Sequence: Synthetic oligonucleotide
augugaguucggauuagca

SEQ ID NO: 842014 - RNA, 19 nt, Artificial Sequence
  Description of Artificial Sequence: Synthetic oligonucleotide
agauuaugcacaacuuguu

SEQ ID NO: 842015 - RNA, 19 nt, Artificial Sequence
  Description of Artificial Sequence: Synthetic oligonucleotide
gguugaugcguuccucagc

SEQ ID NO: 842016 - RNA, 19 nt, Artificial Sequence
  Description of Artificial Sequence: Synthetic oligonucleotide
cggaaaaugggguguaaag

SEQ ID NO: 842017 - RNA, 19 nt, Artificial Sequence
  Description of Artificial Sequence: Synthetic oligonucleotide
aaucgcagugcgccugauu

SEQ ID NO: 842018 - RNA, 19 nt, Artificial Sequence
  Description of Artificial Sequence: Synthetic oligonucleotide
acaggcgggagugcgcggg

SEQ ID NO: 842019 - RNA, 19 nt, Artificial Sequence
  Description of Artificial Sequence: Synthetic oligonucleotide
uugcugccgauaacagcga

SEQ ID NO: 842020 - RNA, 19 nt, Artificial Sequence
  Description of Artificial Sequence: Synthetic oligonucleotide
gugcacaucgcaugucaca

SEQ ID NO: 842021 - RNA, 19 nt, Artificial Sequence
  Description of Artificial Sequence: Synthetic oligonucleotide
cuuacggaucucacuggga

SEQ ID NO: 842022 - RNA, 19 nt, Artificial Sequence
  Description of Artificial Sequence: Synthetic oligonucleotide
gcgcauucacaacugaaca

SEQ ID NO: 842023 - RNA, 19 nt, Artificial Sequence
  Description of Artificial Sequence: Synthetic oligonucleotide
ugucaacgguguguuucag

SEQ ID NO: 842024 - RNA, 19 nt, Artificial Sequence
  Description of Artificial Sequence: Synthetic oligonucleotide
uugaugcguuccucagcgc

SEQ ID NO: 842025 - RNA, 19 nt, Artificial Sequence
  Description of Artificial Sequence: Synthetic oligonucleotide
gaugcguuccucagcgcuc

SEQ ID NO: 842026 - RNA, 19 nt, Artificial Sequence
  Description of Artificial Sequence: Synthetic oligonucleotide
gaggucaugcaugugaguu

SEQ ID NO: 842027 - RNA, 19 nt, Artificial Sequence
  Description of Artificial Sequence: Synthetic oligonucleotide
ucggugcaccugauugggc

SEQ ID NO: 842028 - RNA, 19 nt, Artificial Sequence
  Description of Artificial Sequence: Synthetic oligonucleotide
aucgcaugucacauccuug

SEQ ID NO: 842029 - RNA, 19 nt, Artificial Sequence
  Description of Artificial Sequence: Synthetic oligonucleotide
ccuauccuucagcuuacgg

SEQ ID NO: 842030 - RNA, 19 nt, Artificial Sequence
  Description of Artificial Sequence: Synthetic oligonucleotide
uccuauccuucagcuuacg

SEQ ID NO: 842031 - RNA, 19 nt, Artificial Sequence
  Description of Artificial Sequence: Synthetic oligonucleotide
ggugcaccugauugggcag

SEQ ID NO: 842032 - RNA, 19 nt, Artificial Sequence
  Description of Artificial Sequence: Synthetic oligonucleotide
gucaacgguguguuucaga

SEQ ID NO: 842033 - RNA, 19 nt, Artificial Sequence
  Description of Artificial Sequence: Synthetic oligonucleotide
guagaauccaggacagucu

SEQ ID NO: 842034 - RNA, 19 nt, Artificial Sequence
  Description of Artificial Sequence: Synthetic oligonucleotide
gggugcugagaauaaauua

SEQ ID NO: 842035 - RNA, 19 nt, Artificial Sequence
  Description of Artificial Sequence: Synthetic oligonucleotide
aacggaaaaugggguguaa

SEQ ID NO: 842036 - RNA, 19 nt, Artificial Sequence
  Description of Artificial Sequence: Synthetic oligonucleotide
ucgcagugcgccugauucu

SEQ ID NO: 842037 - RNA, 19 nt, Artificial Sequence
  Description of Artificial Sequence: Synthetic oligonucleotide
ugcuugucgauguccuguu

SEQ ID NO: 842038 - RNA, 19 nt, Artificial Sequence
  Description of Artificial Sequence: Synthetic oligonucleotide
ugcugccgauaacagcgaa

SEQ ID NO: 842039 - RNA, 19 nt, Artificial Sequence
  Description of Artificial Sequence: Synthetic oligonucleotide
cagcgaagggcgcacuuuc

SEQ ID NO: 842040 - RNA, 19 nt, Artificial Sequence
  Description of Artificial Sequence: Synthetic oligonucleotide
aucaugcggguggagagau

SEQ ID NO: 842041 - RNA, 19 nt, Artificial Sequence
  Description of Artificial Sequence: Synthetic oligonucleotide
cuuuggguaaggguuaggu

SEQ ID NO: 842042 - RNA, 19 nt, Artificial Sequence
  Description of Artificial Sequence: Synthetic oligonucleotide
augcacaacuuguucccuu

SEQ ID NO: 842043 - RNA, 19 nt, Artificial Sequence
  Description of Artificial Sequence: Synthetic oligonucleotide
ugcgccugauucuccacuu

SEQ ID NO: 842044 - RNA, 19 nt, Artificial Sequence
  Description of Artificial Sequence: Synthetic oligonucleotide
gguaauucucguagugcac

SEQ ID NO: 842045 - RNA, 19 nt, Artificial Sequence
  Description of Artificial Sequence: Synthetic oligonucleotide
auacggcuguccuguguga

SEQ ID NO: 842046 - RNA, 19 nt, Artificial Sequence
  Description of Artificial Sequence: Synthetic oligonucleotide
aagccggguguguccacaa

SEQ ID NO: 842047 - RNA, 19 nt, Artificial Sequence
  Description of Artificial Sequence: Synthetic oligonucleotide
gucuccgcauccggggugg

SEQ ID NO: 842048 - RNA, 19 nt, Artificial Sequence
  Description of Artificial Sequence: Synthetic oligonucleotide
cuuggagauuaugcacaac

SEQ ID NO: 842049 - RNA, 19 nt, Artificial Sequence
  Description of Artificial Sequence: Synthetic oligonucleotide
gcguugugggccuggggcg

SEQ ID NO: 842050 - RNA, 19 nt, Artificial Sequence
  Description of Artificial Sequence: Synthetic oligonucleotide
gguugaggccacuuucauc

SEQ ID NO: 842051 - RNA, 19 nt, Artificial Sequence
  Description of Artificial Sequence: Synthetic oligonucleotide
gacaggcgggagugcgcgg

SEQ ID NO: 842052 - RNA, 19 nt, Artificial Sequence
  Description of Artificial Sequence: Synthetic oligonucleotide
agaccacucagaagcagau

SEQ ID NO: 842053 - RNA, 19 nt, Artificial Sequence
  Description of Artificial Sequence: Synthetic oligonucleotide
gcaauaaguggaacgaugu

SEQ ID NO: 842054 - RNA, 19 nt, Artificial Sequence
  Description of Artificial Sequence: Synthetic oligonucleotide
agcagugcacccgguuguc

SEQ ID NO: 842055 - RNA, 19 nt, Artificial Sequence
  Description of Artificial Sequence: Synthetic oligonucleotide
ccgccgucuauccauggcg

SEQ ID NO: 842056 - RNA, 19 nt, Artificial Sequence
  Description of Artificial Sequence: Synthetic oligonucleotide
gagcggucuagggaggauc

SEQ ID NO: 842057 - RNA, 19 nt, Artificial Sequence
  Description of Artificial Sequence: Synthetic oligonucleotide
caggccgucugagauccag

SEQ ID NO: 842058 - RNA, 19 nt, Artificial Sequence
  Description of Artificial Sequence: Synthetic oligonucleotide
ccaacacucagaguuguuc

SEQ ID NO: 842059 - RNA, 19 nt, Artificial Sequence
  Description of Artificial Sequence: Synthetic oligonucleotide
ggucaaagccacuuugggu

SEQ ID NO: 842060 - RNA, 19 nt, Artificial Sequence
  Description of Artificial Sequence: Synthetic oligonucleotide
ccaacguacugcuugucga

SEQ ID NO: 842061 - RNA, 19 nt, Artificial Sequence
  Description of Artificial Sequence: Synthetic oligonucleotide
acuuucggugcaccugauu

SEQ ID NO: 842062 - RNA, 19 nt, Artificial Sequence
  Description of Artificial Sequence: Synthetic oligonucleotide
augcgucuuagcucuucau

SEQ ID NO: 842063 - RNA, 19 nt, Artificial Sequence
  Description of Artificial Sequence: Synthetic oligonucleotide
ggagcgugagcggucuagg

SEQ ID NO: 842064 - RNA, 19 nt, Artificial Sequence
  Description of Artificial Sequence: Synthetic oligonucleotide
gugcacccgguugucuugg

SEQ ID NO: 842065 - RNA, 19 nt, Artificial Sequence
  Description of Artificial Sequence: Synthetic oligonucleotide
aggguuagguccaggccgu

SEQ ID NO: 842066 - RNA, 19 nt, Artificial Sequence
  Description of Artificial Sequence: Synthetic oligonucleotide
gcggguggagagauggagg

SEQ ID NO: 842067 - RNA, 19 nt, Artificial Sequence
  Description of Artificial Sequence: Synthetic oligonucleotide
ccguauccuauccuucagc

SEQ ID NO: 842068 - RNA, 19 nt, Artificial Sequence
  Description of Artificial Sequence: Synthetic oligonucleotide
ggacaggaugcgcauucac

SEQ ID NO: 842069 - RNA, 19 nt, Artificial Sequence
  Description of Artificial Sequence: Synthetic oligonucleotide
augcgcauucacaacugaa

SEQ ID NO: 842070 - RNA, 19 nt, Artificial Sequence
  Description of Artificial Sequence: Synthetic oligonucleotide
ggucuagggaggauccggc

SEQ ID NO: 842071 - RNA, 19 nt, Artificial Sequence
  Description of Artificial Sequence: Synthetic oligonucleotide
augcguuccucagcgcuca

SEQ ID NO: 842072 - RNA, 19 nt, Artificial Sequence
  Description of Artificial Sequence: Synthetic oligonucleotide
aguucccgguccuguugcu

SEQ ID NO: 842073 - RNA, 19 nt, Artificial Sequence
  Description of Artificial Sequence: Synthetic oligonucleotide
cacccgguugucuuggaua

SEQ ID NO: 842074 - RNA, 19 nt, Artificial Sequence
  Description of Artificial Sequence: Synthetic oligonucleotide
cagcgcaacagugcugcug

SEQ ID NO: 842075 - RNA, 19 nt, Artificial Sequence
  Description of Artificial Sequence: Synthetic oligonucleotide
cugauugggcaguguggca

SEQ ID NO: 842076 - RNA, 19 nt, Artificial Sequence
  Description of Artificial Sequence: Synthetic oligonucleotide
cucggaaauacugcucaaa

SEQ ID NO: 842077 - RNA, 19 nt, Artificial Sequence
  Description of Artificial Sequence: Synthetic oligonucleotide
agcuuccgguccuuguaua

SEQ ID NO: 842078 - RNA, 19 nt, Artificial Sequence
  Description of Artificial Sequence: Synthetic oligonucleotide
gcugccgauaacagcgaag

SEQ ID NO: 842079 - RNA, 19 nt, Artificial Sequence
  Description of Artificial Sequence: Synthetic oligonucleotide
ccgcaauccguguccaaag

SEQ ID NO: 842080 - RNA, 19 nt, Artificial Sequence
  Description of Artificial Sequence: Synthetic oligonucleotide
caugcaugugaguucggau

SEQ ID NO: 842081 - RNA, 19 nt, Artificial Sequence
  Description of Artificial Sequence: Synthetic oligonucleotide
agggcgcacuuuccuucag

SEQ ID NO: 842082 - RNA, 19 nt, Artificial Sequence
  Description of Artificial Sequence: Synthetic oligonucleotide
acgguguguuucagaaucu

SEQ ID NO: 842083 - RNA, 19 nt, Artificial Sequence
  Description of Artificial Sequence: Synthetic oligonucleotide
cgguaauucucguagugca

SEQ ID NO: 842084 - RNA, 19 nt, Artificial Sequence
  Description of Artificial Sequence: Synthetic oligonucleotide
uaacagcgaagggcgcacu

SEQ ID NO: 842085 - RNA, 19 nt, Artificial Sequence
  Description of Artificial Sequence: Synthetic oligonucleotide
ugcagugggcacgguaauu

SEQ ID NO: 842086 - RNA, 19 nt, Artificial Sequence
  Description of Artificial Sequence: Synthetic oligonucleotide
gucaugcaugugaguucgg

SEQ ID NO: 842087 - RNA, 19 nt, Artificial Sequence
  Description of Artificial Sequence: Synthetic oligonucleotide
agcuucaacuugacucccu

SEQ ID NO: 842088 - RNA, 19 nt, Artificial Sequence
  Description of Artificial Sequence: Synthetic oligonucleotide
cagucguccccggacccgc

SEQ ID NO: 842089 - RNA, 19 nt, Artificial Sequence
  Description of Artificial Sequence: Synthetic oligonucleotide
cuccauacggcuguccugu

SEQ ID NO: 842090 - RNA, 19 nt, Artificial Sequence
  Description of Artificial Sequence: Synthetic oligonucleotide
acagcgaagggcgcacuuu

SEQ ID NO: 842091 - RNA, 19 nt, Artificial Sequence
  Description of Artificial Sequence: Synthetic oligonucleotide
cuucccguauccuauccuu

SEQ ID NO: 842092 - RNA, 19 nt, Artificial Sequence
  Description of Artificial Sequence: Synthetic oligonucleotide
caaagccggguguguccac

SEQ ID NO: 842093 - RNA, 19 nt, Artificial Sequence
  Description of Artificial Sequence: Synthetic oligonucleotide
aaaucgcagugcgccugau

SEQ ID NO: 842094 - RNA, 19 nt, Artificial Sequence
  Description of Artificial Sequence: Synthetic oligonucleotide
cuguggacaagagucgacu

SEQ ID NO: 842095 - RNA, 19 nt, Artificial Sequence
  Description of Artificial Sequence: Synthetic oligonucleotide
cuuggauauucuuccgguu

SEQ ID NO: 842096 - RNA, 19 nt, Artificial Sequence
  Description of Artificial Sequence: Synthetic oligonucleotide
gucuauccauggcguugug

SEQ ID NO: 842097 - RNA, 19 nt, Artificial Sequence
  Description of Artificial Sequence: Synthetic oligonucleotide
cgcaauccguguccaaagg

SEQ ID NO: 842098 - RNA, 19 nt, Artificial Sequence
  Description of Artificial Sequence: Synthetic oligonucleotide
gccgucugagauccagaug

SEQ ID NO: 842099 - RNA, 19 nt, Artificial Sequence
  Description of Artificial Sequence: Synthetic oligonucleotide
cuucggguugacccaggaa

SEQ ID NO: 842100 - RNA, 19 nt, Artificial Sequence
  Description of Artificial Sequence: Synthetic oligonucleotide
ugagcggucuagggaggau

SEQ ID NO: 842101 - RNA, 19 nt, Artificial Sequence
  Description of Artificial Sequence: Synthetic oligonucleotide
caggcgggagugcgcgggg

SEQ ID NO: 842102 - RNA, 19 nt, Artificial Sequence
  Description of Artificial Sequence: Synthetic oligonucleotide
caucgcaugucacauccuu

SEQ ID NO: 842103 - RNA, 19 nt, Artificial Sequence
  Description of Artificial Sequence: Synthetic oligonucleotide
cccguauccuauccuucag

SEQ ID NO: 842104 - RNA, 19 nt, Artificial Sequence
  Description of Artificial Sequence: Synthetic oligonucleotide
aaggagcgugagcggucua

SEQ ID NO: 842105 - RNA, 19 nt, Artificial Sequence
  Description of Artificial Sequence: Synthetic oligonucleotide
gggccuucaugaaacccac

SEQ ID NO: 842106 - RNA, 19 nt, Artificial Sequence
  Description of Artificial Sequence: Synthetic oligonucleotide
agcccgggaaccgccgucu

SEQ ID NO: 842107 - RNA, 19 nt, Artificial Sequence
  Description of Artificial Sequence: Synthetic oligonucleotide
acaucgcaugucacauccu

SEQ ID NO: 842108 - RNA, 19 nt, Artificial Sequence
  Description of Artificial Sequence: Synthetic oligonucleotide
ucuccgcauccgggguggg

SEQ ID NO: 842109 - RNA, 19 nt, Artificial Sequence
  Description of Artificial Sequence: Synthetic oligonucleotide
gucguccccggacccgcug

SEQ ID NO: 842110 - RNA, 19 nt, Artificial Sequence
  Description of Artificial Sequence: Synthetic oligonucleotide
ccgucuauccauggcguug

SEQ ID NO: 842111 - RNA, 19 nt, Artificial Sequence
  Description of Artificial Sequence: Synthetic oligonucleotide
ggcggggugucacuggucu

SEQ ID NO: 842112 - RNA, 19 nt, Artificial Sequence
  Description of Artificial Sequence: Synthetic oligonucleotide
ucucgacugucugguugau

SEQ ID NO: 842113 - RNA, 19 nt, Artificial Sequence
  Description of Artificial Sequence: Synthetic oligonucleotide
gcgcacuuuccuucaguuc

SEQ ID NO: 842114 - RNA, 19 nt, Artificial Sequence
  Description of Artificial Sequence: Synthetic oligonucleotide
gcuguggacaagagucgac

SEQ ID NO: 842115 - RNA, 19 nt, Artificial Sequence
  Description of Artificial Sequence: Synthetic oligonucleotide
gcauccggggugggcagcg

SEQ ID NO: 842116 - RNA, 19 nt, Artificial Sequence
  Description of Artificial Sequence: Synthetic oligonucleotide
gugcgccugauucuccacu

SEQ ID NO: 842117 - RNA, 19 nt, Artificial Sequence
  Description of Artificial Sequence: Synthetic oligonucleotide
cgauaacagcgaagggcgc

SEQ ID NO: 842118 - RNA, 19 nt, Artificial Sequence
  Description of Artificial Sequence: Synthetic oligonucleotide
gugagcggucuagggagga

SEQ ID NO: 842119 - RNA, 19 nt, Artificial Sequence
  Description of Artificial Sequence: Synthetic oligonucleotide
ccgguugaggccacuuuca

SEQ ID NO: 842120 - RNA, 19 nt, Artificial Sequence
  Description of Artificial Sequence: Synthetic oligonucleotide
cgugagcggucuagggagg

SEQ ID NO: 842121 - RNA, 19 nt, Artificial Sequence
  Description of Artificial Sequence: Synthetic oligonucleotide
cuccgcauccggggugggc

SEQ ID NO: 842122 - RNA, 19 nt, Artificial Sequence
  Description of Artificial Sequence: Synthetic oligonucleotide
gacuuccccaggcccgacu

SEQ ID NO: 842123 - RNA, 19 nt, Artificial Sequence
  Description of Artificial Sequence: Synthetic oligonucleotide
gcacaucgcaugucacauc

SEQ ID NO: 842124 - RNA, 19 nt, Artificial Sequence
  Description of Artificial Sequence: Synthetic oligonucleotide
aggccgucugagauccaga

SEQ ID NO: 842125 - RNA, 19 nt, Artificial Sequence
  Description of Artificial Sequence: Synthetic oligonucleotide
gaaucucgacugucugguu

SEQ ID NO: 842126 - RNA, 19 nt, Artificial Sequence
  Description of Artificial Sequence: Synthetic oligonucleotide
cgcucagaagcuuccgguc

SEQ ID NO: 842127 - RNA, 19 nt, Artificial Sequence
  Description of Artificial Sequence: Synthetic oligonucleotide
cauccggggugggcagcgg

SEQ ID NO: 842128 - RNA, 19 nt, Artificial Sequence
  Description of Artificial Sequence: Synthetic oligonucleotide
gggcaguguggcaaagcca

SEQ ID NO: 842129 - RNA, 19 nt, Artificial Sequence
  Description of Artificial Sequence: Synthetic oligonucleotide
gcggucuagggaggauccg

SEQ ID NO: 842130 - RNA, 19 nt, Artificial Sequence
  Description of Artificial Sequence: Synthetic oligonucleotide
cgacaggcgggagugcgcg

SEQ ID NO: 842131 - RNA, 19 nt, Artificial Sequence
  Description of Artificial Sequence: Synthetic oligonucleotide
gccgcaauccguguccaaa

SEQ ID NO: 842132 - RNA, 19 nt, Artificial Sequence
  Description of Artificial Sequence: Synthetic oligonucleotide
gcgcaacagugcugcuggg

SEQ ID NO: 842133 - RNA, 19 nt, Artificial Sequence
  Description of Artificial Sequence: Synthetic oligonucleotide
ggcgcacuuuccuucaguu

SEQ ID NO: 842134 - RNA, 19 nt, Artificial Sequence
  Description of Artificial Sequence: Synthetic oligonucleotide
cacgguguugcugccgaua

SEQ ID NO: 842135 - RNA, 19 nt, Artificial Sequence
  Description of Artificial Sequence: Synthetic oligonucleotide
caacgguguguuucagaau

SEQ ID NO: 842136 - RNA, 19 nt, Artificial Sequence
  Description of Artificial Sequence: Synthetic oligonucleotide
augcggguggagagaugga

SEQ ID NO: 842137 - RNA, 19 nt, Artificial Sequence
  Description of Artificial Sequence: Synthetic oligonucleotide
cauagucggugaugggcuu

SEQ ID NO: 842138 - RNA, 19 nt, Artificial Sequence
  Description of Artificial Sequence: Synthetic oligonucleotide
gcagugcgccugauucucc

SEQ ID NO: 842139 - RNA, 19 nt, Artificial Sequence
  Description of Artificial Sequence: Synthetic oligonucleotide
ccgguccuguugcuugaag

SEQ ID NO: 842140 - RNA, 19 nt, Artificial Sequence
  Description of Artificial Sequence: Synthetic oligonucleotide
cagugcacccgguugucuu

SEQ ID NO: 842141 - RNA, 19 nt, Artificial Sequence
  Description of Artificial Sequence: Synthetic oligonucleotide
ccaaagccgggugugucca

SEQ ID NO: 842142 - RNA, 19 nt, Artificial Sequence
  Description of Artificial Sequence: Synthetic oligonucleotide
gcacgguaauucucguagu

SEQ ID NO: 842143 - RNA, 19 nt, Artificial Sequence
  Description of Artificial Sequence: Synthetic oligonucleotide
cggggugucacuggucuug

SEQ ID NO: 842144 - RNA, 19 nt, Artificial Sequence
  Description of Artificial Sequence: Synthetic oligonucleotide
ccuugacccaaaaguagau

SEQ ID NO: 842145 - RNA, 19 nt, Artificial Sequence
  Description of Artificial Sequence: Synthetic oligonucleotide
ggaaccaggcagucagcuu

SEQ ID NO: 842146 - RNA, 19 nt, Artificial Sequence
  Description of Artificial Sequence: Synthetic oligonucleotide
ccuucggguugacccagga

SEQ ID NO: 842147 - RNA, 19 nt, Artificial Sequence
  Description of Artificial Sequence: Synthetic oligonucleotide
ccgcauccggggugggcag

SEQ ID NO: 842148 - RNA, 19 nt, Artificial Sequence
  Description of Artificial Sequence: Synthetic oligonucleotide
cgucuccgcauccggggug

SEQ ID NO: 842149 - RNA, 19 nt, Artificial Sequence
  Description of Artificial Sequence: Synthetic oligonucleotide
cgucuuagcucuucauccu

SEQ ID NO: 842150 - RNA, 19 nt, Artificial Sequence
  Description of Artificial Sequence: Synthetic oligonucleotide
gacuuucggugcaccugau

SEQ ID NO: 842151 - RNA, 19 nt, Artificial Sequence
  Description of Artificial Sequence: Synthetic oligonucleotide
gggcgcacuuuccuucagu

SEQ ID NO: 842152 - RNA, 19 nt, Artificial Sequence
  Description of Artificial Sequence: Synthetic oligonucleotide
ccguuccugccgccccugg

SEQ ID NO: 842153 - RNA, 19 nt, Artificial Sequence
  Description of Artificial Sequence: Synthetic oligonucleotide
gcgggaggauagggauggg

SEQ ID NO: 842154 - RNA, 19 nt, Artificial Sequence
  Description of Artificial Sequence: Synthetic oligonucleotide
cccgacucaccagccacca

SEQ ID NO: 842155 - RNA, 19 nt, Artificial Sequence
  Description of Artificial Sequence: Synthetic oligonucleotide
guucccgguccuguugcuu

SEQ ID NO: 842156 - RNA, 19 nt, Artificial Sequence
  Description of Artificial Sequence: Synthetic oligonucleotide
ggccgcaauccguguccaa

SEQ ID NO: 842157 - RNA, 19 nt, Artificial Sequence
  Description of Artificial Sequence: Synthetic oligonucleotide
cgccccugguguccuucgg

SEQ ID NO: 842158 - RNA, 19 nt, Artificial Sequence
  Description of Artificial Sequence: Synthetic oligonucleotide
ggguagaauccaggacagu

SEQ ID NO: 842159 - RNA, 19 nt, Artificial Sequence
  Description of Artificial Sequence: Synthetic oligonucleotide
cuggggucgccagcuugcu

SEQ ID NO: 842160 - RNA, 19 nt, Artificial Sequence
  Description of Artificial Sequence: Synthetic oligonucleotide
cgucuauccauggcguugu

SEQ ID NO: 842161 - RNA, 19 nt, Artificial Sequence
  Description of Artificial Sequence: Synthetic oligonucleotide
gcagugcacccgguugucu

SEQ ID NO: 842162 - RNA, 19 nt, Artificial Sequence
  Description of Artificial Sequence: Synthetic oligonucleotide
gccgucuauccauggcguu

SEQ ID NO: 842163 - RNA, 19 nt, Artificial Sequence
  Description of Artificial Sequence: Synthetic oligonucleotide
ugccgccccugguguccuu

SEQ ID NO: 842164 - RNA, 19 nt, Artificial Sequence
  Description of Artificial Sequence: Synthetic oligonucleotide
cgccgucuauccauggcgu

SEQ ID NO: 842165 - RNA, 19 nt, Artificial Sequence
  Description of Artificial Sequence: Synthetic oligonucleotide
cgcauccggggugggcagc

SEQ ID NO: 842166 - RNA, 19 nt, Artificial Sequence
  Description of Artificial Sequence: Synthetic oligonucleotide
cgaagggcgcacuuuccuu

SEQ ID NO: 842167 - RNA, 19 nt, Artificial Sequence
  Description of Artificial Sequence: Synthetic oligonucleotide
gcaccugauugggcagugu

SEQ ID NO: 842168 - RNA, 19 nt, Artificial Sequence
  Description of Artificial Sequence: Synthetic oligonucleotide
ccauggcguugugggccug

SEQ ID NO: 842169 - RNA, 19 nt, Artificial Sequence
  Description of Artificial Sequence: Synthetic oligonucleotide
gggugaagucaaagcccuu

SEQ ID NO: 842170 - RNA, 19 nt, Artificial Sequence
  Description of Artificial Sequence: Synthetic oligonucleotide
cgguugaggccacuuucau

SEQ ID NO: 842171 - RNA, 19 nt, Artificial Sequence
  Description of Artificial Sequence: Synthetic oligonucleotide
ccagcccgggaaccgccgu

SEQ ID NO: 842172 - RNA, 19 nt, Artificial Sequence
  Description of Artificial Sequence: Synthetic oligonucleotide
ccagcgcaacagugcugcu

SEQ ID NO: 842173 - RNA, 19 nt, Artificial Sequence
  Description of Artificial Sequence: Synthetic oligonucleotide
cccgguccuguugcuugaa

SEQ ID NO: 842174 - RNA, 19 nt, Artificial Sequence
  Description of Artificial Sequence: Synthetic oligonucleotide
cccgguugucuuggauauu

SEQ ID NO: 842175 - RNA, 19 nt, Artificial Sequence
  Description of Artificial Sequence: Synthetic oligonucleotide
aauaccaucauggagacag

SEQ ID NO: 842176 - RNA, 19 nt, Artificial Sequence
  Description of Artificial Sequence: Synthetic oligonucleotide
aauuaguacccucacauug

SEQ ID NO: 842177 - RNA, 19 nt, Artificial Sequence
  Description of Artificial Sequence: Synthetic oligonucleotide
gaaaacuuugguuaugggg

SEQ ID NO: 842178 - RNA, 19 nt, Artificial Sequence
  Description of Artificial Sequence: Synthetic oligonucleotide
ugcauagccacuuauaugc

SEQ ID NO: 842179 - RNA, 19 nt, Artificial Sequence
  Description of Artificial Sequence: Synthetic oligonucleotide
uaauuuaauccucacaaca

SEQ ID NO: 842180 - RNA, 19 nt, Artificial Sequence
  Description of Artificial Sequence: Synthetic oligonucleotide
aagauuaaacaucuuacca

SEQ ID NO: 842181 - RNA, 19 nt, Artificial Sequence
  Description of Artificial Sequence: Synthetic oligonucleotide
aaaacaagugguccagccc

SEQ ID NO: 842182 - RNA, 19 nt, Artificial Sequence
  Description of Artificial Sequence: Synthetic oligonucleotide
uuucaagcaaagaaugagg

SEQ ID NO: 842183 - RNA, 19 nt, Artificial Sequence
  Description of Artificial Sequence: Synthetic oligonucleotide
ucauuuaagcucaagaguc

SEQ ID NO: 842184 - RNA, 19 nt, Artificial Sequence
  Description of Artificial Sequence: Synthetic oligonucleotide
uuuaaucccgaucuugagg

SEQ ID NO: 842185 - RNA, 19 nt, Artificial Sequence
  Description of Artificial Sequence: Synthetic oligonucleotide
aagcucaagagucuaacuc

SEQ ID NO: 842186 - RNA, 19 nt, Artificial Sequence
  Description of Artificial Sequence: Synthetic oligonucleotide
agaauuugaagccaggugu

SEQ ID NO: 842187 - RNA, 19 nt, Artificial Sequence
  Description of Artificial Sequence: Synthetic oligonucleotide
gaaugugagcacuugagag

SEQ ID NO: 842188 - RNA, 19 nt, Artificial Sequence
  Description of Artificial Sequence: Synthetic oligonucleotide
acuaucgugggguugcucc

SEQ ID NO: 842189 - RNA, 19 nt, Artificial Sequence
  Description of Artificial Sequence: Synthetic oligonucleotide
aaaggaacccgcugcagac

SEQ ID NO: 842190 - RNA, 19 nt, Artificial Sequence
  Description of Artificial Sequence: Synthetic oligonucleotide
aacucuccccuuuuaaugg

SEQ ID NO: 842191 - RNA, 19 nt, Artificial Sequence
  Description of Artificial Sequence: Synthetic oligonucleotide
aacggagucgcucugcuuc

SEQ ID NO: 842192 - RNA, 19 nt, Artificial Sequence
  Description of Artificial Sequence: Synthetic oligonucleotide
aauaccuucguuccaugag

SEQ ID NO: 842193 - RNA, 19 nt, Artificial Sequence
  Description of Artificial Sequence: Synthetic oligonucleotide
uuaaucccgaucuugaggu

SEQ ID NO: 842194 - RNA, 19 nt, Artificial Sequence
  Description of Artificial Sequence: Synthetic oligonucleotide
aaacaagugguccagcccu

SEQ ID NO: 842195 - RNA, 19 nt, Artificial Sequence
  Description of Artificial Sequence: Synthetic oligonucleotide
uucaagcaaagaaugagga

SEQ ID NO: 842196 - RNA, 19 nt, Artificial Sequence
  Description of Artificial Sequence: Synthetic oligonucleotide
aaccuagcuauuuuaagga

SEQ ID NO: 842197 - RNA, 19 nt, Artificial Sequence
  Description of Artificial Sequence: Synthetic oligonucleotide
agaaacucgagcauggugg

SEQ ID NO: 842198 - RNA, 19 nt, Artificial Sequence
  Description of Artificial Sequence: Synthetic oligonucleotide
uucuaaauuaguacccuca

SEQ ID NO: 842199 - RNA, 19 nt, Artificial Sequence
  Description of Artificial Sequence: Synthetic oligonucleotide
ugaaagcagacauaagaca

SEQ ID NO: 842200 - RNA, 19 nt, Artificial Sequence
  Description of Artificial Sequence: Synthetic oligonucleotide
uucccuaaaggguagccgg

SEQ ID NO: 842201 - RNA, 19 nt, Artificial Sequence
  Description of Artificial Sequence: Synthetic oligonucleotide
agauuaaacaucuuaccaa

SEQ ID NO: 842202 - RNA, 19 nt, Artificial Sequence
  Description of Artificial Sequence: Synthetic oligonucleotide
aaacuuagauccuuccccu

SEQ ID NO: 842203 - RNA, 19 nt, Artificial Sequence
  Description of Artificial Sequence: Synthetic oligonucleotide
ucucuauaguucuuauagg

SEQ ID NO: 842204 - RNA, 19 nt, Artificial Sequence
  Description of Artificial Sequence: Synthetic oligonucleotide
aaaagcuaaggcccugcag

SEQ ID NO: 842205 - RNA, 19 nt, Artificial Sequence
  Description of Artificial Sequence: Synthetic oligonucleotide
auaccuucguuccaugagg

SEQ ID NO: 842206 - RNA, 19 nt, Artificial Sequence
  Description of Artificial Sequence: Synthetic oligonucleotide
ucuaaauuaguacccucac

SEQ ID NO: 842207 - RNA, 19 nt, Artificial Sequence
  Description of Artificial Sequence: Synthetic oligonucleotide
agacauaagacacucuccu

SEQ ID NO: 842208 - RNA, 19 nt, Artificial Sequence
  Description of Artificial Sequence: Synthetic oligonucleotide
ugcuaaaagaacucucccc

SEQ ID NO: 842209 - RNA, 19 nt, Artificial Sequence
  Description of Artificial Sequence: Synthetic oligonucleotide
uuaauuuaauccucacaac

SEQ ID NO: 842210 - RNA, 19 nt, Artificial Sequence
  Description of Artificial Sequence: Synthetic oligonucleotide
aacagguugcuuuguuuuc

SEQ ID NO: 842211 - RNA, 19 nt, Artificial Sequence
  Description of Artificial Sequence: Synthetic oligonucleotide
caggcguagggcaagaggg

SEQ ID NO: 842212 - RNA, 19 nt, Artificial Sequence
  Description of Artificial Sequence: Synthetic oligonucleotide
gaacucuccccuuuuaaug

SEQ ID NO: 842213 - RNA, 19 nt, Artificial Sequence
  Description of Artificial Sequence: Synthetic oligonucleotide
acccaaucuuuucaaaggg

SEQ ID NO: 842214 - RNA, 19 nt, Artificial Sequence
  Description of Artificial Sequence: Synthetic oligonucleotide
ucuaacucccaaaucagua

SEQ ID NO: 842215 - RNA, 19 nt, Artificial Sequence
  Description of Artificial Sequence: Synthetic oligonucleotide
ucuuaggugcuaaaagaac

SEQ ID NO: 842216 - RNA, 19 nt, Artificial Sequence
  Description of Artificial Sequence: Synthetic oligonucleotide
aagagacauaaacuuagau

SEQ ID NO: 842217 - RNA, 19 nt, Artificial Sequence
  Description of Artificial Sequence: Synthetic oligonucleotide
cacaaaaggaacccgcugc

SEQ ID NO: 842218 - RNA, 19 nt, Artificial Sequence
  Description of Artificial Sequence: Synthetic oligonucleotide
cuuauagcccucaauacca

SEQ ID NO: 842219 - RNA, 19 nt, Artificial Sequence
  Description of Artificial Sequence: Synthetic oligonucleotide
aucaucucggcgcuuuccc

SEQ ID NO: 842220 - RNA, 19 nt, Artificial Sequence
  Description of Artificial Sequence: Synthetic oligonucleotide
gaggaauugaggcacaaaa

SEQ ID NO: 842221 - RNA, 19 nt, Artificial Sequence
  Description of Artificial Sequence: Synthetic oligonucleotide
uuucccuuaacggagucgc

SEQ ID NO: 842222 - RNA, 19 nt, Artificial Sequence
  Description of Artificial Sequence: Synthetic oligonucleotide
cauaaucucauuuaauuua

SEQ ID NO: 842223 - RNA, 19 nt, Artificial Sequence
  Description of Artificial Sequence: Synthetic oligonucleotide
cucuauaguucuuauagga

SEQ ID NO: 842224 - RNA, 19 nt, Artificial Sequence
  Description of Artificial Sequence: Synthetic oligonucleotide
uuugcuccauuucacaaau

SEQ ID NO: 842225 - RNA, 19 nt, Artificial Sequence
  Description of Artificial Sequence: Synthetic oligonucleotide
agaaucucuaaucagccuu

SEQ ID NO: 842226 - RNA, 19 nt, Artificial Sequence
  Description of Artificial Sequence: Synthetic oligonucleotide
gcuagauacauacauaauc

SEQ ID NO: 842227 - RNA, 19 nt, Artificial Sequence
  Description of Artificial Sequence: Synthetic oligonucleotide
gaagacccuucccuaaagg

SEQ ID NO: 842228 - RNA, 19 nt, Artificial Sequence
  Description of Artificial Sequence: Synthetic oligonucleotide
cuagauacauacauaaucu

SEQ ID NO: 842229 - RNA, 19 nt, Artificial Sequence
  Description of Artificial Sequence: Synthetic oligonucleotide
cuuguuucgcucuauguca

SEQ ID NO: 842230 - RNA, 19 nt, Artificial Sequence
  Description of Artificial Sequence: Synthetic oligonucleotide
cuaccacggguuuuaaucc

SEQ ID NO: 842231 - RNA, 19 nt, Artificial Sequence
  Description of Artificial Sequence: Synthetic oligonucleotide
agauacauacauaaucuca

SEQ ID NO: 842232 - RNA, 19 nt, Artificial Sequence
  Description of Artificial Sequence: Synthetic oligonucleotide
uucccuacagcuacucugc

SEQ ID NO: 842233 - RNA, 19 nt, Artificial Sequence
  Description of Artificial Sequence: Synthetic oligonucleotide
aacuuagauccuuccccuc

SEQ ID NO: 842234 - RNA, 19 nt, Artificial Sequence
  Description of Artificial Sequence: Synthetic oligonucleotide
ucuuaccaaacuuugcaua

SEQ ID NO: 842235 - RNA, 19 nt, Artificial Sequence
  Description of Artificial Sequence: Synthetic oligonucleotide
ggaauugaggcacaaaaga

SEQ ID NO: 842236 - RNA, 19 nt, Artificial Sequence
  Description of Artificial Sequence: Synthetic oligonucleotide
gaggguuggacacgaagcc

SEQ ID NO: 842237 - RNA, 19 nt, Artificial Sequence
  Description of Artificial Sequence: Synthetic oligonucleotide
acggguuuuaaucccgauc

SEQ ID NO: 842238 - RNA, 19 nt, Artificial Sequence
  Description of Artificial Sequence: Synthetic oligonucleotide
uagauacauacauaaucuc

SEQ ID NO: 842239 - RNA, 19 nt, Artificial Sequence
  Description of Artificial Sequence: Synthetic oligonucleotide
ucuccugaaaaccuagcua

SEQ ID NO: 842240 - RNA, 19 nt, Artificial Sequence
  Description of Artificial Sequence: Synthetic oligonucleotide
cagacauaagacacucucc

SEQ ID NO: 842241 - RNA, 19 nt, Artificial Sequence
  Description of Artificial Sequence: Synthetic oligonucleotide
cucuuauagcccucaauac

SEQ ID NO: 842242 - RNA, 19 nt, Artificial Sequence
  Description of Artificial Sequence: Synthetic oligonucleotide
uuuaaugggaaagggcagu

SEQ ID NO: 842243 - RNA, 19 nt, Artificial Sequence
  Description of Artificial Sequence: Synthetic oligonucleotide
aaauuaguacccucacauu

SEQ ID NO: 842244 - RNA, 19 nt, Artificial Sequence
  Description of Artificial Sequence: Synthetic oligonucleotide
ucaagagucuaacucccaa

SEQ ID NO: 842245 - RNA, 19 nt, Artificial Sequence
  Description of Artificial Sequence: Synthetic oligonucleotide
acaggcguagggcaagagg

SEQ ID NO: 842246 - RNA, 19 nt, Artificial Sequence
  Description of Artificial Sequence: Synthetic oligonucleotide
uuaagcucaagagucuaac

SEQ ID NO: 842247 - RNA, 19 nt, Artificial Sequence
  Description of Artificial Sequence: Synthetic oligonucleotide
uuucuaaauuaguacccuc

SEQ ID NO: 842248 - RNA, 19 nt, Artificial Sequence
  Description of Artificial Sequence: Synthetic oligonucleotide
caucuuaccaaacuuugca

SEQ ID NO: 842249 - RNA, 19 nt, Artificial Sequence
  Description of Artificial Sequence: Synthetic oligonucleotide
ccuuuuauuaaguacccac

SEQ ID NO: 842250 - RNA, 19 nt, Artificial Sequence
  Description of Artificial Sequence: Synthetic oligonucleotide
guuucgcucuaugucaugg

SEQ ID NO: 842251 - RNA, 19 nt, Artificial Sequence
  Description of Artificial Sequence: Synthetic oligonucleotide
augccaucggugcugggac

SEQ ID NO: 842252 - RNA, 19 nt, Artificial Sequence
  Description of Artificial Sequence: Synthetic oligonucleotide
aagaauggagcagaggcua

SEQ ID NO: 842253 - RNA, 19 nt, Artificial Sequence
  Description of Artificial Sequence: Synthetic oligonucleotide
uuuaagcucaagagucuaa

SEQ ID NO: 842254 - RNA, 19 nt, Artificial Sequence
  Description of Artificial Sequence: Synthetic oligonucleotide
ucggcgcuuucccuuaacg

SEQ ID NO: 842255 - RNA, 19 nt, Artificial Sequence
  Description of Artificial Sequence: Synthetic oligonucleotide
aaugccaucggugcuggga

SEQ ID NO: 842256 - RNA, 19 nt, Artificial Sequence
  Description of Artificial Sequence: Synthetic oligonucleotide
agaaaacaagugguccagc

SEQ ID NO: 842257 - RNA, 19 nt, Artificial Sequence
  Description of Artificial Sequence: Synthetic oligonucleotide
agaaucaccacgacccuuc

SEQ ID NO: 842258 - RNA, 19 nt, Artificial Sequence
  Description of Artificial Sequence: Synthetic oligonucleotide
uaagcucaagagucuaacu

SEQ ID NO: 842259 - RNA, 19 nt, Artificial Sequence
  Description of Artificial Sequence: Synthetic oligonucleotide
agucccucugcuugcgggc

SEQ ID NO: 842260 - RNA, 19 nt, Artificial Sequence
  Description of Artificial Sequence: Synthetic oligonucleotide
ucuguagacuucccacuca

SEQ ID NO: 842261 - RNA, 19 nt, Artificial Sequence
  Description of Artificial Sequence: Synthetic oligonucleotide
agaaagcccaucaucucgg

SEQ ID NO: 842262 - RNA, 19 nt, Artificial Sequence
  Description of Artificial Sequence: Synthetic oligonucleotide
agacugaagauuuggguuu

SEQ ID NO: 842263 - RNA, 19 nt, Artificial Sequence
  Description of Artificial Sequence: Synthetic oligonucleotide
ucccuaaaggguagccggg

SEQ ID NO: 842264 - RNA, 19 nt, Artificial Sequence
  Description of Artificial Sequence: Synthetic oligonucleotide
uaaucagccuuuugguuuc

SEQ ID NO: 842265 - RNA, 19 nt, Artificial Sequence
  Description of Artificial Sequence: Synthetic oligonucleotide
uuccucaaucucuuaggug

SEQ ID NO: 842266 - RNA, 19 nt, Artificial Sequence
  Description of Artificial Sequence: Synthetic oligonucleotide
accuccauccuuguuucgc

SEQ ID NO: 842267 - RNA, 19 nt, Artificial Sequence
  Description of Artificial Sequence: Synthetic oligonucleotide
gugcuaaaagaacucuccc

SEQ ID NO: 842268 - RNA, 19 nt, Artificial Sequence
  Description of Artificial Sequence: Synthetic oligonucleotide
aggaauugaggcacaaaag

SEQ ID NO: 842269 - RNA, 19 nt, Artificial Sequence
  Description of Artificial Sequence: Synthetic oligonucleotide
uccacuaucgugggguugc

SEQ ID NO: 842270 - RNA, 19 nt, Artificial Sequence
  Description of Artificial Sequence: Synthetic oligonucleotide
uuaguacccucacauuguc

SEQ ID NO: 842271 - RNA, 19 nt, Artificial Sequence
  Description of Artificial Sequence: Synthetic oligonucleotide
acaaagcuacuuggguucc

SEQ ID NO: 842272 - RNA, 19 nt, Artificial Sequence
  Description of Artificial Sequence: Synthetic oligonucleotide
aucaccacgacccuucauu

SEQ ID NO: 842273 - RNA, 19 nt, Artificial Sequence
  Description of Artificial Sequence: Synthetic oligonucleotide
gagcgcuacaggaagaaac

SEQ ID NO: 842274 - RNA, 19 nt, Artificial Sequence
  Description of Artificial Sequence: Synthetic oligonucleotide
cauggagacaguguucaag

SEQ ID NO: 842275 - RNA, 19 nt, Artificial Sequence
  Description of Artificial Sequence: Synthetic oligonucleotide
cgcucaaggaauuacaaag

SEQ ID NO: 842276 - RNA, 19 nt, Artificial Sequence
  Description of Artificial Sequence: Synthetic oligonucleotide
ggauuccucaaucucuuag

SEQ ID NO: 842277 - RNA, 19 nt, Artificial Sequence
  Description of Artificial Sequence: Synthetic oligonucleotide
uucgcucuaugucaugguc

SEQ ID NO: 842278 - RNA, 19 nt, Artificial Sequence
  Description of Artificial Sequence: Synthetic oligonucleotide
agaacucuccccuuuuaau

SEQ ID NO: 842279 - RNA, 19 nt, Artificial Sequence
  Description of Artificial Sequence: Synthetic oligonucleotide
uuccuagcuccagagcugg

SEQ ID NO: 842280 - RNA, 19 nt, Artificial Sequence
  Description of Artificial Sequence: Synthetic oligonucleotide
aucuuaccaaacuuugcau

SEQ ID NO: 842281 - RNA, 19 nt, Artificial Sequence
  Description of Artificial Sequence: Synthetic oligonucleotide
augucauggucacccuuac

SEQ ID NO: 842282 - RNA, 19 nt, Artificial Sequence
  Description of Artificial Sequence: Synthetic oligonucleotide
ggugcuaaaagaacucucc

SEQ ID NO: 842283 - RNA, 19 nt, Artificial Sequence
  Description of Artificial Sequence: Synthetic oligonucleotide
cauagccacuuauaugcug

SEQ ID NO: 842284 - RNA, 19 nt, Artificial Sequence
  Description of Artificial Sequence: Synthetic oligonucleotide
uuauaugcuggagcaagaa

SEQ ID NO: 842285 - RNA, 19 nt, Artificial Sequence
  Description of Artificial Sequence: Synthetic oligonucleotide
auagcccucaauaccauca

SEQ ID NO: 842286 - RNA, 19 nt, Artificial Sequence
  Description of Artificial Sequence: Synthetic oligonucleotide
auuaguacccucacauugu

SEQ ID NO: 842287 - RNA, 19 nt, Artificial Sequence
  Description of Artificial Sequence: Synthetic oligonucleotide
cugugagcgcuacaggaag

SEQ ID NO: 842288 - RNA, 19 nt, Artificial Sequence
  Description of Artificial Sequence: Synthetic oligonucleotide
gccacuuauaugcuggagc

SEQ ID NO: 842289 - RNA, 19 nt, Artificial Sequence
  Description of Artificial Sequence: Synthetic oligonucleotide
cuucccuaaaggguagccg

SEQ ID NO: 842290 - RNA, 19 nt, Artificial Sequence
  Description of Artificial Sequence: Synthetic oligonucleotide
uaccacggguuuuaauccc

SEQ ID NO: 842291 - RNA, 19 nt, Artificial Sequence
  Description of Artificial Sequence: Synthetic oligonucleotide
accacgacccuucauuuaa

SEQ ID NO: 842292 - RNA, 19 nt, Artificial Sequence
  Description of Artificial Sequence: Synthetic oligonucleotide
agcggcuccgaccugccuc

SEQ ID NO: 842293 - RNA, 19 nt, Artificial Sequence
  Description of Artificial Sequence: Synthetic oligonucleotide
gcagacauaagacacucuc

SEQ ID NO: 842294 - RNA, 19 nt, Artificial Sequence
  Description of Artificial Sequence: Synthetic oligonucleotide
ugugagcgcuacaggaaga

SEQ ID NO: 842295 - RNA, 19 nt, Artificial Sequence
  Description of Artificial Sequence: Synthetic oligonucleotide
cuaaauuaguacccucaca

SEQ ID NO: 842296 - RNA, 19 nt, Artificial Sequence
  Description of Artificial Sequence: Synthetic oligonucleotide
acgacccuucauuuaagcu

SEQ ID NO: 842297 - RNA, 19 nt, Artificial Sequence
  Description of Artificial Sequence: Synthetic oligonucleotide
cuggagcaagaauuugaag

SEQ ID NO: 842298 - RNA, 19 nt, Artificial Sequence
  Description of Artificial Sequence: Synthetic oligonucleotide
uaggugcuaaaagaacucu

SEQ ID NO: 842299 - RNA, 19 nt, Artificial Sequence
  Description of Artificial Sequence: Synthetic oligonucleotide
aggugcuaaaagaacucuc

SEQ ID NO: 842300 - RNA, 19 nt, Artificial Sequence
  Description of Artificial Sequence: Synthetic oligonucleotide
cacgacccuucauuuaagc

SEQ ID NO: 842301 - RNA, 19 nt, Artificial Sequence
  Description of Artificial Sequence: Synthetic oligonucleotide
cuacaggaagaaacucgag

SEQ ID NO: 842302 - RNA, 19 nt, Artificial Sequence
  Description of Artificial Sequence: Synthetic oligonucleotide
uuggacacgaagccacaaa

SEQ ID NO: 842303 - RNA, 19 nt, Artificial Sequence
  Description of Artificial Sequence: Synthetic oligonucleotide
cuaacucccaaaucaguaa

SEQ ID NO: 842304 - RNA, 19 nt, Artificial Sequence
  Description of Artificial Sequence: Synthetic oligonucleotide
uuguuucgcucuaugucau

SEQ ID NO: 842305 - RNA, 19 nt, Artificial Sequence
  Description of Artificial Sequence: Synthetic oligonucleotide
ggcauagaagaauggagca

SEQ ID NO: 842306 - RNA, 19 nt, Artificial Sequence
  Description of Artificial Sequence: Synthetic oligonucleotide
gcagaacuggagaagaccc

SEQ ID NO: 842307 - RNA, 19 nt, Artificial Sequence
  Description of Artificial Sequence: Synthetic oligonucleotide
agcaaagaaugaggaagag

SEQ ID NO: 842308 - RNA, 19 nt, Artificial Sequence
  Description of Artificial Sequence: Synthetic oligonucleotide
ugucauggucacccuuacc

SEQ ID NO: 842309 - RNA, 19 nt, Artificial Sequence
  Description of Artificial Sequence: Synthetic oligonucleotide
cuuccuagcuccagagcug

SEQ ID NO: 842310 - RNA, 19 nt, Artificial Sequence
  Description of Artificial Sequence: Synthetic oligonucleotide
uuauagcccucaauaccau

SEQ ID NO: 842311 - RNA, 19 nt, Artificial Sequence
  Description of Artificial Sequence: Synthetic oligonucleotide
ucuucccuacagcuacucu

SEQ ID NO: 842312 - RNA, 19 nt, Artificial Sequence
  Description of Artificial Sequence: Synthetic oligonucleotide
uuucgcucuaugucauggu

SEQ ID NO: 842313 - RNA, 19 nt, Artificial Sequence
  Description of Artificial Sequence: Synthetic oligonucleotide
acucuccugaaaaccuagc

SEQ ID NO: 842314 - RNA, 19 nt, Artificial Sequence
  Description of Artificial Sequence: Synthetic oligonucleotide
uauagcccucaauaccauc

SEQ ID NO: 842315 - RNA, 19 nt, Artificial Sequence
  Description of Artificial Sequence: Synthetic oligonucleotide
cuuaacggagucgcucugc

SEQ ID NO: 842316 - RNA, 19 nt, Artificial Sequence
  Description of Artificial Sequence: Synthetic oligonucleotide
accuagcuauuuuaaggaa

SEQ ID NO: 842317 - RNA, 19 nt, Artificial Sequence
  Description of Artificial Sequence: Synthetic oligonucleotide
guugcguccccucguucgg

SEQ ID NO: 842318 - RNA, 19 nt, Artificial Sequence
  Description of Artificial Sequence: Synthetic oligonucleotide
acacugggaagggguaacc

SEQ ID NO: 842319 - RNA, 19 nt, Artificial Sequence
  Description of Artificial Sequence: Synthetic oligonucleotide
caaagcuacuuuuaauacu

SEQ ID NO: 842320 - RNA, 19 nt, Artificial Sequence
  Description of Artificial Sequence: Synthetic oligonucleotide
ucgagcauggugggacugg

SEQ ID NO: 842321 - RNA, 19 nt, Artificial Sequence
  Description of Artificial Sequence: Synthetic oligonucleotide
agaauggagcagaggcuac

SEQ ID NO: 842322 - RNA, 19 nt, Artificial Sequence
  Description of Artificial Sequence: Synthetic oligonucleotide
agguaggaugaaagcagac

SEQ ID NO: 842323 - RNA, 19 nt, Artificial Sequence
  Description of Artificial Sequence: Synthetic oligonucleotide
ggauguaagaagcccagaa

SEQ ID NO: 842324 - RNA, 19 nt, Artificial Sequence
  Description of Artificial Sequence: Synthetic oligonucleotide
gaggcuaccugaggggaag

SEQ ID NO: 842325 - RNA, 19 nt, Artificial Sequence
  Description of Artificial Sequence: Synthetic oligonucleotide
ggcagggaaagaccaacag

SEQ ID NO: 842326 - RNA, 19 nt, Artificial Sequence
  Description of Artificial Sequence: Synthetic oligonucleotide
cuaaucagccuuuugguuu

SEQ ID NO: 842327 - RNA, 19 nt, Artificial Sequence
  Description of Artificial Sequence: Synthetic oligonucleotide
agggauguaagaagcccag

SEQ ID NO: 842328 - RNA, 19 nt, Artificial Sequence
  Description of Artificial Sequence: Synthetic oligonucleotide
cucaaggaauuacaaagcu

SEQ ID NO: 842329 - RNA, 19 nt, Artificial Sequence
  Description of Artificial Sequence: Synthetic oligonucleotide
uccgaccugccuccguugc

SEQ ID NO: 842330 - RNA, 19 nt, Artificial Sequence
  Description of Artificial Sequence: Synthetic oligonucleotide
agcgcuacaggaagaaacu

SEQ ID NO: 842331 - RNA, 19 nt, Artificial Sequence
  Description of Artificial Sequence: Synthetic oligonucleotide
ugugagcacuugagagcag

SEQ ID NO: 842332 - RNA, 19 nt, Artificial Sequence
  Description of Artificial Sequence: Synthetic oligonucleotide
ggcgcuuucccuuaacgga

SEQ ID NO: 842333 - RNA, 19 nt, Artificial Sequence
  Description of Artificial Sequence: Synthetic oligonucleotide
accacggguuuuaaucccg

SEQ ID NO: 842334 - RNA, 19 nt, Artificial Sequence
  Description of Artificial Sequence: Synthetic oligonucleotide
gaccaccggaaguugguga

SEQ ID NO: 842335 - RNA, 19 nt, Artificial Sequence
  Description of Artificial Sequence: Synthetic oligonucleotide
ucaccacgacccuucauuu

SEQ ID NO: 842336 - RNA, 19 nt, Artificial Sequence
  Description of Artificial Sequence: Synthetic oligonucleotide
uuagauccuuccccucuua

SEQ ID NO: 842337 - RNA, 19 nt, Artificial Sequence
  Description of Artificial Sequence: Synthetic oligonucleotide
agacauaaacuuagauccu

SEQ ID NO: 842338 - RNA, 19 nt, Artificial Sequence
  Description of Artificial Sequence: Synthetic oligonucleotide
caaaaggaacccgcugcag

SEQ ID NO: 842339 - RNA, 19 nt, Artificial Sequence
  Description of Artificial Sequence: Synthetic oligonucleotide
ucccuuaacggagucgcuc

SEQ ID NO: 842340 - RNA, 19 nt, Artificial Sequence
  Description of Artificial Sequence: Synthetic oligonucleotide
gguaggaugaaagcagaca

SEQ ID NO: 842341 - RNA, 19 nt, Artificial Sequence
  Description of Artificial Sequence: Synthetic oligonucleotide
ccccagucaaaccaggcgc

SEQ ID NO: 842342 - RNA, 19 nt, Artificial Sequence
  Description of Artificial Sequence: Synthetic oligonucleotide
agcggcucaggcgcaaagg

SEQ ID NO: 842343 - RNA, 19 nt, Artificial Sequence
  Description of Artificial Sequence: Synthetic oligonucleotide
gagucgcucugcuucuuca

SEQ ID NO: 842344 - RNA, 19 nt, Artificial Sequence
  Description of Artificial Sequence: Synthetic oligonucleotide
uagccacuuauaugcugga

SEQ ID NO: 842345 - RNA, 19 nt, Artificial Sequence
  Description of Artificial Sequence: Synthetic oligonucleotide
ccacuuauaugcuggagca

SEQ ID NO: 842346 - RNA, 19 nt, Artificial Sequence
  Description of Artificial Sequence: Synthetic oligonucleotide
caucaucucggcgcuuucc

SEQ ID NO: 842347 - RNA, 19 nt, Artificial Sequence
  Description of Artificial Sequence: Synthetic oligonucleotide
aaggaacccgcugcagacu

SEQ ID NO: 842348 - RNA, 19 nt, Artificial Sequence
  Description of Artificial Sequence: Synthetic oligonucleotide
gcaagaauuugaagccagg

SEQ ID NO: 842349 - RNA, 19 nt, Artificial Sequence
  Description of Artificial Sequence: Synthetic oligonucleotide
gucauggcgacggcagcgg

SEQ ID NO: 842350 - RNA, 19 nt, Artificial Sequence
  Description of Artificial Sequence: Synthetic oligonucleotide
caaacuuugcauagccacu

SEQ ID NO: 842351 - RNA, 19 nt, Artificial Sequence
  Description of Artificial Sequence: Synthetic oligonucleotide
cacugggaagggguaaccc

SEQ ID NO: 842352 - RNA, 19 nt, Artificial Sequence
  Description of Artificial Sequence: Synthetic oligonucleotide
ugaccaccggaaguuggug

SEQ ID NO: 842353 - RNA, 19 nt, Artificial Sequence
  Description of Artificial Sequence: Synthetic oligonucleotide
ccucuuauagcccucaaua

SEQ ID NO: 842354 - RNA, 19 nt, Artificial Sequence
  Description of Artificial Sequence: Synthetic oligonucleotide
ggucauggcgacggcagcg

SEQ ID NO: 842355 - RNA, 19 nt, Artificial Sequence
  Description of Artificial Sequence: Synthetic oligonucleotide
agccacuuauaugcuggag

SEQ ID NO: 842356 - RNA, 19 nt, Artificial Sequence
  Description of Artificial Sequence: Synthetic oligonucleotide
aaacucgagcaugguggga

SEQ ID NO: 842357 - RNA, 19 nt, Artificial Sequence
  Description of Artificial Sequence: Synthetic oligonucleotide
ucguuccaugaggaaagac

SEQ ID NO: 842358 - RNA, 19 nt, Artificial Sequence
  Description of Artificial Sequence: Synthetic oligonucleotide
ccaauccccagucaaacca

SEQ ID NO: 842359 - RNA, 19 nt, Artificial Sequence
  Description of Artificial Sequence: Synthetic oligonucleotide
uaucgugggguugcuccug

SEQ ID NO: 842360 - RNA, 19 nt, Artificial Sequence
  Description of Artificial Sequence: Synthetic oligonucleotide
uucccuuaacggagucgcu

SEQ ID NO: 842361 - RNA, 19 nt, Artificial Sequence
  Description of Artificial Sequence: Synthetic oligonucleotide
cacucagaaucaccacgac

SEQ ID NO: 842362 - RNA, 19 nt, Artificial Sequence
  Description of Artificial Sequence: Synthetic oligonucleotide
uggagauaaggggcaggga

SEQ ID NO: 842363 - RNA, 19 nt, Artificial Sequence
  Description of Artificial Sequence: Synthetic oligonucleotide
gaaucaccacgacccuuca

SEQ ID NO: 842364 - RNA, 19 nt, Artificial Sequence
  Description of Artificial Sequence: Synthetic oligonucleotide
aggguuggacacgaagcca

SEQ ID NO: 842365 - RNA, 19 nt, Artificial Sequence
  Description of Artificial Sequence: Synthetic oligonucleotide
gauaaggggcagggaaaga

SEQ ID NO: 842366 - RNA, 19 nt, Artificial Sequence
  Description of Artificial Sequence: Synthetic oligonucleotide
ugcguccccucguucgggc

SEQ ID NO: 842367 - RNA, 19 nt, Artificial Sequence
  Description of Artificial Sequence: Synthetic oligonucleotide
ccuagcuauuuuaaggaaa

SEQ ID NO: 842368 - RNA, 19 nt, Artificial Sequence
  Description of Artificial Sequence: Synthetic oligonucleotide
caagaauuugaagccaggu

SEQ ID NO: 842369 - RNA, 19 nt, Artificial Sequence
  Description of Artificial Sequence: Synthetic oligonucleotide
cucaagagucuaacuccca

SEQ ID NO: 842370 - RNA, 19 nt, Artificial Sequence
  Description of Artificial Sequence: Synthetic oligonucleotide
caggcgcucaaggaauuac

SEQ ID NO: 842371 - RNA, 19 nt, Artificial Sequence
  Description of Artificial Sequence: Synthetic oligonucleotide
ggaaugccaucggugcugg

SEQ ID NO: 842372 - RNA, 19 nt, Artificial Sequence
  Description of Artificial Sequence: Synthetic oligonucleotide
agaaugaggaagagacaua

SEQ ID NO: 842373 - RNA, 19 nt, Artificial Sequence
  Description of Artificial Sequence: Synthetic oligonucleotide
aaguacccacaaugugcuu

SEQ ID NO: 842374 - RNA, 19 nt, Artificial Sequence
  Description of Artificial Sequence: Synthetic oligonucleotide
ggaaagaccaacagagacu

SEQ ID NO: 842375 - RNA, 19 nt, Artificial Sequence
  Description of Artificial Sequence: Synthetic oligonucleotide
uugcguccccucguucggg

SEQ ID NO: 842376 - RNA, 19 nt, Artificial Sequence
  Description of Artificial Sequence: Synthetic oligonucleotide
uggaggaauugaggcacaa

SEQ ID NO: 842377 - RNA, 19 nt, Artificial Sequence
  Description of Artificial Sequence: Synthetic oligonucleotide
cguugcguccccucguucg

SEQ ID NO: 842378 - RNA, 19 nt, Artificial Sequence
  Description of Artificial Sequence: Synthetic oligonucleotide
ugagcgcuacaggaagaaa

SEQ ID NO: 842379 - RNA, 19 nt, Artificial Sequence
  Description of Artificial Sequence: Synthetic oligonucleotide
cuacagcuacucugccuuc

SEQ ID NO: 842380 - RNA, 19 nt, Artificial Sequence
  Description of Artificial Sequence: Synthetic oligonucleotide
ucgcugguuaccgcggguc

SEQ ID NO: 842381 - RNA, 19 nt, Artificial Sequence
  Description of Artificial Sequence: Synthetic oligonucleotide
acaaaagauuaaacaucuu

SEQ ID NO: 842382 - RNA, 19 nt, Artificial Sequence
  Description of Artificial Sequence: Synthetic oligonucleotide
accuucguuccaugaggaa

SEQ ID NO: 842383 - RNA, 19 nt, Artificial Sequence
  Description of Artificial Sequence: Synthetic oligonucleotide
uccguugcguccccucguu

SEQ ID NO: 842384 - RNA, 19 nt, Artificial Sequence
  Description of Artificial Sequence: Synthetic oligonucleotide
aggcgcucaaggaauuaca

SEQ ID NO: 842385 - RNA, 19 nt, Artificial Sequence
  Description of Artificial Sequence: Synthetic oligonucleotide
cuugcgggcggcagcagaa

SEQ ID NO: 842386 - RNA, 19 nt, Artificial Sequence
  Description of Artificial Sequence: Synthetic oligonucleotide
gaggcuaccacggguuuua

SEQ ID NO: 842387 - RNA, 19 nt, Artificial Sequence
  Description of Artificial Sequence: Synthetic oligonucleotide
caguaaacucagaagcuuu

SEQ ID NO: 842388 - RNA, 19 nt, Artificial Sequence
  Description of Artificial Sequence: Synthetic oligonucleotide
guagccgggcuaccuucug

SEQ ID NO: 842389 - RNA, 19 nt, Artificial Sequence
  Description of Artificial Sequence: Synthetic oligonucleotide
cccaauccccagucaaacc

SEQ ID NO: 842390 - RNA, 19 nt, Artificial Sequence
  Description of Artificial Sequence: Synthetic oligonucleotide
aggauuccucaaucucuua

SEQ ID NO: 842391 - RNA, 19 nt, Artificial Sequence
  Description of Artificial Sequence: Synthetic oligonucleotide
agcagacauaagacacucu

SEQ ID NO: 842392 - RNA, 19 nt, Artificial Sequence
  Description of Artificial Sequence: Synthetic oligonucleotide
cagcuaugaggaagcagaa

SEQ ID NO: 842393 - RNA, 19 nt, Artificial Sequence
  Description of Artificial Sequence: Synthetic oligonucleotide
aucucggcgcuuucccuua

SEQ ID NO: 842394 - RNA, 19 nt, Artificial Sequence
  Description of Artificial Sequence: Synthetic oligonucleotide
agcugaccaccggaaguug

SEQ ID NO: 842395 - RNA, 19 nt, Artificial Sequence
  Description of Artificial Sequence: Synthetic oligonucleotide
caguguucaaggucugagu

SEQ ID NO: 842396 - RNA, 19 nt, Artificial Sequence
  Description of Artificial Sequence: Synthetic oligonucleotide
ucgugggguugcuccuggc

SEQ ID NO: 842397 - RNA, 19 nt, Artificial Sequence
  Description of Artificial Sequence: Synthetic oligonucleotide
cucgagcauggugggacug

SEQ ID NO: 842398 - RNA, 19 nt, Artificial Sequence
  Description of Artificial Sequence: Synthetic oligonucleotide
cuccgaccugccuccguug

SEQ ID NO: 842399 - RNA, 19 nt, Artificial Sequence
  Description of Artificial Sequence: Synthetic oligonucleotide
cggcgcuuucccuuaacgg

SEQ ID NO: 842400 - RNA, 19 nt, Artificial Sequence
  Description of Artificial Sequence: Synthetic oligonucleotide
gugagcgcuacaggaagaa

SEQ ID NO: 842401 - RNA, 19 nt, Artificial Sequence
  Description of Artificial Sequence: Synthetic oligonucleotide
guuggacacgaagccacaa

SEQ ID NO: 842402 - RNA, 19 nt, Artificial Sequence
  Description of Artificial Sequence: Synthetic oligonucleotide
cggguuuuaaucccgaucu

SEQ ID NO: 842403 - RNA, 19 nt, Artificial Sequence
  Description of Artificial Sequence: Synthetic oligonucleotide
ccuucccuaaaggguagcc

SEQ ID NO: 842404 - RNA, 19 nt, Artificial Sequence
  Description of Artificial Sequence: Synthetic oligonucleotide
agcuggcccagagacccca

SEQ ID NO: 842405 - RNA, 19 nt, Artificial Sequence
  Description of Artificial Sequence: Synthetic oligonucleotide
ucucggcgcuuucccuuaa

SEQ ID NO: 842406 - RNA, 19 nt, Artificial Sequence
  Description of Artificial Sequence: Synthetic oligonucleotide
caggaagaaacucgagcau

SEQ ID NO: 842407 - RNA, 19 nt, Artificial Sequence
  Description of Artificial Sequence: Synthetic oligonucleotide
cacaggcguagggcaagag

SEQ ID NO: 842408 - RNA, 19 nt, Artificial Sequence
  Description of Artificial Sequence: Synthetic oligonucleotide
cucggcgcuuucccuuaac

SEQ ID NO: 842409 - RNA, 19 nt, Artificial Sequence
  Description of Artificial Sequence: Synthetic oligonucleotide
agaggcuaccacggguuuu

SEQ ID NO: 842410 - RNA, 19 nt, Artificial Sequence
  Description of Artificial Sequence: Synthetic oligonucleotide
gaccugccuccguugcguc

SEQ ID NO: 842411 - RNA, 19 nt, Artificial Sequence
  Description of Artificial Sequence: Synthetic oligonucleotide
gcggcuccgaccugccucc

SEQ ID NO: 842412 - RNA, 19 nt, Artificial Sequence
  Description of Artificial Sequence: Synthetic oligonucleotide
gcgcucaaggaauuacaaa

SEQ ID NO: 842413 - RNA, 19 nt, Artificial Sequence
  Description of Artificial Sequence: Synthetic oligonucleotide
ggcgcucaaggaauuacaa

SEQ ID NO: 842414 - RNA, 19 nt, Artificial Sequence
  Description of Artificial Sequence: Synthetic oligonucleotide
ggagucgcucugcuucuuc

SEQ ID NO: 842415 - RNA, 19 nt, Artificial Sequence
  Description of Artificial Sequence: Synthetic oligonucleotide
ccccaauccccagucaaac

SEQ ID NO: 842416 - RNA, 19 nt, Artificial Sequence
  Description of Artificial Sequence: Synthetic oligonucleotide
ccugugagcgcuacaggaa

SEQ ID NO: 842417 - RNA, 19 nt, Artificial Sequence
  Description of Artificial Sequence: Synthetic oligonucleotide
gcguagggcaagaggguug

SEQ ID NO: 842418 - RNA, 19 nt, Artificial Sequence
  Description of Artificial Sequence: Synthetic oligonucleotide
ccuuaacggagucgcucug

SEQ ID NO: 842419 - RNA, 19 nt, Artificial Sequence
  Description of Artificial Sequence: Synthetic oligonucleotide
cccucacauugucuugaag

SEQ ID NO: 842420 - RNA, 19 nt, Artificial Sequence
  Description of Artificial Sequence: Synthetic oligonucleotide
accgcgggucauggcgacg

SEQ ID NO: 842421 - RNA, 19 nt, Artificial Sequence
  Description of Artificial Sequence: Synthetic oligonucleotide
cacuaucgugggguugcuc

SEQ ID NO: 842422 - RNA, 19 nt, Artificial Sequence
  Description of Artificial Sequence: Synthetic oligonucleotide
cuaugucauggucacccuu

SEQ ID NO: 842423 - RNA, 19 nt, Artificial Sequence
  Description of Artificial Sequence: Synthetic oligonucleotide
cauggcgacggcagcggcu

SEQ ID NO: 842424 - RNA, 19 nt, Artificial Sequence
  Description of Artificial Sequence: Synthetic oligonucleotide
caccacgacccuucauuua

SEQ ID NO: 842425 - RNA, 19 nt, Artificial Sequence
  Description of Artificial Sequence: Synthetic oligonucleotide
ugcuugcgggcggcagcag

SEQ ID NO: 842426 - RNA, 19 nt, Artificial Sequence
  Description of Artificial Sequence: Synthetic oligonucleotide
uugcgggcggcagcagaaa

SEQ ID NO: 842427 - RNA, 19 nt, Artificial Sequence
  Description of Artificial Sequence: Synthetic oligonucleotide
ggguuugcccuuggcaauc

SEQ ID NO: 842428 - RNA, 19 nt, Artificial Sequence
  Description of Artificial Sequence: Synthetic oligonucleotide
ccggaaguuggugagcaga

SEQ ID NO: 842429 - RNA, 19 nt, Artificial Sequence
  Description of Artificial Sequence: Synthetic oligonucleotide
ccgcgggucauggcgacgg

SEQ ID NO: 842430 - RNA, 19 nt, Artificial Sequence
  Description of Artificial Sequence: Synthetic oligonucleotide
ggaggaauugaggcacaaa

SEQ ID NO: 842431 - RNA, 19 nt, Artificial Sequence
  Description of Artificial Sequence: Synthetic oligonucleotide
caucucggcgcuuucccuu

SEQ ID NO: 842432 - RNA, 19 nt, Artificial Sequence
  Description of Artificial Sequence: Synthetic oligonucleotide
ccuuaccaauggguucagg

SEQ ID NO: 842433 - RNA, 19 nt, Artificial Sequence
  Description of Artificial Sequence: Synthetic oligonucleotide
gcgcuacaggaagaaacuc

SEQ ID NO: 842434 - RNA, 19 nt, Artificial Sequence
  Description of Artificial Sequence: Synthetic oligonucleotide
caauaccaucauggagaca

SEQ ID NO: 842435 - RNA, 19 nt, Artificial Sequence
  Description of Artificial Sequence: Synthetic oligonucleotide
ccgaccugccuccguugcg

SEQ ID NO: 842436 - RNA, 19 nt, Artificial Sequence
  Description of Artificial Sequence: Synthetic oligonucleotide
acgaagccacaaagcuacu

SEQ ID NO: 842437 - RNA, 19 nt, Artificial Sequence
  Description of Artificial Sequence: Synthetic oligonucleotide
gguuugcccuuggcaauca

SEQ ID NO: 842438 - RNA, 19 nt, Artificial Sequence
  Description of Artificial Sequence: Synthetic oligonucleotide
cccaaaagcuaaggcccug

SEQ ID NO: 842439 - RNA, 19 nt, Artificial Sequence
  Description of Artificial Sequence: Synthetic oligonucleotide
cccuuaacggagucgcucu

SEQ ID NO: 842440 - RNA, 19 nt, Artificial Sequence
  Description of Artificial Sequence: Synthetic oligonucleotide
ucccgaucuugaggucaaa

SEQ ID NO: 842441 - RNA, 19 nt, Artificial Sequence
  Description of Artificial Sequence: Synthetic oligonucleotide
gcguccccucguucgggcc

SEQ ID NO: 842442 - RNA, 19 nt, Artificial Sequence
  Description of Artificial Sequence: Synthetic oligonucleotide
ccagucaaaccaggcgcuc

SEQ ID NO: 842443 - RNA, 19 nt, Artificial Sequence
  Description of Artificial Sequence: Synthetic oligonucleotide
ccacggguuuuaaucccga

SEQ ID NO: 842444 - RNA, 19 nt, Artificial Sequence
  Description of Artificial Sequence: Synthetic oligonucleotide
gggaccugugagcgcuaca

SEQ ID NO: 842445 - RNA, 19 nt, Artificial Sequence
  Description of Artificial Sequence: Synthetic oligonucleotide
cagcugaccaccggaaguu

SEQ ID NO: 842446 - RNA, 19 nt, Artificial Sequence
  Description of Artificial Sequence: Synthetic oligonucleotide
guagggcaagaggguugga

SEQ ID NO: 842447 - RNA, 19 nt, Artificial Sequence
  Description of Artificial Sequence: Synthetic oligonucleotide
caaagcuacuuggguuccu

SEQ ID NO: 842448 - RNA, 19 nt, Artificial Sequence
  Description of Artificial Sequence: Synthetic oligonucleotide
cuccguugcguccccucgu

SEQ ID NO: 842449 - RNA, 19 nt, Artificial Sequence
  Description of Artificial Sequence: Synthetic oligonucleotide
ugccuccguugcguccccu

SEQ ID NO: 842450 - RNA, 19 nt, Artificial Sequence
  Description of Artificial Sequence: Synthetic oligonucleotide
guccccucguucgggccga

SEQ ID NO: 842451 - RNA, 19 nt, Artificial Sequence
  Description of Artificial Sequence: Synthetic oligonucleotide
ggguuuuaaucccgaucuu

SEQ ID NO: 842452 - RNA, 19 nt, Artificial Sequence
  Description of Artificial Sequence: Synthetic oligonucleotide
cucgcugguuaccgcgggu

SEQ ID NO: 842453 - RNA, 19 nt, Artificial Sequence
  Description of Artificial Sequence: Synthetic oligonucleotide
caccagcggcucaggcgca

SEQ ID NO: 842454 - RNA, 19 nt, Artificial Sequence
  Description of Artificial Sequence: Synthetic oligonucleotide
gcgggucauggcgacggca

SEQ ID NO: 842455 - RNA, 19 nt, Artificial Sequence
  Description of Artificial Sequence: Synthetic oligonucleotide
gguagccgggcuaccuucu

SEQ ID NO: 842456 - RNA, 19 nt, Artificial Sequence
  Description of Artificial Sequence: Synthetic oligonucleotide
gccaucggugcugggaccu

SEQ ID NO: 842457 - RNA, 19 nt, Artificial Sequence
  Description of Artificial Sequence: Synthetic oligonucleotide
gcuccgaccugccuccguu

SEQ ID NO: 842458 - RNA, 19 nt, Artificial Sequence
  Description of Artificial Sequence: Synthetic oligonucleotide
gcacugugcuagauacaua

SEQ ID NO: 842459 - RNA, 19 nt, Artificial Sequence
  Description of Artificial Sequence: Synthetic oligonucleotide
ccguugcguccccucguuc

SEQ ID NO: 842460 - RNA, 19 nt, Artificial Sequence
  Description of Artificial Sequence: Synthetic oligonucleotide
cccucuuauagcccucaau

SEQ ID NO: 842461 - RNA, 19 nt, Artificial Sequence
  Description of Artificial Sequence: Synthetic oligonucleotide
ggcgcaaaggcagcaucuu

SEQ ID NO: 842462 - RNA, 19 nt, Artificial Sequence
  Description of Artificial Sequence: Synthetic oligonucleotide
cgcugguuaccgcggguca

SEQ ID NO: 842463 - RNA, 19 nt, Artificial Sequence
  Description of Artificial Sequence: Synthetic oligonucleotide
uccccucguucgggccgac

SEQ ID NO: 842464 - RNA, 19 nt, Artificial Sequence
  Description of Artificial Sequence: Synthetic oligonucleotide
gcugguuaccgcgggucau

SEQ ID NO: 842465 - RNA, 19 nt, Artificial Sequence
  Description of Artificial Sequence: Synthetic oligonucleotide
ggcuccgaccugccuccgu

SEQ ID NO: 842466 - RNA, 19 nt, Artificial Sequence
  Description of Artificial Sequence: Synthetic oligonucleotide
cgcuuucccuuaacggagu

SEQ ID NO: 842467 - RNA, 19 nt, Artificial Sequence
  Description of Artificial Sequence: Synthetic oligonucleotide
ccacuaucgugggguugcu

SEQ ID NO: 842468 - RNA, 19 nt, Artificial Sequence
  Description of Artificial Sequence: Synthetic oligonucleotide
cggcuccgaccugccuccg

SEQ ID NO: 842469 - RNA, 19 nt, Artificial Sequence
  Description of Artificial Sequence: Synthetic oligonucleotide
gauaaguugcuucugggcg

SEQ ID NO: 842470 - RNA, 19 nt, Artificial Sequence
  Description of Artificial Sequence: Synthetic oligonucleotide
agaugaaucagucgguacc

SEQ ID NO: 842471 - RNA, 19 nt, Artificial Sequence
  Description of Artificial Sequence: Synthetic oligonucleotide
uccacuacagccaucuugg

SEQ ID NO: 842472 - RNA, 19 nt, Artificial Sequence
  Description of Artificial Sequence: Synthetic oligonucleotide
ucuaauacagcccgagucc

SEQ ID NO: 842473 - RNA, 19 nt, Artificial Sequence
  Description of Artificial Sequence: Synthetic oligonucleotide
aagauaaguugcuucuggg

SEQ ID NO: 842474 - RNA, 19 nt, Artificial Sequence
  Description of Artificial Sequence: Synthetic oligonucleotide
agauaaguugcuucugggc

SEQ ID NO: 842475 - RNA, 19 nt, Artificial Sequence
  Description of Artificial Sequence: Synthetic oligonucleotide
ugauauagcacaauccggu

SEQ ID NO: 842476 - RNA, 19 nt, Artificial Sequence
  Description of Artificial Sequence: Synthetic oligonucleotide
uuuauuaacauugccaauc

SEQ ID NO: 842477 - RNA, 19 nt, Artificial Sequence
  Description of Artificial Sequence: Synthetic oligonucleotide
uucaucguccacuacagcc

SEQ ID NO: 842478 - RNA, 19 nt, Artificial Sequence
  Description of Artificial Sequence: Synthetic oligonucleotide
uggacaaguugccaggugg

SEQ ID NO: 842479 - RNA, 19 nt, Artificial Sequence
  Description of Artificial Sequence: Synthetic oligonucleotide
aucucaaccaacuugggca

SEQ ID NO: 842480 - RNA, 19 nt, Artificial Sequence
  Description of Artificial Sequence: Synthetic oligonucleotide
auaaguugcuucugggcgc

SEQ ID NO: 842481 - RNA, 19 nt, Artificial Sequence
  Description of Artificial Sequence: Synthetic oligonucleotide
aaaccagauggauacacca

SEQ ID NO: 842482 - RNA, 19 nt, Artificial Sequence
  Description of Artificial Sequence: Synthetic oligonucleotide
agauacucgcaauagucac

SEQ ID NO: 842483 - RNA, 19 nt, Artificial Sequence
  Description of Artificial Sequence: Synthetic oligonucleotide
aaguauugcuugcuguggg

SEQ ID NO: 842484 - RNA, 19 nt, Artificial Sequence
  Description of Artificial Sequence: Synthetic oligonucleotide
ucagauacucgcaauaguc

SEQ ID NO: 842485 - RNA, 19 nt, Artificial Sequence
  Description of Artificial Sequence: Synthetic oligonucleotide
ucaguagcaggacaggacc

SEQ ID NO: 842486 - RNA, 19 nt, Artificial Sequence
  Description of Artificial Sequence: Synthetic oligonucleotide
gaugcaaguggccagagca

SEQ ID NO: 842487 - RNA, 19 nt, Artificial Sequence
  Description of Artificial Sequence: Synthetic oligonucleotide
ggcauuagaguuuugaccc

SEQ ID NO: 842488 - RNA, 19 nt, Artificial Sequence
  Description of Artificial Sequence: Synthetic oligonucleotide
uuagagaagacacggcgug

SEQ ID NO: 842489 - RNA, 19 nt, Artificial Sequence
  Description of Artificial Sequence: Synthetic oligonucleotide
uuaacauugccaaucccac

SEQ ID NO: 842490 - RNA, 19 nt, Artificial Sequence
  Description of Artificial Sequence: Synthetic oligonucleotide
aauagucacuguucuucac

SEQ ID NO: 842491 - RNA, 19 nt, Artificial Sequence
  Description of Artificial Sequence: Synthetic oligonucleotide
uauagcacaauccggugga

SEQ ID NO: 842492 - RNA, 19 nt, Artificial Sequence
  Description of Artificial Sequence: Synthetic oligonucleotide
auauagcacaauccggugg

SEQ ID NO: 842493 - RNA, 19 nt, Artificial Sequence
  Description of Artificial Sequence: Synthetic oligonucleotide
ucuuggcuggcucaauucg

SEQ ID NO: 842494 - RNA, 19 nt, Artificial Sequence
  Description of Artificial Sequence: Synthetic oligonucleotide
uggcauuagaguuuugacc

SEQ ID NO: 842495 - RNA, 19 nt, Artificial Sequence
  Description of Artificial Sequence: Synthetic oligonucleotide
aacgagagggugcagccuc

SEQ ID NO: 842496 - RNA, 19 nt, Artificial Sequence
  Description of Artificial Sequence: Synthetic oligonucleotide
uguaaccccauccaucagc

SEQ ID NO: 842497 - RNA, 19 nt, Artificial Sequence
  Description of Artificial Sequence: Synthetic oligonucleotide
uguugccccagccagcugg

SEQ ID NO: 842498 - RNA, 19 nt, Artificial Sequence
  Description of Artificial Sequence: Synthetic oligonucleotide
aaugcguguguacaucuca

SEQ ID NO: 842499 - RNA, 19 nt, Artificial Sequence
  Description of Artificial Sequence: Synthetic oligonucleotide
uauuguauuuguccaggca

SEQ ID NO: 842500 - RNA, 19 nt, Artificial Sequence
  Description of Artificial Sequence: Synthetic oligonucleotide
cauggaucuugccacaucc

SEQ ID NO: 842501 - RNA, 19 nt, Artificial Sequence
  Description of Artificial Sequence: Synthetic oligonucleotide
uccucuuagagaagacacg

SEQ ID NO: 842502 - RNA, 19 nt, Artificial Sequence
  Description of Artificial Sequence: Synthetic oligonucleotide
ucagcgagguccgugaagg

SEQ ID NO: 842503 - RNA, 19 nt, Artificial Sequence
  Description of Artificial Sequence: Synthetic oligonucleotide
agcaagauaaguugcuucu

SEQ ID NO: 842504 - RNA, 19 nt, Artificial Sequence
  Description of Artificial Sequence: Synthetic oligonucleotide
cuauauuguauuuguccag

SEQ ID NO: 842505 - RNA, 19 nt, Artificial Sequence
  Description of Artificial Sequence: Synthetic oligonucleotide
auggaugucccuccgauca

SEQ ID NO: 842506 - RNA, 19 nt, Artificial Sequence
  Description of Artificial Sequence: Synthetic oligonucleotide
uugaucagggagccaagag

SEQ ID NO: 842507 - RNA, 19 nt, Artificial Sequence
  Description of Artificial Sequence: Synthetic oligonucleotide
cucaauucgugacacaauc

SEQ ID NO: 842508 - RNA, 19 nt, Artificial Sequence
  Description of Artificial Sequence: Synthetic oligonucleotide
uauuaacauugccaauccc

SEQ ID NO: 842509 - RNA, 19 nt, Artificial Sequence
  Description of Artificial Sequence: Synthetic oligonucleotide
  modified_base (4)..(4): a, c, u, g, unknown or other
uccncuuugugcagcaaga

SEQ ID NO: 842510 - RNA, 19 nt, Artificial Sequence
  Description of Artificial Sequence: Synthetic oligonucleotide
gauauagcacaauccggug

SEQ ID NO: 842511 - RNA, 19 nt, Artificial Sequence
  Description of Artificial Sequence: Synthetic oligonucleotide
  modified_base (5)..(5): a, c, u, g, unknown or other
ggacncagcacacauacgc

SEQ ID NO: 842512 - RNA, 19 nt, Artificial Sequence
  Description of Artificial Sequence: Synthetic oligonucleotide
gauucaucguccacuacag

SEQ ID NO: 842513 - RNA, 19 nt, Artificial Sequence
  Description of Artificial Sequence: Synthetic oligonucleotide
augucauacccuccugccc

SEQ ID NO: 842514 - RNA, 19 nt, Artificial Sequence
  Description of Artificial Sequence: Synthetic oligonucleotide
guuguuugcugugugaagc

SEQ ID NO: 842515 - RNA, 19 nt, Artificial Sequence
  Description of Artificial Sequence: Synthetic oligonucleotide
gaucguuggaaaaugcgug

SEQ ID NO: 842516 - RNA, 19 nt, Artificial Sequence
  Description of Artificial Sequence: Synthetic oligonucleotide
gaggauaccuaccugggca

SEQ ID NO: 842517 - RNA, 19 nt, Artificial Sequence
  Description of Artificial Sequence: Synthetic oligonucleotide
uggaaaaugcguguguaca

SEQ ID NO: 842518 - RNA, 19 nt, Artificial Sequence
  Description of Artificial Sequence: Synthetic oligonucleotide
ucaucgaugucauacccuc

SEQ ID NO: 842519 - RNA, 19 nt, Artificial Sequence
  Description of Artificial Sequence: Synthetic oligonucleotide
ucaauucgugacacaaucu

SEQ ID NO: 842520 - RNA, 19 nt, Artificial Sequence
  Description of Artificial Sequence: Synthetic oligonucleotide
gguuuguugauguaacccc

SEQ ID NO: 842521 - RNA, 19 nt, Artificial Sequence
  Description of Artificial Sequence: Synthetic oligonucleotide
gaaucagucgguaccacug

SEQ ID NO: 842522 - RNA, 19 nt, Artificial Sequence
  Description of Artificial Sequence: Synthetic oligonucleotide
caauucgugacacaaucuc

SEQ ID NO: 842523 - RNA, 19 nt, Artificial Sequence
  Description of Artificial Sequence: Synthetic oligonucleotide
auugccaaucccacgcucc

SEQ ID NO: 842524 - RNA, 19 nt, Artificial Sequence
  Description of Artificial Sequence: Synthetic oligonucleotide
agagcacccaugaaagacc

SEQ ID NO: 842525 - RNA, 19 nt, Artificial Sequence
  Description of Artificial Sequence: Synthetic oligonucleotide
gauggauacaccacccagc

SEQ ID NO: 842526 - RNA, 19 nt, Artificial Sequence
  Description of Artificial Sequence: Synthetic oligonucleotide
aauucgugacacaaucuca

SEQ ID NO: 842527 - RNA, 19 nt, Artificial Sequence
  Description of Artificial Sequence: Synthetic oligonucleotide
aggauaccuaccugggcac

SEQ ID NO: 842528 - RNA, 19 nt, Artificial Sequence
  Description of Artificial Sequence: Synthetic oligonucleotide
guugauguaaccccaucca

SEQ ID NO: 842529 - RNA, 19 nt, Artificial Sequence
  Description of Artificial Sequence: Synthetic oligonucleotide
aaccaacuugggcaagcuc

SEQ ID NO: 842530 - RNA, 19 nt, Artificial Sequence
  Description of Artificial Sequence: Synthetic oligonucleotide
uacucggucugguagucag

SEQ ID NO: 842531 - RNA, 19 nt, Artificial Sequence
  Description of Artificial Sequence: Synthetic oligonucleotide
cuaggggucaggcccaacg

SEQ ID NO: 842532 - RNA, 19 nt, Artificial Sequence
  Description of Artificial Sequence: Synthetic oligonucleotide
acccaauggaugucccucc

SEQ ID NO: 842533 - RNA, 19 nt, Artificial Sequence
  Description of Artificial Sequence: Synthetic oligonucleotide
ucgcaauagucacuguucu

SEQ ID NO: 842534 - RNA, 19 nt, Artificial Sequence
  Description of Artificial Sequence: Synthetic oligonucleotide
aaucagucgguaccacugu

SEQ ID NO: 842535 - RNA, 19 nt, Artificial Sequence
  Description of Artificial Sequence: Synthetic oligonucleotide
uaggggucaggcccaacgg

SEQ ID NO: 842536 - RNA, 19 nt, Artificial Sequence
  Description of Artificial Sequence: Synthetic oligonucleotide
agccgguacucauggauac

SEQ ID NO: 842537 - RNA, 19 nt, Artificial Sequence
  Description of Artificial Sequence: Synthetic oligonucleotide
auucgugacacaaucucag

SEQ ID NO: 842538 - RNA, 19 nt, Artificial Sequence
  Description of Artificial Sequence: Synthetic oligonucleotide
gcuauauuguauuugucca

SEQ ID NO: 842539 - RNA, 19 nt, Artificial Sequence
  Description of Artificial Sequence: Synthetic oligonucleotide
aucgaugucauacccuccu

SEQ ID NO: 842540 - RNA, 19 nt, Artificial Sequence
  Description of Artificial Sequence: Synthetic oligonucleotide
auucaucguccacuacagc

SEQ ID NO: 842541 - RNA, 19 nt, Artificial Sequence
  Description of Artificial Sequence: Synthetic oligonucleotide
agcguauguuuccuugggg

SEQ ID NO: 842542 - RNA, 19 nt, Artificial Sequence
  Description of Artificial Sequence: Synthetic oligonucleotide
caucucaaccaacuugggc

SEQ ID NO: 842543 - RNA, 19 nt, Artificial Sequence
  Description of Artificial Sequence: Synthetic oligonucleotide
uccgcugggagguuuguug

SEQ ID NO: 842544 - RNA, 19 nt, Artificial Sequence
  Description of Artificial Sequence: Synthetic oligonucleotide
auagccgguacucauggau

SEQ ID NO: 842545 - RNA, 19 nt, Artificial Sequence
  Description of Artificial Sequence: Synthetic oligonucleotide
uuccccaagucccauuugu

SEQ ID NO: 842546 - RNA, 19 nt, Artificial Sequence
  Description of Artificial Sequence: Synthetic oligonucleotide
gagguuuguugauguaacc

SEQ ID NO: 842547 - RNA, 19 nt, Artificial Sequence
  Description of Artificial Sequence: Synthetic oligonucleotide
ugaggauaccuaccugggc

SEQ ID NO: 842548 - RNA, 19 nt, Artificial Sequence
  Description of Artificial Sequence: Synthetic oligonucleotide
aucgcugcaacuguggaca

SEQ ID NO: 842549 - RNA, 19 nt, Artificial Sequence
  Description of Artificial Sequence: Synthetic oligonucleotide
  modified_base (3)..(3): a, c, u, g, unknown or other
acncagcacacauacgcca

SEQ ID NO: 842550 - RNA, 19 nt, Artificial Sequence
  Description of Artificial Sequence: Synthetic oligonucleotide
auacucgcaauagucacug

SEQ ID NO: 842551 - RNA, 19 nt, Artificial Sequence
  Description of Artificial Sequence: Synthetic oligonucleotide
ccugaggauaccuaccugg

SEQ ID NO: 842552 - RNA, 19 nt, Artificial Sequence
  Description of Artificial Sequence: Synthetic oligonucleotide
caaguauugcuugcugugg

SEQ ID NO: 842553 - RNA, 19 nt, Artificial Sequence
  Description of Artificial Sequence: Synthetic oligonucleotide
uaaguugcuucugggcgcg

SEQ ID NO: 842554 - RNA, 19 nt, Artificial Sequence
  Description of Artificial Sequence: Synthetic oligonucleotide
ugucaaacacuguccgccc

SEQ ID NO: 842555 - RNA, 19 nt, Artificial Sequence
  Description of Artificial Sequence: Synthetic oligonucleotide
gcucccaugccucauagag

SEQ ID NO: 842556 - RNA, 19 nt, Artificial Sequence
  Description of Artificial Sequence: Synthetic oligonucleotide
gagaugaaucagucgguac

SEQ ID NO: 842557 - RNA, 19 nt, Artificial Sequence
  Description of Artificial Sequence: Synthetic oligonucleotide
caaguaccaaggcaauggc

SEQ ID NO: 842558 - RNA, 19 nt, Artificial Sequence
  Description of Artificial Sequence: Synthetic oligonucleotide
cuaauacagcccgaguccc

SEQ ID NO: 842559 - RNA, 19 nt, Artificial Sequence
  Description of Artificial Sequence: Synthetic oligonucleotide
  modified_base (4)..(4): a, c, u, g, unknown or other
gacncagcacacauacgcc

SEQ ID NO: 842560 - RNA, 19 nt, Artificial Sequence
  Description of Artificial Sequence: Synthetic oligonucleotide
uccucuaauacagcccgag

SEQ ID NO: 842561 - RNA, 19 nt, Artificial Sequence
  Description of Artificial Sequence: Synthetic oligonucleotide
gaugaaucagucgguacca

SEQ ID NO: 842562 - RNA, 19 nt, Artificial Sequence
  Description of Artificial Sequence: Synthetic oligonucleotide
uuuguugauguaaccccau

SEQ ID NO: 842563 - RNA, 19 nt, Artificial Sequence
  Description of Artificial Sequence: Synthetic oligonucleotide
uggauagccgguacucaug

SEQ ID NO: 842564 - RNA, 19 nt, Artificial Sequence
  Description of Artificial Sequence: Synthetic oligonucleotide
ggauagccgguacucaugg

SEQ ID NO: 842565 - RNA, 19 nt, Artificial Sequence
  Description of Artificial Sequence: Synthetic oligonucleotide
gucagcguauguuuccuug

SEQ ID NO: 842566 - RNA, 19 nt, Artificial Sequence
  Description of Artificial Sequence: Synthetic oligonucleotide
uguccguccgguaggucag

SEQ ID NO: 842567 - RNA, 19 nt, Artificial Sequence
  Description of Artificial Sequence: Synthetic oligonucleotide
uucgugacacaaucucagc

SEQ ID NO: 842568 - RNA, 19 nt, Artificial Sequence
  Description of Artificial Sequence: Synthetic oligonucleotide
  modified_base (5)..(5): a, c, u, g, unknown or other
cuccncuuugugcagcaag

SEQ ID NO: 842569 - RNA, 19 nt, Artificial Sequence
  Description of Artificial Sequence: Synthetic oligonucleotide
  modified_base (2)..(2): a, c, u, g, unknown or other
cncagcacacauacgccag

SEQ ID NO: 842570 - RNA, 19 nt, Artificial Sequence
  Description of Artificial Sequence: Synthetic oligonucleotide
gaaaaugcguguguacauc

SEQ ID NO: 842571 - RNA, 19 nt, Artificial Sequence
  Description of Artificial Sequence: Synthetic oligonucleotide
uagagaagacacggcgugg

SEQ ID NO: 842572 - RNA, 19 nt, Artificial Sequence
  Description of Artificial Sequence: Synthetic oligonucleotide
uccccugcuggucuugcag

SEQ ID NO: 842573 - RNA, 19 nt, Artificial Sequence
  Description of Artificial Sequence: Synthetic oligonucleotide
cagauacucgcaauaguca

SEQ ID NO: 842574 - RNA, 19 nt, Artificial Sequence
  Description of Artificial Sequence: Synthetic oligonucleotide
gcuugauauagcacaaucc

SEQ ID NO: 842575 - RNA, 19 nt, Artificial Sequence
  Description of Artificial Sequence: Synthetic oligonucleotide
ucguccacuacagccaucu

SEQ ID NO: 842576 - RNA, 19 nt, Artificial Sequence
  Description of Artificial Sequence: Synthetic oligonucleotide
cagccugacggaugcagcg

SEQ ID NO: 842577 - RNA, 19 nt, Artificial Sequence
  Description of Artificial Sequence: Synthetic oligonucleotide
uaccuaccugggcacagcc

SEQ ID NO: 842578 - RNA, 19 nt, Artificial Sequence
  Description of Artificial Sequence: Synthetic oligonucleotide
gauaccuaccugggcacag

SEQ ID NO: 842579 - RNA, 19 nt, Artificial Sequence
  Description of Artificial Sequence: Synthetic oligonucleotide
acucgcaauagucacuguu

SEQ ID NO: 842580 - RNA, 19 nt, Artificial Sequence
  Description of Artificial Sequence: Synthetic oligonucleotide
  modified_base (10)..(10): a, c, u, g, unknown or other
ggacccuccncuuugugca

SEQ ID NO: 842581 - RNA, 19 nt, Artificial Sequence
  Description of Artificial Sequence: Synthetic oligonucleotide
gguaggucagguccaauac

SEQ ID NO: 842582 - RNA, 19 nt, Artificial Sequence
  Description of Artificial Sequence: Synthetic oligonucleotide
accaaggcguuguuugaug

SEQ ID NO: 842583 - RNA, 19 nt, Artificial Sequence
  Description of Artificial Sequence: Synthetic oligonucleotide
cagcguauguuuccuuggg

SEQ ID NO: 842584 - RNA, 19 nt, Artificial Sequence
  Description of Artificial Sequence: Synthetic oligonucleotide
cugagugacggucugggga

SEQ ID NO: 842585 - RNA, 19 nt, Artificial Sequence
  Description of Artificial Sequence: Synthetic oligonucleotide
uggggaucguuggaaaaug

SEQ ID NO: 842586 - RNA, 19 nt, Artificial Sequence
  Description of Artificial Sequence: Synthetic oligonucleotide
ucgucucaggcaacuuaag

SEQ ID NO: 842587 - RNA, 19 nt, Artificial Sequence
  Description of Artificial Sequence: Synthetic oligonucleotide
ucguuggaaaaugcgugug

SEQ ID NO: 842588 - RNA, 19 nt, Artificial Sequence
  Description of Artificial Sequence: Synthetic oligonucleotide
auuuguccaggcaggaaug

SEQ ID NO: 842589 - RNA, 19 nt, Artificial Sequence
  Description of Artificial Sequence: Synthetic oligonucleotide
ucgaugucauacccuccug

SEQ ID NO: 842590 - RNA, 19 nt, Artificial Sequence
  Description of Artificial Sequence: Synthetic oligonucleotide
ggaggaccgugcuauauug

SEQ ID NO: 842591 - RNA, 19 nt, Artificial Sequence
  Description of Artificial Sequence: Synthetic oligonucleotide
ugacggaugcagcgcuggg

SEQ ID NO: 842592 - RNA, 19 nt, Artificial Sequence
  Description of Artificial Sequence: Synthetic oligonucleotide
  modified_base (7)..(7): a, c, u, g, unknown or other
ccggacncagcacacauac

SEQ ID NO: 842593 - RNA, 19 nt, Artificial Sequence
  Description of Artificial Sequence: Synthetic oligonucleotide
cacaauccgguggaugucc

SEQ ID NO: 842594 - RNA, 19 nt, Artificial Sequence
  Description of Artificial Sequence: Synthetic oligonucleotide
auaccuaccugggcacagc

SEQ ID NO: 842595 - RNA, 19 nt, Artificial Sequence
  Description of Artificial Sequence: Synthetic oligonucleotide
guuuguugauguaacccca

SEQ ID NO: 842596 - RNA, 19 nt, Artificial Sequence
  Description of Artificial Sequence: Synthetic oligonucleotide
gggaucguuggaaaaugcg

SEQ ID NO: 842597 - RNA, 19 nt, Artificial Sequence
  Description of Artificial Sequence: Synthetic oligonucleotide
ugccugucagcacccgugc

SEQ ID NO: 842598 - RNA, 19 nt, Artificial Sequence
  Description of Artificial Sequence: Synthetic oligonucleotide
ugcguguguacaucucaac

SEQ ID NO: 842599 - RNA, 19 nt, Artificial Sequence
  Description of Artificial Sequence: Synthetic oligonucleotide
uacaccacuccggacccag

SEQ ID NO: 842600 - RNA, 19 nt, Artificial Sequence
  Description of Artificial Sequence: Synthetic oligonucleotide
caucgcugcaacuguggac

SEQ ID NO: 842601 - RNA, 19 nt, Artificial Sequence
  Description of Artificial Sequence: Synthetic oligonucleotide
uccgugaaggaggcauugg

SEQ ID NO: 842602 - RNA, 19 nt, Artificial Sequence
  Description of Artificial Sequence: Synthetic oligonucleotide
gccucauagaggcuucacg

SEQ ID NO: 842603 - RNA, 19 nt, Artificial Sequence
  Description of Artificial Sequence: Synthetic oligonucleotide
ccaaguauugcuugcugug

SEQ ID NO: 842604 - RNA, 19 nt, Artificial Sequence
  Description of Artificial Sequence: Synthetic oligonucleotide
caucgaugucauacccucc

SEQ ID NO: 842605 - RNA, 19 nt, Artificial Sequence
  Description of Artificial Sequence: Synthetic oligonucleotide
uagccgguacucauggaua

SEQ ID NO: 842606 - RNA, 19 nt, Artificial Sequence
  Description of Artificial Sequence: Synthetic oligonucleotide
agaagacacggcgugggca

SEQ ID NO: 842607 - RNA, 19 nt, Artificial Sequence
  Description of Artificial Sequence: Synthetic oligonucleotide
uccgcccaugcugauaccc

SEQ ID NO: 842608 - RNA, 19 nt, Artificial Sequence
  Description of Artificial Sequence: Synthetic oligonucleotide
guagcuccgcuccucagca

SEQ ID NO: 842609 - RNA, 19 nt, Artificial Sequence
  Description of Artificial Sequence: Synthetic oligonucleotide
guguccguccgguagguca

SEQ ID NO: 842610 - RNA, 19 nt, Artificial Sequence
  Description of Artificial Sequence: Synthetic oligonucleotide
  modified_base (9)..(9): a, c, u, g, unknown or other
ugccggacncagcacacau

SEQ ID NO: 842611 - RNA, 19 nt, Artificial Sequence
  Description of Artificial Sequence: Synthetic oligonucleotide
gaucgucucaggcaacuua

SEQ ID NO: 842612 - RNA, 19 nt, Artificial Sequence
  Description of Artificial Sequence: Synthetic oligonucleotide
aggaccgugcuauauugua

SEQ ID NO: 842613 - RNA, 19 nt, Artificial Sequence
  Description of Artificial Sequence: Synthetic oligonucleotide
gaccaauggcacugagggc

SEQ ID NO: 842614 - RNA, 19 nt, Artificial Sequence
  Description of Artificial Sequence: Synthetic oligonucleotide
agcgagguccgugaaggag

SEQ ID NO: 842615 - RNA, 19 nt, Artificial Sequence
  Description of Artificial Sequence: Synthetic oligonucleotide
auacccaacuucagagauc

SEQ ID NO: 842616 - RNA, 19 nt, Artificial Sequence
  Description of Artificial Sequence: Synthetic oligonucleotide
gacccaauggaugucccuc

SEQ ID NO: 842617 - RNA, 19 nt, Artificial Sequence
  Description of Artificial Sequence: Synthetic oligonucleotide
cuuagagaagacacggcgu

SEQ ID NO: 842618 - RNA, 19 nt, Artificial Sequence
  Description of Artificial Sequence: Synthetic oligonucleotide
guaaccccauccaucagca

SEQ ID NO: 842619 - RNA, 19 nt, Artificial Sequence
  Description of Artificial Sequence: Synthetic oligonucleotide
cuggcucaauucgugacac

SEQ ID NO: 842620 - RNA, 19 nt, Artificial Sequence
  Description of Artificial Sequence: Synthetic oligonucleotide
ugaagagaagaggcccaug

SEQ ID NO: 842621 - RNA, 19 nt, Artificial Sequence
  Description of Artificial Sequence: Synthetic oligonucleotide
agccugacggaugcagcgc

SEQ ID NO: 842622 - RNA, 19 nt, Artificial Sequence
  Description of Artificial Sequence: Synthetic oligonucleotide
auacugucuagagcagcag

SEQ ID NO: 842623 - RNA, 19 nt, Artificial Sequence
  Description of Artificial Sequence: Synthetic oligonucleotide
aaccaaggcguuguuugau

SEQ ID NO: 842624 - RNA, 19 nt, Artificial Sequence
  Description of Artificial Sequence: Synthetic oligonucleotide
gcagguguccguccgguag

SEQ ID NO: 842625 - RNA, 19 nt, Artificial Sequence
  Description of Artificial Sequence: Synthetic oligonucleotide
cuccgaucauguccacugg

SEQ ID NO: 842626 - RNA, 19 nt, Artificial Sequence
  Description of Artificial Sequence: Synthetic oligonucleotide
ggacaaguugccagguggg

SEQ ID NO: 842627 - RNA, 19 nt, Artificial Sequence
  Description of Artificial Sequence: Synthetic oligonucleotide
ggagguuuguugauguaac

SEQ ID NO: 842628 - RNA, 19 nt, Artificial Sequence
  Description of Artificial Sequence: Synthetic oligonucleotide
gcguauguuuccuugggga

SEQ ID NO: 842629 - RNA, 19 nt, Artificial Sequence
  Description of Artificial Sequence: Synthetic oligonucleotide
gaccuguugcagaugccug

SEQ ID NO: 842630 - RNA, 19 nt, Artificial Sequence
  Description of Artificial Sequence: Synthetic oligonucleotide
cugucuagagcagcagaac

SEQ ID NO: 842631 - RNA, 19 nt, Artificial Sequence
  Description of Artificial Sequence: Synthetic oligonucleotide
acgcucccaugccucauag

SEQ ID NO: 842632 - RNA, 19 nt, Artificial Sequence
  Description of Artificial Sequence: Synthetic oligonucleotide
gcugccuaagaucuucuca

SEQ ID NO: 842633 - RNA, 19 nt, Artificial Sequence
  Description of Artificial Sequence: Synthetic oligonucleotide
aucgucucaggcaacuuaa

SEQ ID NO: 842634 - RNA, 19 nt, Artificial Sequence
  Description of Artificial Sequence: Synthetic oligonucleotide
accacuccggacccagaug

SEQ ID NO: 842635 - RNA, 19 nt, Artificial Sequence
  Description of Artificial Sequence: Synthetic oligonucleotide
  modified_base (9)..(9): a, c, u, g, unknown or other
gacccuccncuuugugcag

SEQ ID NO: 842636 - RNA, 19 nt, Artificial Sequence
  Description of Artificial Sequence: Synthetic oligonucleotide
ccaacgagagggugcagcc

SEQ ID NO: 842637 - RNA, 19 nt, Artificial Sequence
  Description of Artificial Sequence: Synthetic oligonucleotide
ggugaaugccccacagucc

SEQ ID NO: 842638 - RNA, 19 nt, Artificial Sequence
  Description of Artificial Sequence: Synthetic oligonucleotide
  modified_base (8)..(8): a, c, u, g, unknown or other
acccuccncuuugugcagc

SEQ ID NO: 842639 - RNA, 19 nt, Artificial Sequence
  Description of Artificial Sequence: Synthetic oligonucleotide
gaaaagucugagugacggu

SEQ ID NO: 842640 - RNA, 19 nt, Artificial Sequence
  Description of Artificial Sequence: Synthetic oligonucleotide
cacgccugagggcucuugc

SEQ ID NO: 842641 - RNA, 19 nt, Artificial Sequence
  Description of Artificial Sequence: Synthetic oligonucleotide
cugggagaaaccagaugga

SEQ ID NO: 842642 - RNA, 19 nt, Artificial Sequence
  Description of Artificial Sequence: Synthetic oligonucleotide
uaccugcgcuugauggaug

SEQ ID NO: 842643 - RNA, 19 nt, Artificial Sequence
  Description of Artificial Sequence: Synthetic oligonucleotide
augcagucagccugacgga

SEQ ID NO: 842644 - RNA, 19 nt, Artificial Sequence
  Description of Artificial Sequence: Synthetic oligonucleotide
uccccaagucccauuuguu

SEQ ID NO: 842645 - RNA, 19 nt, Artificial Sequence
  Description of Artificial Sequence: Synthetic oligonucleotide
agcaaacagagcacccaug

SEQ ID NO: 842646 - RNA, 19 nt, Artificial Sequence
  Description of Artificial Sequence: Synthetic oligonucleotide
gauacucgcaauagucacu

SEQ ID NO: 842647 - RNA, 19 nt, Artificial Sequence
  Description of Artificial Sequence: Synthetic oligonucleotide
gaccgugcuauauuguauu

SEQ ID NO: 842648 - RNA, 19 nt, Artificial Sequence
  Description of Artificial Sequence: Synthetic oligonucleotide
gauagccgguacucaugga

SEQ ID NO: 842649 - RNA, 19 nt, Artificial Sequence
  Description of Artificial Sequence: Synthetic oligonucleotide
caucauggaucuugccaca

SEQ ID NO: 842650 - RNA, 19 nt, Artificial Sequence
  Description of Artificial Sequence: Synthetic oligonucleotide
guuguuugauguugucacu

SEQ ID NO: 842651 - RNA, 19 nt, Artificial Sequence
  Description of Artificial Sequence: Synthetic oligonucleotide
ccuaagaucuucucaccca

SEQ ID NO: 842652 - RNA, 19 nt, Artificial Sequence
  Description of Artificial Sequence: Synthetic oligonucleotide
ccucagauacucgcaauag

SEQ ID NO: 842653 - RNA, 19 nt, Artificial Sequence
  Description of Artificial Sequence: Synthetic oligonucleotide
gguaccugcgcuugaugga

SEQ ID NO: 842654 - RNA, 19 nt, Artificial Sequence
  Description of Artificial Sequence: Synthetic oligonucleotide
ggcaucgcugcaacugugg

SEQ ID NO: 842655 - RNA, 19 nt, Artificial Sequence
  Description of Artificial Sequence: Synthetic oligonucleotide
gugguaccugcgcuugaug

SEQ ID NO: 842656 - RNA, 19 nt, Artificial Sequence
  Description of Artificial Sequence: Synthetic oligonucleotide
  modified_base (2)..(2): a, c, u, g, unknown or other
cncuuugugcagcaagaua

SEQ ID NO: 842657 - RNA, 19 nt, Artificial Sequence
  Description of Artificial Sequence: Synthetic oligonucleotide
cagauggauacaccaccca

SEQ ID NO: 842658 - RNA, 19 nt, Artificial Sequence
  Description of Artificial Sequence: Synthetic oligonucleotide
aggcaggaauggcauuaga

SEQ ID NO: 842659 - RNA, 19 nt, Artificial Sequence
  Description of Artificial Sequence: Synthetic oligonucleotide
gguaccacugugguaccug

SEQ ID NO: 842660 - RNA, 19 nt, Artificial Sequence
  Description of Artificial Sequence: Synthetic oligonucleotide
cuguagcuccgcuccucag

SEQ ID NO: 842661 - RNA, 19 nt, Artificial Sequence
  Description of Artificial Sequence: Synthetic oligonucleotide
gucccuccgaucaugucca

SEQ ID NO: 842662 - RNA, 19 nt, Artificial Sequence
  Description of Artificial Sequence: Synthetic oligonucleotide
aagucacgccugagggcuc

SEQ ID NO: 842663 - RNA, 19 nt, Artificial Sequence
  Description of Artificial Sequence: Synthetic oligonucleotide
cucagauacucgcaauagu

SEQ ID NO: 842664 - RNA, 19 nt, Artificial Sequence
  Description of Artificial Sequence: Synthetic oligonucleotide
aucauggaucuugccacau

SEQ ID NO: 842665 - RNA, 19 nt, Artificial Sequence
  Description of Artificial Sequence: Synthetic oligonucleotide
uggauacaccacccagcuu

SEQ ID NO: 842666 - RNA, 19 nt, Artificial Sequence
  Description of Artificial Sequence: Synthetic oligonucleotide
gcuggcucaauucgugaca

SEQ ID NO: 842667 - RNA, 19 nt, Artificial Sequence
  Description of Artificial Sequence: Synthetic oligonucleotide
aguugcuucugggcgcgca

SEQ ID NO: 842668 - RNA, 19 nt, Artificial Sequence
  Description of Artificial Sequence: Synthetic oligonucleotide
ggaucguuggaaaaugcgu

SEQ ID NO: 842669 - RNA, 19 nt, Artificial Sequence
  Description of Artificial Sequence: Synthetic oligonucleotide
uacucgcaauagucacugu

SEQ ID NO: 842670 - RNA, 19 nt, Artificial Sequence
  Description of Artificial Sequence: Synthetic oligonucleotide
ugccucauagaggcuucac

SEQ ID NO: 842671 - RNA, 19 nt, Artificial Sequence
  Description of Artificial Sequence: Synthetic oligonucleotide
gugccaggcgggaaaaguc

SEQ ID NO: 842672 - RNA, 19 nt, Artificial Sequence
  Description of Artificial Sequence: Synthetic oligonucleotide
agcccgagucccugggaga

SEQ ID NO: 842673 - RNA, 19 nt, Artificial Sequence
  Description of Artificial Sequence: Synthetic oligonucleotide
ggaaaaugcguguguacau

SEQ ID NO: 842674 - RNA, 19 nt, Artificial Sequence
  Description of Artificial Sequence: Synthetic oligonucleotide
cucaaccaacuugggcaag

SEQ ID NO: 842675 - RNA, 19 nt, Artificial Sequence
  Description of Artificial Sequence: Synthetic oligonucleotide
caauccgguggauguccuc

SEQ ID NO: 842676 - RNA, 19 nt, Artificial Sequence
  Description of Artificial Sequence: Synthetic oligonucleotide
  modified_base (12)..(12): a, c, u, g, unknown or other
cuggacccuccncuuugug

SEQ ID NO: 842677 - RNA, 19 nt, Artificial Sequence
  Description of Artificial Sequence: Synthetic oligonucleotide
caccgcuggcucuugcuca

SEQ ID NO: 842678 - RNA, 19 nt, Artificial Sequence
  Description of Artificial Sequence: Synthetic oligonucleotide
cgugacacaaucucagcga

SEQ ID NO: 842679 - RNA, 19 nt, Artificial Sequence
  Description of Artificial Sequence: Synthetic oligonucleotide
ggggaucguuggaaaaugc

SEQ ID NO: 842680 - RNA, 19 nt, Artificial Sequence
  Description of Artificial Sequence: Synthetic oligonucleotide
gaugucccuccgaucaugu

SEQ ID NO: 842681 - RNA, 19 nt, Artificial Sequence
  Description of Artificial Sequence: Synthetic oligonucleotide
cauuagaguuuugaccccu

SEQ ID NO: 842682 - RNA, 19 nt, Artificial Sequence
  Description of Artificial Sequence: Synthetic oligonucleotide
ggucaguagcaggacagga

SEQ ID NO: 842683 - RNA, 19 nt, Artificial Sequence
  Description of Artificial Sequence: Synthetic oligonucleotide
gcugugugaagcccaagcu

SEQ ID NO: 842684 - RNA, 19 nt, Artificial Sequence
  Description of Artificial Sequence: Synthetic oligonucleotide
gcaacuuaaguagccucca

SEQ ID NO: 842685 - RNA, 19 nt, Artificial Sequence
  Description of Artificial Sequence: Synthetic oligonucleotide
acaaucagauuggcuuuua

SEQ ID NO: 842686 - RNA, 19 nt, Artificial Sequence
  Description of Artificial Sequence: Synthetic oligonucleotide
auacucggucugguaguca

SEQ ID NO: 842687 - RNA, 19 nt, Artificial Sequence
  Description of Artificial Sequence: Synthetic oligonucleotide
  modified_base (14)..(14): a, c, u, g, unknown or other
cccuggacccuccncuuug

SEQ ID NO: 842688 - RNA, 19 nt, Artificial Sequence
  Description of Artificial Sequence: Synthetic oligonucleotide
gcguuguuugauguuguca

SEQ ID NO: 842689 - RNA, 19 nt, Artificial Sequence
  Description of Artificial Sequence: Synthetic oligonucleotide
ugaucgucucaggcaacuu

SEQ ID NO: 842690 - RNA, 19 nt, Artificial Sequence
  Description of Artificial Sequence: Synthetic oligonucleotide
ucacgccugagggcucuug

SEQ ID NO: 842691 - RNA, 19 nt, Artificial Sequence
  Description of Artificial Sequence: Synthetic oligonucleotide
acggaggaccgugcuauau

SEQ ID NO: 842692 - RNA, 19 nt, Artificial Sequence
  Description of Artificial Sequence: Synthetic oligonucleotide
gccuccaacgagagggugc

SEQ ID NO: 842693 - RNA, 19 nt, Artificial Sequence
  Description of Artificial Sequence: Synthetic oligonucleotide
ucgcugcaacuguggacaa

SEQ ID NO: 842694 - RNA, 19 nt, Artificial Sequence
  Description of Artificial Sequence: Synthetic oligonucleotide
ggcagcggagaugcaagug

SEQ ID NO: 842695 - RNA, 19 nt, Artificial Sequence
  Description of Artificial Sequence: Synthetic oligonucleotide
cuccggacccagaugucaa

SEQ ID NO: 842696 - RNA, 19 nt, Artificial Sequence
  Description of Artificial Sequence: Synthetic oligonucleotide
auagcacaauccgguggau

SEQ ID NO: 842697 - RNA, 19 nt, Artificial Sequence
  Description of Artificial Sequence: Synthetic oligonucleotide
ccgugcuauauuguauuug

SEQ ID NO: 842698 - RNA, 19 nt, Artificial Sequence
  Description of Artificial Sequence: Synthetic oligonucleotide
ucggucugguagucagauu

SEQ ID NO: 842699 - RNA, 19 nt, Artificial Sequence
  Description of Artificial Sequence: Synthetic oligonucleotide
ggcguuguuugauguuguc

SEQ ID NO: 842700 - RNA, 19 nt, Artificial Sequence
  Description of Artificial Sequence: Synthetic oligonucleotide
ucacccaccgcuggcucuu

SEQ ID NO: 842701 - RNA, 19 nt, Artificial Sequence
  Description of Artificial Sequence: Synthetic oligonucleotide
ggucugguagucagauuca

SEQ ID NO: 842702 - RNA, 19 nt, Artificial Sequence
  Description of Artificial Sequence: Synthetic oligonucleotide
ugggcgcgcacagcugugu

SEQ ID NO: 842703 - RNA, 19 nt, Artificial Sequence
  Description of Artificial Sequence: Synthetic oligonucleotide
uccguccgguaggucaggu

SEQ ID NO: 842704 - RNA, 19 nt, Artificial Sequence
  Description of Artificial Sequence: Synthetic oligonucleotide
caacggaggaccgugcuau

SEQ ID NO: 842705 - RNA, 19 nt, Artificial Sequence
  Description of Artificial Sequence: Synthetic oligonucleotide
ggcccugaggauaccuacc

SEQ ID NO: 842706 - RNA, 19 nt, Artificial Sequence
  Description of Artificial Sequence: Synthetic oligonucleotide
gacggaugcagcgcugggu

SEQ ID NO: 842707 - RNA, 19 nt, Artificial Sequence
  Description of Artificial Sequence: Synthetic oligonucleotide
cugggcgcgcacagcugug

SEQ ID NO: 842708 - RNA, 19 nt, Artificial Sequence
  Description of Artificial Sequence: Synthetic oligonucleotide
ggcccaacggaggaccgug

SEQ ID NO: 842709 - RNA, 19 nt, Artificial Sequence
  Description of Artificial Sequence: Synthetic oligonucleotide
ugacggucuggggaucguu

SEQ ID NO: 842710 - RNA, 19 nt, Artificial Sequence
  Description of Artificial Sequence: Synthetic oligonucleotide
aggcauuggggcaggugaa

SEQ ID NO: 842711 - RNA, 19 nt, Artificial Sequence
  Description of Artificial Sequence: Synthetic oligonucleotide
cgagguccgugaaggaggc

SEQ ID NO: 842712 - RNA, 19 nt, Artificial Sequence
  Description of Artificial Sequence: Synthetic oligonucleotide
accuaccugggcacagccu

SEQ ID NO: 842713 - RNA, 19 nt, Artificial Sequence
  Description of Artificial Sequence: Synthetic oligonucleotide
augccucauagaggcuuca

SEQ ID NO: 842714 - RNA, 19 nt, Artificial Sequence
  Description of Artificial Sequence: Synthetic oligonucleotide
ggcugccuaagaucuucuc

SEQ ID NO: 842715 - RNA, 19 nt, Artificial Sequence
  Description of Artificial Sequence: Synthetic oligonucleotide
guaccugcgcuugauggau

SEQ ID NO: 842716 - RNA, 19 nt, Artificial Sequence
  Description of Artificial Sequence: Synthetic oligonucleotide
caaucagauuggcuuuuau

SEQ ID NO: 842717 - RNA, 19 nt, Artificial Sequence
  Description of Artificial Sequence: Synthetic oligonucleotide
agguguccguccgguaggu

SEQ ID NO: 842718 - RNA, 19 nt, Artificial Sequence
  Description of Artificial Sequence: Synthetic oligonucleotide
ucuaggggucaggcccaac

SEQ ID NO: 842719 - RNA, 19 nt, Artificial Sequence
  Description of Artificial Sequence: Synthetic oligonucleotide
gaggaccgugcuauauugu

SEQ ID NO: 842720 - RNA, 19 nt, Artificial Sequence
  Description of Artificial Sequence: Synthetic oligonucleotide
guaccaaggcaauggcauu

SEQ ID NO: 842721 - RNA, 19 nt, Artificial Sequence
  Description of Artificial Sequence: Synthetic oligonucleotide
uagcuccgcuccucagcaa

SEQ ID NO: 842722 - RNA, 19 nt, Artificial Sequence
  Description of Artificial Sequence: Synthetic oligonucleotide
gcccaugacuccucuaaua

SEQ ID NO: 842723 - RNA, 19 nt, Artificial Sequence
  Description of Artificial Sequence: Synthetic oligonucleotide
agcagguguccguccggua

SEQ ID NO: 842724 - RNA, 19 nt, Artificial Sequence
  Description of Artificial Sequence: Synthetic oligonucleotide
acucggucugguagucaga

SEQ ID NO: 842725 - RNA, 19 nt, Artificial Sequence
  Description of Artificial Sequence: Synthetic oligonucleotide
acgagagggugcagccuca

SEQ ID NO: 842726 - RNA, 19 nt, Artificial Sequence
  Description of Artificial Sequence: Synthetic oligonucleotide
ggcgcgcacagcuguguuc

SEQ ID NO: 842727 - RNA, 19 nt, Artificial Sequence
  Description of Artificial Sequence: Synthetic oligonucleotide
cuagggcccugaggauacc

SEQ ID NO: 842728 - RNA, 19 nt, Artificial Sequence
  Description of Artificial Sequence: Synthetic oligonucleotide
cuggggaucguuggaaaau

SEQ ID NO: 842729 - RNA, 19 nt, Artificial Sequence
  Description of Artificial Sequence: Synthetic oligonucleotide
cccaaguauugcuugcugu

SEQ ID NO: 842730 - RNA, 19 nt, Artificial Sequence
  Description of Artificial Sequence: Synthetic oligonucleotide
  modified_base (6)..(6): a, c, u, g, unknown or other
cggacncagcacacauacg

SEQ ID NO: 842731 - RNA, 19 nt, Artificial Sequence
  Description of Artificial Sequence: Synthetic oligonucleotide
guccguccgguaggucagg

SEQ ID NO: 842732 - RNA, 19 nt, Artificial Sequence
  Description of Artificial Sequence: Synthetic oligonucleotide
  modified_base (10)..(10): a, c, u, g, unknown or other
cugccggacncagcacaca

SEQ ID NO: 842733 - RNA, 19 nt, Artificial Sequence
  Description of Artificial Sequence: Synthetic oligonucleotide
cucggucugguagucagau

SEQ ID NO: 842734 - RNA, 19 nt, Artificial Sequence
  Description of Artificial Sequence: Synthetic oligonucleotide
ccacuccggacccagaugu

SEQ ID NO: 842735 - RNA, 19 nt, Artificial Sequence
  Description of Artificial Sequence: Synthetic oligonucleotide
caggugaaugccccacagu

SEQ ID NO: 842736 - RNA, 19 nt, Artificial Sequence
  Description of Artificial Sequence: Synthetic oligonucleotide
  modified_base (11)..(11): a, c, u, g, unknown or other
gcugccggacncagcacac

SEQ ID NO: 842737 - RNA, 19 nt, Artificial Sequence
  Description of Artificial Sequence: Synthetic oligonucleotide
cccugaggauaccuaccug

SEQ ID NO: 842738 - RNA, 19 nt, Artificial Sequence
  Description of Artificial Sequence: Synthetic oligonucleotide
gcccugaggauaccuaccu

SEQ ID NO: 842739 - RNA, 19 nt, Artificial Sequence
  Description of Artificial Sequence: Synthetic oligonucleotide
guccgcccaugcugauacc

SEQ ID NO: 842740 - RNA, 19 nt, Artificial Sequence
  Description of Artificial Sequence: Synthetic oligonucleotide
caucguccacuacagccau

SEQ ID NO: 842741 - RNA, 19 nt, Artificial Sequence
  Description of Artificial Sequence: Synthetic oligonucleotide
ccggacccagaugucaaac

SEQ ID NO: 842742 - RNA, 19 nt, Artificial Sequence
  Description of Artificial Sequence: Synthetic oligonucleotide
ggauaccuaccugggcaca

SEQ ID NO: 842743 - RNA, 19 nt, Artificial Sequence
  Description of Artificial Sequence: Synthetic oligonucleotide
aggcccaacggaggaccgu

SEQ ID NO: 842744 - RNA, 19 nt, Artificial Sequence
  Description of Artificial Sequence: Synthetic oligonucleotide
ccuccaacgagagggugca

SEQ ID NO: 842745 - RNA, 19 nt, Artificial Sequence
  Description of Artificial Sequence: Synthetic oligonucleotide
cagcgagguccgugaagga

SEQ ID NO: 842746 - RNA, 19 nt, Artificial Sequence
  Description of Artificial Sequence: Synthetic oligonucleotide
caaccaacuugggcaagcu

SEQ ID NO: 842747 - RNA, 19 nt, Artificial Sequence
  Description of Artificial Sequence: Synthetic oligonucleotide
acugugcgggcaggcccug

SEQ ID NO: 842748 - RNA, 19 nt, Artificial Sequence
  Description of Artificial Sequence: Synthetic oligonucleotide
cuccaacgagagggugcag

SEQ ID NO: 842749 - RNA, 19 nt, Artificial Sequence
  Description of Artificial Sequence: Synthetic oligonucleotide
ccaauggaugucccuccga

SEQ ID NO: 842750 - RNA, 19 nt, Artificial Sequence
  Description of Artificial Sequence: Synthetic oligonucleotide
  modified_base (7)..(7): a, c, u, g, unknown or other
cccuccncuuugugcagca

SEQ ID NO: 842751 - RNA, 19 nt, Artificial Sequence
  Description of Artificial Sequence: Synthetic oligonucleotide
guagcaggacaggaccaau

SEQ ID NO: 842752 - RNA, 19 nt, Artificial Sequence
  Description of Artificial Sequence: Synthetic oligonucleotide
cagcuggauagccgguacu

SEQ ID NO: 842753 - RNA, 19 nt, Artificial Sequence
  Description of Artificial Sequence: Synthetic oligonucleotide
cacgcucccaugccucaua

SEQ ID NO: 842754 - RNA, 19 nt, Artificial Sequence
  Description of Artificial Sequence: Synthetic oligonucleotide
gagguccgugaaggaggca

SEQ ID NO: 842755 - RNA, 19 nt, Artificial Sequence
  Description of Artificial Sequence: Synthetic oligonucleotide
ggaccgugcuauauuguau

SEQ ID NO: 842756 - RNA, 19 nt, Artificial Sequence
  Description of Artificial Sequence: Synthetic oligonucleotide
ccacacaaucagauuggcu

SEQ ID NO: 842757 - RNA, 19 nt, Artificial Sequence
  Description of Artificial Sequence: Synthetic oligonucleotide
ccgcaucuggcuguagcuc

SEQ ID NO: 842758 - RNA, 19 nt, Artificial Sequence
  Description of Artificial Sequence: Synthetic oligonucleotide
cggacccagaugucaaaca

SEQ ID NO: 842759 - RNA, 19 nt, Artificial Sequence
  Description of Artificial Sequence: Synthetic oligonucleotide
cguauguuuccuuggggau

SEQ ID NO: 842760 - RNA, 19 nt, Artificial Sequence
  Description of Artificial Sequence: Synthetic oligonucleotide
caacgagagggugcagccu

SEQ ID NO: 842761 - RNA, 19 nt, Artificial Sequence
  Description of Artificial Sequence: Synthetic oligonucleotide
ccgcccaugcugauaccca

SEQ ID NO: 842762 - RNA, 19 nt, Artificial Sequence
  Description of Artificial Sequence: Synthetic oligonucleotide
gcgcgcacagcuguguucu

SEQ ID NO: 842763 - RNA, 19 nt, Artificial Sequence
  Description of Artificial Sequence: Synthetic oligonucleotide
cugcuugauauagcacaau

SEQ ID NO: 842764 - RNA, 19 nt, Artificial Sequence
  Description of Artificial Sequence: Synthetic oligonucleotide
ccguccgguaggucagguc

SEQ ID NO: 842765 - RNA, 19 nt, Artificial Sequence
  Description of Artificial Sequence: Synthetic oligonucleotide
cgucucaggcaacuuaagu

SEQ ID NO: 842766 - RNA, 19 nt, Artificial Sequence
  Description of Artificial Sequence: Synthetic oligonucleotide
ccucuaauacagcccgagu

SEQ ID NO: 842767 - RNA, 19 nt, Artificial Sequence
  Description of Artificial Sequence: Synthetic oligonucleotide
ccacccagcuugaucgucu

SEQ ID NO: 842768 - RNA, 19 nt, Artificial Sequence
  Description of Artificial Sequence: Synthetic oligonucleotide
gcccgagucccugggagaa

SEQ ID NO: 842769 - RNA, 19 nt, Artificial Sequence
  Description of Artificial Sequence: Synthetic oligonucleotide
ccaacggaggaccgugcua

SEQ ID NO: 842770 - RNA, 19 nt, Artificial Sequence
  Description of Artificial Sequence: Synthetic oligonucleotide
cuguccgcccaugcugaua

SEQ ID NO: 842771 - RNA, 19 nt, Artificial Sequence
  Description of Artificial Sequence: Synthetic oligonucleotide
gggcagcggagaugcaagu

SEQ ID NO: 842772 - RNA, 19 nt, Artificial Sequence
  Description of Artificial Sequence: Synthetic oligonucleotide
gggugugagugugcugucu

SEQ ID NO: 842773 - RNA, 19 nt, Artificial Sequence
  Description of Artificial Sequence: Synthetic oligonucleotide
ccagguggguuccccaagu

SEQ ID NO: 842774 - RNA, 19 nt, Artificial Sequence
  Description of Artificial Sequence: Synthetic oligonucleotide
cccauccaucagcaggugu

SEQ ID NO: 842775 - RNA, 19 nt, Artificial Sequence
  Description of Artificial Sequence: Synthetic oligonucleotide
  modified_base (13)..(13): a, c, u, g, unknown or other
ccuggacccuccncuuugu

SEQ ID NO: 842776 - RNA, 19 nt, Artificial Sequence
  Description of Artificial Sequence: Synthetic oligonucleotide
cgcccaugcugauacccaa

SEQ ID NO: 842777 - RNA, 19 nt, Artificial Sequence
  Description of Artificial Sequence: Synthetic oligonucleotide
cccaacggaggaccgugcu

SEQ ID NO: 842778 - RNA, 19 nt, Artificial Sequence
  Description of Artificial Sequence: Synthetic oligonucleotide
  modified_base (8)..(8): a, c, u, g, unknown or other
gccggacncagcacacaua

SEQ ID NO: 842779 - RNA, 19 nt, Artificial Sequence
  Description of Artificial Sequence: Synthetic oligonucleotide
  modified_base (3)..(3): a, c, u, g, unknown or other
ccncuuugugcagcaagau

SEQ ID NO: 842780 - RNA, 19 nt, Artificial Sequence
  Description of Artificial Sequence: Synthetic oligonucleotide
gcacccgugccaggcggga

SEQ ID NO: 842781 - RNA, 19 nt, Artificial Sequence
  Description of Artificial Sequence: Synthetic oligonucleotide
gccgguacucauggauacu

SEQ ID NO: 842782 - RNA, 19 nt, Artificial Sequence
  Description of Artificial Sequence: Synthetic oligonucleotide
ccgcuggcucuugcucacc

SEQ ID NO: 842783 - RNA, 19 nt, Artificial Sequence
  Description of Artificial Sequence: Synthetic oligonucleotide
gcgcuggguccagggugug

SEQ ID NO: 842784 - RNA, 19 nt, Artificial Sequence
  Description of Artificial Sequence: Synthetic oligonucleotide
  modified_base (6)..(6): a, c, u, g, unknown or other
ccuccncuuugugcagcaa

SEQ ID NO: 842785 - RNA, 19 nt, Artificial Sequence
  Description of Artificial Sequence: Synthetic oligonucleotide
ggaggcugccuaagaucuu

SEQ ID NO: 842786 - RNA, 19 nt, Artificial Sequence
  Description of Artificial Sequence: Synthetic oligonucleotide
gggcgcgcacagcuguguu

SEQ ID NO: 842787 - RNA, 19 nt, Artificial Sequence
  Description of Artificial Sequence: Synthetic oligonucleotide
cccaugccucauagaggcu

SEQ ID NO: 842788 - RNA, 19 nt, Artificial Sequence
  Description of Artificial Sequence: Synthetic oligonucleotide
cggaggaccgugcuauauu

SEQ ID NO: 842789 - RNA, 19 nt, Artificial Sequence
  Description of Artificial Sequence: Synthetic oligonucleotide
cccuccgaucauguccacu

SEQ ID NO: 842790 - RNA, 19 nt, Artificial Sequence
  Description of Artificial Sequence: Synthetic oligonucleotide
gucacgccugagggcucuu

SEQ ID NO: 842791 - RNA, 19 nt, Artificial Sequence
  Description of Artificial Sequence: Synthetic oligonucleotide
cguccacuacagccaucuu

SEQ ID NO: 842792 - RNA, 19 nt, Artificial Sequence
  Description of Artificial Sequence: Synthetic oligonucleotide
aaauguaucagcuaacggc

SEQ ID NO: 842793 - RNA, 19 nt, Artificial Sequence
  Description of Artificial Sequence: Synthetic oligonucleotide
ugcauacccaaccauaagg

SEQ ID NO: 842794 - RNA, 19 nt, Artificial Sequence
  Description of Artificial Sequence: Synthetic oligonucleotide
uauagaaugugauuucugc

SEQ ID NO: 842795 - RNA, 19 nt, Artificial Sequence
  Description of Artificial Sequence: Synthetic oligonucleotide
ucaugucauacucaggagg

SEQ ID NO: 842796 - RNA, 19 nt, Artificial Sequence
  Description of Artificial Sequence: Synthetic oligonucleotide
acagaugcaaaguagaaga

SEQ ID NO: 842797 - RNA, 19 nt, Artificial Sequence
  Description of Artificial Sequence: Synthetic oligonucleotide
aauagggucacgauguggg

SEQ ID NO: 842798 - RNA, 19 nt, Artificial Sequence
  Description of Artificial Sequence: Synthetic oligonucleotide
acuguaucggcuuucaaag

SEQ ID NO: 842799 - RNA, 19 nt, Artificial Sequence
  Description of Artificial Sequence: Synthetic oligonucleotide
aaccauaaggaaucccugg

SEQ ID NO: 842800 - RNA, 19 nt, Artificial Sequence
  Description of Artificial Sequence: Synthetic oligonucleotide
ugcgugauggagaaguccg

SEQ ID NO: 842801 - RNA, 19 nt, Artificial Sequence
  Description of Artificial Sequence: Synthetic oligonucleotide
aauugcgugauggagaagu

SEQ ID NO: 842802 - RNA, 19 nt, Artificial Sequence
  Description of Artificial Sequence: Synthetic oligonucleotide
agagaaucgccauuucugg

SEQ ID NO: 842803 - RNA, 19 nt, Artificial Sequence
  Description of Artificial Sequence: Synthetic oligonucleotide
gcaccuuucauauagaaug

SEQ ID NO: 842804 - RNA, 19 nt, Artificial Sequence
  Description of Artificial Sequence: Synthetic oligonucleotide
cucuuugccaccacaaggg

SEQ ID NO: 842805 - RNA, 19 nt, Artificial Sequence
  Description of Artificial Sequence: Synthetic oligonucleotide
uuuugaauaugguuuuaca

SEQ ID NO: 842806 - RNA, 19 nt, Artificial Sequence
  Description of Artificial Sequence: Synthetic oligonucleotide
uacguaaacaguuuugaau

SEQ ID NO: 842807 - RNA, 19 nt, Artificial Sequence
  Description of Artificial Sequence: Synthetic oligonucleotide
acaaguucaugcucguaac

SEQ ID NO: 842808 - RNA, 19 nt, Artificial Sequence
  Description of Artificial Sequence: Synthetic oligonucleotide
aagaaggucacaguuguga

SEQ ID NO: 842809 - RNA, 19 nt, Artificial Sequence
  Description of Artificial Sequence: Synthetic oligonucleotide
uuagugagguccuuguaca

SEQ ID NO: 842810 - RNA, 19 nt, Artificial Sequence
  Description of Artificial Sequence: Synthetic oligonucleotide
uguaucggcuuucaaaguc

SEQ ID NO: 842811 - RNA, 19 nt, Artificial Sequence
  Description of Artificial Sequence: Synthetic oligonucleotide
ucggcuuucaaaguccugg

SEQ ID NO: 842812 - RNA, 19 nt, Artificial Sequence
  Description of Artificial Sequence: Synthetic oligonucleotide
aauuaggauaucagaagug

SEQ ID NO: 842813 - RNA, 19 nt, Artificial Sequence
  Description of Artificial Sequence: Synthetic oligonucleotide
gaaucccugguacagcggg

SEQ ID NO: 842814 - RNA, 19 nt, Artificial Sequence
  Description of Artificial Sequence: Synthetic oligonucleotide
gguacagcgggacagaugc

SEQ ID NO: 842815 - RNA, 19 nt, Artificial Sequence
  Description of Artificial Sequence: Synthetic oligonucleotide
cuuagugagguccuuguac

SEQ ID NO: 842816 - RNA, 19 nt, Artificial Sequence
  Description of Artificial Sequence: Synthetic oligonucleotide
aagggaucuccccuuagug

SEQ ID NO: 842817 - RNA, 19 nt, Artificial Sequence
  Description of Artificial Sequence: Synthetic oligonucleotide
cuaaggaacucccaucagc

SEQ ID NO: 842818 - RNA, 19 nt, Artificial Sequence
  Description of Artificial Sequence: Synthetic oligonucleotide
ggaauuaggauaucagaag

SEQ ID NO: 842819 - RNA, 19 nt, Artificial Sequence
  Description of Artificial Sequence: Synthetic oligonucleotide
uucuacguaaacaguuuug

SEQ ID NO: 842820 - RNA, 19 nt, Artificial Sequence
  Description of Artificial Sequence: Synthetic oligonucleotide
gaggaugccaccuugguaa

SEQ ID NO: 842821 - RNA, 19 nt, Artificial Sequence
  Description of Artificial Sequence: Synthetic oligonucleotide
ucuugaaggaaagggaucu

SEQ ID NO: 842822 - RNA, 19 nt, Artificial Sequence
  Description of Artificial Sequence: Synthetic oligonucleotide
acugaucaaaacccaaaug

SEQ ID NO: 842823 - RNA, 19 nt, Artificial Sequence
  Description of Artificial Sequence: Synthetic oligonucleotide
agcauuguggugcugugag

SEQ ID NO: 842824 - RNA, 19 nt, Artificial Sequence
  Description of Artificial Sequence: Synthetic oligonucleotide
auagaaugugauuucugcu

SEQ ID NO: 842825 - RNA, 19 nt, Artificial Sequence
  Description of Artificial Sequence: Synthetic oligonucleotide
auuaggauaucagaagugu

SEQ ID NO: 842826 - RNA, 19 nt, Artificial Sequence
  Description of Artificial Sequence: Synthetic oligonucleotide
aacggaauuaggauaucag

SEQ ID NO: 842827 - RNA, 19 nt, Artificial Sequence
  Description of Artificial Sequence: Synthetic oligonucleotide
aguugcacaggacagcuga

SEQ ID NO: 842828 - RNA, 19 nt, Artificial Sequence
  Description of Artificial Sequence: Synthetic oligonucleotide
uggacauugcgacaucagc

SEQ ID NO: 842829 - RNA, 19 nt, Artificial Sequence
  Description of Artificial Sequence: Synthetic oligonucleotide
ucaugcucacgucauuucc

SEQ ID NO: 842830 - RNA, 19 nt, Artificial Sequence
  Description of Artificial Sequence: Synthetic oligonucleotide
auggaagcaaggucccugc

SEQ ID NO: 842831 - RNA, 19 nt, Artificial Sequence
  Description of Artificial Sequence: Synthetic oligonucleotide
uaaggaaucccugguacag

SEQ ID NO: 842832 - RNA, 19 nt, Artificial Sequence
  Description of Artificial Sequence: Synthetic oligonucleotide
cuuucugguaugcuggcgc

SEQ ID NO: 842833 - RNA, 19 nt, Artificial Sequence
  Description of Artificial Sequence: Synthetic oligonucleotide
acgcacacaauacuuuggg

SEQ ID NO: 842834 - RNA, 19 nt, Artificial Sequence
  Description of Artificial Sequence: Synthetic oligonucleotide
auggcugacacuuuccaca

SEQ ID NO: 842835 - RNA, 19 nt, Artificial Sequence
  Description of Artificial Sequence: Synthetic oligonucleotide
ucaugcucguaacaacugc

SEQ ID NO: 842836 - RNA, 19 nt, Artificial Sequence
  Description of Artificial Sequence: Synthetic oligonucleotide
aacggcagugccucgagga

SEQ ID NO: 842837 - RNA, 19 nt, Artificial Sequence
  Description of Artificial Sequence: Synthetic oligonucleotide
ugaauugcgugauggagaa

SEQ ID NO: 842838 - RNA, 19 nt, Artificial Sequence
  Description of Artificial Sequence: Synthetic oligonucleotide
gaauuaggauaucagaagu

SEQ ID NO: 842839 - RNA, 19 nt, Artificial Sequence
  Description of Artificial Sequence: Synthetic oligonucleotide
acauugcgacaucagcacc

SEQ ID NO: 842840 - RNA, 19 nt, Artificial Sequence
  Description of Artificial Sequence: Synthetic oligonucleotide
caaugguggacauugcgac

SEQ ID NO: 842841 - RNA, 19 nt, Artificial Sequence
  Description of Artificial Sequence: Synthetic oligonucleotide
gacagaugcaaaguagaag

SEQ ID NO: 842842 - RNA, 19 nt, Artificial Sequence
  Description of Artificial Sequence: Synthetic oligonucleotide
uuucauauagaaugugauu

SEQ ID NO: 842843 - RNA, 19 nt, Artificial Sequence
  Description of Artificial Sequence: Synthetic oligonucleotide
uuaggauaucagaaguguc

SEQ ID NO: 842844 - RNA, 19 nt, Artificial Sequence
  Description of Artificial Sequence: Synthetic oligonucleotide
acggaauuaggauaucaga

SEQ ID NO: 842845 - RNA, 19 nt, Artificial Sequence
  Description of Artificial Sequence: Synthetic oligonucleotide
aagugaggcaacauagcag

SEQ ID NO: 842846 - RNA, 19 nt, Artificial Sequence
  Description of Artificial Sequence: Synthetic oligonucleotide
auggccacgacauggacga

SEQ ID NO: 842847 - RNA, 19 nt, Artificial Sequence
  Description of Artificial Sequence: Synthetic oligonucleotide
agcacguagaguggaaggc

SEQ ID NO: 842848 - RNA, 19 nt, Artificial Sequence
  Description of Artificial Sequence: Synthetic oligonucleotide
gacgaacucugccucaaag

SEQ ID NO: 842849 - RNA, 19 nt, Artificial Sequence
  Description of Artificial Sequence: Synthetic oligonucleotide
aaggaaucccugguacagc

SEQ ID NO: 842850 - RNA, 19 nt, Artificial Sequence
  Description of Artificial Sequence: Synthetic oligonucleotide
gguauagauaguugcauac

SEQ ID NO: 842851 - RNA, 19 nt, Artificial Sequence
  Description of Artificial Sequence: Synthetic oligonucleotide
uucaugcucguaacaacug

SEQ ID NO: 842852 - RNA, 19 nt, Artificial Sequence
  Description of Artificial Sequence: Synthetic oligonucleotide
auaguugcauacccaacca

SEQ ID NO: 842853 - RNA, 19 nt, Artificial Sequence
  Description of Artificial Sequence: Synthetic oligonucleotide
gacauggacgaacucugcc

SEQ ID NO: 842854 - RNA, 19 nt, Artificial Sequence
  Description of Artificial Sequence: Synthetic oligonucleotide
ugcgcuuucugguaugcug

SEQ ID NO: 842855 - RNA, 19 nt, Artificial Sequence
  Description of Artificial Sequence: Synthetic oligonucleotide
ucuaaggaacucccaucag

SEQ ID NO: 842856 - RNA, 19 nt, Artificial Sequence
  Description of Artificial Sequence: Synthetic oligonucleotide
accgcuuggccacuugggc

SEQ ID NO: 842857 - RNA, 19 nt, Artificial Sequence
  Description of Artificial Sequence: Synthetic oligonucleotide
gauggccacgacauggacg

SEQ ID NO: 842858 - RNA, 19 nt, Artificial Sequence
  Description of Artificial Sequence: Synthetic oligonucleotide
aauacugaucaaaacccaa

SEQ ID NO: 842859 - RNA, 19 nt, Artificial Sequence
  Description of Artificial Sequence: Synthetic oligonucleotide
cuaaggagaacacugggaa

SEQ ID NO: 842860 - RNA, 19 nt, Artificial Sequence
  Description of Artificial Sequence: Synthetic oligonucleotide
guggcggccacacacaaug

SEQ ID NO: 842861 - RNA, 19 nt, Artificial Sequence
  Description of Artificial Sequence: Synthetic oligonucleotide
aguccgcugccagagaagc

SEQ ID NO: 842862 - RNA, 19 nt, Artificial Sequence
  Description of Artificial Sequence: Synthetic oligonucleotide
caugucauacucaggagga

SEQ ID NO: 842863 - RNA, 19 nt, Artificial Sequence
  Description of Artificial Sequence: Synthetic oligonucleotide
auaaggaaucccugguaca

SEQ ID NO: 842864 - RNA, 19 nt, Artificial Sequence
  Description of Artificial Sequence: Synthetic oligonucleotide
gaagugucaccgcuuggcc

SEQ ID NO: 842865 - RNA, 19 nt, Artificial Sequence
  Description of Artificial Sequence: Synthetic oligonucleotide
ucaaaacccaaaugaggaa

SEQ ID NO: 842866 - RNA, 19 nt, Artificial Sequence
  Description of Artificial Sequence: Synthetic oligonucleotide
ugucauacucaggaggaca

SEQ ID NO: 842867 - RNA, 19 nt, Artificial Sequence
  Description of Artificial Sequence: Synthetic oligonucleotide
accauaaggaaucccuggu

SEQ ID NO: 842868 - RNA, 19 nt, Artificial Sequence
  Description of Artificial Sequence: Synthetic oligonucleotide
aaguccagcaucccucuaa

SEQ ID NO: 842869 - RNA, 19 nt, Artificial Sequence
  Description of Artificial Sequence: Synthetic oligonucleotide
uccgcuugcucuccgaggu

SEQ ID NO: 842870 - RNA, 19 nt, Artificial Sequence
  Description of Artificial Sequence: Synthetic oligonucleotide
gagaaucgccauuucuggc

SEQ ID NO: 842871 - RNA, 19 nt, Artificial Sequence
  Description of Artificial Sequence: Synthetic oligonucleotide
aacucggccacaaccauga

SEQ ID NO: 842872 - RNA, 19 nt, Artificial Sequence
  Description of Artificial Sequence: Synthetic oligonucleotide
uucuagccagucauuguac

SEQ ID NO: 842873 - RNA, 19 nt, Artificial Sequence
  Description of Artificial Sequence: Synthetic oligonucleotide
uugugaugaaggcaacauc

SEQ ID NO: 842874 - RNA, 19 nt, Artificial Sequence
  Description of Artificial Sequence: Synthetic oligonucleotide
uguuaaguguguggugucc

SEQ ID NO: 842875 - RNA, 19 nt, Artificial Sequence
  Description of Artificial Sequence: Synthetic oligonucleotide
cacgcacacaauacuuugg

SEQ ID NO: 842876 - RNA, 19 nt, Artificial Sequence
  Description of Artificial Sequence: Synthetic oligonucleotide
acgaacucugccucaaaga

SEQ ID NO: 842877 - RNA, 19 nt, Artificial Sequence
  Description of Artificial Sequence: Synthetic oligonucleotide
agcccgacacucuccgucc

SEQ ID NO: 842878 - RNA, 19 nt, Artificial Sequence
  Description of Artificial Sequence: Synthetic oligonucleotide
uggaugcucaguuuggcuu

SEQ ID NO: 842879 - RNA, 19 nt, Artificial Sequence
  Description of Artificial Sequence: Synthetic oligonucleotide
accgcuuguagcuguuccg

SEQ ID NO: 842880 - RNA, 19 nt, Artificial Sequence
  Description of Artificial Sequence: Synthetic oligonucleotide
cacguagaguggaaggcag

SEQ ID NO: 842881 - RNA, 19 nt, Artificial Sequence
  Description of Artificial Sequence: Synthetic oligonucleotide
aucccucuaaggaacuccc

SEQ ID NO: 842882 - RNA, 19 nt, Artificial Sequence
  Description of Artificial Sequence: Synthetic oligonucleotide
caggagugucucuaccugg

SEQ ID NO: 842883 - RNA, 19 nt, Artificial Sequence
  Description of Artificial Sequence: Synthetic oligonucleotide
ugugaaggagauggccacg

SEQ ID NO: 842884 - RNA, 19 nt, Artificial Sequence
  Description of Artificial Sequence: Synthetic oligonucleotide
acaugaggaugccaccuug

SEQ ID NO: 842885 - RNA, 19 nt, Artificial Sequence
  Description of Artificial Sequence: Synthetic oligonucleotide
gaaugugauuucugcugug

SEQ ID NO: 842886 - RNA, 19 nt, Artificial Sequence
  Description of Artificial Sequence: Synthetic oligonucleotide
uaucggcuuucaaaguccu

SEQ ID NO: 842887 - RNA, 19 nt, Artificial Sequence
  Description of Artificial Sequence: Synthetic oligonucleotide
agcaaggucccugcugacc

SEQ ID NO: 842888 - RNA, 19 nt, Artificial Sequence
  Description of Artificial Sequence: Synthetic oligonucleotide
agugccauguccugauggu

SEQ ID NO: 842889 - RNA, 19 nt, Artificial Sequence
  Description of Artificial Sequence: Synthetic oligonucleotide
guaucggcuuucaaagucc

SEQ ID NO: 842890 - RNA, 19 nt, Artificial Sequence
  Description of Artificial Sequence: Synthetic oligonucleotide
agggaucuccccuuaguga

SEQ ID NO: 842891 - RNA, 19 nt, Artificial Sequence
  Description of Artificial Sequence: Synthetic oligonucleotide
ucuuugccaccacaagggu

SEQ ID NO: 842892 - RNA, 19 nt, Artificial Sequence
  Description of Artificial Sequence: Synthetic oligonucleotide
uucgacaggggaucugcca

SEQ ID NO: 842893 - RNA, 19 nt, Artificial Sequence
  Description of Artificial Sequence: Synthetic oligonucleotide
ucgacaggggaucugccau

SEQ ID NO: 842894 - RNA, 19 nt, Artificial Sequence
  Description of Artificial Sequence: Synthetic oligonucleotide
gaccgcuuguagcuguucc

SEQ ID NO: 842895 - RNA, 19 nt, Artificial Sequence
  Description of Artificial Sequence: Synthetic oligonucleotide
acacucuccguccaucgca

SEQ ID NO: 842896 - RNA, 19 nt, Artificial Sequence
  Description of Artificial Sequence: Synthetic oligonucleotide
uggcuugacuguaucggcu

SEQ ID NO: 842897 - RNA, 19 nt, Artificial Sequence
  Description of Artificial Sequence: Synthetic oligonucleotide
uguguggcggccacacaca

SEQ ID NO: 842898 - RNA, 19 nt, Artificial Sequence
  Description of Artificial Sequence: Synthetic oligonucleotide
auagauaguugcauaccca

SEQ ID NO: 842899 - RNA, 19 nt, Artificial Sequence
  Description of Artificial Sequence: Synthetic oligonucleotide
caucacaagcucagaguac

SEQ ID NO: 842900 - RNA, 19 nt, Artificial Sequence
  Description of Artificial Sequence: Synthetic oligonucleotide
cacaaguucaugcucguaa

SEQ ID NO: 842901 - RNA, 19 nt, Artificial Sequence
  Description of Artificial Sequence: Synthetic oligonucleotide
gggaucugccaucacaagc

SEQ ID NO: 842902 - RNA, 19 nt, Artificial Sequence
  Description of Artificial Sequence: Synthetic oligonucleotide
agcugcacgcacacaauac

SEQ ID NO: 842903 - RNA, 19 nt, Artificial Sequence
  Description of Artificial Sequence: Synthetic oligonucleotide
gucaagaccuggccacugg

SEQ ID NO: 842904 - RNA, 19 nt, Artificial Sequence
  Description of Artificial Sequence: Synthetic oligonucleotide
gugagcccgacacucuccg

SEQ ID NO: 842905 - RNA, 19 nt, Artificial Sequence
  Description of Artificial Sequence: Synthetic oligonucleotide
uaacggcagugccucgagg

SEQ ID NO: 842906 - RNA, 19 nt, Artificial Sequence
  Description of Artificial Sequence: Synthetic oligonucleotide
aaucagcgcugugaaggag

SEQ ID NO: 842907 - RNA, 19 nt, Artificial Sequence
  Description of Artificial Sequence: Synthetic oligonucleotide
accgauggcacaggugcgc

SEQ ID NO: 842908 - RNA, 19 nt, Artificial Sequence
  Description of Artificial Sequence: Synthetic oligonucleotide
caugcucguaacaacugca

SEQ ID NO: 842909 - RNA, 19 nt, Artificial Sequence
  Description of Artificial Sequence: Synthetic oligonucleotide
caucccucuaaggaacucc

SEQ ID NO: 842910 - RNA, 19 nt, Artificial Sequence
  Description of Artificial Sequence: Synthetic oligonucleotide
agcgcaggagugucucuac

SEQ ID NO: 842911 - RNA, 19 nt, Artificial Sequence
  Description of Artificial Sequence: Synthetic oligonucleotide
uaguugcauacccaaccau

SEQ ID NO: 842912 - RNA, 19 nt, Artificial Sequence
  Description of Artificial Sequence: Synthetic oligonucleotide
ucgaggaaugguuuacauu

SEQ ID NO: 842913 - RNA, 19 nt, Artificial Sequence
  Description of Artificial Sequence: Synthetic oligonucleotide
acgacauggacgaacucug

SEQ ID NO: 842914 - RNA, 19 nt, Artificial Sequence
  Description of Artificial Sequence: Synthetic oligonucleotide
cauggaagcaaggucccug

SEQ ID NO: 842915 - RNA, 19 nt, Artificial Sequence
  Description of Artificial Sequence: Synthetic oligonucleotide
auccgcuugcucuccgagg

SEQ ID NO: 842916 - RNA, 19 nt, Artificial Sequence
  Description of Artificial Sequence: Synthetic oligonucleotide
cacuugggcuuguuaagug

SEQ ID NO: 842917 - RNA, 19 nt, Artificial Sequence
  Description of Artificial Sequence: Synthetic oligonucleotide
agcaaagcauuguggugcu

SEQ ID NO: 842918 - RNA, 19 nt, Artificial Sequence
  Description of Artificial Sequence: Synthetic oligonucleotide
cuagugcaaaggagacucc

SEQ ID NO: 842919 - RNA, 19 nt, Artificial Sequence
  Description of Artificial Sequence: Synthetic oligonucleotide
caguguccggucauggaug

SEQ ID NO: 842920 - RNA, 19 nt, Artificial Sequence
  Description of Artificial Sequence: Synthetic oligonucleotide
augucauacucaggaggac

SEQ ID NO: 842921 - RNA, 19 nt, Artificial Sequence
  Description of Artificial Sequence: Synthetic oligonucleotide
ugcuggcgcaauaggguca

SEQ ID NO: 842922 - RNA, 19 nt, Artificial Sequence
  Description of Artificial Sequence: Synthetic oligonucleotide
uugacuguaucggcuuuca

SEQ ID NO: 842923 - RNA, 19 nt, Artificial Sequence
  Description of Artificial Sequence: Synthetic oligonucleotide
agcuacuuucaguguccgg

SEQ ID NO: 842924 - RNA, 19 nt, Artificial Sequence
  Description of Artificial Sequence: Synthetic oligonucleotide
aucccugguacagcgggac

SEQ ID NO: 842925 - RNA, 19 nt, Artificial Sequence
  Description of Artificial Sequence: Synthetic oligonucleotide
uguccggucauggaugcuc

SEQ ID NO: 842926 - RNA, 19 nt, Artificial Sequence
  Description of Artificial Sequence: Synthetic oligonucleotide
gacacucuccguccaucgc

SEQ ID NO: 842927 - RNA, 19 nt, Artificial Sequence
  Description of Artificial Sequence: Synthetic oligonucleotide
cuuguuaaguguguggugu

SEQ ID NO: 842928 - RNA, 19 nt, Artificial Sequence
  Description of Artificial Sequence: Synthetic oligonucleotide
caugcucacgucauuucca

SEQ ID NO: 842929 - RNA, 19 nt, Artificial Sequence
  Description of Artificial Sequence: Synthetic oligonucleotide
auacugaucaaaacccaaa

SEQ ID NO: 842930 - RNA, 19 nt, Artificial Sequence
  Description of Artificial Sequence: Synthetic oligonucleotide
ucgcgugccauguuuccac

SEQ ID NO: 842931 - RNA, 19 nt, Artificial Sequence
  Description of Artificial Sequence: Synthetic oligonucleotide
uccacaaguucaugcucgu

SEQ ID NO: 842932 - RNA, 19 nt, Artificial Sequence
  Description of Artificial Sequence: Synthetic oligonucleotide
gggcuuguuaagugugugg

SEQ ID NO: 842933 - RNA, 19 nt, Artificial Sequence
  Description of Artificial Sequence: Synthetic oligonucleotide
ucagcgcugugaaggagau

SEQ ID NO: 842934 - RNA, 19 nt, Artificial Sequence
  Description of Artificial Sequence: Synthetic oligonucleotide
cagcgggacagaugcaaag

SEQ ID NO: 842935 - RNA, 19 nt, Artificial Sequence
  Description of Artificial Sequence: Synthetic oligonucleotide
acguagaguggaaggcagc

SEQ ID NO: 842936 - RNA, 19 nt, Artificial Sequence
  Description of Artificial Sequence: Synthetic oligonucleotide
aguugcauacccaaccaua

SEQ ID NO: 842937 - RNA, 19 nt, Artificial Sequence
  Description of Artificial Sequence: Synthetic oligonucleotide
gagaguagccacauggccu

SEQ ID NO: 842938 - RNA, 19 nt, Artificial Sequence
  Description of Artificial Sequence: Synthetic oligonucleotide
ugggaacaugguauagaua

SEQ ID NO: 842939 - RNA, 19 nt, Artificial Sequence
  Description of Artificial Sequence: Synthetic oligonucleotide
caccgcuuggccacuuggg

SEQ ID NO: 842940 - RNA, 19 nt, Artificial Sequence
  Description of Artificial Sequence: Synthetic oligonucleotide
ggacauugcgacaucagca

SEQ ID NO: 842941 - RNA, 19 nt, Artificial Sequence
  Description of Artificial Sequence: Synthetic oligonucleotide
cuucgacaggggaucugcc

SEQ ID NO: 842942 - RNA, 19 nt, Artificial Sequence
  Description of Artificial Sequence: Synthetic oligonucleotide
auugcgugauggagaaguc

SEQ ID NO: 842943 - RNA, 19 nt, Artificial Sequence
  Description of Artificial Sequence: Synthetic oligonucleotide
gaucugccaucacaagcuc

SEQ ID NO: 842944 - RNA, 19 nt, Artificial Sequence
  Description of Artificial Sequence: Synthetic oligonucleotide
cuacguaaacaguuuugaa

SEQ ID NO: 842945 - RNA, 19 nt, Artificial Sequence
  Description of Artificial Sequence: Synthetic oligonucleotide
ccguacaugaggaugccac

SEQ ID NO: 842946 - RNA, 19 nt, Artificial Sequence
  Description of Artificial Sequence: Synthetic oligonucleotide
aggaaagggaucuccccuu

SEQ ID NO: 842947 - RNA, 19 nt, Artificial Sequence
  Description of Artificial Sequence: Synthetic oligonucleotide
guuaaguguguggugucca

SEQ ID NO: 842948 - RNA, 19 nt, Artificial Sequence
  Description of Artificial Sequence: Synthetic oligonucleotide
gaacucggccacaaccaug

SEQ ID NO: 842949 - RNA, 19 nt, Artificial Sequence
  Description of Artificial Sequence: Synthetic oligonucleotide
aguucuacguaaacaguuu

SEQ ID NO: 842950 - RNA, 19 nt, Artificial Sequence
  Description of Artificial Sequence: Synthetic oligonucleotide
uggcgcaauagggucacga

SEQ ID NO: 842951 - RNA, 19 nt, Artificial Sequence
  Description of Artificial Sequence: Synthetic oligonucleotide
uggguagagaaucgccauu

SEQ ID NO: 842952 - RNA, 19 nt, Artificial Sequence
  Description of Artificial Sequence: Synthetic oligonucleotide
aaguccgcugccagagaag

SEQ ID NO: 842953 - RNA, 19 nt, Artificial Sequence
  Description of Artificial Sequence: Synthetic oligonucleotide
caaguucaugcucguaaca

SEQ ID NO: 842954 - RNA, 19 nt, Artificial Sequence
  Description of Artificial Sequence: Synthetic oligonucleotide
ucugguaugcuggcgcaau

SEQ ID NO: 842955 - RNA, 19 nt, Artificial Sequence
  Description of Artificial Sequence: Synthetic oligonucleotide
cauccgcuugcucuccgag

SEQ ID NO: 842956 - RNA, 19 nt, Artificial Sequence
  Description of Artificial Sequence: Synthetic oligonucleotide
gacaacggcagggcaguug

SEQ ID NO: 842957 - RNA, 19 nt, Artificial Sequence
  Description of Artificial Sequence: Synthetic oligonucleotide
gcacgcacacaauacuuug

SEQ ID NO: 842958 - RNA, 19 nt, Artificial Sequence
  Description of Artificial Sequence: Synthetic oligonucleotide
aucagcgcugugaaggaga

SEQ ID NO: 842959 - RNA, 19 nt, Artificial Sequence
  Description of Artificial Sequence: Synthetic oligonucleotide
uccaucgcaccagugccac

SEQ ID NO: 842960 - RNA, 19 nt, Artificial Sequence
  Description of Artificial Sequence: Synthetic oligonucleotide
cugcaacggaauuaggaua

SEQ ID NO: 842961 - RNA, 19 nt, Artificial Sequence
  Description of Artificial Sequence: Synthetic oligonucleotide
guuccgcccaugcaccaug

SEQ ID NO: 842962 - RNA, 19 nt, Artificial Sequence
  Description of Artificial Sequence: Synthetic oligonucleotide
gcuuguuaaguguguggug

SEQ ID NO: 842963 - RNA, 19 nt, Artificial Sequence
  Description of Artificial Sequence: Synthetic oligonucleotide
agcgggacagaugcaaagu

SEQ ID NO: 842964 - RNA, 19 nt, Artificial Sequence
  Description of Artificial Sequence: Synthetic oligonucleotide
cauugcgacaucagcaccu

SEQ ID NO: 842965 - RNA, 19 nt, Artificial Sequence
  Description of Artificial Sequence: Synthetic oligonucleotide
guccacugaaaagcaaaac

SEQ ID NO: 842966 - RNA, 19 nt, Artificial Sequence
  Description of Artificial Sequence: Synthetic oligonucleotide
caacggaauuaggauauca

SEQ ID NO: 842967 - RNA, 19 nt, Artificial Sequence
  Description of Artificial Sequence: Synthetic oligonucleotide
auguaucagcuaacggcag

SEQ ID NO: 842968 - RNA, 19 nt, Artificial Sequence
  Description of Artificial Sequence: Synthetic oligonucleotide
gccgaugugucugaauugc

SEQ ID NO: 842969 - RNA, 19 nt, Artificial Sequence
  Description of Artificial Sequence: Synthetic oligonucleotide
gacaccuacugaggaagca

SEQ ID NO: 842970 - RNA, 19 nt, Artificial Sequence
  Description of Artificial Sequence: Synthetic oligonucleotide
gcgcuuucugguaugcugg

SEQ ID NO: 842971 - RNA, 19 nt, Artificial Sequence
  Description of Artificial Sequence: Synthetic oligonucleotide
ugacuguaucggcuuucaa

SEQ ID NO: 842972 - RNA, 19 nt, Artificial Sequence
  Description of Artificial Sequence: Synthetic oligonucleotide
ucaaguacuugagcacgua

SEQ ID NO: 842973 - RNA, 19 nt, Artificial Sequence
  Description of Artificial Sequence: Synthetic oligonucleotide
gcgcaauagggucacgaug

SEQ ID NO: 842974 - RNA, 19 nt, Artificial Sequence
  Description of Artificial Sequence: Synthetic oligonucleotide
gcaaggucccugcugacca

SEQ ID NO: 842975 - RNA, 19 nt, Artificial Sequence
  Description of Artificial Sequence: Synthetic oligonucleotide
ucccgaucccacagucagc

SEQ ID NO: 842976 - RNA, 19 nt, Artificial Sequence
  Description of Artificial Sequence: Synthetic oligonucleotide
agggcaguuggcaggcuag

SEQ ID NO: 842977 - RNA, 19 nt, Artificial Sequence
  Description of Artificial Sequence: Synthetic oligonucleotide
gcauacccaaccauaagga

SEQ ID NO: 842978 - RNA, 19 nt, Artificial Sequence
  Description of Artificial Sequence: Synthetic oligonucleotide
uccguccaucgcaccagug

SEQ ID NO: 842979 - RNA, 19 nt, Artificial Sequence
  Description of Artificial Sequence: Synthetic oligonucleotide
ucgcaccagugccaccuca

SEQ ID NO: 842980 - RNA, 19 nt, Artificial Sequence
  Description of Artificial Sequence: Synthetic oligonucleotide
caacauagcagcccagacu

SEQ ID NO: 842981 - RNA, 19 nt, Artificial Sequence
  Description of Artificial Sequence: Synthetic oligonucleotide
gcagacaacggcagggcag

SEQ ID NO: 842982 - RNA, 19 nt, Artificial Sequence
  Description of Artificial Sequence: Synthetic oligonucleotide
cucuaccuggccucauguc

SEQ ID NO: 842983 - RNA, 19 nt, Artificial Sequence
  Description of Artificial Sequence: Synthetic oligonucleotide
agaacacugggaacauggu

SEQ ID NO: 842984 - RNA, 19 nt, Artificial Sequence
  Description of Artificial Sequence: Synthetic oligonucleotide
cagcuacuuucaguguccg

SEQ ID NO: 842985 - RNA, 19 nt, Artificial Sequence
  Description of Artificial Sequence: Synthetic oligonucleotide
guugcacaggacagcugag

SEQ ID NO: 842986 - RNA, 19 nt, Artificial Sequence
  Description of Artificial Sequence: Synthetic oligonucleotide
ugcagaccgcuuguagcug

SEQ ID NO: 842987 - RNA, 19 nt, Artificial Sequence
  Description of Artificial Sequence: Synthetic oligonucleotide
augcaaaguagaagacuga

SEQ ID NO: 842988 - RNA, 19 nt, Artificial Sequence
  Description of Artificial Sequence: Synthetic oligonucleotide
guacuggacaaugguggac

SEQ ID NO: 842989 - RNA, 19 nt, Artificial Sequence
  Description of Artificial Sequence: Synthetic oligonucleotide
cugacacuuuccacaagaa

SEQ ID NO: 842990 - RNA, 19 nt, Artificial Sequence
  Description of Artificial Sequence: Synthetic oligonucleotide
agcuaacggcagugccucg

SEQ ID NO: 842991 - RNA, 19 nt, Artificial Sequence
  Description of Artificial Sequence: Synthetic oligonucleotide
caaccaugagccagugcca

SEQ ID NO: 842992 - RNA, 19 nt, Artificial Sequence
  Description of Artificial Sequence: Synthetic oligonucleotide
cuuucgcuucaaguacuug

SEQ ID NO: 842993 - RNA, 19 nt, Artificial Sequence
  Description of Artificial Sequence: Synthetic oligonucleotide
ucccugguacagcgggaca

SEQ ID NO: 842994 - RNA, 19 nt, Artificial Sequence
  Description of Artificial Sequence: Synthetic oligonucleotide
caacugcagcuacuuucag

SEQ ID NO: 842995 - RNA, 19 nt, Artificial Sequence
  Description of Artificial Sequence: Synthetic oligonucleotide
ccuuguacagcucugggua

SEQ ID NO: 842996 - RNA, 19 nt, Artificial Sequence
  Description of Artificial Sequence: Synthetic oligonucleotide
gaauugcgugauggagaag

SEQ ID NO: 842997 - RNA, 19 nt, Artificial Sequence
  Description of Artificial Sequence: Synthetic oligonucleotide
aucgccauuucuggcuuca

SEQ ID NO: 842998 - RNA, 19 nt, Artificial Sequence
  Description of Artificial Sequence: Synthetic oligonucleotide
ccuucgaucccgaucccac

SEQ ID NO: 842999 - RNA, 19 nt, Artificial Sequence
  Description of Artificial Sequence: Synthetic oligonucleotide
ugccucgaggaaugguuua

SEQ ID NO: 843000 - RNA, 19 nt, Artificial Sequence
  Description of Artificial Sequence: Synthetic oligonucleotide
caaggucccugcugaccag

SEQ ID NO: 843001 - RNA, 19 nt, Artificial Sequence
  Description of Artificial Sequence: Synthetic oligonucleotide
caaagcauuguggugcugu

SEQ ID NO: 843002 - RNA, 19 nt, Artificial Sequence
  Description of Artificial Sequence: Synthetic oligonucleotide
ggaucugccaucacaagcu

SEQ ID NO: 843003 - RNA, 19 nt, Artificial Sequence
  Description of Artificial Sequence: Synthetic oligonucleotide
cacgacauggacgaacucu

SEQ ID NO: 843004 - RNA, 19 nt, Artificial Sequence
  Description of Artificial Sequence: Synthetic oligonucleotide
caccuuucauauagaaugu

SEQ ID NO: 843005 - RNA, 19 nt, Artificial Sequence
  Description of Artificial Sequence: Synthetic oligonucleotide
cugcagaccgcuuguagcu

SEQ ID NO: 843006 - RNA, 19 nt, Artificial Sequence
  Description of Artificial Sequence: Synthetic oligonucleotide
guucuacguaaacaguuuu

SEQ ID NO: 843007 - RNA, 19 nt, Artificial Sequence
  Description of Artificial Sequence: Synthetic oligonucleotide
ccguccaucgcaccagugc

SEQ ID NO: 843008 - RNA, 19 nt, Artificial Sequence
  Description of Artificial Sequence: Synthetic oligonucleotide
guaacaacugcagcuacuu

SEQ ID NO: 843009 - RNA, 19 nt, Artificial Sequence
  Description of Artificial Sequence: Synthetic oligonucleotide
gcugcaacggaauuaggau

SEQ ID NO: 843010 - RNA, 19 nt, Artificial Sequence
  Description of Artificial Sequence: Synthetic oligonucleotide
ccgaugugucugaauugcg

SEQ ID NO: 843011 - RNA, 19 nt, Artificial Sequence
  Description of Artificial Sequence: Synthetic oligonucleotide
cagccuucgacaggggauc

SEQ ID NO: 843012 - RNA, 19 nt, Artificial Sequence
  Description of Artificial Sequence: Synthetic oligonucleotide
gaucccgaucccacaguca

SEQ ID NO: 843013 - RNA, 19 nt, Artificial Sequence
  Description of Artificial Sequence: Synthetic oligonucleotide
cguccaucgcaccagugcc

SEQ ID NO: 843014 - RNA, 19 nt, Artificial Sequence
  Description of Artificial Sequence: Synthetic oligonucleotide
gaguugcacaggacagcug

SEQ ID NO: 843015 - RNA, 19 nt, Artificial Sequence
  Description of Artificial Sequence: Synthetic oligonucleotide
agaccgcuuguagcuguuc

SEQ ID NO: 843016 - RNA, 19 nt, Artificial Sequence
  Description of Artificial Sequence: Synthetic oligonucleotide
ccuucgacaggggaucugc

SEQ ID NO: 843017 - RNA, 19 nt, Artificial Sequence
  Description of Artificial Sequence: Synthetic oligonucleotide
ccaucacaagcucagagua

SEQ ID NO: 843018 - RNA, 19 nt, Artificial Sequence
  Description of Artificial Sequence: Synthetic oligonucleotide
acggcagugccucgaggaa

SEQ ID NO: 843019 - RNA, 19 nt, Artificial Sequence
  Description of Artificial Sequence: Synthetic oligonucleotide
uggcggccacacacaaugu

SEQ ID NO: 843020 - RNA, 19 nt, Artificial Sequence
  Description of Artificial Sequence: Synthetic oligonucleotide
gcuguuccgcccaugcacc

SEQ ID NO: 843021 - RNA, 19 nt, Artificial Sequence
  Description of Artificial Sequence: Synthetic oligonucleotide
ggaaucccugguacagcgg

SEQ ID NO: 843022 - RNA, 19 nt, Artificial Sequence
  Description of Artificial Sequence: Synthetic oligonucleotide
ggaucuccccuuagugagg

SEQ ID NO: 843023 - RNA, 19 nt, Artificial Sequence
  Description of Artificial Sequence: Synthetic oligonucleotide
gcgacaucagcaccuuuca

SEQ ID NO: 843024 - RNA, 19 nt, Artificial Sequence
  Description of Artificial Sequence: Synthetic oligonucleotide
gccccguacaugaggaugc

SEQ ID NO: 843025 - RNA, 19 nt, Artificial Sequence
  Description of Artificial Sequence: Synthetic oligonucleotide
cauuguggugcugugaguu

SEQ ID NO: 843026 - RNA, 19 nt, Artificial Sequence
  Description of Artificial Sequence: Synthetic oligonucleotide
uuguagcuguuccgcccau

SEQ ID NO: 843027 - RNA, 19 nt, Artificial Sequence
  Description of Artificial Sequence: Synthetic oligonucleotide
auugcgacaucagcaccuu

SEQ ID NO: 843028 - RNA, 19 nt, Artificial Sequence
  Description of Artificial Sequence: Synthetic oligonucleotide
ggcuuguuaaguguguggu

SEQ ID NO: 843029 - RNA, 19 nt, Artificial Sequence
  Description of Artificial Sequence: Synthetic oligonucleotide
agcaucccucuaaggaacu

SEQ ID NO: 843030 - RNA, 19 nt, Artificial Sequence
  Description of Artificial Sequence: Synthetic oligonucleotide
cgacacucuccguccaucg

SEQ ID NO: 843031 - RNA, 19 nt, Artificial Sequence
  Description of Artificial Sequence: Synthetic oligonucleotide
gucaccgcuuggccacuug

SEQ ID NO: 843032 - RNA, 19 nt, Artificial Sequence
  Description of Artificial Sequence: Synthetic oligonucleotide
ggggugaauuaaguccagc

SEQ ID NO: 843033 - RNA, 19 nt, Artificial Sequence
  Description of Artificial Sequence: Synthetic oligonucleotide
cucgaggaaugguuuacau

SEQ ID NO: 843034 - RNA, 19 nt, Artificial Sequence
  Description of Artificial Sequence: Synthetic oligonucleotide
ggugcgcuuucugguaugc

SEQ ID NO: 843035 - RNA, 19 nt, Artificial Sequence
  Description of Artificial Sequence: Synthetic oligonucleotide
uguuccgcccaugcaccau

SEQ ID NO: 843036 - RNA, 19 nt, Artificial Sequence
  Description of Artificial Sequence: Synthetic oligonucleotide
cuaccuggccucaugucau

SEQ ID NO: 843037 - RNA, 19 nt, Artificial Sequence
  Description of Artificial Sequence: Synthetic oligonucleotide
caucgcaccagugccaccu

SEQ ID NO: 843038 - RNA, 19 nt, Artificial Sequence
  Description of Artificial Sequence: Synthetic oligonucleotide
uugcgacaucagcaccuuu

SEQ ID NO: 843039 - RNA, 19 nt, Artificial Sequence
  Description of Artificial Sequence: Synthetic oligonucleotide
uaccuggccucaugucaua

SEQ ID NO: 843040 - RNA, 19 nt, Artificial Sequence
  Description of Artificial Sequence: Synthetic oligonucleotide
cuguaucggcuuucaaagu

SEQ ID NO: 843041 - RNA, 19 nt, Artificial Sequence
  Description of Artificial Sequence: Synthetic oligonucleotide
cccugguacagcgggacag

SEQ ID NO: 843042 - RNA, 19 nt, Artificial Sequence
  Description of Artificial Sequence: Synthetic oligonucleotide
gcugcacgcacacaauacu

SEQ ID NO: 843043 - RNA, 19 nt, Artificial Sequence
  Description of Artificial Sequence: Synthetic oligonucleotide
gcacguagaguggaaggca

SEQ ID NO: 843044 - RNA, 19 nt, Artificial Sequence
  Description of Artificial Sequence: Synthetic oligonucleotide
ggucaagaccuggccacug

SEQ ID NO: 843045 - RNA, 19 nt, Artificial Sequence
  Description of Artificial Sequence: Synthetic oligonucleotide
cagcugaguucuacguaaa

SEQ ID NO: 843046 - RNA, 19 nt, Artificial Sequence
  Description of Artificial Sequence: Synthetic oligonucleotide
aggcaacauagcagcccag

SEQ ID NO: 843047 - RNA, 19 nt, Artificial Sequence
  Description of Artificial Sequence: Synthetic oligonucleotide
ggacaaugguggacauugc

SEQ ID NO: 843048 - RNA, 19 nt, Artificial Sequence
  Description of Artificial Sequence: Synthetic oligonucleotide
cugcacgcacacaauacuu

SEQ ID NO: 843049 - RNA, 19 nt, Artificial Sequence
  Description of Artificial Sequence: Synthetic oligonucleotide
guccaucgcaccagugcca

SEQ ID NO: 843050 - RNA, 19 nt, Artificial Sequence
  Description of Artificial Sequence: Synthetic oligonucleotide
gcgggacagaugcaaagua

SEQ ID NO: 843051 - RNA, 19 nt, Artificial Sequence
  Description of Artificial Sequence: Synthetic oligonucleotide
cucgcgugccauguuucca

SEQ ID NO: 843052 - RNA, 19 nt, Artificial Sequence
  Description of Artificial Sequence: Synthetic oligonucleotide
ucgccauuucuggcuucac

SEQ ID NO: 843053 - RNA, 19 nt, Artificial Sequence
  Description of Artificial Sequence: Synthetic oligonucleotide
guacugagaguagccacau

SEQ ID NO: 843054 - RNA, 19 nt, Artificial Sequence
  Description of Artificial Sequence: Synthetic oligonucleotide
gccucgaggaaugguuuac

SEQ ID NO: 843055 - RNA, 19 nt, Artificial Sequence
  Description of Artificial Sequence: Synthetic oligonucleotide
cccgaucccacagucagca

SEQ ID NO: 843056 - RNA, 19 nt, Artificial Sequence
  Description of Artificial Sequence: Synthetic oligonucleotide
gcuaacggcagugccucga

SEQ ID NO: 843057 - RNA, 19 nt, Artificial Sequence
  Description of Artificial Sequence: Synthetic oligonucleotide
gcuggcgcaauagggucac

SEQ ID NO: 843058 - RNA, 19 nt, Artificial Sequence
  Description of Artificial Sequence: Synthetic oligonucleotide
cagacaacggcagggcagu

SEQ ID NO: 843059 - RNA, 19 nt, Artificial Sequence
  Description of Artificial Sequence: Synthetic oligonucleotide
ugccaccacaaggguccgc

SEQ ID NO: 843060 - RNA, 19 nt, Artificial Sequence
  Description of Artificial Sequence: Synthetic oligonucleotide
ccauaaggaaucccuggua

SEQ ID NO: 843061 - RNA, 19 nt, Artificial Sequence
  Description of Artificial Sequence: Synthetic oligonucleotide
gcgugauggagaaguccgc

SEQ ID NO: 843062 - RNA, 19 nt, Artificial Sequence
  Description of Artificial Sequence: Synthetic oligonucleotide
gcgugccauguuuccacac

SEQ ID NO: 843063 - RNA, 19 nt, Artificial Sequence
  Description of Artificial Sequence: Synthetic oligonucleotide
cugguaugcuggcgcaaua

SEQ ID NO: 843064 - RNA, 19 nt, Artificial Sequence
  Description of Artificial Sequence: Synthetic oligonucleotide
ccacauggccuagggacac

SEQ ID NO: 843065 - RNA, 19 nt, Artificial Sequence
  Description of Artificial Sequence: Synthetic oligonucleotide
cgaucccgaucccacaguc

SEQ ID NO: 843066 - RNA, 19 nt, Artificial Sequence
  Description of Artificial Sequence: Synthetic oligonucleotide
gucacgaugugggccuucu

SEQ ID NO: 843067 - RNA, 19 nt, Artificial Sequence
  Description of Artificial Sequence: Synthetic oligonucleotide
aucccacagucagcagccu

SEQ ID NO: 843068 - RNA, 19 nt, Artificial Sequence
  Description of Artificial Sequence: Synthetic oligonucleotide
ggcgcaauagggucacgau

SEQ ID NO: 843069 - RNA, 19 nt, Artificial Sequence
  Description of Artificial Sequence: Synthetic oligonucleotide
ggcuugacuguaucggcuu

SEQ ID NO: 843070 - RNA, 19 nt, Artificial Sequence
  Description of Artificial Sequence: Synthetic oligonucleotide
cuggcgcaauagggucacg

SEQ ID NO: 843071 - RNA, 19 nt, Artificial Sequence
  Description of Artificial Sequence: Synthetic oligonucleotide
guacagcgggacagaugca

SEQ ID NO: 843072 - RNA, 19 nt, Artificial Sequence
  Description of Artificial Sequence: Synthetic oligonucleotide
gcagaccgcuuguagcugu

SEQ ID NO: 843073 - RNA, 19 nt, Artificial Sequence
  Description of Artificial Sequence: Synthetic oligonucleotide
cagucagaaucagcgcugu

SEQ ID NO: 843074 - RNA, 19 nt, Artificial Sequence
  Description of Artificial Sequence: Synthetic oligonucleotide
gccaagugcugcagaccgc

SEQ ID NO: 843075 - RNA, 19 nt, Artificial Sequence
  Description of Artificial Sequence: Synthetic oligonucleotide
gccacgacauggacgaacu

SEQ ID NO: 843076 - RNA, 19 nt, Artificial Sequence
  Description of Artificial Sequence: Synthetic oligonucleotide
cauggccuagggacaccua

SEQ ID NO: 843077 - RNA, 19 nt, Artificial Sequence
  Description of Artificial Sequence: Synthetic oligonucleotide
gcaacggaauuaggauauc

SEQ ID NO: 843078 - RNA, 19 nt, Artificial Sequence
  Description of Artificial Sequence: Synthetic oligonucleotide
cagccugcaugguggagau

SEQ ID NO: 843079 - RNA, 19 nt, Artificial Sequence
  Description of Artificial Sequence: Synthetic oligonucleotide
cagcgcugugaaggagaug

SEQ ID NO: 843080 - RNA, 19 nt, Artificial Sequence
  Description of Artificial Sequence: Synthetic oligonucleotide
gcuagcuccacaaguucau

SEQ ID NO: 843081 - RNA, 19 nt, Artificial Sequence
  Description of Artificial Sequence: Synthetic oligonucleotide
gccagucauuguacuggac

SEQ ID NO: 843082 - RNA, 19 nt, Artificial Sequence
  Description of Artificial Sequence: Synthetic oligonucleotide
ccaucgcaccagugccacc

SEQ ID NO: 843083 - RNA, 19 nt, Artificial Sequence
  Description of Artificial Sequence: Synthetic oligonucleotide
ccucgaggaaugguuuaca

SEQ ID NO: 843084 - RNA, 19 nt, Artificial Sequence
  Description of Artificial Sequence: Synthetic oligonucleotide
ccacaaccaugagccagug

SEQ ID NO: 843085 - RNA, 19 nt, Artificial Sequence
  Description of Artificial Sequence: Synthetic oligonucleotide
ccgacacucuccguccauc

SEQ ID NO: 843086 - RNA, 19 nt, Artificial Sequence
  Description of Artificial Sequence: Synthetic oligonucleotide
ccaagugcugcagaccgcu

SEQ ID NO: 843087 - RNA, 19 nt, Artificial Sequence
  Description of Artificial Sequence: Synthetic oligonucleotide
agacaacggcagggcaguu

SEQ ID NO: 843088 - RNA, 19 nt, Artificial Sequence
  Description of Artificial Sequence: Synthetic oligonucleotide
ccacgacauggacgaacuc

SEQ ID NO: 843089 - RNA, 19 nt, Artificial Sequence
  Description of Artificial Sequence: Synthetic oligonucleotide
ggccccugugcaugacaaa

SEQ ID NO: 843090 - RNA, 19 nt, Artificial Sequence
  Description of Artificial Sequence: Synthetic oligonucleotide
gcccgacacucuccgucca

SEQ ID NO: 843091 - RNA, 19 nt, Artificial Sequence
  Description of Artificial Sequence: Synthetic oligonucleotide
ccgcuugcucuccgaggug

SEQ ID NO: 843092 - RNA, 19 nt, Artificial Sequence
  Description of Artificial Sequence: Synthetic oligonucleotide
gguccgcagccccucgcgu

SEQ ID NO: 843093 - RNA, 19 nt, Artificial Sequence
  Description of Artificial Sequence: Synthetic oligonucleotide
cccuucgaucccgauccca

SEQ ID NO: 843094 - RNA, 19 nt, Artificial Sequence
  Description of Artificial Sequence: Synthetic oligonucleotide
cccguacaugaggaugcca

SEQ ID NO: 843095 - RNA, 19 nt, Artificial Sequence
  Description of Artificial Sequence: Synthetic oligonucleotide
cgcgugccauguuuccaca

SEQ ID NO: 843096 - RNA, 19 nt, Artificial Sequence
  Description of Artificial Sequence: Synthetic oligonucleotide
gugucaccgcuuggccacu

SEQ ID NO: 843097 - RNA, 19 nt, Artificial Sequence
  Description of Artificial Sequence: Synthetic oligonucleotide
ccggucauggaugcucagu

SEQ ID NO: 843098 - RNA, 19 nt, Artificial Sequence
  Description of Artificial Sequence: Synthetic oligonucleotide
ccacaaguucaugcucgua

SEQ ID NO: 843099 - RNA, 19 nt, Artificial Sequence
  Description of Artificial Sequence: Synthetic oligonucleotide
ccgauggcacaggugcgcu

SEQ ID NO: 843100 - RNA, 19 nt, Artificial Sequence
  Description of Artificial Sequence: Synthetic oligonucleotide
gggccccguacaugaggau

SEQ ID NO: 843101 - RNA, 19 nt, Artificial Sequence
  Description of Artificial Sequence: Synthetic oligonucleotide
ccccucgcgugccauguuu

SEQ ID NO: 843102 - RNA, 19 nt, Artificial Sequence
  Description of Artificial Sequence: Synthetic oligonucleotide
cccgacacucuccguccau

SEQ ID NO: 843103 - RNA, 19 nt, Artificial Sequence
  Description of Artificial Sequence: Synthetic oligonucleotide
gccccucgcgugccauguu

SEQ ID NO: 843104 - RNA, 19 nt, Artificial Sequence
  Description of Artificial Sequence: Synthetic oligonucleotide
uauauaaagguccaguggg

SEQ ID NO: 843105 - RNA, 19 nt, Artificial Sequence
  Description of Artificial Sequence: Synthetic oligonucleotide
aauaacaugacauaucuau

SEQ ID NO: 843106 - RNA, 19 nt, Artificial Sequence
  Description of Artificial Sequence: Synthetic oligonucleotide
uauauauuuauauauauaa

SEQ ID NO: 843107 - RNA, 19 nt, Artificial Sequence
  Description of Artificial Sequence: Synthetic oligonucleotide
uauauauauauuuauauau

SEQ ID NO: 843108 - RNA, 19 nt, Artificial Sequence
  Description of Artificial Sequence: Synthetic oligonucleotide
uuuagcuugaggaugacag

SEQ ID NO: 843109 - RNA, 19 nt, Artificial Sequence
  Description of Artificial Sequence: Synthetic oligonucleotide
cuuagaagcacagagagcg

SEQ ID NO: 843110 - RNA, 19 nt, Artificial Sequence
  Description of Artificial Sequence: Synthetic oligonucleotide
uucaguaagauccaggcca

SEQ ID NO: 843111 - RNA, 19 nt, Artificial Sequence
  Description of Artificial Sequence: Synthetic oligonucleotide
auaucuauguacaacaugg

SEQ ID NO: 843112 - RNA, 19 nt, Artificial Sequence
  Description of Artificial Sequence: Synthetic oligonucleotide
accuaugagauucugaagg

SEQ ID NO: 843113 - RNA, 19 nt, Artificial Sequence
  Description of Artificial Sequence: Synthetic oligonucleotide
auuauauauauauuuauau

SEQ ID NO: 843114 - RNA, 19 nt, Artificial Sequence
  Description of Artificial Sequence: Synthetic oligonucleotide
ucuauguacaacauggcug

SEQ ID NO: 843115 - RNA, 19 nt, Artificial Sequence
  Description of Artificial Sequence: Synthetic oligonucleotide
cuauuguauauaaaggucc

SEQ ID NO: 843116 - RNA, 19 nt, Artificial Sequence
  Description of Artificial Sequence: Synthetic oligonucleotide
aaggcuaugaaaccuauga

SEQ ID NO: 843117 - RNA, 19 nt, Artificial Sequence
  Description of Artificial Sequence: Synthetic oligonucleotide
cucgauaacaagcaggugg

SEQ ID NO: 843118 - RNA, 19 nt, Artificial Sequence
  Description of Artificial Sequence: Synthetic oligonucleotide
uauauauauuuauauauau

SEQ ID NO: 843119 - RNA, 19 nt, Artificial Sequence
  Description of Artificial Sequence: Synthetic oligonucleotide
uauucaguaagauccaggc

SEQ ID NO: 843120 - RNA, 19 nt, Artificial Sequence
  Description of Artificial Sequence: Synthetic oligonucleotide
ucucuaaacacccacgaug

SEQ ID NO: 843121 - RNA, 19 nt, Artificial Sequence
  Description of Artificial Sequence: Synthetic oligonucleotide
cugaaugagagucagagac

SEQ ID NO: 843122 - RNA, 19 nt, Artificial Sequence
  Description of Artificial Sequence: Synthetic oligonucleotide
uguagacccaggaaaacgg

SEQ ID NO: 843123 - RNA, 19 nt, Artificial Sequence
  Description of Artificial Sequence: Synthetic oligonucleotide
aauagcugcagugcuauac

SEQ ID NO: 843124 - RNA, 19 nt, Artificial Sequence
  Description of Artificial Sequence: Synthetic oligonucleotide
cuauguacaacauggcugg

SEQ ID NO: 843125 - RNA, 19 nt, Artificial Sequence
  Description of Artificial Sequence: Synthetic oligonucleotide
aaaccuaugagauucugaa

SEQ ID NO: 843126 - RNA, 19 nt, Artificial Sequence
  Description of Artificial Sequence: Synthetic oligonucleotide
agaaguuucaaauuaccca

SEQ ID NO: 843127 - RNA, 19 nt, Artificial Sequence
  Description of Artificial Sequence: Synthetic oligonucleotide
uguauauaaagguccagug

SEQ ID NO: 843128 - RNA, 19 nt, Artificial Sequence
  Description of Artificial Sequence: Synthetic oligonucleotide
ugccuauuguauauaaagg

SEQ ID NO: 843129 - RNA, 19 nt, Artificial Sequence
  Description of Artificial Sequence: Synthetic oligonucleotide
auauauaauaacaugacau

SEQ ID NO: 843130 - RNA, 19 nt, Artificial Sequence
  Description of Artificial Sequence: Synthetic oligonucleotide
caaaacuuuacauuccuug

SEQ ID NO: 843131 - RNA, 19 nt, Artificial Sequence
  Description of Artificial Sequence: Synthetic oligonucleotide
uauaauaacaugacauauc

SEQ ID NO: 843132 - RNA, 19 nt, Artificial Sequence
  Description of Artificial Sequence: Synthetic oligonucleotide
uuauauauauauuuauaua

SEQ ID NO: 843133 - RNA, 19 nt, Artificial Sequence
  Description of Artificial Sequence: Synthetic oligonucleotide
cucuaaacacccacgaugg

SEQ ID NO: 843134 - RNA, 19 nt, Artificial Sequence
  Description of Artificial Sequence: Synthetic oligonucleotide
gacauaucuauguacaaca

SEQ ID NO: 843135 - RNA, 19 nt, Artificial Sequence
  Description of Artificial Sequence: Synthetic oligonucleotide
acaugacauaucuauguac

SEQ ID NO: 843136 - RNA, 19 nt, Artificial Sequence
  Description of Artificial Sequence: Synthetic oligonucleotide
ucuuguuucugggacaugg

SEQ ID NO: 843137 - RNA, 19 nt, Artificial Sequence
  Description of Artificial Sequence: Synthetic oligonucleotide
cugccuauuguauauaaag

SEQ ID NO: 843138 - RNA, 19 nt, Artificial Sequence
  Description of Artificial Sequence: Synthetic oligonucleotide
aaggcuagcuucuucaggu

SEQ ID NO: 843139 - RNA, 19 nt, Artificial Sequence
  Description of Artificial Sequence: Synthetic oligonucleotide
gaaucaucugcuaaggacc

SEQ ID NO: 843140 - RNA, 19 nt, Artificial Sequence
  Description of Artificial Sequence: Synthetic oligonucleotide
uuuccaacacgucagcuca

SEQ ID NO: 843141 - RNA, 19 nt, Artificial Sequence
  Description of Artificial Sequence: Synthetic oligonucleotide
aauagcuggagggacacag

SEQ ID NO: 843142 - RNA, 19 nt, Artificial Sequence
  Description of Artificial Sequence: Synthetic oligonucleotide
acguacuaaaauuauauau

SEQ ID NO: 843143 - RNA, 19 nt, Artificial Sequence
  Description of Artificial Sequence: Synthetic oligonucleotide
ucuacugggcuacagugag

SEQ ID NO: 843144 - RNA, 19 nt, Artificial Sequence
  Description of Artificial Sequence: Synthetic oligonucleotide
uauuguauauaaaggucca

SEQ ID NO: 843145 - RNA, 19 nt, Artificial Sequence
  Description of Artificial Sequence: Synthetic oligonucleotide
uguagaaguuucaaauuac

SEQ ID NO: 843146 - RNA, 19 nt, Artificial Sequence
  Description of Artificial Sequence: Synthetic oligonucleotide
aaacguacuaaaauuauau

SEQ ID NO: 843147 - RNA, 19 nt, Artificial Sequence
  Description of Artificial Sequence: Synthetic oligonucleotide
gaaguuucaaauuacccaa

SEQ ID NO: 843148 - RNA, 19 nt, Artificial Sequence
  Description of Artificial Sequence: Synthetic oligonucleotide
auacaauuacaaaugagag

SEQ ID NO: 843149 - RNA, 19 nt, Artificial Sequence
  Description of Artificial Sequence: Synthetic oligonucleotide
gaguuuaggggccagggag

SEQ ID NO: 843150 - RNA, 19 nt, Artificial Sequence
  Description of Artificial Sequence: Synthetic oligonucleotide
guaaaggggagacugacug

SEQ ID NO: 843151 - RNA, 19 nt, Artificial Sequence
  Description of Artificial Sequence: Synthetic oligonucleotide
cacuuagaagcacagagag

SEQ ID NO: 843152 - RNA, 19 nt, Artificial Sequence
  Description of Artificial Sequence: Synthetic oligonucleotide
auucaguaagauccaggcc

SEQ ID NO: 843153 - RNA, 19 nt, Artificial Sequence
  Description of Artificial Sequence: Synthetic oligonucleotide
caugacugagccuauuucc

SEQ ID NO: 843154 - RNA, 19 nt, Artificial Sequence
  Description of Artificial Sequence: Synthetic oligonucleotide
gaaguuucucuaaacaccc

SEQ ID NO: 843155 - RNA, 19 nt, Artificial Sequence
  Description of Artificial Sequence: Synthetic oligonucleotide
agacauucuacggaaacac

SEQ ID NO: 843156 - RNA, 19 nt, Artificial Sequence
  Description of Artificial Sequence: Synthetic oligonucleotide
uguacaacauggcugggac

SEQ ID NO: 843157 - RNA, 19 nt, Artificial Sequence
  Description of Artificial Sequence: Synthetic oligonucleotide
uccaaucugaaugagaguc

SEQ ID NO: 843158 - RNA, 19 nt, Artificial Sequence
  Description of Artificial Sequence: Synthetic oligonucleotide
aagcaaaucccuucuccuc

SEQ ID NO: 843159 - RNA, 19 nt, Artificial Sequence
  Description of Artificial Sequence: Synthetic oligonucleotide
auuuacaugcucuucccug

SEQ ID NO: 843160 - RNA, 19 nt, Artificial Sequence
  Description of Artificial Sequence: Synthetic oligonucleotide
cauucuacggaaacacugg

SEQ ID NO: 843161 - RNA, 19 nt, Artificial Sequence
  Description of Artificial Sequence: Synthetic oligonucleotide
uuucucuaaacacccacga

SEQ ID NO: 843162 - RNA, 19 nt, Artificial Sequence
  Description of Artificial Sequence: Synthetic oligonucleotide
gaaaugaacucagagcccc

SEQ ID NO: 843163 - RNA, 19 nt, Artificial Sequence
  Description of Artificial Sequence: Synthetic oligonucleotide
caagaaugccacaugacug

SEQ ID NO: 843164 - RNA, 19 nt, Artificial Sequence
  Description of Artificial Sequence: Synthetic oligonucleotide
cuccuauccaaucugaaug

SEQ ID NO: 843165 - RNA, 19 nt, Artificial Sequence
  Description of Artificial Sequence: Synthetic oligonucleotide
ucuuuuagcaguucucacu

SEQ ID NO: 843166 - RNA, 19 nt, Artificial Sequence
  Description of Artificial Sequence: Synthetic oligonucleotide
caaauuacccaaagaaaug

SEQ ID NO: 843167 - RNA, 19 nt, Artificial Sequence
  Description of Artificial Sequence: Synthetic oligonucleotide
cacugaaccuaccacaccg

SEQ ID NO: 843168 - RNA, 19 nt, Artificial Sequence
  Description of Artificial Sequence: Synthetic oligonucleotide
agcagaaugucuucccugg

SEQ ID NO: 843169 - RNA, 19 nt, Artificial Sequence
  Description of Artificial Sequence: Synthetic oligonucleotide
uggcccuuaaaucucaaac

SEQ ID NO: 843170 - RNA, 19 nt, Artificial Sequence
  Description of Artificial Sequence: Synthetic oligonucleotide
acaaacucgccagacauuc

SEQ ID NO: 843171 - RNA, 19 nt, Artificial Sequence
  Description of Artificial Sequence: Synthetic oligonucleotide
ugaaugagagucagagacc

SEQ ID NO: 843172 - RNA, 19 nt, Artificial Sequence
  Description of Artificial Sequence: Synthetic oligonucleotide
uaaacacccacgaugggaa

SEQ ID NO: 843173 - RNA, 19 nt, Artificial Sequence
  Description of Artificial Sequence: Synthetic oligonucleotide
gaagucagccggaaaaggg

SEQ ID NO: 843174 - RNA, 19 nt, Artificial Sequence
  Description of Artificial Sequence: Synthetic oligonucleotide
caugacauaucuauguaca

SEQ ID NO: 843175 - RNA, 19 nt, Artificial Sequence
  Description of Artificial Sequence: Synthetic oligonucleotide
uaccccgcaagcuugcugg

SEQ ID NO: 843176 - RNA, 19 nt, Artificial Sequence
  Description of Artificial Sequence: Synthetic oligonucleotide
ucucucagggagaauaccu

SEQ ID NO: 843177 - RNA, 19 nt, Artificial Sequence
  Description of Artificial Sequence: Synthetic oligonucleotide
acaugacugagccuauuuc

SEQ ID NO: 843178 - RNA, 19 nt, Artificial Sequence
  Description of Artificial Sequence: Synthetic oligonucleotide
uuuacaugcucuucccuga

SEQ ID NO: 843179 - RNA, 19 nt, Artificial Sequence
  Description of Artificial Sequence: Synthetic oligonucleotide
accacaccgcucuagacuc

SEQ ID NO: 843180 - RNA, 19 nt, Artificial Sequence
  Description of Artificial Sequence: Synthetic oligonucleotide
aacacgucagcucagccuu

SEQ ID NO: 843181 - RNA, 19 nt, Artificial Sequence
  Description of Artificial Sequence: Synthetic oligonucleotide
agugcuauacagucuucuc

SEQ ID NO: 843182 - RNA, 19 nt, Artificial Sequence
  Description of Artificial Sequence: Synthetic oligonucleotide
uaagcaagaaugccacaug

SEQ ID NO: 843183 - RNA, 19 nt, Artificial Sequence
  Description of Artificial Sequence: Synthetic oligonucleotide
uuguauauaaagguccagu

SEQ ID NO: 843184 - RNA, 19 nt, Artificial Sequence
  Description of Artificial Sequence: Synthetic oligonucleotide
aagaaacuauacaaugaug

SEQ ID NO: 843185 - RNA, 19 nt, Artificial Sequence
  Description of Artificial Sequence: Synthetic oligonucleotide
aggggaaacggggacaacc

SEQ ID NO: 843186 - RNA, 19 nt, Artificial Sequence
  Description of Artificial Sequence: Synthetic oligonucleotide
aacguacuaaaauuauaua

SEQ ID NO: 843187 - RNA, 19 nt, Artificial Sequence
  Description of Artificial Sequence: Synthetic oligonucleotide
gaugggaacacgaagcaca

SEQ ID NO: 843188 - RNA, 19 nt, Artificial Sequence
  Description of Artificial Sequence: Synthetic oligonucleotide
uuuugggucucuacugggc

SEQ ID NO: 843189 - RNA, 19 nt, Artificial Sequence
  Description of Artificial Sequence: Synthetic oligonucleotide
uuaagcaagaaugccacau

SEQ ID NO: 843190 - RNA, 19 nt, Artificial Sequence
  Description of Artificial Sequence: Synthetic oligonucleotide
ugagagucaaggaguuuag

SEQ ID NO: 843191 - RNA, 19 nt, Artificial Sequence
  Description of Artificial Sequence: Synthetic oligonucleotide
cauaucuauguacaacaug

SEQ ID NO: 843192 - RNA, 19 nt, Artificial Sequence
  Description of Artificial Sequence: Synthetic oligonucleotide
aaucccuucuccucuuuga

SEQ ID NO: 843193 - RNA, 19 nt, Artificial Sequence
  Description of Artificial Sequence: Synthetic oligonucleotide
aacaugacauaucuaugua

SEQ ID NO: 843194 - RNA, 19 nt, Artificial Sequence
  Description of Artificial Sequence: Synthetic oligonucleotide
ucucaagaaggcuaugaaa

SEQ ID NO: 843195 - RNA, 19 nt, Artificial Sequence
  Description of Artificial Sequence: Synthetic oligonucleotide
uugagaagcagggcaauag

SEQ ID NO: 843196 - RNA, 19 nt, Artificial Sequence
  Description of Artificial Sequence: Synthetic oligonucleotide
agaaaugaacucagagccc

SEQ ID NO: 843197 - RNA, 19 nt, Artificial Sequence
  Description of Artificial Sequence: Synthetic oligonucleotide
cuuugaaguuucucuaaac

SEQ ID NO: 843198 - RNA, 19 nt, Artificial Sequence
  Description of Artificial Sequence: Synthetic oligonucleotide
uacggaaacacuggaaucu

SEQ ID NO: 843199 - RNA, 19 nt, Artificial Sequence
  Description of Artificial Sequence: Synthetic oligonucleotide
uccuauccaaucugaauga

SEQ ID NO: 843200 - RNA, 19 nt, Artificial Sequence
  Description of Artificial Sequence: Synthetic oligonucleotide
uauaaagguccagugggug

SEQ ID NO: 843201 - RNA, 19 nt, Artificial Sequence
  Description of Artificial Sequence: Synthetic oligonucleotide
agccuaagggacaacacac

SEQ ID NO: 843202 - RNA, 19 nt, Artificial Sequence
  Description of Artificial Sequence: Synthetic oligonucleotide
uagggucaacuguagaccc

SEQ ID NO: 843203 - RNA, 19 nt, Artificial Sequence
  Description of Artificial Sequence: Synthetic oligonucleotide
cagugaaucaucugcuaag

SEQ ID NO: 843204 - RNA, 19 nt, Artificial Sequence
  Description of Artificial Sequence: Synthetic oligonucleotide
aaugaacucagagccccuc

SEQ ID NO: 843205 - RNA, 19 nt, Artificial Sequence
  Description of Artificial Sequence: Synthetic oligonucleotide
gaaugagagucagagacca

SEQ ID NO: 843206 - RNA, 19 nt, Artificial Sequence
  Description of Artificial Sequence: Synthetic oligonucleotide
ucagccggaaaagggaagg

SEQ ID NO: 843207 - RNA, 19 nt, Artificial Sequence
  Description of Artificial Sequence: Synthetic oligonucleotide
aaaacggguagagucaaaa

SEQ ID NO: 843208 - RNA, 19 nt, Artificial Sequence
  Description of Artificial Sequence: Synthetic oligonucleotide
uggaaucuguaaaggggag

SEQ ID NO: 843209 - RNA, 19 nt, Artificial Sequence
  Description of Artificial Sequence: Synthetic oligonucleotide
ugacauaucuauguacaac

SEQ ID NO: 843210 - RNA, 19 nt, Artificial Sequence
  Description of Artificial Sequence: Synthetic oligonucleotide
ccuuacauacaucuuaagc

SEQ ID NO: 843211 - RNA, 19 nt, Artificial Sequence
  Description of Artificial Sequence: Synthetic oligonucleotide
uugaggaugacagcaugag

SEQ ID NO: 843212 - RNA, 19 nt, Artificial Sequence
  Description of Artificial Sequence: Synthetic oligonucleotide
ugcagugcuauacagucuu

SEQ ID NO: 843213 - RNA, 19 nt, Artificial Sequence
  Description of Artificial Sequence: Synthetic oligonucleotide
acauucuacggaaacacug

SEQ ID NO: 843214 - RNA, 19 nt, Artificial Sequence
  Description of Artificial Sequence: Synthetic oligonucleotide
cuagggucaacuguagacc

SEQ ID NO: 843215 - RNA, 19 nt, Artificial Sequence
  Description of Artificial Sequence: Synthetic oligonucleotide
cuuuugggucucuacuggg

SEQ ID NO: 843216 - RNA, 19 nt, Artificial Sequence
  Description of Artificial Sequence: Synthetic oligonucleotide
uuagcuugaggaugacagc

SEQ ID NO: 843217 - RNA, 19 nt, Artificial Sequence
  Description of Artificial Sequence: Synthetic oligonucleotide
aggcuaugaaaccuaugag

SEQ ID NO: 843218 - RNA, 19 nt, Artificial Sequence
  Description of Artificial Sequence: Synthetic oligonucleotide
auauauuuauauauauaau

SEQ ID NO: 843219 - RNA, 19 nt, Artificial Sequence
  Description of Artificial Sequence: Synthetic oligonucleotide
auauauauauuuauauaua

SEQ ID NO: 843220 - RNA, 19 nt, Artificial Sequence
  Description of Artificial Sequence: Synthetic oligonucleotide
aaacacccacgaugggaac

SEQ ID NO: 843221 - RNA, 19 nt, Artificial Sequence
  Description of Artificial Sequence: Synthetic oligonucleotide
aaacucgccagacauucua

SEQ ID NO: 843222 - RNA, 19 nt, Artificial Sequence
  Description of Artificial Sequence: Synthetic oligonucleotide
acagcaugagaaaauggag

SEQ ID NO: 843223 - RNA, 19 nt, Artificial Sequence
  Description of Artificial Sequence: Synthetic oligonucleotide
uguaaaggggagacugacu

SEQ ID NO: 843224 - RNA, 19 nt, Artificial Sequence
  Description of Artificial Sequence: Synthetic oligonucleotide
ggauauuuggccuuuagcu

SEQ ID NO: 843225 - RNA, 19 nt, Artificial Sequence
  Description of Artificial Sequence: Synthetic oligonucleotide
ggacagcauauuuacaugc

SEQ ID NO: 843226 - RNA, 19 nt, Artificial Sequence
  Description of Artificial Sequence: Synthetic oligonucleotide
ugggauauuuggccuuuag

SEQ ID NO: 843227 - RNA, 19 nt, Artificial Sequence
  Description of Artificial Sequence: Synthetic oligonucleotide
uggacuuuagcuugaggau

SEQ ID NO: 843228 - RNA, 19 nt, Artificial Sequence
  Description of Artificial Sequence: Synthetic oligonucleotide
agcaacaaacucgccagac

SEQ ID NO: 843229 - RNA, 19 nt, Artificial Sequence
  Description of Artificial Sequence: Synthetic oligonucleotide
agucagagaccagugcggc

SEQ ID NO: 843230 - RNA, 19 nt, Artificial Sequence
  Description of Artificial Sequence: Synthetic oligonucleotide
cucgccagacauucuacgg

SEQ ID NO: 843231 - RNA, 19 nt, Artificial Sequence
  Description of Artificial Sequence: Synthetic oligonucleotide
aaaacguacuaaaauuaua

SEQ ID NO: 843232 - RNA, 19 nt, Artificial Sequence
  Description of Artificial Sequence: Synthetic oligonucleotide
gagccuauuuccucaggcc

SEQ ID NO: 843233 - RNA, 19 nt, Artificial Sequence
  Description of Artificial Sequence: Synthetic oligonucleotide
ucugaaugagagucagaga

SEQ ID NO: 843234 - RNA, 19 nt, Artificial Sequence
  Description of Artificial Sequence: Synthetic oligonucleotide
cuguagacccaggaaaacg

SEQ ID NO: 843235 - RNA, 19 nt, Artificial Sequence
  Description of Artificial Sequence: Synthetic oligonucleotide
auaacaagcaggugguauu

SEQ ID NO: 843236 - RNA, 19 nt, Artificial Sequence
  Description of Artificial Sequence: Synthetic oligonucleotide
ugccuuacauacaucuuaa

SEQ ID NO: 843237 - RNA, 19 nt, Artificial Sequence
  Description of Artificial Sequence: Synthetic oligonucleotide
ucacucuaccuuuccaaca

SEQ ID NO: 843238 - RNA, 19 nt, Artificial Sequence
  Description of Artificial Sequence: Synthetic oligonucleotide
ugguuuuaggcaagcaaau

SEQ ID NO: 843239 - RNA, 19 nt, Artificial Sequence
  Description of Artificial Sequence: Synthetic oligonucleotide
aaccugcuccuauccaauc

SEQ ID NO: 843240 - RNA, 19 nt, Artificial Sequence
  Description of Artificial Sequence: Synthetic oligonucleotide
acucgccagacauucuacg

SEQ ID NO: 843241 - RNA, 19 nt, Artificial Sequence
  Description of Artificial Sequence: Synthetic oligonucleotide
uuuuguccuaggcugggau

SEQ ID NO: 843242 - RNA, 19 nt, Artificial Sequence
  Description of Artificial Sequence: Synthetic oligonucleotide
auacaucuuaagcaagaau

SEQ ID NO: 843243 - RNA, 19 nt, Artificial Sequence
  Description of Artificial Sequence: Synthetic oligonucleotide
auauauauuuauauauaua

SEQ ID NO: 843244 - RNA, 19 nt, Artificial Sequence
  Description of Artificial Sequence: Synthetic oligonucleotide
ucgccagacauucuacgga

SEQ ID NO: 843245 - RNA, 19 nt, Artificial Sequence
  Description of Artificial Sequence: Synthetic oligonucleotide
augccuuacauacaucuua

SEQ ID NO: 843246 - RNA, 19 nt, Artificial Sequence
  Description of Artificial Sequence: Synthetic oligonucleotide
auuguauauaaagguccag

SEQ ID NO: 843247 - RNA, 19 nt, Artificial Sequence
  Description of Artificial Sequence: Synthetic oligonucleotide
cacucuaccuuuccaacac

SEQ ID NO: 843248 - RNA, 19 nt, Artificial Sequence
  Description of Artificial Sequence: Synthetic oligonucleotide
aacucgccagacauucuac

SEQ ID NO: 843249 - RNA, 19 nt, Artificial Sequence
  Description of Artificial Sequence: Synthetic oligonucleotide
uaauaacaugacauaucua

SEQ ID NO: 843250 - RNA, 19 nt, Artificial Sequence
  Description of Artificial Sequence: Synthetic oligonucleotide
gaaacggggacaaccugag

SEQ ID NO: 843251 - RNA, 19 nt, Artificial Sequence
  Description of Artificial Sequence: Synthetic oligonucleotide
cuaccuuuccaacacguca

SEQ ID NO: 843252 - RNA, 19 nt, Artificial Sequence
  Description of Artificial Sequence: Synthetic oligonucleotide
gaccagugcggccagucag

SEQ ID NO: 843253 - RNA, 19 nt, Artificial Sequence
  Description of Artificial Sequence: Synthetic oligonucleotide
gaaccuaccacaccgcucu

SEQ ID NO: 843254 - RNA, 19 nt, Artificial Sequence
  Description of Artificial Sequence: Synthetic oligonucleotide
aagucagccggaaaaggga

SEQ ID NO: 843255 - RNA, 19 nt, Artificial Sequence
  Description of Artificial Sequence: Synthetic oligonucleotide
ucacuaugguugcucaguc

SEQ ID NO: 843256 - RNA, 19 nt, Artificial Sequence
  Description of Artificial Sequence: Synthetic oligonucleotide
cuacggaaacacuggaauc

SEQ ID NO: 843257 - RNA, 19 nt, Artificial Sequence
  Description of Artificial Sequence: Synthetic oligonucleotide
gagccuaagggacaacaca

SEQ ID NO: 843258 - RNA, 19 nt, Artificial Sequence
  Description of Artificial Sequence: Synthetic oligonucleotide
agcaagaaugccacaugac

SEQ ID NO: 843259 - RNA, 19 nt, Artificial Sequence
  Description of Artificial Sequence: Synthetic oligonucleotide
ucuccuucacucuaccuuu

SEQ ID NO: 843260 - RNA, 19 nt, Artificial Sequence
  Description of Artificial Sequence: Synthetic oligonucleotide
augagagucagagaccagu

SEQ ID NO: 843261 - RNA, 19 nt, Artificial Sequence
  Description of Artificial Sequence: Synthetic oligonucleotide
cuauacagucuucucuuuc

SEQ ID NO: 843262 - RNA, 19 nt, Artificial Sequence
  Description of Artificial Sequence: Synthetic oligonucleotide
uagugaugacacagcaaga

SEQ ID NO: 843263 - RNA, 19 nt, Artificial Sequence
  Description of Artificial Sequence: Synthetic oligonucleotide
ucuaccuuuccaacacguc

SEQ ID NO: 843264 - RNA, 19 nt, Artificial Sequence
  Description of Artificial Sequence: Synthetic oligonucleotide
acucuaccuuuccaacacg

SEQ ID NO: 843265 - RNA, 19 nt, Artificial Sequence
  Description of Artificial Sequence: Synthetic oligonucleotide
ugucacuaugguugcucag

SEQ ID NO: 843266 - RNA, 19 nt, Artificial Sequence
  Description of Artificial Sequence: Synthetic oligonucleotide
aaaugagagucaaggaguu

SEQ ID NO: 843267 - RNA, 19 nt, Artificial Sequence
  Description of Artificial Sequence: Synthetic oligonucleotide
gacugagccuauuuccuca

SEQ ID NO: 843268 - RNA, 19 nt, Artificial Sequence
  Description of Artificial Sequence: Synthetic oligonucleotide
aggggagacugacugcauc

SEQ ID NO: 843269 - RNA, 19 nt, Artificial Sequence
  Description of Artificial Sequence: Synthetic oligonucleotide
uuaggcaagcaaaucccuu

SEQ ID NO: 843270 - RNA, 19 nt, Artificial Sequence
  Description of Artificial Sequence: Synthetic oligonucleotide
cugacuaggugcccauucc

SEQ ID NO: 843271 - RNA, 19 nt, Artificial Sequence
  Description of Artificial Sequence: Synthetic oligonucleotide
uucucuaaacacccacgau

SEQ ID NO: 843272 - RNA, 19 nt, Artificial Sequence
  Description of Artificial Sequence: Synthetic oligonucleotide
acgaugggaacacgaagca

SEQ ID NO: 843273 - RNA, 19 nt, Artificial Sequence
  Description of Artificial Sequence: Synthetic oligonucleotide
ugaaccuaccacaccgcuc

SEQ ID NO: 843274 - RNA, 19 nt, Artificial Sequence
  Description of Artificial Sequence: Synthetic oligonucleotide
cugguaggagcacuaacuc

SEQ ID NO: 843275 - RNA, 19 nt, Artificial Sequence
  Description of Artificial Sequence: Synthetic oligonucleotide
agagccuaagggacaacac

SEQ ID NO: 843276 - RNA, 19 nt, Artificial Sequence
  Description of Artificial Sequence: Synthetic oligonucleotide
acugaaccuaccacaccgc

SEQ ID NO: 843277 - RNA, 19 nt, Artificial Sequence
  Description of Artificial Sequence: Synthetic oligonucleotide
acgagcgaggacuuucucu

SEQ ID NO: 843278 - RNA, 19 nt, Artificial Sequence
  Description of Artificial Sequence: Synthetic oligonucleotide
uuagaagcacagagagcgu

SEQ ID NO: 843279 - RNA, 19 nt, Artificial Sequence
  Description of Artificial Sequence: Synthetic oligonucleotide
gggauauuuggccuuuagc

SEQ ID NO: 843280 - RNA, 19 nt, Artificial Sequence
  Description of Artificial Sequence: Synthetic oligonucleotide
gguccucucgauaacaagc

SEQ ID NO: 843281 - RNA, 19 nt, Artificial Sequence
  Description of Artificial Sequence: Synthetic oligonucleotide
aacacccacgaugggaaca

SEQ ID NO: 843282 - RNA, 19 nt, Artificial Sequence
  Description of Artificial Sequence: Synthetic oligonucleotide
cuaaacacccacgauggga

SEQ ID NO: 843283 - RNA, 19 nt, Artificial Sequence
  Description of Artificial Sequence: Synthetic oligonucleotide
agacugacugcaucuucug

SEQ ID NO: 843284 - RNA, 19 nt, Artificial Sequence
  Description of Artificial Sequence: Synthetic oligonucleotide
acggggacaaccugagcug

SEQ ID NO: 843285 - RNA, 19 nt, Artificial Sequence
  Description of Artificial Sequence: Synthetic oligonucleotide
agccggaaaagggaagggg

SEQ ID NO: 843286 - RNA, 19 nt, Artificial Sequence
  Description of Artificial Sequence: Synthetic oligonucleotide
uagaagcacagagagcguc

SEQ ID NO: 843287 - RNA, 19 nt, Artificial Sequence
  Description of Artificial Sequence: Synthetic oligonucleotide
uaacaagcaggugguauuc

SEQ ID NO: 843288 - RNA, 19 nt, Artificial Sequence
  Description of Artificial Sequence: Synthetic oligonucleotide
gaaacuauacaaugauguu

SEQ ID NO: 843289 - RNA, 19 nt, Artificial Sequence
  Description of Artificial Sequence: Synthetic oligonucleotide
ugcacucggcagcuguuug

SEQ ID NO: 843290 - RNA, 19 nt, Artificial Sequence
  Description of Artificial Sequence: Synthetic oligonucleotide
uuaccccgcaagcuugcug

SEQ ID NO: 843291 - RNA, 19 nt, Artificial Sequence
  Description of Artificial Sequence: Synthetic oligonucleotide
ggaagucggagccuccagg

SEQ ID NO: 843292 - RNA, 19 nt, Artificial Sequence
  Description of Artificial Sequence: Synthetic oligonucleotide
cuguaaaggggagacugac

SEQ ID NO: 843293 - RNA, 19 nt, Artificial Sequence
  Description of Artificial Sequence: Synthetic oligonucleotide
cugggacauggcaggaccg

SEQ ID NO: 843294 - RNA, 19 nt, Artificial Sequence
  Description of Artificial Sequence: Synthetic oligonucleotide
aggaaaacggguagaguca

SEQ ID NO: 843295 - RNA, 19 nt, Artificial Sequence
  Description of Artificial Sequence: Synthetic oligonucleotide
uuguccuaggcugggauau

SEQ ID NO: 843296 - RNA, 19 nt, Artificial Sequence
  Description of Artificial Sequence: Synthetic oligonucleotide
aagaaggcuaugaaaccua

SEQ ID NO: 843297 - RNA, 19 nt, Artificial Sequence
  Description of Artificial Sequence: Synthetic oligonucleotide
uuuguccuaggcugggaua

SEQ ID NO: 843298 - RNA, 19 nt, Artificial Sequence
  Description of Artificial Sequence: Synthetic oligonucleotide
auauaaagguccagugggu

SEQ ID NO: 843299 - RNA, 19 nt, Artificial Sequence
  Description of Artificial Sequence: Synthetic oligonucleotide
cagcuuuguagcagcuagg

SEQ ID NO: 843300 - RNA, 19 nt, Artificial Sequence
  Description of Artificial Sequence: Synthetic oligonucleotide
gucuccugagucaaaguac

SEQ ID NO: 843301 - RNA, 19 nt, Artificial Sequence
  Description of Artificial Sequence: Synthetic oligonucleotide
cucucgauaacaagcaggu

SEQ ID NO: 843302 - RNA, 19 nt, Artificial Sequence
  Description of Artificial Sequence: Synthetic oligonucleotide
aaugagagucagagaccag

SEQ ID NO: 843303 - RNA, 19 nt, Artificial Sequence
  Description of Artificial Sequence: Synthetic oligonucleotide
uccugagucaaaguacuuu

SEQ ID NO: 843304 - RNA, 19 nt, Artificial Sequence
  Description of Artificial Sequence: Synthetic oligonucleotide
gauaacaagcaggugguau

SEQ ID NO: 843305 - RNA, 19 nt, Artificial Sequence
  Description of Artificial Sequence: Synthetic oligonucleotide
ugcuccuauccaaucugaa

SEQ ID NO: 843306 - RNA, 19 nt, Artificial Sequence
  Description of Artificial Sequence: Synthetic oligonucleotide
gccuauuguauauaaaggu

SEQ ID NO: 843307 - RNA, 19 nt, Artificial Sequence
  Description of Artificial Sequence: Synthetic oligonucleotide
ucgccagucuccuccgcag

SEQ ID NO: 843308 - RNA, 19 nt, Artificial Sequence
  Description of Artificial Sequence: Synthetic oligonucleotide
ggaagucagccggaaaagg

SEQ ID NO: 843309 - RNA, 19 nt, Artificial Sequence
  Description of Artificial Sequence: Synthetic oligonucleotide
uuccaacacgucagcucag

SEQ ID NO: 843310 - RNA, 19 nt, Artificial Sequence
  Description of Artificial Sequence: Synthetic oligonucleotide
ugucuucccuggauggcaa

SEQ ID NO: 843311 - RNA, 19 nt, Artificial Sequence
  Description of Artificial Sequence: Synthetic oligonucleotide
gucaaggaguuuaggggcc

SEQ ID NO: 843312 - RNA, 19 nt, Artificial Sequence
  Description of Artificial Sequence: Synthetic oligonucleotide
acacgaagcacagagccua

SEQ ID NO: 843313 - RNA, 19 nt, Artificial Sequence
  Description of Artificial Sequence: Synthetic oligonucleotide
ucaccaaccugcuccuauc

SEQ ID NO: 843314 - RNA, 19 nt, Artificial Sequence
  Description of Artificial Sequence: Synthetic oligonucleotide
caccaaccugcuccuaucc

SEQ ID NO: 843315 - RNA, 19 nt, Artificial Sequence
  Description of Artificial Sequence: Synthetic oligonucleotide
uggucaccggucaccaggu

SEQ ID NO: 843316 - RNA, 19 nt, Artificial Sequence
  Description of Artificial Sequence: Synthetic oligonucleotide
cucuagacucagccugucc

SEQ ID NO: 843317 - RNA, 19 nt, Artificial Sequence
  Description of Artificial Sequence: Synthetic oligonucleotide
uccaacacgucagcucagc

SEQ ID NO: 843318 - RNA, 19 nt, Artificial Sequence
  Description of Artificial Sequence: Synthetic oligonucleotide
gaaauagcugcagugcuau

SEQ ID NO: 843319 - RNA, 19 nt, Artificial Sequence
  Description of Artificial Sequence: Synthetic oligonucleotide
ccacauggacuuuagcuug

SEQ ID NO: 843320 - RNA, 19 nt, Artificial Sequence
  Description of Artificial Sequence: Synthetic oligonucleotide
cuaagggacaacacacuua

SEQ ID NO: 843321 - RNA, 19 nt, Artificial Sequence
  Description of Artificial Sequence: Synthetic oligonucleotide
aaucugaaugagagucaga

SEQ ID NO: 843322 - RNA, 19 nt, Artificial Sequence
  Description of Artificial Sequence: Synthetic oligonucleotide
guuaggugggcacuguggu

SEQ ID NO: 843323 - RNA, 19 nt, Artificial Sequence
  Description of Artificial Sequence: Synthetic oligonucleotide
cuaccacaccgcucuagac

SEQ ID NO: 843324 - RNA, 19 nt, Artificial Sequence
  Description of Artificial Sequence: Synthetic oligonucleotide
aggcccauccaaucugcug

SEQ ID NO: 843325 - RNA, 19 nt, Artificial Sequence
  Description of Artificial Sequence: Synthetic oligonucleotide
aggaccgggacugugcagu

SEQ ID NO: 843326 - RNA, 19 nt, Artificial Sequence
  Description of Artificial Sequence: Synthetic oligonucleotide
accgcucuagacucagccu

SEQ ID NO: 843327 - RNA, 19 nt, Artificial Sequence
  Description of Artificial Sequence: Synthetic oligonucleotide
cucucucagggagaauacc

SEQ ID NO: 843328 - RNA, 19 nt, Artificial Sequence
  Description of Artificial Sequence: Synthetic oligonucleotide
gugcuauacagucuucucu

SEQ ID NO: 843329 - RNA, 19 nt, Artificial Sequence
  Description of Artificial Sequence: Synthetic oligonucleotide
uccucgccagucuccuccg

SEQ ID NO: 843330 - RNA, 19 nt, Artificial Sequence
  Description of Artificial Sequence: Synthetic oligonucleotide
gcaagaaugccacaugacu

SEQ ID NO: 843331 - RNA, 19 nt, Artificial Sequence
  Description of Artificial Sequence: Synthetic oligonucleotide
ucucgauaacaagcaggug

SEQ ID NO: 843332 - RNA, 19 nt, Artificial Sequence
  Description of Artificial Sequence: Synthetic oligonucleotide
caacauggcugggacacug

SEQ ID NO: 843333 - RNA, 19 nt, Artificial Sequence
  Description of Artificial Sequence: Synthetic oligonucleotide
agggauccugcucucucca

SEQ ID NO: 843334 - RNA, 19 nt, Artificial Sequence
  Description of Artificial Sequence: Synthetic oligonucleotide
acggaaacacuggaaucug

SEQ ID NO: 843335 - RNA, 19 nt, Artificial Sequence
  Description of Artificial Sequence: Synthetic oligonucleotide
cuacuuuugggucucuacu

SEQ ID NO: 843336 - RNA, 19 nt, Artificial Sequence
  Description of Artificial Sequence: Synthetic oligonucleotide
acauaucuauguacaacau

SEQ ID NO: 843337 - RNA, 19 nt, Artificial Sequence
  Description of Artificial Sequence: Synthetic oligonucleotide
ggguguagaaguuucaaau

SEQ ID NO: 843338 - RNA, 19 nt, Artificial Sequence
  Description of Artificial Sequence: Synthetic oligonucleotide
ugggucucuacugggcuac

SEQ ID NO: 843339 - RNA, 19 nt, Artificial Sequence
  Description of Artificial Sequence: Synthetic oligonucleotide
aaugagagucaaggaguuu

SEQ ID NO: 843340 - RNA, 19 nt, Artificial Sequence
  Description of Artificial Sequence: Synthetic oligonucleotide
cacugugguuuuaggcaag

SEQ ID NO: 843341 - RNA, 19 nt, Artificial Sequence
  Description of Artificial Sequence: Synthetic oligonucleotide
ggacuugcuccucccaaag

SEQ ID NO: 843342 - RNA, 19 nt, Artificial Sequence
  Description of Artificial Sequence: Synthetic oligonucleotide
ccagacauucuacggaaac

SEQ ID NO: 843343 - RNA, 19 nt, Artificial Sequence
  Description of Artificial Sequence: Synthetic oligonucleotide
ccuacuuuugggucucuac

SEQ ID NO: 843344 - RNA, 19 nt, Artificial Sequence
  Description of Artificial Sequence: Synthetic oligonucleotide
uugggacacugaaccuacc

SEQ ID NO: 843345 - RNA, 19 nt, Artificial Sequence
  Description of Artificial Sequence: Synthetic oligonucleotide
gccaaacuagugaugacac

SEQ ID NO: 843346 - RNA, 19 nt, Artificial Sequence
  Description of Artificial Sequence: Synthetic oligonucleotide
ggggaagucagccggaaaa

SEQ ID NO: 843347 - RNA, 19 nt, Artificial Sequence
  Description of Artificial Sequence: Synthetic oligonucleotide
cuucccacauagcaaaacu

SEQ ID NO: 843348 - RNA, 19 nt, Artificial Sequence
  Description of Artificial Sequence: Synthetic oligonucleotide
agcgucuccuucacucuac

SEQ ID NO: 843349 - RNA, 19 nt, Artificial Sequence
  Description of Artificial Sequence: Synthetic oligonucleotide
aaauagcugcagugcuaua

SEQ ID NO: 843350 - RNA, 19 nt, Artificial Sequence
  Description of Artificial Sequence: Synthetic oligonucleotide
gcuaugaaaccuaugagau

SEQ ID NO: 843351 - RNA, 19 nt, Artificial Sequence
  Description of Artificial Sequence: Synthetic oligonucleotide
guccucucgauaacaagca

SEQ ID NO: 843352 - RNA, 19 nt, Artificial Sequence
  Description of Artificial Sequence: Synthetic oligonucleotide
uccaugccuuacauacauc

SEQ ID NO: 843353 - RNA, 19 nt, Artificial Sequence
  Description of Artificial Sequence: Synthetic oligonucleotide
accagugcggccagucagg

SEQ ID NO: 843354 - RNA, 19 nt, Artificial Sequence
  Description of Artificial Sequence: Synthetic oligonucleotide
cugucacuaugguugcuca

SEQ ID NO: 843355 - RNA, 19 nt, Artificial Sequence
  Description of Artificial Sequence: Synthetic oligonucleotide
cagcuagggucaacuguag

SEQ ID NO: 843356 - RNA, 19 nt, Artificial Sequence
  Description of Artificial Sequence: Synthetic oligonucleotide
agaaauagcugcagugcua

SEQ ID NO: 843357 - RNA, 19 nt, Artificial Sequence
  Description of Artificial Sequence: Synthetic oligonucleotide
gaggguguagaaguuucaa

SEQ ID NO: 843358 - RNA, 19 nt, Artificial Sequence
  Description of Artificial Sequence: Synthetic oligonucleotide
auuguccccuccccacaug

SEQ ID NO: 843359 - RNA, 19 nt, Artificial Sequence
  Description of Artificial Sequence: Synthetic oligonucleotide
cucagguccucucgauaac

SEQ ID NO: 843360 - RNA, 19 nt, Artificial Sequence
  Description of Artificial Sequence: Synthetic oligonucleotide
cgaagcacagagccuaagg

SEQ ID NO: 843361 - RNA, 19 nt, Artificial Sequence
  Description of Artificial Sequence: Synthetic oligonucleotide
agaccagugcggccaguca

SEQ ID NO: 843362 - RNA, 19 nt, Artificial Sequence
  Description of Artificial Sequence: Synthetic oligonucleotide
ggaaacggggacaaccuga

SEQ ID NO: 843363 - RNA, 19 nt, Artificial Sequence
  Description of Artificial Sequence: Synthetic oligonucleotide
cuagacucagccuguccaa

SEQ ID NO: 843364 - RNA, 19 nt, Artificial Sequence
  Description of Artificial Sequence: Synthetic oligonucleotide
gguuuuaggcaagcaaauc

SEQ ID NO: 843365 - RNA, 19 nt, Artificial Sequence
  Description of Artificial Sequence: Synthetic oligonucleotide
uguccccuccccacaugga

SEQ ID NO: 843366 - RNA, 19 nt, Artificial Sequence
  Description of Artificial Sequence: Synthetic oligonucleotide
agaaggcuaugaaaccuau

SEQ ID NO: 843367 - RNA, 19 nt, Artificial Sequence
  Description of Artificial Sequence: Synthetic oligonucleotide
cagagagcgucuccuucac

SEQ ID NO: 843368 - RNA, 19 nt, Artificial Sequence
  Description of Artificial Sequence: Synthetic oligonucleotide
gcgaggacuuucucugggg

SEQ ID NO: 843369 - RNA, 19 nt, Artificial Sequence
  Description of Artificial Sequence: Synthetic oligonucleotide
agucaggaggacagcauau

SEQ ID NO: 843370 - RNA, 19 nt, Artificial Sequence
  Description of Artificial Sequence: Synthetic oligonucleotide
acacacuuagaagcacaga

SEQ ID NO: 843371 - RNA, 19 nt, Artificial Sequence
  Description of Artificial Sequence: Synthetic oligonucleotide
ggcccuuaaaucucaaacu

SEQ ID NO: 843372 - RNA, 19 nt, Artificial Sequence
  Description of Artificial Sequence: Synthetic oligonucleotide
gugacgagcgaggacuuuc

SEQ ID NO: 843373 - RNA, 19 nt, Artificial Sequence
  Description of Artificial Sequence: Synthetic oligonucleotide
cagagccuaagggacaaca

SEQ ID NO: 843374 - RNA, 19 nt, Artificial Sequence
  Description of Artificial Sequence: Synthetic oligonucleotide
cacgucagcucagccuugg

SEQ ID NO: 843375 - RNA, 19 nt, Artificial Sequence
  Description of Artificial Sequence: Synthetic oligonucleotide
agcucugacuaggugccca

SEQ ID NO: 843376 - RNA, 19 nt, Artificial Sequence
  Description of Artificial Sequence: Synthetic oligonucleotide
agucagccggaaaagggaa

SEQ ID NO: 843377 - RNA, 19 nt, Artificial Sequence
  Description of Artificial Sequence: Synthetic oligonucleotide
guagcagcuagggucaacu

SEQ ID NO: 843378 - RNA, 19 nt, Artificial Sequence
  Description of Artificial Sequence: Synthetic oligonucleotide
ccuaugagauucugaagga

SEQ ID NO: 843379 - RNA, 19 nt, Artificial Sequence
  Description of Artificial Sequence: Synthetic oligonucleotide
agagagcgucuccuucacu

SEQ ID NO: 843380 - RNA, 19 nt, Artificial Sequence
  Description of Artificial Sequence: Synthetic oligonucleotide
cuggugacgagcgaggacu

SEQ ID NO: 843381 - RNA, 19 nt, Artificial Sequence
  Description of Artificial Sequence: Synthetic oligonucleotide
gcagagguuaggugggcac

SEQ ID NO: 843382 - RNA, 19 nt, Artificial Sequence
  Description of Artificial Sequence: Synthetic oligonucleotide
cacccucucuccagccucc

SEQ ID NO: 843383 - RNA, 19 nt, Artificial Sequence
  Description of Artificial Sequence: Synthetic oligonucleotide
gccuuacauacaucuuaag

SEQ ID NO: 843384 - RNA, 19 nt, Artificial Sequence
  Description of Artificial Sequence: Synthetic oligonucleotide
ccacgaugggaacacgaag

SEQ ID NO: 843385 - RNA, 19 nt, Artificial Sequence
  Description of Artificial Sequence: Synthetic oligonucleotide
cacaccgcucuagacucag

SEQ ID NO: 843386 - RNA, 19 nt, Artificial Sequence
  Description of Artificial Sequence: Synthetic oligonucleotide
ccgcucuagacucagccug

SEQ ID NO: 843387 - RNA, 19 nt, Artificial Sequence
  Description of Artificial Sequence: Synthetic oligonucleotide
gcccggggaagucagccgg

SEQ ID NO: 843388 - RNA, 19 nt, Artificial Sequence
  Description of Artificial Sequence: Synthetic oligonucleotide
uguagcagcuagggucaac

SEQ ID NO: 843389 - RNA, 19 nt, Artificial Sequence
  Description of Artificial Sequence: Synthetic oligonucleotide
caacacgucagcucagccu

SEQ ID NO: 843390 - RNA, 19 nt, Artificial Sequence
  Description of Artificial Sequence: Synthetic oligonucleotide
gucacuaugguugcucagu

SEQ ID NO: 843391 - RNA, 19 nt, Artificial Sequence
  Description of Artificial Sequence: Synthetic oligonucleotide
ggagacugacugcaucuuc

SEQ ID NO: 843392 - RNA, 19 nt, Artificial Sequence
  Description of Artificial Sequence: Synthetic oligonucleotide
acgaagcacagagccuaag

SEQ ID NO: 843393 - RNA, 19 nt, Artificial Sequence
  Description of Artificial Sequence: Synthetic oligonucleotide
cuacagugaggguguagaa

SEQ ID NO: 843394 - RNA, 19 nt, Artificial Sequence
  Description of Artificial Sequence: Synthetic oligonucleotide
gacauucuacggaaacacu

SEQ ID NO: 843395 - RNA, 19 nt, Artificial Sequence
  Description of Artificial Sequence: Synthetic oligonucleotide
uuugcccuuucuggagccu

SEQ ID NO: 843396 - RNA, 19 nt, Artificial Sequence
  Description of Artificial Sequence: Synthetic oligonucleotide
ccauccaaucugcugccag

SEQ ID NO: 843397 - RNA, 19 nt, Artificial Sequence
  Description of Artificial Sequence: Synthetic oligonucleotide
ggaaucuguaaaggggaga

SEQ ID NO: 843398 - RNA, 19 nt, Artificial Sequence
  Description of Artificial Sequence: Synthetic oligonucleotide
ggaguuuaggggccaggga

SEQ ID NO: 843399 - RNA, 19 nt, Artificial Sequence
  Description of Artificial Sequence: Synthetic oligonucleotide
gcacugugguuuuaggcaa

SEQ ID NO: 843400 - RNA, 19 nt, Artificial Sequence
  Description of Artificial Sequence: Synthetic oligonucleotide
gacuaggugcccauucccu

SEQ ID NO: 843401 - RNA, 19 nt, Artificial Sequence
  Description of Artificial Sequence: Synthetic oligonucleotide
uggugacgagcgaggacuu

SEQ ID NO: 843402 - RNA, 19 nt, Artificial Sequence
  Description of Artificial Sequence: Synthetic oligonucleotide
ccuauccaaucugaaugag

SEQ ID NO: 843403 - RNA, 19 nt, Artificial Sequence
  Description of Artificial Sequence: Synthetic oligonucleotide
gccggaaaagggaagggga

SEQ ID NO: 843404 - RNA, 19 nt, Artificial Sequence
  Description of Artificial Sequence: Synthetic oligonucleotide
ccaacacgucagcucagcc

SEQ ID NO: 843405 - RNA, 19 nt, Artificial Sequence
  Description of Artificial Sequence: Synthetic oligonucleotide
caggaccgggacugugcag

SEQ ID NO: 843406 - RNA, 19 nt, Artificial Sequence
  Description of Artificial Sequence: Synthetic oligonucleotide
gagcgucuccuucacucua

SEQ ID NO: 843407 - RNA, 19 nt, Artificial Sequence
  Description of Artificial Sequence: Synthetic oligonucleotide
cuaugaaaccuaugagauu

SEQ ID NO: 843408 - RNA, 19 nt, Artificial Sequence
  Description of Artificial Sequence: Synthetic oligonucleotide
caucugcuaaggaccagcu

SEQ ID NO: 843409 - RNA, 19 nt, Artificial Sequence
  Description of Artificial Sequence: Synthetic oligonucleotide
uccuacuuuugggucucua

SEQ ID NO: 843410 - RNA, 19 nt, Artificial Sequence
  Description of Artificial Sequence: Synthetic oligonucleotide
acaacauggcugggacacu

SEQ ID NO: 843411 - RNA, 19 nt, Artificial Sequence
  Description of Artificial Sequence: Synthetic oligonucleotide
uccgcaggguucucuucuu

SEQ ID NO: 843412 - RNA, 19 nt, Artificial Sequence
  Description of Artificial Sequence: Synthetic oligonucleotide
caucuuggcuuuggccaug

SEQ ID NO: 843413 - RNA, 19 nt, Artificial Sequence
  Description of Artificial Sequence: Synthetic oligonucleotide
cagugcggccagucaggag

SEQ ID NO: 843414 - RNA, 19 nt, Artificial Sequence
  Description of Artificial Sequence: Synthetic oligonucleotide
ggcaagcaaaucccuucuc

SEQ ID NO: 843415 - RNA, 19 nt, Artificial Sequence
  Description of Artificial Sequence: Synthetic oligonucleotide
ccccacauggacuuuagcu

SEQ ID NO: 843416 - RNA, 19 nt, Artificial Sequence
  Description of Artificial Sequence: Synthetic oligonucleotide
gaccgggacugugcagugc

SEQ ID NO: 843417 - RNA, 19 nt, Artificial Sequence
  Description of Artificial Sequence: Synthetic oligonucleotide
uggcaggaccgggacugug

SEQ ID NO: 843418 - RNA, 19 nt, Artificial Sequence
  Description of Artificial Sequence: Synthetic oligonucleotide
ggucucuacugggcuacag

SEQ ID NO: 843419 - RNA, 19 nt, Artificial Sequence
  Description of Artificial Sequence: Synthetic oligonucleotide
cacagagccuaagggacaa

SEQ ID NO: 843420 - RNA, 19 nt, Artificial Sequence
  Description of Artificial Sequence: Synthetic oligonucleotide
cuugagaagcagggcaaua

SEQ ID NO: 843421 - RNA, 19 nt, Artificial Sequence
  Description of Artificial Sequence: Synthetic oligonucleotide
cuuuuguccuaggcuggga

SEQ ID NO: 843422 - RNA, 19 nt, Artificial Sequence
  Description of Artificial Sequence: Synthetic oligonucleotide
cugaaggauggcccuuaaa

SEQ ID NO: 843423 - RNA, 19 nt, Artificial Sequence
  Description of Artificial Sequence: Synthetic oligonucleotide
ccaaccugcuccuauccaa

SEQ ID NO: 843424 - RNA, 19 nt, Artificial Sequence
  Description of Artificial Sequence: Synthetic oligonucleotide
gauggcccuuaaaucucaa

SEQ ID NO: 843425 - RNA, 19 nt, Artificial Sequence
  Description of Artificial Sequence: Synthetic oligonucleotide
gcuggugacgagcgaggac

SEQ ID NO: 843426 - RNA, 19 nt, Artificial Sequence
  Description of Artificial Sequence: Synthetic oligonucleotide
gguuaccccgcaagcuugc

SEQ ID NO: 843427 - RNA, 19 nt, Artificial Sequence
  Description of Artificial Sequence: Synthetic oligonucleotide
cagcagagguuaggugggc

SEQ ID NO: 843428 - RNA, 19 nt, Artificial Sequence
  Description of Artificial Sequence: Synthetic oligonucleotide
cacaugacugagccuauuu

SEQ ID NO: 843429 - RNA, 19 nt, Artificial Sequence
  Description of Artificial Sequence: Synthetic oligonucleotide
ugcccauucccugccuauu

SEQ ID NO: 843430 - RNA, 19 nt, Artificial Sequence
  Description of Artificial Sequence: Synthetic oligonucleotide
ccuaccacaccgcucuaga

SEQ ID NO: 843431 - RNA, 19 nt, Artificial Sequence
  Description of Artificial Sequence: Synthetic oligonucleotide
ucccugccuauuguauaua

SEQ ID NO: 843432 - RNA, 19 nt, Artificial Sequence
  Description of Artificial Sequence: Synthetic oligonucleotide
gcgucuccuucacucuacc

SEQ ID NO: 843433 - RNA, 19 nt, Artificial Sequence
  Description of Artificial Sequence: Synthetic oligonucleotide
ggauccugcucucuccacu

SEQ ID NO: 843434 - RNA, 19 nt, Artificial Sequence
  Description of Artificial Sequence: Synthetic oligonucleotide
gcuccuauccaaucugaau

SEQ ID NO: 843435 - RNA, 19 nt, Artificial Sequence
  Description of Artificial Sequence: Synthetic oligonucleotide
cacucagguccucucgaua

SEQ ID NO: 843436 - RNA, 19 nt, Artificial Sequence
  Description of Artificial Sequence: Synthetic oligonucleotide
caaccugcuccuauccaau

SEQ ID NO: 843437 - RNA, 19 nt, Artificial Sequence
  Description of Artificial Sequence: Synthetic oligonucleotide
accccgcaagcuugcuggu

SEQ ID NO: 843438 - RNA, 19 nt, Artificial Sequence
  Description of Artificial Sequence: Synthetic oligonucleotide
ccugagucaaaguacuuuu

SEQ ID NO: 843439 - RNA, 19 nt, Artificial Sequence
  Description of Artificial Sequence: Synthetic oligonucleotide
gcauuguccccuccccaca

SEQ ID NO: 843440 - RNA, 19 nt, Artificial Sequence
  Description of Artificial Sequence: Synthetic oligonucleotide
ggaccgggacugugcagug

SEQ ID NO: 843441 - RNA, 19 nt, Artificial Sequence
  Description of Artificial Sequence: Synthetic oligonucleotide
uuguagcagcuagggucaa

SEQ ID NO: 843442 - RNA, 19 nt, Artificial Sequence
  Description of Artificial Sequence: Synthetic oligonucleotide
cacgaagcacagagccuaa

SEQ ID NO: 843443 - RNA, 19 nt, Artificial Sequence
  Description of Artificial Sequence: Synthetic oligonucleotide
cccgcaagcuugcugguga

SEQ ID NO: 843444 - RNA, 19 nt, Artificial Sequence
  Description of Artificial Sequence: Synthetic oligonucleotide
caaacucgccagacauucu

SEQ ID NO: 843445 - RNA, 19 nt, Artificial Sequence
  Description of Artificial Sequence: Synthetic oligonucleotide
gggauccugcucucuccac

SEQ ID NO: 843446 - RNA, 19 nt, Artificial Sequence
  Description of Artificial Sequence: Synthetic oligonucleotide
gaggggaaacggggacaac

SEQ ID NO: 843447 - RNA, 19 nt, Artificial Sequence
  Description of Artificial Sequence: Synthetic oligonucleotide
ggauggcaagcugagcucu

SEQ ID NO: 843448 - RNA, 19 nt, Artificial Sequence
  Description of Artificial Sequence: Synthetic oligonucleotide
acacgucagcucagccuug

SEQ ID NO: 843449 - RNA, 19 nt, Artificial Sequence
  Description of Artificial Sequence: Synthetic oligonucleotide
cccugccuauuguauauaa

SEQ ID NO: 843450 - RNA, 19 nt, Artificial Sequence
  Description of Artificial Sequence: Synthetic oligonucleotide
ggaggaggccucacauuuc

SEQ ID NO: 843451 - RNA, 19 nt, Artificial Sequence
  Description of Artificial Sequence: Synthetic oligonucleotide
ggggaaacggggacaaccu

SEQ ID NO: 843452 - RNA, 19 nt, Artificial Sequence
  Description of Artificial Sequence: Synthetic oligonucleotide
gcacagagccuaagggaca

SEQ ID NO: 843453 - RNA, 19 nt, Artificial Sequence
  Description of Artificial Sequence: Synthetic oligonucleotide
cagagguuaggugggcacu

SEQ ID NO: 843454 - RNA, 19 nt, Artificial Sequence
  Description of Artificial Sequence: Synthetic oligonucleotide
ccuccaugccuuacauaca

SEQ ID NO: 843455 - RNA, 19 nt, Artificial Sequence
  Description of Artificial Sequence: Synthetic oligonucleotide
gccccuccucaaccuaagc

SEQ ID NO: 843456 - RNA, 19 nt, Artificial Sequence
  Description of Artificial Sequence: Synthetic oligonucleotide
ccuaagggacaacacacuu

SEQ ID NO: 843457 - RNA, 19 nt, Artificial Sequence
  Description of Artificial Sequence: Synthetic oligonucleotide
gucaggaggacagcauauu

SEQ ID NO: 843458 - RNA, 19 nt, Artificial Sequence
  Description of Artificial Sequence: Synthetic oligonucleotide
cgaugggaacacgaagcac

SEQ ID NO: 843459 - RNA, 19 nt, Artificial Sequence
  Description of Artificial Sequence: Synthetic oligonucleotide
gugcccauucccugccuau

SEQ ID NO: 843460 - RNA, 19 nt, Artificial Sequence
  Description of Artificial Sequence: Synthetic oligonucleotide
ccgcaagcuugcuggugac

SEQ ID NO: 843461 - RNA, 19 nt, Artificial Sequence
  Description of Artificial Sequence: Synthetic oligonucleotide
cuccugagucaaaguacuu

SEQ ID NO: 843462 - RNA, 19 nt, Artificial Sequence
  Description of Artificial Sequence: Synthetic oligonucleotide
cgcaagcuugcuggugacg

SEQ ID NO: 843463 - RNA, 19 nt, Artificial Sequence
  Description of Artificial Sequence: Synthetic oligonucleotide
gccuaagggacaacacacu

SEQ ID NO: 843464 - RNA, 19 nt, Artificial Sequence
  Description of Artificial Sequence: Synthetic oligonucleotide
caguaagauccaggccaaa

SEQ ID NO: 843465 - RNA, 19 nt, Artificial Sequence
  Description of Artificial Sequence: Synthetic oligonucleotide
cagcugguaggagcacuaa

SEQ ID NO: 843466 - RNA, 19 nt, Artificial Sequence
  Description of Artificial Sequence: Synthetic oligonucleotide
guuaccccgcaagcuugcu

SEQ ID NO: 843467 - RNA, 19 nt, Artificial Sequence
  Description of Artificial Sequence: Synthetic oligonucleotide
ccucaggcccauccaaucu

SEQ ID NO: 843468 - RNA, 19 nt, Artificial Sequence
  Description of Artificial Sequence: Synthetic oligonucleotide
cugggauauuuggccuuua

SEQ ID NO: 843469 - RNA, 19 nt, Artificial Sequence
  Description of Artificial Sequence: Synthetic oligonucleotide
gcucugacuaggugcccau

SEQ ID NO: 843470 - RNA, 19 nt, Artificial Sequence
  Description of Artificial Sequence: Synthetic oligonucleotide
ccaggaaaacggguagagu

SEQ ID NO: 843471 - RNA, 19 nt, Artificial Sequence
  Description of Artificial Sequence: Synthetic oligonucleotide
ccagugcggccagucagga

SEQ ID NO: 843472 - RNA, 19 nt, Artificial Sequence
  Description of Artificial Sequence: Synthetic oligonucleotide
ccccgcaagcuugcuggug

SEQ ID NO: 843473 - RNA, 19 nt, Artificial Sequence
  Description of Artificial Sequence: Synthetic oligonucleotide
gcugggauauuuggccuuu

SEQ ID NO: 843474 - RNA, 19 nt, Artificial Sequence
  Description of Artificial Sequence: Synthetic oligonucleotide
ccacaccgcucuagacuca

SEQ ID NO: 843475 - RNA, 19 nt, Artificial Sequence
  Description of Artificial Sequence: Synthetic oligonucleotide
cccggggaagucagccgga

SEQ ID NO: 843476 - RNA, 19 nt, Artificial Sequence
  Description of Artificial Sequence: Synthetic oligonucleotide
cggaaacacuggaaucugu

SEQ ID NO: 843477 - RNA, 19 nt, Artificial Sequence
  Description of Artificial Sequence: Synthetic oligonucleotide
ggggacaaccugagcugcu

SEQ ID NO: 843478 - RNA, 19 nt, Artificial Sequence
  Description of Artificial Sequence: Synthetic oligonucleotide
ccuccccacauggacuuua

SEQ ID NO: 843479 - RNA, 19 nt, Artificial Sequence
  Description of Artificial Sequence: Synthetic oligonucleotide
cccauccaaucugcugcca

SEQ ID NO: 843480 - RNA, 19 nt, Artificial Sequence
  Description of Artificial Sequence: Synthetic oligonucleotide
cucugacuaggugcccauu

SEQ ID NO: 843481 - RNA, 19 nt, Artificial Sequence
  Description of Artificial Sequence: Synthetic oligonucleotide
ccuugagaagcagggcaau

SEQ ID NO: 843482 - RNA, 19 nt, Artificial Sequence
  Description of Artificial Sequence: Synthetic oligonucleotide
gccacaugacugagccuau

SEQ ID NO: 843483 - RNA, 19 nt, Artificial Sequence
  Description of Artificial Sequence: Synthetic oligonucleotide
cgauaacaagcagguggua

SEQ ID NO: 843484 - RNA, 19 nt, Artificial Sequence
  Description of Artificial Sequence: Synthetic oligonucleotide
ccggggaagucagccggaa

SEQ ID NO: 843485 - RNA, 19 nt, Artificial Sequence
  Description of Artificial Sequence: Synthetic oligonucleotide
ccacaugacugagccuauu

SEQ ID NO: 843486 - RNA, 19 nt, Artificial Sequence
  Description of Artificial Sequence: Synthetic oligonucleotide
ucagugacaagaaagacag

SEQ ID NO: 843487 - RNA, 19 nt, Artificial Sequence
  Description of Artificial Sequence: Synthetic oligonucleotide
ugaacauuugaacaggagg

SEQ ID NO: 843488 - RNA, 19 nt, Artificial Sequence
  Description of Artificial Sequence: Synthetic oligonucleotide
aagguauuagcuugugucc

SEQ ID NO: 843489 - RNA, 19 nt, Artificial Sequence
  Description of Artificial Sequence: Synthetic oligonucleotide
aagaaagacagucugccag

SEQ ID NO: 843490 - RNA, 19 nt, Artificial Sequence
  Description of Artificial Sequence: Synthetic oligonucleotide
uucaaguacacauggacag

SEQ ID NO: 843491 - RNA, 19 nt, Artificial Sequence
  Description of Artificial Sequence: Synthetic oligonucleotide
cuaaugaacauuugaacag

SEQ ID NO: 843492 - RNA, 19 nt, Artificial Sequence
  Description of Artificial Sequence: Synthetic oligonucleotide
uguuucuccccuaugaggc

SEQ ID NO: 843493 - RNA, 19 nt, Artificial Sequence
  Description of Artificial Sequence: Synthetic oligonucleotide
agugacaagaaagacaguc

SEQ ID NO: 843494 - RNA, 19 nt, Artificial Sequence
  Description of Artificial Sequence: Synthetic oligonucleotide
gaagguauuagcuuguguc

SEQ ID NO: 843495 - RNA, 19 nt, Artificial Sequence
  Description of Artificial Sequence: Synthetic oligonucleotide
ucuuguaacuuucaaguac

SEQ ID NO: 843496 - RNA, 19 nt, Artificial Sequence
  Description of Artificial Sequence: Synthetic oligonucleotide
ugaggauagaagcucagcc

SEQ ID NO: 843497 - RNA, 19 nt, Artificial Sequence
  Description of Artificial Sequence: Synthetic oligonucleotide
acacauacaagccaccagg

SEQ ID NO: 843498 - RNA, 19 nt, Artificial Sequence
  Description of Artificial Sequence: Synthetic oligonucleotide
cauguuacaugcaagggag

SEQ ID NO: 843499 - RNA, 19 nt, Artificial Sequence
  Description of Artificial Sequence: Synthetic oligonucleotide
aagugugaagcgcagacug

SEQ ID NO: 843500 - RNA, 19 nt, Artificial Sequence
  Description of Artificial Sequence: Synthetic oligonucleotide
gauagcgugggacacagcc

SEQ ID NO: 843501 - RNA, 19 nt, Artificial Sequence
  Description of Artificial Sequence: Synthetic oligonucleotide
agcagauugcaccaucugc

SEQ ID NO: 843502 - RNA, 19 nt, Artificial Sequence
  Description of Artificial Sequence: Synthetic oligonucleotide
uauacagcucguuuaaucu

SEQ ID NO: 843503 - RNA, 19 nt, Artificial Sequence
  Description of Artificial Sequence: Synthetic oligonucleotide
uccuggacgagcaaugggg

SEQ ID NO: 843504 - RNA, 19 nt, Artificial Sequence
  Description of Artificial Sequence: Synthetic oligonucleotide
caugaagcauccuugcugg

SEQ ID NO: 843505 - RNA, 19 nt, Artificial Sequence
  Description of Artificial Sequence: Synthetic oligonucleotide
caacauguuacaugcaagg

SEQ ID NO: 843506 - RNA, 19 nt, Artificial Sequence
  Description of Artificial Sequence: Synthetic oligonucleotide
cauacaagccaccaggagc

SEQ ID NO: 843507 - RNA, 19 nt, Artificial Sequence
  Description of Artificial Sequence: Synthetic oligonucleotide
aaagaagcgcugaagccgc

SEQ ID NO: 843508 - RNA, 19 nt, Artificial Sequence
  Description of Artificial Sequence: Synthetic oligonucleotide
aacauuugaacaggaggac

SEQ ID NO: 843509 - RNA, 19 nt, Artificial Sequence
  Description of Artificial Sequence: Synthetic oligonucleotide
aacauguuacaugcaaggg

SEQ ID NO: 843510 - RNA, 19 nt, Artificial Sequence
  Description of Artificial Sequence: Synthetic oligonucleotide
aaacgcaagugugaagcgc

SEQ ID NO: 843511 - RNA, 19 nt, Artificial Sequence
  Description of Artificial Sequence: Synthetic oligonucleotide
uguuauuuuccacccacac

SEQ ID NO: 843512 - RNA, 19 nt, Artificial Sequence
  Description of Artificial Sequence: Synthetic oligonucleotide
uuccuagagaucaggaggc

SEQ ID NO: 843513 - RNA, 19 nt, Artificial Sequence
  Description of Artificial Sequence: Synthetic oligonucleotide
aaaggacuagcagaccugg

SEQ ID NO: 843514 - RNA, 19 nt, Artificial Sequence
  Description of Artificial Sequence: Synthetic oligonucleotide
aaaagcucgcuuuggcuug

SEQ ID NO: 843515 - RNA, 19 nt, Artificial Sequence
  Description of Artificial Sequence: Synthetic oligonucleotide
aacaggaggacuguuucuc

SEQ ID NO: 843516 - RNA, 19 nt, Artificial Sequence
  Description of Artificial Sequence: Synthetic oligonucleotide
uuauacagcucguuuaauc

SEQ ID NO: 843517 - RNA, 19 nt, Artificial Sequence
  Description of Artificial Sequence: Synthetic oligonucleotide
aguugcaccagucugcaca

SEQ ID NO: 843518 - RNA, 19 nt, Artificial Sequence
  Description of Artificial Sequence: Synthetic oligonucleotide
uuagcuuguguccacccug

SEQ ID NO: 843519 - RNA, 19 nt, Artificial Sequence
  Description of Artificial Sequence: Synthetic oligonucleotide
gaaagucuccgcucaaugc

SEQ ID NO: 843520 - RNA, 19 nt, Artificial Sequence
  Description of Artificial Sequence: Synthetic oligonucleotide
acauguuacaugcaaggga

SEQ ID NO: 843521 - RNA, 19 nt, Artificial Sequence
  Description of Artificial Sequence: Synthetic oligonucleotide
uuuaaucugcgcaccaccu

SEQ ID NO: 843522 - RNA, 19 nt, Artificial Sequence
  Description of Artificial Sequence: Synthetic oligonucleotide
agacugacaggagagcucc

SEQ ID NO: 843523 - RNA, 19 nt, Artificial Sequence
  Description of Artificial Sequence: Synthetic oligonucleotide
aaauugacaggggcugagc

SEQ ID NO: 843524 - RNA, 19 nt, Artificial Sequence
  Description of Artificial Sequence: Synthetic oligonucleotide
uugcauauguuauuuucca

SEQ ID NO: 843525 - RNA, 19 nt, Artificial Sequence
  Description of Artificial Sequence: Synthetic oligonucleotide
ucaauggcagucuguaggc

SEQ ID NO: 843526 - RNA, 19 nt, Artificial Sequence
  Description of Artificial Sequence: Synthetic oligonucleotide
gaacuugcugugcaaacgc

SEQ ID NO: 843527 - RNA, 19 nt, Artificial Sequence
  Description of Artificial Sequence: Synthetic oligonucleotide
ucuggauuccaguuggcca

SEQ ID NO: 843528 - RNA, 19 nt, Artificial Sequence
  Description of Artificial Sequence: Synthetic oligonucleotide
auggcugaggauaagccgc

SEQ ID NO: 843529 - RNA, 19 nt, Artificial Sequence
  Description of Artificial Sequence: Synthetic oligonucleotide
gacaccguggaucccaucc

SEQ ID NO: 843530 - RNA, 19 nt, Artificial Sequence
  Description of Artificial Sequence: Synthetic oligonucleotide
uacaguaccagcuguucug

SEQ ID NO: 843531 - RNA, 19 nt, Artificial Sequence
  Description of Artificial Sequence: Synthetic oligonucleotide
ucugcaucuguacagcauc

SEQ ID NO: 843532 - RNA, 19 nt, Artificial Sequence
  Description of Artificial Sequence: Synthetic oligonucleotide
cauggcugaggauaagccg

SEQ ID NO: 843533 - RNA, 19 nt, Artificial Sequence
  Description of Artificial Sequence: Synthetic oligonucleotide
ugaacaggaggacuguuuc

SEQ ID NO: 843534 - RNA, 19 nt, Artificial Sequence
  Description of Artificial Sequence: Synthetic oligonucleotide
aggaagcaagaguugcacc

SEQ ID NO: 843535 - RNA, 19 nt, Artificial Sequence
  Description of Artificial Sequence: Synthetic oligonucleotide
acuuugccuguccacaggg

SEQ ID NO: 843536 - RNA, 19 nt, Artificial Sequence
  Description of Artificial Sequence: Synthetic oligonucleotide
cuuguaacuuucaaguaca

SEQ ID NO: 843537 - RNA, 19 nt, Artificial Sequence
  Description of Artificial Sequence: Synthetic oligonucleotide
uacacguagacauggucug

SEQ ID NO: 843538 - RNA, 19 nt, Artificial Sequence
  Description of Artificial Sequence: Synthetic oligonucleotide
uccccuaugaggcaagccu

SEQ ID NO: 843539 - RNA, 19 nt, Artificial Sequence
  Description of Artificial Sequence: Synthetic oligonucleotide
agggcuuugugauagcgug

SEQ ID NO: 843540 - RNA, 19 nt, Artificial Sequence
  Description of Artificial Sequence: Synthetic oligonucleotide
uccggugacuuacaaagcu

SEQ ID NO: 843541 - RNA, 19 nt, Artificial Sequence
  Description of Artificial Sequence: Synthetic oligonucleotide
aagcgcugaagccgcaaac

SEQ ID NO: 843542 - RNA, 19 nt, Artificial Sequence
  Description of Artificial Sequence: Synthetic oligonucleotide
cacugggcuauuuauacac

SEQ ID NO: 843543 - RNA, 19 nt, Artificial Sequence
  Description of Artificial Sequence: Synthetic oligonucleotide
guuuaaucugcgcaccacc

SEQ ID NO: 843544 - RNA, 19 nt, Artificial Sequence
  Description of Artificial Sequence: Synthetic oligonucleotide
aagucagcaacagucucag

SEQ ID NO: 843545 - RNA, 19 nt, Artificial Sequence
  Description of Artificial Sequence: Synthetic oligonucleotide
agcacagacccugaaggcc

SEQ ID NO: 843546 - RNA, 19 nt, Artificial Sequence
  Description of Artificial Sequence: Synthetic oligonucleotide
agcucguuuaaucugcgca

SEQ ID NO: 843547 - RNA, 19 nt, Artificial Sequence
  Description of Artificial Sequence: Synthetic oligonucleotide
uaugaggcaagccuguguu

SEQ ID NO: 843548 - RNA, 19 nt, Artificial Sequence
  Description of Artificial Sequence: Synthetic oligonucleotide
gcuccggugacuuacaaag

SEQ ID NO: 843549 - RNA, 19 nt, Artificial Sequence
  Description of Artificial Sequence: Synthetic oligonucleotide
cugggaagguauuagcuug

SEQ ID NO: 843550 - RNA, 19 nt, Artificial Sequence
  Description of Artificial Sequence: Synthetic oligonucleotide
  modified_base (3)..(3): a, c, u, g, unknown or other
ucngcccugucccuaauga

SEQ ID NO: 843551 - RNA, 19 nt, Artificial Sequence
  Description of Artificial Sequence: Synthetic oligonucleotide
aaagacagucugccagguc

SEQ ID NO: 843552 - RNA, 19 nt, Artificial Sequence
  Description of Artificial Sequence: Synthetic oligonucleotide
gaagccgcaaacugaggcc

SEQ ID NO: 843553 - RNA, 19 nt, Artificial Sequence
  Description of Artificial Sequence: Synthetic oligonucleotide
gacuagcagaccugggagg

SEQ ID NO: 843554 - RNA, 19 nt, Artificial Sequence
  Description of Artificial Sequence: Synthetic oligonucleotide
uuaaucugcgcaccaccug

SEQ ID NO: 843555 - RNA, 19 nt, Artificial Sequence
  Description of Artificial Sequence: Synthetic oligonucleotide
gaggauaagccgcucagca

SEQ ID NO: 843556 - RNA, 19 nt, Artificial Sequence
  Description of Artificial Sequence: Synthetic oligonucleotide
agauugcaccaucugcacg

SEQ ID NO: 843557 - RNA, 19 nt, Artificial Sequence
  Description of Artificial Sequence: Synthetic oligonucleotide
uguuacaugcaagggaggu

SEQ ID NO: 843558 - RNA, 19 nt, Artificial Sequence
  Description of Artificial Sequence: Synthetic oligonucleotide
ucuagaaguagcagggcuu

SEQ ID NO: 843559 - RNA, 19 nt, Artificial Sequence
  Description of Artificial Sequence: Synthetic oligonucleotide
auacagcucguuuaaucug

SEQ ID NO: 843560 - RNA, 19 nt, Artificial Sequence
  Description of Artificial Sequence: Synthetic oligonucleotide
uauuagcuuguguccaccc

SEQ ID NO: 843561 - RNA, 19 nt, Artificial Sequence
  Description of Artificial Sequence: Synthetic oligonucleotide
acaguuugcacuuggcaau

SEQ ID NO: 843562 - RNA, 19 nt, Artificial Sequence
  Description of Artificial Sequence: Synthetic oligonucleotide
ugugcucuugcuccaugag

SEQ ID NO: 843563 - RNA, 19 nt, Artificial Sequence
  Description of Artificial Sequence: Synthetic oligonucleotide
cuggauuccaguuggccac

SEQ ID NO: 843564 - RNA, 19 nt, Artificial Sequence
  Description of Artificial Sequence: Synthetic oligonucleotide
ugcauauguuauuuuccac

SEQ ID NO: 843565 - RNA, 19 nt, Artificial Sequence
  Description of Artificial Sequence: Synthetic oligonucleotide
gaaguagcagggcuuugug

SEQ ID NO: 843566 - RNA, 19 nt, Artificial Sequence
  Description of Artificial Sequence: Synthetic oligonucleotide
aguacaguaccagcuguuc

SEQ ID NO: 843567 - RNA, 19 nt, Artificial Sequence
  Description of Artificial Sequence: Synthetic oligonucleotide
aucagugacaagaaagaca

SEQ ID NO: 843568 - RNA, 19 nt, Artificial Sequence
  Description of Artificial Sequence: Synthetic oligonucleotide
aagucuccgcucaaugcac

SEQ ID NO: 843569 - RNA, 19 nt, Artificial Sequence
  Description of Artificial Sequence: Synthetic oligonucleotide
cucaacugacugauccugg

SEQ ID NO: 843570 - RNA, 19 nt, Artificial Sequence
  Description of Artificial Sequence: Synthetic oligonucleotide
aagcgcagacuguguaggg

SEQ ID NO: 843571 - RNA, 19 nt, Artificial Sequence
  Description of Artificial Sequence: Synthetic oligonucleotide
caaacgcaagugugaagcg

SEQ ID NO: 843572 - RNA, 19 nt, Artificial Sequence
  Description of Artificial Sequence: Synthetic oligonucleotide
aaccaggugguagguaggg

SEQ ID NO: 843573 - RNA, 19 nt, Artificial Sequence
  Description of Artificial Sequence: Synthetic oligonucleotide
aacgcaagugugaagcgca

SEQ ID NO: 843574 - RNA, 19 nt, Artificial Sequence
  Description of Artificial Sequence: Synthetic oligonucleotide
acaacauguuacaugcaag

SEQ ID NO: 843575 - RNA, 19 nt, Artificial Sequence
  Description of Artificial Sequence: Synthetic oligonucleotide
aggacuagcagaccuggga

SEQ ID NO: 843576 - RNA, 19 nt, Artificial Sequence
  Description of Artificial Sequence: Synthetic oligonucleotide
ugacuagggaggaggcuag

SEQ ID NO: 843577 - RNA, 19 nt, Artificial Sequence
  Description of Artificial Sequence: Synthetic oligonucleotide
gagacuggcaaccuaggaa

SEQ ID NO: 843578 - RNA, 19 nt, Artificial Sequence
  Description of Artificial Sequence: Synthetic oligonucleotide
cagucuguaggccugagga

SEQ ID NO: 843579 - RNA, 19 nt, Artificial Sequence
  Description of Artificial Sequence: Synthetic oligonucleotide
uggcuugaagucagcaaca

SEQ ID NO: 843580 - RNA, 19 nt, Artificial Sequence
  Description of Artificial Sequence: Synthetic oligonucleotide
aggauaagccgcucagcag

SEQ ID NO: 843581 - RNA, 19 nt, Artificial Sequence
  Description of Artificial Sequence: Synthetic oligonucleotide
ucaacugacugauccuggu

SEQ ID NO: 843582 - RNA, 19 nt, Artificial Sequence
  Description of Artificial Sequence: Synthetic oligonucleotide
gacuuugccuguccacagg

SEQ ID NO: 843583 - RNA, 19 nt, Artificial Sequence
  Description of Artificial Sequence: Synthetic oligonucleotide
aggcuagucuuagagaucu

SEQ ID NO: 843584 - RNA, 19 nt, Artificial Sequence
  Description of Artificial Sequence: Synthetic oligonucleotide
caugagggucucuucuggg

SEQ ID NO: 843585 - RNA, 19 nt, Artificial Sequence
  Description of Artificial Sequence: Synthetic oligonucleotide
uggguagccucagagggag

SEQ ID NO: 843586 - RNA, 19 nt, Artificial Sequence
  Description of Artificial Sequence: Synthetic oligonucleotide
uggcaaccuaggaagcaag

SEQ ID NO: 843587 - RNA, 19 nt, Artificial Sequence
  Description of Artificial Sequence: Synthetic oligonucleotide
cuacccugcagguuagcag

SEQ ID NO: 843588 - RNA, 19 nt, Artificial Sequence
  Description of Artificial Sequence: Synthetic oligonucleotide
guugcaccagucugcacag

SEQ ID NO: 843589 - RNA, 19 nt, Artificial Sequence
  Description of Artificial Sequence: Synthetic oligonucleotide
ugcacaguuugcacuuggc

SEQ ID NO: 843590 - RNA, 19 nt, Artificial Sequence
  Description of Artificial Sequence: Synthetic oligonucleotide
auuagcuuguguccacccu

SEQ ID NO: 843591 - RNA, 19 nt, Artificial Sequence
  Description of Artificial Sequence: Synthetic oligonucleotide
cugaggauaagccgcucag

SEQ ID NO: 843592 - RNA, 19 nt, Artificial Sequence
  Description of Artificial Sequence: Synthetic oligonucleotide
gacaagcuucagcacagac

SEQ ID NO: 843593 - RNA, 19 nt, Artificial Sequence
  Description of Artificial Sequence: Synthetic oligonucleotide
caaaggacuagcagaccug

SEQ ID NO: 843594 - RNA, 19 nt, Artificial Sequence
  Description of Artificial Sequence: Synthetic oligonucleotide
gaggucauggggugacuag

SEQ ID NO: 843595 - RNA, 19 nt, Artificial Sequence
  Description of Artificial Sequence: Synthetic oligonucleotide
ggagccauuaggaaccagg

SEQ ID NO: 843596 - RNA, 19 nt, Artificial Sequence
  Description of Artificial Sequence: Synthetic oligonucleotide
ucguuuaaucugcgcacca

SEQ ID NO: 843597 - RNA, 19 nt, Artificial Sequence
  Description of Artificial Sequence: Synthetic oligonucleotide
auagcgugggacacagccc

SEQ ID NO: 843598 - RNA, 19 nt, Artificial Sequence
  Description of Artificial Sequence: Synthetic oligonucleotide
ggcucuggauuccaguugg

SEQ ID NO: 843599 - RNA, 19 nt, Artificial Sequence
  Description of Artificial Sequence: Synthetic oligonucleotide
gauaugcucagaaacuucu

SEQ ID NO: 843600 - RNA, 19 nt, Artificial Sequence
  Description of Artificial Sequence: Synthetic oligonucleotide
gguuccuagagaucaggag

SEQ ID NO: 843601 - RNA, 19 nt, Artificial Sequence
  Description of Artificial Sequence: Synthetic oligonucleotide
agucucagcaccaucacau

SEQ ID NO: 843602 - RNA, 19 nt, Artificial Sequence
  Description of Artificial Sequence: Synthetic oligonucleotide
ugcaaacgcaagugugaag

SEQ ID NO: 843603 - RNA, 19 nt, Artificial Sequence
  Description of Artificial Sequence: Synthetic oligonucleotide
acacaugccugccaaggga

SEQ ID NO: 843604 - RNA, 19 nt, Artificial Sequence
  Description of Artificial Sequence: Synthetic oligonucleotide
uaagccgcucagcagugac

SEQ ID NO: 843605 - RNA, 19 nt, Artificial Sequence
  Description of Artificial Sequence: Synthetic oligonucleotide
uccaccuaccagagacugg

SEQ ID NO: 843606 - RNA, 19 nt, Artificial Sequence
  Description of Artificial Sequence: Synthetic oligonucleotide
aaggaagcuuucccuggca

SEQ ID NO: 843607 - RNA, 19 nt, Artificial Sequence
  Description of Artificial Sequence: Synthetic oligonucleotide
cacacauacaagccaccag

SEQ ID NO: 843608 - RNA, 19 nt, Artificial Sequence
  Description of Artificial Sequence: Synthetic oligonucleotide
agccgcucagcagugacac

SEQ ID NO: 843609 - RNA, 19 nt, Artificial Sequence
  Description of Artificial Sequence: Synthetic oligonucleotide
auuccacucagcagggccg

SEQ ID NO: 843610 - RNA, 19 nt, Artificial Sequence
  Description of Artificial Sequence: Synthetic oligonucleotide
ugucccuaaugaacauuug

SEQ ID NO: 843611 - RNA, 19 nt, Artificial Sequence
  Description of Artificial Sequence: Synthetic oligonucleotide
caccaugaagcauccuugc

SEQ ID NO: 843612 - RNA, 19 nt, Artificial Sequence
  Description of Artificial Sequence: Synthetic oligonucleotide
gucccuaaugaacauuuga

SEQ ID NO: 843613 - RNA, 19 nt, Artificial Sequence
  Description of Artificial Sequence: Synthetic oligonucleotide
acauuugaacaggaggacu

SEQ ID NO: 843614 - RNA, 19 nt, Artificial Sequence
  Description of Artificial Sequence: Synthetic oligonucleotide
acauuuugcauauguuauu

SEQ ID NO: 843615 - RNA, 19 nt, Artificial Sequence
  Description of Artificial Sequence: Synthetic oligonucleotide
cuugccagcucggaucugg

SEQ ID NO: 843616 - RNA, 19 nt, Artificial Sequence
  Description of Artificial Sequence: Synthetic oligonucleotide
ggacuagcagaccugggag

SEQ ID NO: 843617 - RNA, 19 nt, Artificial Sequence
  Description of Artificial Sequence: Synthetic oligonucleotide
auggacagagcagugacaa

SEQ ID NO: 843618 - RNA, 19 nt, Artificial Sequence
  Description of Artificial Sequence: Synthetic oligonucleotide
ugggaagguauuagcuugu

SEQ ID NO: 843619 - RNA, 19 nt, Artificial Sequence
  Description of Artificial Sequence: Synthetic oligonucleotide
gagcuugccagcucggauc

SEQ ID NO: 843620 - RNA, 19 nt, Artificial Sequence
  Description of Artificial Sequence: Synthetic oligonucleotide
guggguucccagcaguuug

SEQ ID NO: 843621 - RNA, 19 nt, Artificial Sequence
  Description of Artificial Sequence: Synthetic oligonucleotide
  modified_base (4)..(4): a, c, u, g, unknown or other
uucngcccugucccuaaug

SEQ ID NO: 843622 - RNA, 19 nt, Artificial Sequence
  Description of Artificial Sequence: Synthetic oligonucleotide
aggcaagccuguguuuucc

SEQ ID NO: 843623 - RNA, 19 nt, Artificial Sequence
  Description of Artificial Sequence: Synthetic oligonucleotide
gacugauccuggucggccc

SEQ ID NO: 843624 - RNA, 19 nt, Artificial Sequence
  Description of Artificial Sequence: Synthetic oligonucleotide
caaggaagcuuucccuggc

SEQ ID NO: 843625 - RNA, 19 nt, Artificial Sequence
  Description of Artificial Sequence: Synthetic oligonucleotide
ggacauuuugcauauguua

SEQ ID NO: 843626 - RNA, 19 nt, Artificial Sequence
  Description of Artificial Sequence: Synthetic oligonucleotide
ugcucaacugacugauccu

SEQ ID NO: 843627 - RNA, 19 nt, Artificial Sequence
  Description of Artificial Sequence: Synthetic oligonucleotide
ggcauuuugaccuccaccu

SEQ ID NO: 843628 - RNA, 19 nt, Artificial Sequence
  Description of Artificial Sequence: Synthetic oligonucleotide
ugaggauaagccgcucagc

SEQ ID NO: 843629 - RNA, 19 nt, Artificial Sequence
  Description of Artificial Sequence: Synthetic oligonucleotide
cucguuuaaucugcgcacc

SEQ ID NO: 843630 - RNA, 19 nt, Artificial Sequence
  Description of Artificial Sequence: Synthetic oligonucleotide
gcccucuagaaguagcagg

SEQ ID NO: 843631 - RNA, 19 nt, Artificial Sequence
  Description of Artificial Sequence: Synthetic oligonucleotide
agguuagcagcaggcauuc

SEQ ID NO: 843632 - RNA, 19 nt, Artificial Sequence
  Description of Artificial Sequence: Synthetic oligonucleotide
cccuaaugaacauuugaac

SEQ ID NO: 843633 - RNA, 19 nt, Artificial Sequence
  Description of Artificial Sequence: Synthetic oligonucleotide
agguauuagcuugugucca

SEQ ID NO: 843634 - RNA, 19 nt, Artificial Sequence
  Description of Artificial Sequence: Synthetic oligonucleotide
aggaggcuagucuuagaga

SEQ ID NO: 843635 - RNA, 19 nt, Artificial Sequence
  Description of Artificial Sequence: Synthetic oligonucleotide
cugaaaauugacaggggcu

SEQ ID NO: 843636 - RNA, 19 nt, Artificial Sequence
  Description of Artificial Sequence: Synthetic oligonucleotide
cuagagaucaggaggccaa

SEQ ID NO: 843637 - RNA, 19 nt, Artificial Sequence
  Description of Artificial Sequence: Synthetic oligonucleotide
acacguagacauggucugc

SEQ ID NO: 843638 - RNA, 19 nt, Artificial Sequence
  Description of Artificial Sequence: Synthetic oligonucleotide
agcaagaguugcaccaguc

SEQ ID NO: 843639 - RNA, 19 nt, Artificial Sequence
  Description of Artificial Sequence: Synthetic oligonucleotide
caguuugaacugcuggcug

SEQ ID NO: 843640 - RNA, 19 nt, Artificial Sequence
  Description of Artificial Sequence: Synthetic oligonucleotide
acuagggaggaggcuaguc

SEQ ID NO: 843641 - RNA, 19 nt, Artificial Sequence
  Description of Artificial Sequence: Synthetic oligonucleotide
accacgcuggccuuauaca

SEQ ID NO: 843642 - RNA, 19 nt, Artificial Sequence
  Description of Artificial Sequence: Synthetic oligonucleotide
aggacuuugccuguccaca

SEQ ID NO: 843643 - RNA, 19 nt, Artificial Sequence
  Description of Artificial Sequence: Synthetic oligonucleotide
gcagugacaccguggaucc

SEQ ID NO: 843644 - RNA, 19 nt, Artificial Sequence
  Description of Artificial Sequence: Synthetic oligonucleotide
gcaagugugaagcgcagac

SEQ ID NO: 843645 - RNA, 19 nt, Artificial Sequence
  Description of Artificial Sequence: Synthetic oligonucleotide
uggucugcaucuguacagc

SEQ ID NO: 843646 - RNA, 19 nt, Artificial Sequence
  Description of Artificial Sequence: Synthetic oligonucleotide
cucuggauuccaguuggcc

SEQ ID NO: 843647 - RNA, 19 nt, Artificial Sequence
  Description of Artificial Sequence: Synthetic oligonucleotide
acugggcuauuuauacacg

SEQ ID NO: 843648 - RNA, 19 nt, Artificial Sequence
  Description of Artificial Sequence: Synthetic oligonucleotide
gauaagccgcucagcagug

SEQ ID NO: 843649 - RNA, 19 nt, Artificial Sequence
  Description of Artificial Sequence: Synthetic oligonucleotide
cuaggaagcaagaguugca

SEQ ID NO: 843650 - RNA, 19 nt, Artificial Sequence
  Description of Artificial Sequence: Synthetic oligonucleotide
cugaggauagaagcucagc

SEQ ID NO: 843651 - RNA, 19 nt, Artificial Sequence
  Description of Artificial Sequence: Synthetic oligonucleotide
aaggacuagcagaccuggg

SEQ ID NO: 843652 - RNA, 19 nt, Artificial Sequence
  Description of Artificial Sequence: Synthetic oligonucleotide
gcugaagccgcaaacugag

SEQ ID NO: 843653 - RNA, 19 nt, Artificial Sequence
  Description of Artificial Sequence: Synthetic oligonucleotide
auccuggucggcccaccac

SEQ ID NO: 843654 - RNA, 19 nt, Artificial Sequence
  Description of Artificial Sequence: Synthetic oligonucleotide
uggacgagcaauggggcaa

SEQ ID NO: 843655 - RNA, 19 nt, Artificial Sequence
  Description of Artificial Sequence: Synthetic oligonucleotide
gugugaagcgcagacugug

SEQ ID NO: 843656 - RNA, 19 nt, Artificial Sequence
  Description of Artificial Sequence: Synthetic oligonucleotide
ggaacaucucauccagagc

SEQ ID NO: 843657 - RNA, 19 nt, Artificial Sequence
  Description of Artificial Sequence: Synthetic oligonucleotide
ggagccucgaaggucacag

SEQ ID NO: 843658 - RNA, 19 nt, Artificial Sequence
  Description of Artificial Sequence: Synthetic oligonucleotide
auucaggcacagauuccac

SEQ ID NO: 843659 - RNA, 19 nt, Artificial Sequence
  Description of Artificial Sequence: Synthetic oligonucleotide
ucggcccaccaccacuucc

SEQ ID NO: 843660 - RNA, 19 nt, Artificial Sequence
  Description of Artificial Sequence: Synthetic oligonucleotide
cagacugacaggagagcuc

SEQ ID NO: 843661 - RNA, 19 nt, Artificial Sequence
  Description of Artificial Sequence: Synthetic oligonucleotide
agagcuugccagcucggau

SEQ ID NO: 843662 - RNA, 19 nt, Artificial Sequence
  Description of Artificial Sequence: Synthetic oligonucleotide
cuccggugacuuacaaagc

SEQ ID NO: 843663 - RNA, 19 nt, Artificial Sequence
  Description of Artificial Sequence: Synthetic oligonucleotide
gcauaaagugcuccgguga

SEQ ID NO: 843664 - RNA, 19 nt, Artificial Sequence
  Description of Artificial Sequence: Synthetic oligonucleotide
agaguugcaccagucugca

SEQ ID NO: 843665 - RNA, 19 nt, Artificial Sequence
  Description of Artificial Sequence: Synthetic oligonucleotide
aucacaucagugacaagaa

SEQ ID NO: 843666 - RNA, 19 nt, Artificial Sequence
  Description of Artificial Sequence: Synthetic oligonucleotide
ugguagguagggaccccug

SEQ ID NO: 843667 - RNA, 19 nt, Artificial Sequence
  Description of Artificial Sequence: Synthetic oligonucleotide
cugaagccgcaaacugagg

SEQ ID NO: 843668 - RNA, 19 nt, Artificial Sequence
  Description of Artificial Sequence: Synthetic oligonucleotide
cugacaggagagcuccaug

SEQ ID NO: 843669 - RNA, 19 nt, Artificial Sequence
  Description of Artificial Sequence: Synthetic oligonucleotide
aggaagcuuucccuggcau

SEQ ID NO: 843670 - RNA, 19 nt, Artificial Sequence
  Description of Artificial Sequence: Synthetic oligonucleotide
auaugcucagaaacuucug

SEQ ID NO: 843671 - RNA, 19 nt, Artificial Sequence
  Description of Artificial Sequence: Synthetic oligonucleotide
ggucucagacccuacccug

SEQ ID NO: 843672 - RNA, 19 nt, Artificial Sequence
  Description of Artificial Sequence: Synthetic oligonucleotide
agcgcugaagccgcaaacu

SEQ ID NO: 843673 - RNA, 19 nt, Artificial Sequence
  Description of Artificial Sequence: Synthetic oligonucleotide
  modified_base (9)..(9): a, c, u, g, unknown or other
gcccuuucngcccuguccc

SEQ ID NO: 843674 - RNA, 19 nt, Artificial Sequence
  Description of Artificial Sequence: Synthetic oligonucleotide
cggugacuuacaaagcugg

SEQ ID NO: 843675 - RNA, 19 nt, Artificial Sequence
  Description of Artificial Sequence: Synthetic oligonucleotide
auaaagugcuccggugacu

SEQ ID NO: 843676 - RNA, 19 nt, Artificial Sequence
  Description of Artificial Sequence: Synthetic oligonucleotide
gguauuagcuuguguccac

SEQ ID NO: 843677 - RNA, 19 nt, Artificial Sequence
  Description of Artificial Sequence: Synthetic oligonucleotide
accguggaucccauccagc

SEQ ID NO: 843678 - RNA, 19 nt, Artificial Sequence
  Description of Artificial Sequence: Synthetic oligonucleotide
ggauaagccgcucagcagu

SEQ ID NO: 843679 - RNA, 19 nt, Artificial Sequence
  Description of Artificial Sequence: Synthetic oligonucleotide
guuacaugcaagggagguc

SEQ ID NO: 843680 - RNA, 19 nt, Artificial Sequence
  Description of Artificial Sequence: Synthetic oligonucleotide
gcaaccuaggaagcaagag

SEQ ID NO: 843681 - RNA, 19 nt, Artificial Sequence
  Description of Artificial Sequence: Synthetic oligonucleotide
gucuccgcucaaugcacag

SEQ ID NO: 843682 - RNA, 19 nt, Artificial Sequence
  Description of Artificial Sequence: Synthetic oligonucleotide
acagcucguuuaaucugcg

SEQ ID NO: 843683 - RNA, 19 nt, Artificial Sequence
  Description of Artificial Sequence: Synthetic oligonucleotide
ugcuccggugacuuacaaa

SEQ ID NO: 843684 - RNA, 19 nt, Artificial Sequence
  Description of Artificial Sequence: Synthetic oligonucleotide
uccuagagaucaggaggcc

SEQ ID NO: 843685 - RNA, 19 nt, Artificial Sequence
  Description of Artificial Sequence: Synthetic oligonucleotide
ggaagacaagcuucagcac

SEQ ID NO: 843686 - RNA, 19 nt, Artificial Sequence
  Description of Artificial Sequence: Synthetic oligonucleotide
caggcauucaggcacagau

SEQ ID NO: 843687 - RNA, 19 nt, Artificial Sequence
  Description of Artificial Sequence: Synthetic oligonucleotide
gcuuguguccacccuggag

SEQ ID NO: 843688 - RNA, 19 nt, Artificial Sequence
  Description of Artificial Sequence: Synthetic oligonucleotide
uagggaccccugcaccagc

SEQ ID NO: 843689 - RNA, 19 nt, Artificial Sequence
  Description of Artificial Sequence: Synthetic oligonucleotide
ccacgcuggccuuauacag

SEQ ID NO: 843690 - RNA, 19 nt, Artificial Sequence
  Description of Artificial Sequence: Synthetic oligonucleotide
guagccucagagggagagg

SEQ ID NO: 843691 - RNA, 19 nt, Artificial Sequence
  Description of Artificial Sequence: Synthetic oligonucleotide
auguuauuuuccacccaca

SEQ ID NO: 843692 - RNA, 19 nt, Artificial Sequence
  Description of Artificial Sequence: Synthetic oligonucleotide
caauggcagucuguaggcc

SEQ ID NO: 843693 - RNA, 19 nt, Artificial Sequence
  Description of Artificial Sequence: Synthetic oligonucleotide
gggaaggauaugcucagaa

SEQ ID NO: 843694 - RNA, 19 nt, Artificial Sequence
  Description of Artificial Sequence: Synthetic oligonucleotide
gaagcgcugaagccgcaaa

SEQ ID NO: 843695 - RNA, 19 nt, Artificial Sequence
  Description of Artificial Sequence: Synthetic oligonucleotide
cagcucguuuaaucugcgc

SEQ ID NO: 843696 - RNA, 19 nt, Artificial Sequence
  Description of Artificial Sequence: Synthetic oligonucleotide
aaagcucgcuuuggcuuga

SEQ ID NO: 843697 - RNA, 19 nt, Artificial Sequence
  Description of Artificial Sequence: Synthetic oligonucleotide
cacccuggagccuggaaga

SEQ ID NO: 843698 - RNA, 19 nt, Artificial Sequence
  Description of Artificial Sequence: Synthetic oligonucleotide
cucgaaggucacagcuccc

SEQ ID NO: 843699 - RNA, 19 nt, Artificial Sequence
  Description of Artificial Sequence: Synthetic oligonucleotide
ccaugagggucucuucugg

SEQ ID NO: 843700 - RNA, 19 nt, Artificial Sequence
  Description of Artificial Sequence: Synthetic oligonucleotide
gugacuagggaggaggcua

SEQ ID NO: 843701 - RNA, 19 nt, Artificial Sequence
  Description of Artificial Sequence: Synthetic oligonucleotide
ccuggacgagcaauggggc

SEQ ID NO: 843702 - RNA, 19 nt, Artificial Sequence
  Description of Artificial Sequence: Synthetic oligonucleotide
gcucaacugacugauccug

SEQ ID NO: 843703 - RNA, 19 nt, Artificial Sequence
  Description of Artificial Sequence: Synthetic oligonucleotide
caguuugcacuuggcaaug

SEQ ID NO: 843704 - RNA, 19 nt, Artificial Sequence
  Description of Artificial Sequence: Synthetic oligonucleotide
agguuccuagagaucagga

SEQ ID NO: 843705 - RNA, 19 nt, Artificial Sequence
  Description of Artificial Sequence: Synthetic oligonucleotide
ugauagcgugggacacagc

SEQ ID NO: 843706 - RNA, 19 nt, Artificial Sequence
  Description of Artificial Sequence: Synthetic oligonucleotide
accuaggaagcaagaguug

SEQ ID NO: 843707 - RNA, 19 nt, Artificial Sequence
  Description of Artificial Sequence: Synthetic oligonucleotide
caguuggccacaaagcaau

SEQ ID NO: 843708 - RNA, 19 nt, Artificial Sequence
  Description of Artificial Sequence: Synthetic oligonucleotide
uugcaccaucugcacggca

SEQ ID NO: 843709 - RNA, 19 nt, Artificial Sequence
  Description of Artificial Sequence: Synthetic oligonucleotide
agagguuccuagagaucag

SEQ ID NO: 843710 - RNA, 19 nt, Artificial Sequence
  Description of Artificial Sequence: Synthetic oligonucleotide
guacaguaccagcuguucu

SEQ ID NO: 843711 - RNA, 19 nt, Artificial Sequence
  Description of Artificial Sequence: Synthetic oligonucleotide
gucuguaggccugaggaua

SEQ ID NO: 843712 - RNA, 19 nt, Artificial Sequence
  Description of Artificial Sequence: Synthetic oligonucleotide
gucauggggugacuaggga

SEQ ID NO: 843713 - RNA, 19 nt, Artificial Sequence
  Description of Artificial Sequence: Synthetic oligonucleotide
cugggcuauuuauacacgu

SEQ ID NO: 843714 - RNA, 19 nt, Artificial Sequence
  Description of Artificial Sequence: Synthetic oligonucleotide
cacggcauggcugaggaua

SEQ ID NO: 843715 - RNA, 19 nt, Artificial Sequence
  Description of Artificial Sequence: Synthetic oligonucleotide
ggcuauuuauacacguaga

SEQ ID NO: 843716 - RNA, 19 nt, Artificial Sequence
  Description of Artificial Sequence: Synthetic oligonucleotide
gucaggagccucgaagguc

SEQ ID NO: 843717 - RNA, 19 nt, Artificial Sequence
  Description of Artificial Sequence: Synthetic oligonucleotide
caucaagcacaggaggcca

SEQ ID NO: 843718 - RNA, 19 nt, Artificial Sequence
  Description of Artificial Sequence: Synthetic oligonucleotide
gaggcuagucuuagagauc

SEQ ID NO: 843719 - RNA, 19 nt, Artificial Sequence
  Description of Artificial Sequence: Synthetic oligonucleotide
gagccucgaaggucacagc

SEQ ID NO: 843720 - RNA, 19 nt, Artificial Sequence
  Description of Artificial Sequence: Synthetic oligonucleotide
agcgcagacuguguagggu

SEQ ID NO: 843721 - RNA, 19 nt, Artificial Sequence
  Description of Artificial Sequence: Synthetic oligonucleotide
ccaucaagcacaggaggcc

SEQ ID NO: 843722 - RNA, 19 nt, Artificial Sequence
  Description of Artificial Sequence: Synthetic oligonucleotide
gauggcgucugggcacugc

SEQ ID NO: 843723 - RNA, 19 nt, Artificial Sequence
  Description of Artificial Sequence: Synthetic oligonucleotide
ucuccgcucaaugcacagu

SEQ ID NO: 843724 - RNA, 19 nt, Artificial Sequence
  Description of Artificial Sequence: Synthetic oligonucleotide
acguagacauggucugcau

SEQ ID NO: 843725 - RNA, 19 nt, Artificial Sequence
  Description of Artificial Sequence: Synthetic oligonucleotide
gagccauuaggaaccaggu

SEQ ID NO: 843726 - RNA, 19 nt, Artificial Sequence
  Description of Artificial Sequence: Synthetic oligonucleotide
gauccuggucggcccacca

SEQ ID NO: 843727 - RNA, 19 nt, Artificial Sequence
  Description of Artificial Sequence: Synthetic oligonucleotide
ggauaugcucagaaacuuc

SEQ ID NO: 843728 - RNA, 19 nt, Artificial Sequence
  Description of Artificial Sequence: Synthetic oligonucleotide
gccuuauacagcucguuua

SEQ ID NO: 843729 - RNA, 19 nt, Artificial Sequence
  Description of Artificial Sequence: Synthetic oligonucleotide
uagagaucaggaggccaaa

SEQ ID NO: 843730 - RNA, 19 nt, Artificial Sequence
  Description of Artificial Sequence: Synthetic oligonucleotide
gcucgcuuuggcuugaagu

SEQ ID NO: 843731 - RNA, 19 nt, Artificial Sequence
  Description of Artificial Sequence: Synthetic oligonucleotide
ucuccccuaugaggcaagc

SEQ ID NO: 843732 - RNA, 19 nt, Artificial Sequence
  Description of Artificial Sequence: Synthetic oligonucleotide
  modified_base (5)..(5): a, c, u, g, unknown or other
uuucngcccugucccuaau

SEQ ID NO: 843733 - RNA, 19 nt, Artificial Sequence
  Description of Artificial Sequence: Synthetic oligonucleotide
uccacccuggagccuggaa

SEQ ID NO: 843734 - RNA, 19 nt, Artificial Sequence
  Description of Artificial Sequence: Synthetic oligonucleotide
cucggugcuggaacaucuc

SEQ ID NO: 843735 - RNA, 19 nt, Artificial Sequence
  Description of Artificial Sequence: Synthetic oligonucleotide
cacguagacauggucugca

SEQ ID NO: 843736 - RNA, 19 nt, Artificial Sequence
  Description of Artificial Sequence: Synthetic oligonucleotide
ucgcuggcacuacccuuca

SEQ ID NO: 843737 - RNA, 19 nt, Artificial Sequence
  Description of Artificial Sequence: Synthetic oligonucleotide
  modified_base (6)..(6): a, c, u, g, unknown or other
cuuucngcccugucccuaa

SEQ ID NO: 843738 - RNA, 19 nt, Artificial Sequence
  Description of Artificial Sequence: Synthetic oligonucleotide
agcucggaucuggucaaug

SEQ ID NO: 843739 - RNA, 19 nt, Artificial Sequence
  Description of Artificial Sequence: Synthetic oligonucleotide
ugggaaggauaugcucaga

SEQ ID NO: 843740 - RNA, 19 nt, Artificial Sequence
  Description of Artificial Sequence: Synthetic oligonucleotide
cuggacgagcaauggggca

SEQ ID NO: 843741 - RNA, 19 nt, Artificial Sequence
  Description of Artificial Sequence: Synthetic oligonucleotide
gcgcugaagccgcaaacug

SEQ ID NO: 843742 - RNA, 19 nt, Artificial Sequence
  Description of Artificial Sequence: Synthetic oligonucleotide
ccggugacuuacaaagcug

SEQ ID NO: 843743 - RNA, 19 nt, Artificial Sequence
  Description of Artificial Sequence: Synthetic oligonucleotide
ccugaggauagaagcucag

SEQ ID NO: 843744 - RNA, 19 nt, Artificial Sequence
  Description of Artificial Sequence: Synthetic oligonucleotide
cuccccuaugaggcaagcc

SEQ ID NO: 843745 - RNA, 19 nt, Artificial Sequence
  Description of Artificial Sequence: Synthetic oligonucleotide
gcugaggauaagccgcuca

SEQ ID NO: 843746 - RNA, 19 nt, Artificial Sequence
  Description of Artificial Sequence: Synthetic oligonucleotide
ccccuaugaggcaagccug

SEQ ID NO: 843747 - RNA, 19 nt, Artificial Sequence
  Description of Artificial Sequence: Synthetic oligonucleotide
agccguuguuuguccaaaa

SEQ ID NO: 843748 - RNA, 19 nt, Artificial Sequence
  Description of Artificial Sequence: Synthetic oligonucleotide
ccuuauacagcucguuuaa

SEQ ID NO: 843749 - RNA, 19 nt, Artificial Sequence
  Description of Artificial Sequence: Synthetic oligonucleotide
uggggugacuagggaggag

SEQ ID NO: 843750 - RNA, 19 nt, Artificial Sequence
  Description of Artificial Sequence: Synthetic oligonucleotide
gggcuuugugauagcgugg

SEQ ID NO: 843751 - RNA, 19 nt, Artificial Sequence
  Description of Artificial Sequence: Synthetic oligonucleotide
caaucucccagaacuugcu

SEQ ID NO: 843752 - RNA, 19 nt, Artificial Sequence
  Description of Artificial Sequence: Synthetic oligonucleotide
gcgcagacuguguaggguc

SEQ ID NO: 843753 - RNA, 19 nt, Artificial Sequence
  Description of Artificial Sequence: Synthetic oligonucleotide
gaguugcaccagucugcac

SEQ ID NO: 843754 - RNA, 19 nt, Artificial Sequence
  Description of Artificial Sequence: Synthetic oligonucleotide
cgagcaauggggcaaguga

SEQ ID NO: 843755 - RNA, 19 nt, Artificial Sequence
  Description of Artificial Sequence: Synthetic oligonucleotide
agcuuguguccacccugga

SEQ ID NO: 843756 - RNA, 19 nt, Artificial Sequence
  Description of Artificial Sequence: Synthetic oligonucleotide
caaaaggccacacccuuuu

SEQ ID NO: 843757 - RNA, 19 nt, Artificial Sequence
  Description of Artificial Sequence: Synthetic oligonucleotide
ggccgaaagucuccgcuca

SEQ ID NO: 843758 - RNA, 19 nt, Artificial Sequence
  Description of Artificial Sequence: Synthetic oligonucleotide
agucuccgcucaaugcaca

SEQ ID NO: 843759 - RNA, 19 nt, Artificial Sequence
  Description of Artificial Sequence: Synthetic oligonucleotide
acgcaagugugaagcgcag

SEQ ID NO: 843760 - RNA, 19 nt, Artificial Sequence
  Description of Artificial Sequence: Synthetic oligonucleotide
auaagccgcucagcaguga

SEQ ID NO: 843761 - RNA, 19 nt, Artificial Sequence
  Description of Artificial Sequence: Synthetic oligonucleotide
gacagucugccaggucuca

SEQ ID NO: 843762 - RNA, 19 nt, Artificial Sequence
  Description of Artificial Sequence: Synthetic oligonucleotide
uccgugagugugugcugua

SEQ ID NO: 843763 - RNA, 19 nt, Artificial Sequence
  Description of Artificial Sequence: Synthetic oligonucleotide
aggauggcgucugggcacu

SEQ ID NO: 843764 - RNA, 19 nt, Artificial Sequence
  Description of Artificial Sequence: Synthetic oligonucleotide
cagggccgaaagucuccgc

SEQ ID NO: 843765 - RNA, 19 nt, Artificial Sequence
  Description of Artificial Sequence: Synthetic oligonucleotide
agacaagcuucagcacaga

SEQ ID NO: 843766 - RNA, 19 nt, Artificial Sequence
  Description of Artificial Sequence: Synthetic oligonucleotide
ggccugaggauagaagcuc

SEQ ID NO: 843767 - RNA, 19 nt, Artificial Sequence
  Description of Artificial Sequence: Synthetic oligonucleotide
aagcuuucccuggcauuuu

SEQ ID NO: 843768 - RNA, 19 nt, Artificial Sequence
  Description of Artificial Sequence: Synthetic oligonucleotide
ugugugcuguaggcccucu

SEQ ID NO: 843769 - RNA, 19 nt, Artificial Sequence
  Description of Artificial Sequence: Synthetic oligonucleotide
ucccuggcauuuugaccuc

SEQ ID NO: 843770 - RNA, 19 nt, Artificial Sequence
  Description of Artificial Sequence: Synthetic oligonucleotide
ggaagguauuagcuugugu

SEQ ID NO: 843771 - RNA, 19 nt, Artificial Sequence
  Description of Artificial Sequence: Synthetic oligonucleotide
ggcccucuagaaguagcag

SEQ ID NO: 843772 - RNA, 19 nt, Artificial Sequence
  Description of Artificial Sequence: Synthetic oligonucleotide
gagcagugacaaaggacua

SEQ ID NO: 843773 - RNA, 19 nt, Artificial Sequence
  Description of Artificial Sequence: Synthetic oligonucleotide
cugcaucuguacagcaucu

SEQ ID NO: 843774 - RNA, 19 nt, Artificial Sequence
  Description of Artificial Sequence: Synthetic oligonucleotide
acggcauggcugaggauaa

SEQ ID NO: 843775 - RNA, 19 nt, Artificial Sequence
  Description of Artificial Sequence: Synthetic oligonucleotide
gugcacacugggcuauuua

SEQ ID NO: 843776 - RNA, 19 nt, Artificial Sequence
  Description of Artificial Sequence: Synthetic oligonucleotide
cugcuucacaguagaugaa

SEQ ID NO: 843777 - RNA, 19 nt, Artificial Sequence
  Description of Artificial Sequence: Synthetic oligonucleotide
ggacgagcaauggggcaag

SEQ ID NO: 843778 - RNA, 19 nt, Artificial Sequence
  Description of Artificial Sequence: Synthetic oligonucleotide
gggaagguauuagcuugug

SEQ ID NO: 843779 - RNA, 19 nt, Artificial Sequence
  Description of Artificial Sequence: Synthetic oligonucleotide
ugacaccguggaucccauc

SEQ ID NO: 843780 - RNA, 19 nt, Artificial Sequence
  Description of Artificial Sequence: Synthetic oligonucleotide
  modified_base (2)..(2): a, c, u, g, unknown or other
cngcccugucccuaaugaa

SEQ ID NO: 843781 - RNA, 19 nt, Artificial Sequence
  Description of Artificial Sequence: Synthetic oligonucleotide
cuagaaguagcagggcuuu

SEQ ID NO: 843782 - RNA, 19 nt, Artificial Sequence
  Description of Artificial Sequence: Synthetic oligonucleotide
ccucuagaaguagcagggc

SEQ ID NO: 843783 - RNA, 19 nt, Artificial Sequence
  Description of Artificial Sequence: Synthetic oligonucleotide
agggucuccgugugcucuu

SEQ ID NO: 843784 - RNA, 19 nt, Artificial Sequence
  Description of Artificial Sequence: Synthetic oligonucleotide
cguagacauggucugcauc

SEQ ID NO: 843785 - RNA, 19 nt, Artificial Sequence
  Description of Artificial Sequence: Synthetic oligonucleotide
ggagagguuccuagagauc

SEQ ID NO: 843786 - RNA, 19 nt, Artificial Sequence
  Description of Artificial Sequence: Synthetic oligonucleotide
gcaagggaggucauggggu

SEQ ID NO: 843787 - RNA, 19 nt, Artificial Sequence
  Description of Artificial Sequence: Synthetic oligonucleotide
cacuacccuucagggcugc

SEQ ID NO: 843788 - RNA, 19 nt, Artificial Sequence
  Description of Artificial Sequence: Synthetic oligonucleotide
cuacccuucagggcugcaa

SEQ ID NO: 843789 - RNA, 19 nt, Artificial Sequence
  Description of Artificial Sequence: Synthetic oligonucleotide
caagugugaagcgcagacu

SEQ ID NO: 843790 - RNA, 19 nt, Artificial Sequence
  Description of Artificial Sequence: Synthetic oligonucleotide
ggucuccgugugcucuugc

SEQ ID NO: 843791 - RNA, 19 nt, Artificial Sequence
  Description of Artificial Sequence: Synthetic oligonucleotide
ggugguagguagggacccc

SEQ ID NO: 843792 - RNA, 19 nt, Artificial Sequence
  Description of Artificial Sequence: Synthetic oligonucleotide
agccuguguuuuccuccaa

SEQ ID NO: 843793 - RNA, 19 nt, Artificial Sequence
  Description of Artificial Sequence: Synthetic oligonucleotide
cagacccuacccugcaggu

SEQ ID NO: 843794 - RNA, 19 nt, Artificial Sequence
  Description of Artificial Sequence: Synthetic oligonucleotide
cguuuaaucugcgcaccac

SEQ ID NO: 843795 - RNA, 19 nt, Artificial Sequence
  Description of Artificial Sequence: Synthetic oligonucleotide
gccugaggauagaagcuca

SEQ ID NO: 843796 - RNA, 19 nt, Artificial Sequence
  Description of Artificial Sequence: Synthetic oligonucleotide
agacccuacccugcagguu

SEQ ID NO: 843797 - RNA, 19 nt, Artificial Sequence
  Description of Artificial Sequence: Synthetic oligonucleotide
cuuauacagcucguuuaau

SEQ ID NO: 843798 - RNA, 19 nt, Artificial Sequence
  Description of Artificial Sequence: Synthetic oligonucleotide
ccuagagaucaggaggcca

SEQ ID NO: 843799 - RNA, 19 nt, Artificial Sequence
  Description of Artificial Sequence: Synthetic oligonucleotide
aggagccucgaaggucaca

SEQ ID NO: 843800 - RNA, 19 nt, Artificial Sequence
  Description of Artificial Sequence: Synthetic oligonucleotide
cuggccuuauacagcucgu

SEQ ID NO: 843801 - RNA, 19 nt, Artificial Sequence
  Description of Artificial Sequence: Synthetic oligonucleotide
aguuggccacaaagcaaua

SEQ ID NO: 843802 - RNA, 19 nt, Artificial Sequence
  Description of Artificial Sequence: Synthetic oligonucleotide
guccgugagugugugcugu

SEQ ID NO: 843803 - RNA, 19 nt, Artificial Sequence
  Description of Artificial Sequence: Synthetic oligonucleotide
ccuaugaggcaagccugug

SEQ ID NO: 843804 - RNA, 19 nt, Artificial Sequence
  Description of Artificial Sequence: Synthetic oligonucleotide
gugcuccggugacuuacaa

SEQ ID NO: 843805 - RNA, 19 nt, Artificial Sequence
  Description of Artificial Sequence: Synthetic oligonucleotide
ggcgucugggcacugcccu

SEQ ID NO: 843806 - RNA, 19 nt, Artificial Sequence
  Description of Artificial Sequence: Synthetic oligonucleotide
cagugacaccguggauccc

SEQ ID NO: 843807 - RNA, 19 nt, Artificial Sequence
  Description of Artificial Sequence: Synthetic oligonucleotide
gugguagguagggaccccu

SEQ ID NO: 843808 - RNA, 19 nt, Artificial Sequence
  Description of Artificial Sequence: Synthetic oligonucleotide
ggaagcuuucccuggcauu

SEQ ID NO: 843809 - RNA, 19 nt, Artificial Sequence
  Description of Artificial Sequence: Synthetic oligonucleotide
gaggugcacacugggcuau

SEQ ID NO: 843810 - RNA, 19 nt, Artificial Sequence
  Description of Artificial Sequence: Synthetic oligonucleotide
cgcugaagccgcaaacuga

SEQ ID NO: 843811 - RNA, 19 nt, Artificial Sequence
  Description of Artificial Sequence: Synthetic oligonucleotide
ggaggucauggggugacua

SEQ ID NO: 843812 - RNA, 19 nt, Artificial Sequence
  Description of Artificial Sequence: Synthetic oligonucleotide
ccgugagugugugcuguag

SEQ ID NO: 843813 - RNA, 19 nt, Artificial Sequence
  Description of Artificial Sequence: Synthetic oligonucleotide
gcacacugggcuauuuaua

SEQ ID NO: 843814 - RNA, 19 nt, Artificial Sequence
  Description of Artificial Sequence: Synthetic oligonucleotide
ccugguccgugagugugug

SEQ ID NO: 843815 - RNA, 19 nt, Artificial Sequence
  Description of Artificial Sequence: Synthetic oligonucleotide
gucggcccaccaccacuuc

SEQ ID NO: 843816 - RNA, 19 nt, Artificial Sequence
  Description of Artificial Sequence: Synthetic oligonucleotide
gacaccacgcuggccuuau

SEQ ID NO: 843817 - RNA, 19 nt, Artificial Sequence
  Description of Artificial Sequence: Synthetic oligonucleotide
gggacauuuugcauauguu

SEQ ID NO: 843818 - RNA, 19 nt, Artificial Sequence
  Description of Artificial Sequence: Synthetic oligonucleotide
gugugcuguaggcccucua

SEQ ID NO: 843819 - RNA, 19 nt, Artificial Sequence
  Description of Artificial Sequence: Synthetic oligonucleotide
caggagccauuaggaacca

SEQ ID NO: 843820 - RNA, 19 nt, Artificial Sequence
  Description of Artificial Sequence: Synthetic oligonucleotide
ccagacugacaggagagcu

SEQ ID NO: 843821 - RNA, 19 nt, Artificial Sequence
  Description of Artificial Sequence: Synthetic oligonucleotide
cucagagggagagguuccu

SEQ ID NO: 843822 - RNA, 19 nt, Artificial Sequence
  Description of Artificial Sequence: Synthetic oligonucleotide
gccgcaaacugaggcccug

SEQ ID NO: 843823 - RNA, 19 nt, Artificial Sequence
  Description of Artificial Sequence: Synthetic oligonucleotide
gacuagggaggaggcuagu

SEQ ID NO: 843824 - RNA, 19 nt, Artificial Sequence
  Description of Artificial Sequence: Synthetic oligonucleotide
acaccacgcuggccuuaua

SEQ ID NO: 843825 - RNA, 19 nt, Artificial Sequence
  Description of Artificial Sequence: Synthetic oligonucleotide
gccgaaagucuccgcucaa

SEQ ID NO: 843826 - RNA, 19 nt, Artificial Sequence
  Description of Artificial Sequence: Synthetic oligonucleotide
cccuaugaggcaagccugu

SEQ ID NO: 843827 - RNA, 19 nt, Artificial Sequence
  Description of Artificial Sequence: Synthetic oligonucleotide
gacgagcaauggggcaagu

SEQ ID NO: 843828 - RNA, 19 nt, Artificial Sequence
  Description of Artificial Sequence: Synthetic oligonucleotide
  modified_base (7)..(7): a, c, u, g, unknown or other
ccuuucngcccugucccua

SEQ ID NO: 843829 - RNA, 19 nt, Artificial Sequence
  Description of Artificial Sequence: Synthetic oligonucleotide
gccccacacaugccugcca

SEQ ID NO: 843830 - RNA, 19 nt, Artificial Sequence
  Description of Artificial Sequence: Synthetic oligonucleotide
caccugcuucacaguagau

SEQ ID NO: 843831 - RNA, 19 nt, Artificial Sequence
  Description of Artificial Sequence: Synthetic oligonucleotide
cagguccaccaugaagcau

SEQ ID NO: 843832 - RNA, 19 nt, Artificial Sequence
  Description of Artificial Sequence: Synthetic oligonucleotide
cccuacccugcagguuagc

SEQ ID NO: 843833 - RNA, 19 nt, Artificial Sequence
  Description of Artificial Sequence: Synthetic oligonucleotide
ggucggcccaccaccacuu

SEQ ID NO: 843834 - RNA, 19 nt, Artificial Sequence
  Description of Artificial Sequence: Synthetic oligonucleotide
cgcagacuguguagggucu

SEQ ID NO: 843835 - RNA, 19 nt, Artificial Sequence
  Description of Artificial Sequence: Synthetic oligonucleotide
cgcaagugugaagcgcaga

SEQ ID NO: 843836 - RNA, 19 nt, Artificial Sequence
  Description of Artificial Sequence: Synthetic oligonucleotide
ggacaccacgcuggccuua

SEQ ID NO: 843837 - RNA, 19 nt, Artificial Sequence
  Description of Artificial Sequence: Synthetic oligonucleotide
ccgcaaacugaggcccuga

SEQ ID NO: 843838 - RNA, 19 nt, Artificial Sequence
  Description of Artificial Sequence: Synthetic oligonucleotide
ccucgcuggcacuacccuu

SEQ ID NO: 843839 - RNA, 19 nt, Artificial Sequence
  Description of Artificial Sequence: Synthetic oligonucleotide
  modified_base (8)..(8): a, c, u, g, unknown or other
cccuuucngcccugucccu

SEQ ID NO: 843840 - RNA, 19 nt, Artificial Sequence
  Description of Artificial Sequence: Synthetic oligonucleotide
ccgaaagucuccgcucaau

SEQ ID NO: 843841 - RNA, 19 nt, Artificial Sequence
  Description of Artificial Sequence: Synthetic oligonucleotide
ccccugccgccucgcuggc

SEQ ID NO: 843842 - RNA, 19 nt, Artificial Sequence
  Description of Artificial Sequence: Synthetic oligonucleotide
cagcucggaucuggucaau

SEQ ID NO: 843843 - RNA, 19 nt, Artificial Sequence
  Description of Artificial Sequence: Synthetic oligonucleotide
cccugccgccucgcuggca

SEQ ID NO: 843844 - RNA, 19 nt, Artificial Sequence
  Description of Artificial Sequence: Synthetic oligonucleotide
aagauaaauaucuuguucu

SEQ ID NO: 843845 - RNA, 19 nt, Artificial Sequence
  Description of Artificial Sequence: Synthetic oligonucleotide
acuuauuuuacacagagga

SEQ ID NO: 843846 - RNA, 19 nt, Artificial Sequence
  Description of Artificial Sequence: Synthetic oligonucleotide
ugaauuacaaaauaacaug

SEQ ID NO: 843847 - RNA, 19 nt, Artificial Sequence
  Description of Artificial Sequence: Synthetic oligonucleotide
ugcaagauagaauauagcc

SEQ ID NO: 843848 - RNA, 19 nt, Artificial Sequence
  Description of Artificial Sequence: Synthetic oligonucleotide
auagccagaggacauaucc

SEQ ID NO: 843849 - RNA, 19 nt, Artificial Sequence
  Description of Artificial Sequence: Synthetic oligonucleotide
aagguacaauuucagaggc

SEQ ID NO: 843850 - RNA, 19 nt, Artificial Sequence
  Description of Artificial Sequence: Synthetic oligonucleotide
uauacaaugcauacaggcg

SEQ ID NO: 843851 - RNA, 19 nt, Artificial Sequence
  Description of Artificial Sequence: Synthetic oligonucleotide
ucuauuguuaguuuauugc

SEQ ID NO: 843852 - RNA, 19 nt, Artificial Sequence
  Description of Artificial Sequence: Synthetic oligonucleotide
ucugcaguuauuaagccag

SEQ ID NO: 843853 - RNA, 19 nt, Artificial Sequence
  Description of Artificial Sequence: Synthetic oligonucleotide
guaauuaggaaacugcucc

SEQ ID NO: 843854 - RNA, 19 nt, Artificial Sequence
  Description of Artificial Sequence: Synthetic oligonucleotide
gaagguacaauuucagagg

SEQ ID NO: 843855 - RNA, 19 nt, Artificial Sequence
  Description of Artificial Sequence: Synthetic oligonucleotide
aaaagccgcuuacaaaacc

SEQ ID NO: 843856 - RNA, 19 nt, Artificial Sequence
  Description of Artificial Sequence: Synthetic oligonucleotide
aauugcaauauacaaugca

SEQ ID NO: 843857 - RNA, 19 nt, Artificial Sequence
  Description of Artificial Sequence: Synthetic oligonucleotide
ucucaagucagaauuaaca

SEQ ID NO: 843858 - RNA, 19 nt, Artificial Sequence
  Description of Artificial Sequence: Synthetic oligonucleotide
cuuguaauuaggaaacugc

SEQ ID NO: 843859 - RNA, 19 nt, Artificial Sequence
  Description of Artificial Sequence: Synthetic oligonucleotide
aaaucuagcuagcuuauca

SEQ ID NO: 843860 - RNA, 19 nt, Artificial Sequence
  Description of Artificial Sequence: Synthetic oligonucleotide
gaaggaaccagucccagcg

SEQ ID NO: 843861 - RNA, 19 nt, Artificial Sequence
  Description of Artificial Sequence: Synthetic oligonucleotide
uacuauacuguacaaagcu

SEQ ID NO: 843862 - RNA, 19 nt, Artificial Sequence
  Description of Artificial Sequence: Synthetic oligonucleotide
uuagucaagcgucaggaag

SEQ ID NO: 843863 - RNA, 19 nt, Artificial Sequence
  Description of Artificial Sequence: Synthetic oligonucleotide
uuaaccucugaauagccag

SEQ ID NO: 843864 - RNA, 19 nt, Artificial Sequence
  Description of Artificial Sequence: Synthetic oligonucleotide
uauuguuaguuuauugcag

SEQ ID NO: 843865 - RNA, 19 nt, Artificial Sequence
  Description of Artificial Sequence: Synthetic oligonucleotide
aaggaacccgaacacacac

SEQ ID NO: 843866 - RNA, 19 nt, Artificial Sequence
  Description of Artificial Sequence: Synthetic oligonucleotide
uuuggauagagcuaaacua

SEQ ID NO: 843867 - RNA, 19 nt, Artificial Sequence
  Description of Artificial Sequence: Synthetic oligonucleotide
aauuaacccagcugcuuac

SEQ ID NO: 843868 - RNA, 19 nt, Artificial Sequence
  Description of Artificial Sequence: Synthetic oligonucleotide
uaacauaaugacuuccucc

SEQ ID NO: 843869 - RNA, 19 nt, Artificial Sequence
  Description of Artificial Sequence: Synthetic oligonucleotide
acuaguggugcucucaaac

SEQ ID NO: 843870 - RNA, 19 nt, Artificial Sequence
  Description of Artificial Sequence: Synthetic oligonucleotide
aauuaggaaacugcucccc

SEQ ID NO: 843871 - RNA, 19 nt, Artificial Sequence
  Description of Artificial Sequence: Synthetic oligonucleotide
uauuaaaagggcaaacauc

SEQ ID NO: 843872 - RNA, 19 nt, Artificial Sequence
  Description of Artificial Sequence: Synthetic oligonucleotide
auuaacaccucaauuaguc

SEQ ID NO: 843873 - RNA, 19 nt, Artificial Sequence
  Description of Artificial Sequence: Synthetic oligonucleotide
aacaugagccauuuuauaa

SEQ ID NO: 843874 - RNA, 19 nt, Artificial Sequence
  Description of Artificial Sequence: Synthetic oligonucleotide
uuggauagagcuaaacuac

SEQ ID NO: 843875 - RNA, 19 nt, Artificial Sequence
  Description of Artificial Sequence: Synthetic oligonucleotide
gacguaaugaagcuuauga

SEQ ID NO: 843876 - RNA, 19 nt, Artificial Sequence
  Description of Artificial Sequence: Synthetic oligonucleotide
aauuagucaagcgucagga

SEQ ID NO: 843877 - RNA, 19 nt, Artificial Sequence
  Description of Artificial Sequence: Synthetic oligonucleotide
caguuauuaagccagccgg

SEQ ID NO: 843878 - RNA, 19 nt, Artificial Sequence
  Description of Artificial Sequence: Synthetic oligonucleotide
agcuuaugaacucacucac

SEQ ID NO: 843879 - RNA, 19 nt, Artificial Sequence
  Description of Artificial Sequence: Synthetic oligonucleotide
caucuuguaauuaggaaac

SEQ ID NO: 843880 - RNA, 19 nt, Artificial Sequence
  Description of Artificial Sequence: Synthetic oligonucleotide
cuauacuguacaaagcuac

SEQ ID NO: 843881 - RNA, 19 nt, Artificial Sequence
  Description of Artificial Sequence: Synthetic oligonucleotide
aaaugaacucuacccuuac

SEQ ID NO: 843882 - RNA, 19 nt, Artificial Sequence
  Description of Artificial Sequence: Synthetic oligonucleotide
agaacuguguacuaguggu

SEQ ID NO: 843883 - RNA, 19 nt, Artificial Sequence
  Description of Artificial Sequence: Synthetic oligonucleotide
ugauuuugcuuaaccaucc

SEQ ID NO: 843884 - RNA, 19 nt, Artificial Sequence
  Description of Artificial Sequence: Synthetic oligonucleotide
uuauuauugaaaaggggua

SEQ ID NO: 843885 - RNA, 19 nt, Artificial Sequence
  Description of Artificial Sequence: Synthetic oligonucleotide
ugaaccauuuguaucuuca

SEQ ID NO: 843886 - RNA, 19 nt, Artificial Sequence
  Description of Artificial Sequence: Synthetic oligonucleotide
uuguaauuaggaaacugcu

SEQ ID NO: 843887 - RNA, 19 nt, Artificial Sequence
  Description of Artificial Sequence: Synthetic oligonucleotide
cuuaugaacucacucacac

SEQ ID NO: 843888 - RNA, 19 nt, Artificial Sequence
  Description of Artificial Sequence: Synthetic oligonucleotide
ucaugaauuaacccagcug

SEQ ID NO: 843889 - RNA, 19 nt, Artificial Sequence
  Description of Artificial Sequence: Synthetic oligonucleotide
agauucucaagucagaauu

SEQ ID NO: 843890 - RNA, 19 nt, Artificial Sequence
  Description of Artificial Sequence: Synthetic oligonucleotide
auacaaugcauacaggcgu

SEQ ID NO: 843891 - RNA, 19 nt, Artificial Sequence
  Description of Artificial Sequence: Synthetic oligonucleotide
aaagccgcuuacaaaaccg

SEQ ID NO: 843892 - RNA, 19 nt, Artificial Sequence
  Description of Artificial Sequence: Synthetic oligonucleotide
uuauccuagccacauuugc

SEQ ID NO: 843893 - RNA, 19 nt, Artificial Sequence
  Description of Artificial Sequence: Synthetic oligonucleotide
aagccuagaguggacaugg

SEQ ID NO: 843894 - RNA, 19 nt, Artificial Sequence
  Description of Artificial Sequence: Synthetic oligonucleotide
aaccauuuguaucuucaug

SEQ ID NO: 843895 - RNA, 19 nt, Artificial Sequence
  Description of Artificial Sequence: Synthetic oligonucleotide
uugauuuugcuuaaccauc

SEQ ID NO: 843896 - RNA, 19 nt, Artificial Sequence
  Description of Artificial Sequence: Synthetic oligonucleotide
aauaucuuguucucugaaa

SEQ ID NO: 843897 - RNA, 19 nt, Artificial Sequence
  Description of Artificial Sequence: Synthetic oligonucleotide
aacccgaacacacacuacu

SEQ ID NO: 843898 - RNA, 19 nt, Artificial Sequence
  Description of Artificial Sequence: Synthetic oligonucleotide
ucagacguaaugaagcuua

SEQ ID NO: 843899 - RNA, 19 nt, Artificial Sequence
  Description of Artificial Sequence: Synthetic oligonucleotide
uacuuauuuuacacagagg

SEQ ID NO: 843900 - RNA, 19 nt, Artificial Sequence
  Description of Artificial Sequence: Synthetic oligonucleotide
ucuccaaucggcuguuugg

SEQ ID NO: 843901 - RNA, 19 nt, Artificial Sequence
  Description of Artificial Sequence: Synthetic oligonucleotide
uguaauuaggaaacugcuc

SEQ ID NO: 843902 - RNA, 19 nt, Artificial Sequence
  Description of Artificial Sequence: Synthetic oligonucleotide
auacaggcgucauacagag

SEQ ID NO: 843903 - RNA, 19 nt, Artificial Sequence
  Description of Artificial Sequence: Synthetic oligonucleotide
aaaucuguugauaggacgu

SEQ ID NO: 843904 - RNA, 19 nt, Artificial Sequence
  Description of Artificial Sequence: Synthetic oligonucleotide
caagauagaauauagccaa

SEQ ID NO: 843905 - RNA, 19 nt, Artificial Sequence
  Description of Artificial Sequence: Synthetic oligonucleotide
aacaucuauuguuaguuua

SEQ ID NO: 843906 - RNA, 19 nt, Artificial Sequence
  Description of Artificial Sequence: Synthetic oligonucleotide
ucaugaucauucaugcugu

SEQ ID NO: 843907 - RNA, 19 nt, Artificial Sequence
  Description of Artificial Sequence: Synthetic oligonucleotide
acgaaaacugaauuugcug

SEQ ID NO: 843908 - RNA, 19 nt, Artificial Sequence
  Description of Artificial Sequence: Synthetic oligonucleotide
gauagagcuaaacuaccac

SEQ ID NO: 843909 - RNA, 19 nt, Artificial Sequence
  Description of Artificial Sequence: Synthetic oligonucleotide
auugguuauuucaacacag

SEQ ID NO: 843910 - RNA, 19 nt, Artificial Sequence
  Description of Artificial Sequence: Synthetic oligonucleotide
uuaucaugcaagauagaau

SEQ ID NO: 843911 - RNA, 19 nt, Artificial Sequence
  Description of Artificial Sequence: Synthetic oligonucleotide
uauuaagccagccgguaac

SEQ ID NO: 843912 - RNA, 19 nt, Artificial Sequence
  Description of Artificial Sequence: Synthetic oligonucleotide
uaggacgucguguaaacca

SEQ ID NO: 843913 - RNA, 19 nt, Artificial Sequence
  Description of Artificial Sequence: Synthetic oligonucleotide
aucuauuguuaguuuauug

SEQ ID NO: 843914 - RNA, 19 nt, Artificial Sequence
  Description of Artificial Sequence: Synthetic oligonucleotide
agcuuaucaugcaagauag

SEQ ID NO: 843915 - RNA, 19 nt, Artificial Sequence
  Description of Artificial Sequence: Synthetic oligonucleotide
aaucuagcuagcuuaucau

SEQ ID NO: 843916 - RNA, 19 nt, Artificial Sequence
  Description of Artificial Sequence: Synthetic oligonucleotide
uaacaccucaauuagucaa

SEQ ID NO: 843917 - RNA, 19 nt, Artificial Sequence
  Description of Artificial Sequence: Synthetic oligonucleotide
ucagaauuaacaccucaau

SEQ ID NO: 843918 - RNA, 19 nt, Artificial Sequence
  Description of Artificial Sequence: Synthetic oligonucleotide
ucgguuguggaacugucgc

SEQ ID NO: 843919 - RNA, 19 nt, Artificial Sequence
  Description of Artificial Sequence: Synthetic oligonucleotide
uggauagagcuaaacuacc

SEQ ID NO: 843920 - RNA, 19 nt, Artificial Sequence
  Description of Artificial Sequence: Synthetic oligonucleotide
ucuuguaauuaggaaacug

SEQ ID NO: 843921 - RNA, 19 nt, Artificial Sequence
  Description of Artificial Sequence: Synthetic oligonucleotide
cuauuguuaguuuauugca

SEQ ID NO: 843922 - RNA, 19 nt, Artificial Sequence
  Description of Artificial Sequence: Synthetic oligonucleotide
ugguuggacagaaaauggc

SEQ ID NO: 843923 - RNA, 19 nt, Artificial Sequence
  Description of Artificial Sequence: Synthetic oligonucleotide
agcuaugacuguuuuacca

SEQ ID NO: 843924 - RNA, 19 nt, Artificial Sequence
  Description of Artificial Sequence: Synthetic oligonucleotide
agccaagacaaauuuauaa

SEQ ID NO: 843925 - RNA, 19 nt, Artificial Sequence
  Description of Artificial Sequence: Synthetic oligonucleotide
uauccuagccacauuugca

SEQ ID NO: 843926 - RNA, 19 nt, Artificial Sequence
  Description of Artificial Sequence: Synthetic oligonucleotide
ugcggaaaucccuaguuga

SEQ ID NO: 843927 - RNA, 19 nt, Artificial Sequence
  Description of Artificial Sequence: Synthetic oligonucleotide
agaggcuccacguagcugu

SEQ ID NO: 843928 - RNA, 19 nt, Artificial Sequence
  Description of Artificial Sequence: Synthetic oligonucleotide
aaggaaccagucccagcgc

SEQ ID NO: 843929 - RNA, 19 nt, Artificial Sequence
  Description of Artificial Sequence: Synthetic oligonucleotide
cuacuauacuguacaaagc

SEQ ID NO: 843930 - RNA, 19 nt, Artificial Sequence
  Description of Artificial Sequence: Synthetic oligonucleotide
gguuauuucaacacaguag

SEQ ID NO: 843931 - RNA, 19 nt, Artificial Sequence
  Description of Artificial Sequence: Synthetic oligonucleotide
uaccuuuaaaauccaauuu

SEQ ID NO: 843932 - RNA, 19 nt, Artificial Sequence
  Description of Artificial Sequence: Synthetic oligonucleotide
uggccauuaccauucaucu

SEQ ID NO: 843933 - RNA, 19 nt, Artificial Sequence
  Description of Artificial Sequence: Synthetic oligonucleotide
acaucaugaauuaacccag

SEQ ID NO: 843934 - RNA, 19 nt, Artificial Sequence
  Description of Artificial Sequence: Synthetic oligonucleotide
ucaaaguaauuauuaccaa

SEQ ID NO: 843935 - RNA, 19 nt, Artificial Sequence
  Description of Artificial Sequence: Synthetic oligonucleotide
gcuuacuugaauuacaaaa

SEQ ID NO: 843936 - RNA, 19 nt, Artificial Sequence
  Description of Artificial Sequence: Synthetic oligonucleotide
uuaacaccucaauuaguca

SEQ ID NO: 843937 - RNA, 19 nt, Artificial Sequence
  Description of Artificial Sequence: Synthetic oligonucleotide
auauagccaagacaaauuu

SEQ ID NO: 843938 - RNA, 19 nt, Artificial Sequence
  Description of Artificial Sequence: Synthetic oligonucleotide
aaaccgugugcacaacaug

SEQ ID NO: 843939 - RNA, 19 nt, Artificial Sequence
  Description of Artificial Sequence: Synthetic oligonucleotide
aaucuguugauaggacguc

SEQ ID NO: 843940 - RNA, 19 nt, Artificial Sequence
  Description of Artificial Sequence: Synthetic oligonucleotide
guuggaaucucuccagagc

SEQ ID NO: 843941 - RNA, 19 nt, Artificial Sequence
  Description of Artificial Sequence: Synthetic oligonucleotide
uguagucugcggaaauccc

SEQ ID NO: 843942 - RNA, 19 nt, Artificial Sequence
  Description of Artificial Sequence: Synthetic oligonucleotide
uacaacaucuauuguuagu

SEQ ID NO: 843943 - RNA, 19 nt, Artificial Sequence
  Description of Artificial Sequence: Synthetic oligonucleotide
cuuggagccccacaaauuc

SEQ ID NO: 843944 - RNA, 19 nt, Artificial Sequence
  Description of Artificial Sequence: Synthetic oligonucleotide
caagucagaauuaacaccu

SEQ ID NO: 843945 - RNA, 19 nt, Artificial Sequence
  Description of Artificial Sequence: Synthetic oligonucleotide
gcugucgaagccuagagug

SEQ ID NO: 843946 - RNA, 19 nt, Artificial Sequence
  Description of Artificial Sequence: Synthetic oligonucleotide
acugucuacaaaucucuga

SEQ ID NO: 843947 - RNA, 19 nt, Artificial Sequence
  Description of Artificial Sequence: Synthetic oligonucleotide
uguggaacugucgccaucc

SEQ ID NO: 843948 - RNA, 19 nt, Artificial Sequence
  Description of Artificial Sequence: Synthetic oligonucleotide
aacaccucaauuagucaag

SEQ ID NO: 843949 - RNA, 19 nt, Artificial Sequence
  Description of Artificial Sequence: Synthetic oligonucleotide
uuauuaagccagccgguaa

SEQ ID NO: 843950 - RNA, 19 nt, Artificial Sequence
  Description of Artificial Sequence: Synthetic oligonucleotide
uaaugaagcuuaugaacuc

SEQ ID NO: 843951 - RNA, 19 nt, Artificial Sequence
  Description of Artificial Sequence: Synthetic oligonucleotide
auccuugcccaauuuuaac

SEQ ID NO: 843952 - RNA, 19 nt, Artificial Sequence
  Description of Artificial Sequence: Synthetic oligonucleotide
uugcuuaaccauccucucc

SEQ ID NO: 843953 - RNA, 19 nt, Artificial Sequence
  Description of Artificial Sequence: Synthetic oligonucleotide
uauagccaagacaaauuua

SEQ ID NO: 843954 - RNA, 19 nt, Artificial Sequence
  Description of Artificial Sequence: Synthetic oligonucleotide
agaucacgaaaacugaauu

SEQ ID NO: 843955 - RNA, 19 nt, Artificial Sequence
  Description of Artificial Sequence: Synthetic oligonucleotide
aucaugaauuaacccagcu

SEQ ID NO: 843956 - RNA, 19 nt, Artificial Sequence
  Description of Artificial Sequence: Synthetic oligonucleotide
ugagaagcgucgguugugg

SEQ ID NO: 843957 - RNA, 19 nt, Artificial Sequence
  Description of Artificial Sequence: Synthetic oligonucleotide
aaacucucguacaaaacaa

SEQ ID NO: 843958 - RNA, 19 nt, Artificial Sequence
  Description of Artificial Sequence: Synthetic oligonucleotide
ucaauuagucaagcgucag

SEQ ID NO: 843959 - RNA, 19 nt, Artificial Sequence
  Description of Artificial Sequence: Synthetic oligonucleotide
uagcugucgaagccuagag

SEQ ID NO: 843960 - RNA, 19 nt, Artificial Sequence
  Description of Artificial Sequence: Synthetic oligonucleotide
acaaacucucguacaaaac

SEQ ID NO: 843961 - RNA, 19 nt, Artificial Sequence
  Description of Artificial Sequence: Synthetic oligonucleotide
gcaguuauuaagccagccg

SEQ ID NO: 843962 - RNA, 19 nt, Artificial Sequence
  Description of Artificial Sequence: Synthetic oligonucleotide
agauagaauauagccaaga

SEQ ID NO: 843963 - RNA, 19 nt, Artificial Sequence
  Description of Artificial Sequence: Synthetic oligonucleotide
ugucagaacuguguacuag

SEQ ID NO: 843964 - RNA, 19 nt, Artificial Sequence
  Description of Artificial Sequence: Synthetic oligonucleotide
cuuaucaugcaagauagaa

SEQ ID NO: 843965 - RNA, 19 nt, Artificial Sequence
  Description of Artificial Sequence: Synthetic oligonucleotide
guaacugguuagugaaugc

SEQ ID NO: 843966 - RNA, 19 nt, Artificial Sequence
  Description of Artificial Sequence: Synthetic oligonucleotide
aaucccuaguugagaagcg

SEQ ID NO: 843967 - RNA, 19 nt, Artificial Sequence
  Description of Artificial Sequence: Synthetic oligonucleotide
cuggauaacauaaugacuu

SEQ ID NO: 843968 - RNA, 19 nt, Artificial Sequence
  Description of Artificial Sequence: Synthetic oligonucleotide
caaucggcuguuugguugg

SEQ ID NO: 843969 - RNA, 19 nt, Artificial Sequence
  Description of Artificial Sequence: Synthetic oligonucleotide
ggcuggauaacauaaugac

SEQ ID NO: 843970 - RNA, 19 nt, Artificial Sequence
  Description of Artificial Sequence: Synthetic oligonucleotide
agaccgcuccaccaaugcc

SEQ ID NO: 843971 - RNA, 19 nt, Artificial Sequence
  Description of Artificial Sequence: Synthetic oligonucleotide
ucugcggaaaucccuaguu

SEQ ID NO: 843972 - RNA, 19 nt, Artificial Sequence
  Description of Artificial Sequence: Synthetic oligonucleotide
gacaccguucacuugcuuc

SEQ ID NO: 843973 - RNA, 19 nt, Artificial Sequence
  Description of Artificial Sequence: Synthetic oligonucleotide
caucugcaguuauuaagcc

SEQ ID NO: 843974 - RNA, 19 nt, Artificial Sequence
  Description of Artificial Sequence: Synthetic oligonucleotide
uuugcuuaaccauccucuc

SEQ ID NO: 843975 - RNA, 19 nt, Artificial Sequence
  Description of Artificial Sequence: Synthetic oligonucleotide
ggacaaaugaauuuaucaa

SEQ ID NO: 843976 - RNA, 19 nt, Artificial Sequence
  Description of Artificial Sequence: Synthetic oligonucleotide
uccccuucgucccuuggag

SEQ ID NO: 843977 - RNA, 19 nt, Artificial Sequence
  Description of Artificial Sequence: Synthetic oligonucleotide
acaccucaauuagucaagc

SEQ ID NO: 843978 - RNA, 19 nt, Artificial Sequence
  Description of Artificial Sequence: Synthetic oligonucleotide
acaccguucacuugcuuca

SEQ ID NO: 843979 - RNA, 19 nt, Artificial Sequence
  Description of Artificial Sequence: Synthetic oligonucleotide
cguaaugaagcuuaugaac

SEQ ID NO: 843980 - RNA, 19 nt, Artificial Sequence
  Description of Artificial Sequence: Synthetic oligonucleotide
uacaaugcauacaggcguc

SEQ ID NO: 843981 - RNA, 19 nt, Artificial Sequence
  Description of Artificial Sequence: Synthetic oligonucleotide
ucuacccuuacauuuuauu

SEQ ID NO: 843982 - RNA, 19 nt, Artificial Sequence
  Description of Artificial Sequence: Synthetic oligonucleotide
cuuacuugaauuacaaaau

SEQ ID NO: 843983 - RNA, 19 nt, Artificial Sequence
  Description of Artificial Sequence: Synthetic oligonucleotide
ucuccguugauggucuucc

SEQ ID NO: 843984 - RNA, 19 nt, Artificial Sequence
  Description of Artificial Sequence: Synthetic oligonucleotide
gaauuaacccagcugcuua

SEQ ID NO: 843985 - RNA, 19 nt, Artificial Sequence
  Description of Artificial Sequence: Synthetic oligonucleotide
uguacuaguggugcucuca

SEQ ID NO: 843986 - RNA, 19 nt, Artificial Sequence
  Description of Artificial Sequence: Synthetic oligonucleotide
cuugguuggaaucucucca

SEQ ID NO: 843987 - RNA, 19 nt, Artificial Sequence
  Description of Artificial Sequence: Synthetic oligonucleotide
aaaaugaacucuacccuua

SEQ ID NO: 843988 - RNA, 19 nt, Artificial Sequence
  Description of Artificial Sequence: Synthetic oligonucleotide
gaagcgucgguuguggaac

SEQ ID NO: 843989 - RNA, 19 nt, Artificial Sequence
  Description of Artificial Sequence: Synthetic oligonucleotide
cugucgaagccuagagugg

SEQ ID NO: 843990 - RNA, 19 nt, Artificial Sequence
  Description of Artificial Sequence: Synthetic oligonucleotide
aucuguugauaggacgucg

SEQ ID NO: 843991 - RNA, 19 nt, Artificial Sequence
  Description of Artificial Sequence: Synthetic oligonucleotide
auaggacgucguguaaacc

SEQ ID NO: 843992 - RNA, 19 nt, Artificial Sequence
  Description of Artificial Sequence: Synthetic oligonucleotide
aaaaccgugugcacaacau

SEQ ID NO: 843993 - RNA, 19 nt, Artificial Sequence
  Description of Artificial Sequence: Synthetic oligonucleotide
uggauaacauaaugacuuc

SEQ ID NO: 843994 - RNA, 19 nt, Artificial Sequence
  Description of Artificial Sequence: Synthetic oligonucleotide
auccuagccacauuugcaa

SEQ ID NO: 843995 - RNA, 19 nt, Artificial Sequence
  Description of Artificial Sequence: Synthetic oligonucleotide
gauaacauaaugacuuccu

SEQ ID NO: 843996 - RNA, 19 nt, Artificial Sequence
  Description of Artificial Sequence: Synthetic oligonucleotide
ucguguaaaccauaacauu

SEQ ID NO: 843997 - RNA, 19 nt, Artificial Sequence
  Description of Artificial Sequence: Synthetic oligonucleotide
ucgcuuagcccaucuguag

SEQ ID NO: 843998 - RNA, 19 nt, Artificial Sequence
  Description of Artificial Sequence: Synthetic oligonucleotide
uuaaaagggcaaacaucau

SEQ ID NO: 843999 - RNA, 19 nt, Artificial Sequence
  Description of Artificial Sequence: Synthetic oligonucleotide
ucggcuguuugguuggaca

SEQ ID NO: 844000 - RNA, 19 nt, Artificial Sequence
  Description of Artificial Sequence: Synthetic oligonucleotide
gaccgcuccaccaaugccc

SEQ ID NO: 844001 - RNA, 19 nt, Artificial Sequence
  Description of Artificial Sequence: Synthetic oligonucleotide
caucaugaauuaacccagc

SEQ ID NO: 844002 - RNA, 19 nt, Artificial Sequence
  Description of Artificial Sequence: Synthetic oligonucleotide
ugcaguuauuaagccagcc

SEQ ID NO: 844003 - RNA, 19 nt, Artificial Sequence
  Description of Artificial Sequence: Synthetic oligonucleotide
aggaaacugcuccccuucg

SEQ ID NO: 844004 - RNA, 19 nt, Artificial Sequence
  Description of Artificial Sequence: Synthetic oligonucleotide
gguacaauuucagaggcuc

SEQ ID NO: 844005 - RNA, 19 nt, Artificial Sequence
  Description of Artificial Sequence: Synthetic oligonucleotide
aauagccagaggacauauc

SEQ ID NO: 844006 - RNA, 19 nt, Artificial Sequence
  Description of Artificial Sequence: Synthetic oligonucleotide
ugcgaaggaaccaguccca

SEQ ID NO: 844007 - RNA, 19 nt, Artificial Sequence
  Description of Artificial Sequence: Synthetic oligonucleotide
caccucaauuagucaagcg

SEQ ID NO: 844008 - RNA, 19 nt, Artificial Sequence
  Description of Artificial Sequence: Synthetic oligonucleotide
gguaacugguuagugaaug

SEQ ID NO: 844009 - RNA, 19 nt, Artificial Sequence
  Description of Artificial Sequence: Synthetic oligonucleotide
ucccuaguugagaagcguc

SEQ ID NO: 844010 - RNA, 19 nt, Artificial Sequence
  Description of Artificial Sequence: Synthetic oligonucleotide
gagaccgcuccaccaaugc

SEQ ID NO: 844011 - RNA, 19 nt, Artificial Sequence
  Description of Artificial Sequence: Synthetic oligonucleotide
ugucgaagccuagagugga

SEQ ID NO: 844012 - RNA, 19 nt, Artificial Sequence
  Description of Artificial Sequence: Synthetic oligonucleotide
uguguacuaguggugcucu

SEQ ID NO: 844013 - RNA, 19 nt, Artificial Sequence
  Description of Artificial Sequence: Synthetic oligonucleotide
gacagaaaauggcugcgaa

SEQ ID NO: 844014 - RNA, 19 nt, Artificial Sequence
  Description of Artificial Sequence: Synthetic oligonucleotide
accugucaaaagguguugg

SEQ ID NO: 844015 - RNA, 19 nt, Artificial Sequence
  Description of Artificial Sequence: Synthetic oligonucleotide
gaacucuacccuuacauuu

SEQ ID NO: 844016 - RNA, 19 nt, Artificial Sequence
  Description of Artificial Sequence: Synthetic oligonucleotide
acgucguguaaaccauaac

SEQ ID NO: 844017 - RNA, 19 nt, Artificial Sequence
  Description of Artificial Sequence: Synthetic oligonucleotide
ucuccugaugacaccguuc

SEQ ID NO: 844018 - RNA, 19 nt, Artificial Sequence
  Description of Artificial Sequence: Synthetic oligonucleotide
gguuggaaucucuccagag

SEQ ID NO: 844019 - RNA, 19 nt, Artificial Sequence
  Description of Artificial Sequence: Synthetic oligonucleotide
aucaugaggcuggauaaca

SEQ ID NO: 844020 - RNA, 19 nt, Artificial Sequence
  Description of Artificial Sequence: Synthetic oligonucleotide
ccagaaaucuguugauagg

SEQ ID NO: 844021 - RNA, 19 nt, Artificial Sequence
  Description of Artificial Sequence: Synthetic oligonucleotide
ggauaacauaaugacuucc

SEQ ID NO: 844022 - RNA, 19 nt, Artificial Sequence
  Description of Artificial Sequence: Synthetic oligonucleotide
cuaguggugcucucaaaca

SEQ ID NO: 844023 - RNA, 19 nt, Artificial Sequence
  Description of Artificial Sequence: Synthetic oligonucleotide
uagucugcggaaaucccua

SEQ ID NO: 844024 - RNA, 19 nt, Artificial Sequence
  Description of Artificial Sequence: Synthetic oligonucleotide
auuauccuagccacauuug

SEQ ID NO: 844025 - RNA, 19 nt, Artificial Sequence
  Description of Artificial Sequence: Synthetic oligonucleotide
aacugucuacaaaucucug

SEQ ID NO: 844026 - RNA, 19 nt, Artificial Sequence
  Description of Artificial Sequence: Synthetic oligonucleotide
auuagucaagcgucaggaa

SEQ ID NO: 844027 - RNA, 19 nt, Artificial Sequence
  Description of Artificial Sequence: Synthetic oligonucleotide
agaagcgucgguuguggaa

SEQ ID NO: 844028 - RNA, 19 nt, Artificial Sequence
  Description of Artificial Sequence: Synthetic oligonucleotide
aguuauuaagccagccggu

SEQ ID NO: 844029 - RNA, 19 nt, Artificial Sequence
  Description of Artificial Sequence: Synthetic oligonucleotide
gaguggacauggcgaagag

SEQ ID NO: 844030 - RNA, 19 nt, Artificial Sequence
  Description of Artificial Sequence: Synthetic oligonucleotide
gcuuacaaaaccgugugca

SEQ ID NO: 844031 - RNA, 19 nt, Artificial Sequence
  Description of Artificial Sequence: Synthetic oligonucleotide
ugaauuaacccagcugcuu

SEQ ID NO: 844032 - RNA, 19 nt, Artificial Sequence
  Description of Artificial Sequence: Synthetic oligonucleotide
cuagcuagcuuaucaugca

SEQ ID NO: 844033 - RNA, 19 nt, Artificial Sequence
  Description of Artificial Sequence: Synthetic oligonucleotide
cuccugaugacaccguuca

SEQ ID NO: 844034 - RNA, 19 nt, Artificial Sequence
  Description of Artificial Sequence: Synthetic oligonucleotide
gaucacgaaaacugaauuu

SEQ ID NO: 844035 - RNA, 19 nt, Artificial Sequence
  Description of Artificial Sequence: Synthetic oligonucleotide
aacucucguacaaaacaaa

SEQ ID NO: 844036 - RNA, 19 nt, Artificial Sequence
  Description of Artificial Sequence: Synthetic oligonucleotide
aggcgucauacagagcaac

SEQ ID NO: 844037 - RNA, 19 nt, Artificial Sequence
  Description of Artificial Sequence: Synthetic oligonucleotide
aggcaacucucauucaaaa

SEQ ID NO: 844038 - RNA, 19 nt, Artificial Sequence
  Description of Artificial Sequence: Synthetic oligonucleotide
uugaaccauuuguaucuuc

SEQ ID NO: 844039 - RNA, 19 nt, Artificial Sequence
  Description of Artificial Sequence: Synthetic oligonucleotide
uagccaagacaaauuuaua

SEQ ID NO: 844040 - RNA, 19 nt, Artificial Sequence
  Description of Artificial Sequence: Synthetic oligonucleotide
ucgaagccuagaguggaca

SEQ ID NO: 844041 - RNA, 19 nt, Artificial Sequence
  Description of Artificial Sequence: Synthetic oligonucleotide
accauaacauuuuguuguu

SEQ ID NO: 844042 - RNA, 19 nt, Artificial Sequence
  Description of Artificial Sequence: Synthetic oligonucleotide
agcuacauuacagcuacuu

SEQ ID NO: 844043 - RNA, 19 nt, Artificial Sequence
  Description of Artificial Sequence: Synthetic oligonucleotide
aacucuacccuuacauuuu

SEQ ID NO: 844044 - RNA, 19 nt, Artificial Sequence
  Description of Artificial Sequence: Synthetic oligonucleotide
uucacuugcuucagacgua

SEQ ID NO: 844045 - RNA, 19 nt, Artificial Sequence
  Description of Artificial Sequence: Synthetic oligonucleotide
cugcggaaaucccuaguug

SEQ ID NO: 844046 - RNA, 19 nt, Artificial Sequence
  Description of Artificial Sequence: Synthetic oligonucleotide
acucucguacaaaacaaaa

SEQ ID NO: 844047 - RNA, 19 nt, Artificial Sequence
  Description of Artificial Sequence: Synthetic oligonucleotide
gguguuggauccuugccca

SEQ ID NO: 844048 - RNA, 19 nt, Artificial Sequence
  Description of Artificial Sequence: Synthetic oligonucleotide
cuagaguggacauggcgaa

SEQ ID NO: 844049 - RNA, 19 nt, Artificial Sequence
  Description of Artificial Sequence: Synthetic oligonucleotide
guacaauuucagaggcucc

SEQ ID NO: 844050 - RNA, 19 nt, Artificial Sequence
  Description of Artificial Sequence: Synthetic oligonucleotide
cugcuuacuugaauuacaa

SEQ ID NO: 844051 - RNA, 19 nt, Artificial Sequence
  Description of Artificial Sequence: Synthetic oligonucleotide
cuccaauguagucugcgga

SEQ ID NO: 844052 - RNA, 19 nt, Artificial Sequence
  Description of Artificial Sequence: Synthetic oligonucleotide
gucgguuguggaacugucg

SEQ ID NO: 844053 - RNA, 19 nt, Artificial Sequence
  Description of Artificial Sequence: Synthetic oligonucleotide
ugcacaacaugagccauuu

SEQ ID NO: 844054 - RNA, 19 nt, Artificial Sequence
  Description of Artificial Sequence: Synthetic oligonucleotide
gaacacacacuacuauacu

SEQ ID NO: 844055 - RNA, 19 nt, Artificial Sequence
  Description of Artificial Sequence: Synthetic oligonucleotide
uaguugagaagcgucgguu

SEQ ID NO: 844056 - RNA, 19 nt, Artificial Sequence
  Description of Artificial Sequence: Synthetic oligonucleotide
uggaacugucgccauccau

SEQ ID NO: 844057 - RNA, 19 nt, Artificial Sequence
  Description of Artificial Sequence: Synthetic oligonucleotide
aaccagucccagcgcggag

SEQ ID NO: 844058 - RNA, 19 nt, Artificial Sequence
  Description of Artificial Sequence: Synthetic oligonucleotide
ccaaucggcuguuugguug

SEQ ID NO: 844059 - RNA, 19 nt, Artificial Sequence
  Description of Artificial Sequence: Synthetic oligonucleotide
acuauacuguacaaagcua

SEQ ID NO: 844060 - RNA, 19 nt, Artificial Sequence
  Description of Artificial Sequence: Synthetic oligonucleotide
ccuagaguggacauggcga

SEQ ID NO: 844061 - RNA, 19 nt, Artificial Sequence
  Description of Artificial Sequence: Synthetic oligonucleotide
uguuugagguauggcauuu

SEQ ID NO: 844062 - RNA, 19 nt, Artificial Sequence
  Description of Artificial Sequence: Synthetic oligonucleotide
gggaagauaaauaucuugu

SEQ ID NO: 844063 - RNA, 19 nt, Artificial Sequence
  Description of Artificial Sequence: Synthetic oligonucleotide
augaauuaacccagcugcu

SEQ ID NO: 844064 - RNA, 19 nt, Artificial Sequence
  Description of Artificial Sequence: Synthetic oligonucleotide
aagccgcuuacaaaaccgu

SEQ ID NO: 844065 - RNA, 19 nt, Artificial Sequence
  Description of Artificial Sequence: Synthetic oligonucleotide
gcugcgaaggaaccagucc

SEQ ID NO: 844066 - RNA, 19 nt, Artificial Sequence
  Description of Artificial Sequence: Synthetic oligonucleotide
cugcaguuauuaagccagc

SEQ ID NO: 844067 - RNA, 19 nt, Artificial Sequence
  Description of Artificial Sequence: Synthetic oligonucleotide
cacuuccucccaaugccug

SEQ ID NO: 844068 - RNA, 19 nt, Artificial Sequence
  Description of Artificial Sequence: Synthetic oligonucleotide
acaaaaccgugugcacaac

SEQ ID NO: 844069 - RNA, 19 nt, Artificial Sequence
  Description of Artificial Sequence: Synthetic oligonucleotide
gcuagcuuaucaugcaaga

SEQ ID NO: 844070 - RNA, 19 nt, Artificial Sequence
  Description of Artificial Sequence: Synthetic oligonucleotide
gucagaacuguguacuagu

SEQ ID NO: 844071 - RNA, 19 nt, Artificial Sequence
  Description of Artificial Sequence: Synthetic oligonucleotide
ccacauuugcaaugggaag

SEQ ID NO: 844072 - RNA, 19 nt, Artificial Sequence
  Description of Artificial Sequence: Synthetic oligonucleotide
uagccgagaccgcuccacc

SEQ ID NO: 844073 - RNA, 19 nt, Artificial Sequence
  Description of Artificial Sequence: Synthetic oligonucleotide
agacguaaugaagcuuaug

SEQ ID NO: 844074 - RNA, 19 nt, Artificial Sequence
  Description of Artificial Sequence: Synthetic oligonucleotide
uccuagccacauuugcaau

SEQ ID NO: 844075 - RNA, 19 nt, Artificial Sequence
  Description of Artificial Sequence: Synthetic oligonucleotide
aucuuguaauuaggaaacu

SEQ ID NO: 844076 - RNA, 19 nt, Artificial Sequence
  Description of Artificial Sequence: Synthetic oligonucleotide
caaaaugaacucuacccuu

SEQ ID NO: 844077 - RNA, 19 nt, Artificial Sequence
  Description of Artificial Sequence: Synthetic oligonucleotide
gucguguaaaccauaacau

SEQ ID NO: 844078 - RNA, 19 nt, Artificial Sequence
  Description of Artificial Sequence: Synthetic oligonucleotide
caguaucaucaugaggcug

SEQ ID NO: 844079 - RNA, 19 nt, Artificial Sequence
  Description of Artificial Sequence: Synthetic oligonucleotide
acauuuuguuguugaccau

SEQ ID NO: 844080 - RNA, 19 nt, Artificial Sequence
  Description of Artificial Sequence: Synthetic oligonucleotide
uccucgcuuagcccaucug

SEQ ID NO: 844081 - RNA, 19 nt, Artificial Sequence
  Description of Artificial Sequence: Synthetic oligonucleotide
cgucguguaaaccauaaca

SEQ ID NO: 844082 - RNA, 19 nt, Artificial Sequence
  Description of Artificial Sequence: Synthetic oligonucleotide
aucuguagccgagaccgcu

SEQ ID NO: 844083 - RNA, 19 nt, Artificial Sequence
  Description of Artificial Sequence: Synthetic oligonucleotide
auuaacccagcugcuuacu

SEQ ID NO: 844084 - RNA, 19 nt, Artificial Sequence
  Description of Artificial Sequence: Synthetic oligonucleotide
uuugaaccauuuguaucuu

SEQ ID NO: 844085 - RNA, 19 nt, Artificial Sequence
  Description of Artificial Sequence: Synthetic oligonucleotide
uuguggaacugucgccauc

SEQ ID NO: 844086 - RNA, 19 nt, Artificial Sequence
  Description of Artificial Sequence: Synthetic oligonucleotide
uguuccagacuugguugga

SEQ ID NO: 844087 - RNA, 19 nt, Artificial Sequence
  Description of Artificial Sequence: Synthetic oligonucleotide
cuucgcccucacuuccucc

SEQ ID NO: 844088 - RNA, 19 nt, Artificial Sequence
  Description of Artificial Sequence: Synthetic oligonucleotide
gacgucguguaaaccauaa

SEQ ID NO: 844089 - RNA, 19 nt, Artificial Sequence
  Description of Artificial Sequence: Synthetic oligonucleotide
guuauuaagccagccggua

SEQ ID NO: 844090 - RNA, 19 nt, Artificial Sequence
  Description of Artificial Sequence: Synthetic oligonucleotide
caugaucauucaugcuguc

SEQ ID NO: 844091 - RNA, 19 nt, Artificial Sequence
  Description of Artificial Sequence: Synthetic oligonucleotide
gcgucaggaagcuacauua

SEQ ID NO: 844092 - RNA, 19 nt, Artificial Sequence
  Description of Artificial Sequence: Synthetic oligonucleotide
ucccgucuccaaucggcug

SEQ ID NO: 844093 - RNA, 19 nt, Artificial Sequence
  Description of Artificial Sequence: Synthetic oligonucleotide
caucaugaggcuggauaac

SEQ ID NO: 844094 - RNA, 19 nt, Artificial Sequence
  Description of Artificial Sequence: Synthetic oligonucleotide
uguuggauccuugcccaau

SEQ ID NO: 844095 - RNA, 19 nt, Artificial Sequence
  Description of Artificial Sequence: Synthetic oligonucleotide
uacuaguggugcucucaaa

SEQ ID NO: 844096 - RNA, 19 nt, Artificial Sequence
  Description of Artificial Sequence: Synthetic oligonucleotide
caacaugagccauuuuaua

SEQ ID NO: 844097 - RNA, 19 nt, Artificial Sequence
  Description of Artificial Sequence: Synthetic oligonucleotide
gguuguggaacugucgcca

SEQ ID NO: 844098 - RNA, 19 nt, Artificial Sequence
  Description of Artificial Sequence: Synthetic oligonucleotide
ggaacccgaacacacacua

SEQ ID NO: 844099 - RNA, 19 nt, Artificial Sequence
  Description of Artificial Sequence: Synthetic oligonucleotide
uacaggcgucauacagagc

SEQ ID NO: 844100 - RNA, 19 nt, Artificial Sequence
  Description of Artificial Sequence: Synthetic oligonucleotide
cagagcaacaaacucucgu

SEQ ID NO: 844101 - RNA, 19 nt, Artificial Sequence
  Description of Artificial Sequence: Synthetic oligonucleotide
aucaugcaagauagaauau

SEQ ID NO: 844102 - RNA, 19 nt, Artificial Sequence
  Description of Artificial Sequence: Synthetic oligonucleotide
acaaugcauacaggcguca

SEQ ID NO: 844103 - RNA, 19 nt, Artificial Sequence
  Description of Artificial Sequence: Synthetic oligonucleotide
ccguucacuugcuucagac

SEQ ID NO: 844104 - RNA, 19 nt, Artificial Sequence
  Description of Artificial Sequence: Synthetic oligonucleotide
guagcugucgaagccuaga

SEQ ID NO: 844105 - RNA, 19 nt, Artificial Sequence
  Description of Artificial Sequence: Synthetic oligonucleotide
ccuaguugagaagcgucgg

SEQ ID NO: 844106 - RNA, 19 nt, Artificial Sequence
  Description of Artificial Sequence: Synthetic oligonucleotide
caucuguagccgagaccgc

SEQ ID NO: 844107 - RNA, 19 nt, Artificial Sequence
  Description of Artificial Sequence: Synthetic oligonucleotide
cuucgucccuuggagcccc

SEQ ID NO: 844108 - RNA, 19 nt, Artificial Sequence
  Description of Artificial Sequence: Synthetic oligonucleotide
gaacccgaacacacacuac

SEQ ID NO: 844109 - RNA, 19 nt, Artificial Sequence
  Description of Artificial Sequence: Synthetic oligonucleotide
cucgcuuagcccaucugua

SEQ ID NO: 844110 - RNA, 19 nt, Artificial Sequence
  Description of Artificial Sequence: Synthetic oligonucleotide
uggcgaagagaauguccuc

SEQ ID NO: 844111 - RNA, 19 nt, Artificial Sequence
  Description of Artificial Sequence: Synthetic oligonucleotide
agccgcuuacaaaaccgug

SEQ ID NO: 844112 - RNA, 19 nt, Artificial Sequence
  Description of Artificial Sequence: Synthetic oligonucleotide
gcuacauuacagcuacuua

SEQ ID NO: 844113 - RNA, 19 nt, Artificial Sequence
  Description of Artificial Sequence: Synthetic oligonucleotide
cagacuugguuggaaucuc

SEQ ID NO: 844114 - RNA, 19 nt, Artificial Sequence
  Description of Artificial Sequence: Synthetic oligonucleotide
caagcgucaggaagcuaca

SEQ ID NO: 844115 - RNA, 19 nt, Artificial Sequence
  Description of Artificial Sequence: Synthetic oligonucleotide
gaaccagucccagcgcgga

SEQ ID NO: 844116 - RNA, 19 nt, Artificial Sequence
  Description of Artificial Sequence: Synthetic oligonucleotide
guagccgagaccgcuccac

SEQ ID NO: 844117 - RNA, 19 nt, Artificial Sequence
  Description of Artificial Sequence: Synthetic oligonucleotide
ccgcuuacaaaaccgugug

SEQ ID NO: 844118 - RNA, 19 nt, Artificial Sequence
  Description of Artificial Sequence: Synthetic oligonucleotide
accguucacuugcuucaga

SEQ ID NO: 844119 - RNA, 19 nt, Artificial Sequence
  Description of Artificial Sequence: Synthetic oligonucleotide
gguuggacagaaaauggcu

SEQ ID NO: 844120 - RNA, 19 nt, Artificial Sequence
  Description of Artificial Sequence: Synthetic oligonucleotide
acuccugaacacauucuuu

SEQ ID NO: 844121 - RNA, 19 nt, Artificial Sequence
  Description of Artificial Sequence: Synthetic oligonucleotide
gagaagcgucgguugugga

SEQ ID NO: 844122 - RNA, 19 nt, Artificial Sequence
  Description of Artificial Sequence: Synthetic oligonucleotide
agguacaauuucagaggcu

SEQ ID NO: 844123 - RNA, 19 nt, Artificial Sequence
  Description of Artificial Sequence: Synthetic oligonucleotide
gcggaaaucccuaguugag

SEQ ID NO: 844124 - RNA, 19 nt, Artificial Sequence
  Description of Artificial Sequence: Synthetic oligonucleotide
aggacgucguguaaaccau

SEQ ID NO: 844125 - RNA, 19 nt, Artificial Sequence
  Description of Artificial Sequence: Synthetic oligonucleotide
ccacguagcugucgaagcc

SEQ ID NO: 844126 - RNA, 19 nt, Artificial Sequence
  Description of Artificial Sequence: Synthetic oligonucleotide
gccgguaacugguuaguga

SEQ ID NO: 844127 - RNA, 19 nt, Artificial Sequence
  Description of Artificial Sequence: Synthetic oligonucleotide
aagcgucaggaagcuacau

SEQ ID NO: 844128 - RNA, 19 nt, Artificial Sequence
  Description of Artificial Sequence: Synthetic oligonucleotide
agccuagaguggacauggc

SEQ ID NO: 844129 - RNA, 19 nt, Artificial Sequence
  Description of Artificial Sequence: Synthetic oligonucleotide
agccgguaacugguuagug

SEQ ID NO: 844130 - RNA, 19 nt, Artificial Sequence
  Description of Artificial Sequence: Synthetic oligonucleotide
ccgguaacugguuagugaa

SEQ ID NO: 844131 - RNA, 19 nt, Artificial Sequence
  Description of Artificial Sequence: Synthetic oligonucleotide
ggaagcuacauuacagcua

SEQ ID NO: 844132 - RNA, 19 nt, Artificial Sequence
  Description of Artificial Sequence: Synthetic oligonucleotide
aggaacccgaacacacacu

SEQ ID NO: 844133 - RNA, 19 nt, Artificial Sequence
  Description of Artificial Sequence: Synthetic oligonucleotide
aaucggcuguuugguugga

SEQ ID NO: 844134 - RNA, 19 nt, Artificial Sequence
  Description of Artificial Sequence: Synthetic oligonucleotide
gcucccgucuccaaucggc

SEQ ID NO: 844135 - RNA, 19 nt, Artificial Sequence
  Description of Artificial Sequence: Synthetic oligonucleotide
cuaguugagaagcgucggu

SEQ ID NO: 844136 - RNA, 19 nt, Artificial Sequence
  Description of Artificial Sequence: Synthetic oligonucleotide
ugacaccguucacuugcuu

SEQ ID NO: 844137 - RNA, 19 nt, Artificial Sequence
  Description of Artificial Sequence: Synthetic oligonucleotide
agagcccgguuccaucauu

SEQ ID NO: 844138 - RNA, 19 nt, Artificial Sequence
  Description of Artificial Sequence: Synthetic oligonucleotide
gcuggauaacauaaugacu

SEQ ID NO: 844139 - RNA, 19 nt, Artificial Sequence
  Description of Artificial Sequence: Synthetic oligonucleotide
gcuuaugaacucacucaca

SEQ ID NO: 844140 - RNA, 19 nt, Artificial Sequence
  Description of Artificial Sequence: Synthetic oligonucleotide
gucgaagccuagaguggac

SEQ ID NO: 844141 - RNA, 19 nt, Artificial Sequence
  Description of Artificial Sequence: Synthetic oligonucleotide
guguacuaguggugcucuc

SEQ ID NO: 844142 - RNA, 19 nt, Artificial Sequence
  Description of Artificial Sequence: Synthetic oligonucleotide
gaguggccauuaccauuca

SEQ ID NO: 844143 - RNA, 19 nt, Artificial Sequence
  Description of Artificial Sequence: Synthetic oligonucleotide
augacaccguucacuugcu

SEQ ID NO: 844144 - RNA, 19 nt, Artificial Sequence
  Description of Artificial Sequence: Synthetic oligonucleotide
ggcgaagagaauguccucu

SEQ ID NO: 844145 - RNA, 19 nt, Artificial Sequence
  Description of Artificial Sequence: Synthetic oligonucleotide
cuagcuuaucaugcaagau

SEQ ID NO: 844146 - RNA, 19 nt, Artificial Sequence
  Description of Artificial Sequence: Synthetic oligonucleotide
guuggauccuugcccaauu

SEQ ID NO: 844147 - RNA, 19 nt, Artificial Sequence
  Description of Artificial Sequence: Synthetic oligonucleotide
caacaucuauuguuaguuu

SEQ ID NO: 844148 - RNA, 19 nt, Artificial Sequence
  Description of Artificial Sequence: Synthetic oligonucleotide
acccgaacacacacuacua

SEQ ID NO: 844149 - RNA, 19 nt, Artificial Sequence
  Description of Artificial Sequence: Synthetic oligonucleotide
ggcgucauacagagcaaca

SEQ ID NO: 844150 - RNA, 19 nt, Artificial Sequence
  Description of Artificial Sequence: Synthetic oligonucleotide
cagaggagucuucgcccuc

SEQ ID NO: 844151 - RNA, 19 nt, Artificial Sequence
  Description of Artificial Sequence: Synthetic oligonucleotide
cgaaggaaccagucccagc

SEQ ID NO: 844152 - RNA, 19 nt, Artificial Sequence
  Description of Artificial Sequence: Synthetic oligonucleotide
ccgaacacacacuacuaua

SEQ ID NO: 844153 - RNA, 19 nt, Artificial Sequence
  Description of Artificial Sequence: Synthetic oligonucleotide
ggcucccgucuccaaucgg

SEQ ID NO: 844154 - RNA, 19 nt, Artificial Sequence
  Description of Artificial Sequence: Synthetic oligonucleotide
gcgaaggaaccagucccag

SEQ ID NO: 844155 - RNA, 19 nt, Artificial Sequence
  Description of Artificial Sequence: Synthetic oligonucleotide
cauuaccauucaucuugua

SEQ ID NO: 844156 - RNA, 19 nt, Artificial Sequence
  Description of Artificial Sequence: Synthetic oligonucleotide
cgcuuacaaaaccgugugc

SEQ ID NO: 844157 - RNA, 19 nt, Artificial Sequence
  Description of Artificial Sequence: Synthetic oligonucleotide
gucugcggaaaucccuagu

SEQ ID NO: 844158 - RNA, 19 nt, Artificial Sequence
  Description of Artificial Sequence: Synthetic oligonucleotide
cuguuugagguauggcauu

SEQ ID NO: 844159 - RNA, 19 nt, Artificial Sequence
  Description of Artificial Sequence: Synthetic oligonucleotide
guuguggaacugucgccau

SEQ ID NO: 844160 - RNA, 19 nt, Artificial Sequence
  Description of Artificial Sequence: Synthetic oligonucleotide
cgguuguggaacugucgcc

SEQ ID NO: 844161 - RNA, 19 nt, Artificial Sequence
  Description of Artificial Sequence: Synthetic oligonucleotide
caggcgucauacagagcaa

SEQ ID NO: 844162 - RNA, 19 nt, Artificial Sequence
  Description of Artificial Sequence: Synthetic oligonucleotide
cacguagcugucgaagccu

SEQ ID NO: 844163 - RNA, 19 nt, Artificial Sequence
  Description of Artificial Sequence: Synthetic oligonucleotide
ccccuucgucccuuggagc

SEQ ID NO: 844164 - RNA, 19 nt, Artificial Sequence
  Description of Artificial Sequence: Synthetic oligonucleotide
guguuggauccuugcccaa

SEQ ID NO: 844165 - RNA, 19 nt, Artificial Sequence
  Description of Artificial Sequence: Synthetic oligonucleotide
gccgcuuacaaaaccgugu

SEQ ID NO: 844166 - RNA, 19 nt, Artificial Sequence
  Description of Artificial Sequence: Synthetic oligonucleotide
ggcugcgaaggaaccaguc

SEQ ID NO: 844167 - RNA, 19 nt, Artificial Sequence
  Description of Artificial Sequence: Synthetic oligonucleotide
ccguugauggucuuccgcu

SEQ ID NO: 844168 - RNA, 19 nt, Artificial Sequence
  Description of Artificial Sequence: Synthetic oligonucleotide
cucccgucuccaaucggcu

SEQ ID NO: 844169 - RNA, 19 nt, Artificial Sequence
  Description of Artificial Sequence: Synthetic oligonucleotide
gcuuaucaugcaagauaga

SEQ ID NO: 844170 - RNA, 19 nt, Artificial Sequence
  Description of Artificial Sequence: Synthetic oligonucleotide
cagacguaaugaagcuuau

SEQ ID NO: 844171 - RNA, 19 nt, Artificial Sequence
  Description of Artificial Sequence: Synthetic oligonucleotide
ccuucgucccuuggagccc

SEQ ID NO: 844172 - RNA, 19 nt, Artificial Sequence
  Description of Artificial Sequence: Synthetic oligonucleotide
ccucgcuuagcccaucugu

SEQ ID NO: 844173 - RNA, 19 nt, Artificial Sequence
  Description of Artificial Sequence: Synthetic oligonucleotide
gcccgguuccaucauuucu

SEQ ID NO: 844174 - RNA, 19 nt, Artificial Sequence
  Description of Artificial Sequence: Synthetic oligonucleotide
gcuccacuuccaggacucg

SEQ ID NO: 844175 - RNA, 19 nt, Artificial Sequence
  Description of Artificial Sequence: Synthetic oligonucleotide
cguagcugucgaagccuag

SEQ ID NO: 844176 - RNA, 19 nt, Artificial Sequence
  Description of Artificial Sequence: Synthetic oligonucleotide
cgucgguuguggaacuguc

SEQ ID NO: 844177 - RNA, 19 nt, Artificial Sequence
  Description of Artificial Sequence: Synthetic oligonucleotide
cuccaaugcagcccugguu

SEQ ID NO: 844178 - RNA, 19 nt, Artificial Sequence
  Description of Artificial Sequence: Synthetic oligonucleotide
ucgucccuuggagccccac

SEQ ID NO: 844179 - RNA, 19 nt, Artificial Sequence
  Description of Artificial Sequence: Synthetic oligonucleotide
cgagaccgcuccaccaaug

SEQ ID NO: 844180 - RNA, 19 nt, Artificial Sequence
  Description of Artificial Sequence: Synthetic oligonucleotide
gcuuaaccauccucucccu

SEQ ID NO: 844181 - RNA, 19 nt, Artificial Sequence
  Description of Artificial Sequence: Synthetic oligonucleotide
caaugcauacaggcgucau

SEQ ID NO: 844182 - RNA, 19 nt, Artificial Sequence
  Description of Artificial Sequence: Synthetic oligonucleotide
cccgguuccaucauuucuu

SEQ ID NO: 844183 - RNA, 19 nt, Artificial Sequence
  Description of Artificial Sequence: Synthetic oligonucleotide
cuccucgcuuagcccaucu

SEQ ID NO: 844184 - RNA, 19 nt, Artificial Sequence
  Description of Artificial Sequence: Synthetic oligonucleotide
ccuaagcuaugacuguuuu

SEQ ID NO: 844185 - RNA, 19 nt, Artificial Sequence
  Description of Artificial Sequence: Synthetic oligonucleotide
ggccauuaccauucaucuu

SEQ ID NO: 844186 - RNA, 19 nt, Artificial Sequence
  Description of Artificial Sequence: Synthetic oligonucleotide
cagccgguaacugguuagu

SEQ ID NO: 844187 - RNA, 19 nt, Artificial Sequence
  Description of Artificial Sequence: Synthetic oligonucleotide
cccgucuccaaucggcugu

SEQ ID NO: 844188 - RNA, 19 nt, Artificial Sequence
  Description of Artificial Sequence: Synthetic oligonucleotide
ggacgucguguaaaccaua

SEQ ID NO: 844189 - RNA, 19 nt, Artificial Sequence
  Description of Artificial Sequence: Synthetic oligonucleotide
cccgaacacacacuacuau

SEQ ID NO: 844190 - RNA, 19 nt, Artificial Sequence
  Description of Artificial Sequence: Synthetic oligonucleotide
cagagcccgguuccaucau

SEQ ID NO: 844191 - RNA, 19 nt, Artificial Sequence
  Description of Artificial Sequence: Synthetic oligonucleotide
gcuccucgcuuagcccauc

SEQ ID NO: 844192 - RNA, 19 nt, Artificial Sequence
  Description of Artificial Sequence: Synthetic oligonucleotide
ccgagaccgcuccaccaau

SEQ ID NO: 844193 - RNA, 19 nt, Artificial Sequence
  Description of Artificial Sequence: Synthetic oligonucleotide
ccgucuccaaucggcuguu

SEQ ID NO: 844194 - RNA, 19 nt, Artificial Sequence
  Description of Artificial Sequence: Synthetic oligonucleotide
ucuaauaacaaguuguuug

SEQ ID NO: 844195 - RNA, 19 nt, Artificial Sequence
  Description of Artificial Sequence: Synthetic oligonucleotide
aguauuuagucuucaaugc

SEQ ID NO: 844196 - RNA, 19 nt, Artificial Sequence
  Description of Artificial Sequence: Synthetic oligonucleotide
uaauguuagauuuaugucc

SEQ ID NO: 844197 - RNA, 19 nt, Artificial Sequence
  Description of Artificial Sequence: Synthetic oligonucleotide
uaagcaauacaaaagcccg

SEQ ID NO: 844198 - RNA, 19 nt, Artificial Sequence
  Description of Artificial Sequence: Synthetic oligonucleotide
uauuauaaccuccagguca

SEQ ID NO: 844199 - RNA, 19 nt, Artificial Sequence
  Description of Artificial Sequence: Synthetic oligonucleotide
uguuaguugaucaaggucu

SEQ ID NO: 844200 - RNA, 19 nt, Artificial Sequence
  Description of Artificial Sequence: Synthetic oligonucleotide
uuaaauaagaacaagccuu

SEQ ID NO: 844201 - RNA, 19 nt, Artificial Sequence
  Description of Artificial Sequence: Synthetic oligonucleotide
acauguguugaauauauac

SEQ ID NO: 844202 - RNA, 19 nt, Artificial Sequence
  Description of Artificial Sequence: Synthetic oligonucleotide
ucaucuaauaacaaguugu

SEQ ID NO: 844203 - RNA, 19 nt, Artificial Sequence
  Description of Artificial Sequence: Synthetic oligonucleotide
cuauauauuguagagaccc

SEQ ID NO: 844204 - RNA, 19 nt, Artificial Sequence
  Description of Artificial Sequence: Synthetic oligonucleotide
aacauguaggcuuuaaugu

SEQ ID NO: 844205 - RNA, 19 nt, Artificial Sequence
  Description of Artificial Sequence: Synthetic oligonucleotide
aauauucuaaucccugaag

SEQ ID NO: 844206 - RNA, 19 nt, Artificial Sequence
  Description of Artificial Sequence: Synthetic oligonucleotide
acaaaagcccguuaguggc

SEQ ID NO: 844207 - RNA, 19 nt, Artificial Sequence
  Description of Artificial Sequence: Synthetic oligonucleotide
uacaaguucucuucuaugg

SEQ ID NO: 844208 - RNA, 19 nt, Artificial Sequence
  Description of Artificial Sequence: Synthetic oligonucleotide
cuaauaacaaguuguuugg

SEQ ID NO: 844209 - RNA, 19 nt, Artificial Sequence
  Description of Artificial Sequence: Synthetic oligonucleotide
uuaaacgucacguaaucug

SEQ ID NO: 844210 - RNA, 19 nt, Artificial Sequence
  Description of Artificial Sequence: Synthetic oligonucleotide
aauauuccuuguucuaagg

SEQ ID NO: 844211 - RNA, 19 nt, Artificial Sequence
  Description of Artificial Sequence: Synthetic oligonucleotide
uaaacgucacguaaucugg

SEQ ID NO: 844212 - RNA, 19 nt, Artificial Sequence
  Description of Artificial Sequence: Synthetic oligonucleotide
uguaaucccacuugggagg

SEQ ID NO: 844213 - RNA, 19 nt, Artificial Sequence
  Description of Artificial Sequence: Synthetic oligonucleotide
aauucuaguacacggauua

SEQ ID NO: 844214 - RNA, 19 nt, Artificial Sequence
  Description of Artificial Sequence: Synthetic oligonucleotide
agcaauucugcuaauauac

SEQ ID NO: 844215 - RNA, 19 nt, Artificial Sequence
  Description of Artificial Sequence: Synthetic oligonucleotide
aacaauaacucaggggccc

SEQ ID NO: 844216 - RNA, 19 nt, Artificial Sequence
  Description of Artificial Sequence: Synthetic oligonucleotide
acacggauuaaauaagaac

SEQ ID NO: 844217 - RNA, 19 nt, Artificial Sequence
  Description of Artificial Sequence: Synthetic oligonucleotide
  modified_base (13)..(13): a, c, u, g, unknown or other
  modified_base (17)..(17): a, c, u, g, unknown or other
aaauguaguaaanaaanaa

SEQ ID NO: 844218 - RNA, 19 nt, Artificial Sequence
  Description of Artificial Sequence: Synthetic oligonucleotide
aaaggcauaugugauuuac

SEQ ID NO: 844219 - RNA, 19 nt, Artificial Sequence
  Description of Artificial Sequence: Synthetic oligonucleotide
ucugcuaauauacagccaa

SEQ ID NO: 844220 - RNA, 19 nt, Artificial Sequence
  Description of Artificial Sequence: Synthetic oligonucleotide
aauauauacaaguucucuu

SEQ ID NO: 844221 - RNA, 19 nt, Artificial Sequence
  Description of Artificial Sequence: Synthetic oligonucleotide
ucuaauccugcacacaggc

SEQ ID NO: 844222 - RNA, 19 nt, Artificial Sequence
  Description of Artificial Sequence: Synthetic oligonucleotide
cuguaauucuaguacacgg

SEQ ID NO: 844223 - RNA, 19 nt, Artificial Sequence
  Description of Artificial Sequence: Synthetic oligonucleotide
uauucuaaucccugaagag

SEQ ID NO: 844224 - RNA, 19 nt, Artificial Sequence
  Description of Artificial Sequence: Synthetic oligonucleotide
uacaaaagcccguuagugg

SEQ ID NO: 844225 - RNA, 19 nt, Artificial Sequence
  Description of Artificial Sequence: Synthetic oligonucleotide
uaguacaggaaucucaaac

SEQ ID NO: 844226 - RNA, 19 nt, Artificial Sequence
  Description of Artificial Sequence: Synthetic oligonucleotide
aauacaaaagcccguuagu

SEQ ID NO: 844227 - RNA, 19 nt, Artificial Sequence
  Description of Artificial Sequence: Synthetic oligonucleotide
cacggauuaaauaagaaca

SEQ ID NO: 844228 - RNA, 19 nt, Artificial Sequence
  Description of Artificial Sequence: Synthetic oligonucleotide
cuuacagauguguuaaggc

SEQ ID NO: 844229 - RNA, 19 nt, Artificial Sequence
  Description of Artificial Sequence: Synthetic oligonucleotide
  modified_base (16)..(16): a, c, u, g, unknown or other
cuuaaauguaguaaanaaa

SEQ ID NO: 844230 - RNA, 19 nt, Artificial Sequence
  Description of Artificial Sequence: Synthetic oligonucleotide
guuaucaaggcucuaagca

SEQ ID NO: 844231 - RNA, 19 nt, Artificial Sequence
  Description of Artificial Sequence: Synthetic oligonucleotide
uguaauucuaguacacgga

SEQ ID NO: 844232 - RNA, 19 nt, Artificial Sequence
  Description of Artificial Sequence: Synthetic oligonucleotide
uauugggacuuccaaauga

SEQ ID NO: 844233 - RNA, 19 nt, Artificial Sequence
  Description of Artificial Sequence: Synthetic oligonucleotide
auauucuaaucccugaaga

SEQ ID NO: 844234 - RNA, 19 nt, Artificial Sequence
  Description of Artificial Sequence: Synthetic oligonucleotide
uuuaaagcgucugaaaccu

SEQ ID NO: 844235 - RNA, 19 nt, Artificial Sequence
  Description of Artificial Sequence: Synthetic oligonucleotide
uuaauggcgacaauuuggu

SEQ ID NO: 844236 - RNA, 19 nt, Artificial Sequence
  Description of Artificial Sequence: Synthetic oligonucleotide
augacuuagcuccuguaac

SEQ ID NO: 844237 - RNA, 19 nt, Artificial Sequence
  Description of Artificial Sequence: Synthetic oligonucleotide
aacccauacuuuuacauau

SEQ ID NO: 844238 - RNA, 19 nt, Artificial Sequence
  Description of Artificial Sequence: Synthetic oligonucleotide
uaaagcgucugaaaccucc

SEQ ID NO: 844239 - RNA, 19 nt, Artificial Sequence
  Description of Artificial Sequence: Synthetic oligonucleotide
aaacucuuaaacgucacgu

SEQ ID NO: 844240 - RNA, 19 nt, Artificial Sequence
  Description of Artificial Sequence: Synthetic oligonucleotide
ugaccuguguccaaguuug

SEQ ID NO: 844241 - RNA, 19 nt, Artificial Sequence
  Description of Artificial Sequence: Synthetic oligonucleotide
auaagaacaagccuuggau

SEQ ID NO: 844242 - RNA, 19 nt, Artificial Sequence
  Description of Artificial Sequence: Synthetic oligonucleotide
aaacaauaacucaggggcc

SEQ ID NO: 844243 - RNA, 19 nt, Artificial Sequence
  Description of Artificial Sequence: Synthetic oligonucleotide
aggcauaugugauuuacag

SEQ ID NO: 844244 - RNA, 19 nt, Artificial Sequence
  Description of Artificial Sequence: Synthetic oligonucleotide
aacacaagacuauuauccu

SEQ ID NO: 844245 - RNA, 19 nt, Artificial Sequence
  Description of Artificial Sequence: Synthetic oligonucleotide
auuuagccaggccaaaauc

SEQ ID NO: 844246 - RNA, 19 nt, Artificial Sequence
  Description of Artificial Sequence: Synthetic oligonucleotide
gauguguuaaggcuaguac

SEQ ID NO: 844247 - RNA, 19 nt, Artificial Sequence
  Description of Artificial Sequence: Synthetic oligonucleotide
auggcgacaauuugguugg

SEQ ID NO: 844248 - RNA, 19 nt, Artificial Sequence
  Description of Artificial Sequence: Synthetic oligonucleotide
caccauacauccuagcucc

SEQ ID NO: 844249 - RNA, 19 nt, Artificial Sequence
  Description of Artificial Sequence: Synthetic oligonucleotide
accaauuauguuuggauga

SEQ ID NO: 844250 - RNA, 19 nt, Artificial Sequence
  Description of Artificial Sequence: Synthetic oligonucleotide
uucuaaucccugaagaguc

SEQ ID NO: 844251 - RNA, 19 nt, Artificial Sequence
  Description of Artificial Sequence: Synthetic oligonucleotide
gugauuuacagguuuguug

SEQ ID NO: 844252 - RNA, 19 nt, Artificial Sequence
  Description of Artificial Sequence: Synthetic oligonucleotide
auguguugaauauauacaa

SEQ ID NO: 844253 - RNA, 19 nt, Artificial Sequence
  Description of Artificial Sequence: Synthetic oligonucleotide
guacaggaaucucaaacgg

SEQ ID NO: 844254 - RNA, 19 nt, Artificial Sequence
  Description of Artificial Sequence: Synthetic oligonucleotide
caauacaaaagcccguuag

SEQ ID NO: 844255 - RNA, 19 nt, Artificial Sequence
  Description of Artificial Sequence: Synthetic oligonucleotide
acaccauacauccuagcuc

SEQ ID NO: 844256 - RNA, 19 nt, Artificial Sequence
  Description of Artificial Sequence: Synthetic oligonucleotide
uguuaaggcuaguacagga

SEQ ID NO: 844257 - RNA, 19 nt, Artificial Sequence
  Description of Artificial Sequence: Synthetic oligonucleotide
ucuaguacacggauuaaau

SEQ ID NO: 844258 - RNA, 19 nt, Artificial Sequence
  Description of Artificial Sequence: Synthetic oligonucleotide
ugcguguaagcccuauugg

SEQ ID NO: 844259 - RNA, 19 nt, Artificial Sequence
  Description of Artificial Sequence: Synthetic oligonucleotide
uauauuguagagacccugu

SEQ ID NO: 844260 - RNA, 19 nt, Artificial Sequence
  Description of Artificial Sequence: Synthetic oligonucleotide
auacauccuagcuccaaac

SEQ ID NO: 844261 - RNA, 19 nt, Artificial Sequence
  Description of Artificial Sequence: Synthetic oligonucleotide
aauauacagccaacagccc

SEQ ID NO: 844262 - RNA, 19 nt, Artificial Sequence
  Description of Artificial Sequence: Synthetic oligonucleotide
auguguuaaggcuaguaca

SEQ ID NO: 844263 - RNA, 19 nt, Artificial Sequence
  Description of Artificial Sequence: Synthetic oligonucleotide
auuugacuguucuuuuagg

SEQ ID NO: 844264 - RNA, 19 nt, Artificial Sequence
  Description of Artificial Sequence: Synthetic oligonucleotide
uuaucaaggcucuaagcaa

SEQ ID NO: 844265 - RNA, 19 nt, Artificial Sequence
  Description of Artificial Sequence: Synthetic oligonucleotide
uaggcuuuaaugugggaug

SEQ ID NO: 844266 - RNA, 19 nt, Artificial Sequence
  Description of Artificial Sequence: Synthetic oligonucleotide
uguccaaaugcaucuagga

SEQ ID NO: 844267 - RNA, 19 nt, Artificial Sequence
  Description of Artificial Sequence: Synthetic oligonucleotide
acauguaggcuuuaaugug

SEQ ID NO: 844268 - RNA, 19 nt, Artificial Sequence
  Description of Artificial Sequence: Synthetic oligonucleotide
aaucccugaagagucauca

SEQ ID NO: 844269 - RNA, 19 nt, Artificial Sequence
  Description of Artificial Sequence: Synthetic oligonucleotide
accaaaaggcauuaaucug

SEQ ID NO: 844270 - RNA, 19 nt, Artificial Sequence
  Description of Artificial Sequence: Synthetic oligonucleotide
uuguuaguugaucaagguc

SEQ ID NO: 844271 - RNA, 19 nt, Artificial Sequence
  Description of Artificial Sequence: Synthetic oligonucleotide
agacuauuauccuuuauua

SEQ ID NO: 844272 - RNA, 19 nt, Artificial Sequence
  Description of Artificial Sequence: Synthetic oligonucleotide
uuaaggcuaguacaggaau

SEQ ID NO: 844273 - RNA, 19 nt, Artificial Sequence
  Description of Artificial Sequence: Synthetic oligonucleotide
cuguaaucccacuugggag

SEQ ID NO: 844274 - RNA, 19 nt, Artificial Sequence
  Description of Artificial Sequence: Synthetic oligonucleotide
aggaucuaauccugcacac

SEQ ID NO: 844275 - RNA, 19 nt, Artificial Sequence
  Description of Artificial Sequence: Synthetic oligonucleotide
aacccguagaagcaauucu

SEQ ID NO: 844276 - RNA, 19 nt, Artificial Sequence
  Description of Artificial Sequence: Synthetic oligonucleotide
cuauuauccuuuauuauaa

SEQ ID NO: 844277 - RNA, 19 nt, Artificial Sequence
  Description of Artificial Sequence: Synthetic oligonucleotide
uguaucugauccagccagg

SEQ ID NO: 844278 - RNA, 19 nt, Artificial Sequence
  Description of Artificial Sequence: Synthetic oligonucleotide
uugguguucuuaucucugg

SEQ ID NO: 844279 - RNA, 19 nt, Artificial Sequence
  Description of Artificial Sequence: Synthetic oligonucleotide
uauauauuguagagacccu

SEQ ID NO: 844280 - RNA, 19 nt, Artificial Sequence
  Description of Artificial Sequence: Synthetic oligonucleotide
agaccaauuauguuuggau

SEQ ID NO: 844281 - RNA, 19 nt, Artificial Sequence
  Description of Artificial Sequence: Synthetic oligonucleotide
ugacuuagcuccuguaaca

SEQ ID NO: 844282 - RNA, 19 nt, Artificial Sequence
  Description of Artificial Sequence: Synthetic oligonucleotide
gaucaagcaagucgucucc

SEQ ID NO: 844283 - RNA, 19 nt, Artificial Sequence
  Description of Artificial Sequence: Synthetic oligonucleotide
aaagcgucugaaaccuccc

SEQ ID NO: 844284 - RNA, 19 nt, Artificial Sequence
  Description of Artificial Sequence: Synthetic oligonucleotide
uaucaaggcucuaagcaau

SEQ ID NO: 844285 - RNA, 19 nt, Artificial Sequence
  Description of Artificial Sequence: Synthetic oligonucleotide
aaggcucuaagcaauacaa

SEQ ID NO: 844286 - RNA, 19 nt, Artificial Sequence
  Description of Artificial Sequence: Synthetic oligonucleotide
gacuacacaugucaggcca

SEQ ID NO: 844287 - RNA, 19 nt, Artificial Sequence
  Description of Artificial Sequence: Synthetic oligonucleotide
auuauaaccuccaggucag

SEQ ID NO: 844288 - RNA, 19 nt, Artificial Sequence
  Description of Artificial Sequence: Synthetic oligonucleotide
agacuacacaugucaggcc

SEQ ID NO: 844289 - RNA, 19 nt, Artificial Sequence
  Description of Artificial Sequence: Synthetic oligonucleotide
auauauuguagagacccug

SEQ ID NO: 844290 - RNA, 19 nt, Artificial Sequence
  Description of Artificial Sequence: Synthetic oligonucleotide
augcguguaagcccuauug

SEQ ID NO: 844291 - RNA, 19 nt, Artificial Sequence
  Description of Artificial Sequence: Synthetic oligonucleotide
acucuuaaacgucacguaa

SEQ ID NO: 844292 - RNA, 19 nt, Artificial Sequence
  Description of Artificial Sequence: Synthetic oligonucleotide
uguagaccguggcaaacug

SEQ ID NO: 844293 - RNA, 19 nt, Artificial Sequence
  Description of Artificial Sequence: Synthetic oligonucleotide
agcauucggaggcagagga

SEQ ID NO: 844294 - RNA, 19 nt, Artificial Sequence
  Description of Artificial Sequence: Synthetic oligonucleotide
uacacggauuaaauaagaa

SEQ ID NO: 844295 - RNA, 19 nt, Artificial Sequence
  Description of Artificial Sequence: Synthetic oligonucleotide
auucuaaucccugaagagu

SEQ ID NO: 844296 - RNA, 19 nt, Artificial Sequence
  Description of Artificial Sequence: Synthetic oligonucleotide
gaauuuaaagcgucugaaa

SEQ ID NO: 844297 - RNA, 19 nt, Artificial Sequence
  Description of Artificial Sequence: Synthetic oligonucleotide
ucucaucuaauaacaaguu

SEQ ID NO: 844298 - RNA, 19 nt, Artificial Sequence
  Description of Artificial Sequence: Synthetic oligonucleotide
uuggauuauuucuuucagu

SEQ ID NO: 844299 - RNA, 19 nt, Artificial Sequence
  Description of Artificial Sequence: Synthetic oligonucleotide
agugggaucccagggaaac

SEQ ID NO: 844300 - RNA, 19 nt, Artificial Sequence
  Description of Artificial Sequence: Synthetic oligonucleotide
aguacacggauuaaauaag

SEQ ID NO: 844301 - RNA, 19 nt, Artificial Sequence
  Description of Artificial Sequence: Synthetic oligonucleotide
auaugugauuuacagguuu

SEQ ID NO: 844302 - RNA, 19 nt, Artificial Sequence
  Description of Artificial Sequence: Synthetic oligonucleotide
uuauaccaucuuuagcuuc

SEQ ID NO: 844303 - RNA, 19 nt, Artificial Sequence
  Description of Artificial Sequence: Synthetic oligonucleotide
uaaggcuaguacaggaauc

SEQ ID NO: 844304 - RNA, 19 nt, Artificial Sequence
  Description of Artificial Sequence: Synthetic oligonucleotide
augagaucaagcaagucgu

SEQ ID NO: 844305 - RNA, 19 nt, Artificial Sequence
  Description of Artificial Sequence: Synthetic oligonucleotide
ccuauguagaauccaaugc

SEQ ID NO: 844306 - RNA, 19 nt, Artificial Sequence
  Description of Artificial Sequence: Synthetic oligonucleotide
aacucuuaaacgucacgua

SEQ ID NO: 844307 - RNA, 19 nt, Artificial Sequence
  Description of Artificial Sequence: Synthetic oligonucleotide
gcauaugugauuuacaggu

SEQ ID NO: 844308 - RNA, 19 nt, Artificial Sequence
  Description of Artificial Sequence: Synthetic oligonucleotide
ccaaacaauaacucagggg

SEQ ID NO: 844309 - RNA, 19 nt, Artificial Sequence
  Description of Artificial Sequence: Synthetic oligonucleotide
cuugggcuauauauuguag

SEQ ID NO: 844310 - RNA, 19 nt, Artificial Sequence
  Description of Artificial Sequence: Synthetic oligonucleotide
cacaccuacaccauacauc

SEQ ID NO: 844311 - RNA, 19 nt, Artificial Sequence
  Description of Artificial Sequence: Synthetic oligonucleotide
cuucgcucgagacuucacg

SEQ ID NO: 844312 - RNA, 19 nt, Artificial Sequence
  Description of Artificial Sequence: Synthetic oligonucleotide
uuaucucucuuaaggcugu

SEQ ID NO: 844313 - RNA, 19 nt, Artificial Sequence
  Description of Artificial Sequence: Synthetic oligonucleotide
auuaaucugugaguuugag

SEQ ID NO: 844314 - RNA, 19 nt, Artificial Sequence
  Description of Artificial Sequence: Synthetic oligonucleotide
caaaugauuuagccaggcc

SEQ ID NO: 844315 - RNA, 19 nt, Artificial Sequence
  Description of Artificial Sequence: Synthetic oligonucleotide
auuuaaugcucccuauuuu

SEQ ID NO: 844316 - RNA, 19 nt, Artificial Sequence
  Description of Artificial Sequence: Synthetic oligonucleotide
uguacccaauguuucaaau

SEQ ID NO: 844317 - RNA, 19 nt, Artificial Sequence
  Description of Artificial Sequence: Synthetic oligonucleotide
acauccuagcuccaaacaa

SEQ ID NO: 844318 - RNA, 19 nt, Artificial Sequence
  Description of Artificial Sequence: Synthetic oligonucleotide
ucuaaucccugaagaguca

SEQ ID NO: 844319 - RNA, 19 nt, Artificial Sequence
  Description of Artificial Sequence: Synthetic oligonucleotide
ggcauaugugauuuacagg

SEQ ID NO: 844320 - RNA, 19 nt, Artificial Sequence
  Description of Artificial Sequence: Synthetic oligonucleotide
aauccaaugcugauguaaa

SEQ ID NO: 844321 - RNA, 19 nt, Artificial Sequence
  Description of Artificial Sequence: Synthetic oligonucleotide
ugggcgauuacugaaguau

SEQ ID NO: 844322 - RNA, 19 nt, Artificial Sequence
  Description of Artificial Sequence: Synthetic oligonucleotide
uaacccauacuuuuacaua

SEQ ID NO: 844323 - RNA, 19 nt, Artificial Sequence
  Description of Artificial Sequence: Synthetic oligonucleotide
ucuuaaggcuguucuauuu

SEQ ID NO: 844324 - RNA, 19 nt, Artificial Sequence
  Description of Artificial Sequence: Synthetic oligonucleotide
cauucggaggcagaggaag

SEQ ID NO: 844325 - RNA, 19 nt, Artificial Sequence
  Description of Artificial Sequence: Synthetic oligonucleotide
uucgcucgagacuucacgu

SEQ ID NO: 844326 - RNA, 19 nt, Artificial Sequence
  Description of Artificial Sequence: Synthetic oligonucleotide
agaucccuauguagaaucc

SEQ ID NO: 844327 - RNA, 19 nt, Artificial Sequence
  Description of Artificial Sequence: Synthetic oligonucleotide
ccuguaacaauuuuaucuc

SEQ ID NO: 844328 - RNA, 19 nt, Artificial Sequence
  Description of Artificial Sequence: Synthetic oligonucleotide
acgucacguaaucuggaag

SEQ ID NO: 844329 - RNA, 19 nt, Artificial Sequence
  Description of Artificial Sequence: Synthetic oligonucleotide
uuaauggugcacaccuuua

SEQ ID NO: 844330 - RNA, 19 nt, Artificial Sequence
  Description of Artificial Sequence: Synthetic oligonucleotide
ugucaacacaagacuauua

SEQ ID NO: 844331 - RNA, 19 nt, Artificial Sequence
  Description of Artificial Sequence: Synthetic oligonucleotide
uaauucuaguacacggauu

SEQ ID NO: 844332 - RNA, 19 nt, Artificial Sequence
  Description of Artificial Sequence: Synthetic oligonucleotide
guguaagcccuauugggac

SEQ ID NO: 844333 - RNA, 19 nt, Artificial Sequence
  Description of Artificial Sequence: Synthetic oligonucleotide
aacgucacguaaucuggaa

SEQ ID NO: 844334 - RNA, 19 nt, Artificial Sequence
  Description of Artificial Sequence: Synthetic oligonucleotide
cuauggcauuuaaugcucc

SEQ ID NO: 844335 - RNA, 19 nt, Artificial Sequence
  Description of Artificial Sequence: Synthetic oligonucleotide
agggaaacucuuaaacguc

SEQ ID NO: 844336 - RNA, 19 nt, Artificial Sequence
  Description of Artificial Sequence: Synthetic oligonucleotide
cuauguagaauccaaugcu

SEQ ID NO: 844337 - RNA, 19 nt, Artificial Sequence
  Description of Artificial Sequence: Synthetic oligonucleotide
aagcccuauugggacuucc

SEQ ID NO: 844338 - RNA, 19 nt, Artificial Sequence
  Description of Artificial Sequence: Synthetic oligonucleotide
cacguaaucuggaagacua

SEQ ID NO: 844339 - RNA, 19 nt, Artificial Sequence
  Description of Artificial Sequence: Synthetic oligonucleotide
aggcuuuaaugugggaugg

SEQ ID NO: 844340 - RNA, 19 nt, Artificial Sequence
  Description of Artificial Sequence: Synthetic oligonucleotide
ucuuuagcuucugaccugu

SEQ ID NO: 844341 - RNA, 19 nt, Artificial Sequence
  Description of Artificial Sequence: Synthetic oligonucleotide
uucuaguacacggauuaaa

SEQ ID NO: 844342 - RNA, 19 nt, Artificial Sequence
  Description of Artificial Sequence: Synthetic oligonucleotide
uucucauagcgcuucgcuc

SEQ ID NO: 844343 - RNA, 19 nt, Artificial Sequence
  Description of Artificial Sequence: Synthetic oligonucleotide
uguaagcccuauugggacu

SEQ ID NO: 844344 - RNA, 19 nt, Artificial Sequence
  Description of Artificial Sequence: Synthetic oligonucleotide
ugaucaaggucugaaucuc

SEQ ID NO: 844345 - RNA, 19 nt, Artificial Sequence
  Description of Artificial Sequence: Synthetic oligonucleotide
aguugaucaaggucugaau

SEQ ID NO: 844346 - RNA, 19 nt, Artificial Sequence
  Description of Artificial Sequence: Synthetic oligonucleotide
gcguguaagcccuauuggg

SEQ ID NO: 844347 - RNA, 19 nt, Artificial Sequence
  Description of Artificial Sequence: Synthetic oligonucleotide
uuuagucuucaaugccugu

SEQ ID NO: 844348 - RNA, 19 nt, Artificial Sequence
  Description of Artificial Sequence: Synthetic oligonucleotide
gcuuacagauguguuaagg

SEQ ID NO: 844349 - RNA, 19 nt, Artificial Sequence
  Description of Artificial Sequence: Synthetic oligonucleotide
ugguguacccaauguuuca

SEQ ID NO: 844350 - RNA, 19 nt, Artificial Sequence
  Description of Artificial Sequence: Synthetic oligonucleotide
uuguucgcuguaacuaaaa

SEQ ID NO: 844351 - RNA, 19 nt, Artificial Sequence
  Description of Artificial Sequence: Synthetic oligonucleotide
agaaagccgaggccuccac

SEQ ID NO: 844352 - RNA, 19 nt, Artificial Sequence
  Description of Artificial Sequence: Synthetic oligonucleotide
aaggcauaugugauuuaca

SEQ ID NO: 844353 - RNA, 19 nt, Artificial Sequence
  Description of Artificial Sequence: Synthetic oligonucleotide
aaaagcccguuaguggccu

SEQ ID NO: 844354 - RNA, 19 nt, Artificial Sequence
  Description of Artificial Sequence: Synthetic oligonucleotide
cuauugggacuuccaaaug

SEQ ID NO: 844355 - RNA, 19 nt, Artificial Sequence
  Description of Artificial Sequence: Synthetic oligonucleotide
acaauaacucaggggcccg

SEQ ID NO: 844356 - RNA, 19 nt, Artificial Sequence
  Description of Artificial Sequence: Synthetic oligonucleotide
uguagagacccuguuucaa

SEQ ID NO: 844357 - RNA, 19 nt, Artificial Sequence
  Description of Artificial Sequence: Synthetic oligonucleotide
acguccacagccaugcgag

SEQ ID NO: 844358 - RNA, 19 nt, Artificial Sequence
  Description of Artificial Sequence: Synthetic oligonucleotide
cagggaaacucuuaaacgu

SEQ ID NO: 844359 - RNA, 19 nt, Artificial Sequence
  Description of Artificial Sequence: Synthetic oligonucleotide
aagcgucugaaaccuccca

SEQ ID NO: 844360 - RNA, 19 nt, Artificial Sequence
  Description of Artificial Sequence: Synthetic oligonucleotide
acaggaaucucaaacgguu

SEQ ID NO: 844361 - RNA, 19 nt, Artificial Sequence
  Description of Artificial Sequence: Synthetic oligonucleotide
uggcccugggcgauuacug

SEQ ID NO: 844362 - RNA, 19 nt, Artificial Sequence
  Description of Artificial Sequence: Synthetic oligonucleotide
aagcaauacaaaagcccgu

SEQ ID NO: 844363 - RNA, 19 nt, Artificial Sequence
  Description of Artificial Sequence: Synthetic oligonucleotide
ccuagcuccaaacaauaac

SEQ ID NO: 844364 - RNA, 19 nt, Artificial Sequence
  Description of Artificial Sequence: Synthetic oligonucleotide
ugagaucaagcaagucguc

SEQ ID NO: 844365 - RNA, 19 nt, Artificial Sequence
  Description of Artificial Sequence: Synthetic oligonucleotide
cuugaugcguguaagcccu

SEQ ID NO: 844366 - RNA, 19 nt, Artificial Sequence
  Description of Artificial Sequence: Synthetic oligonucleotide
uuguagaccguggcaaacu

SEQ ID NO: 844367 - RNA, 19 nt, Artificial Sequence
  Description of Artificial Sequence: Synthetic oligonucleotide
agaacaagccuuggaugag

SEQ ID NO: 844368 - RNA, 19 nt, Artificial Sequence
  Description of Artificial Sequence: Synthetic oligonucleotide
acggauuaaauaagaacaa

SEQ ID NO: 844369 - RNA, 19 nt, Artificial Sequence
  Description of Artificial Sequence: Synthetic oligonucleotide
uccuagcuccaaacaauaa

SEQ ID NO: 844370 - RNA, 19 nt, Artificial Sequence
  Description of Artificial Sequence: Synthetic oligonucleotide
gucaacacaagacuauuau

SEQ ID NO: 844371 - RNA, 19 nt, Artificial Sequence
  Description of Artificial Sequence: Synthetic oligonucleotide
uugggcaauauuccuuguu

SEQ ID NO: 844372 - RNA, 19 nt, Artificial Sequence
  Description of Artificial Sequence: Synthetic oligonucleotide
aaacgucacguaaucugga

SEQ ID NO: 844373 - RNA, 19 nt, Artificial Sequence
  Description of Artificial Sequence: Synthetic oligonucleotide
cuaguacacggauuaaaua

SEQ ID NO: 844374 - RNA, 19 nt, Artificial Sequence
  Description of Artificial Sequence: Synthetic oligonucleotide
acccguagaagcaauucug

SEQ ID NO: 844375 - RNA, 19 nt, Artificial Sequence
  Description of Artificial Sequence: Synthetic oligonucleotide
aucuaauccugcacacagg

SEQ ID NO: 844376 - RNA, 19 nt, Artificial Sequence
  Description of Artificial Sequence: Synthetic oligonucleotide
uacauguguugaauauaua

SEQ ID NO: 844377 - RNA, 19 nt, Artificial Sequence
  Description of Artificial Sequence: Synthetic oligonucleotide
caaggcuaauguuagauuu

SEQ ID NO: 844378 - RNA, 19 nt, Artificial Sequence
  Description of Artificial Sequence: Synthetic oligonucleotide
cauuguucgcuguaacuaa

SEQ ID NO: 844379 - RNA, 19 nt, Artificial Sequence
  Description of Artificial Sequence: Synthetic oligonucleotide
caugcgagugaggagccag

SEQ ID NO: 844380 - RNA, 19 nt, Artificial Sequence
  Description of Artificial Sequence: Synthetic oligonucleotide
uuaaagcgucugaaaccuc

SEQ ID NO: 844381 - RNA, 19 nt, Artificial Sequence
  Description of Artificial Sequence: Synthetic oligonucleotide
aggucugaaucuccaggca

SEQ ID NO: 844382 - RNA, 19 nt, Artificial Sequence
  Description of Artificial Sequence: Synthetic oligonucleotide
agcgucugaaaccucccaa

SEQ ID NO: 844383 - RNA, 19 nt, Artificial Sequence
  Description of Artificial Sequence: Synthetic oligonucleotide
cuccauucucaucuaauaa

SEQ ID NO: 844384 - RNA, 19 nt, Artificial Sequence
  Description of Artificial Sequence: Synthetic oligonucleotide
agcaauacaaaagcccguu

SEQ ID NO: 844385 - RNA, 19 nt, Artificial Sequence
  Description of Artificial Sequence: Synthetic oligonucleotide
gagaccaauuauguuugga

SEQ ID NO: 844386 - RNA, 19 nt, Artificial Sequence
  Description of Artificial Sequence: Synthetic oligonucleotide
guacccaauguuucaaaua

SEQ ID NO: 844387 - RNA, 19 nt, Artificial Sequence
  Description of Artificial Sequence: Synthetic oligonucleotide
cgauuacugaaguauuuag

SEQ ID NO: 844388 - RNA, 19 nt, Artificial Sequence
  Description of Artificial Sequence: Synthetic oligonucleotide
aaggaacccguagaagcaa

SEQ ID NO: 844389 - RNA, 19 nt, Artificial Sequence
  Description of Artificial Sequence: Synthetic oligonucleotide
aaugcaucuaggagaccaa

SEQ ID NO: 844390 - RNA, 19 nt, Artificial Sequence
  Description of Artificial Sequence: Synthetic oligonucleotide
cuuguuaguugaucaaggu

SEQ ID NO: 844391 - RNA, 19 nt, Artificial Sequence
  Description of Artificial Sequence: Synthetic oligonucleotide
auugggacuuccaaaugau

SEQ ID NO: 844392 - RNA, 19 nt, Artificial Sequence
  Description of Artificial Sequence: Synthetic oligonucleotide
uagcgcuucgcucgagacu

SEQ ID NO: 844393 - RNA, 19 nt, Artificial Sequence
  Description of Artificial Sequence: Synthetic oligonucleotide
gaucccuauguagaaucca

SEQ ID NO: 844394 - RNA, 19 nt, Artificial Sequence
  Description of Artificial Sequence: Synthetic oligonucleotide
cauuaaucugugaguuuga

SEQ ID NO: 844395 - RNA, 19 nt, Artificial Sequence
  Description of Artificial Sequence: Synthetic oligonucleotide
acguaaucuggaagacuac

SEQ ID NO: 844396 - RNA, 19 nt, Artificial Sequence
  Description of Artificial Sequence: Synthetic oligonucleotide
agauguguuaaggcuagua

SEQ ID NO: 844397 - RNA, 19 nt, Artificial Sequence
  Description of Artificial Sequence: Synthetic oligonucleotide
aaucaaagacaaggcuaau

SEQ ID NO: 844398 - RNA, 19 nt, Artificial Sequence
  Description of Artificial Sequence: Synthetic oligonucleotide
guaaucccacuugggaggc

SEQ ID NO: 844399 - RNA, 19 nt, Artificial Sequence
  Description of Artificial Sequence: Synthetic oligonucleotide
gcuuuaaugugggauggug

SEQ ID NO: 844400 - RNA, 19 nt, Artificial Sequence
  Description of Artificial Sequence: Synthetic oligonucleotide
agcgcuucgcucgagacuu

SEQ ID NO: 844401 - RNA, 19 nt, Artificial Sequence
  Description of Artificial Sequence: Synthetic oligonucleotide
ugauccagccaggaucuaa

SEQ ID NO: 844402 - RNA, 19 nt, Artificial Sequence
  Description of Artificial Sequence: Synthetic oligonucleotide
ucagaucccuauguagaau

SEQ ID NO: 844403 - RNA, 19 nt, Artificial Sequence
  Description of Artificial Sequence: Synthetic oligonucleotide
cccguagaagcaauucugc

SEQ ID NO: 844404 - RNA, 19 nt, Artificial Sequence
  Description of Artificial Sequence: Synthetic oligonucleotide
acaagacuauuauccuuua

SEQ ID NO: 844405 - RNA, 19 nt, Artificial Sequence
  Description of Artificial Sequence: Synthetic oligonucleotide
gaacaagccuuggaugaga

SEQ ID NO: 844406 - RNA, 19 nt, Artificial Sequence
  Description of Artificial Sequence: Synthetic oligonucleotide
gcaucuaggagaccaauua

SEQ ID NO: 844407 - RNA, 19 nt, Artificial Sequence
  Description of Artificial Sequence: Synthetic oligonucleotide
uacacaugucaggccacug

SEQ ID NO: 844408 - RNA, 19 nt, Artificial Sequence
  Description of Artificial Sequence: Synthetic oligonucleotide
acgguuaucaaggcucuaa

SEQ ID NO: 844409 - RNA, 19 nt, Artificial Sequence
  Description of Artificial Sequence: Synthetic oligonucleotide
gacuuagcuccuguaacaa

SEQ ID NO: 844410 - RNA, 19 nt, Artificial Sequence
  Description of Artificial Sequence: Synthetic oligonucleotide
gucacguaaucuggaagac

SEQ ID NO: 844411 - RNA, 19 nt, Artificial Sequence
  Description of Artificial Sequence: Synthetic oligonucleotide
cuguguccaaguuugauuu

SEQ ID NO: 844412 - RNA, 19 nt, Artificial Sequence
  Description of Artificial Sequence: Synthetic oligonucleotide
cauacauccuagcuccaaa

SEQ ID NO: 844413 - RNA, 19 nt, Artificial Sequence
  Description of Artificial Sequence: Synthetic oligonucleotide
uccgcuggacaguuugguc

SEQ ID NO: 844414 - RNA, 19 nt, Artificial Sequence
  Description of Artificial Sequence: Synthetic oligonucleotide
aaagcccguuaguggccug

SEQ ID NO: 844415 - RNA, 19 nt, Artificial Sequence
  Description of Artificial Sequence: Synthetic oligonucleotide
ggagaccaauuauguuugg

SEQ ID NO: 844416 - RNA, 19 nt, Artificial Sequence
  Description of Artificial Sequence: Synthetic oligonucleotide
uguguccaaguuugauuuu

SEQ ID NO: 844417 - RNA, 19 nt, Artificial Sequence
  Description of Artificial Sequence: Synthetic oligonucleotide
gcuauauauuguagagacc

SEQ ID NO: 844418 - RNA, 19 nt, Artificial Sequence
  Description of Artificial Sequence: Synthetic oligonucleotide
aucccuauguagaauccaa

SEQ ID NO: 844419 - RNA, 19 nt, Artificial Sequence
  Description of Artificial Sequence: Synthetic oligonucleotide
cugaaaccucccaacagcu

SEQ ID NO: 844420 - RNA, 19 nt, Artificial Sequence
  Description of Artificial Sequence: Synthetic oligonucleotide
caucuaauaacaaguuguu

SEQ ID NO: 844421 - RNA, 19 nt, Artificial Sequence
  Description of Artificial Sequence: Synthetic oligonucleotide
ugcgagugaggagccagac

SEQ ID NO: 844422 - RNA, 19 nt, Artificial Sequence
  Description of Artificial Sequence: Synthetic oligonucleotide
ccuguaaucccacuuggga

SEQ ID NO: 844423 - RNA, 19 nt, Artificial Sequence
  Description of Artificial Sequence: Synthetic oligonucleotide
uaauggcgacaauuugguu

SEQ ID NO: 844424 - RNA, 19 nt, Artificial Sequence
  Description of Artificial Sequence: Synthetic oligonucleotide
agcuccuguaacaauuuua

SEQ ID NO: 844425 - RNA, 19 nt, Artificial Sequence
  Description of Artificial Sequence: Synthetic oligonucleotide
auuguucgcuguaacuaaa

SEQ ID NO: 844426 - RNA, 19 nt, Artificial Sequence
  Description of Artificial Sequence: Synthetic oligonucleotide
caagucgucuccugcugca

SEQ ID NO: 844427 - RNA, 19 nt, Artificial Sequence
  Description of Artificial Sequence: Synthetic oligonucleotide
cucuuaaacgucacguaau

SEQ ID NO: 844428 - RNA, 19 nt, Artificial Sequence
  Description of Artificial Sequence: Synthetic oligonucleotide
cccgguaccaucuggucac

SEQ ID NO: 844429 - RNA, 19 nt, Artificial Sequence
  Description of Artificial Sequence: Synthetic oligonucleotide
cacuguccauuguucgcug

SEQ ID NO: 844430 - RNA, 19 nt, Artificial Sequence
  Description of Artificial Sequence: Synthetic oligonucleotide
ggcuaguacaggaaucuca

SEQ ID NO: 844431 - RNA, 19 nt, Artificial Sequence
  Description of Artificial Sequence: Synthetic oligonucleotide
gggaaacucuuaaacguca

SEQ ID NO: 844432 - RNA, 19 nt, Artificial Sequence
  Description of Artificial Sequence: Synthetic oligonucleotide
gggacuuccaaaugauuua

SEQ ID NO: 844433 - RNA, 19 nt, Artificial Sequence
  Description of Artificial Sequence: Synthetic oligonucleotide
gcuaguacaggaaucucaa

SEQ ID NO: 844434 - RNA, 19 nt, Artificial Sequence
  Description of Artificial Sequence: Synthetic oligonucleotide
auaacucaggggcccggua

SEQ ID NO: 844435 - RNA, 19 nt, Artificial Sequence
  Description of Artificial Sequence: Synthetic oligonucleotide
gcgucugaaaccucccaac

SEQ ID NO: 844436 - RNA, 19 nt, Artificial Sequence
  Description of Artificial Sequence: Synthetic oligonucleotide
cagcauucggaggcagagg

SEQ ID NO: 844437 - RNA, 19 nt, Artificial Sequence
  Description of Artificial Sequence: Synthetic oligonucleotide
gcaagucgucuccugcugc

SEQ ID NO: 844438 - RNA, 19 nt, Artificial Sequence
  Description of Artificial Sequence: Synthetic oligonucleotide
cacguccacagccaugcga

SEQ ID NO: 844439 - RNA, 19 nt, Artificial Sequence
  Description of Artificial Sequence: Synthetic oligonucleotide
ggcaauauuccuuguucua

SEQ ID NO: 844440 - RNA, 19 nt, Artificial Sequence
  Description of Artificial Sequence: Synthetic oligonucleotide
auucuaguacacggauuaa

SEQ ID NO: 844441 - RNA, 19 nt, Artificial Sequence
  Description of Artificial Sequence: Synthetic oligonucleotide
gucacaacuugaugcgugu

SEQ ID NO: 844442 - RNA, 19 nt, Artificial Sequence
  Description of Artificial Sequence: Synthetic oligonucleotide
cuaguacaggaaucucaaa

SEQ ID NO: 844443 - RNA, 19 nt, Artificial Sequence
  Description of Artificial Sequence: Synthetic oligonucleotide
cuuaaacgucacguaaucu

SEQ ID NO: 844444 - RNA, 19 nt, Artificial Sequence
  Description of Artificial Sequence: Synthetic oligonucleotide
cauagcgcuucgcucgaga

SEQ ID NO: 844445 - RNA, 19 nt, Artificial Sequence
  Description of Artificial Sequence: Synthetic oligonucleotide
gcgacaauuugguuggugu

SEQ ID NO: 844446 - RNA, 19 nt, Artificial Sequence
  Description of Artificial Sequence: Synthetic oligonucleotide
caggaaucucaaacgguua

SEQ ID NO: 844447 - RNA, 19 nt, Artificial Sequence
  Description of Artificial Sequence: Synthetic oligonucleotide
ggaaucucaaacgguuauc

SEQ ID NO: 844448 - RNA, 19 nt, Artificial Sequence
  Description of Artificial Sequence: Synthetic oligonucleotide
cgucacguaaucuggaaga

SEQ ID NO: 844449 - RNA, 19 nt, Artificial Sequence
  Description of Artificial Sequence: Synthetic oligonucleotide
aagccuuggaugagaucaa

SEQ ID NO: 844450 - RNA, 19 nt, Artificial Sequence
  Description of Artificial Sequence: Synthetic oligonucleotide
ugaugcguguaagcccuau

SEQ ID NO: 844451 - RNA, 19 nt, Artificial Sequence
  Description of Artificial Sequence: Synthetic oligonucleotide
cucucuuaaggcuguucua

SEQ ID NO: 844452 - RNA, 19 nt, Artificial Sequence
  Description of Artificial Sequence: Synthetic oligonucleotide
augauuuagccaggccaaa

SEQ ID NO: 844453 - RNA, 19 nt, Artificial Sequence
  Description of Artificial Sequence: Synthetic oligonucleotide
uuauaaccuccaggucagu

SEQ ID NO: 844454 - RNA, 19 nt, Artificial Sequence
  Description of Artificial Sequence: Synthetic oligonucleotide
caucuaggagaccaauuau

SEQ ID NO: 844455 - RNA, 19 nt, Artificial Sequence
  Description of Artificial Sequence: Synthetic oligonucleotide
ccuauugggacuuccaaau

SEQ ID NO: 844456 - RNA, 19 nt, Artificial Sequence
  Description of Artificial Sequence: Synthetic oligonucleotide
cguguaagcccuauuggga

SEQ ID NO: 844457 - RNA, 19 nt, Artificial Sequence
  Description of Artificial Sequence: Synthetic oligonucleotide
ccguuaguggccuggcgug

SEQ ID NO: 844458 - RNA, 19 nt, Artificial Sequence
  Description of Artificial Sequence: Synthetic oligonucleotide
gcagugggaucccagggaa

SEQ ID NO: 844459 - RNA, 19 nt, Artificial Sequence
  Description of Artificial Sequence: Synthetic oligonucleotide
uggcuggauuugacuguuc

SEQ ID NO: 844460 - RNA, 19 nt, Artificial Sequence
  Description of Artificial Sequence: Synthetic oligonucleotide
agcccuauugggacuucca

SEQ ID NO: 844461 - RNA, 19 nt, Artificial Sequence
  Description of Artificial Sequence: Synthetic oligonucleotide
cgguuaucaaggcucuaag

SEQ ID NO: 844462 - RNA, 19 nt, Artificial Sequence
  Description of Artificial Sequence: Synthetic oligonucleotide
cuaggagaccaauuauguu

SEQ ID NO: 844463 - RNA, 19 nt, Artificial Sequence
  Description of Artificial Sequence: Synthetic oligonucleotide
aacgguuaucaaggcucua

SEQ ID NO: 844464 - RNA, 19 nt, Artificial Sequence
  Description of Artificial Sequence: Synthetic oligonucleotide
aucaaggcucuaagcaaua

SEQ ID NO: 844465 - RNA, 19 nt, Artificial Sequence
  Description of Artificial Sequence: Synthetic oligonucleotide
cguagaagcaauucugcua

SEQ ID NO: 844466 - RNA, 19 nt, Artificial Sequence
  Description of Artificial Sequence: Synthetic oligonucleotide
ggcgacaauuugguuggug

SEQ ID NO: 844467 - RNA, 19 nt, Artificial Sequence
  Description of Artificial Sequence: Synthetic oligonucleotide
uugaugcguguaagcccua

SEQ ID NO: 844468 - RNA, 19 nt, Artificial Sequence
  Description of Artificial Sequence: Synthetic oligonucleotide
aggaacccguagaagcaau

SEQ ID NO: 844469 - RNA, 19 nt, Artificial Sequence
  Description of Artificial Sequence: Synthetic oligonucleotide
ccauuguucgcuguaacua

SEQ ID NO: 844470 - RNA, 19 nt, Artificial Sequence
  Description of Artificial Sequence: Synthetic oligonucleotide
gcaauacaaaagcccguua

SEQ ID NO: 844471 - RNA, 19 nt, Artificial Sequence
  Description of Artificial Sequence: Synthetic oligonucleotide
gcgauuacugaaguauuua

SEQ ID NO: 844472 - RNA, 19 nt, Artificial Sequence
  Description of Artificial Sequence: Synthetic oligonucleotide
ccuugggcuauauauugua

SEQ ID NO: 844473 - RNA, 19 nt, Artificial Sequence
  Description of Artificial Sequence: Synthetic oligonucleotide
gaugcguguaagcccuauu

SEQ ID NO: 844474 - RNA, 19 nt, Artificial Sequence
  Description of Artificial Sequence: Synthetic oligonucleotide
gcccgguaccaucugguca

SEQ ID NO: 844475 - RNA, 19 nt, Artificial Sequence
  Description of Artificial Sequence: Synthetic oligonucleotide
ggugucaacacaagacuau

SEQ ID NO: 844476 - RNA, 19 nt, Artificial Sequence
  Description of Artificial Sequence: Synthetic oligonucleotide
caccccgcaggaauuuaaa

SEQ ID NO: 844477 - RNA, 19 nt, Artificial Sequence
  Description of Artificial Sequence: Synthetic oligonucleotide
uaagcccuauugggacuuc

SEQ ID NO: 844478 - RNA, 19 nt, Artificial Sequence
  Description of Artificial Sequence: Synthetic oligonucleotide
cguaaucuggaagacuaca

SEQ ID NO: 844479 - RNA, 19 nt, Artificial Sequence
  Description of Artificial Sequence: Synthetic oligonucleotide
cugggcgauuacugaagua

SEQ ID NO: 844480 - RNA, 19 nt, Artificial Sequence
  Description of Artificial Sequence: Synthetic oligonucleotide
uaucucucuuaaggcuguu

SEQ ID NO: 844481 - RNA, 19 nt, Artificial Sequence
  Description of Artificial Sequence: Synthetic oligonucleotide
guagaccguggcaaacugu

SEQ ID NO: 844482 - RNA, 19 nt, Artificial Sequence
  Description of Artificial Sequence: Synthetic oligonucleotide
gcccguuaguggccuggcg

SEQ ID NO: 844483 - RNA, 19 nt, Artificial Sequence
  Description of Artificial Sequence: Synthetic oligonucleotide
gugucaacacaagacuauu

SEQ ID NO: 844484 - RNA, 19 nt, Artificial Sequence
  Description of Artificial Sequence: Synthetic oligonucleotide
ccacauguccacaccuaca

SEQ ID NO: 844485 - RNA, 19 nt, Artificial Sequence
  Description of Artificial Sequence: Synthetic oligonucleotide
gcauuuaaugcucccuauu

SEQ ID NO: 844486 - RNA, 19 nt, Artificial Sequence
  Description of Artificial Sequence: Synthetic oligonucleotide
gaccuguguccaaguuuga

SEQ ID NO: 844487 - RNA, 19 nt, Artificial Sequence
  Description of Artificial Sequence: Synthetic oligonucleotide
guaagcccuauugggacuu

SEQ ID NO: 844488 - RNA, 19 nt, Artificial Sequence
  Description of Artificial Sequence: Synthetic oligonucleotide
cagugggaucccagggaaa

SEQ ID NO: 844489 - RNA, 19 nt, Artificial Sequence
  Description of Artificial Sequence: Synthetic oligonucleotide
gccaugcgagugaggagcc

SEQ ID NO: 844490 - RNA, 19 nt, Artificial Sequence
  Description of Artificial Sequence: Synthetic oligonucleotide
ccgcuggacaguuuggucu

SEQ ID NO: 844491 - RNA, 19 nt, Artificial Sequence
  Description of Artificial Sequence: Synthetic oligonucleotide
ggcagaguuugaggccacc

SEQ ID NO: 844492 - RNA, 19 nt, Artificial Sequence
  Description of Artificial Sequence: Synthetic oligonucleotide
guuaguggccuggcguggu

SEQ ID NO: 844493 - RNA, 19 nt, Artificial Sequence
  Description of Artificial Sequence: Synthetic oligonucleotide
cguuaguggccuggcgugg

SEQ ID NO: 844494 - RNA, 19 nt, Artificial Sequence
  Description of Artificial Sequence: Synthetic oligonucleotide
uggcgacaauuugguuggu

SEQ ID NO: 844495 - RNA, 19 nt, Artificial Sequence
  Description of Artificial Sequence: Synthetic oligonucleotide
ggcgauuacugaaguauuu

SEQ ID NO: 844496 - RNA, 19 nt, Artificial Sequence
  Description of Artificial Sequence: Synthetic oligonucleotide
caaugccugugaagcugua

SEQ ID NO: 844497 - RNA, 19 nt, Artificial Sequence
  Description of Artificial Sequence: Synthetic oligonucleotide
gcagaguuugaggccaccu

SEQ ID NO: 844498 - RNA, 19 nt, Artificial Sequence
  Description of Artificial Sequence: Synthetic oligonucleotide
cccguuaguggccuggcgu

SEQ ID NO: 844499 - RNA, 19 nt, Artificial Sequence
  Description of Artificial Sequence: Synthetic oligonucleotide
gcauucggaggcagaggaa

SEQ ID NO: 844500 - RNA, 19 nt, Artificial Sequence
  Description of Artificial Sequence: Synthetic oligonucleotide
ccaccccgcaggaauuuaa

SEQ ID NO: 844501 - RNA, 19 nt, Artificial Sequence
  Description of Artificial Sequence: Synthetic oligonucleotide
ccgcaggaauuuaaagcgu

SEQ ID NO: 844502 - RNA, 19 nt, Artificial Sequence
  Description of Artificial Sequence: Synthetic oligonucleotide
ggcuuuaaugugggauggu

SEQ ID NO: 844503 - RNA, 19 nt, Artificial Sequence
  Description of Artificial Sequence: Synthetic oligonucleotide
ccugggcgauuacugaagu

SEQ ID NO: 844504 - RNA, 19 nt, Artificial Sequence
  Description of Artificial Sequence: Synthetic oligonucleotide
gggcgauuacugaaguauu

SEQ ID NO: 844505 - RNA, 19 nt, Artificial Sequence
  Description of Artificial Sequence: Synthetic oligonucleotide
ggccaccuugggcuauaua

SEQ ID NO: 844506 - RNA, 19 nt, Artificial Sequence
  Description of Artificial Sequence: Synthetic oligonucleotide
cuccaccccgcaggaauuu

SEQ ID NO: 844507 - RNA, 19 nt, Artificial Sequence
  Description of Artificial Sequence: Synthetic oligonucleotide
ccaugcgagugaggagcca

SEQ ID NO: 844508 - RNA, 19 nt, Artificial Sequence
  Description of Artificial Sequence: Synthetic oligonucleotide
gggcuuccgcuggacaguu

SEQ ID NO: 844509 - RNA, 19 nt, Artificial Sequence
  Description of Artificial Sequence: Synthetic oligonucleotide
gcgcuucgcucgagacuuc

SEQ ID NO: 844510 - RNA, 19 nt, Artificial Sequence
  Description of Artificial Sequence: Synthetic oligonucleotide
guguuggcccugggcgauu

SEQ ID NO: 844511 - RNA, 19 nt, Artificial Sequence
  Description of Artificial Sequence: Synthetic oligonucleotide
ccgaggccuccaccccgca

SEQ ID NO: 844512 - RNA, 19 nt, Artificial Sequence
  Description of Artificial Sequence: Synthetic oligonucleotide
ggcuuccgcuggacaguuu

SEQ ID NO: 844513 - RNA, 19 nt, Artificial Sequence
  Description of Artificial Sequence: Synthetic oligonucleotide
ucugauaucucucuucugg

SEQ ID NO: 844514 - RNA, 19 nt, Artificial Sequence
  Description of Artificial Sequence: Synthetic oligonucleotide
uauuacuuggucaauaaac

SEQ ID NO: 844515 - RNA, 19 nt, Artificial Sequence
  Description of Artificial Sequence: Synthetic oligonucleotide
ugugucauagcuuggaaag

SEQ ID NO: 844516 - RNA, 19 nt, Artificial Sequence
  Description of Artificial Sequence: Synthetic oligonucleotide
aacuuaguauccaagaguc

SEQ ID NO: 844517 - RNA, 19 nt, Artificial Sequence
  Description of Artificial Sequence: Synthetic oligonucleotide
uuaacuuaguauccaagag

SEQ ID NO: 844518 - RNA, 19 nt, Artificial Sequence
  Description of Artificial Sequence: Synthetic oligonucleotide
gauccgauaacuuucagca

SEQ ID NO: 844519 - RNA, 19 nt, Artificial Sequence
  Description of Artificial Sequence: Synthetic oligonucleotide
guuaauaacacacacaccu

SEQ ID NO: 844520 - RNA, 19 nt, Artificial Sequence
  Description of Artificial Sequence: Synthetic oligonucleotide
cuggauguuaccaaaggcg

SEQ ID NO: 844521 - RNA, 19 nt, Artificial Sequence
  Description of Artificial Sequence: Synthetic oligonucleotide
aacauagaaguuaaaugac

SEQ ID NO: 844522 - RNA, 19 nt, Artificial Sequence
  Description of Artificial Sequence: Synthetic oligonucleotide
aguuaaaugacuucguuau

SEQ ID NO: 844523 - RNA, 19 nt, Artificial Sequence
  Description of Artificial Sequence: Synthetic oligonucleotide
aacuuuaggagggucaaac

SEQ ID NO: 844524 - RNA, 19 nt, Artificial Sequence
  Description of Artificial Sequence: Synthetic oligonucleotide
uccuaaaggaacacaaugc

SEQ ID NO: 844525 - RNA, 19 nt, Artificial Sequence
  Description of Artificial Sequence: Synthetic oligonucleotide
ugaauugugugcaugacau

SEQ ID NO: 844526 - RNA, 19 nt, Artificial Sequence
  Description of Artificial Sequence: Synthetic oligonucleotide
uaggcuguaagucuggccc

SEQ ID NO: 844527 - RNA, 19 nt, Artificial Sequence
  Description of Artificial Sequence: Synthetic oligonucleotide
aguucugccauggagacac

SEQ ID NO: 844528 - RNA, 19 nt, Artificial Sequence
  Description of Artificial Sequence: Synthetic oligonucleotide
gaguaaagaaccuagguaa

SEQ ID NO: 844529 - RNA, 19 nt, Artificial Sequence
  Description of Artificial Sequence: Synthetic oligonucleotide
aacaugaaugccuuuggga

SEQ ID NO: 844530 - RNA, 19 nt, Artificial Sequence
  Description of Artificial Sequence: Synthetic oligonucleotide
uguugguaugggaacaggg

SEQ ID NO: 844531 - RNA, 19 nt, Artificial Sequence
  Description of Artificial Sequence: Synthetic oligonucleotide
cuuuaggagggucaaacgg

SEQ ID NO: 844532 - RNA, 19 nt, Artificial Sequence
  Description of Artificial Sequence: Synthetic oligonucleotide
gaacuaacuaguuaauaac

SEQ ID NO: 844533 - RNA, 19 nt, Artificial Sequence
  Description of Artificial Sequence: Synthetic oligonucleotide
auagaaguuaaaugacuuc

SEQ ID NO: 844534 - RNA, 19 nt, Artificial Sequence
  Description of Artificial Sequence: Synthetic oligonucleotide
ucucuaaugucucaacaug

SEQ ID NO: 844535 - RNA, 19 nt, Artificial Sequence
  Description of Artificial Sequence: Synthetic oligonucleotide
uggauguuaccaaaggcgc

SEQ ID NO: 844536 - RNA, 19 nt, Artificial Sequence
  Description of Artificial Sequence: Synthetic oligonucleotide
uagguaauuugccauggag

SEQ ID NO: 844537 - RNA, 19 nt, Artificial Sequence
  Description of Artificial Sequence: Synthetic oligonucleotide
aaaauuccccaucgauggc

SEQ ID NO: 844538 - RNA, 19 nt, Artificial Sequence
  Description of Artificial Sequence: Synthetic oligonucleotide
auaacuaugugucucuccu

SEQ ID NO: 844539 - RNA, 19 nt, Artificial Sequence
  Description of Artificial Sequence: Synthetic oligonucleotide
aagucugauaaauaaguuu

SEQ ID NO: 844540 - RNA, 19 nt, Artificial Sequence
  Description of Artificial Sequence: Synthetic oligonucleotide
uccaaguuuaaauauggaa

SEQ ID NO: 844541 - RNA, 19 nt, Artificial Sequence
  Description of Artificial Sequence: Synthetic oligonucleotide
uucguuauauacuuggaau

SEQ ID NO: 844542 - RNA, 19 nt, Artificial Sequence
  Description of Artificial Sequence: Synthetic oligonucleotide
cauacuuaaaagcgcaaag

SEQ ID NO: 844543 - RNA, 19 nt, Artificial Sequence
  Description of Artificial Sequence: Synthetic oligonucleotide
cauggagacacacacacac

SEQ ID NO: 844544 - RNA, 19 nt, Artificial Sequence
  Description of Artificial Sequence: Synthetic oligonucleotide
aaauuccccaucgauggcg

SEQ ID NO: 844545 - RNA, 19 nt, Artificial Sequence
  Description of Artificial Sequence: Synthetic oligonucleotide
cacacacacacacacaagg

SEQ ID NO: 844546 - RNA, 19 nt, Artificial Sequence
  Description of Artificial Sequence: Synthetic oligonucleotide
uuuaggagggucaaacggu

SEQ ID NO: 844547 - RNA, 19 nt, Artificial Sequence
  Description of Artificial Sequence: Synthetic oligonucleotide
uugguaugggaacaggggc

SEQ ID NO: 844548 - RNA, 19 nt, Artificial Sequence
  Description of Artificial Sequence: Synthetic oligonucleotide
uacuuggucaauaaacuuc

SEQ ID NO: 844549 - RNA, 19 nt, Artificial Sequence
  Description of Artificial Sequence: Synthetic oligonucleotide
ugucacguggagaacauga

SEQ ID NO: 844550 - RNA, 19 nt, Artificial Sequence
  Description of Artificial Sequence: Synthetic oligonucleotide
aaguuaaaugacuucguua

SEQ ID NO: 844551 - RNA, 19 nt, Artificial Sequence
  Description of Artificial Sequence: Synthetic oligonucleotide
aguuuaaauauggaauguc

SEQ ID NO: 844552 - RNA, 19 nt, Artificial Sequence
  Description of Artificial Sequence: Synthetic oligonucleotide
gacacacacacacacacac

SEQ ID NO: 844553 - RNA, 19 nt, Artificial Sequence
  Description of Artificial Sequence: Synthetic oligonucleotide
acaaggaucaggaacuaac

SEQ ID NO: 844554 - RNA, 19 nt, Artificial Sequence
  Description of Artificial Sequence: Synthetic oligonucleotide
uuaaaugacuucguuauau

SEQ ID NO: 844555 - RNA, 19 nt, Artificial Sequence
  Description of Artificial Sequence: Synthetic oligonucleotide
ugugucgggaacuucgaag

SEQ ID NO: 844556 - RNA, 19 nt, Artificial Sequence
  Description of Artificial Sequence: Synthetic oligonucleotide
ucaucaauccaggauaucu

SEQ ID NO: 844557 - RNA, 19 nt, Artificial Sequence
  Description of Artificial Sequence: Synthetic oligonucleotide
caugaucacguuuaggcug

SEQ ID NO: 844558 - RNA, 19 nt, Artificial Sequence
  Description of Artificial Sequence: Synthetic oligonucleotide
ugauaucucucuucugggg

SEQ ID NO: 844559 - RNA, 19 nt, Artificial Sequence
  Description of Artificial Sequence: Synthetic oligonucleotide
ugcacuaccaugugucggg

SEQ ID NO: 844560 - RNA, 19 nt, Artificial Sequence
  Description of Artificial Sequence: Synthetic oligonucleotide
agaaccuagguaauuugcc

SEQ ID NO: 844561 - RNA, 19 nt, Artificial Sequence
  Description of Artificial Sequence: Synthetic oligonucleotide
ucaaugaguuuugaucugg

SEQ ID NO: 844562 - RNA, 19 nt, Artificial Sequence
  Description of Artificial Sequence: Synthetic oligonucleotide
gagacacacacacacacac

SEQ ID NO: 844563 - RNA, 19 nt, Artificial Sequence
  Description of Artificial Sequence: Synthetic oligonucleotide
cuuaguauccaagagucug

SEQ ID NO: 844564 - RNA, 19 nt, Artificial Sequence
  Description of Artificial Sequence: Synthetic oligonucleotide
ugauuccugaaaauucccc

SEQ ID NO: 844565 - RNA, 19 nt, Artificial Sequence
  Description of Artificial Sequence: Synthetic oligonucleotide
acaugaaugccuuugggaa

SEQ ID NO: 844566 - RNA, 19 nt, Artificial Sequence
  Description of Artificial Sequence: Synthetic oligonucleotide
aucacguuuaggcuguaag

SEQ ID NO: 844567 - RNA, 19 nt, Artificial Sequence
  Description of Artificial Sequence: Synthetic oligonucleotide
ucguuauauacuuggaauc

SEQ ID NO: 844568 - RNA, 19 nt, Artificial Sequence
  Description of Artificial Sequence: Synthetic oligonucleotide
aacagcaauuuguacuugu

SEQ ID NO: 844569 - RNA, 19 nt, Artificial Sequence
  Description of Artificial Sequence: Synthetic oligonucleotide
uggagacacacacacacac

SEQ ID NO: 844570 - RNA, 19 nt, Artificial Sequence
  Description of Artificial Sequence: Synthetic oligonucleotide
ucgggaacuucgaagagca

SEQ ID NO: 844571 - RNA, 19 nt, Artificial Sequence
  Description of Artificial Sequence: Synthetic oligonucleotide
aaguccaaacugaaacagc

SEQ ID NO: 844572 - RNA, 19 nt, Artificial Sequence
  Description of Artificial Sequence: Synthetic oligonucleotide
gauaacuaugugucucucc

SEQ ID NO: 844573 - RNA, 19 nt, Artificial Sequence
  Description of Artificial Sequence: Synthetic oligonucleotide
ucuauuacuuggucaauaa

SEQ ID NO: 844574 - RNA, 19 nt, Artificial Sequence
  Description of Artificial Sequence: Synthetic oligonucleotide
auauacuuggaaucugugu

SEQ ID NO: 844575 - RNA, 19 nt, Artificial Sequence
  Description of Artificial Sequence: Synthetic oligonucleotide
augaggguuugaugcaugc

SEQ ID NO: 844576 - RNA, 19 nt, Artificial Sequence
  Description of Artificial Sequence: Synthetic oligonucleotide
ugucaaaaccacuugucaa

SEQ ID NO: 844577 - RNA, 19 nt, Artificial Sequence
  Description of Artificial Sequence: Synthetic oligonucleotide
uccgauaacuuucagcaua

SEQ ID NO: 844578 - RNA, 19 nt, Artificial Sequence
  Description of Artificial Sequence: Synthetic oligonucleotide
auuacuuggucaauaaacu

SEQ ID NO: 844579 - RNA, 19 nt, Artificial Sequence
  Description of Artificial Sequence: Synthetic oligonucleotide
ugguauuaacagcaauuug

SEQ ID NO: 844580 - RNA, 19 nt, Artificial Sequence
  Description of Artificial Sequence: Synthetic oligonucleotide
uccgaguaaagaaccuagg

SEQ ID NO: 844581 - RNA, 19 nt, Artificial Sequence
  Description of Artificial Sequence: Synthetic oligonucleotide
uuaggagggucaaacggug

SEQ ID NO: 844582 - RNA, 19 nt, Artificial Sequence
  Description of Artificial Sequence: Synthetic oligonucleotide
ugucaaugcagugacugag

SEQ ID NO: 844583 - RNA, 19 nt, Artificial Sequence
  Description of Artificial Sequence: Synthetic oligonucleotide
uuugccagagcuccugccc

SEQ ID NO: 844584 - RNA, 19 nt, Artificial Sequence
  Description of Artificial Sequence: Synthetic oligonucleotide
uauuaacagcaauuuguac

SEQ ID NO: 844585 - RNA, 19 nt, Artificial Sequence
  Description of Artificial Sequence: Synthetic oligonucleotide
aggauaucuggauguuacc

SEQ ID NO: 844586 - RNA, 19 nt, Artificial Sequence
  Description of Artificial Sequence: Synthetic oligonucleotide
augacuucguuauauacuu

SEQ ID NO: 844587 - RNA, 19 nt, Artificial Sequence
  Description of Artificial Sequence: Synthetic oligonucleotide
caggauaucuggauguuac

SEQ ID NO: 844588 - RNA, 19 nt, Artificial Sequence
  Description of Artificial Sequence: Synthetic oligonucleotide
guucaaugaguuuugaucu

SEQ ID NO: 844589 - RNA, 19 nt, Artificial Sequence
  Description of Artificial Sequence: Synthetic oligonucleotide
uuuguaggaaauucucuau

SEQ ID NO: 844590 - RNA, 19 nt, Artificial Sequence
  Description of Artificial Sequence: Synthetic oligonucleotide
augaaugccuuugggaaac

SEQ ID NO: 844591 - RNA, 19 nt, Artificial Sequence
  Description of Artificial Sequence: Synthetic oligonucleotide
gaugugucaucaauccagg

SEQ ID NO: 844592 - RNA, 19 nt, Artificial Sequence
  Description of Artificial Sequence: Synthetic oligonucleotide
agggauguguuguuaauga

SEQ ID NO: 844593 - RNA, 19 nt, Artificial Sequence
  Description of Artificial Sequence: Synthetic oligonucleotide
cacacacacacacacacac

SEQ ID NO: 844594 - RNA, 19 nt, Artificial Sequence
  Description of Artificial Sequence: Synthetic oligonucleotide
cugauaucucucuucuggg

SEQ ID NO: 844595 - RNA, 19 nt, Artificial Sequence
  Description of Artificial Sequence: Synthetic oligonucleotide
cauauugucauuuccuuaa

SEQ ID NO: 844596 - RNA, 19 nt, Artificial Sequence
  Description of Artificial Sequence: Synthetic oligonucleotide
aaccuagguaauuugccau

SEQ ID NO: 844597 - RNA, 19 nt, Artificial Sequence
  Description of Artificial Sequence: Synthetic oligonucleotide
cuaacuaguuaauaacaca

SEQ ID NO: 844598 - RNA, 19 nt, Artificial Sequence
  Description of Artificial Sequence: Synthetic oligonucleotide
cugucuucgguccacuucc

SEQ ID NO: 844599 - RNA, 19 nt, Artificial Sequence
  Description of Artificial Sequence: Synthetic oligonucleotide
ugauccucagggauuguca

SEQ ID NO: 844600 - RNA, 19 nt, Artificial Sequence
  Description of Artificial Sequence: Synthetic oligonucleotide
agauaucuccuccaauucu

SEQ ID NO: 844601 - RNA, 19 nt, Artificial Sequence
  Description of Artificial Sequence: Synthetic oligonucleotide
gcacuuucaacuuuaggag

SEQ ID NO: 844602 - RNA, 19 nt, Artificial Sequence
  Description of Artificial Sequence: Synthetic oligonucleotide
aguccugugauguaagcau

SEQ ID NO: 844603 - RNA, 19 nt, Artificial Sequence
  Description of Artificial Sequence: Synthetic oligonucleotide
uuggucaauaaacuuccuc

SEQ ID NO: 844604 - RNA, 19 nt, Artificial Sequence
  Description of Artificial Sequence: Synthetic oligonucleotide
auuacauauccagaagugu

SEQ ID NO: 844605 - RNA, 19 nt, Artificial Sequence
  Description of Artificial Sequence: Synthetic oligonucleotide
ucacguuuaggcuguaagu

SEQ ID NO: 844606 - RNA, 19 nt, Artificial Sequence
  Description of Artificial Sequence: Synthetic oligonucleotide
aacucugcaagggaugugu

SEQ ID NO: 844607 - RNA, 19 nt, Artificial Sequence
  Description of Artificial Sequence: Synthetic oligonucleotide
ggaacuucgaagagcaugg

SEQ ID NO: 844608 - RNA, 19 nt, Artificial Sequence
  Description of Artificial Sequence: Synthetic oligonucleotide
auguaagcaucauacccug

SEQ ID NO: 844609 - RNA, 19 nt, Artificial Sequence
  Description of Artificial Sequence: Synthetic oligonucleotide
uucaaugaguuuugaucug

SEQ ID NO: 844610 - RNA, 19 nt, Artificial Sequence
  Description of Artificial Sequence: Synthetic oligonucleotide
auaggucuggauccgauaa

SEQ ID NO: 844611 - RNA, 19 nt, Artificial Sequence
  Description of Artificial Sequence: Synthetic oligonucleotide
ucgaauuagcaauggcaug

SEQ ID NO: 844612 - RNA, 19 nt, Artificial Sequence
  Description of Artificial Sequence: Synthetic oligonucleotide
aaggaucaggaacuaacua

SEQ ID NO: 844613 - RNA, 19 nt, Artificial Sequence
  Description of Artificial Sequence: Synthetic oligonucleotide
caauagaacuggugaauug

SEQ ID NO: 844614 - RNA, 19 nt, Artificial Sequence
  Description of Artificial Sequence: Synthetic oligonucleotide
ugccccauuggccugagaa

SEQ ID NO: 844615 - RNA, 19 nt, Artificial Sequence
  Description of Artificial Sequence: Synthetic oligonucleotide
acaugaucacguuuaggcu

SEQ ID NO: 844616 - RNA, 19 nt, Artificial Sequence
  Description of Artificial Sequence: Synthetic oligonucleotide
aaacgaaggcugauguguc

SEQ ID NO: 844617 - RNA, 19 nt, Artificial Sequence
  Description of Artificial Sequence: Synthetic oligonucleotide
ggaacuaacuaguuaauaa

SEQ ID NO: 844618 - RNA, 19 nt, Artificial Sequence
  Description of Artificial Sequence: Synthetic oligonucleotide
acacacacacacaaggauc

SEQ ID NO: 844619 - RNA, 19 nt, Artificial Sequence
  Description of Artificial Sequence: Synthetic oligonucleotide
ugggaaacuuccaacucaa

SEQ ID NO: 844620 - RNA, 19 nt, Artificial Sequence
  Description of Artificial Sequence: Synthetic oligonucleotide
aagacacauauugucauuu

SEQ ID NO: 844621 - RNA, 19 nt, Artificial Sequence
  Description of Artificial Sequence: Synthetic oligonucleotide
caaaaccacuugucaaugc

SEQ ID NO: 844622 - RNA, 19 nt, Artificial Sequence
  Description of Artificial Sequence: Synthetic oligonucleotide
uguaagucuggcccuucca

SEQ ID NO: 844623 - RNA, 19 nt, Artificial Sequence
  Description of Artificial Sequence: Synthetic oligonucleotide
acguuuaggcuguaagucu

SEQ ID NO: 844624 - RNA, 19 nt, Artificial Sequence
  Description of Artificial Sequence: Synthetic oligonucleotide
uuacuuggucaauaaacuu

SEQ ID NO: 844625 - RNA, 19 nt, Artificial Sequence
  Description of Artificial Sequence: Synthetic oligonucleotide
uucagcauauuuacuggua

SEQ ID NO: 844626 - RNA, 19 nt, Artificial Sequence
  Description of Artificial Sequence: Synthetic oligonucleotide
caaugaguuuugaucuggc

SEQ ID NO: 844627 - RNA, 19 nt, Artificial Sequence
  Description of Artificial Sequence: Synthetic oligonucleotide
cuuaaaaggcugugugcug

SEQ ID NO: 844628 - RNA, 19 nt, Artificial Sequence
  Description of Artificial Sequence: Synthetic oligonucleotide
agaaacgaaggcugaugug

SEQ ID NO: 844629 - RNA, 19 nt, Artificial Sequence
  Description of Artificial Sequence: Synthetic oligonucleotide
gaaacgaaggcugaugugu

SEQ ID NO: 844630 - RNA, 19 nt, Artificial Sequence
  Description of Artificial Sequence: Synthetic oligonucleotide
aauuagcaauggcauggau

SEQ ID NO: 844631 - RNA, 19 nt, Artificial Sequence
  Description of Artificial Sequence: Synthetic oligonucleotide
uccucgaauuagcaauggc

SEQ ID NO: 844632 - RNA, 19 nt, Artificial Sequence
  Description of Artificial Sequence: Synthetic oligonucleotide
augucucaacaugaaugcc

SEQ ID NO: 844633 - RNA, 19 nt, Artificial Sequence
  Description of Artificial Sequence: Synthetic oligonucleotide
gacucuugaaaaucccaca

SEQ ID NO: 844634 - RNA, 19 nt, Artificial Sequence
  Description of Artificial Sequence: Synthetic oligonucleotide
accugcacuaccauguguc

SEQ ID NO: 844635 - RNA, 19 nt, Artificial Sequence
  Description of Artificial Sequence: Synthetic oligonucleotide
aaaaggguucaaugaguuu

SEQ ID NO: 844636 - RNA, 19 nt, Artificial Sequence
  Description of Artificial Sequence: Synthetic oligonucleotide
aacgaaggcugauguguca

SEQ ID NO: 844637 - RNA, 19 nt, Artificial Sequence
  Description of Artificial Sequence: Synthetic oligonucleotide
acuuuuggagguccgagua

SEQ ID NO: 844638 - RNA, 19 nt, Artificial Sequence
  Description of Artificial Sequence: Synthetic oligonucleotide
cacacacacacaaggauca

SEQ ID NO: 844639 - RNA, 19 nt, Artificial Sequence
  Description of Artificial Sequence: Synthetic oligonucleotide
accuagguaauuugccaug

SEQ ID NO: 844640 - RNA, 19 nt, Artificial Sequence
  Description of Artificial Sequence: Synthetic oligonucleotide
ugaagcuguugguauggga

SEQ ID NO: 844641 - RNA, 19 nt, Artificial Sequence
  Description of Artificial Sequence: Synthetic oligonucleotide
uuuuggagguccgaguaaa

SEQ ID NO: 844642 - RNA, 19 nt, Artificial Sequence
  Description of Artificial Sequence: Synthetic oligonucleotide
gacucagauuucucuuucc

SEQ ID NO: 844643 - RNA, 19 nt, Artificial Sequence
  Description of Artificial Sequence: Synthetic oligonucleotide
cacguuuaggcuguaaguc

SEQ ID NO: 844644 - RNA, 19 nt, Artificial Sequence
  Description of Artificial Sequence: Synthetic oligonucleotide
cuuccucgaauuagcaaug

SEQ ID NO: 844645 - RNA, 19 nt, Artificial Sequence
  Description of Artificial Sequence: Synthetic oligonucleotide
ccuacugaaaggcuugggg

SEQ ID NO: 844646 - RNA, 19 nt, Artificial Sequence
  Description of Artificial Sequence: Synthetic oligonucleotide
guuaccaaaggcgcugaag

SEQ ID NO: 844647 - RNA, 19 nt, Artificial Sequence
  Description of Artificial Sequence: Synthetic oligonucleotide
agagaaacgaaggcugaug

SEQ ID NO: 844648 - RNA, 19 nt, Artificial Sequence
  Description of Artificial Sequence: Synthetic oligonucleotide
cauagcuuggaaagccuuc

SEQ ID NO: 844649 - RNA, 19 nt, Artificial Sequence
  Description of Artificial Sequence: Synthetic oligonucleotide
uaaaaggcugugugcuggc

SEQ ID NO: 844650 - RNA, 19 nt, Artificial Sequence
  Description of Artificial Sequence: Synthetic oligonucleotide
gagaaacgaaggcugaugu

SEQ ID NO: 844651 - RNA, 19 nt, Artificial Sequence
  Description of Artificial Sequence: Synthetic oligonucleotide
ggauccgauaacuuucagc

SEQ ID NO: 844652 - RNA, 19 nt, Artificial Sequence
  Description of Artificial Sequence: Synthetic oligonucleotide
agcucagagucagauaucu

SEQ ID NO: 844653 - RNA, 19 nt, Artificial Sequence
  Description of Artificial Sequence: Synthetic oligonucleotide
ugacccucauaagaaauaa

SEQ ID NO: 844654 - RNA, 19 nt, Artificial Sequence
  Description of Artificial Sequence: Synthetic oligonucleotide
aaggguucaaugaguuuug

SEQ ID NO: 844655 - RNA, 19 nt, Artificial Sequence
  Description of Artificial Sequence: Synthetic oligonucleotide
acaaccagcuuccucgaau

SEQ ID NO: 844656 - RNA, 19 nt, Artificial Sequence
  Description of Artificial Sequence: Synthetic oligonucleotide
guccgaguaaagaaccuag

SEQ ID NO: 844657 - RNA, 19 nt, Artificial Sequence
  Description of Artificial Sequence: Synthetic oligonucleotide
cagauaucuccuccaauuc

SEQ ID NO: 844658 - RNA, 19 nt, Artificial Sequence
  Description of Artificial Sequence: Synthetic oligonucleotide
ucauagcuuggaaagccuu

SEQ ID NO: 844659 - RNA, 19 nt, Artificial Sequence
  Description of Artificial Sequence: Synthetic oligonucleotide
cagugcauggcucuagauc

SEQ ID NO: 844660 - RNA, 19 nt, Artificial Sequence
  Description of Artificial Sequence: Synthetic oligonucleotide
uuccucgaauuagcaaugg

SEQ ID NO: 844661 - RNA, 19 nt, Artificial Sequence
  Description of Artificial Sequence: Synthetic oligonucleotide
ccaugugucgggaacuucg

SEQ ID NO: 844662 - RNA, 19 nt, Artificial Sequence
  Description of Artificial Sequence: Synthetic oligonucleotide
uccaacaaccagcuuccuc

SEQ ID NO: 844663 - RNA, 19 nt, Artificial Sequence
  Description of Artificial Sequence: Synthetic oligonucleotide
uccaacucaaagucugaua

SEQ ID NO: 844664 - RNA, 19 nt, Artificial Sequence
  Description of Artificial Sequence: Synthetic oligonucleotide
agaaguuaaaugacuucgu

SEQ ID NO: 844665 - RNA, 19 nt, Artificial Sequence
  Description of Artificial Sequence: Synthetic oligonucleotide
auagcuuggaaagccuucu

SEQ ID NO: 844666 - RNA, 19 nt, Artificial Sequence
  Description of Artificial Sequence: Synthetic oligonucleotide
cacacacacacacacacaa

SEQ ID NO: 844667 - RNA, 19 nt, Artificial Sequence
  Description of Artificial Sequence: Synthetic oligonucleotide
ugcuuguugucuuccugcu

SEQ ID NO: 844668 - RNA, 19 nt, Artificial Sequence
  Description of Artificial Sequence: Synthetic oligonucleotide
cuucguuauauacuuggaa

SEQ ID NO: 844669 - RNA, 19 nt, Artificial Sequence
  Description of Artificial Sequence: Synthetic oligonucleotide
agggcuaucugcaacaguu

SEQ ID NO: 844670 - RNA, 19 nt, Artificial Sequence
  Description of Artificial Sequence: Synthetic oligonucleotide
uccugucucaaugaggguu

SEQ ID NO: 844671 - RNA, 19 nt, Artificial Sequence
  Description of Artificial Sequence: Synthetic oligonucleotide
agcgcaaaguccaaacuga

SEQ ID NO: 844672 - RNA, 19 nt, Artificial Sequence
  Description of Artificial Sequence: Synthetic oligonucleotide
uggauccgauaacuuucag

SEQ ID NO: 844673 - RNA, 19 nt, Artificial Sequence
  Description of Artificial Sequence: Synthetic oligonucleotide
aaccgcuuuuccaacucug

SEQ ID NO: 844674 - RNA, 19 nt, Artificial Sequence
  Description of Artificial Sequence: Synthetic oligonucleotide
ucaaacggugucucuuuua

SEQ ID NO: 844675 - RNA, 19 nt, Artificial Sequence
  Description of Artificial Sequence: Synthetic oligonucleotide
cucgaauuagcaauggcau

SEQ ID NO: 844676 - RNA, 19 nt, Artificial Sequence
  Description of Artificial Sequence: Synthetic oligonucleotide
gugacugaggguccaucgc

SEQ ID NO: 844677 - RNA, 19 nt, Artificial Sequence
  Description of Artificial Sequence: Synthetic oligonucleotide
cugugaagcuguugguaug

SEQ ID NO: 844678 - RNA, 19 nt, Artificial Sequence
  Description of Artificial Sequence: Synthetic oligonucleotide
gaauugugugcaugacauc

SEQ ID NO: 844679 - RNA, 19 nt, Artificial Sequence
  Description of Artificial Sequence: Synthetic oligonucleotide
aauuccccaucgauggcga

SEQ ID NO: 844680 - RNA, 19 nt, Artificial Sequence
  Description of Artificial Sequence: Synthetic oligonucleotide
gucaaaaccacuugucaau

SEQ ID NO: 844681 - RNA, 19 nt, Artificial Sequence
  Description of Artificial Sequence: Synthetic oligonucleotide
aguaaagaaccuagguaau

SEQ ID NO: 844682 - RNA, 19 nt, Artificial Sequence
  Description of Artificial Sequence: Synthetic oligonucleotide
aguguccuaaaggaacaca

SEQ ID NO: 844683 - RNA, 19 nt, Artificial Sequence
  Description of Artificial Sequence: Synthetic oligonucleotide
ccaacucaaagucugauaa

SEQ ID NO: 844684 - RNA, 19 nt, Artificial Sequence
  Description of Artificial Sequence: Synthetic oligonucleotide
cacaggaaucuaucuguuc

SEQ ID NO: 844685 - RNA, 19 nt, Artificial Sequence
  Description of Artificial Sequence: Synthetic oligonucleotide
gaguccugugauguaagca

SEQ ID NO: 844686 - RNA, 19 nt, Artificial Sequence
  Description of Artificial Sequence: Synthetic oligonucleotide
gaugcaugcuguaguucug

SEQ ID NO: 844687 - RNA, 19 nt, Artificial Sequence
  Description of Artificial Sequence: Synthetic oligonucleotide
cuguaagucuggcccuucc

SEQ ID NO: 844688 - RNA, 19 nt, Artificial Sequence
  Description of Artificial Sequence: Synthetic oligonucleotide
cugcacuaccaugugucgg

SEQ ID NO: 844689 - RNA, 19 nt, Artificial Sequence
  Description of Artificial Sequence: Synthetic oligonucleotide
guguccuaaaggaacacaa

SEQ ID NO: 844690 - RNA, 19 nt, Artificial Sequence
  Description of Artificial Sequence: Synthetic oligonucleotide
ucauacccugccucaugca

SEQ ID NO: 844691 - RNA, 19 nt, Artificial Sequence
  Description of Artificial Sequence: Synthetic oligonucleotide
gaauuagcaauggcaugga

SEQ ID NO: 844692 - RNA, 19 nt, Artificial Sequence
  Description of Artificial Sequence: Synthetic oligonucleotide
uaacagcaauuuguacuug

SEQ ID NO: 844693 - RNA, 19 nt, Artificial Sequence
  Description of Artificial Sequence: Synthetic oligonucleotide
caugaaugccuuugggaaa

SEQ ID NO: 844694 - RNA, 19 nt, Artificial Sequence
  Description of Artificial Sequence: Synthetic oligonucleotide
ucugcuggaguguccuaaa

SEQ ID NO: 844695 - RNA, 19 nt, Artificial Sequence
  Description of Artificial Sequence: Synthetic oligonucleotide
augaucacguuuaggcugu

SEQ ID NO: 844696 - RNA, 19 nt, Artificial Sequence
  Description of Artificial Sequence: Synthetic oligonucleotide
acacaaugcuuugccacug

SEQ ID NO: 844697 - RNA, 19 nt, Artificial Sequence
  Description of Artificial Sequence: Synthetic oligonucleotide
caucauacccugccucaug

SEQ ID NO: 844698 - RNA, 19 nt, Artificial Sequence
  Description of Artificial Sequence: Synthetic oligonucleotide
ugaggguuugaugcaugcu

SEQ ID NO: 844699 - RNA, 19 nt, Artificial Sequence
  Description of Artificial Sequence: Synthetic oligonucleotide
cugugucauagcuuggaaa

SEQ ID NO: 844700 - RNA, 19 nt, Artificial Sequence
  Description of Artificial Sequence: Synthetic oligonucleotide
acuucguuauauacuugga

SEQ ID NO: 844701 - RNA, 19 nt, Artificial Sequence
  Description of Artificial Sequence: Synthetic oligonucleotide
acacacacacacacaagga

SEQ ID NO: 844702 - RNA, 19 nt, Artificial Sequence
  Description of Artificial Sequence: Synthetic oligonucleotide
cuguugguaugggaacagg

SEQ ID NO: 844703 - RNA, 19 nt, Artificial Sequence
  Description of Artificial Sequence: Synthetic oligonucleotide
ggaaauucucuaucuucuc

SEQ ID NO: 844704 - RNA, 19 nt, Artificial Sequence
  Description of Artificial Sequence: Synthetic oligonucleotide
cuggugaauugugugcaug

SEQ ID NO: 844705 - RNA, 19 nt, Artificial Sequence
  Description of Artificial Sequence: Synthetic oligonucleotide
accuacugaaaggcuuggg

SEQ ID NO: 844706 - RNA, 19 nt, Artificial Sequence
  Description of Artificial Sequence: Synthetic oligonucleotide
uguuaccaaaggcgcugaa

SEQ ID NO: 844707 - RNA, 19 nt, Artificial Sequence
  Description of Artificial Sequence: Synthetic oligonucleotide
ggugucaaaaccacuuguc

SEQ ID NO: 844708 - RNA, 19 nt, Artificial Sequence
  Description of Artificial Sequence: Synthetic oligonucleotide
auugugugcaugacaucca

SEQ ID NO: 844709 - RNA, 19 nt, Artificial Sequence
  Description of Artificial Sequence: Synthetic oligonucleotide
cuggauccgauaacuuuca

SEQ ID NO: 844710 - RNA, 19 nt, Artificial Sequence
  Description of Artificial Sequence: Synthetic oligonucleotide
uaacuaugugucucuccuu

SEQ ID NO: 844711 - RNA, 19 nt, Artificial Sequence
  Description of Artificial Sequence: Synthetic oligonucleotide
guuaaaugacuucguuaua

SEQ ID NO: 844712 - RNA, 19 nt, Artificial Sequence
  Description of Artificial Sequence: Synthetic oligonucleotide
gggaagacacauauuguca

SEQ ID NO: 844713 - RNA, 19 nt, Artificial Sequence
  Description of Artificial Sequence: Synthetic oligonucleotide
caucgauggcgaagaaguc

SEQ ID NO: 844714 - RNA, 19 nt, Artificial Sequence
  Description of Artificial Sequence: Synthetic oligonucleotide
ggggaaaacauagaaguua

SEQ ID NO: 844715 - RNA, 19 nt, Artificial Sequence
  Description of Artificial Sequence: Synthetic oligonucleotide
ccccauuggccugagaacg

SEQ ID NO: 844716 - RNA, 19 nt, Artificial Sequence
  Description of Artificial Sequence: Synthetic oligonucleotide
gauaucuccuccaauucuu

SEQ ID NO: 844717 - RNA, 19 nt, Artificial Sequence
  Description of Artificial Sequence: Synthetic oligonucleotide
aggcuguaagucuggcccu

SEQ ID NO: 844718 - RNA, 19 nt, Artificial Sequence
  Description of Artificial Sequence: Synthetic oligonucleotide
acuuaguauccaagagucu

SEQ ID NO: 844719 - RNA, 19 nt, Artificial Sequence
  Description of Artificial Sequence: Synthetic oligonucleotide
cugauaacuaugugucucu

SEQ ID NO: 844720 - RNA, 19 nt, Artificial Sequence
  Description of Artificial Sequence: Synthetic oligonucleotide
uggugaggaccuacugaaa

SEQ ID NO: 844721 - RNA, 19 nt, Artificial Sequence
  Description of Artificial Sequence: Synthetic oligonucleotide
auccgauaacuuucagcau

SEQ ID NO: 844722 - RNA, 19 nt, Artificial Sequence
  Description of Artificial Sequence: Synthetic oligonucleotide
gcuuccucgaauuagcaau

SEQ ID NO: 844723 - RNA, 19 nt, Artificial Sequence
  Description of Artificial Sequence: Synthetic oligonucleotide
ugaaaggcuuggggaaaac

SEQ ID NO: 844724 - RNA, 19 nt, Artificial Sequence
  Description of Artificial Sequence: Synthetic oligonucleotide
acacacacacacacacaag

SEQ ID NO: 844725 - RNA, 19 nt, Artificial Sequence
  Description of Artificial Sequence: Synthetic oligonucleotide
caggggcuugacacuuugg

SEQ ID NO: 844726 - RNA, 19 nt, Artificial Sequence
  Description of Artificial Sequence: Synthetic oligonucleotide
auggcauggaugacucuug

SEQ ID NO: 844727 - RNA, 19 nt, Artificial Sequence
  Description of Artificial Sequence: Synthetic oligonucleotide
gugaagcuguugguauggg

SEQ ID NO: 844728 - RNA, 19 nt, Artificial Sequence
  Description of Artificial Sequence: Synthetic oligonucleotide
gaguguccuaaaggaacac

SEQ ID NO: 844729 - RNA, 19 nt, Artificial Sequence
  Description of Artificial Sequence: Synthetic oligonucleotide
acucaaagucugauaaaua

SEQ ID NO: 844730 - RNA, 19 nt, Artificial Sequence
  Description of Artificial Sequence: Synthetic oligonucleotide
ugcaagggauguguuguua

SEQ ID NO: 844731 - RNA, 19 nt, Artificial Sequence
  Description of Artificial Sequence: Synthetic oligonucleotide
caugugucgggaacuucga

SEQ ID NO: 844732 - RNA, 19 nt, Artificial Sequence
  Description of Artificial Sequence: Synthetic oligonucleotide
cucuagauccaagcucuuc

SEQ ID NO: 844733 - RNA, 19 nt, Artificial Sequence
  Description of Artificial Sequence: Synthetic oligonucleotide
accaugugucgggaacuuc

SEQ ID NO: 844734 - RNA, 19 nt, Artificial Sequence
  Description of Artificial Sequence: Synthetic oligonucleotide
gcugguaaaggucacuggu

SEQ ID NO: 844735 - RNA, 19 nt, Artificial Sequence
  Description of Artificial Sequence: Synthetic oligonucleotide
agggucaaacggugucucu

SEQ ID NO: 844736 - RNA, 19 nt, Artificial Sequence
  Description of Artificial Sequence: Synthetic oligonucleotide
cuagguaauuugccaugga

SEQ ID NO: 844737 - RNA, 19 nt, Artificial Sequence
  Description of Artificial Sequence: Synthetic oligonucleotide
ccugcacuaccaugugucg

SEQ ID NO: 844738 - RNA, 19 nt, Artificial Sequence
  Description of Artificial Sequence: Synthetic oligonucleotide
gaagacacauauugucauu

SEQ ID NO: 844739 - RNA, 19 nt, Artificial Sequence
  Description of Artificial Sequence: Synthetic oligonucleotide
aguuccugccaaggaaagu

SEQ ID NO: 844740 - RNA, 19 nt, Artificial Sequence
  Description of Artificial Sequence: Synthetic oligonucleotide
cuuuuggagguccgaguaa

SEQ ID NO: 844741 - RNA, 19 nt, Artificial Sequence
  Description of Artificial Sequence: Synthetic oligonucleotide
augugucgggaacuucgaa

SEQ ID NO: 844742 - RNA, 19 nt, Artificial Sequence
  Description of Artificial Sequence: Synthetic oligonucleotide
ggaguguccuaaaggaaca

SEQ ID NO: 844743 - RNA, 19 nt, Artificial Sequence
  Description of Artificial Sequence: Synthetic oligonucleotide
agacacacacacacacaca

SEQ ID NO: 844744 - RNA, 19 nt, Artificial Sequence
  Description of Artificial Sequence: Synthetic oligonucleotide
auguuaccaaaggcgcuga

SEQ ID NO: 844745 - RNA, 19 nt, Artificial Sequence
  Description of Artificial Sequence: Synthetic oligonucleotide
auggagacacacacacaca

SEQ ID NO: 844746 - RNA, 19 nt, Artificial Sequence
  Description of Artificial Sequence: Synthetic oligonucleotide
cacacacacacacaaggau

SEQ ID NO: 844747 - RNA, 19 nt, Artificial Sequence
  Description of Artificial Sequence: Synthetic oligonucleotide
uaguucugccauggagaca

SEQ ID NO: 844748 - RNA, 19 nt, Artificial Sequence
  Description of Artificial Sequence: Synthetic oligonucleotide
ggcgcugaagagcugguaa

SEQ ID NO: 844749 - RNA, 19 nt, Artificial Sequence
  Description of Artificial Sequence: Synthetic oligonucleotide
uccaggauaucuggauguu

SEQ ID NO: 844750 - RNA, 19 nt, Artificial Sequence
  Description of Artificial Sequence: Synthetic oligonucleotide
acacacacacacacacaca

SEQ ID NO: 844751 - RNA, 19 nt, Artificial Sequence
  Description of Artificial Sequence: Synthetic oligonucleotide
gggcaauagaacuggugaa

SEQ ID NO: 844752 - RNA, 19 nt, Artificial Sequence
  Description of Artificial Sequence: Synthetic oligonucleotide
gcaagggauguguuguuaa

SEQ ID NO: 844753 - RNA, 19 nt, Artificial Sequence
  Description of Artificial Sequence: Synthetic oligonucleotide
uguguccaacaaccagcuu

SEQ ID NO: 844754 - RNA, 19 nt, Artificial Sequence
  Description of Artificial Sequence: Synthetic oligonucleotide
caacaaccagcuuccucga

SEQ ID NO: 844755 - RNA, 19 nt, Artificial Sequence
  Description of Artificial Sequence: Synthetic oligonucleotide
ugaaugccuuugggaaacu

SEQ ID NO: 844756 - RNA, 19 nt, Artificial Sequence
  Description of Artificial Sequence: Synthetic oligonucleotide
ggcccuuccaaguuuaaau

SEQ ID NO: 844757 - RNA, 19 nt, Artificial Sequence
  Description of Artificial Sequence: Synthetic oligonucleotide
auaucuccuccaauucuuu

SEQ ID NO: 844758 - RNA, 19 nt, Artificial Sequence
  Description of Artificial Sequence: Synthetic oligonucleotide
augucacguggagaacaug

SEQ ID NO: 844759 - RNA, 19 nt, Artificial Sequence
  Description of Artificial Sequence: Synthetic oligonucleotide
agguccgaguaaagaaccu

SEQ ID NO: 844760 - RNA, 19 nt, Artificial Sequence
  Description of Artificial Sequence: Synthetic oligonucleotide
guaaagaaccuagguaauu

SEQ ID NO: 844761 - RNA, 19 nt, Artificial Sequence
  Description of Artificial Sequence: Synthetic oligonucleotide
guccaucgcugauuccuga

SEQ ID NO: 844762 - RNA, 19 nt, Artificial Sequence
  Description of Artificial Sequence: Synthetic oligonucleotide
gcauauuuacugguauuaa

SEQ ID NO: 844763 - RNA, 19 nt, Artificial Sequence
  Description of Artificial Sequence: Synthetic oligonucleotide
guaugggaacaggggcuug

SEQ ID NO: 844764 - RNA, 19 nt, Artificial Sequence
  Description of Artificial Sequence: Synthetic oligonucleotide
gucaucaauccaggauauc

SEQ ID NO: 844765 - RNA, 19 nt, Artificial Sequence
  Description of Artificial Sequence: Synthetic oligonucleotide
gccccauuggccugagaac

SEQ ID NO: 844766 - RNA, 19 nt, Artificial Sequence
  Description of Artificial Sequence: Synthetic oligonucleotide
ggagacacacacacacaca

SEQ ID NO: 844767 - RNA, 19 nt, Artificial Sequence
  Description of Artificial Sequence: Synthetic oligonucleotide
cggugucucuuuuaaccgc

SEQ ID NO: 844768 - RNA, 19 nt, Artificial Sequence
  Description of Artificial Sequence: Synthetic oligonucleotide
cugucucaaugaggguuug

SEQ ID NO: 844769 - RNA, 19 nt, Artificial Sequence
  Description of Artificial Sequence: Synthetic oligonucleotide
ucugauccucagggauugu

SEQ ID NO: 844770 - RNA, 19 nt, Artificial Sequence
  Description of Artificial Sequence: Synthetic oligonucleotide
gagagaaacgaaggcugau

SEQ ID NO: 844771 - RNA, 19 nt, Artificial Sequence
  Description of Artificial Sequence: Synthetic oligonucleotide
cuugaccugcuuguugucu

SEQ ID NO: 844772 - RNA, 19 nt, Artificial Sequence
  Description of Artificial Sequence: Synthetic oligonucleotide
ccugaaaauuccccaucga

SEQ ID NO: 844773 - RNA, 19 nt, Artificial Sequence
  Description of Artificial Sequence: Synthetic oligonucleotide
ggcaauagaacuggugaau

SEQ ID NO: 844774 - RNA, 19 nt, Artificial Sequence
  Description of Artificial Sequence: Synthetic oligonucleotide
ggggaaugucacguggaga

SEQ ID NO: 844775 - RNA, 19 nt, Artificial Sequence
  Description of Artificial Sequence: Synthetic oligonucleotide
ccgaguaaagaaccuaggu

SEQ ID NO: 844776 - RNA, 19 nt, Artificial Sequence
  Description of Artificial Sequence: Synthetic oligonucleotide
ccaagagucuggggaagac

SEQ ID NO: 844777 - RNA, 19 nt, Artificial Sequence
  Description of Artificial Sequence: Synthetic oligonucleotide
gguccgaguaaagaaccua

SEQ ID NO: 844778 - RNA, 19 nt, Artificial Sequence
  Description of Artificial Sequence: Synthetic oligonucleotide
cguuauauacuuggaaucu

SEQ ID NO: 844779 - RNA, 19 nt, Artificial Sequence
  Description of Artificial Sequence: Synthetic oligonucleotide
ccaugacccucauaagaaa

SEQ ID NO: 844780 - RNA, 19 nt, Artificial Sequence
  Description of Artificial Sequence: Synthetic oligonucleotide
ggguucaaugaguuuugau

SEQ ID NO: 844781 - RNA, 19 nt, Artificial Sequence
  Description of Artificial Sequence: Synthetic oligonucleotide
gucaaacggugucucuuuu

SEQ ID NO: 844782 - RNA, 19 nt, Artificial Sequence
  Description of Artificial Sequence: Synthetic oligonucleotide
ggauguuaccaaaggcgcu

SEQ ID NO: 844783 - RNA, 19 nt, Artificial Sequence
  Description of Artificial Sequence: Synthetic oligonucleotide
gggcuaucugcaacaguuc

SEQ ID NO: 844784 - RNA, 19 nt, Artificial Sequence
  Description of Artificial Sequence: Synthetic oligonucleotide
cacaaugcuuugccacugu

SEQ ID NO: 844785 - RNA, 19 nt, Artificial Sequence
  Description of Artificial Sequence: Synthetic oligonucleotide
ggucaggacucagauuucu

SEQ ID NO: 844786 - RNA, 19 nt, Artificial Sequence
  Description of Artificial Sequence: Synthetic oligonucleotide
ggguuugaugcaugcugua

SEQ ID NO: 844787 - RNA, 19 nt, Artificial Sequence
  Description of Artificial Sequence: Synthetic oligonucleotide
gucacguggagaacaugau

SEQ ID NO: 844788 - RNA, 19 nt, Artificial Sequence
  Description of Artificial Sequence: Synthetic oligonucleotide
ugaucacguuuaggcugua

SEQ ID NO: 844789 - RNA, 19 nt, Artificial Sequence
  Description of Artificial Sequence: Synthetic oligonucleotide
ccgauaacuuucagcauau

SEQ ID NO: 844790 - RNA, 19 nt, Artificial Sequence
  Description of Artificial Sequence: Synthetic oligonucleotide
gcucagagucagauaucuc

SEQ ID NO: 844791 - RNA, 19 nt, Artificial Sequence
  Description of Artificial Sequence: Synthetic oligonucleotide
gcgcaaaguccaaacugaa

SEQ ID NO: 844792 - RNA, 19 nt, Artificial Sequence
  Description of Artificial Sequence: Synthetic oligonucleotide
cuugacacuuuggguugcu

SEQ ID NO: 844793 - RNA, 19 nt, Artificial Sequence
  Description of Artificial Sequence: Synthetic oligonucleotide
aggcgcugaagagcuggua

SEQ ID NO: 844794 - RNA, 19 nt, Artificial Sequence
  Description of Artificial Sequence: Synthetic oligonucleotide
cucuauggccugguacacu

SEQ ID NO: 844795 - RNA, 19 nt, Artificial Sequence
  Description of Artificial Sequence: Synthetic oligonucleotide
cagggcuaucugcaacagu

SEQ ID NO: 844796 - RNA, 19 nt, Artificial Sequence
  Description of Artificial Sequence: Synthetic oligonucleotide
gguaugggaacaggggcuu

SEQ ID NO: 844797 - RNA, 19 nt, Artificial Sequence
  Description of Artificial Sequence: Synthetic oligonucleotide
gcuguaagucuggcccuuc

SEQ ID NO: 844798 - RNA, 19 nt, Artificial Sequence
  Description of Artificial Sequence: Synthetic oligonucleotide
cuccugucucaaugagggu

SEQ ID NO: 844799 - RNA, 19 nt, Artificial Sequence
  Description of Artificial Sequence: Synthetic oligonucleotide
cugaggguccaucgcugau

SEQ ID NO: 844800 - RNA, 19 nt, Artificial Sequence
  Description of Artificial Sequence: Synthetic oligonucleotide
gggucaaacggugucucuu

SEQ ID NO: 844801 - RNA, 19 nt, Artificial Sequence
  Description of Artificial Sequence: Synthetic oligonucleotide
gcacuaccaugugucggga

SEQ ID NO: 844802 - RNA, 19 nt, Artificial Sequence
  Description of Artificial Sequence: Synthetic oligonucleotide
ccaggauaucuggauguua

SEQ ID NO: 844803 - RNA, 19 nt, Artificial Sequence
  Description of Artificial Sequence: Synthetic oligonucleotide
ggcuguaagucuggcccuu

SEQ ID NO: 844804 - RNA, 19 nt, Artificial Sequence
  Description of Artificial Sequence: Synthetic oligonucleotide
gcucuagauccaagcucuu

SEQ ID NO: 844805 - RNA, 19 nt, Artificial Sequence
  Description of Artificial Sequence: Synthetic oligonucleotide
aggcucuuaagcuauagcc

SEQ ID NO: 844806 - RNA, 19 nt, Artificial Sequence
  Description of Artificial Sequence: Synthetic oligonucleotide
ucugauauugggcugacca

SEQ ID NO: 844807 - RNA, 19 nt, Artificial Sequence
  Description of Artificial Sequence: Synthetic oligonucleotide
agagagacaucccaaagcg

SEQ ID NO: 844808 - RNA, 19 nt, Artificial Sequence
  Description of Artificial Sequence: Synthetic oligonucleotide
aaagucaguagcucugugg

SEQ ID NO: 844809 - RNA, 19 nt, Artificial Sequence
  Description of Artificial Sequence: Synthetic oligonucleotide
uacucuguuccaauaagcg

SEQ ID NO: 844810 - RNA, 19 nt, Artificial Sequence
  Description of Artificial Sequence: Synthetic oligonucleotide
aaagcggccuuuccgaugg

SEQ ID NO: 844811 - RNA, 19 nt, Artificial Sequence
  Description of Artificial Sequence: Synthetic oligonucleotide
uguguagcagccauuuccg

SEQ ID NO: 844812 - RNA, 19 nt, Artificial Sequence
  Description of Artificial Sequence: Synthetic oligonucleotide
ugcgguaaaggaaggaagg

SEQ ID NO: 844813 - RNA, 19 nt, Artificial Sequence
  Description of Artificial Sequence: Synthetic oligonucleotide
agacuagggaagcucaacc

SEQ ID NO: 844814 - RNA, 19 nt, Artificial Sequence
  Description of Artificial Sequence: Synthetic oligonucleotide
ugggugugaacacaaacug

SEQ ID NO: 844815 - RNA, 19 nt, Artificial Sequence
  Description of Artificial Sequence: Synthetic oligonucleotide
ugacuugucaucugcaucu

SEQ ID NO: 844816 - RNA, 19 nt, Artificial Sequence
  Description of Artificial Sequence: Synthetic oligonucleotide
gaagcucaaccugagaagg

SEQ ID NO: 844817 - RNA, 19 nt, Artificial Sequence
  Description of Artificial Sequence: Synthetic oligonucleotide
uaagcuauagccaguguuc

SEQ ID NO: 844818 - RNA, 19 nt, Artificial Sequence
  Description of Artificial Sequence: Synthetic oligonucleotide
uuacucuguuccaauaagc

SEQ ID NO: 844819 - RNA, 19 nt, Artificial Sequence
  Description of Artificial Sequence: Synthetic oligonucleotide
ucuguaaagugcuggcccg

SEQ ID NO: 844820 - RNA, 19 nt, Artificial Sequence
  Description of Artificial Sequence: Synthetic oligonucleotide
uugauaggaacagugacac

SEQ ID NO: 844821 - RNA, 19 nt, Artificial Sequence
  Description of Artificial Sequence: Synthetic oligonucleotide
agucucuccauugagccgc

SEQ ID NO: 844822 - RNA, 19 nt, Artificial Sequence
  Description of Artificial Sequence: Synthetic oligonucleotide
uuaagcuauagccaguguu

SEQ ID NO: 844823 - RNA, 19 nt, Artificial Sequence
  Description of Artificial Sequence: Synthetic oligonucleotide
aggaguaccacaaacucgg

SEQ ID NO: 844824 - RNA, 19 nt, Artificial Sequence
  Description of Artificial Sequence: Synthetic oligonucleotide
cuggguguagagaagaaac

SEQ ID NO: 844825 - RNA, 19 nt, Artificial Sequence
  Description of Artificial Sequence: Synthetic oligonucleotide
gagggagucacuucugucc

SEQ ID NO: 844826 - RNA, 19 nt, Artificial Sequence
  Description of Artificial Sequence: Synthetic oligonucleotide
ucgaaaagaaggccugaag

SEQ ID NO: 844827 - RNA, 19 nt, Artificial Sequence
  Description of Artificial Sequence: Synthetic oligonucleotide
uauucgaaggccaccuccc

SEQ ID NO: 844828 - RNA, 19 nt, Artificial Sequence
  Description of Artificial Sequence: Synthetic oligonucleotide
aguuuugauaggaacagug

SEQ ID NO: 844829 - RNA, 19 nt, Artificial Sequence
  Description of Artificial Sequence: Synthetic oligonucleotide
gacuucaaacagcagggcc

SEQ ID NO: 844830 - RNA, 19 nt, Artificial Sequence
  Description of Artificial Sequence: Synthetic oligonucleotide
agaagucagaagccacugc

SEQ ID NO: 844831 - RNA, 19 nt, Artificial Sequence
  Description of Artificial Sequence: Synthetic oligonucleotide
cuugaacagacuagggaag

SEQ ID NO: 844832 - RNA, 19 nt, Artificial Sequence
  Description of Artificial Sequence: Synthetic oligonucleotide
guuacucuguuccaauaag

SEQ ID NO: 844833 - RNA, 19 nt, Artificial Sequence
  Description of Artificial Sequence: Synthetic oligonucleotide
agaaccgugaagaagucag

SEQ ID NO: 844834 - RNA, 19 nt, Artificial Sequence
  Description of Artificial Sequence: Synthetic oligonucleotide
ugauauugggcugaccacc

SEQ ID NO: 844835 - RNA, 19 nt, Artificial Sequence
  Description of Artificial Sequence: Synthetic oligonucleotide
acugggugacuucaaacag

SEQ ID NO: 844836 - RNA, 19 nt, Artificial Sequence
  Description of Artificial Sequence: Synthetic oligonucleotide
aacuccagaagcucucgug

SEQ ID NO: 844837 - RNA, 19 nt, Artificial Sequence
  Description of Artificial Sequence: Synthetic oligonucleotide
ggugugaacacaaacuggg

SEQ ID NO: 844838 - RNA, 19 nt, Artificial Sequence
  Description of Artificial Sequence: Synthetic oligonucleotide
uucagauggugacuguccc

SEQ ID NO: 844839 - RNA, 19 nt, Artificial Sequence
  Description of Artificial Sequence: Synthetic oligonucleotide
uggguguagagaagaaacc

SEQ ID NO: 844840 - RNA, 19 nt, Artificial Sequence
  Description of Artificial Sequence: Synthetic oligonucleotide
guagcagccauuuccgaag

SEQ ID NO: 844841 - RNA, 19 nt, Artificial Sequence
  Description of Artificial Sequence: Synthetic oligonucleotide
ucccaaagcggccuuuccg

SEQ ID NO: 844842 - RNA, 19 nt, Artificial Sequence
  Description of Artificial Sequence: Synthetic oligonucleotide
aagaaaccugcugaggaug

SEQ ID NO: 844843 - RNA, 19 nt, Artificial Sequence
  Description of Artificial Sequence: Synthetic oligonucleotide
uuccgauggagucugugug

SEQ ID NO: 844844 - RNA, 19 nt, Artificial Sequence
  Description of Artificial Sequence: Synthetic oligonucleotide
acuagggaagcucaaccug

SEQ ID NO: 844845 - RNA, 19 nt, Artificial Sequence
  Description of Artificial Sequence: Synthetic oligonucleotide
ucuuaagcuauagccagug

SEQ ID NO: 844846 - RNA, 19 nt, Artificial Sequence
  Description of Artificial Sequence: Synthetic oligonucleotide
aagaacugggcaaggggcg

SEQ ID NO: 844847 - RNA, 19 nt, Artificial Sequence
  Description of Artificial Sequence: Synthetic oligonucleotide
guuacccgggcacagcugg

SEQ ID NO: 844848 - RNA, 19 nt, Artificial Sequence
  Description of Artificial Sequence: Synthetic oligonucleotide
cuugucacaggucaccgac

SEQ ID NO: 844849 - RNA, 19 nt, Artificial Sequence
  Description of Artificial Sequence: Synthetic oligonucleotide
gacugggugacuucaaaca

SEQ ID NO: 844850 - RNA, 19 nt, Artificial Sequence
  Description of Artificial Sequence: Synthetic oligonucleotide
agucaguagcucuguggcc

SEQ ID NO: 844851 - RNA, 19 nt, Artificial Sequence
  Description of Artificial Sequence: Synthetic oligonucleotide
guauucgaaggccaccucc

SEQ ID NO: 844852 - RNA, 19 nt, Artificial Sequence
  Description of Artificial Sequence: Synthetic oligonucleotide
uccgauggagucugugugg

SEQ ID NO: 844853 - RNA, 19 nt, Artificial Sequence
  Description of Artificial Sequence: Synthetic oligonucleotide
cauguucagccacuggucc

SEQ ID NO: 844854 - RNA, 19 nt, Artificial Sequence
  Description of Artificial Sequence: Synthetic oligonucleotide
ggguccgaaguuuugauag

SEQ ID NO: 844855 - RNA, 19 nt, Artificial Sequence
  Description of Artificial Sequence: Synthetic oligonucleotide
gagggugcgguaaaggaag

SEQ ID NO: 844856 - RNA, 19 nt, Artificial Sequence
  Description of Artificial Sequence: Synthetic oligonucleotide
caggcaagcuuucuguagg

SEQ ID NO: 844857 - RNA, 19 nt, Artificial Sequence
  Description of Artificial Sequence: Synthetic oligonucleotide
ugaucagggccccaucagc

SEQ ID NO: 844858 - RNA, 19 nt, Artificial Sequence
  Description of Artificial Sequence: Synthetic oligonucleotide
uguuccaauaagcgcuggc

SEQ ID NO: 844859 - RNA, 19 nt, Artificial Sequence
  Description of Artificial Sequence: Synthetic oligonucleotide
uccaccucagugaugggac

SEQ ID NO: 844860 - RNA, 19 nt, Artificial Sequence
  Description of Artificial Sequence: Synthetic oligonucleotide
caugguucaggaagaacug

SEQ ID NO: 844861 - RNA, 19 nt, Artificial Sequence
  Description of Artificial Sequence: Synthetic oligonucleotide
gaacuugaacagacuaggg

SEQ ID NO: 844862 - RNA, 19 nt, Artificial Sequence
  Description of Artificial Sequence: Synthetic oligonucleotide
ccgugaagaagucagaagc

SEQ ID NO: 844863 - RNA, 19 nt, Artificial Sequence
  Description of Artificial Sequence: Synthetic oligonucleotide
uuuccgauggagucugugu

SEQ ID NO: 844864 - RNA, 19 nt, Artificial Sequence
  Description of Artificial Sequence: Synthetic oligonucleotide
uaagcgcuggcaguauucg

SEQ ID NO: 844865 - RNA, 19 nt, Artificial Sequence
  Description of Artificial Sequence: Synthetic oligonucleotide
aggaugugggaagggagcc

SEQ ID NO: 844866 - RNA, 19 nt, Artificial Sequence
  Description of Artificial Sequence: Synthetic oligonucleotide
gaacaugcuggcucggcug

SEQ ID NO: 844867 - RNA, 19 nt, Artificial Sequence
  Description of Artificial Sequence: Synthetic oligonucleotide
uaaagucaguagcucugug

SEQ ID NO: 844868 - RNA, 19 nt, Artificial Sequence
  Description of Artificial Sequence: Synthetic oligonucleotide
gaagggagccugcugagca

SEQ ID NO: 844869 - RNA, 19 nt, Artificial Sequence
  Description of Artificial Sequence: Synthetic oligonucleotide
agagggagucacuucuguc

SEQ ID NO: 844870 - RNA, 19 nt, Artificial Sequence
  Description of Artificial Sequence: Synthetic oligonucleotide
aacucugauauugggcuga

SEQ ID NO: 844871 - RNA, 19 nt, Artificial Sequence
  Description of Artificial Sequence: Synthetic oligonucleotide
gauauugggcugaccaccc

SEQ ID NO: 844872 - RNA, 19 nt, Artificial Sequence
  Description of Artificial Sequence: Synthetic oligonucleotide
ugaaguggcgucagucucu

SEQ ID NO: 844873 - RNA, 19 nt, Artificial Sequence
  Description of Artificial Sequence: Synthetic oligonucleotide
acuucaaacagcagggccu

SEQ ID NO: 844874 - RNA, 19 nt, Artificial Sequence
  Description of Artificial Sequence: Synthetic oligonucleotide
gagagaaccgugaagaagu

SEQ ID NO: 844875 - RNA, 19 nt, Artificial Sequence
  Description of Artificial Sequence: Synthetic oligonucleotide
gucccuucaaccuggcaag

SEQ ID NO: 844876 - RNA, 19 nt, Artificial Sequence
  Description of Artificial Sequence: Synthetic oligonucleotide
gucaguagcucuguggccc

SEQ ID NO: 844877 - RNA, 19 nt, Artificial Sequence
  Description of Artificial Sequence: Synthetic oligonucleotide
agucacuucuguccaggag

SEQ ID NO: 844878 - RNA, 19 nt, Artificial Sequence
  Description of Artificial Sequence: Synthetic oligonucleotide
acagucgaaaagaaggccu

SEQ ID NO: 844879 - RNA, 19 nt, Artificial Sequence
  Description of Artificial Sequence: Synthetic oligonucleotide
ucaguaaagucaguagcuc

SEQ ID NO: 844880 - RNA, 19 nt, Artificial Sequence
  Description of Artificial Sequence: Synthetic oligonucleotide
ucaccgacagguacucgcc

SEQ ID NO: 844881 - RNA, 19 nt, Artificial Sequence
  Description of Artificial Sequence: Synthetic oligonucleotide
ggccccaucagcaagcugg

SEQ ID NO: 844882 - RNA, 19 nt, Artificial Sequence
  Description of Artificial Sequence: Synthetic oligonucleotide
aagcuauagccaguguuca

SEQ ID NO: 844883 - RNA, 19 nt, Artificial Sequence
  Description of Artificial Sequence: Synthetic oligonucleotide
cagccgggaauccugagag

SEQ ID NO: 844884 - RNA, 19 nt, Artificial Sequence
  Description of Artificial Sequence: Synthetic oligonucleotide
ugaccagccuccaccacca

SEQ ID NO: 844885 - RNA, 19 nt, Artificial Sequence
  Description of Artificial Sequence: Synthetic oligonucleotide
guaaggggagggcuguucc

SEQ ID NO: 844886 - RNA, 19 nt, Artificial Sequence
  Description of Artificial Sequence: Synthetic oligonucleotide
aucccaaagcggccuuucc

SEQ ID NO: 844887 - RNA, 19 nt, Artificial Sequence
  Description of Artificial Sequence: Synthetic oligonucleotide
agaaaccugcugaggaugg

SEQ ID NO: 844888 - RNA, 19 nt, Artificial Sequence
  Description of Artificial Sequence: Synthetic oligonucleotide
aauaagcgcuggcaguauu

SEQ ID NO: 844889 - RNA, 19 nt, Artificial Sequence
  Description of Artificial Sequence: Synthetic oligonucleotide
uuggucagcguggucauga

SEQ ID NO: 844890 - RNA, 19 nt, Artificial Sequence
  Description of Artificial Sequence: Synthetic oligonucleotide
uggcaguauucgaaggcca

SEQ ID NO: 844891 - RNA, 19 nt, Artificial Sequence
  Description of Artificial Sequence: Synthetic oligonucleotide
gcgugcaacaucuccacgg

SEQ ID NO: 844892 - RNA, 19 nt, Artificial Sequence
  Description of Artificial Sequence: Synthetic oligonucleotide
cagcucaacucugauauug

SEQ ID NO: 844893 - RNA, 19 nt, Artificial Sequence
  Description of Artificial Sequence: Synthetic oligonucleotide
cagucgaaaagaaggccug

SEQ ID NO: 844894 - RNA, 19 nt, Artificial Sequence
  Description of Artificial Sequence: Synthetic oligonucleotide
aaccgugaagaagucagaa

SEQ ID NO: 844895 - RNA, 19 nt, Artificial Sequence
  Description of Artificial Sequence: Synthetic oligonucleotide
uugguacgaagcagguggc

SEQ ID NO: 844896 - RNA, 19 nt, Artificial Sequence
  Description of Artificial Sequence: Synthetic oligonucleotide
agccauuuccgaagcaugg

SEQ ID NO: 844897 - RNA, 19 nt, Artificial Sequence
  Description of Artificial Sequence: Synthetic oligonucleotide
cuggcaguauucgaaggcc

SEQ ID NO: 844898 - RNA, 19 nt, Artificial Sequence
  Description of Artificial Sequence: Synthetic oligonucleotide
cauaccacacaggugaaca

SEQ ID NO: 844899 - RNA, 19 nt, Artificial Sequence
  Description of Artificial Sequence: Synthetic oligonucleotide
cacaggugaacaugcuggc

SEQ ID NO: 844900 - RNA, 19 nt, Artificial Sequence
  Description of Artificial Sequence: Synthetic oligonucleotide
uccgaagcauggagaaggc

SEQ ID NO: 844901 - RNA, 19 nt, Artificial Sequence
  Description of Artificial Sequence: Synthetic oligonucleotide
ugugcaccucuugucacag

SEQ ID NO: 844902 - RNA, 19 nt, Artificial Sequence
  Description of Artificial Sequence: Synthetic oligonucleotide
gucucggugguaucggggc

SEQ ID NO: 844903 - RNA, 19 nt, Artificial Sequence
  Description of Artificial Sequence: Synthetic oligonucleotide
ggaggaguaccacaaacuc

SEQ ID NO: 844904 - RNA, 19 nt, Artificial Sequence
  Description of Artificial Sequence: Synthetic oligonucleotide
uguucagauggugacuguc

SEQ ID NO: 844905 - RNA, 19 nt, Artificial Sequence
  Description of Artificial Sequence: Synthetic oligonucleotide
uggguaucuucaguaaagu

SEQ ID NO: 844906 - RNA, 19 nt, Artificial Sequence
  Description of Artificial Sequence: Synthetic oligonucleotide
uccccaugguucaggaaga

SEQ ID NO: 844907 - RNA, 19 nt, Artificial Sequence
  Description of Artificial Sequence: Synthetic oligonucleotide
cacccagccuccuaugcag

SEQ ID NO: 844908 - RNA, 19 nt, Artificial Sequence
  Description of Artificial Sequence: Synthetic oligonucleotide
cauuuccgaagcauggaga

SEQ ID NO: 844909 - RNA, 19 nt, Artificial Sequence
  Description of Artificial Sequence: Synthetic oligonucleotide
cagugaugggaccuggcug

SEQ ID NO: 844910 - RNA, 19 nt, Artificial Sequence
  Description of Artificial Sequence: Synthetic oligonucleotide
cugcacacuggguuacccg

SEQ ID NO: 844911 - RNA, 19 nt, Artificial Sequence
  Description of Artificial Sequence: Synthetic oligonucleotide
agcucaacucugauauugg

SEQ ID NO: 844912 - RNA, 19 nt, Artificial Sequence
  Description of Artificial Sequence: Synthetic oligonucleotide
uugggcugaccacccaggc

SEQ ID NO: 844913 - RNA, 19 nt, Artificial Sequence
  Description of Artificial Sequence: Synthetic oligonucleotide
gugcgguaaaggaaggaag

SEQ ID NO: 844914 - RNA, 19 nt, Artificial Sequence
  Description of Artificial Sequence: Synthetic oligonucleotide
ugaacagacuagggaagcu

SEQ ID NO: 844915 - RNA, 19 nt, Artificial Sequence
  Description of Artificial Sequence: Synthetic oligonucleotide
caggcucuuaagcuauagc

SEQ ID NO: 844916 - RNA, 19 nt, Artificial Sequence
  Description of Artificial Sequence: Synthetic oligonucleotide
gguacgaagcagguggcgg

SEQ ID NO: 844917 - RNA, 19 nt, Artificial Sequence
  Description of Artificial Sequence: Synthetic oligonucleotide
ugacuucaaacagcagggc

SEQ ID NO: 844918 - RNA, 19 nt, Artificial Sequence
  Description of Artificial Sequence: Synthetic oligonucleotide
ccuccgguuacucuguucc

SEQ ID NO: 844919 - RNA, 19 nt, Artificial Sequence
  Description of Artificial Sequence: Synthetic oligonucleotide
gucagucucuccauugagc

SEQ ID NO: 844920 - RNA, 19 nt, Artificial Sequence
  Description of Artificial Sequence: Synthetic oligonucleotide
uugucacaggucaccgaca

SEQ ID NO: 844921 - RNA, 19 nt, Artificial Sequence
  Description of Artificial Sequence: Synthetic oligonucleotide
ggagagaaccgugaagaag

SEQ ID NO: 844922 - RNA, 19 nt, Artificial Sequence
  Description of Artificial Sequence: Synthetic oligonucleotide
cagucucuccauugagccg

SEQ ID NO: 844923 - RNA, 19 nt, Artificial Sequence
  Description of Artificial Sequence: Synthetic oligonucleotide
ccuucaaccuggcaagagg

SEQ ID NO: 844924 - RNA, 19 nt, Artificial Sequence
  Description of Artificial Sequence: Synthetic oligonucleotide
gcaagcuuucuguagguca

SEQ ID NO: 844925 - RNA, 19 nt, Artificial Sequence
  Description of Artificial Sequence: Synthetic oligonucleotide
agcucaaccugagaaggcu

SEQ ID NO: 844926 - RNA, 19 nt, Artificial Sequence
  Description of Artificial Sequence: Synthetic oligonucleotide
ccgaaguuuugauaggaac

SEQ ID NO: 844927 - RNA, 19 nt, Artificial Sequence
  Description of Artificial Sequence: Synthetic oligonucleotide
ugguacgaagcagguggcg

SEQ ID NO: 844928 - RNA, 19 nt, Artificial Sequence
  Description of Artificial Sequence: Synthetic oligonucleotide
gaucagggccccaucagca

SEQ ID NO: 844929 - RNA, 19 nt, Artificial Sequence
  Description of Artificial Sequence: Synthetic oligonucleotide
augcuggcguagcgcagcc

SEQ ID NO: 844930 - RNA, 19 nt, Artificial Sequence
  Description of Artificial Sequence: Synthetic oligonucleotide
gugguaucggggcuggcac

SEQ ID NO: 844931 - RNA, 19 nt, Artificial Sequence
  Description of Artificial Sequence: Synthetic oligonucleotide
gacuagggaagcucaaccu

SEQ ID NO: 844932 - RNA, 19 nt, Artificial Sequence
  Description of Artificial Sequence: Synthetic oligonucleotide
aaggcccuccgguuacucu

SEQ ID NO: 844933 - RNA, 19 nt, Artificial Sequence
  Description of Artificial Sequence: Synthetic oligonucleotide
gcuggcaguauucgaaggc

SEQ ID NO: 844934 - RNA, 19 nt, Artificial Sequence
  Description of Artificial Sequence: Synthetic oligonucleotide
gccggcacaacacauccag

SEQ ID NO: 844935 - RNA, 19 nt, Artificial Sequence
  Description of Artificial Sequence: Synthetic oligonucleotide
agucggcuggcaguggagg

SEQ ID NO: 844936 - RNA, 19 nt, Artificial Sequence
  Description of Artificial Sequence: Synthetic oligonucleotide
uggugacugucccuucaac

SEQ ID NO: 844937 - RNA, 19 nt, Artificial Sequence
  Description of Artificial Sequence: Synthetic oligonucleotide
ugaccacccaggcucuuaa

SEQ ID NO: 844938 - RNA, 19 nt, Artificial Sequence
  Description of Artificial Sequence: Synthetic oligonucleotide
gguccgaaguuuugauagg

SEQ ID NO: 844939 - RNA, 19 nt, Artificial Sequence
  Description of Artificial Sequence: Synthetic oligonucleotide
uggcgucucggugguaucg

SEQ ID NO: 844940 - RNA, 19 nt, Artificial Sequence
  Description of Artificial Sequence: Synthetic oligonucleotide
aagcgcuggcaguauucga

SEQ ID NO: 844941 - RNA, 19 nt, Artificial Sequence
  Description of Artificial Sequence: Synthetic oligonucleotide
cgugaagaagucagaagcc

SEQ ID NO: 844942 - RNA, 19 nt, Artificial Sequence
  Description of Artificial Sequence: Synthetic oligonucleotide
caucuggacugccuggguc

SEQ ID NO: 844943 - RNA, 19 nt, Artificial Sequence
  Description of Artificial Sequence: Synthetic oligonucleotide
caaagcggccuuuccgaug

SEQ ID NO: 844944 - RNA, 19 nt, Artificial Sequence
  Description of Artificial Sequence: Synthetic oligonucleotide
agcgccaggaacugggauu

SEQ ID NO: 844945 - RNA, 19 nt, Artificial Sequence
  Description of Artificial Sequence: Synthetic oligonucleotide
agagaaccgugaagaaguc

SEQ ID NO: 844946 - RNA, 19 nt, Artificial Sequence
  Description of Artificial Sequence: Synthetic oligonucleotide
caggaacuugaacagacua

SEQ ID NO: 844947 - RNA, 19 nt, Artificial Sequence
  Description of Artificial Sequence: Synthetic oligonucleotide
uggaccugagcuguagguc

SEQ ID NO: 844948 - RNA, 19 nt, Artificial Sequence
  Description of Artificial Sequence: Synthetic oligonucleotide
cagguggcggaagaguccc

SEQ ID NO: 844949 - RNA, 19 nt, Artificial Sequence
  Description of Artificial Sequence: Synthetic oligonucleotide
cacuggguuacccgggcac

SEQ ID NO: 844950 - RNA, 19 nt, Artificial Sequence
  Description of Artificial Sequence: Synthetic oligonucleotide
auucgaaggccaccucccu

SEQ ID NO: 844951 - RNA, 19 nt, Artificial Sequence
  Description of Artificial Sequence: Synthetic oligonucleotide
gaccaccugugguggacag

SEQ ID NO: 844952 - RNA, 19 nt, Artificial Sequence
  Description of Artificial Sequence: Synthetic oligonucleotide
ucggggcuggcacacgccu

SEQ ID NO: 844953 - RNA, 19 nt, Artificial Sequence
  Description of Artificial Sequence: Synthetic oligonucleotide
gguuacucuguuccaauaa

SEQ ID NO: 844954 - RNA, 19 nt, Artificial Sequence
  Description of Artificial Sequence: Synthetic oligonucleotide
ggagucacuucuguccagg

SEQ ID NO: 844955 - RNA, 19 nt, Artificial Sequence
  Description of Artificial Sequence: Synthetic oligonucleotide
guacgaagcagguggcgga

SEQ ID NO: 844956 - RNA, 19 nt, Artificial Sequence
  Description of Artificial Sequence: Synthetic oligonucleotide
cgaaguuuugauaggaaca

SEQ ID NO: 844957 - RNA, 19 nt, Artificial Sequence
  Description of Artificial Sequence: Synthetic oligonucleotide
cucggcuguaaggggaggg

SEQ ID NO: 844958 - RNA, 19 nt, Artificial Sequence
  Description of Artificial Sequence: Synthetic oligonucleotide
gcucacguuccccacaaac

SEQ ID NO: 844959 - RNA, 19 nt, Artificial Sequence
  Description of Artificial Sequence: Synthetic oligonucleotide
auaggaacagugacacccu

SEQ ID NO: 844960 - RNA, 19 nt, Artificial Sequence
  Description of Artificial Sequence: Synthetic oligonucleotide
acucugauauugggcugac

SEQ ID NO: 844961 - RNA, 19 nt, Artificial Sequence
  Description of Artificial Sequence: Synthetic oligonucleotide
ugggcaaggggcgaccagu

SEQ ID NO: 844962 - RNA, 19 nt, Artificial Sequence
  Description of Artificial Sequence: Synthetic oligonucleotide
cucggggccgacuguguag

SEQ ID NO: 844963 - RNA, 19 nt, Artificial Sequence
  Description of Artificial Sequence: Synthetic oligonucleotide
aaggggagggcuguuccaa

SEQ ID NO: 844964 - RNA, 19 nt, Artificial Sequence
  Description of Artificial Sequence: Synthetic oligonucleotide
ucggcuguaaggggagggc

SEQ ID NO: 844965 - RNA, 19 nt, Artificial Sequence
  Description of Artificial Sequence: Synthetic oligonucleotide
ggccuugguacgaagcagg

SEQ ID NO: 844966 - RNA, 19 nt, Artificial Sequence
  Description of Artificial Sequence: Synthetic oligonucleotide
uccgguuacucuguuccaa

SEQ ID NO: 844967 - RNA, 19 nt, Artificial Sequence
  Description of Artificial Sequence: Synthetic oligonucleotide
uggucagcguggucaugag

SEQ ID NO: 844968 - RNA, 19 nt, Artificial Sequence
  Description of Artificial Sequence: Synthetic oligonucleotide
gcagcggucaggcagggca

SEQ ID NO: 844969 - RNA, 19 nt, Artificial Sequence
  Description of Artificial Sequence: Synthetic oligonucleotide
agccgcuggccuugguacg

SEQ ID NO: 844970 - RNA, 19 nt, Artificial Sequence
  Description of Artificial Sequence: Synthetic oligonucleotide
gccgggaauccugagagag

SEQ ID NO: 844971 - RNA, 19 nt, Artificial Sequence
  Description of Artificial Sequence: Synthetic oligonucleotide
ggguaucuucaguaaaguc

SEQ ID NO: 844972 - RNA, 19 nt, Artificial Sequence
  Description of Artificial Sequence: Synthetic oligonucleotide
ggcucuuaagcuauagcca

SEQ ID NO: 844973 - RNA, 19 nt, Artificial Sequence
  Description of Artificial Sequence: Synthetic oligonucleotide
aaggggcgaccagugcccg

SEQ ID NO: 844974 - RNA, 19 nt, Artificial Sequence
  Description of Artificial Sequence: Synthetic oligonucleotide
gcgguaaaggaaggaaggg

SEQ ID NO: 844975 - RNA, 19 nt, Artificial Sequence
  Description of Artificial Sequence: Synthetic oligonucleotide
ucggggccgacuguguagc

SEQ ID NO: 844976 - RNA, 19 nt, Artificial Sequence
  Description of Artificial Sequence: Synthetic oligonucleotide
agagggugcgguaaaggaa

SEQ ID NO: 844977 - RNA, 19 nt, Artificial Sequence
  Description of Artificial Sequence: Synthetic oligonucleotide
cagacuagggaagcucaac

SEQ ID NO: 844978 - RNA, 19 nt, Artificial Sequence
  Description of Artificial Sequence: Synthetic oligonucleotide
ugcacggagcugguggcug

SEQ ID NO: 844979 - RNA, 19 nt, Artificial Sequence
  Description of Artificial Sequence: Synthetic oligonucleotide
aguagcucuguggcccggg

SEQ ID NO: 844980 - RNA, 19 nt, Artificial Sequence
  Description of Artificial Sequence: Synthetic oligonucleotide
cuccauugagccgcuggcc

SEQ ID NO: 844981 - RNA, 19 nt, Artificial Sequence
  Description of Artificial Sequence: Synthetic oligonucleotide
ucggugguaucggggcugg

SEQ ID NO: 844982 - RNA, 19 nt, Artificial Sequence
  Description of Artificial Sequence: Synthetic oligonucleotide
agucgaaaagaaggccuga

SEQ ID NO: 844983 - RNA, 19 nt, Artificial Sequence
  Description of Artificial Sequence: Synthetic oligonucleotide
auauugggcugaccaccca

SEQ ID NO: 844984 - RNA, 19 nt, Artificial Sequence
  Description of Artificial Sequence: Synthetic oligonucleotide
gcugacggugcgcagggcc

SEQ ID NO: 844985 - RNA, 19 nt, Artificial Sequence
  Description of Artificial Sequence: Synthetic oligonucleotide
gcaagcugggucacagucg

SEQ ID NO: 844986 - RNA, 19 nt, Artificial Sequence
  Description of Artificial Sequence: Synthetic oligonucleotide
gagaaccgugaagaaguca

SEQ ID NO: 844987 - RNA, 19 nt, Artificial Sequence
  Description of Artificial Sequence: Synthetic oligonucleotide
ugaugggaccuggcugccg

SEQ ID NO: 844988 - RNA, 19 nt, Artificial Sequence
  Description of Artificial Sequence: Synthetic oligonucleotide
uaggaacagugacacccuu

SEQ ID NO: 844989 - RNA, 19 nt, Artificial Sequence
  Description of Artificial Sequence: Synthetic oligonucleotide
aaccggcugacggugcgca

SEQ ID NO: 844990 - RNA, 19 nt, Artificial Sequence
  Description of Artificial Sequence: Synthetic oligonucleotide
cuucacccagccuccuaug

SEQ ID NO: 844991 - RNA, 19 nt, Artificial Sequence
  Description of Artificial Sequence: Synthetic oligonucleotide
uccugccggcacaacacau

SEQ ID NO: 844992 - RNA, 19 nt, Artificial Sequence
  Description of Artificial Sequence: Synthetic oligonucleotide
accgacagguacucgccaa

SEQ ID NO: 844993 - RNA, 19 nt, Artificial Sequence
  Description of Artificial Sequence: Synthetic oligonucleotide
ggcgucagucucuccauug

SEQ ID NO: 844994 - RNA, 19 nt, Artificial Sequence
  Description of Artificial Sequence: Synthetic oligonucleotide
accaccugugguggacagc

SEQ ID NO: 844995 - RNA, 19 nt, Artificial Sequence
  Description of Artificial Sequence: Synthetic oligonucleotide
agcguggucaugagugcag

SEQ ID NO: 844996 - RNA, 19 nt, Artificial Sequence
  Description of Artificial Sequence: Synthetic oligonucleotide
gaccacccaggcucuuaag

SEQ ID NO: 844997 - RNA, 19 nt, Artificial Sequence
  Description of Artificial Sequence: Synthetic oligonucleotide
gaaguggcgucagucucuc

SEQ ID NO: 844998 - RNA, 19 nt, Artificial Sequence
  Description of Artificial Sequence: Synthetic oligonucleotide
cacccuugggaucaggucu

SEQ ID NO: 844999 - RNA, 19 nt, Artificial Sequence
  Description of Artificial Sequence: Synthetic oligonucleotide
cauugagccgcuggccuug

SEQ ID NO: 845000 - RNA, 19 nt, Artificial Sequence
  Description of Artificial Sequence: Synthetic oligonucleotide
accaggcaagcuuucugua

SEQ ID NO: 845001 - RNA, 19 nt, Artificial Sequence
  Description of Artificial Sequence: Synthetic oligonucleotide
gaaccgugaagaagucaga

SEQ ID NO: 845002 - RNA, 19 nt, Artificial Sequence
  Description of Artificial Sequence: Synthetic oligonucleotide
ugcugcucacguuccccac

SEQ ID NO: 845003 - RNA, 19 nt, Artificial Sequence
  Description of Artificial Sequence: Synthetic oligonucleotide
augggaccuggcugccggg

SEQ ID NO: 845004 - RNA, 19 nt, Artificial Sequence
  Description of Artificial Sequence: Synthetic oligonucleotide
agugaccaccuguggugga

SEQ ID NO: 845005 - RNA, 19 nt, Artificial Sequence
  Description of Artificial Sequence: Synthetic oligonucleotide
aggggcgaccagugcccgc

SEQ ID NO: 845006 - RNA, 19 nt, Artificial Sequence
  Description of Artificial Sequence: Synthetic oligonucleotide
accaaccggcugacggugc

SEQ ID NO: 845007 - RNA, 19 nt, Artificial Sequence
  Description of Artificial Sequence: Synthetic oligonucleotide
uacgaagcagguggcggaa

SEQ ID NO: 845008 - RNA, 19 nt, Artificial Sequence
  Description of Artificial Sequence: Synthetic oligonucleotide
acacuggguuacccgggca

SEQ ID NO: 845009 - RNA, 19 nt, Artificial Sequence
  Description of Artificial Sequence: Synthetic oligonucleotide
cagaagcucucgugaccag

SEQ ID NO: 845010 - RNA, 19 nt, Artificial Sequence
  Description of Artificial Sequence: Synthetic oligonucleotide
cuguuccaauaagcgcugg

SEQ ID NO: 845011 - RNA, 19 nt, Artificial Sequence
  Description of Artificial Sequence: Synthetic oligonucleotide
ugacggugcgcagggccag

SEQ ID NO: 845012 - RNA, 19 nt, Artificial Sequence
  Description of Artificial Sequence: Synthetic oligonucleotide
guguggaccugagcuguag

SEQ ID NO: 845013 - RNA, 19 nt, Artificial Sequence
  Description of Artificial Sequence: Synthetic oligonucleotide
cugugcaccucuugucaca

SEQ ID NO: 845014 - RNA, 19 nt, Artificial Sequence
  Description of Artificial Sequence: Synthetic oligonucleotide
gucgaaaagaaggccugaa

SEQ ID NO: 845015 - RNA, 19 nt, Artificial Sequence
  Description of Artificial Sequence: Synthetic oligonucleotide
ggugcgguaaaggaaggaa

SEQ ID NO: 845016 - RNA, 19 nt, Artificial Sequence
  Description of Artificial Sequence: Synthetic oligonucleotide
cucggugguaucggggcug

SEQ ID NO: 845017 - RNA, 19 nt, Artificial Sequence
  Description of Artificial Sequence: Synthetic oligonucleotide
guaccacaaacucggcugu

SEQ ID NO: 845018 - RNA, 19 nt, Artificial Sequence
  Description of Artificial Sequence: Synthetic oligonucleotide
agggugcgguaaaggaagg

SEQ ID NO: 845019 - RNA, 19 nt, Artificial Sequence
  Description of Artificial Sequence: Synthetic oligonucleotide
ggcgugcaacaucuccacg

SEQ ID NO: 845020 - RNA, 19 nt, Artificial Sequence
  Description of Artificial Sequence: Synthetic oligonucleotide
accucagugaugggaccug

SEQ ID NO: 845021 - RNA, 19 nt, Artificial Sequence
  Description of Artificial Sequence: Synthetic oligonucleotide
caccaaccggcugacggug

SEQ ID NO: 845022 - RNA, 19 nt, Artificial Sequence
  Description of Artificial Sequence: Synthetic oligonucleotide
cucugauauugggcugacc

SEQ ID NO: 845023 - RNA, 19 nt, Artificial Sequence
  Description of Artificial Sequence: Synthetic oligonucleotide
gguggagcccuccagcucu

SEQ ID NO: 845024 - RNA, 19 nt, Artificial Sequence
  Description of Artificial Sequence: Synthetic oligonucleotide
ggucaugagugcagugacc

SEQ ID NO: 845025 - RNA, 19 nt, Artificial Sequence
  Description of Artificial Sequence: Synthetic oligonucleotide
gguccugccggcacaacac

SEQ ID NO: 845026 - RNA, 19 nt, Artificial Sequence
  Description of Artificial Sequence: Synthetic oligonucleotide
cacgccugcagugggugug

SEQ ID NO: 845027 - RNA, 19 nt, Artificial Sequence
  Description of Artificial Sequence: Synthetic oligonucleotide
caucccaaagcggccuuuc

SEQ ID NO: 845028 - RNA, 19 nt, Artificial Sequence
  Description of Artificial Sequence: Synthetic oligonucleotide
ggcaguauucgaaggccac

SEQ ID NO: 845029 - RNA, 19 nt, Artificial Sequence
  Description of Artificial Sequence: Synthetic oligonucleotide
caauggcccauaccacaca

SEQ ID NO: 845030 - RNA, 19 nt, Artificial Sequence
  Description of Artificial Sequence: Synthetic oligonucleotide
agccgggaauccugagaga

SEQ ID NO: 845031 - RNA, 19 nt, Artificial Sequence
  Description of Artificial Sequence: Synthetic oligonucleotide
cuguuccaagccaggaacu

SEQ ID NO: 845032 - RNA, 19 nt, Artificial Sequence
  Description of Artificial Sequence: Synthetic oligonucleotide
cccaaagcggccuuuccga

SEQ ID NO: 845033 - RNA, 19 nt, Artificial Sequence
  Description of Artificial Sequence: Synthetic oligonucleotide
acacgccugcagugggugu

SEQ ID NO: 845034 - RNA, 19 nt, Artificial Sequence
  Description of Artificial Sequence: Synthetic oligonucleotide
gaggggcgggacuggguga

SEQ ID NO: 845035 - RNA, 19 nt, Artificial Sequence
  Description of Artificial Sequence: Synthetic oligonucleotide
acagacuagggaagcucaa

SEQ ID NO: 845036 - RNA, 19 nt, Artificial Sequence
  Description of Artificial Sequence: Synthetic oligonucleotide
acccgggcacagcuggcca

SEQ ID NO: 845037 - RNA, 19 nt, Artificial Sequence
  Description of Artificial Sequence: Synthetic oligonucleotide
gcucaaccugagaaggcug

SEQ ID NO: 845038 - RNA, 19 nt, Artificial Sequence
  Description of Artificial Sequence: Synthetic oligonucleotide
cucuuaagcuauagccagu

SEQ ID NO: 845039 - RNA, 19 nt, Artificial Sequence
  Description of Artificial Sequence: Synthetic oligonucleotide
gguacucgccaauggccca

SEQ ID NO: 845040 - RNA, 19 nt, Artificial Sequence
  Description of Artificial Sequence: Synthetic oligonucleotide
ggcgucucggugguaucgg

SEQ ID NO: 845041 - RNA, 19 nt, Artificial Sequence
  Description of Artificial Sequence: Synthetic oligonucleotide
cuuaagcuauagccagugu

SEQ ID NO: 845042 - RNA, 19 nt, Artificial Sequence
  Description of Artificial Sequence: Synthetic oligonucleotide
gccuuuccgauggagucug

SEQ ID NO: 845043 - RNA, 19 nt, Artificial Sequence
  Description of Artificial Sequence: Synthetic oligonucleotide
gcacggagcugguggcugg

SEQ ID NO: 845044 - RNA, 19 nt, Artificial Sequence
  Description of Artificial Sequence: Synthetic oligonucleotide
ggcgaccagugcccgcucg

SEQ ID NO: 845045 - RNA, 19 nt, Artificial Sequence
  Description of Artificial Sequence: Synthetic oligonucleotide
gcugggucacagucgaaaa

SEQ ID NO: 845046 - RNA, 19 nt, Artificial Sequence
  Description of Artificial Sequence: Synthetic oligonucleotide
guccugccggcacaacaca

SEQ ID NO: 845047 - RNA, 19 nt, Artificial Sequence
  Description of Artificial Sequence: Synthetic oligonucleotide
gugcugguagaugacuucu

SEQ ID NO: 845048 - RNA, 19 nt, Artificial Sequence
  Description of Artificial Sequence: Synthetic oligonucleotide
ggccguguuggcgucucgg

SEQ ID NO: 845049 - RNA, 19 nt, Artificial Sequence
  Description of Artificial Sequence: Synthetic oligonucleotide
gcgucucggugguaucggg

SEQ ID NO: 845050 - RNA, 19 nt, Artificial Sequence
  Description of Artificial Sequence: Synthetic oligonucleotide
gguugaucagggccccauc

SEQ ID NO: 845051 - RNA, 19 nt, Artificial Sequence
  Description of Artificial Sequence: Synthetic oligonucleotide
cgucucggugguaucgggg

SEQ ID NO: 845052 - RNA, 19 nt, Artificial Sequence
  Description of Artificial Sequence: Synthetic oligonucleotide
cuccgguuacucuguucca

SEQ ID NO: 845053 - RNA, 19 nt, Artificial Sequence
  Description of Artificial Sequence: Synthetic oligonucleotide
gugaugggaccuggcugcc

SEQ ID NO: 845054 - RNA, 19 nt, Artificial Sequence
  Description of Artificial Sequence: Synthetic oligonucleotide
gggaggaguaccacaaacu

SEQ ID NO: 845055 - RNA, 19 nt, Artificial Sequence
  Description of Artificial Sequence: Synthetic oligonucleotide
cagcuuccaccaggcaagc

SEQ ID NO: 845056 - RNA, 19 nt, Artificial Sequence
  Description of Artificial Sequence: Synthetic oligonucleotide
guuggcgucucggugguau

SEQ ID NO: 845057 - RNA, 19 nt, Artificial Sequence
  Description of Artificial Sequence: Synthetic oligonucleotide
cuguguggaccugagcugu

SEQ ID NO: 845058 - RNA, 19 nt, Artificial Sequence
  Description of Artificial Sequence: Synthetic oligonucleotide
gugcccgcucgcugccagg

SEQ ID NO: 845059 - RNA, 19 nt, Artificial Sequence
  Description of Artificial Sequence: Synthetic oligonucleotide
caguagcucuguggcccgg

SEQ ID NO: 845060 - RNA, 19 nt, Artificial Sequence
  Description of Artificial Sequence: Synthetic oligonucleotide
aagcggccuuuccgaugga

SEQ ID NO: 845061 - RNA, 19 nt, Artificial Sequence
  Description of Artificial Sequence: Synthetic oligonucleotide
ggauggcuucagcuugcac

SEQ ID NO: 845062 - RNA, 19 nt, Artificial Sequence
  Description of Artificial Sequence: Synthetic oligonucleotide
caccgacagguacucgcca

SEQ ID NO: 845063 - RNA, 19 nt, Artificial Sequence
  Description of Artificial Sequence: Synthetic oligonucleotide
ccucagugaugggaccugg

SEQ ID NO: 845064 - RNA, 19 nt, Artificial Sequence
  Description of Artificial Sequence: Synthetic oligonucleotide
ccggcacaacacauccagc

SEQ ID NO: 845065 - RNA, 19 nt, Artificial Sequence
  Description of Artificial Sequence: Synthetic oligonucleotide
caaggcccuccgguuacuc

SEQ ID NO: 845066 - RNA, 19 nt, Artificial Sequence
  Description of Artificial Sequence: Synthetic oligonucleotide
acagcgccaggaacuggga

SEQ ID NO: 845067 - RNA, 19 nt, Artificial Sequence
  Description of Artificial Sequence: Synthetic oligonucleotide
agaaggccugaagcaggau

SEQ ID NO: 845068 - RNA, 19 nt, Artificial Sequence
  Description of Artificial Sequence: Synthetic oligonucleotide
gguuacccgggcacagcug

SEQ ID NO: 845069 - RNA, 19 nt, Artificial Sequence
  Description of Artificial Sequence: Synthetic oligonucleotide
gcgaccagugcccgcucgc

SEQ ID NO: 845070 - RNA, 19 nt, Artificial Sequence
  Description of Artificial Sequence: Synthetic oligonucleotide
ccaauaagcgcuggcagua

SEQ ID NO: 845071 - RNA, 19 nt, Artificial Sequence
  Description of Artificial Sequence: Synthetic oligonucleotide
ccguguuggcgucucggug

SEQ ID NO: 845072 - RNA, 19 nt, Artificial Sequence
  Description of Artificial Sequence: Synthetic oligonucleotide
gcuggcacacgccugcagu

SEQ ID NO: 845073 - RNA, 19 nt, Artificial Sequence
  Description of Artificial Sequence: Synthetic oligonucleotide
cggccuuuccgauggaguc

SEQ ID NO: 845074 - RNA, 19 nt, Artificial Sequence
  Description of Artificial Sequence: Synthetic oligonucleotide
ggucaccgacagguacucg

SEQ ID NO: 845075 - RNA, 19 nt, Artificial Sequence
  Description of Artificial Sequence: Synthetic oligonucleotide
gcaggucagccgaggggcg

SEQ ID NO: 845076 - RNA, 19 nt, Artificial Sequence
  Description of Artificial Sequence: Synthetic oligonucleotide
gggucacagucgaaaagaa

SEQ ID NO: 845077 - RNA, 19 nt, Artificial Sequence
  Description of Artificial Sequence: Synthetic oligonucleotide
ccuugguacgaagcaggug

SEQ ID NO: 845078 - RNA, 19 nt, Artificial Sequence
  Description of Artificial Sequence: Synthetic oligonucleotide
cagaguccgccuuccucaa

SEQ ID NO: 845079 - RNA, 19 nt, Artificial Sequence
  Description of Artificial Sequence: Synthetic oligonucleotide
cccuucaaccuggcaagag

SEQ ID NO: 845080 - RNA, 19 nt, Artificial Sequence
  Description of Artificial Sequence: Synthetic oligonucleotide
cugggaggaguaccacaaa

SEQ ID NO: 845081 - RNA, 19 nt, Artificial Sequence
  Description of Artificial Sequence: Synthetic oligonucleotide
guguucagauggugacugu

SEQ ID NO: 845082 - RNA, 19 nt, Artificial Sequence
  Description of Artificial Sequence: Synthetic oligonucleotide
ccggcugacggugcgcagg

SEQ ID NO: 845083 - RNA, 19 nt, Artificial Sequence
  Description of Artificial Sequence: Synthetic oligonucleotide
ggguuacccgggcacagcu

SEQ ID NO: 845084 - RNA, 19 nt, Artificial Sequence
  Description of Artificial Sequence: Synthetic oligonucleotide
gcggcagagagcacagaca

SEQ ID NO: 845085 - RNA, 19 nt, Artificial Sequence
  Description of Artificial Sequence: Synthetic oligonucleotide
caggguccgaaguuuugau

SEQ ID NO: 845086 - RNA, 19 nt, Artificial Sequence
  Description of Artificial Sequence: Synthetic oligonucleotide
cuccaccaaccggcugacg

SEQ ID NO: 845087 - RNA, 19 nt, Artificial Sequence
  Description of Artificial Sequence: Synthetic oligonucleotide
cugguagagggagucacuu

SEQ ID NO: 845088 - RNA, 19 nt, Artificial Sequence
  Description of Artificial Sequence: Synthetic oligonucleotide
acgccugcaguggguguga

SEQ ID NO: 845089 - RNA, 19 nt, Artificial Sequence
  Description of Artificial Sequence: Synthetic oligonucleotide
cccggguacggauggcuuc

SEQ ID NO: 845090 - RNA, 19 nt, Artificial Sequence
  Description of Artificial Sequence: Synthetic oligonucleotide
gguacugccucugcacacu

SEQ ID NO: 845091 - RNA, 19 nt, Artificial Sequence
  Description of Artificial Sequence: Synthetic oligonucleotide
agccuccuaugcagggccu

SEQ ID NO: 845092 - RNA, 19 nt, Artificial Sequence
  Description of Artificial Sequence: Synthetic oligonucleotide
ccacgguggugccagccuc

SEQ ID NO: 845093 - RNA, 19 nt, Artificial Sequence
  Description of Artificial Sequence: Synthetic oligonucleotide
cagcuuggucagcgugguc

SEQ ID NO: 845094 - RNA, 19 nt, Artificial Sequence
  Description of Artificial Sequence: Synthetic oligonucleotide
ggcgggacugggugacuuc

SEQ ID NO: 845095 - RNA, 19 nt, Artificial Sequence
  Description of Artificial Sequence: Synthetic oligonucleotide
gggcuguuccaagccagga

SEQ ID NO: 845096 - RNA, 19 nt, Artificial Sequence
  Description of Artificial Sequence: Synthetic oligonucleotide
gcgggacugggugacuuca

SEQ ID NO: 845097 - RNA, 19 nt, Artificial Sequence
  Description of Artificial Sequence: Synthetic oligonucleotide
ccuggguguagagaagaaa

SEQ ID NO: 845098 - RNA, 19 nt, Artificial Sequence
  Description of Artificial Sequence: Synthetic oligonucleotide
gggugcgguaaaggaagga

SEQ ID NO: 845099 - RNA, 19 nt, Artificial Sequence
  Description of Artificial Sequence: Synthetic oligonucleotide
cccgcucgcugccaggguc

SEQ ID NO: 845100 - RNA, 19 nt, Artificial Sequence
  Description of Artificial Sequence: Synthetic oligonucleotide
cuguaaagugcuggcccgu

SEQ ID NO: 845101 - RNA, 19 nt, Artificial Sequence
  Description of Artificial Sequence: Synthetic oligonucleotide
ggucagcguggucaugagu

SEQ ID NO: 845102 - RNA, 19 nt, Artificial Sequence
  Description of Artificial Sequence: Synthetic oligonucleotide
ccgauggagucugugugga

SEQ ID NO: 845103 - RNA, 19 nt, Artificial Sequence
  Description of Artificial Sequence: Synthetic oligonucleotide
gucagccgaggggcgggac

SEQ ID NO: 845104 - RNA, 19 nt, Artificial Sequence
  Description of Artificial Sequence: Synthetic oligonucleotide
caauaagcgcuggcaguau

SEQ ID NO: 845105 - RNA, 19 nt, Artificial Sequence
  Description of Artificial Sequence: Synthetic oligonucleotide
guagcgcagccaguccacu

SEQ ID NO: 845106 - RNA, 19 nt, Artificial Sequence
  Description of Artificial Sequence: Synthetic oligonucleotide
ccuccuaugcagggccuuc

SEQ ID NO: 845107 - RNA, 19 nt, Artificial Sequence
  Description of Artificial Sequence: Synthetic oligonucleotide
guacucgccaauggcccau

SEQ ID NO: 845108 - RNA, 19 nt, Artificial Sequence
  Description of Artificial Sequence: Synthetic oligonucleotide
cggaagagucccuggaacu

SEQ ID NO: 845109 - RNA, 19 nt, Artificial Sequence
  Description of Artificial Sequence: Synthetic oligonucleotide
gccguguuggcgucucggu

SEQ ID NO: 845110 - RNA, 19 nt, Artificial Sequence
  Description of Artificial Sequence: Synthetic oligonucleotide
ccguggagagaaccgugaa

SEQ ID NO: 845111 - RNA, 19 nt, Artificial Sequence
  Description of Artificial Sequence: Synthetic oligonucleotide
cagcgccaggaacugggau

SEQ ID NO: 845112 - RNA, 19 nt, Artificial Sequence
  Description of Artificial Sequence: Synthetic oligonucleotide
cgugcaacaucuccacggu

SEQ ID NO: 845113 - RNA, 19 nt, Artificial Sequence
  Description of Artificial Sequence: Synthetic oligonucleotide
gccuugguacgaagcaggu

SEQ ID NO: 845114 - RNA, 19 nt, Artificial Sequence
  Description of Artificial Sequence: Synthetic oligonucleotide
gugcacggagcugguggcu

SEQ ID NO: 845115 - RNA, 19 nt, Artificial Sequence
  Description of Artificial Sequence: Synthetic oligonucleotide
ggcccguggagagaaccgu

SEQ ID NO: 845116 - RNA, 19 nt, Artificial Sequence
  Description of Artificial Sequence: Synthetic oligonucleotide
gccggguccuggguguaga

SEQ ID NO: 845117 - RNA, 19 nt, Artificial Sequence
  Description of Artificial Sequence: Synthetic oligonucleotide
ccgguuacucuguuccaau

SEQ ID NO: 845118 - RNA, 19 nt, Artificial Sequence
  Description of Artificial Sequence: Synthetic oligonucleotide
ggcugacggugcgcagggc

SEQ ID NO: 845119 - RNA, 19 nt, Artificial Sequence
  Description of Artificial Sequence: Synthetic oligonucleotide
gcguggucaugagugcagu

SEQ ID NO: 845120 - RNA, 19 nt, Artificial Sequence
  Description of Artificial Sequence: Synthetic oligonucleotide
ggucagccgaggggcggga

SEQ ID NO: 845121 - RNA, 19 nt, Artificial Sequence
  Description of Artificial Sequence: Synthetic oligonucleotide
ccauggcggcugccucccc

SEQ ID NO: 845122 - RNA, 19 nt, Artificial Sequence
  Description of Artificial Sequence: Synthetic oligonucleotide
gggcgaccagugcccgcuc

SEQ ID NO: 845123 - RNA, 19 nt, Artificial Sequence
  Description of Artificial Sequence: Synthetic oligonucleotide
ccucggggccgacugugua

SEQ ID NO: 845124 - RNA, 19 nt, Artificial Sequence
  Description of Artificial Sequence: Synthetic oligonucleotide
ccgacagguacucgccaau

SEQ ID NO: 845125 - RNA, 19 nt, Artificial Sequence
  Description of Artificial Sequence: Synthetic oligonucleotide
ccgcucgcugccagggucu

SEQ ID NO: 845126 - RNA, 19 nt, Artificial Sequence
  Description of Artificial Sequence: Synthetic oligonucleotide
ccccaugguucaggaagaa

SEQ ID NO: 845127 - RNA, 19 nt, Artificial Sequence
  Description of Artificial Sequence: Synthetic oligonucleotide
cccaggcucuuaagcuaua

SEQ ID NO: 845128 - RNA, 19 nt, Artificial Sequence
  Description of Artificial Sequence: Synthetic oligonucleotide
gcggucaggcagggcaggu

SEQ ID NO: 845129 - RNA, 19 nt, Artificial Sequence
  Description of Artificial Sequence: Synthetic oligonucleotide
gccuccuaugcagggccuu

SEQ ID NO: 845130 - RNA, 19 nt, Artificial Sequence
  Description of Artificial Sequence: Synthetic oligonucleotide
ccgaggggcgggacugggu

SEQ ID NO: 845131 - RNA, 19 nt, Artificial Sequence
  Description of Artificial Sequence: Synthetic oligonucleotide
cggggccgacuguguagca

SEQ ID NO: 845132 - RNA, 19 nt, Artificial Sequence
  Description of Artificial Sequence: Synthetic oligonucleotide
gcccuccgguuacucuguu

SEQ ID NO: 845133 - RNA, 19 nt, Artificial Sequence
  Description of Artificial Sequence: Synthetic oligonucleotide
aauaaguuccuccaaacgc

SEQ ID NO: 845134 - RNA, 19 nt, Artificial Sequence
  Description of Artificial Sequence: Synthetic oligonucleotide
acuauuaacauucugacca

SEQ ID NO: 845135 - RNA, 19 nt, Artificial Sequence
  Description of Artificial Sequence: Synthetic oligonucleotide
gauaugaugaaccaaugcc

SEQ ID NO: 845136 - RNA, 19 nt, Artificial Sequence
  Description of Artificial Sequence: Synthetic oligonucleotide
ugaacuaagacaugaagag

SEQ ID NO: 845137 - RNA, 19 nt, Artificial Sequence
  Description of Artificial Sequence: Synthetic oligonucleotide
gaagauaguaauaaguucc

SEQ ID NO: 845138 - RNA, 19 nt, Artificial Sequence
  Description of Artificial Sequence: Synthetic oligonucleotide
auuuuagagaccucugugc

SEQ ID NO: 845139 - RNA, 19 nt, Artificial Sequence
  Description of Artificial Sequence: Synthetic oligonucleotide
auaggucucauccagagag

SEQ ID NO: 845140 - RNA, 19 nt, Artificial Sequence
  Description of Artificial Sequence: Synthetic oligonucleotide
gaucguuuugucuucaggg

SEQ ID NO: 845141 - RNA, 19 nt, Artificial Sequence
  Description of Artificial Sequence: Synthetic oligonucleotide
augaaucagcuguagaacc

SEQ ID NO: 845142 - RNA, 19 nt, Artificial Sequence
  Description of Artificial Sequence: Synthetic oligonucleotide
uguuaagccauccacucag

SEQ ID NO: 845143 - RNA, 19 nt, Artificial Sequence
  Description of Artificial Sequence: Synthetic oligonucleotide
aagaacguuugcugaaccc

SEQ ID NO: 845144 - RNA, 19 nt, Artificial Sequence
  Description of Artificial Sequence: Synthetic oligonucleotide
accaauacuagcuggguac

SEQ ID NO: 845145 - RNA, 19 nt, Artificial Sequence
  Description of Artificial Sequence: Synthetic oligonucleotide
ucugaacuaagacaugaag

SEQ ID NO: 845146 - RNA, 19 nt, Artificial Sequence
  Description of Artificial Sequence: Synthetic oligonucleotide
ugaaaaguugguccggcgg

SEQ ID NO: 845147 - RNA, 19 nt, Artificial Sequence
  Description of Artificial Sequence: Synthetic oligonucleotide
uuauaguugguagugaagc

SEQ ID NO: 845148 - RNA, 19 nt, Artificial Sequence
  Description of Artificial Sequence: Synthetic oligonucleotide
aauauccucuccucauggc

SEQ ID NO: 845149 - RNA, 19 nt, Artificial Sequence
  Description of Artificial Sequence: Synthetic oligonucleotide
uguaaaggaugcaugacac

SEQ ID NO: 845150 - RNA, 19 nt, Artificial Sequence
  Description of Artificial Sequence: Synthetic oligonucleotide
aaauggaccaggcuaucuc

SEQ ID NO: 845151 - RNA, 19 nt, Artificial Sequence
  Description of Artificial Sequence: Synthetic oligonucleotide
aacgccuuaauuugacuuc

SEQ ID NO: 845152 - RNA, 19 nt, Artificial Sequence
  Description of Artificial Sequence: Synthetic oligonucleotide
aucguuuugucuucagggc

SEQ ID NO: 845153 - RNA, 19 nt, Artificial Sequence
  Description of Artificial Sequence: Synthetic oligonucleotide
auaguaauaaguuccucca

SEQ ID NO: 845154 - RNA, 19 nt, Artificial Sequence
  Description of Artificial Sequence: Synthetic oligonucleotide
gaagccacgacugagguug

SEQ ID NO: 845155 - RNA, 19 nt, Artificial Sequence
  Description of Artificial Sequence: Synthetic oligonucleotide
uucaaccaauacuagcugg

SEQ ID NO: 845156 - RNA, 19 nt, Artificial Sequence
  Description of Artificial Sequence: Synthetic oligonucleotide
acuguuaagccauccacuc

SEQ ID NO: 845157 - RNA, 19 nt, Artificial Sequence
  Description of Artificial Sequence: Synthetic oligonucleotide
ugucacuucuuuuagcccc

SEQ ID NO: 845158 - RNA, 19 nt, Artificial Sequence
  Description of Artificial Sequence: Synthetic oligonucleotide
aacggauccucauuucagg

SEQ ID NO: 845159 - RNA, 19 nt, Artificial Sequence
  Description of Artificial Sequence: Synthetic oligonucleotide
aauccucagagguacccgg

SEQ ID NO: 845160 - RNA, 19 nt, Artificial Sequence
  Description of Artificial Sequence: Synthetic oligonucleotide
gaauauccucuccucaugg

SEQ ID NO: 845161 - RNA, 19 nt, Artificial Sequence
  Description of Artificial Sequence: Synthetic oligonucleotide
gagaaaaccggcauuauac

SEQ ID NO: 845162 - RNA, 19 nt, Artificial Sequence
  Description of Artificial Sequence: Synthetic oligonucleotide
uuagccccugcucagagag

SEQ ID NO: 845163 - RNA, 19 nt, Artificial Sequence
  Description of Artificial Sequence: Synthetic oligonucleotide
ucuagaauggaggcaaccg

SEQ ID NO: 845164 - RNA, 19 nt, Artificial Sequence
  Description of Artificial Sequence: Synthetic oligonucleotide
aaggucucgauaggcaucc

SEQ ID NO: 845165 - RNA, 19 nt, Artificial Sequence
  Description of Artificial Sequence: Synthetic oligonucleotide
ugaauugucccgaaaacua

SEQ ID NO: 845166 - RNA, 19 nt, Artificial Sequence
  Description of Artificial Sequence: Synthetic oligonucleotide
aauacuagcuggguacaac

SEQ ID NO: 845167 - RNA, 19 nt, Artificial Sequence
  Description of Artificial Sequence: Synthetic oligonucleotide
agaaucccaauccucagag

SEQ ID NO: 845168 - RNA, 19 nt, Artificial Sequence
  Description of Artificial Sequence: Synthetic oligonucleotide
uggaacaucguccuucagc

SEQ ID NO: 845169 - RNA, 19 nt, Artificial Sequence
  Description of Artificial Sequence: Synthetic oligonucleotide
auaggcauccgguccagcc

SEQ ID NO: 845170 - RNA, 19 nt, Artificial Sequence
  Description of Artificial Sequence: Synthetic oligonucleotide
cuucucgaaguaaagacac

SEQ ID NO: 845171 - RNA, 19 nt, Artificial Sequence
  Description of Artificial Sequence: Synthetic oligonucleotide
aacgugaucguuuugucuu

SEQ ID NO: 845172 - RNA, 19 nt, Artificial Sequence
  Description of Artificial Sequence: Synthetic oligonucleotide
caugauaucugcauagguc

SEQ ID NO: 845173 - RNA, 19 nt, Artificial Sequence
  Description of Artificial Sequence: Synthetic oligonucleotide
accggcauuauacugaacu

SEQ ID NO: 845174 - RNA, 19 nt, Artificial Sequence
  Description of Artificial Sequence: Synthetic oligonucleotide
ugaucguuuugucuucagg

SEQ ID NO: 845175 - RNA, 19 nt, Artificial Sequence
  Description of Artificial Sequence: Synthetic oligonucleotide
uuuuauaguugguagugaa

SEQ ID NO: 845176 - RNA, 19 nt, Artificial Sequence
  Description of Artificial Sequence: Synthetic oligonucleotide
ucuguaaaauggaccaggc

SEQ ID NO: 845177 - RNA, 19 nt, Artificial Sequence
  Description of Artificial Sequence: Synthetic oligonucleotide
ugaacuggaucucugaauu

SEQ ID NO: 845178 - RNA, 19 nt, Artificial Sequence
  Description of Artificial Sequence: Synthetic oligonucleotide
ucugaauugucccgaaaac

SEQ ID NO: 845179 - RNA, 19 nt, Artificial Sequence
  Description of Artificial Sequence: Synthetic oligonucleotide
ugagaguuugagaacuggc

SEQ ID NO: 845180 - RNA, 19 nt, Artificial Sequence
  Description of Artificial Sequence: Synthetic oligonucleotide
ugaaccaaugccacauaag

SEQ ID NO: 845181 - RNA, 19 nt, Artificial Sequence
  Description of Artificial Sequence: Synthetic oligonucleotide
gaugggaaaagcgaagccc

SEQ ID NO: 845182 - RNA, 19 nt, Artificial Sequence
  Description of Artificial Sequence: Synthetic oligonucleotide
gacacauuguaaaggaugc

SEQ ID NO: 845183 - RNA, 19 nt, Artificial Sequence
  Description of Artificial Sequence: Synthetic oligonucleotide
aagagaucgacuguuuucu

SEQ ID NO: 845184 - RNA, 19 nt, Artificial Sequence
  Description of Artificial Sequence: Synthetic oligonucleotide
ugagauacggggugggucc

SEQ ID NO: 845185 - RNA, 19 nt, Artificial Sequence
  Description of Artificial Sequence: Synthetic oligonucleotide
gaaaaguugguccggcggc

SEQ ID NO: 845186 - RNA, 19 nt, Artificial Sequence
  Description of Artificial Sequence: Synthetic oligonucleotide
ucgacacaaaggcagaagu

SEQ ID NO: 845187 - RNA, 19 nt, Artificial Sequence
  Description of Artificial Sequence: Synthetic oligonucleotide
uguugugucucucaugaau

SEQ ID NO: 845188 - RNA, 19 nt, Artificial Sequence
  Description of Artificial Sequence: Synthetic oligonucleotide
auuccggccacacaggucu

SEQ ID NO: 845189 - RNA, 19 nt, Artificial Sequence
  Description of Artificial Sequence: Synthetic oligonucleotide
cuagaauggaggcaaccgg

SEQ ID NO: 845190 - RNA, 19 nt, Artificial Sequence
  Description of Artificial Sequence: Synthetic oligonucleotide
aaaaccggcauuauacuga

SEQ ID NO: 845191 - RNA, 19 nt, Artificial Sequence
  Description of Artificial Sequence: Synthetic oligonucleotide
cugaacuaagacaugaaga

SEQ ID NO: 845192 - RNA, 19 nt, Artificial Sequence
  Description of Artificial Sequence: Synthetic oligonucleotide
gacaugaagagcuggggac

SEQ ID NO: 845193 - RNA, 19 nt, Artificial Sequence
  Description of Artificial Sequence: Synthetic oligonucleotide
augaucgacacaaaggcag

SEQ ID NO: 845194 - RNA, 19 nt, Artificial Sequence
  Description of Artificial Sequence: Synthetic oligonucleotide
uuagagaccucugugcuug

SEQ ID NO: 845195 - RNA, 19 nt, Artificial Sequence
  Description of Artificial Sequence: Synthetic oligonucleotide
ucucgaaguaaagacacug

SEQ ID NO: 845196 - RNA, 19 nt, Artificial Sequence
  Description of Artificial Sequence: Synthetic oligonucleotide
aaagagaaaaccggcauua

SEQ ID NO: 845197 - RNA, 19 nt, Artificial Sequence
  Description of Artificial Sequence: Synthetic oligonucleotide
cauuuuagagaccucugug

SEQ ID NO: 845198 - RNA, 19 nt, Artificial Sequence
  Description of Artificial Sequence: Synthetic oligonucleotide
ugucccgaaaacuauuaac

SEQ ID NO: 845199 - RNA, 19 nt, Artificial Sequence
  Description of Artificial Sequence: Synthetic oligonucleotide
uuccuagaaguucaucccc

SEQ ID NO: 845200 - RNA, 19 nt, Artificial Sequence
  Description of Artificial Sequence: Synthetic oligonucleotide
aaggaugcaugacaccugu

SEQ ID NO: 845201 - RNA, 19 nt, Artificial Sequence
  Description of Artificial Sequence: Synthetic oligonucleotide
ucaucuagaauggaggcaa

SEQ ID NO: 845202 - RNA, 19 nt, Artificial Sequence
  Description of Artificial Sequence: Synthetic oligonucleotide
agagaauguguccuuugag

SEQ ID NO: 845203 - RNA, 19 nt, Artificial Sequence
  Description of Artificial Sequence: Synthetic oligonucleotide
gcaugaucgacacaaaggc

SEQ ID NO: 845204 - RNA, 19 nt, Artificial Sequence
  Description of Artificial Sequence: Synthetic oligonucleotide
uuggaggacacauuguaaa

SEQ ID NO: 845205 - RNA, 19 nt, Artificial Sequence
  Description of Artificial Sequence: Synthetic oligonucleotide
ucucaacaccuucugagcu

SEQ ID NO: 845206 - RNA, 19 nt, Artificial Sequence
  Description of Artificial Sequence: Synthetic oligonucleotide
auaagcuucccuugaauau

SEQ ID NO: 845207 - RNA, 19 nt, Artificial Sequence
  Description of Artificial Sequence: Synthetic oligonucleotide
aggaaaauccuuggggugg

SEQ ID NO: 845208 - RNA, 19 nt, Artificial Sequence
  Description of Artificial Sequence: Synthetic oligonucleotide
auaugaugaaccaaugcca

SEQ ID NO: 845209 - RNA, 19 nt, Artificial Sequence
  Description of Artificial Sequence: Synthetic oligonucleotide
gagaucgacuguuuucucc

SEQ ID NO: 845210 - RNA, 19 nt, Artificial Sequence
  Description of Artificial Sequence: Synthetic oligonucleotide
ugcaugacaccuguggucc

SEQ ID NO: 845211 - RNA, 19 nt, Artificial Sequence
  Description of Artificial Sequence: Synthetic oligonucleotide
guacccgggaacgugaucg

SEQ ID NO: 845212 - RNA, 19 nt, Artificial Sequence
  Description of Artificial Sequence: Synthetic oligonucleotide
ugucucucaugaaucagcu

SEQ ID NO: 845213 - RNA, 19 nt, Artificial Sequence
  Description of Artificial Sequence: Synthetic oligonucleotide
cuaugugcccugcaggucc

SEQ ID NO: 845214 - RNA, 19 nt, Artificial Sequence
  Description of Artificial Sequence: Synthetic oligonucleotide
uauugaacuggaucucuga

SEQ ID NO: 845215 - RNA, 19 nt, Artificial Sequence
  Description of Artificial Sequence: Synthetic oligonucleotide
uggaggacacauuguaaag

SEQ ID NO: 845216 - RNA, 19 nt, Artificial Sequence
  Description of Artificial Sequence: Synthetic oligonucleotide
cagccuagaaucccaaucc

SEQ ID NO: 845217 - RNA, 19 nt, Artificial Sequence
  Description of Artificial Sequence: Synthetic oligonucleotide
aguuugagaacuggcagag

SEQ ID NO: 845218 - RNA, 19 nt, Artificial Sequence
  Description of Artificial Sequence: Synthetic oligonucleotide
ggaugcaugacaccugugg

SEQ ID NO: 845219 - RNA, 19 nt, Artificial Sequence
  Description of Artificial Sequence: Synthetic oligonucleotide
ucucugauaugaugaacca

SEQ ID NO: 845220 - RNA, 19 nt, Artificial Sequence
  Description of Artificial Sequence: Synthetic oligonucleotide
augcaugacaccugugguc

SEQ ID NO: 845221 - RNA, 19 nt, Artificial Sequence
  Description of Artificial Sequence: Synthetic oligonucleotide
aaguucauccccugugaga

SEQ ID NO: 845222 - RNA, 19 nt, Artificial Sequence
  Description of Artificial Sequence: Synthetic oligonucleotide
gaagaacguuugcugaacc

SEQ ID NO: 845223 - RNA, 19 nt, Artificial Sequence
  Description of Artificial Sequence: Synthetic oligonucleotide
cuccaaacgccuuaauuug

SEQ ID NO: 845224 - RNA, 19 nt, Artificial Sequence
  Description of Artificial Sequence: Synthetic oligonucleotide
cauuguaaaggaugcauga

SEQ ID NO: 845225 - RNA, 19 nt, Artificial Sequence
  Description of Artificial Sequence: Synthetic oligonucleotide
agaaaaccggcauuauacu

SEQ ID NO: 845226 - RNA, 19 nt, Artificial Sequence
  Description of Artificial Sequence: Synthetic oligonucleotide
aagauaguaauaaguuccu

SEQ ID NO: 845227 - RNA, 19 nt, Artificial Sequence
  Description of Artificial Sequence: Synthetic oligonucleotide
gaauggaggcaaccggccg

SEQ ID NO: 845228 - RNA, 19 nt, Artificial Sequence
  Description of Artificial Sequence: Synthetic oligonucleotide
uaugauaugcccgugucuu

SEQ ID NO: 845229 - RNA, 19 nt, Artificial Sequence
  Description of Artificial Sequence: Synthetic oligonucleotide
agagcacgugacaagaagg

SEQ ID NO: 845230 - RNA, 19 nt, Artificial Sequence
  Description of Artificial Sequence: Synthetic oligonucleotide
aucaccuuaagguuugcau

SEQ ID NO: 845231 - RNA, 19 nt, Artificial Sequence
  Description of Artificial Sequence: Synthetic oligonucleotide
gaacaaugcaguaacugca

SEQ ID NO: 845232 - RNA, 19 nt, Artificial Sequence
  Description of Artificial Sequence: Synthetic oligonucleotide
cucauuucagggucuauuc

SEQ ID NO: 845233 - RNA, 19 nt, Artificial Sequence
  Description of Artificial Sequence: Synthetic oligonucleotide
cuguaugcaaagagaaaac

SEQ ID NO: 845234 - RNA, 19 nt, Artificial Sequence
  Description of Artificial Sequence: Synthetic oligonucleotide
auauccucuccucauggca

SEQ ID NO: 845235 - RNA, 19 nt, Artificial Sequence
  Description of Artificial Sequence: Synthetic oligonucleotide
aaccgaaagcacuucuuaa

SEQ ID NO: 845236 - RNA, 19 nt, Artificial Sequence
  Description of Artificial Sequence: Synthetic oligonucleotide
ugaugaaccaaugccacau

SEQ ID NO: 845237 - RNA, 19 nt, Artificial Sequence
  Description of Artificial Sequence: Synthetic oligonucleotide
cuauucuugaaaccugauc

SEQ ID NO: 845238 - RNA, 19 nt, Artificial Sequence
  Description of Artificial Sequence: Synthetic oligonucleotide
uucagccuaugauaugccc

SEQ ID NO: 845239 - RNA, 19 nt, Artificial Sequence
  Description of Artificial Sequence: Synthetic oligonucleotide
cucgauaggcauccggucc

SEQ ID NO: 845240 - RNA, 19 nt, Artificial Sequence
  Description of Artificial Sequence: Synthetic oligonucleotide
caagagaucgacuguuuuc

SEQ ID NO: 845241 - RNA, 19 nt, Artificial Sequence
  Description of Artificial Sequence: Synthetic oligonucleotide
aggaacaaugcaguaacug

SEQ ID NO: 845242 - RNA, 19 nt, Artificial Sequence
  Description of Artificial Sequence: Synthetic oligonucleotide
acgacugagguugguaggc

SEQ ID NO: 845243 - RNA, 19 nt, Artificial Sequence
  Description of Artificial Sequence: Synthetic oligonucleotide
agaauggaggcaaccggcc

SEQ ID NO: 845244 - RNA, 19 nt, Artificial Sequence
  Description of Artificial Sequence: Synthetic oligonucleotide
acgagugaaaggaacaaug

SEQ ID NO: 845245 - RNA, 19 nt, Artificial Sequence
  Description of Artificial Sequence: Synthetic oligonucleotide
agaggugaaacggauccuc

SEQ ID NO: 845246 - RNA, 19 nt, Artificial Sequence
  Description of Artificial Sequence: Synthetic oligonucleotide
uccgguccagccaagagau

SEQ ID NO: 845247 - RNA, 19 nt, Artificial Sequence
  Description of Artificial Sequence: Synthetic oligonucleotide
aaccggccgacuccucucc

SEQ ID NO: 845248 - RNA, 19 nt, Artificial Sequence
  Description of Artificial Sequence: Synthetic oligonucleotide
uucucuugaagaaccgaaa

SEQ ID NO: 845249 - RNA, 19 nt, Artificial Sequence
  Description of Artificial Sequence: Synthetic oligonucleotide
caugcuguaugcaaagaga

SEQ ID NO: 845250 - RNA, 19 nt, Artificial Sequence
  Description of Artificial Sequence: Synthetic oligonucleotide
ucuguggaagaacguuugc

SEQ ID NO: 845251 - RNA, 19 nt, Artificial Sequence
  Description of Artificial Sequence: Synthetic oligonucleotide
uccacuguuaagccaucca

SEQ ID NO: 845252 - RNA, 19 nt, Artificial Sequence
  Description of Artificial Sequence: Synthetic oligonucleotide
aaaccggcauuauacugaa

SEQ ID NO: 845253 - RNA, 19 nt, Artificial Sequence
  Description of Artificial Sequence: Synthetic oligonucleotide
aaaauggaccaggcuaucu

SEQ ID NO: 845254 - RNA, 19 nt, Artificial Sequence
  Description of Artificial Sequence: Synthetic oligonucleotide
cacgugacaagaaggauca

SEQ ID NO: 845255 - RNA, 19 nt, Artificial Sequence
  Description of Artificial Sequence: Synthetic oligonucleotide
ucgauaggcauccggucca

SEQ ID NO: 845256 - RNA, 19 nt, Artificial Sequence
  Description of Artificial Sequence: Synthetic oligonucleotide
gguuuuauaguugguagug

SEQ ID NO: 845257 - RNA, 19 nt, Artificial Sequence
  Description of Artificial Sequence: Synthetic oligonucleotide
uaagccauccacucagguc

SEQ ID NO: 845258 - RNA, 19 nt, Artificial Sequence
  Description of Artificial Sequence: Synthetic oligonucleotide
cuagaaucccaauccucag

SEQ ID NO: 845259 - RNA, 19 nt, Artificial Sequence
  Description of Artificial Sequence: Synthetic oligonucleotide
auugaacuggaucucugaa

SEQ ID NO: 845260 - RNA, 19 nt, Artificial Sequence
  Description of Artificial Sequence: Synthetic oligonucleotide
aguucauccccugugagau

SEQ ID NO: 845261 - RNA, 19 nt, Artificial Sequence
  Description of Artificial Sequence: Synthetic oligonucleotide
ucucgagguagacuuuucu

SEQ ID NO: 845262 - RNA, 19 nt, Artificial Sequence
  Description of Artificial Sequence: Synthetic oligonucleotide
ugaucgacacaaaggcaga

SEQ ID NO: 845263 - RNA, 19 nt, Artificial Sequence
  Description of Artificial Sequence: Synthetic oligonucleotide
gacgccucuucucugaaga

SEQ ID NO: 845264 - RNA, 19 nt, Artificial Sequence
  Description of Artificial Sequence: Synthetic oligonucleotide
caggugaucauccucuguc

SEQ ID NO: 845265 - RNA, 19 nt, Artificial Sequence
  Description of Artificial Sequence: Synthetic oligonucleotide
gaacccuucaaccaauacu

SEQ ID NO: 845266 - RNA, 19 nt, Artificial Sequence
  Description of Artificial Sequence: Synthetic oligonucleotide
gucccgaaaacuauuaaca

SEQ ID NO: 845267 - RNA, 19 nt, Artificial Sequence
  Description of Artificial Sequence: Synthetic oligonucleotide
uucauccccugugagauac

SEQ ID NO: 845268 - RNA, 19 nt, Artificial Sequence
  Description of Artificial Sequence: Synthetic oligonucleotide
aaacgguuccagauggucu

SEQ ID NO: 845269 - RNA, 19 nt, Artificial Sequence
  Description of Artificial Sequence: Synthetic oligonucleotide
ucguccuucagccuaugau

SEQ ID NO: 845270 - RNA, 19 nt, Artificial Sequence
  Description of Artificial Sequence: Synthetic oligonucleotide
aaccaauacuagcugggua

SEQ ID NO: 845271 - RNA, 19 nt, Artificial Sequence
  Description of Artificial Sequence: Synthetic oligonucleotide
cuucaaccaauacuagcug

SEQ ID NO: 845272 - RNA, 19 nt, Artificial Sequence
  Description of Artificial Sequence: Synthetic oligonucleotide
guaaaggaugcaugacacc

SEQ ID NO: 845273 - RNA, 19 nt, Artificial Sequence
  Description of Artificial Sequence: Synthetic oligonucleotide
ugaacccuucaaccaauac

SEQ ID NO: 845274 - RNA, 19 nt, Artificial Sequence
  Description of Artificial Sequence: Synthetic oligonucleotide
ucccgaaaacuauuaacau

SEQ ID NO: 845275 - RNA, 19 nt, Artificial Sequence
  Description of Artificial Sequence: Synthetic oligonucleotide
cugaaaaguugguccggcg

SEQ ID NO: 845276 - RNA, 19 nt, Artificial Sequence
  Description of Artificial Sequence: Synthetic oligonucleotide
cuugaaaccugauccagaa

SEQ ID NO: 845277 - RNA, 19 nt, Artificial Sequence
  Description of Artificial Sequence: Synthetic oligonucleotide
accgaaagcacuucuuaaa

SEQ ID NO: 845278 - RNA, 19 nt, Artificial Sequence
  Description of Artificial Sequence: Synthetic oligonucleotide
cuaucucugugucauucac

SEQ ID NO: 845279 - RNA, 19 nt, Artificial Sequence
  Description of Artificial Sequence: Synthetic oligonucleotide
accaggcuaucucuguguc

SEQ ID NO: 845280 - RNA, 19 nt, Artificial Sequence
  Description of Artificial Sequence: Synthetic oligonucleotide
gaacuggaucucugaauug

SEQ ID NO: 845281 - RNA, 19 nt, Artificial Sequence
  Description of Artificial Sequence: Synthetic oligonucleotide
ugguccuaaaucucccaca

SEQ ID NO: 845282 - RNA, 19 nt, Artificial Sequence
  Description of Artificial Sequence: Synthetic oligonucleotide
ucuauucuugaaaccugau

SEQ ID NO: 845283 - RNA, 19 nt, Artificial Sequence
  Description of Artificial Sequence: Synthetic oligonucleotide
aacugcacauguugucaca

SEQ ID NO: 845284 - RNA, 19 nt, Artificial Sequence
  Description of Artificial Sequence: Synthetic oligonucleotide
caggaaaauccuuggggug

SEQ ID NO: 845285 - RNA, 19 nt, Artificial Sequence
  Description of Artificial Sequence: Synthetic oligonucleotide
aaugcauugaugagucuuu

SEQ ID NO: 845286 - RNA, 19 nt, Artificial Sequence
  Description of Artificial Sequence: Synthetic oligonucleotide
aaaauccuuggggugggga

SEQ ID NO: 845287 - RNA, 19 nt, Artificial Sequence
  Description of Artificial Sequence: Synthetic oligonucleotide
gcauuauugaacuggaucu

SEQ ID NO: 845288 - RNA, 19 nt, Artificial Sequence
  Description of Artificial Sequence: Synthetic oligonucleotide
ggacacauuguaaaggaug

SEQ ID NO: 845289 - RNA, 19 nt, Artificial Sequence
  Description of Artificial Sequence: Synthetic oligonucleotide
aaaggaugcaugacaccug

SEQ ID NO: 845290 - RNA, 19 nt, Artificial Sequence
  Description of Artificial Sequence: Synthetic oligonucleotide
ugccacauaagcuucccuu

SEQ ID NO: 845291 - RNA, 19 nt, Artificial Sequence
  Description of Artificial Sequence: Synthetic oligonucleotide
ucauuccggccacacaggu

SEQ ID NO: 845292 - RNA, 19 nt, Artificial Sequence
  Description of Artificial Sequence: Synthetic oligonucleotide
augauaugcccgugucuuc

SEQ ID NO: 845293 - RNA, 19 nt, Artificial Sequence
  Description of Artificial Sequence: Synthetic oligonucleotide
uaaacgguuccagaugguc

SEQ ID NO: 845294 - RNA, 19 nt, Artificial Sequence
  Description of Artificial Sequence: Synthetic oligonucleotide
agagaucgacuguuuucuc

SEQ ID NO: 845295 - RNA, 19 nt, Artificial Sequence
  Description of Artificial Sequence: Synthetic oligonucleotide
agagaaaaccggcauuaua

SEQ ID NO: 845296 - RNA, 19 nt, Artificial Sequence
  Description of Artificial Sequence: Synthetic oligonucleotide
acuucucgaaguaaagaca

SEQ ID NO: 845297 - RNA, 19 nt, Artificial Sequence
  Description of Artificial Sequence: Synthetic oligonucleotide
cuugagcccagaguuagug

SEQ ID NO: 845298 - RNA, 19 nt, Artificial Sequence
  Description of Artificial Sequence: Synthetic oligonucleotide
ugaaacggauccucauuuc

SEQ ID NO: 845299 - RNA, 19 nt, Artificial Sequence
  Description of Artificial Sequence: Synthetic oligonucleotide
accugggauacauucucug

SEQ ID NO: 845300 - RNA, 19 nt, Artificial Sequence
  Description of Artificial Sequence: Synthetic oligonucleotide
aauccgcucuucuguaaaa

SEQ ID NO: 845301 - RNA, 19 nt, Artificial Sequence
  Description of Artificial Sequence: Synthetic oligonucleotide
uaugcccgugucuucugcc

SEQ ID NO: 845302 - RNA, 19 nt, Artificial Sequence
  Description of Artificial Sequence: Synthetic oligonucleotide
gaggcaaccggccgacucc

SEQ ID NO: 845303 - RNA, 19 nt, Artificial Sequence
  Description of Artificial Sequence: Synthetic oligonucleotide
gaccugacuccacaacagc

SEQ ID NO: 845304 - RNA, 19 nt, Artificial Sequence
  Description of Artificial Sequence: Synthetic oligonucleotide
cccagaguuagugacaucc

SEQ ID NO: 845305 - RNA, 19 nt, Artificial Sequence
  Description of Artificial Sequence: Synthetic oligonucleotide
uggggagaggugaaacgga

SEQ ID NO: 845306 - RNA, 19 nt, Artificial Sequence
  Description of Artificial Sequence: Synthetic oligonucleotide
auccgguccagccaagaga

SEQ ID NO: 845307 - RNA, 19 nt, Artificial Sequence
  Description of Artificial Sequence: Synthetic oligonucleotide
ugggauacauucucugaua

SEQ ID NO: 845308 - RNA, 19 nt, Artificial Sequence
  Description of Artificial Sequence: Synthetic oligonucleotide
uucucgaaguaaagacacu

SEQ ID NO: 845309 - RNA, 19 nt, Artificial Sequence
  Description of Artificial Sequence: Synthetic oligonucleotide
acgugaucguuuugucuuc

SEQ ID NO: 845310 - RNA, 19 nt, Artificial Sequence
  Description of Artificial Sequence: Synthetic oligonucleotide
uguuuggacuggcaugaua

SEQ ID NO: 845311 - RNA, 19 nt, Artificial Sequence
  Description of Artificial Sequence: Synthetic oligonucleotide
ugguccggcggcuagccug

SEQ ID NO: 845312 - RNA, 19 nt, Artificial Sequence
  Description of Artificial Sequence: Synthetic oligonucleotide
uuuagagaccucugugcuu

SEQ ID NO: 845313 - RNA, 19 nt, Artificial Sequence
  Description of Artificial Sequence: Synthetic oligonucleotide
aauugucccgaaaacuauu

SEQ ID NO: 845314 - RNA, 19 nt, Artificial Sequence
  Description of Artificial Sequence: Synthetic oligonucleotide
uugucccgaaaacuauuaa

SEQ ID NO: 845315 - RNA, 19 nt, Artificial Sequence
  Description of Artificial Sequence: Synthetic oligonucleotide
aggugaucauccucugucu

SEQ ID NO: 845316 - RNA, 19 nt, Artificial Sequence
  Description of Artificial Sequence: Synthetic oligonucleotide
gagaagcacguuugcugcc

SEQ ID NO: 845317 - RNA, 19 nt, Artificial Sequence
  Description of Artificial Sequence: Synthetic oligonucleotide
aucgacacaaaggcagaag

SEQ ID NO: 845318 - RNA, 19 nt, Artificial Sequence
  Description of Artificial Sequence: Synthetic oligonucleotide
ucucgauaggcauccgguc

SEQ ID NO: 845319 - RNA, 19 nt, Artificial Sequence
  Description of Artificial Sequence: Synthetic oligonucleotide
cgcaugaucgacacaaagg

SEQ ID NO: 845320 - RNA, 19 nt, Artificial Sequence
  Description of Artificial Sequence: Synthetic oligonucleotide
ugccucaugcuguaugcaa

SEQ ID NO: 845321 - RNA, 19 nt, Artificial Sequence
  Description of Artificial Sequence: Synthetic oligonucleotide
caugaucgacacaaaggca

SEQ ID NO: 845322 - RNA, 19 nt, Artificial Sequence
  Description of Artificial Sequence: Synthetic oligonucleotide
gagguugguaggcacugca

SEQ ID NO: 845323 - RNA, 19 nt, Artificial Sequence
  Description of Artificial Sequence: Synthetic oligonucleotide
caauccucagagguacccg

SEQ ID NO: 845324 - RNA, 19 nt, Artificial Sequence
  Description of Artificial Sequence: Synthetic oligonucleotide
uuuggacuggcaugauauc

SEQ ID NO: 845325 - RNA, 19 nt, Artificial Sequence
  Description of Artificial Sequence: Synthetic oligonucleotide
ggauccucauuucaggguc

SEQ ID NO: 845326 - RNA, 19 nt, Artificial Sequence
  Description of Artificial Sequence: Synthetic oligonucleotide
agccuagaaucccaauccu

SEQ ID NO: 845327 - RNA, 19 nt, Artificial Sequence
  Description of Artificial Sequence: Synthetic oligonucleotide
uaggucucauccagagaga

SEQ ID NO: 845328 - RNA, 19 nt, Artificial Sequence
  Description of Artificial Sequence: Synthetic oligonucleotide
ucccuguugaggaucucuc

SEQ ID NO: 845329 - RNA, 19 nt, Artificial Sequence
  Description of Artificial Sequence: Synthetic oligonucleotide
aucgacuguuuucucccug

SEQ ID NO: 845330 - RNA, 19 nt, Artificial Sequence
  Description of Artificial Sequence: Synthetic oligonucleotide
gaauccgcucuucuguaaa

SEQ ID NO: 845331 - RNA, 19 nt, Artificial Sequence
  Description of Artificial Sequence: Synthetic oligonucleotide
cauccccugugagauacgg

SEQ ID NO: 845332 - RNA, 19 nt, Artificial Sequence
  Description of Artificial Sequence: Synthetic oligonucleotide
augagucuuucaaaguggu

SEQ ID NO: 845333 - RNA, 19 nt, Artificial Sequence
  Description of Artificial Sequence: Synthetic oligonucleotide
aguuccuccaaacgccuua

SEQ ID NO: 845334 - RNA, 19 nt, Artificial Sequence
  Description of Artificial Sequence: Synthetic oligonucleotide
ccuagaaucccaauccuca

SEQ ID NO: 845335 - RNA, 19 nt, Artificial Sequence
  Description of Artificial Sequence: Synthetic oligonucleotide
gagcacgugacaagaagga

SEQ ID NO: 845336 - RNA, 19 nt, Artificial Sequence
  Description of Artificial Sequence: Synthetic oligonucleotide
agcuggguacaacccacug

SEQ ID NO: 845337 - RNA, 19 nt, Artificial Sequence
  Description of Artificial Sequence: Synthetic oligonucleotide
aggucaagcaaugcauuga

SEQ ID NO: 845338 - RNA, 19 nt, Artificial Sequence
  Description of Artificial Sequence: Synthetic oligonucleotide
ggucucgauaggcauccgg

SEQ ID NO: 845339 - RNA, 19 nt, Artificial Sequence
  Description of Artificial Sequence: Synthetic oligonucleotide
uggaccaggcuaucucugu

SEQ ID NO: 845340 - RNA, 19 nt, Artificial Sequence
  Description of Artificial Sequence: Synthetic oligonucleotide
gaacgugaucguuuugucu

SEQ ID NO: 845341 - RNA, 19 nt, Artificial Sequence
  Description of Artificial Sequence: Synthetic oligonucleotide
ggauacauucucugauaug

SEQ ID NO: 845342 - RNA, 19 nt, Artificial Sequence
  Description of Artificial Sequence: Synthetic oligonucleotide
ggcagauggaucugcuugc

SEQ ID NO: 845343 - RNA, 19 nt, Artificial Sequence
  Description of Artificial Sequence: Synthetic oligonucleotide
aagagaaaaccggcauuau

SEQ ID NO: 845344 - RNA, 19 nt, Artificial Sequence
  Description of Artificial Sequence: Synthetic oligonucleotide
aguugguccggcggcuagc

SEQ ID NO: 845345 - RNA, 19 nt, Artificial Sequence
  Description of Artificial Sequence: Synthetic oligonucleotide
cacgguugcuuccacucug

SEQ ID NO: 845346 - RNA, 19 nt, Artificial Sequence
  Description of Artificial Sequence: Synthetic oligonucleotide
gguacaacccacugagguc

SEQ ID NO: 845347 - RNA, 19 nt, Artificial Sequence
  Description of Artificial Sequence: Synthetic oligonucleotide
ugcaucauuccggccacac

SEQ ID NO: 845348 - RNA, 19 nt, Artificial Sequence
  Description of Artificial Sequence: Synthetic oligonucleotide
cuggcagccauaggucucg

SEQ ID NO: 845349 - RNA, 19 nt, Artificial Sequence
  Description of Artificial Sequence: Synthetic oligonucleotide
ccaaguccacuguuaagcc

SEQ ID NO: 845350 - RNA, 19 nt, Artificial Sequence
  Description of Artificial Sequence: Synthetic oligonucleotide
gaagcacguuugcugccug

SEQ ID NO: 845351 - RNA, 19 nt, Artificial Sequence
  Description of Artificial Sequence: Synthetic oligonucleotide
ucaugaucacugccuuguc

SEQ ID NO: 845352 - RNA, 19 nt, Artificial Sequence
  Description of Artificial Sequence: Synthetic oligonucleotide
gaagaaccgaaagcacuuc

SEQ ID NO: 845353 - RNA, 19 nt, Artificial Sequence
  Description of Artificial Sequence: Synthetic oligonucleotide
cauccgguccagccaagag

SEQ ID NO: 845354 - RNA, 19 nt, Artificial Sequence
  Description of Artificial Sequence: Synthetic oligonucleotide
auaggucucgagguagacu

SEQ ID NO: 845355 - RNA, 19 nt, Artificial Sequence
  Description of Artificial Sequence: Synthetic oligonucleotide
cccuucaaccaauacuagc

SEQ ID NO: 845356 - RNA, 19 nt, Artificial Sequence
  Description of Artificial Sequence: Synthetic oligonucleotide
gcagccuagaaucccaauc

SEQ ID NO: 845357 - RNA, 19 nt, Artificial Sequence
  Description of Artificial Sequence: Synthetic oligonucleotide
ggacuggcaugauaucugc

SEQ ID NO: 845358 - RNA, 19 nt, Artificial Sequence
  Description of Artificial Sequence: Synthetic oligonucleotide
uaaaauggaccaggcuauc

SEQ ID NO: 845359 - RNA, 19 nt, Artificial Sequence
  Description of Artificial Sequence: Synthetic oligonucleotide
ccggggaaggucucgauag

SEQ ID NO: 845360 - RNA, 19 nt, Artificial Sequence
  Description of Artificial Sequence: Synthetic oligonucleotide
guacaacccacugaggucu

SEQ ID NO: 845361 - RNA, 19 nt, Artificial Sequence
  Description of Artificial Sequence: Synthetic oligonucleotide
agaucaccuuaagguuugc

SEQ ID NO: 845362 - RNA, 19 nt, Artificial Sequence
  Description of Artificial Sequence: Synthetic oligonucleotide
caucuagaauggaggcaac

SEQ ID NO: 845363 - RNA, 19 nt, Artificial Sequence
  Description of Artificial Sequence: Synthetic oligonucleotide
ccacuguuaagccauccac

SEQ ID NO: 845364 - RNA, 19 nt, Artificial Sequence
  Description of Artificial Sequence: Synthetic oligonucleotide
cagauggaucugcuugcag

SEQ ID NO: 845365 - RNA, 19 nt, Artificial Sequence
  Description of Artificial Sequence: Synthetic oligonucleotide
cacguuugcugccugcuga

SEQ ID NO: 845366 - RNA, 19 nt, Artificial Sequence
  Description of Artificial Sequence: Synthetic oligonucleotide
gagcucugaccuugagccc

SEQ ID NO: 845367 - RNA, 19 nt, Artificial Sequence
  Description of Artificial Sequence: Synthetic oligonucleotide
auugucccgaaaacuauua

SEQ ID NO: 845368 - RNA, 19 nt, Artificial Sequence
  Description of Artificial Sequence: Synthetic oligonucleotide
aguugguagugaagccacg

SEQ ID NO: 845369 - RNA, 19 nt, Artificial Sequence
  Description of Artificial Sequence: Synthetic oligonucleotide
acacgguugcuuccacucu

SEQ ID NO: 845370 - RNA, 19 nt, Artificial Sequence
  Description of Artificial Sequence: Synthetic oligonucleotide
uacgggguggguccuccac

SEQ ID NO: 845371 - RNA, 19 nt, Artificial Sequence
  Description of Artificial Sequence: Synthetic oligonucleotide
gguccuaaaucucccacaa

SEQ ID NO: 845372 - RNA, 19 nt, Artificial Sequence
  Description of Artificial Sequence: Synthetic oligonucleotide
gugacaagaaggaucacau

SEQ ID NO: 845373 - RNA, 19 nt, Artificial Sequence
  Description of Artificial Sequence: Synthetic oligonucleotide
ugugagauacggggugggu

SEQ ID NO: 845374 - RNA, 19 nt, Artificial Sequence
  Description of Artificial Sequence: Synthetic oligonucleotide
ccacgacugagguugguag

SEQ ID NO: 845375 - RNA, 19 nt, Artificial Sequence
  Description of Artificial Sequence: Synthetic oligonucleotide
cugugagauacgggguggg

SEQ ID NO: 845376 - RNA, 19 nt, Artificial Sequence
  Description of Artificial Sequence: Synthetic oligonucleotide
acacauuguaaaggaugca

SEQ ID NO: 845377 - RNA, 19 nt, Artificial Sequence
  Description of Artificial Sequence: Synthetic oligonucleotide
gugagauacgggguggguc

SEQ ID NO: 845378 - RNA, 19 nt, Artificial Sequence
  Description of Artificial Sequence: Synthetic oligonucleotide
gaggugaaacggauccuca

SEQ ID NO: 845379 - RNA, 19 nt, Artificial Sequence
  Description of Artificial Sequence: Synthetic oligonucleotide
aggaauccgcucuucugua

SEQ ID NO: 845380 - RNA, 19 nt, Artificial Sequence
  Description of Artificial Sequence: Synthetic oligonucleotide
uugacgccucuucucugaa

SEQ ID NO: 845381 - RNA, 19 nt, Artificial Sequence
  Description of Artificial Sequence: Synthetic oligonucleotide
cacuguuaagccauccacu

SEQ ID NO: 845382 - RNA, 19 nt, Artificial Sequence
  Description of Artificial Sequence: Synthetic oligonucleotide
ccuaugauaugcccguguc

SEQ ID NO: 845383 - RNA, 19 nt, Artificial Sequence
  Description of Artificial Sequence: Synthetic oligonucleotide
cuguuaagccauccacuca

SEQ ID NO: 845384 - RNA, 19 nt, Artificial Sequence
  Description of Artificial Sequence: Synthetic oligonucleotide
ggguacaacccacugaggu

SEQ ID NO: 845385 - RNA, 19 nt, Artificial Sequence
  Description of Artificial Sequence: Synthetic oligonucleotide
aggucuguggaagaacguu

SEQ ID NO: 845386 - RNA, 19 nt, Artificial Sequence
  Description of Artificial Sequence: Synthetic oligonucleotide
cacaggucuguggaagaac

SEQ ID NO: 845387 - RNA, 19 nt, Artificial Sequence
  Description of Artificial Sequence: Synthetic oligonucleotide
cucgaaguaaagacacugu

SEQ ID NO: 845388 - RNA, 19 nt, Artificial Sequence
  Description of Artificial Sequence: Synthetic oligonucleotide
ugguaggcacugcauuauu

SEQ ID NO: 845389 - RNA, 19 nt, Artificial Sequence
  Description of Artificial Sequence: Synthetic oligonucleotide
augccacauaagcuucccu

SEQ ID NO: 845390 - RNA, 19 nt, Artificial Sequence
  Description of Artificial Sequence: Synthetic oligonucleotide
gaauugucccgaaaacuau

SEQ ID NO: 845391 - RNA, 19 nt, Artificial Sequence
  Description of Artificial Sequence: Synthetic oligonucleotide
cucucugauagagcacgug

SEQ ID NO: 845392 - RNA, 19 nt, Artificial Sequence
  Description of Artificial Sequence: Synthetic oligonucleotide
gcacgugacaagaaggauc

SEQ ID NO: 845393 - RNA, 19 nt, Artificial Sequence
  Description of Artificial Sequence: Synthetic oligonucleotide
agcccagaguuagugacau

SEQ ID NO: 845394 - RNA, 19 nt, Artificial Sequence
  Description of Artificial Sequence: Synthetic oligonucleotide
ggaagaacguuugcugaac

SEQ ID NO: 845395 - RNA, 19 nt, Artificial Sequence
  Description of Artificial Sequence: Synthetic oligonucleotide
cauaggucucauccagaga

SEQ ID NO: 845396 - RNA, 19 nt, Artificial Sequence
  Description of Artificial Sequence: Synthetic oligonucleotide
aucguccuucagccuauga

SEQ ID NO: 845397 - RNA, 19 nt, Artificial Sequence
  Description of Artificial Sequence: Synthetic oligonucleotide
aaccggcauuauacugaac

SEQ ID NO: 845398 - RNA, 19 nt, Artificial Sequence
  Description of Artificial Sequence: Synthetic oligonucleotide
auacauucucugauaugau

SEQ ID NO: 845399 - RNA, 19 nt, Artificial Sequence
  Description of Artificial Sequence: Synthetic oligonucleotide
agaaccgaaagcacuucuu

SEQ ID NO: 845400 - RNA, 19 nt, Artificial Sequence
  Description of Artificial Sequence: Synthetic oligonucleotide
guugguccggcggcuagcc

SEQ ID NO: 845401 - RNA, 19 nt, Artificial Sequence
  Description of Artificial Sequence: Synthetic oligonucleotide
ugcagccuagaaucccaau

SEQ ID NO: 845402 - RNA, 19 nt, Artificial Sequence
  Description of Artificial Sequence: Synthetic oligonucleotide
cacauuguaaaggaugcau

SEQ ID NO: 845403 - RNA, 19 nt, Artificial Sequence
  Description of Artificial Sequence: Synthetic oligonucleotide
gaucgacacaaaggcagaa

SEQ ID NO: 845404 - RNA, 19 nt, Artificial Sequence
  Description of Artificial Sequence: Synthetic oligonucleotide
gcagauguugugucucuca

SEQ ID NO: 845405 - RNA, 19 nt, Artificial Sequence
  Description of Artificial Sequence: Synthetic oligonucleotide
agcacgugacaagaaggau

SEQ ID NO: 845406 - RNA, 19 nt, Artificial Sequence
  Description of Artificial Sequence: Synthetic oligonucleotide
gagguacccgggaacguga

SEQ ID NO: 845407 - RNA, 19 nt, Artificial Sequence
  Description of Artificial Sequence: Synthetic oligonucleotide
acccuucaaccaauacuag

SEQ ID NO: 845408 - RNA, 19 nt, Artificial Sequence
  Description of Artificial Sequence: Synthetic oligonucleotide
cuaugauaugcccgugucu

SEQ ID NO: 845409 - RNA, 19 nt, Artificial Sequence
  Description of Artificial Sequence: Synthetic oligonucleotide
cacauaagcuucccuugaa

SEQ ID NO: 845410 - RNA, 19 nt, Artificial Sequence
  Description of Artificial Sequence: Synthetic oligonucleotide
gacaccugugguccuaaau

SEQ ID NO: 845411 - RNA, 19 nt, Artificial Sequence
  Description of Artificial Sequence: Synthetic oligonucleotide
ggcuaucucugugucauuc

SEQ ID NO: 845412 - RNA, 19 nt, Artificial Sequence
  Description of Artificial Sequence: Synthetic oligonucleotide
ucccggccacgagugaaag

SEQ ID NO: 845413 - RNA, 19 nt, Artificial Sequence
  Description of Artificial Sequence: Synthetic oligonucleotide
cugaccaagaagugucacu

SEQ ID NO: 845414 - RNA, 19 nt, Artificial Sequence
  Description of Artificial Sequence: Synthetic oligonucleotide
ccgcaugaucgacacaaag

SEQ ID NO: 845415 - RNA, 19 nt, Artificial Sequence
  Description of Artificial Sequence: Synthetic oligonucleotide
aagccacgacugagguugg

SEQ ID NO: 845416 - RNA, 19 nt, Artificial Sequence
  Description of Artificial Sequence: Synthetic oligonucleotide
caaccggccgacuccucuc

SEQ ID NO: 845417 - RNA, 19 nt, Artificial Sequence
  Description of Artificial Sequence: Synthetic oligonucleotide
uacccgggaacgugaucgu

SEQ ID NO: 845418 - RNA, 19 nt, Artificial Sequence
  Description of Artificial Sequence: Synthetic oligonucleotide
auccgcucuucuguaaaau

SEQ ID NO: 845419 - RNA, 19 nt, Artificial Sequence
  Description of Artificial Sequence: Synthetic oligonucleotide
caaagagaaaaccggcauu

SEQ ID NO: 845420 - RNA, 19 nt, Artificial Sequence
  Description of Artificial Sequence: Synthetic oligonucleotide
cuguaaaauggaccaggcu

SEQ ID NO: 845421 - RNA, 19 nt, Artificial Sequence
  Description of Artificial Sequence: Synthetic oligonucleotide
cagccuaugauaugcccgu

SEQ ID NO: 845422 - RNA, 19 nt, Artificial Sequence
  Description of Artificial Sequence: Synthetic oligonucleotide
gacuggcaugauaucugca

SEQ ID NO: 845423 - RNA, 19 nt, Artificial Sequence
  Description of Artificial Sequence: Synthetic oligonucleotide
ccugugagauacggggugg

SEQ ID NO: 845424 - RNA, 19 nt, Artificial Sequence
  Description of Artificial Sequence: Synthetic oligonucleotide
ggaggcaaccggccgacuc

SEQ ID NO: 845425 - RNA, 19 nt, Artificial Sequence
  Description of Artificial Sequence: Synthetic oligonucleotide
gggauacauucucugauau

SEQ ID NO: 845426 - RNA, 19 nt, Artificial Sequence
  Description of Artificial Sequence: Synthetic oligonucleotide
gaucgacuguuuucucccu

SEQ ID NO: 845427 - RNA, 19 nt, Artificial Sequence
  Description of Artificial Sequence: Synthetic oligonucleotide
cuuuuagccccugcucaga

SEQ ID NO: 845428 - RNA, 19 nt, Artificial Sequence
  Description of Artificial Sequence: Synthetic oligonucleotide
acgugacaagaaggaucac

SEQ ID NO: 845429 - RNA, 19 nt, Artificial Sequence
  Description of Artificial Sequence: Synthetic oligonucleotide
uagugacauccuccaccuc

SEQ ID NO: 845430 - RNA, 19 nt, Artificial Sequence
  Description of Artificial Sequence: Synthetic oligonucleotide
caaacgccuuaauuugacu

SEQ ID NO: 845431 - RNA, 19 nt, Artificial Sequence
  Description of Artificial Sequence: Synthetic oligonucleotide
guccgcaggaauccgcucu

SEQ ID NO: 845432 - RNA, 19 nt, Artificial Sequence
  Description of Artificial Sequence: Synthetic oligonucleotide
uuccggccacacaggucug

SEQ ID NO: 845433 - RNA, 19 nt, Artificial Sequence
  Description of Artificial Sequence: Synthetic oligonucleotide
ccugggauacauucucuga

SEQ ID NO: 845434 - RNA, 19 nt, Artificial Sequence
  Description of Artificial Sequence: Synthetic oligonucleotide
caggcuaucucugugucau

SEQ ID NO: 845435 - RNA, 19 nt, Artificial Sequence
  Description of Artificial Sequence: Synthetic oligonucleotide
guccagccaagagaucgac

SEQ ID NO: 845436 - RNA, 19 nt, Artificial Sequence
  Description of Artificial Sequence: Synthetic oligonucleotide
uugguccggcggcuagccu

SEQ ID NO: 845437 - RNA, 19 nt, Artificial Sequence
  Description of Artificial Sequence: Synthetic oligonucleotide
ggccacgagugaaaggaac

SEQ ID NO: 845438 - RNA, 19 nt, Artificial Sequence
  Description of Artificial Sequence: Synthetic oligonucleotide
ccggccacgagugaaagga

SEQ ID NO: 845439 - RNA, 19 nt, Artificial Sequence
  Description of Artificial Sequence: Synthetic oligonucleotide
auacgggguggguccucca

SEQ ID NO: 845440 - RNA, 19 nt, Artificial Sequence
  Description of Artificial Sequence: Synthetic oligonucleotide
gguccggcggcuagccugg

SEQ ID NO: 845441 - RNA, 19 nt, Artificial Sequence
  Description of Artificial Sequence: Synthetic oligonucleotide
aggcaaccggccgacuccu

SEQ ID NO: 845442 - RNA, 19 nt, Artificial Sequence
  Description of Artificial Sequence: Synthetic oligonucleotide
cugaacccuucaaccaaua

SEQ ID NO: 845443 - RNA, 19 nt, Artificial Sequence
  Description of Artificial Sequence: Synthetic oligonucleotide
cagauggucugcucagccu

SEQ ID NO: 845444 - RNA, 19 nt, Artificial Sequence
  Description of Artificial Sequence: Synthetic oligonucleotide
aggaugcaugacaccugug

SEQ ID NO: 845445 - RNA, 19 nt, Artificial Sequence
  Description of Artificial Sequence: Synthetic oligonucleotide
ggugaaacggauccucauu

SEQ ID NO: 845446 - RNA, 19 nt, Artificial Sequence
  Description of Artificial Sequence: Synthetic oligonucleotide
ggaauccgcucuucuguaa

SEQ ID NO: 845447 - RNA, 19 nt, Artificial Sequence
  Description of Artificial Sequence: Synthetic oligonucleotide
gcacguuugcugccugcug

SEQ ID NO: 845448 - RNA, 19 nt, Artificial Sequence
  Description of Artificial Sequence: Synthetic oligonucleotide
caauacuagcuggguacaa

SEQ ID NO: 845449 - RNA, 19 nt, Artificial Sequence
  Description of Artificial Sequence: Synthetic oligonucleotide
guacacgguugcuuccacu

SEQ ID NO: 845450 - RNA, 19 nt, Artificial Sequence
  Description of Artificial Sequence: Synthetic oligonucleotide
uuguuuggacuggcaugau

SEQ ID NO: 845451 - RNA, 19 nt, Artificial Sequence
  Description of Artificial Sequence: Synthetic oligonucleotide
ccccucugaacuaagacau

SEQ ID NO: 845452 - RNA, 19 nt, Artificial Sequence
  Description of Artificial Sequence: Synthetic oligonucleotide
cggcauuauacugaacuuc

SEQ ID NO: 845453 - RNA, 19 nt, Artificial Sequence
  Description of Artificial Sequence: Synthetic oligonucleotide
ccacauaagcuucccuuga

SEQ ID NO: 845454 - RNA, 19 nt, Artificial Sequence
  Description of Artificial Sequence: Synthetic oligonucleotide
cugccccucugaacuaaga

SEQ ID NO: 845455 - RNA, 19 nt, Artificial Sequence
  Description of Artificial Sequence: Synthetic oligonucleotide
gucucgagguagacuuuuc

SEQ ID NO: 845456 - RNA, 19 nt, Artificial Sequence
  Description of Artificial Sequence: Synthetic oligonucleotide
cgugacaagaaggaucaca

SEQ ID NO: 845457 - RNA, 19 nt, Artificial Sequence
  Description of Artificial Sequence: Synthetic oligonucleotide
agccuggagcugaaauccu

SEQ ID NO: 845458 - RNA, 19 nt, Artificial Sequence
  Description of Artificial Sequence: Synthetic oligonucleotide
uugcaucauuccggccaca

SEQ ID NO: 845459 - RNA, 19 nt, Artificial Sequence
  Description of Artificial Sequence: Synthetic oligonucleotide
ccugcugaccugacuccac

SEQ ID NO: 845460 - RNA, 19 nt, Artificial Sequence
  Description of Artificial Sequence: Synthetic oligonucleotide
cccucugaacuaagacaug

SEQ ID NO: 845461 - RNA, 19 nt, Artificial Sequence
  Description of Artificial Sequence: Synthetic oligonucleotide
guaaacgguuccagauggu

SEQ ID NO: 845462 - RNA, 19 nt, Artificial Sequence
  Description of Artificial Sequence: Synthetic oligonucleotide
gguacccgggaacgugauc

SEQ ID NO: 845463 - RNA, 19 nt, Artificial Sequence
  Description of Artificial Sequence: Synthetic oligonucleotide
ccaauacuagcuggguaca

SEQ ID NO: 845464 - RNA, 19 nt, Artificial Sequence
  Description of Artificial Sequence: Synthetic oligonucleotide
gcggcuagccuggagcuga

SEQ ID NO: 845465 - RNA, 19 nt, Artificial Sequence
  Description of Artificial Sequence: Synthetic oligonucleotide
cucccggccacgagugaaa

SEQ ID NO: 845466 - RNA, 19 nt, Artificial Sequence
  Description of Artificial Sequence: Synthetic oligonucleotide
gcuaugugcccugcagguc

SEQ ID NO: 845467 - RNA, 19 nt, Artificial Sequence
  Description of Artificial Sequence: Synthetic oligonucleotide
cccgaaaacuauuaacauu

SEQ ID NO: 845468 - RNA, 19 nt, Artificial Sequence
  Description of Artificial Sequence: Synthetic oligonucleotide
cccggccacgagugaaagg

SEQ ID NO: 845469 - RNA, 19 nt, Artificial Sequence
  Description of Artificial Sequence: Synthetic oligonucleotide
aggcuaucucugugucauu

SEQ ID NO: 845470 - RNA, 19 nt, Artificial Sequence
  Description of Artificial Sequence: Synthetic oligonucleotide
caucguccuucagccuaug

SEQ ID NO: 845471 - RNA, 19 nt, Artificial Sequence
  Description of Artificial Sequence: Synthetic oligonucleotide
ggucuguggaagaacguuu

SEQ ID NO: 845472 - RNA, 19 nt, Artificial Sequence
  Description of Artificial Sequence: Synthetic oligonucleotide
gagauacgggguggguccu

SEQ ID NO: 845473 - RNA, 19 nt, Artificial Sequence
  Description of Artificial Sequence: Synthetic oligonucleotide
agguacccgggaacgugau

SEQ ID NO: 845474 - RNA, 19 nt, Artificial Sequence
  Description of Artificial Sequence: Synthetic oligonucleotide
gcaaccggccgacuccucu

SEQ ID NO: 845475 - RNA, 19 nt, Artificial Sequence
  Description of Artificial Sequence: Synthetic oligonucleotide
gcaggugaucauccucugu

SEQ ID NO: 845476 - RNA, 19 nt, Artificial Sequence
  Description of Artificial Sequence: Synthetic oligonucleotide
acccgggaacgugaucguu

SEQ ID NO: 845477 - RNA, 19 nt, Artificial Sequence
  Description of Artificial Sequence: Synthetic oligonucleotide
caacccacugaggucuggu

SEQ ID NO: 845478 - RNA, 19 nt, Artificial Sequence
  Description of Artificial Sequence: Synthetic oligonucleotide
gccggggaaggucucgaua

SEQ ID NO: 845479 - RNA, 19 nt, Artificial Sequence
  Description of Artificial Sequence: Synthetic oligonucleotide
cgaaaacuauuaacauucu

SEQ ID NO: 845480 - RNA, 19 nt, Artificial Sequence
  Description of Artificial Sequence: Synthetic oligonucleotide
gcaaugcauugaugagucu

SEQ ID NO: 845481 - RNA, 19 nt, Artificial Sequence
  Description of Artificial Sequence: Synthetic oligonucleotide
ccucugugcuuggaggaca

SEQ ID NO: 845482 - RNA, 19 nt, Artificial Sequence
  Description of Artificial Sequence: Synthetic oligonucleotide
cucacaccugggauacauu

SEQ ID NO: 845483 - RNA, 19 nt, Artificial Sequence
  Description of Artificial Sequence: Synthetic oligonucleotide
cucucccggccacgaguga

SEQ ID NO: 845484 - RNA, 19 nt, Artificial Sequence
  Description of Artificial Sequence: Synthetic oligonucleotide
cagccggggaaggucucga

SEQ ID NO: 845485 - RNA, 19 nt, Artificial Sequence
  Description of Artificial Sequence: Synthetic oligonucleotide
ggcauccgguccagccaag

SEQ ID NO: 845486 - RNA, 19 nt, Artificial Sequence
  Description of Artificial Sequence: Synthetic oligonucleotide
gcugaacccuucaaccaau

SEQ ID NO: 845487 - RNA, 19 nt, Artificial Sequence
  Description of Artificial Sequence: Synthetic oligonucleotide
ggucucgagguagacuuuu

SEQ ID NO: 845488 - RNA, 19 nt, Artificial Sequence
  Description of Artificial Sequence: Synthetic oligonucleotide
ccggcauuauacugaacuu

SEQ ID NO: 845489 - RNA, 19 nt, Artificial Sequence
  Description of Artificial Sequence: Synthetic oligonucleotide
cguuugcugaacccuucaa

SEQ ID NO: 845490 - RNA, 19 nt, Artificial Sequence
  Description of Artificial Sequence: Synthetic oligonucleotide
cgauaggcauccgguccag

SEQ ID NO: 845491 - RNA, 19 nt, Artificial Sequence
  Description of Artificial Sequence: Synthetic oligonucleotide
cguucaucuggcagccaua

SEQ ID NO: 845492 - RNA, 19 nt, Artificial Sequence
  Description of Artificial Sequence: Synthetic oligonucleotide
cccgggaacgugaucguuu

SEQ ID NO: 845493 - RNA, 19 nt, Artificial Sequence
  Description of Artificial Sequence: Synthetic oligonucleotide
cccgcaugaucgacacaaa

SEQ ID NO: 845494 - RNA, 19 nt, Artificial Sequence
  Description of Artificial Sequence: Synthetic oligonucleotide
ccgggaacgugaucguuuu

SEQ ID NO: 845495 - RNA, 19 nt, Artificial Sequence
  Description of Artificial Sequence: Synthetic oligonucleotide
cgacugagguugguaggca

SEQ ID NO: 845496 - RNA, 19 nt, Artificial Sequence
  Description of Artificial Sequence: Synthetic oligonucleotide
ccuugagcccagaguuagu

SEQ ID NO: 845497 - RNA, 19 nt, Artificial Sequence
  Description of Artificial Sequence: Synthetic oligonucleotide
ccgcaggaauccgcucuuc

SEQ ID NO: 845498 - RNA, 19 nt, Artificial Sequence
  Description of Artificial Sequence: Synthetic oligonucleotide
gccccgcaugaucgacaca

SEQ ID NO: 845499 - RNA, 19 nt, Artificial Sequence
  Description of Artificial Sequence: Synthetic oligonucleotide
ggcaaccggccgacuccuc

SEQ ID NO: 845500 - RNA, 19 nt, Artificial Sequence
  Description of Artificial Sequence: Synthetic oligonucleotide
ggcucacaccugggauaca

SEQ ID NO: 845501 - RNA, 19 nt, Artificial Sequence
  Description of Artificial Sequence: Synthetic oligonucleotide
uccuuuaauacaaagucgg

SEQ ID NO: 845502 - RNA, 19 nt, Artificial Sequence
  Description of Artificial Sequence: Synthetic oligonucleotide
aauguaggcuuucugcugc

SEQ ID NO: 845503 - RNA, 19 nt, Artificial Sequence
  Description of Artificial Sequence: Synthetic oligonucleotide
ugcauaaugaucaaagcug

SEQ ID NO: 845504 - RNA, 19 nt, Artificial Sequence
  Description of Artificial Sequence: Synthetic oligonucleotide
aaaguggccaacuccaugg

SEQ ID NO: 845505 - RNA, 19 nt, Artificial Sequence
  Description of Artificial Sequence: Synthetic oligonucleotide
uguugcauaaugaucaaag

SEQ ID NO: 845506 - RNA, 19 nt, Artificial Sequence
  Description of Artificial Sequence: Synthetic oligonucleotide
agucgguuuaucuacauac

SEQ ID NO: 845507 - RNA, 19 nt, Artificial Sequence
  Description of Artificial Sequence: Synthetic oligonucleotide
uguaguugcgcugagaccg

SEQ ID NO: 845508 - RNA, 19 nt, Artificial Sequence
  Description of Artificial Sequence: Synthetic oligonucleotide
acuggcacgauuuuguuuc

SEQ ID NO: 845509 - RNA, 19 nt, Artificial Sequence
  Description of Artificial Sequence: Synthetic oligonucleotide
uaaucacuacccaugaugc

SEQ ID NO: 845510 - RNA, 19 nt, Artificial Sequence
  Description of Artificial Sequence: Synthetic oligonucleotide
uguccauacacauccaccg

SEQ ID NO: 845511 - RNA, 19 nt, Artificial Sequence
  Description of Artificial Sequence: Synthetic oligonucleotide
uuuaauacaaagucgguuu

SEQ ID NO: 845512 - RNA, 19 nt, Artificial Sequence
  Description of Artificial Sequence: Synthetic oligonucleotide
agucgauaaagccuucacc

SEQ ID NO: 845513 - RNA, 19 nt, Artificial Sequence
  Description of Artificial Sequence: Synthetic oligonucleotide
ucaaaguuugacuggcacg

SEQ ID NO: 845514 - RNA, 19 nt, Artificial Sequence
  Description of Artificial Sequence: Synthetic oligonucleotide
acgaagaauguacugcggc

SEQ ID NO: 845515 - RNA, 19 nt, Artificial Sequence
  Description of Artificial Sequence: Synthetic oligonucleotide
ucacgaagaauguacugcg

SEQ ID NO: 845516 - RNA, 19 nt, Artificial Sequence
  Description of Artificial Sequence: Synthetic oligonucleotide
aagucgauaaagccuucac

SEQ ID NO: 845517 - RNA, 19 nt, Artificial Sequence
  Description of Artificial Sequence: Synthetic oligonucleotide
aaucacuacccaugaugcc

SEQ ID NO: 845518 - RNA, 19 nt, Artificial Sequence
  Description of Artificial Sequence: Synthetic oligonucleotide
uaaugaucaaagcugccca

SEQ ID NO: 845519 - RNA, 19 nt, Artificial Sequence
  Description of Artificial Sequence: Synthetic oligonucleotide
cuuggugagcauuacgacg

SEQ ID NO: 845520 - RNA, 19 nt, Artificial Sequence
  Description of Artificial Sequence: Synthetic oligonucleotide
uaggcgaugacauuggcgu

SEQ ID NO: 845521 - RNA, 19 nt, Artificial Sequence
  Description of Artificial Sequence: Synthetic oligonucleotide
uuggugagcauuacgacga

SEQ ID NO: 845522 - RNA, 19 nt, Artificial Sequence
  Description of Artificial Sequence: Synthetic oligonucleotide
ucgguuuaucuacauacag

SEQ ID NO: 845523 - RNA, 19 nt, Artificial Sequence
  Description of Artificial Sequence: Synthetic oligonucleotide
guagucagagccuucgacg

SEQ ID NO: 845524 - RNA, 19 nt, Artificial Sequence
  Description of Artificial Sequence: Synthetic oligonucleotide
cacguguccauacacaucc

SEQ ID NO: 845525 - RNA, 19 nt, Artificial Sequence
  Description of Artificial Sequence: Synthetic oligonucleotide
agcauuacgacgauugugg

SEQ ID NO: 845526 - RNA, 19 nt, Artificial Sequence
  Description of Artificial Sequence: Synthetic oligonucleotide
uacauacaggggcagagcc

SEQ ID NO: 845527 - RNA, 19 nt, Artificial Sequence
  Description of Artificial Sequence: Synthetic oligonucleotide
agggucgauagacucauac

SEQ ID NO: 845528 - RNA, 19 nt, Artificial Sequence
  Description of Artificial Sequence: Synthetic oligonucleotide
uguguaaggaaaagguccu

SEQ ID NO: 845529 - RNA, 19 nt, Artificial Sequence
  Description of Artificial Sequence: Synthetic oligonucleotide
auuacgacgauuguggagu

SEQ ID NO: 845530 - RNA, 19 nt, Artificial Sequence
  Description of Artificial Sequence: Synthetic oligonucleotide
aaagcugcccagguauucc

SEQ ID NO: 845531 - RNA, 19 nt, Artificial Sequence
  Description of Artificial Sequence: Synthetic oligonucleotide
ucgguuaggccaauacugg

SEQ ID NO: 845532 - RNA, 19 nt, Artificial Sequence
  Description of Artificial Sequence: Synthetic oligonucleotide
gaugacauuggcguagcgg

SEQ ID NO: 845533 - RNA, 19 nt, Artificial Sequence
  Description of Artificial Sequence: Synthetic oligonucleotide
cucgguuaggccaauacug

SEQ ID NO: 845534 - RNA, 19 nt, Artificial Sequence
  Description of Artificial Sequence: Synthetic oligonucleotide
aagccguaagucucuguac

SEQ ID NO: 845535 - RNA, 19 nt, Artificial Sequence
  Description of Artificial Sequence: Synthetic oligonucleotide
cacgagaauggucauaggc

SEQ ID NO: 845536 - RNA, 19 nt, Artificial Sequence
  Description of Artificial Sequence: Synthetic oligonucleotide
cauguaguugcgcugagac

SEQ ID NO: 845537 - RNA, 19 nt, Artificial Sequence
  Description of Artificial Sequence: Synthetic oligonucleotide
gaaauggcgcaccucacgc

SEQ ID NO: 845538 - RNA, 19 nt, Artificial Sequence
  Description of Artificial Sequence: Synthetic oligonucleotide
agaggcugcaagaugacac

SEQ ID NO: 845539 - RNA, 19 nt, Artificial Sequence
  Description of Artificial Sequence: Synthetic oligonucleotide
acgagaauggucauaggcg

SEQ ID NO: 845540 - RNA, 19 nt, Artificial Sequence
  Description of Artificial Sequence: Synthetic oligonucleotide
gaugaagcuguacugaucu

SEQ ID NO: 845541 - RNA, 19 nt, Artificial Sequence
  Description of Artificial Sequence: Synthetic oligonucleotide
aaacggcacggacagagcu

SEQ ID NO: 845542 - RNA, 19 nt, Artificial Sequence
  Description of Artificial Sequence: Synthetic oligonucleotide
ucuacauacaggggcagag

SEQ ID NO: 845543 - RNA, 19 nt, Artificial Sequence
  Description of Artificial Sequence: Synthetic oligonucleotide
ucuccaaaggucucgggca

SEQ ID NO: 845544 - RNA, 19 nt, Artificial Sequence
  Description of Artificial Sequence: Synthetic oligonucleotide
ugaagcgugaagugugugc

SEQ ID NO: 845545 - RNA, 19 nt, Artificial Sequence
  Description of Artificial Sequence: Synthetic oligonucleotide
auacaaagucgguuuaucu

SEQ ID NO: 845546 - RNA, 19 nt, Artificial Sequence
  Description of Artificial Sequence: Synthetic oligonucleotide
gauguaugcguucugccga

SEQ ID NO: 845547 - RNA, 19 nt, Artificial Sequence
  Description of Artificial Sequence: Synthetic oligonucleotide
ucugccauaggguccacca

SEQ ID NO: 845548 - RNA, 19 nt, Artificial Sequence
  Description of Artificial Sequence: Synthetic oligonucleotide
cucacgaagaauguacugc

SEQ ID NO: 845549 - RNA, 19 nt, Artificial Sequence
  Description of Artificial Sequence: Synthetic oligonucleotide
gaacucacgaagaauguac

SEQ ID NO: 845550 - RNA, 19 nt, Artificial Sequence
  Description of Artificial Sequence: Synthetic oligonucleotide
auguaguugcgcugagacc

SEQ ID NO: 845551 - RNA, 19 nt, Artificial Sequence
  Description of Artificial Sequence: Synthetic oligonucleotide
cacgauuuuguuucugggc

SEQ ID NO: 845552 - RNA, 19 nt, Artificial Sequence
  Description of Artificial Sequence: Synthetic oligonucleotide
uacaaagucgguuuaucua

SEQ ID NO: 845553 - RNA, 19 nt, Artificial Sequence
  Description of Artificial Sequence: Synthetic oligonucleotide
uguguggcgauguaugcgu

SEQ ID NO: 845554 - RNA, 19 nt, Artificial Sequence
  Description of Artificial Sequence: Synthetic oligonucleotide
uauucagguaccccguggu

SEQ ID NO: 845555 - RNA, 19 nt, Artificial Sequence
  Description of Artificial Sequence: Synthetic oligonucleotide
augaacacuccuguccugc

SEQ ID NO: 845556 - RNA, 19 nt, Artificial Sequence
  Description of Artificial Sequence: Synthetic oligonucleotide
gaagcgugaagugugugcc

SEQ ID NO: 845557 - RNA, 19 nt, Artificial Sequence
  Description of Artificial Sequence: Synthetic oligonucleotide
gauuguggaguuguuuucc

SEQ ID NO: 845558 - RNA, 19 nt, Artificial Sequence
  Description of Artificial Sequence: Synthetic oligonucleotide
uacgaaucuuccuuuaaua

SEQ ID NO: 845559 - RNA, 19 nt, Artificial Sequence
  Description of Artificial Sequence: Synthetic oligonucleotide
ucgauagacucauacuccu

SEQ ID NO: 845560 - RNA, 19 nt, Artificial Sequence
  Description of Artificial Sequence: Synthetic oligonucleotide
uggaguuguuuucccacag

SEQ ID NO: 845561 - RNA, 19 nt, Artificial Sequence
  Description of Artificial Sequence: Synthetic oligonucleotide
ugugucgcaauguaggcuu

SEQ ID NO: 845562 - RNA, 19 nt, Artificial Sequence
  Description of Artificial Sequence: Synthetic oligonucleotide
gucgauaaagccuucaccu

SEQ ID NO: 845563 - RNA, 19 nt, Artificial Sequence
  Description of Artificial Sequence: Synthetic oligonucleotide
uugaacucacgaagaaugu

SEQ ID NO: 845564 - RNA, 19 nt, Artificial Sequence
  Description of Artificial Sequence: Synthetic oligonucleotide
ugaucaaagcugcccaggu

SEQ ID NO: 845565 - RNA, 19 nt, Artificial Sequence
  Description of Artificial Sequence: Synthetic oligonucleotide
uggccgaugaagucgauaa

SEQ ID NO: 845566 - RNA, 19 nt, Artificial Sequence
  Description of Artificial Sequence: Synthetic oligonucleotide
cuugugucgcaauguaggc

SEQ ID NO: 845567 - RNA, 19 nt, Artificial Sequence
  Description of Artificial Sequence: Synthetic oligonucleotide
accucgguuaggccaauac

SEQ ID NO: 845568 - RNA, 19 nt, Artificial Sequence
  Description of Artificial Sequence: Synthetic oligonucleotide
ucgauaaagccuucaccug

SEQ ID NO: 845569 - RNA, 19 nt, Artificial Sequence
  Description of Artificial Sequence: Synthetic oligonucleotide
uccugacgcagaaaguggc

SEQ ID NO: 845570 - RNA, 19 nt, Artificial Sequence
  Description of Artificial Sequence: Synthetic oligonucleotide
gggguauucagguaccccg

SEQ ID NO: 845571 - RNA, 19 nt, Artificial Sequence
  Description of Artificial Sequence: Synthetic oligonucleotide
cauuacgacgauuguggag

SEQ ID NO: 845572 - RNA, 19 nt, Artificial Sequence
  Description of Artificial Sequence: Synthetic oligonucleotide
aaggucucgggcaggggcc

SEQ ID NO: 845573 - RNA, 19 nt, Artificial Sequence
  Description of Artificial Sequence: Synthetic oligonucleotide
ggucgauagacucauacuc

SEQ ID NO: 845574 - RNA, 19 nt, Artificial Sequence
  Description of Artificial Sequence: Synthetic oligonucleotide
ggaacugucgaacgguccg

SEQ ID NO: 845575 - RNA, 19 nt, Artificial Sequence
  Description of Artificial Sequence: Synthetic oligonucleotide
aacugguacucguccuccg

SEQ ID NO: 845576 - RNA, 19 nt, Artificial Sequence
  Description of Artificial Sequence: Synthetic oligonucleotide
guauucagguaccccgugg

SEQ ID NO: 845577 - RNA, 19 nt, Artificial Sequence
  Description of Artificial Sequence: Synthetic oligonucleotide
ugaccgaacugcuccuugg

SEQ ID NO: 845578 - RNA, 19 nt, Artificial Sequence
  Description of Artificial Sequence: Synthetic oligonucleotide
guuaggccaauacugguca

SEQ ID NO: 845579 - RNA, 19 nt, Artificial Sequence
  Description of Artificial Sequence: Synthetic oligonucleotide
aaaacggcacggacagagc

SEQ ID NO: 845580 - RNA, 19 nt, Artificial Sequence
  Description of Artificial Sequence: Synthetic oligonucleotide
auguaaucacuacccauga

SEQ ID NO: 845581 - RNA, 19 nt, Artificial Sequence
  Description of Artificial Sequence: Synthetic oligonucleotide
acaaugcucagggugauga

SEQ ID NO: 845582 - RNA, 19 nt, Artificial Sequence
  Description of Artificial Sequence: Synthetic oligonucleotide
cacgcuucucacuggagcc

SEQ ID NO: 845583 - RNA, 19 nt, Artificial Sequence
  Description of Artificial Sequence: Synthetic oligonucleotide
gaagcagaacugguacucg

SEQ ID NO: 845584 - RNA, 19 nt, Artificial Sequence
  Description of Artificial Sequence: Synthetic oligonucleotide
uguaccucgguuaggccaa

SEQ ID NO: 845585 - RNA, 19 nt, Artificial Sequence
  Description of Artificial Sequence: Synthetic oligonucleotide
aaagucgguuuaucuacau

SEQ ID NO: 845586 - RNA, 19 nt, Artificial Sequence
  Description of Artificial Sequence: Synthetic oligonucleotide
acgauuguggaguuguuuu

SEQ ID NO: 845587 - RNA, 19 nt, Artificial Sequence
  Description of Artificial Sequence: Synthetic oligonucleotide
agagccuucgacgccacgg

SEQ ID NO: 845588 - RNA, 19 nt, Artificial Sequence
  Description of Artificial Sequence: Synthetic oligonucleotide
auagacucauacuccugug

SEQ ID NO: 845589 - RNA, 19 nt, Artificial Sequence
  Description of Artificial Sequence: Synthetic oligonucleotide
agcgccucauggaugaagc

SEQ ID NO: 845590 - RNA, 19 nt, Artificial Sequence
  Description of Artificial Sequence: Synthetic oligonucleotide
acucacgaagaauguacug

SEQ ID NO: 845591 - RNA, 19 nt, Artificial Sequence
  Description of Artificial Sequence: Synthetic oligonucleotide
ugucgaacgguccgggacu

SEQ ID NO: 845592 - RNA, 19 nt, Artificial Sequence
  Description of Artificial Sequence: Synthetic oligonucleotide
auguaugcguucugccgac

SEQ ID NO: 845593 - RNA, 19 nt, Artificial Sequence
  Description of Artificial Sequence: Synthetic oligonucleotide
caaaguuugacuggcacga

SEQ ID NO: 845594 - RNA, 19 nt, Artificial Sequence
  Description of Artificial Sequence: Synthetic oligonucleotide
caccgucuggaaaaugucc

SEQ ID NO: 845595 - RNA, 19 nt, Artificial Sequence
  Description of Artificial Sequence: Synthetic oligonucleotide
uggaacugucgaacggucc

SEQ ID NO: 845596 - RNA, 19 nt, Artificial Sequence
  Description of Artificial Sequence: Synthetic oligonucleotide
uccagguucgaauguuccc

SEQ ID NO: 845597 - RNA, 19 nt, Artificial Sequence
  Description of Artificial Sequence: Synthetic oligonucleotide
ugagcauuacgacgauugu

SEQ ID NO: 845598 - RNA, 19 nt, Artificial Sequence
  Description of Artificial Sequence: Synthetic oligonucleotide
acccgcucuaucuuguuug

SEQ ID NO: 845599 - RNA, 19 nt, Artificial Sequence
  Description of Artificial Sequence: Synthetic oligonucleotide
gucgauagacucauacucc

SEQ ID NO: 845600 - RNA, 19 nt, Artificial Sequence
  Description of Artificial Sequence: Synthetic oligonucleotide
aacgguccgggacuggcca

SEQ ID NO: 845601 - RNA, 19 nt, Artificial Sequence
  Description of Artificial Sequence: Synthetic oligonucleotide
aaauggcgcaccucacgcu

SEQ ID NO: 845602 - RNA, 19 nt, Artificial Sequence
  Description of Artificial Sequence: Synthetic oligonucleotide
guaugcguucugccgacgg

SEQ ID NO: 845603 - RNA, 19 nt, Artificial Sequence
  Description of Artificial Sequence: Synthetic oligonucleotide
gagcauuacgacgauugug

SEQ ID NO: 845604 - RNA, 19 nt, Artificial Sequence
  Description of Artificial Sequence: Synthetic oligonucleotide
gugugggguauucagguac

SEQ ID NO: 845605 - RNA, 19 nt, Artificial Sequence
  Description of Artificial Sequence: Synthetic oligonucleotide
uacugcggcauguuguacu

SEQ ID NO: 845606 - RNA, 19 nt, Artificial Sequence
  Description of Artificial Sequence: Synthetic oligonucleotide
ggcacgauuuuguuucugg

SEQ ID NO: 845607 - RNA, 19 nt, Artificial Sequence
  Description of Artificial Sequence: Synthetic oligonucleotide
acagcgcacgccaaaaguc

SEQ ID NO: 845608 - RNA, 19 nt, Artificial Sequence
  Description of Artificial Sequence: Synthetic oligonucleotide
gaagccguaagucucugua

SEQ ID NO: 845609 - RNA, 19 nt, Artificial Sequence
  Description of Artificial Sequence: Synthetic oligonucleotide
aacucacgaagaauguacu

SEQ ID NO: 845610 - RNA, 19 nt, Artificial Sequence
  Description of Artificial Sequence: Synthetic oligonucleotide
cacgaagaauguacugcgg

SEQ ID NO: 845611 - RNA, 19 nt, Artificial Sequence
  Description of Artificial Sequence: Synthetic oligonucleotide
aaguuugacuggcacgauu

SEQ ID NO: 845612 - RNA, 19 nt, Artificial Sequence
  Description of Artificial Sequence: Synthetic oligonucleotide
auucagguaccccgugguc

SEQ ID NO: 845613 - RNA, 19 nt, Artificial Sequence
  Description of Artificial Sequence: Synthetic oligonucleotide
uucgacgccacggaugggc

SEQ ID NO: 845614 - RNA, 19 nt, Artificial Sequence
  Description of Artificial Sequence: Synthetic oligonucleotide
ucgaauguucccaggugaa

SEQ ID NO: 845615 - RNA, 19 nt, Artificial Sequence
  Description of Artificial Sequence: Synthetic oligonucleotide
agcuuggugagcauuacga

SEQ ID NO: 845616 - RNA, 19 nt, Artificial Sequence
  Description of Artificial Sequence: Synthetic oligonucleotide
ggaaauggcgcaccucacg

SEQ ID NO: 845617 - RNA, 19 nt, Artificial Sequence
  Description of Artificial Sequence: Synthetic oligonucleotide
uccguuccagcacaaugcu

SEQ ID NO: 845618 - RNA, 19 nt, Artificial Sequence
  Description of Artificial Sequence: Synthetic oligonucleotide
ugaccacaguggccgaccg

SEQ ID NO: 845619 - RNA, 19 nt, Artificial Sequence
  Description of Artificial Sequence: Synthetic oligonucleotide
gagagucacguguccauac

SEQ ID NO: 845620 - RNA, 19 nt, Artificial Sequence
  Description of Artificial Sequence: Synthetic oligonucleotide
auuggcguagcgguucuuc

SEQ ID NO: 845621 - RNA, 19 nt, Artificial Sequence
  Description of Artificial Sequence: Synthetic oligonucleotide
uguagguguagaggcugcg

SEQ ID NO: 845622 - RNA, 19 nt, Artificial Sequence
  Description of Artificial Sequence: Synthetic oligonucleotide
ggugaugaagcgugaagug

SEQ ID NO: 845623 - RNA, 19 nt, Artificial Sequence
  Description of Artificial Sequence: Synthetic oligonucleotide
aacugucgaacgguccggg

SEQ ID NO: 845624 - RNA, 19 nt, Artificial Sequence
  Description of Artificial Sequence: Synthetic oligonucleotide
cagcgcacgccaaaagucc

SEQ ID NO: 845625 - RNA, 19 nt, Artificial Sequence
  Description of Artificial Sequence: Synthetic oligonucleotide
gagucacguguccauacac

SEQ ID NO: 845626 - RNA, 19 nt, Artificial Sequence
  Description of Artificial Sequence: Synthetic oligonucleotide
gcauaaugaucaaagcugc

SEQ ID NO: 845627 - RNA, 19 nt, Artificial Sequence
  Description of Artificial Sequence: Synthetic oligonucleotide
uguaaucacuacccaugau

SEQ ID NO: 845628 - RNA, 19 nt, Artificial Sequence
  Description of Artificial Sequence: Synthetic oligonucleotide
acgccaaaaguccuccgug

SEQ ID NO: 845629 - RNA, 19 nt, Artificial Sequence
  Description of Artificial Sequence: Synthetic oligonucleotide
ggcgucuaugacuaugaag

SEQ ID NO: 845630 - RNA, 19 nt, Artificial Sequence
  Description of Artificial Sequence: Synthetic oligonucleotide
accugacuugggugcaccc

SEQ ID NO: 845631 - RNA, 19 nt, Artificial Sequence
  Description of Artificial Sequence: Synthetic oligonucleotide
gaugaacacuccuguccug

SEQ ID NO: 845632 - RNA, 19 nt, Artificial Sequence
  Description of Artificial Sequence: Synthetic oligonucleotide
ucacauccgggaacguggc

SEQ ID NO: 845633 - RNA, 19 nt, Artificial Sequence
  Description of Artificial Sequence: Synthetic oligonucleotide
ucgcaauguaggcuuucug

SEQ ID NO: 845634 - RNA, 19 nt, Artificial Sequence
  Description of Artificial Sequence: Synthetic oligonucleotide
uaucuacauacaggggcag

SEQ ID NO: 845635 - RNA, 19 nt, Artificial Sequence
  Description of Artificial Sequence: Synthetic oligonucleotide
agccgcgucaucaugacca

SEQ ID NO: 845636 - RNA, 19 nt, Artificial Sequence
  Description of Artificial Sequence: Synthetic oligonucleotide
uaugcguucugccgacggu

SEQ ID NO: 845637 - RNA, 19 nt, Artificial Sequence
  Description of Artificial Sequence: Synthetic oligonucleotide
aagucgguuuaucuacaua

SEQ ID NO: 845638 - RNA, 19 nt, Artificial Sequence
  Description of Artificial Sequence: Synthetic oligonucleotide
acgacgauuguggaguugu

SEQ ID NO: 845639 - RNA, 19 nt, Artificial Sequence
  Description of Artificial Sequence: Synthetic oligonucleotide
gaacugucgaacgguccgg

SEQ ID NO: 845640 - RNA, 19 nt, Artificial Sequence
  Description of Artificial Sequence: Synthetic oligonucleotide
cuguaccucgguuaggcca

SEQ ID NO: 845641 - RNA, 19 nt, Artificial Sequence
  Description of Artificial Sequence: Synthetic oligonucleotide
cucguagcgcauccguucc

SEQ ID NO: 845642 - RNA, 19 nt, Artificial Sequence
  Description of Artificial Sequence: Synthetic oligonucleotide
caccaggcgguucuuaaac

SEQ ID NO: 845643 - RNA, 19 nt, Artificial Sequence
  Description of Artificial Sequence: Synthetic oligonucleotide
caggcgguucuuaaacuug

SEQ ID NO: 845644 - RNA, 19 nt, Artificial Sequence
  Description of Artificial Sequence: Synthetic oligonucleotide
gcauuaauguagucagagc

SEQ ID NO: 845645 - RNA, 19 nt, Artificial Sequence
  Description of Artificial Sequence: Synthetic oligonucleotide
cugucgaacgguccgggac

SEQ ID NO: 845646 - RNA, 19 nt, Artificial Sequence
  Description of Artificial Sequence: Synthetic oligonucleotide
agagucacguguccauaca

SEQ ID NO: 845647 - RNA, 19 nt, Artificial Sequence
  Description of Artificial Sequence: Synthetic oligonucleotide
ugagaccgcaugagaguca

SEQ ID NO: 845648 - RNA, 19 nt, Artificial Sequence
  Description of Artificial Sequence: Synthetic oligonucleotide
ugacuugggugcacccugc

SEQ ID NO: 845649 - RNA, 19 nt, Artificial Sequence
  Description of Artificial Sequence: Synthetic oligonucleotide
gcacgauuuuguuucuggg

SEQ ID NO: 845650 - RNA, 19 nt, Artificial Sequence
  Description of Artificial Sequence: Synthetic oligonucleotide
ccgaugaagucgauaaagc

SEQ ID NO: 845651 - RNA, 19 nt, Artificial Sequence
  Description of Artificial Sequence: Synthetic oligonucleotide
guccugacgcagaaagugg

SEQ ID NO: 845652 - RNA, 19 nt, Artificial Sequence
  Description of Artificial Sequence: Synthetic oligonucleotide
aagcgugaagugugugccu

SEQ ID NO: 845653 - RNA, 19 nt, Artificial Sequence
  Description of Artificial Sequence: Synthetic oligonucleotide
gaauguucccaggugaacu

SEQ ID NO: 845654 - RNA, 19 nt, Artificial Sequence
  Description of Artificial Sequence: Synthetic oligonucleotide
ucacguguccauacacauc

SEQ ID NO: 845655 - RNA, 19 nt, Artificial Sequence
  Description of Artificial Sequence: Synthetic oligonucleotide
cagguucgaauguucccag

SEQ ID NO: 845656 - RNA, 19 nt, Artificial Sequence
  Description of Artificial Sequence: Synthetic oligonucleotide
accacaguggccgaccgcu

SEQ ID NO: 845657 - RNA, 19 nt, Artificial Sequence
  Description of Artificial Sequence: Synthetic oligonucleotide
cuacauacaggggcagagc

SEQ ID NO: 845658 - RNA, 19 nt, Artificial Sequence
  Description of Artificial Sequence: Synthetic oligonucleotide
aguccgugaacuggaacug

SEQ ID NO: 845659 - RNA, 19 nt, Artificial Sequence
  Description of Artificial Sequence: Synthetic oligonucleotide
agccggccaguacuggugg

SEQ ID NO: 845660 - RNA, 19 nt, Artificial Sequence
  Description of Artificial Sequence: Synthetic oligonucleotide
gcucucauauggcaggaug

SEQ ID NO: 845661 - RNA, 19 nt, Artificial Sequence
  Description of Artificial Sequence: Synthetic oligonucleotide
ggagccauucuuguguaag

SEQ ID NO: 845662 - RNA, 19 nt, Artificial Sequence
  Description of Artificial Sequence: Synthetic oligonucleotide
cauggcgucuaugacuaug

SEQ ID NO: 845663 - RNA, 19 nt, Artificial Sequence
  Description of Artificial Sequence: Synthetic oligonucleotide
ccuucgacgccacggaugg

SEQ ID NO: 845664 - RNA, 19 nt, Artificial Sequence
  Description of Artificial Sequence: Synthetic oligonucleotide
gacucgugagcucucauau

SEQ ID NO: 845665 - RNA, 19 nt, Artificial Sequence
  Description of Artificial Sequence: Synthetic oligonucleotide
ugacgcagaaaguggccaa

SEQ ID NO: 845666 - RNA, 19 nt, Artificial Sequence
  Description of Artificial Sequence: Synthetic oligonucleotide
accgucuggaaaaugucca

SEQ ID NO: 845667 - RNA, 19 nt, Artificial Sequence
  Description of Artificial Sequence: Synthetic oligonucleotide
gaagucgauaaagccuuca

SEQ ID NO: 845668 - RNA, 19 nt, Artificial Sequence
  Description of Artificial Sequence: Synthetic oligonucleotide
aacggcacggacagagcug

SEQ ID NO: 845669 - RNA, 19 nt, Artificial Sequence
  Description of Artificial Sequence: Synthetic oligonucleotide
uacugaucuuccgucugca

SEQ ID NO: 845670 - RNA, 19 nt, Artificial Sequence
  Description of Artificial Sequence: Synthetic oligonucleotide
cugagaccgcaugagaguc

SEQ ID NO: 845671 - RNA, 19 nt, Artificial Sequence
  Description of Artificial Sequence: Synthetic oligonucleotide
gagaccgcaugagagucac

SEQ ID NO: 845672 - RNA, 19 nt, Artificial Sequence
  Description of Artificial Sequence: Synthetic oligonucleotide
gacucugcgcaggaaugcc

SEQ ID NO: 845673 - RNA, 19 nt, Artificial Sequence
  Description of Artificial Sequence: Synthetic oligonucleotide
gacgccacggaugggcugc

SEQ ID NO: 845674 - RNA, 19 nt, Artificial Sequence
  Description of Artificial Sequence: Synthetic oligonucleotide
ucucauauggcaggauguu

SEQ ID NO: 845675 - RNA, 19 nt, Artificial Sequence
  Description of Artificial Sequence: Synthetic oligonucleotide
ucgguacgaaucuuccuuu

SEQ ID NO: 845676 - RNA, 19 nt, Artificial Sequence
  Description of Artificial Sequence: Synthetic oligonucleotide
uguaugcguucugccgacg

SEQ ID NO: 845677 - RNA, 19 nt, Artificial Sequence
  Description of Artificial Sequence: Synthetic oligonucleotide
uuaggccaauacuggucac

SEQ ID NO: 845678 - RNA, 19 nt, Artificial Sequence
  Description of Artificial Sequence: Synthetic oligonucleotide
cucauauggcaggauguuc

SEQ ID NO: 845679 - RNA, 19 nt, Artificial Sequence
  Description of Artificial Sequence: Synthetic oligonucleotide
agcauggcgucuaugacua

SEQ ID NO: 845680 - RNA, 19 nt, Artificial Sequence
  Description of Artificial Sequence: Synthetic oligonucleotide
cguaagucucuguaccucg

SEQ ID NO: 845681 - RNA, 19 nt, Artificial Sequence
  Description of Artificial Sequence: Synthetic oligonucleotide
ggaaaauguccaccacgcc

SEQ ID NO: 845682 - RNA, 19 nt, Artificial Sequence
  Description of Artificial Sequence: Synthetic oligonucleotide
gagcuggcgagccucuuga

SEQ ID NO: 845683 - RNA, 19 nt, Artificial Sequence
  Description of Artificial Sequence: Synthetic oligonucleotide
cacggacagagcugacccg

SEQ ID NO: 845684 - RNA, 19 nt, Artificial Sequence
  Description of Artificial Sequence: Synthetic oligonucleotide
ucugccgacgguagccauc

SEQ ID NO: 845685 - RNA, 19 nt, Artificial Sequence
  Description of Artificial Sequence: Synthetic oligonucleotide
gacgugcucucccggcucc

SEQ ID NO: 845686 - RNA, 19 nt, Artificial Sequence
  Description of Artificial Sequence: Synthetic oligonucleotide
agucacguguccauacaca

SEQ ID NO: 845687 - RNA, 19 nt, Artificial Sequence
  Description of Artificial Sequence: Synthetic oligonucleotide
agacucgugagcucucaua

SEQ ID NO: 845688 - RNA, 19 nt, Artificial Sequence
  Description of Artificial Sequence: Synthetic oligonucleotide
cugcaagaugacacgagaa

SEQ ID NO: 845689 - RNA, 19 nt, Artificial Sequence
  Description of Artificial Sequence: Synthetic oligonucleotide
gggaacguggcgcaggguc

SEQ ID NO: 845690 - RNA, 19 nt, Artificial Sequence
  Description of Artificial Sequence: Synthetic oligonucleotide
cugccgacgguagccaucc

SEQ ID NO: 845691 - RNA, 19 nt, Artificial Sequence
  Description of Artificial Sequence: Synthetic oligonucleotide
caucccgggcaucugugac

SEQ ID NO: 845692 - RNA, 19 nt, Artificial Sequence
  Description of Artificial Sequence: Synthetic oligonucleotide
cuggcgagccucuugaacu

SEQ ID NO: 845693 - RNA, 19 nt, Artificial Sequence
  Description of Artificial Sequence: Synthetic oligonucleotide
cucucauauggcaggaugu

SEQ ID NO: 845694 - RNA, 19 nt, Artificial Sequence
  Description of Artificial Sequence: Synthetic oligonucleotide
uucaccugacuugggugca

SEQ ID NO: 845695 - RNA, 19 nt, Artificial Sequence
  Description of Artificial Sequence: Synthetic oligonucleotide
gaagaauguacugcggcau

SEQ ID NO: 845696 - RNA, 19 nt, Artificial Sequence
  Description of Artificial Sequence: Synthetic oligonucleotide
ugugcacuuggccgaugaa

SEQ ID NO: 845697 - RNA, 19 nt, Artificial Sequence
  Description of Artificial Sequence: Synthetic oligonucleotide
accgcaugagagucacgug

SEQ ID NO: 845698 - RNA, 19 nt, Artificial Sequence
  Description of Artificial Sequence: Synthetic oligonucleotide
uggguccgaagcaccuuca

SEQ ID NO: 845699 - RNA, 19 nt, Artificial Sequence
  Description of Artificial Sequence: Synthetic oligonucleotide
accacgacgggacccgcgu

SEQ ID NO: 845700 - RNA, 19 nt, Artificial Sequence
  Description of Artificial Sequence: Synthetic oligonucleotide
cuuuaauacaaagucgguu

SEQ ID NO: 845701 - RNA, 19 nt, Artificial Sequence
  Description of Artificial Sequence: Synthetic oligonucleotide
acauuggcguagcgguucu

SEQ ID NO: 845702 - RNA, 19 nt, Artificial Sequence
  Description of Artificial Sequence: Synthetic oligonucleotide
guacucguccuccgucugc

SEQ ID NO: 845703 - RNA, 19 nt, Artificial Sequence
  Description of Artificial Sequence: Synthetic oligonucleotide
ggcguagcgguucuucggc

SEQ ID NO: 845704 - RNA, 19 nt, Artificial Sequence
  Description of Artificial Sequence: Synthetic oligonucleotide
cucacgcuucucacuggag

SEQ ID NO: 845705 - RNA, 19 nt, Artificial Sequence
  Description of Artificial Sequence: Synthetic oligonucleotide
ugacgugcucucccggcuc

SEQ ID NO: 845706 - RNA, 19 nt, Artificial Sequence
  Description of Artificial Sequence: Synthetic oligonucleotide
gacgcagaaaguggccaac

SEQ ID NO: 845707 - RNA, 19 nt, Artificial Sequence
  Description of Artificial Sequence: Synthetic oligonucleotide
cuugguuggccuuccaggu

SEQ ID NO: 845708 - RNA, 19 nt, Artificial Sequence
  Description of Artificial Sequence: Synthetic oligonucleotide
gcuuggugagcauuacgac

SEQ ID NO: 845709 - RNA, 19 nt, Artificial Sequence
  Description of Artificial Sequence: Synthetic oligonucleotide
gguauucagguaccccgug

SEQ ID NO: 845710 - RNA, 19 nt, Artificial Sequence
  Description of Artificial Sequence: Synthetic oligonucleotide
gucgguuuaucuacauaca

SEQ ID NO: 845711 - RNA, 19 nt, Artificial Sequence
  Description of Artificial Sequence: Synthetic oligonucleotide
gcgggcagagcguucagcc

SEQ ID NO: 845712 - RNA, 19 nt, Artificial Sequence
  Description of Artificial Sequence: Synthetic oligonucleotide
gcgauguaugcguucugcc

SEQ ID NO: 845713 - RNA, 19 nt, Artificial Sequence
  Description of Artificial Sequence: Synthetic oligonucleotide
guacgaaucuuccuuuaau

SEQ ID NO: 845714 - RNA, 19 nt, Artificial Sequence
  Description of Artificial Sequence: Synthetic oligonucleotide
augacacgagaauggucau

SEQ ID NO: 845715 - RNA, 19 nt, Artificial Sequence
  Description of Artificial Sequence: Synthetic oligonucleotide
ugagagucacguguccaua

SEQ ID NO: 845716 - RNA, 19 nt, Artificial Sequence
  Description of Artificial Sequence: Synthetic oligonucleotide
ccauucuuguguaaggaaa

SEQ ID NO: 845717 - RNA, 19 nt, Artificial Sequence
  Description of Artificial Sequence: Synthetic oligonucleotide
ggucuugacucugcgcagg

SEQ ID NO: 845718 - RNA, 19 nt, Artificial Sequence
  Description of Artificial Sequence: Synthetic oligonucleotide
gagccuucgacgccacgga

SEQ ID NO: 845719 - RNA, 19 nt, Artificial Sequence
  Description of Artificial Sequence: Synthetic oligonucleotide
caccgagaugggcccaucc

SEQ ID NO: 845720 - RNA, 19 nt, Artificial Sequence
  Description of Artificial Sequence: Synthetic oligonucleotide
acggcacggacagagcuga

SEQ ID NO: 845721 - RNA, 19 nt, Artificial Sequence
  Description of Artificial Sequence: Synthetic oligonucleotide
ggucacauuugauccguga

SEQ ID NO: 845722 - RNA, 19 nt, Artificial Sequence
  Description of Artificial Sequence: Synthetic oligonucleotide
acugucgaacgguccggga

SEQ ID NO: 845723 - RNA, 19 nt, Artificial Sequence
  Description of Artificial Sequence: Synthetic oligonucleotide
gguuaggccaauacugguc

SEQ ID NO: 845724 - RNA, 19 nt, Artificial Sequence
  Description of Artificial Sequence: Synthetic oligonucleotide
ggcgauguaugcguucugc

SEQ ID NO: 845725 - RNA, 19 nt, Artificial Sequence
  Description of Artificial Sequence: Synthetic oligonucleotide
ggccuuccagguucgaaug

SEQ ID NO: 845726 - RNA, 19 nt, Artificial Sequence
  Description of Artificial Sequence: Synthetic oligonucleotide
ccacggaugggcugcaggc

SEQ ID NO: 845727 - RNA, 19 nt, Artificial Sequence
  Description of Artificial Sequence: Synthetic oligonucleotide
acgggacccgcgucaggcg

SEQ ID NO: 845728 - RNA, 19 nt, Artificial Sequence
  Description of Artificial Sequence: Synthetic oligonucleotide
acccgcgucaggcggguug

SEQ ID NO: 845729 - RNA, 19 nt, Artificial Sequence
  Description of Artificial Sequence: Synthetic oligonucleotide
gggaccucgguguugccac

SEQ ID NO: 845730 - RNA, 19 nt, Artificial Sequence
  Description of Artificial Sequence: Synthetic oligonucleotide
aucuacauacaggggcaga

SEQ ID NO: 845731 - RNA, 19 nt, Artificial Sequence
  Description of Artificial Sequence: Synthetic oligonucleotide
uggcgauguaugcguucug

SEQ ID NO: 845732 - RNA, 19 nt, Artificial Sequence
  Description of Artificial Sequence: Synthetic oligonucleotide
cgaaguacugguagcgggc

SEQ ID NO: 845733 - RNA, 19 nt, Artificial Sequence
  Description of Artificial Sequence: Synthetic oligonucleotide
guguaaggaaaagguccug

SEQ ID NO: 845734 - RNA, 19 nt, Artificial Sequence
  Description of Artificial Sequence: Synthetic oligonucleotide
gcgucaggcggguugcagg

SEQ ID NO: 845735 - RNA, 19 nt, Artificial Sequence
  Description of Artificial Sequence: Synthetic oligonucleotide
ugcgcuccagcauggcguc

SEQ ID NO: 845736 - RNA, 19 nt, Artificial Sequence
  Description of Artificial Sequence: Synthetic oligonucleotide
uacgacgauuguggaguug

SEQ ID NO: 845737 - RNA, 19 nt, Artificial Sequence
  Description of Artificial Sequence: Synthetic oligonucleotide
gaacgguccgggacuggcc

SEQ ID NO: 845738 - RNA, 19 nt, Artificial Sequence
  Description of Artificial Sequence: Synthetic oligonucleotide
cugacgcagaaaguggcca

SEQ ID NO: 845739 - RNA, 19 nt, Artificial Sequence
  Description of Artificial Sequence: Synthetic oligonucleotide
ccauccgccagaagucucc

SEQ ID NO: 845740 - RNA, 19 nt, Artificial Sequence
  Description of Artificial Sequence: Synthetic oligonucleotide
cugccauaggguccaccac

SEQ ID NO: 845741 - RNA, 19 nt, Artificial Sequence
  Description of Artificial Sequence: Synthetic oligonucleotide
uuacgacgauuguggaguu

SEQ ID NO: 845742 - RNA, 19 nt, Artificial Sequence
  Description of Artificial Sequence: Synthetic oligonucleotide
gguacgaaucuuccuuuaa

SEQ ID NO: 845743 - RNA, 19 nt, Artificial Sequence
  Description of Artificial Sequence: Synthetic oligonucleotide
caccauggcgggccucugg

SEQ ID NO: 845744 - RNA, 19 nt, Artificial Sequence
  Description of Artificial Sequence: Synthetic oligonucleotide
ccuucaagaggcugcaaga

SEQ ID NO: 845745 - RNA, 19 nt, Artificial Sequence
  Description of Artificial Sequence: Synthetic oligonucleotide
uggcacgauuuuguuucug

SEQ ID NO: 845746 - RNA, 19 nt, Artificial Sequence
  Description of Artificial Sequence: Synthetic oligonucleotide
guagcgggcagagcguuca

SEQ ID NO: 845747 - RNA, 19 nt, Artificial Sequence
  Description of Artificial Sequence: Synthetic oligonucleotide
gaagggugugggguauuca

SEQ ID NO: 845748 - RNA, 19 nt, Artificial Sequence
  Description of Artificial Sequence: Synthetic oligonucleotide
cgagaauggucauaggcga

SEQ ID NO: 845749 - RNA, 19 nt, Artificial Sequence
  Description of Artificial Sequence: Synthetic oligonucleotide
gugaccuggaugaagccgu

SEQ ID NO: 845750 - RNA, 19 nt, Artificial Sequence
  Description of Artificial Sequence: Synthetic oligonucleotide
acgcagaaaguggccaacu

SEQ ID NO: 845751 - RNA, 19 nt, Artificial Sequence
  Description of Artificial Sequence: Synthetic oligonucleotide
gacgguagccauccacaua

SEQ ID NO: 845752 - RNA, 19 nt, Artificial Sequence
  Description of Artificial Sequence: Synthetic oligonucleotide
uuggccgaugaagucgaua

SEQ ID NO: 845753 - RNA, 19 nt, Artificial Sequence
  Description of Artificial Sequence: Synthetic oligonucleotide
ucgaugaagcuggcauuaa

SEQ ID NO: 845754 - RNA, 19 nt, Artificial Sequence
  Description of Artificial Sequence: Synthetic oligonucleotide
ugucgcaauguaggcuuuc

SEQ ID NO: 845755 - RNA, 19 nt, Artificial Sequence
  Description of Artificial Sequence: Synthetic oligonucleotide
acuacccaugaugccuuca

SEQ ID NO: 845756 - RNA, 19 nt, Artificial Sequence
  Description of Artificial Sequence: Synthetic oligonucleotide
guaguugcgcugagaccgc

SEQ ID NO: 845757 - RNA, 19 nt, Artificial Sequence
  Description of Artificial Sequence: Synthetic oligonucleotide
gguacucguccuccgucug

SEQ ID NO: 845758 - RNA, 19 nt, Artificial Sequence
  Description of Artificial Sequence: Synthetic oligonucleotide
cauccgggaacguggcgca

SEQ ID NO: 845759 - RNA, 19 nt, Artificial Sequence
  Description of Artificial Sequence: Synthetic oligonucleotide
ucggcuugguuggccuucc

SEQ ID NO: 845760 - RNA, 19 nt, Artificial Sequence
  Description of Artificial Sequence: Synthetic oligonucleotide
caccugacuugggugcacc

SEQ ID NO: 845761 - RNA, 19 nt, Artificial Sequence
  Description of Artificial Sequence: Synthetic oligonucleotide
ggugcacccugcucuggcc

SEQ ID NO: 845762 - RNA, 19 nt, Artificial Sequence
  Description of Artificial Sequence: Synthetic oligonucleotide
gccauucuuguguaaggaa

SEQ ID NO: 845763 - RNA, 19 nt, Artificial Sequence
  Description of Artificial Sequence: Synthetic oligonucleotide
ucggagcuuggugagcauu

SEQ ID NO: 845764 - RNA, 19 nt, Artificial Sequence
  Description of Artificial Sequence: Synthetic oligonucleotide
cacagcgcacgccaaaagu

SEQ ID NO: 845765 - RNA, 19 nt, Artificial Sequence
  Description of Artificial Sequence: Synthetic oligonucleotide
augcguucugccgacggua

SEQ ID NO: 845766 - RNA, 19 nt, Artificial Sequence
  Description of Artificial Sequence: Synthetic oligonucleotide
ucgaacgguccgggacugg

SEQ ID NO: 845767 - RNA, 19 nt, Artificial Sequence
  Description of Artificial Sequence: Synthetic oligonucleotide
cacgacgggacccgcguca

SEQ ID NO: 845768 - RNA, 19 nt, Artificial Sequence
  Description of Artificial Sequence: Synthetic oligonucleotide
gaccgaacugcuccuuggu

SEQ ID NO: 845769 - RNA, 19 nt, Artificial Sequence
  Description of Artificial Sequence: Synthetic oligonucleotide
guaccccguggucuggcca

SEQ ID NO: 845770 - RNA, 19 nt, Artificial Sequence
  Description of Artificial Sequence: Synthetic oligonucleotide
gcauuacgacgauugugga

SEQ ID NO: 845771 - RNA, 19 nt, Artificial Sequence
  Description of Artificial Sequence: Synthetic oligonucleotide
uaguugcgcugagaccgca

SEQ ID NO: 845772 - RNA, 19 nt, Artificial Sequence
  Description of Artificial Sequence: Synthetic oligonucleotide
gucgaacgguccgggacug

SEQ ID NO: 845773 - RNA, 19 nt, Artificial Sequence
  Description of Artificial Sequence: Synthetic oligonucleotide
cagccgcgucaucaugacc

SEQ ID NO: 845774 - RNA, 19 nt, Artificial Sequence
  Description of Artificial Sequence: Synthetic oligonucleotide
cucucggagcuuggugagc

SEQ ID NO: 845775 - RNA, 19 nt, Artificial Sequence
  Description of Artificial Sequence: Synthetic oligonucleotide
agccuucgacgccacggau

SEQ ID NO: 845776 - RNA, 19 nt, Artificial Sequence
  Description of Artificial Sequence: Synthetic oligonucleotide
cagaacugguacucguccu

SEQ ID NO: 845777 - RNA, 19 nt, Artificial Sequence
  Description of Artificial Sequence: Synthetic oligonucleotide
gacgauuguggaguuguuu

SEQ ID NO: 845778 - RNA, 19 nt, Artificial Sequence
  Description of Artificial Sequence: Synthetic oligonucleotide
gccgacgguagccauccac

SEQ ID NO: 845779 - RNA, 19 nt, Artificial Sequence
  Description of Artificial Sequence: Synthetic oligonucleotide
ccagguucgaauguuccca

SEQ ID NO: 845780 - RNA, 19 nt, Artificial Sequence
  Description of Artificial Sequence: Synthetic oligonucleotide
gggucgauagacucauacu

SEQ ID NO: 845781 - RNA, 19 nt, Artificial Sequence
  Description of Artificial Sequence: Synthetic oligonucleotide
acgacgggacccgcgucag

SEQ ID NO: 845782 - RNA, 19 nt, Artificial Sequence
  Description of Artificial Sequence: Synthetic oligonucleotide
cuucaagaggcugcaagau

SEQ ID NO: 845783 - RNA, 19 nt, Artificial Sequence
  Description of Artificial Sequence: Synthetic oligonucleotide
cagagccuucgacgccacg

SEQ ID NO: 845784 - RNA, 19 nt, Artificial Sequence
  Description of Artificial Sequence: Synthetic oligonucleotide
guggcgauguaugcguucu

SEQ ID NO: 845785 - RNA, 19 nt, Artificial Sequence
  Description of Artificial Sequence: Synthetic oligonucleotide
agggcccauggcuuauguu

SEQ ID NO: 845786 - RNA, 19 nt, Artificial Sequence
  Description of Artificial Sequence: Synthetic oligonucleotide
ggcuggcggugaugaagcg

SEQ ID NO: 845787 - RNA, 19 nt, Artificial Sequence
  Description of Artificial Sequence: Synthetic oligonucleotide
ccggugacgugcucucccg

SEQ ID NO: 845788 - RNA, 19 nt, Artificial Sequence
  Description of Artificial Sequence: Synthetic oligonucleotide
ccguggucuggccaggcug

SEQ ID NO: 845789 - RNA, 19 nt, Artificial Sequence
  Description of Artificial Sequence: Synthetic oligonucleotide
cacgcccgcgcugcagugg

SEQ ID NO: 845790 - RNA, 19 nt, Artificial Sequence
  Description of Artificial Sequence: Synthetic oligonucleotide
gccuucgacgccacggaug

SEQ ID NO: 845791 - RNA, 19 nt, Artificial Sequence
  Description of Artificial Sequence: Synthetic oligonucleotide
cagagcguucagccggcca

SEQ ID NO: 845792 - RNA, 19 nt, Artificial Sequence
  Description of Artificial Sequence: Synthetic oligonucleotide
ugcgugcggggaccucggu

SEQ ID NO: 845793 - RNA, 19 nt, Artificial Sequence
  Description of Artificial Sequence: Synthetic oligonucleotide
gugacgugcucucccggcu

SEQ ID NO: 845794 - RNA, 19 nt, Artificial Sequence
  Description of Artificial Sequence: Synthetic oligonucleotide
ccgaccgcuguucccacac

SEQ ID NO: 845795 - RNA, 19 nt, Artificial Sequence
  Description of Artificial Sequence: Synthetic oligonucleotide
ccuuuaauacaaagucggu

SEQ ID NO: 845796 - RNA, 19 nt, Artificial Sequence
  Description of Artificial Sequence: Synthetic oligonucleotide
auccgccagaagucuccaa

SEQ ID NO: 845797 - RNA, 19 nt, Artificial Sequence
  Description of Artificial Sequence: Synthetic oligonucleotide
agcucucauauggcaggau

SEQ ID NO: 845798 - RNA, 19 nt, Artificial Sequence
  Description of Artificial Sequence: Synthetic oligonucleotide
caugccggugacgugcucu

SEQ ID NO: 845799 - RNA, 19 nt, Artificial Sequence
  Description of Artificial Sequence: Synthetic oligonucleotide
cuucgacgccacggauggg

SEQ ID NO: 845800 - RNA, 19 nt, Artificial Sequence
  Description of Artificial Sequence: Synthetic oligonucleotide
ugggcccauccugaccgaa

SEQ ID NO: 845801 - RNA, 19 nt, Artificial Sequence
  Description of Artificial Sequence: Synthetic oligonucleotide
ccguaagucucuguaccuc

SEQ ID NO: 845802 - RNA, 19 nt, Artificial Sequence
  Description of Artificial Sequence: Synthetic oligonucleotide
accgcuguucccacaccau

SEQ ID NO: 845803 - RNA, 19 nt, Artificial Sequence
  Description of Artificial Sequence: Synthetic oligonucleotide
gccaaaaguccuccguggu

SEQ ID NO: 845804 - RNA, 19 nt, Artificial Sequence
  Description of Artificial Sequence: Synthetic oligonucleotide
ccagccgcgucaucaugac

SEQ ID NO: 845805 - RNA, 19 nt, Artificial Sequence
  Description of Artificial Sequence: Synthetic oligonucleotide
gccauaggguccaccacga

SEQ ID NO: 845806 - RNA, 19 nt, Artificial Sequence
  Description of Artificial Sequence: Synthetic oligonucleotide
gacccgcucuaucuuguuu

SEQ ID NO: 845807 - RNA, 19 nt, Artificial Sequence
  Description of Artificial Sequence: Synthetic oligonucleotide
agcgguucuucggcuuggu

SEQ ID NO: 845808 - RNA, 19 nt, Artificial Sequence
  Description of Artificial Sequence: Synthetic oligonucleotide
aguugcgcugagaccgcau

SEQ ID NO: 845809 - RNA, 19 nt, Artificial Sequence
  Description of Artificial Sequence: Synthetic oligonucleotide
ggcgagccucuugaacucc

SEQ ID NO: 845810 - RNA, 19 nt, Artificial Sequence
  Description of Artificial Sequence: Synthetic oligonucleotide
gcccauccugaccgaacug

SEQ ID NO: 845811 - RNA, 19 nt, Artificial Sequence
  Description of Artificial Sequence: Synthetic oligonucleotide
acgguccgggacuggccau

SEQ ID NO: 845812 - RNA, 19 nt, Artificial Sequence
  Description of Artificial Sequence: Synthetic oligonucleotide
ccgcaugagagucacgugu

SEQ ID NO: 845813 - RNA, 19 nt, Artificial Sequence
  Description of Artificial Sequence: Synthetic oligonucleotide
gcgcaccucacgcuucuca

SEQ ID NO: 845814 - RNA, 19 nt, Artificial Sequence
  Description of Artificial Sequence: Synthetic oligonucleotide
cgucuaugacuaugaagca

SEQ ID NO: 845815 - RNA, 19 nt, Artificial Sequence
  Description of Artificial Sequence: Synthetic oligonucleotide
aggggccccuguguggcga

SEQ ID NO: 845816 - RNA, 19 nt, Artificial Sequence
  Description of Artificial Sequence: Synthetic oligonucleotide
cagugcggcccacgcccgc

SEQ ID NO: 845817 - RNA, 19 nt, Artificial Sequence
  Description of Artificial Sequence: Synthetic oligonucleotide
ggcccauccugaccgaacu

SEQ ID NO: 845818 - RNA, 19 nt, Artificial Sequence
  Description of Artificial Sequence: Synthetic oligonucleotide
gccguaagucucuguaccu

SEQ ID NO: 845819 - RNA, 19 nt, Artificial Sequence
  Description of Artificial Sequence: Synthetic oligonucleotide
ugccgacgguagccaucca

SEQ ID NO: 845820 - RNA, 19 nt, Artificial Sequence
  Description of Artificial Sequence: Synthetic oligonucleotide
ccgcuguucccacaccauc

SEQ ID NO: 845821 - RNA, 19 nt, Artificial Sequence
  Description of Artificial Sequence: Synthetic oligonucleotide
ccagugcggcccacgcccg

SEQ ID NO: 845822 - RNA, 19 nt, Artificial Sequence
  Description of Artificial Sequence: Synthetic oligonucleotide
gggacccgcgucaggcggg

SEQ ID NO: 845823 - RNA, 19 nt, Artificial Sequence
  Description of Artificial Sequence: Synthetic oligonucleotide
ccguuccagcacaaugcuc

SEQ ID NO: 845824 - RNA, 19 nt, Artificial Sequence
  Description of Artificial Sequence: Synthetic oligonucleotide
cacaguggccgaccgcugu

SEQ ID NO: 845825 - RNA, 19 nt, Artificial Sequence
  Description of Artificial Sequence: Synthetic oligonucleotide
gguccgggacuggccaucc

SEQ ID NO: 845826 - RNA, 19 nt, Artificial Sequence
  Description of Artificial Sequence: Synthetic oligonucleotide
gccgcgucaucaugaccac

SEQ ID NO: 845827 - RNA, 19 nt, Artificial Sequence
  Description of Artificial Sequence: Synthetic oligonucleotide
cgaacgguccgggacuggc

SEQ ID NO: 845828 - RNA, 19 nt, Artificial Sequence
  Description of Artificial Sequence: Synthetic oligonucleotide
ccauggcuuauguugcaua

SEQ ID NO: 845829 - RNA, 19 nt, Artificial Sequence
  Description of Artificial Sequence: Synthetic oligonucleotide
gcccuugugucgcaaugua

SEQ ID NO: 845830 - RNA, 19 nt, Artificial Sequence
  Description of Artificial Sequence: Synthetic oligonucleotide
gcguucagccggccaguac

SEQ ID NO: 845831 - RNA, 19 nt, Artificial Sequence
  Description of Artificial Sequence: Synthetic oligonucleotide
cgggacccgcgucaggcgg

SEQ ID NO: 845832 - RNA, 19 nt, Artificial Sequence
  Description of Artificial Sequence: Synthetic oligonucleotide
ccucgguuaggccaauacu

SEQ ID NO: 845833 - RNA, 19 nt, Artificial Sequence
  Description of Artificial Sequence: Synthetic oligonucleotide
agcguucagccggccagua

SEQ ID NO: 845834 - RNA, 19 nt, Artificial Sequence
  Description of Artificial Sequence: Synthetic oligonucleotide
aggaagggugugggguauu

SEQ ID NO: 845835 - RNA, 19 nt, Artificial Sequence
  Description of Artificial Sequence: Synthetic oligonucleotide
gcagacucgugagcucuca

SEQ ID NO: 845836 - RNA, 19 nt, Artificial Sequence
  Description of Artificial Sequence: Synthetic oligonucleotide
ugcccaucucucggagcuu

SEQ ID NO: 845837 - RNA, 19 nt, Artificial Sequence
  Description of Artificial Sequence: Synthetic oligonucleotide
ggcggguugcaggucuuga

SEQ ID NO: 845838 - RNA, 19 nt, Artificial Sequence
  Description of Artificial Sequence: Synthetic oligonucleotide
gccggccaguacugguggc

SEQ ID NO: 845839 - RNA, 19 nt, Artificial Sequence
  Description of Artificial Sequence: Synthetic oligonucleotide
gggcccauccugaccgaac

SEQ ID NO: 845840 - RNA, 19 nt, Artificial Sequence
  Description of Artificial Sequence: Synthetic oligonucleotide
cccgcgucaggcggguugc

SEQ ID NO: 845841 - RNA, 19 nt, Artificial Sequence
  Description of Artificial Sequence: Synthetic oligonucleotide
gguagcgggcagagcguuc

SEQ ID NO: 845842 - RNA, 19 nt, Artificial Sequence
  Description of Artificial Sequence: Synthetic oligonucleotide
gaucuuccgucugcaccau

SEQ ID NO: 845843 - RNA, 19 nt, Artificial Sequence
  Description of Artificial Sequence: Synthetic oligonucleotide
ggcggugaugaagcgugaa

SEQ ID NO: 845844 - RNA, 19 nt, Artificial Sequence
  Description of Artificial Sequence: Synthetic oligonucleotide
agcggcccuugugucgcaa

SEQ ID NO: 845845 - RNA, 19 nt, Artificial Sequence
  Description of Artificial Sequence: Synthetic oligonucleotide
cgugcggggaccucggugu

SEQ ID NO: 845846 - RNA, 19 nt, Artificial Sequence
  Description of Artificial Sequence: Synthetic oligonucleotide
ggcccuugugucgcaaugu

SEQ ID NO: 845847 - RNA, 19 nt, Artificial Sequence
  Description of Artificial Sequence: Synthetic oligonucleotide
gcucagggugaugaacacu

SEQ ID NO: 845848 - RNA, 19 nt, Artificial Sequence
  Description of Artificial Sequence: Synthetic oligonucleotide
gcccucguagcgcauccgu

SEQ ID NO: 845849 - RNA, 19 nt, Artificial Sequence
  Description of Artificial Sequence: Synthetic oligonucleotide
cagacucgugagcucucau

SEQ ID NO: 845850 - RNA, 19 nt, Artificial Sequence
  Description of Artificial Sequence: Synthetic oligonucleotide
ggccgaccgcuguucccac

SEQ ID NO: 845851 - RNA, 19 nt, Artificial Sequence
  Description of Artificial Sequence: Synthetic oligonucleotide
gugcaccgagaugggccca

SEQ ID NO: 845852 - RNA, 19 nt, Artificial Sequence
  Description of Artificial Sequence: Synthetic oligonucleotide
cgucugcaccauguaguug

SEQ ID NO: 845853 - RNA, 19 nt, Artificial Sequence
  Description of Artificial Sequence: Synthetic oligonucleotide
gcgcacgccaaaaguccuc

SEQ ID NO: 845854 - RNA, 19 nt, Artificial Sequence
  Description of Artificial Sequence: Synthetic oligonucleotide
acgccacggaugggcugca

SEQ ID NO: 845855 - RNA, 19 nt, Artificial Sequence
  Description of Artificial Sequence: Synthetic oligonucleotide
cagggucgauagacucaua

SEQ ID NO: 845856 - RNA, 19 nt, Artificial Sequence
  Description of Artificial Sequence: Synthetic oligonucleotide
gcguagcgguucuucggcu

SEQ ID NO: 845857 - RNA, 19 nt, Artificial Sequence
  Description of Artificial Sequence: Synthetic oligonucleotide
ccagggucgauagacucau

SEQ ID NO: 845858 - RNA, 19 nt, Artificial Sequence
  Description of Artificial Sequence: Synthetic oligonucleotide
cgaccgcuguucccacacc

SEQ ID NO: 845859 - RNA, 19 nt, Artificial Sequence
  Description of Artificial Sequence: Synthetic oligonucleotide
ccggccaguacugguggca

SEQ ID NO: 845860 - RNA, 19 nt, Artificial Sequence
  Description of Artificial Sequence: Synthetic oligonucleotide
ccacgacgggacccgcguc

SEQ ID NO: 845861 - RNA, 19 nt, Artificial Sequence
  Description of Artificial Sequence: Synthetic oligonucleotide
gccgaccgcuguucccaca

SEQ ID NO: 845862 - RNA, 19 nt, Artificial Sequence
  Description of Artificial Sequence: Synthetic oligonucleotide
cuuggccgaugaagucgau

SEQ ID NO: 845863 - RNA, 19 nt, Artificial Sequence
  Description of Artificial Sequence: Synthetic oligonucleotide
cgguuaggccaauacuggu

SEQ ID NO: 845864 - RNA, 19 nt, Artificial Sequence
  Description of Artificial Sequence: Synthetic oligonucleotide
cccgcucuaucuuguuugu

SEQ ID NO: 845865 - RNA, 19 nt, Artificial Sequence
  Description of Artificial Sequence: Synthetic oligonucleotide
cgguacgaaucuuccuuua

SEQ ID NO: 845866 - RNA, 19 nt, Artificial Sequence
  Description of Artificial Sequence: Synthetic oligonucleotide
cgcgucaggcggguugcag

SEQ ID NO: 845867 - RNA, 19 nt, Artificial Sequence
  Description of Artificial Sequence: Synthetic oligonucleotide
guguggcgauguaugcguu

SEQ ID NO: 845868 - RNA, 19 nt, Artificial Sequence
  Description of Artificial Sequence: Synthetic oligonucleotide
cucaugcccugcggggccu

SEQ ID NO: 845869 - RNA, 19 nt, Artificial Sequence
  Description of Artificial Sequence: Synthetic oligonucleotide
gugucgcaauguaggcuuu

SEQ ID NO: 845870 - RNA, 19 nt, Artificial Sequence
  Description of Artificial Sequence: Synthetic oligonucleotide
cgacgggacccgcgucagg

SEQ ID NO: 845871 - RNA, 19 nt, Artificial Sequence
  Description of Artificial Sequence: Synthetic oligonucleotide
ccccguggucuggccaggc

SEQ ID NO: 845872 - RNA, 19 nt, Artificial Sequence
  Description of Artificial Sequence: Synthetic oligonucleotide
caggcggguugcaggucuu

SEQ ID NO: 845873 - RNA, 19 nt, Artificial Sequence
  Description of Artificial Sequence: Synthetic oligonucleotide
cgcccucguagcgcauccg

SEQ ID NO: 845874 - RNA, 19 nt, Artificial Sequence
  Description of Artificial Sequence: Synthetic oligonucleotide
cguagcgguucuucggcuu

SEQ ID NO: 845875 - RNA, 19 nt, Artificial Sequence
  Description of Artificial Sequence: Synthetic oligonucleotide
ccgcgucaucaugaccaca

SEQ ID NO: 845876 - RNA, 19 nt, Artificial Sequence
  Description of Artificial Sequence: Synthetic oligonucleotide
cgguccgggacuggccauc

SEQ ID NO: 845877 - RNA, 19 nt, Artificial Sequence
  Description of Artificial Sequence: Synthetic oligonucleotide
gcggcccuugugucgcaau

SEQ ID NO: 845878 - RNA, 19 nt, Artificial Sequence
  Description of Artificial Sequence: Synthetic oligonucleotide
cauuggcguagcgguucuu

SEQ ID NO: 845879 - RNA, 19 nt, Artificial Sequence
  Description of Artificial Sequence: Synthetic oligonucleotide
ggacccgcgucaggcgggu

SEQ ID NO: 845880 - RNA, 19 nt, Artificial Sequence
  Description of Artificial Sequence: Synthetic oligonucleotide
gcauggcgucuaugacuau

SEQ ID NO: 845881 - RNA, 19 nt, Artificial Sequence
  Description of Artificial Sequence: Synthetic oligonucleotide
cgccgccuggaagcagaac

SEQ ID NO: 845882 - RNA, 19 nt, Artificial Sequence
  Description of Artificial Sequence: Synthetic oligonucleotide
cgacgauuguggaguuguu

SEQ ID NO: 845883 - RNA, 19 nt, Artificial Sequence
  Description of Artificial Sequence: Synthetic oligonucleotide
gacccgcgucaggcggguu

SEQ ID NO: 845884 - RNA, 19 nt, Artificial Sequence
  Description of Artificial Sequence: Synthetic oligonucleotide
ccgcucuaucuuguuuguu

SEQ ID NO: 845885 - RNA, 19 nt, Artificial Sequence
  Description of Artificial Sequence: Synthetic oligonucleotide
gcgcuccagcauggcgucu

SEQ ID NO: 845886 - RNA, 19 nt, Artificial Sequence
  Description of Artificial Sequence: Synthetic oligonucleotide
ccgcgucaggcggguugca

SEQ ID NO: 845887 - RNA, 19 nt, Artificial Sequence
  Description of Artificial Sequence: Synthetic oligonucleotide
cgggaacguggcgcagggu

SEQ ID NO: 845888 - RNA, 19 nt, Artificial Sequence
  Description of Artificial Sequence: Synthetic oligonucleotide
ucugaggcaaaauagauac

SEQ ID NO: 845889 - RNA, 19 nt, Artificial Sequence
  Description of Artificial Sequence: Synthetic oligonucleotide
auaaguguguacuuguugg

SEQ ID NO: 845890 - RNA, 19 nt, Artificial Sequence
  Description of Artificial Sequence: Synthetic oligonucleotide
aguuuaauguccugggugg

SEQ ID NO: 845891 - RNA, 19 nt, Artificial Sequence
  Description of Artificial Sequence: Synthetic oligonucleotide
aauagauacccuugccaac

SEQ ID NO: 845892 - RNA, 19 nt, Artificial Sequence
  Description of Artificial Sequence: Synthetic oligonucleotide
aaaguugugugggauaacg

SEQ ID NO: 845893 - RNA, 19 nt, Artificial Sequence
  Description of Artificial Sequence: Synthetic oligonucleotide
gaacauguagcccaccugg

SEQ ID NO: 845894 - RNA, 19 nt, Artificial Sequence
  Description of Artificial Sequence: Synthetic oligonucleotide
ucaagguacagucauaguc

SEQ ID NO: 845895 - RNA, 19 nt, Artificial Sequence
  Description of Artificial Sequence: Synthetic oligonucleotide
aaauagauacccuugccaa

SEQ ID NO: 845896 - RNA, 19 nt, Artificial Sequence
  Description of Artificial Sequence: Synthetic oligonucleotide
aagugggagcguuugaacg

SEQ ID NO: 845897 - RNA, 19 nt, Artificial Sequence
  Description of Artificial Sequence: Synthetic oligonucleotide
agacuuucguuuuggagcc

SEQ ID NO: 845898 - RNA, 19 nt, Artificial Sequence
  Description of Artificial Sequence: Synthetic oligonucleotide
acagucauaguccucgugg

SEQ ID NO: 845899 - RNA, 19 nt, Artificial Sequence
  Description of Artificial Sequence: Synthetic oligonucleotide
ugaggcaaaauagauaccc

SEQ ID NO: 845900 - RNA, 19 nt, Artificial Sequence
  Description of Artificial Sequence: Synthetic oligonucleotide
augggaguaacauagccag

SEQ ID NO: 845901 - RNA, 19 nt, Artificial Sequence
  Description of Artificial Sequence: Synthetic oligonucleotide
cacaggucgaccuugaggc

SEQ ID NO: 845902 - RNA, 19 nt, Artificial Sequence
  Description of Artificial Sequence: Synthetic oligonucleotide
uccucuagagcuuccaagg

SEQ ID NO: 845903 - RNA, 19 nt, Artificial Sequence
  Description of Artificial Sequence: Synthetic oligonucleotide
gauaacgguguagaaacgg

SEQ ID NO: 845904 - RNA, 19 nt, Artificial Sequence
  Description of Artificial Sequence: Synthetic oligonucleotide
ugcggcaugauucggagcc

SEQ ID NO: 845905 - RNA, 19 nt, Artificial Sequence
  Description of Artificial Sequence: Synthetic oligonucleotide
cuuugcaucuuccaggcag

SEQ ID NO: 845906 - RNA, 19 nt, Artificial Sequence
  Description of Artificial Sequence: Synthetic oligonucleotide
ucccuagagaaacaggacc

SEQ ID NO: 845907 - RNA, 19 nt, Artificial Sequence
  Description of Artificial Sequence: Synthetic oligonucleotide
gauaaguguguacuuguug

SEQ ID NO: 845908 - RNA, 19 nt, Artificial Sequence
  Description of Artificial Sequence: Synthetic oligonucleotide
uuuggagugggccuggaac

SEQ ID NO: 845909 - RNA, 19 nt, Artificial Sequence
  Description of Artificial Sequence: Synthetic oligonucleotide
gaagccaauggccguaugg

SEQ ID NO: 845910 - RNA, 19 nt, Artificial Sequence
  Description of Artificial Sequence: Synthetic oligonucleotide
uuaucccuagagaaacagg

SEQ ID NO: 845911 - RNA, 19 nt, Artificial Sequence
  Description of Artificial Sequence: Synthetic oligonucleotide
uccagguaggucuguaucg

SEQ ID NO: 845912 - RNA, 19 nt, Artificial Sequence
  Description of Artificial Sequence: Synthetic oligonucleotide
uguucuucgucuucucccg

SEQ ID NO: 845913 - RNA, 19 nt, Artificial Sequence
  Description of Artificial Sequence: Synthetic oligonucleotide
uauuacauucuugggaagc

SEQ ID NO: 845914 - RNA, 19 nt, Artificial Sequence
  Description of Artificial Sequence: Synthetic oligonucleotide
ugaacgaugggcacggcac

SEQ ID NO: 845915 - RNA, 19 nt, Artificial Sequence
  Description of Artificial Sequence: Synthetic oligonucleotide
gaagagguggcugucaccc

SEQ ID NO: 845916 - RNA, 19 nt, Artificial Sequence
  Description of Artificial Sequence: Synthetic oligonucleotide
ugacagaggagugugaaga

SEQ ID NO: 845917 - RNA, 19 nt, Artificial Sequence
  Description of Artificial Sequence: Synthetic oligonucleotide
aagccaauggccguauggg

SEQ ID NO: 845918 - RNA, 19 nt, Artificial Sequence
  Description of Artificial Sequence: Synthetic oligonucleotide
gagguacucacucuggcug

SEQ ID NO: 845919 - RNA, 19 nt, Artificial Sequence
  Description of Artificial Sequence: Synthetic oligonucleotide
uucuuuacguccagguuca

SEQ ID NO: 845920 - RNA, 19 nt, Artificial Sequence
  Description of Artificial Sequence: Synthetic oligonucleotide
ucaggaaucgcucgagugu

SEQ ID NO: 845921 - RNA, 19 nt, Artificial Sequence
  Description of Artificial Sequence: Synthetic oligonucleotide
aguaacauagccagcugac

SEQ ID NO: 845922 - RNA, 19 nt, Artificial Sequence
  Description of Artificial Sequence: Synthetic oligonucleotide
ucggaaacuguccuccucc

SEQ ID NO: 845923 - RNA, 19 nt, Artificial Sequence
  Description of Artificial Sequence: Synthetic oligonucleotide
guauaugagguacucacuc

SEQ ID NO: 845924 - RNA, 19 nt, Artificial Sequence
  Description of Artificial Sequence: Synthetic oligonucleotide
uguguacuuguugggaugg

SEQ ID NO: 845925 - RNA, 19 nt, Artificial Sequence
  Description of Artificial Sequence: Synthetic oligonucleotide
uuuuauggccuccucuaga

SEQ ID NO: 845926 - RNA, 19 nt, Artificial Sequence
  Description of Artificial Sequence: Synthetic oligonucleotide
auaggugugcaccaaugug

SEQ ID NO: 845927 - RNA, 19 nt, Artificial Sequence
  Description of Artificial Sequence: Synthetic oligonucleotide
uguauaugagguacucacu

SEQ ID NO: 845928 - RNA, 19 nt, Artificial Sequence
  Description of Artificial Sequence: Synthetic oligonucleotide
gggauaacgguguagaaac

SEQ ID NO: 845929 - RNA, 19 nt, Artificial Sequence
  Description of Artificial Sequence: Synthetic oligonucleotide
augcaugggaguaacauag

SEQ ID NO: 845930 - RNA, 19 nt, Artificial Sequence
  Description of Artificial Sequence: Synthetic oligonucleotide
ugauguggugcucuuugcc

SEQ ID NO: 845931 - RNA, 19 nt, Artificial Sequence
  Description of Artificial Sequence: Synthetic oligonucleotide
gguacagucauaguccucg

SEQ ID NO: 845932 - RNA, 19 nt, Artificial Sequence
  Description of Artificial Sequence: Synthetic oligonucleotide
aaugcaugggaguaacaua

SEQ ID NO: 845933 - RNA, 19 nt, Artificial Sequence
  Description of Artificial Sequence: Synthetic oligonucleotide
ugugggauaacgguguaga

SEQ ID NO: 845934 - RNA, 19 nt, Artificial Sequence
  Description of Artificial Sequence: Synthetic oligonucleotide
uacguccagguucaugagg

SEQ ID NO: 845935 - RNA, 19 nt, Artificial Sequence
  Description of Artificial Sequence: Synthetic oligonucleotide
accuugaggcaccacuacc

SEQ ID NO: 845936 - RNA, 19 nt, Artificial Sequence
  Description of Artificial Sequence: Synthetic oligonucleotide
gauuccagcagaagaagug

SEQ ID NO: 845937 - RNA, 19 nt, Artificial Sequence
  Description of Artificial Sequence: Synthetic oligonucleotide
uauaugagguacucacucu

SEQ ID NO: 845938 - RNA, 19 nt, Artificial Sequence
  Description of Artificial Sequence: Synthetic oligonucleotide
ucagcgguggaucggaaac

SEQ ID NO: 845939 - RNA, 19 nt, Artificial Sequence
  Description of Artificial Sequence: Synthetic oligonucleotide
ugguaucaggaaucgcucg

SEQ ID NO: 845940 - RNA, 19 nt, Artificial Sequence
  Description of Artificial Sequence: Synthetic oligonucleotide
caagcugggaucaucggug

SEQ ID NO: 845941 - RNA, 19 nt, Artificial Sequence
  Description of Artificial Sequence: Synthetic oligonucleotide
ucaagcugggaucaucggu

SEQ ID NO: 845942 - RNA, 19 nt, Artificial Sequence
  Description of Artificial Sequence: Synthetic oligonucleotide
ucgauaaguguguacuugu

SEQ ID NO: 845943 - RNA, 19 nt, Artificial Sequence
  Description of Artificial Sequence: Synthetic oligonucleotide
gaaacaggacccuggaaga

SEQ ID NO: 845944 - RNA, 19 nt, Artificial Sequence
  Description of Artificial Sequence: Synthetic oligonucleotide
acggaugaugcgcugaucu

SEQ ID NO: 845945 - RNA, 19 nt, Artificial Sequence
  Description of Artificial Sequence: Synthetic oligonucleotide
ucgcccaggaacauguagc

SEQ ID NO: 845946 - RNA, 19 nt, Artificial Sequence
  Description of Artificial Sequence: Synthetic oligonucleotide
gagcguuugaacgaugggc

SEQ ID NO: 845947 - RNA, 19 nt, Artificial Sequence
  Description of Artificial Sequence: Synthetic oligonucleotide
gugcucuuugccuagggcc

SEQ ID NO: 845948 - RNA, 19 nt, Artificial Sequence
  Description of Artificial Sequence: Synthetic oligonucleotide
cucacucuggcugaagugg

SEQ ID NO: 845949 - RNA, 19 nt, Artificial Sequence
  Description of Artificial Sequence: Synthetic oligonucleotide
ucgaccuugaggcaccacu

SEQ ID NO: 845950 - RNA, 19 nt, Artificial Sequence
  Description of Artificial Sequence: Synthetic oligonucleotide
ucgagugugccuuccaaga

SEQ ID NO: 845951 - RNA, 19 nt, Artificial Sequence
  Description of Artificial Sequence: Synthetic oligonucleotide
guuugaacgaugggcacgg

SEQ ID NO: 845952 - RNA, 19 nt, Artificial Sequence
  Description of Artificial Sequence: Synthetic oligonucleotide
uucgccacggccucuuggg

SEQ ID NO: 845953 - RNA, 19 nt, Artificial Sequence
  Description of Artificial Sequence: Synthetic oligonucleotide
uguaucgccuuguacucca

SEQ ID NO: 845954 - RNA, 19 nt, Artificial Sequence
  Description of Artificial Sequence: Synthetic oligonucleotide
augauucggagcccgcugg

SEQ ID NO: 845955 - RNA, 19 nt, Artificial Sequence
  Description of Artificial Sequence: Synthetic oligonucleotide
guagaugaggccauaggug

SEQ ID NO: 845956 - RNA, 19 nt, Artificial Sequence
  Description of Artificial Sequence: Synthetic oligonucleotide
acgguguagaaacgggagg

SEQ ID NO: 845957 - RNA, 19 nt, Artificial Sequence
  Description of Artificial Sequence: Synthetic oligonucleotide
ggcccgaagaaucucaggg

SEQ ID NO: 845958 - RNA, 19 nt, Artificial Sequence
  Description of Artificial Sequence: Synthetic oligonucleotide
auaacgguguagaaacggg

SEQ ID NO: 845959 - RNA, 19 nt, Artificial Sequence
  Description of Artificial Sequence: Synthetic oligonucleotide
ugugcaccaaugugucugg

SEQ ID NO: 845960 - RNA, 19 nt, Artificial Sequence
  Description of Artificial Sequence: Synthetic oligonucleotide
ucuguaucgccuuguacuc

SEQ ID NO: 845961 - RNA, 19 nt, Artificial Sequence
  Description of Artificial Sequence: Synthetic oligonucleotide
auagauacccuugccaaca

SEQ ID NO: 845962 - RNA, 19 nt, Artificial Sequence
  Description of Artificial Sequence: Synthetic oligonucleotide
uaugggagccugacagagg

SEQ ID NO: 845963 - RNA, 19 nt, Artificial Sequence
  Description of Artificial Sequence: Synthetic oligonucleotide
gaguaacauagccagcuga

SEQ ID NO: 845964 - RNA, 19 nt, Artificial Sequence
  Description of Artificial Sequence: Synthetic oligonucleotide
uugaacgaugggcacggca

SEQ ID NO: 845965 - RNA, 19 nt, Artificial Sequence
  Description of Artificial Sequence: Synthetic oligonucleotide
aguuguugccagucuguuc

SEQ ID NO: 845966 - RNA, 19 nt, Artificial Sequence
  Description of Artificial Sequence: Synthetic oligonucleotide
uucaagcugggaucaucgg

SEQ ID NO: 845967 - RNA, 19 nt, Artificial Sequence
  Description of Artificial Sequence: Synthetic oligonucleotide
agggcuuaaccacaguccu

SEQ ID NO: 845968 - RNA, 19 nt, Artificial Sequence
  Description of Artificial Sequence: Synthetic oligonucleotide
uacccuugccaacacggcc

SEQ ID NO: 845969 - RNA, 19 nt, Artificial Sequence
  Description of Artificial Sequence: Synthetic oligonucleotide
gaggccauaggugugcacc

SEQ ID NO: 845970 - RNA, 19 nt, Artificial Sequence
  Description of Artificial Sequence: Synthetic oligonucleotide
ugacauagaacuuguuguu

SEQ ID NO: 845971 - RNA, 19 nt, Artificial Sequence
  Description of Artificial Sequence: Synthetic oligonucleotide
cacauuggugccaugccac

SEQ ID NO: 845972 - RNA, 19 nt, Artificial Sequence
  Description of Artificial Sequence: Synthetic oligonucleotide
agugcggcaugauucggag

SEQ ID NO: 845973 - RNA, 19 nt, Artificial Sequence
  Description of Artificial Sequence: Synthetic oligonucleotide
agugggagcguuugaacga

SEQ ID NO: 845974 - RNA, 19 nt, Artificial Sequence
  Description of Artificial Sequence: Synthetic oligonucleotide
uggcauauauuacauucuu

SEQ ID NO: 845975 - RNA, 19 nt, Artificial Sequence
  Description of Artificial Sequence: Synthetic oligonucleotide
gagcgcaagcaguucagag

SEQ ID NO: 845976 - RNA, 19 nt, Artificial Sequence
  Description of Artificial Sequence: Synthetic oligonucleotide
ugcgcugaucugcaggggc

SEQ ID NO: 845977 - RNA, 19 nt, Artificial Sequence
  Description of Artificial Sequence: Synthetic oligonucleotide
agaggugaaucuccagcag

SEQ ID NO: 845978 - RNA, 19 nt, Artificial Sequence
  Description of Artificial Sequence: Synthetic oligonucleotide
auagaacuuguuguuguug

SEQ ID NO: 845979 - RNA, 19 nt, Artificial Sequence
  Description of Artificial Sequence: Synthetic oligonucleotide
gucuguaucgccuuguacu

SEQ ID NO: 845980 - RNA, 19 nt, Artificial Sequence
  Description of Artificial Sequence: Synthetic oligonucleotide
aaacaggacccuggaagag

SEQ ID NO: 845981 - RNA, 19 nt, Artificial Sequence
  Description of Artificial Sequence: Synthetic oligonucleotide
ggugccaugccacagcagc

SEQ ID NO: 845982 - RNA, 19 nt, Artificial Sequence
  Description of Artificial Sequence: Synthetic oligonucleotide
aggauagcagccaccacgg

SEQ ID NO: 845983 - RNA, 19 nt, Artificial Sequence
  Description of Artificial Sequence: Synthetic oligonucleotide
gugccuuccaagaagcaag

SEQ ID NO: 845984 - RNA, 19 nt, Artificial Sequence
  Description of Artificial Sequence: Synthetic oligonucleotide
guugccagucuguuccagg

SEQ ID NO: 845985 - RNA, 19 nt, Artificial Sequence
  Description of Artificial Sequence: Synthetic oligonucleotide
ugggauaacgguguagaaa

SEQ ID NO: 845986 - RNA, 19 nt, Artificial Sequence
  Description of Artificial Sequence: Synthetic oligonucleotide
ucugagagccucagcggug

SEQ ID NO: 845987 - RNA, 19 nt, Artificial Sequence
  Description of Artificial Sequence: Synthetic oligonucleotide
uacagucauaguccucgug

SEQ ID NO: 845988 - RNA, 19 nt, Artificial Sequence
  Description of Artificial Sequence: Synthetic oligonucleotide
uucagaggugaaucuccag

SEQ ID NO: 845989 - RNA, 19 nt, Artificial Sequence
  Description of Artificial Sequence: Synthetic oligonucleotide
guacuuguugggaugggcc

SEQ ID NO: 845990 - RNA, 19 nt, Artificial Sequence
  Description of Artificial Sequence: Synthetic oligonucleotide
aggcaaaauagauacccuu

SEQ ID NO: 845991 - RNA, 19 nt, Artificial Sequence
  Description of Artificial Sequence: Synthetic oligonucleotide
uugaggcaccacuaccugc

SEQ ID NO: 845992 - RNA, 19 nt, Artificial Sequence
  Description of Artificial Sequence: Synthetic oligonucleotide
caaucugcugcuugcucag

SEQ ID NO: 845993 - RNA, 19 nt, Artificial Sequence
  Description of Artificial Sequence: Synthetic oligonucleotide
ucgccuuguacuccagccc

SEQ ID NO: 845994 - RNA, 19 nt, Artificial Sequence
  Description of Artificial Sequence: Synthetic oligonucleotide
ugcggccaaaguugugugg

SEQ ID NO: 845995 - RNA, 19 nt, Artificial Sequence
  Description of Artificial Sequence: Synthetic oligonucleotide
uuggcccgaagaaucucag

SEQ ID NO: 845996 - RNA, 19 nt, Artificial Sequence
  Description of Artificial Sequence: Synthetic oligonucleotide
uccuuguauaugagguacu

SEQ ID NO: 845997 - RNA, 19 nt, Artificial Sequence
  Description of Artificial Sequence: Synthetic oligonucleotide
ugcaugggaguaacauagc

SEQ ID NO: 845998 - RNA, 19 nt, Artificial Sequence
  Description of Artificial Sequence: Synthetic oligonucleotide
cucgagugugccuuccaag

SEQ ID NO: 845999 - RNA, 19 nt, Artificial Sequence
  Description of Artificial Sequence: Synthetic oligonucleotide
uuccaagaagcaaguucca

SEQ ID NO: 846000 - RNA, 19 nt, Artificial Sequence
  Description of Artificial Sequence: Synthetic oligonucleotide
ccgaaauuucuucucaaag

SEQ ID NO: 846001 - RNA, 19 nt, Artificial Sequence
  Description of Artificial Sequence: Synthetic oligonucleotide
ugugccuuccaagaagcaa

SEQ ID NO: 846002 - RNA, 19 nt, Artificial Sequence
  Description of Artificial Sequence: Synthetic oligonucleotide
gguggacucuucaagcugg

SEQ ID NO: 846003 - RNA, 19 nt, Artificial Sequence
  Description of Artificial Sequence: Synthetic oligonucleotide
guguguacuuguugggaug

SEQ ID NO: 846004 - RNA, 19 nt, Artificial Sequence
  Description of Artificial Sequence: Synthetic oligonucleotide
uuaauguccugggugggau

SEQ ID NO: 846005 - RNA, 19 nt, Artificial Sequence
  Description of Artificial Sequence: Synthetic oligonucleotide
aaucgcucgagugugccuu

SEQ ID NO: 846006 - RNA, 19 nt, Artificial Sequence
  Description of Artificial Sequence: Synthetic oligonucleotide
cagaggugaaucuccagca

SEQ ID NO: 846007 - RNA, 19 nt, Artificial Sequence
  Description of Artificial Sequence: Synthetic oligonucleotide
ucguggaccugaguucugg

SEQ ID NO: 846008 - RNA, 19 nt, Artificial Sequence
  Description of Artificial Sequence: Synthetic oligonucleotide
uagaaacgggaggacagcu

SEQ ID NO: 846009 - RNA, 19 nt, Artificial Sequence
  Description of Artificial Sequence: Synthetic oligonucleotide
auacccuugccaacacggc

SEQ ID NO: 846010 - RNA, 19 nt, Artificial Sequence
  Description of Artificial Sequence: Synthetic oligonucleotide
uugcucaguuuggaguggg

SEQ ID NO: 846011 - RNA, 19 nt, Artificial Sequence
  Description of Artificial Sequence: Synthetic oligonucleotide
ucuccuuguauaugaggua

SEQ ID NO: 846012 - RNA, 19 nt, Artificial Sequence
  Description of Artificial Sequence: Synthetic oligonucleotide
gagccucagcgguggaucg

SEQ ID NO: 846013 - RNA, 19 nt, Artificial Sequence
  Description of Artificial Sequence: Synthetic oligonucleotide
ccguaugggagccugacag

SEQ ID NO: 846014 - RNA, 19 nt, Artificial Sequence
  Description of Artificial Sequence: Synthetic oligonucleotide
ugggaguaacauagccagc

SEQ ID NO: 846015 - RNA, 19 nt, Artificial Sequence
  Description of Artificial Sequence: Synthetic oligonucleotide
guaucaggaaucgcucgag

SEQ ID NO: 846016 - RNA, 19 nt, Artificial Sequence
  Description of Artificial Sequence: Synthetic oligonucleotide
aaguuccaagucagggcuc

SEQ ID NO: 846017 - RNA, 19 nt, Artificial Sequence
  Description of Artificial Sequence: Synthetic oligonucleotide
uagcgcagacgacacuggc

SEQ ID NO: 846018 - RNA, 19 nt, Artificial Sequence
  Description of Artificial Sequence: Synthetic oligonucleotide
ucuucgucuucucccgaaa

SEQ ID NO: 846019 - RNA, 19 nt, Artificial Sequence
  Description of Artificial Sequence: Synthetic oligonucleotide
ucgucuucucccgaaauuu

SEQ ID NO: 846020 - RNA, 19 nt, Artificial Sequence
  Description of Artificial Sequence: Synthetic oligonucleotide
cugggguugcggcugagug

SEQ ID NO: 846021 - RNA, 19 nt, Artificial Sequence
  Description of Artificial Sequence: Synthetic oligonucleotide
cauuguccagcaguugaag

SEQ ID NO: 846022 - RNA, 19 nt, Artificial Sequence
  Description of Artificial Sequence: Synthetic oligonucleotide
cacaaugcaugggaguaac

SEQ ID NO: 846023 - RNA, 19 nt, Artificial Sequence
  Description of Artificial Sequence: Synthetic oligonucleotide
cucgcccaggaacauguag

SEQ ID NO: 846024 - RNA, 19 nt, Artificial Sequence
  Description of Artificial Sequence: Synthetic oligonucleotide
cuagagaaacaggacccug

SEQ ID NO: 846025 - RNA, 19 nt, Artificial Sequence
  Description of Artificial Sequence: Synthetic oligonucleotide
ggaucggaaacuguccucc

SEQ ID NO: 846026 - RNA, 19 nt, Artificial Sequence
  Description of Artificial Sequence: Synthetic oligonucleotide
guugcggcugaguggacac

SEQ ID NO: 846027 - RNA, 19 nt, Artificial Sequence
  Description of Artificial Sequence: Synthetic oligonucleotide
uggcccgaagaaucucagg

SEQ ID NO: 846028 - RNA, 19 nt, Artificial Sequence
  Description of Artificial Sequence: Synthetic oligonucleotide
cagccugguaucaggaauc

SEQ ID NO: 846029 - RNA, 19 nt, Artificial Sequence
  Description of Artificial Sequence: Synthetic oligonucleotide
agguccggggagcgcaagc

SEQ ID NO: 846030 - RNA, 19 nt, Artificial Sequence
  Description of Artificial Sequence: Synthetic oligonucleotide
uugccaacacggccaccgg

SEQ ID NO: 846031 - RNA, 19 nt, Artificial Sequence
  Description of Artificial Sequence: Synthetic oligonucleotide
uuggccucgggcgaugaca

SEQ ID NO: 846032 - RNA, 19 nt, Artificial Sequence
  Description of Artificial Sequence: Synthetic oligonucleotide
uggucugguucaagguaca

SEQ ID NO: 846033 - RNA, 19 nt, Artificial Sequence
  Description of Artificial Sequence: Synthetic oligonucleotide
uggccucgggcgaugacac

SEQ ID NO: 846034 - RNA, 19 nt, Artificial Sequence
  Description of Artificial Sequence: Synthetic oligonucleotide
acggaagacuuucguuuug

SEQ ID NO: 846035 - RNA, 19 nt, Artificial Sequence
  Description of Artificial Sequence: Synthetic oligonucleotide
cagcgauuccagcagaaga

SEQ ID NO: 846036 - RNA, 19 nt, Artificial Sequence
  Description of Artificial Sequence: Synthetic oligonucleotide
cagcagguagcgcagacga

SEQ ID NO: 846037 - RNA, 19 nt, Artificial Sequence
  Description of Artificial Sequence: Synthetic oligonucleotide
caagggcaucuucuuuacg

SEQ ID NO: 846038 - RNA, 19 nt, Artificial Sequence
  Description of Artificial Sequence: Synthetic oligonucleotide
cagguagcgcagacgacac

SEQ ID NO: 846039 - RNA, 19 nt, Artificial Sequence
  Description of Artificial Sequence: Synthetic oligonucleotide
ugccaacacggccaccgga

SEQ ID NO: 846040 - RNA, 19 nt, Artificial Sequence
  Description of Artificial Sequence: Synthetic oligonucleotide
ugcucaguuuggagugggc

SEQ ID NO: 846041 - RNA, 19 nt, Artificial Sequence
  Description of Artificial Sequence: Synthetic oligonucleotide
ucgggcgaugacacuguca

SEQ ID NO: 846042 - RNA, 19 nt, Artificial Sequence
  Description of Artificial Sequence: Synthetic oligonucleotide
acauuggugccaugccaca

SEQ ID NO: 846043 - RNA, 19 nt, Artificial Sequence
  Description of Artificial Sequence: Synthetic oligonucleotide
ugauucggagcccgcuggu

SEQ ID NO: 846044 - RNA, 19 nt, Artificial Sequence
  Description of Artificial Sequence: Synthetic oligonucleotide
ggaacauguagcccaccug

SEQ ID NO: 846045 - RNA, 19 nt, Artificial Sequence
  Description of Artificial Sequence: Synthetic oligonucleotide
ggagcguuugaacgauggg

SEQ ID NO: 846046 - RNA, 19 nt, Artificial Sequence
  Description of Artificial Sequence: Synthetic oligonucleotide
gcccgaagaaucucagggg

SEQ ID NO: 846047 - RNA, 19 nt, Artificial Sequence
  Description of Artificial Sequence: Synthetic oligonucleotide
gggagcguuugaacgaugg

SEQ ID NO: 846048 - RNA, 19 nt, Artificial Sequence
  Description of Artificial Sequence: Synthetic oligonucleotide
gguaucaggaaucgcucga

SEQ ID NO: 846049 - RNA, 19 nt, Artificial Sequence
  Description of Artificial Sequence: Synthetic oligonucleotide
ugcccguccagcucuaguu

SEQ ID NO: 846050 - RNA, 19 nt, Artificial Sequence
  Description of Artificial Sequence: Synthetic oligonucleotide
uaguccucguggaccugag

SEQ ID NO: 846051 - RNA, 19 nt, Artificial Sequence
  Description of Artificial Sequence: Synthetic oligonucleotide
gccgauguuggucugguuc

SEQ ID NO: 846052 - RNA, 19 nt, Artificial Sequence
  Description of Artificial Sequence: Synthetic oligonucleotide
gggaucaggcucuguuugg

SEQ ID NO: 846053 - RNA, 19 nt, Artificial Sequence
  Description of Artificial Sequence: Synthetic oligonucleotide
auguggugcucuuugccua

SEQ ID NO: 846054 - RNA, 19 nt, Artificial Sequence
  Description of Artificial Sequence: Synthetic oligonucleotide
gaaccugucucccuccccu

SEQ ID NO: 846055 - RNA, 19 nt, Artificial Sequence
  Description of Artificial Sequence: Synthetic oligonucleotide
aggccauaggugugcacca

SEQ ID NO: 846056 - RNA, 19 nt, Artificial Sequence
  Description of Artificial Sequence: Synthetic oligonucleotide
aggucgaccuugaggcacc

SEQ ID NO: 846057 - RNA, 19 nt, Artificial Sequence
  Description of Artificial Sequence: Synthetic oligonucleotide
guaggucuguaucgccuug

SEQ ID NO: 846058 - RNA, 19 nt, Artificial Sequence
  Description of Artificial Sequence: Synthetic oligonucleotide
gggaugggccacaaagugg

SEQ ID NO: 846059 - RNA, 19 nt, Artificial Sequence
  Description of Artificial Sequence: Synthetic oligonucleotide
gguggaucggaaacugucc

SEQ ID NO: 846060 - RNA, 19 nt, Artificial Sequence
  Description of Artificial Sequence: Synthetic oligonucleotide
cauuggugccaugccacag

SEQ ID NO: 846061 - RNA, 19 nt, Artificial Sequence
  Description of Artificial Sequence: Synthetic oligonucleotide
guagcgcagacgacacugg

SEQ ID NO: 846062 - RNA, 19 nt, Artificial Sequence
  Description of Artificial Sequence: Synthetic oligonucleotide
caaugugucuggcauauau

SEQ ID NO: 846063 - RNA, 19 nt, Artificial Sequence
  Description of Artificial Sequence: Synthetic oligonucleotide
uccaacucccaggguagug

SEQ ID NO: 846064 - RNA, 19 nt, Artificial Sequence
  Description of Artificial Sequence: Synthetic oligonucleotide
caaagccccgcgcaaucug

SEQ ID NO: 846065 - RNA, 19 nt, Artificial Sequence
  Description of Artificial Sequence: Synthetic oligonucleotide
ccaauggccguaugggagc

SEQ ID NO: 846066 - RNA, 19 nt, Artificial Sequence
  Description of Artificial Sequence: Synthetic oligonucleotide
gcggccaaaguuguguggg

SEQ ID NO: 846067 - RNA, 19 nt, Artificial Sequence
  Description of Artificial Sequence: Synthetic oligonucleotide
ugugugggauaacggugua

SEQ ID NO: 846068 - RNA, 19 nt, Artificial Sequence
  Description of Artificial Sequence: Synthetic oligonucleotide
guguagaaacgggaggaca

SEQ ID NO: 846069 - RNA, 19 nt, Artificial Sequence
  Description of Artificial Sequence: Synthetic oligonucleotide
cucccgaaauuucuucuca

SEQ ID NO: 846070 - RNA, 19 nt, Artificial Sequence
  Description of Artificial Sequence: Synthetic oligonucleotide
auaguccucguggaccuga

SEQ ID NO: 846071 - RNA, 19 nt, Artificial Sequence
  Description of Artificial Sequence: Synthetic oligonucleotide
caggucgaccuugaggcac

SEQ ID NO: 846072 - RNA, 19 nt, Artificial Sequence
  Description of Artificial Sequence: Synthetic oligonucleotide
aucgcucgagugugccuuc

SEQ ID NO: 846073 - RNA, 19 nt, Artificial Sequence
  Description of Artificial Sequence: Synthetic oligonucleotide
uguugccgauguuggucug

SEQ ID NO: 846074 - RNA, 19 nt, Artificial Sequence
  Description of Artificial Sequence: Synthetic oligonucleotide
cuguaucgccuuguacucc

SEQ ID NO: 846075 - RNA, 19 nt, Artificial Sequence
  Description of Artificial Sequence: Synthetic oligonucleotide
ggauaacgguguagaaacg

SEQ ID NO: 846076 - RNA, 19 nt, Artificial Sequence
  Description of Artificial Sequence: Synthetic oligonucleotide
cuggcaccugaggagcugg

SEQ ID NO: 846077 - RNA, 19 nt, Artificial Sequence
  Description of Artificial Sequence: Synthetic oligonucleotide
ccggagugcggcaugauuc

SEQ ID NO: 846078 - RNA, 19 nt, Artificial Sequence
  Description of Artificial Sequence: Synthetic oligonucleotide
ugggagcguuugaacgaug

SEQ ID NO: 846079 - RNA, 19 nt, Artificial Sequence
  Description of Artificial Sequence: Synthetic oligonucleotide
uaggucuguaucgccuugu

SEQ ID NO: 846080 - RNA, 19 nt, Artificial Sequence
  Description of Artificial Sequence: Synthetic oligonucleotide
cugcggccaaaguugugug

SEQ ID NO: 846081 - RNA, 19 nt, Artificial Sequence
  Description of Artificial Sequence: Synthetic oligonucleotide
gggcaucuguaguuguugc

SEQ ID NO: 846082 - RNA, 19 nt, Artificial Sequence
  Description of Artificial Sequence: Synthetic oligonucleotide
ccauaggugugcaccaaug

SEQ ID NO: 846083 - RNA, 19 nt, Artificial Sequence
  Description of Artificial Sequence: Synthetic oligonucleotide
uuuggccucgggcgaugac

SEQ ID NO: 846084 - RNA, 19 nt, Artificial Sequence
  Description of Artificial Sequence: Synthetic oligonucleotide
guucagaggugaaucucca

SEQ ID NO: 846085 - RNA, 19 nt, Artificial Sequence
  Description of Artificial Sequence: Synthetic oligonucleotide
acaggucgaccuugaggca

SEQ ID NO: 846086 - RNA, 19 nt, Artificial Sequence
  Description of Artificial Sequence: Synthetic oligonucleotide
gugugggauaacgguguag

SEQ ID NO: 846087 - RNA, 19 nt, Artificial Sequence
  Description of Artificial Sequence: Synthetic oligonucleotide
cucccugcauuucgauaag

SEQ ID NO: 846088 - RNA, 19 nt, Artificial Sequence
  Description of Artificial Sequence: Synthetic oligonucleotide
cuaguuuaauguccugggu

SEQ ID NO: 846089 - RNA, 19 nt, Artificial Sequence
  Description of Artificial Sequence: Synthetic oligonucleotide
ucuuugccuagggccaccu

SEQ ID NO: 846090 - RNA, 19 nt, Artificial Sequence
  Description of Artificial Sequence: Synthetic oligonucleotide
guggaucggaaacuguccu

SEQ ID NO: 846091 - RNA, 19 nt, Artificial Sequence
  Description of Artificial Sequence: Synthetic oligonucleotide
gaccugaguucugggguug

SEQ ID NO: 846092 - RNA, 19 nt, Artificial Sequence
  Description of Artificial Sequence: Synthetic oligonucleotide
gcgcagacgacacuggcuc

SEQ ID NO: 846093 - RNA, 19 nt, Artificial Sequence
  Description of Artificial Sequence: Synthetic oligonucleotide
ccuccaacucccaggguag

SEQ ID NO: 846094 - RNA, 19 nt, Artificial Sequence
  Description of Artificial Sequence: Synthetic oligonucleotide
guagcccaccugguggucc

SEQ ID NO: 846095 - RNA, 19 nt, Artificial Sequence
  Description of Artificial Sequence: Synthetic oligonucleotide
guggacucuucaagcuggg

SEQ ID NO: 846096 - RNA, 19 nt, Artificial Sequence
  Description of Artificial Sequence: Synthetic oligonucleotide
ugaggccauaggugugcac

SEQ ID NO: 846097 - RNA, 19 nt, Artificial Sequence
  Description of Artificial Sequence: Synthetic oligonucleotide
uguuccagguaggucugua

SEQ ID NO: 846098 - RNA, 19 nt, Artificial Sequence
  Description of Artificial Sequence: Synthetic oligonucleotide
ggaucaggcucuguuuggc

SEQ ID NO: 846099 - RNA, 19 nt, Artificial Sequence
  Description of Artificial Sequence: Synthetic oligonucleotide
ggaucaucgguggugaugu

SEQ ID NO: 846100 - RNA, 19 nt, Artificial Sequence
  Description of Artificial Sequence: Synthetic oligonucleotide
gagugcggcaugauucgga

SEQ ID NO: 846101 - RNA, 19 nt, Artificial Sequence
  Description of Artificial Sequence: Synthetic oligonucleotide
cagcucgaugucugcuagc

SEQ ID NO: 846102 - RNA, 19 nt, Artificial Sequence
  Description of Artificial Sequence: Synthetic oligonucleotide
agcgcagacgacacuggcu

SEQ ID NO: 846103 - RNA, 19 nt, Artificial Sequence
  Description of Artificial Sequence: Synthetic oligonucleotide
ucccugcauuucgauaagu

SEQ ID NO: 846104 - RNA, 19 nt, Artificial Sequence
  Description of Artificial Sequence: Synthetic oligonucleotide
gccaacacggccaccggag

SEQ ID NO: 846105 - RNA, 19 nt, Artificial Sequence
  Description of Artificial Sequence: Synthetic oligonucleotide
accggagugcggcaugauu

SEQ ID NO: 846106 - RNA, 19 nt, Artificial Sequence
  Description of Artificial Sequence: Synthetic oligonucleotide
ggugaggauagcagccacc

SEQ ID NO: 846107 - RNA, 19 nt, Artificial Sequence
  Description of Artificial Sequence: Synthetic oligonucleotide
uuugaacgaugggcacggc

SEQ ID NO: 846108 - RNA, 19 nt, Artificial Sequence
  Description of Artificial Sequence: Synthetic oligonucleotide
cgaagaaucucaggggagc

SEQ ID NO: 846109 - RNA, 19 nt, Artificial Sequence
  Description of Artificial Sequence: Synthetic oligonucleotide
ggagugugaagaucaagau

SEQ ID NO: 846110 - RNA, 19 nt, Artificial Sequence
  Description of Artificial Sequence: Synthetic oligonucleotide
guccucguggaccugaguu

SEQ ID NO: 846111 - RNA, 19 nt, Artificial Sequence
  Description of Artificial Sequence: Synthetic oligonucleotide
cccauuguccagcaguuga

SEQ ID NO: 846112 - RNA, 19 nt, Artificial Sequence
  Description of Artificial Sequence: Synthetic oligonucleotide
ggacucuucaagcugggau

SEQ ID NO: 846113 - RNA, 19 nt, Artificial Sequence
  Description of Artificial Sequence: Synthetic oligonucleotide
agccaugguuaucccuaga

SEQ ID NO: 846114 - RNA, 19 nt, Artificial Sequence
  Description of Artificial Sequence: Synthetic oligonucleotide
gugggauaacgguguagaa

SEQ ID NO: 846115 - RNA, 19 nt, Artificial Sequence
  Description of Artificial Sequence: Synthetic oligonucleotide
gguguagaaacgggaggac

SEQ ID NO: 846116 - RNA, 19 nt, Artificial Sequence
  Description of Artificial Sequence: Synthetic oligonucleotide
gaguggacacggcgggguc

SEQ ID NO: 846117 - RNA, 19 nt, Artificial Sequence
  Description of Artificial Sequence: Synthetic oligonucleotide
cacuaccugcugcccgucc

SEQ ID NO: 846118 - RNA, 19 nt, Artificial Sequence
  Description of Artificial Sequence: Synthetic oligonucleotide
aggucuguaucgccuugua

SEQ ID NO: 846119 - RNA, 19 nt, Artificial Sequence
  Description of Artificial Sequence: Synthetic oligonucleotide
ucgccacggccucuugggu

SEQ ID NO: 846120 - RNA, 19 nt, Artificial Sequence
  Description of Artificial Sequence: Synthetic oligonucleotide
cccgaagaaucucagggga

SEQ ID NO: 846121 - RNA, 19 nt, Artificial Sequence
  Description of Artificial Sequence: Synthetic oligonucleotide
guaacauagccagcugacu

SEQ ID NO: 846122 - RNA, 19 nt, Artificial Sequence
  Description of Artificial Sequence: Synthetic oligonucleotide
guuuuggagccaugguuau

SEQ ID NO: 846123 - RNA, 19 nt, Artificial Sequence
  Description of Artificial Sequence: Synthetic oligonucleotide
ccagcucgaugucugcuag

SEQ ID NO: 846124 - RNA, 19 nt, Artificial Sequence
  Description of Artificial Sequence: Synthetic oligonucleotide
gugcggcaugauucggagc

SEQ ID NO: 846125 - RNA, 19 nt, Artificial Sequence
  Description of Artificial Sequence: Synthetic oligonucleotide
gaucacggcccagccuagc

SEQ ID NO: 846126 - RNA, 19 nt, Artificial Sequence
  Description of Artificial Sequence: Synthetic oligonucleotide
acacggccaccggagugcg

SEQ ID NO: 846127 - RNA, 19 nt, Artificial Sequence
  Description of Artificial Sequence: Synthetic oligonucleotide
ggaaccugucucccucccc

SEQ ID NO: 846128 - RNA, 19 nt, Artificial Sequence
  Description of Artificial Sequence: Synthetic oligonucleotide
gggguugcggcugagugga

SEQ ID NO: 846129 - RNA, 19 nt, Artificial Sequence
  Description of Artificial Sequence: Synthetic oligonucleotide
aguccucguggaccugagu

SEQ ID NO: 846130 - RNA, 19 nt, Artificial Sequence
  Description of Artificial Sequence: Synthetic oligonucleotide
gcucuaguuuaauguccug

SEQ ID NO: 846131 - RNA, 19 nt, Artificial Sequence
  Description of Artificial Sequence: Synthetic oligonucleotide
ggcucuguuuggccucggg

SEQ ID NO: 846132 - RNA, 19 nt, Artificial Sequence
  Description of Artificial Sequence: Synthetic oligonucleotide
gaucggaaacuguccuccu

SEQ ID NO: 846133 - RNA, 19 nt, Artificial Sequence
  Description of Artificial Sequence: Synthetic oligonucleotide
gaaucgcucgagugugccu

SEQ ID NO: 846134 - RNA, 19 nt, Artificial Sequence
  Description of Artificial Sequence: Synthetic oligonucleotide
ggggagcgcaagcaguuca

SEQ ID NO: 846135 - RNA, 19 nt, Artificial Sequence
  Description of Artificial Sequence: Synthetic oligonucleotide
ccgauguuggucugguuca

SEQ ID NO: 846136 - RNA, 19 nt, Artificial Sequence
  Description of Artificial Sequence: Synthetic oligonucleotide
uggccguaugggagccuga

SEQ ID NO: 846137 - RNA, 19 nt, Artificial Sequence
  Description of Artificial Sequence: Synthetic oligonucleotide
cggagugcggcaugauucg

SEQ ID NO: 846138 - RNA, 19 nt, Artificial Sequence
  Description of Artificial Sequence: Synthetic oligonucleotide
ccugcauuucgauaagugu

SEQ ID NO: 846139 - RNA, 19 nt, Artificial Sequence
  Description of Artificial Sequence: Synthetic oligonucleotide
gcacggaagacuuucguuu

SEQ ID NO: 846140 - RNA, 19 nt, Artificial Sequence
  Description of Artificial Sequence: Synthetic oligonucleotide
cucguggaccugaguucug

SEQ ID NO: 846141 - RNA, 19 nt, Artificial Sequence
  Description of Artificial Sequence: Synthetic oligonucleotide
ggagugcggcaugauucgg

SEQ ID NO: 846142 - RNA, 19 nt, Artificial Sequence
  Description of Artificial Sequence: Synthetic oligonucleotide
ccgguugcucaguuuggag

SEQ ID NO: 846143 - RNA, 19 nt, Artificial Sequence
  Description of Artificial Sequence: Synthetic oligonucleotide
cggaagacuuucguuuugg

SEQ ID NO: 846144 - RNA, 19 nt, Artificial Sequence
  Description of Artificial Sequence: Synthetic oligonucleotide
cacacggaugaugcgcuga

SEQ ID NO: 846145 - RNA, 19 nt, Artificial Sequence
  Description of Artificial Sequence: Synthetic oligonucleotide
cgcgcaaucugcugcuugc

SEQ ID NO: 846146 - RNA, 19 nt, Artificial Sequence
  Description of Artificial Sequence: Synthetic oligonucleotide
ucgcucgagugugccuucc

SEQ ID NO: 846147 - RNA, 19 nt, Artificial Sequence
  Description of Artificial Sequence: Synthetic oligonucleotide
cgguggaucggaaacuguc

SEQ ID NO: 846148 - RNA, 19 nt, Artificial Sequence
  Description of Artificial Sequence: Synthetic oligonucleotide
guaucgccuuguacuccag

SEQ ID NO: 846149 - RNA, 19 nt, Artificial Sequence
  Description of Artificial Sequence: Synthetic oligonucleotide
gggagcgcaagcaguucag

SEQ ID NO: 846150 - RNA, 19 nt, Artificial Sequence
  Description of Artificial Sequence: Synthetic oligonucleotide
gguuaucccuagagaaaca

SEQ ID NO: 846151 - RNA, 19 nt, Artificial Sequence
  Description of Artificial Sequence: Synthetic oligonucleotide
ugggaucaucgguggugau

SEQ ID NO: 846152 - RNA, 19 nt, Artificial Sequence
  Description of Artificial Sequence: Synthetic oligonucleotide
caccuggugguccccacaa

SEQ ID NO: 846153 - RNA, 19 nt, Artificial Sequence
  Description of Artificial Sequence: Synthetic oligonucleotide
caggacccuggaagaggug

SEQ ID NO: 846154 - RNA, 19 nt, Artificial Sequence
  Description of Artificial Sequence: Synthetic oligonucleotide
gccccgcgcaaucugcugc

SEQ ID NO: 846155 - RNA, 19 nt, Artificial Sequence
  Description of Artificial Sequence: Synthetic oligonucleotide
gccuagggccaccucgccc

SEQ ID NO: 846156 - RNA, 19 nt, Artificial Sequence
  Description of Artificial Sequence: Synthetic oligonucleotide
ccacauuggugccaugcca

SEQ ID NO: 846157 - RNA, 19 nt, Artificial Sequence
  Description of Artificial Sequence: Synthetic oligonucleotide
caccugaggagcugguagu

SEQ ID NO: 846158 - RNA, 19 nt, Artificial Sequence
  Description of Artificial Sequence: Synthetic oligonucleotide
caccaaugugucuggcaua

SEQ ID NO: 846159 - RNA, 19 nt, Artificial Sequence
  Description of Artificial Sequence: Synthetic oligonucleotide
ggaagccaauggccguaug

SEQ ID NO: 846160 - RNA, 19 nt, Artificial Sequence
  Description of Artificial Sequence: Synthetic oligonucleotide
acccggccccagcgauucc

SEQ ID NO: 846161 - RNA, 19 nt, Artificial Sequence
  Description of Artificial Sequence: Synthetic oligonucleotide
cucgggcgaugacacuguc

SEQ ID NO: 846162 - RNA, 19 nt, Artificial Sequence
  Description of Artificial Sequence: Synthetic oligonucleotide
cacggaagacuuucguuuu

SEQ ID NO: 846163 - RNA, 19 nt, Artificial Sequence
  Description of Artificial Sequence: Synthetic oligonucleotide
gucuaaggagcagggcuua

SEQ ID NO: 846164 - RNA, 19 nt, Artificial Sequence
  Description of Artificial Sequence: Synthetic oligonucleotide
ccagcgauuccagcagaag

SEQ ID NO: 846165 - RNA, 19 nt, Artificial Sequence
  Description of Artificial Sequence: Synthetic oligonucleotide
gguugcggcugaguggaca

SEQ ID NO: 846166 - RNA, 19 nt, Artificial Sequence
  Description of Artificial Sequence: Synthetic oligonucleotide
cuucgucuucucccgaaau

SEQ ID NO: 846167 - RNA, 19 nt, Artificial Sequence
  Description of Artificial Sequence: Synthetic oligonucleotide
ccugaguucugggguugcg

SEQ ID NO: 846168 - RNA, 19 nt, Artificial Sequence
  Description of Artificial Sequence: Synthetic oligonucleotide
ggcacggcacaggucgacc

SEQ ID NO: 846169 - RNA, 19 nt, Artificial Sequence
  Description of Artificial Sequence: Synthetic oligonucleotide
caccucgcccaggaacaug

SEQ ID NO: 846170 - RNA, 19 nt, Artificial Sequence
  Description of Artificial Sequence: Synthetic oligonucleotide
cacggccaccggagugcgg

SEQ ID NO: 846171 - RNA, 19 nt, Artificial Sequence
  Description of Artificial Sequence: Synthetic oligonucleotide
ggcaugauucggagcccgc

SEQ ID NO: 846172 - RNA, 19 nt, Artificial Sequence
  Description of Artificial Sequence: Synthetic oligonucleotide
gcagacgacacuggcucuc

SEQ ID NO: 846173 - RNA, 19 nt, Artificial Sequence
  Description of Artificial Sequence: Synthetic oligonucleotide
gcucgagugugccuuccaa

SEQ ID NO: 846174 - RNA, 19 nt, Artificial Sequence
  Description of Artificial Sequence: Synthetic oligonucleotide
guuuggccucgggcgauga

SEQ ID NO: 846175 - RNA, 19 nt, Artificial Sequence
  Description of Artificial Sequence: Synthetic oligonucleotide
ugccgauguuggucugguu

SEQ ID NO: 846176 - RNA, 19 nt, Artificial Sequence
  Description of Artificial Sequence: Synthetic oligonucleotide
gguaggucuguaucgccuu

SEQ ID NO: 846177 - RNA, 19 nt, Artificial Sequence
  Description of Artificial Sequence: Synthetic oligonucleotide
cccacaaugcaugggagua

SEQ ID NO: 846178 - RNA, 19 nt, Artificial Sequence
  Description of Artificial Sequence: Synthetic oligonucleotide
gguucaagguacagucaua

SEQ ID NO: 846179 - RNA, 19 nt, Artificial Sequence
  Description of Artificial Sequence: Synthetic oligonucleotide
cgguguagaaacgggagga

SEQ ID NO: 846180 - RNA, 19 nt, Artificial Sequence
  Description of Artificial Sequence: Synthetic oligonucleotide
ggagcgcaagcaguucaga

SEQ ID NO: 846181 - RNA, 19 nt, Artificial Sequence
  Description of Artificial Sequence: Synthetic oligonucleotide
gccguaugggagccugaca

SEQ ID NO: 846182 - RNA, 19 nt, Artificial Sequence
  Description of Artificial Sequence: Synthetic oligonucleotide
ugcugcccguccagcucua

SEQ ID NO: 846183 - RNA, 19 nt, Artificial Sequence
  Description of Artificial Sequence: Synthetic oligonucleotide
aggcucuguuuggccucgg

SEQ ID NO: 846184 - RNA, 19 nt, Artificial Sequence
  Description of Artificial Sequence: Synthetic oligonucleotide
acggcccagccuagcaggu

SEQ ID NO: 846185 - RNA, 19 nt, Artificial Sequence
  Description of Artificial Sequence: Synthetic oligonucleotide
gccaccggagugcggcaug

SEQ ID NO: 846186 - RNA, 19 nt, Artificial Sequence
  Description of Artificial Sequence: Synthetic oligonucleotide
ggucuaaggagcagggcuu

SEQ ID NO: 846187 - RNA, 19 nt, Artificial Sequence
  Description of Artificial Sequence: Synthetic oligonucleotide
cagguccggggagcgcaag

SEQ ID NO: 846188 - RNA, 19 nt, Artificial Sequence
  Description of Artificial Sequence: Synthetic oligonucleotide
gccugguaucaggaaucgc

SEQ ID NO: 846189 - RNA, 19 nt, Artificial Sequence
  Description of Artificial Sequence: Synthetic oligonucleotide
gugggagcguuugaacgau

SEQ ID NO: 846190 - RNA, 19 nt, Artificial Sequence
  Description of Artificial Sequence: Synthetic oligonucleotide
cugggcaucuguaguuguu

SEQ ID NO: 846191 - RNA, 19 nt, Artificial Sequence
  Description of Artificial Sequence: Synthetic oligonucleotide
ccgcgcaaucugcugcuug

SEQ ID NO: 846192 - RNA, 19 nt, Artificial Sequence
  Description of Artificial Sequence: Synthetic oligonucleotide
cccuugccaacacggccac

SEQ ID NO: 846193 - RNA, 19 nt, Artificial Sequence
  Description of Artificial Sequence: Synthetic oligonucleotide
ccaccuucgccacggccuc

SEQ ID NO: 846194 - RNA, 19 nt, Artificial Sequence
  Description of Artificial Sequence: Synthetic oligonucleotide
gucgaccuugaggcaccac

SEQ ID NO: 846195 - RNA, 19 nt, Artificial Sequence
  Description of Artificial Sequence: Synthetic oligonucleotide
gcggcaugauucggagccc

SEQ ID NO: 846196 - RNA, 19 nt, Artificial Sequence
  Description of Artificial Sequence: Synthetic oligonucleotide
gccucagcgguggaucgga

SEQ ID NO: 846197 - RNA, 19 nt, Artificial Sequence
  Description of Artificial Sequence: Synthetic oligonucleotide
gccggcugcggccaaaguu

SEQ ID NO: 846198 - RNA, 19 nt, Artificial Sequence
  Description of Artificial Sequence: Synthetic oligonucleotide
cagcgguggaucggaaacu

SEQ ID NO: 846199 - RNA, 19 nt, Artificial Sequence
  Description of Artificial Sequence: Synthetic oligonucleotide
cccguccagcucuaguuua

SEQ ID NO: 846200 - RNA, 19 nt, Artificial Sequence
  Description of Artificial Sequence: Synthetic oligonucleotide
ccuagagaaacaggacccu

SEQ ID NO: 846201 - RNA, 19 nt, Artificial Sequence
  Description of Artificial Sequence: Synthetic oligonucleotide
cgaccuugaggcaccacua

SEQ ID NO: 846202 - RNA, 19 nt, Artificial Sequence
  Description of Artificial Sequence: Synthetic oligonucleotide
gcggcugaguggacacggc

SEQ ID NO: 846203 - RNA, 19 nt, Artificial Sequence
  Description of Artificial Sequence: Synthetic oligonucleotide
ccguccagcucuaguuuaa

SEQ ID NO: 846204 - RNA, 19 nt, Artificial Sequence
  Description of Artificial Sequence: Synthetic oligonucleotide
uggacacggcgggguccac

SEQ ID NO: 846205 - RNA, 19 nt, Artificial Sequence
  Description of Artificial Sequence: Synthetic oligonucleotide
ggcugcggccaaaguugug

SEQ ID NO: 846206 - RNA, 19 nt, Artificial Sequence
  Description of Artificial Sequence: Synthetic oligonucleotide
gggcacggcacaggucgac

SEQ ID NO: 846207 - RNA, 19 nt, Artificial Sequence
  Description of Artificial Sequence: Synthetic oligonucleotide
ccccacaaugcaugggagu

SEQ ID NO: 846208 - RNA, 19 nt, Artificial Sequence
  Description of Artificial Sequence: Synthetic oligonucleotide
ccacaaugcaugggaguaa

SEQ ID NO: 846209 - RNA, 19 nt, Artificial Sequence
  Description of Artificial Sequence: Synthetic oligonucleotide
ggccauaggugugcaccaa

SEQ ID NO: 846210 - RNA, 19 nt, Artificial Sequence
  Description of Artificial Sequence: Synthetic oligonucleotide
gggcuccugucuggugacc

SEQ ID NO: 846211 - RNA, 19 nt, Artificial Sequence
  Description of Artificial Sequence: Synthetic oligonucleotide
ggucgaccuugaggcacca

SEQ ID NO: 846212 - RNA, 19 nt, Artificial Sequence
  Description of Artificial Sequence: Synthetic oligonucleotide
ccuucgccacggccucuug

SEQ ID NO: 846213 - RNA, 19 nt, Artificial Sequence
  Description of Artificial Sequence: Synthetic oligonucleotide
cuccaacucccaggguagu

SEQ ID NO: 846214 - RNA, 19 nt, Artificial Sequence
  Description of Artificial Sequence: Synthetic oligonucleotide
cgauaaguguguacuuguu

SEQ ID NO: 846215 - RNA, 19 nt, Artificial Sequence
  Description of Artificial Sequence: Synthetic oligonucleotide
cacggccucuugggucuca

SEQ ID NO: 846216 - RNA, 19 nt, Artificial Sequence
  Description of Artificial Sequence: Synthetic oligonucleotide
ccaccggagugcggcauga

SEQ ID NO: 846217 - RNA, 19 nt, Artificial Sequence
  Description of Artificial Sequence: Synthetic oligonucleotide
gcgcaaucugcugcuugcu

SEQ ID NO: 846218 - RNA, 19 nt, Artificial Sequence
  Description of Artificial Sequence: Synthetic oligonucleotide
ggguugcggcugaguggac

SEQ ID NO: 846219 - RNA, 19 nt, Artificial Sequence
  Description of Artificial Sequence: Synthetic oligonucleotide
cagccuccgguugcucagu

SEQ ID NO: 846220 - RNA, 19 nt, Artificial Sequence
  Description of Artificial Sequence: Synthetic oligonucleotide
cgauguuggucugguucaa

SEQ ID NO: 846221 - RNA, 19 nt, Artificial Sequence
  Description of Artificial Sequence: Synthetic oligonucleotide
ccccgcgcaaucugcugcu

SEQ ID NO: 846222 - RNA, 19 nt, Artificial Sequence
  Description of Artificial Sequence: Synthetic oligonucleotide
cggggagcgcaagcaguuc

SEQ ID NO: 846223 - RNA, 19 nt, Artificial Sequence
  Description of Artificial Sequence: Synthetic oligonucleotide
gccuuccaagaagcaaguu

SEQ ID NO: 846224 - RNA, 19 nt, Artificial Sequence
  Description of Artificial Sequence: Synthetic oligonucleotide
ccucgcccaggaacaugua

SEQ ID NO: 846225 - RNA, 19 nt, Artificial Sequence
  Description of Artificial Sequence: Synthetic oligonucleotide
ggccggcugcggccaaagu

SEQ ID NO: 846226 - RNA, 19 nt, Artificial Sequence
  Description of Artificial Sequence: Synthetic oligonucleotide
caccuucgccacggccucu

SEQ ID NO: 846227 - RNA, 19 nt, Artificial Sequence
  Description of Artificial Sequence: Synthetic oligonucleotide
ggccaccggagugcggcau

SEQ ID NO: 846228 - RNA, 19 nt, Artificial Sequence
  Description of Artificial Sequence: Synthetic oligonucleotide
caccggagugcggcaugau

SEQ ID NO: 846229 - RNA, 19 nt, Artificial Sequence
  Description of Artificial Sequence: Synthetic oligonucleotide
cccgcgcaaucugcugcuu

SEQ ID NO: 846230 - RNA, 19 nt, Artificial Sequence
  Description of Artificial Sequence: Synthetic oligonucleotide
aauguaauaacuuugguug

SEQ ID NO: 846231 - RNA, 19 nt, Artificial Sequence
  Description of Artificial Sequence: Synthetic oligonucleotide
aagaacucggcuuagacac

SEQ ID NO: 846232 - RNA, 19 nt, Artificial Sequence
  Description of Artificial Sequence: Synthetic oligonucleotide
auaaagacgagcuugauca

SEQ ID NO: 846233 - RNA, 19 nt, Artificial Sequence
  Description of Artificial Sequence: Synthetic oligonucleotide
ugaguaaauaaacugagca

SEQ ID NO: 846234 - RNA, 19 nt, Artificial Sequence
  Description of Artificial Sequence: Synthetic oligonucleotide
ugugauuaaauuuucacca

SEQ ID NO: 846235 - RNA, 19 nt, Artificial Sequence
  Description of Artificial Sequence: Synthetic oligonucleotide
aauaguagcaggcucacug

SEQ ID NO: 846236 - RNA, 19 nt, Artificial Sequence
  Description of Artificial Sequence: Synthetic oligonucleotide
aauccuuauggccuggagc

SEQ ID NO: 846237 - RNA, 19 nt, Artificial Sequence
  Description of Artificial Sequence: Synthetic oligonucleotide
uuuguucuaauaaacacga

SEQ ID NO: 846238 - RNA, 19 nt, Artificial Sequence
  Description of Artificial Sequence: Synthetic oligonucleotide
uuguuuaggacacuaauca

SEQ ID NO: 846239 - RNA, 19 nt, Artificial Sequence
  Description of Artificial Sequence: Synthetic oligonucleotide
uauuaauacuucuuggcag

SEQ ID NO: 846240 - RNA, 19 nt, Artificial Sequence
  Description of Artificial Sequence: Synthetic oligonucleotide
auaaucguccuccacagac

SEQ ID NO: 846241 - RNA, 19 nt, Artificial Sequence
  Description of Artificial Sequence: Synthetic oligonucleotide
gauccuuuauaccagcugg

SEQ ID NO: 846242 - RNA, 19 nt, Artificial Sequence
  Description of Artificial Sequence: Synthetic oligonucleotide
uaaucuaaaagguuuguca

SEQ ID NO: 846243 - RNA, 19 nt, Artificial Sequence
  Description of Artificial Sequence: Synthetic oligonucleotide
uuuaauaguagcaggcuca

SEQ ID NO: 846244 - RNA, 19 nt, Artificial Sequence
  Description of Artificial Sequence: Synthetic oligonucleotide
uuauuaauacuucuuggca

SEQ ID NO: 846245 - RNA, 19 nt, Artificial Sequence
  Description of Artificial Sequence: Synthetic oligonucleotide
uuuuguuuacauuacccag

SEQ ID NO: 846246 - RNA, 19 nt, Artificial Sequence
  Description of Artificial Sequence: Synthetic oligonucleotide
uuaccgaucguacuaaaag

SEQ ID NO: 846247 - RNA, 19 nt, Artificial Sequence
  Description of Artificial Sequence: Synthetic oligonucleotide
uuagacacggauaaagcgc

SEQ ID NO: 846248 - RNA, 19 nt, Artificial Sequence
  Description of Artificial Sequence: Synthetic oligonucleotide
aaaagcuacaucacucucc

SEQ ID NO: 846249 - RNA, 19 nt, Artificial Sequence
  Description of Artificial Sequence: Synthetic oligonucleotide
auauugaagaugaggaucc

SEQ ID NO: 846250 - RNA, 19 nt, Artificial Sequence
  Description of Artificial Sequence: Synthetic oligonucleotide
cuaaucaaucguuuaauag

SEQ ID NO: 846251 - RNA, 19 nt, Artificial Sequence
  Description of Artificial Sequence: Synthetic oligonucleotide
acuaucuuguuccagaacu

SEQ ID NO: 846252 - RNA, 19 nt, Artificial Sequence
  Description of Artificial Sequence: Synthetic oligonucleotide
aaugaaauccuuauggccu

SEQ ID NO: 846253 - RNA, 19 nt, Artificial Sequence
  Description of Artificial Sequence: Synthetic oligonucleotide
uguucuaauaaacacgauc

SEQ ID NO: 846254 - RNA, 19 nt, Artificial Sequence
  Description of Artificial Sequence: Synthetic oligonucleotide
acauccgacacacauaauc

SEQ ID NO: 846255 - RNA, 19 nt, Artificial Sequence
  Description of Artificial Sequence: Synthetic oligonucleotide
cuuagacacggauaaagcg

SEQ ID NO: 846256 - RNA, 19 nt, Artificial Sequence
  Description of Artificial Sequence: Synthetic oligonucleotide
caaaguaagacuaacguga

SEQ ID NO: 846257 - RNA, 19 nt, Artificial Sequence
  Description of Artificial Sequence: Synthetic oligonucleotide
uuuagugauaggaacuuca

SEQ ID NO: 846258 - RNA, 19 nt, Artificial Sequence
  Description of Artificial Sequence: Synthetic oligonucleotide
aaucuaaaagguuugucaa

SEQ ID NO: 846259 - RNA, 19 nt, Artificial Sequence
  Description of Artificial Sequence: Synthetic oligonucleotide
aguaagacuaacgugaucu

SEQ ID NO: 846260 - RNA, 19 nt, Artificial Sequence
  Description of Artificial Sequence: Synthetic oligonucleotide
gaguaaauaaacugagcag

SEQ ID NO: 846261 - RNA, 19 nt, Artificial Sequence
  Description of Artificial Sequence: Synthetic oligonucleotide
uacuaaaaggccaugcucu

SEQ ID NO: 846262 - RNA, 19 nt, Artificial Sequence
  Description of Artificial Sequence: Synthetic oligonucleotide
aaucguuuaauaguagcag

SEQ ID NO: 846263 - RNA, 19 nt, Artificial Sequence
  Description of Artificial Sequence: Synthetic oligonucleotide
ucucaugugaucaaggcau

SEQ ID NO: 846264 - RNA, 19 nt, Artificial Sequence
  Description of Artificial Sequence: Synthetic oligonucleotide
ucugaaucgaguacaagcu

SEQ ID NO: 846265 - RNA, 19 nt, Artificial Sequence
  Description of Artificial Sequence: Synthetic oligonucleotide
caugcauaugcaaaggaag

SEQ ID NO: 846266 - RNA, 19 nt, Artificial Sequence
  Description of Artificial Sequence: Synthetic oligonucleotide
uuggcagcuaauuauagcu

SEQ ID NO: 846267 - RNA, 19 nt, Artificial Sequence
  Description of Artificial Sequence: Synthetic oligonucleotide
ucuaccaacgcauucuggc

SEQ ID NO: 846268 - RNA, 19 nt, Artificial Sequence
  Description of Artificial Sequence: Synthetic oligonucleotide
aaagcuacaucacucuccu

SEQ ID NO: 846269 - RNA, 19 nt, Artificial Sequence
  Description of Artificial Sequence: Synthetic oligonucleotide
aucguuuaauaguagcagg

SEQ ID NO: 846270 - RNA, 19 nt, Artificial Sequence
  Description of Artificial Sequence: Synthetic oligonucleotide
ucgugaguaaauaaacuga

SEQ ID NO: 846271 - RNA, 19 nt, Artificial Sequence
  Description of Artificial Sequence: Synthetic oligonucleotide
cuucaucguaguuauagcc

SEQ ID NO: 846272 - RNA, 19 nt, Artificial Sequence
  Description of Artificial Sequence: Synthetic oligonucleotide
uaccgaucguacuaaaagg

SEQ ID NO: 846273 - RNA, 19 nt, Artificial Sequence
  Description of Artificial Sequence: Synthetic oligonucleotide
augaauaaagacgagcuug

SEQ ID NO: 846274 - RNA, 19 nt, Artificial Sequence
  Description of Artificial Sequence: Synthetic oligonucleotide
uaauguaauaacuuugguu

SEQ ID NO: 846275 - RNA, 19 nt, Artificial Sequence
  Description of Artificial Sequence: Synthetic oligonucleotide
guugccaauuuaccgaucg

SEQ ID NO: 846276 - RNA, 19 nt, Artificial Sequence
  Description of Artificial Sequence: Synthetic oligonucleotide
agugauuauuaauacuucu

SEQ ID NO: 846277 - RNA, 19 nt, Artificial Sequence
  Description of Artificial Sequence: Synthetic oligonucleotide
cagaacuacugacagagcc

SEQ ID NO: 846278 - RNA, 19 nt, Artificial Sequence
  Description of Artificial Sequence: Synthetic oligonucleotide
uuaggacacuaaucaaucg

SEQ ID NO: 846279 - RNA, 19 nt, Artificial Sequence
  Description of Artificial Sequence: Synthetic oligonucleotide
ugauucagaagagaauuag

SEQ ID NO: 846280 - RNA, 19 nt, Artificial Sequence
  Description of Artificial Sequence: Synthetic oligonucleotide
uuaggaaugaaauccuuau

SEQ ID NO: 846281 - RNA, 19 nt, Artificial Sequence
  Description of Artificial Sequence: Synthetic oligonucleotide
gucgugaguaaauaaacug

SEQ ID NO: 846282 - RNA, 19 nt, Artificial Sequence
  Description of Artificial Sequence: Synthetic oligonucleotide
uaaacacgauccuuuauac

SEQ ID NO: 846283 - RNA, 19 nt, Artificial Sequence
  Description of Artificial Sequence: Synthetic oligonucleotide
uagacacggauaaagcgcc

SEQ ID NO: 846284 - RNA, 19 nt, Artificial Sequence
  Description of Artificial Sequence: Synthetic oligonucleotide
augauauccaucccaacca

SEQ ID NO: 846285 - RNA, 19 nt, Artificial Sequence
  Description of Artificial Sequence: Synthetic oligonucleotide
uauuguggagccaccauac

SEQ ID NO: 846286 - RNA, 19 nt, Artificial Sequence
  Description of Artificial Sequence: Synthetic oligonucleotide
gaagagaauuagaagauuc

SEQ ID NO: 846287 - RNA, 19 nt, Artificial Sequence
  Description of Artificial Sequence: Synthetic oligonucleotide
uaggacacuaaucaaucgu

SEQ ID NO: 846288 - RNA, 19 nt, Artificial Sequence
  Description of Artificial Sequence: Synthetic oligonucleotide
ugucaauggaucguugagg

SEQ ID NO: 846289 - RNA, 19 nt, Artificial Sequence
  Description of Artificial Sequence: Synthetic oligonucleotide
cuaaaagguuugucaaugg

SEQ ID NO: 846290 - RNA, 19 nt, Artificial Sequence
  Description of Artificial Sequence: Synthetic oligonucleotide
uugauagguucuuuggggc

SEQ ID NO: 846291 - RNA, 19 nt, Artificial Sequence
  Description of Artificial Sequence: Synthetic oligonucleotide
ucaucaugcagagugauuc

SEQ ID NO: 846292 - RNA, 19 nt, Artificial Sequence
  Description of Artificial Sequence: Synthetic oligonucleotide
auaaacacgauccuuuaua

SEQ ID NO: 846293 - RNA, 19 nt, Artificial Sequence
  Description of Artificial Sequence: Synthetic oligonucleotide
acggauaaagcgccaaccg

SEQ ID NO: 846294 - RNA, 19 nt, Artificial Sequence
  Description of Artificial Sequence: Synthetic oligonucleotide
uugucaauggaucguugag

SEQ ID NO: 846295 - RNA, 19 nt, Artificial Sequence
  Description of Artificial Sequence: Synthetic oligonucleotide
augcauaugcaaaggaagc

SEQ ID NO: 846296 - RNA, 19 nt, Artificial Sequence
  Description of Artificial Sequence: Synthetic oligonucleotide
uugguugugguuucaaacu

SEQ ID NO: 846297 - RNA, 19 nt, Artificial Sequence
  Description of Artificial Sequence: Synthetic oligonucleotide
uuugucaauggaucguuga

SEQ ID NO: 846298 - RNA, 19 nt, Artificial Sequence
  Description of Artificial Sequence: Synthetic oligonucleotide
uuccauaacugcacacugg

SEQ ID NO: 846299 - RNA, 19 nt, Artificial Sequence
  Description of Artificial Sequence: Synthetic oligonucleotide
uauagcuuuagguucucgu

SEQ ID NO: 846300 - RNA, 19 nt, Artificial Sequence
  Description of Artificial Sequence: Synthetic oligonucleotide
cacucguagggauaaaagc

SEQ ID NO: 846301 - RNA, 19 nt, Artificial Sequence
  Description of Artificial Sequence: Synthetic oligonucleotide
augaccaaugaccacuaag

SEQ ID NO: 846302 - RNA, 19 nt, Artificial Sequence
  Description of Artificial Sequence: Synthetic oligonucleotide
ucggcuuagacacggauaa

SEQ ID NO: 846303 - RNA, 19 nt, Artificial Sequence
  Description of Artificial Sequence: Synthetic oligonucleotide
caauaaucguccuccacag

SEQ ID NO: 846304 - RNA, 19 nt, Artificial Sequence
  Description of Artificial Sequence: Synthetic oligonucleotide
uucuuguugccaauuuacc

SEQ ID NO: 846305 - RNA, 19 nt, Artificial Sequence
  Description of Artificial Sequence: Synthetic oligonucleotide
ucgaguacaagcuuugaua

SEQ ID NO: 846306 - RNA, 19 nt, Artificial Sequence
  Description of Artificial Sequence: Synthetic oligonucleotide
ucaacaacuaaaacagcua

SEQ ID NO: 846307 - RNA, 19 nt, Artificial Sequence
  Description of Artificial Sequence: Synthetic oligonucleotide
guuccagaacuacugacag

SEQ ID NO: 846308 - RNA, 19 nt, Artificial Sequence
  Description of Artificial Sequence: Synthetic oligonucleotide
cuugcuuaagaaagugccc

SEQ ID NO: 846309 - RNA, 19 nt, Artificial Sequence
  Description of Artificial Sequence: Synthetic oligonucleotide
ucgugucuacaaaacauca

SEQ ID NO: 846310 - RNA, 19 nt, Artificial Sequence
  Description of Artificial Sequence: Synthetic oligonucleotide
ucucauccaagacccaugc

SEQ ID NO: 846311 - RNA, 19 nt, Artificial Sequence
  Description of Artificial Sequence: Synthetic oligonucleotide
aaguaagacuaacgugauc

SEQ ID NO: 846312 - RNA, 19 nt, Artificial Sequence
  Description of Artificial Sequence: Synthetic oligonucleotide
guaauaacuuugguugugg

SEQ ID NO: 846313 - RNA, 19 nt, Artificial Sequence
  Description of Artificial Sequence: Synthetic oligonucleotide
uaggaaugaaauccuuaug

SEQ ID NO: 846314 - RNA, 19 nt, Artificial Sequence
  Description of Artificial Sequence: Synthetic oligonucleotide
ugaaggaaucaauuuguuc

SEQ ID NO: 846315 - RNA, 19 nt, Artificial Sequence
  Description of Artificial Sequence: Synthetic oligonucleotide
acuaaaaggccaugcucuc

SEQ ID NO: 846316 - RNA, 19 nt, Artificial Sequence
  Description of Artificial Sequence: Synthetic oligonucleotide
uacagggguugucacgucg

SEQ ID NO: 846317 - RNA, 19 nt, Artificial Sequence
  Description of Artificial Sequence: Synthetic oligonucleotide
caguacaaguuucauuggg

SEQ ID NO: 846318 - RNA, 19 nt, Artificial Sequence
  Description of Artificial Sequence: Synthetic oligonucleotide
ugaaucgaguacaagcuuu

SEQ ID NO: 846319 - RNA, 19 nt, Artificial Sequence
  Description of Artificial Sequence: Synthetic oligonucleotide
acuuugucaugccaacauc

SEQ ID NO: 846320 - RNA, 19 nt, Artificial Sequence
  Description of Artificial Sequence: Synthetic oligonucleotide
uugcuuaagaaagugccca

SEQ ID NO: 846321 - RNA, 19 nt, Artificial Sequence
  Description of Artificial Sequence: Synthetic oligonucleotide
uacuuaugcauuaguuucu

SEQ ID NO: 846322 - RNA, 19 nt, Artificial Sequence
  Description of Artificial Sequence: Synthetic oligonucleotide
uuugguaguguaacagcac

SEQ ID NO: 846323 - RNA, 19 nt, Artificial Sequence
  Description of Artificial Sequence: Synthetic oligonucleotide
ugguaguguaacagcacag

SEQ ID NO: 846324 - RNA, 19 nt, Artificial Sequence
  Description of Artificial Sequence: Synthetic oligonucleotide
uguaauaacuuugguugug

SEQ ID NO: 846325 - RNA, 19 nt, Artificial Sequence
  Description of Artificial Sequence: Synthetic oligonucleotide
gacccaugcauaugcaaag

SEQ ID NO: 846326 - RNA, 19 nt, Artificial Sequence
  Description of Artificial Sequence: Synthetic oligonucleotide
ugcuugcuuaagaaagugc

SEQ ID NO: 846327 - RNA, 19 nt, Artificial Sequence
  Description of Artificial Sequence: Synthetic oligonucleotide
uuagugauaggaacuucaa

SEQ ID NO: 846328 - RNA, 19 nt, Artificial Sequence
  Description of Artificial Sequence: Synthetic oligonucleotide
aagcucuaccaacgcauuc

SEQ ID NO: 846329 - RNA, 19 nt, Artificial Sequence
  Description of Artificial Sequence: Synthetic oligonucleotide
auuguggagccaccauacc

SEQ ID NO: 846330 - RNA, 19 nt, Artificial Sequence
  Description of Artificial Sequence: Synthetic oligonucleotide
ugcauaugcaaaggaagcc

SEQ ID NO: 846331 - RNA, 19 nt, Artificial Sequence
  Description of Artificial Sequence: Synthetic oligonucleotide
cuuggcagcuaauuauagc

SEQ ID NO: 846332 - RNA, 19 nt, Artificial Sequence
  Description of Artificial Sequence: Synthetic oligonucleotide
ugauagguucuuuggggcc

SEQ ID NO: 846333 - RNA, 19 nt, Artificial Sequence
  Description of Artificial Sequence: Synthetic oligonucleotide
auauccaucccaaccaaag

SEQ ID NO: 846334 - RNA, 19 nt, Artificial Sequence
  Description of Artificial Sequence: Synthetic oligonucleotide
uccgacacacauaaucuaa

SEQ ID NO: 846335 - RNA, 19 nt, Artificial Sequence
  Description of Artificial Sequence: Synthetic oligonucleotide
uuagaagauucuuuccgau

SEQ ID NO: 846336 - RNA, 19 nt, Artificial Sequence
  Description of Artificial Sequence: Synthetic oligonucleotide
ucuaauaaacacgauccuu

SEQ ID NO: 846337 - RNA, 19 nt, Artificial Sequence
  Description of Artificial Sequence: Synthetic oligonucleotide
cuaauuauagcuuuagguu

SEQ ID NO: 846338 - RNA, 19 nt, Artificial Sequence
  Description of Artificial Sequence: Synthetic oligonucleotide
ggauaaagcgccaaccgcg

SEQ ID NO: 846339 - RNA, 19 nt, Artificial Sequence
  Description of Artificial Sequence: Synthetic oligonucleotide
uuuaccgaucguacuaaaa

SEQ ID NO: 846340 - RNA, 19 nt, Artificial Sequence
  Description of Artificial Sequence: Synthetic oligonucleotide
agcuuugauagguucuuug

SEQ ID NO: 846341 - RNA, 19 nt, Artificial Sequence
  Description of Artificial Sequence: Synthetic oligonucleotide
acucguagggauaaaagcu

SEQ ID NO: 846342 - RNA, 19 nt, Artificial Sequence
  Description of Artificial Sequence: Synthetic oligonucleotide
ucauuuaacuggugauuca

SEQ ID NO: 846343 - RNA, 19 nt, Artificial Sequence
  Description of Artificial Sequence: Synthetic oligonucleotide
ugguuucaaacuuugucau

SEQ ID NO: 846344 - RNA, 19 nt, Artificial Sequence
  Description of Artificial Sequence: Synthetic oligonucleotide
acacuaaucaaucguuuaa

SEQ ID NO: 846345 - RNA, 19 nt, Artificial Sequence
  Description of Artificial Sequence: Synthetic oligonucleotide
ugucaugccaacauccauu

SEQ ID NO: 846346 - RNA, 19 nt, Artificial Sequence
  Description of Artificial Sequence: Synthetic oligonucleotide
ucaauggaucguugagggg

SEQ ID NO: 846347 - RNA, 19 nt, Artificial Sequence
  Description of Artificial Sequence: Synthetic oligonucleotide
cuaaaacagcuacauccgc

SEQ ID NO: 846348 - RNA, 19 nt, Artificial Sequence
  Description of Artificial Sequence: Synthetic oligonucleotide
gcuuugauagguucuuugg

SEQ ID NO: 846349 - RNA, 19 nt, Artificial Sequence
  Description of Artificial Sequence: Synthetic oligonucleotide
aauccuuuagugauaggaa

SEQ ID NO: 846350 - RNA, 19 nt, Artificial Sequence
  Description of Artificial Sequence: Synthetic oligonucleotide
uguuuaggacacuaaucaa

SEQ ID NO: 846351 - RNA, 19 nt, Artificial Sequence
  Description of Artificial Sequence: Synthetic oligonucleotide
ucagcuugccagacuaucu

SEQ ID NO: 846352 - RNA, 19 nt, Artificial Sequence
  Description of Artificial Sequence: Synthetic oligonucleotide
agcuacauccgccugggcu

SEQ ID NO: 846353 - RNA, 19 nt, Artificial Sequence
  Description of Artificial Sequence: Synthetic oligonucleotide
acgucgugaguaaauaaac

SEQ ID NO: 846354 - RNA, 19 nt, Artificial Sequence
  Description of Artificial Sequence: Synthetic oligonucleotide
uauagccucggacguuccg

SEQ ID NO: 846355 - RNA, 19 nt, Artificial Sequence
  Description of Artificial Sequence: Synthetic oligonucleotide
auguaauaacuuugguugu

SEQ ID NO: 846356 - RNA, 19 nt, Artificial Sequence
  Description of Artificial Sequence: Synthetic oligonucleotide
uggagcauccauuaaugua

SEQ ID NO: 846357 - RNA, 19 nt, Artificial Sequence
  Description of Artificial Sequence: Synthetic oligonucleotide
cuaccaacgcauucuggcc

SEQ ID NO: 846358 - RNA, 19 nt, Artificial Sequence
  Description of Artificial Sequence: Synthetic oligonucleotide
ucguagggauaaaagcuac

SEQ ID NO: 846359 - RNA, 19 nt, Artificial Sequence
  Description of Artificial Sequence: Synthetic oligonucleotide
gugauuaaauuuucaccac

SEQ ID NO: 846360 - RNA, 19 nt, Artificial Sequence
  Description of Artificial Sequence: Synthetic oligonucleotide
gcuaauuauagcuuuaggu

SEQ ID NO: 846361 - RNA, 19 nt, Artificial Sequence
  Description of Artificial Sequence: Synthetic oligonucleotide
gacguuccgaugccgagcc

SEQ ID NO: 846362 - RNA, 19 nt, Artificial Sequence
  Description of Artificial Sequence: Synthetic oligonucleotide
ugaccacuaaguugagcag

SEQ ID NO: 846363 - RNA, 19 nt, Artificial Sequence
  Description of Artificial Sequence: Synthetic oligonucleotide
agugauuccuuuugcagua

SEQ ID NO: 846364 - RNA, 19 nt, Artificial Sequence
  Description of Artificial Sequence: Synthetic oligonucleotide
uaaccagcuucaaucuuac

SEQ ID NO: 846365 - RNA, 19 nt, Artificial Sequence
  Description of Artificial Sequence: Synthetic oligonucleotide
acgagcuugaucaauuuca

SEQ ID NO: 846366 - RNA, 19 nt, Artificial Sequence
  Description of Artificial Sequence: Synthetic oligonucleotide
ugauauccaucccaaccaa

SEQ ID NO: 846367 - RNA, 19 nt, Artificial Sequence
  Description of Artificial Sequence: Synthetic oligonucleotide
uaaucguccuccacagacu

SEQ ID NO: 846368 - RNA, 19 nt, Artificial Sequence
  Description of Artificial Sequence: Synthetic oligonucleotide
gcuugcuuaagaaagugcc

SEQ ID NO: 846369 - RNA, 19 nt, Artificial Sequence
  Description of Artificial Sequence: Synthetic oligonucleotide
caguacuuuuguuuaggac

SEQ ID NO: 846370 - RNA, 19 nt, Artificial Sequence
  Description of Artificial Sequence: Synthetic oligonucleotide
gucaguaugucaucaggca

SEQ ID NO: 846371 - RNA, 19 nt, Artificial Sequence
  Description of Artificial Sequence: Synthetic oligonucleotide
ugcaggagugauuauuaau

SEQ ID NO: 846372 - RNA, 19 nt, Artificial Sequence
  Description of Artificial Sequence: Synthetic oligonucleotide
gaccacuaaguugagcagc

SEQ ID NO: 846373 - RNA, 19 nt, Artificial Sequence
  Description of Artificial Sequence: Synthetic oligonucleotide
uuaauaguagcaggcucac

SEQ ID NO: 846374 - RNA, 19 nt, Artificial Sequence
  Description of Artificial Sequence: Synthetic oligonucleotide
gacgguuugguaguguaac

SEQ ID NO: 846375 - RNA, 19 nt, Artificial Sequence
  Description of Artificial Sequence: Synthetic oligonucleotide
gaaucgaguacaagcuuug

SEQ ID NO: 846376 - RNA, 19 nt, Artificial Sequence
  Description of Artificial Sequence: Synthetic oligonucleotide
guaguguaacagcacagga

SEQ ID NO: 846377 - RNA, 19 nt, Artificial Sequence
  Description of Artificial Sequence: Synthetic oligonucleotide
caucguaguuauagccucg

SEQ ID NO: 846378 - RNA, 19 nt, Artificial Sequence
  Description of Artificial Sequence: Synthetic oligonucleotide
cauaccgcagcauaaaccu

SEQ ID NO: 846379 - RNA, 19 nt, Artificial Sequence
  Description of Artificial Sequence: Synthetic oligonucleotide
aaacagcuacauccgccug

SEQ ID NO: 846380 - RNA, 19 nt, Artificial Sequence
  Description of Artificial Sequence: Synthetic oligonucleotide
guuugguaguguaacagca

SEQ ID NO: 846381 - RNA, 19 nt, Artificial Sequence
  Description of Artificial Sequence: Synthetic oligonucleotide
uagugauaggaacuucaau

SEQ ID NO: 846382 - RNA, 19 nt, Artificial Sequence
  Description of Artificial Sequence: Synthetic oligonucleotide
ccaaucaacagguucauca

SEQ ID NO: 846383 - RNA, 19 nt, Artificial Sequence
  Description of Artificial Sequence: Synthetic oligonucleotide
caucaugcagagugauucc

SEQ ID NO: 846384 - RNA, 19 nt, Artificial Sequence
  Description of Artificial Sequence: Synthetic oligonucleotide
cauauggcccaucagagua

SEQ ID NO: 846385 - RNA, 19 nt, Artificial Sequence
  Description of Artificial Sequence: Synthetic oligonucleotide
gguuugguaguguaacagc

SEQ ID NO: 846386 - RNA, 19 nt, Artificial Sequence
  Description of Artificial Sequence: Synthetic oligonucleotide
ggaaauccuuuagugauag

SEQ ID NO: 846387 - RNA, 19 nt, Artificial Sequence
  Description of Artificial Sequence: Synthetic oligonucleotide
uuacauuacccagaagaua

SEQ ID NO: 846388 - RNA, 19 nt, Artificial Sequence
  Description of Artificial Sequence: Synthetic oligonucleotide
ccaaaguaagacuaacgug

SEQ ID NO: 846389 - RNA, 19 nt, Artificial Sequence
  Description of Artificial Sequence: Synthetic oligonucleotide
gacacuaaucaaucguuua

SEQ ID NO: 846390 - RNA, 19 nt, Artificial Sequence
  Description of Artificial Sequence: Synthetic oligonucleotide
ucacugacgguuugguagu

SEQ ID NO: 846391 - RNA, 19 nt, Artificial Sequence
  Description of Artificial Sequence: Synthetic oligonucleotide
gaugccgagccaucgcggc

SEQ ID NO: 846392 - RNA, 19 nt, Artificial Sequence
  Description of Artificial Sequence: Synthetic oligonucleotide
ugaucaaggcaugaauaaa

SEQ ID NO: 846393 - RNA, 19 nt, Artificial Sequence
  Description of Artificial Sequence: Synthetic oligonucleotide
auaugcagccaacauugau

SEQ ID NO: 846394 - RNA, 19 nt, Artificial Sequence
  Description of Artificial Sequence: Synthetic oligonucleotide
agagaauuagaagauucuu

SEQ ID NO: 846395 - RNA, 19 nt, Artificial Sequence
  Description of Artificial Sequence: Synthetic oligonucleotide
aaagacgagcuugaucaau

SEQ ID NO: 846396 - RNA, 19 nt, Artificial Sequence
  Description of Artificial Sequence: Synthetic oligonucleotide
uggcaucaacaacuaaaac

SEQ ID NO: 846397 - RNA, 19 nt, Artificial Sequence
  Description of Artificial Sequence: Synthetic oligonucleotide
ucccaaccaaaguaagacu

SEQ ID NO: 846398 - RNA, 19 nt, Artificial Sequence
  Description of Artificial Sequence: Synthetic oligonucleotide
gacuaacgugaucuccugc

SEQ ID NO: 846399 - RNA, 19 nt, Artificial Sequence
  Description of Artificial Sequence: Synthetic oligonucleotide
cacggauaaagcgccaacc

SEQ ID NO: 846400 - RNA, 19 nt, Artificial Sequence
  Description of Artificial Sequence: Synthetic oligonucleotide
gccaucgcggcacacaggg

SEQ ID NO: 846401 - RNA, 19 nt, Artificial Sequence
  Description of Artificial Sequence: Synthetic oligonucleotide
aucguaguuauagccucgg

SEQ ID NO: 846402 - RNA, 19 nt, Artificial Sequence
  Description of Artificial Sequence: Synthetic oligonucleotide
agggcgucagccacggucc

SEQ ID NO: 846403 - RNA, 19 nt, Artificial Sequence
  Description of Artificial Sequence: Synthetic oligonucleotide
cgaguacaagcuuugauag

SEQ ID NO: 846404 - RNA, 19 nt, Artificial Sequence
  Description of Artificial Sequence: Synthetic oligonucleotide
gguccucucaaagaacucg

SEQ ID NO: 846405 - RNA, 19 nt, Artificial Sequence
  Description of Artificial Sequence: Synthetic oligonucleotide
cacugagaccacucguagg

SEQ ID NO: 846406 - RNA, 19 nt, Artificial Sequence
  Description of Artificial Sequence: Synthetic oligonucleotide
uugucaugccaacauccau

SEQ ID NO: 846407 - RNA, 19 nt, Artificial Sequence
  Description of Artificial Sequence: Synthetic oligonucleotide
uuagguucucgugucuaca

SEQ ID NO: 846408 - RNA, 19 nt, Artificial Sequence
  Description of Artificial Sequence: Synthetic oligonucleotide
gacgagcuugaucaauuuc

SEQ ID NO: 846409 - RNA, 19 nt, Artificial Sequence
  Description of Artificial Sequence: Synthetic oligonucleotide
ugaugauauccaucccaac

SEQ ID NO: 846410 - RNA, 19 nt, Artificial Sequence
  Description of Artificial Sequence: Synthetic oligonucleotide
acgucuaucugcugccuca

SEQ ID NO: 846411 - RNA, 19 nt, Artificial Sequence
  Description of Artificial Sequence: Synthetic oligonucleotide
ucacgucgugaguaaauaa

SEQ ID NO: 846412 - RNA, 19 nt, Artificial Sequence
  Description of Artificial Sequence: Synthetic oligonucleotide
agacuaacgugaucuccug

SEQ ID NO: 846413 - RNA, 19 nt, Artificial Sequence
  Description of Artificial Sequence: Synthetic oligonucleotide
agcucacucgacugugauc

SEQ ID NO: 846414 - RNA, 19 nt, Artificial Sequence
  Description of Artificial Sequence: Synthetic oligonucleotide
gcagccaacauugauuuug

SEQ ID NO: 846415 - RNA, 19 nt, Artificial Sequence
  Description of Artificial Sequence: Synthetic oligonucleotide
ugagaccacucguagggau

SEQ ID NO: 846416 - RNA, 19 nt, Artificial Sequence
  Description of Artificial Sequence: Synthetic oligonucleotide
caauuuaccgaucguacua

SEQ ID NO: 846417 - RNA, 19 nt, Artificial Sequence
  Description of Artificial Sequence: Synthetic oligonucleotide
ugccaauuuaccgaucgua

SEQ ID NO: 846418 - RNA, 19 nt, Artificial Sequence
  Description of Artificial Sequence: Synthetic oligonucleotide
cacgauccuuuauaccagc

SEQ ID NO: 846419 - RNA, 19 nt, Artificial Sequence
  Description of Artificial Sequence: Synthetic oligonucleotide
agcucuaccaacgcauucu

SEQ ID NO: 846420 - RNA, 19 nt, Artificial Sequence
  Description of Artificial Sequence: Synthetic oligonucleotide
gauagguucuuuggggcca

SEQ ID NO: 846421 - RNA, 19 nt, Artificial Sequence
  Description of Artificial Sequence: Synthetic oligonucleotide
agugcccaaguuuuccagu

SEQ ID NO: 846422 - RNA, 19 nt, Artificial Sequence
  Description of Artificial Sequence: Synthetic oligonucleotide
agacuaucuuguuccagaa

SEQ ID NO: 846423 - RNA, 19 nt, Artificial Sequence
  Description of Artificial Sequence: Synthetic oligonucleotide
cuaacgugaucuccugcug

SEQ ID NO: 846424 - RNA, 19 nt, Artificial Sequence
  Description of Artificial Sequence: Synthetic oligonucleotide
ggagccaccauaccgcagc

SEQ ID NO: 846425 - RNA, 19 nt, Artificial Sequence
  Description of Artificial Sequence: Synthetic oligonucleotide
uaaaaccugcuugcuuaag

SEQ ID NO: 846426 - RNA, 19 nt, Artificial Sequence
  Description of Artificial Sequence: Synthetic oligonucleotide
ugcuuaagaaagugcccaa

SEQ ID NO: 846427 - RNA, 19 nt, Artificial Sequence
  Description of Artificial Sequence: Synthetic oligonucleotide
aagacgagcuugaucaauu

SEQ ID NO: 846428 - RNA, 19 nt, Artificial Sequence
  Description of Artificial Sequence: Synthetic oligonucleotide
auauggcccaucagaguac

SEQ ID NO: 846429 - RNA, 19 nt, Artificial Sequence
  Description of Artificial Sequence: Synthetic oligonucleotide
aaucgaguacaagcuuuga

SEQ ID NO: 846430 - RNA, 19 nt, Artificial Sequence
  Description of Artificial Sequence: Synthetic oligonucleotide
cuggacgccccucuguggc

SEQ ID NO: 846431 - RNA, 19 nt, Artificial Sequence
  Description of Artificial Sequence: Synthetic oligonucleotide
cacgucgugaguaaauaaa

SEQ ID NO: 846432 - RNA, 19 nt, Artificial Sequence
  Description of Artificial Sequence: Synthetic oligonucleotide
gacugucucacugcauuug

SEQ ID NO: 846433 - RNA, 19 nt, Artificial Sequence
  Description of Artificial Sequence: Synthetic oligonucleotide
agaaagugcccaaguuuuc

SEQ ID NO: 846434 - RNA, 19 nt, Artificial Sequence
  Description of Artificial Sequence: Synthetic oligonucleotide
ccauaccgcagcauaaacc

SEQ ID NO: 846435 - RNA, 19 nt, Artificial Sequence
  Description of Artificial Sequence: Synthetic oligonucleotide
cucucaugugaucaaggca

SEQ ID NO: 846436 - RNA, 19 nt, Artificial Sequence
  Description of Artificial Sequence: Synthetic oligonucleotide
ucaugugaucaaggcauga

SEQ ID NO: 846437 - RNA, 19 nt, Artificial Sequence
  Description of Artificial Sequence: Synthetic oligonucleotide
cuaacagucggucaccagu

SEQ ID NO: 846438 - RNA, 19 nt, Artificial Sequence
  Description of Artificial Sequence: Synthetic oligonucleotide
guaagacuaacgugaucuc

SEQ ID NO: 846439 - RNA, 19 nt, Artificial Sequence
  Description of Artificial Sequence: Synthetic oligonucleotide
ucggacguuccgaugccga

SEQ ID NO: 846440 - RNA, 19 nt, Artificial Sequence
  Description of Artificial Sequence: Synthetic oligonucleotide
ugacgguuugguaguguaa

SEQ ID NO: 846441 - RNA, 19 nt, Artificial Sequence
  Description of Artificial Sequence: Synthetic oligonucleotide
gaaauacaauaaucguccu

SEQ ID NO: 846442 - RNA, 19 nt, Artificial Sequence
  Description of Artificial Sequence: Synthetic oligonucleotide
aauaugcagccaacauuga

SEQ ID NO: 846443 - RNA, 19 nt, Artificial Sequence
  Description of Artificial Sequence: Synthetic oligonucleotide
ugccaacauccauuguuac

SEQ ID NO: 846444 - RNA, 19 nt, Artificial Sequence
  Description of Artificial Sequence: Synthetic oligonucleotide
uccgaugccgagccaucgc

SEQ ID NO: 846445 - RNA, 19 nt, Artificial Sequence
  Description of Artificial Sequence: Synthetic oligonucleotide
uugccaauuuaccgaucgu

SEQ ID NO: 846446 - RNA, 19 nt, Artificial Sequence
  Description of Artificial Sequence: Synthetic oligonucleotide
gaccucucucaugugauca

SEQ ID NO: 846447 - RNA, 19 nt, Artificial Sequence
  Description of Artificial Sequence: Synthetic oligonucleotide
uuguucuaauaaacacgau

SEQ ID NO: 846448 - RNA, 19 nt, Artificial Sequence
  Description of Artificial Sequence: Synthetic oligonucleotide
cauccgacacacauaaucu

SEQ ID NO: 846449 - RNA, 19 nt, Artificial Sequence
  Description of Artificial Sequence: Synthetic oligonucleotide
uggcagcuaauuauagcuu

SEQ ID NO: 846450 - RNA, 19 nt, Artificial Sequence
  Description of Artificial Sequence: Synthetic oligonucleotide
gcaguacaaguuucauugg

SEQ ID NO: 846451 - RNA, 19 nt, Artificial Sequence
  Description of Artificial Sequence: Synthetic oligonucleotide
cagggcgucagccacgguc

SEQ ID NO: 846452 - RNA, 19 nt, Artificial Sequence
  Description of Artificial Sequence: Synthetic oligonucleotide
ucguaguuauagccucgga

SEQ ID NO: 846453 - RNA, 19 nt, Artificial Sequence
  Description of Artificial Sequence: Synthetic oligonucleotide
agaagagaauuagaagauu

SEQ ID NO: 846454 - RNA, 19 nt, Artificial Sequence
  Description of Artificial Sequence: Synthetic oligonucleotide
aucaugcagagugauuccu

SEQ ID NO: 846455 - RNA, 19 nt, Artificial Sequence
  Description of Artificial Sequence: Synthetic oligonucleotide
uugcaggagugauuauuaa

SEQ ID NO: 846456 - RNA, 19 nt, Artificial Sequence
  Description of Artificial Sequence: Synthetic oligonucleotide
acgguuugguaguguaaca

SEQ ID NO: 846457 - RNA, 19 nt, Artificial Sequence
  Description of Artificial Sequence: Synthetic oligonucleotide
cucguagggauaaaagcua

SEQ ID NO: 846458 - RNA, 19 nt, Artificial Sequence
  Description of Artificial Sequence: Synthetic oligonucleotide
ccgaucguacuaaaaggcc

SEQ ID NO: 846459 - RNA, 19 nt, Artificial Sequence
  Description of Artificial Sequence: Synthetic oligonucleotide
gcuuagacacggauaaagc

SEQ ID NO: 846460 - RNA, 19 nt, Artificial Sequence
  Description of Artificial Sequence: Synthetic oligonucleotide
cauugcuaacagucgguca

SEQ ID NO: 846461 - RNA, 19 nt, Artificial Sequence
  Description of Artificial Sequence: Synthetic oligonucleotide
agacccaugcauaugcaaa

SEQ ID NO: 846462 - RNA, 19 nt, Artificial Sequence
  Description of Artificial Sequence: Synthetic oligonucleotide
aacuacugacagagccuuc

SEQ ID NO: 846463 - RNA, 19 nt, Artificial Sequence
  Description of Artificial Sequence: Synthetic oligonucleotide
cguaguuauagccucggac

SEQ ID NO: 846464 - RNA, 19 nt, Artificial Sequence
  Description of Artificial Sequence: Synthetic oligonucleotide
auccgacacacauaaucua

SEQ ID NO: 846465 - RNA, 19 nt, Artificial Sequence
  Description of Artificial Sequence: Synthetic oligonucleotide
aucuuguuccagaacuacu

SEQ ID NO: 846466 - RNA, 19 nt, Artificial Sequence
  Description of Artificial Sequence: Synthetic oligonucleotide
aggacacuaaucaaucguu

SEQ ID NO: 846467 - RNA, 19 nt, Artificial Sequence
  Description of Artificial Sequence: Synthetic oligonucleotide
cucgacugugaucuuguga

SEQ ID NO: 846468 - RNA, 19 nt, Artificial Sequence
  Description of Artificial Sequence: Synthetic oligonucleotide
ucucgagucuguccuccaa

SEQ ID NO: 846469 - RNA, 19 nt, Artificial Sequence
  Description of Artificial Sequence: Synthetic oligonucleotide
ccacucguagggauaaaag

SEQ ID NO: 846470 - RNA, 19 nt, Artificial Sequence
  Description of Artificial Sequence: Synthetic oligonucleotide
gguucucgugucuacaaaa

SEQ ID NO: 846471 - RNA, 19 nt, Artificial Sequence
  Description of Artificial Sequence: Synthetic oligonucleotide
uggagccaccauaccgcag

SEQ ID NO: 846472 - RNA, 19 nt, Artificial Sequence
  Description of Artificial Sequence: Synthetic oligonucleotide
acucggcuuagacacggau

SEQ ID NO: 846473 - RNA, 19 nt, Artificial Sequence
  Description of Artificial Sequence: Synthetic oligonucleotide
ugacugucucacugcauuu

SEQ ID NO: 846474 - RNA, 19 nt, Artificial Sequence
  Description of Artificial Sequence: Synthetic oligonucleotide
agucucauccaagacccau

SEQ ID NO: 846475 - RNA, 19 nt, Artificial Sequence
  Description of Artificial Sequence: Synthetic oligonucleotide
gcuggcaucaacaacuaaa

SEQ ID NO: 846476 - RNA, 19 nt, Artificial Sequence
  Description of Artificial Sequence: Synthetic oligonucleotide
gccaauuuaccgaucguac

SEQ ID NO: 846477 - RNA, 19 nt, Artificial Sequence
  Description of Artificial Sequence: Synthetic oligonucleotide
gcagcuauuguggagccac

SEQ ID NO: 846478 - RNA, 19 nt, Artificial Sequence
  Description of Artificial Sequence: Synthetic oligonucleotide
gccucggacguuccgaugc

SEQ ID NO: 846479 - RNA, 19 nt, Artificial Sequence
  Description of Artificial Sequence: Synthetic oligonucleotide
agcuauuguggagccacca

SEQ ID NO: 846480 - RNA, 19 nt, Artificial Sequence
  Description of Artificial Sequence: Synthetic oligonucleotide
guagggauaaaagcuacau

SEQ ID NO: 846481 - RNA, 19 nt, Artificial Sequence
  Description of Artificial Sequence: Synthetic oligonucleotide
agaacucggcuuagacacg

SEQ ID NO: 846482 - RNA, 19 nt, Artificial Sequence
  Description of Artificial Sequence: Synthetic oligonucleotide
guugucacgucgugaguaa

SEQ ID NO: 846483 - RNA, 19 nt, Artificial Sequence
  Description of Artificial Sequence: Synthetic oligonucleotide
agacgagcuugaucaauuu

SEQ ID NO: 846484 - RNA, 19 nt, Artificial Sequence
  Description of Artificial Sequence: Synthetic oligonucleotide
auaccgcagcauaaaccuc

SEQ ID NO: 846485 - RNA, 19 nt, Artificial Sequence
  Description of Artificial Sequence: Synthetic oligonucleotide
uaauaguagcaggcucacu

SEQ ID NO: 846486 - RNA, 19 nt, Artificial Sequence
  Description of Artificial Sequence: Synthetic oligonucleotide
uccgggcucugaaucgagu

SEQ ID NO: 846487 - RNA, 19 nt, Artificial Sequence
  Description of Artificial Sequence: Synthetic oligonucleotide
aucguacuaaaaggccaug

SEQ ID NO: 846488 - RNA, 19 nt, Artificial Sequence
  Description of Artificial Sequence: Synthetic oligonucleotide
aggaaucaauuuguucuaa

SEQ ID NO: 846489 - RNA, 19 nt, Artificial Sequence
  Description of Artificial Sequence: Synthetic oligonucleotide
acucgacugugaucuugug

SEQ ID NO: 846490 - RNA, 19 nt, Artificial Sequence
  Description of Artificial Sequence: Synthetic oligonucleotide
agaguacuuuucccagcau

SEQ ID NO: 846491 - RNA, 19 nt, Artificial Sequence
  Description of Artificial Sequence: Synthetic oligonucleotide
accacucguagggauaaaa

SEQ ID NO: 846492 - RNA, 19 nt, Artificial Sequence
  Description of Artificial Sequence: Synthetic oligonucleotide
cacagggcgucagccacgg

SEQ ID NO: 846493 - RNA, 19 nt, Artificial Sequence
  Description of Artificial Sequence: Synthetic oligonucleotide
gaucguacuaaaaggccau

SEQ ID NO: 846494 - RNA, 19 nt, Artificial Sequence
  Description of Artificial Sequence: Synthetic oligonucleotide
agcaggcucacugacgguu

SEQ ID NO: 846495 - RNA, 19 nt, Artificial Sequence
  Description of Artificial Sequence: Synthetic oligonucleotide
caagacccaugcauaugca

SEQ ID NO: 846496 - RNA, 19 nt, Artificial Sequence
  Description of Artificial Sequence: Synthetic oligonucleotide
gaccaaugaccacuaaguu

SEQ ID NO: 846497 - RNA, 19 nt, Artificial Sequence
  Description of Artificial Sequence: Synthetic oligonucleotide
gcucuaccaacgcauucug

SEQ ID NO: 846498 - RNA, 19 nt, Artificial Sequence
  Description of Artificial Sequence: Synthetic oligonucleotide
cucggcuuagacacggaua

SEQ ID NO: 846499 - RNA, 19 nt, Artificial Sequence
  Description of Artificial Sequence: Synthetic oligonucleotide
cugacgguuugguagugua

SEQ ID NO: 846500 - RNA, 19 nt, Artificial Sequence
  Description of Artificial Sequence: Synthetic oligonucleotide
gacacggauaaagcgccaa

SEQ ID NO: 846501 - RNA, 19 nt, Artificial Sequence
  Description of Artificial Sequence: Synthetic oligonucleotide
uagccucggacguuccgau

SEQ ID NO: 846502 - RNA, 19 nt, Artificial Sequence
  Description of Artificial Sequence: Synthetic oligonucleotide
gauccgggcucugaaucga

SEQ ID NO: 846503 - RNA, 19 nt, Artificial Sequence
  Description of Artificial Sequence: Synthetic oligonucleotide
accacugagaccacucgua

SEQ ID NO: 846504 - RNA, 19 nt, Artificial Sequence
  Description of Artificial Sequence: Synthetic oligonucleotide
cugucucacugcauuugga

SEQ ID NO: 846505 - RNA, 19 nt, Artificial Sequence
  Description of Artificial Sequence: Synthetic oligonucleotide
cacgucuaucugcugccuc

SEQ ID NO: 846506 - RNA, 19 nt, Artificial Sequence
  Description of Artificial Sequence: Synthetic oligonucleotide
cggauaaagcgccaaccgc

SEQ ID NO: 846507 - RNA, 19 nt, Artificial Sequence
  Description of Artificial Sequence: Synthetic oligonucleotide
cucggacguuccgaugccg

SEQ ID NO: 846508 - RNA, 19 nt, Artificial Sequence
  Description of Artificial Sequence: Synthetic oligonucleotide
acgauccuuuauaccagcu

SEQ ID NO: 846509 - RNA, 19 nt, Artificial Sequence
  Description of Artificial Sequence: Synthetic oligonucleotide
ccacugagaccacucguag

SEQ ID NO: 846510 - RNA, 19 nt, Artificial Sequence
  Description of Artificial Sequence: Synthetic oligonucleotide
guggagccaccauaccgca

SEQ ID NO: 846511 - RNA, 19 nt, Artificial Sequence
  Description of Artificial Sequence: Synthetic oligonucleotide
acugacgguuugguagugu

SEQ ID NO: 846512 - RNA, 19 nt, Artificial Sequence
  Description of Artificial Sequence: Synthetic oligonucleotide
cauccauuguuacuccccu

SEQ ID NO: 846513 - RNA, 19 nt, Artificial Sequence
  Description of Artificial Sequence: Synthetic oligonucleotide
aguuauagccucggacguu

SEQ ID NO: 846514 - RNA, 19 nt, Artificial Sequence
  Description of Artificial Sequence: Synthetic oligonucleotide
aggcaugaauaaagacgag

SEQ ID NO: 846515 - RNA, 19 nt, Artificial Sequence
  Description of Artificial Sequence: Synthetic oligonucleotide
ccgaugccgagccaucgcg

SEQ ID NO: 846516 - RNA, 19 nt, Artificial Sequence
  Description of Artificial Sequence: Synthetic oligonucleotide
cugcauuuggaaacauggu

SEQ ID NO: 846517 - RNA, 19 nt, Artificial Sequence
  Description of Artificial Sequence: Synthetic oligonucleotide
cugacugucucacugcauu

SEQ ID NO: 846518 - RNA, 19 nt, Artificial Sequence
  Description of Artificial Sequence: Synthetic oligonucleotide
gucacgucgugaguaaaua

SEQ ID NO: 846519 - RNA, 19 nt, Artificial Sequence
  Description of Artificial Sequence: Synthetic oligonucleotide
cgaucguacuaaaaggcca

SEQ ID NO: 846520 - RNA, 19 nt, Artificial Sequence
  Description of Artificial Sequence: Synthetic oligonucleotide
auccauuguuacuccccuu

SEQ ID NO: 846521 - RNA, 19 nt, Artificial Sequence
  Description of Artificial Sequence: Synthetic oligonucleotide
cagcacaggaaauccuuua

SEQ ID NO: 846522 - RNA, 19 nt, Artificial Sequence
  Description of Artificial Sequence: Synthetic oligonucleotide
gguugucacgucgugagua

SEQ ID NO: 846523 - RNA, 19 nt, Artificial Sequence
  Description of Artificial Sequence: Synthetic oligonucleotide
augccgagccaucgcggca

SEQ ID NO: 846524 - RNA, 19 nt, Artificial Sequence
  Description of Artificial Sequence: Synthetic oligonucleotide
ugcucucgagucuguccuc

SEQ ID NO: 846525 - RNA, 19 nt, Artificial Sequence
  Description of Artificial Sequence: Synthetic oligonucleotide
gcccaucacucuuugaucu

SEQ ID NO: 846526 - RNA, 19 nt, Artificial Sequence
  Description of Artificial Sequence: Synthetic oligonucleotide
gagaccacucguagggaua

SEQ ID NO: 846527 - RNA, 19 nt, Artificial Sequence
  Description of Artificial Sequence: Synthetic oligonucleotide
cuggagcauccauuaaugu

SEQ ID NO: 846528 - RNA, 19 nt, Artificial Sequence
  Description of Artificial Sequence: Synthetic oligonucleotide
agccucggacguuccgaug

SEQ ID NO: 846529 - RNA, 19 nt, Artificial Sequence
  Description of Artificial Sequence: Synthetic oligonucleotide
gguucaucaugcagaguga

SEQ ID NO: 846530 - RNA, 19 nt, Artificial Sequence
  Description of Artificial Sequence: Synthetic oligonucleotide
gcauugcuaacagucgguc

SEQ ID NO: 846531 - RNA, 19 nt, Artificial Sequence
  Description of Artificial Sequence: Synthetic oligonucleotide
ggcugacugucucacugca

SEQ ID NO: 846532 - RNA, 19 nt, Artificial Sequence
  Description of Artificial Sequence: Synthetic oligonucleotide
gaugaggauccgggcucug

SEQ ID NO: 846533 - RNA, 19 nt, Artificial Sequence
  Description of Artificial Sequence: Synthetic oligonucleotide
ccaguacuuuuguuuagga

SEQ ID NO: 846534 - RNA, 19 nt, Artificial Sequence
  Description of Artificial Sequence: Synthetic oligonucleotide
ggacguuccgaugccgagc

SEQ ID NO: 846535 - RNA, 19 nt, Artificial Sequence
  Description of Artificial Sequence: Synthetic oligonucleotide
cgguuugguaguguaacag

SEQ ID NO: 846536 - RNA, 19 nt, Artificial Sequence
  Description of Artificial Sequence: Synthetic oligonucleotide
gggcucugaaucgaguaca

SEQ ID NO: 846537 - RNA, 19 nt, Artificial Sequence
  Description of Artificial Sequence: Synthetic oligonucleotide
ggcagcuaauuauagcuuu

SEQ ID NO: 846538 - RNA, 19 nt, Artificial Sequence
  Description of Artificial Sequence: Synthetic oligonucleotide
cuacagggguugucacguc

SEQ ID NO: 846539 - RNA, 19 nt, Artificial Sequence
  Description of Artificial Sequence: Synthetic oligonucleotide
uagcaggcucacugacggu

SEQ ID NO: 846540 - RNA, 19 nt, Artificial Sequence
  Description of Artificial Sequence: Synthetic oligonucleotide
ccagaagauaaagcauaug

SEQ ID NO: 846541 - RNA, 19 nt, Artificial Sequence
  Description of Artificial Sequence: Synthetic oligonucleotide
agguucuuuggggccacaa

SEQ ID NO: 846542 - RNA, 19 nt, Artificial Sequence
  Description of Artificial Sequence: Synthetic oligonucleotide
gcucugaaucgaguacaag

SEQ ID NO: 846543 - RNA, 19 nt, Artificial Sequence
  Description of Artificial Sequence: Synthetic oligonucleotide
gagcucacucgacugugau

SEQ ID NO: 846544 - RNA, 19 nt, Artificial Sequence
  Description of Artificial Sequence: Synthetic oligonucleotide
agccaucgcggcacacagg

SEQ ID NO: 846545 - RNA, 19 nt, Artificial Sequence
  Description of Artificial Sequence: Synthetic oligonucleotide
gccaacauccauuguuacu

SEQ ID NO: 846546 - RNA, 19 nt, Artificial Sequence
  Description of Artificial Sequence: Synthetic oligonucleotide
ccaauuuaccgaucguacu

SEQ ID NO: 846547 - RNA, 19 nt, Artificial Sequence
  Description of Artificial Sequence: Synthetic oligonucleotide
cugaaucgaguacaagcuu

SEQ ID NO: 846548 - RNA, 19 nt, Artificial Sequence
  Description of Artificial Sequence: Synthetic oligonucleotide
ggaccucucucaugugauc

SEQ ID NO: 846549 - RNA, 19 nt, Artificial Sequence
  Description of Artificial Sequence: Synthetic oligonucleotide
auccgggcucugaaucgag

SEQ ID NO: 846550 - RNA, 19 nt, Artificial Sequence
  Description of Artificial Sequence: Synthetic oligonucleotide
caccauaccgcagcauaaa

SEQ ID NO: 846551 - RNA, 19 nt, Artificial Sequence
  Description of Artificial Sequence: Synthetic oligonucleotide
gaagcucuaccaacgcauu

SEQ ID NO: 846552 - RNA, 19 nt, Artificial Sequence
  Description of Artificial Sequence: Synthetic oligonucleotide
cacugacgguuugguagug

SEQ ID NO: 846553 - RNA, 19 nt, Artificial Sequence
  Description of Artificial Sequence: Synthetic oligonucleotide
cucucgagucuguccucca

SEQ ID NO: 846554 - RNA, 19 nt, Artificial Sequence
  Description of Artificial Sequence: Synthetic oligonucleotide
caugaccaaugaccacuaa

SEQ ID NO: 846555 - RNA, 19 nt, Artificial Sequence
  Description of Artificial Sequence: Synthetic oligonucleotide
gcagcuaauuauagcuuua

SEQ ID NO: 846556 - RNA, 19 nt, Artificial Sequence
  Description of Artificial Sequence: Synthetic oligonucleotide
gcuggugagcucacucgac

SEQ ID NO: 846557 - RNA, 19 nt, Artificial Sequence
  Description of Artificial Sequence: Synthetic oligonucleotide
gacgccccucuguggcuga

SEQ ID NO: 846558 - RNA, 19 nt, Artificial Sequence
  Description of Artificial Sequence: Synthetic oligonucleotide
ccucggacguuccgaugcc

SEQ ID NO: 846559 - RNA, 19 nt, Artificial Sequence
  Description of Artificial Sequence: Synthetic oligonucleotide
ccugcuugcuuaagaaagu

SEQ ID NO: 846560 - RNA, 19 nt, Artificial Sequence
  Description of Artificial Sequence: Synthetic oligonucleotide
caucaacugcacacuguuu

SEQ ID NO: 846561 - RNA, 19 nt, Artificial Sequence
  Description of Artificial Sequence: Synthetic oligonucleotide
ggcauugcuaacagucggu

SEQ ID NO: 846562 - RNA, 19 nt, Artificial Sequence
  Description of Artificial Sequence: Synthetic oligonucleotide
ggcucugaaucgaguacaa

SEQ ID NO: 846563 - RNA, 19 nt, Artificial Sequence
  Description of Artificial Sequence: Synthetic oligonucleotide
cgucgugaguaaauaaacu

SEQ ID NO: 846564 - RNA, 19 nt, Artificial Sequence
  Description of Artificial Sequence: Synthetic oligonucleotide
ggacacuaaucaaucguuu

SEQ ID NO: 846565 - RNA, 19 nt, Artificial Sequence
  Description of Artificial Sequence: Synthetic oligonucleotide
guacaagcuuugauagguu

SEQ ID NO: 846566 - RNA, 19 nt, Artificial Sequence
  Description of Artificial Sequence: Synthetic oligonucleotide
acgccccucuguggcugac

SEQ ID NO: 846567 - RNA, 19 nt, Artificial Sequence
  Description of Artificial Sequence: Synthetic oligonucleotide
cguuuaauaguagcaggcu

SEQ ID NO: 846568 - RNA, 19 nt, Artificial Sequence
  Description of Artificial Sequence: Synthetic oligonucleotide
ccgggcucugaaucgagua

SEQ ID NO: 846569 - RNA, 19 nt, Artificial Sequence
  Description of Artificial Sequence: Synthetic oligonucleotide
gaccacucguagggauaaa

SEQ ID NO: 846570 - RNA, 19 nt, Artificial Sequence
  Description of Artificial Sequence: Synthetic oligonucleotide
ccuuuagugauaggaacuu

SEQ ID NO: 846571 - RNA, 19 nt, Artificial Sequence
  Description of Artificial Sequence: Synthetic oligonucleotide
ucccgcccucgccgcuucu

SEQ ID NO: 846572 - RNA, 19 nt, Artificial Sequence
  Description of Artificial Sequence: Synthetic oligonucleotide
cgugucuacaaaacaucau

SEQ ID NO: 846573 - RNA, 19 nt, Artificial Sequence
  Description of Artificial Sequence: Synthetic oligonucleotide
gcgucagccacgguccucu

SEQ ID NO: 846574 - RNA, 19 nt, Artificial Sequence
  Description of Artificial Sequence: Synthetic oligonucleotide
ccgagccaucgcggcacac

SEQ ID NO: 846575 - RNA, 19 nt, Artificial Sequence
  Description of Artificial Sequence: Synthetic oligonucleotide
gggcgucagccacgguccu

SEQ ID NO: 846576 - RNA, 19 nt, Artificial Sequence
  Description of Artificial Sequence: Synthetic oligonucleotide
cggcuuagacacggauaaa

SEQ ID NO: 846577 - RNA, 19 nt, Artificial Sequence
  Description of Artificial Sequence: Synthetic oligonucleotide
ccaacgcauucuggcccuu

SEQ ID NO: 846578 - RNA, 19 nt, Artificial Sequence
  Description of Artificial Sequence: Synthetic oligonucleotide
aagaguauggaugagaacg

SEQ ID NO: 846579 - RNA, 19 nt, Artificial Sequence
  Description of Artificial Sequence: Synthetic oligonucleotide
aacuuaggauaucugaugc

SEQ ID NO: 846580 - RNA, 19 nt, Artificial Sequence
  Description of Artificial Sequence: Synthetic oligonucleotide
ucugguaugauccuauggg

SEQ ID NO: 846581 - RNA, 19 nt, Artificial Sequence
  Description of Artificial Sequence: Synthetic oligonucleotide
aacauauccaacuacuaca

SEQ ID NO: 846582 - RNA, 19 nt, Artificial Sequence
  Description of Artificial Sequence: Synthetic oligonucleotide
uuucuauccaaacaaaaga

SEQ ID NO: 846583 - RNA, 19 nt, Artificial Sequence
  Description of Artificial Sequence: Synthetic oligonucleotide
acuacuacagucuaacauc

SEQ ID NO: 846584 - RNA, 19 nt, Artificial Sequence
  Description of Artificial Sequence: Synthetic oligonucleotide
auauccaacuacuacaguc

SEQ ID NO: 846585 - RNA, 19 nt, Artificial Sequence
  Description of Artificial Sequence: Synthetic oligonucleotide
uaccccaucagaaagaagc

SEQ ID NO: 846586 - RNA, 19 nt, Artificial Sequence
  Description of Artificial Sequence: Synthetic oligonucleotide
aauacugacgauaaagcuc

SEQ ID NO: 846587 - RNA, 19 nt, Artificial Sequence
  Description of Artificial Sequence: Synthetic oligonucleotide
aaucgggccaggcagagcg

SEQ ID NO: 846588 - RNA, 19 nt, Artificial Sequence
  Description of Artificial Sequence: Synthetic oligonucleotide
ucaaaaguuaugaaugcug

SEQ ID NO: 846589 - RNA, 19 nt, Artificial Sequence
  Description of Artificial Sequence: Synthetic oligonucleotide
aaguuaugaaugcuguccg

SEQ ID NO: 846590 - RNA, 19 nt, Artificial Sequence
  Description of Artificial Sequence: Synthetic oligonucleotide
aaauacugacgauaaagcu

SEQ ID NO: 846591 - RNA, 19 nt, Artificial Sequence
  Description of Artificial Sequence: Synthetic oligonucleotide
acagucuaacaucaaaugg

SEQ ID NO: 846592 - RNA, 19 nt, Artificial Sequence
  Description of Artificial Sequence: Synthetic oligonucleotide
guuaaggaagaucaggucc

SEQ ID NO: 846593 - RNA, 19 nt, Artificial Sequence
  Description of Artificial Sequence: Synthetic oligonucleotide
aaucugguuugcuuagccc

SEQ ID NO: 846594 - RNA, 19 nt, Artificial Sequence
  Description of Artificial Sequence: Synthetic oligonucleotide
auacugacgauaaagcucc

SEQ ID NO: 846595 - RNA, 19 nt, Artificial Sequence
  Description of Artificial Sequence: Synthetic oligonucleotide
aaaaguuaugaaugcuguc

SEQ ID NO: 846596 - RNA, 19 nt, Artificial Sequence
  Description of Artificial Sequence: Synthetic oligonucleotide
cuacuuaggaugaaguggg

SEQ ID NO: 846597 - RNA, 19 nt, Artificial Sequence
  Description of Artificial Sequence: Synthetic oligonucleotide
aaacuuaggauaucugaug

SEQ ID NO: 846598 - RNA, 19 nt, Artificial Sequence
  Description of Artificial Sequence: Synthetic oligonucleotide
uuucaaacgcucuuuagca

SEQ ID NO: 846599 - RNA, 19 nt, Artificial Sequence
  Description of Artificial Sequence: Synthetic oligonucleotide
aauacuuauuucuauccaa

SEQ ID NO: 846600 - RNA, 19 nt, Artificial Sequence
  Description of Artificial Sequence: Synthetic oligonucleotide
ucaaacgcucuuuagcacg

SEQ ID NO: 846601 - RNA, 19 nt, Artificial Sequence
  Description of Artificial Sequence: Synthetic oligonucleotide
cagaucagaacauaaacug

SEQ ID NO: 846602 - RNA, 19 nt, Artificial Sequence
  Description of Artificial Sequence: Synthetic oligonucleotide
aaauacuuauuucuaucca

SEQ ID NO: 846603 - RNA, 19 nt, Artificial Sequence
  Description of Artificial Sequence: Synthetic oligonucleotide
cuuaggaugaagugggagg

SEQ ID NO: 846604 - RNA, 19 nt, Artificial Sequence
  Description of Artificial Sequence: Synthetic oligonucleotide
aacuacuacagucuaacau

SEQ ID NO: 846605 - RNA, 19 nt, Artificial Sequence
  Description of Artificial Sequence: Synthetic oligonucleotide
aaguuaauaccuguggaag

SEQ ID NO: 846606 - RNA, 19 nt, Artificial Sequence
  Description of Artificial Sequence: Synthetic oligonucleotide
uauuccuccaaauccaggc

SEQ ID NO: 846607 - RNA, 19 nt, Artificial Sequence
  Description of Artificial Sequence: Synthetic oligonucleotide
aaaggaguuauccuuugga

SEQ ID NO: 846608 - RNA, 19 nt, Artificial Sequence
  Description of Artificial Sequence: Synthetic oligonucleotide
uuuuaucaacaacacaaga

SEQ ID NO: 846609 - RNA, 19 nt, Artificial Sequence
  Description of Artificial Sequence: Synthetic oligonucleotide
gauaaagcuccucucuacg

SEQ ID NO: 846610 - RNA, 19 nt, Artificial Sequence
  Description of Artificial Sequence: Synthetic oligonucleotide
aauggucccuaccuccugc

SEQ ID NO: 846611 - RNA, 19 nt, Artificial Sequence
  Description of Artificial Sequence: Synthetic oligonucleotide
uuugucucaaaaguuauga

SEQ ID NO: 846612 - RNA, 19 nt, Artificial Sequence
  Description of Artificial Sequence: Synthetic oligonucleotide
uuaaggaagaucaggucca

SEQ ID NO: 846613 - RNA, 19 nt, Artificial Sequence
  Description of Artificial Sequence: Synthetic oligonucleotide
aaugcuguccgucucagaa

SEQ ID NO: 846614 - RNA, 19 nt, Artificial Sequence
  Description of Artificial Sequence: Synthetic oligonucleotide
aaaaggaguuauccuuugg

SEQ ID NO: 846615 - RNA, 19 nt, Artificial Sequence
  Description of Artificial Sequence: Synthetic oligonucleotide
cauauaacaaacagaucag

SEQ ID NO: 846616 - RNA, 19 nt, Artificial Sequence
  Description of Artificial Sequence: Synthetic oligonucleotide
gugguguucaaacugaggc

SEQ ID NO: 846617 - RNA, 19 nt, Artificial Sequence
  Description of Artificial Sequence: Synthetic oligonucleotide
gaagauacaggccucuggc

SEQ ID NO: 846618 - RNA, 19 nt, Artificial Sequence
  Description of Artificial Sequence: Synthetic oligonucleotide
uguuaagugguaagcaaca

SEQ ID NO: 846619 - RNA, 19 nt, Artificial Sequence
  Description of Artificial Sequence: Synthetic oligonucleotide
agucgagugacccugucgg

SEQ ID NO: 846620 - RNA, 19 nt, Artificial Sequence
  Description of Artificial Sequence: Synthetic oligonucleotide
uuaggaugaagugggaggg

SEQ ID NO: 846621 - RNA, 19 nt, Artificial Sequence
  Description of Artificial Sequence: Synthetic oligonucleotide
aaaugagcagucuuuccca

SEQ ID NO: 846622 - RNA, 19 nt, Artificial Sequence
  Description of Artificial Sequence: Synthetic oligonucleotide
uauccaacuacuacagucu

SEQ ID NO: 846623 - RNA, 19 nt, Artificial Sequence
  Description of Artificial Sequence: Synthetic oligonucleotide
caagggaacaagaguaugg

SEQ ID NO: 846624 - RNA, 19 nt, Artificial Sequence
  Description of Artificial Sequence: Synthetic oligonucleotide
aauucuggaugacgugugg

SEQ ID NO: 846625 - RNA, 19 nt, Artificial Sequence
  Description of Artificial Sequence: Synthetic oligonucleotide
aggaguuauccuuuggauc

SEQ ID NO: 846626 - RNA, 19 nt, Artificial Sequence
  Description of Artificial Sequence: Synthetic oligonucleotide
guaauuauuucauuuuauc

SEQ ID NO: 846627 - RNA, 19 nt, Artificial Sequence
  Description of Artificial Sequence: Synthetic oligonucleotide
gucucaaaaguuaugaaug

SEQ ID NO: 846628 - RNA, 19 nt, Artificial Sequence
  Description of Artificial Sequence: Synthetic oligonucleotide
ggaguuauccuuuggaucc

SEQ ID NO: 846629 - RNA, 19 nt, Artificial Sequence
  Description of Artificial Sequence: Synthetic oligonucleotide
gaacauauccaacuacuac

SEQ ID NO: 846630 - RNA, 19 nt, Artificial Sequence
  Description of Artificial Sequence: Synthetic oligonucleotide
aauaacagagcaauccaca

SEQ ID NO: 846631 - RNA, 19 nt, Artificial Sequence
  Description of Artificial Sequence: Synthetic oligonucleotide
auaacagagcaauccacag

SEQ ID NO: 846632 - RNA, 19 nt, Artificial Sequence
  Description of Artificial Sequence: Synthetic oligonucleotide
agaacauaaacugcugccg

SEQ ID NO: 846633 - RNA, 19 nt, Artificial Sequence
  Description of Artificial Sequence: Synthetic oligonucleotide
gagccuuuuguacacuugg

SEQ ID NO: 846634 - RNA, 19 nt, Artificial Sequence
  Description of Artificial Sequence: Synthetic oligonucleotide
uuccucacguuucaaacgc

SEQ ID NO: 846635 - RNA, 19 nt, Artificial Sequence
  Description of Artificial Sequence: Synthetic oligonucleotide
ccauauaacaaacagauca

SEQ ID NO: 846636 - RNA, 19 nt, Artificial Sequence
  Description of Artificial Sequence: Synthetic oligonucleotide
agaucagaacauaaacugc

SEQ ID NO: 846637 - RNA, 19 nt, Artificial Sequence
  Description of Artificial Sequence: Synthetic oligonucleotide
agaggggaagcacuuggcc

SEQ ID NO: 846638 - RNA, 19 nt, Artificial Sequence
  Description of Artificial Sequence: Synthetic oligonucleotide
cagaacauaaacugcugcc

SEQ ID NO: 846639 - RNA, 19 nt, Artificial Sequence
  Description of Artificial Sequence: Synthetic oligonucleotide
acaauaacagagcaaucca

SEQ ID NO: 846640 - RNA, 19 nt, Artificial Sequence
  Description of Artificial Sequence: Synthetic oligonucleotide
aagaacacuuccaaacauc

SEQ ID NO: 846641 - RNA, 19 nt, Artificial Sequence
  Description of Artificial Sequence: Synthetic oligonucleotide
ugcuuguugaccacaauaa

SEQ ID NO: 846642 - RNA, 19 nt, Artificial Sequence
  Description of Artificial Sequence: Synthetic oligonucleotide
cugguguuaaggaagauca

SEQ ID NO: 846643 - RNA, 19 nt, Artificial Sequence
  Description of Artificial Sequence: Synthetic oligonucleotide
ucagaacauauccaacuac

SEQ ID NO: 846644 - RNA, 19 nt, Artificial Sequence
  Description of Artificial Sequence: Synthetic oligonucleotide
ucuacgucguuccucacgu

SEQ ID NO: 846645 - RNA, 19 nt, Artificial Sequence
  Description of Artificial Sequence: Synthetic oligonucleotide
uuauuccuccaaauccagg

SEQ ID NO: 846646 - RNA, 19 nt, Artificial Sequence
  Description of Artificial Sequence: Synthetic oligonucleotide
cuuguugaccacaauaaca

SEQ ID NO: 846647 - RNA, 19 nt, Artificial Sequence
  Description of Artificial Sequence: Synthetic oligonucleotide
ucucuacuuaggaugaagu

SEQ ID NO: 846648 - RNA, 19 nt, Artificial Sequence
  Description of Artificial Sequence: Synthetic oligonucleotide
ugcaagaaacuuaggauau

SEQ ID NO: 846649 - RNA, 19 nt, Artificial Sequence
  Description of Artificial Sequence: Synthetic oligonucleotide
aaggaguuauccuuuggau

SEQ ID NO: 846650 - RNA, 19 nt, Artificial Sequence
  Description of Artificial Sequence: Synthetic oligonucleotide
ugaccacaauaacagagca

SEQ ID NO: 846651 - RNA, 19 nt, Artificial Sequence
  Description of Artificial Sequence: Synthetic oligonucleotide
uggcuagccauguugcugg

SEQ ID NO: 846652 - RNA, 19 nt, Artificial Sequence
  Description of Artificial Sequence: Synthetic oligonucleotide
agaguggacugguggagcc

SEQ ID NO: 846653 - RNA, 19 nt, Artificial Sequence
  Description of Artificial Sequence: Synthetic oligonucleotide
aaggggacuagggagagug

SEQ ID NO: 846654 - RNA, 19 nt, Artificial Sequence
  Description of Artificial Sequence: Synthetic oligonucleotide
uuaggauaucugaugcuga

SEQ ID NO: 846655 - RNA, 19 nt, Artificial Sequence
  Description of Artificial Sequence: Synthetic oligonucleotide
gaugagaacgaaagccugg

SEQ ID NO: 846656 - RNA, 19 nt, Artificial Sequence
  Description of Artificial Sequence: Synthetic oligonucleotide
aacaaaagauacagucccg

SEQ ID NO: 846657 - RNA, 19 nt, Artificial Sequence
  Description of Artificial Sequence: Synthetic oligonucleotide
aucaaauggucccuaccuc

SEQ ID NO: 846658 - RNA, 19 nt, Artificial Sequence
  Description of Artificial Sequence: Synthetic oligonucleotide
ugaggugagacccuccccu

SEQ ID NO: 846659 - RNA, 19 nt, Artificial Sequence
  Description of Artificial Sequence: Synthetic oligonucleotide
uggcguggcgggaaaaucg

SEQ ID NO: 846660 - RNA, 19 nt, Artificial Sequence
  Description of Artificial Sequence: Synthetic oligonucleotide
aguuaauaccuguggaaga

SEQ ID NO: 846661 - RNA, 19 nt, Artificial Sequence
  Description of Artificial Sequence: Synthetic oligonucleotide
cuuaggauaucugaugcug

SEQ ID NO: 846662 - RNA, 19 nt, Artificial Sequence
  Description of Artificial Sequence: Synthetic oligonucleotide
accacaauaacagagcaau

SEQ ID NO: 846663 - RNA, 19 nt, Artificial Sequence
  Description of Artificial Sequence: Synthetic oligonucleotide
aggucucgcaccuuccgcc

SEQ ID NO: 846664 - RNA, 19 nt, Artificial Sequence
  Description of Artificial Sequence: Synthetic oligonucleotide
ucagcgagguacccgaggc

SEQ ID NO: 846665 - RNA, 19 nt, Artificial Sequence
  Description of Artificial Sequence: Synthetic oligonucleotide
guuccucacguuucaaacg

SEQ ID NO: 846666 - RNA, 19 nt, Artificial Sequence
  Description of Artificial Sequence: Synthetic oligonucleotide
ucaauucuggaugacgugu

SEQ ID NO: 846667 - RNA, 19 nt, Artificial Sequence
  Description of Artificial Sequence: Synthetic oligonucleotide
uucuaaaugagcagucuuu

SEQ ID NO: 846668 - RNA, 19 nt, Artificial Sequence
  Description of Artificial Sequence: Synthetic oligonucleotide
ugcuguccgucucagaaca

SEQ ID NO: 846669 - RNA, 19 nt, Artificial Sequence
  Description of Artificial Sequence: Synthetic oligonucleotide
uuaugaaugcuguccgucu

SEQ ID NO: 846670 - RNA, 19 nt, Artificial Sequence
  Description of Artificial Sequence: Synthetic oligonucleotide
ucuucagcgagguacccga

SEQ ID NO: 846671 - RNA, 19 nt, Artificial Sequence
  Description of Artificial Sequence: Synthetic oligonucleotide
uacuuauuucuauccaaac

SEQ ID NO: 846672 - RNA, 19 nt, Artificial Sequence
  Description of Artificial Sequence: Synthetic oligonucleotide
auaaacugcugccguuugg

SEQ ID NO: 846673 - RNA, 19 nt, Artificial Sequence
  Description of Artificial Sequence: Synthetic oligonucleotide
uagucgagugacccugucg

SEQ ID NO: 846674 - RNA, 19 nt, Artificial Sequence
  Description of Artificial Sequence: Synthetic oligonucleotide
acuacagucuaacaucaaa

SEQ ID NO: 846675 - RNA, 19 nt, Artificial Sequence
  Description of Artificial Sequence: Synthetic oligonucleotide
uguuaaggaagaucagguc

SEQ ID NO: 846676 - RNA, 19 nt, Artificial Sequence
  Description of Artificial Sequence: Synthetic oligonucleotide
gguguuaaggaagaucagg

SEQ ID NO: 846677 - RNA, 19 nt, Artificial Sequence
  Description of Artificial Sequence: Synthetic oligonucleotide
gagcuaccccaucagaaag

SEQ ID NO: 846678 - RNA, 19 nt, Artificial Sequence
  Description of Artificial Sequence: Synthetic oligonucleotide
uaaagcuccucucuacguc

SEQ ID NO: 846679 - RNA, 19 nt, Artificial Sequence
  Description of Artificial Sequence: Synthetic oligonucleotide
aagggaacaagaguaugga

SEQ ID NO: 846680 - RNA, 19 nt, Artificial Sequence
  Description of Artificial Sequence: Synthetic oligonucleotide
cucaaaauacugacgauaa

SEQ ID NO: 846681 - RNA, 19 nt, Artificial Sequence
  Description of Artificial Sequence: Synthetic oligonucleotide
cucuacuuaggaugaagug

SEQ ID NO: 846682 - RNA, 19 nt, Artificial Sequence
  Description of Artificial Sequence: Synthetic oligonucleotide
uuguacacuuggauuguca

SEQ ID NO: 846683 - RNA, 19 nt, Artificial Sequence
  Description of Artificial Sequence: Synthetic oligonucleotide
auaucugaugcugacccag

SEQ ID NO: 846684 - RNA, 19 nt, Artificial Sequence
  Description of Artificial Sequence: Synthetic oligonucleotide
gagugcgaagaacacuucc

SEQ ID NO: 846685 - RNA, 19 nt, Artificial Sequence
  Description of Artificial Sequence: Synthetic oligonucleotide
guaagcaacagccgcagga

SEQ ID NO: 846686 - RNA, 19 nt, Artificial Sequence
  Description of Artificial Sequence: Synthetic oligonucleotide
auaaagcuccucucuacgu

SEQ ID NO: 846687 - RNA, 19 nt, Artificial Sequence
  Description of Artificial Sequence: Synthetic oligonucleotide
ccaagugucacuuugucuc

SEQ ID NO: 846688 - RNA, 19 nt, Artificial Sequence
  Description of Artificial Sequence: Synthetic oligonucleotide
aaccaugccgaggucucgc

SEQ ID NO: 846689 - RNA, 19 nt, Artificial Sequence
  Description of Artificial Sequence: Synthetic oligonucleotide
gcgguugggaacuugauug

SEQ ID NO: 846690 - RNA, 19 nt, Artificial Sequence
  Description of Artificial Sequence: Synthetic oligonucleotide
caaaguuaauaccugugga

SEQ ID NO: 846691 - RNA, 19 nt, Artificial Sequence
  Description of Artificial Sequence: Synthetic oligonucleotide
augagaacgaaagccuggg

SEQ ID NO: 846692 - RNA, 19 nt, Artificial Sequence
  Description of Artificial Sequence: Synthetic oligonucleotide
aggauaucugaugcugacc

SEQ ID NO: 846693 - RNA, 19 nt, Artificial Sequence
  Description of Artificial Sequence: Synthetic oligonucleotide
agcagucuuucccaaagga

SEQ ID NO: 846694 - RNA, 19 nt, Artificial Sequence
  Description of Artificial Sequence: Synthetic oligonucleotide
uugcuuagccccuggcagg

SEQ ID NO: 846695 - RNA, 19 nt, Artificial Sequence
  Description of Artificial Sequence: Synthetic oligonucleotide
gauuugauccacaggguuc

SEQ ID NO: 846696 - RNA, 19 nt, Artificial Sequence
  Description of Artificial Sequence: Synthetic oligonucleotide
ucugaagcgguugggaacu

SEQ ID NO: 846697 - RNA, 19 nt, Artificial Sequence
  Description of Artificial Sequence: Synthetic oligonucleotide
aaugagcagucuuucccaa

SEQ ID NO: 846698 - RNA, 19 nt, Artificial Sequence
  Description of Artificial Sequence: Synthetic oligonucleotide
uucaaacgcucuuuagcac

SEQ ID NO: 846699 - RNA, 19 nt, Artificial Sequence
  Description of Artificial Sequence: Synthetic oligonucleotide
cacaggguucuaaaugagc

SEQ ID NO: 846700 - RNA, 19 nt, Artificial Sequence
  Description of Artificial Sequence: Synthetic oligonucleotide
aacauaaacugcugccguu

SEQ ID NO: 846701 - RNA, 19 nt, Artificial Sequence
  Description of Artificial Sequence: Synthetic oligonucleotide
aguaaugccucugguauga

SEQ ID NO: 846702 - RNA, 19 nt, Artificial Sequence
  Description of Artificial Sequence: Synthetic oligonucleotide
ugcugacccagagagugcg

SEQ ID NO: 846703 - RNA, 19 nt, Artificial Sequence
  Description of Artificial Sequence: Synthetic oligonucleotide
aaaaucgggccaggcagag

SEQ ID NO: 846704 - RNA, 19 nt, Artificial Sequence
  Description of Artificial Sequence: Synthetic oligonucleotide
acuuaggaugaagugggag

SEQ ID NO: 846705 - RNA, 19 nt, Artificial Sequence
  Description of Artificial Sequence: Synthetic oligonucleotide
gguguucaaacugaggcag

SEQ ID NO: 846706 - RNA, 19 nt, Artificial Sequence
  Description of Artificial Sequence: Synthetic oligonucleotide
auuugauccacaggguucu

SEQ ID NO: 846707 - RNA, 19 nt, Artificial Sequence
  Description of Artificial Sequence: Synthetic oligonucleotide
gcagucuaaguucugauuc

SEQ ID NO: 846708 - RNA, 19 nt, Artificial Sequence
  Description of Artificial Sequence: Synthetic oligonucleotide
ugguguuaaggaagaucag

SEQ ID NO: 846709 - RNA, 19 nt, Artificial Sequence
  Description of Artificial Sequence: Synthetic oligonucleotide
ggaagauacaggccucugg

SEQ ID NO: 846710 - RNA, 19 nt, Artificial Sequence
  Description of Artificial Sequence: Synthetic oligonucleotide
aacaaacagaucagaacau

SEQ ID NO: 846711 - RNA, 19 nt, Artificial Sequence
  Description of Artificial Sequence: Synthetic oligonucleotide
uguugaccacaauaacaga

SEQ ID NO: 846712 - RNA, 19 nt, Artificial Sequence
  Description of Artificial Sequence: Synthetic oligonucleotide
gacguguggagguggaaac

SEQ ID NO: 846713 - RNA, 19 nt, Artificial Sequence
  Description of Artificial Sequence: Synthetic oligonucleotide
uucuaggucccucuuucuc

SEQ ID NO: 846714 - RNA, 19 nt, Artificial Sequence
  Description of Artificial Sequence: Synthetic oligonucleotide
uccgagcagacccugccug

SEQ ID NO: 846715 - RNA, 19 nt, Artificial Sequence
  Description of Artificial Sequence: Synthetic oligonucleotide
caugccgaggucucgcacc

SEQ ID NO: 846716 - RNA, 19 nt, Artificial Sequence
  Description of Artificial Sequence: Synthetic oligonucleotide
gaccaaagagcccuuggga

SEQ ID NO: 846717 - RNA, 19 nt, Artificial Sequence
  Description of Artificial Sequence: Synthetic oligonucleotide
guuccgcccacgcagguag

SEQ ID NO: 846718 - RNA, 19 nt, Artificial Sequence
  Description of Artificial Sequence: Synthetic oligonucleotide
caauucuggaugacgugug

SEQ ID NO: 846719 - RNA, 19 nt, Artificial Sequence
  Description of Artificial Sequence: Synthetic oligonucleotide
agagcaauccacaggccuc

SEQ ID NO: 846720 - RNA, 19 nt, Artificial Sequence
  Description of Artificial Sequence: Synthetic oligonucleotide
guuaagugguaagcaacag

SEQ ID NO: 846721 - RNA, 19 nt, Artificial Sequence
  Description of Artificial Sequence: Synthetic oligonucleotide
cucuacgucguuccucacg

SEQ ID NO: 846722 - RNA, 19 nt, Artificial Sequence
  Description of Artificial Sequence: Synthetic oligonucleotide
cccaccauauaacaaacag

SEQ ID NO: 846723 - RNA, 19 nt, Artificial Sequence
  Description of Artificial Sequence: Synthetic oligonucleotide
caucagacaagggaacaag

SEQ ID NO: 846724 - RNA, 19 nt, Artificial Sequence
  Description of Artificial Sequence: Synthetic oligonucleotide
caaaaguuaugaaugcugu

SEQ ID NO: 846725 - RNA, 19 nt, Artificial Sequence
  Description of Artificial Sequence: Synthetic oligonucleotide
ggaaacaaaggcugucacc

SEQ ID NO: 846726 - RNA, 19 nt, Artificial Sequence
  Description of Artificial Sequence: Synthetic oligonucleotide
caaaggaaaaggaguuauc

SEQ ID NO: 846727 - RNA, 19 nt, Artificial Sequence
  Description of Artificial Sequence: Synthetic oligonucleotide
uuuuguacacuuggauugu

SEQ ID NO: 846728 - RNA, 19 nt, Artificial Sequence
  Description of Artificial Sequence: Synthetic oligonucleotide
cagucuaacaucaaauggu

SEQ ID NO: 846729 - RNA, 19 nt, Artificial Sequence
  Description of Artificial Sequence: Synthetic oligonucleotide
aggugagacccuccccugc

SEQ ID NO: 846730 - RNA, 19 nt, Artificial Sequence
  Description of Artificial Sequence: Synthetic oligonucleotide
guuuggcuaaccagguggg

SEQ ID NO: 846731 - RNA, 19 nt, Artificial Sequence
  Description of Artificial Sequence: Synthetic oligonucleotide
aggguucuaaaugagcagu

SEQ ID NO: 846732 - RNA, 19 nt, Artificial Sequence
  Description of Artificial Sequence: Synthetic oligonucleotide
auccauucaggguggcauc

SEQ ID NO: 846733 - RNA, 19 nt, Artificial Sequence
  Description of Artificial Sequence: Synthetic oligonucleotide
agagcuaccccaucagaaa

SEQ ID NO: 846734 - RNA, 19 nt, Artificial Sequence
  Description of Artificial Sequence: Synthetic oligonucleotide
caggguucuaaaugagcag

SEQ ID NO: 846735 - RNA, 19 nt, Artificial Sequence
  Description of Artificial Sequence: Synthetic oligonucleotide
cucugaagcgguugggaac

SEQ ID NO: 846736 - RNA, 19 nt, Artificial Sequence
  Description of Artificial Sequence: Synthetic oligonucleotide
aguuaugaaugcuguccgu

SEQ ID NO: 846737 - RNA, 19 nt, Artificial Sequence
  Description of Artificial Sequence: Synthetic oligonucleotide
ugacgauaaagcuccucuc

SEQ ID NO: 846738 - RNA, 19 nt, Artificial Sequence
  Description of Artificial Sequence: Synthetic oligonucleotide
agcuaccacucuugcuugc

SEQ ID NO: 846739 - RNA, 19 nt, Artificial Sequence
  Description of Artificial Sequence: Synthetic oligonucleotide
uguuggccgagaccgugcc

SEQ ID NO: 846740 - RNA, 19 nt, Artificial Sequence
  Description of Artificial Sequence: Synthetic oligonucleotide
gacgauaaagcuccucucu

SEQ ID NO: 846741 - RNA, 19 nt, Artificial Sequence
  Description of Artificial Sequence: Synthetic oligonucleotide
cucugcaucaaagcgccgc

SEQ ID NO: 846742 - RNA, 19 nt, Artificial Sequence
  Description of Artificial Sequence: Synthetic oligonucleotide
aaaucgggccaggcagagc

SEQ ID NO: 846743 - RNA, 19 nt, Artificial Sequence
  Description of Artificial Sequence: Synthetic oligonucleotide
ugcgaagaacacuuccaaa

SEQ ID NO: 846744 - RNA, 19 nt, Artificial Sequence
  Description of Artificial Sequence: Synthetic oligonucleotide
ccugccaaggccaaccugc

SEQ ID NO: 846745 - RNA, 19 nt, Artificial Sequence
  Description of Artificial Sequence: Synthetic oligonucleotide
acaagggaacaagaguaug

SEQ ID NO: 846746 - RNA, 19 nt, Artificial Sequence
  Description of Artificial Sequence: Synthetic oligonucleotide
uacgucguuccucacguuu

SEQ ID NO: 846747 - RNA, 19 nt, Artificial Sequence
  Description of Artificial Sequence: Synthetic oligonucleotide
cuccguuccgcccacgcag

SEQ ID NO: 846748 - RNA, 19 nt, Artificial Sequence
  Description of Artificial Sequence: Synthetic oligonucleotide
acuuggauugucaaaguua

SEQ ID NO: 846749 - RNA, 19 nt, Artificial Sequence
  Description of Artificial Sequence: Synthetic oligonucleotide
gaagaggcugaggauuuug

SEQ ID NO: 846750 - RNA, 19 nt, Artificial Sequence
  Description of Artificial Sequence: Synthetic oligonucleotide
caagaguauggaugagaac

SEQ ID NO: 846751 - RNA, 19 nt, Artificial Sequence
  Description of Artificial Sequence: Synthetic oligonucleotide
aaugacaccucugguguua

SEQ ID NO: 846752 - RNA, 19 nt, Artificial Sequence
  Description of Artificial Sequence: Synthetic oligonucleotide
uacagucccgaaagcaguc

SEQ ID NO: 846753 - RNA, 19 nt, Artificial Sequence
  Description of Artificial Sequence: Synthetic oligonucleotide
ugcuucuaugcgagccagg

SEQ ID NO: 846754 - RNA, 19 nt, Artificial Sequence
  Description of Artificial Sequence: Synthetic oligonucleotide
guggcgggaaaaucgggcc

SEQ ID NO: 846755 - RNA, 19 nt, Artificial Sequence
  Description of Artificial Sequence: Synthetic oligonucleotide
cuaggucccucuuucucac

SEQ ID NO: 846756 - RNA, 19 nt, Artificial Sequence
  Description of Artificial Sequence: Synthetic oligonucleotide
accauauaacaaacagauc

SEQ ID NO: 846757 - RNA, 19 nt, Artificial Sequence
  Description of Artificial Sequence: Synthetic oligonucleotide
guuugcuuagccccuggca

SEQ ID NO: 846758 - RNA, 19 nt, Artificial Sequence
  Description of Artificial Sequence: Synthetic oligonucleotide
gaacauaaacugcugccgu

SEQ ID NO: 846759 - RNA, 19 nt, Artificial Sequence
  Description of Artificial Sequence: Synthetic oligonucleotide
cacuuugucucaaaaguua

SEQ ID NO: 846760 - RNA, 19 nt, Artificial Sequence
  Description of Artificial Sequence: Synthetic oligonucleotide
agaccccagaaauacuuau

SEQ ID NO: 846761 - RNA, 19 nt, Artificial Sequence
  Description of Artificial Sequence: Synthetic oligonucleotide
ugauucuguuaagugguaa

SEQ ID NO: 846762 - RNA, 19 nt, Artificial Sequence
  Description of Artificial Sequence: Synthetic oligonucleotide
ugagaacgaaagccugggu

SEQ ID NO: 846763 - RNA, 19 nt, Artificial Sequence
  Description of Artificial Sequence: Synthetic oligonucleotide
uccauucaggguggcaucc

SEQ ID NO: 846764 - RNA, 19 nt, Artificial Sequence
  Description of Artificial Sequence: Synthetic oligonucleotide
agugcgaagaacacuucca

SEQ ID NO: 846765 - RNA, 19 nt, Artificial Sequence
  Description of Artificial Sequence: Synthetic oligonucleotide
cagaacauauccaacuacu

SEQ ID NO: 846766 - RNA, 19 nt, Artificial Sequence
  Description of Artificial Sequence: Synthetic oligonucleotide
cagagagugcgaagaacac

SEQ ID NO: 846767 - RNA, 19 nt, Artificial Sequence
  Description of Artificial Sequence: Synthetic oligonucleotide
acugacuccauaaguggug

SEQ ID NO: 846768 - RNA, 19 nt, Artificial Sequence
  Description of Artificial Sequence: Synthetic oligonucleotide
gaagaacacuuccaaacau

SEQ ID NO: 846769 - RNA, 19 nt, Artificial Sequence
  Description of Artificial Sequence: Synthetic oligonucleotide
uccguuccgcccacgcagg

SEQ ID NO: 846770 - RNA, 19 nt, Artificial Sequence
  Description of Artificial Sequence: Synthetic oligonucleotide
ugacccagagagugcgaag

SEQ ID NO: 846771 - RNA, 19 nt, Artificial Sequence
  Description of Artificial Sequence: Synthetic oligonucleotide
gucuaacaucaaauggucc

SEQ ID NO: 846772 - RNA, 19 nt, Artificial Sequence
  Description of Artificial Sequence: Synthetic oligonucleotide
ugaugacacugccugccaa

SEQ ID NO: 846773 - RNA, 19 nt, Artificial Sequence
  Description of Artificial Sequence: Synthetic oligonucleotide
acaaccaugccgaggucuc

SEQ ID NO: 846774 - RNA, 19 nt, Artificial Sequence
  Description of Artificial Sequence: Synthetic oligonucleotide
cucucuacgucguuccuca

SEQ ID NO: 846775 - RNA, 19 nt, Artificial Sequence
  Description of Artificial Sequence: Synthetic oligonucleotide
agaguauggaugagaacga

SEQ ID NO: 846776 - RNA, 19 nt, Artificial Sequence
  Description of Artificial Sequence: Synthetic oligonucleotide
agguagucgagugacccug

SEQ ID NO: 846777 - RNA, 19 nt, Artificial Sequence
  Description of Artificial Sequence: Synthetic oligonucleotide
acaacacaagaguuccaaa

SEQ ID NO: 846778 - RNA, 19 nt, Artificial Sequence
  Description of Artificial Sequence: Synthetic oligonucleotide
uccauaagugguguucaaa

SEQ ID NO: 846779 - RNA, 19 nt, Artificial Sequence
  Description of Artificial Sequence: Synthetic oligonucleotide
gaggucucgcaccuuccgc

SEQ ID NO: 846780 - RNA, 19 nt, Artificial Sequence
  Description of Artificial Sequence: Synthetic oligonucleotide
agcagucuaaguucugauu

SEQ ID NO: 846781 - RNA, 19 nt, Artificial Sequence
  Description of Artificial Sequence: Synthetic oligonucleotide
acuuugucucaaaaguuau

SEQ ID NO: 846782 - RNA, 19 nt, Artificial Sequence
  Description of Artificial Sequence: Synthetic oligonucleotide
uggcgggaaaaucgggcca

SEQ ID NO: 846783 - RNA, 19 nt, Artificial Sequence
  Description of Artificial Sequence: Synthetic oligonucleotide
agaaagaagcugagccuag

SEQ ID NO: 846784 - RNA, 19 nt, Artificial Sequence
  Description of Artificial Sequence: Synthetic oligonucleotide
aaauccaggcuggggccag

SEQ ID NO: 846785 - RNA, 19 nt, Artificial Sequence
  Description of Artificial Sequence: Synthetic oligonucleotide
ugacguguggagguggaaa

SEQ ID NO: 846786 - RNA, 19 nt, Artificial Sequence
  Description of Artificial Sequence: Synthetic oligonucleotide
uagaccccagaaauacuua

SEQ ID NO: 846787 - RNA, 19 nt, Artificial Sequence
  Description of Artificial Sequence: Synthetic oligonucleotide
ccgaaagcagucuaaguuc

SEQ ID NO: 846788 - RNA, 19 nt, Artificial Sequence
  Description of Artificial Sequence: Synthetic oligonucleotide
cacuuccaaacaucucuac

SEQ ID NO: 846789 - RNA, 19 nt, Artificial Sequence
  Description of Artificial Sequence: Synthetic oligonucleotide
agguacccgaggccgcccc

SEQ ID NO: 846790 - RNA, 19 nt, Artificial Sequence
  Description of Artificial Sequence: Synthetic oligonucleotide
caguaaugccucugguaug

SEQ ID NO: 846791 - RNA, 19 nt, Artificial Sequence
  Description of Artificial Sequence: Synthetic oligonucleotide
gagaguggacugguggagc

SEQ ID NO: 846792 - RNA, 19 nt, Artificial Sequence
  Description of Artificial Sequence: Synthetic oligonucleotide
agggaacaagaguauggau

SEQ ID NO: 846793 - RNA, 19 nt, Artificial Sequence
  Description of Artificial Sequence: Synthetic oligonucleotide
ccaacuacuacagucuaac

SEQ ID NO: 846794 - RNA, 19 nt, Artificial Sequence
  Description of Artificial Sequence: Synthetic oligonucleotide
agcgcuugugacaaugaca

SEQ ID NO: 846795 - RNA, 19 nt, Artificial Sequence
  Description of Artificial Sequence: Synthetic oligonucleotide
cuuagccccuggcagggac

SEQ ID NO: 846796 - RNA, 19 nt, Artificial Sequence
  Description of Artificial Sequence: Synthetic oligonucleotide
uuaauaccuguggaagaua

SEQ ID NO: 846797 - RNA, 19 nt, Artificial Sequence
  Description of Artificial Sequence: Synthetic oligonucleotide
uggagcuaccacucuugcu

SEQ ID NO: 846798 - RNA, 19 nt, Artificial Sequence
  Description of Artificial Sequence: Synthetic oligonucleotide
aguauggaugagaacgaaa

SEQ ID NO: 846799 - RNA, 19 nt, Artificial Sequence
  Description of Artificial Sequence: Synthetic oligonucleotide
cagagcuaccccaucagaa

SEQ ID NO: 846800 - RNA, 19 nt, Artificial Sequence
  Description of Artificial Sequence: Synthetic oligonucleotide
cauaagugguguucaaacu

SEQ ID NO: 846801 - RNA, 19 nt, Artificial Sequence
  Description of Artificial Sequence: Synthetic oligonucleotide
ucucugcaucaaagcgccg

SEQ ID NO: 846802 - RNA, 19 nt, Artificial Sequence
  Description of Artificial Sequence: Synthetic oligonucleotide
cucaguaaugccucuggua

SEQ ID NO: 846803 - RNA, 19 nt, Artificial Sequence
  Description of Artificial Sequence: Synthetic oligonucleotide
uuagccccuggcagggacu

SEQ ID NO: 846804 - RNA, 19 nt, Artificial Sequence
  Description of Artificial Sequence: Synthetic oligonucleotide
uccucacguuucaaacgcu

SEQ ID NO: 846805 - RNA, 19 nt, Artificial Sequence
  Description of Artificial Sequence: Synthetic oligonucleotide
gccucaguaaugccucugg

SEQ ID NO: 846806 - RNA, 19 nt, Artificial Sequence
  Description of Artificial Sequence: Synthetic oligonucleotide
uuuguacacuuggauuguc

SEQ ID NO: 846807 - RNA, 19 nt, Artificial Sequence
  Description of Artificial Sequence: Synthetic oligonucleotide
acauaaacugcugccguuu

SEQ ID NO: 846808 - RNA, 19 nt, Artificial Sequence
  Description of Artificial Sequence: Synthetic oligonucleotide
acgucguuccucacguuuc

SEQ ID NO: 846809 - RNA, 19 nt, Artificial Sequence
  Description of Artificial Sequence: Synthetic oligonucleotide
cucagaacauauccaacua

SEQ ID NO: 846810 - RNA, 19 nt, Artificial Sequence
  Description of Artificial Sequence: Synthetic oligonucleotide
cuggcuagccauguugcug

SEQ ID NO: 846811 - RNA, 19 nt, Artificial Sequence
  Description of Artificial Sequence: Synthetic oligonucleotide
cuguuggccgagaccgugc

SEQ ID NO: 846812 - RNA, 19 nt, Artificial Sequence
  Description of Artificial Sequence: Synthetic oligonucleotide
caaacgcucuuuagcacga

SEQ ID NO: 846813 - RNA, 19 nt, Artificial Sequence
  Description of Artificial Sequence: Synthetic oligonucleotide
accgugccacuguugaaga

SEQ ID NO: 846814 - RNA, 19 nt, Artificial Sequence
  Description of Artificial Sequence: Synthetic oligonucleotide
gcuuguugaccacaauaac

SEQ ID NO: 846815 - RNA, 19 nt, Artificial Sequence
  Description of Artificial Sequence: Synthetic oligonucleotide
cagugaugacacugccugc

SEQ ID NO: 846816 - RNA, 19 nt, Artificial Sequence
  Description of Artificial Sequence: Synthetic oligonucleotide
gccacucugaagcgguugg

SEQ ID NO: 846817 - RNA, 19 nt, Artificial Sequence
  Description of Artificial Sequence: Synthetic oligonucleotide
uuuggcuaaccagguggga

SEQ ID NO: 846818 - RNA, 19 nt, Artificial Sequence
  Description of Artificial Sequence: Synthetic oligonucleotide
gcuucuaugcgagccaggc

SEQ ID NO: 846819 - RNA, 19 nt, Artificial Sequence
  Description of Artificial Sequence: Synthetic oligonucleotide
ucgagugacccugucgguc

SEQ ID NO: 846820 - RNA, 19 nt, Artificial Sequence
  Description of Artificial Sequence: Synthetic oligonucleotide
aaacgcucuuuagcacgag

SEQ ID NO: 846821 - RNA, 19 nt, Artificial Sequence
  Description of Artificial Sequence: Synthetic oligonucleotide
acguuucaaacgcucuuua

SEQ ID NO: 846822 - RNA, 19 nt, Artificial Sequence
  Description of Artificial Sequence: Synthetic oligonucleotide
guuaauaccuguggaagau

SEQ ID NO: 846823 - RNA, 19 nt, Artificial Sequence
  Description of Artificial Sequence: Synthetic oligonucleotide
gauccauucaggguggcau

SEQ ID NO: 846824 - RNA, 19 nt, Artificial Sequence
  Description of Artificial Sequence: Synthetic oligonucleotide
cuaccccaucagaaagaag

SEQ ID NO: 846825 - RNA, 19 nt, Artificial Sequence
  Description of Artificial Sequence: Synthetic oligonucleotide
uggaugacguguggaggug

SEQ ID NO: 846826 - RNA, 19 nt, Artificial Sequence
  Description of Artificial Sequence: Synthetic oligonucleotide
gacccugucggucuccucu

SEQ ID NO: 846827 - RNA, 19 nt, Artificial Sequence
  Description of Artificial Sequence: Synthetic oligonucleotide
uuccgccccacagacucag

SEQ ID NO: 846828 - RNA, 19 nt, Artificial Sequence
  Description of Artificial Sequence: Synthetic oligonucleotide
gccuagaccccagaaauac

SEQ ID NO: 846829 - RNA, 19 nt, Artificial Sequence
  Description of Artificial Sequence: Synthetic oligonucleotide
cucuugaugggacagugau

SEQ ID NO: 846830 - RNA, 19 nt, Artificial Sequence
  Description of Artificial Sequence: Synthetic oligonucleotide
guucuaaaugagcagucuu

SEQ ID NO: 846831 - RNA, 19 nt, Artificial Sequence
  Description of Artificial Sequence: Synthetic oligonucleotide
cagcgcuugugacaaugac

SEQ ID NO: 846832 - RNA, 19 nt, Artificial Sequence
  Description of Artificial Sequence: Synthetic oligonucleotide
gaacgaaagccugggugga

SEQ ID NO: 846833 - RNA, 19 nt, Artificial Sequence
  Description of Artificial Sequence: Synthetic oligonucleotide
cugcuucuaugcgagccag

SEQ ID NO: 846834 - RNA, 19 nt, Artificial Sequence
  Description of Artificial Sequence: Synthetic oligonucleotide
cguuccucacguuucaaac

SEQ ID NO: 846835 - RNA, 19 nt, Artificial Sequence
  Description of Artificial Sequence: Synthetic oligonucleotide
ugucuucagcgagguaccc

SEQ ID NO: 846836 - RNA, 19 nt, Artificial Sequence
  Description of Artificial Sequence: Synthetic oligonucleotide
caacuacuacagucuaaca

SEQ ID NO: 846837 - RNA, 19 nt, Artificial Sequence
  Description of Artificial Sequence: Synthetic oligonucleotide
gguaagcaacagccgcagg

SEQ ID NO: 846838 - RNA, 19 nt, Artificial Sequence
  Description of Artificial Sequence: Synthetic oligonucleotide
gaugacguguggaggugga

SEQ ID NO: 846839 - RNA, 19 nt, Artificial Sequence
  Description of Artificial Sequence: Synthetic oligonucleotide
ggaugacguguggaggugg

SEQ ID NO: 846840 - RNA, 19 nt, Artificial Sequence
  Description of Artificial Sequence: Synthetic oligonucleotide
cagugaggugagacccucc

SEQ ID NO: 846841 - RNA, 19 nt, Artificial Sequence
  Description of Artificial Sequence: Synthetic oligonucleotide
cuucagcgagguacccgag

SEQ ID NO: 846842 - RNA, 19 nt, Artificial Sequence
  Description of Artificial Sequence: Synthetic oligonucleotide
ggaaagagcagggccacuc

SEQ ID NO: 846843 - RNA, 19 nt, Artificial Sequence
  Description of Artificial Sequence: Synthetic oligonucleotide
guggagccucaguaaugcc

SEQ ID NO: 846844 - RNA, 19 nt, Artificial Sequence
  Description of Artificial Sequence: Synthetic oligonucleotide
cagagcaauccacaggccu

SEQ ID NO: 846845 - RNA, 19 nt, Artificial Sequence
  Description of Artificial Sequence: Synthetic oligonucleotide
acccugucggucuccucug

SEQ ID NO: 846846 - RNA, 19 nt, Artificial Sequence
  Description of Artificial Sequence: Synthetic oligonucleotide
agcuaccccaucagaaaga

SEQ ID NO: 846847 - RNA, 19 nt, Artificial Sequence
  Description of Artificial Sequence: Synthetic oligonucleotide
gaggcagcugggguuuggc

SEQ ID NO: 846848 - RNA, 19 nt, Artificial Sequence
  Description of Artificial Sequence: Synthetic oligonucleotide
cuucuaugcgagccaggca

SEQ ID NO: 846849 - RNA, 19 nt, Artificial Sequence
  Description of Artificial Sequence: Synthetic oligonucleotide
cacaaugcuuggaggcuga

SEQ ID NO: 846850 - RNA, 19 nt, Artificial Sequence
  Description of Artificial Sequence: Synthetic oligonucleotide
ccaccugugcagcaguuug

SEQ ID NO: 846851 - RNA, 19 nt, Artificial Sequence
  Description of Artificial Sequence: Synthetic oligonucleotide
accaggggaaaaggggacu

SEQ ID NO: 846852 - RNA, 19 nt, Artificial Sequence
  Description of Artificial Sequence: Synthetic oligonucleotide
ggaucaggguguccagagc

SEQ ID NO: 846853 - RNA, 19 nt, Artificial Sequence
  Description of Artificial Sequence: Synthetic oligonucleotide
caaauggucccuaccuccu

SEQ ID NO: 846854 - RNA, 19 nt, Artificial Sequence
  Description of Artificial Sequence: Synthetic oligonucleotide
acugccugccaaggccaac

SEQ ID NO: 846855 - RNA, 19 nt, Artificial Sequence
  Description of Artificial Sequence: Synthetic oligonucleotide
agccuuuuguacacuugga

SEQ ID NO: 846856 - RNA, 19 nt, Artificial Sequence
  Description of Artificial Sequence: Synthetic oligonucleotide
uacugacgauaaagcuccu

SEQ ID NO: 846857 - RNA, 19 nt, Artificial Sequence
  Description of Artificial Sequence: Synthetic oligonucleotide
accaugccgaggucucgca

SEQ ID NO: 846858 - RNA, 19 nt, Artificial Sequence
  Description of Artificial Sequence: Synthetic oligonucleotide
agccuuccaagugucacuu

SEQ ID NO: 846859 - RNA, 19 nt, Artificial Sequence
  Description of Artificial Sequence: Synthetic oligonucleotide
caaccaugccgaggucucg

SEQ ID NO: 846860 - RNA, 19 nt, Artificial Sequence
  Description of Artificial Sequence: Synthetic oligonucleotide
cguggcgggaaaaucgggc

SEQ ID NO: 846861 - RNA, 19 nt, Artificial Sequence
  Description of Artificial Sequence: Synthetic oligonucleotide
ccuaccuccugcucaucag

SEQ ID NO: 846862 - RNA, 19 nt, Artificial Sequence
  Description of Artificial Sequence: Synthetic oligonucleotide
ggaugaagugggagggacc

SEQ ID NO: 846863 - RNA, 19 nt, Artificial Sequence
  Description of Artificial Sequence: Synthetic oligonucleotide
ugcuguuggccgagaccgu

SEQ ID NO: 846864 - RNA, 19 nt, Artificial Sequence
  Description of Artificial Sequence: Synthetic oligonucleotide
agguggaaacaaaggcugu

SEQ ID NO: 846865 - RNA, 19 nt, Artificial Sequence
  Description of Artificial Sequence: Synthetic oligonucleotide
cacugacuccauaaguggu

SEQ ID NO: 846866 - RNA, 19 nt, Artificial Sequence
  Description of Artificial Sequence: Synthetic oligonucleotide
aggcagagcgucggcggcg

SEQ ID NO: 846867 - RNA, 19 nt, Artificial Sequence
  Description of Artificial Sequence: Synthetic oligonucleotide
ccucacguuucaaacgcuc

SEQ ID NO: 846868 - RNA, 19 nt, Artificial Sequence
  Description of Artificial Sequence: Synthetic oligonucleotide
guagucgagugacccuguc

SEQ ID NO: 846869 - RNA, 19 nt, Artificial Sequence
  Description of Artificial Sequence: Synthetic oligonucleotide
gcugauuuccugaggccug

SEQ ID NO: 846870 - RNA, 19 nt, Artificial Sequence
  Description of Artificial Sequence: Synthetic oligonucleotide
cagauuugauccacagggu

SEQ ID NO: 846871 - RNA, 19 nt, Artificial Sequence
  Description of Artificial Sequence: Synthetic oligonucleotide
ggcuaaccaggugggaaag

SEQ ID NO: 846872 - RNA, 19 nt, Artificial Sequence
  Description of Artificial Sequence: Synthetic oligonucleotide
uggucccuaccuccugcuc

SEQ ID NO: 846873 - RNA, 19 nt, Artificial Sequence
  Description of Artificial Sequence: Synthetic oligonucleotide
ggcgggaaaaucgggccag

SEQ ID NO: 846874 - RNA, 19 nt, Artificial Sequence
  Description of Artificial Sequence: Synthetic oligonucleotide
aagcgguugggaacuugau

SEQ ID NO: 846875 - RNA, 19 nt, Artificial Sequence
  Description of Artificial Sequence: Synthetic oligonucleotide
uaugcgagccaggcagcuc

SEQ ID NO: 846876 - RNA, 19 nt, Artificial Sequence
  Description of Artificial Sequence: Synthetic oligonucleotide
cacucugaagcgguuggga

SEQ ID NO: 846877 - RNA, 19 nt, Artificial Sequence
  Description of Artificial Sequence: Synthetic oligonucleotide
cacgcagguagucgaguga

SEQ ID NO: 846878 - RNA, 19 nt, Artificial Sequence
  Description of Artificial Sequence: Synthetic oligonucleotide
ucucuacgucguuccucac

SEQ ID NO: 846879 - RNA, 19 nt, Artificial Sequence
  Description of Artificial Sequence: Synthetic oligonucleotide
cgaagaacacuuccaaaca

SEQ ID NO: 846880 - RNA, 19 nt, Artificial Sequence
  Description of Artificial Sequence: Synthetic oligonucleotide
gcucaucagacaagggaac

SEQ ID NO: 846881 - RNA, 19 nt, Artificial Sequence
  Description of Artificial Sequence: Synthetic oligonucleotide
gagcggugcaagaaacuua

SEQ ID NO: 846882 - RNA, 19 nt, Artificial Sequence
  Description of Artificial Sequence: Synthetic oligonucleotide
ggagcucccggcagcaacc

SEQ ID NO: 846883 - RNA, 19 nt, Artificial Sequence
  Description of Artificial Sequence: Synthetic oligonucleotide
ggguucuaaaugagcaguc

SEQ ID NO: 846884 - RNA, 19 nt, Artificial Sequence
  Description of Artificial Sequence: Synthetic oligonucleotide
gggaccuuggguuuugaau

SEQ ID NO: 846885 - RNA, 19 nt, Artificial Sequence
  Description of Artificial Sequence: Synthetic oligonucleotide
ccacaauaacagagcaauc

SEQ ID NO: 846886 - RNA, 19 nt, Artificial Sequence
  Description of Artificial Sequence: Synthetic oligonucleotide
cugauucuguuaaguggua

SEQ ID NO: 846887 - RNA, 19 nt, Artificial Sequence
  Description of Artificial Sequence: Synthetic oligonucleotide
cugcaucaaagcgccgcug

SEQ ID NO: 846888 - RNA, 19 nt, Artificial Sequence
  Description of Artificial Sequence: Synthetic oligonucleotide
gggagcucccggcagcaac

SEQ ID NO: 846889 - RNA, 19 nt, Artificial Sequence
  Description of Artificial Sequence: Synthetic oligonucleotide
ugcuccgagccgcuccguu

SEQ ID NO: 846890 - RNA, 19 nt, Artificial Sequence
  Description of Artificial Sequence: Synthetic oligonucleotide
gagugacccugucggucuc

SEQ ID NO: 846891 - RNA, 19 nt, Artificial Sequence
  Description of Artificial Sequence: Synthetic oligonucleotide
gggcccauguuccgagcag

SEQ ID NO: 846892 - RNA, 19 nt, Artificial Sequence
  Description of Artificial Sequence: Synthetic oligonucleotide
cccggcagcaaccgagggg

SEQ ID NO: 846893 - RNA, 19 nt, Artificial Sequence
  Description of Artificial Sequence: Synthetic oligonucleotide
cauguuccgagcagacccu

SEQ ID NO: 846894 - RNA, 19 nt, Artificial Sequence
  Description of Artificial Sequence: Synthetic oligonucleotide
ugccucugguaugauccua

SEQ ID NO: 846895 - RNA, 19 nt, Artificial Sequence
  Description of Artificial Sequence: Synthetic oligonucleotide
ugcgagccaggcagcucaa

SEQ ID NO: 846896 - RNA, 19 nt, Artificial Sequence
  Description of Artificial Sequence: Synthetic oligonucleotide
gguucuaaaugagcagucu

SEQ ID NO: 846897 - RNA, 19 nt, Artificial Sequence
  Description of Artificial Sequence: Synthetic oligonucleotide
cacaaccaugccgaggucu

SEQ ID NO: 846898 - RNA, 19 nt, Artificial Sequence
  Description of Artificial Sequence: Synthetic oligonucleotide
gggacuagggagaguggac

SEQ ID NO: 846899 - RNA, 19 nt, Artificial Sequence
  Description of Artificial Sequence: Synthetic oligonucleotide
gcccuugggaaggagcccc

SEQ ID NO: 846900 - RNA, 19 nt, Artificial Sequence
  Description of Artificial Sequence: Synthetic oligonucleotide
guggcguggcgggaaaauc

SEQ ID NO: 846901 - RNA, 19 nt, Artificial Sequence
  Description of Artificial Sequence: Synthetic oligonucleotide
gcuguuggccgagaccgug

SEQ ID NO: 846902 - RNA, 19 nt, Artificial Sequence
  Description of Artificial Sequence: Synthetic oligonucleotide
cugacccagagagugcgaa

SEQ ID NO: 846903 - RNA, 19 nt, Artificial Sequence
  Description of Artificial Sequence: Synthetic oligonucleotide
guccgucucagaacauauc

SEQ ID NO: 846904 - RNA, 19 nt, Artificial Sequence
  Description of Artificial Sequence: Synthetic oligonucleotide
gagguacccgaggccgccc

SEQ ID NO: 846905 - RNA, 19 nt, Artificial Sequence
  Description of Artificial Sequence: Synthetic oligonucleotide
cacuuggauugucaaaguu

SEQ ID NO: 846906 - RNA, 19 nt, Artificial Sequence
  Description of Artificial Sequence: Synthetic oligonucleotide
aggcgacuggaaggcugac

SEQ ID NO: 846907 - RNA, 19 nt, Artificial Sequence
  Description of Artificial Sequence: Synthetic oligonucleotide
ccgucucagaacauaucca

SEQ ID NO: 846908 - RNA, 19 nt, Artificial Sequence
  Description of Artificial Sequence: Synthetic oligonucleotide
cugacuccauaaguggugu

SEQ ID NO: 846909 - RNA, 19 nt, Artificial Sequence
  Description of Artificial Sequence: Synthetic oligonucleotide
gcuaccccaucagaaagaa

SEQ ID NO: 846910 - RNA, 19 nt, Artificial Sequence
  Description of Artificial Sequence: Synthetic oligonucleotide
cuucuaggucccucuuucu

SEQ ID NO: 846911 - RNA, 19 nt, Artificial Sequence
  Description of Artificial Sequence: Synthetic oligonucleotide
gccgaggucucgcaccuuc

SEQ ID NO: 846912 - RNA, 19 nt, Artificial Sequence
  Description of Artificial Sequence: Synthetic oligonucleotide
uggccgagaccgugccacu

SEQ ID NO: 846913 - RNA, 19 nt, Artificial Sequence
  Description of Artificial Sequence: Synthetic oligonucleotide
cagagcgucggcggcgcug

SEQ ID NO: 846914 - RNA, 19 nt, Artificial Sequence
  Description of Artificial Sequence: Synthetic oligonucleotide
cagcucaauucuggaugac

SEQ ID NO: 846915 - RNA, 19 nt, Artificial Sequence
  Description of Artificial Sequence: Synthetic oligonucleotide
ccucugguaugauccuaug

SEQ ID NO: 846916 - RNA, 19 nt, Artificial Sequence
  Description of Artificial Sequence: Synthetic oligonucleotide
agccuagaccccagaaaua

SEQ ID NO: 846917 - RNA, 19 nt, Artificial Sequence
  Description of Artificial Sequence: Synthetic oligonucleotide
cuguccgucucagaacaua

SEQ ID NO: 846918 - RNA, 19 nt, Artificial Sequence
  Description of Artificial Sequence: Synthetic oligonucleotide
cgcaccuuccgccccacag

SEQ ID NO: 846919 - RNA, 19 nt, Artificial Sequence
  Description of Artificial Sequence: Synthetic oligonucleotide
augacguguggagguggaa

SEQ ID NO: 846920 - RNA, 19 nt, Artificial Sequence
  Description of Artificial Sequence: Synthetic oligonucleotide
aagcucuugcugggagguu

SEQ ID NO: 846921 - RNA, 19 nt, Artificial Sequence
  Description of Artificial Sequence: Synthetic oligonucleotide
gccccgaguggcguggcgg

SEQ ID NO: 846922 - RNA, 19 nt, Artificial Sequence
  Description of Artificial Sequence: Synthetic oligonucleotide
uggggaccuuggguuuuga

SEQ ID NO: 846923 - RNA, 19 nt, Artificial Sequence
  Description of Artificial Sequence: Synthetic oligonucleotide
cagguagucgagugacccu

SEQ ID NO: 846924 - RNA, 19 nt, Artificial Sequence
  Description of Artificial Sequence: Synthetic oligonucleotide
ggugagacccuccccugcu

SEQ ID NO: 846925 - RNA, 19 nt, Artificial Sequence
  Description of Artificial Sequence: Synthetic oligonucleotide
gguggcauccagagccuuc

SEQ ID NO: 846926 - RNA, 19 nt, Artificial Sequence
  Description of Artificial Sequence: Synthetic oligonucleotide
ccccgaguggcguggcggg

SEQ ID NO: 846927 - RNA, 19 nt, Artificial Sequence
  Description of Artificial Sequence: Synthetic oligonucleotide
ccgaggucucgcaccuucc

SEQ ID NO: 846928 - RNA, 19 nt, Artificial Sequence
  Description of Artificial Sequence: Synthetic oligonucleotide
ggcaggugccaggcgacug

SEQ ID NO: 846929 - RNA, 19 nt, Artificial Sequence
  Description of Artificial Sequence: Synthetic oligonucleotide
cuuccgccccacagacuca

SEQ ID NO: 846930 - RNA, 19 nt, Artificial Sequence
  Description of Artificial Sequence: Synthetic oligonucleotide
gcuccgagccgcuccguuc

SEQ ID NO: 846931 - RNA, 19 nt, Artificial Sequence
  Description of Artificial Sequence: Synthetic oligonucleotide
gcguggcgggaaaaucggg

SEQ ID NO: 846932 - RNA, 19 nt, Artificial Sequence
  Description of Artificial Sequence: Synthetic oligonucleotide
gucccuaccuccugcucau

SEQ ID NO: 846933 - RNA, 19 nt, Artificial Sequence
  Description of Artificial Sequence: Synthetic oligonucleotide
ccagagcuaccccaucaga

SEQ ID NO: 846934 - RNA, 19 nt, Artificial Sequence
  Description of Artificial Sequence: Synthetic oligonucleotide
gucgagugacccugucggu

SEQ ID NO: 846935 - RNA, 19 nt, Artificial Sequence
  Description of Artificial Sequence: Synthetic oligonucleotide
caucaaagcgccgcuggau

SEQ ID NO: 846936 - RNA, 19 nt, Artificial Sequence
  Description of Artificial Sequence: Synthetic oligonucleotide
cacguuucaaacgcucuuu

SEQ ID NO: 846937 - RNA, 19 nt, Artificial Sequence
  Description of Artificial Sequence: Synthetic oligonucleotide
gcggugcaagaaacuuagg

SEQ ID NO: 846938 - RNA, 19 nt, Artificial Sequence
  Description of Artificial Sequence: Synthetic oligonucleotide
ggauccauucaggguggca

SEQ ID NO: 846939 - RNA, 19 nt, Artificial Sequence
  Description of Artificial Sequence: Synthetic oligonucleotide
gcgggaaaaucgggccagg

SEQ ID NO: 846940 - RNA, 19 nt, Artificial Sequence
  Description of Artificial Sequence: Synthetic oligonucleotide
ccaugccgaggucucgcac

SEQ ID NO: 846941 - RNA, 19 nt, Artificial Sequence
  Description of Artificial Sequence: Synthetic oligonucleotide
ggagcggugcaagaaacuu

SEQ ID NO: 846942 - RNA, 19 nt, Artificial Sequence
  Description of Artificial Sequence: Synthetic oligonucleotide
cuaugcgagccaggcagcu

SEQ ID NO: 846943 - RNA, 19 nt, Artificial Sequence
  Description of Artificial Sequence: Synthetic oligonucleotide
gucguuccucacguuucaa

SEQ ID NO: 846944 - RNA, 19 nt, Artificial Sequence
  Description of Artificial Sequence: Synthetic oligonucleotide
gcuccguuccgcccacgca

SEQ ID NO: 846945 - RNA, 19 nt, Artificial Sequence
  Description of Artificial Sequence: Synthetic oligonucleotide
ccgcccacgcagguagucg

SEQ ID NO: 846946 - RNA, 19 nt, Artificial Sequence
  Description of Artificial Sequence: Synthetic oligonucleotide
gaguggcguggcgggaaaa

SEQ ID NO: 846947 - RNA, 19 nt, Artificial Sequence
  Description of Artificial Sequence: Synthetic oligonucleotide
cgagaccgugccacuguug

SEQ ID NO: 846948 - RNA, 19 nt, Artificial Sequence
  Description of Artificial Sequence: Synthetic oligonucleotide
acccugccugucccacaau

SEQ ID NO: 846949 - RNA, 19 nt, Artificial Sequence
  Description of Artificial Sequence: Synthetic oligonucleotide
gccgccccgaguggcgugg

SEQ ID NO: 846950 - RNA, 19 nt, Artificial Sequence
  Description of Artificial Sequence: Synthetic oligonucleotide
cguguggagguggaaacaa

SEQ ID NO: 846951 - RNA, 19 nt, Artificial Sequence
  Description of Artificial Sequence: Synthetic oligonucleotide
cgagguacccgaggccgcc

SEQ ID NO: 846952 - RNA, 19 nt, Artificial Sequence
  Description of Artificial Sequence: Synthetic oligonucleotide
cgcuccguuccgcccacgc

SEQ ID NO: 846953 - RNA, 19 nt, Artificial Sequence
  Description of Artificial Sequence: Synthetic oligonucleotide
ccaggggaaaaggggacua

SEQ ID NO: 846954 - RNA, 19 nt, Artificial Sequence
  Description of Artificial Sequence: Synthetic oligonucleotide
gccucugguaugauccuau

SEQ ID NO: 846955 - RNA, 19 nt, Artificial Sequence
  Description of Artificial Sequence: Synthetic oligonucleotide
gcugacccagagagugcga

SEQ ID NO: 846956 - RNA, 19 nt, Artificial Sequence
  Description of Artificial Sequence: Synthetic oligonucleotide
cgaggccgccccgaguggc

SEQ ID NO: 846957 - RNA, 19 nt, Artificial Sequence
  Description of Artificial Sequence: Synthetic oligonucleotide
ugccgaggucucgcaccuu

SEQ ID NO: 846958 - RNA, 19 nt, Artificial Sequence
  Description of Artificial Sequence: Synthetic oligonucleotide
cuacgucguuccucacguu

SEQ ID NO: 846959 - RNA, 19 nt, Artificial Sequence
  Description of Artificial Sequence: Synthetic oligonucleotide
ccgaguggcguggcgggaa

SEQ ID NO: 846960 - RNA, 19 nt, Artificial Sequence
  Description of Artificial Sequence: Synthetic oligonucleotide
gagcgucggcggcgcugcu

SEQ ID NO: 846961 - RNA, 19 nt, Artificial Sequence
  Description of Artificial Sequence: Synthetic oligonucleotide
ggugcgggcuggagugggu

SEQ ID NO: 846962 - RNA, 19 nt, Artificial Sequence
  Description of Artificial Sequence: Synthetic oligonucleotide
gccuuccaagugucacuuu

SEQ ID NO: 846963 - RNA, 19 nt, Artificial Sequence
  Description of Artificial Sequence: Synthetic oligonucleotide
ccagagccuuuuguacacu

SEQ ID NO: 846964 - RNA, 19 nt, Artificial Sequence
  Description of Artificial Sequence: Synthetic oligonucleotide
cgaguggcguggcgggaaa

SEQ ID NO: 846965 - RNA, 19 nt, Artificial Sequence
  Description of Artificial Sequence: Synthetic oligonucleotide
gcuguccgucucagaacau

SEQ ID NO: 846966 - RNA, 19 nt, Artificial Sequence
  Description of Artificial Sequence: Synthetic oligonucleotide
ccgccccaccugugcagca

SEQ ID NO: 846967 - RNA, 19 nt, Artificial Sequence
  Description of Artificial Sequence: Synthetic oligonucleotide
cuccagcgcuugugacaau

SEQ ID NO: 846968 - RNA, 19 nt, Artificial Sequence
  Description of Artificial Sequence: Synthetic oligonucleotide
cccgaguggcguggcggga

SEQ ID NO: 846969 - RNA, 19 nt, Artificial Sequence
  Description of Artificial Sequence: Synthetic oligonucleotide
ccgagaccgugccacuguu

SEQ ID NO: 846970 - RNA, 19 nt, Artificial Sequence
  Description of Artificial Sequence: Synthetic oligonucleotide
ccgcuccguuccgcccacg

SEQ ID NO: 846971 - RNA, 19 nt, Artificial Sequence
  Description of Artificial Sequence: Synthetic oligonucleotide
cugcuccgagccgcuccgu

SEQ ID NO: 846972 - RNA, 19 nt, Artificial Sequence
  Description of Artificial Sequence: Synthetic oligonucleotide
ccgccccgaguggcguggc

SEQ ID NO: 846973 - RNA, 19 nt, Artificial Sequence
  Description of Artificial Sequence: Synthetic oligonucleotide
cguuccgcccacgcaggua

SEQ ID NO: 846974 - RNA, 19 nt, Artificial Sequence
  Description of Artificial Sequence: Synthetic oligonucleotide
ccguuccgcccacgcaggu

SEQ ID NO: 846975 - RNA, 19 nt, Artificial Sequence
  Description of Artificial Sequence: Synthetic oligonucleotide
gcugccguuuggggaccuu

SEQ ID NO: 846976 - RNA, 19 nt, Artificial Sequence
  Description of Artificial Sequence: Synthetic oligonucleotide
uauuacaaacagaaggugg

SEQ ID NO: 846977 - RNA, 19 nt, Artificial Sequence
  Description of Artificial Sequence: Synthetic oligonucleotide
cacuauuacaaacagaagg

SEQ ID NO: 846978 - RNA, 19 nt, Artificial Sequence
  Description of Artificial Sequence: Synthetic oligonucleotide
auaauaaacagauuguuaa

SEQ ID NO: 846979 - RNA, 19 nt, Artificial Sequence
  Description of Artificial Sequence: Synthetic oligonucleotide
aaacagauuguuaagaucu

SEQ ID NO: 846980 - RNA, 19 nt, Artificial Sequence
  Description of Artificial Sequence: Synthetic oligonucleotide
agaagauuaggccacggcg

SEQ ID NO: 846981 - RNA, 19 nt, Artificial Sequence
  Description of Artificial Sequence: Synthetic oligonucleotide
cugaacuagggcuagaggg

SEQ ID NO: 846982 - RNA, 19 nt, Artificial Sequence
  Description of Artificial Sequence: Synthetic oligonucleotide
ugaacagaagauuaggcca

SEQ ID NO: 846983 - RNA, 19 nt, Artificial Sequence
  Description of Artificial Sequence: Synthetic oligonucleotide
ugacccacuacaaauaacc

SEQ ID NO: 846984 - RNA, 19 nt, Artificial Sequence
  Description of Artificial Sequence: Synthetic oligonucleotide
caugaguucugcuugaacc

SEQ ID NO: 846985 - RNA, 19 nt, Artificial Sequence
  Description of Artificial Sequence: Synthetic oligonucleotide
gggacuaugacuuaguuug

SEQ ID NO: 846986 - RNA, 19 nt, Artificial Sequence
  Description of Artificial Sequence: Synthetic oligonucleotide
ucugucgcaugacauagcg

SEQ ID NO: 846987 - RNA, 19 nt, Artificial Sequence
  Description of Artificial Sequence: Synthetic oligonucleotide
uguauuucuccccaggacu

SEQ ID NO: 846988 - RNA, 19 nt, Artificial Sequence
  Description of Artificial Sequence: Synthetic oligonucleotide
ucgacuggcaaauacagca

SEQ ID NO: 846989 - RNA, 19 nt, Artificial Sequence
  Description of Artificial Sequence: Synthetic oligonucleotide
aaagcgggagggcucaucg

SEQ ID NO: 846990 - RNA, 19 nt, Artificial Sequence
  Description of Artificial Sequence: Synthetic oligonucleotide
ugucgcaugacauagcgcu

SEQ ID NO: 846991 - RNA, 19 nt, Artificial Sequence
  Description of Artificial Sequence: Synthetic oligonucleotide
aagaugaucucaucgcaug

SEQ ID NO: 846992 - RNA, 19 nt, Artificial Sequence
  Description of Artificial Sequence: Synthetic oligonucleotide
ugccaaucaacccuccugg

SEQ ID NO: 846993 - RNA, 19 nt, Artificial Sequence
  Description of Artificial Sequence: Synthetic oligonucleotide
uaaugaagcuucacacucg

SEQ ID NO: 846994 - RNA, 19 nt, Artificial Sequence
  Description of Artificial Sequence: Synthetic oligonucleotide
uacucuggcgaccaaaggc

SEQ ID NO: 846995 - RNA, 19 nt, Artificial Sequence
  Description of Artificial Sequence: Synthetic oligonucleotide
uccuaaugaagcuucacac

SEQ ID NO: 846996 - RNA, 19 nt, Artificial Sequence
  Description of Artificial Sequence: Synthetic oligonucleotide
guagaaguagaugagauca

SEQ ID NO: 846997 - RNA, 19 nt, Artificial Sequence
  Description of Artificial Sequence: Synthetic oligonucleotide
ugugguacacacaaagcac

SEQ ID NO: 846998 - RNA, 19 nt, Artificial Sequence
  Description of Artificial Sequence: Synthetic oligonucleotide
auaaccuuuucucugugug

SEQ ID NO: 846999 - RNA, 19 nt, Artificial Sequence
  Description of Artificial Sequence: Synthetic oligonucleotide
gaucucaucgcaugcuugg

SEQ ID NO: 847000 - RNA, 19 nt, Artificial Sequence
  Description of Artificial Sequence: Synthetic oligonucleotide
aggacucugaacuagggcu

SEQ ID NO: 847001 - RNA, 19 nt, Artificial Sequence
  Description of Artificial Sequence: Synthetic oligonucleotide
aaauacagcaaugucucca

SEQ ID NO: 847002 - RNA, 19 nt, Artificial Sequence
  Description of Artificial Sequence: Synthetic oligonucleotide
augugguacacacaaagca

SEQ ID NO: 847003 - RNA, 19 nt, Artificial Sequence
  Description of Artificial Sequence: Synthetic oligonucleotide
agaugaucucaucgcaugc

SEQ ID NO: 847004 - RNA, 19 nt, Artificial Sequence
  Description of Artificial Sequence: Synthetic oligonucleotide
ucccgcguuacaacgaugg

SEQ ID NO: 847005 - RNA, 19 nt, Artificial Sequence
  Description of Artificial Sequence: Synthetic oligonucleotide
aauugcauuguuucacuau

SEQ ID NO: 847006 - RNA, 19 nt, Artificial Sequence
  Description of Artificial Sequence: Synthetic oligonucleotide
aaugguagaaguagaugag

SEQ ID NO: 847007 - RNA, 19 nt, Artificial Sequence
  Description of Artificial Sequence: Synthetic oligonucleotide
ucugaacuagggcuagagg

SEQ ID NO: 847008 - RNA, 19 nt, Artificial Sequence
  Description of Artificial Sequence: Synthetic oligonucleotide
uggauaguagaguuccugc

SEQ ID NO: 847009 - RNA, 19 nt, Artificial Sequence
  Description of Artificial Sequence: Synthetic oligonucleotide
ugaacuagggcuagagggu

SEQ ID NO: 847010 - RNA, 19 nt, Artificial Sequence
  Description of Artificial Sequence: Synthetic oligonucleotide
gaaucauuguuuaugcuga

SEQ ID NO: 847011 - RNA, 19 nt, Artificial Sequence
  Description of Artificial Sequence: Synthetic oligonucleotide
uucgguugcagcauccuga

SEQ ID NO: 847012 - RNA, 19 nt, Artificial Sequence
  Description of Artificial Sequence: Synthetic oligonucleotide
cauuguuuaugcugacugg

SEQ ID NO: 847013 - RNA, 19 nt, Artificial Sequence
  Description of Artificial Sequence: Synthetic oligonucleotide
ucacuauuacaaacagaag

SEQ ID NO: 847014 - RNA, 19 nt, Artificial Sequence
  Description of Artificial Sequence: Synthetic oligonucleotide
aagauuaggccacggcgug

SEQ ID NO: 847015 - RNA, 19 nt, Artificial Sequence
  Description of Artificial Sequence: Synthetic oligonucleotide
gaagcagcgaucugaagca

SEQ ID NO: 847016 - RNA, 19 nt, Artificial Sequence
  Description of Artificial Sequence: Synthetic oligonucleotide
uguauggcgaggcaucacu

SEQ ID NO: 847017 - RNA, 19 nt, Artificial Sequence
  Description of Artificial Sequence: Synthetic oligonucleotide
aguagaccuugccagaaug

SEQ ID NO: 847018 - RNA, 19 nt, Artificial Sequence
  Description of Artificial Sequence: Synthetic oligonucleotide
cauucaggagagaagauga

SEQ ID NO: 847019 - RNA, 19 nt, Artificial Sequence
  Description of Artificial Sequence: Synthetic oligonucleotide
gaccuugccagaaugguag

SEQ ID NO: 847020 - RNA, 19 nt, Artificial Sequence
  Description of Artificial Sequence: Synthetic oligonucleotide
uuauccuguauuucucccc

SEQ ID NO: 847021 - RNA, 19 nt, Artificial Sequence
  Description of Artificial Sequence: Synthetic oligonucleotide
uguccaggaguuucugugg

SEQ ID NO: 847022 - RNA, 19 nt, Artificial Sequence
  Description of Artificial Sequence: Synthetic oligonucleotide
ucgugaacagaagauuagg

SEQ ID NO: 847023 - RNA, 19 nt, Artificial Sequence
  Description of Artificial Sequence: Synthetic oligonucleotide
gucgcgaaagcugacacgg

SEQ ID NO: 847024 - RNA, 19 nt, Artificial Sequence
  Description of Artificial Sequence: Synthetic oligonucleotide
uauggcgaggcaucacugg

SEQ ID NO: 847025 - RNA, 19 nt, Artificial Sequence
  Description of Artificial Sequence: Synthetic oligonucleotide
caugugguacacacaaagc

SEQ ID NO: 847026 - RNA, 19 nt, Artificial Sequence
  Description of Artificial Sequence: Synthetic oligonucleotide
accuuuaugggugugccuc

SEQ ID NO: 847027 - RNA, 19 nt, Artificial Sequence
  Description of Artificial Sequence: Synthetic oligonucleotide
agugcucgaccacaacggc

SEQ ID NO: 847028 - RNA, 19 nt, Artificial Sequence
  Description of Artificial Sequence: Synthetic oligonucleotide
aagccguggaagcugugag

SEQ ID NO: 847029 - RNA, 19 nt, Artificial Sequence
  Description of Artificial Sequence: Synthetic oligonucleotide
ugugcggugacugugccug

SEQ ID NO: 847030 - RNA, 19 nt, Artificial Sequence
  Description of Artificial Sequence: Synthetic oligonucleotide
aacagggacuaugacuuag

SEQ ID NO: 847031 - RNA, 19 nt, Artificial Sequence
  Description of Artificial Sequence: Synthetic oligonucleotide
guuacaacgaugguggcca

SEQ ID NO: 847032 - RNA, 19 nt, Artificial Sequence
  Description of Artificial Sequence: Synthetic oligonucleotide
acaugaguucugcuugaac

SEQ ID NO: 847033 - RNA, 19 nt, Artificial Sequence
  Description of Artificial Sequence: Synthetic oligonucleotide
aggaguugcuuuuauccug

SEQ ID NO: 847034 - RNA, 19 nt, Artificial Sequence
  Description of Artificial Sequence: Synthetic oligonucleotide
caaagggucgcgaaagcug

SEQ ID NO: 847035 - RNA, 19 nt, Artificial Sequence
  Description of Artificial Sequence: Synthetic oligonucleotide
uguuuaugcugacuggaua

SEQ ID NO: 847036 - RNA, 19 nt, Artificial Sequence
  Description of Artificial Sequence: Synthetic oligonucleotide
aggacuguugacauagggg

SEQ ID NO: 847037 - RNA, 19 nt, Artificial Sequence
  Description of Artificial Sequence: Synthetic oligonucleotide
uuaaagguuucgguugcag

SEQ ID NO: 847038 - RNA, 19 nt, Artificial Sequence
  Description of Artificial Sequence: Synthetic oligonucleotide
ugccuucaagccacgaugc

SEQ ID NO: 847039 - RNA, 19 nt, Artificial Sequence
  Description of Artificial Sequence: Synthetic oligonucleotide
auaguagaguuccugcuaa

SEQ ID NO: 847040 - RNA, 19 nt, Artificial Sequence
  Description of Artificial Sequence: Synthetic oligonucleotide
cugugggugguucaggagc

SEQ ID NO: 847041 - RNA, 19 nt, Artificial Sequence
  Description of Artificial Sequence: Synthetic oligonucleotide
gacuaugacuuaguuuggg

SEQ ID NO: 847042 - RNA, 19 nt, Artificial Sequence
  Description of Artificial Sequence: Synthetic oligonucleotide
ugaucucaucgcaugcuug

SEQ ID NO: 847043 - RNA, 19 nt, Artificial Sequence
  Description of Artificial Sequence: Synthetic oligonucleotide
ugcucgacuggcaaauaca

SEQ ID NO: 847044 - RNA, 19 nt, Artificial Sequence
  Description of Artificial Sequence: Synthetic oligonucleotide
gcaugugguacacacaaag

SEQ ID NO: 847045 - RNA, 19 nt, Artificial Sequence
  Description of Artificial Sequence: Synthetic oligonucleotide
accaaagggucgcgaaagc

SEQ ID NO: 847046 - RNA, 19 nt, Artificial Sequence
  Description of Artificial Sequence: Synthetic oligonucleotide
guaauggucacugggaaga

SEQ ID NO: 847047 - RNA, 19 nt, Artificial Sequence
  Description of Artificial Sequence: Synthetic oligonucleotide
ucugaagcaugccaguguu

SEQ ID NO: 847048 - RNA, 19 nt, Artificial Sequence
  Description of Artificial Sequence: Synthetic oligonucleotide
aaucaacccuccugggugu

SEQ ID NO: 847049 - RNA, 19 nt, Artificial Sequence
  Description of Artificial Sequence: Synthetic oligonucleotide
gacuucguggccugcggcg

SEQ ID NO: 847050 - RNA, 19 nt, Artificial Sequence
  Description of Artificial Sequence: Synthetic oligonucleotide
cucaucgcaugcuuggcag

SEQ ID NO: 847051 - RNA, 19 nt, Artificial Sequence
  Description of Artificial Sequence: Synthetic oligonucleotide
cucgugaacagaagauuag

SEQ ID NO: 847052 - RNA, 19 nt, Artificial Sequence
  Description of Artificial Sequence: Synthetic oligonucleotide
aagagugacccacuacaaa

SEQ ID NO: 847053 - RNA, 19 nt, Artificial Sequence
  Description of Artificial Sequence: Synthetic oligonucleotide
auggcgaggcaucacuggg

SEQ ID NO: 847054 - RNA, 19 nt, Artificial Sequence
  Description of Artificial Sequence: Synthetic oligonucleotide
cuccguacauucaggagag

SEQ ID NO: 847055 - RNA, 19 nt, Artificial Sequence
  Description of Artificial Sequence: Synthetic oligonucleotide
ucggccuccguacauucag

SEQ ID NO: 847056 - RNA, 19 nt, Artificial Sequence
  Description of Artificial Sequence: Synthetic oligonucleotide
ggacuguugacauagggga

SEQ ID NO: 847057 - RNA, 19 nt, Artificial Sequence
  Description of Artificial Sequence: Synthetic oligonucleotide
aguagaguuccugcuaaag

SEQ ID NO: 847058 - RNA, 19 nt, Artificial Sequence
  Description of Artificial Sequence: Synthetic oligonucleotide
gaggacucugaacuagggc

SEQ ID NO: 847059 - RNA, 19 nt, Artificial Sequence
  Description of Artificial Sequence: Synthetic oligonucleotide
aaggcucgcaacucuuucu

SEQ ID NO: 847060 - RNA, 19 nt, Artificial Sequence
  Description of Artificial Sequence: Synthetic oligonucleotide
aaagggucgcgaaagcuga

SEQ ID NO: 847061 - RNA, 19 nt, Artificial Sequence
  Description of Artificial Sequence: Synthetic oligonucleotide
ugggaagauucgaacggug

SEQ ID NO: 847062 - RNA, 19 nt, Artificial Sequence
  Description of Artificial Sequence: Synthetic oligonucleotide
ucucaucgcaugcuuggca

SEQ ID NO: 847063 - RNA, 19 nt, Artificial Sequence
  Description of Artificial Sequence: Synthetic oligonucleotide
gauaguagaguuccugcua

SEQ ID NO: 847064 - RNA, 19 nt, Artificial Sequence
  Description of Artificial Sequence: Synthetic oligonucleotide
cugccuucaagccacgaug

SEQ ID NO: 847065 - RNA, 19 nt, Artificial Sequence
  Description of Artificial Sequence: Synthetic oligonucleotide
agcgcugcccuccuaauga

SEQ ID NO: 847066 - RNA, 19 nt, Artificial Sequence
  Description of Artificial Sequence: Synthetic oligonucleotide
uccugcuaaaguugccugc

SEQ ID NO: 847067 - RNA, 19 nt, Artificial Sequence
  Description of Artificial Sequence: Synthetic oligonucleotide
agccguggaagcugugagc

SEQ ID NO: 847068 - RNA, 19 nt, Artificial Sequence
  Description of Artificial Sequence: Synthetic oligonucleotide
ggggaaucauuguuuaugc

SEQ ID NO: 847069 - RNA, 19 nt, Artificial Sequence
  Description of Artificial Sequence: Synthetic oligonucleotide
uuaugggugugccucgguc

SEQ ID NO: 847070 - RNA, 19 nt, Artificial Sequence
  Description of Artificial Sequence: Synthetic oligonucleotide
ugcucgaccacaacggcua

SEQ ID NO: 847071 - RNA, 19 nt, Artificial Sequence
  Description of Artificial Sequence: Synthetic oligonucleotide
cgcguuacaacgauggugg

SEQ ID NO: 847072 - RNA, 19 nt, Artificial Sequence
  Description of Artificial Sequence: Synthetic oligonucleotide
ucaggcauagaguggcggu

SEQ ID NO: 847073 - RNA, 19 nt, Artificial Sequence
  Description of Artificial Sequence: Synthetic oligonucleotide
ucgguugcagcauccugag

SEQ ID NO: 847074 - RNA, 19 nt, Artificial Sequence
  Description of Artificial Sequence: Synthetic oligonucleotide
cagaagauuaggccacggc

SEQ ID NO: 847075 - RNA, 19 nt, Artificial Sequence
  Description of Artificial Sequence: Synthetic oligonucleotide
gauucucccgcuugcgcug

SEQ ID NO: 847076 - RNA, 19 nt, Artificial Sequence
  Description of Artificial Sequence: Synthetic oligonucleotide
gcugugaagggcuaaauaa

SEQ ID NO: 847077 - RNA, 19 nt, Artificial Sequence
  Description of Artificial Sequence: Synthetic oligonucleotide
aucugaagcaugccagugu

SEQ ID NO: 847078 - RNA, 19 nt, Artificial Sequence
  Description of Artificial Sequence: Synthetic oligonucleotide
acgaugcaguucuugucuc

SEQ ID NO: 847079 - RNA, 19 nt, Artificial Sequence
  Description of Artificial Sequence: Synthetic oligonucleotide
uagaaguagaugagaucaa

SEQ ID NO: 847080 - RNA, 19 nt, Artificial Sequence
  Description of Artificial Sequence: Synthetic oligonucleotide
cuugucucguguauggcga

SEQ ID NO: 847081 - RNA, 19 nt, Artificial Sequence
  Description of Artificial Sequence: Synthetic oligonucleotide
cucagacaccaaagggucg

SEQ ID NO: 847082 - RNA, 19 nt, Artificial Sequence
  Description of Artificial Sequence: Synthetic oligonucleotide
auucgaacggugccccguc

SEQ ID NO: 847083 - RNA, 19 nt, Artificial Sequence
  Description of Artificial Sequence: Synthetic oligonucleotide
gccagaaugguagaaguag

SEQ ID NO: 847084 - RNA, 19 nt, Artificial Sequence
  Description of Artificial Sequence: Synthetic oligonucleotide
guauuucuccccaggacug

SEQ ID NO: 847085 - RNA, 19 nt, Artificial Sequence
  Description of Artificial Sequence: Synthetic oligonucleotide
uuuaugcugacuggauagu

SEQ ID NO: 847086 - RNA, 19 nt, Artificial Sequence
  Description of Artificial Sequence: Synthetic oligonucleotide
ugaucccgcguuacaacga

SEQ ID NO: 847087 - RNA, 19 nt, Artificial Sequence
  Description of Artificial Sequence: Synthetic oligonucleotide
aagcgggagggcucaucgg

SEQ ID NO: 847088 - RNA, 19 nt, Artificial Sequence
  Description of Artificial Sequence: Synthetic oligonucleotide
gugcacucaggguucggcg

SEQ ID NO: 847089 - RNA, 19 nt, Artificial Sequence
  Description of Artificial Sequence: Synthetic oligonucleotide
ucgcaugacauagcgcugc

SEQ ID NO: 847090 - RNA, 19 nt, Artificial Sequence
  Description of Artificial Sequence: Synthetic oligonucleotide
cucgacuggcaaauacagc

SEQ ID NO: 847091 - RNA, 19 nt, Artificial Sequence
  Description of Artificial Sequence: Synthetic oligonucleotide
caucggagccugcagcagg

SEQ ID NO: 847092 - RNA, 19 nt, Artificial Sequence
  Description of Artificial Sequence: Synthetic oligonucleotide
aucucaucgcaugcuuggc

SEQ ID NO: 847093 - RNA, 19 nt, Artificial Sequence
  Description of Artificial Sequence: Synthetic oligonucleotide
agcuucacacucgaagcag

SEQ ID NO: 847094 - RNA, 19 nt, Artificial Sequence
  Description of Artificial Sequence: Synthetic oligonucleotide
guacucuggcgaccaaagg

SEQ ID NO: 847095 - RNA, 19 nt, Artificial Sequence
  Description of Artificial Sequence: Synthetic oligonucleotide
acccacuacaaauaaccuu

SEQ ID NO: 847096 - RNA, 19 nt, Artificial Sequence
  Description of Artificial Sequence: Synthetic oligonucleotide
cauucagcaugguggcgcc

SEQ ID NO: 847097 - RNA, 19 nt, Artificial Sequence
  Description of Artificial Sequence: Synthetic oligonucleotide
cuggauaguagaguuccug

SEQ ID NO: 847098 - RNA, 19 nt, Artificial Sequence
  Description of Artificial Sequence: Synthetic oligonucleotide
ugcuaaaguugccugccuu

SEQ ID NO: 847099 - RNA, 19 nt, Artificial Sequence
  Description of Artificial Sequence: Synthetic oligonucleotide
gaaagggcggcccagcagu

SEQ ID NO: 847100 - RNA, 19 nt, Artificial Sequence
  Description of Artificial Sequence: Synthetic oligonucleotide
gugguucaggagcaccgcg

SEQ ID NO: 847101 - RNA, 19 nt, Artificial Sequence
  Description of Artificial Sequence: Synthetic oligonucleotide
agggacuaugacuuaguuu

SEQ ID NO: 847102 - RNA, 19 nt, Artificial Sequence
  Description of Artificial Sequence: Synthetic oligonucleotide
caucgcaugcuuggcagcg

SEQ ID NO: 847103 - RNA, 19 nt, Artificial Sequence
  Description of Artificial Sequence: Synthetic oligonucleotide
ugcacucaggguucggcgu

SEQ ID NO: 847104 - RNA, 19 nt, Artificial Sequence
  Description of Artificial Sequence: Synthetic oligonucleotide
ugagugguccuggaccugc

SEQ ID NO: 847105 - RNA, 19 nt, Artificial Sequence
  Description of Artificial Sequence: Synthetic oligonucleotide
cucugaacuagggcuagag

SEQ ID NO: 847106 - RNA, 19 nt, Artificial Sequence
  Description of Artificial Sequence: Synthetic oligonucleotide
gaagauuaggccacggcgu

SEQ ID NO: 847107 - RNA, 19 nt, Artificial Sequence
  Description of Artificial Sequence: Synthetic oligonucleotide
acaccuggacaaguggcgg

SEQ ID NO: 847108 - RNA, 19 nt, Artificial Sequence
  Description of Artificial Sequence: Synthetic oligonucleotide
acaacggcuacagcagaag

SEQ ID NO: 847109 - RNA, 19 nt, Artificial Sequence
  Description of Artificial Sequence: Synthetic oligonucleotide
agguuucgguugcagcauc

SEQ ID NO: 847110 - RNA, 19 nt, Artificial Sequence
  Description of Artificial Sequence: Synthetic oligonucleotide
uuuaugggugugccucggu

SEQ ID NO: 847111 - RNA, 19 nt, Artificial Sequence
  Description of Artificial Sequence: Synthetic oligonucleotide
ucaucgcaugcuuggcagc

SEQ ID NO: 847112 - RNA, 19 nt, Artificial Sequence
  Description of Artificial Sequence: Synthetic oligonucleotide
agcgggagggcucaucgga

SEQ ID NO: 847113 - RNA, 19 nt, Artificial Sequence
  Description of Artificial Sequence: Synthetic oligonucleotide
ugccagaaugguagaagua

SEQ ID NO: 847114 - RNA, 19 nt, Artificial Sequence
  Description of Artificial Sequence: Synthetic oligonucleotide
aggcauagaguggcggugg

SEQ ID NO: 847115 - RNA, 19 nt, Artificial Sequence
  Description of Artificial Sequence: Synthetic oligonucleotide
acccaugugccagugccgg

SEQ ID NO: 847116 - RNA, 19 nt, Artificial Sequence
  Description of Artificial Sequence: Synthetic oligonucleotide
aucggagccugcagcaggc

SEQ ID NO: 847117 - RNA, 19 nt, Artificial Sequence
  Description of Artificial Sequence: Synthetic oligonucleotide
agggcgcaggcauucagca

SEQ ID NO: 847118 - RNA, 19 nt, Artificial Sequence
  Description of Artificial Sequence: Synthetic oligonucleotide
ucgcgaaagcugacacggg

SEQ ID NO: 847119 - RNA, 19 nt, Artificial Sequence
  Description of Artificial Sequence: Synthetic oligonucleotide
aaccugaucccgcguuaca

SEQ ID NO: 847120 - RNA, 19 nt, Artificial Sequence
  Description of Artificial Sequence: Synthetic oligonucleotide
ggaacaggauccugaauca

SEQ ID NO: 847121 - RNA, 19 nt, Artificial Sequence
  Description of Artificial Sequence: Synthetic oligonucleotide
ugucucguguauggcgagg

SEQ ID NO: 847122 - RNA, 19 nt, Artificial Sequence
  Description of Artificial Sequence: Synthetic oligonucleotide
aucauuguuuaugcugacu

SEQ ID NO: 847123 - RNA, 19 nt, Artificial Sequence
  Description of Artificial Sequence: Synthetic oligonucleotide
agauucgaacggugccccg

SEQ ID NO: 847124 - RNA, 19 nt, Artificial Sequence
  Description of Artificial Sequence: Synthetic oligonucleotide
augaucucaucgcaugcuu

SEQ ID NO: 847125 - RNA, 19 nt, Artificial Sequence
  Description of Artificial Sequence: Synthetic oligonucleotide
agcugugcggugacugugc

SEQ ID NO: 847126 - RNA, 19 nt, Artificial Sequence
  Description of Artificial Sequence: Synthetic oligonucleotide
cuuuaugggugugccucgg

SEQ ID NO: 847127 - RNA, 19 nt, Artificial Sequence
  Description of Artificial Sequence: Synthetic oligonucleotide
acagauuguuaagaucuau

SEQ ID NO: 847128 - RNA, 19 nt, Artificial Sequence
  Description of Artificial Sequence: Synthetic oligonucleotide
ugagcugugcggugacugu

SEQ ID NO: 847129 - RNA, 19 nt, Artificial Sequence
  Description of Artificial Sequence: Synthetic oligonucleotide
cugucgcaugacauagcgc

SEQ ID NO: 847130 - RNA, 19 nt, Artificial Sequence
  Description of Artificial Sequence: Synthetic oligonucleotide
ucucguguauggcgaggca

SEQ ID NO: 847131 - RNA, 19 nt, Artificial Sequence
  Description of Artificial Sequence: Synthetic oligonucleotide
uagcgcugcccuccuaaug

SEQ ID NO: 847132 - RNA, 19 nt, Artificial Sequence
  Description of Artificial Sequence: Synthetic oligonucleotide
ggaacaacagggacuauga

SEQ ID NO: 847133 - RNA, 19 nt, Artificial Sequence
  Description of Artificial Sequence: Synthetic oligonucleotide
uuccagccugccaaucaac

SEQ ID NO: 847134 - RNA, 19 nt, Artificial Sequence
  Description of Artificial Sequence: Synthetic oligonucleotide
accuggacaaguggcgggg

SEQ ID NO: 847135 - RNA, 19 nt, Artificial Sequence
  Description of Artificial Sequence: Synthetic oligonucleotide
acggcgugguaggaaaggg

SEQ ID NO: 847136 - RNA, 19 nt, Artificial Sequence
  Description of Artificial Sequence: Synthetic oligonucleotide
agauuaggccacggcgugg

SEQ ID NO: 847137 - RNA, 19 nt, Artificial Sequence
  Description of Artificial Sequence: Synthetic oligonucleotide
ugaaggcucgcaacucuuu

SEQ ID NO: 847138 - RNA, 19 nt, Artificial Sequence
  Description of Artificial Sequence: Synthetic oligonucleotide
ggcggugcaguacugugcc

SEQ ID NO: 847139 - RNA, 19 nt, Artificial Sequence
  Description of Artificial Sequence: Synthetic oligonucleotide
cugccuugguacaggugcc

SEQ ID NO: 847140 - RNA, 19 nt, Artificial Sequence
  Description of Artificial Sequence: Synthetic oligonucleotide
cucgcaacucuuucuucuc

SEQ ID NO: 847141 - RNA, 19 nt, Artificial Sequence
  Description of Artificial Sequence: Synthetic oligonucleotide
acaccaaagggucgcgaaa

SEQ ID NO: 847142 - RNA, 19 nt, Artificial Sequence
  Description of Artificial Sequence: Synthetic oligonucleotide
uugggagaguuuugucuuc

SEQ ID NO: 847143 - RNA, 19 nt, Artificial Sequence
  Description of Artificial Sequence: Synthetic oligonucleotide
ugagcugugaagggcuaaa

SEQ ID NO: 847144 - RNA, 19 nt, Artificial Sequence
  Description of Artificial Sequence: Synthetic oligonucleotide
gcuaaaguugccugccuuc

SEQ ID NO: 847145 - RNA, 19 nt, Artificial Sequence
  Description of Artificial Sequence: Synthetic oligonucleotide
gcucgacuggcaaauacag

SEQ ID NO: 847146 - RNA, 19 nt, Artificial Sequence
  Description of Artificial Sequence: Synthetic oligonucleotide
aacagauuguuaagaucua

SEQ ID NO: 847147 - RNA, 19 nt, Artificial Sequence
  Description of Artificial Sequence: Synthetic oligonucleotide
gacccaugugccagugccg

SEQ ID NO: 847148 - RNA, 19 nt, Artificial Sequence
  Description of Artificial Sequence: Synthetic oligonucleotide
ggucgcgaaagcugacacg

SEQ ID NO: 847149 - RNA, 19 nt, Artificial Sequence
  Description of Artificial Sequence: Synthetic oligonucleotide
caggcucgugaacagaaga

SEQ ID NO: 847150 - RNA, 19 nt, Artificial Sequence
  Description of Artificial Sequence: Synthetic oligonucleotide
gcgaucugaagcaugccag

SEQ ID NO: 847151 - RNA, 19 nt, Artificial Sequence
  Description of Artificial Sequence: Synthetic oligonucleotide
cugaagcaugccaguguug

SEQ ID NO: 847152 - RNA, 19 nt, Artificial Sequence
  Description of Artificial Sequence: Synthetic oligonucleotide
gucucguguauggcgaggc

SEQ ID NO: 847153 - RNA, 19 nt, Artificial Sequence
  Description of Artificial Sequence: Synthetic oligonucleotide
gccgauguguuccccacag

SEQ ID NO: 847154 - RNA, 19 nt, Artificial Sequence
  Description of Artificial Sequence: Synthetic oligonucleotide
uaguagaguuccugcuaaa

SEQ ID NO: 847155 - RNA, 19 nt, Artificial Sequence
  Description of Artificial Sequence: Synthetic oligonucleotide
gggaagauucgaacggugc

SEQ ID NO: 847156 - RNA, 19 nt, Artificial Sequence
  Description of Artificial Sequence: Synthetic oligonucleotide
ugcggugacugugccugcg

SEQ ID NO: 847157 - RNA, 19 nt, Artificial Sequence
  Description of Artificial Sequence: Synthetic oligonucleotide
ucaacccuccugggugugg

SEQ ID NO: 847158 - RNA, 19 nt, Artificial Sequence
  Description of Artificial Sequence: Synthetic oligonucleotide
aagggucgcgaaagcugac

SEQ ID NO: 847159 - RNA, 19 nt, Artificial Sequence
  Description of Artificial Sequence: Synthetic oligonucleotide
guauggcgaggcaucacug

SEQ ID NO: 847160 - RNA, 19 nt, Artificial Sequence
  Description of Artificial Sequence: Synthetic oligonucleotide
gaagggcuaaauaaauaau

SEQ ID NO: 847161 - RNA, 19 nt, Artificial Sequence
  Description of Artificial Sequence: Synthetic oligonucleotide
cacggggcguacucuggcg

SEQ ID NO: 847162 - RNA, 19 nt, Artificial Sequence
  Description of Artificial Sequence: Synthetic oligonucleotide
gaugaucucaucgcaugcu

SEQ ID NO: 847163 - RNA, 19 nt, Artificial Sequence
  Description of Artificial Sequence: Synthetic oligonucleotide
cacggcgugguaggaaagg

SEQ ID NO: 847164 - RNA, 19 nt, Artificial Sequence
  Description of Artificial Sequence: Synthetic oligonucleotide
gaaccugaucccgcguuac

SEQ ID NO: 847165 - RNA, 19 nt, Artificial Sequence
  Description of Artificial Sequence: Synthetic oligonucleotide
caggauccugaaucagaac

SEQ ID NO: 847166 - RNA, 19 nt, Artificial Sequence
  Description of Artificial Sequence: Synthetic oligonucleotide
gagggcgcaggcauucagc

SEQ ID NO: 847167 - RNA, 19 nt, Artificial Sequence
  Description of Artificial Sequence: Synthetic oligonucleotide
agaaccugaucccgcguua

SEQ ID NO: 847168 - RNA, 19 nt, Artificial Sequence
  Description of Artificial Sequence: Synthetic oligonucleotide
cacgaugcaguucuugucu

SEQ ID NO: 847169 - RNA, 19 nt, Artificial Sequence
  Description of Artificial Sequence: Synthetic oligonucleotide
agcgagggcgcaggcauuc

SEQ ID NO: 847170 - RNA, 19 nt, Artificial Sequence
  Description of Artificial Sequence: Synthetic oligonucleotide
cuccgaucuguuuuccaca

SEQ ID NO: 847171 - RNA, 19 nt, Artificial Sequence
  Description of Artificial Sequence: Synthetic oligonucleotide
gcagcgaucugaagcaugc

SEQ ID NO: 847172 - RNA, 19 nt, Artificial Sequence
  Description of Artificial Sequence: Synthetic oligonucleotide
ugguggcgcccacaguaga

SEQ ID NO: 847173 - RNA, 19 nt, Artificial Sequence
  Description of Artificial Sequence: Synthetic oligonucleotide
uggcgcccacaguagaccu

SEQ ID NO: 847174 - RNA, 19 nt, Artificial Sequence
  Description of Artificial Sequence: Synthetic oligonucleotide
ccuccguacauucaggaga

SEQ ID NO: 847175 - RNA, 19 nt, Artificial Sequence
  Description of Artificial Sequence: Synthetic oligonucleotide
aggcucgcaacucuuucuu

SEQ ID NO: 847176 - RNA, 19 nt, Artificial Sequence
  Description of Artificial Sequence: Synthetic oligonucleotide
gagggcucaucggagccug

SEQ ID NO: 847177 - RNA, 19 nt, Artificial Sequence
  Description of Artificial Sequence: Synthetic oligonucleotide
ggcgaggcaucacugggug

SEQ ID NO: 847178 - RNA, 19 nt, Artificial Sequence
  Description of Artificial Sequence: Synthetic oligonucleotide
cgaaagcugacacggggcg

SEQ ID NO: 847179 - RNA, 19 nt, Artificial Sequence
  Description of Artificial Sequence: Synthetic oligonucleotide
ccuccgaucuguuuuccac

SEQ ID NO: 847180 - RNA, 19 nt, Artificial Sequence
  Description of Artificial Sequence: Synthetic oligonucleotide
ccaguaauggucacuggga

SEQ ID NO: 847181 - RNA, 19 nt, Artificial Sequence
  Description of Artificial Sequence: Synthetic oligonucleotide
agggcggcccagcagugcu

SEQ ID NO: 847182 - RNA, 19 nt, Artificial Sequence
  Description of Artificial Sequence: Synthetic oligonucleotide
gaggugcacucaggguucg

SEQ ID NO: 847183 - RNA, 19 nt, Artificial Sequence
  Description of Artificial Sequence: Synthetic oligonucleotide
ggacuaugacuuaguuugg

SEQ ID NO: 847184 - RNA, 19 nt, Artificial Sequence
  Description of Artificial Sequence: Synthetic oligonucleotide
gccaaucaacccuccuggg

SEQ ID NO: 847185 - RNA, 19 nt, Artificial Sequence
  Description of Artificial Sequence: Synthetic oligonucleotide
ucaagccacgaugcaguuc

SEQ ID NO: 847186 - RNA, 19 nt, Artificial Sequence
  Description of Artificial Sequence: Synthetic oligonucleotide
agcagcgaucugaagcaug

SEQ ID NO: 847187 - RNA, 19 nt, Artificial Sequence
  Description of Artificial Sequence: Synthetic oligonucleotide
gaacggugccccgucccag

SEQ ID NO: 847188 - RNA, 19 nt, Artificial Sequence
  Description of Artificial Sequence: Synthetic oligonucleotide
ggauaguagaguuccugcu

SEQ ID NO: 847189 - RNA, 19 nt, Artificial Sequence
  Description of Artificial Sequence: Synthetic oligonucleotide
acagggacuaugacuuagu

SEQ ID NO: 847190 - RNA, 19 nt, Artificial Sequence
  Description of Artificial Sequence: Synthetic oligonucleotide
accugaucccgcguuacaa

SEQ ID NO: 847191 - RNA, 19 nt, Artificial Sequence
  Description of Artificial Sequence: Synthetic oligonucleotide
guggcgcccacaguagacc

SEQ ID NO: 847192 - RNA, 19 nt, Artificial Sequence
  Description of Artificial Sequence: Synthetic oligonucleotide
auagcgcugcccuccuaau

SEQ ID NO: 847193 - RNA, 19 nt, Artificial Sequence
  Description of Artificial Sequence: Synthetic oligonucleotide
gggucgcgaaagcugacac

SEQ ID NO: 847194 - RNA, 19 nt, Artificial Sequence
  Description of Artificial Sequence: Synthetic oligonucleotide
cgcgaaagcugacacgggg

SEQ ID NO: 847195 - RNA, 19 nt, Artificial Sequence
  Description of Artificial Sequence: Synthetic oligonucleotide
gacugugccugcgcuccag

SEQ ID NO: 847196 - RNA, 19 nt, Artificial Sequence
  Description of Artificial Sequence: Synthetic oligonucleotide
gccuccguacauucaggag

SEQ ID NO: 847197 - RNA, 19 nt, Artificial Sequence
  Description of Artificial Sequence: Synthetic oligonucleotide
ggugcacucaggguucggc

SEQ ID NO: 847198 - RNA, 19 nt, Artificial Sequence
  Description of Artificial Sequence: Synthetic oligonucleotide
cccacuacaaauaaccuuu

SEQ ID NO: 847199 - RNA, 19 nt, Artificial Sequence
  Description of Artificial Sequence: Synthetic oligonucleotide
ucccgcuugcgcugcuggc

SEQ ID NO: 847200 - RNA, 19 nt, Artificial Sequence
  Description of Artificial Sequence: Synthetic oligonucleotide
gcgaaagcugacacggggc

SEQ ID NO: 847201 - RNA, 19 nt, Artificial Sequence
  Description of Artificial Sequence: Synthetic oligonucleotide
agggucgcgaaagcugaca

SEQ ID NO: 847202 - RNA, 19 nt, Artificial Sequence
  Description of Artificial Sequence: Synthetic oligonucleotide
gguuucgguugcagcaucc

SEQ ID NO: 847203 - RNA, 19 nt, Artificial Sequence
  Description of Artificial Sequence: Synthetic oligonucleotide
gacccacuacaaauaaccu

SEQ ID NO: 847204 - RNA, 19 nt, Artificial Sequence
  Description of Artificial Sequence: Synthetic oligonucleotide
ugucugcgacgccgguggc

SEQ ID NO: 847205 - RNA, 19 nt, Artificial Sequence
  Description of Artificial Sequence: Synthetic oligonucleotide
ggcucaucggagccugcag

SEQ ID NO: 847206 - RNA, 19 nt, Artificial Sequence
  Description of Artificial Sequence: Synthetic oligonucleotide
cuuggcagcgagggcgcag

SEQ ID NO: 847207 - RNA, 19 nt, Artificial Sequence
  Description of Artificial Sequence: Synthetic oligonucleotide
gucgcaugacauagcgcug

SEQ ID NO: 847208 - RNA, 19 nt, Artificial Sequence
  Description of Artificial Sequence: Synthetic oligonucleotide
aagcagcgaucugaagcau

SEQ ID NO: 847209 - RNA, 19 nt, Artificial Sequence
  Description of Artificial Sequence: Synthetic oligonucleotide
gauucgaacggugccccgu

SEQ ID NO: 847210 - RNA, 19 nt, Artificial Sequence
  Description of Artificial Sequence: Synthetic oligonucleotide
agcaggcgcagcagugggg

SEQ ID NO: 847211 - RNA, 19 nt, Artificial Sequence
  Description of Artificial Sequence: Synthetic oligonucleotide
acuggauaguagaguuccu

SEQ ID NO: 847212 - RNA, 19 nt, Artificial Sequence
  Description of Artificial Sequence: Synthetic oligonucleotide
gaucccgcguuacaacgau

SEQ ID NO: 847213 - RNA, 19 nt, Artificial Sequence
  Description of Artificial Sequence: Synthetic oligonucleotide
uuacaacgaugguggccau

SEQ ID NO: 847214 - RNA, 19 nt, Artificial Sequence
  Description of Artificial Sequence: Synthetic oligonucleotide
ggcaccaaggccugcucga

SEQ ID NO: 847215 - RNA, 19 nt, Artificial Sequence
  Description of Artificial Sequence: Synthetic oligonucleotide
cugucucggauguccccuc

SEQ ID NO: 847216 - RNA, 19 nt, Artificial Sequence
  Description of Artificial Sequence: Synthetic oligonucleotide
gcucgugaacagaagauua

SEQ ID NO: 847217 - RNA, 19 nt, Artificial Sequence
  Description of Artificial Sequence: Synthetic oligonucleotide
ggugguucaggagcaccgc

SEQ ID NO: 847218 - RNA, 19 nt, Artificial Sequence
  Description of Artificial Sequence: Synthetic oligonucleotide
ccaugugccagugccggcc

SEQ ID NO: 847219 - RNA, 19 nt, Artificial Sequence
  Description of Artificial Sequence: Synthetic oligonucleotide
ccgcguuacaacgauggug

SEQ ID NO: 847220 - RNA, 19 nt, Artificial Sequence
  Description of Artificial Sequence: Synthetic oligonucleotide
gcacucaggguucggcgug

SEQ ID NO: 847221 - RNA, 19 nt, Artificial Sequence
  Description of Artificial Sequence: Synthetic oligonucleotide
gcucgcaacucuuucuucu

SEQ ID NO: 847222 - RNA, 19 nt, Artificial Sequence
  Description of Artificial Sequence: Synthetic oligonucleotide
cagcgaucugaagcaugcc

SEQ ID NO: 847223 - RNA, 19 nt, Artificial Sequence
  Description of Artificial Sequence: Synthetic oligonucleotide
ggcauucagcaugguggcg

SEQ ID NO: 847224 - RNA, 19 nt, Artificial Sequence
  Description of Artificial Sequence: Synthetic oligonucleotide
gacggcucugucgcaugac

SEQ ID NO: 847225 - RNA, 19 nt, Artificial Sequence
  Description of Artificial Sequence: Synthetic oligonucleotide
ggcgaccaaaggcauuauc

SEQ ID NO: 847226 - RNA, 19 nt, Artificial Sequence
  Description of Artificial Sequence: Synthetic oligonucleotide
caccuccgaucuguuuucc

SEQ ID NO: 847227 - RNA, 19 nt, Artificial Sequence
  Description of Artificial Sequence: Synthetic oligonucleotide
guguauggcgaggcaucac

SEQ ID NO: 847228 - RNA, 19 nt, Artificial Sequence
  Description of Artificial Sequence: Synthetic oligonucleotide
uccguacauucaggagaga

SEQ ID NO: 847229 - RNA, 19 nt, Artificial Sequence
  Description of Artificial Sequence: Synthetic oligonucleotide
gcgcaggcauucagcaugg

SEQ ID NO: 847230 - RNA, 19 nt, Artificial Sequence
  Description of Artificial Sequence: Synthetic oligonucleotide
gaguugcuuuuauccugua

SEQ ID NO: 847231 - RNA, 19 nt, Artificial Sequence
  Description of Artificial Sequence: Synthetic oligonucleotide
ggaguugcuuuuauccugu

SEQ ID NO: 847232 - RNA, 19 nt, Artificial Sequence
  Description of Artificial Sequence: Synthetic oligonucleotide
aucgcaugcuuggcagcga

SEQ ID NO: 847233 - RNA, 19 nt, Artificial Sequence
  Description of Artificial Sequence: Synthetic oligonucleotide
gcaguucuugucucgugua

SEQ ID NO: 847234 - RNA, 19 nt, Artificial Sequence
  Description of Artificial Sequence: Synthetic oligonucleotide
gguggcgcccacaguagac

SEQ ID NO: 847235 - RNA, 19 nt, Artificial Sequence
  Description of Artificial Sequence: Synthetic oligonucleotide
uggggacggcucugucgca

SEQ ID NO: 847236 - RNA, 19 nt, Artificial Sequence
  Description of Artificial Sequence: Synthetic oligonucleotide
agggcucaucggagccugc

SEQ ID NO: 847237 - RNA, 19 nt, Artificial Sequence
  Description of Artificial Sequence: Synthetic oligonucleotide
ccgucccagauucucccgc

SEQ ID NO: 847238 - RNA, 19 nt, Artificial Sequence
  Description of Artificial Sequence: Synthetic oligonucleotide
gcgcccacaguagaccuug

SEQ ID NO: 847239 - RNA, 19 nt, Artificial Sequence
  Description of Artificial Sequence: Synthetic oligonucleotide
ggcucgcaacucuuucuuc

SEQ ID NO: 847240 - RNA, 19 nt, Artificial Sequence
  Description of Artificial Sequence: Synthetic oligonucleotide
cucggccuccguacauuca

SEQ ID NO: 847241 - RNA, 19 nt, Artificial Sequence
  Description of Artificial Sequence: Synthetic oligonucleotide
gccacggcgugguaggaaa

SEQ ID NO: 847242 - RNA, 19 nt, Artificial Sequence
  Description of Artificial Sequence: Synthetic oligonucleotide
gcaggcucgugaacagaag

SEQ ID NO: 847243 - RNA, 19 nt, Artificial Sequence
  Description of Artificial Sequence: Synthetic oligonucleotide
gcguuacaacgaugguggc

SEQ ID NO: 847244 - RNA, 19 nt, Artificial Sequence
  Description of Artificial Sequence: Synthetic oligonucleotide
acggugccccgucccagau

SEQ ID NO: 847245 - RNA, 19 nt, Artificial Sequence
  Description of Artificial Sequence: Synthetic oligonucleotide
aucccgcguuacaacgaug

SEQ ID NO: 847246 - RNA, 19 nt, Artificial Sequence
  Description of Artificial Sequence: Synthetic oligonucleotide
ccuccuaaugaagcuucac

SEQ ID NO: 847247 - RNA, 19 nt, Artificial Sequence
  Description of Artificial Sequence: Synthetic oligonucleotide
acgccgguggcggguggcg

SEQ ID NO: 847248 - RNA, 19 nt, Artificial Sequence
  Description of Artificial Sequence: Synthetic oligonucleotide
gcccuccuaaugaagcuuc

SEQ ID NO: 847249 - RNA, 19 nt, Artificial Sequence
  Description of Artificial Sequence: Synthetic oligonucleotide
cugggaagauucgaacggu

SEQ ID NO: 847250 - RNA, 19 nt, Artificial Sequence
  Description of Artificial Sequence: Synthetic oligonucleotide
ccccaguaauggucacugg

SEQ ID NO: 847251 - RNA, 19 nt, Artificial Sequence
  Description of Artificial Sequence: Synthetic oligonucleotide
augaagcuucacacucgaa

SEQ ID NO: 847252 - RNA, 19 nt, Artificial Sequence
  Description of Artificial Sequence: Synthetic oligonucleotide
ccguacauucaggagagaa

SEQ ID NO: 847253 - RNA, 19 nt, Artificial Sequence
  Description of Artificial Sequence: Synthetic oligonucleotide
gcaggcgcagcagugggga

SEQ ID NO: 847254 - RNA, 19 nt, Artificial Sequence
  Description of Artificial Sequence: Synthetic oligonucleotide
gggacggcucugucgcaug

SEQ ID NO: 847255 - RNA, 19 nt, Artificial Sequence
  Description of Artificial Sequence: Synthetic oligonucleotide
ucggagccugcagcaggcu

SEQ ID NO: 847256 - RNA, 19 nt, Artificial Sequence
  Description of Artificial Sequence: Synthetic oligonucleotide
gugcaguacugugccucac

SEQ ID NO: 847257 - RNA, 19 nt, Artificial Sequence
  Description of Artificial Sequence: Synthetic oligonucleotide
cugaaggcucgcaacucuu

SEQ ID NO: 847258 - RNA, 19 nt, Artificial Sequence
  Description of Artificial Sequence: Synthetic oligonucleotide
gugcucgaccacaacggcu

SEQ ID NO: 847259 - RNA, 19 nt, Artificial Sequence
  Description of Artificial Sequence: Synthetic oligonucleotide
acauagcgcugcccuccua

SEQ ID NO: 847260 - RNA, 19 nt, Artificial Sequence
  Description of Artificial Sequence: Synthetic oligonucleotide
gccuucaagccacgaugca

SEQ ID NO: 847261 - RNA, 19 nt, Artificial Sequence
  Description of Artificial Sequence: Synthetic oligonucleotide
ggacggcucugucgcauga

SEQ ID NO: 847262 - RNA, 19 nt, Artificial Sequence
  Description of Artificial Sequence: Synthetic oligonucleotide
cucgaccacaacggcuaca

SEQ ID NO: 847263 - RNA, 19 nt, Artificial Sequence
  Description of Artificial Sequence: Synthetic oligonucleotide
ggcggggcuggguuguuaa

SEQ ID NO: 847264 - RNA, 19 nt, Artificial Sequence
  Description of Artificial Sequence: Synthetic oligonucleotide
ccgauguguuccccacagc

SEQ ID NO: 847265 - RNA, 19 nt, Artificial Sequence
  Description of Artificial Sequence: Synthetic oligonucleotide
ccucggccuccguacauuc

SEQ ID NO: 847266 - RNA, 19 nt, Artificial Sequence
  Description of Artificial Sequence: Synthetic oligonucleotide
ccacggcgugguaggaaag

SEQ ID NO: 847267 - RNA, 19 nt, Artificial Sequence
  Description of Artificial Sequence: Synthetic oligonucleotide
cagggacuaugacuuaguu

SEQ ID NO: 847268 - RNA, 19 nt, Artificial Sequence
  Description of Artificial Sequence: Synthetic oligonucleotide
cugcuaaaguugccugccu

SEQ ID NO: 847269 - RNA, 19 nt, Artificial Sequence
  Description of Artificial Sequence: Synthetic oligonucleotide
uggcgaccaaaggcauuau

SEQ ID NO: 847270 - RNA, 19 nt, Artificial Sequence
  Description of Artificial Sequence: Synthetic oligonucleotide
caccuuuaugggugugccu

SEQ ID NO: 847271 - RNA, 19 nt, Artificial Sequence
  Description of Artificial Sequence: Synthetic oligonucleotide
ggggcguacucuggcgacc

SEQ ID NO: 847272 - RNA, 19 nt, Artificial Sequence
  Description of Artificial Sequence: Synthetic oligonucleotide
ggcucccucggcgucggug

SEQ ID NO: 847273 - RNA, 19 nt, Artificial Sequence
  Description of Artificial Sequence: Synthetic oligonucleotide
ccaaucaacccuccugggu

SEQ ID NO: 847274 - RNA, 19 nt, Artificial Sequence
  Description of Artificial Sequence: Synthetic oligonucleotide
cgcaugacauagcgcugcc

SEQ ID NO: 847275 - RNA, 19 nt, Artificial Sequence
  Description of Artificial Sequence: Synthetic oligonucleotide
gccgguggcggguggcggc

SEQ ID NO: 847276 - RNA, 19 nt, Artificial Sequence
  Description of Artificial Sequence: Synthetic oligonucleotide
gcucgaccacaacggcuac

SEQ ID NO: 847277 - RNA, 19 nt, Artificial Sequence
  Description of Artificial Sequence: Synthetic oligonucleotide
cggccuccguacauucagg

SEQ ID NO: 847278 - RNA, 19 nt, Artificial Sequence
  Description of Artificial Sequence: Synthetic oligonucleotide
ggcucgugaacagaagauu

SEQ ID NO: 847279 - RNA, 19 nt, Artificial Sequence
  Description of Artificial Sequence: Synthetic oligonucleotide
ggccgauguguuccccaca

SEQ ID NO: 847280 - RNA, 19 nt, Artificial Sequence
  Description of Artificial Sequence: Synthetic oligonucleotide
gcaccaaggccugcucgac

SEQ ID NO: 847281 - RNA, 19 nt, Artificial Sequence
  Description of Artificial Sequence: Synthetic oligonucleotide
gggcguacucuggcgacca

SEQ ID NO: 847282 - RNA, 19 nt, Artificial Sequence
  Description of Artificial Sequence: Synthetic oligonucleotide
ggcaugugguacacacaaa

SEQ ID NO: 847283 - RNA, 19 nt, Artificial Sequence
  Description of Artificial Sequence: Synthetic oligonucleotide
cugugcggugacugugccu

SEQ ID NO: 847284 - RNA, 19 nt, Artificial Sequence
  Description of Artificial Sequence: Synthetic oligonucleotide
gcgaggcaucacuggguga

SEQ ID NO: 847285 - RNA, 19 nt, Artificial Sequence
  Description of Artificial Sequence: Synthetic oligonucleotide
gcguacucuggcgaccaaa

SEQ ID NO: 847286 - RNA, 19 nt, Artificial Sequence
  Description of Artificial Sequence: Synthetic oligonucleotide
ccaaagggucgcgaaagcu

SEQ ID NO: 847287 - RNA, 19 nt, Artificial Sequence
  Description of Artificial Sequence: Synthetic oligonucleotide
uggcggggcuggguuguua

SEQ ID NO: 847288 - RNA, 19 nt, Artificial Sequence
  Description of Artificial Sequence: Synthetic oligonucleotide
gguucggcgugggccuccc

SEQ ID NO: 847289 - RNA, 19 nt, Artificial Sequence
  Description of Artificial Sequence: Synthetic oligonucleotide
aggccacggcgugguagga

SEQ ID NO: 847290 - RNA, 19 nt, Artificial Sequence
  Description of Artificial Sequence: Synthetic oligonucleotide
ggggccccucucagaaagc

SEQ ID NO: 847291 - RNA, 19 nt, Artificial Sequence
  Description of Artificial Sequence: Synthetic oligonucleotide
cugcauggcgggccucaua

SEQ ID NO: 847292 - RNA, 19 nt, Artificial Sequence
  Description of Artificial Sequence: Synthetic oligonucleotide
cggggcguacucuggcgac

SEQ ID NO: 847293 - RNA, 19 nt, Artificial Sequence
  Description of Artificial Sequence: Synthetic oligonucleotide
cguguauggcgaggcauca

SEQ ID NO: 847294 - RNA, 19 nt, Artificial Sequence
  Description of Artificial Sequence: Synthetic oligonucleotide
cgaucugaagcaugccagu

SEQ ID NO: 847295 - RNA, 19 nt, Artificial Sequence
  Description of Artificial Sequence: Synthetic oligonucleotide
gccugcucgacuggcaaau

SEQ ID NO: 847296 - RNA, 19 nt, Artificial Sequence
  Description of Artificial Sequence: Synthetic oligonucleotide
cgaacggugccccguccca

SEQ ID NO: 847297 - RNA, 19 nt, Artificial Sequence
  Description of Artificial Sequence: Synthetic oligonucleotide
guggcggguggcggcagcu

SEQ ID NO: 847298 - RNA, 19 nt, Artificial Sequence
  Description of Artificial Sequence: Synthetic oligonucleotide
cagugccggcccucggccu

SEQ ID NO: 847299 - RNA, 19 nt, Artificial Sequence
  Description of Artificial Sequence: Synthetic oligonucleotide
ggccacggcgugguaggaa

SEQ ID NO: 847300 - RNA, 19 nt, Artificial Sequence
  Description of Artificial Sequence: Synthetic oligonucleotide
ggcguacucuggcgaccaa

SEQ ID NO: 847301 - RNA, 19 nt, Artificial Sequence
  Description of Artificial Sequence: Synthetic oligonucleotide
gggcgcaggcauucagcau

SEQ ID NO: 847302 - RNA, 19 nt, Artificial Sequence
  Description of Artificial Sequence: Synthetic oligonucleotide
ggggacggcucugucgcau

SEQ ID NO: 847303 - RNA, 19 nt, Artificial Sequence
  Description of Artificial Sequence: Synthetic oligonucleotide
guggaacaacagggacuau

SEQ ID NO: 847304 - RNA, 19 nt, Artificial Sequence
  Description of Artificial Sequence: Synthetic oligonucleotide
gcgagggcgcaggcauuca

SEQ ID NO: 847305 - RNA, 19 nt, Artificial Sequence
  Description of Artificial Sequence: Synthetic oligonucleotide
gcggugcaguacugugccu

SEQ ID NO: 847306 - RNA, 19 nt, Artificial Sequence
  Description of Artificial Sequence: Synthetic oligonucleotide
guucggcgugggccucccu

SEQ ID NO: 847307 - RNA, 19 nt, Artificial Sequence
  Description of Artificial Sequence: Synthetic oligonucleotide
cccgcguuacaacgauggu

SEQ ID NO: 847308 - RNA, 19 nt, Artificial Sequence
  Description of Artificial Sequence: Synthetic oligonucleotide
cccgcuugcgcugcuggcu

SEQ ID NO: 847309 - RNA, 19 nt, Artificial Sequence
  Description of Artificial Sequence: Synthetic oligonucleotide
cgacgccgguggcgggugg

SEQ ID NO: 847310 - RNA, 19 nt, Artificial Sequence
  Description of Artificial Sequence: Synthetic oligonucleotide
ggcgcccacaguagaccuu

SEQ ID NO: 847311 - RNA, 19 nt, Artificial Sequence
  Description of Artificial Sequence: Synthetic oligonucleotide
gcgcagcaguggggacggc

SEQ ID NO: 847312 - RNA, 19 nt, Artificial Sequence
  Description of Artificial Sequence: Synthetic oligonucleotide
aaaggaauaggccuacacc

SEQ ID NO: 847313 - RNA, 19 nt, Artificial Sequence
  Description of Artificial Sequence: Synthetic oligonucleotide
aaguucauuacccuccacc

SEQ ID NO: 847314 - RNA, 19 nt, Artificial Sequence
  Description of Artificial Sequence: Synthetic oligonucleotide
auaagaaucacauugcuaa

SEQ ID NO: 847315 - RNA, 19 nt, Artificial Sequence
  Description of Artificial Sequence: Synthetic oligonucleotide
agaaucaaggauaagaauc

SEQ ID NO: 847316 - RNA, 19 nt, Artificial Sequence
  Description of Artificial Sequence: Synthetic oligonucleotide
aaggaauaggccuacaccu

SEQ ID NO: 847317 - RNA, 19 nt, Artificial Sequence
  Description of Artificial Sequence: Synthetic oligonucleotide
aaggucaacgccccaagcc

SEQ ID NO: 847318 - RNA, 19 nt, Artificial Sequence
  Description of Artificial Sequence: Synthetic oligonucleotide
agggguaggauccagagag

SEQ ID NO: 847319 - RNA, 19 nt, Artificial Sequence
  Description of Artificial Sequence: Synthetic oligonucleotide
agcaauagcuucuuagccg

SEQ ID NO: 847320 - RNA, 19 nt, Artificial Sequence
  Description of Artificial Sequence: Synthetic oligonucleotide
uccaucucguccuuuagcg

SEQ ID NO: 847321 - RNA, 19 nt, Artificial Sequence
  Description of Artificial Sequence: Synthetic oligonucleotide
agaagaaucaaggauaaga

SEQ ID NO: 847322 - RNA, 19 nt, Artificial Sequence
  Description of Artificial Sequence: Synthetic oligonucleotide
aauccgacgagcuguacug

SEQ ID NO: 847323 - RNA, 19 nt, Artificial Sequence
  Description of Artificial Sequence: Synthetic oligonucleotide
auaggccuacaccugauac

SEQ ID NO: 847324 - RNA, 19 nt, Artificial Sequence
  Description of Artificial Sequence: Synthetic oligonucleotide
aaugacugggcaugggcag

SEQ ID NO: 847325 - RNA, 19 nt, Artificial Sequence
  Description of Artificial Sequence: Synthetic oligonucleotide
aggaauaguaucuucggga

SEQ ID NO: 847326 - RNA, 19 nt, Artificial Sequence
  Description of Artificial Sequence: Synthetic oligonucleotide
caaauagccacuucucagc

SEQ ID NO: 847327 - RNA, 19 nt, Artificial Sequence
  Description of Artificial Sequence: Synthetic oligonucleotide
uugcuaaaaggaauaggcc

SEQ ID NO: 847328 - RNA, 19 nt, Artificial Sequence
  Description of Artificial Sequence: Synthetic oligonucleotide
agugggaggcuccaacucc

SEQ ID NO: 847329 - RNA, 19 nt, Artificial Sequence
  Description of Artificial Sequence: Synthetic oligonucleotide
aagaaucaaggauaagaau

SEQ ID NO: 847330 - RNA, 19 nt, Artificial Sequence
  Description of Artificial Sequence: Synthetic oligonucleotide
aggauaagaaucacauugc

SEQ ID NO: 847331 - RNA, 19 nt, Artificial Sequence
  Description of Artificial Sequence: Synthetic oligonucleotide
ucacucaggaauaguaucu

SEQ ID NO: 847332 - RNA, 19 nt, Artificial Sequence
  Description of Artificial Sequence: Synthetic oligonucleotide
auagccucaaucaagguca

SEQ ID NO: 847333 - RNA, 19 nt, Artificial Sequence
  Description of Artificial Sequence: Synthetic oligonucleotide
ugccguauucucauguucc

SEQ ID NO: 847334 - RNA, 19 nt, Artificial Sequence
  Description of Artificial Sequence: Synthetic oligonucleotide
aguucauuacccuccaccu

SEQ ID NO: 847335 - RNA, 19 nt, Artificial Sequence
  Description of Artificial Sequence: Synthetic oligonucleotide
uuagccgugaggccugagg

SEQ ID NO: 847336 - RNA, 19 nt, Artificial Sequence
  Description of Artificial Sequence: Synthetic oligonucleotide
gucagugcuuaucaguggg

SEQ ID NO: 847337 - RNA, 19 nt, Artificial Sequence
  Description of Artificial Sequence: Synthetic oligonucleotide
uuaucaguggggcgaaggc

SEQ ID NO: 847338 - RNA, 19 nt, Artificial Sequence
  Description of Artificial Sequence: Synthetic oligonucleotide
aggucaacgccccaagccg

SEQ ID NO: 847339 - RNA, 19 nt, Artificial Sequence
  Description of Artificial Sequence: Synthetic oligonucleotide
ucacauugcuaaaaggaau

SEQ ID NO: 847340 - RNA, 19 nt, Artificial Sequence
  Description of Artificial Sequence: Synthetic oligonucleotide
gucauagccucaaucaagg

SEQ ID NO: 847341 - RNA, 19 nt, Artificial Sequence
  Description of Artificial Sequence: Synthetic oligonucleotide
uuugucaccaagucacacu

SEQ ID NO: 847342 - RNA, 19 nt, Artificial Sequence
  Description of Artificial Sequence: Synthetic oligonucleotide
ucccucucugucaacagcc

SEQ ID NO: 847343 - RNA, 19 nt, Artificial Sequence
  Description of Artificial Sequence: Synthetic oligonucleotide
ucguauuacgcuccuccag

SEQ ID NO: 847344 - RNA, 19 nt, Artificial Sequence
  Description of Artificial Sequence: Synthetic oligonucleotide
aggguauggaguucugggg

SEQ ID NO: 847345 - RNA, 19 nt, Artificial Sequence
  Description of Artificial Sequence: Synthetic oligonucleotide
cugccuugcacguucagag

SEQ ID NO: 847346 - RNA, 19 nt, Artificial Sequence
  Description of Artificial Sequence: Synthetic oligonucleotide
ugaaugaccaugcgugccu

SEQ ID NO: 847347 - RNA, 19 nt, Artificial Sequence
  Description of Artificial Sequence: Synthetic oligonucleotide
ucagugcuuaucagugggg

SEQ ID NO: 847348 - RNA, 19 nt, Artificial Sequence
  Description of Artificial Sequence: Synthetic oligonucleotide
cugucagugcuuaucagug

SEQ ID NO: 847349 - RNA, 19 nt, Artificial Sequence
  Description of Artificial Sequence: Synthetic oligonucleotide
aacgccccaagccggguac

SEQ ID NO: 847350 - RNA, 19 nt, Artificial Sequence
  Description of Artificial Sequence: Synthetic oligonucleotide
cauagccucaaucaagguc

SEQ ID NO: 847351 - RNA, 19 nt, Artificial Sequence
  Description of Artificial Sequence: Synthetic oligonucleotide
agcccguugcuccaaggcc

SEQ ID NO: 847352 - RNA, 19 nt, Artificial Sequence
  Description of Artificial Sequence: Synthetic oligonucleotide
ucaaggucaacgccccaag

SEQ ID NO: 847353 - RNA, 19 nt, Artificial Sequence
  Description of Artificial Sequence: Synthetic oligonucleotide
uguacugcugucaguggga

SEQ ID NO: 847354 - RNA, 19 nt, Artificial Sequence
  Description of Artificial Sequence: Synthetic oligonucleotide
uccgacucuucucauaguc

SEQ ID NO: 847355 - RNA, 19 nt, Artificial Sequence
  Description of Artificial Sequence: Synthetic oligonucleotide
caaucaaggucaacgcccc

SEQ ID NO: 847356 - RNA, 19 nt, Artificial Sequence
  Description of Artificial Sequence: Synthetic oligonucleotide
uagccgugaggccugaggc

SEQ ID NO: 847357 - RNA, 19 nt, Artificial Sequence
  Description of Artificial Sequence: Synthetic oligonucleotide
aauagcuucuuagccguga

SEQ ID NO: 847358 - RNA, 19 nt, Artificial Sequence
  Description of Artificial Sequence: Synthetic oligonucleotide
uccucacucaggaauagua

SEQ ID NO: 847359 - RNA, 19 nt, Artificial Sequence
  Description of Artificial Sequence: Synthetic oligonucleotide
auagccacuucucagcuuu

SEQ ID NO: 847360 - RNA, 19 nt, Artificial Sequence
  Description of Artificial Sequence: Synthetic oligonucleotide
cuuaucaguggggcgaagg

SEQ ID NO: 847361 - RNA, 19 nt, Artificial Sequence
  Description of Artificial Sequence: Synthetic oligonucleotide
uuggucgccagucuuugcu

SEQ ID NO: 847362 - RNA, 19 nt, Artificial Sequence
  Description of Artificial Sequence: Synthetic oligonucleotide
guaccaugugagcuggagg

SEQ ID NO: 847363 - RNA, 19 nt, Artificial Sequence
  Description of Artificial Sequence: Synthetic oligonucleotide
uucagaggacugccgaagc

SEQ ID NO: 847364 - RNA, 19 nt, Artificial Sequence
  Description of Artificial Sequence: Synthetic oligonucleotide
ucucauguuccgcucccag

SEQ ID NO: 847365 - RNA, 19 nt, Artificial Sequence
  Description of Artificial Sequence: Synthetic oligonucleotide
uaggccuacaccugauacc

SEQ ID NO: 847366 - RNA, 19 nt, Artificial Sequence
  Description of Artificial Sequence: Synthetic oligonucleotide
ggaauaguaucuucgggac

SEQ ID NO: 847367 - RNA, 19 nt, Artificial Sequence
  Description of Artificial Sequence: Synthetic oligonucleotide
gccucaaucaaggucaacg

SEQ ID NO: 847368 - RNA, 19 nt, Artificial Sequence
  Description of Artificial Sequence: Synthetic oligonucleotide
gaagcaaagggcagaaguc

SEQ ID NO: 847369 - RNA, 19 nt, Artificial Sequence
  Description of Artificial Sequence: Synthetic oligonucleotide
ucuuguucccgcugacucc

SEQ ID NO: 847370 - RNA, 19 nt, Artificial Sequence
  Description of Artificial Sequence: Synthetic oligonucleotide
uccuuuagcgcuugagccu

SEQ ID NO: 847371 - RNA, 19 nt, Artificial Sequence
  Description of Artificial Sequence: Synthetic oligonucleotide
aggagaagaaucaaggaua

SEQ ID NO: 847372 - RNA, 19 nt, Artificial Sequence
  Description of Artificial Sequence: Synthetic oligonucleotide
ucaggguauggaguucugg

SEQ ID NO: 847373 - RNA, 19 nt, Artificial Sequence
  Description of Artificial Sequence: Synthetic oligonucleotide
cuuguucccgcugacuccg

SEQ ID NO: 847374 - RNA, 19 nt, Artificial Sequence
  Description of Artificial Sequence: Synthetic oligonucleotide
agcgcuugagccuccuggg

SEQ ID NO: 847375 - RNA, 19 nt, Artificial Sequence
  Description of Artificial Sequence: Synthetic oligonucleotide
uauuacgcuccuccagcug

SEQ ID NO: 847376 - RNA, 19 nt, Artificial Sequence
  Description of Artificial Sequence: Synthetic oligonucleotide
cauucaaauagccacuucu

SEQ ID NO: 847377 - RNA, 19 nt, Artificial Sequence
  Description of Artificial Sequence: Synthetic oligonucleotide
uuccucuagguucuggcau

SEQ ID NO: 847378 - RNA, 19 nt, Artificial Sequence
  Description of Artificial Sequence: Synthetic oligonucleotide
auuacccuccaccuccuca

SEQ ID NO: 847379 - RNA, 19 nt, Artificial Sequence
  Description of Artificial Sequence: Synthetic oligonucleotide
uuacccuccaccuccucac

SEQ ID NO: 847380 - RNA, 19 nt, Artificial Sequence
  Description of Artificial Sequence: Synthetic oligonucleotide
ucucuugugccagauucug

SEQ ID NO: 847381 - RNA, 19 nt, Artificial Sequence
  Description of Artificial Sequence: Synthetic oligonucleotide
auggcgugcacgguuggcc

SEQ ID NO: 847382 - RNA, 19 nt, Artificial Sequence
  Description of Artificial Sequence: Synthetic oligonucleotide
agucacacuuuuccucuag

SEQ ID NO: 847383 - RNA, 19 nt, Artificial Sequence
  Description of Artificial Sequence: Synthetic oligonucleotide
ugccagauucugcuucucc

SEQ ID NO: 847384 - RNA, 19 nt, Artificial Sequence
  Description of Artificial Sequence: Synthetic oligonucleotide
gucacacuuuuccucuagg

SEQ ID NO: 847385 - RNA, 19 nt, Artificial Sequence
  Description of Artificial Sequence: Synthetic oligonucleotide
uccaggugccguauucuca

SEQ ID NO: 847386 - RNA, 19 nt, Artificial Sequence
  Description of Artificial Sequence: Synthetic oligonucleotide
gucagccugagccaauccc

SEQ ID NO: 847387 - RNA, 19 nt, Artificial Sequence
  Description of Artificial Sequence: Synthetic oligonucleotide
aaugaccaugcgugccuug

SEQ ID NO: 847388 - RNA, 19 nt, Artificial Sequence
  Description of Artificial Sequence: Synthetic oligonucleotide
cacucuccacuuccgagcg

SEQ ID NO: 847389 - RNA, 19 nt, Artificial Sequence
  Description of Artificial Sequence: Synthetic oligonucleotide
gcucguauuacgcuccucc

SEQ ID NO: 847390 - RNA, 19 nt, Artificial Sequence
  Description of Artificial Sequence: Synthetic oligonucleotide
gucgcucgcggucugaggc

SEQ ID NO: 847391 - RNA, 19 nt, Artificial Sequence
  Description of Artificial Sequence: Synthetic oligonucleotide
ggaaugacugggcaugggc

SEQ ID NO: 847392 - RNA, 19 nt, Artificial Sequence
  Description of Artificial Sequence: Synthetic oligonucleotide
aauaggccuacaccugaua

SEQ ID NO: 847393 - RNA, 19 nt, Artificial Sequence
  Description of Artificial Sequence: Synthetic oligonucleotide
uucuuagccgugaggccug

SEQ ID NO: 847394 - RNA, 19 nt, Artificial Sequence
  Description of Artificial Sequence: Synthetic oligonucleotide
agcguggcucguauuacgc

SEQ ID NO: 847395 - RNA, 19 nt, Artificial Sequence
  Description of Artificial Sequence: Synthetic oligonucleotide
aucaaggauaagaaucaca

SEQ ID NO: 847396 - RNA, 19 nt, Artificial Sequence
  Description of Artificial Sequence: Synthetic oligonucleotide
gucgcgugcgcucagcgug

SEQ ID NO: 847397 - RNA, 19 nt, Artificial Sequence
  Description of Artificial Sequence: Synthetic oligonucleotide
ugcaaggccuuuuguagau

SEQ ID NO: 847398 - RNA, 19 nt, Artificial Sequence
  Description of Artificial Sequence: Synthetic oligonucleotide
cugaaugaccaugcgugcc

SEQ ID NO: 847399 - RNA, 19 nt, Artificial Sequence
  Description of Artificial Sequence: Synthetic oligonucleotide
guaucuucgggacugugua

SEQ ID NO: 847400 - RNA, 19 nt, Artificial Sequence
  Description of Artificial Sequence: Synthetic oligonucleotide
acucucguuuccucugcag

SEQ ID NO: 847401 - RNA, 19 nt, Artificial Sequence
  Description of Artificial Sequence: Synthetic oligonucleotide
uugcacguucagaggacug

SEQ ID NO: 847402 - RNA, 19 nt, Artificial Sequence
  Description of Artificial Sequence: Synthetic oligonucleotide
acguucagaggacugccga

SEQ ID NO: 847403 - RNA, 19 nt, Artificial Sequence
  Description of Artificial Sequence: Synthetic oligonucleotide
cacguucagaggacugccg

SEQ ID NO: 847404 - RNA, 19 nt, Artificial Sequence
  Description of Artificial Sequence: Synthetic oligonucleotide
aggugccguauucucaugu

SEQ ID NO: 847405 - RNA, 19 nt, Artificial Sequence
  Description of Artificial Sequence: Synthetic oligonucleotide
ugauccagccugugcugag

SEQ ID NO: 847406 - RNA, 19 nt, Artificial Sequence
  Description of Artificial Sequence: Synthetic oligonucleotide
aguaucuucgggacugugu

SEQ ID NO: 847407 - RNA, 19 nt, Artificial Sequence
  Description of Artificial Sequence: Synthetic oligonucleotide
agccggguaccaugugagc

SEQ ID NO: 847408 - RNA, 19 nt, Artificial Sequence
  Description of Artificial Sequence: Synthetic oligonucleotide
uucccguagggcagcauuc

SEQ ID NO: 847409 - RNA, 19 nt, Artificial Sequence
  Description of Artificial Sequence: Synthetic oligonucleotide
ucauagccucaaucaaggu

SEQ ID NO: 847410 - RNA, 19 nt, Artificial Sequence
  Description of Artificial Sequence: Synthetic oligonucleotide
gaggacucuagcaggcagc

SEQ ID NO: 847411 - RNA, 19 nt, Artificial Sequence
  Description of Artificial Sequence: Synthetic oligonucleotide
ggggcgaaggcucagagaa

SEQ ID NO: 847412 - RNA, 19 nt, Artificial Sequence
  Description of Artificial Sequence: Synthetic oligonucleotide
ugaggccugaggcacucuc

SEQ ID NO: 847413 - RNA, 19 nt, Artificial Sequence
  Description of Artificial Sequence: Synthetic oligonucleotide
cagcguggcucguauuacg

SEQ ID NO: 847414 - RNA, 19 nt, Artificial Sequence
  Description of Artificial Sequence: Synthetic oligonucleotide
cauaguccaucuccaggug

SEQ ID NO: 847415 - RNA, 19 nt, Artificial Sequence
  Description of Artificial Sequence: Synthetic oligonucleotide
agagaagccaggcguccca

SEQ ID NO: 847416 - RNA, 19 nt, Artificial Sequence
  Description of Artificial Sequence: Synthetic oligonucleotide
uggucgccagucuuugcug

SEQ ID NO: 847417 - RNA, 19 nt, Artificial Sequence
  Description of Artificial Sequence: Synthetic oligonucleotide
cuuccugucgcucgcgguc

SEQ ID NO: 847418 - RNA, 19 nt, Artificial Sequence
  Description of Artificial Sequence: Synthetic oligonucleotide
caaggucaacgccccaagc

SEQ ID NO: 847419 - RNA, 19 nt, Artificial Sequence
  Description of Artificial Sequence: Synthetic oligonucleotide
ucauuacccuccaccuccu

SEQ ID NO: 847420 - RNA, 19 nt, Artificial Sequence
  Description of Artificial Sequence: Synthetic oligonucleotide
uccgacgagcuguacugcu

SEQ ID NO: 847421 - RNA, 19 nt, Artificial Sequence
  Description of Artificial Sequence: Synthetic oligonucleotide
gucugucagugcuuaucag

SEQ ID NO: 847422 - RNA, 19 nt, Artificial Sequence
  Description of Artificial Sequence: Synthetic oligonucleotide
uacucucguuuccucugca

SEQ ID NO: 847423 - RNA, 19 nt, Artificial Sequence
  Description of Artificial Sequence: Synthetic oligonucleotide
guacucucguuuccucugc

SEQ ID NO: 847424 - RNA, 19 nt, Artificial Sequence
  Description of Artificial Sequence: Synthetic oligonucleotide
cuuccgagcggcccacccg

SEQ ID NO: 847425 - RNA, 19 nt, Artificial Sequence
  Description of Artificial Sequence: Synthetic oligonucleotide
ggaggacucuagcaggcag

SEQ ID NO: 847426 - RNA, 19 nt, Artificial Sequence
  Description of Artificial Sequence: Synthetic oligonucleotide
ugucgcucgcggucugagg

SEQ ID NO: 847427 - RNA, 19 nt, Artificial Sequence
  Description of Artificial Sequence: Synthetic oligonucleotide
ggucugucagugcuuauca

SEQ ID NO: 847428 - RNA, 19 nt, Artificial Sequence
  Description of Artificial Sequence: Synthetic oligonucleotide
cucggcugcagcugggcac

SEQ ID NO: 847429 - RNA, 19 nt, Artificial Sequence
  Description of Artificial Sequence: Synthetic oligonucleotide
caagucacacuuuuccucu

SEQ ID NO: 847430 - RNA, 19 nt, Artificial Sequence
  Description of Artificial Sequence: Synthetic oligonucleotide
cauagcggcgguagcguuc

SEQ ID NO: 847431 - RNA, 19 nt, Artificial Sequence
  Description of Artificial Sequence: Synthetic oligonucleotide
gguauggaguucuggggac

SEQ ID NO: 847432 - RNA, 19 nt, Artificial Sequence
  Description of Artificial Sequence: Synthetic oligonucleotide
auccgacgagcuguacugc

SEQ ID NO: 847433 - RNA, 19 nt, Artificial Sequence
  Description of Artificial Sequence: Synthetic oligonucleotide
cucggcgugcauuggucgc

SEQ ID NO: 847434 - RNA, 19 nt, Artificial Sequence
  Description of Artificial Sequence: Synthetic oligonucleotide
ccuacaccugauaccagcc

SEQ ID NO: 847435 - RNA, 19 nt, Artificial Sequence
  Description of Artificial Sequence: Synthetic oligonucleotide
cagcccguugcuccaaggc

SEQ ID NO: 847436 - RNA, 19 nt, Artificial Sequence
  Description of Artificial Sequence: Synthetic oligonucleotide
gccguauucucauguuccg

SEQ ID NO: 847437 - RNA, 19 nt, Artificial Sequence
  Description of Artificial Sequence: Synthetic oligonucleotide
gaggcacucuccacuuccg

SEQ ID NO: 847438 - RNA, 19 nt, Artificial Sequence
  Description of Artificial Sequence: Synthetic oligonucleotide
cguauuacgcuccuccagc

SEQ ID NO: 847439 - RNA, 19 nt, Artificial Sequence
  Description of Artificial Sequence: Synthetic oligonucleotide
aggaucucugcugcuaagu

SEQ ID NO: 847440 - RNA, 19 nt, Artificial Sequence
  Description of Artificial Sequence: Synthetic oligonucleotide
cauguuccgcucccagagc

SEQ ID NO: 847441 - RNA, 19 nt, Artificial Sequence
  Description of Artificial Sequence: Synthetic oligonucleotide
uaucuucgggacuguguau

SEQ ID NO: 847442 - RNA, 19 nt, Artificial Sequence
  Description of Artificial Sequence: Synthetic oligonucleotide
gccuacaccugauaccagc

SEQ ID NO: 847443 - RNA, 19 nt, Artificial Sequence
  Description of Artificial Sequence: Synthetic oligonucleotide
uuagcgcuugagccuccug

SEQ ID NO: 847444 - RNA, 19 nt, Artificial Sequence
  Description of Artificial Sequence: Synthetic oligonucleotide
uccucggcgugcauugguc

SEQ ID NO: 847445 - RNA, 19 nt, Artificial Sequence
  Description of Artificial Sequence: Synthetic oligonucleotide
caucucguccuuuagcgcu

SEQ ID NO: 847446 - RNA, 19 nt, Artificial Sequence
  Description of Artificial Sequence: Synthetic oligonucleotide
gguaccaugugagcuggag

SEQ ID NO: 847447 - RNA, 19 nt, Artificial Sequence
  Description of Artificial Sequence: Synthetic oligonucleotide
agagagaggucagccugag

SEQ ID NO: 847448 - RNA, 19 nt, Artificial Sequence
  Description of Artificial Sequence: Synthetic oligonucleotide
gugcgcucagcguggcucg

SEQ ID NO: 847449 - RNA, 19 nt, Artificial Sequence
  Description of Artificial Sequence: Synthetic oligonucleotide
cauuggucgccagucuuug

SEQ ID NO: 847450 - RNA, 19 nt, Artificial Sequence
  Description of Artificial Sequence: Synthetic oligonucleotide
ggggacaccccagugggcg

SEQ ID NO: 847451 - RNA, 19 nt, Artificial Sequence
  Description of Artificial Sequence: Synthetic oligonucleotide
aggaaugacugggcauggg

SEQ ID NO: 847452 - RNA, 19 nt, Artificial Sequence
  Description of Artificial Sequence: Synthetic oligonucleotide
aagucacacuuuuccucua

SEQ ID NO: 847453 - RNA, 19 nt, Artificial Sequence
  Description of Artificial Sequence: Synthetic oligonucleotide
cugucgcgugcgcucagcg

SEQ ID NO: 847454 - RNA, 19 nt, Artificial Sequence
  Description of Artificial Sequence: Synthetic oligonucleotide
ccugggauaggcuggucag

SEQ ID NO: 847455 - RNA, 19 nt, Artificial Sequence
  Description of Artificial Sequence: Synthetic oligonucleotide
cagggagucccucucuguc

SEQ ID NO: 847456 - RNA, 19 nt, Artificial Sequence
  Description of Artificial Sequence: Synthetic oligonucleotide
cucguauuacgcuccucca

SEQ ID NO: 847457 - RNA, 19 nt, Artificial Sequence
  Description of Artificial Sequence: Synthetic oligonucleotide
cacccguucccguagggca

SEQ ID NO: 847458 - RNA, 19 nt, Artificial Sequence
  Description of Artificial Sequence: Synthetic oligonucleotide
guggcucguauuacgcucc

SEQ ID NO: 847459 - RNA, 19 nt, Artificial Sequence
  Description of Artificial Sequence: Synthetic oligonucleotide
uguucccgcugacuccgac

SEQ ID NO: 847460 - RNA, 19 nt, Artificial Sequence
  Description of Artificial Sequence: Synthetic oligonucleotide
auagcggcgguagcguucu

SEQ ID NO: 847461 - RNA, 19 nt, Artificial Sequence
  Description of Artificial Sequence: Synthetic oligonucleotide
cuccaggugccguauucuc

SEQ ID NO: 847462 - RNA, 19 nt, Artificial Sequence
  Description of Artificial Sequence: Synthetic oligonucleotide
augaccaugcgugccuugu

SEQ ID NO: 847463 - RNA, 19 nt, Artificial Sequence
  Description of Artificial Sequence: Synthetic oligonucleotide
gcgugccuuguccacauag

SEQ ID NO: 847464 - RNA, 19 nt, Artificial Sequence
  Description of Artificial Sequence: Synthetic oligonucleotide
ugaccaugcgugccuuguc

SEQ ID NO: 847465 - RNA, 19 nt, Artificial Sequence
  Description of Artificial Sequence: Synthetic oligonucleotide
uaggauccagagagagguc

SEQ ID NO: 847466 - RNA, 19 nt, Artificial Sequence
  Description of Artificial Sequence: Synthetic oligonucleotide
ccgacucuucucauagucc

SEQ ID NO: 847467 - RNA, 19 nt, Artificial Sequence
  Description of Artificial Sequence: Synthetic oligonucleotide
agcggcgguagcguucuuc

SEQ ID NO: 847468 - RNA, 19 nt, Artificial Sequence
  Description of Artificial Sequence: Synthetic oligonucleotide
cuuuagcgcuugagccucc

SEQ ID NO: 847469 - RNA, 19 nt, Artificial Sequence
  Description of Artificial Sequence: Synthetic oligonucleotide
ugucgcgugcgcucagcgu

SEQ ID NO: 847470 - RNA, 19 nt, Artificial Sequence
  Description of Artificial Sequence: Synthetic oligonucleotide
ucgcucgcggucugaggcc

SEQ ID NO: 847471 - RNA, 19 nt, Artificial Sequence
  Description of Artificial Sequence: Synthetic oligonucleotide
cucagcguggcucguauua

SEQ ID NO: 847472 - RNA, 19 nt, Artificial Sequence
  Description of Artificial Sequence: Synthetic oligonucleotide
gccuugcacguucagagga

SEQ ID NO: 847473 - RNA, 19 nt, Artificial Sequence
  Description of Artificial Sequence: Synthetic oligonucleotide
agaagggguaggauccaga

SEQ ID NO: 847474 - RNA, 19 nt, Artificial Sequence
  Description of Artificial Sequence: Synthetic oligonucleotide
gucaacgccccaagccggg

SEQ ID NO: 847475 - RNA, 19 nt, Artificial Sequence
  Description of Artificial Sequence: Synthetic oligonucleotide
ggucaacgccccaagccgg

SEQ ID NO: 847476 - RNA, 19 nt, Artificial Sequence
  Description of Artificial Sequence: Synthetic oligonucleotide
ggcacagucgcuuguucuc

SEQ ID NO: 847477 - RNA, 19 nt, Artificial Sequence
  Description of Artificial Sequence: Synthetic oligonucleotide
cuucuuagccgugaggccu

SEQ ID NO: 847478 - RNA, 19 nt, Artificial Sequence
  Description of Artificial Sequence: Synthetic oligonucleotide
uuuagcgcuugagccuccu

SEQ ID NO: 847479 - RNA, 19 nt, Artificial Sequence
  Description of Artificial Sequence: Synthetic oligonucleotide
guauuacgcuccuccagcu

SEQ ID NO: 847480 - RNA, 19 nt, Artificial Sequence
  Description of Artificial Sequence: Synthetic oligonucleotide
ggccuugcaacuccugcac

SEQ ID NO: 847481 - RNA, 19 nt, Artificial Sequence
  Description of Artificial Sequence: Synthetic oligonucleotide
gcggcgguagcguucuucc

SEQ ID NO: 847482 - RNA, 19 nt, Artificial Sequence
  Description of Artificial Sequence: Synthetic oligonucleotide
ucccguagggcagcauucu

SEQ ID NO: 847483 - RNA, 19 nt, Artificial Sequence
  Description of Artificial Sequence: Synthetic oligonucleotide
uuccugucgcucgcggucu

SEQ ID NO: 847484 - RNA, 19 nt, Artificial Sequence
  Description of Artificial Sequence: Synthetic oligonucleotide
auaguaucuucgggacugu

SEQ ID NO: 847485 - RNA, 19 nt, Artificial Sequence
  Description of Artificial Sequence: Synthetic oligonucleotide
aggcacucuccacuuccga

SEQ ID NO: 847486 - RNA, 19 nt, Artificial Sequence
  Description of Artificial Sequence: Synthetic oligonucleotide
ugcuuaucaguggggcgaa

SEQ ID NO: 847487 - RNA, 19 nt, Artificial Sequence
  Description of Artificial Sequence: Synthetic oligonucleotide
uggcucguauuacgcuccu

SEQ ID NO: 847488 - RNA, 19 nt, Artificial Sequence
  Description of Artificial Sequence: Synthetic oligonucleotide
ggguccucggcgugcauug

SEQ ID NO: 847489 - RNA, 19 nt, Artificial Sequence
  Description of Artificial Sequence: Synthetic oligonucleotide
caauccccucggcugcagc

SEQ ID NO: 847490 - RNA, 19 nt, Artificial Sequence
  Description of Artificial Sequence: Synthetic oligonucleotide
ugguuccguuguugcagcu

SEQ ID NO: 847491 - RNA, 19 nt, Artificial Sequence
  Description of Artificial Sequence: Synthetic oligonucleotide
guauggaguucuggggaca

SEQ ID NO: 847492 - RNA, 19 nt, Artificial Sequence
  Description of Artificial Sequence: Synthetic oligonucleotide
ugggcacgcagggauccug

SEQ ID NO: 847493 - RNA, 19 nt, Artificial Sequence
  Description of Artificial Sequence: Synthetic oligonucleotide
ccaucucguccuuuagcgc

SEQ ID NO: 847494 - RNA, 19 nt, Artificial Sequence
  Description of Artificial Sequence: Synthetic oligonucleotide
gauaccagccucuccccuu

SEQ ID NO: 847495 - RNA, 19 nt, Artificial Sequence
  Description of Artificial Sequence: Synthetic oligonucleotide
gacuccgacucuucucaua

SEQ ID NO: 847496 - RNA, 19 nt, Artificial Sequence
  Description of Artificial Sequence: Synthetic oligonucleotide
caauccgacgagcuguacu

SEQ ID NO: 847497 - RNA, 19 nt, Artificial Sequence
  Description of Artificial Sequence: Synthetic oligonucleotide
ugccgccugagcucccgca

SEQ ID NO: 847498 - RNA, 19 nt, Artificial Sequence
  Description of Artificial Sequence: Synthetic oligonucleotide
ugggcaugggcaggagacu

SEQ ID NO: 847499 - RNA, 19 nt, Artificial Sequence
  Description of Artificial Sequence: Synthetic oligonucleotide
ccucggcgugcauuggucg

SEQ ID NO: 847500 - RNA, 19 nt, Artificial Sequence
  Description of Artificial Sequence: Synthetic oligonucleotide
cauggcgugcacgguuggc

SEQ ID NO: 847501 - RNA, 19 nt, Artificial Sequence
  Description of Artificial Sequence: Synthetic oligonucleotide
gcgguagcguucuuccaug

SEQ ID NO: 847502 - RNA, 19 nt, Artificial Sequence
  Description of Artificial Sequence: Synthetic oligonucleotide
ucaauccgacgagcuguac

SEQ ID NO: 847503 - RNA, 19 nt, Artificial Sequence
  Description of Artificial Sequence: Synthetic oligonucleotide
ccuuguccacauagcggcg

SEQ ID NO: 847504 - RNA, 19 nt, Artificial Sequence
  Description of Artificial Sequence: Synthetic oligonucleotide
ggucagccugagccaaucc

SEQ ID NO: 847505 - RNA, 19 nt, Artificial Sequence
  Description of Artificial Sequence: Synthetic oligonucleotide
uccugucgcucgcggucug

SEQ ID NO: 847506 - RNA, 19 nt, Artificial Sequence
  Description of Artificial Sequence: Synthetic oligonucleotide
ccuugcacguucagaggac

SEQ ID NO: 847507 - RNA, 19 nt, Artificial Sequence
  Description of Artificial Sequence: Synthetic oligonucleotide
ccggguaccaugugagcug

SEQ ID NO: 847508 - RNA, 19 nt, Artificial Sequence
  Description of Artificial Sequence: Synthetic oligonucleotide
caugggcaggagacugcuc

SEQ ID NO: 847509 - RNA, 19 nt, Artificial Sequence
  Description of Artificial Sequence: Synthetic oligonucleotide
cgugccuuguccacauagc

SEQ ID NO: 847510 - RNA, 19 nt, Artificial Sequence
  Description of Artificial Sequence: Synthetic oligonucleotide
caugcgugccuuguccaca

SEQ ID NO: 847511 - RNA, 19 nt, Artificial Sequence
  Description of Artificial Sequence: Synthetic oligonucleotide
ccuuuagcgcuugagccuc

SEQ ID NO: 847512 - RNA, 19 nt, Artificial Sequence
  Description of Artificial Sequence: Synthetic oligonucleotide
gggcaugggcaggagacug

SEQ ID NO: 847513 - RNA, 19 nt, Artificial Sequence
  Description of Artificial Sequence: Synthetic oligonucleotide
cacagucgcuuguucucca

SEQ ID NO: 847514 - RNA, 19 nt, Artificial Sequence
  Description of Artificial Sequence: Synthetic oligonucleotide
cucccaucuaaggaagcaa

SEQ ID NO: 847515 - RNA, 19 nt, Artificial Sequence
  Description of Artificial Sequence: Synthetic oligonucleotide
gcacagucgcuuguucucc

SEQ ID NO: 847516 - RNA, 19 nt, Artificial Sequence
  Description of Artificial Sequence: Synthetic oligonucleotide
cguggcucguauuacgcuc

SEQ ID NO: 847517 - RNA, 19 nt, Artificial Sequence
  Description of Artificial Sequence: Synthetic oligonucleotide
cucaauccgacgagcugua

SEQ ID NO: 847518 - RNA, 19 nt, Artificial Sequence
  Description of Artificial Sequence: Synthetic oligonucleotide
caggugccguauucucaug

SEQ ID NO: 847519 - RNA, 19 nt, Artificial Sequence
  Description of Artificial Sequence: Synthetic oligonucleotide
acgccccaagccggguacc

SEQ ID NO: 847520 - RNA, 19 nt, Artificial Sequence
  Description of Artificial Sequence: Synthetic oligonucleotide
ucaacgccccaagccgggu

SEQ ID NO: 847521 - RNA, 19 nt, Artificial Sequence
  Description of Artificial Sequence: Synthetic oligonucleotide
cucgcggucugaggccucc

SEQ ID NO: 847522 - RNA, 19 nt, Artificial Sequence
  Description of Artificial Sequence: Synthetic oligonucleotide
ucuuagccgugaggccuga

SEQ ID NO: 847523 - RNA, 19 nt, Artificial Sequence
  Description of Artificial Sequence: Synthetic oligonucleotide
ccguauucucauguuccgc

SEQ ID NO: 847524 - RNA, 19 nt, Artificial Sequence
  Description of Artificial Sequence: Synthetic oligonucleotide
cuacaccugauaccagccu

SEQ ID NO: 847525 - RNA, 19 nt, Artificial Sequence
  Description of Artificial Sequence: Synthetic oligonucleotide
ugucagugggaggcuccaa

SEQ ID NO: 847526 - RNA, 19 nt, Artificial Sequence
  Description of Artificial Sequence: Synthetic oligonucleotide
uguccacauagcggcggua

SEQ ID NO: 847527 - RNA, 19 nt, Artificial Sequence
  Description of Artificial Sequence: Synthetic oligonucleotide
caccugauaccagccucuc

SEQ ID NO: 847528 - RNA, 19 nt, Artificial Sequence
  Description of Artificial Sequence: Synthetic oligonucleotide
cgugcauuggucgccaguc

SEQ ID NO: 847529 - RNA, 19 nt, Artificial Sequence
  Description of Artificial Sequence: Synthetic oligonucleotide
gguuccguuguugcagcuc

SEQ ID NO: 847530 - RNA, 19 nt, Artificial Sequence
  Description of Artificial Sequence: Synthetic oligonucleotide
ccgacgagcuguacugcug

SEQ ID NO: 847531 - RNA, 19 nt, Artificial Sequence
  Description of Artificial Sequence: Synthetic oligonucleotide
ggagcgucucucugagcuc

SEQ ID NO: 847532 - RNA, 19 nt, Artificial Sequence
  Description of Artificial Sequence: Synthetic oligonucleotide
cuugcacguucagaggacu

SEQ ID NO: 847533 - RNA, 19 nt, Artificial Sequence
  Description of Artificial Sequence: Synthetic oligonucleotide
cuuagccgugaggccugag

SEQ ID NO: 847534 - RNA, 19 nt, Artificial Sequence
  Description of Artificial Sequence: Synthetic oligonucleotide
ccccaagccggguaccaug

SEQ ID NO: 847535 - RNA, 19 nt, Artificial Sequence
  Description of Artificial Sequence: Synthetic oligonucleotide
ggcccacccguucccguag

SEQ ID NO: 847536 - RNA, 19 nt, Artificial Sequence
  Description of Artificial Sequence: Synthetic oligonucleotide
cguauucucauguuccgcu

SEQ ID NO: 847537 - RNA, 19 nt, Artificial Sequence
  Description of Artificial Sequence: Synthetic oligonucleotide
gcccguugcuccaaggcca

SEQ ID NO: 847538 - RNA, 19 nt, Artificial Sequence
  Description of Artificial Sequence: Synthetic oligonucleotide
ggcgguagcguucuuccau

SEQ ID NO: 847539 - RNA, 19 nt, Artificial Sequence
  Description of Artificial Sequence: Synthetic oligonucleotide
cgguagcguucuuccaugg

SEQ ID NO: 847540 - RNA, 19 nt, Artificial Sequence
  Description of Artificial Sequence: Synthetic oligonucleotide
gaaugaccaugcgugccuu

SEQ ID NO: 847541 - RNA, 19 nt, Artificial Sequence
  Description of Artificial Sequence: Synthetic oligonucleotide
ccauggcgugcacgguugg

SEQ ID NO: 847542 - RNA, 19 nt, Artificial Sequence
  Description of Artificial Sequence: Synthetic oligonucleotide
gggcacgcagggauccugc

SEQ ID NO: 847543 - RNA, 19 nt, Artificial Sequence
  Description of Artificial Sequence: Synthetic oligonucleotide
ccucaauccgacgagcugu

SEQ ID NO: 847544 - RNA, 19 nt, Artificial Sequence
  Description of Artificial Sequence: Synthetic oligonucleotide
ggcucuucccaaggaguuc

SEQ ID NO: 847545 - RNA, 19 nt, Artificial Sequence
  Description of Artificial Sequence: Synthetic oligonucleotide
cggguaccaugugagcugg

SEQ ID NO: 847546 - RNA, 19 nt, Artificial Sequence
  Description of Artificial Sequence: Synthetic oligonucleotide
guccucggcgugcauuggu

SEQ ID NO: 847547 - RNA, 19 nt, Artificial Sequence
  Description of Artificial Sequence: Synthetic oligonucleotide
gguccucggcgugcauugg

SEQ ID NO: 847548 - RNA, 19 nt, Artificial Sequence
  Description of Artificial Sequence: Synthetic oligonucleotide
ccacccguucccguagggc

SEQ ID NO: 847549 - RNA, 19 nt, Artificial Sequence
  Description of Artificial Sequence: Synthetic oligonucleotide
ugcgcucagcguggcucgu

SEQ ID NO: 847550 - RNA, 19 nt, Artificial Sequence
  Description of Artificial Sequence: Synthetic oligonucleotide
gccggguaccaugugagcu

SEQ ID NO: 847551 - RNA, 19 nt, Artificial Sequence
  Description of Artificial Sequence: Synthetic oligonucleotide
ccucacucaggaauaguau

SEQ ID NO: 847552 - RNA, 19 nt, Artificial Sequence
  Description of Artificial Sequence: Synthetic oligonucleotide
gcuuaucaguggggcgaag

SEQ ID NO: 847553 - RNA, 19 nt, Artificial Sequence
  Description of Artificial Sequence: Synthetic oligonucleotide
ugucugcgcugagccucga

SEQ ID NO: 847554 - RNA, 19 nt, Artificial Sequence
  Description of Artificial Sequence: Synthetic oligonucleotide
cacucaggaauaguaucuu

SEQ ID NO: 847555 - RNA, 19 nt, Artificial Sequence
  Description of Artificial Sequence: Synthetic oligonucleotide
uccgagcggcccacccguu

SEQ ID NO: 847556 - RNA, 19 nt, Artificial Sequence
  Description of Artificial Sequence: Synthetic oligonucleotide
gcccacccguucccguagg

SEQ ID NO: 847557 - RNA, 19 nt, Artificial Sequence
  Description of Artificial Sequence: Synthetic oligonucleotide
ggcgugcauuggucgccag

SEQ ID NO: 847558 - RNA, 19 nt, Artificial Sequence
  Description of Artificial Sequence: Synthetic oligonucleotide
ggccuacaccugauaccag

SEQ ID NO: 847559 - RNA, 19 nt, Artificial Sequence
  Description of Artificial Sequence: Synthetic oligonucleotide
ggugccguauucucauguu

SEQ ID NO: 847560 - RNA, 19 nt, Artificial Sequence
  Description of Artificial Sequence: Synthetic oligonucleotide
ggcgugcacgguuggccuc

SEQ ID NO: 847561 - RNA, 19 nt, Artificial Sequence
  Description of Artificial Sequence: Synthetic oligonucleotide
cacuuccgagcggcccacc

SEQ ID NO: 847562 - RNA, 19 nt, Artificial Sequence
  Description of Artificial Sequence: Synthetic oligonucleotide
cgacggcagcuguucagag

SEQ ID NO: 847563 - RNA, 19 nt, Artificial Sequence
  Description of Artificial Sequence: Synthetic oligonucleotide
ggcauucaaauagccacuu

SEQ ID NO: 847564 - RNA, 19 nt, Artificial Sequence
  Description of Artificial Sequence: Synthetic oligonucleotide
caacgccccaagccgggua

SEQ ID NO: 847565 - RNA, 19 nt, Artificial Sequence
  Description of Artificial Sequence: Synthetic oligonucleotide
cagcugucgcgugcgcuca

SEQ ID NO: 847566 - RNA, 19 nt, Artificial Sequence
  Description of Artificial Sequence: Synthetic oligonucleotide
gggguaggauccagagaga

SEQ ID NO: 847567 - RNA, 19 nt, Artificial Sequence
  Description of Artificial Sequence: Synthetic oligonucleotide
cgcaggagcgucucucuga

SEQ ID NO: 847568 - RNA, 19 nt, Artificial Sequence
  Description of Artificial Sequence: Synthetic oligonucleotide
cagcucacccaggcggcga

SEQ ID NO: 847569 - RNA, 19 nt, Artificial Sequence
  Description of Artificial Sequence: Synthetic oligonucleotide
gcguggcucguauuacgcu

SEQ ID NO: 847570 - RNA, 19 nt, Artificial Sequence
  Description of Artificial Sequence: Synthetic oligonucleotide
cugccgcaccugccgccug

SEQ ID NO: 847571 - RNA, 19 nt, Artificial Sequence
  Description of Artificial Sequence: Synthetic oligonucleotide
cugucaacagccgcuccuu

SEQ ID NO: 847572 - RNA, 19 nt, Artificial Sequence
  Description of Artificial Sequence: Synthetic oligonucleotide
cccguucccguagggcagc

SEQ ID NO: 847573 - RNA, 19 nt, Artificial Sequence
  Description of Artificial Sequence: Synthetic oligonucleotide
ggcucguauuacgcuccuc

SEQ ID NO: 847574 - RNA, 19 nt, Artificial Sequence
  Description of Artificial Sequence: Synthetic oligonucleotide
cccaagccggguaccaugu

SEQ ID NO: 847575 - RNA, 19 nt, Artificial Sequence
  Description of Artificial Sequence: Synthetic oligonucleotide
cugugacugcaggagcaau

SEQ ID NO: 847576 - RNA, 19 nt, Artificial Sequence
  Description of Artificial Sequence: Synthetic oligonucleotide
gaggacugccgaagcucau

SEQ ID NO: 847577 - RNA, 19 nt, Artificial Sequence
  Description of Artificial Sequence: Synthetic oligonucleotide
ggcacgcagggauccugcu

SEQ ID NO: 847578 - RNA, 19 nt, Artificial Sequence
  Description of Artificial Sequence: Synthetic oligonucleotide
gcgugcauuggucgccagu

SEQ ID NO: 847579 - RNA, 19 nt, Artificial Sequence
  Description of Artificial Sequence: Synthetic oligonucleotide
ccgagcggcccacccguuc

SEQ ID NO: 847580 - RNA, 19 nt, Artificial Sequence
  Description of Artificial Sequence: Synthetic oligonucleotide
cgugaggccugaggcacuc

SEQ ID NO: 847581 - RNA, 19 nt, Artificial Sequence
  Description of Artificial Sequence: Synthetic oligonucleotide
cgcuuguucuccagcugaa

SEQ ID NO: 847582 - RNA, 19 nt, Artificial Sequence
  Description of Artificial Sequence: Synthetic oligonucleotide
cgacgagcuguacugcugu

SEQ ID NO: 847583 - RNA, 19 nt, Artificial Sequence
  Description of Artificial Sequence: Synthetic oligonucleotide
ggguaccaugugagcugga

SEQ ID NO: 847584 - RNA, 19 nt, Artificial Sequence
  Description of Artificial Sequence: Synthetic oligonucleotide
gcugccgcaccugccgccu

SEQ ID NO: 847585 - RNA, 19 nt, Artificial Sequence
  Description of Artificial Sequence: Synthetic oligonucleotide
gccgcucaucuucccugcu

SEQ ID NO: 847586 - RNA, 19 nt, Artificial Sequence
  Description of Artificial Sequence: Synthetic oligonucleotide
cugggcacgcagggauccu

SEQ ID NO: 847587 - RNA, 19 nt, Artificial Sequence
  Description of Artificial Sequence: Synthetic oligonucleotide
ccguugcuccaaggccaug

SEQ ID NO: 847588 - RNA, 19 nt, Artificial Sequence
  Description of Artificial Sequence: Synthetic oligonucleotide
cccguugcuccaaggccau

SEQ ID NO: 847589 - RNA, 19 nt, Artificial Sequence
  Description of Artificial Sequence: Synthetic oligonucleotide
gcucgcggucugaggccuc

SEQ ID NO: 847590 - RNA, 19 nt, Artificial Sequence
  Description of Artificial Sequence: Synthetic oligonucleotide
gcggcccacccguucccgu

SEQ ID NO: 847591 - RNA, 19 nt, Artificial Sequence
  Description of Artificial Sequence: Synthetic oligonucleotide
ccgugaggccugaggcacu

SEQ ID NO: 847592 - RNA, 19 nt, Artificial Sequence
  Description of Artificial Sequence: Synthetic oligonucleotide
gcgcucagcguggcucgua

SEQ ID NO: 847593 - RNA, 19 nt, Artificial Sequence
  Description of Artificial Sequence: Synthetic oligonucleotide
cgcucagcguggcucguau

SEQ ID NO: 847594 - RNA, 19 nt, Artificial Sequence
  Description of Artificial Sequence: Synthetic oligonucleotide
cggcgugcauuggucgcca

SEQ ID NO: 847595 - RNA, 19 nt, Artificial Sequence
  Description of Artificial Sequence: Synthetic oligonucleotide
cgccccaagccggguacca

SEQ ID NO: 847596 - RNA, 19 nt, Artificial Sequence
  Description of Artificial Sequence: Synthetic oligonucleotide
gggcggccucugcuugggu

SEQ ID NO: 847597 - RNA, 19 nt, Artificial Sequence
  Description of Artificial Sequence: Synthetic oligonucleotide
cgcucgcggucugaggccu

SEQ ID NO: 847598 - RNA, 19 nt, Artificial Sequence
  Description of Artificial Sequence: Synthetic oligonucleotide
ccccagcccguugcuccaa

SEQ ID NO: 847599 - RNA, 19 nt, Artificial Sequence
  Description of Artificial Sequence: Synthetic oligonucleotide
aacaaguccagcuagaggc

SEQ ID NO: 847600 - RNA, 19 nt, Artificial Sequence
  Description of Artificial Sequence: Synthetic oligonucleotide
  modified_base (2)..(2): a, c, u, g, unknown or other
unuuuuaagaaauauuugg

SEQ ID NO: 847601 - RNA, 19 nt, Artificial Sequence
  Description of Artificial Sequence: Synthetic oligonucleotide
aaaaugagcuuuuacaugg

SEQ ID NO: 847602 - RNA, 19 nt, Artificial Sequence
  Description of Artificial Sequence: Synthetic oligonucleotide
  modified_base (4)..(4): a, c, u, g, unknown or other
uuunuuuuaagaaauauuu

SEQ ID NO: 847603 - RNA, 19 nt, Artificial Sequence
  Description of Artificial Sequence: Synthetic oligonucleotide
uugacuaggaaucagaaca

SEQ ID NO: 847604 - RNA, 19 nt, Artificial Sequence
  Description of Artificial Sequence: Synthetic oligonucleotide
aauauuuggugguuuuggc

SEQ ID NO: 847605 - RNA, 19 nt, Artificial Sequence
  Description of Artificial Sequence: Synthetic oligonucleotide
  modified_base (3)..(3): a, c, u, g, unknown or other
ucnccuuuugaaaagacag

SEQ ID NO: 847606 - RNA, 19 nt, Artificial Sequence
  Description of Artificial Sequence: Synthetic oligonucleotide
uguacauuggagauaagag

SEQ ID NO: 847607 - RNA, 19 nt, Artificial Sequence
  Description of Artificial Sequence: Synthetic oligonucleotide
auuuaggucaaguucuugc

SEQ ID NO: 847608 - RNA, 19 nt, Artificial Sequence
  Description of Artificial Sequence: Synthetic oligonucleotide
aauauaggguuaucuauuc

SEQ ID NO: 847609 - RNA, 19 nt, Artificial Sequence
  Description of Artificial Sequence: Synthetic oligonucleotide
uacauuggagauaagagga

SEQ ID NO: 847610 - RNA, 19 nt, Artificial Sequence
  Description of Artificial Sequence: Synthetic oligonucleotide
cuuuaagacaguuuguacc

SEQ ID NO: 847611 - RNA, 19 nt, Artificial Sequence
  Description of Artificial Sequence: Synthetic oligonucleotide
  modified_base (3)..(3): a, c, u, g, unknown or other
uunuuuuaagaaauauuug

SEQ ID NO: 847612 - RNA, 19 nt, Artificial Sequence
  Description of Artificial Sequence: Synthetic oligonucleotide
ucaacuucuaauauuuuca

SEQ ID NO: 847613 - RNA, 19 nt, Artificial Sequence
  Description of Artificial Sequence: Synthetic oligonucleotide
aauaucucgagccuuuucu

SEQ ID NO: 847614 - RNA, 19 nt, Artificial Sequence
  Description of Artificial Sequence: Synthetic oligonucleotide
  modified_base (7)..(7): a, c, u, g, unknown or other
uauaucnccuuuugaaaag

SEQ ID NO: 847615 - RNA, 19 nt, Artificial Sequence
  Description of Artificial Sequence: Synthetic oligonucleotide
uuucauuacgaacuguggc

SEQ ID NO: 847616 - RNA, 19 nt, Artificial Sequence
  Description of Artificial Sequence: Synthetic oligonucleotide
agugguaaucucuaccagc

SEQ ID NO: 847617 - RNA, 19 nt, Artificial Sequence
  Description of Artificial Sequence: Synthetic oligonucleotide
acgccuacgucucauaucc

SEQ ID NO: 847618 - RNA, 19 nt, Artificial Sequence
  Description of Artificial Sequence: Synthetic oligonucleotide
uguuggauauguuuaagug

SEQ ID NO: 847619 - RNA, 19 nt, Artificial Sequence
  Description of Artificial Sequence: Synthetic oligonucleotide
ucucccuuaacucuucagg

SEQ ID NO: 847620 - RNA, 19 nt, Artificial Sequence
  Description of Artificial Sequence: Synthetic oligonucleotide
agcaacuuuaucaugggcc

SEQ ID NO: 847621 - RNA, 19 nt, Artificial Sequence
  Description of Artificial Sequence: Synthetic oligonucleotide
cucgacauggaacauaagg

SEQ ID NO: 847622 - RNA, 19 nt, Artificial Sequence
  Description of Artificial Sequence: Synthetic oligonucleotide
ugcauaucagacaacaagu

SEQ ID NO: 847623 - RNA, 19 nt, Artificial Sequence
  Description of Artificial Sequence: Synthetic oligonucleotide
auaaggaucauccgagggg

SEQ ID NO: 847624 - RNA, 19 nt, Artificial Sequence
  Description of Artificial Sequence: Synthetic oligonucleotide
guacauuggagauaagagg

SEQ ID NO: 847625 - RNA, 19 nt, Artificial Sequence
  Description of Artificial Sequence: Synthetic oligonucleotide
uauaggguuaucuauucca

SEQ ID NO: 847626 - RNA, 19 nt, Artificial Sequence
  Description of Artificial Sequence: Synthetic oligonucleotide
uucacuauccggcuaauga

SEQ ID NO: 847627 - RNA, 19 nt, Artificial Sequence
  Description of Artificial Sequence: Synthetic oligonucleotide
uucaccuuagccaaguaga

SEQ ID NO: 847628 - RNA, 19 nt, Artificial Sequence
  Description of Artificial Sequence: Synthetic oligonucleotide
ugucguacagaaucgaugc

SEQ ID NO: 847629 - RNA, 19 nt, Artificial Sequence
  Description of Artificial Sequence: Synthetic oligonucleotide
caauggaauaucucgagcc

SEQ ID NO: 847630 - RNA, 19 nt, Artificial Sequence
  Description of Artificial Sequence: Synthetic oligonucleotide
uuuguuaaugagccuaagc

SEQ ID NO: 847631 - RNA, 19 nt, Artificial Sequence
  Description of Artificial Sequence: Synthetic oligonucleotide
uguggaccaaucaagauaa

SEQ ID NO: 847632 - RNA, 19 nt, Artificial Sequence
  Description of Artificial Sequence: Synthetic oligonucleotide
  modified_base (5)..(5): a, c, u, g, unknown or other
uuuunuuuuaagaaauauu

SEQ ID NO: 847633 - RNA, 19 nt, Artificial Sequence
  Description of Artificial Sequence: Synthetic oligonucleotide
ucgacauggaacauaagga

SEQ ID NO: 847634 - RNA, 19 nt, Artificial Sequence
  Description of Artificial Sequence: Synthetic oligonucleotide
uguuaagaucucuucauug

SEQ ID NO: 847635 - RNA, 19 nt, Artificial Sequence
  Description of Artificial Sequence: Synthetic oligonucleotide
cauggaagaauuuagguca

SEQ ID NO: 847636 - RNA, 19 nt, Artificial Sequence
  Description of Artificial Sequence: Synthetic oligonucleotide
gaacaaaugucaaaguacc

SEQ ID NO: 847637 - RNA, 19 nt, Artificial Sequence
  Description of Artificial Sequence: Synthetic oligonucleotide
uguagaagcagugaaauau

SEQ ID NO: 847638 - RNA, 19 nt, Artificial Sequence
  Description of Artificial Sequence: Synthetic oligonucleotide
aacauaaggaucauccgag

SEQ ID NO: 847639 - RNA, 19 nt, Artificial Sequence
  Description of Artificial Sequence: Synthetic oligonucleotide
uaaaagugccugaauaugu

SEQ ID NO: 847640 - RNA, 19 nt, Artificial Sequence
  Description of Artificial Sequence: Synthetic oligonucleotide
ucuguaaugggcucuagcu

SEQ ID NO: 847641 - RNA, 19 nt, Artificial Sequence
  Description of Artificial Sequence: Synthetic oligonucleotide
ugagcuuuuacauggauua

SEQ ID NO: 847642 - RNA, 19 nt, Artificial Sequence
  Description of Artificial Sequence: Synthetic oligonucleotide
agcauuguguaucuugaac

SEQ ID NO: 847643 - RNA, 19 nt, Artificial Sequence
  Description of Artificial Sequence: Synthetic oligonucleotide
uguucgcagacuuaaaaga

SEQ ID NO: 847644 - RNA, 19 nt, Artificial Sequence
  Description of Artificial Sequence: Synthetic oligonucleotide
uucauuacgaacuguggca

SEQ ID NO: 847645 - RNA, 19 nt, Artificial Sequence
  Description of Artificial Sequence: Synthetic oligonucleotide
ucugugucaaauauagggu

SEQ ID NO: 847646 - RNA, 19 nt, Artificial Sequence
  Description of Artificial Sequence: Synthetic oligonucleotide
uguggcgcauuuaacaaag

SEQ ID NO: 847647 - RNA, 19 nt, Artificial Sequence
  Description of Artificial Sequence: Synthetic oligonucleotide
ucgaaaaccucauugacau

SEQ ID NO: 847648 - RNA, 19 nt, Artificial Sequence
  Description of Artificial Sequence: Synthetic oligonucleotide
aacaugaugacaugggaua

SEQ ID NO: 847649 - RNA, 19 nt, Artificial Sequence
  Description of Artificial Sequence: Synthetic oligonucleotide
uucaccauguucaaugaac

SEQ ID NO: 847650 - RNA, 19 nt, Artificial Sequence
  Description of Artificial Sequence: Synthetic oligonucleotide
aaaucuuuguuuuguuaca

SEQ ID NO: 847651 - RNA, 19 nt, Artificial Sequence
  Description of Artificial Sequence: Synthetic oligonucleotide
agucgaaaaccucauugac

SEQ ID NO: 847652 - RNA, 19 nt, Artificial Sequence
  Description of Artificial Sequence: Synthetic oligonucleotide
auauaggguuaucuauucc

SEQ ID NO: 847653 - RNA, 19 nt, Artificial Sequence
  Description of Artificial Sequence: Synthetic oligonucleotide
aauggaauaucucgagccu

SEQ ID NO: 847654 - RNA, 19 nt, Artificial Sequence
  Description of Artificial Sequence: Synthetic oligonucleotide
ugauauaugguuucagauc

SEQ ID NO: 847655 - RNA, 19 nt, Artificial Sequence
  Description of Artificial Sequence: Synthetic oligonucleotide
cuggcuuuaagacaguuug

SEQ ID NO: 847656 - RNA, 19 nt, Artificial Sequence
  Description of Artificial Sequence: Synthetic oligonucleotide
uuuucuauacgaacuauuu

SEQ ID NO: 847657 - RNA, 19 nt, Artificial Sequence
  Description of Artificial Sequence: Synthetic oligonucleotide
aauacgcuccaauugugca

SEQ ID NO: 847658 - RNA, 19 nt, Artificial Sequence
  Description of Artificial Sequence: Synthetic oligonucleotide
acgcaguucauucuggccg

SEQ ID NO: 847659 - RNA, 19 nt, Artificial Sequence
  Description of Artificial Sequence: Synthetic oligonucleotide
aagucgaaaaccucauuga

SEQ ID NO: 847660 - RNA, 19 nt, Artificial Sequence
  Description of Artificial Sequence: Synthetic oligonucleotide
ucaaagacuguguucgcag

SEQ ID NO: 847661 - RNA, 19 nt, Artificial Sequence
  Description of Artificial Sequence: Synthetic oligonucleotide
ucauggaagaauuuagguc

SEQ ID NO: 847662 - RNA, 19 nt, Artificial Sequence
  Description of Artificial Sequence: Synthetic oligonucleotide
ugcuauaucugcuucaaau

SEQ ID NO: 847663 - RNA, 19 nt, Artificial Sequence
  Description of Artificial Sequence: Synthetic oligonucleotide
uguuaaugagccuaagcaa

SEQ ID NO: 847664 - RNA, 19 nt, Artificial Sequence
  Description of Artificial Sequence: Synthetic oligonucleotide
agaauuuaggucaaguucu

SEQ ID NO: 847665 - RNA, 19 nt, Artificial Sequence
  Description of Artificial Sequence: Synthetic oligonucleotide
guucaugagucucugacgc

SEQ ID NO: 847666 - RNA, 19 nt, Artificial Sequence
  Description of Artificial Sequence: Synthetic oligonucleotide
aucgaugcugguuccauac

SEQ ID NO: 847667 - RNA, 19 nt, Artificial Sequence
  Description of Artificial Sequence: Synthetic oligonucleotide
cuaacucucgacauggaac

SEQ ID NO: 847668 - RNA, 19 nt, Artificial Sequence
  Description of Artificial Sequence: Synthetic oligonucleotide
uauuccgaguuguaugagg

SEQ ID NO: 847669 - RNA, 19 nt, Artificial Sequence
  Description of Artificial Sequence: Synthetic oligonucleotide
ucagaucugaauuccggag

SEQ ID NO: 847670 - RNA, 19 nt, Artificial Sequence
  Description of Artificial Sequence: Synthetic oligonucleotide
caagucgaaaaccucauug

SEQ ID NO: 847671 - RNA, 19 nt, Artificial Sequence
  Description of Artificial Sequence: Synthetic oligonucleotide
gcauuguguaucuugaacg

SEQ ID NO: 847672 - RNA, 19 nt, Artificial Sequence
  Description of Artificial Sequence: Synthetic oligonucleotide
auuugauuuguugacuagg

SEQ ID NO: 847673 - RNA, 19 nt, Artificial Sequence
  Description of Artificial Sequence: Synthetic oligonucleotide
uuguugucgaauacgcucc

SEQ ID NO: 847674 - RNA, 19 nt, Artificial Sequence
  Description of Artificial Sequence: Synthetic oligonucleotide
uuggccgauacuuucauac

SEQ ID NO: 847675 - RNA, 19 nt, Artificial Sequence
  Description of Artificial Sequence: Synthetic oligonucleotide
uauguuaagaucucuucau

SEQ ID NO: 847676 - RNA, 19 nt, Artificial Sequence
  Description of Artificial Sequence: Synthetic oligonucleotide
uagaagcagugaaauaucc

SEQ ID NO: 847677 - RNA, 19 nt, Artificial Sequence
  Description of Artificial Sequence: Synthetic oligonucleotide
ucgaauacgcuccaauugu

SEQ ID NO: 847678 - RNA, 19 nt, Artificial Sequence
  Description of Artificial Sequence: Synthetic oligonucleotide
guaucuugaacgcauuuug

SEQ ID NO: 847679 - RNA, 19 nt, Artificial Sequence
  Description of Artificial Sequence: Synthetic oligonucleotide
accucauugacaucuuuuc

SEQ ID NO: 847680 - RNA, 19 nt, Artificial Sequence
  Description of Artificial Sequence: Synthetic oligonucleotide
gaugauauaugguuucaga

SEQ ID NO: 847681 - RNA, 19 nt, Artificial Sequence
  Description of Artificial Sequence: Synthetic oligonucleotide
uucauacacucucucaucu

SEQ ID NO: 847682 - RNA, 19 nt, Artificial Sequence
  Description of Artificial Sequence: Synthetic oligonucleotide
cauuguguaucuugaacgc

SEQ ID NO: 847683 - RNA, 19 nt, Artificial Sequence
  Description of Artificial Sequence: Synthetic oligonucleotide
aacuucuaauauuuucaca

SEQ ID NO: 847684 - RNA, 19 nt, Artificial Sequence
  Description of Artificial Sequence: Synthetic oligonucleotide
aauauguggcgcauuuaac

SEQ ID NO: 847685 - RNA, 19 nt, Artificial Sequence
  Description of Artificial Sequence: Synthetic oligonucleotide
aaguucaacaugaugacau

SEQ ID NO: 847686 - RNA, 19 nt, Artificial Sequence
  Description of Artificial Sequence: Synthetic oligonucleotide
ugagcuaguuucuuaaguc

SEQ ID NO: 847687 - RNA, 19 nt, Artificial Sequence
  Description of Artificial Sequence: Synthetic oligonucleotide
gaagaugauauaugguuuc

SEQ ID NO: 847688 - RNA, 19 nt, Artificial Sequence
  Description of Artificial Sequence: Synthetic oligonucleotide
  modified_base (9)..(9): a, c, u, g, unknown or other
aguauaucnccuuuugaaa

SEQ ID NO: 847689 - RNA, 19 nt, Artificial Sequence
  Description of Artificial Sequence: Synthetic oligonucleotide
cauggucucgccuauuccg

SEQ ID NO: 847690 - RNA, 19 nt, Artificial Sequence
  Description of Artificial Sequence: Synthetic oligonucleotide
uugucguacagaaucgaug

SEQ ID NO: 847691 - RNA, 19 nt, Artificial Sequence
  Description of Artificial Sequence: Synthetic oligonucleotide
cauaaggaucauccgaggg

SEQ ID NO: 847692 - RNA, 19 nt, Artificial Sequence
  Description of Artificial Sequence: Synthetic oligonucleotide
augauauaugguuucagau

SEQ ID NO: 847693 - RNA, 19 nt, Artificial Sequence
  Description of Artificial Sequence: Synthetic oligonucleotide
gauuugauuuguugacuag

SEQ ID NO: 847694 - RNA, 19 nt, Artificial Sequence
  Description of Artificial Sequence: Synthetic oligonucleotide
uuaucaagaucugaauuca

SEQ ID NO: 847695 - RNA, 19 nt, Artificial Sequence
  Description of Artificial Sequence: Synthetic oligonucleotide
aaugcuugccgugaaacga

SEQ ID NO: 847696 - RNA, 19 nt, Artificial Sequence
  Description of Artificial Sequence: Synthetic oligonucleotide
uuuaggucaaguucuugcu

SEQ ID NO: 847697 - RNA, 19 nt, Artificial Sequence
  Description of Artificial Sequence: Synthetic oligonucleotide
aucuguaaugggcucuagc

SEQ ID NO: 847698 - RNA, 19 nt, Artificial Sequence
  Description of Artificial Sequence: Synthetic oligonucleotide
  modified_base (18)..(18): a, c, u, g, unknown or other
aucacaugaaguauaucnc

SEQ ID NO: 847699 - RNA, 19 nt, Artificial Sequence
  Description of Artificial Sequence: Synthetic oligonucleotide
ucugacgcaguucauucug

SEQ ID NO: 847700 - RNA, 19 nt, Artificial Sequence
  Description of Artificial Sequence: Synthetic oligonucleotide
guuguugucgaauacgcuc

SEQ ID NO: 847701 - RNA, 19 nt, Artificial Sequence
  Description of Artificial Sequence: Synthetic oligonucleotide
uaucuauuccagucuuugg

SEQ ID NO: 847702 - RNA, 19 nt, Artificial Sequence
  Description of Artificial Sequence: Synthetic oligonucleotide
gauucuugcccucuuuggc

SEQ ID NO: 847703 - RNA, 19 nt, Artificial Sequence
  Description of Artificial Sequence: Synthetic oligonucleotide
uuaagaucucuucauuguc

SEQ ID NO: 847704 - RNA, 19 nt, Artificial Sequence
  Description of Artificial Sequence: Synthetic oligonucleotide
gaacaaguccagcuagagg

SEQ ID NO: 847705 - RNA, 19 nt, Artificial Sequence
  Description of Artificial Sequence: Synthetic oligonucleotide
uguucauguguacugugac

SEQ ID NO: 847706 - RNA, 19 nt, Artificial Sequence
  Description of Artificial Sequence: Synthetic oligonucleotide
cuguuguugucgaauacgc

SEQ ID NO: 847707 - RNA, 19 nt, Artificial Sequence
  Description of Artificial Sequence: Synthetic oligonucleotide
gauaauaggucuuuuccua

SEQ ID NO: 847708 - RNA, 19 nt, Artificial Sequence
  Description of Artificial Sequence: Synthetic oligonucleotide
aaacaagucuucaacuucu

SEQ ID NO: 847709 - RNA, 19 nt, Artificial Sequence
  Description of Artificial Sequence: Synthetic oligonucleotide
guuggauauguuuaaguga

SEQ ID NO: 847710 - RNA, 19 nt, Artificial Sequence
  Description of Artificial Sequence: Synthetic oligonucleotide
auaucagacaacaagucga

SEQ ID NO: 847711 - RNA, 19 nt, Artificial Sequence
  Description of Artificial Sequence: Synthetic oligonucleotide
aucugaauuccggagaguc

SEQ ID NO: 847712 - RNA, 19 nt, Artificial Sequence
  Description of Artificial Sequence: Synthetic oligonucleotide
uuacaguuucuuuggcagg

SEQ ID NO: 847713 - RNA, 19 nt, Artificial Sequence
  Description of Artificial Sequence: Synthetic oligonucleotide
uguguucgcagacuuaaaa

SEQ ID NO: 847714 - RNA, 19 nt, Artificial Sequence
  Description of Artificial Sequence: Synthetic oligonucleotide
ucuugaacgcauuuugaaa

SEQ ID NO: 847715 - RNA, 19 nt, Artificial Sequence
  Description of Artificial Sequence: Synthetic oligonucleotide
uugaucacuugucguacag

SEQ ID NO: 847716 - RNA, 19 nt, Artificial Sequence
  Description of Artificial Sequence: Synthetic oligonucleotide
auacgcuccaauugugcac

SEQ ID NO: 847717 - RNA, 19 nt, Artificial Sequence
  Description of Artificial Sequence: Synthetic oligonucleotide
uuucuaaaacgauuccuuc

SEQ ID NO: 847718 - RNA, 19 nt, Artificial Sequence
  Description of Artificial Sequence: Synthetic oligonucleotide
cucucuauaggccugccac

SEQ ID NO: 847719 - RNA, 19 nt, Artificial Sequence
  Description of Artificial Sequence: Synthetic oligonucleotide
auuaugguuugucuucaug

SEQ ID NO: 847720 - RNA, 19 nt, Artificial Sequence
  Description of Artificial Sequence: Synthetic oligonucleotide
cucccuuaacucuucaggc

SEQ ID NO: 847721 - RNA, 19 nt, Artificial Sequence
  Description of Artificial Sequence: Synthetic oligonucleotide
cuugaacgcauuuugaaaa

SEQ ID NO: 847722 - RNA, 19 nt, Artificial Sequence
  Description of Artificial Sequence: Synthetic oligonucleotide
gucgaauacgcuccaauug

SEQ ID NO: 847723 - RNA, 19 nt, Artificial Sequence
  Description of Artificial Sequence: Synthetic oligonucleotide
ugaaacgaagugguaaucu

SEQ ID NO: 847724 - RNA, 19 nt, Artificial Sequence
  Description of Artificial Sequence: Synthetic oligonucleotide
uauguggcgcauuuaacaa

SEQ ID NO: 847725 - RNA, 19 nt, Artificial Sequence
  Description of Artificial Sequence: Synthetic oligonucleotide
aaauauaggguuaucuauu

SEQ ID NO: 847726 - RNA, 19 nt, Artificial Sequence
  Description of Artificial Sequence: Synthetic oligonucleotide
uuugagcuaguuucuuaag

SEQ ID NO: 847727 - RNA, 19 nt, Artificial Sequence
  Description of Artificial Sequence: Synthetic oligonucleotide
cuaagcaauucuugauagg

SEQ ID NO: 847728 - RNA, 19 nt, Artificial Sequence
  Description of Artificial Sequence: Synthetic oligonucleotide
auuccgaguuguaugaggg

SEQ ID NO: 847729 - RNA, 19 nt, Artificial Sequence
  Description of Artificial Sequence: Synthetic oligonucleotide
aguugaucacuugucguac

SEQ ID NO: 847730 - RNA, 19 nt, Artificial Sequence
  Description of Artificial Sequence: Synthetic oligonucleotide
uuguguaucuugaacgcau

SEQ ID NO: 847731 - RNA, 19 nt, Artificial Sequence
  Description of Artificial Sequence: Synthetic oligonucleotide
uggcgcauuuaacaaagca

SEQ ID NO: 847732 - RNA, 19 nt, Artificial Sequence
  Description of Artificial Sequence: Synthetic oligonucleotide
ugaugguaaagugacauuu

SEQ ID NO: 847733 - RNA, 19 nt, Artificial Sequence
  Description of Artificial Sequence: Synthetic oligonucleotide
uguaccucuuguacaaggu

SEQ ID NO: 847734 - RNA, 19 nt, Artificial Sequence
  Description of Artificial Sequence: Synthetic oligonucleotide
gaucacuugucguacagaa

SEQ ID NO: 847735 - RNA, 19 nt, Artificial Sequence
  Description of Artificial Sequence: Synthetic oligonucleotide
acauaaggaucauccgagg

SEQ ID NO: 847736 - RNA, 19 nt, Artificial Sequence
  Description of Artificial Sequence: Synthetic oligonucleotide
ugguaaagugacauuuccu

SEQ ID NO: 847737 - RNA, 19 nt, Artificial Sequence
  Description of Artificial Sequence: Synthetic oligonucleotide
  modified_base (8)..(8): a, c, u, g, unknown or other
guauaucnccuuuugaaaa

SEQ ID NO: 847738 - RNA, 19 nt, Artificial Sequence
  Description of Artificial Sequence: Synthetic oligonucleotide
cauauuggccgauacuuuc

SEQ ID NO: 847739 - RNA, 19 nt, Artificial Sequence
  Description of Artificial Sequence: Synthetic oligonucleotide
acauggaacauaaggauca

SEQ ID NO: 847740 - RNA, 19 nt, Artificial Sequence
  Description of Artificial Sequence: Synthetic oligonucleotide
aaugagcuuuuacauggau

SEQ ID NO: 847741 - RNA, 19 nt, Artificial Sequence
  Description of Artificial Sequence: Synthetic oligonucleotide
uugccgugaaacgaagugg

SEQ ID NO: 847742 - RNA, 19 nt, Artificial Sequence
  Description of Artificial Sequence: Synthetic oligonucleotide
uccaauugugcacuucuuc

SEQ ID NO: 847743 - RNA, 19 nt, Artificial Sequence
  Description of Artificial Sequence: Synthetic oligonucleotide
cauauuuugccagaguuga

SEQ ID NO: 847744 - RNA, 19 nt, Artificial Sequence
  Description of Artificial Sequence: Synthetic oligonucleotide
accaaaguguguuggauau

SEQ ID NO: 847745 - RNA, 19 nt, Artificial Sequence
  Description of Artificial Sequence: Synthetic oligonucleotide
ugcccaaaucuccagggca

SEQ ID NO: 847746 - RNA, 19 nt, Artificial Sequence
  Description of Artificial Sequence: Synthetic oligonucleotide
uccauauuggccgauacuu

SEQ ID NO: 847747 - RNA, 19 nt, Artificial Sequence
  Description of Artificial Sequence: Synthetic oligonucleotide
  modified_base (5)..(5): a, c, u, g, unknown or other
uaucnccuuuugaaaagac

SEQ ID NO: 847748 - RNA, 19 nt, Artificial Sequence
  Description of Artificial Sequence: Synthetic oligonucleotide
cuugccgugaaacgaagug

SEQ ID NO: 847749 - RNA, 19 nt, Artificial Sequence
  Description of Artificial Sequence: Synthetic oligonucleotide
cagaauccauuucauuacg

SEQ ID NO: 847750 - RNA, 19 nt, Artificial Sequence
  Description of Artificial Sequence: Synthetic oligonucleotide
agaguugaucacuugucgu

SEQ ID NO: 847751 - RNA, 19 nt, Artificial Sequence
  Description of Artificial Sequence: Synthetic oligonucleotide
uaaggaucauccgaggggu

SEQ ID NO: 847752 - RNA, 19 nt, Artificial Sequence
  Description of Artificial Sequence: Synthetic oligonucleotide
ucguacagaaucgaugcug

SEQ ID NO: 847753 - RNA, 19 nt, Artificial Sequence
  Description of Artificial Sequence: Synthetic oligonucleotide
ugccgugaaacgaaguggu

SEQ ID NO: 847754 - RNA, 19 nt, Artificial Sequence
  Description of Artificial Sequence: Synthetic oligonucleotide
agauuugauuuguugacua

SEQ ID NO: 847755 - RNA, 19 nt, Artificial Sequence
  Description of Artificial Sequence: Synthetic oligonucleotide
acaaaugucaaaguaccau

SEQ ID NO: 847756 - RNA, 19 nt, Artificial Sequence
  Description of Artificial Sequence: Synthetic oligonucleotide
ucgcagacuuaaaagacau

SEQ ID NO: 847757 - RNA, 19 nt, Artificial Sequence
  Description of Artificial Sequence: Synthetic oligonucleotide
aagacagaccuaacucucg

SEQ ID NO: 847758 - RNA, 19 nt, Artificial Sequence
  Description of Artificial Sequence: Synthetic oligonucleotide
uuugccagaguugaucacu

SEQ ID NO: 847759 - RNA, 19 nt, Artificial Sequence
  Description of Artificial Sequence: Synthetic oligonucleotide
gaggaaauggaggacuggc

SEQ ID NO: 847760 - RNA, 19 nt, Artificial Sequence
  Description of Artificial Sequence: Synthetic oligonucleotide
ucauucuggccgcaguucu

SEQ ID NO: 847761 - RNA, 19 nt, Artificial Sequence
  Description of Artificial Sequence: Synthetic oligonucleotide
aaccaaaguguguuggaua

SEQ ID NO: 847762 - RNA, 19 nt, Artificial Sequence
  Description of Artificial Sequence: Synthetic oligonucleotide
gguaaucucuaccagcuac

SEQ ID NO: 847763 - RNA, 19 nt, Artificial Sequence
  Description of Artificial Sequence: Synthetic oligonucleotide
agcaauucuugauaggcuu

SEQ ID NO: 847764 - RNA, 19 nt, Artificial Sequence
  Description of Artificial Sequence: Synthetic oligonucleotide
ugacuaggaaucagaacaa

SEQ ID NO: 847765 - RNA, 19 nt, Artificial Sequence
  Description of Artificial Sequence: Synthetic oligonucleotide
uuaaugagccuaagcaauu

SEQ ID NO: 847766 - RNA, 19 nt, Artificial Sequence
  Description of Artificial Sequence: Synthetic oligonucleotide
ggagauuugauuuguugac

SEQ ID NO: 847767 - RNA, 19 nt, Artificial Sequence
  Description of Artificial Sequence: Synthetic oligonucleotide
caacaagucgaaaaccuca

SEQ ID NO: 847768 - RNA, 19 nt, Artificial Sequence
  Description of Artificial Sequence: Synthetic oligonucleotide
uguguuggauauguuuaag

SEQ ID NO: 847769 - RNA, 19 nt, Artificial Sequence
  Description of Artificial Sequence: Synthetic oligonucleotide
ucucugacgcaguucauuc

SEQ ID NO: 847770 - RNA, 19 nt, Artificial Sequence
  Description of Artificial Sequence: Synthetic oligonucleotide
uggcuaacaaugcccgaag

SEQ ID NO: 847771 - RNA, 19 nt, Artificial Sequence
  Description of Artificial Sequence: Synthetic oligonucleotide
cuggaacaaguccagcuag

SEQ ID NO: 847772 - RNA, 19 nt, Artificial Sequence
  Description of Artificial Sequence: Synthetic oligonucleotide
aagaugauauaugguuuca

SEQ ID NO: 847773 - RNA, 19 nt, Artificial Sequence
  Description of Artificial Sequence: Synthetic oligonucleotide
caugggauaaaacagcugu

SEQ ID NO: 847774 - RNA, 19 nt, Artificial Sequence
  Description of Artificial Sequence: Synthetic oligonucleotide
uaucaagaucugaauucac

SEQ ID NO: 847775 - RNA, 19 nt, Artificial Sequence
  Description of Artificial Sequence: Synthetic oligonucleotide
aacuuuaucaugggccagu

SEQ ID NO: 847776 - RNA, 19 nt, Artificial Sequence
  Description of Artificial Sequence: Synthetic oligonucleotide
ucacuauccggcuaaugau

SEQ ID NO: 847777 - RNA, 19 nt, Artificial Sequence
  Description of Artificial Sequence: Synthetic oligonucleotide
gaauacgcuccaauugugc

SEQ ID NO: 847778 - RNA, 19 nt, Artificial Sequence
  Description of Artificial Sequence: Synthetic oligonucleotide
ucauuacgaacuguggcac

SEQ ID NO: 847779 - RNA, 19 nt, Artificial Sequence
  Description of Artificial Sequence: Synthetic oligonucleotide
aguucaacaugaugacaug

SEQ ID NO: 847780 - RNA, 19 nt, Artificial Sequence
  Description of Artificial Sequence: Synthetic oligonucleotide
agccaaguagauggcaccc

SEQ ID NO: 847781 - RNA, 19 nt, Artificial Sequence
  Description of Artificial Sequence: Synthetic oligonucleotide
gacauauuuugccagaguu

SEQ ID NO: 847782 - RNA, 19 nt, Artificial Sequence
  Description of Artificial Sequence: Synthetic oligonucleotide
ucucuauaggccugccacc

SEQ ID NO: 847783 - RNA, 19 nt, Artificial Sequence
  Description of Artificial Sequence: Synthetic oligonucleotide
uguuguugucgaauacgcu

SEQ ID NO: 847784 - RNA, 19 nt, Artificial Sequence
  Description of Artificial Sequence: Synthetic oligonucleotide
ccuaagcaauucuugauag

SEQ ID NO: 847785 - RNA, 19 nt, Artificial Sequence
  Description of Artificial Sequence: Synthetic oligonucleotide
uauccggcuaaugaugaca

SEQ ID NO: 847786 - RNA, 19 nt, Artificial Sequence
  Description of Artificial Sequence: Synthetic oligonucleotide
ugguuucagaucugaauuc

SEQ ID NO: 847787 - RNA, 19 nt, Artificial Sequence
  Description of Artificial Sequence: Synthetic oligonucleotide
gacauggaacauaaggauc

SEQ ID NO: 847788 - RNA, 19 nt, Artificial Sequence
  Description of Artificial Sequence: Synthetic oligonucleotide
cucugagaaucaaccaaag

SEQ ID NO: 847789 - RNA, 19 nt, Artificial Sequence
  Description of Artificial Sequence: Synthetic oligonucleotide
ucgagccuuuucuauacga

SEQ ID NO: 847790 - RNA, 19 nt, Artificial Sequence
  Description of Artificial Sequence: Synthetic oligonucleotide
auaggguuaucuauuccag

SEQ ID NO: 847791 - RNA, 19 nt, Artificial Sequence
  Description of Artificial Sequence: Synthetic oligonucleotide
aaagugacauuuccucgua

SEQ ID NO: 847792 - RNA, 19 nt, Artificial Sequence
  Description of Artificial Sequence: Synthetic oligonucleotide
uccgaguuguaugagggac

SEQ ID NO: 847793 - RNA, 19 nt, Artificial Sequence
  Description of Artificial Sequence: Synthetic oligonucleotide
uagccaaguagauggcacc

SEQ ID NO: 847794 - RNA, 19 nt, Artificial Sequence
  Description of Artificial Sequence: Synthetic oligonucleotide
uugaaaagacagaccuaac

SEQ ID NO: 847795 - RNA, 19 nt, Artificial Sequence
  Description of Artificial Sequence: Synthetic oligonucleotide
gacgcaguucauucuggcc

SEQ ID NO: 847796 - RNA, 19 nt, Artificial Sequence
  Description of Artificial Sequence: Synthetic oligonucleotide
ucguauguuaagaucucuu

SEQ ID NO: 847797 - RNA, 19 nt, Artificial Sequence
  Description of Artificial Sequence: Synthetic oligonucleotide
uugucgaauacgcuccaau

SEQ ID NO: 847798 - RNA, 19 nt, Artificial Sequence
  Description of Artificial Sequence: Synthetic oligonucleotide
ucccuuaacucuucaggcu

SEQ ID NO: 847799 - RNA, 19 nt, Artificial Sequence
  Description of Artificial Sequence: Synthetic oligonucleotide
ggcgcauuuaacaaagcag

SEQ ID NO: 847800 - RNA, 19 nt, Artificial Sequence
  Description of Artificial Sequence: Synthetic oligonucleotide
gagccuaagcaauucuuga

SEQ ID NO: 847801 - RNA, 19 nt, Artificial Sequence
  Description of Artificial Sequence: Synthetic oligonucleotide
uugaacgcauuuugaaaau

SEQ ID NO: 847802 - RNA, 19 nt, Artificial Sequence
  Description of Artificial Sequence: Synthetic oligonucleotide
uggaacaaguccagcuaga

SEQ ID NO: 847803 - RNA, 19 nt, Artificial Sequence
  Description of Artificial Sequence: Synthetic oligonucleotide
ugucgaauacgcuccaauu

SEQ ID NO: 847804 - RNA, 19 nt, Artificial Sequence
  Description of Artificial Sequence: Synthetic oligonucleotide
uuaggucaaguucuugcuu

SEQ ID NO: 847805 - RNA, 19 nt, Artificial Sequence
  Description of Artificial Sequence: Synthetic oligonucleotide
ugugcacuucuucgcacug

SEQ ID NO: 847806 - RNA, 19 nt, Artificial Sequence
  Description of Artificial Sequence: Synthetic oligonucleotide
uaacaaugcccgaagucuu

SEQ ID NO: 847807 - RNA, 19 nt, Artificial Sequence
  Description of Artificial Sequence: Synthetic oligonucleotide
guucgcagacuuaaaagac

SEQ ID NO: 847808 - RNA, 19 nt, Artificial Sequence
  Description of Artificial Sequence: Synthetic oligonucleotide
ucaccuuagccaaguagau

SEQ ID NO: 847809 - RNA, 19 nt, Artificial Sequence
  Description of Artificial Sequence: Synthetic oligonucleotide
gcuuuuacauggauuacag

SEQ ID NO: 847810 - RNA, 19 nt, Artificial Sequence
  Description of Artificial Sequence: Synthetic oligonucleotide
uugacaucuuuuccccgga

SEQ ID NO: 847811 - RNA, 19 nt, Artificial Sequence
  Description of Artificial Sequence: Synthetic oligonucleotide
aaugcccgaagucuuucuu

SEQ ID NO: 847812 - RNA, 19 nt, Artificial Sequence
  Description of Artificial Sequence: Synthetic oligonucleotide
ggaagguggagcaaugaag

SEQ ID NO: 847813 - RNA, 19 nt, Artificial Sequence
  Description of Artificial Sequence: Synthetic oligonucleotide
ugacgcaguucauucuggc

SEQ ID NO: 847814 - RNA, 19 nt, Artificial Sequence
  Description of Artificial Sequence: Synthetic oligonucleotide
gacaacaagucgaaaaccu

SEQ ID NO: 847815 - RNA, 19 nt, Artificial Sequence
  Description of Artificial Sequence: Synthetic oligonucleotide
gaguugaucacuugucgua

SEQ ID NO: 847816 - RNA, 19 nt, Artificial Sequence
  Description of Artificial Sequence: Synthetic oligonucleotide
ugagguucaguguccaguu

SEQ ID NO: 847817 - RNA, 19 nt, Artificial Sequence
  Description of Artificial Sequence: Synthetic oligonucleotide
aacaagucgaaaaccucau

SEQ ID NO: 847818 - RNA, 19 nt, Artificial Sequence
  Description of Artificial Sequence: Synthetic oligonucleotide
  modified_base (6)..(6): a, c, u, g, unknown or other
auaucnccuuuugaaaaga

SEQ ID NO: 847819 - RNA, 19 nt, Artificial Sequence
  Description of Artificial Sequence: Synthetic oligonucleotide
cauuacgaacuguggcacc

SEQ ID NO: 847820 - RNA, 19 nt, Artificial Sequence
  Description of Artificial Sequence: Synthetic oligonucleotide
  modified_base (16)..(16): a, c, u, g, unknown or other
cacaugaaguauaucnccu

SEQ ID NO: 847821 - RNA, 19 nt, Artificial Sequence
  Description of Artificial Sequence: Synthetic oligonucleotide
agacagaccuaacucucga

SEQ ID NO: 847822 - RNA, 19 nt, Artificial Sequence
  Description of Artificial Sequence: Synthetic oligonucleotide
  modified_base (4)..(4): a, c, u, g, unknown or other
aucnccuuuugaaaagaca

SEQ ID NO: 847823 - RNA, 19 nt, Artificial Sequence
  Description of Artificial Sequence: Synthetic oligonucleotide
ggagauaagaggaaaugga

SEQ ID NO: 847824 - RNA, 19 nt, Artificial Sequence
  Description of Artificial Sequence: Synthetic oligonucleotide
guaccaugcauaucagaca

SEQ ID NO: 847825 - RNA, 19 nt, Artificial Sequence
  Description of Artificial Sequence: Synthetic oligonucleotide
uugugcacuucuucgcacu

SEQ ID NO: 847826 - RNA, 19 nt, Artificial Sequence
  Description of Artificial Sequence: Synthetic oligonucleotide
acuguguucgcagacuuaa

SEQ ID NO: 847827 - RNA, 19 nt, Artificial Sequence
  Description of Artificial Sequence: Synthetic oligonucleotide
augcccgaagucuuucuug

SEQ ID NO: 847828 - RNA, 19 nt, Artificial Sequence
  Description of Artificial Sequence: Synthetic oligonucleotide
uggaccaaucaagauaaua

SEQ ID NO: 847829 - RNA, 19 nt, Artificial Sequence
  Description of Artificial Sequence: Synthetic oligonucleotide
uguugucgaauacgcucca

SEQ ID NO: 847830 - RNA, 19 nt, Artificial Sequence
  Description of Artificial Sequence: Synthetic oligonucleotide
ucguccccucucuauaggc

SEQ ID NO: 847831 - RNA, 19 nt, Artificial Sequence
  Description of Artificial Sequence: Synthetic oligonucleotide
cuaacaaugcccgaagucu

SEQ ID NO: 847832 - RNA, 19 nt, Artificial Sequence
  Description of Artificial Sequence: Synthetic oligonucleotide
ugaacgcauuuugaaaauc

SEQ ID NO: 847833 - RNA, 19 nt, Artificial Sequence
  Description of Artificial Sequence: Synthetic oligonucleotide
  modified_base (15)..(15): a, c, u, g, unknown or other
acaugaaguauaucnccuu

SEQ ID NO: 847834 - RNA, 19 nt, Artificial Sequence
  Description of Artificial Sequence: Synthetic oligonucleotide
cuucaaagacuguguucgc

SEQ ID NO: 847835 - RNA, 19 nt, Artificial Sequence
  Description of Artificial Sequence: Synthetic oligonucleotide
uaaugagccuaagcaauuc

SEQ ID NO: 847836 - RNA, 19 nt, Artificial Sequence
  Description of Artificial Sequence: Synthetic oligonucleotide
gguuucagaucugaauucc

SEQ ID NO: 847837 - RNA, 19 nt, Artificial Sequence
  Description of Artificial Sequence: Synthetic oligonucleotide
auuguguaucuugaacgca

SEQ ID NO: 847838 - RNA, 19 nt, Artificial Sequence
  Description of Artificial Sequence: Synthetic oligonucleotide
cagugucaaaguaguggcc

SEQ ID NO: 847839 - RNA, 19 nt, Artificial Sequence
  Description of Artificial Sequence: Synthetic oligonucleotide
uacgucucauauccuccug

SEQ ID NO: 847840 - RNA, 19 nt, Artificial Sequence
  Description of Artificial Sequence: Synthetic oligonucleotide
agccuaagcaauucuugau

SEQ ID NO: 847841 - RNA, 19 nt, Artificial Sequence
  Description of Artificial Sequence: Synthetic oligonucleotide
ggacuuucuaaaacgauuc

SEQ ID NO: 847842 - RNA, 19 nt, Artificial Sequence
  Description of Artificial Sequence: Synthetic oligonucleotide
gucgaaaaccucauugaca

SEQ ID NO: 847843 - RNA, 19 nt, Artificial Sequence
  Description of Artificial Sequence: Synthetic oligonucleotide
gaauucacaauugcagugu

SEQ ID NO: 847844 - RNA, 19 nt, Artificial Sequence
  Description of Artificial Sequence: Synthetic oligonucleotide
aagugacauuuccucguau

SEQ ID NO: 847845 - RNA, 19 nt, Artificial Sequence
  Description of Artificial Sequence: Synthetic oligonucleotide
gucaaauauaggguuaucu

SEQ ID NO: 847846 - RNA, 19 nt, Artificial Sequence
  Description of Artificial Sequence: Synthetic oligonucleotide
uguguaucuugaacgcauu

SEQ ID NO: 847847 - RNA, 19 nt, Artificial Sequence
  Description of Artificial Sequence: Synthetic oligonucleotide
acuauccggcuaaugauga

SEQ ID NO: 847848 - RNA, 19 nt, Artificial Sequence
  Description of Artificial Sequence: Synthetic oligonucleotide
gaacgcauuuugaaaaucu

SEQ ID NO: 847849 - RNA, 19 nt, Artificial Sequence
  Description of Artificial Sequence: Synthetic oligonucleotide
gacagaccuaacucucgac

SEQ ID NO: 847850 - RNA, 19 nt, Artificial Sequence
  Description of Artificial Sequence: Synthetic oligonucleotide
auccggcuaaugaugacag

SEQ ID NO: 847851 - RNA, 19 nt, Artificial Sequence
  Description of Artificial Sequence: Synthetic oligonucleotide
agaagcagugaaauauccu

SEQ ID NO: 847852 - RNA, 19 nt, Artificial Sequence
  Description of Artificial Sequence: Synthetic oligonucleotide
agaaucaaccaaagugugu

SEQ ID NO: 847853 - RNA, 19 nt, Artificial Sequence
  Description of Artificial Sequence: Synthetic oligonucleotide
aacgcauuuugaaaaucuu

SEQ ID NO: 847854 - RNA, 19 nt, Artificial Sequence
  Description of Artificial Sequence: Synthetic oligonucleotide
aggacuuucuaaaacgauu

SEQ ID NO: 847855 - RNA, 19 nt, Artificial Sequence
  Description of Artificial Sequence: Synthetic oligonucleotide
auaucucgagccuuuucua

SEQ ID NO: 847856 - RNA, 19 nt, Artificial Sequence
  Description of Artificial Sequence: Synthetic oligonucleotide
gucucauauccuccuguug

SEQ ID NO: 847857 - RNA, 19 nt, Artificial Sequence
  Description of Artificial Sequence: Synthetic oligonucleotide
gccuauuccgaguuguaug

SEQ ID NO: 847858 - RNA, 19 nt, Artificial Sequence
  Description of Artificial Sequence: Synthetic oligonucleotide
uggccgauacuuucauaca

SEQ ID NO: 847859 - RNA, 19 nt, Artificial Sequence
  Description of Artificial Sequence: Synthetic oligonucleotide
cagaucugaauuccggaga

SEQ ID NO: 847860 - RNA, 19 nt, Artificial Sequence
  Description of Artificial Sequence: Synthetic oligonucleotide
ucgcacuggcaucauccug

SEQ ID NO: 847861 - RNA, 19 nt, Artificial Sequence
  Description of Artificial Sequence: Synthetic oligonucleotide
ugaucacuugucguacaga

SEQ ID NO: 847862 - RNA, 19 nt, Artificial Sequence
  Description of Artificial Sequence: Synthetic oligonucleotide
ucgaugcugguuccauaca

SEQ ID NO: 847863 - RNA, 19 nt, Artificial Sequence
  Description of Artificial Sequence: Synthetic oligonucleotide
uccccggauuucaaugcca

SEQ ID NO: 847864 - RNA, 19 nt, Artificial Sequence
  Description of Artificial Sequence: Synthetic oligonucleotide
gcuaacaaugcccgaaguc

SEQ ID NO: 847865 - RNA, 19 nt, Artificial Sequence
  Description of Artificial Sequence: Synthetic oligonucleotide
ccuguuguugucgaauacg

SEQ ID NO: 847866 - RNA, 19 nt, Artificial Sequence
  Description of Artificial Sequence: Synthetic oligonucleotide
cuguggaccaaucaagaua

SEQ ID NO: 847867 - RNA, 19 nt, Artificial Sequence
  Description of Artificial Sequence: Synthetic oligonucleotide
uuucacuauccggcuaaug

SEQ ID NO: 847868 - RNA, 19 nt, Artificial Sequence
  Description of Artificial Sequence: Synthetic oligonucleotide
uuccgaguuguaugaggga

SEQ ID NO: 847869 - RNA, 19 nt, Artificial Sequence
  Description of Artificial Sequence: Synthetic oligonucleotide
agaauccauuucauuacga

SEQ ID NO: 847870 - RNA, 19 nt, Artificial Sequence
  Description of Artificial Sequence: Synthetic oligonucleotide
uucgcacuggcaucauccu

SEQ ID NO: 847871 - RNA, 19 nt, Artificial Sequence
  Description of Artificial Sequence: Synthetic oligonucleotide
guaugagggacugcagaug

SEQ ID NO: 847872 - RNA, 19 nt, Artificial Sequence
  Description of Artificial Sequence: Synthetic oligonucleotide
  modified_base (2)..(2): a, c, u, g, unknown or other
cnccuuuugaaaagacaga

SEQ ID NO: 847873 - RNA, 19 nt, Artificial Sequence
  Description of Artificial Sequence: Synthetic oligonucleotide
auauuggccgauacuuuca

SEQ ID NO: 847874 - RNA, 19 nt, Artificial Sequence
  Description of Artificial Sequence: Synthetic oligonucleotide
ucucgacauggaacauaag

SEQ ID NO: 847875 - RNA, 19 nt, Artificial Sequence
  Description of Artificial Sequence: Synthetic oligonucleotide
auguaagagcccacucuuc

SEQ ID NO: 847876 - RNA, 19 nt, Artificial Sequence
  Description of Artificial Sequence: Synthetic oligonucleotide
ggaacaaguccagcuagag

SEQ ID NO: 847877 - RNA, 19 nt, Artificial Sequence
  Description of Artificial Sequence: Synthetic oligonucleotide
uugccagaguugaucacuu

SEQ ID NO: 847878 - RNA, 19 nt, Artificial Sequence
  Description of Artificial Sequence: Synthetic oligonucleotide
auguggcgcauuuaacaaa

SEQ ID NO: 847879 - RNA, 19 nt, Artificial Sequence
  Description of Artificial Sequence: Synthetic oligonucleotide
ccaauggaauaucucgagc

SEQ ID NO: 847880 - RNA, 19 nt, Artificial Sequence
  Description of Artificial Sequence: Synthetic oligonucleotide
ucacaauugcagugucaaa

SEQ ID NO: 847881 - RNA, 19 nt, Artificial Sequence
  Description of Artificial Sequence: Synthetic oligonucleotide
uccuauuugcuggcugaug

SEQ ID NO: 847882 - RNA, 19 nt, Artificial Sequence
  Description of Artificial Sequence: Synthetic oligonucleotide
cuagaggcugguugucuuc

SEQ ID NO: 847883 - RNA, 19 nt, Artificial Sequence
  Description of Artificial Sequence: Synthetic oligonucleotide
cucgagccuuuucuauacg

SEQ ID NO: 847884 - RNA, 19 nt, Artificial Sequence
  Description of Artificial Sequence: Synthetic oligonucleotide
guugaucacuugucguaca

SEQ ID NO: 847885 - RNA, 19 nt, Artificial Sequence
  Description of Artificial Sequence: Synthetic oligonucleotide
caaaguguguuggauaugu

SEQ ID NO: 847886 - RNA, 19 nt, Artificial Sequence
  Description of Artificial Sequence: Synthetic oligonucleotide
ucuauaggccugccaccaa

SEQ ID NO: 847887 - RNA, 19 nt, Artificial Sequence
  Description of Artificial Sequence: Synthetic oligonucleotide
uacgaacuguggcacccaa

SEQ ID NO: 847888 - RNA, 19 nt, Artificial Sequence
  Description of Artificial Sequence: Synthetic oligonucleotide
gugccugaauauguggcgc

SEQ ID NO: 847889 - RNA, 19 nt, Artificial Sequence
  Description of Artificial Sequence: Synthetic oligonucleotide
gugacauuuccucguaugu

SEQ ID NO: 847890 - RNA, 19 nt, Artificial Sequence
  Description of Artificial Sequence: Synthetic oligonucleotide
caguuuguuaaugagccua

SEQ ID NO: 847891 - RNA, 19 nt, Artificial Sequence
  Description of Artificial Sequence: Synthetic oligonucleotide
acccaauggaauaucucga

SEQ ID NO: 847892 - RNA, 19 nt, Artificial Sequence
  Description of Artificial Sequence: Synthetic oligonucleotide
cuuaacucuucaggcuuug

SEQ ID NO: 847893 - RNA, 19 nt, Artificial Sequence
  Description of Artificial Sequence: Synthetic oligonucleotide
aaggaucauccgagggguc

SEQ ID NO: 847894 - RNA, 19 nt, Artificial Sequence
  Description of Artificial Sequence: Synthetic oligonucleotide
cuauuccgaguuguaugag

SEQ ID NO: 847895 - RNA, 19 nt, Artificial Sequence
  Description of Artificial Sequence: Synthetic oligonucleotide
augagcuuuuacauggauu

SEQ ID NO: 847896 - RNA, 19 nt, Artificial Sequence
  Description of Artificial Sequence: Synthetic oligonucleotide
cuauccggcuaaugaugac

SEQ ID NO: 847897 - RNA, 19 nt, Artificial Sequence
  Description of Artificial Sequence: Synthetic oligonucleotide
gcuacuucauggucucgcc

SEQ ID NO: 847898 - RNA, 19 nt, Artificial Sequence
  Description of Artificial Sequence: Synthetic oligonucleotide
ccuauuccgaguuguauga

SEQ ID NO: 847899 - RNA, 19 nt, Artificial Sequence
  Description of Artificial Sequence: Synthetic oligonucleotide
acaagucgaaaaccucauu

SEQ ID NO: 847900 - RNA, 19 nt, Artificial Sequence
  Description of Artificial Sequence: Synthetic oligonucleotide
ugacaucuuuuccccggau

SEQ ID NO: 847901 - RNA, 19 nt, Artificial Sequence
  Description of Artificial Sequence: Synthetic oligonucleotide
ugaucacaugaaguauauc

SEQ ID NO: 847902 - RNA, 19 nt, Artificial Sequence
  Description of Artificial Sequence: Synthetic oligonucleotide
acgcauuuugaaaaucuuu

SEQ ID NO: 847903 - RNA, 19 nt, Artificial Sequence
  Description of Artificial Sequence: Synthetic oligonucleotide
ugguaaucucuaccagcua

SEQ ID NO: 847904 - RNA, 19 nt, Artificial Sequence
  Description of Artificial Sequence: Synthetic oligonucleotide
caacuuuaucaugggccag

SEQ ID NO: 847905 - RNA, 19 nt, Artificial Sequence
  Description of Artificial Sequence: Synthetic oligonucleotide
cacgccuacgucucauauc

SEQ ID NO: 847906 - RNA, 19 nt, Artificial Sequence
  Description of Artificial Sequence: Synthetic oligonucleotide
uggaggaauuugagcuagu

SEQ ID NO: 847907 - RNA, 19 nt, Artificial Sequence
  Description of Artificial Sequence: Synthetic oligonucleotide
cgaacuguggcacccaaug

SEQ ID NO: 847908 - RNA, 19 nt, Artificial Sequence
  Description of Artificial Sequence: Synthetic oligonucleotide
uucugauggacuggcuuua

SEQ ID NO: 847909 - RNA, 19 nt, Artificial Sequence
  Description of Artificial Sequence: Synthetic oligonucleotide
caccuuagccaaguagaug

SEQ ID NO: 847910 - RNA, 19 nt, Artificial Sequence
  Description of Artificial Sequence: Synthetic oligonucleotide
cucuauaggccugccacca

SEQ ID NO: 847911 - RNA, 19 nt, Artificial Sequence
  Description of Artificial Sequence: Synthetic oligonucleotide
aacaagucuucaacuucua

SEQ ID NO: 847912 - RNA, 19 nt, Artificial Sequence
  Description of Artificial Sequence: Synthetic oligonucleotide
guaguggccauuguuuugu

SEQ ID NO: 847913 - RNA, 19 nt, Artificial Sequence
  Description of Artificial Sequence: Synthetic oligonucleotide
acauuggagauaagaggaa

SEQ ID NO: 847914 - RNA, 19 nt, Artificial Sequence
  Description of Artificial Sequence: Synthetic oligonucleotide
gugaaacgaagugguaauc

SEQ ID NO: 847915 - RNA, 19 nt, Artificial Sequence
  Description of Artificial Sequence: Synthetic oligonucleotide
cuggccgcaguucugugga

SEQ ID NO: 847916 - RNA, 19 nt, Artificial Sequence
  Description of Artificial Sequence: Synthetic oligonucleotide
augagccuaagcaauucuu

SEQ ID NO: 847917 - RNA, 19 nt, Artificial Sequence
  Description of Artificial Sequence: Synthetic oligonucleotide
gggccaguaaaagugccug

SEQ ID NO: 847918 - RNA, 19 nt, Artificial Sequence
  Description of Artificial Sequence: Synthetic oligonucleotide
ccggagagucuucaaagac

SEQ ID NO: 847919 - RNA, 19 nt, Artificial Sequence
  Description of Artificial Sequence: Synthetic oligonucleotide
agcuagaggcugguugucu

SEQ ID NO: 847920 - RNA, 19 nt, Artificial Sequence
  Description of Artificial Sequence: Synthetic oligonucleotide
gccuaagcaauucuugaua

SEQ ID NO: 847921 - RNA, 19 nt, Artificial Sequence
  Description of Artificial Sequence: Synthetic oligonucleotide
ucugauggacuggcuuuaa

SEQ ID NO: 847922 - RNA, 19 nt, Artificial Sequence
  Description of Artificial Sequence: Synthetic oligonucleotide
gccuacgucucauauccuc

SEQ ID NO: 847923 - RNA, 19 nt, Artificial Sequence
  Description of Artificial Sequence: Synthetic oligonucleotide
gcgcauuuaacaaagcagu

SEQ ID NO: 847924 - RNA, 19 nt, Artificial Sequence
  Description of Artificial Sequence: Synthetic oligonucleotide
ggucuuguacauuggagau

SEQ ID NO: 847925 - RNA, 19 nt, Artificial Sequence
  Description of Artificial Sequence: Synthetic oligonucleotide
ucgccuauuccgaguugua

SEQ ID NO: 847926 - RNA, 19 nt, Artificial Sequence
  Description of Artificial Sequence: Synthetic oligonucleotide
accuuucacuauccggcua

SEQ ID NO: 847927 - RNA, 19 nt, Artificial Sequence
  Description of Artificial Sequence: Synthetic oligonucleotide
cauggauuacaguuucuuu

SEQ ID NO: 847928 - RNA, 19 nt, Artificial Sequence
  Description of Artificial Sequence: Synthetic oligonucleotide
cuugucguacagaaucgau

SEQ ID NO: 847929 - RNA, 19 nt, Artificial Sequence
  Description of Artificial Sequence: Synthetic oligonucleotide
cagaccuaacucucgacau

SEQ ID NO: 847930 - RNA, 19 nt, Artificial Sequence
  Description of Artificial Sequence: Synthetic oligonucleotide
ccagcuacuucauggucuc

SEQ ID NO: 847931 - RNA, 19 nt, Artificial Sequence
  Description of Artificial Sequence: Synthetic oligonucleotide
cacagcauagugaggacuu

SEQ ID NO: 847932 - RNA, 19 nt, Artificial Sequence
  Description of Artificial Sequence: Synthetic oligonucleotide
aucacuugucguacagaau

SEQ ID NO: 847933 - RNA, 19 nt, Artificial Sequence
  Description of Artificial Sequence: Synthetic oligonucleotide
augcuugccgugaaacgaa

SEQ ID NO: 847934 - RNA, 19 nt, Artificial Sequence
  Description of Artificial Sequence: Synthetic oligonucleotide
gaggacuuucuaaaacgau

SEQ ID NO: 847935 - RNA, 19 nt, Artificial Sequence
  Description of Artificial Sequence: Synthetic oligonucleotide
auauuuugccagaguugau

SEQ ID NO: 847936 - RNA, 19 nt, Artificial Sequence
  Description of Artificial Sequence: Synthetic oligonucleotide
ccuccauauuggccgauac

SEQ ID NO: 847937 - RNA, 19 nt, Artificial Sequence
  Description of Artificial Sequence: Synthetic oligonucleotide
cuacgucucauauccuccu

SEQ ID NO: 847938 - RNA, 19 nt, Artificial Sequence
  Description of Artificial Sequence: Synthetic oligonucleotide
cgaauacgcuccaauugug

SEQ ID NO: 847939 - RNA, 19 nt, Artificial Sequence
  Description of Artificial Sequence: Synthetic oligonucleotide
gaauuuaggucaaguucuu

SEQ ID NO: 847940 - RNA, 19 nt, Artificial Sequence
  Description of Artificial Sequence: Synthetic oligonucleotide
gaaucgaugcugguuccau

SEQ ID NO: 847941 - RNA, 19 nt, Artificial Sequence
  Description of Artificial Sequence: Synthetic oligonucleotide
uccuccauauuggccgaua

SEQ ID NO: 847942 - RNA, 19 nt, Artificial Sequence
  Description of Artificial Sequence: Synthetic oligonucleotide
cauuuccugcucagcaacu

SEQ ID NO: 847943 - RNA, 19 nt, Artificial Sequence
  Description of Artificial Sequence: Synthetic oligonucleotide
gcccgaagucuuucuuggg

SEQ ID NO: 847944 - RNA, 19 nt, Artificial Sequence
  Description of Artificial Sequence: Synthetic oligonucleotide
cagcauuguguaucuugaa

SEQ ID NO: 847945 - RNA, 19 nt, Artificial Sequence
  Description of Artificial Sequence: Synthetic oligonucleotide
cuccauauuggccgauacu

SEQ ID NO: 847946 - RNA, 19 nt, Artificial Sequence
  Description of Artificial Sequence: Synthetic oligonucleotide
gucguacagaaucgaugcu

SEQ ID NO: 847947 - RNA, 19 nt, Artificial Sequence
  Description of Artificial Sequence: Synthetic oligonucleotide
cccgaagucuuucuuggga

SEQ ID NO: 847948 - RNA, 19 nt, Artificial Sequence
  Description of Artificial Sequence: Synthetic oligonucleotide
uaguggccauuguuuuguu

SEQ ID NO: 847949 - RNA, 19 nt, Artificial Sequence
  Description of Artificial Sequence: Synthetic oligonucleotide
guguaucuugaacgcauuu

SEQ ID NO: 847950 - RNA, 19 nt, Artificial Sequence
  Description of Artificial Sequence: Synthetic oligonucleotide
ggacuggccuuguucaugu

SEQ ID NO: 847951 - RNA, 19 nt, Artificial Sequence
  Description of Artificial Sequence: Synthetic oligonucleotide
ccuaacucucgacauggaa

SEQ ID NO: 847952 - RNA, 19 nt, Artificial Sequence
  Description of Artificial Sequence: Synthetic oligonucleotide
ccgaagucuuucuugggaa

SEQ ID NO: 847953 - RNA, 19 nt, Artificial Sequence
  Description of Artificial Sequence: Synthetic oligonucleotide
guacagaaucgaugcuggu

SEQ ID NO: 847954 - RNA, 19 nt, Artificial Sequence
  Description of Artificial Sequence: Synthetic oligonucleotide
cuuuuccccggauuucaau

SEQ ID NO: 847955 - RNA, 19 nt, Artificial Sequence
  Description of Artificial Sequence: Synthetic oligonucleotide
gaucugaauuccggagagu

SEQ ID NO: 847956 - RNA, 19 nt, Artificial Sequence
  Description of Artificial Sequence: Synthetic oligonucleotide
cgaguuguaugagggacug

SEQ ID NO: 847957 - RNA, 19 nt, Artificial Sequence
  Description of Artificial Sequence: Synthetic oligonucleotide
gccgcaguucuguggacca

SEQ ID NO: 847958 - RNA, 19 nt, Artificial Sequence
  Description of Artificial Sequence: Synthetic oligonucleotide
ccuggugcccaaaucucca

SEQ ID NO: 847959 - RNA, 19 nt, Artificial Sequence
  Description of Artificial Sequence: Synthetic oligonucleotide
cucgccuauuccgaguugu

SEQ ID NO: 847960 - RNA, 19 nt, Artificial Sequence
  Description of Artificial Sequence: Synthetic oligonucleotide
cucugacgcaguucauucu

SEQ ID NO: 847961 - RNA, 19 nt, Artificial Sequence
  Description of Artificial Sequence: Synthetic oligonucleotide
cucguauguuaagaucucu

SEQ ID NO: 847962 - RNA, 19 nt, Artificial Sequence
  Description of Artificial Sequence: Synthetic oligonucleotide
caugagucucugacgcagu

SEQ ID NO: 847963 - RNA, 19 nt, Artificial Sequence
  Description of Artificial Sequence: Synthetic oligonucleotide
gucuucguccccucucuau

SEQ ID NO: 847964 - RNA, 19 nt, Artificial Sequence
  Description of Artificial Sequence: Synthetic oligonucleotide
guugucgaauacgcuccaa

SEQ ID NO: 847965 - RNA, 19 nt, Artificial Sequence
  Description of Artificial Sequence: Synthetic oligonucleotide
cugcuauaucugcuucaaa

SEQ ID NO: 847966 - RNA, 19 nt, Artificial Sequence
  Description of Artificial Sequence: Synthetic oligonucleotide
gcacccaauggaauaucuc

SEQ ID NO: 847967 - RNA, 19 nt, Artificial Sequence
  Description of Artificial Sequence: Synthetic oligonucleotide
caaugcccgaagucuuucu

SEQ ID NO: 847968 - RNA, 19 nt, Artificial Sequence
  Description of Artificial Sequence: Synthetic oligonucleotide
ccgugaaacgaagugguaa

SEQ ID NO: 847969 - RNA, 19 nt, Artificial Sequence
  Description of Artificial Sequence: Synthetic oligonucleotide
cagcuagaggcugguuguc

SEQ ID NO: 847970 - RNA, 19 nt, Artificial Sequence
  Description of Artificial Sequence: Synthetic oligonucleotide
acgaacuguggcacccaau

SEQ ID NO: 847971 - RNA, 19 nt, Artificial Sequence
  Description of Artificial Sequence: Synthetic oligonucleotide
ggcuaacaaugcccgaagu

SEQ ID NO: 847972 - RNA, 19 nt, Artificial Sequence
  Description of Artificial Sequence: Synthetic oligonucleotide
ccaaaguguguuggauaug

SEQ ID NO: 847973 - RNA, 19 nt, Artificial Sequence
  Description of Artificial Sequence: Synthetic oligonucleotide
caccauguucaaugaacuu

SEQ ID NO: 847974 - RNA, 19 nt, Artificial Sequence
  Description of Artificial Sequence: Synthetic oligonucleotide
gagguucaguguccaguuu

SEQ ID NO: 847975 - RNA, 19 nt, Artificial Sequence
  Description of Artificial Sequence: Synthetic oligonucleotide
ccaaaucuccagggcaguc

SEQ ID NO: 847976 - RNA, 19 nt, Artificial Sequence
  Description of Artificial Sequence: Synthetic oligonucleotide
cucacgccuacgucucaua

SEQ ID NO: 847977 - RNA, 19 nt, Artificial Sequence
  Description of Artificial Sequence: Synthetic oligonucleotide
cgagccuuuucuauacgaa

SEQ ID NO: 847978 - RNA, 19 nt, Artificial Sequence
  Description of Artificial Sequence: Synthetic oligonucleotide
ggaggaauuugagcuaguu

SEQ ID NO: 847979 - RNA, 19 nt, Artificial Sequence
  Description of Artificial Sequence: Synthetic oligonucleotide
cgugaaacgaagugguaau

SEQ ID NO: 847980 - RNA, 19 nt, Artificial Sequence
  Description of Artificial Sequence: Synthetic oligonucleotide
ggucucgccuauuccgagu

SEQ ID NO: 847981 - RNA, 19 nt, Artificial Sequence
  Description of Artificial Sequence: Synthetic oligonucleotide
acgcuccaauugugcacuu

SEQ ID NO: 847982 - RNA, 19 nt, Artificial Sequence
  Description of Artificial Sequence: Synthetic oligonucleotide
cauggaacauaaggaucau

SEQ ID NO: 847983 - RNA, 19 nt, Artificial Sequence
  Description of Artificial Sequence: Synthetic oligonucleotide
gcuagaggcugguugucuu

SEQ ID NO: 847984 - RNA, 19 nt, Artificial Sequence
  Description of Artificial Sequence: Synthetic oligonucleotide
cccuuaacucuucaggcuu

SEQ ID NO: 847985 - RNA, 19 nt, Artificial Sequence
  Description of Artificial Sequence: Synthetic oligonucleotide
ccgaguuguaugagggacu

SEQ ID NO: 847986 - RNA, 19 nt, Artificial Sequence
  Description of Artificial Sequence: Synthetic oligonucleotide
ccccucucuauaggccugc

SEQ ID NO: 847987 - RNA, 19 nt, Artificial Sequence
  Description of Artificial Sequence: Synthetic oligonucleotide
ccauauuggccgauacuuu

SEQ ID NO: 847988 - RNA, 19 nt, Artificial Sequence
  Description of Artificial Sequence: Synthetic oligonucleotide
cuuucacuauccggcuaau

SEQ ID NO: 847989 - RNA, 19 nt, Artificial Sequence
  Description of Artificial Sequence: Synthetic oligonucleotide
ccccggauuucaaugccau

SEQ ID NO: 847990 - RNA, 19 nt, Artificial Sequence
  Description of Artificial Sequence: Synthetic oligonucleotide
gccugaauauguggcgcau

SEQ ID NO: 847991 - RNA, 19 nt, Artificial Sequence
  Description of Artificial Sequence: Synthetic oligonucleotide
cuucauggucucgccuauu

SEQ ID NO: 847992 - RNA, 19 nt, Artificial Sequence
  Description of Artificial Sequence: Synthetic oligonucleotide
cgcuccaauugugcacuuc

SEQ ID NO: 847993 - RNA, 19 nt, Artificial Sequence
  Description of Artificial Sequence: Synthetic oligonucleotide
ccgaggggucauagucaaa

SEQ ID NO: 847994 - RNA, 19 nt, Artificial Sequence
  Description of Artificial Sequence: Synthetic oligonucleotide
cgccuauuccgaguuguau

SEQ ID NO: 847995 - RNA, 19 nt, Artificial Sequence
  Description of Artificial Sequence: Synthetic oligonucleotide
ccucacgccuacgucucau

SEQ ID NO: 847996 - RNA, 19 nt, Artificial Sequence
  Description of Artificial Sequence: Synthetic oligonucleotide
ccgcaguucuguggaccaa

SEQ ID NO: 847997 - RNA, 19 nt, Artificial Sequence
  Description of Artificial Sequence: Synthetic oligonucleotide
cgccuacgucucauauccu

SEQ ID NO: 847998 - RNA, 19 nt, Artificial Sequence
  Description of Artificial Sequence: Synthetic oligonucleotide
  modified_base (1)..(1): a, c, u, g, unknown or other
nccuuuugaaaagacagac

SEQ ID NO: 847999 - RNA, 19 nt, Artificial Sequence
  Description of Artificial Sequence: Synthetic oligonucleotide
uacacugccauuucaaugg

SEQ ID NO: 848000 - RNA, 19 nt, Artificial Sequence
  Description of Artificial Sequence: Synthetic oligonucleotide
auagauucgaaccucgggg

SEQ ID NO: 848001 - RNA, 19 nt, Artificial Sequence
  Description of Artificial Sequence: Synthetic oligonucleotide
aaauucagauccugggugg

SEQ ID NO: 848002 - RNA, 19 nt, Artificial Sequence
  Description of Artificial Sequence: Synthetic oligonucleotide
caauuuuccguauaucugg

SEQ ID NO: 848003 - RNA, 19 nt, Artificial Sequence
  Description of Artificial Sequence: Synthetic oligonucleotide
uuuuacuggggaaagcucc

SEQ ID NO: 848004 - RNA, 19 nt, Artificial Sequence
  Description of Artificial Sequence: Synthetic oligonucleotide
uuuccuauaguaaaacuuc

SEQ ID NO: 848005 - RNA, 19 nt, Artificial Sequence
  Description of Artificial Sequence: Synthetic oligonucleotide
aauaccuucaaaguucuca

SEQ ID NO: 848006 - RNA, 19 nt, Artificial Sequence
  Description of Artificial Sequence: Synthetic oligonucleotide
uaucccauucacaagacac

SEQ ID NO: 848007 - RNA, 19 nt, Artificial Sequence
  Description of Artificial Sequence: Synthetic oligonucleotide
cuuacagagaguauacagc

SEQ ID NO: 848008 - RNA, 19 nt, Artificial Sequence
  Description of Artificial Sequence: Synthetic oligonucleotide
uuuuccguauaucuggagc

SEQ ID NO: 848009 - RNA, 19 nt, Artificial Sequence
  Description of Artificial Sequence: Synthetic oligonucleotide
uacacauguauguacacug

SEQ ID NO: 848010 - RNA, 19 nt, Artificial Sequence
  Description of Artificial Sequence: Synthetic oligonucleotide
uguccuauacacauguaug

SEQ ID NO: 848011 - RNA, 19 nt, Artificial Sequence
  Description of Artificial Sequence: Synthetic oligonucleotide
cuauaguaaaacuucuuac

SEQ ID NO: 848012 - RNA, 19 nt, Artificial Sequence
  Description of Artificial Sequence: Synthetic oligonucleotide
uagagguuugcucucuucg

SEQ ID NO: 848013 - RNA, 19 nt, Artificial Sequence
  Description of Artificial Sequence: Synthetic oligonucleotide
ggaaucauagauucgaacc

SEQ ID NO: 848014 - RNA, 19 nt, Artificial Sequence
  Description of Artificial Sequence: Synthetic oligonucleotide
acacuaaauaugcugaugu

SEQ ID NO: 848015 - RNA, 19 nt, Artificial Sequence
  Description of Artificial Sequence: Synthetic oligonucleotide
aagauaucggcuccuuuag

SEQ ID NO: 848016 - RNA, 19 nt, Artificial Sequence
  Description of Artificial Sequence: Synthetic oligonucleotide
auaaguggagcgcuggagg

SEQ ID NO: 848017 - RNA, 19 nt, Artificial Sequence
  Description of Artificial Sequence: Synthetic oligonucleotide
uucucgucaguuuuacugg

SEQ ID NO: 848018 - RNA, 19 nt, Artificial Sequence
  Description of Artificial Sequence: Synthetic oligonucleotide
ugauguauucaaagggaag

SEQ ID NO: 848019 - RNA, 19 nt, Artificial Sequence
  Description of Artificial Sequence: Synthetic oligonucleotide
uccuuuagaagagugacug

SEQ ID NO: 848020 - RNA, 19 nt, Artificial Sequence
  Description of Artificial Sequence: Synthetic oligonucleotide
aauaugcugauguauucaa

SEQ ID NO: 848021 - RNA, 19 nt, Artificial Sequence
  Description of Artificial Sequence: Synthetic oligonucleotide
aagccuagagguuugcucu

SEQ ID NO: 848022 - RNA, 19 nt, Artificial Sequence
  Description of Artificial Sequence: Synthetic oligonucleotide
auaguaaaacuucuuacaa

SEQ ID NO: 848023 - RNA, 19 nt, Artificial Sequence
  Description of Artificial Sequence: Synthetic oligonucleotide
acuucuuacaaacacuuau

SEQ ID NO: 848024 - RNA, 19 nt, Artificial Sequence
  Description of Artificial Sequence: Synthetic oligonucleotide
ucuguauguucucaucugc

SEQ ID NO: 848025 - RNA, 19 nt, Artificial Sequence
  Description of Artificial Sequence: Synthetic oligonucleotide
uucaaaguucucauagugu

SEQ ID NO: 848026 - RNA, 19 nt, Artificial Sequence
  Description of Artificial Sequence: Synthetic oligonucleotide
uauccauacucucuaaguc

SEQ ID NO: 848027 - RNA, 19 nt, Artificial Sequence
  Description of Artificial Sequence: Synthetic oligonucleotide
uauacagcggcauugucuc

SEQ ID NO: 848028 - RNA, 19 nt, Artificial Sequence
  Description of Artificial Sequence: Synthetic oligonucleotide
cucaccaccauugagcucc

SEQ ID NO: 848029 - RNA, 19 nt, Artificial Sequence
  Description of Artificial Sequence: Synthetic oligonucleotide
acaagucaaaauucagauc

SEQ ID NO: 848030 - RNA, 19 nt, Artificial Sequence
  Description of Artificial Sequence: Synthetic oligonucleotide
gaaguagacauacuucuuc

SEQ ID NO: 848031 - RNA, 19 nt, Artificial Sequence
  Description of Artificial Sequence: Synthetic oligonucleotide
uuuccguauaucuggagcu

SEQ ID NO: 848032 - RNA, 19 nt, Artificial Sequence
  Description of Artificial Sequence: Synthetic oligonucleotide
gaucggaagguucugucag

SEQ ID NO: 848033 - RNA, 19 nt, Artificial Sequence
  Description of Artificial Sequence: Synthetic oligonucleotide
aaauaugcugauguauuca

SEQ ID NO: 848034 - RNA, 19 nt, Artificial Sequence
  Description of Artificial Sequence: Synthetic oligonucleotide
gacacugggagaucggaag

SEQ ID NO: 848035 - RNA, 19 nt, Artificial Sequence
  Description of Artificial Sequence: Synthetic oligonucleotide
uaucugucguauuuugugc

SEQ ID NO: 848036 - RNA, 19 nt, Artificial Sequence
  Description of Artificial Sequence: Synthetic oligonucleotide
ucuuacaaacacuuauuuc

SEQ ID NO: 848037 - RNA, 19 nt, Artificial Sequence
  Description of Artificial Sequence: Synthetic oligonucleotide
uaaguggagcgcuggaggg

SEQ ID NO: 848038 - RNA, 19 nt, Artificial Sequence
  Description of Artificial Sequence: Synthetic oligonucleotide
uguuccaagauaucggcuc

SEQ ID NO: 848039 - RNA, 19 nt, Artificial Sequence
  Description of Artificial Sequence: Synthetic oligonucleotide
ucuaaguccuccuuacaga

SEQ ID NO: 848040 - RNA, 19 nt, Artificial Sequence
  Description of Artificial Sequence: Synthetic oligonucleotide
ggcugaaccgcucugaagg

SEQ ID NO: 848041 - RNA, 19 nt, Artificial Sequence
  Description of Artificial Sequence: Synthetic oligonucleotide
uuuagaagagugacugacu

SEQ ID NO: 848042 - RNA, 19 nt, Artificial Sequence
  Description of Artificial Sequence: Synthetic oligonucleotide
ugacauacuggguugucgc

SEQ ID NO: 848043 - RNA, 19 nt, Artificial Sequence
  Description of Artificial Sequence: Synthetic oligonucleotide
cauagauucgaaccucggg

SEQ ID NO: 848044 - RNA, 19 nt, Artificial Sequence
  Description of Artificial Sequence: Synthetic oligonucleotide
uucacgucccuguaccugg

SEQ ID NO: 848045 - RNA, 19 nt, Artificial Sequence
  Description of Artificial Sequence: Synthetic oligonucleotide
ugaauaaguggagcgcugg

SEQ ID NO: 848046 - RNA, 19 nt, Artificial Sequence
  Description of Artificial Sequence: Synthetic oligonucleotide
uacagagaguauacagcgg

SEQ ID NO: 848047 - RNA, 19 nt, Artificial Sequence
  Description of Artificial Sequence: Synthetic oligonucleotide
agauucgaaccucggggcc

SEQ ID NO: 848048 - RNA, 19 nt, Artificial Sequence
  Description of Artificial Sequence: Synthetic oligonucleotide
cuacauugcucucugaguc

SEQ ID NO: 848049 - RNA, 19 nt, Artificial Sequence
  Description of Artificial Sequence: Synthetic oligonucleotide
uggguugucgcuuucuucu

SEQ ID NO: 848050 - RNA, 19 nt, Artificial Sequence
  Description of Artificial Sequence: Synthetic oligonucleotide
cucuaaguccuccuuacag

SEQ ID NO: 848051 - RNA, 19 nt, Artificial Sequence
  Description of Artificial Sequence: Synthetic oligonucleotide
ucuggguccacgcaugcca

SEQ ID NO: 848052 - RNA, 19 nt, Artificial Sequence
  Description of Artificial Sequence: Synthetic oligonucleotide
uagauucgaaccucggggc

SEQ ID NO: 848053 - RNA, 19 nt, Artificial Sequence
  Description of Artificial Sequence: Synthetic oligonucleotide
agagugacugacucuuuuc

SEQ ID NO: 848054 - RNA, 19 nt, Artificial Sequence
  Description of Artificial Sequence: Synthetic oligonucleotide
ucucacuacaugaccagac

SEQ ID NO: 848055 - RNA, 19 nt, Artificial Sequence
  Description of Artificial Sequence: Synthetic oligonucleotide
acgagucuucuccacaggg

SEQ ID NO: 848056 - RNA, 19 nt, Artificial Sequence
  Description of Artificial Sequence: Synthetic oligonucleotide
ucaaccuugucccagcguu

SEQ ID NO: 848057 - RNA, 19 nt, Artificial Sequence
  Description of Artificial Sequence: Synthetic oligonucleotide
uuccuauaguaaaacuucu

SEQ ID NO: 848058 - RNA, 19 nt, Artificial Sequence
  Description of Artificial Sequence: Synthetic oligonucleotide
gucaaaauucagauccugg

SEQ ID NO: 848059 - RNA, 19 nt, Artificial Sequence
  Description of Artificial Sequence: Synthetic oligonucleotide
guguuggaaucauagauuc

SEQ ID NO: 848060 - RNA, 19 nt, Artificial Sequence
  Description of Artificial Sequence: Synthetic oligonucleotide
acuacaugaccagacauca

SEQ ID NO: 848061 - RNA, 19 nt, Artificial Sequence
  Description of Artificial Sequence: Synthetic oligonucleotide
cacugaauaucacagccac

SEQ ID NO: 848062 - RNA, 19 nt, Artificial Sequence
  Description of Artificial Sequence: Synthetic oligonucleotide
ugagguaucugucguauuu

SEQ ID NO: 848063 - RNA, 19 nt, Artificial Sequence
  Description of Artificial Sequence: Synthetic oligonucleotide
acuaaauaugcugauguau

SEQ ID NO: 848064 - RNA, 19 nt, Artificial Sequence
  Description of Artificial Sequence: Synthetic oligonucleotide
aguuuuacuggggaaagcu

SEQ ID NO: 848065 - RNA, 19 nt, Artificial Sequence
  Description of Artificial Sequence: Synthetic oligonucleotide
guauucaaagggaaguccc

SEQ ID NO: 848066 - RNA, 19 nt, Artificial Sequence
  Description of Artificial Sequence: Synthetic oligonucleotide
ucucgucaguuuuacuggg

SEQ ID NO: 848067 - RNA, 19 nt, Artificial Sequence
  Description of Artificial Sequence: Synthetic oligonucleotide
uggggaaagcuccugguac

SEQ ID NO: 848068 - RNA, 19 nt, Artificial Sequence
  Description of Artificial Sequence: Synthetic oligonucleotide
uccacucucgccacgggag

SEQ ID NO: 848069 - RNA, 19 nt, Artificial Sequence
  Description of Artificial Sequence: Synthetic oligonucleotide
ugggcuguacuccuggugu

SEQ ID NO: 848070 - RNA, 19 nt, Artificial Sequence
  Description of Artificial Sequence: Synthetic oligonucleotide
guuggaaucauagauucga

SEQ ID NO: 848071 - RNA, 19 nt, Artificial Sequence
  Description of Artificial Sequence: Synthetic oligonucleotide
uucacaagacacugggaga

SEQ ID NO: 848072 - RNA, 19 nt, Artificial Sequence
  Description of Artificial Sequence: Synthetic oligonucleotide
aguagacuuuccuauagua

SEQ ID NO: 848073 - RNA, 19 nt, Artificial Sequence
  Description of Artificial Sequence: Synthetic oligonucleotide
aguuuguugggugcagccc

SEQ ID NO: 848074 - RNA, 19 nt, Artificial Sequence
  Description of Artificial Sequence: Synthetic oligonucleotide
agcaaugagaugaguggcc

SEQ ID NO: 848075 - RNA, 19 nt, Artificial Sequence
  Description of Artificial Sequence: Synthetic oligonucleotide
uguacuccugguguggucc

SEQ ID NO: 848076 - RNA, 19 nt, Artificial Sequence
  Description of Artificial Sequence: Synthetic oligonucleotide
gaaucauagauucgaaccu

SEQ ID NO: 848077 - RNA, 19 nt, Artificial Sequence
  Description of Artificial Sequence: Synthetic oligonucleotide
uccgauuaucccauucaca

SEQ ID NO: 848078 - RNA, 19 nt, Artificial Sequence
  Description of Artificial Sequence: Synthetic oligonucleotide
uggcauagcacaccaacuc

SEQ ID NO: 848079 - RNA, 19 nt, Artificial Sequence
  Description of Artificial Sequence: Synthetic oligonucleotide
acaauuuuccguauaucug

SEQ ID NO: 848080 - RNA, 19 nt, Artificial Sequence
  Description of Artificial Sequence: Synthetic oligonucleotide
auguauucaaagggaaguc

SEQ ID NO: 848081 - RNA, 19 nt, Artificial Sequence
  Description of Artificial Sequence: Synthetic oligonucleotide
agaguauacagcggcauug

SEQ ID NO: 848082 - RNA, 19 nt, Artificial Sequence
  Description of Artificial Sequence: Synthetic oligonucleotide
ucgucaguuuuacugggga

SEQ ID NO: 848083 - RNA, 19 nt, Artificial Sequence
  Description of Artificial Sequence: Synthetic oligonucleotide
uuuacuggggaaagcuccu

SEQ ID NO: 848084 - RNA, 19 nt, Artificial Sequence
  Description of Artificial Sequence: Synthetic oligonucleotide
gauguauucaaagggaagu

SEQ ID NO: 848085 - RNA, 19 nt, Artificial Sequence
  Description of Artificial Sequence: Synthetic oligonucleotide
uuggcauagcacaccaacu

SEQ ID NO: 848086 - RNA, 19 nt, Artificial Sequence
  Description of Artificial Sequence: Synthetic oligonucleotide
ugggagcacauucugucug

SEQ ID NO: 848087 - RNA, 19 nt, Artificial Sequence
  Description of Artificial Sequence: Synthetic oligonucleotide
aucggaagguucugucagc

SEQ ID NO: 848088 - RNA, 19 nt, Artificial Sequence
  Description of Artificial Sequence: Synthetic oligonucleotide
agcucgggcacaauuuucc

SEQ ID NO: 848089 - RNA, 19 nt, Artificial Sequence
  Description of Artificial Sequence: Synthetic oligonucleotide
guuugcucucuucggaucc

SEQ ID NO: 848090 - RNA, 19 nt, Artificial Sequence
  Description of Artificial Sequence: Synthetic oligonucleotide
uguaggugccuacacuccu

SEQ ID NO: 848091 - RNA, 19 nt, Artificial Sequence
  Description of Artificial Sequence: Synthetic oligonucleotide
uuaucccauucacaagaca

SEQ ID NO: 848092 - RNA, 19 nt, Artificial Sequence
  Description of Artificial Sequence: Synthetic oligonucleotide
cugguuaccucugugugcc

SEQ ID NO: 848093 - RNA, 19 nt, Artificial Sequence
  Description of Artificial Sequence: Synthetic oligonucleotide
  modified_base (2)..(2): a, c, u, g, unknown or other
uncauucacgucccuguac

SEQ ID NO: 848094 - RNA, 19 nt, Artificial Sequence
  Description of Artificial Sequence: Synthetic oligonucleotide
ucugucguauuuugugcug

SEQ ID NO: 848095 - RNA, 19 nt, Artificial Sequence
  Description of Artificial Sequence: Synthetic oligonucleotide
uggaauggauggguguugg

SEQ ID NO: 848096 - RNA, 19 nt, Artificial Sequence
  Description of Artificial Sequence: Synthetic oligonucleotide
aucugucguauuuugugcu

SEQ ID NO: 848097 - RNA, 19 nt, Artificial Sequence
  Description of Artificial Sequence: Synthetic oligonucleotide
ucaggauccuucacugaca

SEQ ID NO: 848098 - RNA, 19 nt, Artificial Sequence
  Description of Artificial Sequence: Synthetic oligonucleotide
guugcuggauucuccacug

SEQ ID NO: 848099 - RNA, 19 nt, Artificial Sequence
  Description of Artificial Sequence: Synthetic oligonucleotide
auaguguucacgagucuuc

SEQ ID NO: 848100 - RNA, 19 nt, Artificial Sequence
  Description of Artificial Sequence: Synthetic oligonucleotide
auuuuccguauaucuggag

SEQ ID NO: 848101 - RNA, 19 nt, Artificial Sequence
  Description of Artificial Sequence: Synthetic oligonucleotide
aguucucauagugucagca

SEQ ID NO: 848102 - RNA, 19 nt, Artificial Sequence
  Description of Artificial Sequence: Synthetic oligonucleotide
uccccaugaauaaguggag

SEQ ID NO: 848103 - RNA, 19 nt, Artificial Sequence
  Description of Artificial Sequence: Synthetic oligonucleotide
accacauguaggugccuac

SEQ ID NO: 848104 - RNA, 19 nt, Artificial Sequence
  Description of Artificial Sequence: Synthetic oligonucleotide
aauuuuccguauaucugga

SEQ ID NO: 848105 - RNA, 19 nt, Artificial Sequence
  Description of Artificial Sequence: Synthetic oligonucleotide
ugugcccgggcagucaucg

SEQ ID NO: 848106 - RNA, 19 nt, Artificial Sequence
  Description of Artificial Sequence: Synthetic oligonucleotide
gagucuugguguccuauac

SEQ ID NO: 848107 - RNA, 19 nt, Artificial Sequence
  Description of Artificial Sequence: Synthetic oligonucleotide
uguauguucucaucugcuu

SEQ ID NO: 848108 - RNA, 19 nt, Artificial Sequence
  Description of Artificial Sequence: Synthetic oligonucleotide
ugugguccgauuaucccau

SEQ ID NO: 848109 - RNA, 19 nt, Artificial Sequence
  Description of Artificial Sequence: Synthetic oligonucleotide
cccaugaauaaguggagcg

SEQ ID NO: 848110 - RNA, 19 nt, Artificial Sequence
  Description of Artificial Sequence: Synthetic oligonucleotide
uugucugagguucccggga

SEQ ID NO: 848111 - RNA, 19 nt, Artificial Sequence
  Description of Artificial Sequence: Synthetic oligonucleotide
guuccaagauaucggcucc

SEQ ID NO: 848112 - RNA, 19 nt, Artificial Sequence
  Description of Artificial Sequence: Synthetic oligonucleotide
aguuuucucuuguggccuc

SEQ ID NO: 848113 - RNA, 19 nt, Artificial Sequence
  Description of Artificial Sequence: Synthetic oligonucleotide
aaccucggggccaggaugg

SEQ ID NO: 848114 - RNA, 19 nt, Artificial Sequence
  Description of Artificial Sequence: Synthetic oligonucleotide
cuagaggccuucccaaggc

SEQ ID NO: 848115 - RNA, 19 nt, Artificial Sequence
  Description of Artificial Sequence: Synthetic oligonucleotide
uuggaaucauagauucgaa

SEQ ID NO: 848116 - RNA, 19 nt, Artificial Sequence
  Description of Artificial Sequence: Synthetic oligonucleotide
uagaagagugacugacucu

SEQ ID NO: 848117 - RNA, 19 nt, Artificial Sequence
  Description of Artificial Sequence: Synthetic oligonucleotide
agaucggaagguucuguca

SEQ ID NO: 848118 - RNA, 19 nt, Artificial Sequence
  Description of Artificial Sequence: Synthetic oligonucleotide
ucuccaaggaugucaucga

SEQ ID NO: 848119 - RNA, 19 nt, Artificial Sequence
  Description of Artificial Sequence: Synthetic oligonucleotide
ugccugugagucuuggugu

SEQ ID NO: 848120 - RNA, 19 nt, Artificial Sequence
  Description of Artificial Sequence: Synthetic oligonucleotide
cuggacaagucaaaauuca

SEQ ID NO: 848121 - RNA, 19 nt, Artificial Sequence
  Description of Artificial Sequence: Synthetic oligonucleotide
ucgaccucuuuauccauac

SEQ ID NO: 848122 - RNA, 19 nt, Artificial Sequence
  Description of Artificial Sequence: Synthetic oligonucleotide
gugccuacacuccugugcc

SEQ ID NO: 848123 - RNA, 19 nt, Artificial Sequence
  Description of Artificial Sequence: Synthetic oligonucleotide
uccuauaguaaaacuucuu

SEQ ID NO: 848124 - RNA, 19 nt, Artificial Sequence
  Description of Artificial Sequence: Synthetic oligonucleotide
cucucuucggaucccuggg

SEQ ID NO: 848125 - RNA, 19 nt, Artificial Sequence
  Description of Artificial Sequence: Synthetic oligonucleotide
gaaccucggggccaggaug

SEQ ID NO: 848126 - RNA, 19 nt, Artificial Sequence
  Description of Artificial Sequence: Synthetic oligonucleotide
uacauugcucucugagucu

SEQ ID NO: 848127 - RNA, 19 nt, Artificial Sequence
  Description of Artificial Sequence: Synthetic oligonucleotide
ucgggcacaauuuuccgua

SEQ ID NO: 848128 - RNA, 19 nt, Artificial Sequence
  Description of Artificial Sequence: Synthetic oligonucleotide
guugucgcuuucuucuagc

SEQ ID NO: 848129 - RNA, 19 nt, Artificial Sequence
  Description of Artificial Sequence: Synthetic oligonucleotide
cugacauacuggguugucg

SEQ ID NO: 848130 - RNA, 19 nt, Artificial Sequence
  Description of Artificial Sequence: Synthetic oligonucleotide
cauugcuuugcuccacccc

SEQ ID NO: 848131 - RNA, 19 nt, Artificial Sequence
  Description of Artificial Sequence: Synthetic oligonucleotide
uacacuccugugccuggcg

SEQ ID NO: 848132 - RNA, 19 nt, Artificial Sequence
  Description of Artificial Sequence: Synthetic oligonucleotide
ggugccuacacuccugugc

SEQ ID NO: 848133 - RNA, 19 nt, Artificial Sequence
  Description of Artificial Sequence: Synthetic oligonucleotide
aucguugcuggauucucca

SEQ ID NO: 848134 - RNA, 19 nt, Artificial Sequence
  Description of Artificial Sequence: Synthetic oligonucleotide
cucgucaguuuuacugggg

SEQ ID NO: 848135 - RNA, 19 nt, Artificial Sequence
  Description of Artificial Sequence: Synthetic oligonucleotide
caagauaucggcuccuuua

SEQ ID NO: 848136 - RNA, 19 nt, Artificial Sequence
  Description of Artificial Sequence: Synthetic oligonucleotide
guuaccucugugugcccgg

SEQ ID NO: 848137 - RNA, 19 nt, Artificial Sequence
  Description of Artificial Sequence: Synthetic oligonucleotide
ucggaagguucugucagcc

SEQ ID NO: 848138 - RNA, 19 nt, Artificial Sequence
  Description of Artificial Sequence: Synthetic oligonucleotide
gagaucggaagguucuguc

SEQ ID NO: 848139 - RNA, 19 nt, Artificial Sequence
  Description of Artificial Sequence: Synthetic oligonucleotide
ccucacacuaaauaugcug

SEQ ID NO: 848140 - RNA, 19 nt, Artificial Sequence
  Description of Artificial Sequence: Synthetic oligonucleotide
aaggcuccccaugaauaag

SEQ ID NO: 848141 - RNA, 19 nt, Artificial Sequence
  Description of Artificial Sequence: Synthetic oligonucleotide
uucuugucugagguucccg

SEQ ID NO: 848142 - RNA, 19 nt, Artificial Sequence
  Description of Artificial Sequence: Synthetic oligonucleotide
uugagcucccuagaggccu

SEQ ID NO: 848143 - RNA, 19 nt, Artificial Sequence
  Description of Artificial Sequence: Synthetic oligonucleotide
caccaacuccucauaacac

SEQ ID NO: 848144 - RNA, 19 nt, Artificial Sequence
  Description of Artificial Sequence: Synthetic oligonucleotide
cuaaauaugcugauguauu

SEQ ID NO: 848145 - RNA, 19 nt, Artificial Sequence
  Description of Artificial Sequence: Synthetic oligonucleotide
gagguuugcucucuucgga

SEQ ID NO: 848146 - RNA, 19 nt, Artificial Sequence
  Description of Artificial Sequence: Synthetic oligonucleotide
accucuuuauccauacucu

SEQ ID NO: 848147 - RNA, 19 nt, Artificial Sequence
  Description of Artificial Sequence: Synthetic oligonucleotide
ucugucagcccauggccac

SEQ ID NO: 848148 - RNA, 19 nt, Artificial Sequence
  Description of Artificial Sequence: Synthetic oligonucleotide
gacugcuggucggagaggc

SEQ ID NO: 848149 - RNA, 19 nt, Artificial Sequence
  Description of Artificial Sequence: Synthetic oligonucleotide
ggcauagcacaccaacucc

SEQ ID NO: 848150 - RNA, 19 nt, Artificial Sequence
  Description of Artificial Sequence: Synthetic oligonucleotide
gaaggcuccccaugaauaa

SEQ ID NO: 848151 - RNA, 19 nt, Artificial Sequence
  Description of Artificial Sequence: Synthetic oligonucleotide
gaaggaggaaggcucccca

SEQ ID NO: 848152 - RNA, 19 nt, Artificial Sequence
  Description of Artificial Sequence: Synthetic oligonucleotide
uccacgcaugccaguggcg

SEQ ID NO: 848153 - RNA, 19 nt, Artificial Sequence
  Description of Artificial Sequence: Synthetic oligonucleotide
ggaagguucugucagccca

SEQ ID NO: 848154 - RNA, 19 nt, Artificial Sequence
  Description of Artificial Sequence: Synthetic oligonucleotide
guccgauuaucccauucac

SEQ ID NO: 848155 - RNA, 19 nt, Artificial Sequence
  Description of Artificial Sequence: Synthetic oligonucleotide
uuuguugggugcagcccac

SEQ ID NO: 848156 - RNA, 19 nt, Artificial Sequence
  Description of Artificial Sequence: Synthetic oligonucleotide
ugagcucgggcacaauuuu

SEQ ID NO: 848157 - RNA, 19 nt, Artificial Sequence
  Description of Artificial Sequence: Synthetic oligonucleotide
aggaggaaggcuccccaug

SEQ ID NO: 848158 - RNA, 19 nt, Artificial Sequence
  Description of Artificial Sequence: Synthetic oligonucleotide
uucagauccuggguggagu

SEQ ID NO: 848159 - RNA, 19 nt, Artificial Sequence
  Description of Artificial Sequence: Synthetic oligonucleotide
uccuauacacauguaugua

SEQ ID NO: 848160 - RNA, 19 nt, Artificial Sequence
  Description of Artificial Sequence: Synthetic oligonucleotide
aggaugaggacaagccuag

SEQ ID NO: 848161 - RNA, 19 nt, Artificial Sequence
  Description of Artificial Sequence: Synthetic oligonucleotide
guauaucuggagcuuccuc

SEQ ID NO: 848162 - RNA, 19 nt, Artificial Sequence
  Description of Artificial Sequence: Synthetic oligonucleotide
gugugguccgauuauccca

SEQ ID NO: 848163 - RNA, 19 nt, Artificial Sequence
  Description of Artificial Sequence: Synthetic oligonucleotide
aguggagcgcuggagggag

SEQ ID NO: 848164 - RNA, 19 nt, Artificial Sequence
  Description of Artificial Sequence: Synthetic oligonucleotide
cugucguauuuugugcugc

SEQ ID NO: 848165 - RNA, 19 nt, Artificial Sequence
  Description of Artificial Sequence: Synthetic oligonucleotide
ugucgucgcugccuucucc

SEQ ID NO: 848166 - RNA, 19 nt, Artificial Sequence
  Description of Artificial Sequence: Synthetic oligonucleotide
agccuagagguuugcucuc

SEQ ID NO: 848167 - RNA, 19 nt, Artificial Sequence
  Description of Artificial Sequence: Synthetic oligonucleotide
agauaucggcuccuuuaga

SEQ ID NO: 848168 - RNA, 19 nt, Artificial Sequence
  Description of Artificial Sequence: Synthetic oligonucleotide
ugucaucgaccucuuuauc

SEQ ID NO: 848169 - RNA, 19 nt, Artificial Sequence
  Description of Artificial Sequence: Synthetic oligonucleotide
uggcugaaccgcucugaag

SEQ ID NO: 848170 - RNA, 19 nt, Artificial Sequence
  Description of Artificial Sequence: Synthetic oligonucleotide
cuagagguuugcucucuuc

SEQ ID NO: 848171 - RNA, 19 nt, Artificial Sequence
  Description of Artificial Sequence: Synthetic oligonucleotide
cuaugagcgggaagagcug

SEQ ID NO: 848172 - RNA, 19 nt, Artificial Sequence
  Description of Artificial Sequence: Synthetic oligonucleotide
ucacgucccuguaccuggg

SEQ ID NO: 848173 - RNA, 19 nt, Artificial Sequence
  Description of Artificial Sequence: Synthetic oligonucleotide
ugguccgauuaucccauuc

SEQ ID NO: 848174 - RNA, 19 nt, Artificial Sequence
  Description of Artificial Sequence: Synthetic oligonucleotide
gggacugcuggucggagag

SEQ ID NO: 848175 - RNA, 19 nt, Artificial Sequence
  Description of Artificial Sequence: Synthetic oligonucleotide
uggacucacuggcagcauc

SEQ ID NO: 848176 - RNA, 19 nt, Artificial Sequence
  Description of Artificial Sequence: Synthetic oligonucleotide
uccuuacagagaguauaca

SEQ ID NO: 848177 - RNA, 19 nt, Artificial Sequence
  Description of Artificial Sequence: Synthetic oligonucleotide
ugagugggcuguacuccug

SEQ ID NO: 848178 - RNA, 19 nt, Artificial Sequence
  Description of Artificial Sequence: Synthetic oligonucleotide
guauguacacugccauuuc

SEQ ID NO: 848179 - RNA, 19 nt, Artificial Sequence
  Description of Artificial Sequence: Synthetic oligonucleotide
gucaguuuuacuggggaaa

SEQ ID NO: 848180 - RNA, 19 nt, Artificial Sequence
  Description of Artificial Sequence: Synthetic oligonucleotide
cuguaccugggaaguagac

SEQ ID NO: 848181 - RNA, 19 nt, Artificial Sequence
  Description of Artificial Sequence: Synthetic oligonucleotide
augccaguggcgcuccucu

SEQ ID NO: 848182 - RNA, 19 nt, Artificial Sequence
  Description of Artificial Sequence: Synthetic oligonucleotide
agguuugcucucuucggau

SEQ ID NO: 848183 - RNA, 19 nt, Artificial Sequence
  Description of Artificial Sequence: Synthetic oligonucleotide
guccacgcaugccaguggc

SEQ ID NO: 848184 - RNA, 19 nt, Artificial Sequence
  Description of Artificial Sequence: Synthetic oligonucleotide
aggaaggcuccccaugaau

SEQ ID NO: 848185 - RNA, 19 nt, Artificial Sequence
  Description of Artificial Sequence: Synthetic oligonucleotide
uccggaugagcuugccugu

SEQ ID NO: 848186 - RNA, 19 nt, Artificial Sequence
  Description of Artificial Sequence: Synthetic oligonucleotide
agcccucacacuaaauaug

SEQ ID NO: 848187 - RNA, 19 nt, Artificial Sequence
  Description of Artificial Sequence: Synthetic oligonucleotide
uggcgcaccuucucugugc

SEQ ID NO: 848188 - RNA, 19 nt, Artificial Sequence
  Description of Artificial Sequence: Synthetic oligonucleotide
caucaucguugcuggauuc

SEQ ID NO: 848189 - RNA, 19 nt, Artificial Sequence
  Description of Artificial Sequence: Synthetic oligonucleotide
  modified_base (4)..(4): a, c, u, g, unknown or other
gguncauucacgucccugu

SEQ ID NO: 848190 - RNA, 19 nt, Artificial Sequence
  Description of Artificial Sequence: Synthetic oligonucleotide
guuuuacuggggaaagcuc

SEQ ID NO: 848191 - RNA, 19 nt, Artificial Sequence
  Description of Artificial Sequence: Synthetic oligonucleotide
guacuccuggugugguccg

SEQ ID NO: 848192 - RNA, 19 nt, Artificial Sequence
  Description of Artificial Sequence: Synthetic oligonucleotide
acucucgccacgggaggcc

SEQ ID NO: 848193 - RNA, 19 nt, Artificial Sequence
  Description of Artificial Sequence: Synthetic oligonucleotide
cuccaaggaugucaucgac

SEQ ID NO: 848194 - RNA, 19 nt, Artificial Sequence
  Description of Artificial Sequence: Synthetic oligonucleotide
aguggcgcuccucucgcca

SEQ ID NO: 848195 - RNA, 19 nt, Artificial Sequence
  Description of Artificial Sequence: Synthetic oligonucleotide
ugugugcccgggcagucau

SEQ ID NO: 848196 - RNA, 19 nt, Artificial Sequence
  Description of Artificial Sequence: Synthetic oligonucleotide
gcuccccaugaauaagugg

SEQ ID NO: 848197 - RNA, 19 nt, Artificial Sequence
  Description of Artificial Sequence: Synthetic oligonucleotide
auaacacuuugucgcuuaa

SEQ ID NO: 848198 - RNA, 19 nt, Artificial Sequence
  Description of Artificial Sequence: Synthetic oligonucleotide
gcugggagcacauucuguc

SEQ ID NO: 848199 - RNA, 19 nt, Artificial Sequence
  Description of Artificial Sequence: Synthetic oligonucleotide
uccuucucgucaguuuuac

SEQ ID NO: 848200 - RNA, 19 nt, Artificial Sequence
  Description of Artificial Sequence: Synthetic oligonucleotide
uccguauaucuggagcuuc

SEQ ID NO: 848201 - RNA, 19 nt, Artificial Sequence
  Description of Artificial Sequence: Synthetic oligonucleotide
auucagauccuggguggag

SEQ ID NO: 848202 - RNA, 19 nt, Artificial Sequence
  Description of Artificial Sequence: Synthetic oligonucleotide
cugcuuccgaacugccugc

SEQ ID NO: 848203 - RNA, 19 nt, Artificial Sequence
  Description of Artificial Sequence: Synthetic oligonucleotide
ccaccauugagcucccuag

SEQ ID NO: 848204 - RNA, 19 nt, Artificial Sequence
  Description of Artificial Sequence: Synthetic oligonucleotide
aucggcuccuuuagaagag

SEQ ID NO: 848205 - RNA, 19 nt, Artificial Sequence
  Description of Artificial Sequence: Synthetic oligonucleotide
caugaccagacaucacaca

SEQ ID NO: 848206 - RNA, 19 nt, Artificial Sequence
  Description of Artificial Sequence: Synthetic oligonucleotide
auguauguacacugccauu

SEQ ID NO: 848207 - RNA, 19 nt, Artificial Sequence
  Description of Artificial Sequence: Synthetic oligonucleotide
agggcugguuaccucugug

SEQ ID NO: 848208 - RNA, 19 nt, Artificial Sequence
  Description of Artificial Sequence: Synthetic oligonucleotide
gcugguuaccucugugugc

SEQ ID NO: 848209 - RNA, 19 nt, Artificial Sequence
  Description of Artificial Sequence: Synthetic oligonucleotide
gcaaugagaugaguggccc

SEQ ID NO: 848210 - RNA, 19 nt, Artificial Sequence
  Description of Artificial Sequence: Synthetic oligonucleotide
agacuuuccuauaguaaaa

SEQ ID NO: 848211 - RNA, 19 nt, Artificial Sequence
  Description of Artificial Sequence: Synthetic oligonucleotide
aacuucuuacaaacacuua

SEQ ID NO: 848212 - RNA, 19 nt, Artificial Sequence
  Description of Artificial Sequence: Synthetic oligonucleotide
ccuauaguaaaacuucuua

SEQ ID NO: 848213 - RNA, 19 nt, Artificial Sequence
  Description of Artificial Sequence: Synthetic oligonucleotide
cuggguccacgcaugccag

SEQ ID NO: 848214 - RNA, 19 nt, Artificial Sequence
  Description of Artificial Sequence: Synthetic oligonucleotide
gguuaccucugugugcccg

SEQ ID NO: 848215 - RNA, 19 nt, Artificial Sequence
  Description of Artificial Sequence: Synthetic oligonucleotide
acugucgucgcugccuucu

SEQ ID NO: 848216 - RNA, 19 nt, Artificial Sequence
  Description of Artificial Sequence: Synthetic oligonucleotide
caguuuuacuggggaaagc

SEQ ID NO: 848217 - RNA, 19 nt, Artificial Sequence
  Description of Artificial Sequence: Synthetic oligonucleotide
aaguggagcgcuggaggga

SEQ ID NO: 848218 - RNA, 19 nt, Artificial Sequence
  Description of Artificial Sequence: Synthetic oligonucleotide
cauguauguacacugccau

SEQ ID NO: 848219 - RNA, 19 nt, Artificial Sequence
  Description of Artificial Sequence: Synthetic oligonucleotide
uaacacuuugucgcuuaaa

SEQ ID NO: 848220 - RNA, 19 nt, Artificial Sequence
  Description of Artificial Sequence: Synthetic oligonucleotide
ccaugaauaaguggagcgc

SEQ ID NO: 848221 - RNA, 19 nt, Artificial Sequence
  Description of Artificial Sequence: Synthetic oligonucleotide
ccuagaggccuucccaagg

SEQ ID NO: 848222 - RNA, 19 nt, Artificial Sequence
  Description of Artificial Sequence: Synthetic oligonucleotide
gcccucacacuaaauaugc

SEQ ID NO: 848223 - RNA, 19 nt, Artificial Sequence
  Description of Artificial Sequence: Synthetic oligonucleotide
aucaucguugcuggauucu

SEQ ID NO: 848224 - RNA, 19 nt, Artificial Sequence
  Description of Artificial Sequence: Synthetic oligonucleotide
uccucucgccaggaugagg

SEQ ID NO: 848225 - RNA, 19 nt, Artificial Sequence
  Description of Artificial Sequence: Synthetic oligonucleotide
cugaaccgcucugaaggag

SEQ ID NO: 848226 - RNA, 19 nt, Artificial Sequence
  Description of Artificial Sequence: Synthetic oligonucleotide
cuucggaucccugggguuc

SEQ ID NO: 848227 - RNA, 19 nt, Artificial Sequence
  Description of Artificial Sequence: Synthetic oligonucleotide
ccagguauccuucucguca

SEQ ID NO: 848228 - RNA, 19 nt, Artificial Sequence
  Description of Artificial Sequence: Synthetic oligonucleotide
ucuucggaucccugggguu

SEQ ID NO: 848229 - RNA, 19 nt, Artificial Sequence
  Description of Artificial Sequence: Synthetic oligonucleotide
ucacugucgucgcugccuu

SEQ ID NO: 848230 - RNA, 19 nt, Artificial Sequence
  Description of Artificial Sequence: Synthetic oligonucleotide
ucguugcuggauucuccac

SEQ ID NO: 848231 - RNA, 19 nt, Artificial Sequence
  Description of Artificial Sequence: Synthetic oligonucleotide
ucugacauacuggguuguc

SEQ ID NO: 848232 - RNA, 19 nt, Artificial Sequence
  Description of Artificial Sequence: Synthetic oligonucleotide
uuccgaacugccugcccuc

SEQ ID NO: 848233 - RNA, 19 nt, Artificial Sequence
  Description of Artificial Sequence: Synthetic oligonucleotide
uucggaucccugggguucc

SEQ ID NO: 848234 - RNA, 19 nt, Artificial Sequence
  Description of Artificial Sequence: Synthetic oligonucleotide
gccaguggcgcuccucucg

SEQ ID NO: 848235 - RNA, 19 nt, Artificial Sequence
  Description of Artificial Sequence: Synthetic oligonucleotide
cacuaaauaugcugaugua

SEQ ID NO: 848236 - RNA, 19 nt, Artificial Sequence
  Description of Artificial Sequence: Synthetic oligonucleotide
uuccaagauaucggcuccu

SEQ ID NO: 848237 - RNA, 19 nt, Artificial Sequence
  Description of Artificial Sequence: Synthetic oligonucleotide
gucgucgcugccuucucca

SEQ ID NO: 848238 - RNA, 19 nt, Artificial Sequence
  Description of Artificial Sequence: Synthetic oligonucleotide
caaccuugucccagcguuc

SEQ ID NO: 848239 - RNA, 19 nt, Artificial Sequence
  Description of Artificial Sequence: Synthetic oligonucleotide
guaggugccuacacuccug

SEQ ID NO: 848240 - RNA, 19 nt, Artificial Sequence
  Description of Artificial Sequence: Synthetic oligonucleotide
acugaauaucacagccaca

SEQ ID NO: 848241 - RNA, 19 nt, Artificial Sequence
  Description of Artificial Sequence: Synthetic oligonucleotide
cacauccacucucgccacg

SEQ ID NO: 848242 - RNA, 19 nt, Artificial Sequence
  Description of Artificial Sequence: Synthetic oligonucleotide
gcucgggcacaauuuuccg

SEQ ID NO: 848243 - RNA, 19 nt, Artificial Sequence
  Description of Artificial Sequence: Synthetic oligonucleotide
cuguauguucucaucugcu

SEQ ID NO: 848244 - RNA, 19 nt, Artificial Sequence
  Description of Artificial Sequence: Synthetic oligonucleotide
acgcaugccaguggcgcuc

SEQ ID NO: 848245 - RNA, 19 nt, Artificial Sequence
  Description of Artificial Sequence: Synthetic oligonucleotide
ccguauaucuggagcuucc

SEQ ID NO: 848246 - RNA, 19 nt, Artificial Sequence
  Description of Artificial Sequence: Synthetic oligonucleotide
gacauacuggguugucgcu

SEQ ID NO: 848247 - RNA, 19 nt, Artificial Sequence
  Description of Artificial Sequence: Synthetic oligonucleotide
acaagccuagagguuugcu

SEQ ID NO: 848248 - RNA, 19 nt, Artificial Sequence
  Description of Artificial Sequence: Synthetic oligonucleotide
caccaaacaucugcugcug

SEQ ID NO: 848249 - RNA, 19 nt, Artificial Sequence
  Description of Artificial Sequence: Synthetic oligonucleotide
cagacaucacacauccacu

SEQ ID NO: 848250 - RNA, 19 nt, Artificial Sequence
  Description of Artificial Sequence: Synthetic oligonucleotide
acuccucauaacacuuugu

SEQ ID NO: 848251 - RNA, 19 nt, Artificial Sequence
  Description of Artificial Sequence: Synthetic oligonucleotide
uuccguauaucuggagcuu

SEQ ID NO: 848252 - RNA, 19 nt, Artificial Sequence
  Description of Artificial Sequence: Synthetic oligonucleotide
gguccacgcaugccagugg

SEQ ID NO: 848253 - RNA, 19 nt, Artificial Sequence
  Description of Artificial Sequence: Synthetic oligonucleotide
gaaccgcucugaaggagga

SEQ ID NO: 848254 - RNA, 19 nt, Artificial Sequence
  Description of Artificial Sequence: Synthetic oligonucleotide
ugcuuccgaacugccugcc

SEQ ID NO: 848255 - RNA, 19 nt, Artificial Sequence
  Description of Artificial Sequence: Synthetic oligonucleotide
ccugagugggcuguacucc

SEQ ID NO: 848256 - RNA, 19 nt, Artificial Sequence
  Description of Artificial Sequence: Synthetic oligonucleotide
ucgaaccucggggccagga

SEQ ID NO: 848257 - RNA, 19 nt, Artificial Sequence
  Description of Artificial Sequence: Synthetic oligonucleotide
ggcagucaucgucuaugag

SEQ ID NO: 848258 - RNA, 19 nt, Artificial Sequence
  Description of Artificial Sequence: Synthetic oligonucleotide
ccucucgccaggaugagga

SEQ ID NO: 848259 - RNA, 19 nt, Artificial Sequence
  Description of Artificial Sequence: Synthetic oligonucleotide
cacgggaggcccugcugag

SEQ ID NO: 848260 - RNA, 19 nt, Artificial Sequence
  Description of Artificial Sequence: Synthetic oligonucleotide
auacagcggcauugucucu

SEQ ID NO: 848261 - RNA, 19 nt, Artificial Sequence
  Description of Artificial Sequence: Synthetic oligonucleotide
  modified_base (3)..(3): a, c, u, g, unknown or other
guncauucacgucccugua

SEQ ID NO: 848262 - RNA, 19 nt, Artificial Sequence
  Description of Artificial Sequence: Synthetic oligonucleotide
caccgggacugcuggucgg

SEQ ID NO: 848263 - RNA, 19 nt, Artificial Sequence
  Description of Artificial Sequence: Synthetic oligonucleotide
ucggcuccuuuagaagagu

SEQ ID NO: 848264 - RNA, 19 nt, Artificial Sequence
  Description of Artificial Sequence: Synthetic oligonucleotide
ugagucucacugggucccc

SEQ ID NO: 848265 - RNA, 19 nt, Artificial Sequence
  Description of Artificial Sequence: Synthetic oligonucleotide
cuguacuccuggugugguc

SEQ ID NO: 848266 - RNA, 19 nt, Artificial Sequence
  Description of Artificial Sequence: Synthetic oligonucleotide
ccgcucugaaggaggaagg

SEQ ID NO: 848267 - RNA, 19 nt, Artificial Sequence
  Description of Artificial Sequence: Synthetic oligonucleotide
gagaguauacagcggcauu

SEQ ID NO: 848268 - RNA, 19 nt, Artificial Sequence
  Description of Artificial Sequence: Synthetic oligonucleotide
gggaaagcuccugguacag

SEQ ID NO: 848269 - RNA, 19 nt, Artificial Sequence
  Description of Artificial Sequence: Synthetic oligonucleotide
uccaagauaucggcuccuu

SEQ ID NO: 848270 - RNA, 19 nt, Artificial Sequence
  Description of Artificial Sequence: Synthetic oligonucleotide
cuuccgaacugccugcccu

SEQ ID NO: 848271 - RNA, 19 nt, Artificial Sequence
  Description of Artificial Sequence: Synthetic oligonucleotide
cuggugugguccgauuauc

SEQ ID NO: 848272 - RNA, 19 nt, Artificial Sequence
  Description of Artificial Sequence: Synthetic oligonucleotide
gcuacauugcucucugagu

SEQ ID NO: 848273 - RNA, 19 nt, Artificial Sequence
  Description of Artificial Sequence: Synthetic oligonucleotide
ugccuacacuccugugccu

SEQ ID NO: 848274 - RNA, 19 nt, Artificial Sequence
  Description of Artificial Sequence: Synthetic oligonucleotide
aggugccuacacuccugug

SEQ ID NO: 848275 - RNA, 19 nt, Artificial Sequence
  Description of Artificial Sequence: Synthetic oligonucleotide
augagaugaguggcccugu

SEQ ID NO: 848276 - RNA, 19 nt, Artificial Sequence
  Description of Artificial Sequence: Synthetic oligonucleotide
ccauugcuuugcuccaccc

SEQ ID NO: 848277 - RNA, 19 nt, Artificial Sequence
  Description of Artificial Sequence: Synthetic oligonucleotide
  modified_base (5)..(5): a, c, u, g, unknown or other
ggguncauucacgucccug

SEQ ID NO: 848278 - RNA, 19 nt, Artificial Sequence
  Description of Artificial Sequence: Synthetic oligonucleotide
caccauugagcucccuaga

SEQ ID NO: 848279 - RNA, 19 nt, Artificial Sequence
  Description of Artificial Sequence: Synthetic oligonucleotide
ggcgcaccuucucugugcc

SEQ ID NO: 848280 - RNA, 19 nt, Artificial Sequence
  Description of Artificial Sequence: Synthetic oligonucleotide
cuugagguaucugucguau

SEQ ID NO: 848281 - RNA, 19 nt, Artificial Sequence
  Description of Artificial Sequence: Synthetic oligonucleotide
agguauccuucucgucagu

SEQ ID NO: 848282 - RNA, 19 nt, Artificial Sequence
  Description of Artificial Sequence: Synthetic oligonucleotide
cacucucgccacgggaggc

SEQ ID NO: 848283 - RNA, 19 nt, Artificial Sequence
  Description of Artificial Sequence: Synthetic oligonucleotide
cguauuuugugcugcucuc

SEQ ID NO: 848284 - RNA, 19 nt, Artificial Sequence
  Description of Artificial Sequence: Synthetic oligonucleotide
agacacugggagaucggaa

SEQ ID NO: 848285 - RNA, 19 nt, Artificial Sequence
  Description of Artificial Sequence: Synthetic oligonucleotide
ggaaggcuccccaugaaua

SEQ ID NO: 848286 - RNA, 19 nt, Artificial Sequence
  Description of Artificial Sequence: Synthetic oligonucleotide
gaccacauguaggugccua

SEQ ID NO: 848287 - RNA, 19 nt, Artificial Sequence
  Description of Artificial Sequence: Synthetic oligonucleotide
gguucccgggacccagggg

SEQ ID NO: 848288 - RNA, 19 nt, Artificial Sequence
  Description of Artificial Sequence: Synthetic oligonucleotide
cucuggguccacgcaugcc

SEQ ID NO: 848289 - RNA, 19 nt, Artificial Sequence
  Description of Artificial Sequence: Synthetic oligonucleotide
gagcuugccuguguuggaa

SEQ ID NO: 848290 - RNA, 19 nt, Artificial Sequence
  Description of Artificial Sequence: Synthetic oligonucleotide
gcuugccuguguuggaauc

SEQ ID NO: 848291 - RNA, 19 nt, Artificial Sequence
  Description of Artificial Sequence: Synthetic oligonucleotide
guggcugaaccgcucugaa

SEQ ID NO: 848292 - RNA, 19 nt, Artificial Sequence
  Description of Artificial Sequence: Synthetic oligonucleotide
gugcccauccggaugagcu

SEQ ID NO: 848293 - RNA, 19 nt, Artificial Sequence
  Description of Artificial Sequence: Synthetic oligonucleotide
guauccuucucgucaguuu

SEQ ID NO: 848294 - RNA, 19 nt, Artificial Sequence
  Description of Artificial Sequence: Synthetic oligonucleotide
cucucacuacaugaccaga

SEQ ID NO: 848295 - RNA, 19 nt, Artificial Sequence
  Description of Artificial Sequence: Synthetic oligonucleotide
gugcagcccacugaauauc

SEQ ID NO: 848296 - RNA, 19 nt, Artificial Sequence
  Description of Artificial Sequence: Synthetic oligonucleotide
ccuguguuggaaucauaga

SEQ ID NO: 848297 - RNA, 19 nt, Artificial Sequence
  Description of Artificial Sequence: Synthetic oligonucleotide
ccccaugaauaaguggagc

SEQ ID NO: 848298 - RNA, 19 nt, Artificial Sequence
  Description of Artificial Sequence: Synthetic oligonucleotide
ucgucgcugccuucuccaa

SEQ ID NO: 848299 - RNA, 19 nt, Artificial Sequence
  Description of Artificial Sequence: Synthetic oligonucleotide
ccucaaccuugucccagcg

SEQ ID NO: 848300 - RNA, 19 nt, Artificial Sequence
  Description of Artificial Sequence: Synthetic oligonucleotide
gucacugucgucgcugccu

SEQ ID NO: 848301 - RNA, 19 nt, Artificial Sequence
  Description of Artificial Sequence: Synthetic oligonucleotide
gcucccuagaggccuuccc

SEQ ID NO: 848302 - RNA, 19 nt, Artificial Sequence
  Description of Artificial Sequence: Synthetic oligonucleotide
gcugaaccgcucugaagga

SEQ ID NO: 848303 - RNA, 19 nt, Artificial Sequence
  Description of Artificial Sequence: Synthetic oligonucleotide
cucucgccacgggaggccc

SEQ ID NO: 848304 - RNA, 19 nt, Artificial Sequence
  Description of Artificial Sequence: Synthetic oligonucleotide
gccuacacuccugugccug

SEQ ID NO: 848305 - RNA, 19 nt, Artificial Sequence
  Description of Artificial Sequence: Synthetic oligonucleotide
ggcuccuuuagaagaguga

SEQ ID NO: 848306 - RNA, 19 nt, Artificial Sequence
  Description of Artificial Sequence: Synthetic oligonucleotide
ugggugcagcccacugaau

SEQ ID NO: 848307 - RNA, 19 nt, Artificial Sequence
  Description of Artificial Sequence: Synthetic oligonucleotide
ucucgccacgggaggcccu

SEQ ID NO: 848308 - RNA, 19 nt, Artificial Sequence
  Description of Artificial Sequence: Synthetic oligonucleotide
ccaccgggacugcuggucg

SEQ ID NO: 848309 - RNA, 19 nt, Artificial Sequence
  Description of Artificial Sequence: Synthetic oligonucleotide
caaugagaugaguggcccu

SEQ ID NO: 848310 - RNA, 19 nt, Artificial Sequence
  Description of Artificial Sequence: Synthetic oligonucleotide
gagguaucugucguauuuu

SEQ ID NO: 848311 - RNA, 19 nt, Artificial Sequence
  Description of Artificial Sequence: Synthetic oligonucleotide
cucuucggaucccuggggu

SEQ ID NO: 848312 - RNA, 19 nt, Artificial Sequence
  Description of Artificial Sequence: Synthetic oligonucleotide
aaccgcucugaaggaggaa

SEQ ID NO: 848313 - RNA, 19 nt, Artificial Sequence
  Description of Artificial Sequence: Synthetic oligonucleotide
ggguccacgcaugccagug

SEQ ID NO: 848314 - RNA, 19 nt, Artificial Sequence
  Description of Artificial Sequence: Synthetic oligonucleotide
cccuagaggccuucccaag

SEQ ID NO: 848315 - RNA, 19 nt, Artificial Sequence
  Description of Artificial Sequence: Synthetic oligonucleotide
cugggagcacauucugucu

SEQ ID NO: 848316 - RNA, 19 nt, Artificial Sequence
  Description of Artificial Sequence: Synthetic oligonucleotide
cauacuggguugucgcuuu

SEQ ID NO: 848317 - RNA, 19 nt, Artificial Sequence
  Description of Artificial Sequence: Synthetic oligonucleotide
ccaguggcgcuccucucgc

SEQ ID NO: 848318 - RNA, 19 nt, Artificial Sequence
  Description of Artificial Sequence: Synthetic oligonucleotide
gcuuccgaacugccugccc

SEQ ID NO: 848319 - RNA, 19 nt, Artificial Sequence
  Description of Artificial Sequence: Synthetic oligonucleotide
ccacucucgccacgggagg

SEQ ID NO: 848320 - RNA, 19 nt, Artificial Sequence
  Description of Artificial Sequence: Synthetic oligonucleotide
ggguggaacaaggcugcug

SEQ ID NO: 848321 - RNA, 19 nt, Artificial Sequence
  Description of Artificial Sequence: Synthetic oligonucleotide
gaagguucugucagcccau

SEQ ID NO: 848322 - RNA, 19 nt, Artificial Sequence
  Description of Artificial Sequence: Synthetic oligonucleotide
gucccuguaccugggaagu

SEQ ID NO: 848323 - RNA, 19 nt, Artificial Sequence
  Description of Artificial Sequence: Synthetic oligonucleotide
gguaucugucguauuuugu

SEQ ID NO: 848324 - RNA, 19 nt, Artificial Sequence
  Description of Artificial Sequence: Synthetic oligonucleotide
uggguggaacaaggcugcu

SEQ ID NO: 848325 - RNA, 19 nt, Artificial Sequence
  Description of Artificial Sequence: Synthetic oligonucleotide
cauucacgucccuguaccu

SEQ ID NO: 848326 - RNA, 19 nt, Artificial Sequence
  Description of Artificial Sequence: Synthetic oligonucleotide
ccuguaccugggaaguaga

SEQ ID NO: 848327 - RNA, 19 nt, Artificial Sequence
  Description of Artificial Sequence: Synthetic oligonucleotide
ggagucucccugagugggc

SEQ ID NO: 848328 - RNA, 19 nt, Artificial Sequence
  Description of Artificial Sequence: Synthetic oligonucleotide
cugucgucgcugccuucuc

SEQ ID NO: 848329 - RNA, 19 nt, Artificial Sequence
  Description of Artificial Sequence: Synthetic oligonucleotide
cucgccacgggaggcccug

SEQ ID NO: 848330 - RNA, 19 nt, Artificial Sequence
  Description of Artificial Sequence: Synthetic oligonucleotide
accgggacugcuggucgga

SEQ ID NO: 848331 - RNA, 19 nt, Artificial Sequence
  Description of Artificial Sequence: Synthetic oligonucleotide
cuccucucgccaggaugag

SEQ ID NO: 848332 - RNA, 19 nt, Artificial Sequence
  Description of Artificial Sequence: Synthetic oligonucleotide
gcccgggugagggaccagg

SEQ ID NO: 848333 - RNA, 19 nt, Artificial Sequence
  Description of Artificial Sequence: Synthetic oligonucleotide
ucccuguaccugggaagua

SEQ ID NO: 848334 - RNA, 19 nt, Artificial Sequence
  Description of Artificial Sequence: Synthetic oligonucleotide
ggagcacauucugucuguc

SEQ ID NO: 848335 - RNA, 19 nt, Artificial Sequence
  Description of Artificial Sequence: Synthetic oligonucleotide
cucaaccuugucccagcgu

SEQ ID NO: 848336 - RNA, 19 nt, Artificial Sequence
  Description of Artificial Sequence: Synthetic oligonucleotide
gggagcacauucugucugu

SEQ ID NO: 848337 - RNA, 19 nt, Artificial Sequence
  Description of Artificial Sequence: Synthetic oligonucleotide
cacugucgucgcugccuuc

SEQ ID NO: 848338 - RNA, 19 nt, Artificial Sequence
  Description of Artificial Sequence: Synthetic oligonucleotide
gugagucuugguguccuau

SEQ ID NO: 848339 - RNA, 19 nt, Artificial Sequence
  Description of Artificial Sequence: Synthetic oligonucleotide
caucgucuaugagcgggaa

SEQ ID NO: 848340 - RNA, 19 nt, Artificial Sequence
  Description of Artificial Sequence: Synthetic oligonucleotide
cuucacugacagagcuugu

SEQ ID NO: 848341 - RNA, 19 nt, Artificial Sequence
  Description of Artificial Sequence: Synthetic oligonucleotide
cucuugagcucgggcacaa

SEQ ID NO: 848342 - RNA, 19 nt, Artificial Sequence
  Description of Artificial Sequence: Synthetic oligonucleotide
ccacgggaggcccugcuga

SEQ ID NO: 848343 - RNA, 19 nt, Artificial Sequence
  Description of Artificial Sequence: Synthetic oligonucleotide
gggcacaauuuuccguaua

SEQ ID NO: 848344 - RNA, 19 nt, Artificial Sequence
  Description of Artificial Sequence: Synthetic oligonucleotide
agcgcuggagggagcuggu

SEQ ID NO: 848345 - RNA, 19 nt, Artificial Sequence
  Description of Artificial Sequence: Synthetic oligonucleotide
ggagaucggaagguucugu

SEQ ID NO: 848346 - RNA, 19 nt, Artificial Sequence
  Description of Artificial Sequence: Synthetic oligonucleotide
cucugacauacuggguugu

SEQ ID NO: 848347 - RNA, 19 nt, Artificial Sequence
  Description of Artificial Sequence: Synthetic oligonucleotide
ggaaguagacauacuucuu

SEQ ID NO: 848348 - RNA, 19 nt, Artificial Sequence
  Description of Artificial Sequence: Synthetic oligonucleotide
cacgucccuguaccuggga

SEQ ID NO: 848349 - RNA, 19 nt, Artificial Sequence
  Description of Artificial Sequence: Synthetic oligonucleotide
ggccauugcuuugcuccac

SEQ ID NO: 848350 - RNA, 19 nt, Artificial Sequence
  Description of Artificial Sequence: Synthetic oligonucleotide
ggguugucgcuuucuucua

SEQ ID NO: 848351 - RNA, 19 nt, Artificial Sequence
  Description of Artificial Sequence: Synthetic oligonucleotide
gccaccgggacugcugguc

SEQ ID NO: 848352 - RNA, 19 nt, Artificial Sequence
  Description of Artificial Sequence: Synthetic oligonucleotide
gguauccuucucgucaguu

SEQ ID NO: 848353 - RNA, 19 nt, Artificial Sequence
  Description of Artificial Sequence: Synthetic oligonucleotide
ggccguggcaugauagugu

SEQ ID NO: 848354 - RNA, 19 nt, Artificial Sequence
  Description of Artificial Sequence: Synthetic oligonucleotide
cgucaguuuuacuggggaa

SEQ ID NO: 848355 - RNA, 19 nt, Artificial Sequence
  Description of Artificial Sequence: Synthetic oligonucleotide
ucgccacgggaggcccugc

SEQ ID NO: 848356 - RNA, 19 nt, Artificial Sequence
  Description of Artificial Sequence: Synthetic oligonucleotide
ccauccggaugagcuugcc

SEQ ID NO: 848357 - RNA, 19 nt, Artificial Sequence
  Description of Artificial Sequence: Synthetic oligonucleotide
ccggaugagcuugccugug

SEQ ID NO: 848358 - RNA, 19 nt, Artificial Sequence
  Description of Artificial Sequence: Synthetic oligonucleotide
ggagcgcuggagggagcug

SEQ ID NO: 848359 - RNA, 19 nt, Artificial Sequence
  Description of Artificial Sequence: Synthetic oligonucleotide
ccagcguuccaggcagcuc

SEQ ID NO: 848360 - RNA, 19 nt, Artificial Sequence
  Description of Artificial Sequence: Synthetic oligonucleotide
cccucacacuaaauaugcu

SEQ ID NO: 848361 - RNA, 19 nt, Artificial Sequence
  Description of Artificial Sequence: Synthetic oligonucleotide
ggcgcuccucucgccagga

SEQ ID NO: 848362 - RNA, 19 nt, Artificial Sequence
  Description of Artificial Sequence: Synthetic oligonucleotide
gccuagagguuugcucucu

SEQ ID NO: 848363 - RNA, 19 nt, Artificial Sequence
  Description of Artificial Sequence: Synthetic oligonucleotide
ccuucucgucaguuuuacu

SEQ ID NO: 848364 - RNA, 19 nt, Artificial Sequence
  Description of Artificial Sequence: Synthetic oligonucleotide
gcgcaccuucucugugcca

SEQ ID NO: 848365 - RNA, 19 nt, Artificial Sequence
  Description of Artificial Sequence: Synthetic oligonucleotide
ccaagauaucggcuccuuu

SEQ ID NO: 848366 - RNA, 19 nt, Artificial Sequence
  Description of Artificial Sequence: Synthetic oligonucleotide
gcccgggcagucaucgucu

SEQ ID NO: 848367 - RNA, 19 nt, Artificial Sequence
  Description of Artificial Sequence: Synthetic oligonucleotide
  modified_base (6)..(6): a, c, u, g, unknown or other
gggguncauucacgucccu

SEQ ID NO: 848368 - RNA, 19 nt, Artificial Sequence
  Description of Artificial Sequence: Synthetic oligonucleotide
gugguccgauuaucccauu

SEQ ID NO: 848369 - RNA, 19 nt, Artificial Sequence
  Description of Artificial Sequence: Synthetic oligonucleotide
gugcccgggcagucaucgu

SEQ ID NO: 848370 - RNA, 19 nt, Artificial Sequence
  Description of Artificial Sequence: Synthetic oligonucleotide
cguauaucuggagcuuccu

SEQ ID NO: 848371 - RNA, 19 nt, Artificial Sequence
  Description of Artificial Sequence: Synthetic oligonucleotide
cccgggcagucaucgucua

SEQ ID NO: 848372 - RNA, 19 nt, Artificial Sequence
  Description of Artificial Sequence: Synthetic oligonucleotide
cgggcacaauuuuccguau

SEQ ID NO: 848373 - RNA, 19 nt, Artificial Sequence
  Description of Artificial Sequence: Synthetic oligonucleotide
gcgcuccucucgccaggau

SEQ ID NO: 848374 - RNA, 19 nt, Artificial Sequence
  Description of Artificial Sequence: Synthetic oligonucleotide
  modified_base (1)..(1): a, c, u, g, unknown or other
ncauucacgucccuguacc

SEQ ID NO: 848375 - RNA, 19 nt, Artificial Sequence
  Description of Artificial Sequence: Synthetic oligonucleotide
aacgaguaaacacaaaucc

SEQ ID NO: 848376 - RNA, 19 nt, Artificial Sequence
  Description of Artificial Sequence: Synthetic oligonucleotide
ucuaauugcauucuuauca

SEQ ID NO: 848377 - RNA, 19 nt, Artificial Sequence
  Description of Artificial Sequence: Synthetic oligonucleotide
uaucauauggauuauuagg

SEQ ID NO: 848378 - RNA, 19 nt, Artificial Sequence
  Description of Artificial Sequence: Synthetic oligonucleotide
uucacuaaaauaaaauaag

SEQ ID NO: 848379 - RNA, 19 nt, Artificial Sequence
  Description of Artificial Sequence: Synthetic oligonucleotide
uuugaauugacucaacucu

SEQ ID NO: 848380 - RNA, 19 nt, Artificial Sequence
  Description of Artificial Sequence: Synthetic oligonucleotide
aaaacuuugaauugacuca

SEQ ID NO: 848381 - RNA, 19 nt, Artificial Sequence
  Description of Artificial Sequence: Synthetic oligonucleotide
ugagaaacaacuaaacucu

SEQ ID NO: 848382 - RNA, 19 nt, Artificial Sequence
  Description of Artificial Sequence: Synthetic oligonucleotide
aaucccacaaauuauaaau

SEQ ID NO: 848383 - RNA, 19 nt, Artificial Sequence
  Description of Artificial Sequence: Synthetic oligonucleotide
acauuauuuacucuaauug

SEQ ID NO: 848384 - RNA, 19 nt, Artificial Sequence
  Description of Artificial Sequence: Synthetic oligonucleotide
acuagauugcaccauaagg

SEQ ID NO: 848385 - RNA, 19 nt, Artificial Sequence
  Description of Artificial Sequence: Synthetic oligonucleotide
uuagguaucugcuugaacu

SEQ ID NO: 848386 - RNA, 19 nt, Artificial Sequence
  Description of Artificial Sequence: Synthetic oligonucleotide
aguuauaucacuuuauuaa

SEQ ID NO: 848387 - RNA, 19 nt, Artificial Sequence
  Description of Artificial Sequence: Synthetic oligonucleotide
uuuaguaucugacugugca

SEQ ID NO: 848388 - RNA, 19 nt, Artificial Sequence
  Description of Artificial Sequence: Synthetic oligonucleotide
gaaaacuuugaauugacuc

SEQ ID NO: 848389 - RNA, 19 nt, Artificial Sequence
  Description of Artificial Sequence: Synthetic oligonucleotide
aacaacuaaacucuuuaug

SEQ ID NO: 848390 - RNA, 19 nt, Artificial Sequence
  Description of Artificial Sequence: Synthetic oligonucleotide
aauagcgcaguccaacaac

SEQ ID NO: 848391 - RNA, 19 nt, Artificial Sequence
  Description of Artificial Sequence: Synthetic oligonucleotide
aucauauggauuauuaggc

SEQ ID NO: 848392 - RNA, 19 nt, Artificial Sequence
  Description of Artificial Sequence: Synthetic oligonucleotide
aacuaaacucuuuauguug

SEQ ID NO: 848393 - RNA, 19 nt, Artificial Sequence
  Description of Artificial Sequence: Synthetic oligonucleotide
uuaaucuuugaacuggaug

SEQ ID NO: 848394 - RNA, 19 nt, Artificial Sequence
  Description of Artificial Sequence: Synthetic oligonucleotide
uuaagaacacccgagaagc

SEQ ID NO: 848395 - RNA, 19 nt, Artificial Sequence
  Description of Artificial Sequence: Synthetic oligonucleotide
acaacuaaacucuuuaugu

SEQ ID NO: 848396 - RNA, 19 nt, Artificial Sequence
  Description of Artificial Sequence: Synthetic oligonucleotide
acuauuuacaccuuaugcu

SEQ ID NO: 848397 - RNA, 19 nt, Artificial Sequence
  Description of Artificial Sequence: Synthetic oligonucleotide
gauuauuaggcucucguug

SEQ ID NO: 848398 - RNA, 19 nt, Artificial Sequence
  Description of Artificial Sequence: Synthetic oligonucleotide
gacuauuuacaccuuaugc

SEQ ID NO: 848399 - RNA, 19 nt, Artificial Sequence
  Description of Artificial Sequence: Synthetic oligonucleotide
auaaagggcauuuagcaug

SEQ ID NO: 848400 - RNA, 19 nt, Artificial Sequence
  Description of Artificial Sequence: Synthetic oligonucleotide
aauugacucaacucuuuuc

SEQ ID NO: 848401 - RNA, 19 nt, Artificial Sequence
  Description of Artificial Sequence: Synthetic oligonucleotide
aguaauaagacagcauagc

SEQ ID NO: 848402 - RNA, 19 nt, Artificial Sequence
  Description of Artificial Sequence: Synthetic oligonucleotide
uuaaagacaggaauguggu

SEQ ID NO: 848403 - RNA, 19 nt, Artificial Sequence
  Description of Artificial Sequence: Synthetic oligonucleotide
uaaacgaguaaacacaaau

SEQ ID NO: 848404 - RNA, 19 nt, Artificial Sequence
  Description of Artificial Sequence: Synthetic oligonucleotide
ugaaugaccuggcagauac

SEQ ID NO: 848405 - RNA, 19 nt, Artificial Sequence
  Description of Artificial Sequence: Synthetic oligonucleotide
uuucuuuugagccauggaa

SEQ ID NO: 848406 - RNA, 19 nt, Artificial Sequence
  Description of Artificial Sequence: Synthetic oligonucleotide
auuaagaacacccgagaag

SEQ ID NO: 848407 - RNA, 19 nt, Artificial Sequence
  Description of Artificial Sequence: Synthetic oligonucleotide
uucauguguauaaacuuag

SEQ ID NO: 848408 - RNA, 19 nt, Artificial Sequence
  Description of Artificial Sequence: Synthetic oligonucleotide
auucuuaucauauggauua

SEQ ID NO: 848409 - RNA, 19 nt, Artificial Sequence
  Description of Artificial Sequence: Synthetic oligonucleotide
uguguuuugaaaacuuuga

SEQ ID NO: 848410 - RNA, 19 nt, Artificial Sequence
  Description of Artificial Sequence: Synthetic oligonucleotide
uauaucuugguagaacagg

SEQ ID NO: 848411 - RNA, 19 nt, Artificial Sequence
  Description of Artificial Sequence: Synthetic oligonucleotide
uuuucucaccgucacaugc

SEQ ID NO: 848412 - RNA, 19 nt, Artificial Sequence
  Description of Artificial Sequence: Synthetic oligonucleotide
acuugugccaauuuuguug

SEQ ID NO: 848413 - RNA, 19 nt, Artificial Sequence
  Description of Artificial Sequence: Synthetic oligonucleotide
augaaguaagugcacgggc

SEQ ID NO: 848414 - RNA, 19 nt, Artificial Sequence
  Description of Artificial Sequence: Synthetic oligonucleotide
auaagauucauauguagaa

SEQ ID NO: 848415 - RNA, 19 nt, Artificial Sequence
  Description of Artificial Sequence: Synthetic oligonucleotide
aaacgaguaaacacaaauc

SEQ ID NO: 848416 - RNA, 19 nt, Artificial Sequence
  Description of Artificial Sequence: Synthetic oligonucleotide
ugguguuucuauuaaagac

SEQ ID NO: 848417 - RNA, 19 nt, Artificial Sequence
  Description of Artificial Sequence: Synthetic oligonucleotide
auaaggaacuaccccuucc

SEQ ID NO: 848418 - RNA, 19 nt, Artificial Sequence
  Description of Artificial Sequence: Synthetic oligonucleotide
uguaguaccacuucacuaa

SEQ ID NO: 848419 - RNA, 19 nt, Artificial Sequence
  Description of Artificial Sequence: Synthetic oligonucleotide
ugcauaaagggcauuuagc

SEQ ID NO: 848420 - RNA, 19 nt, Artificial Sequence
  Description of Artificial Sequence: Synthetic oligonucleotide
uuacaaugaauuuugugau

SEQ ID NO: 848421 - RNA, 19 nt, Artificial Sequence
  Description of Artificial Sequence: Synthetic oligonucleotide
aggauuccaggcuggaucc

SEQ ID NO: 848422 - RNA, 19 nt, Artificial Sequence
  Description of Artificial Sequence: Synthetic oligonucleotide
uaaacacaaaucccgaguc

SEQ ID NO: 848423 - RNA, 19 nt, Artificial Sequence
  Description of Artificial Sequence: Synthetic oligonucleotide
uucuuuugagccauggaac

SEQ ID NO: 848424 - RNA, 19 nt, Artificial Sequence
  Description of Artificial Sequence: Synthetic oligonucleotide
uuguuguccaugauauagg

SEQ ID NO: 848425 - RNA, 19 nt, Artificial Sequence
  Description of Artificial Sequence: Synthetic oligonucleotide
auaaaaugggauccagcuc

SEQ ID NO: 848426 - RNA, 19 nt, Artificial Sequence
  Description of Artificial Sequence: Synthetic oligonucleotide
aaggacaguagcauuacag

SEQ ID NO: 848427 - RNA, 19 nt, Artificial Sequence
  Description of Artificial Sequence: Synthetic oligonucleotide
acagagaguggacagauga

SEQ ID NO: 848428 - RNA, 19 nt, Artificial Sequence
  Description of Artificial Sequence: Synthetic oligonucleotide
ucccacaaauuauaaauca

SEQ ID NO: 848429 - RNA, 19 nt, Artificial Sequence
  Description of Artificial Sequence: Synthetic oligonucleotide
cuucacuaaaauaaaauaa

SEQ ID NO: 848430 - RNA, 19 nt, Artificial Sequence
  Description of Artificial Sequence: Synthetic oligonucleotide
agaugaaguaagugcacgg

SEQ ID NO: 848431 - RNA, 19 nt, Artificial Sequence
  Description of Artificial Sequence: Synthetic oligonucleotide
uguaucuucuuuaaccuua

SEQ ID NO: 848432 - RNA, 19 nt, Artificial Sequence
  Description of Artificial Sequence: Synthetic oligonucleotide
ucuaaacgaguaaacacaa

SEQ ID NO: 848433 - RNA, 19 nt, Artificial Sequence
  Description of Artificial Sequence: Synthetic oligonucleotide
uuuauguugggguucucug

SEQ ID NO: 848434 - RNA, 19 nt, Artificial Sequence
  Description of Artificial Sequence: Synthetic oligonucleotide
aacuagauugcaccauaag

SEQ ID NO: 848435 - RNA, 19 nt, Artificial Sequence
  Description of Artificial Sequence: Synthetic oligonucleotide
aacuugaccucucaaaguu

SEQ ID NO: 848436 - RNA, 19 nt, Artificial Sequence
  Description of Artificial Sequence: Synthetic oligonucleotide
uaaugaauguaguaccacu

SEQ ID NO: 848437 - RNA, 19 nt, Artificial Sequence
  Description of Artificial Sequence: Synthetic oligonucleotide
aaaacguggaaagaaaguu

SEQ ID NO: 848438 - RNA, 19 nt, Artificial Sequence
  Description of Artificial Sequence: Synthetic oligonucleotide
cuuuaaccuuagaugaucc

SEQ ID NO: 848439 - RNA, 19 nt, Artificial Sequence
  Description of Artificial Sequence: Synthetic oligonucleotide
aaugugguaaacugagaaa

SEQ ID NO: 848440 - RNA, 19 nt, Artificial Sequence
  Description of Artificial Sequence: Synthetic oligonucleotide
accauaaggaacuaccccu

SEQ ID NO: 848441 - RNA, 19 nt, Artificial Sequence
  Description of Artificial Sequence: Synthetic oligonucleotide
auuauuuacuacuccugug

SEQ ID NO: 848442 - RNA, 19 nt, Artificial Sequence
  Description of Artificial Sequence: Synthetic oligonucleotide
augaauguaguaccacuuc

SEQ ID NO: 848443 - RNA, 19 nt, Artificial Sequence
  Description of Artificial Sequence: Synthetic oligonucleotide
caugauauaggccaaggca

SEQ ID NO: 848444 - RNA, 19 nt, Artificial Sequence
  Description of Artificial Sequence: Synthetic oligonucleotide
gaugaaguaagugcacggg

SEQ ID NO: 848445 - RNA, 19 nt, Artificial Sequence
  Description of Artificial Sequence: Synthetic oligonucleotide
augauauaggccaaggcag

SEQ ID NO: 848446 - RNA, 19 nt, Artificial Sequence
  Description of Artificial Sequence: Synthetic oligonucleotide
uggauuauuaggcucucgu

SEQ ID NO: 848447 - RNA, 19 nt, Artificial Sequence
  Description of Artificial Sequence: Synthetic oligonucleotide
gaaugugguaaacugagaa

SEQ ID NO: 848448 - RNA, 19 nt, Artificial Sequence
  Description of Artificial Sequence: Synthetic oligonucleotide
uuuacucuacuuuuaguau

SEQ ID NO: 848449 - RNA, 19 nt, Artificial Sequence
  Description of Artificial Sequence: Synthetic oligonucleotide
uuaugcuuccaccacugca

SEQ ID NO: 848450 - RNA, 19 nt, Artificial Sequence
  Description of Artificial Sequence: Synthetic oligonucleotide
acgaguaaacacaaauccc

SEQ ID NO: 848451 - RNA, 19 nt, Artificial Sequence
  Description of Artificial Sequence: Synthetic oligonucleotide
aguaaacacaaaucccgag

SEQ ID NO: 848452 - RNA, 19 nt, Artificial Sequence
  Description of Artificial Sequence: Synthetic oligonucleotide
auauauuucuaaguaauaa

SEQ ID NO: 848453 - RNA, 19 nt, Artificial Sequence
  Description of Artificial Sequence: Synthetic oligonucleotide
uauguagaagagauguauc

SEQ ID NO: 848454 - RNA, 19 nt, Artificial Sequence
  Description of Artificial Sequence: Synthetic oligonucleotide
ugcauucuuaucauaugga

SEQ ID NO: 848455 - RNA, 19 nt, Artificial Sequence
  Description of Artificial Sequence: Synthetic oligonucleotide
uccguaauucaaucaaagc

SEQ ID NO: 848456 - RNA, 19 nt, Artificial Sequence
  Description of Artificial Sequence: Synthetic oligonucleotide
gauccauuaagaacacccg

SEQ ID NO: 848457 - RNA, 19 nt, Artificial Sequence
  Description of Artificial Sequence: Synthetic oligonucleotide
aauggccaaccugaucucc

SEQ ID NO: 848458 - RNA, 19 nt, Artificial Sequence
  Description of Artificial Sequence: Synthetic oligonucleotide
uguauaaacuuagguaucu

SEQ ID NO: 848459 - RNA, 19 nt, Artificial Sequence
  Description of Artificial Sequence: Synthetic oligonucleotide
uguaucaguuauaucacuu

SEQ ID NO: 848460 - RNA, 19 nt, Artificial Sequence
  Description of Artificial Sequence: Synthetic oligonucleotide
uccagugguuuauauaucu

SEQ ID NO: 848461 - RNA, 19 nt, Artificial Sequence
  Description of Artificial Sequence: Synthetic oligonucleotide
agcauuaaucuuugaacug

SEQ ID NO: 848462 - RNA, 19 nt, Artificial Sequence
  Description of Artificial Sequence: Synthetic oligonucleotide
cauauggauuauuaggcuc

SEQ ID NO: 848463 - RNA, 19 nt, Artificial Sequence
  Description of Artificial Sequence: Synthetic oligonucleotide
ugauauaggccaaggcagc

SEQ ID NO: 848464 - RNA, 19 nt, Artificial Sequence
  Description of Artificial Sequence: Synthetic oligonucleotide
uucuuuuagggcagaaacu

SEQ ID NO: 848465 - RNA, 19 nt, Artificial Sequence
  Description of Artificial Sequence: Synthetic oligonucleotide
cuacuccuguguaauagcg

SEQ ID NO: 848466 - RNA, 19 nt, Artificial Sequence
  Description of Artificial Sequence: Synthetic oligonucleotide
ucaucacuaguuaggaagu

SEQ ID NO: 848467 - RNA, 19 nt, Artificial Sequence
  Description of Artificial Sequence: Synthetic oligonucleotide
ugcaagaucucucuuuaaa

SEQ ID NO: 848468 - RNA, 19 nt, Artificial Sequence
  Description of Artificial Sequence: Synthetic oligonucleotide
ucauauggauuauuaggcu

SEQ ID NO: 848469 - RNA, 19 nt, Artificial Sequence
  Description of Artificial Sequence: Synthetic oligonucleotide
ugguuuauauaucuuggua

SEQ ID NO: 848470 - RNA, 19 nt, Artificial Sequence
  Description of Artificial Sequence: Synthetic oligonucleotide
ucuuuuagggcagaaacua

SEQ ID NO: 848471 - RNA, 19 nt, Artificial Sequence
  Description of Artificial Sequence: Synthetic oligonucleotide
aaacacaaaucccgagucu

SEQ ID NO: 848472 - RNA, 19 nt, Artificial Sequence
  Description of Artificial Sequence: Synthetic oligonucleotide
ucucguuguaaagaaacca

SEQ ID NO: 848473 - RNA, 19 nt, Artificial Sequence
  Description of Artificial Sequence: Synthetic oligonucleotide
ugaaagucuuggaaaauuu

SEQ ID NO: 848474 - RNA, 19 nt, Artificial Sequence
  Description of Artificial Sequence: Synthetic oligonucleotide
uaucugcuugaacugaccu

SEQ ID NO: 848475 - RNA, 19 nt, Artificial Sequence
  Description of Artificial Sequence: Synthetic oligonucleotide
uauuuacaccuuaugcuuc

SEQ ID NO: 848476 - RNA, 19 nt, Artificial Sequence
  Description of Artificial Sequence: Synthetic oligonucleotide
aaacuuugaauugacucaa

SEQ ID NO: 848477 - RNA, 19 nt, Artificial Sequence
  Description of Artificial Sequence: Synthetic oligonucleotide
uagauugcaccauaaggaa

SEQ ID NO: 848478 - RNA, 19 nt, Artificial Sequence
  Description of Artificial Sequence: Synthetic oligonucleotide
agggcauucuaauaaauua

SEQ ID NO: 848479 - RNA, 19 nt, Artificial Sequence
  Description of Artificial Sequence: Synthetic oligonucleotide
agagaguggacagaugauc

SEQ ID NO: 848480 - RNA, 19 nt, Artificial Sequence
  Description of Artificial Sequence: Synthetic oligonucleotide
aucuaaacgaguaaacaca

SEQ ID NO: 848481 - RNA, 19 nt, Artificial Sequence
  Description of Artificial Sequence: Synthetic oligonucleotide
ucgacagaauccuuuacaa

SEQ ID NO: 848482 - RNA, 19 nt, Artificial Sequence
  Description of Artificial Sequence: Synthetic oligonucleotide
acucuaauugcauucuuau

SEQ ID NO: 848483 - RNA, 19 nt, Artificial Sequence
  Description of Artificial Sequence: Synthetic oligonucleotide
uagaagagauguaucaguu

SEQ ID NO: 848484 - RNA, 19 nt, Artificial Sequence
  Description of Artificial Sequence: Synthetic oligonucleotide
auauguagaagagauguau

SEQ ID NO: 848485 - RNA, 19 nt, Artificial Sequence
  Description of Artificial Sequence: Synthetic oligonucleotide
uuggaacucaaaacgugga

SEQ ID NO: 848486 - RNA, 19 nt, Artificial Sequence
  Description of Artificial Sequence: Synthetic oligonucleotide
ugguaaacugagaaacaac

SEQ ID NO: 848487 - RNA, 19 nt, Artificial Sequence
  Description of Artificial Sequence: Synthetic oligonucleotide
ucacuaguuaggaagucau

SEQ ID NO: 848488 - RNA, 19 nt, Artificial Sequence
  Description of Artificial Sequence: Synthetic oligonucleotide
ucuucaucacuaguuagga

SEQ ID NO: 848489 - RNA, 19 nt, Artificial Sequence
  Description of Artificial Sequence: Synthetic oligonucleotide
uuuuaguaucugacugugc

SEQ ID NO: 848490 - RNA, 19 nt, Artificial Sequence
  Description of Artificial Sequence: Synthetic oligonucleotide
aacucuuuauguugggguu

SEQ ID NO: 848491 - RNA, 19 nt, Artificial Sequence
  Description of Artificial Sequence: Synthetic oligonucleotide
cuuaucauauggauuauua

SEQ ID NO: 848492 - RNA, 19 nt, Artificial Sequence
  Description of Artificial Sequence: Synthetic oligonucleotide
auauuggacagacugcaaa

SEQ ID NO: 848493 - RNA, 19 nt, Artificial Sequence
  Description of Artificial Sequence: Synthetic oligonucleotide
uguauacuguuucugcaua

SEQ ID NO: 848494 - RNA, 19 nt, Artificial Sequence
  Description of Artificial Sequence: Synthetic oligonucleotide
uaaacuuagguaucugcuu

SEQ ID NO: 848495 - RNA, 19 nt, Artificial Sequence
  Description of Artificial Sequence: Synthetic oligonucleotide
aaugaauguaguaccacuu

SEQ ID NO: 848496 - RNA, 19 nt, Artificial Sequence
  Description of Artificial Sequence: Synthetic oligonucleotide
agauucauauguagaagag

SEQ ID NO: 848497 - RNA, 19 nt, Artificial Sequence
  Description of Artificial Sequence: Synthetic oligonucleotide
agagauguaucaguuauau

SEQ ID NO: 848498 - RNA, 19 nt, Artificial Sequence
  Description of Artificial Sequence: Synthetic oligonucleotide
uuauguugggguucucugu

SEQ ID NO: 848499 - RNA, 19 nt, Artificial Sequence
  Description of Artificial Sequence: Synthetic oligonucleotide
aauccaguuugaaacacaa

SEQ ID NO: 848500 - RNA, 19 nt, Artificial Sequence
  Description of Artificial Sequence: Synthetic oligonucleotide
uugaauugacucaacucuu

SEQ ID NO: 848501 - RNA, 19 nt, Artificial Sequence
  Description of Artificial Sequence: Synthetic oligonucleotide
uuuaaccuuagaugauccu

SEQ ID NO: 848502 - RNA, 19 nt, Artificial Sequence
  Description of Artificial Sequence: Synthetic oligonucleotide
cacaugccaauucuucugg

SEQ ID NO: 848503 - RNA, 19 nt, Artificial Sequence
  Description of Artificial Sequence: Synthetic oligonucleotide
accaucuaaacgaguaaac

SEQ ID NO: 848504 - RNA, 19 nt, Artificial Sequence
  Description of Artificial Sequence: Synthetic oligonucleotide
uuuaaauggccaaccugau

SEQ ID NO: 848505 - RNA, 19 nt, Artificial Sequence
  Description of Artificial Sequence: Synthetic oligonucleotide
cugcuuuuaaggacaguag

SEQ ID NO: 848506 - RNA, 19 nt, Artificial Sequence
  Description of Artificial Sequence: Synthetic oligonucleotide
caccauaaggaacuacccc

SEQ ID NO: 848507 - RNA, 19 nt, Artificial Sequence
  Description of Artificial Sequence: Synthetic oligonucleotide
auauggauuauuaggcucu

SEQ ID NO: 848508 - RNA, 19 nt, Artificial Sequence
  Description of Artificial Sequence: Synthetic oligonucleotide
uuaaccuuagaugauccuu

SEQ ID NO: 848509 - RNA, 19 nt, Artificial Sequence
  Description of Artificial Sequence: Synthetic oligonucleotide
uaagugcacgggcaaauuc

SEQ ID NO: 848510 - RNA, 19 nt, Artificial Sequence
  Description of Artificial Sequence: Synthetic oligonucleotide
auccauuaagaacacccga

SEQ ID NO: 848511 - RNA, 19 nt, Artificial Sequence
  Description of Artificial Sequence: Synthetic oligonucleotide
gcauaaagggcauuuagca

SEQ ID NO: 848512 - RNA, 19 nt, Artificial Sequence
  Description of Artificial Sequence: Synthetic oligonucleotide
uauuuacucuaauugcauu

SEQ ID NO: 848513 - RNA, 19 nt, Artificial Sequence
  Description of Artificial Sequence: Synthetic oligonucleotide
uacuccuguguaauagcgc

SEQ ID NO: 848514 - RNA, 19 nt, Artificial Sequence
  Description of Artificial Sequence: Synthetic oligonucleotide
augacaaccucuugcuucu

SEQ ID NO: 848515 - RNA, 19 nt, Artificial Sequence
  Description of Artificial Sequence: Synthetic oligonucleotide
uggauaugaaagucuugga

SEQ ID NO: 848516 - RNA, 19 nt, Artificial Sequence
  Description of Artificial Sequence: Synthetic oligonucleotide
auuagagcauuaaucuuug

SEQ ID NO: 848517 - RNA, 19 nt, Artificial Sequence
  Description of Artificial Sequence: Synthetic oligonucleotide
aagugcacgggcaaauucu

SEQ ID NO: 848518 - RNA, 19 nt, Artificial Sequence
  Description of Artificial Sequence: Synthetic oligonucleotide
gucacauuucuuugagacc

SEQ ID NO: 848519 - RNA, 19 nt, Artificial Sequence
  Description of Artificial Sequence: Synthetic oligonucleotide
uggcgguucacuaguuucc

SEQ ID NO: 848520 - RNA, 19 nt, Artificial Sequence
  Description of Artificial Sequence: Synthetic oligonucleotide
ugaauugacucaacucuuu

SEQ ID NO: 848521 - RNA, 19 nt, Artificial Sequence
  Description of Artificial Sequence: Synthetic oligonucleotide
uaauagcgcaguccaacaa

SEQ ID NO: 848522 - RNA, 19 nt, Artificial Sequence
  Description of Artificial Sequence: Synthetic oligonucleotide
uggaacucaaaacguggaa

SEQ ID NO: 848523 - RNA, 19 nt, Artificial Sequence
  Description of Artificial Sequence: Synthetic oligonucleotide
uguccguaauucaaucaaa

SEQ ID NO: 848524 - RNA, 19 nt, Artificial Sequence
  Description of Artificial Sequence: Synthetic oligonucleotide
auuuacuacuccuguguaa

SEQ ID NO: 848525 - RNA, 19 nt, Artificial Sequence
  Description of Artificial Sequence: Synthetic oligonucleotide
ucguuguaaagaaaccauu

SEQ ID NO: 848526 - RNA, 19 nt, Artificial Sequence
  Description of Artificial Sequence: Synthetic oligonucleotide
uucuucgacagaauccuuu

SEQ ID NO: 848527 - RNA, 19 nt, Artificial Sequence
  Description of Artificial Sequence: Synthetic oligonucleotide
acucaaaacguggaaagaa

SEQ ID NO: 848528 - RNA, 19 nt, Artificial Sequence
  Description of Artificial Sequence: Synthetic oligonucleotide
gauaacgucuuggaacuca

SEQ ID NO: 848529 - RNA, 19 nt, Artificial Sequence
  Description of Artificial Sequence: Synthetic oligonucleotide
aaagcaugcauuagagcau

SEQ ID NO: 848530 - RNA, 19 nt, Artificial Sequence
  Description of Artificial Sequence: Synthetic oligonucleotide
uuaaggacaguagcauuac

SEQ ID NO: 848531 - RNA, 19 nt, Artificial Sequence
  Description of Artificial Sequence: Synthetic oligonucleotide
guccguaauucaaucaaag

SEQ ID NO: 848532 - RNA, 19 nt, Artificial Sequence
  Description of Artificial Sequence: Synthetic oligonucleotide
ucaauguacugaacggcua

SEQ ID NO: 848533 - RNA, 19 nt, Artificial Sequence
  Description of Artificial Sequence: Synthetic oligonucleotide
uuaguaucugacugugcau

SEQ ID NO: 848534 - RNA, 19 nt, Artificial Sequence
  Description of Artificial Sequence: Synthetic oligonucleotide
auguaguaccacuucacua

SEQ ID NO: 848535 - RNA, 19 nt, Artificial Sequence
  Description of Artificial Sequence: Synthetic oligonucleotide
uuucuagaucucauucuua

SEQ ID NO: 848536 - RNA, 19 nt, Artificial Sequence
  Description of Artificial Sequence: Synthetic oligonucleotide
ccguaauucaaucaaagca

SEQ ID NO: 848537 - RNA, 19 nt, Artificial Sequence
  Description of Artificial Sequence: Synthetic oligonucleotide
uagcauuacagugggagau

SEQ ID NO: 848538 - RNA, 19 nt, Artificial Sequence
  Description of Artificial Sequence: Synthetic oligonucleotide
gagaccuccaucacagaug

SEQ ID NO: 848539 - RNA, 19 nt, Artificial Sequence
  Description of Artificial Sequence: Synthetic oligonucleotide
guuauaucacuuuauuaau

SEQ ID NO: 848540 - RNA, 19 nt, Artificial Sequence
  Description of Artificial Sequence: Synthetic oligonucleotide
accgucacaugccaauucu

SEQ ID NO: 848541 - RNA, 19 nt, Artificial Sequence
  Description of Artificial Sequence: Synthetic oligonucleotide
cucuaauugcauucuuauc

SEQ ID NO: 848542 - RNA, 19 nt, Artificial Sequence
  Description of Artificial Sequence: Synthetic oligonucleotide
ucucuguccguaauucaau

SEQ ID NO: 848543 - RNA, 19 nt, Artificial Sequence
  Description of Artificial Sequence: Synthetic oligonucleotide
ggucaauccaauugcucag

SEQ ID NO: 848544 - RNA, 19 nt, Artificial Sequence
  Description of Artificial Sequence: Synthetic oligonucleotide
ucacucugaaugaccuggc

SEQ ID NO: 848545 - RNA, 19 nt, Artificial Sequence
  Description of Artificial Sequence: Synthetic oligonucleotide
ucuugcuucuggccaaguc

SEQ ID NO: 848546 - RNA, 19 nt, Artificial Sequence
  Description of Artificial Sequence: Synthetic oligonucleotide
cauguguauaaacuuaggu

SEQ ID NO: 848547 - RNA, 19 nt, Artificial Sequence
  Description of Artificial Sequence: Synthetic oligonucleotide
caaucaaagcaugcauuag

SEQ ID NO: 848548 - RNA, 19 nt, Artificial Sequence
  Description of Artificial Sequence: Synthetic oligonucleotide
uuagggcagaaacuagauu

SEQ ID NO: 848549 - RNA, 19 nt, Artificial Sequence
  Description of Artificial Sequence: Synthetic oligonucleotide
cuuagguaucugcuugaac

SEQ ID NO: 848550 - RNA, 19 nt, Artificial Sequence
  Description of Artificial Sequence: Synthetic oligonucleotide
gaaguaagugcacgggcaa

SEQ ID NO: 848551 - RNA, 19 nt, Artificial Sequence
  Description of Artificial Sequence: Synthetic oligonucleotide
uaguaucugacugugcauu

SEQ ID NO: 848552 - RNA, 19 nt, Artificial Sequence
  Description of Artificial Sequence: Synthetic oligonucleotide
uguccucucuccaguguca

SEQ ID NO: 848553 - RNA, 19 nt, Artificial Sequence
  Description of Artificial Sequence: Synthetic oligonucleotide
accuuaugcuuccaccacu

SEQ ID NO: 848554 - RNA, 19 nt, Artificial Sequence
  Description of Artificial Sequence: Synthetic oligonucleotide
cauuagagcauuaaucuuu

SEQ ID NO: 848555 - RNA, 19 nt, Artificial Sequence
  Description of Artificial Sequence: Synthetic oligonucleotide
uuccacuugugccaauuuu

SEQ ID NO: 848556 - RNA, 19 nt, Artificial Sequence
  Description of Artificial Sequence: Synthetic oligonucleotide
aaaugggauccagcucuuc

SEQ ID NO: 848557 - RNA, 19 nt, Artificial Sequence
  Description of Artificial Sequence: Synthetic oligonucleotide
cagaaacuagauugcacca

SEQ ID NO: 848558 - RNA, 19 nt, Artificial Sequence
  Description of Artificial Sequence: Synthetic oligonucleotide
uggagggcauucuaauaaa

SEQ ID NO: 848559 - RNA, 19 nt, Artificial Sequence
  Description of Artificial Sequence: Synthetic oligonucleotide
guagcauuacagugggaga

SEQ ID NO: 848560 - RNA, 19 nt, Artificial Sequence
  Description of Artificial Sequence: Synthetic oligonucleotide
cuggagggcauucuaauaa

SEQ ID NO: 848561 - RNA, 19 nt, Artificial Sequence
  Description of Artificial Sequence: Synthetic oligonucleotide
aaacuagauugcaccauaa

SEQ ID NO: 848562 - RNA, 19 nt, Artificial Sequence
  Description of Artificial Sequence: Synthetic oligonucleotide
cucuguccguaauucaauc

SEQ ID NO: 848563 - RNA, 19 nt, Artificial Sequence
  Description of Artificial Sequence: Synthetic oligonucleotide
guuguccaugauauaggcc

SEQ ID NO: 848564 - RNA, 19 nt, Artificial Sequence
  Description of Artificial Sequence: Synthetic oligonucleotide
uauuaggcucucguuguaa

SEQ ID NO: 848565 - RNA, 19 nt, Artificial Sequence
  Description of Artificial Sequence: Synthetic oligonucleotide
agaaacuagauugcaccau

SEQ ID NO: 848566 - RNA, 19 nt, Artificial Sequence
  Description of Artificial Sequence: Synthetic oligonucleotide
cuuaugcuuccaccacugc

SEQ ID NO: 848567 - RNA, 19 nt, Artificial Sequence
  Description of Artificial Sequence: Synthetic oligonucleotide
uuucauugucuguggcggu

SEQ ID NO: 848568 - RNA, 19 nt, Artificial Sequence
  Description of Artificial Sequence: Synthetic oligonucleotide
acuugaccucucaaaguuc

SEQ ID NO: 848569 - RNA, 19 nt, Artificial Sequence
  Description of Artificial Sequence: Synthetic oligonucleotide
auagcgcaguccaacaacu

SEQ ID NO: 848570 - RNA, 19 nt, Artificial Sequence
  Description of Artificial Sequence: Synthetic oligonucleotide
agcugcaagaucucucuuu

SEQ ID NO: 848571 - RNA, 19 nt, Artificial Sequence
  Description of Artificial Sequence: Synthetic oligonucleotide
cuguccguaauucaaucaa

SEQ ID NO: 848572 - RNA, 19 nt, Artificial Sequence
  Description of Artificial Sequence: Synthetic oligonucleotide
caaaacguggaaagaaagu

SEQ ID NO: 848573 - RNA, 19 nt, Artificial Sequence
  Description of Artificial Sequence: Synthetic oligonucleotide
cacuucacuaaaauaaaau

SEQ ID NO: 848574 - RNA, 19 nt, Artificial Sequence
  Description of Artificial Sequence: Synthetic oligonucleotide
cauaaggaacuaccccuuc

SEQ ID NO: 848575 - RNA, 19 nt, Artificial Sequence
  Description of Artificial Sequence: Synthetic oligonucleotide
auggauuauuaggcucucg

SEQ ID NO: 848576 - RNA, 19 nt, Artificial Sequence
  Description of Artificial Sequence: Synthetic oligonucleotide
aagcaugcauuagagcauu

SEQ ID NO: 848577 - RNA, 19 nt, Artificial Sequence
  Description of Artificial Sequence: Synthetic oligonucleotide
gcucucguuguaaagaaac

SEQ ID NO: 848578 - RNA, 19 nt, Artificial Sequence
  Description of Artificial Sequence: Synthetic oligonucleotide
uccaggacauggcgccggg

SEQ ID NO: 848579 - RNA, 19 nt, Artificial Sequence
  Description of Artificial Sequence: Synthetic oligonucleotide
cacaaagauucaagccaac

SEQ ID NO: 848580 - RNA, 19 nt, Artificial Sequence
  Description of Artificial Sequence: Synthetic oligonucleotide
gcuuuuaaggacaguagca

SEQ ID NO: 848581 - RNA, 19 nt, Artificial Sequence
  Description of Artificial Sequence: Synthetic oligonucleotide
gcuugaacugaccuuacaa

SEQ ID NO: 848582 - RNA, 19 nt, Artificial Sequence
  Description of Artificial Sequence: Synthetic oligonucleotide
auauaggccaaggcagcug

SEQ ID NO: 848583 - RNA, 19 nt, Artificial Sequence
  Description of Artificial Sequence: Synthetic oligonucleotide
gaccucucaaaguuccaaa

SEQ ID NO: 848584 - RNA, 19 nt, Artificial Sequence
  Description of Artificial Sequence: Synthetic oligonucleotide
gaugauccuuuuacucuac

SEQ ID NO: 848585 - RNA, 19 nt, Artificial Sequence
  Description of Artificial Sequence: Synthetic oligonucleotide
guaccacuucacuaaaaua

SEQ ID NO: 848586 - RNA, 19 nt, Artificial Sequence
  Description of Artificial Sequence: Synthetic oligonucleotide
cuaccccuuccacuugugc

SEQ ID NO: 848587 - RNA, 19 nt, Artificial Sequence
  Description of Artificial Sequence: Synthetic oligonucleotide
aucugcuugaacugaccuu

SEQ ID NO: 848588 - RNA, 19 nt, Artificial Sequence
  Description of Artificial Sequence: Synthetic oligonucleotide
auaugccaaauagaguauu

SEQ ID NO: 848589 - RNA, 19 nt, Artificial Sequence
  Description of Artificial Sequence: Synthetic oligonucleotide
cuaauugcauucuuaucau

SEQ ID NO: 848590 - RNA, 19 nt, Artificial Sequence
  Description of Artificial Sequence: Synthetic oligonucleotide
cacgggcaaauucuguauc

SEQ ID NO: 848591 - RNA, 19 nt, Artificial Sequence
  Description of Artificial Sequence: Synthetic oligonucleotide
caauguacugaacggcuaa

SEQ ID NO: 848592 - RNA, 19 nt, Artificial Sequence
  Description of Artificial Sequence: Synthetic oligonucleotide
ugucuguggcgguucacua

SEQ ID NO: 848593 - RNA, 19 nt, Artificial Sequence
  Description of Artificial Sequence: Synthetic oligonucleotide
ccaugauauaggccaaggc

SEQ ID NO: 848594 - RNA, 19 nt, Artificial Sequence
  Description of Artificial Sequence: Synthetic oligonucleotide
auugucuguggcgguucac

SEQ ID NO: 848595 - RNA, 19 nt, Artificial Sequence
  Description of Artificial Sequence: Synthetic oligonucleotide
auuggacagacugcaaaua

SEQ ID NO: 848596 - RNA, 19 nt, Artificial Sequence
  Description of Artificial Sequence: Synthetic oligonucleotide
gaacuaccccuuccacuug

SEQ ID NO: 848597 - RNA, 19 nt, Artificial Sequence
  Description of Artificial Sequence: Synthetic oligonucleotide
agaauccuuuacaaugaau

SEQ ID NO: 848598 - RNA, 19 nt, Artificial Sequence
  Description of Artificial Sequence: Synthetic oligonucleotide
gggauaacgucuuggaacu

SEQ ID NO: 848599 - RNA, 19 nt, Artificial Sequence
  Description of Artificial Sequence: Synthetic oligonucleotide
cucguuguaaagaaaccau

SEQ ID NO: 848600 - RNA, 19 nt, Artificial Sequence
  Description of Artificial Sequence: Synthetic oligonucleotide
agugcacgggcaaauucug

SEQ ID NO: 848601 - RNA, 19 nt, Artificial Sequence
  Description of Artificial Sequence: Synthetic oligonucleotide
cauaaagggcauuuagcau

SEQ ID NO: 848602 - RNA, 19 nt, Artificial Sequence
  Description of Artificial Sequence: Synthetic oligonucleotide
ggaacucaaaacguggaaa

SEQ ID NO: 848603 - RNA, 19 nt, Artificial Sequence
  Description of Artificial Sequence: Synthetic oligonucleotide
cuuuuaaggacaguagcau

SEQ ID NO: 848604 - RNA, 19 nt, Artificial Sequence
  Description of Artificial Sequence: Synthetic oligonucleotide
cuaaacgaguaaacacaaa

SEQ ID NO: 848605 - RNA, 19 nt, Artificial Sequence
  Description of Artificial Sequence: Synthetic oligonucleotide
guaucaguuauaucacuuu

SEQ ID NO: 848606 - RNA, 19 nt, Artificial Sequence
  Description of Artificial Sequence: Synthetic oligonucleotide
uuucuucgacagaauccuu

SEQ ID NO: 848607 - RNA, 19 nt, Artificial Sequence
  Description of Artificial Sequence: Synthetic oligonucleotide
guaguaccacuucacuaaa

SEQ ID NO: 848608 - RNA, 19 nt, Artificial Sequence
  Description of Artificial Sequence: Synthetic oligonucleotide
cagcauagcauaaaauuuu

SEQ ID NO: 848609 - RNA, 19 nt, Artificial Sequence
  Description of Artificial Sequence: Synthetic oligonucleotide
gaauugacucaacucuuuu

SEQ ID NO: 848610 - RNA, 19 nt, Artificial Sequence
  Description of Artificial Sequence: Synthetic oligonucleotide
uacuuccaaacaggauccc

SEQ ID NO: 848611 - RNA, 19 nt, Artificial Sequence
  Description of Artificial Sequence: Synthetic oligonucleotide
agauccugcuucuguguuu

SEQ ID NO: 848612 - RNA, 19 nt, Artificial Sequence
  Description of Artificial Sequence: Synthetic oligonucleotide
cuuuugagccauggaacca

SEQ ID NO: 848613 - RNA, 19 nt, Artificial Sequence
  Description of Artificial Sequence: Synthetic oligonucleotide
uugguagaacagguucccu

SEQ ID NO: 848614 - RNA, 19 nt, Artificial Sequence
  Description of Artificial Sequence: Synthetic oligonucleotide
uucauugucuguggcgguu

SEQ ID NO: 848615 - RNA, 19 nt, Artificial Sequence
  Description of Artificial Sequence: Synthetic oligonucleotide
agccauggaaccaucuaaa

SEQ ID NO: 848616 - RNA, 19 nt, Artificial Sequence
  Description of Artificial Sequence: Synthetic oligonucleotide
caucacuaguuaggaaguc

SEQ ID NO: 848617 - RNA, 19 nt, Artificial Sequence
  Description of Artificial Sequence: Synthetic oligonucleotide
cauauuggacagacugcaa

SEQ ID NO: 848618 - RNA, 19 nt, Artificial Sequence
  Description of Artificial Sequence: Synthetic oligonucleotide
gccauggaaccaucuaaac

SEQ ID NO: 848619 - RNA, 19 nt, Artificial Sequence
  Description of Artificial Sequence: Synthetic oligonucleotide
cguaauucaaucaaagcau

SEQ ID NO: 848620 - RNA, 19 nt, Artificial Sequence
  Description of Artificial Sequence: Synthetic oligonucleotide
caccgucacaugccaauuc

SEQ ID NO: 848621 - RNA, 19 nt, Artificial Sequence
  Description of Artificial Sequence: Synthetic oligonucleotide
ggcauucuaauaaauuaua

SEQ ID NO: 848622 - RNA, 19 nt, Artificial Sequence
  Description of Artificial Sequence: Synthetic oligonucleotide
aggaucccucuugaacauc

SEQ ID NO: 848623 - RNA, 19 nt, Artificial Sequence
  Description of Artificial Sequence: Synthetic oligonucleotide
ggaacuaccccuuccacuu

SEQ ID NO: 848624 - RNA, 19 nt, Artificial Sequence
  Description of Artificial Sequence: Synthetic oligonucleotide
gaguggacagaugaucagu

SEQ ID NO: 848625 - RNA, 19 nt, Artificial Sequence
  Description of Artificial Sequence: Synthetic oligonucleotide
ugggguucucuguccguaa

SEQ ID NO: 848626 - RNA, 19 nt, Artificial Sequence
  Description of Artificial Sequence: Synthetic oligonucleotide
ucaccccuacagacuauuu

SEQ ID NO: 848627 - RNA, 19 nt, Artificial Sequence
  Description of Artificial Sequence: Synthetic oligonucleotide
ccaucuaaacgaguaaaca

SEQ ID NO: 848628 - RNA, 19 nt, Artificial Sequence
  Description of Artificial Sequence: Synthetic oligonucleotide
ccauuaagaacacccgaga

SEQ ID NO: 848629 - RNA, 19 nt, Artificial Sequence
  Description of Artificial Sequence: Synthetic oligonucleotide
cagacuauuuacaccuuau

SEQ ID NO: 848630 - RNA, 19 nt, Artificial Sequence
  Description of Artificial Sequence: Synthetic oligonucleotide
cuuuauguugggguucucu

SEQ ID NO: 848631 - RNA, 19 nt, Artificial Sequence
  Description of Artificial Sequence: Synthetic oligonucleotide
cacccgagaagcugcacaa

SEQ ID NO: 848632 - RNA, 19 nt, Artificial Sequence
  Description of Artificial Sequence: Synthetic oligonucleotide
ugcccugggcgcccggacu

SEQ ID NO: 848633 - RNA, 19 nt, Artificial Sequence
  Description of Artificial Sequence: Synthetic oligonucleotide
cagaauccuuuacaaugaa

SEQ ID NO: 848634 - RNA, 19 nt, Artificial Sequence
  Description of Artificial Sequence: Synthetic oligonucleotide
cacucugaaugaccuggca

SEQ ID NO: 848635 - RNA, 19 nt, Artificial Sequence
  Description of Artificial Sequence: Synthetic oligonucleotide
auugcucagcacagagagu

SEQ ID NO: 848636 - RNA, 19 nt, Artificial Sequence
  Description of Artificial Sequence: Synthetic oligonucleotide
caaauuggucaauccaauu

SEQ ID NO: 848637 - RNA, 19 nt, Artificial Sequence
  Description of Artificial Sequence: Synthetic oligonucleotide
caccccuacagacuauuua

SEQ ID NO: 848638 - RNA, 19 nt, Artificial Sequence
  Description of Artificial Sequence: Synthetic oligonucleotide
cauggcgccgggcggggug

SEQ ID NO: 848639 - RNA, 19 nt, Artificial Sequence
  Description of Artificial Sequence: Synthetic oligonucleotide
cauugucuguggcgguuca

SEQ ID NO: 848640 - RNA, 19 nt, Artificial Sequence
  Description of Artificial Sequence: Synthetic oligonucleotide
acacaaaucccgagucuuu

SEQ ID NO: 848641 - RNA, 19 nt, Artificial Sequence
  Description of Artificial Sequence: Synthetic oligonucleotide
gaaugaccuggcagauaca

SEQ ID NO: 848642 - RNA, 19 nt, Artificial Sequence
  Description of Artificial Sequence: Synthetic oligonucleotide
auugcaccauaaggaacua

SEQ ID NO: 848643 - RNA, 19 nt, Artificial Sequence
  Description of Artificial Sequence: Synthetic oligonucleotide
cacaaaucccgagucuuua

SEQ ID NO: 848644 - RNA, 19 nt, Artificial Sequence
  Description of Artificial Sequence: Synthetic oligonucleotide
gaugaucaguguuguucuu

SEQ ID NO: 848645 - RNA, 19 nt, Artificial Sequence
  Description of Artificial Sequence: Synthetic oligonucleotide
ggauuauuaggcucucguu

SEQ ID NO: 848646 - RNA, 19 nt, Artificial Sequence
  Description of Artificial Sequence: Synthetic oligonucleotide
gagaaacaacuaaacucuu

SEQ ID NO: 848647 - RNA, 19 nt, Artificial Sequence
  Description of Artificial Sequence: Synthetic oligonucleotide
ccggacuuucucaggccgc

SEQ ID NO: 848648 - RNA, 19 nt, Artificial Sequence
  Description of Artificial Sequence: Synthetic oligonucleotide
agguucccucaccccuaca

SEQ ID NO: 848649 - RNA, 19 nt, Artificial Sequence
  Description of Artificial Sequence: Synthetic oligonucleotide
ggcggggugaccucgggau

SEQ ID NO: 848650 - RNA, 19 nt, Artificial Sequence
  Description of Artificial Sequence: Synthetic oligonucleotide
acccgagaagcugcacaaa

SEQ ID NO: 848651 - RNA, 19 nt, Artificial Sequence
  Description of Artificial Sequence: Synthetic oligonucleotide
cacuugugccaauuuuguu

SEQ ID NO: 848652 - RNA, 19 nt, Artificial Sequence
  Description of Artificial Sequence: Synthetic oligonucleotide
gcgcccggacuuucucagg

SEQ ID NO: 848653 - RNA, 19 nt, Artificial Sequence
  Description of Artificial Sequence: Synthetic oligonucleotide
ggauaacgucuuggaacuc

SEQ ID NO: 848654 - RNA, 19 nt, Artificial Sequence
  Description of Artificial Sequence: Synthetic oligonucleotide
agcaugcauuagagcauua

SEQ ID NO: 848655 - RNA, 19 nt, Artificial Sequence
  Description of Artificial Sequence: Synthetic oligonucleotide
gcggggugaccucgggaug

SEQ ID NO: 848656 - RNA, 19 nt, Artificial Sequence
  Description of Artificial Sequence: Synthetic oligonucleotide
auggcgccgggcgggguga

SEQ ID NO: 848657 - RNA, 19 nt, Artificial Sequence
  Description of Artificial Sequence: Synthetic oligonucleotide
ggagggcauucuaauaaau

SEQ ID NO: 848658 - RNA, 19 nt, Artificial Sequence
  Description of Artificial Sequence: Synthetic oligonucleotide
cggggugaccucgggaugc

SEQ ID NO: 848659 - RNA, 19 nt, Artificial Sequence
  Description of Artificial Sequence: Synthetic oligonucleotide
ggcucucguuguaaagaaa

SEQ ID NO: 848660 - RNA, 19 nt, Artificial Sequence
  Description of Artificial Sequence: Synthetic oligonucleotide
cccucaccccuacagacua

SEQ ID NO: 848661 - RNA, 19 nt, Artificial Sequence
  Description of Artificial Sequence: Synthetic oligonucleotide
ggggugaccucgggaugcc

SEQ ID NO: 848662 - RNA, 19 nt, Artificial Sequence
  Description of Artificial Sequence: Synthetic oligonucleotide
ccauaaggaacuaccccuu

SEQ ID NO: 848663 - RNA, 19 nt, Artificial Sequence
  Description of Artificial Sequence: Synthetic oligonucleotide
cucaccccuacagacuauu

SEQ ID NO: 848664 - RNA, 19 nt, Artificial Sequence
  Description of Artificial Sequence: Synthetic oligonucleotide
ggguucucuguccguaauu

SEQ ID NO: 848665 - RNA, 19 nt, Artificial Sequence
  Description of Artificial Sequence: Synthetic oligonucleotide
gggcggggugaccucggga

SEQ ID NO: 848666 - RNA, 19 nt, Artificial Sequence
  Description of Artificial Sequence: Synthetic oligonucleotide
cugggcgcccggacuuucu

SEQ ID NO: 848667 - RNA, 19 nt, Artificial Sequence
  Description of Artificial Sequence: Synthetic oligonucleotide
cucuugcuucuggccaagu

SEQ ID NO: 848668 - RNA, 19 nt, Artificial Sequence
  Description of Artificial Sequence: Synthetic oligonucleotide
ccugggcgcccggacuuuc

SEQ ID NO: 848669 - RNA, 19 nt, Artificial Sequence
  Description of Artificial Sequence: Synthetic oligonucleotide
cgggcggggugaccucggg

SEQ ID NO: 848670 - RNA, 19 nt, Artificial Sequence
  Description of Artificial Sequence: Synthetic oligonucleotide
ccgucacaugccaauucuu

SEQ ID NO: 848671 - RNA, 19 nt, Artificial Sequence
  Description of Artificial Sequence: Synthetic oligonucleotide
ccucaccccuacagacuau

SEQ ID NO: 848672 - RNA, 19 nt, Artificial Sequence
  Description of Artificial Sequence: Synthetic oligonucleotide
ucuuaaguaaccuuaugcc

SEQ ID NO: 848673 - RNA, 19 nt, Artificial Sequence
  Description of Artificial Sequence: Synthetic oligonucleotide
aagucuggcaauucgagag

SEQ ID NO: 848674 - RNA, 19 nt, Artificial Sequence
  Description of Artificial Sequence: Synthetic oligonucleotide
uuaaguaaccuuaugccug

SEQ ID NO: 848675 - RNA, 19 nt, Artificial Sequence
  Description of Artificial Sequence: Synthetic oligonucleotide
uauacaucggcauggacag

SEQ ID NO: 848676 - RNA, 19 nt, Artificial Sequence
  Description of Artificial Sequence: Synthetic oligonucleotide
cuuuggaucagaaucgagg

SEQ ID NO: 848677 - RNA, 19 nt, Artificial Sequence
  Description of Artificial Sequence: Synthetic oligonucleotide
auuuaguaaacuggaaccc

SEQ ID NO: 848678 - RNA, 19 nt, Artificial Sequence
  Description of Artificial Sequence: Synthetic oligonucleotide
uuaguaaacuggaacccgg

SEQ ID NO: 848679 - RNA, 19 nt, Artificial Sequence
  Description of Artificial Sequence: Synthetic oligonucleotide
cauaguggaaaucuguggg

SEQ ID NO: 848680 - RNA, 19 nt, Artificial Sequence
  Description of Artificial Sequence: Synthetic oligonucleotide
uucagaagauguuugacca

SEQ ID NO: 848681 - RNA, 19 nt, Artificial Sequence
  Description of Artificial Sequence: Synthetic oligonucleotide
aauucgagagguucuuccg

SEQ ID NO: 848682 - RNA, 19 nt, Artificial Sequence
  Description of Artificial Sequence: Synthetic oligonucleotide
aaguugugaugucuacucc

SEQ ID NO: 848683 - RNA, 19 nt, Artificial Sequence
  Description of Artificial Sequence: Synthetic oligonucleotide
auagugcucagucuuugcc

SEQ ID NO: 848684 - RNA, 19 nt, Artificial Sequence
  Description of Artificial Sequence: Synthetic oligonucleotide
uuuccgaaaauaugcauca

SEQ ID NO: 848685 - RNA, 19 nt, Artificial Sequence
  Description of Artificial Sequence: Synthetic oligonucleotide
uuuuccgaaaauaugcauc

SEQ ID NO: 848686 - RNA, 19 nt, Artificial Sequence
  Description of Artificial Sequence: Synthetic oligonucleotide
aagucauccaucaggggcc

SEQ ID NO: 848687 - RNA, 19 nt, Artificial Sequence
  Description of Artificial Sequence: Synthetic oligonucleotide
acaaccagcaucucuccgc

SEQ ID NO: 848688 - RNA, 19 nt, Artificial Sequence
  Description of Artificial Sequence: Synthetic oligonucleotide
uuuaguaaacuggaacccg

SEQ ID NO: 848689 - RNA, 19 nt, Artificial Sequence
  Description of Artificial Sequence: Synthetic oligonucleotide
uuauguguuucacuguccc

SEQ ID NO: 848690 - RNA, 19 nt, Artificial Sequence
  Description of Artificial Sequence: Synthetic oligonucleotide
aauaccccggcugugcugc

SEQ ID NO: 848691 - RNA, 19 nt, Artificial Sequence
  Description of Artificial Sequence: Synthetic oligonucleotide
uuuggaucagaaucgaggu

SEQ ID NO: 848692 - RNA, 19 nt, Artificial Sequence
  Description of Artificial Sequence: Synthetic oligonucleotide
acacggacagcauagaucu

SEQ ID NO: 848693 - RNA, 19 nt, Artificial Sequence
  Description of Artificial Sequence: Synthetic oligonucleotide
uucauaguggaaaucugug

SEQ ID NO: 848694 - RNA, 19 nt, Artificial Sequence
  Description of Artificial Sequence: Synthetic oligonucleotide
aguugguugguucuguguc

SEQ ID NO: 848695 - RNA, 19 nt, Artificial Sequence
  Description of Artificial Sequence: Synthetic oligonucleotide
cuaaaugcaggagacaggc

SEQ ID NO: 848696 - RNA, 19 nt, Artificial Sequence
  Description of Artificial Sequence: Synthetic oligonucleotide
cucguuauguguuucacug

SEQ ID NO: 848697 - RNA, 19 nt, Artificial Sequence
  Description of Artificial Sequence: Synthetic oligonucleotide
auuaggauuguuguaauca

SEQ ID NO: 848698 - RNA, 19 nt, Artificial Sequence
  Description of Artificial Sequence: Synthetic oligonucleotide
uaaguaaccuuaugccugg

SEQ ID NO: 848699 - RNA, 19 nt, Artificial Sequence
  Description of Artificial Sequence: Synthetic oligonucleotide
ucuacacaaccuaagucug

SEQ ID NO: 848700 - RNA, 19 nt, Artificial Sequence
  Description of Artificial Sequence: Synthetic oligonucleotide
uaaguugugaugucuacuc

SEQ ID NO: 848701 - RNA, 19 nt, Artificial Sequence
  Description of Artificial Sequence: Synthetic oligonucleotide
aaguucgacucucuguaag

SEQ ID NO: 848702 - RNA, 19 nt, Artificial Sequence
  Description of Artificial Sequence: Synthetic oligonucleotide
cuuccgaucugcuucagag

SEQ ID NO: 848703 - RNA, 19 nt, Artificial Sequence
  Description of Artificial Sequence: Synthetic oligonucleotide
gaaucgaggucaaaggucc

SEQ ID NO: 848704 - RNA, 19 nt, Artificial Sequence
  Description of Artificial Sequence: Synthetic oligonucleotide
aaaucugugggaagagugg

SEQ ID NO: 848705 - RNA, 19 nt, Artificial Sequence
  Description of Artificial Sequence: Synthetic oligonucleotide
ugucccauuuaguaaacug

SEQ ID NO: 848706 - RNA, 19 nt, Artificial Sequence
  Description of Artificial Sequence: Synthetic oligonucleotide
aaauaggaguauucuccag

SEQ ID NO: 848707 - RNA, 19 nt, Artificial Sequence
  Description of Artificial Sequence: Synthetic oligonucleotide
ugugguuuaccucuguguc

SEQ ID NO: 848708 - RNA, 19 nt, Artificial Sequence
  Description of Artificial Sequence: Synthetic oligonucleotide
uucgugagcccacugagca

SEQ ID NO: 848709 - RNA, 19 nt, Artificial Sequence
  Description of Artificial Sequence: Synthetic oligonucleotide
agcauugaugucaaauacc

SEQ ID NO: 848710 - RNA, 19 nt, Artificial Sequence
  Description of Artificial Sequence: Synthetic oligonucleotide
ucccauuuaguaaacugga

SEQ ID NO: 848711 - RNA, 19 nt, Artificial Sequence
  Description of Artificial Sequence: Synthetic oligonucleotide
uacuccuugguuuucagaa

SEQ ID NO: 848712 - RNA, 19 nt, Artificial Sequence
  Description of Artificial Sequence: Synthetic oligonucleotide
ugucuagaaaacucuguca

SEQ ID NO: 848713 - RNA, 19 nt, Artificial Sequence
  Description of Artificial Sequence: Synthetic oligonucleotide
ugcacucaucaaaugaggc

SEQ ID NO: 848714 - RNA, 19 nt, Artificial Sequence
  Description of Artificial Sequence: Synthetic oligonucleotide
ucuucugaaacaugggauc

SEQ ID NO: 848715 - RNA, 19 nt, Artificial Sequence
  Description of Artificial Sequence: Synthetic oligonucleotide
ugucaugucuacacaaccu

SEQ ID NO: 848716 - RNA, 19 nt, Artificial Sequence
  Description of Artificial Sequence: Synthetic oligonucleotide
uugaccauucuccugugcu

SEQ ID NO: 848717 - RNA, 19 nt, Artificial Sequence
  Description of Artificial Sequence: Synthetic oligonucleotide
ugcuuaagaaucucugaca

SEQ ID NO: 848718 - RNA, 19 nt, Artificial Sequence
  Description of Artificial Sequence: Synthetic oligonucleotide
aauaagucugacucuucau

SEQ ID NO: 848719 - RNA, 19 nt, Artificial Sequence
  Description of Artificial Sequence: Synthetic oligonucleotide
ucuagaaaacucugucagc

SEQ ID NO: 848720 - RNA, 19 nt, Artificial Sequence
  Description of Artificial Sequence: Synthetic oligonucleotide
cuaagucuggcaauucgag

SEQ ID NO: 848721 - RNA, 19 nt, Artificial Sequence
  Description of Artificial Sequence: Synthetic oligonucleotide
uccgaaaauaugcaucaaa

SEQ ID NO: 848722 - RNA, 19 nt, Artificial Sequence
  Description of Artificial Sequence: Synthetic oligonucleotide
accuaagucuggcaauucg

SEQ ID NO: 848723 - RNA, 19 nt, Artificial Sequence
  Description of Artificial Sequence: Synthetic oligonucleotide
ccgaaaauaagucugacuc

SEQ ID NO: 848724 - RNA, 19 nt, Artificial Sequence
  Description of Artificial Sequence: Synthetic oligonucleotide
gucccauuuaguaaacugg

SEQ ID NO: 848725 - RNA, 19 nt, Artificial Sequence
  Description of Artificial Sequence: Synthetic oligonucleotide
ucgacucucuguaaguugu

SEQ ID NO: 848726 - RNA, 19 nt, Artificial Sequence
  Description of Artificial Sequence: Synthetic oligonucleotide
uccaggacaaaaguuggag

SEQ ID NO: 848727 - RNA, 19 nt, Artificial Sequence
  Description of Artificial Sequence: Synthetic oligonucleotide
aucggcauggacagcaucc

SEQ ID NO: 848728 - RNA, 19 nt, Artificial Sequence
  Description of Artificial Sequence: Synthetic oligonucleotide
aggucaaaggucccaauug

SEQ ID NO: 848729 - RNA, 19 nt, Artificial Sequence
  Description of Artificial Sequence: Synthetic oligonucleotide
auaugcaucaaaaucaaua

SEQ ID NO: 848730 - RNA, 19 nt, Artificial Sequence
  Description of Artificial Sequence: Synthetic oligonucleotide
uaaccuuaugccugguuug

SEQ ID NO: 848731 - RNA, 19 nt, Artificial Sequence
  Description of Artificial Sequence: Synthetic oligonucleotide
aacccggccagagaagggc

SEQ ID NO: 848732 - RNA, 19 nt, Artificial Sequence
  Description of Artificial Sequence: Synthetic oligonucleotide
aguugugaugucuacuccu

SEQ ID NO: 848733 - RNA, 19 nt, Artificial Sequence
  Description of Artificial Sequence: Synthetic oligonucleotide
agaaucgaggucaaagguc

SEQ ID NO: 848734 - RNA, 19 nt, Artificial Sequence
  Description of Artificial Sequence: Synthetic oligonucleotide
agagaaauaccccggcugu

SEQ ID NO: 848735 - RNA, 19 nt, Artificial Sequence
  Description of Artificial Sequence: Synthetic oligonucleotide
caugggauccaccucacac

SEQ ID NO: 848736 - RNA, 19 nt, Artificial Sequence
  Description of Artificial Sequence: Synthetic oligonucleotide
uguccuucugcuuaagaau

SEQ ID NO: 848737 - RNA, 19 nt, Artificial Sequence
  Description of Artificial Sequence: Synthetic oligonucleotide
ucauuggcuaaaugcagga

SEQ ID NO: 848738 - RNA, 19 nt, Artificial Sequence
  Description of Artificial Sequence: Synthetic oligonucleotide
aauuggucccgaaaauaag

SEQ ID NO: 848739 - RNA, 19 nt, Artificial Sequence
  Description of Artificial Sequence: Synthetic oligonucleotide
ugguuuaccucugugucag

SEQ ID NO: 848740 - RNA, 19 nt, Artificial Sequence
  Description of Artificial Sequence: Synthetic oligonucleotide
guauacaucggcauggaca

SEQ ID NO: 848741 - RNA, 19 nt, Artificial Sequence
  Description of Artificial Sequence: Synthetic oligonucleotide
cugcuuaagaaucucugac

SEQ ID NO: 848742 - RNA, 19 nt, Artificial Sequence
  Description of Artificial Sequence: Synthetic oligonucleotide
aucauuaggauuguuguaa

SEQ ID NO: 848743 - RNA, 19 nt, Artificial Sequence
  Description of Artificial Sequence: Synthetic oligonucleotide
uucgagagguucuuccgag

SEQ ID NO: 848744 - RNA, 19 nt, Artificial Sequence
  Description of Artificial Sequence: Synthetic oligonucleotide
cacacuuccgaucugcuuc

SEQ ID NO: 848745 - RNA, 19 nt, Artificial Sequence
  Description of Artificial Sequence: Synthetic oligonucleotide
gaugguggaucuuugccca

SEQ ID NO: 848746 - RNA, 19 nt, Artificial Sequence
  Description of Artificial Sequence: Synthetic oligonucleotide
ucuuuggaucagaaucgag

SEQ ID NO: 848747 - RNA, 19 nt, Artificial Sequence
  Description of Artificial Sequence: Synthetic oligonucleotide
cuucuuuggcuuugcagcc

SEQ ID NO: 848748 - RNA, 19 nt, Artificial Sequence
  Description of Artificial Sequence: Synthetic oligonucleotide
ucccaauuggucccgaaaa

SEQ ID NO: 848749 - RNA, 19 nt, Artificial Sequence
  Description of Artificial Sequence: Synthetic oligonucleotide
uuugguuguuccugguuca

SEQ ID NO: 848750 - RNA, 19 nt, Artificial Sequence
  Description of Artificial Sequence: Synthetic oligonucleotide
gaaccagugaucugggcca

SEQ ID NO: 848751 - RNA, 19 nt, Artificial Sequence
  Description of Artificial Sequence: Synthetic oligonucleotide
cugucaugucuacacaacc

SEQ ID NO: 848752 - RNA, 19 nt, Artificial Sequence
  Description of Artificial Sequence: Synthetic oligonucleotide
uuuaccucugugucagucu

SEQ ID NO: 848753 - RNA, 19 nt, Artificial Sequence
  Description of Artificial Sequence: Synthetic oligonucleotide
guaucauuaggauuguugu

SEQ ID NO: 848754 - RNA, 19 nt, Artificial Sequence
  Description of Artificial Sequence: Synthetic oligonucleotide
ucuguaaguugugaugucu

SEQ ID NO: 848755 - RNA, 19 nt, Artificial Sequence
  Description of Artificial Sequence: Synthetic oligonucleotide
uccugucuagaaaacucug

SEQ ID NO: 848756 - RNA, 19 nt, Artificial Sequence
  Description of Artificial Sequence: Synthetic oligonucleotide
auaguggaaaucuguggga

SEQ ID NO: 848757 - RNA, 19 nt, Artificial Sequence
  Description of Artificial Sequence: Synthetic oligonucleotide
uaguaaacuggaacccggc

SEQ ID NO: 848758 - RNA, 19 nt, Artificial Sequence
  Description of Artificial Sequence: Synthetic oligonucleotide
uggagagaaauaccccggc

SEQ ID NO: 848759 - RNA, 19 nt, Artificial Sequence
  Description of Artificial Sequence: Synthetic oligonucleotide
uaagucuggcaauucgaga

SEQ ID NO: 848760 - RNA, 19 nt, Artificial Sequence
  Description of Artificial Sequence: Synthetic oligonucleotide
agucuggcaauucgagagg

SEQ ID NO: 848761 - RNA, 19 nt, Artificial Sequence
  Description of Artificial Sequence: Synthetic oligonucleotide
gguaucauuaggauuguug

SEQ ID NO: 848762 - RNA, 19 nt, Artificial Sequence
  Description of Artificial Sequence: Synthetic oligonucleotide
uuggucccgaaaauaaguc

SEQ ID NO: 848763 - RNA, 19 nt, Artificial Sequence
  Description of Artificial Sequence: Synthetic oligonucleotide
ucaugucuacacaaccuaa

SEQ ID NO: 848764 - RNA, 19 nt, Artificial Sequence
  Description of Artificial Sequence: Synthetic oligonucleotide
cuugggucgaggccgaaag

SEQ ID NO: 848765 - RNA, 19 nt, Artificial Sequence
  Description of Artificial Sequence: Synthetic oligonucleotide
guaaacuggaacccggcca

SEQ ID NO: 848766 - RNA, 19 nt, Artificial Sequence
  Description of Artificial Sequence: Synthetic oligonucleotide
ugugccuucuagcuucaga

SEQ ID NO: 848767 - RNA, 19 nt, Artificial Sequence
  Description of Artificial Sequence: Synthetic oligonucleotide
cuuaagaaucucugacaug

SEQ ID NO: 848768 - RNA, 19 nt, Artificial Sequence
  Description of Artificial Sequence: Synthetic oligonucleotide
uucuugagaugguggaucu

SEQ ID NO: 848769 - RNA, 19 nt, Artificial Sequence
  Description of Artificial Sequence: Synthetic oligonucleotide
cucgcuucuauaguccugg

SEQ ID NO: 848770 - RNA, 19 nt, Artificial Sequence
  Description of Artificial Sequence: Synthetic oligonucleotide
uccggggacugaaauagga

SEQ ID NO: 848771 - RNA, 19 nt, Artificial Sequence
  Description of Artificial Sequence: Synthetic oligonucleotide
ggaggcaguaucuugcuug

SEQ ID NO: 848772 - RNA, 19 nt, Artificial Sequence
  Description of Artificial Sequence: Synthetic oligonucleotide
aaagauccucugugccuuc

SEQ ID NO: 848773 - RNA, 19 nt, Artificial Sequence
  Description of Artificial Sequence: Synthetic oligonucleotide
ucuguaccaaggcucucug

SEQ ID NO: 848774 - RNA, 19 nt, Artificial Sequence
  Description of Artificial Sequence: Synthetic oligonucleotide
cuuaaguaaccuuaugccu

SEQ ID NO: 848775 - RNA, 19 nt, Artificial Sequence
  Description of Artificial Sequence: Synthetic oligonucleotide
gguauggagagguucugag

SEQ ID NO: 848776 - RNA, 19 nt, Artificial Sequence
  Description of Artificial Sequence: Synthetic oligonucleotide
uaucauuaggauuguugua

SEQ ID NO: 848777 - RNA, 19 nt, Artificial Sequence
  Description of Artificial Sequence: Synthetic oligonucleotide
ucucugacaugaaaucaau

SEQ ID NO: 848778 - RNA, 19 nt, Artificial Sequence
  Description of Artificial Sequence: Synthetic oligonucleotide
aaauaccccggcugugcug

SEQ ID NO: 848779 - RNA, 19 nt, Artificial Sequence
  Description of Artificial Sequence: Synthetic oligonucleotide
auuggucccgaaaauaagu

SEQ ID NO: 848780 - RNA, 19 nt, Artificial Sequence
  Description of Artificial Sequence: Synthetic oligonucleotide
aguucgacucucuguaagu

SEQ ID NO: 848781 - RNA, 19 nt, Artificial Sequence
  Description of Artificial Sequence: Synthetic oligonucleotide
cacacggacagcauagauc

SEQ ID NO: 848782 - RNA, 19 nt, Artificial Sequence
  Description of Artificial Sequence: Synthetic oligonucleotide
guauggagagguucugagc

SEQ ID NO: 848783 - RNA, 19 nt, Artificial Sequence
  Description of Artificial Sequence: Synthetic oligonucleotide
gacgagagcaucuguuuca

SEQ ID NO: 848784 - RNA, 19 nt, Artificial Sequence
  Description of Artificial Sequence: Synthetic oligonucleotide
uuccaauucugguucucca

SEQ ID NO: 848785 - RNA, 19 nt, Artificial Sequence
  Description of Artificial Sequence: Synthetic oligonucleotide
uguauacaucggcauggac

SEQ ID NO: 848786 - RNA, 19 nt, Artificial Sequence
  Description of Artificial Sequence: Synthetic oligonucleotide
ucacugucccauuuaguaa

SEQ ID NO: 848787 - RNA, 19 nt, Artificial Sequence
  Description of Artificial Sequence: Synthetic oligonucleotide
uguguccuucugcuuaaga

SEQ ID NO: 848788 - RNA, 19 nt, Artificial Sequence
  Description of Artificial Sequence: Synthetic oligonucleotide
aaucgaggucaaagguccc

SEQ ID NO: 848789 - RNA, 19 nt, Artificial Sequence
  Description of Artificial Sequence: Synthetic oligonucleotide
caauuggucccgaaaauaa

SEQ ID NO: 848790 - RNA, 19 nt, Artificial Sequence
  Description of Artificial Sequence: Synthetic oligonucleotide
ucugaaacaugggauccac

SEQ ID NO: 848791 - RNA, 19 nt, Artificial Sequence
  Description of Artificial Sequence: Synthetic oligonucleotide
ucgagagguucuuccgagg

SEQ ID NO: 848792 - RNA, 19 nt, Artificial Sequence
  Description of Artificial Sequence: Synthetic oligonucleotide
uccuucgugagcccacuga

SEQ ID NO: 848793 - RNA, 19 nt, Artificial Sequence
  Description of Artificial Sequence: Synthetic oligonucleotide
uggcaauucgagagguucu

SEQ ID NO: 848794 - RNA, 19 nt, Artificial Sequence
  Description of Artificial Sequence: Synthetic oligonucleotide
ugaaggguggagagaaaua

SEQ ID NO: 848795 - RNA, 19 nt, Artificial Sequence
  Description of Artificial Sequence: Synthetic oligonucleotide
cuggcggucuuccacacac

SEQ ID NO: 848796 - RNA, 19 nt, Artificial Sequence
  Description of Artificial Sequence: Synthetic oligonucleotide
acaaccuaagucuggcaau

SEQ ID NO: 848797 - RNA, 19 nt, Artificial Sequence
  Description of Artificial Sequence: Synthetic oligonucleotide
uuaugccugguuugaggug

SEQ ID NO: 848798 - RNA, 19 nt, Artificial Sequence
  Description of Artificial Sequence: Synthetic oligonucleotide
uaaaucugucaugucuaca

SEQ ID NO: 848799 - RNA, 19 nt, Artificial Sequence
  Description of Artificial Sequence: Synthetic oligonucleotide
acggacagcauagaucuug

SEQ ID NO: 848800 - RNA, 19 nt, Artificial Sequence
  Description of Artificial Sequence: Synthetic oligonucleotide
agaagauguuugaccauuc

SEQ ID NO: 848801 - RNA, 19 nt, Artificial Sequence
  Description of Artificial Sequence: Synthetic oligonucleotide
uggaaaucugugggaagag

SEQ ID NO: 848802 - RNA, 19 nt, Artificial Sequence
  Description of Artificial Sequence: Synthetic oligonucleotide
uggugacuuuccaauucug

SEQ ID NO: 848803 - RNA, 19 nt, Artificial Sequence
  Description of Artificial Sequence: Synthetic oligonucleotide
acucguuauguguuucacu

SEQ ID NO: 848804 - RNA, 19 nt, Artificial Sequence
  Description of Artificial Sequence: Synthetic oligonucleotide
cauuaggauuguuguaauc

SEQ ID NO: 848805 - RNA, 19 nt, Artificial Sequence
  Description of Artificial Sequence: Synthetic oligonucleotide
gaugucuacuccuugguuu

SEQ ID NO: 848806 - RNA, 19 nt, Artificial Sequence
  Description of Artificial Sequence: Synthetic oligonucleotide
caaccagcaucucuccgcc

SEQ ID NO: 848807 - RNA, 19 nt, Artificial Sequence
  Description of Artificial Sequence: Synthetic oligonucleotide
ucuauaguccuggcaguga

SEQ ID NO: 848808 - RNA, 19 nt, Artificial Sequence
  Description of Artificial Sequence: Synthetic oligonucleotide
uaguggaaaucugugggaa

SEQ ID NO: 848809 - RNA, 19 nt, Artificial Sequence
  Description of Artificial Sequence: Synthetic oligonucleotide
gaggccgaaagaaccagug

SEQ ID NO: 848810 - RNA, 19 nt, Artificial Sequence
  Description of Artificial Sequence: Synthetic oligonucleotide
acucucuguaaguugugau

SEQ ID NO: 848811 - RNA, 19 nt, Artificial Sequence
  Description of Artificial Sequence: Synthetic oligonucleotide
aaccuuaugccugguuuga

SEQ ID NO: 848812 - RNA, 19 nt, Artificial Sequence
  Description of Artificial Sequence: Synthetic oligonucleotide
aagggaaaagcagcucgcu

SEQ ID NO: 848813 - RNA, 19 nt, Artificial Sequence
  Description of Artificial Sequence: Synthetic oligonucleotide
agcaucucuccgccgccgc

SEQ ID NO: 848814 - RNA, 19 nt, Artificial Sequence
  Description of Artificial Sequence: Synthetic oligonucleotide
guuauguguuucacugucc

SEQ ID NO: 848815 - RNA, 19 nt, Artificial Sequence
  Description of Artificial Sequence: Synthetic oligonucleotide
gguccggggacugaaauag

SEQ ID NO: 848816 - RNA, 19 nt, Artificial Sequence
  Description of Artificial Sequence: Synthetic oligonucleotide
uaagaaucucugacaugaa

SEQ ID NO: 848817 - RNA, 19 nt, Artificial Sequence
  Description of Artificial Sequence: Synthetic oligonucleotide
cuucgugagcccacugagc

SEQ ID NO: 848818 - RNA, 19 nt, Artificial Sequence
  Description of Artificial Sequence: Synthetic oligonucleotide
ucguuauguguuucacugu

SEQ ID NO: 848819 - RNA, 19 nt, Artificial Sequence
  Description of Artificial Sequence: Synthetic oligonucleotide
ugggauccaccucacacuu

SEQ ID NO: 848820 - RNA, 19 nt, Artificial Sequence
  Description of Artificial Sequence: Synthetic oligonucleotide
ugaugucuacuccuugguu

SEQ ID NO: 848821 - RNA, 19 nt, Artificial Sequence
  Description of Artificial Sequence: Synthetic oligonucleotide
cauugaugucaaauaccuc

SEQ ID NO: 848822 - RNA, 19 nt, Artificial Sequence
  Description of Artificial Sequence: Synthetic oligonucleotide
caggacaaaaguuggaggu

SEQ ID NO: 848823 - RNA, 19 nt, Artificial Sequence
  Description of Artificial Sequence: Synthetic oligonucleotide
gacgucuucuucuuuggcu

SEQ ID NO: 848824 - RNA, 19 nt, Artificial Sequence
  Description of Artificial Sequence: Synthetic oligonucleotide
cauagaucuuggugcuggc

SEQ ID NO: 848825 - RNA, 19 nt, Artificial Sequence
  Description of Artificial Sequence: Synthetic oligonucleotide
gcaagggugcuuuuaaauc

SEQ ID NO: 848826 - RNA, 19 nt, Artificial Sequence
  Description of Artificial Sequence: Synthetic oligonucleotide
agacucguuauguguuuca

SEQ ID NO: 848827 - RNA, 19 nt, Artificial Sequence
  Description of Artificial Sequence: Synthetic oligonucleotide
cacaaccagcaucucuccg

SEQ ID NO: 848828 - RNA, 19 nt, Artificial Sequence
  Description of Artificial Sequence: Synthetic oligonucleotide
guggaaaucugugggaaga

SEQ ID NO: 848829 - RNA, 19 nt, Artificial Sequence
  Description of Artificial Sequence: Synthetic oligonucleotide
cagcucgcuucuauagucc

SEQ ID NO: 848830 - RNA, 19 nt, Artificial Sequence
  Description of Artificial Sequence: Synthetic oligonucleotide
cuuaugccugguuugaggu

SEQ ID NO: 848831 - RNA, 19 nt, Artificial Sequence
  Description of Artificial Sequence: Synthetic oligonucleotide
agcauccacacggacagca

SEQ ID NO: 848832 - RNA, 19 nt, Artificial Sequence
  Description of Artificial Sequence: Synthetic oligonucleotide
cuggaccuggcagagcucc

SEQ ID NO: 848833 - RNA, 19 nt, Artificial Sequence
  Description of Artificial Sequence: Synthetic oligonucleotide
uggacgagagcaucuguuu

SEQ ID NO: 848834 - RNA, 19 nt, Artificial Sequence
  Description of Artificial Sequence: Synthetic oligonucleotide
ugcugucuuuggaucagaa

SEQ ID NO: 848835 - RNA, 19 nt, Artificial Sequence
  Description of Artificial Sequence: Synthetic oligonucleotide
cacaaccuaagucuggcaa

SEQ ID NO: 848836 - RNA, 19 nt, Artificial Sequence
  Description of Artificial Sequence: Synthetic oligonucleotide
agcagcucgcuucuauagu

SEQ ID NO: 848837 - RNA, 19 nt, Artificial Sequence
  Description of Artificial Sequence: Synthetic oligonucleotide
guaaccuuaugccugguuu

SEQ ID NO: 848838 - RNA, 19 nt, Artificial Sequence
  Description of Artificial Sequence: Synthetic oligonucleotide
ucccugagggaaacaauuu

SEQ ID NO: 848839 - RNA, 19 nt, Artificial Sequence
  Description of Artificial Sequence: Synthetic oligonucleotide
cagcccuccaagaacucug

SEQ ID NO: 848840 - RNA, 19 nt, Artificial Sequence
  Description of Artificial Sequence: Synthetic oligonucleotide
gacucguuauguguuucac

SEQ ID NO: 848841 - RNA, 19 nt, Artificial Sequence
  Description of Artificial Sequence: Synthetic oligonucleotide
agcucgcuucuauaguccu

SEQ ID NO: 848842 - RNA, 19 nt, Artificial Sequence
  Description of Artificial Sequence: Synthetic oligonucleotide
ucgaggccgaaagaaccag

SEQ ID NO: 848843 - RNA, 19 nt, Artificial Sequence
  Description of Artificial Sequence: Synthetic oligonucleotide
guuuaccucugugucaguc

SEQ ID NO: 848844 - RNA, 19 nt, Artificial Sequence
  Description of Artificial Sequence: Synthetic oligonucleotide
ugguccuggcccaucuuaa

SEQ ID NO: 848845 - RNA, 19 nt, Artificial Sequence
  Description of Artificial Sequence: Synthetic oligonucleotide
ggaacccggccagagaagg

SEQ ID NO: 848846 - RNA, 19 nt, Artificial Sequence
  Description of Artificial Sequence: Synthetic oligonucleotide
ugcucuggaccuggcagag

SEQ ID NO: 848847 - RNA, 19 nt, Artificial Sequence
  Description of Artificial Sequence: Synthetic oligonucleotide
ccgaaaauaugcaucaaaa

SEQ ID NO: 848848 - RNA, 19 nt, Artificial Sequence
  Description of Artificial Sequence: Synthetic oligonucleotide
agcuggcggucuuccacac

SEQ ID NO: 848849 - RNA, 19 nt, Artificial Sequence
  Description of Artificial Sequence: Synthetic oligonucleotide
ggucgaggccgaaagaacc

SEQ ID NO: 848850 - RNA, 19 nt, Artificial Sequence
  Description of Artificial Sequence: Synthetic oligonucleotide
uugggucgaggccgaaaga

SEQ ID NO: 848851 - RNA, 19 nt, Artificial Sequence
  Description of Artificial Sequence: Synthetic oligonucleotide
aguaaccuuaugccugguu

SEQ ID NO: 848852 - RNA, 19 nt, Artificial Sequence
  Description of Artificial Sequence: Synthetic oligonucleotide
cuguaccaaggcucucugc

SEQ ID NO: 848853 - RNA, 19 nt, Artificial Sequence
  Description of Artificial Sequence: Synthetic oligonucleotide
gcagucuuggcauaaugaa

SEQ ID NO: 848854 - RNA, 19 nt, Artificial Sequence
  Description of Artificial Sequence: Synthetic oligonucleotide
guuugaccauucuccugug

SEQ ID NO: 848855 - RNA, 19 nt, Artificial Sequence
  Description of Artificial Sequence: Synthetic oligonucleotide
augguccggggacugaaau

SEQ ID NO: 848856 - RNA, 19 nt, Artificial Sequence
  Description of Artificial Sequence: Synthetic oligonucleotide
acagacucguuauguguuu

SEQ ID NO: 848857 - RNA, 19 nt, Artificial Sequence
  Description of Artificial Sequence: Synthetic oligonucleotide
agggguauggagagguucu

SEQ ID NO: 848858 - RNA, 19 nt, Artificial Sequence
  Description of Artificial Sequence: Synthetic oligonucleotide
cagacuccacauguucugc

SEQ ID NO: 848859 - RNA, 19 nt, Artificial Sequence
  Description of Artificial Sequence: Synthetic oligonucleotide
uaggaguauucuccagguu

SEQ ID NO: 848860 - RNA, 19 nt, Artificial Sequence
  Description of Artificial Sequence: Synthetic oligonucleotide
cugugcugcacucaucaaa

SEQ ID NO: 848861 - RNA, 19 nt, Artificial Sequence
  Description of Artificial Sequence: Synthetic oligonucleotide
ugcaggacgucuucuucuu

SEQ ID NO: 848862 - RNA, 19 nt, Artificial Sequence
  Description of Artificial Sequence: Synthetic oligonucleotide
ggugccagcagccacuuua

SEQ ID NO: 848863 - RNA, 19 nt, Artificial Sequence
  Description of Artificial Sequence: Synthetic oligonucleotide
acuuccgaucugcuucaga

SEQ ID NO: 848864 - RNA, 19 nt, Artificial Sequence
  Description of Artificial Sequence: Synthetic oligonucleotide
gaacccggccagagaaggg

SEQ ID NO: 848865 - RNA, 19 nt, Artificial Sequence
  Description of Artificial Sequence: Synthetic oligonucleotide
ucggcauggacagcaucca

SEQ ID NO: 848866 - RNA, 19 nt, Artificial Sequence
  Description of Artificial Sequence: Synthetic oligonucleotide
aggagagagucugcauguc

SEQ ID NO: 848867 - RNA, 19 nt, Artificial Sequence
  Description of Artificial Sequence: Synthetic oligonucleotide
gagcuggcggucuuccaca

SEQ ID NO: 848868 - RNA, 19 nt, Artificial Sequence
  Description of Artificial Sequence: Synthetic oligonucleotide
agcacaugguuuggauguc

SEQ ID NO: 848869 - RNA, 19 nt, Artificial Sequence
  Description of Artificial Sequence: Synthetic oligonucleotide
uggagcuggacgagagcau

SEQ ID NO: 848870 - RNA, 19 nt, Artificial Sequence
  Description of Artificial Sequence: Synthetic oligonucleotide
cagaaucgaggucaaaggu

SEQ ID NO: 848871 - RNA, 19 nt, Artificial Sequence
  Description of Artificial Sequence: Synthetic oligonucleotide
ucgaggucaaaggucccaa

SEQ ID NO: 848872 - RNA, 19 nt, Artificial Sequence
  Description of Artificial Sequence: Synthetic oligonucleotide
gcagcucgcuucuauaguc

SEQ ID NO: 848873 - RNA, 19 nt, Artificial Sequence
  Description of Artificial Sequence: Synthetic oligonucleotide
gaaauaccccggcugugcu

SEQ ID NO: 848874 - RNA, 19 nt, Artificial Sequence
  Description of Artificial Sequence: Synthetic oligonucleotide
auacaucggcauggacagc

SEQ ID NO: 848875 - RNA, 19 nt, Artificial Sequence
  Description of Artificial Sequence: Synthetic oligonucleotide
ccuucgugagcccacugag

SEQ ID NO: 848876 - RNA, 19 nt, Artificial Sequence
  Description of Artificial Sequence: Synthetic oligonucleotide
ggaguauucuccagguuuc

SEQ ID NO: 848877 - RNA, 19 nt, Artificial Sequence
  Description of Artificial Sequence: Synthetic oligonucleotide
ucaugguccggggacugaa

SEQ ID NO: 848878 - RNA, 19 nt, Artificial Sequence
  Description of Artificial Sequence: Synthetic oligonucleotide
caggcaaaagccaggggua

SEQ ID NO: 848879 - RNA, 19 nt, Artificial Sequence
  Description of Artificial Sequence: Synthetic oligonucleotide
caauuuccucauagugcuc

SEQ ID NO: 848880 - RNA, 19 nt, Artificial Sequence
  Description of Artificial Sequence: Synthetic oligonucleotide
cguuauguguuucacuguc

SEQ ID NO: 848881 - RNA, 19 nt, Artificial Sequence
  Description of Artificial Sequence: Synthetic oligonucleotide
ggcggucuuccacacacug

SEQ ID NO: 848882 - RNA, 19 nt, Artificial Sequence
  Description of Artificial Sequence: Synthetic oligonucleotide
aguauucuccagguuucau

SEQ ID NO: 848883 - RNA, 19 nt, Artificial Sequence
  Description of Artificial Sequence: Synthetic oligonucleotide
ugguccggggacugaaaua

SEQ ID NO: 848884 - RNA, 19 nt, Artificial Sequence
  Description of Artificial Sequence: Synthetic oligonucleotide
aggacaaaaguuggaggua

SEQ ID NO: 848885 - RNA, 19 nt, Artificial Sequence
  Description of Artificial Sequence: Synthetic oligonucleotide
ggacgagagcaucuguuuc

SEQ ID NO: 848886 - RNA, 19 nt, Artificial Sequence
  Description of Artificial Sequence: Synthetic oligonucleotide
ccuaagucuggcaauucga

SEQ ID NO: 848887 - RNA, 19 nt, Artificial Sequence
  Description of Artificial Sequence: Synthetic oligonucleotide
cugugggucucccacugca

SEQ ID NO: 848888 - RNA, 19 nt, Artificial Sequence
  Description of Artificial Sequence: Synthetic oligonucleotide
uugcuugggucgaggccga

SEQ ID NO: 848889 - RNA, 19 nt, Artificial Sequence
  Description of Artificial Sequence: Synthetic oligonucleotide
ucgcuucuauaguccuggc

SEQ ID NO: 848890 - RNA, 19 nt, Artificial Sequence
  Description of Artificial Sequence: Synthetic oligonucleotide
cuccugucuagaaaacucu

SEQ ID NO: 848891 - RNA, 19 nt, Artificial Sequence
  Description of Artificial Sequence: Synthetic oligonucleotide
uuccgaaaauaugcaucaa

SEQ ID NO: 848892 - RNA, 19 nt, Artificial Sequence
  Description of Artificial Sequence: Synthetic oligonucleotide
ccagguuucauggauaaaa

SEQ ID NO: 848893 - RNA, 19 nt, Artificial Sequence
  Description of Artificial Sequence: Synthetic oligonucleotide
ucuccgccgccgcuggaac

SEQ ID NO: 848894 - RNA, 19 nt, Artificial Sequence
  Description of Artificial Sequence: Synthetic oligonucleotide
gucuuuggaucagaaucga

SEQ ID NO: 848895 - RNA, 19 nt, Artificial Sequence
  Description of Artificial Sequence: Synthetic oligonucleotide
gaguauucuccagguuuca

SEQ ID NO: 848896 - RNA, 19 nt, Artificial Sequence
  Description of Artificial Sequence: Synthetic oligonucleotide
cagugaucugggccagccc

SEQ ID NO: 848897 - RNA, 19 nt, Artificial Sequence
  Description of Artificial Sequence: Synthetic oligonucleotide
agcuggacgagagcaucug

SEQ ID NO: 848898 - RNA, 19 nt, Artificial Sequence
  Description of Artificial Sequence: Synthetic oligonucleotide
agguccuucgugagcccac

SEQ ID NO: 848899 - RNA, 19 nt, Artificial Sequence
  Description of Artificial Sequence: Synthetic oligonucleotide
ucuggaccuggcagagcuc

SEQ ID NO: 848900 - RNA, 19 nt, Artificial Sequence
  Description of Artificial Sequence: Synthetic oligonucleotide
gucccgaaaauaagucuga

SEQ ID NO: 848901 - RNA, 19 nt, Artificial Sequence
  Description of Artificial Sequence: Synthetic oligonucleotide
gucccaauuggucccgaaa

SEQ ID NO: 848902 - RNA, 19 nt, Artificial Sequence
  Description of Artificial Sequence: Synthetic oligonucleotide
gcagccuuuguuuuccgaa

SEQ ID NO: 848903 - RNA, 19 nt, Artificial Sequence
  Description of Artificial Sequence: Synthetic oligonucleotide
caucggcauggacagcauc

SEQ ID NO: 848904 - RNA, 19 nt, Artificial Sequence
  Description of Artificial Sequence: Synthetic oligonucleotide
aaguaaccuuaugccuggu

SEQ ID NO: 848905 - RNA, 19 nt, Artificial Sequence
  Description of Artificial Sequence: Synthetic oligonucleotide
gguccuggcccaucuuaag

SEQ ID NO: 848906 - RNA, 19 nt, Artificial Sequence
  Description of Artificial Sequence: Synthetic oligonucleotide
cagacucguuauguguuuc

SEQ ID NO: 848907 - RNA, 19 nt, Artificial Sequence
  Description of Artificial Sequence: Synthetic oligonucleotide
cuucuauaguccuggcagu

SEQ ID NO: 848908 - RNA, 19 nt, Artificial Sequence
  Description of Artificial Sequence: Synthetic oligonucleotide
uugguuguuccugguucaa

SEQ ID NO: 848909 - RNA, 19 nt, Artificial Sequence
  Description of Artificial Sequence: Synthetic oligonucleotide
gucgaggccgaaagaacca

SEQ ID NO: 848910 - RNA, 19 nt, Artificial Sequence
  Description of Artificial Sequence: Synthetic oligonucleotide
ccggggacugaaauaggag

SEQ ID NO: 848911 - RNA, 19 nt, Artificial Sequence
  Description of Artificial Sequence: Synthetic oligonucleotide
gacagacucguuauguguu

SEQ ID NO: 848912 - RNA, 19 nt, Artificial Sequence
  Description of Artificial Sequence: Synthetic oligonucleotide
acgagagcaucuguuucau

SEQ ID NO: 848913 - RNA, 19 nt, Artificial Sequence
  Description of Artificial Sequence: Synthetic oligonucleotide
gcugcaagggugcuuuuaa

SEQ ID NO: 848914 - RNA, 19 nt, Artificial Sequence
  Description of Artificial Sequence: Synthetic oligonucleotide
caaccucagcauugauguc

SEQ ID NO: 848915 - RNA, 19 nt, Artificial Sequence
  Description of Artificial Sequence: Synthetic oligonucleotide
cagucuuggcauaaugaau

SEQ ID NO: 848916 - RNA, 19 nt, Artificial Sequence
  Description of Artificial Sequence: Synthetic oligonucleotide
ucgugagcccacugagcau

SEQ ID NO: 848917 - RNA, 19 nt, Artificial Sequence
  Description of Artificial Sequence: Synthetic oligonucleotide
ugcugcaagggugcuuuua

SEQ ID NO: 848918 - RNA, 19 nt, Artificial Sequence
  Description of Artificial Sequence: Synthetic oligonucleotide
gucuacuccuugguuuuca

SEQ ID NO: 848919 - RNA, 19 nt, Artificial Sequence
  Description of Artificial Sequence: Synthetic oligonucleotide
caccucacacuuccgaucu

SEQ ID NO: 848920 - RNA, 19 nt, Artificial Sequence
  Description of Artificial Sequence: Synthetic oligonucleotide
gugaaggguggagagaaau

SEQ ID NO: 848921 - RNA, 19 nt, Artificial Sequence
  Description of Artificial Sequence: Synthetic oligonucleotide
cauccacacggacagcaua

SEQ ID NO: 848922 - RNA, 19 nt, Artificial Sequence
  Description of Artificial Sequence: Synthetic oligonucleotide
uggcggucuuccacacacu

SEQ ID NO: 848923 - RNA, 19 nt, Artificial Sequence
  Description of Artificial Sequence: Synthetic oligonucleotide
guccggggacugaaauagg

SEQ ID NO: 848924 - RNA, 19 nt, Artificial Sequence
  Description of Artificial Sequence: Synthetic oligonucleotide
gagguggagcuggacgaga

SEQ ID NO: 848925 - RNA, 19 nt, Artificial Sequence
  Description of Artificial Sequence: Synthetic oligonucleotide
ggggacugaaauaggagua

SEQ ID NO: 848926 - RNA, 19 nt, Artificial Sequence
  Description of Artificial Sequence: Synthetic oligonucleotide
ccugguucaacagcacuuc

SEQ ID NO: 848927 - RNA, 19 nt, Artificial Sequence
  Description of Artificial Sequence: Synthetic oligonucleotide
ccuugcaucacaagaacau

SEQ ID NO: 848928 - RNA, 19 nt, Artificial Sequence
  Description of Artificial Sequence: Synthetic oligonucleotide
guccaggacaaaaguugga

SEQ ID NO: 848929 - RNA, 19 nt, Artificial Sequence
  Description of Artificial Sequence: Synthetic oligonucleotide
ggagagaaauaccccggcu

SEQ ID NO: 848930 - RNA, 19 nt, Artificial Sequence
  Description of Artificial Sequence: Synthetic oligonucleotide
gcagccaucucgaguggcc

SEQ ID NO: 848931 - RNA, 19 nt, Artificial Sequence
  Description of Artificial Sequence: Synthetic oligonucleotide
gaguggugacuuuccaauu

SEQ ID NO: 848932 - RNA, 19 nt, Artificial Sequence
  Description of Artificial Sequence: Synthetic oligonucleotide
ggaucuuugcccagcccuc

SEQ ID NO: 848933 - RNA, 19 nt, Artificial Sequence
  Description of Artificial Sequence: Synthetic oligonucleotide
gccugguuugagguggagc

SEQ ID NO: 848934 - RNA, 19 nt, Artificial Sequence
  Description of Artificial Sequence: Synthetic oligonucleotide
guuuugcaggacgucuucu

SEQ ID NO: 848935 - RNA, 19 nt, Artificial Sequence
  Description of Artificial Sequence: Synthetic oligonucleotide
caaaagccagggguaugga

SEQ ID NO: 848936 - RNA, 19 nt, Artificial Sequence
  Description of Artificial Sequence: Synthetic oligonucleotide
gaucagaaucgaggucaaa

SEQ ID NO: 848937 - RNA, 19 nt, Artificial Sequence
  Description of Artificial Sequence: Synthetic oligonucleotide
cagaagauguuugaccauu

SEQ ID NO: 848938 - RNA, 19 nt, Artificial Sequence
  Description of Artificial Sequence: Synthetic oligonucleotide
gucuggcaauucgagaggu

SEQ ID NO: 848939 - RNA, 19 nt, Artificial Sequence
  Description of Artificial Sequence: Synthetic oligonucleotide
gggucgaggccgaaagaac

SEQ ID NO: 848940 - RNA, 19 nt, Artificial Sequence
  Description of Artificial Sequence: Synthetic oligonucleotide
cucacacuuccgaucugcu

SEQ ID NO: 848941 - RNA, 19 nt, Artificial Sequence
  Description of Artificial Sequence: Synthetic oligonucleotide
agugaaggguggagagaaa

SEQ ID NO: 848942 - RNA, 19 nt, Artificial Sequence
  Description of Artificial Sequence: Synthetic oligonucleotide
caugguccggggacugaaa

SEQ ID NO: 848943 - RNA, 19 nt, Artificial Sequence
  Description of Artificial Sequence: Synthetic oligonucleotide
ugguugguucuguguccuu

SEQ ID NO: 848944 - RNA, 19 nt, Artificial Sequence
  Description of Artificial Sequence: Synthetic oligonucleotide
ccgaaagaaccagugaucu

SEQ ID NO: 848945 - RNA, 19 nt, Artificial Sequence
  Description of Artificial Sequence: Synthetic oligonucleotide
gcggucuuccacacacugc

SEQ ID NO: 848946 - RNA, 19 nt, Artificial Sequence
  Description of Artificial Sequence: Synthetic oligonucleotide
agguaucauuaggauuguu

SEQ ID NO: 848947 - RNA, 19 nt, Artificial Sequence
  Description of Artificial Sequence: Synthetic oligonucleotide
guaccaaggcucucugcuu

SEQ ID NO: 848948 - RNA, 19 nt, Artificial Sequence
  Description of Artificial Sequence: Synthetic oligonucleotide
ccaauuggucccgaaaaua

SEQ ID NO: 848949 - RNA, 19 nt, Artificial Sequence
  Description of Artificial Sequence: Synthetic oligonucleotide
guguuucacugucccauuu

SEQ ID NO: 848950 - RNA, 19 nt, Artificial Sequence
  Description of Artificial Sequence: Synthetic oligonucleotide
gagcuggacgagagcaucu

SEQ ID NO: 848951 - RNA, 19 nt, Artificial Sequence
  Description of Artificial Sequence: Synthetic oligonucleotide
cgugagcccacugagcauc

SEQ ID NO: 848952 - RNA, 19 nt, Artificial Sequence
  Description of Artificial Sequence: Synthetic oligonucleotide
cgagagguucuuccgagga

SEQ ID NO: 848953 - RNA, 19 nt, Artificial Sequence
  Description of Artificial Sequence: Synthetic oligonucleotide
gaggcucagccaccaaguu

SEQ ID NO: 848954 - RNA, 19 nt, Artificial Sequence
  Description of Artificial Sequence: Synthetic oligonucleotide
cccgaaaauaagucugacu

SEQ ID NO: 848955 - RNA, 19 nt, Artificial Sequence
  Description of Artificial Sequence: Synthetic oligonucleotide
caaccuaagucuggcaauu

SEQ ID NO: 848956 - RNA, 19 nt, Artificial Sequence
  Description of Artificial Sequence: Synthetic oligonucleotide
cagguccuucgugagccca

SEQ ID NO: 848957 - RNA, 19 nt, Artificial Sequence
  Description of Artificial Sequence: Synthetic oligonucleotide
cacuuccgaucugcuucag

SEQ ID NO: 848958 - RNA, 19 nt, Artificial Sequence
  Description of Artificial Sequence: Synthetic oligonucleotide
cagcccacaucuucauggu

SEQ ID NO: 848959 - RNA, 19 nt, Artificial Sequence
  Description of Artificial Sequence: Synthetic oligonucleotide
acaucggcauggacagcau

SEQ ID NO: 848960 - RNA, 19 nt, Artificial Sequence
  Description of Artificial Sequence: Synthetic oligonucleotide
gccaucucgaguggccuca

SEQ ID NO: 848961 - RNA, 19 nt, Artificial Sequence
  Description of Artificial Sequence: Synthetic oligonucleotide
auaccccggcugugcugca

SEQ ID NO: 848962 - RNA, 19 nt, Artificial Sequence
  Description of Artificial Sequence: Synthetic oligonucleotide
uaccccggcugugcugcac

SEQ ID NO: 848963 - RNA, 19 nt, Artificial Sequence
  Description of Artificial Sequence: Synthetic oligonucleotide
gucagagugguggcagccu

SEQ ID NO: 848964 - RNA, 19 nt, Artificial Sequence
  Description of Artificial Sequence: Synthetic oligonucleotide
gugcugucuuuggaucaga

SEQ ID NO: 848965 - RNA, 19 nt, Artificial Sequence
  Description of Artificial Sequence: Synthetic oligonucleotide
ggaucagaaucgaggucaa

SEQ ID NO: 848966 - RNA, 19 nt, Artificial Sequence
  Description of Artificial Sequence: Synthetic oligonucleotide
cugugccuucuagcuucag

SEQ ID NO: 848967 - RNA, 19 nt, Artificial Sequence
  Description of Artificial Sequence: Synthetic oligonucleotide
cuccgccgccgcuggaaca

SEQ ID NO: 848968 - RNA, 19 nt, Artificial Sequence
  Description of Artificial Sequence: Synthetic oligonucleotide
ggucccaauuggucccgaa

SEQ ID NO: 848969 - RNA, 19 nt, Artificial Sequence
  Description of Artificial Sequence: Synthetic oligonucleotide
ggcccaucuuaaguaaccu

SEQ ID NO: 848970 - RNA, 19 nt, Artificial Sequence
  Description of Artificial Sequence: Synthetic oligonucleotide
gcuggacgagagcaucugu

SEQ ID NO: 848971 - RNA, 19 nt, Artificial Sequence
  Description of Artificial Sequence: Synthetic oligonucleotide
cucuccgccgccgcuggaa

SEQ ID NO: 848972 - RNA, 19 nt, Artificial Sequence
  Description of Artificial Sequence: Synthetic oligonucleotide
ugcuugggucgaggccgaa

SEQ ID NO: 848973 - RNA, 19 nt, Artificial Sequence
  Description of Artificial Sequence: Synthetic oligonucleotide
ggcaauucgagagguucuu

SEQ ID NO: 848974 - RNA, 19 nt, Artificial Sequence
  Description of Artificial Sequence: Synthetic oligonucleotide
gcuggcggucuuccacaca

SEQ ID NO: 848975 - RNA, 19 nt, Artificial Sequence
  Description of Artificial Sequence: Synthetic oligonucleotide
gggauccaccucacacuuc

SEQ ID NO: 848976 - RNA, 19 nt, Artificial Sequence
  Description of Artificial Sequence: Synthetic oligonucleotide
cccaauuggucccgaaaau

SEQ ID NO: 848977 - RNA, 19 nt, Artificial Sequence
  Description of Artificial Sequence: Synthetic oligonucleotide
gcucuggaccuggcagagc

SEQ ID NO: 848978 - RNA, 19 nt, Artificial Sequence
  Description of Artificial Sequence: Synthetic oligonucleotide
gugagcccacugagcaucu

SEQ ID NO: 848979 - RNA, 19 nt, Artificial Sequence
  Description of Artificial Sequence: Synthetic oligonucleotide
caucucgaguggccucagu

SEQ ID NO: 848980 - RNA, 19 nt, Artificial Sequence
  Description of Artificial Sequence: Synthetic oligonucleotide
gguuuaccucugugucagu

SEQ ID NO: 848981 - RNA, 19 nt, Artificial Sequence
  Description of Artificial Sequence: Synthetic oligonucleotide
cacggacagcauagaucuu

SEQ ID NO: 848982 - RNA, 19 nt, Artificial Sequence
  Description of Artificial Sequence: Synthetic oligonucleotide
gcaggacgucuucuucuuu

SEQ ID NO: 848983 - RNA, 19 nt, Artificial Sequence
  Description of Artificial Sequence: Synthetic oligonucleotide
cgccgccgcuggaacacug

SEQ ID NO: 848984 - RNA, 19 nt, Artificial Sequence
  Description of Artificial Sequence: Synthetic oligonucleotide
cgaggccgaaagaaccagu

SEQ ID NO: 848985 - RNA, 19 nt, Artificial Sequence
  Description of Artificial Sequence: Synthetic oligonucleotide
cccggcugugcugcacuca

SEQ ID NO: 848986 - RNA, 19 nt, Artificial Sequence
  Description of Artificial Sequence: Synthetic oligonucleotide
ccgcuggaacacugugggu

SEQ ID NO: 848987 - RNA, 19 nt, Artificial Sequence
  Description of Artificial Sequence: Synthetic oligonucleotide
ccgccgccgcuggaacacu

SEQ ID NO: 848988 - RNA, 19 nt, Artificial Sequence
  Description of Artificial Sequence: Synthetic oligonucleotide
acuguaacaauuuauuuac

SEQ ID NO: 848989 - RNA, 19 nt, Artificial Sequence
  Description of Artificial Sequence: Synthetic oligonucleotide
uuugauaugagguacaaac

SEQ ID NO: 848990 - RNA, 19 nt, Artificial Sequence
  Description of Artificial Sequence: Synthetic oligonucleotide
agaccaaucaaugugaccc

SEQ ID NO: 848991 - RNA, 19 nt, Artificial Sequence
  Description of Artificial Sequence: Synthetic oligonucleotide
uuaaugaaggacuucauga

SEQ ID NO: 848992 - RNA, 19 nt, Artificial Sequence
  Description of Artificial Sequence: Synthetic oligonucleotide
aacaggagacugcacaucc

SEQ ID NO: 848993 - RNA, 19 nt, Artificial Sequence
  Description of Artificial Sequence: Synthetic oligonucleotide
ugauaugagguacaaacag

SEQ ID NO: 848994 - RNA, 19 nt, Artificial Sequence
  Description of Artificial Sequence: Synthetic oligonucleotide
uguuggagcaacuugagcc

SEQ ID NO: 848995 - RNA, 19 nt, Artificial Sequence
  Description of Artificial Sequence: Synthetic oligonucleotide
uggcauaucagacagaaga

SEQ ID NO: 848996 - RNA, 19 nt, Artificial Sequence
  Description of Artificial Sequence: Synthetic oligonucleotide
aucaaugugacccuaguuc

SEQ ID NO: 848997 - RNA, 19 nt, Artificial Sequence
  Description of Artificial Sequence: Synthetic oligonucleotide
uguaacaauuuauuuacag

SEQ ID NO: 848998 - RNA, 19 nt, Artificial Sequence
  Description of Artificial Sequence: Synthetic oligonucleotide
aaguuguuccuucuguagc

SEQ ID NO: 848999 - RNA, 19 nt, Artificial Sequence
  Description of Artificial Sequence: Synthetic oligonucleotide
uuacguuuaaugaaggacu

SEQ ID NO: 849000 - RNA, 19 nt, Artificial Sequence
  Description of Artificial Sequence: Synthetic oligonucleotide
aacuaaaaguauucaacug

SEQ ID NO: 849001 - RNA, 19 nt, Artificial Sequence
  Description of Artificial Sequence: Synthetic oligonucleotide
acuaaaaguauucaacuga

SEQ ID NO: 849002 - RNA, 19 nt, Artificial Sequence
  Description of Artificial Sequence: Synthetic oligonucleotide
ugcaagaaaguccggaggg

SEQ ID NO: 849003 - RNA, 19 nt, Artificial Sequence
  Description of Artificial Sequence: Synthetic oligonucleotide
cagaguacuaccuacagac

SEQ ID NO: 849004 - RNA, 19 nt, Artificial Sequence
  Description of Artificial Sequence: Synthetic oligonucleotide
aagcagaggauauugauau

SEQ ID NO: 849005 - RNA, 19 nt, Artificial Sequence
  Description of Artificial Sequence: Synthetic oligonucleotide
aacuguaacaauuuauuua

SEQ ID NO: 849006 - RNA, 19 nt, Artificial Sequence
  Description of Artificial Sequence: Synthetic oligonucleotide
agcaacuugagccugcgcg

SEQ ID NO: 849007 - RNA, 19 nt, Artificial Sequence
  Description of Artificial Sequence: Synthetic oligonucleotide
uuaaagauguccuccaagu

SEQ ID NO: 849008 - RNA, 19 nt, Artificial Sequence
  Description of Artificial Sequence: Synthetic oligonucleotide
guacuaaucacaaucuugg

SEQ ID NO: 849009 - RNA, 19 nt, Artificial Sequence
  Description of Artificial Sequence: Synthetic oligonucleotide
gauauugauauccaccuga

SEQ ID NO: 849010 - RNA, 19 nt, Artificial Sequence
  Description of Artificial Sequence: Synthetic oligonucleotide
uauucaacugaacuguaac

SEQ ID NO: 849011 - RNA, 19 nt, Artificial Sequence
  Description of Artificial Sequence: Synthetic oligonucleotide
aggcguacuaaucacaauc

SEQ ID NO: 849012 - RNA, 19 nt, Artificial Sequence
  Description of Artificial Sequence: Synthetic oligonucleotide
gacuucaugacacugcuac

SEQ ID NO: 849013 - RNA, 19 nt, Artificial Sequence
  Description of Artificial Sequence: Synthetic oligonucleotide
aaugaaggacuucaugaca

SEQ ID NO: 849014 - RNA, 19 nt, Artificial Sequence
  Description of Artificial Sequence: Synthetic oligonucleotide
uuuacagaguacuaccuac

SEQ ID NO: 849015 - RNA, 19 nt, Artificial Sequence
  Description of Artificial Sequence: Synthetic oligonucleotide
gacagacacacauaggccc

SEQ ID NO: 849016 - RNA, 19 nt, Artificial Sequence
  Description of Artificial Sequence: Synthetic oligonucleotide
aagcagcagagcuagugcg

SEQ ID NO: 849017 - RNA, 19 nt, Artificial Sequence
  Description of Artificial Sequence: Synthetic oligonucleotide
gauaugagguacaaacagg

SEQ ID NO: 849018 - RNA, 19 nt, Artificial Sequence
  Description of Artificial Sequence: Synthetic oligonucleotide
ucgauagccacccaccaag

SEQ ID NO: 849019 - RNA, 19 nt, Artificial Sequence
  Description of Artificial Sequence: Synthetic oligonucleotide
accagcccaacacagaaac

SEQ ID NO: 849020 - RNA, 19 nt, Artificial Sequence
  Description of Artificial Sequence: Synthetic oligonucleotide
ggucguaccaccuuguugg

SEQ ID NO: 849021 - RNA, 19 nt, Artificial Sequence
  Description of Artificial Sequence: Synthetic oligonucleotide
uacgggaagccaaaguagg

SEQ ID NO: 849022 - RNA, 19 nt, Artificial Sequence
  Description of Artificial Sequence: Synthetic oligonucleotide
aagguaggcguacuaauca

SEQ ID NO: 849023 - RNA, 19 nt, Artificial Sequence
  Description of Artificial Sequence: Synthetic oligonucleotide
ucaaugugacccuaguucu

SEQ ID NO: 849024 - RNA, 19 nt, Artificial Sequence
  Description of Artificial Sequence: Synthetic oligonucleotide
uaguuaucugugcugaucu

SEQ ID NO: 849025 - RNA, 19 nt, Artificial Sequence
  Description of Artificial Sequence: Synthetic oligonucleotide
uacagaccaaucaauguga

SEQ ID NO: 849026 - RNA, 19 nt, Artificial Sequence
  Description of Artificial Sequence: Synthetic oligonucleotide
uauuuacagaguacuaccu

SEQ ID NO: 849027 - RNA, 19 nt, Artificial Sequence
  Description of Artificial Sequence: Synthetic oligonucleotide
uuuagaggcggugaguucc

SEQ ID NO: 849028 - RNA, 19 nt, Artificial Sequence
  Description of Artificial Sequence: Synthetic oligonucleotide
acuaccuacagaccaauca

SEQ ID NO: 849029 - RNA, 19 nt, Artificial Sequence
  Description of Artificial Sequence: Synthetic oligonucleotide
agagcuagugcgcuugugg

SEQ ID NO: 849030 - RNA, 19 nt, Artificial Sequence
  Description of Artificial Sequence: Synthetic oligonucleotide
agaaacuaaaaguauucaa

SEQ ID NO: 849031 - RNA, 19 nt, Artificial Sequence
  Description of Artificial Sequence: Synthetic oligonucleotide
aguuccaagcagcagagcu

SEQ ID NO: 849032 - RNA, 19 nt, Artificial Sequence
  Description of Artificial Sequence: Synthetic oligonucleotide
ucacgcuucagcuucaccu

SEQ ID NO: 849033 - RNA, 19 nt, Artificial Sequence
  Description of Artificial Sequence: Synthetic oligonucleotide
aguguuacguuuaaugaag

SEQ ID NO: 849034 - RNA, 19 nt, Artificial Sequence
  Description of Artificial Sequence: Synthetic oligonucleotide
uacagaguacuaccuacag

SEQ ID NO: 849035 - RNA, 19 nt, Artificial Sequence
  Description of Artificial Sequence: Synthetic oligonucleotide
uucaagaccuugcuggcug

SEQ ID NO: 849036 - RNA, 19 nt, Artificial Sequence
  Description of Artificial Sequence: Synthetic oligonucleotide
cuacagaccaaucaaugug

SEQ ID NO: 849037 - RNA, 19 nt, Artificial Sequence
  Description of Artificial Sequence: Synthetic oligonucleotide
augaaggacuucaugacac

SEQ ID NO: 849038 - RNA, 19 nt, Artificial Sequence
  Description of Artificial Sequence: Synthetic oligonucleotide
uucaugacacugcuacggg

SEQ ID NO: 849039 - RNA, 19 nt, Artificial Sequence
  Description of Artificial Sequence: Synthetic oligonucleotide
ugaguuccaagcagcagag

SEQ ID NO: 849040 - RNA, 19 nt, Artificial Sequence
  Description of Artificial Sequence: Synthetic oligonucleotide
uguggagucauuugauaug

SEQ ID NO: 849041 - RNA, 19 nt, Artificial Sequence
  Description of Artificial Sequence: Synthetic oligonucleotide
guuacguuuaaugaaggac

SEQ ID NO: 849042 - RNA, 19 nt, Artificial Sequence
  Description of Artificial Sequence: Synthetic oligonucleotide
cuucaugacacugcuacgg

SEQ ID NO: 849043 - RNA, 19 nt, Artificial Sequence
  Description of Artificial Sequence: Synthetic oligonucleotide
cuuucgauagccacccacc

SEQ ID NO: 849044 - RNA, 19 nt, Artificial Sequence
  Description of Artificial Sequence: Synthetic oligonucleotide
agcuggguaccucuggccc

SEQ ID NO: 849045 - RNA, 19 nt, Artificial Sequence
  Description of Artificial Sequence: Synthetic oligonucleotide
acuguuuagguccauccca

SEQ ID NO: 849046 - RNA, 19 nt, Artificial Sequence
  Description of Artificial Sequence: Synthetic oligonucleotide
uguuuggucaggcuuggcu

SEQ ID NO: 849047 - RNA, 19 nt, Artificial Sequence
  Description of Artificial Sequence: Synthetic oligonucleotide
guuuagguccaucccauag

SEQ ID NO: 849048 - RNA, 19 nt, Artificial Sequence
  Description of Artificial Sequence: Synthetic oligonucleotide
uccagugggagaaugguuc

SEQ ID NO: 849049 - RNA, 19 nt, Artificial Sequence
  Description of Artificial Sequence: Synthetic oligonucleotide
uuuagguccaucccauagu

SEQ ID NO: 849050 - RNA, 19 nt, Artificial Sequence
  Description of Artificial Sequence: Synthetic oligonucleotide
cucauugccugcuuguagc

SEQ ID NO: 849051 - RNA, 19 nt, Artificial Sequence
  Description of Artificial Sequence: Synthetic oligonucleotide
agcucugcaagguucgggg

SEQ ID NO: 849052 - RNA, 19 nt, Artificial Sequence
  Description of Artificial Sequence: Synthetic oligonucleotide
caggcuauaggccaggcug

SEQ ID NO: 849053 - RNA, 19 nt, Artificial Sequence
  Description of Artificial Sequence: Synthetic oligonucleotide
ggagucauuugauaugagg

SEQ ID NO: 849054 - RNA, 19 nt, Artificial Sequence
  Description of Artificial Sequence: Synthetic oligonucleotide
cuuaggguccacacggagg

SEQ ID NO: 849055 - RNA, 19 nt, Artificial Sequence
  Description of Artificial Sequence: Synthetic oligonucleotide
ucuccuuaggguccacacg

SEQ ID NO: 849056 - RNA, 19 nt, Artificial Sequence
  Description of Artificial Sequence: Synthetic oligonucleotide
uccuuguggagucauuuga

SEQ ID NO: 849057 - RNA, 19 nt, Artificial Sequence
  Description of Artificial Sequence: Synthetic oligonucleotide
ggcgcuuugagguacagcc

SEQ ID NO: 849058 - RNA, 19 nt, Artificial Sequence
  Description of Artificial Sequence: Synthetic oligonucleotide
uuacagaguacuaccuaca

SEQ ID NO: 849059 - RNA, 19 nt, Artificial Sequence
  Description of Artificial Sequence: Synthetic oligonucleotide
ucuuucgauagccacccac

SEQ ID NO: 849060 - RNA, 19 nt, Artificial Sequence
  Description of Artificial Sequence: Synthetic oligonucleotide
aucccauaguuaucugugc

SEQ ID NO: 849061 - RNA, 19 nt, Artificial Sequence
  Description of Artificial Sequence: Synthetic oligonucleotide
gaggcggugaguuccaagc

SEQ ID NO: 849062 - RNA, 19 nt, Artificial Sequence
  Description of Artificial Sequence: Synthetic oligonucleotide
ugugacccuaguucuuucg

SEQ ID NO: 849063 - RNA, 19 nt, Artificial Sequence
  Description of Artificial Sequence: Synthetic oligonucleotide
cugaagacgcuccugcucc

SEQ ID NO: 849064 - RNA, 19 nt, Artificial Sequence
  Description of Artificial Sequence: Synthetic oligonucleotide
auaguuaucugugcugauc

SEQ ID NO: 849065 - RNA, 19 nt, Artificial Sequence
  Description of Artificial Sequence: Synthetic oligonucleotide
agguaacugugacagauga

SEQ ID NO: 849066 - RNA, 19 nt, Artificial Sequence
  Description of Artificial Sequence: Synthetic oligonucleotide
uguuacguuuaaugaagga

SEQ ID NO: 849067 - RNA, 19 nt, Artificial Sequence
  Description of Artificial Sequence: Synthetic oligonucleotide
ucauccgguucacucauug

SEQ ID NO: 849068 - RNA, 19 nt, Artificial Sequence
  Description of Artificial Sequence: Synthetic oligonucleotide
ugacaagcagaggauauug

SEQ ID NO: 849069 - RNA, 19 nt, Artificial Sequence
  Description of Artificial Sequence: Synthetic oligonucleotide
uuguggagucauuugauau

SEQ ID NO: 849070 - RNA, 19 nt, Artificial Sequence
  Description of Artificial Sequence: Synthetic oligonucleotide
cuaaaaguauucaacugaa

SEQ ID NO: 849071 - RNA, 19 nt, Artificial Sequence
  Description of Artificial Sequence: Synthetic oligonucleotide
cuacgggaagccaaaguag

SEQ ID NO: 849072 - RNA, 19 nt, Artificial Sequence
  Description of Artificial Sequence: Synthetic oligonucleotide
uccgaagagcucugcaagg

SEQ ID NO: 849073 - RNA, 19 nt, Artificial Sequence
  Description of Artificial Sequence: Synthetic oligonucleotide
acccuacuggcuuuuagag

SEQ ID NO: 849074 - RNA, 19 nt, Artificial Sequence
  Description of Artificial Sequence: Synthetic oligonucleotide
uuguuggcuggacagggug

SEQ ID NO: 849075 - RNA, 19 nt, Artificial Sequence
  Description of Artificial Sequence: Synthetic oligonucleotide
agcaauggcauaucagaca

SEQ ID NO: 849076 - RNA, 19 nt, Artificial Sequence
  Description of Artificial Sequence: Synthetic oligonucleotide
aaucaaugugacccuaguu

SEQ ID NO: 849077 - RNA, 19 nt, Artificial Sequence
  Description of Artificial Sequence: Synthetic oligonucleotide
agguaggcguacuaaucac

SEQ ID NO: 849078 - RNA, 19 nt, Artificial Sequence
  Description of Artificial Sequence: Synthetic oligonucleotide
acccuaguucuuucgauag

SEQ ID NO: 849079 - RNA, 19 nt, Artificial Sequence
  Description of Artificial Sequence: Synthetic oligonucleotide
gggaguguuacguuuaaug

SEQ ID NO: 849080 - RNA, 19 nt, Artificial Sequence
  Description of Artificial Sequence: Synthetic oligonucleotide
agguccaucccauaguuau

SEQ ID NO: 849081 - RNA, 19 nt, Artificial Sequence
  Description of Artificial Sequence: Synthetic oligonucleotide
aaacaggagacugcacauc

SEQ ID NO: 849082 - RNA, 19 nt, Artificial Sequence
  Description of Artificial Sequence: Synthetic oligonucleotide
ggcacuucgacauucagga

SEQ ID NO: 849083 - RNA, 19 nt, Artificial Sequence
  Description of Artificial Sequence: Synthetic oligonucleotide
gacagaagagcaccagccc

SEQ ID NO: 849084 - RNA, 19 nt, Artificial Sequence
  Description of Artificial Sequence: Synthetic oligonucleotide
ugcggaggcgcucuucacg

SEQ ID NO: 849085 - RNA, 19 nt, Artificial Sequence
  Description of Artificial Sequence: Synthetic oligonucleotide
gaguguuacguuuaaugaa

SEQ ID NO: 849086 - RNA, 19 nt, Artificial Sequence
  Description of Artificial Sequence: Synthetic oligonucleotide
uucacucauugccugcuug

SEQ ID NO: 849087 - RNA, 19 nt, Artificial Sequence
  Description of Artificial Sequence: Synthetic oligonucleotide
aagagcucugcaagguucg

SEQ ID NO: 849088 - RNA, 19 nt, Artificial Sequence
  Description of Artificial Sequence: Synthetic oligonucleotide
ucgacauucaggagucucu

SEQ ID NO: 849089 - RNA, 19 nt, Artificial Sequence
  Description of Artificial Sequence: Synthetic oligonucleotide
agaaaguccggaggggucg

SEQ ID NO: 849090 - RNA, 19 nt, Artificial Sequence
  Description of Artificial Sequence: Synthetic oligonucleotide
uuagguccaucccauaguu

SEQ ID NO: 849091 - RNA, 19 nt, Artificial Sequence
  Description of Artificial Sequence: Synthetic oligonucleotide
acuucgacauucaggaguc

SEQ ID NO: 849092 - RNA, 19 nt, Artificial Sequence
  Description of Artificial Sequence: Synthetic oligonucleotide
uugagguacagccacuguu

SEQ ID NO: 849093 - RNA, 19 nt, Artificial Sequence
  Description of Artificial Sequence: Synthetic oligonucleotide
uccuucuguagccgcagag

SEQ ID NO: 849094 - RNA, 19 nt, Artificial Sequence
  Description of Artificial Sequence: Synthetic oligonucleotide
guucuuucgauagccaccc

SEQ ID NO: 849095 - RNA, 19 nt, Artificial Sequence
  Description of Artificial Sequence: Synthetic oligonucleotide
ucaagguaggcguacuaau

SEQ ID NO: 849096 - RNA, 19 nt, Artificial Sequence
  Description of Artificial Sequence: Synthetic oligonucleotide
aagaaaguccggagggguc

SEQ ID NO: 849097 - RNA, 19 nt, Artificial Sequence
  Description of Artificial Sequence: Synthetic oligonucleotide
guuaucugugcugaucuug

SEQ ID NO: 849098 - RNA, 19 nt, Artificial Sequence
  Description of Artificial Sequence: Synthetic oligonucleotide
gagucauuugauaugaggu

SEQ ID NO: 849099 - RNA, 19 nt, Artificial Sequence
  Description of Artificial Sequence: Synthetic oligonucleotide
uacguuuaaugaaggacuu

SEQ ID NO: 849100 - RNA, 19 nt, Artificial Sequence
  Description of Artificial Sequence: Synthetic oligonucleotide
auuuacagaguacuaccua

SEQ ID NO: 849101 - RNA, 19 nt, Artificial Sequence
  Description of Artificial Sequence: Synthetic oligonucleotide
ggaguguuacguuuaauga

SEQ ID NO: 849102 - RNA, 19 nt, Artificial Sequence
  Description of Artificial Sequence: Synthetic oligonucleotide
ucacguucaagaccuugcu

SEQ ID NO: 849103 - RNA, 19 nt, Artificial Sequence
  Description of Artificial Sequence: Synthetic oligonucleotide
gauagccacccaccaagcc

SEQ ID NO: 849104 - RNA, 19 nt, Artificial Sequence
  Description of Artificial Sequence: Synthetic oligonucleotide
agaguacuaccuacagacc

SEQ ID NO: 849105 - RNA, 19 nt, Artificial Sequence
  Description of Artificial Sequence: Synthetic oligonucleotide
caccuuguuggcuggacag

SEQ ID NO: 849106 - RNA, 19 nt, Artificial Sequence
  Description of Artificial Sequence: Synthetic oligonucleotide
ucaugacacugcuacggga

SEQ ID NO: 849107 - RNA, 19 nt, Artificial Sequence
  Description of Artificial Sequence: Synthetic oligonucleotide
caagguaggcguacuaauc

SEQ ID NO: 849108 - RNA, 19 nt, Artificial Sequence
  Description of Artificial Sequence: Synthetic oligonucleotide
agcgucuccugauggcgcc

SEQ ID NO: 849109 - RNA, 19 nt, Artificial Sequence
  Description of Artificial Sequence: Synthetic oligonucleotide
aguccggaggggucguacc

SEQ ID NO: 849110 - RNA, 19 nt, Artificial Sequence
  Description of Artificial Sequence: Synthetic oligonucleotide
gaugcugccuggccacugg

SEQ ID NO: 849111 - RNA, 19 nt, Artificial Sequence
  Description of Artificial Sequence: Synthetic oligonucleotide
ugcgcuugugguagcgggg

SEQ ID NO: 849112 - RNA, 19 nt, Artificial Sequence
  Description of Artificial Sequence: Synthetic oligonucleotide
acagaguacuaccuacaga

SEQ ID NO: 849113 - RNA, 19 nt, Artificial Sequence
  Description of Artificial Sequence: Synthetic oligonucleotide
gaagagcucugcaagguuc

SEQ ID NO: 849114 - RNA, 19 nt, Artificial Sequence
  Description of Artificial Sequence: Synthetic oligonucleotide
uacuaaucacaaucuuggu

SEQ ID NO: 849115 - RNA, 19 nt, Artificial Sequence
  Description of Artificial Sequence: Synthetic oligonucleotide
ucacucauugccugcuugu

SEQ ID NO: 849116 - RNA, 19 nt, Artificial Sequence
  Description of Artificial Sequence: Synthetic oligonucleotide
uccucauccgguucacuca

SEQ ID NO: 849117 - RNA, 19 nt, Artificial Sequence
  Description of Artificial Sequence: Synthetic oligonucleotide
ucuguuuggucaggcuugg

SEQ ID NO: 849118 - RNA, 19 nt, Artificial Sequence
  Description of Artificial Sequence: Synthetic oligonucleotide
gguacagccacuguucuug

SEQ ID NO: 849119 - RNA, 19 nt, Artificial Sequence
  Description of Artificial Sequence: Synthetic oligonucleotide
agccgcagagcuuucucuc

SEQ ID NO: 849120 - RNA, 19 nt, Artificial Sequence
  Description of Artificial Sequence: Synthetic oligonucleotide
uaccuacagaccaaucaau

SEQ ID NO: 849121 - RNA, 19 nt, Artificial Sequence
  Description of Artificial Sequence: Synthetic oligonucleotide
aaugugacccuaguucuuu

SEQ ID NO: 849122 - RNA, 19 nt, Artificial Sequence
  Description of Artificial Sequence: Synthetic oligonucleotide
guguuacguuuaaugaagg

SEQ ID NO: 849123 - RNA, 19 nt, Artificial Sequence
  Description of Artificial Sequence: Synthetic oligonucleotide
uucaagguaggcguacuaa

SEQ ID NO: 849124 - RNA, 19 nt, Artificial Sequence
  Description of Artificial Sequence: Synthetic oligonucleotide
gacccuacuggcuuuuaga

SEQ ID NO: 849125 - RNA, 19 nt, Artificial Sequence
  Description of Artificial Sequence: Synthetic oligonucleotide
acagaccaaucaaugugac

SEQ ID NO: 849126 - RNA, 19 nt, Artificial Sequence
  Description of Artificial Sequence: Synthetic oligonucleotide
agagcaccagcccaacaca

SEQ ID NO: 849127 - RNA, 19 nt, Artificial Sequence
  Description of Artificial Sequence: Synthetic oligonucleotide
gagcaauggcauaucagac

SEQ ID NO: 849128 - RNA, 19 nt, Artificial Sequence
  Description of Artificial Sequence: Synthetic oligonucleotide
ugcuacgggaagccaaagu

SEQ ID NO: 849129 - RNA, 19 nt, Artificial Sequence
  Description of Artificial Sequence: Synthetic oligonucleotide
cagaccaaucaaugugacc

SEQ ID NO: 849130 - RNA, 19 nt, Artificial Sequence
  Description of Artificial Sequence: Synthetic oligonucleotide
aaguccggaggggucguac

SEQ ID NO: 849131 - RNA, 19 nt, Artificial Sequence
  Description of Artificial Sequence: Synthetic oligonucleotide
agcagcagagcuagugcgc

SEQ ID NO: 849132 - RNA, 19 nt, Artificial Sequence
  Description of Artificial Sequence: Synthetic oligonucleotide
uggagucauuugauaugag

SEQ ID NO: 849133 - RNA, 19 nt, Artificial Sequence
  Description of Artificial Sequence: Synthetic oligonucleotide
acacggaggggaguguuac

SEQ ID NO: 849134 - RNA, 19 nt, Artificial Sequence
  Description of Artificial Sequence: Synthetic oligonucleotide
ucauugccugcuuguagcu

SEQ ID NO: 849135 - RNA, 19 nt, Artificial Sequence
  Description of Artificial Sequence: Synthetic oligonucleotide
accuacagaccaaucaaug

SEQ ID NO: 849136 - RNA, 19 nt, Artificial Sequence
  Description of Artificial Sequence: Synthetic oligonucleotide
gcaccugacaagcagagga

SEQ ID NO: 849137 - RNA, 19 nt, Artificial Sequence
  Description of Artificial Sequence: Synthetic oligonucleotide
gaggggucguaccaccuug

SEQ ID NO: 849138 - RNA, 19 nt, Artificial Sequence
  Description of Artificial Sequence: Synthetic oligonucleotide
ucuucgccugcucuuccug

SEQ ID NO: 849139 - RNA, 19 nt, Artificial Sequence
  Description of Artificial Sequence: Synthetic oligonucleotide
cugcacauccacagucacg

SEQ ID NO: 849140 - RNA, 19 nt, Artificial Sequence
  Description of Artificial Sequence: Synthetic oligonucleotide
caggagacugcacauccac

SEQ ID NO: 849141 - RNA, 19 nt, Artificial Sequence
  Description of Artificial Sequence: Synthetic oligonucleotide
cagagcuuucucucucucc

SEQ ID NO: 849142 - RNA, 19 nt, Artificial Sequence
  Description of Artificial Sequence: Synthetic oligonucleotide
ggguuugcucuucuuaaag

SEQ ID NO: 849143 - RNA, 19 nt, Artificial Sequence
  Description of Artificial Sequence: Synthetic oligonucleotide
gucacguucaagaccuugc

SEQ ID NO: 849144 - RNA, 19 nt, Artificial Sequence
  Description of Artificial Sequence: Synthetic oligonucleotide
gugcgcuugugguagcggg

SEQ ID NO: 849145 - RNA, 19 nt, Artificial Sequence
  Description of Artificial Sequence: Synthetic oligonucleotide
aucuguuuggucaggcuug

SEQ ID NO: 849146 - RNA, 19 nt, Artificial Sequence
  Description of Artificial Sequence: Synthetic oligonucleotide
uuucaagguaggcguacua

SEQ ID NO: 849147 - RNA, 19 nt, Artificial Sequence
  Description of Artificial Sequence: Synthetic oligonucleotide
cguacuaaucacaaucuug

SEQ ID NO: 849148 - RNA, 19 nt, Artificial Sequence
  Description of Artificial Sequence: Synthetic oligonucleotide
uuagaggcggugaguucca

SEQ ID NO: 849149 - RNA, 19 nt, Artificial Sequence
  Description of Artificial Sequence: Synthetic oligonucleotide
caugacacugcuacgggaa

SEQ ID NO: 849150 - RNA, 19 nt, Artificial Sequence
  Description of Artificial Sequence: Synthetic oligonucleotide
guggagucauuugauauga

SEQ ID NO: 849151 - RNA, 19 nt, Artificial Sequence
  Description of Artificial Sequence: Synthetic oligonucleotide
ggcauaucagacagaagag

SEQ ID NO: 849152 - RNA, 19 nt, Artificial Sequence
  Description of Artificial Sequence: Synthetic oligonucleotide
augugacccuaguucuuuc

SEQ ID NO: 849153 - RNA, 19 nt, Artificial Sequence
  Description of Artificial Sequence: Synthetic oligonucleotide
uucgacauucaggagucuc

SEQ ID NO: 849154 - RNA, 19 nt, Artificial Sequence
  Description of Artificial Sequence: Synthetic oligonucleotide
cuucugacacucugaggug

SEQ ID NO: 849155 - RNA, 19 nt, Artificial Sequence
  Description of Artificial Sequence: Synthetic oligonucleotide
ugugguagcgggguuugcu

SEQ ID NO: 849156 - RNA, 19 nt, Artificial Sequence
  Description of Artificial Sequence: Synthetic oligonucleotide
gagucaucacuguuuaggu

SEQ ID NO: 849157 - RNA, 19 nt, Artificial Sequence
  Description of Artificial Sequence: Synthetic oligonucleotide
cuacuggcuuuuagaggcg

SEQ ID NO: 849158 - RNA, 19 nt, Artificial Sequence
  Description of Artificial Sequence: Synthetic oligonucleotide
ugacacugcuacgggaagc

SEQ ID NO: 849159 - RNA, 19 nt, Artificial Sequence
  Description of Artificial Sequence: Synthetic oligonucleotide
acguuuaaugaaggacuuc

SEQ ID NO: 849160 - RNA, 19 nt, Artificial Sequence
  Description of Artificial Sequence: Synthetic oligonucleotide
ugguagcgggguuugcucu

SEQ ID NO: 849161 - RNA, 19 nt, Artificial Sequence
  Description of Artificial Sequence: Synthetic oligonucleotide
aggaauggguuuccuggga

SEQ ID NO: 849162 - RNA, 19 nt, Artificial Sequence
  Description of Artificial Sequence: Synthetic oligonucleotide
uccugcgugccucuacuuc

SEQ ID NO: 849163 - RNA, 19 nt, Artificial Sequence
  Description of Artificial Sequence: Synthetic oligonucleotide
agaagagcaccagcccaac

SEQ ID NO: 849164 - RNA, 19 nt, Artificial Sequence
  Description of Artificial Sequence: Synthetic oligonucleotide
agaggcggugaguuccaag

SEQ ID NO: 849165 - RNA, 19 nt, Artificial Sequence
  Description of Artificial Sequence: Synthetic oligonucleotide
ggaaggaauggguuuccug

SEQ ID NO: 849166 - RNA, 19 nt, Artificial Sequence
  Description of Artificial Sequence: Synthetic oligonucleotide
gguuugcucuucuuaaaga

SEQ ID NO: 849167 - RNA, 19 nt, Artificial Sequence
  Description of Artificial Sequence: Synthetic oligonucleotide
gcuagugcgcuugugguag

SEQ ID NO: 849168 - RNA, 19 nt, Artificial Sequence
  Description of Artificial Sequence: Synthetic oligonucleotide
guacagccacuguucuugg

SEQ ID NO: 849169 - RNA, 19 nt, Artificial Sequence
  Description of Artificial Sequence: Synthetic oligonucleotide
acuguucuuggagaccucu

SEQ ID NO: 849170 - RNA, 19 nt, Artificial Sequence
  Description of Artificial Sequence: Synthetic oligonucleotide
auggcgccgcgccucuucc

SEQ ID NO: 849171 - RNA, 19 nt, Artificial Sequence
  Description of Artificial Sequence: Synthetic oligonucleotide
ggcagcaccugacaagcag

SEQ ID NO: 849172 - RNA, 19 nt, Artificial Sequence
  Description of Artificial Sequence: Synthetic oligonucleotide
gacacacauaggcccaguc

SEQ ID NO: 849173 - RNA, 19 nt, Artificial Sequence
  Description of Artificial Sequence: Synthetic oligonucleotide
uggcuuuuagaggcgguga

SEQ ID NO: 849174 - RNA, 19 nt, Artificial Sequence
  Description of Artificial Sequence: Synthetic oligonucleotide
gagcucugcaagguucggg

SEQ ID NO: 849175 - RNA, 19 nt, Artificial Sequence
  Description of Artificial Sequence: Synthetic oligonucleotide
uggagucaucacuguuuag

SEQ ID NO: 849176 - RNA, 19 nt, Artificial Sequence
  Description of Artificial Sequence: Synthetic oligonucleotide
aguccagugggagaauggu

SEQ ID NO: 849177 - RNA, 19 nt, Artificial Sequence
  Description of Artificial Sequence: Synthetic oligonucleotide
gagcaccagcccaacacag

SEQ ID NO: 849178 - RNA, 19 nt, Artificial Sequence
  Description of Artificial Sequence: Synthetic oligonucleotide
ucuucacgcuucagcuuca

SEQ ID NO: 849179 - RNA, 19 nt, Artificial Sequence
  Description of Artificial Sequence: Synthetic oligonucleotide
uagccgcagagcuuucucu

SEQ ID NO: 849180 - RNA, 19 nt, Artificial Sequence
  Description of Artificial Sequence: Synthetic oligonucleotide
cuaguucuuucgauagcca

SEQ ID NO: 849181 - RNA, 19 nt, Artificial Sequence
  Description of Artificial Sequence: Synthetic oligonucleotide
agucacguucaagaccuug

SEQ ID NO: 849182 - RNA, 19 nt, Artificial Sequence
  Description of Artificial Sequence: Synthetic oligonucleotide
aacuugagccugcgcgccu

SEQ ID NO: 849183 - RNA, 19 nt, Artificial Sequence
  Description of Artificial Sequence: Synthetic oligonucleotide
cacuucgacauucaggagu

SEQ ID NO: 849184 - RNA, 19 nt, Artificial Sequence
  Description of Artificial Sequence: Synthetic oligonucleotide
gcaacuugagccugcgcgc

SEQ ID NO: 849185 - RNA, 19 nt, Artificial Sequence
  Description of Artificial Sequence: Synthetic oligonucleotide
gauauccaccugagcaaug

SEQ ID NO: 849186 - RNA, 19 nt, Artificial Sequence
  Description of Artificial Sequence: Synthetic oligonucleotide
ggcuuuuagaggcggugag

SEQ ID NO: 849187 - RNA, 19 nt, Artificial Sequence
  Description of Artificial Sequence: Synthetic oligonucleotide
acccaccaagcccauccuc

SEQ ID NO: 849188 - RNA, 19 nt, Artificial Sequence
  Description of Artificial Sequence: Synthetic oligonucleotide
guuggagcaacuugagccu

SEQ ID NO: 849189 - RNA, 19 nt, Artificial Sequence
  Description of Artificial Sequence: Synthetic oligonucleotide
guaccaccuuguuggcugg

SEQ ID NO: 849190 - RNA, 19 nt, Artificial Sequence
  Description of Artificial Sequence: Synthetic oligonucleotide
uacuaccuacagaccaauc

SEQ ID NO: 849191 - RNA, 19 nt, Artificial Sequence
  Description of Artificial Sequence: Synthetic oligonucleotide
gacccuaguucuuucgaua

SEQ ID NO: 849192 - RNA, 19 nt, Artificial Sequence
  Description of Artificial Sequence: Synthetic oligonucleotide
aggagucucuccagguaac

SEQ ID NO: 849193 - RNA, 19 nt, Artificial Sequence
  Description of Artificial Sequence: Synthetic oligonucleotide
uccuuaggguccacacgga

SEQ ID NO: 849194 - RNA, 19 nt, Artificial Sequence
  Description of Artificial Sequence: Synthetic oligonucleotide
gagccugcgcgccuccucc

SEQ ID NO: 849195 - RNA, 19 nt, Artificial Sequence
  Description of Artificial Sequence: Synthetic oligonucleotide
gcuacgggaagccaaagua

SEQ ID NO: 849196 - RNA, 19 nt, Artificial Sequence
  Description of Artificial Sequence: Synthetic oligonucleotide
cugugcugaucuuggggug

SEQ ID NO: 849197 - RNA, 19 nt, Artificial Sequence
  Description of Artificial Sequence: Synthetic oligonucleotide
accaagcccauccuccaaa

SEQ ID NO: 849198 - RNA, 19 nt, Artificial Sequence
  Description of Artificial Sequence: Synthetic oligonucleotide
acggaggggaguguuacgu

SEQ ID NO: 849199 - RNA, 19 nt, Artificial Sequence
  Description of Artificial Sequence: Synthetic oligonucleotide
ggcggugaguuccaagcag

SEQ ID NO: 849200 - RNA, 19 nt, Artificial Sequence
  Description of Artificial Sequence: Synthetic oligonucleotide
auuugauaugagguacaaa

SEQ ID NO: 849201 - RNA, 19 nt, Artificial Sequence
  Description of Artificial Sequence: Synthetic oligonucleotide
cuuguggagucauuugaua

SEQ ID NO: 849202 - RNA, 19 nt, Artificial Sequence
  Description of Artificial Sequence: Synthetic oligonucleotide
ucacgggccugcaucacuu

SEQ ID NO: 849203 - RNA, 19 nt, Artificial Sequence
  Description of Artificial Sequence: Synthetic oligonucleotide
guaggcguacuaaucacaa

SEQ ID NO: 849204 - RNA, 19 nt, Artificial Sequence
  Description of Artificial Sequence: Synthetic oligonucleotide
gucucuccagguaacugug

SEQ ID NO: 849205 - RNA, 19 nt, Artificial Sequence
  Description of Artificial Sequence: Synthetic oligonucleotide
cuugugguagcgggguuug

SEQ ID NO: 849206 - RNA, 19 nt, Artificial Sequence
  Description of Artificial Sequence: Synthetic oligonucleotide
uguggcgcuuugagguaca

SEQ ID NO: 849207 - RNA, 19 nt, Artificial Sequence
  Description of Artificial Sequence: Synthetic oligonucleotide
ccugcgugccucuacuucc

SEQ ID NO: 849208 - RNA, 19 nt, Artificial Sequence
  Description of Artificial Sequence: Synthetic oligonucleotide
caacuugagccugcgcgcc

SEQ ID NO: 849209 - RNA, 19 nt, Artificial Sequence
  Description of Artificial Sequence: Synthetic oligonucleotide
ugucugcgcagcugcucag

SEQ ID NO: 849210 - RNA, 19 nt, Artificial Sequence
  Description of Artificial Sequence: Synthetic oligonucleotide
accaccuuguuggcuggac

SEQ ID NO: 849211 - RNA, 19 nt, Artificial Sequence
  Description of Artificial Sequence: Synthetic oligonucleotide
gugacccuaguucuuucga

SEQ ID NO: 849212 - RNA, 19 nt, Artificial Sequence
  Description of Artificial Sequence: Synthetic oligonucleotide
uguuuagguccaucccaua

SEQ ID NO: 849213 - RNA, 19 nt, Artificial Sequence
  Description of Artificial Sequence: Synthetic oligonucleotide
cugcuuguagcugcguuuc

SEQ ID NO: 849214 - RNA, 19 nt, Artificial Sequence
  Description of Artificial Sequence: Synthetic oligonucleotide
acgggccugcaucacuuug

SEQ ID NO: 849215 - RNA, 19 nt, Artificial Sequence
  Description of Artificial Sequence: Synthetic oligonucleotide
guauucaacugaacuguaa

SEQ ID NO: 849216 - RNA, 19 nt, Artificial Sequence
  Description of Artificial Sequence: Synthetic oligonucleotide
cuccucaaucugagcaaac

SEQ ID NO: 849217 - RNA, 19 nt, Artificial Sequence
  Description of Artificial Sequence: Synthetic oligonucleotide
aguuaucugugcugaucuu

SEQ ID NO: 849218 - RNA, 19 nt, Artificial Sequence
  Description of Artificial Sequence: Synthetic oligonucleotide
gagcuagugcgcuuguggu

SEQ ID NO: 849219 - RNA, 19 nt, Artificial Sequence
  Description of Artificial Sequence: Synthetic oligonucleotide
guagccgcagagcuuucuc

SEQ ID NO: 849220 - RNA, 19 nt, Artificial Sequence
  Description of Artificial Sequence: Synthetic oligonucleotide
cuugcucagccagcugccg

SEQ ID NO: 849221 - RNA, 19 nt, Artificial Sequence
  Description of Artificial Sequence: Synthetic oligonucleotide
gugguagcgggguuugcuc

SEQ ID NO: 849222 - RNA, 19 nt, Artificial Sequence
  Description of Artificial Sequence: Synthetic oligonucleotide
uacagccacuguucuugga

SEQ ID NO: 849223 - RNA, 19 nt, Artificial Sequence
  Description of Artificial Sequence: Synthetic oligonucleotide
agcaccugacaagcagagg

SEQ ID NO: 849224 - RNA, 19 nt, Artificial Sequence
  Description of Artificial Sequence: Synthetic oligonucleotide
cugaggcacuucgacauuc

SEQ ID NO: 849225 - RNA, 19 nt, Artificial Sequence
  Description of Artificial Sequence: Synthetic oligonucleotide
uagguccaucccauaguua

SEQ ID NO: 849226 - RNA, 19 nt, Artificial Sequence
  Description of Artificial Sequence: Synthetic oligonucleotide
gcucacgcuguucugccag

SEQ ID NO: 849227 - RNA, 19 nt, Artificial Sequence
  Description of Artificial Sequence: Synthetic oligonucleotide
cacggaggggaguguuacg

SEQ ID NO: 849228 - RNA, 19 nt, Artificial Sequence
  Description of Artificial Sequence: Synthetic oligonucleotide
gaaugguuccgaagagcuc

SEQ ID NO: 849229 - RNA, 19 nt, Artificial Sequence
  Description of Artificial Sequence: Synthetic oligonucleotide
cguaccaccuuguuggcug

SEQ ID NO: 849230 - RNA, 19 nt, Artificial Sequence
  Description of Artificial Sequence: Synthetic oligonucleotide
gggucguaccaccuuguug

SEQ ID NO: 849231 - RNA, 19 nt, Artificial Sequence
  Description of Artificial Sequence: Synthetic oligonucleotide
cucacgcuguucugccagc

SEQ ID NO: 849232 - RNA, 19 nt, Artificial Sequence
  Description of Artificial Sequence: Synthetic oligonucleotide
cagugggagaaugguuccg

SEQ ID NO: 849233 - RNA, 19 nt, Artificial Sequence
  Description of Artificial Sequence: Synthetic oligonucleotide
uguagccgcagagcuuucu

SEQ ID NO: 849234 - RNA, 19 nt, Artificial Sequence
  Description of Artificial Sequence: Synthetic oligonucleotide
guucccucugaaguuguuc

SEQ ID NO: 849235 - RNA, 19 nt, Artificial Sequence
  Description of Artificial Sequence: Synthetic oligonucleotide
agcuagugcgcuuguggua

SEQ ID NO: 849236 - RNA, 19 nt, Artificial Sequence
  Description of Artificial Sequence: Synthetic oligonucleotide
agagcucugcaagguucgg

SEQ ID NO: 849237 - RNA, 19 nt, Artificial Sequence
  Description of Artificial Sequence: Synthetic oligonucleotide
uucuuucgauagccaccca

SEQ ID NO: 849238 - RNA, 19 nt, Artificial Sequence
  Description of Artificial Sequence: Synthetic oligonucleotide
uccuccuguuggagcaacu

SEQ ID NO: 849239 - RNA, 19 nt, Artificial Sequence
  Description of Artificial Sequence: Synthetic oligonucleotide
ggaugagccucaucaucug

SEQ ID NO: 849240 - RNA, 19 nt, Artificial Sequence
  Description of Artificial Sequence: Synthetic oligonucleotide
cuucugcacugugugcaag

SEQ ID NO: 849241 - RNA, 19 nt, Artificial Sequence
  Description of Artificial Sequence: Synthetic oligonucleotide
gauggcgccgcgccucuuc

SEQ ID NO: 849242 - RNA, 19 nt, Artificial Sequence
  Description of Artificial Sequence: Synthetic oligonucleotide
gagcaacuugagccugcgc

SEQ ID NO: 849243 - RNA, 19 nt, Artificial Sequence
  Description of Artificial Sequence: Synthetic oligonucleotide
gagguacagccacuguucu

SEQ ID NO: 849244 - RNA, 19 nt, Artificial Sequence
  Description of Artificial Sequence: Synthetic oligonucleotide
cuagugcgcuugugguagc

SEQ ID NO: 849245 - RNA, 19 nt, Artificial Sequence
  Description of Artificial Sequence: Synthetic oligonucleotide
caaacaggagacugcacau

SEQ ID NO: 849246 - RNA, 19 nt, Artificial Sequence
  Description of Artificial Sequence: Synthetic oligonucleotide
ggacccuacuggcuuuuag

SEQ ID NO: 849247 - RNA, 19 nt, Artificial Sequence
  Description of Artificial Sequence: Synthetic oligonucleotide
gaccaaucaaugugacccu

SEQ ID NO: 849248 - RNA, 19 nt, Artificial Sequence
  Description of Artificial Sequence: Synthetic oligonucleotide
ggugaguuccaagcagcag

SEQ ID NO: 849249 - RNA, 19 nt, Artificial Sequence
  Description of Artificial Sequence: Synthetic oligonucleotide
cguuuaaugaaggacuuca

SEQ ID NO: 849250 - RNA, 19 nt, Artificial Sequence
  Description of Artificial Sequence: Synthetic oligonucleotide
gucguaccaccuuguuggc

SEQ ID NO: 849251 - RNA, 19 nt, Artificial Sequence
  Description of Artificial Sequence: Synthetic oligonucleotide
cauugccugcuuguagcug

SEQ ID NO: 849252 - RNA, 19 nt, Artificial Sequence
  Description of Artificial Sequence: Synthetic oligonucleotide
cauaggcccaguccugcca

SEQ ID NO: 849253 - RNA, 19 nt, Artificial Sequence
  Description of Artificial Sequence: Synthetic oligonucleotide
guaggggucaugagcaucu

SEQ ID NO: 849254 - RNA, 19 nt, Artificial Sequence
  Description of Artificial Sequence: Synthetic oligonucleotide
ggacugaggaccugccuca

SEQ ID NO: 849255 - RNA, 19 nt, Artificial Sequence
  Description of Artificial Sequence: Synthetic oligonucleotide
gcggaggcgcucuucacgc

SEQ ID NO: 849256 - RNA, 19 nt, Artificial Sequence
  Description of Artificial Sequence: Synthetic oligonucleotide
cacugcuacgggaagccaa

SEQ ID NO: 849257 - RNA, 19 nt, Artificial Sequence
  Description of Artificial Sequence: Synthetic oligonucleotide
cagacgccgccgcuugucc

SEQ ID NO: 849258 - RNA, 19 nt, Artificial Sequence
  Description of Artificial Sequence: Synthetic oligonucleotide
cuccuuccgccgcagguuc

SEQ ID NO: 849259 - RNA, 19 nt, Artificial Sequence
  Description of Artificial Sequence: Synthetic oligonucleotide
acugcuacgggaagccaaa

SEQ ID NO: 849260 - RNA, 19 nt, Artificial Sequence
  Description of Artificial Sequence: Synthetic oligonucleotide
ggagcaacuugagccugcg

SEQ ID NO: 849261 - RNA, 19 nt, Artificial Sequence
  Description of Artificial Sequence: Synthetic oligonucleotide
gugcugaucuugggguggg

SEQ ID NO: 849262 - RNA, 19 nt, Artificial Sequence
  Description of Artificial Sequence: Synthetic oligonucleotide
agcccaacacagaaacaga

SEQ ID NO: 849263 - RNA, 19 nt, Artificial Sequence
  Description of Artificial Sequence: Synthetic oligonucleotide
gggcuuucaagguaggcgu

SEQ ID NO: 849264 - RNA, 19 nt, Artificial Sequence
  Description of Artificial Sequence: Synthetic oligonucleotide
acuguggcgcuuugaggua

SEQ ID NO: 849265 - RNA, 19 nt, Artificial Sequence
  Description of Artificial Sequence: Synthetic oligonucleotide
cuuuuagaggcggugaguu

SEQ ID NO: 849266 - RNA, 19 nt, Artificial Sequence
  Description of Artificial Sequence: Synthetic oligonucleotide
acagggcuuucaagguagg

SEQ ID NO: 849267 - RNA, 19 nt, Artificial Sequence
  Description of Artificial Sequence: Synthetic oligonucleotide
gcuccacccgcucacgggc

SEQ ID NO: 849268 - RNA, 19 nt, Artificial Sequence
  Description of Artificial Sequence: Synthetic oligonucleotide
gguuccgaagagcucugca

SEQ ID NO: 849269 - RNA, 19 nt, Artificial Sequence
  Description of Artificial Sequence: Synthetic oligonucleotide
cuggguaccucuggcccag

SEQ ID NO: 849270 - RNA, 19 nt, Artificial Sequence
  Description of Artificial Sequence: Synthetic oligonucleotide
caaucaaugugacccuagu

SEQ ID NO: 849271 - RNA, 19 nt, Artificial Sequence
  Description of Artificial Sequence: Synthetic oligonucleotide
uggcgcuuugagguacagc

SEQ ID NO: 849272 - RNA, 19 nt, Artificial Sequence
  Description of Artificial Sequence: Synthetic oligonucleotide
ggccuucucugccagccgc

SEQ ID NO: 849273 - RNA, 19 nt, Artificial Sequence
  Description of Artificial Sequence: Synthetic oligonucleotide
gguaggcguacuaaucaca

SEQ ID NO: 849274 - RNA, 19 nt, Artificial Sequence
  Description of Artificial Sequence: Synthetic oligonucleotide
uccugauggcgccgcgccu

SEQ ID NO: 849275 - RNA, 19 nt, Artificial Sequence
  Description of Artificial Sequence: Synthetic oligonucleotide
cuccagacgccgccgcuug

SEQ ID NO: 849276 - RNA, 19 nt, Artificial Sequence
  Description of Artificial Sequence: Synthetic oligonucleotide
cuguggcgcuuugagguac

SEQ ID NO: 849277 - RNA, 19 nt, Artificial Sequence
  Description of Artificial Sequence: Synthetic oligonucleotide
uccggaggggucguaccac

SEQ ID NO: 849278 - RNA, 19 nt, Artificial Sequence
  Description of Artificial Sequence: Synthetic oligonucleotide
guuccaagcagcagagcua

SEQ ID NO: 849279 - RNA, 19 nt, Artificial Sequence
  Description of Artificial Sequence: Synthetic oligonucleotide
cuccacccgcucacgggcc

SEQ ID NO: 849280 - RNA, 19 nt, Artificial Sequence
  Description of Artificial Sequence: Synthetic oligonucleotide
ccauaguuaucugugcuga

SEQ ID NO: 849281 - RNA, 19 nt, Artificial Sequence
  Description of Artificial Sequence: Synthetic oligonucleotide
accaacuuucugaggcacu

SEQ ID NO: 849282 - RNA, 19 nt, Artificial Sequence
  Description of Artificial Sequence: Synthetic oligonucleotide
caagaaaguccggaggggu

SEQ ID NO: 849283 - RNA, 19 nt, Artificial Sequence
  Description of Artificial Sequence: Synthetic oligonucleotide
uugcggaggcgcucuucac

SEQ ID NO: 849284 - RNA, 19 nt, Artificial Sequence
  Description of Artificial Sequence: Synthetic oligonucleotide
ucacuuugcggaggcgcuc

SEQ ID NO: 849285 - RNA, 19 nt, Artificial Sequence
  Description of Artificial Sequence: Synthetic oligonucleotide
caauggcauaucagacaga

SEQ ID NO: 849286 - RNA, 19 nt, Artificial Sequence
  Description of Artificial Sequence: Synthetic oligonucleotide
accaaucaaugugacccua

SEQ ID NO: 849287 - RNA, 19 nt, Artificial Sequence
  Description of Artificial Sequence: Synthetic oligonucleotide
guccggaggggucguacca

SEQ ID NO: 849288 - RNA, 19 nt, Artificial Sequence
  Description of Artificial Sequence: Synthetic oligonucleotide
gaggggaguguuacguuua

SEQ ID NO: 849289 - RNA, 19 nt, Artificial Sequence
  Description of Artificial Sequence: Synthetic oligonucleotide
gcuuucaagguaggcguac

SEQ ID NO: 849290 - RNA, 19 nt, Artificial Sequence
  Description of Artificial Sequence: Synthetic oligonucleotide
guugguaguacugguggau

SEQ ID NO: 849291 - RNA, 19 nt, Artificial Sequence
  Description of Artificial Sequence: Synthetic oligonucleotide
gggguugaagcuccucauc

SEQ ID NO: 849292 - RNA, 19 nt, Artificial Sequence
  Description of Artificial Sequence: Synthetic oligonucleotide
cacucugaggugcuuuucu

SEQ ID NO: 849293 - RNA, 19 nt, Artificial Sequence
  Description of Artificial Sequence: Synthetic oligonucleotide
uggguccuuguggagucau

SEQ ID NO: 849294 - RNA, 19 nt, Artificial Sequence
  Description of Artificial Sequence: Synthetic oligonucleotide
ccaagcccauccuccaaac

SEQ ID NO: 849295 - RNA, 19 nt, Artificial Sequence
  Description of Artificial Sequence: Synthetic oligonucleotide
ccuacagaccaaucaaugu

SEQ ID NO: 849296 - RNA, 19 nt, Artificial Sequence
  Description of Artificial Sequence: Synthetic oligonucleotide
cccuaguucuuucgauagc

SEQ ID NO: 849297 - RNA, 19 nt, Artificial Sequence
  Description of Artificial Sequence: Synthetic oligonucleotide
gcacuucgacauucaggag

SEQ ID NO: 849298 - RNA, 19 nt, Artificial Sequence
  Description of Artificial Sequence: Synthetic oligonucleotide
augguuccgaagagcucug

SEQ ID NO: 849299 - RNA, 19 nt, Artificial Sequence
  Description of Artificial Sequence: Synthetic oligonucleotide
ccgguucacucauugccug

SEQ ID NO: 849300 - RNA, 19 nt, Artificial Sequence
  Description of Artificial Sequence: Synthetic oligonucleotide
uccagacgccgccgcuugu

SEQ ID NO: 849301 - RNA, 19 nt, Artificial Sequence
  Description of Artificial Sequence: Synthetic oligonucleotide
uuccugcgugccucuacuu

SEQ ID NO: 849302 - RNA, 19 nt, Artificial Sequence
  Description of Artificial Sequence: Synthetic oligonucleotide
gguaccucuggcccaggaa

SEQ ID NO: 849303 - RNA, 19 nt, Artificial Sequence
  Description of Artificial Sequence: Synthetic oligonucleotide
cugcuacgggaagccaaag

SEQ ID NO: 849304 - RNA, 19 nt, Artificial Sequence
  Description of Artificial Sequence: Synthetic oligonucleotide
uccacacggaggggagugu

SEQ ID NO: 849305 - RNA, 19 nt, Artificial Sequence
  Description of Artificial Sequence: Synthetic oligonucleotide
cuucacgcuucagcuucac

SEQ ID NO: 849306 - RNA, 19 nt, Artificial Sequence
  Description of Artificial Sequence: Synthetic oligonucleotide
cuuccugcgugccucuacu

SEQ ID NO: 849307 - RNA, 19 nt, Artificial Sequence
  Description of Artificial Sequence: Synthetic oligonucleotide
cagagcuagugcgcuugug

SEQ ID NO: 849308 - RNA, 19 nt, Artificial Sequence
  Description of Artificial Sequence: Synthetic oligonucleotide
uggggacccuacuggcuuu

SEQ ID NO: 849309 - RNA, 19 nt, Artificial Sequence
  Description of Artificial Sequence: Synthetic oligonucleotide
cuuccgccgcagguucucc

SEQ ID NO: 849310 - RNA, 19 nt, Artificial Sequence
  Description of Artificial Sequence: Synthetic oligonucleotide
cuguuuggucaggcuuggc

SEQ ID NO: 849311 - RNA, 19 nt, Artificial Sequence
  Description of Artificial Sequence: Synthetic oligonucleotide
cuuguuggcuggacagggu

SEQ ID NO: 849312 - RNA, 19 nt, Artificial Sequence
  Description of Artificial Sequence: Synthetic oligonucleotide
ugcugaucuugggguggga

SEQ ID NO: 849313 - RNA, 19 nt, Artificial Sequence
  Description of Artificial Sequence: Synthetic oligonucleotide
cauaguuaucugugcugau

SEQ ID NO: 849314 - RNA, 19 nt, Artificial Sequence
  Description of Artificial Sequence: Synthetic oligonucleotide
ggaauggguuuccugggau

SEQ ID NO: 849315 - RNA, 19 nt, Artificial Sequence
  Description of Artificial Sequence: Synthetic oligonucleotide
aggcgcucuucacgcuuca

SEQ ID NO: 849316 - RNA, 19 nt, Artificial Sequence
  Description of Artificial Sequence: Synthetic oligonucleotide
gcuggguaccucuggccca

SEQ ID NO: 849317 - RNA, 19 nt, Artificial Sequence
  Description of Artificial Sequence: Synthetic oligonucleotide
agcgggguuugcucuucuu

SEQ ID NO: 849318 - RNA, 19 nt, Artificial Sequence
  Description of Artificial Sequence: Synthetic oligonucleotide
guggcgcuuugagguacag

SEQ ID NO: 849319 - RNA, 19 nt, Artificial Sequence
  Description of Artificial Sequence: Synthetic oligonucleotide
aaaguccggaggggucgua

SEQ ID NO: 849320 - RNA, 19 nt, Artificial Sequence
  Description of Artificial Sequence: Synthetic oligonucleotide
ccggaggggucguaccacc

SEQ ID NO: 849321 - RNA, 19 nt, Artificial Sequence
  Description of Artificial Sequence: Synthetic oligonucleotide
gcaucacuuugcggaggcg

SEQ ID NO: 849322 - RNA, 19 nt, Artificial Sequence
  Description of Artificial Sequence: Synthetic oligonucleotide
caccugacaagcagaggau

SEQ ID NO: 849323 - RNA, 19 nt, Artificial Sequence
  Description of Artificial Sequence: Synthetic oligonucleotide
ggaggggaguguuacguuu

SEQ ID NO: 849324 - RNA, 19 nt, Artificial Sequence
  Description of Artificial Sequence: Synthetic oligonucleotide
uugagccugcgcgccuccu

SEQ ID NO: 849325 - RNA, 19 nt, Artificial Sequence
  Description of Artificial Sequence: Synthetic oligonucleotide
guacuaccuacagaccaau

SEQ ID NO: 849326 - RNA, 19 nt, Artificial Sequence
  Description of Artificial Sequence: Synthetic oligonucleotide
gcguuuccuucugacacuc

SEQ ID NO: 849327 - RNA, 19 nt, Artificial Sequence
  Description of Artificial Sequence: Synthetic oligonucleotide
cacacggaggggaguguua

SEQ ID NO: 849328 - RNA, 19 nt, Artificial Sequence
  Description of Artificial Sequence: Synthetic oligonucleotide
aggcugcuggggacccuac

SEQ ID NO: 849329 - RNA, 19 nt, Artificial Sequence
  Description of Artificial Sequence: Synthetic oligonucleotide
gaaaguccggaggggucgu

SEQ ID NO: 849330 - RNA, 19 nt, Artificial Sequence
  Description of Artificial Sequence: Synthetic oligonucleotide
uagaggcggugaguuccaa

SEQ ID NO: 849331 - RNA, 19 nt, Artificial Sequence
  Description of Artificial Sequence: Synthetic oligonucleotide
cacucauugccugcuugua

SEQ ID NO: 849332 - RNA, 19 nt, Artificial Sequence
  Description of Artificial Sequence: Synthetic oligonucleotide
cgguucacucauugccugc

SEQ ID NO: 849333 - RNA, 19 nt, Artificial Sequence
  Description of Artificial Sequence: Synthetic oligonucleotide
ugccugcuuguagcugcgu

SEQ ID NO: 849334 - RNA, 19 nt, Artificial Sequence
  Description of Artificial Sequence: Synthetic oligonucleotide
cccaguccugccaggagga

SEQ ID NO: 849335 - RNA, 19 nt, Artificial Sequence
  Description of Artificial Sequence: Synthetic oligonucleotide
ccgcucacgggccugcauc

SEQ ID NO: 849336 - RNA, 19 nt, Artificial Sequence
  Description of Artificial Sequence: Synthetic oligonucleotide
caguucccucugaaguugu

SEQ ID NO: 849337 - RNA, 19 nt, Artificial Sequence
  Description of Artificial Sequence: Synthetic oligonucleotide
cucacgggccugcaucacu

SEQ ID NO: 849338 - RNA, 19 nt, Artificial Sequence
  Description of Artificial Sequence: Synthetic oligonucleotide
aguucccucugaaguuguu

SEQ ID NO: 849339 - RNA, 19 nt, Artificial Sequence
  Description of Artificial Sequence: Synthetic oligonucleotide
gguccuuguggagucauuu

SEQ ID NO: 849340 - RNA, 19 nt, Artificial Sequence
  Description of Artificial Sequence: Synthetic oligonucleotide
ccaccuuguuggcuggaca

SEQ ID NO: 849341 - RNA, 19 nt, Artificial Sequence
  Description of Artificial Sequence: Synthetic oligonucleotide
ccgcagagcuuucucucuc

SEQ ID NO: 849342 - RNA, 19 nt, Artificial Sequence
  Description of Artificial Sequence: Synthetic oligonucleotide
gcuuuuagaggcggugagu

SEQ ID NO: 849343 - RNA, 19 nt, Artificial Sequence
  Description of Artificial Sequence: Synthetic oligonucleotide
cgggguuugcucuucuuaa

SEQ ID NO: 849344 - RNA, 19 nt, Artificial Sequence
  Description of Artificial Sequence: Synthetic oligonucleotide
ccuuguggagucauuugau

SEQ ID NO: 849345 - RNA, 19 nt, Artificial Sequence
  Description of Artificial Sequence: Synthetic oligonucleotide
cugacaagcagaggauauu

SEQ ID NO: 849346 - RNA, 19 nt, Artificial Sequence
  Description of Artificial Sequence: Synthetic oligonucleotide
gggcuggcagcaccugaca

SEQ ID NO: 849347 - RNA, 19 nt, Artificial Sequence
  Description of Artificial Sequence: Synthetic oligonucleotide
cacuuugcggaggcgcucu

SEQ ID NO: 849348 - RNA, 19 nt, Artificial Sequence
  Description of Artificial Sequence: Synthetic oligonucleotide
ccagcccaacacagaaaca

SEQ ID NO: 849349 - RNA, 19 nt, Artificial Sequence
  Description of Artificial Sequence: Synthetic oligonucleotide
gcguacuaaucacaaucuu

SEQ ID NO: 849350 - RNA, 19 nt, Artificial Sequence
  Description of Artificial Sequence: Synthetic oligonucleotide
caguccugccaggaggacu

SEQ ID NO: 849351 - RNA, 19 nt, Artificial Sequence
  Description of Artificial Sequence: Synthetic oligonucleotide
gcgucuccugauggcgccg

SEQ ID NO: 849352 - RNA, 19 nt, Artificial Sequence
  Description of Artificial Sequence: Synthetic oligonucleotide
gcgcuuugagguacagcca

SEQ ID NO: 849353 - RNA, 19 nt, Artificial Sequence
  Description of Artificial Sequence: Synthetic oligonucleotide
gguggaugauggccuggcu

SEQ ID NO: 849354 - RNA, 19 nt, Artificial Sequence
  Description of Artificial Sequence: Synthetic oligonucleotide
guccagugggagaaugguu

SEQ ID NO: 849355 - RNA, 19 nt, Artificial Sequence
  Description of Artificial Sequence: Synthetic oligonucleotide
cuguguccaucuguuuggu

SEQ ID NO: 849356 - RNA, 19 nt, Artificial Sequence
  Description of Artificial Sequence: Synthetic oligonucleotide
ccugcuuguagcugcguuu

SEQ ID NO: 849357 - RNA, 19 nt, Artificial Sequence
  Description of Artificial Sequence: Synthetic oligonucleotide
ggcuuucaagguaggcgua

SEQ ID NO: 849358 - RNA, 19 nt, Artificial Sequence
  Description of Artificial Sequence: Synthetic oligonucleotide
ggaggcgcucuucacgcuu

SEQ ID NO: 849359 - RNA, 19 nt, Artificial Sequence
  Description of Artificial Sequence: Synthetic oligonucleotide
ccagacgccgccgcuuguc

SEQ ID NO: 849360 - RNA, 19 nt, Artificial Sequence
  Description of Artificial Sequence: Synthetic oligonucleotide
gcugaucuuggggugggau

SEQ ID NO: 849361 - RNA, 19 nt, Artificial Sequence
  Description of Artificial Sequence: Synthetic oligonucleotide
ccgccuggccucagcugcc

SEQ ID NO: 849362 - RNA, 19 nt, Artificial Sequence
  Description of Artificial Sequence: Synthetic oligonucleotide
gguagcgggguuugcucuu

SEQ ID NO: 849363 - RNA, 19 nt, Artificial Sequence
  Description of Artificial Sequence: Synthetic oligonucleotide
accugccucagggcuucuu

SEQ ID NO: 849364 - RNA, 19 nt, Artificial Sequence
  Description of Artificial Sequence: Synthetic oligonucleotide
ggaggggucguaccaccuu

SEQ ID NO: 849365 - RNA, 19 nt, Artificial Sequence
  Description of Artificial Sequence: Synthetic oligonucleotide
ggcuauaggccaggcugcu

SEQ ID NO: 849366 - RNA, 19 nt, Artificial Sequence
  Description of Artificial Sequence: Synthetic oligonucleotide
cgcucacgggccugcauca

SEQ ID NO: 849367 - RNA, 19 nt, Artificial Sequence
  Description of Artificial Sequence: Synthetic oligonucleotide
ccgaagagcucugcaaggu

SEQ ID NO: 849368 - RNA, 19 nt, Artificial Sequence
  Description of Artificial Sequence: Synthetic oligonucleotide
gcuugugguagcgggguuu

SEQ ID NO: 849369 - RNA, 19 nt, Artificial Sequence
  Description of Artificial Sequence: Synthetic oligonucleotide
cgucuccugauggcgccgc

SEQ ID NO: 849370 - RNA, 19 nt, Artificial Sequence
  Description of Artificial Sequence: Synthetic oligonucleotide
cuucgacauucaggagucu

SEQ ID NO: 849371 - RNA, 19 nt, Artificial Sequence
  Description of Artificial Sequence: Synthetic oligonucleotide
ugguggcacuguggcgcuu

SEQ ID NO: 849372 - RNA, 19 nt, Artificial Sequence
  Description of Artificial Sequence: Synthetic oligonucleotide
gcgcuugugguagcggggu

SEQ ID NO: 849373 - RNA, 19 nt, Artificial Sequence
  Description of Artificial Sequence: Synthetic oligonucleotide
acccgcucacgggccugca

SEQ ID NO: 849374 - RNA, 19 nt, Artificial Sequence
  Description of Artificial Sequence: Synthetic oligonucleotide
ccgcuuguccuccuccacu

SEQ ID NO: 849375 - RNA, 19 nt, Artificial Sequence
  Description of Artificial Sequence: Synthetic oligonucleotide
cagcagagcuagugcgcuu

SEQ ID NO: 849376 - RNA, 19 nt, Artificial Sequence
  Description of Artificial Sequence: Synthetic oligonucleotide
ggggucguaccaccuuguu

SEQ ID NO: 849377 - RNA, 19 nt, Artificial Sequence
  Description of Artificial Sequence: Synthetic oligonucleotide
gguccacacggaggggagu

SEQ ID NO: 849378 - RNA, 19 nt, Artificial Sequence
  Description of Artificial Sequence: Synthetic oligonucleotide
cacgggccugcaucacuuu

SEQ ID NO: 849379 - RNA, 19 nt, Artificial Sequence
  Description of Artificial Sequence: Synthetic oligonucleotide
cugacacucugaggugcuu

SEQ ID NO: 849380 - RNA, 19 nt, Artificial Sequence
  Description of Artificial Sequence: Synthetic oligonucleotide
gggacccuacuggcuuuua

SEQ ID NO: 849381 - RNA, 19 nt, Artificial Sequence
  Description of Artificial Sequence: Synthetic oligonucleotide
cggaggggucguaccaccu

SEQ ID NO: 849382 - RNA, 19 nt, Artificial Sequence
  Description of Artificial Sequence: Synthetic oligonucleotide
ggggacccuacuggcuuuu

SEQ ID NO: 849383 - RNA, 19 nt, Artificial Sequence
  Description of Artificial Sequence: Synthetic oligonucleotide
ggguccuuguggagucauu

SEQ ID NO: 849384 - RNA, 19 nt, Artificial Sequence
  Description of Artificial Sequence: Synthetic oligonucleotide
cggaggggaguguuacguu

SEQ ID NO: 849385 - RNA, 19 nt, Artificial Sequence
  Description of Artificial Sequence: Synthetic oligonucleotide
ccgcgccucuuccuccugu

SEQ ID NO: 849386 - RNA, 19 nt, Artificial Sequence
  Description of Artificial Sequence: Synthetic oligonucleotide
cccgcucacgggccugcau

SEQ ID NO: 849387 - RNA, 19 nt, Artificial Sequence
  Description of Artificial Sequence: Synthetic oligonucleotide
aauauggaaagauagcugg

SEQ ID NO: 849388 - RNA, 19 nt, Artificial Sequence
  Description of Artificial Sequence: Synthetic oligonucleotide
guuucgaugaguuuuaagg

SEQ ID NO: 849389 - RNA, 19 nt, Artificial Sequence
  Description of Artificial Sequence: Synthetic oligonucleotide
uuuaccgcaguuaagacag

SEQ ID NO: 849390 - RNA, 19 nt, Artificial Sequence
  Description of Artificial Sequence: Synthetic oligonucleotide
uucauuuuaguucuggcag

SEQ ID NO: 849391 - RNA, 19 nt, Artificial Sequence
  Description of Artificial Sequence: Synthetic oligonucleotide
aacucuucgaaggaaaacc

SEQ ID NO: 849392 - RNA, 19 nt, Artificial Sequence
  Description of Artificial Sequence: Synthetic oligonucleotide
aaucaaacugucaugggcc

SEQ ID NO: 849393 - RNA, 19 nt, Artificial Sequence
  Description of Artificial Sequence: Synthetic oligonucleotide
acuacugcccauuaguggc

SEQ ID NO: 849394 - RNA, 19 nt, Artificial Sequence
  Description of Artificial Sequence: Synthetic oligonucleotide
gagucuuuuacucagguug

SEQ ID NO: 849395 - RNA, 19 nt, Artificial Sequence
  Description of Artificial Sequence: Synthetic oligonucleotide
acugucaugggccaauucc

SEQ ID NO: 849396 - RNA, 19 nt, Artificial Sequence
  Description of Artificial Sequence: Synthetic oligonucleotide
uuuuaguucuggcagaaug

SEQ ID NO: 849397 - RNA, 19 nt, Artificial Sequence
  Description of Artificial Sequence: Synthetic oligonucleotide
uuuacuagcccaauggcug

SEQ ID NO: 849398 - RNA, 19 nt, Artificial Sequence
  Description of Artificial Sequence: Synthetic oligonucleotide
ucuuguuagguuaaggaga

SEQ ID NO: 849399 - RNA, 19 nt, Artificial Sequence
  Description of Artificial Sequence: Synthetic oligonucleotide
caaaggaucggccacaucc

SEQ ID NO: 849400 - RNA, 19 nt, Artificial Sequence
  Description of Artificial Sequence: Synthetic oligonucleotide
ucuucaagcaaacuacugc

SEQ ID NO: 849401 - RNA, 19 nt, Artificial Sequence
  Description of Artificial Sequence: Synthetic oligonucleotide
aucuccuugguuuaguaac

SEQ ID NO: 849402 - RNA, 19 nt, Artificial Sequence
  Description of Artificial Sequence: Synthetic oligonucleotide
ucgaugaguuuuaaggugg

SEQ ID NO: 849403 - RNA, 19 nt, Artificial Sequence
  Description of Artificial Sequence: Synthetic oligonucleotide
uuugguagauucaaggacu

SEQ ID NO: 849404 - RNA, 19 nt, Artificial Sequence
  Description of Artificial Sequence: Synthetic oligonucleotide
gauucaaggacucuccacc

SEQ ID NO: 849405 - RNA, 19 nt, Artificial Sequence
  Description of Artificial Sequence: Synthetic oligonucleotide
gauucauggcacaugaacg

SEQ ID NO: 849406 - RNA, 19 nt, Artificial Sequence
  Description of Artificial Sequence: Synthetic oligonucleotide
aacuccuguggauuuaccg

SEQ ID NO: 849407 - RNA, 19 nt, Artificial Sequence
  Description of Artificial Sequence: Synthetic oligonucleotide
ucauccugcacaaacacga

SEQ ID NO: 849408 - RNA, 19 nt, Artificial Sequence
  Description of Artificial Sequence: Synthetic oligonucleotide
agugcuaucacuuggcugu

SEQ ID NO: 849409 - RNA, 19 nt, Artificial Sequence
  Description of Artificial Sequence: Synthetic oligonucleotide
gaauagaauugguauuugg

SEQ ID NO: 849410 - RNA, 19 nt, Artificial Sequence
  Description of Artificial Sequence: Synthetic oligonucleotide
uuuagaucuguucccauca

SEQ ID NO: 849411 - RNA, 19 nt, Artificial Sequence
  Description of Artificial Sequence: Synthetic oligonucleotide
ugucacaacauaauuggca

SEQ ID NO: 849412 - RNA, 19 nt, Artificial Sequence
  Description of Artificial Sequence: Synthetic oligonucleotide
aacuacugcccauuagugg

SEQ ID NO: 849413 - RNA, 19 nt, Artificial Sequence
  Description of Artificial Sequence: Synthetic oligonucleotide
ucucaugugaacauuucug

SEQ ID NO: 849414 - RNA, 19 nt, Artificial Sequence
  Description of Artificial Sequence: Synthetic oligonucleotide
gaagggaccuccuuggagg

SEQ ID NO: 849415 - RNA, 19 nt, Artificial Sequence
  Description of Artificial Sequence: Synthetic oligonucleotide
ugcuaaaggaagaauguca

SEQ ID NO: 849416 - RNA, 19 nt, Artificial Sequence
  Description of Artificial Sequence: Synthetic oligonucleotide
acagacuuggcacugauga

SEQ ID NO: 849417 - RNA, 19 nt, Artificial Sequence
  Description of Artificial Sequence: Synthetic oligonucleotide
aguuaaaucuccuugguuu

SEQ ID NO: 849418 - RNA, 19 nt, Artificial Sequence
  Description of Artificial Sequence: Synthetic oligonucleotide
caucugguaacauuagccg

SEQ ID NO: 849419 - RNA, 19 nt, Artificial Sequence
  Description of Artificial Sequence: Synthetic oligonucleotide
augaguuuuaaggugguac

SEQ ID NO: 849420 - RNA, 19 nt, Artificial Sequence
  Description of Artificial Sequence: Synthetic oligonucleotide
uuuuacuagcccaauggcu

SEQ ID NO: 849421 - RNA, 19 nt, Artificial Sequence
  Description of Artificial Sequence: Synthetic oligonucleotide
agcaaucaaacugucaugg

SEQ ID NO: 849422 - RNA, 19 nt, Artificial Sequence
  Description of Artificial Sequence: Synthetic oligonucleotide
auggcugagagucuuuuac

SEQ ID NO: 849423 - RNA, 19 nt, Artificial Sequence
  Description of Artificial Sequence: Synthetic oligonucleotide
ucagauggagguugaaccg

SEQ ID NO: 849424 - RNA, 19 nt, Artificial Sequence
  Description of Artificial Sequence: Synthetic oligonucleotide
cuugaaaugagcuggccac

SEQ ID NO: 849425 - RNA, 19 nt, Artificial Sequence
  Description of Artificial Sequence: Synthetic oligonucleotide
ugaacuaccagguguuucc

SEQ ID NO: 849426 - RNA, 19 nt, Artificial Sequence
  Description of Artificial Sequence: Synthetic oligonucleotide
uuuaguucuggcagaaugu

SEQ ID NO: 849427 - RNA, 19 nt, Artificial Sequence
  Description of Artificial Sequence: Synthetic oligonucleotide
ugaaccgaagccuucagac

SEQ ID NO: 849428 - RNA, 19 nt, Artificial Sequence
  Description of Artificial Sequence: Synthetic oligonucleotide
ucugcggggcacaugaagg

SEQ ID NO: 849429 - RNA, 19 nt, Artificial Sequence
  Description of Artificial Sequence: Synthetic oligonucleotide
uuacucagguugcuaaagg

SEQ ID NO: 849430 - RNA, 19 nt, Artificial Sequence
  Description of Artificial Sequence: Synthetic oligonucleotide
auggagguugaaccgaagc

SEQ ID NO: 849431 - RNA, 19 nt, Artificial Sequence
  Description of Artificial Sequence: Synthetic oligonucleotide
ugaaggcuccucaaaacag

SEQ ID NO: 849432 - RNA, 19 nt, Artificial Sequence
  Description of Artificial Sequence: Synthetic oligonucleotide
gagccuuuagaucuguucc

SEQ ID NO: 849433 - RNA, 19 nt, Artificial Sequence
  Description of Artificial Sequence: Synthetic oligonucleotide
auuaaacuugcuuuugaga

SEQ ID NO: 849434 - RNA, 19 nt, Artificial Sequence
  Description of Artificial Sequence: Synthetic oligonucleotide
agaaacuucauaggacugc

SEQ ID NO: 849435 - RNA, 19 nt, Artificial Sequence
  Description of Artificial Sequence: Synthetic oligonucleotide
uuucgaugaguuuuaaggu

SEQ ID NO: 849436 - RNA, 19 nt, Artificial Sequence
  Description of Artificial Sequence: Synthetic oligonucleotide
caucaguuacugaagacag

SEQ ID NO: 849437 - RNA, 19 nt, Artificial Sequence
  Description of Artificial Sequence: Synthetic oligonucleotide
uggaguaucaucugguaac

SEQ ID NO: 849438 - RNA, 19 nt, Artificial Sequence
  Description of Artificial Sequence: Synthetic oligonucleotide
uucgaugaguuuuaaggug

SEQ ID NO: 849439 - RNA, 19 nt, Artificial Sequence
  Description of Artificial Sequence: Synthetic oligonucleotide
ugugcucucaccagagagg

SEQ ID NO: 849440 - RNA, 19 nt, Artificial Sequence
  Description of Artificial Sequence: Synthetic oligonucleotide
aagucuaccccaaaacuuc

SEQ ID NO: 849441 - RNA, 19 nt, Artificial Sequence
  Description of Artificial Sequence: Synthetic oligonucleotide
caaucaaacugucaugggc

SEQ ID NO: 849442 - RNA, 19 nt, Artificial Sequence
  Description of Artificial Sequence: Synthetic oligonucleotide
cauaauuggcaucacuccc

SEQ ID NO: 849443 - RNA, 19 nt, Artificial Sequence
  Description of Artificial Sequence: Synthetic oligonucleotide
aaaaccugaacagucacaa

SEQ ID NO: 849444 - RNA, 19 nt, Artificial Sequence
  Description of Artificial Sequence: Synthetic oligonucleotide
acaaaugaaaggcuucucu

SEQ ID NO: 849445 - RNA, 19 nt, Artificial Sequence
  Description of Artificial Sequence: Synthetic oligonucleotide
acauuagccgacugcauuc

SEQ ID NO: 849446 - RNA, 19 nt, Artificial Sequence
  Description of Artificial Sequence: Synthetic oligonucleotide
agcccaauggcugagaguc

SEQ ID NO: 849447 - RNA, 19 nt, Artificial Sequence
  Description of Artificial Sequence: Synthetic oligonucleotide
uuaaggugguacuugaaau

SEQ ID NO: 849448 - RNA, 19 nt, Artificial Sequence
  Description of Artificial Sequence: Synthetic oligonucleotide
cucuuguuagguuaaggag

SEQ ID NO: 849449 - RNA, 19 nt, Artificial Sequence
  Description of Artificial Sequence: Synthetic oligonucleotide
caugauuaaacaauaugga

SEQ ID NO: 849450 - RNA, 19 nt, Artificial Sequence
  Description of Artificial Sequence: Synthetic oligonucleotide
uggagguugaaccgaagcc

SEQ ID NO: 849451 - RNA, 19 nt, Artificial Sequence
  Description of Artificial Sequence: Synthetic oligonucleotide
aaggggaggauucaaguaa

SEQ ID NO: 849452 - RNA, 19 nt, Artificial Sequence
  Description of Artificial Sequence: Synthetic oligonucleotide
cauuaaacuugcuuuugag

SEQ ID NO: 849453 - RNA, 19 nt, Artificial Sequence
  Description of Artificial Sequence: Synthetic oligonucleotide
gguuuaguaacuccugugg

SEQ ID NO: 849454 - RNA, 19 nt, Artificial Sequence
  Description of Artificial Sequence: Synthetic oligonucleotide
ucugguaacauuagccgac

SEQ ID NO: 849455 - RNA, 19 nt, Artificial Sequence
  Description of Artificial Sequence: Synthetic oligonucleotide
agaagucuaccccaaaacu

SEQ ID NO: 849456 - RNA, 19 nt, Artificial Sequence
  Description of Artificial Sequence: Synthetic oligonucleotide
aaaggaucggccacauccc

SEQ ID NO: 849457 - RNA, 19 nt, Artificial Sequence
  Description of Artificial Sequence: Synthetic oligonucleotide
agauucaaggacucuccac

SEQ ID NO: 849458 - RNA, 19 nt, Artificial Sequence
  Description of Artificial Sequence: Synthetic oligonucleotide
guuaccucagccugggccg

SEQ ID NO: 849459 - RNA, 19 nt, Artificial Sequence
  Description of Artificial Sequence: Synthetic oligonucleotide
ugaguuuuaaggugguacu

SEQ ID NO: 849460 - RNA, 19 nt, Artificial Sequence
  Description of Artificial Sequence: Synthetic oligonucleotide
aagaauagaauugguauuu

SEQ ID NO: 849461 - RNA, 19 nt, Artificial Sequence
  Description of Artificial Sequence: Synthetic oligonucleotide
auagaauugguauuuggua

SEQ ID NO: 849462 - RNA, 19 nt, Artificial Sequence
  Description of Artificial Sequence: Synthetic oligonucleotide
aaccgaagccuucagacaa

SEQ ID NO: 849463 - RNA, 19 nt, Artificial Sequence
  Description of Artificial Sequence: Synthetic oligonucleotide
ugcauggucaccaaaugau

SEQ ID NO: 849464 - RNA, 19 nt, Artificial Sequence
  Description of Artificial Sequence: Synthetic oligonucleotide
agccuuuagaucuguuccc

SEQ ID NO: 849465 - RNA, 19 nt, Artificial Sequence
  Description of Artificial Sequence: Synthetic oligonucleotide
aaccaagguggacauuuuc

SEQ ID NO: 849466 - RNA, 19 nt, Artificial Sequence
  Description of Artificial Sequence: Synthetic oligonucleotide
gugaggauccuucagugag

SEQ ID NO: 849467 - RNA, 19 nt, Artificial Sequence
  Description of Artificial Sequence: Synthetic oligonucleotide
uuuacuggguacugaagcu

SEQ ID NO: 849468 - RNA, 19 nt, Artificial Sequence
  Description of Artificial Sequence: Synthetic oligonucleotide
aagacagagggcgugagga

SEQ ID NO: 849469 - RNA, 19 nt, Artificial Sequence
  Description of Artificial Sequence: Synthetic oligonucleotide
auggaaagauagcuggguc

SEQ ID NO: 849470 - RNA, 19 nt, Artificial Sequence
  Description of Artificial Sequence: Synthetic oligonucleotide
agguuaaggagaauaaaag

SEQ ID NO: 849471 - RNA, 19 nt, Artificial Sequence
  Description of Artificial Sequence: Synthetic oligonucleotide
aaggagaauaaaagaagug

SEQ ID NO: 849472 - RNA, 19 nt, Artificial Sequence
  Description of Artificial Sequence: Synthetic oligonucleotide
uuuaguaacuccuguggau

SEQ ID NO: 849473 - RNA, 19 nt, Artificial Sequence
  Description of Artificial Sequence: Synthetic oligonucleotide
auuuaccgcaguuaagaca

SEQ ID NO: 849474 - RNA, 19 nt, Artificial Sequence
  Description of Artificial Sequence: Synthetic oligonucleotide
ucacaucaguuacugaaga

SEQ ID NO: 849475 - RNA, 19 nt, Artificial Sequence
  Description of Artificial Sequence: Synthetic oligonucleotide
aacuucgcaguagaaagug

SEQ ID NO: 849476 - RNA, 19 nt, Artificial Sequence
  Description of Artificial Sequence: Synthetic oligonucleotide
agaauugguauuugguaga

SEQ ID NO: 849477 - RNA, 19 nt, Artificial Sequence
  Description of Artificial Sequence: Synthetic oligonucleotide
uguuagguuaaggagaaua

SEQ ID NO: 849478 - RNA, 19 nt, Artificial Sequence
  Description of Artificial Sequence: Synthetic oligonucleotide
uucaagcaaacuacugccc

SEQ ID NO: 849479 - RNA, 19 nt, Artificial Sequence
  Description of Artificial Sequence: Synthetic oligonucleotide
gagaagucuaccccaaaac

SEQ ID NO: 849480 - RNA, 19 nt, Artificial Sequence
  Description of Artificial Sequence: Synthetic oligonucleotide
aaacuugcuuuugagagaa

SEQ ID NO: 849481 - RNA, 19 nt, Artificial Sequence
  Description of Artificial Sequence: Synthetic oligonucleotide
ucauaggacugccuccccg

SEQ ID NO: 849482 - RNA, 19 nt, Artificial Sequence
  Description of Artificial Sequence: Synthetic oligonucleotide
gucacaaugaaaaucuuca

SEQ ID NO: 849483 - RNA, 19 nt, Artificial Sequence
  Description of Artificial Sequence: Synthetic oligonucleotide
ucagacaacacaggcgagg

SEQ ID NO: 849484 - RNA, 19 nt, Artificial Sequence
  Description of Artificial Sequence: Synthetic oligonucleotide
acaaacacgaagugcucag

SEQ ID NO: 849485 - RNA, 19 nt, Artificial Sequence
  Description of Artificial Sequence: Synthetic oligonucleotide
ugugucacaucaguuacug

SEQ ID NO: 849486 - RNA, 19 nt, Artificial Sequence
  Description of Artificial Sequence: Synthetic oligonucleotide
ugaugugucacaucaguua

SEQ ID NO: 849487 - RNA, 19 nt, Artificial Sequence
  Description of Artificial Sequence: Synthetic oligonucleotide
agaauaaaagaagugcuau

SEQ ID NO: 849488 - RNA, 19 nt, Artificial Sequence
  Description of Artificial Sequence: Synthetic oligonucleotide
gaaaaucuucauccaacac

SEQ ID NO: 849489 - RNA, 19 nt, Artificial Sequence
  Description of Artificial Sequence: Synthetic oligonucleotide
uuuguuaccucagccuggg

SEQ ID NO: 849490 - RNA, 19 nt, Artificial Sequence
  Description of Artificial Sequence: Synthetic oligonucleotide
aacacgaagugcucagcug

SEQ ID NO: 849491 - RNA, 19 nt, Artificial Sequence
  Description of Artificial Sequence: Synthetic oligonucleotide
uucacaaaugaaaggcuuc

SEQ ID NO: 849492 - RNA, 19 nt, Artificial Sequence
  Description of Artificial Sequence: Synthetic oligonucleotide
uaaacuugcuuuugagaga

SEQ ID NO: 849493 - RNA, 19 nt, Artificial Sequence
  Description of Artificial Sequence: Synthetic oligonucleotide
aacauuagccgacugcauu

SEQ ID NO: 849494 - RNA, 19 nt, Artificial Sequence
  Description of Artificial Sequence: Synthetic oligonucleotide
aaggugguacuugaaauga

SEQ ID NO: 849495 - RNA, 19 nt, Artificial Sequence
  Description of Artificial Sequence: Synthetic oligonucleotide
cacaugaacggcuucuccc

SEQ ID NO: 849496 - RNA, 19 nt, Artificial Sequence
  Description of Artificial Sequence: Synthetic oligonucleotide
uucucaugugaacauuucu

SEQ ID NO: 849497 - RNA, 19 nt, Artificial Sequence
  Description of Artificial Sequence: Synthetic oligonucleotide
aagauagcugggucuagca

SEQ ID NO: 849498 - RNA, 19 nt, Artificial Sequence
  Description of Artificial Sequence: Synthetic oligonucleotide
agucuuuuacucagguugc

SEQ ID NO: 849499 - RNA, 19 nt, Artificial Sequence
  Description of Artificial Sequence: Synthetic oligonucleotide
uucgcaguagaaagugaag

SEQ ID NO: 849500 - RNA, 19 nt, Artificial Sequence
  Description of Artificial Sequence: Synthetic oligonucleotide
ucuaccccaaaacuucgca

SEQ ID NO: 849501 - RNA, 19 nt, Artificial Sequence
  Description of Artificial Sequence: Synthetic oligonucleotide
ucgcaguagaaagugaagc

SEQ ID NO: 849502 - RNA, 19 nt, Artificial Sequence
  Description of Artificial Sequence: Synthetic oligonucleotide
aacuaccagguguuuccgg

SEQ ID NO: 849503 - RNA, 19 nt, Artificial Sequence
  Description of Artificial Sequence: Synthetic oligonucleotide
ugguacuugaaaugagcug

SEQ ID NO: 849504 - RNA, 19 nt, Artificial Sequence
  Description of Artificial Sequence: Synthetic oligonucleotide
acggugguucuucagguuc

SEQ ID NO: 849505 - RNA, 19 nt, Artificial Sequence
  Description of Artificial Sequence: Synthetic oligonucleotide
cuuggaggaguuagugugg

SEQ ID NO: 849506 - RNA, 19 nt, Artificial Sequence
  Description of Artificial Sequence: Synthetic oligonucleotide
agcuacagguauccagccc

SEQ ID NO: 849507 - RNA, 19 nt, Artificial Sequence
  Description of Artificial Sequence: Synthetic oligonucleotide
uuagccgacugcauucuga

SEQ ID NO: 849508 - RNA, 19 nt, Artificial Sequence
  Description of Artificial Sequence: Synthetic oligonucleotide
acacgaagugcucagcuga

SEQ ID NO: 849509 - RNA, 19 nt, Artificial Sequence
  Description of Artificial Sequence: Synthetic oligonucleotide
agcuaggcgacucuggagu

SEQ ID NO: 849510 - RNA, 19 nt, Artificial Sequence
  Description of Artificial Sequence: Synthetic oligonucleotide
aacugucaugggccaauuc

SEQ ID NO: 849511 - RNA, 19 nt, Artificial Sequence
  Description of Artificial Sequence: Synthetic oligonucleotide
aucaucaacuccaagaaua

SEQ ID NO: 849512 - RNA, 19 nt, Artificial Sequence
  Description of Artificial Sequence: Synthetic oligonucleotide
ugaggccucagucacugga

SEQ ID NO: 849513 - RNA, 19 nt, Artificial Sequence
  Description of Artificial Sequence: Synthetic oligonucleotide
uucugcggggcacaugaag

SEQ ID NO: 849514 - RNA, 19 nt, Artificial Sequence
  Description of Artificial Sequence: Synthetic oligonucleotide
uaccccaaaacuucgcagu

SEQ ID NO: 849515 - RNA, 19 nt, Artificial Sequence
  Description of Artificial Sequence: Synthetic oligonucleotide
gguugcuaaaggaagaaug

SEQ ID NO: 849516 - RNA, 19 nt, Artificial Sequence
  Description of Artificial Sequence: Synthetic oligonucleotide
uagaucuugcaacaagcua

SEQ ID NO: 849517 - RNA, 19 nt, Artificial Sequence
  Description of Artificial Sequence: Synthetic oligonucleotide
aucugguaacauuagccga

SEQ ID NO: 849518 - RNA, 19 nt, Artificial Sequence
  Description of Artificial Sequence: Synthetic oligonucleotide
cucagucacuggaaggagg

SEQ ID NO: 849519 - RNA, 19 nt, Artificial Sequence
  Description of Artificial Sequence: Synthetic oligonucleotide
gguaacauuagccgacugc

SEQ ID NO: 849520 - RNA, 19 nt, Artificial Sequence
  Description of Artificial Sequence: Synthetic oligonucleotide
uuagguuaaggagaauaaa

SEQ ID NO: 849521 - RNA, 19 nt, Artificial Sequence
  Description of Artificial Sequence: Synthetic oligonucleotide
aagcuaggcgacucuggag

SEQ ID NO: 849522 - RNA, 19 nt, Artificial Sequence
  Description of Artificial Sequence: Synthetic oligonucleotide
cuuuagaucuguucccauc

SEQ ID NO: 849523 - RNA, 19 nt, Artificial Sequence
  Description of Artificial Sequence: Synthetic oligonucleotide
cuuuugagagaagucuacc

SEQ ID NO: 849524 - RNA, 19 nt, Artificial Sequence
  Description of Artificial Sequence: Synthetic oligonucleotide
acuaccagguguuuccgga

SEQ ID NO: 849525 - RNA, 19 nt, Artificial Sequence
  Description of Artificial Sequence: Synthetic oligonucleotide
guagauucaaggacucucc

SEQ ID NO: 849526 - RNA, 19 nt, Artificial Sequence
  Description of Artificial Sequence: Synthetic oligonucleotide
ugaggauccuucagugagc

SEQ ID NO: 849527 - RNA, 19 nt, Artificial Sequence
  Description of Artificial Sequence: Synthetic oligonucleotide
aauuggcaucacucccuuc

SEQ ID NO: 849528 - RNA, 19 nt, Artificial Sequence
  Description of Artificial Sequence: Synthetic oligonucleotide
ucauggcacaugaacggcu

SEQ ID NO: 849529 - RNA, 19 nt, Artificial Sequence
  Description of Artificial Sequence: Synthetic oligonucleotide
acagagggcgugaggaucc

SEQ ID NO: 849530 - RNA, 19 nt, Artificial Sequence
  Description of Artificial Sequence: Synthetic oligonucleotide
ucaccaaaugaugugucac

SEQ ID NO: 849531 - RNA, 19 nt, Artificial Sequence
  Description of Artificial Sequence: Synthetic oligonucleotide
cuucauaggacugccuccc

SEQ ID NO: 849532 - RNA, 19 nt, Artificial Sequence
  Description of Artificial Sequence: Synthetic oligonucleotide
uagccgacugcauucugag

SEQ ID NO: 849533 - RNA, 19 nt, Artificial Sequence
  Description of Artificial Sequence: Synthetic oligonucleotide
cuuguuagguuaaggagaa

SEQ ID NO: 849534 - RNA, 19 nt, Artificial Sequence
  Description of Artificial Sequence: Synthetic oligonucleotide
uacucagcaaaggaucggc

SEQ ID NO: 849535 - RNA, 19 nt, Artificial Sequence
  Description of Artificial Sequence: Synthetic oligonucleotide
uugguagauucaaggacuc

SEQ ID NO: 849536 - RNA, 19 nt, Artificial Sequence
  Description of Artificial Sequence: Synthetic oligonucleotide
cuuuuacucagguugcuaa

SEQ ID NO: 849537 - RNA, 19 nt, Artificial Sequence
  Description of Artificial Sequence: Synthetic oligonucleotide
augucacaacauaauuggc

SEQ ID NO: 849538 - RNA, 19 nt, Artificial Sequence
  Description of Artificial Sequence: Synthetic oligonucleotide
uacuggguacugaagcuuc

SEQ ID NO: 849539 - RNA, 19 nt, Artificial Sequence
  Description of Artificial Sequence: Synthetic oligonucleotide
cagaaacuucauaggacug

SEQ ID NO: 849540 - RNA, 19 nt, Artificial Sequence
  Description of Artificial Sequence: Synthetic oligonucleotide
agaauagaauugguauuug

SEQ ID NO: 849541 - RNA, 19 nt, Artificial Sequence
  Description of Artificial Sequence: Synthetic oligonucleotide
aaacuucgcaguagaaagu

SEQ ID NO: 849542 - RNA, 19 nt, Artificial Sequence
  Description of Artificial Sequence: Synthetic oligonucleotide
gacagauccccuccuccag

SEQ ID NO: 849543 - RNA, 19 nt, Artificial Sequence
  Description of Artificial Sequence: Synthetic oligonucleotide
guggauuuaccgcaguuaa

SEQ ID NO: 849544 - RNA, 19 nt, Artificial Sequence
  Description of Artificial Sequence: Synthetic oligonucleotide
ccuucagacaacacaggcg

SEQ ID NO: 849545 - RNA, 19 nt, Artificial Sequence
  Description of Artificial Sequence: Synthetic oligonucleotide
guuuccggaggcuugaaua

SEQ ID NO: 849546 - RNA, 19 nt, Artificial Sequence
  Description of Artificial Sequence: Synthetic oligonucleotide
auaggacugccuccccgac

SEQ ID NO: 849547 - RNA, 19 nt, Artificial Sequence
  Description of Artificial Sequence: Synthetic oligonucleotide
uggacuggggauucauaga

SEQ ID NO: 849548 - RNA, 19 nt, Artificial Sequence
  Description of Artificial Sequence: Synthetic oligonucleotide
cacacaaauguccggucac

SEQ ID NO: 849549 - RNA, 19 nt, Artificial Sequence
  Description of Artificial Sequence: Synthetic oligonucleotide
aagggaccuccuuggagga

SEQ ID NO: 849550 - RNA, 19 nt, Artificial Sequence
  Description of Artificial Sequence: Synthetic oligonucleotide
auuaaacaauauggaaaga

SEQ ID NO: 849551 - RNA, 19 nt, Artificial Sequence
  Description of Artificial Sequence: Synthetic oligonucleotide
acucagcaaaggaucggcc

SEQ ID NO: 849552 - RNA, 19 nt, Artificial Sequence
  Description of Artificial Sequence: Synthetic oligonucleotide
uccuguggauuuaccgcag

SEQ ID NO: 849553 - RNA, 19 nt, Artificial Sequence
  Description of Artificial Sequence: Synthetic oligonucleotide
guuagguuaaggagaauaa

SEQ ID NO: 849554 - RNA, 19 nt, Artificial Sequence
  Description of Artificial Sequence: Synthetic oligonucleotide
cuagcccaauggcugagag

SEQ ID NO: 849555 - RNA, 19 nt, Artificial Sequence
  Description of Artificial Sequence: Synthetic oligonucleotide
gaacuaccagguguuuccg

SEQ ID NO: 849556 - RNA, 19 nt, Artificial Sequence
  Description of Artificial Sequence: Synthetic oligonucleotide
acaucccugggcuucacaa

SEQ ID NO: 849557 - RNA, 19 nt, Artificial Sequence
  Description of Artificial Sequence: Synthetic oligonucleotide
ugguuuggaguaucaucug

SEQ ID NO: 849558 - RNA, 19 nt, Artificial Sequence
  Description of Artificial Sequence: Synthetic oligonucleotide
gcacucuggggucagacag

SEQ ID NO: 849559 - RNA, 19 nt, Artificial Sequence
  Description of Artificial Sequence: Synthetic oligonucleotide
gaaccgaagccuucagaca

SEQ ID NO: 849560 - RNA, 19 nt, Artificial Sequence
  Description of Artificial Sequence: Synthetic oligonucleotide
gcuaaaggaagaaugucac

SEQ ID NO: 849561 - RNA, 19 nt, Artificial Sequence
  Description of Artificial Sequence: Synthetic oligonucleotide
acgaguagcagcaaucaaa

SEQ ID NO: 849562 - RNA, 19 nt, Artificial Sequence
  Description of Artificial Sequence: Synthetic oligonucleotide
uggaucagauggagguuga

SEQ ID NO: 849563 - RNA, 19 nt, Artificial Sequence
  Description of Artificial Sequence: Synthetic oligonucleotide
agguuguuccuguucuuga

SEQ ID NO: 849564 - RNA, 19 nt, Artificial Sequence
  Description of Artificial Sequence: Synthetic oligonucleotide
accaagguggacauuuucu

SEQ ID NO: 849565 - RNA, 19 nt, Artificial Sequence
  Description of Artificial Sequence: Synthetic oligonucleotide
uaacuccuguggauuuacc

SEQ ID NO: 849566 - RNA, 19 nt, Artificial Sequence
  Description of Artificial Sequence: Synthetic oligonucleotide
agucuaccccaaaacuucg

SEQ ID NO: 849567 - RNA, 19 nt, Artificial Sequence
  Description of Artificial Sequence: Synthetic oligonucleotide
ugguaacauuagccgacug

SEQ ID NO: 849568 - RNA, 19 nt, Artificial Sequence
  Description of Artificial Sequence: Synthetic oligonucleotide
acguucaccugaaggcucc

SEQ ID NO: 849569 - RNA, 19 nt, Artificial Sequence
  Description of Artificial Sequence: Synthetic oligonucleotide
gcuacagguauccagccca

SEQ ID NO: 849570 - RNA, 19 nt, Artificial Sequence
  Description of Artificial Sequence: Synthetic oligonucleotide
cugugcacgaguagcagca

SEQ ID NO: 849571 - RNA, 19 nt, Artificial Sequence
  Description of Artificial Sequence: Synthetic oligonucleotide
cagaccugcucuuguuagg

SEQ ID NO: 849572 - RNA, 19 nt, Artificial Sequence
  Description of Artificial Sequence: Synthetic oligonucleotide
aucccugggcuucacaaau

SEQ ID NO: 849573 - RNA, 19 nt, Artificial Sequence
  Description of Artificial Sequence: Synthetic oligonucleotide
gcaaucaaacugucauggg

SEQ ID NO: 849574 - RNA, 19 nt, Artificial Sequence
  Description of Artificial Sequence: Synthetic oligonucleotide
ggcuugaauacucagcaaa

SEQ ID NO: 849575 - RNA, 19 nt, Artificial Sequence
  Description of Artificial Sequence: Synthetic oligonucleotide
gcuugaauacucagcaaag

SEQ ID NO: 849576 - RNA, 19 nt, Artificial Sequence
  Description of Artificial Sequence: Synthetic oligonucleotide
guugcuaaaggaagaaugu

SEQ ID NO: 849577 - RNA, 19 nt, Artificial Sequence
  Description of Artificial Sequence: Synthetic oligonucleotide
cuaccagguguuuccggag

SEQ ID NO: 849578 - RNA, 19 nt, Artificial Sequence
  Description of Artificial Sequence: Synthetic oligonucleotide
ucagacagauccccuccuc

SEQ ID NO: 849579 - RNA, 19 nt, Artificial Sequence
  Description of Artificial Sequence: Synthetic oligonucleotide
gguagauucaaggacucuc

SEQ ID NO: 849580 - RNA, 19 nt, Artificial Sequence
  Description of Artificial Sequence: Synthetic oligonucleotide
acaagcuaggcgacucugg

SEQ ID NO: 849581 - RNA, 19 nt, Artificial Sequence
  Description of Artificial Sequence: Synthetic oligonucleotide
caucgccagaaccaaggug

SEQ ID NO: 849582 - RNA, 19 nt, Artificial Sequence
  Description of Artificial Sequence: Synthetic oligonucleotide
guagcagcaaucaaacugu

SEQ ID NO: 849583 - RNA, 19 nt, Artificial Sequence
  Description of Artificial Sequence: Synthetic oligonucleotide
ugccuccccgacugcaugg

SEQ ID NO: 849584 - RNA, 19 nt, Artificial Sequence
  Description of Artificial Sequence: Synthetic oligonucleotide
gggcuucacaaaugaaagg

SEQ ID NO: 849585 - RNA, 19 nt, Artificial Sequence
  Description of Artificial Sequence: Synthetic oligonucleotide
gguauuugguagauucaag

SEQ ID NO: 849586 - RNA, 19 nt, Artificial Sequence
  Description of Artificial Sequence: Synthetic oligonucleotide
gucaccaaaugauguguca

SEQ ID NO: 849587 - RNA, 19 nt, Artificial Sequence
  Description of Artificial Sequence: Synthetic oligonucleotide
acucuucgaaggaaaaccu

SEQ ID NO: 849588 - RNA, 19 nt, Artificial Sequence
  Description of Artificial Sequence: Synthetic oligonucleotide
cucccacucugagaaaagg

SEQ ID NO: 849589 - RNA, 19 nt, Artificial Sequence
  Description of Artificial Sequence: Synthetic oligonucleotide
uugcaacaagcuaggcgac

SEQ ID NO: 849590 - RNA, 19 nt, Artificial Sequence
  Description of Artificial Sequence: Synthetic oligonucleotide
ugcacucuggggucagaca

SEQ ID NO: 849591 - RNA, 19 nt, Artificial Sequence
  Description of Artificial Sequence: Synthetic oligonucleotide
ucuuuuacucagguugcua

SEQ ID NO: 849592 - RNA, 19 nt, Artificial Sequence
  Description of Artificial Sequence: Synthetic oligonucleotide
gugaugcuuucucauguga

SEQ ID NO: 849593 - RNA, 19 nt, Artificial Sequence
  Description of Artificial Sequence: Synthetic oligonucleotide
auuagccgacugcauucug

SEQ ID NO: 849594 - RNA, 19 nt, Artificial Sequence
  Description of Artificial Sequence: Synthetic oligonucleotide
aggagcgcucguuucgaug

SEQ ID NO: 849595 - RNA, 19 nt, Artificial Sequence
  Description of Artificial Sequence: Synthetic oligonucleotide
guacuugaaaugagcuggc

SEQ ID NO: 849596 - RNA, 19 nt, Artificial Sequence
  Description of Artificial Sequence: Synthetic oligonucleotide
ggaguggacagaaacucug

SEQ ID NO: 849597 - RNA, 19 nt, Artificial Sequence
  Description of Artificial Sequence: Synthetic oligonucleotide
uuacuggguacugaagcuu

SEQ ID NO: 849598 - RNA, 19 nt, Artificial Sequence
  Description of Artificial Sequence: Synthetic oligonucleotide
aagcaaacuacugcccauu

SEQ ID NO: 849599 - RNA, 19 nt, Artificial Sequence
  Description of Artificial Sequence: Synthetic oligonucleotide
ucuuuggguugcccaucgc

SEQ ID NO: 849600 - RNA, 19 nt, Artificial Sequence
  Description of Artificial Sequence: Synthetic oligonucleotide
acacaggcgaggcgagguc

SEQ ID NO: 849601 - RNA, 19 nt, Artificial Sequence
  Description of Artificial Sequence: Synthetic oligonucleotide
gcaaacuacugcccauuag

SEQ ID NO: 849602 - RNA, 19 nt, Artificial Sequence
  Description of Artificial Sequence: Synthetic oligonucleotide
ugcgacggugguucuucag

SEQ ID NO: 849603 - RNA, 19 nt, Artificial Sequence
  Description of Artificial Sequence: Synthetic oligonucleotide
gacagagggcgugaggauc

SEQ ID NO: 849604 - RNA, 19 nt, Artificial Sequence
  Description of Artificial Sequence: Synthetic oligonucleotide
caaacacgaagugcucagc

SEQ ID NO: 849605 - RNA, 19 nt, Artificial Sequence
  Description of Artificial Sequence: Synthetic oligonucleotide
gaagagcccagaccugcuc

SEQ ID NO: 849606 - RNA, 19 nt, Artificial Sequence
  Description of Artificial Sequence: Synthetic oligonucleotide
cauaggacugccuccccga

SEQ ID NO: 849607 - RNA, 19 nt, Artificial Sequence
  Description of Artificial Sequence: Synthetic oligonucleotide
ggagcgcucguuucgauga

SEQ ID NO: 849608 - RNA, 19 nt, Artificial Sequence
  Description of Artificial Sequence: Synthetic oligonucleotide
cacguucaccugaaggcuc

SEQ ID NO: 849609 - RNA, 19 nt, Artificial Sequence
  Description of Artificial Sequence: Synthetic oligonucleotide
gauggagguugaaccgaag

SEQ ID NO: 849610 - RNA, 19 nt, Artificial Sequence
  Description of Artificial Sequence: Synthetic oligonucleotide
aauugguauuugguagauu

SEQ ID NO: 849611 - RNA, 19 nt, Artificial Sequence
  Description of Artificial Sequence: Synthetic oligonucleotide
guaacuccuguggauuuac

SEQ ID NO: 849612 - RNA, 19 nt, Artificial Sequence
  Description of Artificial Sequence: Synthetic oligonucleotide
agccgacugcauucugagg

SEQ ID NO: 849613 - RNA, 19 nt, Artificial Sequence
  Description of Artificial Sequence: Synthetic oligonucleotide
ucauugccugaauccucug

SEQ ID NO: 849614 - RNA, 19 nt, Artificial Sequence
  Description of Artificial Sequence: Synthetic oligonucleotide
caagcuaggcgacucugga

SEQ ID NO: 849615 - RNA, 19 nt, Artificial Sequence
  Description of Artificial Sequence: Synthetic oligonucleotide
gaagcaggacaugauuaaa

SEQ ID NO: 849616 - RNA, 19 nt, Artificial Sequence
  Description of Artificial Sequence: Synthetic oligonucleotide
aggggcccagaaucuuugg

SEQ ID NO: 849617 - RNA, 19 nt, Artificial Sequence
  Description of Artificial Sequence: Synthetic oligonucleotide
ugcucccagcugcaaguga

SEQ ID NO: 849618 - RNA, 19 nt, Artificial Sequence
  Description of Artificial Sequence: Synthetic oligonucleotide
ucuccgucugggcccacgu

SEQ ID NO: 849619 - RNA, 19 nt, Artificial Sequence
  Description of Artificial Sequence: Synthetic oligonucleotide
cucaccagagaggaaguca

SEQ ID NO: 849620 - RNA, 19 nt, Artificial Sequence
  Description of Artificial Sequence: Synthetic oligonucleotide
uacuagcccaauggcugag

SEQ ID NO: 849621 - RNA, 19 nt, Artificial Sequence
  Description of Artificial Sequence: Synthetic oligonucleotide
ugugagccuuuagaucugu

SEQ ID NO: 849622 - RNA, 19 nt, Artificial Sequence
  Description of Artificial Sequence: Synthetic oligonucleotide
ccagaccugcucuuguuag

SEQ ID NO: 849623 - RNA, 19 nt, Artificial Sequence
  Description of Artificial Sequence: Synthetic oligonucleotide
cacaaacacgaagugcuca

SEQ ID NO: 849624 - RNA, 19 nt, Artificial Sequence
  Description of Artificial Sequence: Synthetic oligonucleotide
aggugguacuugaaaugag

SEQ ID NO: 849625 - RNA, 19 nt, Artificial Sequence
  Description of Artificial Sequence: Synthetic oligonucleotide
gcugugcacgaguagcagc

SEQ ID NO: 849626 - RNA, 19 nt, Artificial Sequence
  Description of Artificial Sequence: Synthetic oligonucleotide
agugaagcagcuacaggua

SEQ ID NO: 849627 - RNA, 19 nt, Artificial Sequence
  Description of Artificial Sequence: Synthetic oligonucleotide
agcugugcacgaguagcag

SEQ ID NO: 849628 - RNA, 19 nt, Artificial Sequence
  Description of Artificial Sequence: Synthetic oligonucleotide
gcgugaggauccuucagug

SEQ ID NO: 849629 - RNA, 19 nt, Artificial Sequence
  Description of Artificial Sequence: Synthetic oligonucleotide
ugguagauucaaggacucu

SEQ ID NO: 849630 - RNA, 19 nt, Artificial Sequence
  Description of Artificial Sequence: Synthetic oligonucleotide
ccagcugugcacgaguagc

SEQ ID NO: 849631 - RNA, 19 nt, Artificial Sequence
  Description of Artificial Sequence: Synthetic oligonucleotide
aaggagcgcucguuucgau

SEQ ID NO: 849632 - RNA, 19 nt, Artificial Sequence
  Description of Artificial Sequence: Synthetic oligonucleotide
ugcuaucacuuggcuguag

SEQ ID NO: 849633 - RNA, 19 nt, Artificial Sequence
  Description of Artificial Sequence: Synthetic oligonucleotide
augaugugucacaucaguu

SEQ ID NO: 849634 - RNA, 19 nt, Artificial Sequence
  Description of Artificial Sequence: Synthetic oligonucleotide
uuguuaccucagccugggc

SEQ ID NO: 849635 - RNA, 19 nt, Artificial Sequence
  Description of Artificial Sequence: Synthetic oligonucleotide
uccugguuggaagcaggac

SEQ ID NO: 849636 - RNA, 19 nt, Artificial Sequence
  Description of Artificial Sequence: Synthetic oligonucleotide
uccccguuguguguccuca

SEQ ID NO: 849637 - RNA, 19 nt, Artificial Sequence
  Description of Artificial Sequence: Synthetic oligonucleotide
agguggacauuuucuccau

SEQ ID NO: 849638 - RNA, 19 nt, Artificial Sequence
  Description of Artificial Sequence: Synthetic oligonucleotide
acaacacaggcgaggcgag

SEQ ID NO: 849639 - RNA, 19 nt, Artificial Sequence
  Description of Artificial Sequence: Synthetic oligonucleotide
cugucaugggccaauuccu

SEQ ID NO: 849640 - RNA, 19 nt, Artificial Sequence
  Description of Artificial Sequence: Synthetic oligonucleotide
acgaagugcucagcugaag

SEQ ID NO: 849641 - RNA, 19 nt, Artificial Sequence
  Description of Artificial Sequence: Synthetic oligonucleotide
aucaguuacugaagacaga

SEQ ID NO: 849642 - RNA, 19 nt, Artificial Sequence
  Description of Artificial Sequence: Synthetic oligonucleotide
uuaccgcaguuaagacaga

SEQ ID NO: 849643 - RNA, 19 nt, Artificial Sequence
  Description of Artificial Sequence: Synthetic oligonucleotide
gagcgcucguuucgaugag

SEQ ID NO: 849644 - RNA, 19 nt, Artificial Sequence
  Description of Artificial Sequence: Synthetic oligonucleotide
gacuuggcacugaugaggu

SEQ ID NO: 849645 - RNA, 19 nt, Artificial Sequence
  Description of Artificial Sequence: Synthetic oligonucleotide
cucguuucgaugaguuuua

SEQ ID NO: 849646 - RNA, 19 nt, Artificial Sequence
  Description of Artificial Sequence: Synthetic oligonucleotide
aaacugucaugggccaauu

SEQ ID NO: 849647 - RNA, 19 nt, Artificial Sequence
  Description of Artificial Sequence: Synthetic oligonucleotide
agguugcuaaaggaagaau

SEQ ID NO: 849648 - RNA, 19 nt, Artificial Sequence
  Description of Artificial Sequence: Synthetic oligonucleotide
gucuaccccaaaacuucgc

SEQ ID NO: 849649 - RNA, 19 nt, Artificial Sequence
  Description of Artificial Sequence: Synthetic oligonucleotide
ggaguaucaucugguaaca

SEQ ID NO: 849650 - RNA, 19 nt, Artificial Sequence
  Description of Artificial Sequence: Synthetic oligonucleotide
aggaaggggcccagaaucu

SEQ ID NO: 849651 - RNA, 19 nt, Artificial Sequence
  Description of Artificial Sequence: Synthetic oligonucleotide
ggacccggaggaaccaugg

SEQ ID NO: 849652 - RNA, 19 nt, Artificial Sequence
  Description of Artificial Sequence: Synthetic oligonucleotide
cagauggagguugaaccga

SEQ ID NO: 849653 - RNA, 19 nt, Artificial Sequence
  Description of Artificial Sequence: Synthetic oligonucleotide
cagcugugcacgaguagca

SEQ ID NO: 849654 - RNA, 19 nt, Artificial Sequence
  Description of Artificial Sequence: Synthetic oligonucleotide
ggaaagauagcugggucua

SEQ ID NO: 849655 - RNA, 19 nt, Artificial Sequence
  Description of Artificial Sequence: Synthetic oligonucleotide
acaugaaggagcgcucguu

SEQ ID NO: 849656 - RNA, 19 nt, Artificial Sequence
  Description of Artificial Sequence: Synthetic oligonucleotide
augugucacaucaguuacu

SEQ ID NO: 849657 - RNA, 19 nt, Artificial Sequence
  Description of Artificial Sequence: Synthetic oligonucleotide
aggggaggauucaaguaau

SEQ ID NO: 849658 - RNA, 19 nt, Artificial Sequence
  Description of Artificial Sequence: Synthetic oligonucleotide
agauggagguugaaccgaa

SEQ ID NO: 849659 - RNA, 19 nt, Artificial Sequence
  Description of Artificial Sequence: Synthetic oligonucleotide
ggagguugaaccgaagccu

SEQ ID NO: 849660 - RNA, 19 nt, Artificial Sequence
  Description of Artificial Sequence: Synthetic oligonucleotide
agcuggccacacaaauguc

SEQ ID NO: 849661 - RNA, 19 nt, Artificial Sequence
  Description of Artificial Sequence: Synthetic oligonucleotide
caucaacuccaagaauaga

SEQ ID NO: 849662 - RNA, 19 nt, Artificial Sequence
  Description of Artificial Sequence: Synthetic oligonucleotide
ugcccaucgccagaaccaa

SEQ ID NO: 849663 - RNA, 19 nt, Artificial Sequence
  Description of Artificial Sequence: Synthetic oligonucleotide
cugcggggcacaugaagga

SEQ ID NO: 849664 - RNA, 19 nt, Artificial Sequence
  Description of Artificial Sequence: Synthetic oligonucleotide
ccgacugcauucugaggcc

SEQ ID NO: 849665 - RNA, 19 nt, Artificial Sequence
  Description of Artificial Sequence: Synthetic oligonucleotide
gcuaggcgacucuggagug

SEQ ID NO: 849666 - RNA, 19 nt, Artificial Sequence
  Description of Artificial Sequence: Synthetic oligonucleotide
cguuucgaugaguuuuaag

SEQ ID NO: 849667 - RNA, 19 nt, Artificial Sequence
  Description of Artificial Sequence: Synthetic oligonucleotide
accgcaguuaagacagaaa

SEQ ID NO: 849668 - RNA, 19 nt, Artificial Sequence
  Description of Artificial Sequence: Synthetic oligonucleotide
ucguuucgaugaguuuuaa

SEQ ID NO: 849669 - RNA, 19 nt, Artificial Sequence
  Description of Artificial Sequence: Synthetic oligonucleotide
ggaguuagugugguuugga

SEQ ID NO: 849670 - RNA, 19 nt, Artificial Sequence
  Description of Artificial Sequence: Synthetic oligonucleotide
ugggccgaaggggaggauu

SEQ ID NO: 849671 - RNA, 19 nt, Artificial Sequence
  Description of Artificial Sequence: Synthetic oligonucleotide
ugugcacgaguagcagcaa

SEQ ID NO: 849672 - RNA, 19 nt, Artificial Sequence
  Description of Artificial Sequence: Synthetic oligonucleotide
ccuccaggagccagcaaac

SEQ ID NO: 849673 - RNA, 19 nt, Artificial Sequence
  Description of Artificial Sequence: Synthetic oligonucleotide
uguucccaucaugcacucu

SEQ ID NO: 849674 - RNA, 19 nt, Artificial Sequence
  Description of Artificial Sequence: Synthetic oligonucleotide
gacccggaggaaccaugga

SEQ ID NO: 849675 - RNA, 19 nt, Artificial Sequence
  Description of Artificial Sequence: Synthetic oligonucleotide
cauccugcacaaacacgaa

SEQ ID NO: 849676 - RNA, 19 nt, Artificial Sequence
  Description of Artificial Sequence: Synthetic oligonucleotide
agugaacuaccagguguuu

SEQ ID NO: 849677 - RNA, 19 nt, Artificial Sequence
  Description of Artificial Sequence: Synthetic oligonucleotide
cacucuggggucagacaga

SEQ ID NO: 849678 - RNA, 19 nt, Artificial Sequence
  Description of Artificial Sequence: Synthetic oligonucleotide
cacgaguagcagcaaucaa

SEQ ID NO: 849679 - RNA, 19 nt, Artificial Sequence
  Description of Artificial Sequence: Synthetic oligonucleotide
caagcaaacuacugcccau

SEQ ID NO: 849680 - RNA, 19 nt, Artificial Sequence
  Description of Artificial Sequence: Synthetic oligonucleotide
acccagauucauggcacau

SEQ ID NO: 849681 - RNA, 19 nt, Artificial Sequence
  Description of Artificial Sequence: Synthetic oligonucleotide
gaacugcuugccacaccca

SEQ ID NO: 849682 - RNA, 19 nt, Artificial Sequence
  Description of Artificial Sequence: Synthetic oligonucleotide
caugaaggagcgcucguuu

SEQ ID NO: 849683 - RNA, 19 nt, Artificial Sequence
  Description of Artificial Sequence: Synthetic oligonucleotide
cacccagauucauggcaca

SEQ ID NO: 849684 - RNA, 19 nt, Artificial Sequence
  Description of Artificial Sequence: Synthetic oligonucleotide
gggcccagaaucuuugggu

SEQ ID NO: 849685 - RNA, 19 nt, Artificial Sequence
  Description of Artificial Sequence: Synthetic oligonucleotide
agcgcucguuucgaugagu

SEQ ID NO: 849686 - RNA, 19 nt, Artificial Sequence
  Description of Artificial Sequence: Synthetic oligonucleotide
ggcgugaggauccuucagu

SEQ ID NO: 849687 - RNA, 19 nt, Artificial Sequence
  Description of Artificial Sequence: Synthetic oligonucleotide
cagguauccagcccauagu

SEQ ID NO: 849688 - RNA, 19 nt, Artificial Sequence
  Description of Artificial Sequence: Synthetic oligonucleotide
gccuuuagaucuguuccca

SEQ ID NO: 849689 - RNA, 19 nt, Artificial Sequence
  Description of Artificial Sequence: Synthetic oligonucleotide
cagcccauagucacugccu

SEQ ID NO: 849690 - RNA, 19 nt, Artificial Sequence
  Description of Artificial Sequence: Synthetic oligonucleotide
caguuaaaucuccuugguu

SEQ ID NO: 849691 - RNA, 19 nt, Artificial Sequence
  Description of Artificial Sequence: Synthetic oligonucleotide
uacagguauccagcccaua

SEQ ID NO: 849692 - RNA, 19 nt, Artificial Sequence
  Description of Artificial Sequence: Synthetic oligonucleotide
gggcacaugaaggagcgcu

SEQ ID NO: 849693 - RNA, 19 nt, Artificial Sequence
  Description of Artificial Sequence: Synthetic oligonucleotide
ggcgaggucuuuguccuuc

SEQ ID NO: 849694 - RNA, 19 nt, Artificial Sequence
  Description of Artificial Sequence: Synthetic oligonucleotide
gcucguuucgaugaguuuu

SEQ ID NO: 849695 - RNA, 19 nt, Artificial Sequence
  Description of Artificial Sequence: Synthetic oligonucleotide
cggaggcuugaauacucag

SEQ ID NO: 849696 - RNA, 19 nt, Artificial Sequence
  Description of Artificial Sequence: Synthetic oligonucleotide
cuccccguuguguguccuc

SEQ ID NO: 849697 - RNA, 19 nt, Artificial Sequence
  Description of Artificial Sequence: Synthetic oligonucleotide
ccccaaaacuucgcaguag

SEQ ID NO: 849698 - RNA, 19 nt, Artificial Sequence
  Description of Artificial Sequence: Synthetic oligonucleotide
cauuagccgacugcauucu

SEQ ID NO: 849699 - RNA, 19 nt, Artificial Sequence
  Description of Artificial Sequence: Synthetic oligonucleotide
ggcacaugaaggagcgcuc

SEQ ID NO: 849700 - RNA, 19 nt, Artificial Sequence
  Description of Artificial Sequence: Synthetic oligonucleotide
gucuuuuacucagguugcu

SEQ ID NO: 849701 - RNA, 19 nt, Artificial Sequence
  Description of Artificial Sequence: Synthetic oligonucleotide
gucugucuuucaguuaaau

SEQ ID NO: 849702 - RNA, 19 nt, Artificial Sequence
  Description of Artificial Sequence: Synthetic oligonucleotide
cccugggcuucacaaauga

SEQ ID NO: 849703 - RNA, 19 nt, Artificial Sequence
  Description of Artificial Sequence: Synthetic oligonucleotide
cacaucccugggcuucaca

SEQ ID NO: 849704 - RNA, 19 nt, Artificial Sequence
  Description of Artificial Sequence: Synthetic oligonucleotide
cccguuguguguccucaug

SEQ ID NO: 849705 - RNA, 19 nt, Artificial Sequence
  Description of Artificial Sequence: Synthetic oligonucleotide
caacaagcuaggcgacucu

SEQ ID NO: 849706 - RNA, 19 nt, Artificial Sequence
  Description of Artificial Sequence: Synthetic oligonucleotide
cugguaacauuagccgacu

SEQ ID NO: 849707 - RNA, 19 nt, Artificial Sequence
  Description of Artificial Sequence: Synthetic oligonucleotide
cacaugaaggagcgcucgu

SEQ ID NO: 849708 - RNA, 19 nt, Artificial Sequence
  Description of Artificial Sequence: Synthetic oligonucleotide
gugcacgaguagcagcaau

SEQ ID NO: 849709 - RNA, 19 nt, Artificial Sequence
  Description of Artificial Sequence: Synthetic oligonucleotide
cuguggauuuaccgcaguu

SEQ ID NO: 849710 - RNA, 19 nt, Artificial Sequence
  Description of Artificial Sequence: Synthetic oligonucleotide
cuacagguauccagcccau

SEQ ID NO: 849711 - RNA, 19 nt, Artificial Sequence
  Description of Artificial Sequence: Synthetic oligonucleotide
gugcgacggugguucuuca

SEQ ID NO: 849712 - RNA, 19 nt, Artificial Sequence
  Description of Artificial Sequence: Synthetic oligonucleotide
gaccugcucuuguuagguu

SEQ ID NO: 849713 - RNA, 19 nt, Artificial Sequence
  Description of Artificial Sequence: Synthetic oligonucleotide
acaggcgaggcgaggucuu

SEQ ID NO: 849714 - RNA, 19 nt, Artificial Sequence
  Description of Artificial Sequence: Synthetic oligonucleotide
cgugaggauccuucaguga

SEQ ID NO: 849715 - RNA, 19 nt, Artificial Sequence
  Description of Artificial Sequence: Synthetic oligonucleotide
gcgaggcgaggucuuuguc

SEQ ID NO: 849716 - RNA, 19 nt, Artificial Sequence
  Description of Artificial Sequence: Synthetic oligonucleotide
ggaucagauggagguugaa

SEQ ID NO: 849717 - RNA, 19 nt, Artificial Sequence
  Description of Artificial Sequence: Synthetic oligonucleotide
gcccaucgccagaaccaag

SEQ ID NO: 849718 - RNA, 19 nt, Artificial Sequence
  Description of Artificial Sequence: Synthetic oligonucleotide
agagggcgugaggauccuu

SEQ ID NO: 849719 - RNA, 19 nt, Artificial Sequence
  Description of Artificial Sequence: Synthetic oligonucleotide
gcucccagcugcaagugau

SEQ ID NO: 849720 - RNA, 19 nt, Artificial Sequence
  Description of Artificial Sequence: Synthetic oligonucleotide
gugcuaucacuuggcugua

SEQ ID NO: 849721 - RNA, 19 nt, Artificial Sequence
  Description of Artificial Sequence: Synthetic oligonucleotide
ggggcacaugaaggagcgc

SEQ ID NO: 849722 - RNA, 19 nt, Artificial Sequence
  Description of Artificial Sequence: Synthetic oligonucleotide
ccacguucaccugaaggcu

SEQ ID NO: 849723 - RNA, 19 nt, Artificial Sequence
  Description of Artificial Sequence: Synthetic oligonucleotide
caccagagaggaagucauu

SEQ ID NO: 849724 - RNA, 19 nt, Artificial Sequence
  Description of Artificial Sequence: Synthetic oligonucleotide
ccuuuagaucuguucccau

SEQ ID NO: 849725 - RNA, 19 nt, Artificial Sequence
  Description of Artificial Sequence: Synthetic oligonucleotide
ccugaauccucugucucau

SEQ ID NO: 849726 - RNA, 19 nt, Artificial Sequence
  Description of Artificial Sequence: Synthetic oligonucleotide
cuggguacugaagcuucuu

SEQ ID NO: 849727 - RNA, 19 nt, Artificial Sequence
  Description of Artificial Sequence: Synthetic oligonucleotide
ccuccccgacugcaugguc

SEQ ID NO: 849728 - RNA, 19 nt, Artificial Sequence
  Description of Artificial Sequence: Synthetic oligonucleotide
ggaaggggcccagaaucuu

SEQ ID NO: 849729 - RNA, 19 nt, Artificial Sequence
  Description of Artificial Sequence: Synthetic oligonucleotide
ccaucgccagaaccaaggu

SEQ ID NO: 849730 - RNA, 19 nt, Artificial Sequence
  Description of Artificial Sequence: Synthetic oligonucleotide
ccuggacccggaggaacca

SEQ ID NO: 849731 - RNA, 19 nt, Artificial Sequence
  Description of Artificial Sequence: Synthetic oligonucleotide
gcgcucguuucgaugaguu

SEQ ID NO: 849732 - RNA, 19 nt, Artificial Sequence
  Description of Artificial Sequence: Synthetic oligonucleotide
cgucugggcccacguucac

SEQ ID NO: 849733 - RNA, 19 nt, Artificial Sequence
  Description of Artificial Sequence: Synthetic oligonucleotide
gcccagaccugcucuuguu

SEQ ID NO: 849734 - RNA, 19 nt, Artificial Sequence
  Description of Artificial Sequence: Synthetic oligonucleotide
cuccgucugggcccacguu

SEQ ID NO: 849735 - RNA, 19 nt, Artificial Sequence
  Description of Artificial Sequence: Synthetic oligonucleotide
cagagggcgugaggauccu

SEQ ID NO: 849736 - RNA, 19 nt, Artificial Sequence
  Description of Artificial Sequence: Synthetic oligonucleotide
gcccaauggcugagagucu

SEQ ID NO: 849737 - RNA, 19 nt, Artificial Sequence
  Description of Artificial Sequence: Synthetic oligonucleotide
cgcucguuucgaugaguuu

SEQ ID NO: 849738 - RNA, 19 nt, Artificial Sequence
  Description of Artificial Sequence: Synthetic oligonucleotide
ccccguuguguguccucau

SEQ ID NO: 849739 - RNA, 19 nt, Artificial Sequence
  Description of Artificial Sequence: Synthetic oligonucleotide
cguucaccugaaggcuccu

SEQ ID NO: 849740 - RNA, 19 nt, Artificial Sequence
  Description of Artificial Sequence: Synthetic oligonucleotide
uuugguaugaacaaguuag

SEQ ID NO: 849741 - RNA, 19 nt, Artificial Sequence
  Description of Artificial Sequence: Synthetic oligonucleotide
uguaaaagggcacagaccc

SEQ ID NO: 849742 - RNA, 19 nt, Artificial Sequence
  Description of Artificial Sequence: Synthetic oligonucleotide
aauuuaaacaccuggaagu

SEQ ID NO: 849743 - RNA, 19 nt, Artificial Sequence
  Description of Artificial Sequence: Synthetic oligonucleotide
auuuagauucauucuaucc

SEQ ID NO: 849744 - RNA, 19 nt, Artificial Sequence
  Description of Artificial Sequence: Synthetic oligonucleotide
uuaacaauuugaauuuagg

SEQ ID NO: 849745 - RNA, 19 nt, Artificial Sequence
  Description of Artificial Sequence: Synthetic oligonucleotide
agaacauccacauagcgag

SEQ ID NO: 849746 - RNA, 19 nt, Artificial Sequence
  Description of Artificial Sequence: Synthetic oligonucleotide
uuuagauucauucuaucca

SEQ ID NO: 849747 - RNA, 19 nt, Artificial Sequence
  Description of Artificial Sequence: Synthetic oligonucleotide
uuaucuagucaucucaggg

SEQ ID NO: 849748 - RNA, 19 nt, Artificial Sequence
  Description of Artificial Sequence: Synthetic oligonucleotide
aauagcagcucccagggag

SEQ ID NO: 849749 - RNA, 19 nt, Artificial Sequence
  Description of Artificial Sequence: Synthetic oligonucleotide
aggguaagaguucaggucc

SEQ ID NO: 849750 - RNA, 19 nt, Artificial Sequence
  Description of Artificial Sequence: Synthetic oligonucleotide
aauccgaaggagcaagagc

SEQ ID NO: 849751 - RNA, 19 nt, Artificial Sequence
  Description of Artificial Sequence: Synthetic oligonucleotide
uuaaacaccuggaaguuag

SEQ ID NO: 849752 - RNA, 19 nt, Artificial Sequence
  Description of Artificial Sequence: Synthetic oligonucleotide
aauucauauacaugggcug

SEQ ID NO: 849753 - RNA, 19 nt, Artificial Sequence
  Description of Artificial Sequence: Synthetic oligonucleotide
uccaacuacaaauccagcg

SEQ ID NO: 849754 - RNA, 19 nt, Artificial Sequence
  Description of Artificial Sequence: Synthetic oligonucleotide
aauuuagauucauucuauc

SEQ ID NO: 849755 - RNA, 19 nt, Artificial Sequence
  Description of Artificial Sequence: Synthetic oligonucleotide
uuagaacauccacauagcg

SEQ ID NO: 849756 - RNA, 19 nt, Artificial Sequence
  Description of Artificial Sequence: Synthetic oligonucleotide
uuagauucauucuauccag

SEQ ID NO: 849757 - RNA, 19 nt, Artificial Sequence
  Description of Artificial Sequence: Synthetic oligonucleotide
uuagguaacgagcaggugu

SEQ ID NO: 849758 - RNA, 19 nt, Artificial Sequence
  Description of Artificial Sequence: Synthetic oligonucleotide
uaacaauuugaauuuagga

SEQ ID NO: 849759 - RNA, 19 nt, Artificial Sequence
  Description of Artificial Sequence: Synthetic oligonucleotide
ugaauuuagauucauucua

SEQ ID NO: 849760 - RNA, 19 nt, Artificial Sequence
  Description of Artificial Sequence: Synthetic oligonucleotide
aucaguagaggauugucgg

SEQ ID NO: 849761 - RNA, 19 nt, Artificial Sequence
  Description of Artificial Sequence: Synthetic oligonucleotide
uguguauuuucuuuggcca

SEQ ID NO: 849762 - RNA, 19 nt, Artificial Sequence
  Description of Artificial Sequence: Synthetic oligonucleotide
gacuaagaaagaaacauug

SEQ ID NO: 849763 - RNA, 19 nt, Artificial Sequence
  Description of Artificial Sequence: Synthetic oligonucleotide
uaugaacaaguuagaaggg

SEQ ID NO: 849764 - RNA, 19 nt, Artificial Sequence
  Description of Artificial Sequence: Synthetic oligonucleotide
agaacaguuaucuagucau

SEQ ID NO: 849765 - RNA, 19 nt, Artificial Sequence
  Description of Artificial Sequence: Synthetic oligonucleotide
auacucauaagccucuguc

SEQ ID NO: 849766 - RNA, 19 nt, Artificial Sequence
  Description of Artificial Sequence: Synthetic oligonucleotide
aguugaggaucaaagaggc

SEQ ID NO: 849767 - RNA, 19 nt, Artificial Sequence
  Description of Artificial Sequence: Synthetic oligonucleotide
uccgcugugucccaguugg

SEQ ID NO: 849768 - RNA, 19 nt, Artificial Sequence
  Description of Artificial Sequence: Synthetic oligonucleotide
uuuucuagacagcuugugc

SEQ ID NO: 849769 - RNA, 19 nt, Artificial Sequence
  Description of Artificial Sequence: Synthetic oligonucleotide
ugaauuuaaacaccuggaa

SEQ ID NO: 849770 - RNA, 19 nt, Artificial Sequence
  Description of Artificial Sequence: Synthetic oligonucleotide
uuugaauagcuucauuggu

SEQ ID NO: 849771 - RNA, 19 nt, Artificial Sequence
  Description of Artificial Sequence: Synthetic oligonucleotide
uuugucuaaagugacuaag

SEQ ID NO: 849772 - RNA, 19 nt, Artificial Sequence
  Description of Artificial Sequence: Synthetic oligonucleotide
aaguuagguaacgagcagg

SEQ ID NO: 849773 - RNA, 19 nt, Artificial Sequence
  Description of Artificial Sequence: Synthetic oligonucleotide
uacauaaaagacuuugaau

SEQ ID NO: 849774 - RNA, 19 nt, Artificial Sequence
  Description of Artificial Sequence: Synthetic oligonucleotide
uagaacauccacauagcga

SEQ ID NO: 849775 - RNA, 19 nt, Artificial Sequence
  Description of Artificial Sequence: Synthetic oligonucleotide
gagccaucuagcuuggagg

SEQ ID NO: 849776 - RNA, 19 nt, Artificial Sequence
  Description of Artificial Sequence: Synthetic oligonucleotide
aacaucggcacccuggcga

SEQ ID NO: 849777 - RNA, 19 nt, Artificial Sequence
  Description of Artificial Sequence: Synthetic oligonucleotide
uggcuaaucaacacuggag

SEQ ID NO: 849778 - RNA, 19 nt, Artificial Sequence
  Description of Artificial Sequence: Synthetic oligonucleotide
uguagagcuuaucaucuug

SEQ ID NO: 849779 - RNA, 19 nt, Artificial Sequence
  Description of Artificial Sequence: Synthetic oligonucleotide
agaggcguaacugggaagc

SEQ ID NO: 849780 - RNA, 19 nt, Artificial Sequence
  Description of Artificial Sequence: Synthetic oligonucleotide
gguaugaacaaguuagaag

SEQ ID NO: 849781 - RNA, 19 nt, Artificial Sequence
  Description of Artificial Sequence: Synthetic oligonucleotide
aauuugucuaaagugacua

SEQ ID NO: 849782 - RNA, 19 nt, Artificial Sequence
  Description of Artificial Sequence: Synthetic oligonucleotide
guaguacccagcucuaugg

SEQ ID NO: 849783 - RNA, 19 nt, Artificial Sequence
  Description of Artificial Sequence: Synthetic oligonucleotide
guuagaagggaugggagcg

SEQ ID NO: 849784 - RNA, 19 nt, Artificial Sequence
  Description of Artificial Sequence: Synthetic oligonucleotide
acauagcgagcucuggacc

SEQ ID NO: 849785 - RNA, 19 nt, Artificial Sequence
  Description of Artificial Sequence: Synthetic oligonucleotide
ggagacaugguguaguggg

SEQ ID NO: 849786 - RNA, 19 nt, Artificial Sequence
  Description of Artificial Sequence: Synthetic oligonucleotide
ucuaccuuagacugagccc

SEQ ID NO: 849787 - RNA, 19 nt, Artificial Sequence
  Description of Artificial Sequence: Synthetic oligonucleotide
uuggcuaucaccucacagu

SEQ ID NO: 849788 - RNA, 19 nt, Artificial Sequence
  Description of Artificial Sequence: Synthetic oligonucleotide
cuaccuuagacugagcccc

SEQ ID NO: 849789 - RNA, 19 nt, Artificial Sequence
  Description of Artificial Sequence: Synthetic oligonucleotide
aguagaggauugucggccc

SEQ ID NO: 849790 - RNA, 19 nt, Artificial Sequence
  Description of Artificial Sequence: Synthetic oligonucleotide
uacucauaagccucugucc

SEQ ID NO: 849791 - RNA, 19 nt, Artificial Sequence
  Description of Artificial Sequence: Synthetic oligonucleotide
guaagugucugacagguga

SEQ ID NO: 849792 - RNA, 19 nt, Artificial Sequence
  Description of Artificial Sequence: Synthetic oligonucleotide
uaucuagucaucucagggu

SEQ ID NO: 849793 - RNA, 19 nt, Artificial Sequence
  Description of Artificial Sequence: Synthetic oligonucleotide
uagguaacgagcaggugug

SEQ ID NO: 849794 - RNA, 19 nt, Artificial Sequence
  Description of Artificial Sequence: Synthetic oligonucleotide
cuaguucgguucuuggugg

SEQ ID NO: 849795 - RNA, 19 nt, Artificial Sequence
  Description of Artificial Sequence: Synthetic oligonucleotide
ucuugaaucaaaagugguu

SEQ ID NO: 849796 - RNA, 19 nt, Artificial Sequence
  Description of Artificial Sequence: Synthetic oligonucleotide
cucuaccuuagacugagcc

SEQ ID NO: 849797 - RNA, 19 nt, Artificial Sequence
  Description of Artificial Sequence: Synthetic oligonucleotide
gaagccugcaccaacugag

SEQ ID NO: 849798 - RNA, 19 nt, Artificial Sequence
  Description of Artificial Sequence: Synthetic oligonucleotide
uucaguugaggaucaaaga

SEQ ID NO: 849799 - RNA, 19 nt, Artificial Sequence
  Description of Artificial Sequence: Synthetic oligonucleotide
acucauaagccucuguccu

SEQ ID NO: 849800 - RNA, 19 nt, Artificial Sequence
  Description of Artificial Sequence: Synthetic oligonucleotide
aggauugucggcccucagc

SEQ ID NO: 849801 - RNA, 19 nt, Artificial Sequence
  Description of Artificial Sequence: Synthetic oligonucleotide
guuaucuagucaucucagg

SEQ ID NO: 849802 - RNA, 19 nt, Artificial Sequence
  Description of Artificial Sequence: Synthetic oligonucleotide
uaauuugucuaaagugacu

SEQ ID NO: 849803 - RNA, 19 nt, Artificial Sequence
  Description of Artificial Sequence: Synthetic oligonucleotide
agccaucuagcuuggaggg

SEQ ID NO: 849804 - RNA, 19 nt, Artificial Sequence
  Description of Artificial Sequence: Synthetic oligonucleotide
uucauucuauccagcaucu

SEQ ID NO: 849805 - RNA, 19 nt, Artificial Sequence
  Description of Artificial Sequence: Synthetic oligonucleotide
agacugagcauacucauaa

SEQ ID NO: 849806 - RNA, 19 nt, Artificial Sequence
  Description of Artificial Sequence: Synthetic oligonucleotide
aacgagcaggugugcaccc

SEQ ID NO: 849807 - RNA, 19 nt, Artificial Sequence
  Description of Artificial Sequence: Synthetic oligonucleotide
uagagcuuaucaucuuggg

SEQ ID NO: 849808 - RNA, 19 nt, Artificial Sequence
  Description of Artificial Sequence: Synthetic oligonucleotide
uuacuugagagcccaaaau

SEQ ID NO: 849809 - RNA, 19 nt, Artificial Sequence
  Description of Artificial Sequence: Synthetic oligonucleotide
gacauaaguugcuacugac

SEQ ID NO: 849810 - RNA, 19 nt, Artificial Sequence
  Description of Artificial Sequence: Synthetic oligonucleotide
uaagugucugacaggugag

SEQ ID NO: 849811 - RNA, 19 nt, Artificial Sequence
  Description of Artificial Sequence: Synthetic oligonucleotide
uauacaugggcugcaagga

SEQ ID NO: 849812 - RNA, 19 nt, Artificial Sequence
  Description of Artificial Sequence: Synthetic oligonucleotide
aucaggauuccacagcaca

SEQ ID NO: 849813 - RNA, 19 nt, Artificial Sequence
  Description of Artificial Sequence: Synthetic oligonucleotide
agugcuuggcaucaguaga

SEQ ID NO: 849814 - RNA, 19 nt, Artificial Sequence
  Description of Artificial Sequence: Synthetic oligonucleotide
aaguuagaagggaugggag

SEQ ID NO: 849815 - RNA, 19 nt, Artificial Sequence
  Description of Artificial Sequence: Synthetic oligonucleotide
ugcaucaagggcucagugc

SEQ ID NO: 849816 - RNA, 19 nt, Artificial Sequence
  Description of Artificial Sequence: Synthetic oligonucleotide
accauuucugggucugggc

SEQ ID NO: 849817 - RNA, 19 nt, Artificial Sequence
  Description of Artificial Sequence: Synthetic oligonucleotide
agugguuggcagucaacac

SEQ ID NO: 849818 - RNA, 19 nt, Artificial Sequence
  Description of Artificial Sequence: Synthetic oligonucleotide
aaauccgaaggagcaagag

SEQ ID NO: 849819 - RNA, 19 nt, Artificial Sequence
  Description of Artificial Sequence: Synthetic oligonucleotide
gaaguuagguaacgagcag

SEQ ID NO: 849820 - RNA, 19 nt, Artificial Sequence
  Description of Artificial Sequence: Synthetic oligonucleotide
agaaauccgaaggagcaag

SEQ ID NO: 849821 - RNA, 19 nt, Artificial Sequence
  Description of Artificial Sequence: Synthetic oligonucleotide
agcaagagcuggcucacuc

SEQ ID NO: 849822 - RNA, 19 nt, Artificial Sequence
  Description of Artificial Sequence: Synthetic oligonucleotide
cauagcgagcucuggaccc

SEQ ID NO: 849823 - RNA, 19 nt, Artificial Sequence
  Description of Artificial Sequence: Synthetic oligonucleotide
aaaagugguuggcagucaa

SEQ ID NO: 849824 - RNA, 19 nt, Artificial Sequence
  Description of Artificial Sequence: Synthetic oligonucleotide
agcaggguuguaaaagggc

SEQ ID NO: 849825 - RNA, 19 nt, Artificial Sequence
  Description of Artificial Sequence: Synthetic oligonucleotide
aguaugaccggcucugggu

SEQ ID NO: 849826 - RNA, 19 nt, Artificial Sequence
  Description of Artificial Sequence: Synthetic oligonucleotide
agcucuaugggaccccggg

SEQ ID NO: 849827 - RNA, 19 nt, Artificial Sequence
  Description of Artificial Sequence: Synthetic oligonucleotide
uugguaugaacaaguuaga

SEQ ID NO: 849828 - RNA, 19 nt, Artificial Sequence
  Description of Artificial Sequence: Synthetic oligonucleotide
agagcuuaucaucuugggu

SEQ ID NO: 849829 - RNA, 19 nt, Artificial Sequence
  Description of Artificial Sequence: Synthetic oligonucleotide
aacauccacauagcgagcu

SEQ ID NO: 849830 - RNA, 19 nt, Artificial Sequence
  Description of Artificial Sequence: Synthetic oligonucleotide
ccaacuacaaauccagcgg

SEQ ID NO: 849831 - RNA, 19 nt, Artificial Sequence
  Description of Artificial Sequence: Synthetic oligonucleotide
gaacaaguuagaagggaug

SEQ ID NO: 849832 - RNA, 19 nt, Artificial Sequence
  Description of Artificial Sequence: Synthetic oligonucleotide
acugagccccaucugaucu

SEQ ID NO: 849833 - RNA, 19 nt, Artificial Sequence
  Description of Artificial Sequence: Synthetic oligonucleotide
cuuggcuaucaccucacag

SEQ ID NO: 849834 - RNA, 19 nt, Artificial Sequence
  Description of Artificial Sequence: Synthetic oligonucleotide
ucaaaagugguuggcaguc

SEQ ID NO: 849835 - RNA, 19 nt, Artificial Sequence
  Description of Artificial Sequence: Synthetic oligonucleotide
aagaggcguaacugggaag

SEQ ID NO: 849836 - RNA, 19 nt, Artificial Sequence
  Description of Artificial Sequence: Synthetic oligonucleotide
gacccacgagacuugaggc

SEQ ID NO: 849837 - RNA, 19 nt, Artificial Sequence
  Description of Artificial Sequence: Synthetic oligonucleotide
cuggagaguaugcaccagg

SEQ ID NO: 849838 - RNA, 19 nt, Artificial Sequence
  Description of Artificial Sequence: Synthetic oligonucleotide
cauucuauccagcaucuga

SEQ ID NO: 849839 - RNA, 19 nt, Artificial Sequence
  Description of Artificial Sequence: Synthetic oligonucleotide
aguuaucuagucaucucag

SEQ ID NO: 849840 - RNA, 19 nt, Artificial Sequence
  Description of Artificial Sequence: Synthetic oligonucleotide
uggagaguaugcaccaggu

SEQ ID NO: 849841 - RNA, 19 nt, Artificial Sequence
  Description of Artificial Sequence: Synthetic oligonucleotide
aaagugguuggcagucaac

SEQ ID NO: 849842 - RNA, 19 nt, Artificial Sequence
  Description of Artificial Sequence: Synthetic oligonucleotide
uccauagguaguacccagc

SEQ ID NO: 849843 - RNA, 19 nt, Artificial Sequence
  Description of Artificial Sequence: Synthetic oligonucleotide
auccaagugcucuaccuca

SEQ ID NO: 849844 - RNA, 19 nt, Artificial Sequence
  Description of Artificial Sequence: Synthetic oligonucleotide
auacaugggcugcaaggag

SEQ ID NO: 849845 - RNA, 19 nt, Artificial Sequence
  Description of Artificial Sequence: Synthetic oligonucleotide
gaaucaaaagugguuggca

SEQ ID NO: 849846 - RNA, 19 nt, Artificial Sequence
  Description of Artificial Sequence: Synthetic oligonucleotide
aguugcuacugacccacag

SEQ ID NO: 849847 - RNA, 19 nt, Artificial Sequence
  Description of Artificial Sequence: Synthetic oligonucleotide
aggagggagacacacagua

SEQ ID NO: 849848 - RNA, 19 nt, Artificial Sequence
  Description of Artificial Sequence: Synthetic oligonucleotide
guaguggaaggccugugug

SEQ ID NO: 849849 - RNA, 19 nt, Artificial Sequence
  Description of Artificial Sequence: Synthetic oligonucleotide
ugaugugaugugacacugc

SEQ ID NO: 849850 - RNA, 19 nt, Artificial Sequence
  Description of Artificial Sequence: Synthetic oligonucleotide
ggauugucggcccucagcc

SEQ ID NO: 849851 - RNA, 19 nt, Artificial Sequence
  Description of Artificial Sequence: Synthetic oligonucleotide
auugucggcccucagcccu

SEQ ID NO: 849852 - RNA, 19 nt, Artificial Sequence
  Description of Artificial Sequence: Synthetic oligonucleotide
acaaguuagaagggauggg

SEQ ID NO: 849853 - RNA, 19 nt, Artificial Sequence
  Description of Artificial Sequence: Synthetic oligonucleotide
cacauagcgagcucuggac

SEQ ID NO: 849854 - RNA, 19 nt, Artificial Sequence
  Description of Artificial Sequence: Synthetic oligonucleotide
agguaagugucugacaggu

SEQ ID NO: 849855 - RNA, 19 nt, Artificial Sequence
  Description of Artificial Sequence: Synthetic oligonucleotide
uggcuaucaccucacagua

SEQ ID NO: 849856 - RNA, 19 nt, Artificial Sequence
  Description of Artificial Sequence: Synthetic oligonucleotide
caguagaggauugucggcc

SEQ ID NO: 849857 - RNA, 19 nt, Artificial Sequence
  Description of Artificial Sequence: Synthetic oligonucleotide
gaaaggaaccauggaauca

SEQ ID NO: 849858 - RNA, 19 nt, Artificial Sequence
  Description of Artificial Sequence: Synthetic oligonucleotide
auaaguugcuacugaccca

SEQ ID NO: 849859 - RNA, 19 nt, Artificial Sequence
  Description of Artificial Sequence: Synthetic oligonucleotide
uccaagugcucuaccucag

SEQ ID NO: 849860 - RNA, 19 nt, Artificial Sequence
  Description of Artificial Sequence: Synthetic oligonucleotide
ggacccacgagacuugagg

SEQ ID NO: 849861 - RNA, 19 nt, Artificial Sequence
  Description of Artificial Sequence: Synthetic oligonucleotide
aggauuccacagcacagug

SEQ ID NO: 849862 - RNA, 19 nt, Artificial Sequence
  Description of Artificial Sequence: Synthetic oligonucleotide
uuuggccaauccucccugg

SEQ ID NO: 849863 - RNA, 19 nt, Artificial Sequence
  Description of Artificial Sequence: Synthetic oligonucleotide
gaauuccccgaggugacag

SEQ ID NO: 849864 - RNA, 19 nt, Artificial Sequence
  Description of Artificial Sequence: Synthetic oligonucleotide
gcuaaucaacacuggagag

SEQ ID NO: 849865 - RNA, 19 nt, Artificial Sequence
  Description of Artificial Sequence: Synthetic oligonucleotide
ggcaauccuaguucaaugc

SEQ ID NO: 849866 - RNA, 19 nt, Artificial Sequence
  Description of Artificial Sequence: Synthetic oligonucleotide
uuccaacuacaaauccagc

SEQ ID NO: 849867 - RNA, 19 nt, Artificial Sequence
  Description of Artificial Sequence: Synthetic oligonucleotide
gaggaagcuucuugaauca

SEQ ID NO: 849868 - RNA, 19 nt, Artificial Sequence
  Description of Artificial Sequence: Synthetic oligonucleotide
cacaaguagaugaauuuaa

SEQ ID NO: 849869 - RNA, 19 nt, Artificial Sequence
  Description of Artificial Sequence: Synthetic oligonucleotide
gcuaguucgguucuuggug

SEQ ID NO: 849870 - RNA, 19 nt, Artificial Sequence
  Description of Artificial Sequence: Synthetic oligonucleotide
gagcaggguuguaaaaggg

SEQ ID NO: 849871 - RNA, 19 nt, Artificial Sequence
  Description of Artificial Sequence: Synthetic oligonucleotide
ggcuaaucaacacuggaga

SEQ ID NO: 849872 - RNA, 19 nt, Artificial Sequence
  Description of Artificial Sequence: Synthetic oligonucleotide
caguuaucuagucaucuca

SEQ ID NO: 849873 - RNA, 19 nt, Artificial Sequence
  Description of Artificial Sequence: Synthetic oligonucleotide
uaacgagcaggugugcacc

SEQ ID NO: 849874 - RNA, 19 nt, Artificial Sequence
  Description of Artificial Sequence: Synthetic oligonucleotide
uggguuugguaugaacaag

SEQ ID NO: 849875 - RNA, 19 nt, Artificial Sequence
  Description of Artificial Sequence: Synthetic oligonucleotide
ugaggaucaaagaggcgua

SEQ ID NO: 849876 - RNA, 19 nt, Artificial Sequence
  Description of Artificial Sequence: Synthetic oligonucleotide
guccauagguaguacccag

SEQ ID NO: 849877 - RNA, 19 nt, Artificial Sequence
  Description of Artificial Sequence: Synthetic oligonucleotide
ucucaggguuccaacuaca

SEQ ID NO: 849878 - RNA, 19 nt, Artificial Sequence
  Description of Artificial Sequence: Synthetic oligonucleotide
gugacuaagaaagaaacau

SEQ ID NO: 849879 - RNA, 19 nt, Artificial Sequence
  Description of Artificial Sequence: Synthetic oligonucleotide
aggguuccaacuacaaauc

SEQ ID NO: 849880 - RNA, 19 nt, Artificial Sequence
  Description of Artificial Sequence: Synthetic oligonucleotide
cuagucccauuucagccag

SEQ ID NO: 849881 - RNA, 19 nt, Artificial Sequence
  Description of Artificial Sequence: Synthetic oligonucleotide
gcuacugacccacagggac

SEQ ID NO: 849882 - RNA, 19 nt, Artificial Sequence
  Description of Artificial Sequence: Synthetic oligonucleotide
aguuagguaacgagcaggu

SEQ ID NO: 849883 - RNA, 19 nt, Artificial Sequence
  Description of Artificial Sequence: Synthetic oligonucleotide
agcugccacgaucccacgc

SEQ ID NO: 849884 - RNA, 19 nt, Artificial Sequence
  Description of Artificial Sequence: Synthetic oligonucleotide
uggccaauccucccuggcc

SEQ ID NO: 849885 - RNA, 19 nt, Artificial Sequence
  Description of Artificial Sequence: Synthetic oligonucleotide
ucuagcuuggaggguaaga

SEQ ID NO: 849886 - RNA, 19 nt, Artificial Sequence
  Description of Artificial Sequence: Synthetic oligonucleotide
aaauccagcggcaauccua

SEQ ID NO: 849887 - RNA, 19 nt, Artificial Sequence
  Description of Artificial Sequence: Synthetic oligonucleotide
guaacgagcaggugugcac

SEQ ID NO: 849888 - RNA, 19 nt, Artificial Sequence
  Description of Artificial Sequence: Synthetic oligonucleotide
aggaucaaagaggcguaac

SEQ ID NO: 849889 - RNA, 19 nt, Artificial Sequence
  Description of Artificial Sequence: Synthetic oligonucleotide
auuugucuaaagugacuaa

SEQ ID NO: 849890 - RNA, 19 nt, Artificial Sequence
  Description of Artificial Sequence: Synthetic oligonucleotide
agaguaugcaccagguugu

SEQ ID NO: 849891 - RNA, 19 nt, Artificial Sequence
  Description of Artificial Sequence: Synthetic oligonucleotide
aagccucuguccuuugaau

SEQ ID NO: 849892 - RNA, 19 nt, Artificial Sequence
  Description of Artificial Sequence: Synthetic oligonucleotide
uggcacugggaacaucggc

SEQ ID NO: 849893 - RNA, 19 nt, Artificial Sequence
  Description of Artificial Sequence: Synthetic oligonucleotide
agcuggcuaaucaacacug

SEQ ID NO: 849894 - RNA, 19 nt, Artificial Sequence
  Description of Artificial Sequence: Synthetic oligonucleotide
ugagccccaucugaucugg

SEQ ID NO: 849895 - RNA, 19 nt, Artificial Sequence
  Description of Artificial Sequence: Synthetic oligonucleotide
agcuaguucgguucuuggu

SEQ ID NO: 849896 - RNA, 19 nt, Artificial Sequence
  Description of Artificial Sequence: Synthetic oligonucleotide
auuuaaacaccuggaaguu

SEQ ID NO: 849897 - RNA, 19 nt, Artificial Sequence
  Description of Artificial Sequence: Synthetic oligonucleotide
ggaaguuagguaacgagca

SEQ ID NO: 849898 - RNA, 19 nt, Artificial Sequence
  Description of Artificial Sequence: Synthetic oligonucleotide
caaguuagaagggauggga

SEQ ID NO: 849899 - RNA, 19 nt, Artificial Sequence
  Description of Artificial Sequence: Synthetic oligonucleotide
ucccagcaaggacauaagu

SEQ ID NO: 849900 - RNA, 19 nt, Artificial Sequence
  Description of Artificial Sequence: Synthetic oligonucleotide
cacgccgugcaucaagggc

SEQ ID NO: 849901 - RNA, 19 nt, Artificial Sequence
  Description of Artificial Sequence: Synthetic oligonucleotide
guaagaguucagguccagg

SEQ ID NO: 849902 - RNA, 19 nt, Artificial Sequence
  Description of Artificial Sequence: Synthetic oligonucleotide
auagcgagcucuggacccc

SEQ ID NO: 849903 - RNA, 19 nt, Artificial Sequence
  Description of Artificial Sequence: Synthetic oligonucleotide
ucauugagcucugaaggua

SEQ ID NO: 849904 - RNA, 19 nt, Artificial Sequence
  Description of Artificial Sequence: Synthetic oligonucleotide
uugugucaggacacucuug

SEQ ID NO: 849905 - RNA, 19 nt, Artificial Sequence
  Description of Artificial Sequence: Synthetic oligonucleotide
ugggaccccgggauauugg

SEQ ID NO: 849906 - RNA, 19 nt, Artificial Sequence
  Description of Artificial Sequence: Synthetic oligonucleotide
acaggccuuaauuugucua

SEQ ID NO: 849907 - RNA, 19 nt, Artificial Sequence
  Description of Artificial Sequence: Synthetic oligonucleotide
uuggccaauccucccuggc

SEQ ID NO: 849908 - RNA, 19 nt, Artificial Sequence
  Description of Artificial Sequence: Synthetic oligonucleotide
aagaaauccgaaggagcaa

SEQ ID NO: 849909 - RNA, 19 nt, Artificial Sequence
  Description of Artificial Sequence: Synthetic oligonucleotide
uccacauagcgagcucugg

SEQ ID NO: 849910 - RNA, 19 nt, Artificial Sequence
  Description of Artificial Sequence: Synthetic oligonucleotide
cuccacgugucgcagcugc

SEQ ID NO: 849911 - RNA, 19 nt, Artificial Sequence
  Description of Artificial Sequence: Synthetic oligonucleotide
aggugugcaccccaagaga

SEQ ID NO: 849912 - RNA, 19 nt, Artificial Sequence
  Description of Artificial Sequence: Synthetic oligonucleotide
aauuccccgaggugacaga

SEQ ID NO: 849913 - RNA, 19 nt, Artificial Sequence
  Description of Artificial Sequence: Synthetic oligonucleotide
uucuauccagcaucugaaa

SEQ ID NO: 849914 - RNA, 19 nt, Artificial Sequence
  Description of Artificial Sequence: Synthetic oligonucleotide
cacagacccgccuggagug

SEQ ID NO: 849915 - RNA, 19 nt, Artificial Sequence
  Description of Artificial Sequence: Synthetic oligonucleotide
uugguggagaacaguuauc

SEQ ID NO: 849916 - RNA, 19 nt, Artificial Sequence
  Description of Artificial Sequence: Synthetic oligonucleotide
uggcaaacuugaaauucua

SEQ ID NO: 849917 - RNA, 19 nt, Artificial Sequence
  Description of Artificial Sequence: Synthetic oligonucleotide
cugaaaggaaccauggaau

SEQ ID NO: 849918 - RNA, 19 nt, Artificial Sequence
  Description of Artificial Sequence: Synthetic oligonucleotide
gauugucggcccucagccc

SEQ ID NO: 849919 - RNA, 19 nt, Artificial Sequence
  Description of Artificial Sequence: Synthetic oligonucleotide
caguaugaccggcucuggg

SEQ ID NO: 849920 - RNA, 19 nt, Artificial Sequence
  Description of Artificial Sequence: Synthetic oligonucleotide
acaucggcacccuggcgag

SEQ ID NO: 849921 - RNA, 19 nt, Artificial Sequence
  Description of Artificial Sequence: Synthetic oligonucleotide
caccaacugagcaggguug

SEQ ID NO: 849922 - RNA, 19 nt, Artificial Sequence
  Description of Artificial Sequence: Synthetic oligonucleotide
cagcuaguucgguucuugg

SEQ ID NO: 849923 - RNA, 19 nt, Artificial Sequence
  Description of Artificial Sequence: Synthetic oligonucleotide
cuuuggccaauccucccug

SEQ ID NO: 849924 - RNA, 19 nt, Artificial Sequence
  Description of Artificial Sequence: Synthetic oligonucleotide
gguggcaaacuugaaauuc

SEQ ID NO: 849925 - RNA, 19 nt, Artificial Sequence
  Description of Artificial Sequence: Synthetic oligonucleotide
gguguaguggguggcaggg

SEQ ID NO: 849926 - RNA, 19 nt, Artificial Sequence
  Description of Artificial Sequence: Synthetic oligonucleotide
aaggccuguguggcuaguc

SEQ ID NO: 849927 - RNA, 19 nt, Artificial Sequence
  Description of Artificial Sequence: Synthetic oligonucleotide
accuggaaguuagguaacg

SEQ ID NO: 849928 - RNA, 19 nt, Artificial Sequence
  Description of Artificial Sequence: Synthetic oligonucleotide
aggguuguaaaagggcaca

SEQ ID NO: 849929 - RNA, 19 nt, Artificial Sequence
  Description of Artificial Sequence: Synthetic oligonucleotide
cuaucaccucacaguagug

SEQ ID NO: 849930 - RNA, 19 nt, Artificial Sequence
  Description of Artificial Sequence: Synthetic oligonucleotide
ucuaugggaccccgggaua

SEQ ID NO: 849931 - RNA, 19 nt, Artificial Sequence
  Description of Artificial Sequence: Synthetic oligonucleotide
agagccugaugugauguga

SEQ ID NO: 849932 - RNA, 19 nt, Artificial Sequence
  Description of Artificial Sequence: Synthetic oligonucleotide
cuggcuaaucaacacugga

SEQ ID NO: 849933 - RNA, 19 nt, Artificial Sequence
  Description of Artificial Sequence: Synthetic oligonucleotide
ucccuggccuugaauuccc

SEQ ID NO: 849934 - RNA, 19 nt, Artificial Sequence
  Description of Artificial Sequence: Synthetic oligonucleotide
guugcaccagaggcaaagg

SEQ ID NO: 849935 - RNA, 19 nt, Artificial Sequence
  Description of Artificial Sequence: Synthetic oligonucleotide
gaugggagcggggcuagug

SEQ ID NO: 849936 - RNA, 19 nt, Artificial Sequence
  Description of Artificial Sequence: Synthetic oligonucleotide
acccacgagacuugaggca

SEQ ID NO: 849937 - RNA, 19 nt, Artificial Sequence
  Description of Artificial Sequence: Synthetic oligonucleotide
ugggagcggggcuagugga

SEQ ID NO: 849938 - RNA, 19 nt, Artificial Sequence
  Description of Artificial Sequence: Synthetic oligonucleotide
caaagaggcguaacuggga

SEQ ID NO: 849939 - RNA, 19 nt, Artificial Sequence
  Description of Artificial Sequence: Synthetic oligonucleotide
aguuacuugagagcccaaa

SEQ ID NO: 849940 - RNA, 19 nt, Artificial Sequence
  Description of Artificial Sequence: Synthetic oligonucleotide
ugggcaguagcugcacgcc

SEQ ID NO: 849941 - RNA, 19 nt, Artificial Sequence
  Description of Artificial Sequence: Synthetic oligonucleotide
ugaggcagcuaguucgguu

SEQ ID NO: 849942 - RNA, 19 nt, Artificial Sequence
  Description of Artificial Sequence: Synthetic oligonucleotide
cacgugucgcagcugcacc

SEQ ID NO: 849943 - RNA, 19 nt, Artificial Sequence
  Description of Artificial Sequence: Synthetic oligonucleotide
gcaucugaaaggaaccaug

SEQ ID NO: 849944 - RNA, 19 nt, Artificial Sequence
  Description of Artificial Sequence: Synthetic oligonucleotide
agagcccaaaauauuuuau

SEQ ID NO: 849945 - RNA, 19 nt, Artificial Sequence
  Description of Artificial Sequence: Synthetic oligonucleotide
ucuguccuuugaauagcuu

SEQ ID NO: 849946 - RNA, 19 nt, Artificial Sequence
  Description of Artificial Sequence: Synthetic oligonucleotide
ucuggguuacugccauguc

SEQ ID NO: 849947 - RNA, 19 nt, Artificial Sequence
  Description of Artificial Sequence: Synthetic oligonucleotide
accugcuuuucuagacagc

SEQ ID NO: 849948 - RNA, 19 nt, Artificial Sequence
  Description of Artificial Sequence: Synthetic oligonucleotide
ggcucuaccuuagacugag

SEQ ID NO: 849949 - RNA, 19 nt, Artificial Sequence
  Description of Artificial Sequence: Synthetic oligonucleotide
gguuccaacuacaaaucca

SEQ ID NO: 849950 - RNA, 19 nt, Artificial Sequence
  Description of Artificial Sequence: Synthetic oligonucleotide
agguaacgagcaggugugc

SEQ ID NO: 849951 - RNA, 19 nt, Artificial Sequence
  Description of Artificial Sequence: Synthetic oligonucleotide
caucaggauuccacagcac

SEQ ID NO: 849952 - RNA, 19 nt, Artificial Sequence
  Description of Artificial Sequence: Synthetic oligonucleotide
ggguccauagguaguaccc

SEQ ID NO: 849953 - RNA, 19 nt, Artificial Sequence
  Description of Artificial Sequence: Synthetic oligonucleotide
agcauacucauaagccucu

SEQ ID NO: 849954 - RNA, 19 nt, Artificial Sequence
  Description of Artificial Sequence: Synthetic oligonucleotide
uucccuucggaaggcaggu

SEQ ID NO: 849955 - RNA, 19 nt, Artificial Sequence
  Description of Artificial Sequence: Synthetic oligonucleotide
acaguaugaccggcucugg

SEQ ID NO: 849956 - RNA, 19 nt, Artificial Sequence
  Description of Artificial Sequence: Synthetic oligonucleotide
caggccuuaauuugucuaa

SEQ ID NO: 849957 - RNA, 19 nt, Artificial Sequence
  Description of Artificial Sequence: Synthetic oligonucleotide
cuacugacccacagggaca

SEQ ID NO: 849958 - RNA, 19 nt, Artificial Sequence
  Description of Artificial Sequence: Synthetic oligonucleotide
ugucugcggagcugugggc

SEQ ID NO: 849959 - RNA, 19 nt, Artificial Sequence
  Description of Artificial Sequence: Synthetic oligonucleotide
uaccuuagacugagcccca

SEQ ID NO: 849960 - RNA, 19 nt, Artificial Sequence
  Description of Artificial Sequence: Synthetic oligonucleotide
cuugguggagaacaguuau

SEQ ID NO: 849961 - RNA, 19 nt, Artificial Sequence
  Description of Artificial Sequence: Synthetic oligonucleotide
ggugugcaccccaagagac

SEQ ID NO: 849962 - RNA, 19 nt, Artificial Sequence
  Description of Artificial Sequence: Synthetic oligonucleotide
ucauucuauccagcaucug

SEQ ID NO: 849963 - RNA, 19 nt, Artificial Sequence
  Description of Artificial Sequence: Synthetic oligonucleotide
cacuggagaguaugcacca

SEQ ID NO: 849964 - RNA, 19 nt, Artificial Sequence
  Description of Artificial Sequence: Synthetic oligonucleotide
cacgaucccacgcugggga

SEQ ID NO: 849965 - RNA, 19 nt, Artificial Sequence
  Description of Artificial Sequence: Synthetic oligonucleotide
agcaucugaaaggaaccau

SEQ ID NO: 849966 - RNA, 19 nt, Artificial Sequence
  Description of Artificial Sequence: Synthetic oligonucleotide
gcuaucaccucacaguagu

SEQ ID NO: 849967 - RNA, 19 nt, Artificial Sequence
  Description of Artificial Sequence: Synthetic oligonucleotide
ggugggcucuaccuuagac

SEQ ID NO: 849968 - RNA, 19 nt, Artificial Sequence
  Description of Artificial Sequence: Synthetic oligonucleotide
guuagguaacgagcaggug

SEQ ID NO: 849969 - RNA, 19 nt, Artificial Sequence
  Description of Artificial Sequence: Synthetic oligonucleotide
acgagcaggugugcacccc

SEQ ID NO: 849970 - RNA, 19 nt, Artificial Sequence
  Description of Artificial Sequence: Synthetic oligonucleotide
gcaagagcuggcucacucc

SEQ ID NO: 849971 - RNA, 19 nt, Artificial Sequence
  Description of Artificial Sequence: Synthetic oligonucleotide
gugggcucuaccuuagacu

SEQ ID NO: 849972 - RNA, 19 nt, Artificial Sequence
  Description of Artificial Sequence: Synthetic oligonucleotide
ugcaccaacugagcagggu

SEQ ID NO: 849973 - RNA, 19 nt, Artificial Sequence
  Description of Artificial Sequence: Synthetic oligonucleotide
gggaagccaaguguggacc

SEQ ID NO: 849974 - RNA, 19 nt, Artificial Sequence
  Description of Artificial Sequence: Synthetic oligonucleotide
uccaaguccugugcuguuc

SEQ ID NO: 849975 - RNA, 19 nt, Artificial Sequence
  Description of Artificial Sequence: Synthetic oligonucleotide
ggcacugggaacaucggca

SEQ ID NO: 849976 - RNA, 19 nt, Artificial Sequence
  Description of Artificial Sequence: Synthetic oligonucleotide
ugaauuccccgaggugaca

SEQ ID NO: 849977 - RNA, 19 nt, Artificial Sequence
  Description of Artificial Sequence: Synthetic oligonucleotide
ggguuuagaacauccacau

SEQ ID NO: 849978 - RNA, 19 nt, Artificial Sequence
  Description of Artificial Sequence: Synthetic oligonucleotide
cugagccccaucugaucug

SEQ ID NO: 849979 - RNA, 19 nt, Artificial Sequence
  Description of Artificial Sequence: Synthetic oligonucleotide
accaacugagcaggguugu

SEQ ID NO: 849980 - RNA, 19 nt, Artificial Sequence
  Description of Artificial Sequence: Synthetic oligonucleotide
aguaugcaccagguugugu

SEQ ID NO: 849981 - RNA, 19 nt, Artificial Sequence
  Description of Artificial Sequence: Synthetic oligonucleotide
gaggcguaacugggaagcc

SEQ ID NO: 849982 - RNA, 19 nt, Artificial Sequence
  Description of Artificial Sequence: Synthetic oligonucleotide
aggcagcuaguucgguucu

SEQ ID NO: 849983 - RNA, 19 nt, Artificial Sequence
  Description of Artificial Sequence: Synthetic oligonucleotide
ggucccagcaaggacauaa

SEQ ID NO: 849984 - RNA, 19 nt, Artificial Sequence
  Description of Artificial Sequence: Synthetic oligonucleotide
cauuucagccaggcggcac

SEQ ID NO: 849985 - RNA, 19 nt, Artificial Sequence
  Description of Artificial Sequence: Synthetic oligonucleotide
agucaucucaggguuccaa

SEQ ID NO: 849986 - RNA, 19 nt, Artificial Sequence
  Description of Artificial Sequence: Synthetic oligonucleotide
gccacgaucccacgcuggg

SEQ ID NO: 849987 - RNA, 19 nt, Artificial Sequence
  Description of Artificial Sequence: Synthetic oligonucleotide
gcugcaccaaccaggcagg

SEQ ID NO: 849988 - RNA, 19 nt, Artificial Sequence
  Description of Artificial Sequence: Synthetic oligonucleotide
cuuugaauuuagauucauu

SEQ ID NO: 849989 - RNA, 19 nt, Artificial Sequence
  Description of Artificial Sequence: Synthetic oligonucleotide
uagaggauugucggcccuc

SEQ ID NO: 849990 - RNA, 19 nt, Artificial Sequence
  Description of Artificial Sequence: Synthetic oligonucleotide
ugcaccaaccaggcaggcu

SEQ ID NO: 849991 - RNA, 19 nt, Artificial Sequence
  Description of Artificial Sequence: Synthetic oligonucleotide
acacacaguaugaccggcu

SEQ ID NO: 849992 - RNA, 19 nt, Artificial Sequence
  Description of Artificial Sequence: Synthetic oligonucleotide
ccaucugggacccacgaga

SEQ ID NO: 849993 - RNA, 19 nt, Artificial Sequence
  Description of Artificial Sequence: Synthetic oligonucleotide
ugacagaagccugcaccaa

SEQ ID NO: 849994 - RNA, 19 nt, Artificial Sequence
  Description of Artificial Sequence: Synthetic oligonucleotide
gcuggcuaaucaacacugg

SEQ ID NO: 849995 - RNA, 19 nt, Artificial Sequence
  Description of Artificial Sequence: Synthetic oligonucleotide
caggugagucccguggcac

SEQ ID NO: 849996 - RNA, 19 nt, Artificial Sequence
  Description of Artificial Sequence: Synthetic oligonucleotide
augggaccccgggauauug

SEQ ID NO: 849997 - RNA, 19 nt, Artificial Sequence
  Description of Artificial Sequence: Synthetic oligonucleotide
auuccccgaggugacagaa

SEQ ID NO: 849998 - RNA, 19 nt, Artificial Sequence
  Description of Artificial Sequence: Synthetic oligonucleotide
ccuaguucaaugcugugua

SEQ ID NO: 849999 - RNA, 19 nt, Artificial Sequence
  Description of Artificial Sequence: Synthetic oligonucleotide
aucugggacccacgagacu

SEQ ID NO: 850000 - RNA, 19 nt, Artificial Sequence
  Description of Artificial Sequence: Synthetic oligonucleotide
gggcuaguggagcaaagaa

SEQ ID NO: 850001 - RNA, 19 nt, Artificial Sequence
  Description of Artificial Sequence: Synthetic oligonucleotide
cugcaccaacugagcaggg

SEQ ID NO: 850002 - RNA, 19 nt, Artificial Sequence
  Description of Artificial Sequence: Synthetic oligonucleotide
gggaccccgggauauuggc

SEQ ID NO: 850003 - RNA, 19 nt, Artificial Sequence
  Description of Artificial Sequence: Synthetic oligonucleotide
cccguggcaccauuucugg

SEQ ID NO: 850004 - RNA, 19 nt, Artificial Sequence
  Description of Artificial Sequence: Synthetic oligonucleotide
cagacuggagcugccacga

SEQ ID NO: 850005 - RNA, 19 nt, Artificial Sequence
  Description of Artificial Sequence: Synthetic oligonucleotide
ugucccaguuggguuuaga

SEQ ID NO: 850006 - RNA, 19 nt, Artificial Sequence
  Description of Artificial Sequence: Synthetic oligonucleotide
agccaaguguggacccugg

SEQ ID NO: 850007 - RNA, 19 nt, Artificial Sequence
  Description of Artificial Sequence: Synthetic oligonucleotide
aucuagcuuggaggguaag

SEQ ID NO: 850008 - RNA, 19 nt, Artificial Sequence
  Description of Artificial Sequence: Synthetic oligonucleotide
cagcucuaugggaccccgg

SEQ ID NO: 850009 - RNA, 19 nt, Artificial Sequence
  Description of Artificial Sequence: Synthetic oligonucleotide
gaaugucugcggagcugug

SEQ ID NO: 850010 - RNA, 19 nt, Artificial Sequence
  Description of Artificial Sequence: Synthetic oligonucleotide
ccucacaguaguggaaggc

SEQ ID NO: 850011 - RNA, 19 nt, Artificial Sequence
  Description of Artificial Sequence: Synthetic oligonucleotide
ggcacaaguagaugaauuu

SEQ ID NO: 850012 - RNA, 19 nt, Artificial Sequence
  Description of Artificial Sequence: Synthetic oligonucleotide
agacccgccuggaguggcc

SEQ ID NO: 850013 - RNA, 19 nt, Artificial Sequence
  Description of Artificial Sequence: Synthetic oligonucleotide
acccuggcgaggugagcug

SEQ ID NO: 850014 - RNA, 19 nt, Artificial Sequence
  Description of Artificial Sequence: Synthetic oligonucleotide
ugugucccaguuggguuua

SEQ ID NO: 850015 - RNA, 19 nt, Artificial Sequence
  Description of Artificial Sequence: Synthetic oligonucleotide
uauuggcacugggaacauc

SEQ ID NO: 850016 - RNA, 19 nt, Artificial Sequence
  Description of Artificial Sequence: Synthetic oligonucleotide
gccaaguguggacccuggg

SEQ ID NO: 850017 - RNA, 19 nt, Artificial Sequence
  Description of Artificial Sequence: Synthetic oligonucleotide
gguaacgagcaggugugca

SEQ ID NO: 850018 - RNA, 19 nt, Artificial Sequence
  Description of Artificial Sequence: Synthetic oligonucleotide
cugccacgaucccacgcug

SEQ ID NO: 850019 - RNA, 19 nt, Artificial Sequence
  Description of Artificial Sequence: Synthetic oligonucleotide
cucuaugggaccccgggau

SEQ ID NO: 850020 - RNA, 19 nt, Artificial Sequence
  Description of Artificial Sequence: Synthetic oligonucleotide
cuucggaaggcagguguca

SEQ ID NO: 850021 - RNA, 19 nt, Artificial Sequence
  Description of Artificial Sequence: Synthetic oligonucleotide
gagcggggcuaguggagca

SEQ ID NO: 850022 - RNA, 19 nt, Artificial Sequence
  Description of Artificial Sequence: Synthetic oligonucleotide
guaugaccggcucuggguu

SEQ ID NO: 850023 - RNA, 19 nt, Artificial Sequence
  Description of Artificial Sequence: Synthetic oligonucleotide
ugagucccguggcaccauu

SEQ ID NO: 850024 - RNA, 19 nt, Artificial Sequence
  Description of Artificial Sequence: Synthetic oligonucleotide
caaaagugguuggcaguca

SEQ ID NO: 850025 - RNA, 19 nt, Artificial Sequence
  Description of Artificial Sequence: Synthetic oligonucleotide
cauacucauaagccucugu

SEQ ID NO: 850026 - RNA, 19 nt, Artificial Sequence
  Description of Artificial Sequence: Synthetic oligonucleotide
gggagacacacaguaugac

SEQ ID NO: 850027 - RNA, 19 nt, Artificial Sequence
  Description of Artificial Sequence: Synthetic oligonucleotide
cucuguccuuugaauagcu

SEQ ID NO: 850028 - RNA, 19 nt, Artificial Sequence
  Description of Artificial Sequence: Synthetic oligonucleotide
gcagcuaguucgguucuug

SEQ ID NO: 850029 - RNA, 19 nt, Artificial Sequence
  Description of Artificial Sequence: Synthetic oligonucleotide
gguccauagguaguaccca

SEQ ID NO: 850030 - RNA, 19 nt, Artificial Sequence
  Description of Artificial Sequence: Synthetic oligonucleotide
caguaguggaaggccugug

SEQ ID NO: 850031 - RNA, 19 nt, Artificial Sequence
  Description of Artificial Sequence: Synthetic oligonucleotide
ggcuaucaccucacaguag

SEQ ID NO: 850032 - RNA, 19 nt, Artificial Sequence
  Description of Artificial Sequence: Synthetic oligonucleotide
ccucuguccuuugaauagc

SEQ ID NO: 850033 - RNA, 19 nt, Artificial Sequence
  Description of Artificial Sequence: Synthetic oligonucleotide
cauugguggcaaacuugaa

SEQ ID NO: 850034 - RNA, 19 nt, Artificial Sequence
  Description of Artificial Sequence: Synthetic oligonucleotide
gagacuugaggcagcuagu

SEQ ID NO: 850035 - RNA, 19 nt, Artificial Sequence
  Description of Artificial Sequence: Synthetic oligonucleotide
gguaagugucugacaggug

SEQ ID NO: 850036 - RNA, 19 nt, Artificial Sequence
  Description of Artificial Sequence: Synthetic oligonucleotide
cucuggguuacugccaugu

SEQ ID NO: 850037 - RNA, 19 nt, Artificial Sequence
  Description of Artificial Sequence: Synthetic oligonucleotide
caucuagcuuggaggguaa

SEQ ID NO: 850038 - RNA, 19 nt, Artificial Sequence
  Description of Artificial Sequence: Synthetic oligonucleotide
gggaaugucugcggagcug

SEQ ID NO: 850039 - RNA, 19 nt, Artificial Sequence
  Description of Artificial Sequence: Synthetic oligonucleotide
gucugacaggugagucccg

SEQ ID NO: 850040 - RNA, 19 nt, Artificial Sequence
  Description of Artificial Sequence: Synthetic oligonucleotide
gaccggcucuggguuacug

SEQ ID NO: 850041 - RNA, 19 nt, Artificial Sequence
  Description of Artificial Sequence: Synthetic oligonucleotide
gguuacugccauguccauc

SEQ ID NO: 850042 - RNA, 19 nt, Artificial Sequence
  Description of Artificial Sequence: Synthetic oligonucleotide
gcacgccgugcaucaaggg

SEQ ID NO: 850043 - RNA, 19 nt, Artificial Sequence
  Description of Artificial Sequence: Synthetic oligonucleotide
cagacccgccuggaguggc

SEQ ID NO: 850044 - RNA, 19 nt, Artificial Sequence
  Description of Artificial Sequence: Synthetic oligonucleotide
ucccuucggaaggcaggug

SEQ ID NO: 850045 - RNA, 19 nt, Artificial Sequence
  Description of Artificial Sequence: Synthetic oligonucleotide
guagaggauugucggcccu

SEQ ID NO: 850046 - RNA, 19 nt, Artificial Sequence
  Description of Artificial Sequence: Synthetic oligonucleotide
ccgaggugacagaagccug

SEQ ID NO: 850047 - RNA, 19 nt, Artificial Sequence
  Description of Artificial Sequence: Synthetic oligonucleotide
uagcgagcucuggacccca

SEQ ID NO: 850048 - RNA, 19 nt, Artificial Sequence
  Description of Artificial Sequence: Synthetic oligonucleotide
gaucccacgcuggggaggu

SEQ ID NO: 850049 - RNA, 19 nt, Artificial Sequence
  Description of Artificial Sequence: Synthetic oligonucleotide
ggcucagugcuuggcauca

SEQ ID NO: 850050 - RNA, 19 nt, Artificial Sequence
  Description of Artificial Sequence: Synthetic oligonucleotide
ucggcacccuggcgaggug

SEQ ID NO: 850051 - RNA, 19 nt, Artificial Sequence
  Description of Artificial Sequence: Synthetic oligonucleotide
uagcuucauugguggcaaa

SEQ ID NO: 850052 - RNA, 19 nt, Artificial Sequence
  Description of Artificial Sequence: Synthetic oligonucleotide
uaugggaccccgggauauu

SEQ ID NO: 850053 - RNA, 19 nt, Artificial Sequence
  Description of Artificial Sequence: Synthetic oligonucleotide
ccacauagcgagcucugga

SEQ ID NO: 850054 - RNA, 19 nt, Artificial Sequence
  Description of Artificial Sequence: Synthetic oligonucleotide
gcucuaugggaccccggga

SEQ ID NO: 850055 - RNA, 19 nt, Artificial Sequence
  Description of Artificial Sequence: Synthetic oligonucleotide
gcugccacgaucccacgcu

SEQ ID NO: 850056 - RNA, 19 nt, Artificial Sequence
  Description of Artificial Sequence: Synthetic oligonucleotide
ccagcucuaugggaccccg

SEQ ID NO: 850057 - RNA, 19 nt, Artificial Sequence
  Description of Artificial Sequence: Synthetic oligonucleotide
ggggcuaguggagcaaaga

SEQ ID NO: 850058 - RNA, 19 nt, Artificial Sequence
  Description of Artificial Sequence: Synthetic oligonucleotide
cugcaccaaccaggcaggc

SEQ ID NO: 850059 - RNA, 19 nt, Artificial Sequence
  Description of Artificial Sequence: Synthetic oligonucleotide
auccagcggcaauccuagu

SEQ ID NO: 850060 - RNA, 19 nt, Artificial Sequence
  Description of Artificial Sequence: Synthetic oligonucleotide
ccccgaggugacagaagcc

SEQ ID NO: 850061 - RNA, 19 nt, Artificial Sequence
  Description of Artificial Sequence: Synthetic oligonucleotide
cugugucccaguuggguuu

SEQ ID NO: 850062 - RNA, 19 nt, Artificial Sequence
  Description of Artificial Sequence: Synthetic oligonucleotide
gcuggggaggucuccaagu

SEQ ID NO: 850063 - RNA, 19 nt, Artificial Sequence
  Description of Artificial Sequence: Synthetic oligonucleotide
ggguaagaguucaggucca

SEQ ID NO: 850064 - RNA, 19 nt, Artificial Sequence
  Description of Artificial Sequence: Synthetic oligonucleotide
ccuuagacugagccccauc

SEQ ID NO: 850065 - RNA, 19 nt, Artificial Sequence
  Description of Artificial Sequence: Synthetic oligonucleotide
ccacgagacuugaggcagc

SEQ ID NO: 850066 - RNA, 19 nt, Artificial Sequence
  Description of Artificial Sequence: Synthetic oligonucleotide
ccauagguaguacccagcu

SEQ ID NO: 850067 - RNA, 19 nt, Artificial Sequence
  Description of Artificial Sequence: Synthetic oligonucleotide
gggacaggccuuaauuugu

SEQ ID NO: 850068 - RNA, 19 nt, Artificial Sequence
  Description of Artificial Sequence: Synthetic oligonucleotide
cccagcaaggacauaaguu

SEQ ID NO: 850069 - RNA, 19 nt, Artificial Sequence
  Description of Artificial Sequence: Synthetic oligonucleotide
cugcaaggagggagacaca

SEQ ID NO: 850070 - RNA, 19 nt, Artificial Sequence
  Description of Artificial Sequence: Synthetic oligonucleotide
caucugaucuggguuuggu

SEQ ID NO: 850071 - RNA, 19 nt, Artificial Sequence
  Description of Artificial Sequence: Synthetic oligonucleotide
accaaccaggcaggcucca

SEQ ID NO: 850072 - RNA, 19 nt, Artificial Sequence
  Description of Artificial Sequence: Synthetic oligonucleotide
gcaccaacugagcaggguu

SEQ ID NO: 850073 - RNA, 19 nt, Artificial Sequence
  Description of Artificial Sequence: Synthetic oligonucleotide
acgcuggggaggucuccaa

SEQ ID NO: 850074 - RNA, 19 nt, Artificial Sequence
  Description of Artificial Sequence: Synthetic oligonucleotide
guagcugcacgccgugcau

SEQ ID NO: 850075 - RNA, 19 nt, Artificial Sequence
  Description of Artificial Sequence: Synthetic oligonucleotide
agcggcaauccuaguucaa

SEQ ID NO: 850076 - RNA, 19 nt, Artificial Sequence
  Description of Artificial Sequence: Synthetic oligonucleotide
ggcacccuggcgaggugag

SEQ ID NO: 850077 - RNA, 19 nt, Artificial Sequence
  Description of Artificial Sequence: Synthetic oligonucleotide
ccuggaaguuagguaacga

SEQ ID NO: 850078 - RNA, 19 nt, Artificial Sequence
  Description of Artificial Sequence: Synthetic oligonucleotide
cuaugggaccccgggauau

SEQ ID NO: 850079 - RNA, 19 nt, Artificial Sequence
  Description of Artificial Sequence: Synthetic oligonucleotide
accuuagacugagccccau

SEQ ID NO: 850080 - RNA, 19 nt, Artificial Sequence
  Description of Artificial Sequence: Synthetic oligonucleotide
cacccuggcgaggugagcu

SEQ ID NO: 850081 - RNA, 19 nt, Artificial Sequence
  Description of Artificial Sequence: Synthetic oligonucleotide
cacgcuggggaggucucca

SEQ ID NO: 850082 - RNA, 19 nt, Artificial Sequence
  Description of Artificial Sequence: Synthetic oligonucleotide
ccaucugaucuggguuugg

SEQ ID NO: 850083 - RNA, 19 nt, Artificial Sequence
  Description of Artificial Sequence: Synthetic oligonucleotide
ggcggcacaaguagaugaa

SEQ ID NO: 850084 - RNA, 19 nt, Artificial Sequence
  Description of Artificial Sequence: Synthetic oligonucleotide
ccaucuagcuuggagggua

SEQ ID NO: 850085 - RNA, 19 nt, Artificial Sequence
  Description of Artificial Sequence: Synthetic oligonucleotide
cccaucugaucuggguuug

SEQ ID NO: 850086 - RNA, 19 nt, Artificial Sequence
  Description of Artificial Sequence: Synthetic oligonucleotide
agcggggcuaguggagcaa

SEQ ID NO: 850087 - RNA, 19 nt, Artificial Sequence
  Description of Artificial Sequence: Synthetic oligonucleotide
gguuugguaugaacaaguu

SEQ ID NO: 850088 - RNA, 19 nt, Artificial Sequence
  Description of Artificial Sequence: Synthetic oligonucleotide
ccacgaucccacgcugggg

SEQ ID NO: 850089 - RNA, 19 nt, Artificial Sequence
  Description of Artificial Sequence: Synthetic oligonucleotide
cccgggauauuggcacugg

SEQ ID NO: 850090 - RNA, 19 nt, Artificial Sequence
  Description of Artificial Sequence: Synthetic oligonucleotide
ggagaguaugcaccagguu

SEQ ID NO: 850091 - RNA, 19 nt, Artificial Sequence
  Description of Artificial Sequence: Synthetic oligonucleotide
gggacccacgagacuugag

SEQ ID NO: 850092 - RNA, 19 nt, Artificial Sequence
  Description of Artificial Sequence: Synthetic oligonucleotide
ggaccccgggauauuggca

SEQ ID NO: 850093 - RNA, 19 nt, Artificial Sequence
  Description of Artificial Sequence: Synthetic oligonucleotide
ugaccggcucuggguuacu

SEQ ID NO: 850094 - RNA, 19 nt, Artificial Sequence
  Description of Artificial Sequence: Synthetic oligonucleotide
gugucccaguuggguuuag

SEQ ID NO: 850095 - RNA, 19 nt, Artificial Sequence
  Description of Artificial Sequence: Synthetic oligonucleotide
cacgagacuugaggcagcu

SEQ ID NO: 850096 - RNA, 19 nt, Artificial Sequence
  Description of Artificial Sequence: Synthetic oligonucleotide
ccaagugcucuaccucaga

SEQ ID NO: 850097 - RNA, 19 nt, Artificial Sequence
  Description of Artificial Sequence: Synthetic oligonucleotide
ggcaucaguagaggauugu

SEQ ID NO: 850098 - RNA, 19 nt, Artificial Sequence
  Description of Artificial Sequence: Synthetic oligonucleotide
cacagggacaggccuuaau

SEQ ID NO: 850099 - RNA, 19 nt, Artificial Sequence
  Description of Artificial Sequence: Synthetic oligonucleotide
gggccauccaagugcucua

SEQ ID NO: 850100 - RNA, 19 nt, Artificial Sequence
  Description of Artificial Sequence: Synthetic oligonucleotide
acgagacuugaggcagcua

SEQ ID NO: 850101 - RNA, 19 nt, Artificial Sequence
  Description of Artificial Sequence: Synthetic oligonucleotide
ccaaguccugugcuguucu

SEQ ID NO: 850102 - RNA, 19 nt, Artificial Sequence
  Description of Artificial Sequence: Synthetic oligonucleotide
cccgaggugacagaagccu

SEQ ID NO: 850103 - RNA, 19 nt, Artificial Sequence
  Description of Artificial Sequence: Synthetic oligonucleotide
aucccacgcuggggagguc

SEQ ID NO: 850104 - RNA, 19 nt, Artificial Sequence
  Description of Artificial Sequence: Synthetic oligonucleotide
ccgcugugucccaguuggg

SEQ ID NO: 850105 - RNA, 19 nt, Artificial Sequence
  Description of Artificial Sequence: Synthetic oligonucleotide
cggggcuaguggagcaaag

SEQ ID NO: 850106 - RNA, 19 nt, Artificial Sequence
  Description of Artificial Sequence: Synthetic oligonucleotide
gcucuaccuuagacugagc

SEQ ID NO: 850107 - RNA, 19 nt, Artificial Sequence
  Description of Artificial Sequence: Synthetic oligonucleotide
ggacucugggaagccaagu

SEQ ID NO: 850108 - RNA, 19 nt, Artificial Sequence
  Description of Artificial Sequence: Synthetic oligonucleotide
ggagggagacacacaguau

SEQ ID NO: 850109 - RNA, 19 nt, Artificial Sequence
  Description of Artificial Sequence: Synthetic oligonucleotide
cagcuugugcagcuuucuu

SEQ ID NO: 850110 - RNA, 19 nt, Artificial Sequence
  Description of Artificial Sequence: Synthetic oligonucleotide
ccccgggauauuggcacug

SEQ ID NO: 850111 - RNA, 19 nt, Artificial Sequence
  Description of Artificial Sequence: Synthetic oligonucleotide
gcggcaauccuaguucaau

SEQ ID NO: 850112 - RNA, 19 nt, Artificial Sequence
  Description of Artificial Sequence: Synthetic oligonucleotide
uggucccagcaaggacaua

SEQ ID NO: 850113 - RNA, 19 nt, Artificial Sequence
  Description of Artificial Sequence: Synthetic oligonucleotide
cuccaaguccugugcuguu

SEQ ID NO: 850114 - RNA, 19 nt, Artificial Sequence
  Description of Artificial Sequence: Synthetic oligonucleotide
cagugcccuccuggaucug

SEQ ID NO: 850115 - RNA, 19 nt, Artificial Sequence
  Description of Artificial Sequence: Synthetic oligonucleotide
cggcacaaguagaugaauu

SEQ ID NO: 850116 - RNA, 19 nt, Artificial Sequence
  Description of Artificial Sequence: Synthetic oligonucleotide
ggguuacugccauguccau

SEQ ID NO: 850117 - RNA, 19 nt, Artificial Sequence
  Description of Artificial Sequence: Synthetic oligonucleotide
ggcaaagguccugccuggu

SEQ ID NO: 850118 - RNA, 19 nt, Artificial Sequence
  Description of Artificial Sequence: Synthetic oligonucleotide
gcggggcuaguggagcaaa

SEQ ID NO: 850119 - RNA, 19 nt, Artificial Sequence
  Description of Artificial Sequence: Synthetic oligonucleotide
gccaucuagcuuggagggu

SEQ ID NO: 850120 - RNA, 19 nt, Artificial Sequence
  Description of Artificial Sequence: Synthetic oligonucleotide
gcggcacaaguagaugaau

SEQ ID NO: 850121 - RNA, 19 nt, Artificial Sequence
  Description of Artificial Sequence: Synthetic oligonucleotide
gccaauccucccuggccuu

SEQ ID NO: 850122 - RNA, 19 nt, Artificial Sequence
  Description of Artificial Sequence: Synthetic oligonucleotide
gcucuggaccccaccugcu

SEQ ID NO: 850123 - RNA, 19 nt, Artificial Sequence
  Description of Artificial Sequence: Synthetic oligonucleotide
ccaacugagcaggguugua

SEQ ID NO: 850124 - RNA, 19 nt, Artificial Sequence
  Description of Artificial Sequence: Synthetic oligonucleotide
ggguugcaccagaggcaaa

SEQ ID NO: 850125 - RNA, 19 nt, Artificial Sequence
  Description of Artificial Sequence: Synthetic oligonucleotide
cgugucgcagcugcaccaa

SEQ ID NO: 850126 - RNA, 19 nt, Artificial Sequence
  Description of Artificial Sequence: Synthetic oligonucleotide
ggcagcuaguucgguucuu

SEQ ID NO: 850127 - RNA, 19 nt, Artificial Sequence
  Description of Artificial Sequence: Synthetic oligonucleotide
ccgccuggaguggccccug

SEQ ID NO: 850128 - RNA, 19 nt, Artificial Sequence
  Description of Artificial Sequence: Synthetic oligonucleotide
gcuggccaucagggaaugu

SEQ ID NO: 850129 - RNA, 19 nt, Artificial Sequence
  Description of Artificial Sequence: Synthetic oligonucleotide
ccuguguggcuagucccau

SEQ ID NO: 850130 - RNA, 19 nt, Artificial Sequence
  Description of Artificial Sequence: Synthetic oligonucleotide
aaaaucauugcuuggagag

SEQ ID NO: 850131 - RNA, 19 nt, Artificial Sequence
  Description of Artificial Sequence: Synthetic oligonucleotide
aguaacauugcucaaacac

SEQ ID NO: 850132 - RNA, 19 nt, Artificial Sequence
  Description of Artificial Sequence: Synthetic oligonucleotide
ucauaaaagaacaggaaag

SEQ ID NO: 850133 - RNA, 19 nt, Artificial Sequence
  Description of Artificial Sequence: Synthetic oligonucleotide
acgguuuugaggcagaagc

SEQ ID NO: 850134 - RNA, 19 nt, Artificial Sequence
  Description of Artificial Sequence: Synthetic oligonucleotide
uaucauuucgccuggaggg

SEQ ID NO: 850135 - RNA, 19 nt, Artificial Sequence
  Description of Artificial Sequence: Synthetic oligonucleotide
aagagaugggcucaaacuc

SEQ ID NO: 850136 - RNA, 19 nt, Artificial Sequence
  Description of Artificial Sequence: Synthetic oligonucleotide
aauaugauuucacauaauu

SEQ ID NO: 850137 - RNA, 19 nt, Artificial Sequence
  Description of Artificial Sequence: Synthetic oligonucleotide
uguuuuauauuccaguagu

SEQ ID NO: 850138 - RNA, 19 nt, Artificial Sequence
  Description of Artificial Sequence: Synthetic oligonucleotide
auugauucagguugcaugg

SEQ ID NO: 850139 - RNA, 19 nt, Artificial Sequence
  Description of Artificial Sequence: Synthetic oligonucleotide
uuuacagagaaauauuccu

SEQ ID NO: 850140 - RNA, 19 nt, Artificial Sequence
  Description of Artificial Sequence: Synthetic oligonucleotide
agaaagugaggguauaaac

SEQ ID NO: 850141 - RNA, 19 nt, Artificial Sequence
  Description of Artificial Sequence: Synthetic oligonucleotide
agacucacaauucagagcu

SEQ ID NO: 850142 - RNA, 19 nt, Artificial Sequence
  Description of Artificial Sequence: Synthetic oligonucleotide
gguuaauugauucagguug

SEQ ID NO: 850143 - RNA, 19 nt, Artificial Sequence
  Description of Artificial Sequence: Synthetic oligonucleotide
guaauuacucuuuauaguc

SEQ ID NO: 850144 - RNA, 19 nt, Artificial Sequence
  Description of Artificial Sequence: Synthetic oligonucleotide
uuagcucacacacacacac

SEQ ID NO: 850145 - RNA, 19 nt, Artificial Sequence
  Description of Artificial Sequence: Synthetic oligonucleotide
agauagauuuagcucacac

SEQ ID NO: 850146 - RNA, 19 nt, Artificial Sequence
  Description of Artificial Sequence: Synthetic oligonucleotide
ugagccggaaucauuagag

SEQ ID NO: 850147 - RNA, 19 nt, Artificial Sequence
  Description of Artificial Sequence: Synthetic oligonucleotide
aaucauugcuuggagaguc

SEQ ID NO: 850148 - RNA, 19 nt, Artificial Sequence
  Description of Artificial Sequence: Synthetic oligonucleotide
ugaggguauaaacaacagg

SEQ ID NO: 850149 - RNA, 19 nt, Artificial Sequence
  Description of Artificial Sequence: Synthetic oligonucleotide
aauuaucaccagcuggauc

SEQ ID NO: 850150 - RNA, 19 nt, Artificial Sequence
  Description of Artificial Sequence: Synthetic oligonucleotide
uuaucaaccacuuuuccau

SEQ ID NO: 850151 - RNA, 19 nt, Artificial Sequence
  Description of Artificial Sequence: Synthetic oligonucleotide
uagcauugcagauggaacg

SEQ ID NO: 850152 - RNA, 19 nt, Artificial Sequence
  Description of Artificial Sequence: Synthetic oligonucleotide
ucugcgaucagccaaugac

SEQ ID NO: 850153 - RNA, 19 nt, Artificial Sequence
  Description of Artificial Sequence: Synthetic oligonucleotide
aguaauuacucuuuauagu

SEQ ID NO: 850154 - RNA, 19 nt, Artificial Sequence
  Description of Artificial Sequence: Synthetic oligonucleotide
uuuaucaaccacuuuucca

SEQ ID NO: 850155 - RNA, 19 nt, Artificial Sequence
  Description of Artificial Sequence: Synthetic oligonucleotide
uuaucuuguggacuguaag

SEQ ID NO: 850156 - RNA, 19 nt, Artificial Sequence
  Description of Artificial Sequence: Synthetic oligonucleotide
uucaagcuaaccccgaggc

SEQ ID NO: 850157 - RNA, 19 nt, Artificial Sequence
  Description of Artificial Sequence: Synthetic oligonucleotide
ggaaucauuagagugaggg

SEQ ID NO: 850158 - RNA, 19 nt, Artificial Sequence
  Description of Artificial Sequence: Synthetic oligonucleotide
guaagaacagaugacuugg

SEQ ID NO: 850159 - RNA, 19 nt, Artificial Sequence
  Description of Artificial Sequence: Synthetic oligonucleotide
gacuugguaaucauaaaag

SEQ ID NO: 850160 - RNA, 19 nt, Artificial Sequence
  Description of Artificial Sequence: Synthetic oligonucleotide
uccuuuaucaaccacuuuu

SEQ ID NO: 850161 - RNA, 19 nt, Artificial Sequence
  Description of Artificial Sequence: Synthetic oligonucleotide
aacggaacaguuucugaag

SEQ ID NO: 850162 - RNA, 19 nt, Artificial Sequence
  Description of Artificial Sequence: Synthetic oligonucleotide
ucacaagauagauuuagcu

SEQ ID NO: 850163 - RNA, 19 nt, Artificial Sequence
  Description of Artificial Sequence: Synthetic oligonucleotide
gauggaacggaacaguuuc

SEQ ID NO: 850164 - RNA, 19 nt, Artificial Sequence
  Description of Artificial Sequence: Synthetic oligonucleotide
cugauucuaaaguugcagg

SEQ ID NO: 850165 - RNA, 19 nt, Artificial Sequence
  Description of Artificial Sequence: Synthetic oligonucleotide
ugcgaucagccaaugaccg

SEQ ID NO: 850166 - RNA, 19 nt, Artificial Sequence
  Description of Artificial Sequence: Synthetic oligonucleotide
agcucacacacacacacac

SEQ ID NO: 850167 - RNA, 19 nt, Artificial Sequence
  Description of Artificial Sequence: Synthetic oligonucleotide
auggauaugacgcacuacu

SEQ ID NO: 850168 - RNA, 19 nt, Artificial Sequence
  Description of Artificial Sequence: Synthetic oligonucleotide
ugauucuaaaguugcagga

SEQ ID NO: 850169 - RNA, 19 nt, Artificial Sequence
  Description of Artificial Sequence: Synthetic oligonucleotide
uaucuuuagaauguaagaa

SEQ ID NO: 850170 - RNA, 19 nt, Artificial Sequence
  Description of Artificial Sequence: Synthetic oligonucleotide
cauugcucaaacacuaagc

SEQ ID NO: 850171 - RNA, 19 nt, Artificial Sequence
  Description of Artificial Sequence: Synthetic oligonucleotide
ucagugauauaaaugggau

SEQ ID NO: 850172 - RNA, 19 nt, Artificial Sequence
  Description of Artificial Sequence: Synthetic oligonucleotide
uucagugguccaaugacug

SEQ ID NO: 850173 - RNA, 19 nt, Artificial Sequence
  Description of Artificial Sequence: Synthetic oligonucleotide
cuaucauuucgccuggagg

SEQ ID NO: 850174 - RNA, 19 nt, Artificial Sequence
  Description of Artificial Sequence: Synthetic oligonucleotide
uuauauacucauauacaau

SEQ ID NO: 850175 - RNA, 19 nt, Artificial Sequence
  Description of Artificial Sequence: Synthetic oligonucleotide
aguaguaaauagcauugca

SEQ ID NO: 850176 - RNA, 19 nt, Artificial Sequence
  Description of Artificial Sequence: Synthetic oligonucleotide
acuugguaaucauaaaaga

SEQ ID NO: 850177 - RNA, 19 nt, Artificial Sequence
  Description of Artificial Sequence: Synthetic oligonucleotide
gauaugacgcacuacuauc

SEQ ID NO: 850178 - RNA, 19 nt, Artificial Sequence
  Description of Artificial Sequence: Synthetic oligonucleotide
cucaaacucacaauggauc

SEQ ID NO: 850179 - RNA, 19 nt, Artificial Sequence
  Description of Artificial Sequence: Synthetic oligonucleotide
cuaauuaucaccagcugga

SEQ ID NO: 850180 - RNA, 19 nt, Artificial Sequence
  Description of Artificial Sequence: Synthetic oligonucleotide
aacacuaagcagcaagcaa

SEQ ID NO: 850181 - RNA, 19 nt, Artificial Sequence
  Description of Artificial Sequence: Synthetic oligonucleotide
uuaauccugguuucccacg

SEQ ID NO: 850182 - RNA, 19 nt, Artificial Sequence
  Description of Artificial Sequence: Synthetic oligonucleotide
uggaauccaccccagagcu

SEQ ID NO: 850183 - RNA, 19 nt, Artificial Sequence
  Description of Artificial Sequence: Synthetic oligonucleotide
ugcauggcugguaucacag

SEQ ID NO: 850184 - RNA, 19 nt, Artificial Sequence
  Description of Artificial Sequence: Synthetic oligonucleotide
auaaacaacagguuuuguu

SEQ ID NO: 850185 - RNA, 19 nt, Artificial Sequence
  Description of Artificial Sequence: Synthetic oligonucleotide
aauggauaugacgcacuac

SEQ ID NO: 850186 - RNA, 19 nt, Artificial Sequence
  Description of Artificial Sequence: Synthetic oligonucleotide
cuucagugauauaaauggg

SEQ ID NO: 850187 - RNA, 19 nt, Artificial Sequence
  Description of Artificial Sequence: Synthetic oligonucleotide
agaauucacucuccauccc

SEQ ID NO: 850188 - RNA, 19 nt, Artificial Sequence
  Description of Artificial Sequence: Synthetic oligonucleotide
ugacgcacuacuaucauuu

SEQ ID NO: 850189 - RNA, 19 nt, Artificial Sequence
  Description of Artificial Sequence: Synthetic oligonucleotide
uugcagauggaacggaaca

SEQ ID NO: 850190 - RNA, 19 nt, Artificial Sequence
  Description of Artificial Sequence: Synthetic oligonucleotide
auagcauugcagauggaac

SEQ ID NO: 850191 - RNA, 19 nt, Artificial Sequence
  Description of Artificial Sequence: Synthetic oligonucleotide
gaaugagagcucuuaucag

SEQ ID NO: 850192 - RNA, 19 nt, Artificial Sequence
  Description of Artificial Sequence: Synthetic oligonucleotide
aguaaauagcauugcagau

SEQ ID NO: 850193 - RNA, 19 nt, Artificial Sequence
  Description of Artificial Sequence: Synthetic oligonucleotide
cucacacacacacacacac

SEQ ID NO: 850194 - RNA, 19 nt, Artificial Sequence
  Description of Artificial Sequence: Synthetic oligonucleotide
auacucauauacaauaaca

SEQ ID NO: 850195 - RNA, 19 nt, Artificial Sequence
  Description of Artificial Sequence: Synthetic oligonucleotide
auucagguugcauggcugg

SEQ ID NO: 850196 - RNA, 19 nt, Artificial Sequence
  Description of Artificial Sequence: Synthetic oligonucleotide
gaggguauaaacaacaggu

SEQ ID NO: 850197 - RNA, 19 nt, Artificial Sequence
  Description of Artificial Sequence: Synthetic oligonucleotide
aaacaaagccaaaugcugu

SEQ ID NO: 850198 - RNA, 19 nt, Artificial Sequence
  Description of Artificial Sequence: Synthetic oligonucleotide
uacuguggaauccacccca

SEQ ID NO: 850199 - RNA, 19 nt, Artificial Sequence
  Description of Artificial Sequence: Synthetic oligonucleotide
uuuaauccugguuucccac

SEQ ID NO: 850200 - RNA, 19 nt, Artificial Sequence
  Description of Artificial Sequence: Synthetic oligonucleotide
uuucccacggguaggaggu

SEQ ID NO: 850201 - RNA, 19 nt, Artificial Sequence
  Description of Artificial Sequence: Synthetic oligonucleotide
uagacucacaauucagagc

SEQ ID NO: 850202 - RNA, 19 nt, Artificial Sequence
  Description of Artificial Sequence: Synthetic oligonucleotide
uucagugaggggaaaagua

SEQ ID NO: 850203 - RNA, 19 nt, Artificial Sequence
  Description of Artificial Sequence: Synthetic oligonucleotide
uggacaucgaucuccucag

SEQ ID NO: 850204 - RNA, 19 nt, Artificial Sequence
  Description of Artificial Sequence: Synthetic oligonucleotide
ucuuccuauucuuggaacu

SEQ ID NO: 850205 - RNA, 19 nt, Artificial Sequence
  Description of Artificial Sequence: Synthetic oligonucleotide
ucguaagauuugucaaugg

SEQ ID NO: 850206 - RNA, 19 nt, Artificial Sequence
  Description of Artificial Sequence: Synthetic oligonucleotide
ucuccauccccauaugaca

SEQ ID NO: 850207 - RNA, 19 nt, Artificial Sequence
  Description of Artificial Sequence: Synthetic oligonucleotide
cacacacacacacacacac

SEQ ID NO: 850208 - RNA, 19 nt, Artificial Sequence
  Description of Artificial Sequence: Synthetic oligonucleotide
ccuaauuaucaccagcugg

SEQ ID NO: 850209 - RNA, 19 nt, Artificial Sequence
  Description of Artificial Sequence: Synthetic oligonucleotide
gaauguaagaacagaugac

SEQ ID NO: 850210 - RNA, 19 nt, Artificial Sequence
  Description of Artificial Sequence: Synthetic oligonucleotide
uuucaugugugugugugug

SEQ ID NO: 850211 - RNA, 19 nt, Artificial Sequence
  Description of Artificial Sequence: Synthetic oligonucleotide
auggucuggaaagugcccc

SEQ ID NO: 850212 - RNA, 19 nt, Artificial Sequence
  Description of Artificial Sequence: Synthetic oligonucleotide
uggcuguaaucuucaaggg

SEQ ID NO: 850213 - RNA, 19 nt, Artificial Sequence
  Description of Artificial Sequence: Synthetic oligonucleotide
aguuacugccuuuaauccu

SEQ ID NO: 850214 - RNA, 19 nt, Artificial Sequence
  Description of Artificial Sequence: Synthetic oligonucleotide
acgcacuacuaucauuucg

SEQ ID NO: 850215 - RNA, 19 nt, Artificial Sequence
  Description of Artificial Sequence: Synthetic oligonucleotide
uccuaauuaucaccagcug

SEQ ID NO: 850216 - RNA, 19 nt, Artificial Sequence
  Description of Artificial Sequence: Synthetic oligonucleotide
aaauggauaugacgcacua

SEQ ID NO: 850217 - RNA, 19 nt, Artificial Sequence
  Description of Artificial Sequence: Synthetic oligonucleotide
uuuugaggcagaagcacau

SEQ ID NO: 850218 - RNA, 19 nt, Artificial Sequence
  Description of Artificial Sequence: Synthetic oligonucleotide
guuaauugauucagguugc

SEQ ID NO: 850219 - RNA, 19 nt, Artificial Sequence
  Description of Artificial Sequence: Synthetic oligonucleotide
guuucccacggguaggagg

SEQ ID NO: 850220 - RNA, 19 nt, Artificial Sequence
  Description of Artificial Sequence: Synthetic oligonucleotide
cuuugcuuucaucuggcac

SEQ ID NO: 850221 - RNA, 19 nt, Artificial Sequence
  Description of Artificial Sequence: Synthetic oligonucleotide
uagauuuagcucacacaca

SEQ ID NO: 850222 - RNA, 19 nt, Artificial Sequence
  Description of Artificial Sequence: Synthetic oligonucleotide
uuuagcucacacacacaca

SEQ ID NO: 850223 - RNA, 19 nt, Artificial Sequence
  Description of Artificial Sequence: Synthetic oligonucleotide
cacauggaggaccacacug

SEQ ID NO: 850224 - RNA, 19 nt, Artificial Sequence
  Description of Artificial Sequence: Synthetic oligonucleotide
cagauuugaaauugacaug

SEQ ID NO: 850225 - RNA, 19 nt, Artificial Sequence
  Description of Artificial Sequence: Synthetic oligonucleotide
aauccugguuucccacggg

SEQ ID NO: 850226 - RNA, 19 nt, Artificial Sequence
  Description of Artificial Sequence: Synthetic oligonucleotide
cugcgaucagccaaugacc

SEQ ID NO: 850227 - RNA, 19 nt, Artificial Sequence
  Description of Artificial Sequence: Synthetic oligonucleotide
ugaaauugacauguugauc

SEQ ID NO: 850228 - RNA, 19 nt, Artificial Sequence
  Description of Artificial Sequence: Synthetic oligonucleotide
uccccauuaacagcaauca

SEQ ID NO: 850229 - RNA, 19 nt, Artificial Sequence
  Description of Artificial Sequence: Synthetic oligonucleotide
acuagagaaagugagggua

SEQ ID NO: 850230 - RNA, 19 nt, Artificial Sequence
  Description of Artificial Sequence: Synthetic oligonucleotide
ucaugugugugugugugug

SEQ ID NO: 850231 - RNA, 19 nt, Artificial Sequence
  Description of Artificial Sequence: Synthetic oligonucleotide
acuuucaugugugugugug

SEQ ID NO: 850232 - RNA, 19 nt, Artificial Sequence
  Description of Artificial Sequence: Synthetic oligonucleotide
gaacggaacaguuucugaa

SEQ ID NO: 850233 - RNA, 19 nt, Artificial Sequence
  Description of Artificial Sequence: Synthetic oligonucleotide
ucggaccaaaaucauugcu

SEQ ID NO: 850234 - RNA, 19 nt, Artificial Sequence
  Description of Artificial Sequence: Synthetic oligonucleotide
agcauugcagauggaacgg

SEQ ID NO: 850235 - RNA, 19 nt, Artificial Sequence
  Description of Artificial Sequence: Synthetic oligonucleotide
ugugugugugugugugugg

SEQ ID NO: 850236 - RNA, 19 nt, Artificial Sequence
  Description of Artificial Sequence: Synthetic oligonucleotide
acacacacacacuuucaug

SEQ ID NO: 850237 - RNA, 19 nt, Artificial Sequence
  Description of Artificial Sequence: Synthetic oligonucleotide
ugugugugugugugguggg

SEQ ID NO: 850238 - RNA, 19 nt, Artificial Sequence
  Description of Artificial Sequence: Synthetic oligonucleotide
uuggagauuuucagguuaa

SEQ ID NO: 850239 - RNA, 19 nt, Artificial Sequence
  Description of Artificial Sequence: Synthetic oligonucleotide
aaaucauugcuuggagagu

SEQ ID NO: 850240 - RNA, 19 nt, Artificial Sequence
  Description of Artificial Sequence: Synthetic oligonucleotide
guguguguguguguggugg

SEQ ID NO: 850241 - RNA, 19 nt, Artificial Sequence
  Description of Artificial Sequence: Synthetic oligonucleotide
caagauagauuuagcucac

SEQ ID NO: 850242 - RNA, 19 nt, Artificial Sequence
  Description of Artificial Sequence: Synthetic oligonucleotide
cacagauuugaaauugaca

SEQ ID NO: 850243 - RNA, 19 nt, Artificial Sequence
  Description of Artificial Sequence: Synthetic oligonucleotide
aagugccaaauggauauga

SEQ ID NO: 850244 - RNA, 19 nt, Artificial Sequence
  Description of Artificial Sequence: Synthetic oligonucleotide
caacgucggaccaaaauca

SEQ ID NO: 850245 - RNA, 19 nt, Artificial Sequence
  Description of Artificial Sequence: Synthetic oligonucleotide
gacggccauccuuaaaagc

SEQ ID NO: 850246 - RNA, 19 nt, Artificial Sequence
  Description of Artificial Sequence: Synthetic oligonucleotide
aguuuaaugcagaugggaa

SEQ ID NO: 850247 - RNA, 19 nt, Artificial Sequence
  Description of Artificial Sequence: Synthetic oligonucleotide
uuccugucagaguuacugc

SEQ ID NO: 850248 - RNA, 19 nt, Artificial Sequence
  Description of Artificial Sequence: Synthetic oligonucleotide
gauucagguugcauggcug

SEQ ID NO: 850249 - RNA, 19 nt, Artificial Sequence
  Description of Artificial Sequence: Synthetic oligonucleotide
uggcgauacuucacucucg

SEQ ID NO: 850250 - RNA, 19 nt, Artificial Sequence
  Description of Artificial Sequence: Synthetic oligonucleotide
auaugauuucacauaauuu

SEQ ID NO: 850251 - RNA, 19 nt, Artificial Sequence
  Description of Artificial Sequence: Synthetic oligonucleotide
gauguucagugguccaaug

SEQ ID NO: 850252 - RNA, 19 nt, Artificial Sequence
  Description of Artificial Sequence: Synthetic oligonucleotide
uucauucucagacggccau

SEQ ID NO: 850253 - RNA, 19 nt, Artificial Sequence
  Description of Artificial Sequence: Synthetic oligonucleotide
cacacacacacacacuuuc

SEQ ID NO: 850254 - RNA, 19 nt, Artificial Sequence
  Description of Artificial Sequence: Synthetic oligonucleotide
ccccauaugacaaaauaug

SEQ ID NO: 850255 - RNA, 19 nt, Artificial Sequence
  Description of Artificial Sequence: Synthetic oligonucleotide
acauggaggaccacacugg

SEQ ID NO: 850256 - RNA, 19 nt, Artificial Sequence
  Description of Artificial Sequence: Synthetic oligonucleotide
acggccauccuuaaaagca

SEQ ID NO: 850257 - RNA, 19 nt, Artificial Sequence
  Description of Artificial Sequence: Synthetic oligonucleotide
uccuuuuaucuuguggacu

SEQ ID NO: 850258 - RNA, 19 nt, Artificial Sequence
  Description of Artificial Sequence: Synthetic oligonucleotide
gguaaucauaaaagaacag

SEQ ID NO: 850259 - RNA, 19 nt, Artificial Sequence
  Description of Artificial Sequence: Synthetic oligonucleotide
gagggauagacucacaauu

SEQ ID NO: 850260 - RNA, 19 nt, Artificial Sequence
  Description of Artificial Sequence: Synthetic oligonucleotide
cagccuccuaauuaucacc

SEQ ID NO: 850261 - RNA, 19 nt, Artificial Sequence
  Description of Artificial Sequence: Synthetic oligonucleotide
ucuuaucagagagaccguc

SEQ ID NO: 850262 - RNA, 19 nt, Artificial Sequence
  Description of Artificial Sequence: Synthetic oligonucleotide
uaugacgcacuacuaucau

SEQ ID NO: 850263 - RNA, 19 nt, Artificial Sequence
  Description of Artificial Sequence: Synthetic oligonucleotide
cagugauauaaaugggauc

SEQ ID NO: 850264 - RNA, 19 nt, Artificial Sequence
  Description of Artificial Sequence: Synthetic oligonucleotide
uguuuguuccugucagagu

SEQ ID NO: 850265 - RNA, 19 nt, Artificial Sequence
  Description of Artificial Sequence: Synthetic oligonucleotide
cauucucagacggccaucc

SEQ ID NO: 850266 - RNA, 19 nt, Artificial Sequence
  Description of Artificial Sequence: Synthetic oligonucleotide
agacggccauccuuaaaag

SEQ ID NO: 850267 - RNA, 19 nt, Artificial Sequence
  Description of Artificial Sequence: Synthetic oligonucleotide
ucacacacacacacacaca

SEQ ID NO: 850268 - RNA, 19 nt, Artificial Sequence
  Description of Artificial Sequence: Synthetic oligonucleotide
cuuaucagagagaccguca

SEQ ID NO: 850269 - RNA, 19 nt, Artificial Sequence
  Description of Artificial Sequence: Synthetic oligonucleotide
auaugacgcacuacuauca

SEQ ID NO: 850270 - RNA, 19 nt, Artificial Sequence
  Description of Artificial Sequence: Synthetic oligonucleotide
cauggucuggaaagugccc

SEQ ID NO: 850271 - RNA, 19 nt, Artificial Sequence
  Description of Artificial Sequence: Synthetic oligonucleotide
aucauuucgccuggagggg

SEQ ID NO: 850272 - RNA, 19 nt, Artificial Sequence
  Description of Artificial Sequence: Synthetic oligonucleotide
uggggauggcgauacuuca

SEQ ID NO: 850273 - RNA, 19 nt, Artificial Sequence
  Description of Artificial Sequence: Synthetic oligonucleotide
gagaccgucagcuucuacu

SEQ ID NO: 850274 - RNA, 19 nt, Artificial Sequence
  Description of Artificial Sequence: Synthetic oligonucleotide
uggcccaucguaagauuug

SEQ ID NO: 850275 - RNA, 19 nt, Artificial Sequence
  Description of Artificial Sequence: Synthetic oligonucleotide
aaugcagaugggaauuuua

SEQ ID NO: 850276 - RNA, 19 nt, Artificial Sequence
  Description of Artificial Sequence: Synthetic oligonucleotide
ggcgauacuucacucucgg

SEQ ID NO: 850277 - RNA, 19 nt, Artificial Sequence
  Description of Artificial Sequence: Synthetic oligonucleotide
cagagagaccgucagcuuc

SEQ ID NO: 850278 - RNA, 19 nt, Artificial Sequence
  Description of Artificial Sequence: Synthetic oligonucleotide
uggauaugacgcacuacua

SEQ ID NO: 850279 - RNA, 19 nt, Artificial Sequence
  Description of Artificial Sequence: Synthetic oligonucleotide
aagauguucagugguccaa

SEQ ID NO: 850280 - RNA, 19 nt, Artificial Sequence
  Description of Artificial Sequence: Synthetic oligonucleotide
ccuuaaaagcagcaccucc

SEQ ID NO: 850281 - RNA, 19 nt, Artificial Sequence
  Description of Artificial Sequence: Synthetic oligonucleotide
ugccccacacucuguaagc

SEQ ID NO: 850282 - RNA, 19 nt, Artificial Sequence
  Description of Artificial Sequence: Synthetic oligonucleotide
uguguguguguggugggug

SEQ ID NO: 850283 - RNA, 19 nt, Artificial Sequence
  Description of Artificial Sequence: Synthetic oligonucleotide
ucacucucggcccacccau

SEQ ID NO: 850284 - RNA, 19 nt, Artificial Sequence
  Description of Artificial Sequence: Synthetic oligonucleotide
ucauugcuuggagagucca

SEQ ID NO: 850285 - RNA, 19 nt, Artificial Sequence
  Description of Artificial Sequence: Synthetic oligonucleotide
gugaggguauaaacaacag

SEQ ID NO: 850286 - RNA, 19 nt, Artificial Sequence
  Description of Artificial Sequence: Synthetic oligonucleotide
augugugugugugugugug

SEQ ID NO: 850287 - RNA, 19 nt, Artificial Sequence
  Description of Artificial Sequence: Synthetic oligonucleotide
cguaagauuugucaauggc

SEQ ID NO: 850288 - RNA, 19 nt, Artificial Sequence
  Description of Artificial Sequence: Synthetic oligonucleotide
guaacauugcucaaacacu

SEQ ID NO: 850289 - RNA, 19 nt, Artificial Sequence
  Description of Artificial Sequence: Synthetic oligonucleotide
uccguggaugauagauuug

SEQ ID NO: 850290 - RNA, 19 nt, Artificial Sequence
  Description of Artificial Sequence: Synthetic oligonucleotide
aguugcaggaagauuuccu

SEQ ID NO: 850291 - RNA, 19 nt, Artificial Sequence
  Description of Artificial Sequence: Synthetic oligonucleotide
cuccuaauuaucaccagcu

SEQ ID NO: 850292 - RNA, 19 nt, Artificial Sequence
  Description of Artificial Sequence: Synthetic oligonucleotide
cgcacuacuaucauuucgc

SEQ ID NO: 850293 - RNA, 19 nt, Artificial Sequence
  Description of Artificial Sequence: Synthetic oligonucleotide
aucauuagagugagggaga

SEQ ID NO: 850294 - RNA, 19 nt, Artificial Sequence
  Description of Artificial Sequence: Synthetic oligonucleotide
acacacuuucaugugugug

SEQ ID NO: 850295 - RNA, 19 nt, Artificial Sequence
  Description of Artificial Sequence: Synthetic oligonucleotide
gaggggaaaaguaauuacu

SEQ ID NO: 850296 - RNA, 19 nt, Artificial Sequence
  Description of Artificial Sequence: Synthetic oligonucleotide
uucaugugugugugugugu

SEQ ID NO: 850297 - RNA, 19 nt, Artificial Sequence
  Description of Artificial Sequence: Synthetic oligonucleotide
uguguguguguguguggug

SEQ ID NO: 850298 - RNA, 19 nt, Artificial Sequence
  Description of Artificial Sequence: Synthetic oligonucleotide
gauggcgauacuucacucu

SEQ ID NO: 850299 - RNA, 19 nt, Artificial Sequence
  Description of Artificial Sequence: Synthetic oligonucleotide
gucggaccaaaaucauugc

SEQ ID NO: 850300 - RNA, 19 nt, Artificial Sequence
  Description of Artificial Sequence: Synthetic oligonucleotide
ucgaucuccucaguguuuc

SEQ ID NO: 850301 - RNA, 19 nt, Artificial Sequence
  Description of Artificial Sequence: Synthetic oligonucleotide
ccaacgucggaccaaaauc

SEQ ID NO: 850302 - RNA, 19 nt, Artificial Sequence
  Description of Artificial Sequence: Synthetic oligonucleotide
gugccccacacucuguaag

SEQ ID NO: 850303 - RNA, 19 nt, Artificial Sequence
  Description of Artificial Sequence: Synthetic oligonucleotide
ucauuucgccuggaggggc

SEQ ID NO: 850304 - RNA, 19 nt, Artificial Sequence
  Description of Artificial Sequence: Synthetic oligonucleotide
agaccgucagcuucuacuu

SEQ ID NO: 850305 - RNA, 19 nt, Artificial Sequence
  Description of Artificial Sequence: Synthetic oligonucleotide
gugagggauagacucacaa

SEQ ID NO: 850306 - RNA, 19 nt, Artificial Sequence
  Description of Artificial Sequence: Synthetic oligonucleotide
ucauuagagugagggagau

SEQ ID NO: 850307 - RNA, 19 nt, Artificial Sequence
  Description of Artificial Sequence: Synthetic oligonucleotide
gagcuccguggccagaaug

SEQ ID NO: 850308 - RNA, 19 nt, Artificial Sequence
  Description of Artificial Sequence: Synthetic oligonucleotide
cgucggaccaaaaucauug

SEQ ID NO: 850309 - RNA, 19 nt, Artificial Sequence
  Description of Artificial Sequence: Synthetic oligonucleotide
aagauagauuuagcucaca

SEQ ID NO: 850310 - RNA, 19 nt, Artificial Sequence
  Description of Artificial Sequence: Synthetic oligonucleotide
ugugugugugugugugugu

SEQ ID NO: 850311 - RNA, 19 nt, Artificial Sequence
  Description of Artificial Sequence: Synthetic oligonucleotide
accuccguggaugauagau

SEQ ID NO: 850312 - RNA, 19 nt, Artificial Sequence
  Description of Artificial Sequence: Synthetic oligonucleotide
uugauucagguugcauggc

SEQ ID NO: 850313 - RNA, 19 nt, Artificial Sequence
  Description of Artificial Sequence: Synthetic oligonucleotide
uagcucacacacacacaca

SEQ ID NO: 850314 - RNA, 19 nt, Artificial Sequence
  Description of Artificial Sequence: Synthetic oligonucleotide
agagaccgucagcuucuac

SEQ ID NO: 850315 - RNA, 19 nt, Artificial Sequence
  Description of Artificial Sequence: Synthetic oligonucleotide
uugcuuggagaguccaauc

SEQ ID NO: 850316 - RNA, 19 nt, Artificial Sequence
  Description of Artificial Sequence: Synthetic oligonucleotide
aagugccccacacucugua

SEQ ID NO: 850317 - RNA, 19 nt, Artificial Sequence
  Description of Artificial Sequence: Synthetic oligonucleotide
gggauagacucacaauuca

SEQ ID NO: 850318 - RNA, 19 nt, Artificial Sequence
  Description of Artificial Sequence: Synthetic oligonucleotide
ccuccuaauuaucaccagc

SEQ ID NO: 850319 - RNA, 19 nt, Artificial Sequence
  Description of Artificial Sequence: Synthetic oligonucleotide
gugugugugugugugugug

SEQ ID NO: 850320 - RNA, 19 nt, Artificial Sequence
  Description of Artificial Sequence: Synthetic oligonucleotide
auugccuggcggaagacau

SEQ ID NO: 850321 - RNA, 19 nt, Artificial Sequence
  Description of Artificial Sequence: Synthetic oligonucleotide
cuagggaacagaggaacca

SEQ ID NO: 850322 - RNA, 19 nt, Artificial Sequence
  Description of Artificial Sequence: Synthetic oligonucleotide
uaagugccaaauggauaug

SEQ ID NO: 850323 - RNA, 19 nt, Artificial Sequence
  Description of Artificial Sequence: Synthetic oligonucleotide
auuuucagugaggggaaaa

SEQ ID NO: 850324 - RNA, 19 nt, Artificial Sequence
  Description of Artificial Sequence: Synthetic oligonucleotide
cacaauggaucucagaguu

SEQ ID NO: 850325 - RNA, 19 nt, Artificial Sequence
  Description of Artificial Sequence: Synthetic oligonucleotide
cucggcccacccaucauug

SEQ ID NO: 850326 - RNA, 19 nt, Artificial Sequence
  Description of Artificial Sequence: Synthetic oligonucleotide
ccacccaucauugggaagc

SEQ ID NO: 850327 - RNA, 19 nt, Artificial Sequence
  Description of Artificial Sequence: Synthetic oligonucleotide
aagcuaaccccgaggccag

SEQ ID NO: 850328 - RNA, 19 nt, Artificial Sequence
  Description of Artificial Sequence: Synthetic oligonucleotide
auacuucacucucggccca

SEQ ID NO: 850329 - RNA, 19 nt, Artificial Sequence
  Description of Artificial Sequence: Synthetic oligonucleotide
cccaucguaagauuuguca

SEQ ID NO: 850330 - RNA, 19 nt, Artificial Sequence
  Description of Artificial Sequence: Synthetic oligonucleotide
aaucugcgaucagccaaug

SEQ ID NO: 850331 - RNA, 19 nt, Artificial Sequence
  Description of Artificial Sequence: Synthetic oligonucleotide
guuuuauauuccaguagua

SEQ ID NO: 850332 - RNA, 19 nt, Artificial Sequence
  Description of Artificial Sequence: Synthetic oligonucleotide
gacgcacuacuaucauuuc

SEQ ID NO: 850333 - RNA, 19 nt, Artificial Sequence
  Description of Artificial Sequence: Synthetic oligonucleotide
ccuauucuuggaacucggg

SEQ ID NO: 850334 - RNA, 19 nt, Artificial Sequence
  Description of Artificial Sequence: Synthetic oligonucleotide
ugcuuugcugcggggaagu

SEQ ID NO: 850335 - RNA, 19 nt, Artificial Sequence
  Description of Artificial Sequence: Synthetic oligonucleotide
ucggcccacccaucauugg

SEQ ID NO: 850336 - RNA, 19 nt, Artificial Sequence
  Description of Artificial Sequence: Synthetic oligonucleotide
ucucggcccacccaucauu

SEQ ID NO: 850337 - RNA, 19 nt, Artificial Sequence
  Description of Artificial Sequence: Synthetic oligonucleotide
uaaucuucaagggcccauu

SEQ ID NO: 850338 - RNA, 19 nt, Artificial Sequence
  Description of Artificial Sequence: Synthetic oligonucleotide
aacgucggaccaaaaucau

SEQ ID NO: 850339 - RNA, 19 nt, Artificial Sequence
  Description of Artificial Sequence: Synthetic oligonucleotide
gggcucaaacucacaaugg

SEQ ID NO: 850340 - RNA, 19 nt, Artificial Sequence
  Description of Artificial Sequence: Synthetic oligonucleotide
uugcuuugcugcggggaag

SEQ ID NO: 850341 - RNA, 19 nt, Artificial Sequence
  Description of Artificial Sequence: Synthetic oligonucleotide
ugguuggacuugcccagaa

SEQ ID NO: 850342 - RNA, 19 nt, Artificial Sequence
  Description of Artificial Sequence: Synthetic oligonucleotide
agguugcauggcugguauc

SEQ ID NO: 850343 - RNA, 19 nt, Artificial Sequence
  Description of Artificial Sequence: Synthetic oligonucleotide
augacgcacuacuaucauu

SEQ ID NO: 850344 - RNA, 19 nt, Artificial Sequence
  Description of Artificial Sequence: Synthetic oligonucleotide
uaaugcagaugggaauuuu

SEQ ID NO: 850345 - RNA, 19 nt, Artificial Sequence
  Description of Artificial Sequence: Synthetic oligonucleotide
ggacuguaagugccaaaug

SEQ ID NO: 850346 - RNA, 19 nt, Artificial Sequence
  Description of Artificial Sequence: Synthetic oligonucleotide
uuccuuuaucaaccacuuu

SEQ ID NO: 850347 - RNA, 19 nt, Artificial Sequence
  Description of Artificial Sequence: Synthetic oligonucleotide
uguuccugucagaguuacu

SEQ ID NO: 850348 - RNA, 19 nt, Artificial Sequence
  Description of Artificial Sequence: Synthetic oligonucleotide
gcacuacuaucauuucgcc

SEQ ID NO: 850349 - RNA, 19 nt, Artificial Sequence
  Description of Artificial Sequence: Synthetic oligonucleotide
agauguucagugguccaau

SEQ ID NO: 850350 - RNA, 19 nt, Artificial Sequence
  Description of Artificial Sequence: Synthetic oligonucleotide
cauacugcucacgguuuug

SEQ ID NO: 850351 - RNA, 19 nt, Artificial Sequence
  Description of Artificial Sequence: Synthetic oligonucleotide
gggaaaaguaauuacucuu

SEQ ID NO: 850352 - RNA, 19 nt, Artificial Sequence
  Description of Artificial Sequence: Synthetic oligonucleotide
aucugcgaucagccaauga

SEQ ID NO: 850353 - RNA, 19 nt, Artificial Sequence
  Description of Artificial Sequence: Synthetic oligonucleotide
aucaugccccggauguuuc

SEQ ID NO: 850354 - RNA, 19 nt, Artificial Sequence
  Description of Artificial Sequence: Synthetic oligonucleotide
ugaccgagcuuugcuuuca

SEQ ID NO: 850355 - RNA, 19 nt, Artificial Sequence
  Description of Artificial Sequence: Synthetic oligonucleotide
ugagggagaugaagcuuuu

SEQ ID NO: 850356 - RNA, 19 nt, Artificial Sequence
  Description of Artificial Sequence: Synthetic oligonucleotide
gaaguugacucaucugcuu

SEQ ID NO: 850357 - RNA, 19 nt, Artificial Sequence
  Description of Artificial Sequence: Synthetic oligonucleotide
ggaacggaacaguuucuga

SEQ ID NO: 850358 - RNA, 19 nt, Artificial Sequence
  Description of Artificial Sequence: Synthetic oligonucleotide
ucagguugcauggcuggua

SEQ ID NO: 850359 - RNA, 19 nt, Artificial Sequence
  Description of Artificial Sequence: Synthetic oligonucleotide
cuagagaaagugaggguau

SEQ ID NO: 850360 - RNA, 19 nt, Artificial Sequence
  Description of Artificial Sequence: Synthetic oligonucleotide
cugagccggaaucauuaga

SEQ ID NO: 850361 - RNA, 19 nt, Artificial Sequence
  Description of Artificial Sequence: Synthetic oligonucleotide
ggggaaaaguaauuacucu

SEQ ID NO: 850362 - RNA, 19 nt, Artificial Sequence
  Description of Artificial Sequence: Synthetic oligonucleotide
acacacacacacacuuuca

SEQ ID NO: 850363 - RNA, 19 nt, Artificial Sequence
  Description of Artificial Sequence: Synthetic oligonucleotide
cacgguuuugaggcagaag

SEQ ID NO: 850364 - RNA, 19 nt, Artificial Sequence
  Description of Artificial Sequence: Synthetic oligonucleotide
ucauucucagacggccauc

SEQ ID NO: 850365 - RNA, 19 nt, Artificial Sequence
  Description of Artificial Sequence: Synthetic oligonucleotide
aaccccgaggccagcugag

SEQ ID NO: 850366 - RNA, 19 nt, Artificial Sequence
  Description of Artificial Sequence: Synthetic oligonucleotide
agauggaacggaacaguuu

SEQ ID NO: 850367 - RNA, 19 nt, Artificial Sequence
  Description of Artificial Sequence: Synthetic oligonucleotide
cacacacacacacacacuu

SEQ ID NO: 850368 - RNA, 19 nt, Artificial Sequence
  Description of Artificial Sequence: Synthetic oligonucleotide
aaauagcauugcagaugga

SEQ ID NO: 850369 - RNA, 19 nt, Artificial Sequence
  Description of Artificial Sequence: Synthetic oligonucleotide
cacggguaggagguggaac

SEQ ID NO: 850370 - RNA, 19 nt, Artificial Sequence
  Description of Artificial Sequence: Synthetic oligonucleotide
ggauaugacgcacuacuau

SEQ ID NO: 850371 - RNA, 19 nt, Artificial Sequence
  Description of Artificial Sequence: Synthetic oligonucleotide
ugcggggaaguugacucau

SEQ ID NO: 850372 - RNA, 19 nt, Artificial Sequence
  Description of Artificial Sequence: Synthetic oligonucleotide
gccggaaucauuagaguga

SEQ ID NO: 850373 - RNA, 19 nt, Artificial Sequence
  Description of Artificial Sequence: Synthetic oligonucleotide
cagaagaguuuccccauua

SEQ ID NO: 850374 - RNA, 19 nt, Artificial Sequence
  Description of Artificial Sequence: Synthetic oligonucleotide
auuucgccuggaggggcuc

SEQ ID NO: 850375 - RNA, 19 nt, Artificial Sequence
  Description of Artificial Sequence: Synthetic oligonucleotide
cacuacuaucauuucgccu

SEQ ID NO: 850376 - RNA, 19 nt, Artificial Sequence
  Description of Artificial Sequence: Synthetic oligonucleotide
ccggaaucauuagagugag

SEQ ID NO: 850377 - RNA, 19 nt, Artificial Sequence
  Description of Artificial Sequence: Synthetic oligonucleotide
uuaucaccagcuggaucau

SEQ ID NO: 850378 - RNA, 19 nt, Artificial Sequence
  Description of Artificial Sequence: Synthetic oligonucleotide
acacacacacacacacaca

SEQ ID NO: 850379 - RNA, 19 nt, Artificial Sequence
  Description of Artificial Sequence: Synthetic oligonucleotide
acacacacacacacacacu

SEQ ID NO: 850380 - RNA, 19 nt, Artificial Sequence
  Description of Artificial Sequence: Synthetic oligonucleotide
gcugagccggaaucauuag

SEQ ID NO: 850381 - RNA, 19 nt, Artificial Sequence
  Description of Artificial Sequence: Synthetic oligonucleotide
guucagugguccaaugacu

SEQ ID NO: 850382 - RNA, 19 nt, Artificial Sequence
  Description of Artificial Sequence: Synthetic oligonucleotide
gagccggaaucauuagagu

SEQ ID NO: 850383 - RNA, 19 nt, Artificial Sequence
  Description of Artificial Sequence: Synthetic oligonucleotide
ggauggcgauacuucacuc

SEQ ID NO: 850384 - RNA, 19 nt, Artificial Sequence
  Description of Artificial Sequence: Synthetic oligonucleotide
cuccguggaugauagauuu

SEQ ID NO: 850385 - RNA, 19 nt, Artificial Sequence
  Description of Artificial Sequence: Synthetic oligonucleotide
uucgccuggaggggcucag

SEQ ID NO: 850386 - RNA, 19 nt, Artificial Sequence
  Description of Artificial Sequence: Synthetic oligonucleotide
gcaccuccguggaugauag

SEQ ID NO: 850387 - RNA, 19 nt, Artificial Sequence
  Description of Artificial Sequence: Synthetic oligonucleotide
uuccuuccauggacaucga

SEQ ID NO: 850388 - RNA, 19 nt, Artificial Sequence
  Description of Artificial Sequence: Synthetic oligonucleotide
cuuucaugugugugugugu

SEQ ID NO: 850389 - RNA, 19 nt, Artificial Sequence
  Description of Artificial Sequence: Synthetic oligonucleotide
gcucaaacacuaagcagca

SEQ ID NO: 850390 - RNA, 19 nt, Artificial Sequence
  Description of Artificial Sequence: Synthetic oligonucleotide
caaucugcgaucagccaau

SEQ ID NO: 850391 - RNA, 19 nt, Artificial Sequence
  Description of Artificial Sequence: Synthetic oligonucleotide
uuucgccuggaggggcuca

SEQ ID NO: 850392 - RNA, 19 nt, Artificial Sequence
  Description of Artificial Sequence: Synthetic oligonucleotide
ccccauuaacagcaaucag

SEQ ID NO: 850393 - RNA, 19 nt, Artificial Sequence
  Description of Artificial Sequence: Synthetic oligonucleotide
cauggacaucgaucuccuc

SEQ ID NO: 850394 - RNA, 19 nt, Artificial Sequence
  Description of Artificial Sequence: Synthetic oligonucleotide
agcuaaccccgaggccagc

SEQ ID NO: 850395 - RNA, 19 nt, Artificial Sequence
  Description of Artificial Sequence: Synthetic oligonucleotide
gacccaacgucggaccaaa

SEQ ID NO: 850396 - RNA, 19 nt, Artificial Sequence
  Description of Artificial Sequence: Synthetic oligonucleotide
gcuuucguugcagccccgg

SEQ ID NO: 850397 - RNA, 19 nt, Artificial Sequence
  Description of Artificial Sequence: Synthetic oligonucleotide
aggaaccagcucucugauu

SEQ ID NO: 850398 - RNA, 19 nt, Artificial Sequence
  Description of Artificial Sequence: Synthetic oligonucleotide
gcaaucaguuggucauuca

SEQ ID NO: 850399 - RNA, 19 nt, Artificial Sequence
  Description of Artificial Sequence: Synthetic oligonucleotide
gacucacaauucagagcuc

SEQ ID NO: 850400 - RNA, 19 nt, Artificial Sequence
  Description of Artificial Sequence: Synthetic oligonucleotide
gggauggcgauacuucacu

SEQ ID NO: 850401 - RNA, 19 nt, Artificial Sequence
  Description of Artificial Sequence: Synthetic oligonucleotide
cagacccaacgucggacca

SEQ ID NO: 850402 - RNA, 19 nt, Artificial Sequence
  Description of Artificial Sequence: Synthetic oligonucleotide
cacacacacacacuuucau

SEQ ID NO: 850403 - RNA, 19 nt, Artificial Sequence
  Description of Artificial Sequence: Synthetic oligonucleotide
gaucaugccccggauguuu

SEQ ID NO: 850404 - RNA, 19 nt, Artificial Sequence
  Description of Artificial Sequence: Synthetic oligonucleotide
uggucccucuguggacuag

SEQ ID NO: 850405 - RNA, 19 nt, Artificial Sequence
  Description of Artificial Sequence: Synthetic oligonucleotide
caaugaccgagcuuugcuu

SEQ ID NO: 850406 - RNA, 19 nt, Artificial Sequence
  Description of Artificial Sequence: Synthetic oligonucleotide
acaauggaucucagaguuu

SEQ ID NO: 850407 - RNA, 19 nt, Artificial Sequence
  Description of Artificial Sequence: Synthetic oligonucleotide
ccguggaugauagauuuga

SEQ ID NO: 850408 - RNA, 19 nt, Artificial Sequence
  Description of Artificial Sequence: Synthetic oligonucleotide
guguguguguguguguggu

SEQ ID NO: 850409 - RNA, 19 nt, Artificial Sequence
  Description of Artificial Sequence: Synthetic oligonucleotide
ucgcaccauguguggucug

SEQ ID NO: 850410 - RNA, 19 nt, Artificial Sequence
  Description of Artificial Sequence: Synthetic oligonucleotide
acacacacacacacacuuu

SEQ ID NO: 850411 - RNA, 19 nt, Artificial Sequence
  Description of Artificial Sequence: Synthetic oligonucleotide
augguuggacuugcccaga

SEQ ID NO: 850412 - RNA, 19 nt, Artificial Sequence
  Description of Artificial Sequence: Synthetic oligonucleotide
gcgauacuucacucucggc

SEQ ID NO: 850413 - RNA, 19 nt, Artificial Sequence
  Description of Artificial Sequence: Synthetic oligonucleotide
cugcggggaaguugacuca

SEQ ID NO: 850414 - RNA, 19 nt, Artificial Sequence
  Description of Artificial Sequence: Synthetic oligonucleotide
agacccaacgucggaccaa

SEQ ID NO: 850415 - RNA, 19 nt, Artificial Sequence
  Description of Artificial Sequence: Synthetic oligonucleotide
agaccaggaugcgguggug

SEQ ID NO: 850416 - RNA, 19 nt, Artificial Sequence
  Description of Artificial Sequence: Synthetic oligonucleotide
uugcugcggggaaguugac

SEQ ID NO: 850417 - RNA, 19 nt, Artificial Sequence
  Description of Artificial Sequence: Synthetic oligonucleotide
caugugugugugugugugu

SEQ ID NO: 850418 - RNA, 19 nt, Artificial Sequence
  Description of Artificial Sequence: Synthetic oligonucleotide
cuuuauagucuuggucccu

SEQ ID NO: 850419 - RNA, 19 nt, Artificial Sequence
  Description of Artificial Sequence: Synthetic oligonucleotide
ggggauggcgauacuucac

SEQ ID NO: 850420 - RNA, 19 nt, Artificial Sequence
  Description of Artificial Sequence: Synthetic oligonucleotide
acgucggaccaaaaucauu

SEQ ID NO: 850421 - RNA, 19 nt, Artificial Sequence
  Description of Artificial Sequence: Synthetic oligonucleotide
cacacacuuucaugugugu

SEQ ID NO: 850422 - RNA, 19 nt, Artificial Sequence
  Description of Artificial Sequence: Synthetic oligonucleotide
cucuuaucagagagaccgu

SEQ ID NO: 850423 - RNA, 19 nt, Artificial Sequence
  Description of Artificial Sequence: Synthetic oligonucleotide
ugguggggauggcgauacu

SEQ ID NO: 850424 - RNA, 19 nt, Artificial Sequence
  Description of Artificial Sequence: Synthetic oligonucleotide
cagguugcauggcugguau

SEQ ID NO: 850425 - RNA, 19 nt, Artificial Sequence
  Description of Artificial Sequence: Synthetic oligonucleotide
cacucucggcccacccauc

SEQ ID NO: 850426 - RNA, 19 nt, Artificial Sequence
  Description of Artificial Sequence: Synthetic oligonucleotide
augccccggauguuuccuu

SEQ ID NO: 850427 - RNA, 19 nt, Artificial Sequence
  Description of Artificial Sequence: Synthetic oligonucleotide
cggcccacccaucauuggg

SEQ ID NO: 850428 - RNA, 19 nt, Artificial Sequence
  Description of Artificial Sequence: Synthetic oligonucleotide
gccccggauguuuccuucc

SEQ ID NO: 850429 - RNA, 19 nt, Artificial Sequence
  Description of Artificial Sequence: Synthetic oligonucleotide
gcagaagcacauggaggac

SEQ ID NO: 850430 - RNA, 19 nt, Artificial Sequence
  Description of Artificial Sequence: Synthetic oligonucleotide
ccauguguggucugggccu

SEQ ID NO: 850431 - RNA, 19 nt, Artificial Sequence
  Description of Artificial Sequence: Synthetic oligonucleotide
gcauugcagauggaacgga

SEQ ID NO: 850432 - RNA, 19 nt, Artificial Sequence
  Description of Artificial Sequence: Synthetic oligonucleotide
cccaucauugggaagcaau

SEQ ID NO: 850433 - RNA, 19 nt, Artificial Sequence
  Description of Artificial Sequence: Synthetic oligonucleotide
gcgaucagccaaugaccga

SEQ ID NO: 850434 - RNA, 19 nt, Artificial Sequence
  Description of Artificial Sequence: Synthetic oligonucleotide
gcucacacacacacacaca

SEQ ID NO: 850435 - RNA, 19 nt, Artificial Sequence
  Description of Artificial Sequence: Synthetic oligonucleotide
cgcaccauguguggucugg

SEQ ID NO: 850436 - RNA, 19 nt, Artificial Sequence
  Description of Artificial Sequence: Synthetic oligonucleotide
cggccucgcaccaugugug

SEQ ID NO: 850437 - RNA, 19 nt, Artificial Sequence
  Description of Artificial Sequence: Synthetic oligonucleotide
cucgcaccauguguggucu

SEQ ID NO: 850438 - RNA, 19 nt, Artificial Sequence
  Description of Artificial Sequence: Synthetic oligonucleotide
cggaccaaaaucauugcuu

SEQ ID NO: 850439 - RNA, 19 nt, Artificial Sequence
  Description of Artificial Sequence: Synthetic oligonucleotide
guguguguguguggugggu

SEQ ID NO: 850440 - RNA, 19 nt, Artificial Sequence
  Description of Artificial Sequence: Synthetic oligonucleotide
caugccccggauguuuccu

SEQ ID NO: 850441 - RNA, 19 nt, Artificial Sequence
  Description of Artificial Sequence: Synthetic oligonucleotide
agggcccauuccagaccag

SEQ ID NO: 850442 - RNA, 19 nt, Artificial Sequence
  Description of Artificial Sequence: Synthetic oligonucleotide
gguggggauggcgauacuu

SEQ ID NO: 850443 - RNA, 19 nt, Artificial Sequence
  Description of Artificial Sequence: Synthetic oligonucleotide
gcaauaggucuuuccuuuu

SEQ ID NO: 850444 - RNA, 19 nt, Artificial Sequence
  Description of Artificial Sequence: Synthetic oligonucleotide
ggcccaucguaagauuugu

SEQ ID NO: 850445 - RNA, 19 nt, Artificial Sequence
  Description of Artificial Sequence: Synthetic oligonucleotide
gcccaucguaagauuuguc

SEQ ID NO: 850446 - RNA, 19 nt, Artificial Sequence
  Description of Artificial Sequence: Synthetic oligonucleotide
cccaacgucggaccaaaau

SEQ ID NO: 850447 - RNA, 19 nt, Artificial Sequence
  Description of Artificial Sequence: Synthetic oligonucleotide
ggacaucgaucuccucagu

SEQ ID NO: 850448 - RNA, 19 nt, Artificial Sequence
  Description of Artificial Sequence: Synthetic oligonucleotide
caccuccguggaugauaga

SEQ ID NO: 850449 - RNA, 19 nt, Artificial Sequence
  Description of Artificial Sequence: Synthetic oligonucleotide
gcuaaccccgaggccagcu

SEQ ID NO: 850450 - RNA, 19 nt, Artificial Sequence
  Description of Artificial Sequence: Synthetic oligonucleotide
cccggccucgcaccaugug

SEQ ID NO: 850451 - RNA, 19 nt, Artificial Sequence
  Description of Artificial Sequence: Synthetic oligonucleotide
acccaacgucggaccaaaa

SEQ ID NO: 850452 - RNA, 19 nt, Artificial Sequence
  Description of Artificial Sequence: Synthetic oligonucleotide
ccggccucgcaccaugugu

SEQ ID NO: 850453 - RNA, 19 nt, Artificial Sequence
  Description of Artificial Sequence: Synthetic oligonucleotide
cucucggcccacccaucau

SEQ ID NO: 850454 - RNA, 19 nt, Artificial Sequence
  Description of Artificial Sequence: Synthetic oligonucleotide
ggaggggcucagagcuucu

SEQ ID NO: 850455 - RNA, 19 nt, Artificial Sequence
  Description of Artificial Sequence: Synthetic oligonucleotide
ccacggguaggagguggaa

SEQ ID NO: 850456 - RNA, 19 nt, Artificial Sequence
  Description of Artificial Sequence: Synthetic oligonucleotide
aauaaaccaggacugaccc

SEQ ID NO: 850457 - RNA, 19 nt, Artificial Sequence
  Description of Artificial Sequence: Synthetic oligonucleotide
auaaguaagaagucaagcc

SEQ ID NO: 850458 - RNA, 19 nt, Artificial Sequence
  Description of Artificial Sequence: Synthetic oligonucleotide
aaugauaagggcccagccc

SEQ ID NO: 850459 - RNA, 19 nt, Artificial Sequence
  Description of Artificial Sequence: Synthetic oligonucleotide
uaaguaagaagucaagcca

SEQ ID NO: 850460 - RNA, 19 nt, Artificial Sequence
  Description of Artificial Sequence: Synthetic oligonucleotide
uuugcagccaugcuuaaag

SEQ ID NO: 850461 - RNA, 19 nt, Artificial Sequence
  Description of Artificial Sequence: Synthetic oligonucleotide
ugaauuauggacacagaac

SEQ ID NO: 850462 - RNA, 19 nt, Artificial Sequence
  Description of Artificial Sequence: Synthetic oligonucleotide
agagcuacugaguagcggg

SEQ ID NO: 850463 - RNA, 19 nt, Artificial Sequence
  Description of Artificial Sequence: Synthetic oligonucleotide
aggaaaaucagagagcauc

SEQ ID NO: 850464 - RNA, 19 nt, Artificial Sequence
  Description of Artificial Sequence: Synthetic oligonucleotide
gauagagagcaauugagca

SEQ ID NO: 850465 - RNA, 19 nt, Artificial Sequence
  Description of Artificial Sequence: Synthetic oligonucleotide
uuggcaaugauaagggccc

SEQ ID NO: 850466 - RNA, 19 nt, Artificial Sequence
  Description of Artificial Sequence: Synthetic oligonucleotide
uauccuccagcauagaccc

SEQ ID NO: 850467 - RNA, 19 nt, Artificial Sequence
  Description of Artificial Sequence: Synthetic oligonucleotide
uggaguagguacuaucugg

SEQ ID NO: 850468 - RNA, 19 nt, Artificial Sequence
  Description of Artificial Sequence: Synthetic oligonucleotide
gauaacaggguuuggcucc

SEQ ID NO: 850469 - RNA, 19 nt, Artificial Sequence
  Description of Artificial Sequence: Synthetic oligonucleotide
ugagcucaaaguagggucg

SEQ ID NO: 850470 - RNA, 19 nt, Artificial Sequence
  Description of Artificial Sequence: Synthetic oligonucleotide
uccucaaaccugaaaauug

SEQ ID NO: 850471 - RNA, 19 nt, Artificial Sequence
  Description of Artificial Sequence: Synthetic oligonucleotide
ucagagagacucaagugcc

SEQ ID NO: 850472 - RNA, 19 nt, Artificial Sequence
  Description of Artificial Sequence: Synthetic oligonucleotide
aauaggcucagcguguccg

SEQ ID NO: 850473 - RNA, 19 nt, Artificial Sequence
  Description of Artificial Sequence: Synthetic oligonucleotide
aaccacuugggcuaggaca

SEQ ID NO: 850474 - RNA, 19 nt, Artificial Sequence
  Description of Artificial Sequence: Synthetic oligonucleotide
agaccaaguucccugaggg

SEQ ID NO: 850475 - RNA, 19 nt, Artificial Sequence
  Description of Artificial Sequence: Synthetic oligonucleotide
aggcuuaauaggcucagcg

SEQ ID NO: 850476 - RNA, 19 nt, Artificial Sequence
  Description of Artificial Sequence: Synthetic oligonucleotide
cauaaguaagaagucaagc

SEQ ID NO: 850477 - RNA, 19 nt, Artificial Sequence
  Description of Artificial Sequence: Synthetic oligonucleotide
auagaagucaggucagaag

SEQ ID NO: 850478 - RNA, 19 nt, Artificial Sequence
  Description of Artificial Sequence: Synthetic oligonucleotide
acauaaacuauuuuauuua

SEQ ID NO: 850479 - RNA, 19 nt, Artificial Sequence
  Description of Artificial Sequence: Synthetic oligonucleotide
aauugggagaucccauuug

SEQ ID NO: 850480 - RNA, 19 nt, Artificial Sequence
  Description of Artificial Sequence: Synthetic oligonucleotide
uccagcauagaccccauca

SEQ ID NO: 850481 - RNA, 19 nt, Artificial Sequence
  Description of Artificial Sequence: Synthetic oligonucleotide
cucacuucaggucaacucc

SEQ ID NO: 850482 - RNA, 19 nt, Artificial Sequence
  Description of Artificial Sequence: Synthetic oligonucleotide
agagcaauugagcaccaag

SEQ ID NO: 850483 - RNA, 19 nt, Artificial Sequence
  Description of Artificial Sequence: Synthetic oligonucleotide
cugauugcccauaaguaag

SEQ ID NO: 850484 - RNA, 19 nt, Artificial Sequence
  Description of Artificial Sequence: Synthetic oligonucleotide
ugaaaauugggagauccca

SEQ ID NO: 850485 - RNA, 19 nt, Artificial Sequence
  Description of Artificial Sequence: Synthetic oligonucleotide
gaaucucaugucucuaucc

SEQ ID NO: 850486 - RNA, 19 nt, Artificial Sequence
  Description of Artificial Sequence: Synthetic oligonucleotide
ugcagaccaaaucuggggc

SEQ ID NO: 850487 - RNA, 19 nt, Artificial Sequence
  Description of Artificial Sequence: Synthetic oligonucleotide
aguagguacuaucuggugu

SEQ ID NO: 850488 - RNA, 19 nt, Artificial Sequence
  Description of Artificial Sequence: Synthetic oligonucleotide
ucucuauccuccagcauag

SEQ ID NO: 850489 - RNA, 19 nt, Artificial Sequence
  Description of Artificial Sequence: Synthetic oligonucleotide
uagucaacaggugaggacc

SEQ ID NO: 850490 - RNA, 19 nt, Artificial Sequence
  Description of Artificial Sequence: Synthetic oligonucleotide
uugagcucaaaguaggguc

SEQ ID NO: 850491 - RNA, 19 nt, Artificial Sequence
  Description of Artificial Sequence: Synthetic oligonucleotide
uguggguaaggcaaagaga

SEQ ID NO: 850492 - RNA, 19 nt, Artificial Sequence
  Description of Artificial Sequence: Synthetic oligonucleotide
ggugcgaaggcuuaauagg

SEQ ID NO: 850493 - RNA, 19 nt, Artificial Sequence
  Description of Artificial Sequence: Synthetic oligonucleotide
agccuugagaaucucaugu

SEQ ID NO: 850494 - RNA, 19 nt, Artificial Sequence
  Description of Artificial Sequence: Synthetic oligonucleotide
cuaaucgccgcauugauaa

SEQ ID NO: 850495 - RNA, 19 nt, Artificial Sequence
  Description of Artificial Sequence: Synthetic oligonucleotide
aaaagccagacagauagaa

SEQ ID NO: 850496 - RNA, 19 nt, Artificial Sequence
  Description of Artificial Sequence: Synthetic oligonucleotide
uucccuaaugccacccugg

SEQ ID NO: 850497 - RNA, 19 nt, Artificial Sequence
  Description of Artificial Sequence: Synthetic oligonucleotide
aggacugacccuuucccac

SEQ ID NO: 850498 - RNA, 19 nt, Artificial Sequence
  Description of Artificial Sequence: Synthetic oligonucleotide
cuuaaagcgcuucccagag

SEQ ID NO: 850499 - RNA, 19 nt, Artificial Sequence
  Description of Artificial Sequence: Synthetic oligonucleotide
guagguacuaucuggugug

SEQ ID NO: 850500 - RNA, 19 nt, Artificial Sequence
  Description of Artificial Sequence: Synthetic oligonucleotide
guuacgcagagcuacugag

SEQ ID NO: 850501 - RNA, 19 nt, Artificial Sequence
  Description of Artificial Sequence: Synthetic oligonucleotide
aguugguccuaaucgccgc

SEQ ID NO: 850502 - RNA, 19 nt, Artificial Sequence
  Description of Artificial Sequence: Synthetic oligonucleotide
aaaauugggagaucccauu

SEQ ID NO: 850503 - RNA, 19 nt, Artificial Sequence
  Description of Artificial Sequence: Synthetic oligonucleotide
aacugaagacaaaccacac

SEQ ID NO: 850504 - RNA, 19 nt, Artificial Sequence
  Description of Artificial Sequence: Synthetic oligonucleotide
ucuauccuccagcauagac

SEQ ID NO: 850505 - RNA, 19 nt, Artificial Sequence
  Description of Artificial Sequence: Synthetic oligonucleotide
gacucaagugccaggaggg

SEQ ID NO: 850506 - RNA, 19 nt, Artificial Sequence
  Description of Artificial Sequence: Synthetic oligonucleotide
cacugaauuauggacacag

SEQ ID NO: 850507 - RNA, 19 nt, Artificial Sequence
  Description of Artificial Sequence: Synthetic oligonucleotide
caaagagagagcugccucc

SEQ ID NO: 850508 - RNA, 19 nt, Artificial Sequence
  Description of Artificial Sequence: Synthetic oligonucleotide
cacugagucacacuucugc

SEQ ID NO: 850509 - RNA, 19 nt, Artificial Sequence
  Description of Artificial Sequence: Synthetic oligonucleotide
cucaaaccugaaaauuggg

SEQ ID NO: 850510 - RNA, 19 nt, Artificial Sequence
  Description of Artificial Sequence: Synthetic oligonucleotide
cuucugggaagacaguacc

SEQ ID NO: 850511 - RNA, 19 nt, Artificial Sequence
  Description of Artificial Sequence: Synthetic oligonucleotide
ugcuuaaagcgcuucccag

SEQ ID NO: 850512 - RNA, 19 nt, Artificial Sequence
  Description of Artificial Sequence: Synthetic oligonucleotide
uugagaaucucaugucucu

SEQ ID NO: 850513 - RNA, 19 nt, Artificial Sequence
  Description of Artificial Sequence: Synthetic oligonucleotide
aaguucccuaaugccaccc

SEQ ID NO: 850514 - RNA, 19 nt, Artificial Sequence
  Description of Artificial Sequence: Synthetic oligonucleotide
ugggagaucccauuugaga

SEQ ID NO: 850515 - RNA, 19 nt, Artificial Sequence
  Description of Artificial Sequence: Synthetic oligonucleotide
ucuucuagaccaaguuccc

SEQ ID NO: 850516 - RNA, 19 nt, Artificial Sequence
  Description of Artificial Sequence: Synthetic oligonucleotide
aaauugggagaucccauuu

SEQ ID NO: 850517 - RNA, 19 nt, Artificial Sequence
  Description of Artificial Sequence: Synthetic oligonucleotide
agcauagaccccaucaggg

SEQ ID NO: 850518 - RNA, 19 nt, Artificial Sequence
  Description of Artificial Sequence: Synthetic oligonucleotide
aguaagaagucaagccagc

SEQ ID NO: 850519 - RNA, 19 nt, Artificial Sequence
  Description of Artificial Sequence: Synthetic oligonucleotide
aagcgcuucccagagguuc

SEQ ID NO: 850520 - RNA, 19 nt, Artificial Sequence
  Description of Artificial Sequence: Synthetic oligonucleotide
gacauuuuacacauugcuc

SEQ ID NO: 850521 - RNA, 19 nt, Artificial Sequence
  Description of Artificial Sequence: Synthetic oligonucleotide
cugcagaccaaaucugggg

SEQ ID NO: 850522 - RNA, 19 nt, Artificial Sequence
  Description of Artificial Sequence: Synthetic oligonucleotide
agcguguccguaucugggc

SEQ ID NO: 850523 - RNA, 19 nt, Artificial Sequence
  Description of Artificial Sequence: Synthetic oligonucleotide
agcgauagagagcaauuga

SEQ ID NO: 850524 - RNA, 19 nt, Artificial Sequence
  Description of Artificial Sequence: Synthetic oligonucleotide
ucggcucuugccaauggcc

SEQ ID NO: 850525 - RNA, 19 nt, Artificial Sequence
  Description of Artificial Sequence: Synthetic oligonucleotide
ugauugcccauaaguaaga

SEQ ID NO: 850526 - RNA, 19 nt, Artificial Sequence
  Description of Artificial Sequence: Synthetic oligonucleotide
acugaagacaaaccacaca

SEQ ID NO: 850527 - RNA, 19 nt, Artificial Sequence
  Description of Artificial Sequence: Synthetic oligonucleotide
uuaaagcgcuucccagagg

SEQ ID NO: 850528 - RNA, 19 nt, Artificial Sequence
  Description of Artificial Sequence: Synthetic oligonucleotide
gauguucccgcucgccucg

SEQ ID NO: 850529 - RNA, 19 nt, Artificial Sequence
  Description of Artificial Sequence: Synthetic oligonucleotide
aagaucugcugugguuucc

SEQ ID NO: 850530 - RNA, 19 nt, Artificial Sequence
  Description of Artificial Sequence: Synthetic oligonucleotide
aucagggagcuacuagcac

SEQ ID NO: 850531 - RNA, 19 nt, Artificial Sequence
  Description of Artificial Sequence: Synthetic oligonucleotide
acggucucagccuugagaa

SEQ ID NO: 850532 - RNA, 19 nt, Artificial Sequence
  Description of Artificial Sequence: Synthetic oligonucleotide
uacgcagagcuacugagua

SEQ ID NO: 850533 - RNA, 19 nt, Artificial Sequence
  Description of Artificial Sequence: Synthetic oligonucleotide
aaucgccgcauugauaaca

SEQ ID NO: 850534 - RNA, 19 nt, Artificial Sequence
  Description of Artificial Sequence: Synthetic oligonucleotide
acaggugaggaccugucca

SEQ ID NO: 850535 - RNA, 19 nt, Artificial Sequence
  Description of Artificial Sequence: Synthetic oligonucleotide
agcaccaaguucccuaaug

SEQ ID NO: 850536 - RNA, 19 nt, Artificial Sequence
  Description of Artificial Sequence: Synthetic oligonucleotide
caaugauaagggcccagcc

SEQ ID NO: 850537 - RNA, 19 nt, Artificial Sequence
  Description of Artificial Sequence: Synthetic oligonucleotide
uugggagaucccauuugag

SEQ ID NO: 850538 - RNA, 19 nt, Artificial Sequence
  Description of Artificial Sequence: Synthetic oligonucleotide
aggcacauggacauuuuac

SEQ ID NO: 850539 - RNA, 19 nt, Artificial Sequence
  Description of Artificial Sequence: Synthetic oligonucleotide
agagcgcaagccuucuggg

SEQ ID NO: 850540 - RNA, 19 nt, Artificial Sequence
  Description of Artificial Sequence: Synthetic oligonucleotide
cagagcgcaagccuucugg

SEQ ID NO: 850541 - RNA, 19 nt, Artificial Sequence
  Description of Artificial Sequence: Synthetic oligonucleotide
ucaugugaccuuucugugu

SEQ ID NO: 850542 - RNA, 19 nt, Artificial Sequence
  Description of Artificial Sequence: Synthetic oligonucleotide
acugagucacacuucugca

SEQ ID NO: 850543 - RNA, 19 nt, Artificial Sequence
  Description of Artificial Sequence: Synthetic oligonucleotide
aagucaagccagcucacuu

SEQ ID NO: 850544 - RNA, 19 nt, Artificial Sequence
  Description of Artificial Sequence: Synthetic oligonucleotide
ggaagagcgauagagagca

SEQ ID NO: 850545 - RNA, 19 nt, Artificial Sequence
  Description of Artificial Sequence: Synthetic oligonucleotide
cagcauagaccccaucagg

SEQ ID NO: 850546 - RNA, 19 nt, Artificial Sequence
  Description of Artificial Sequence: Synthetic oligonucleotide
gaguugguccuaaucgccg

SEQ ID NO: 850547 - RNA, 19 nt, Artificial Sequence
  Description of Artificial Sequence: Synthetic oligonucleotide
ucggagggucuuuugcagg

SEQ ID NO: 850548 - RNA, 19 nt, Artificial Sequence
  Description of Artificial Sequence: Synthetic oligonucleotide
cagacagauagaagucagg

SEQ ID NO: 850549 - RNA, 19 nt, Artificial Sequence
  Description of Artificial Sequence: Synthetic oligonucleotide
gaaggcugcagaccaaauc

SEQ ID NO: 850550 - RNA, 19 nt, Artificial Sequence
  Description of Artificial Sequence: Synthetic oligonucleotide
cuggcaugguccgagaggc

SEQ ID NO: 850551 - RNA, 19 nt, Artificial Sequence
  Description of Artificial Sequence: Synthetic oligonucleotide
uuacgcagagcuacugagu

SEQ ID NO: 850552 - RNA, 19 nt, Artificial Sequence
  Description of Artificial Sequence: Synthetic oligonucleotide
ccucaaaccugaaaauugg

SEQ ID NO: 850553 - RNA, 19 nt, Artificial Sequence
  Description of Artificial Sequence: Synthetic oligonucleotide
agcaauugagcaccaaguu

SEQ ID NO: 850554 - RNA, 19 nt, Artificial Sequence
  Description of Artificial Sequence: Synthetic oligonucleotide
aagagcgauagagagcaau

SEQ ID NO: 850555 - RNA, 19 nt, Artificial Sequence
  Description of Artificial Sequence: Synthetic oligonucleotide
cccauuugagacaugggcc

SEQ ID NO: 850556 - RNA, 19 nt, Artificial Sequence
  Description of Artificial Sequence: Synthetic oligonucleotide
gaaggcuuaauaggcucag

SEQ ID NO: 850557 - RNA, 19 nt, Artificial Sequence
  Description of Artificial Sequence: Synthetic oligonucleotide
gcuaggacaggacaagagc

SEQ ID NO: 850558 - RNA, 19 nt, Artificial Sequence
  Description of Artificial Sequence: Synthetic oligonucleotide
auaacaggguuuggcuccc

SEQ ID NO: 850559 - RNA, 19 nt, Artificial Sequence
  Description of Artificial Sequence: Synthetic oligonucleotide
gugguuucccuucauacaa

SEQ ID NO: 850560 - RNA, 19 nt, Artificial Sequence
  Description of Artificial Sequence: Synthetic oligonucleotide
gaugaggaggcaagccccg

SEQ ID NO: 850561 - RNA, 19 nt, Artificial Sequence
  Description of Artificial Sequence: Synthetic oligonucleotide
ggagcuacuagcaccuugg

SEQ ID NO: 850562 - RNA, 19 nt, Artificial Sequence
  Description of Artificial Sequence: Synthetic oligonucleotide
agagagacucaagugccag

SEQ ID NO: 850563 - RNA, 19 nt, Artificial Sequence
  Description of Artificial Sequence: Synthetic oligonucleotide
ucgcugaucuguuccaggu

SEQ ID NO: 850564 - RNA, 19 nt, Artificial Sequence
  Description of Artificial Sequence: Synthetic oligonucleotide
ugcccauaaguaagaaguc

SEQ ID NO: 850565 - RNA, 19 nt, Artificial Sequence
  Description of Artificial Sequence: Synthetic oligonucleotide
aauggcccgucggaggguc

SEQ ID NO: 850566 - RNA, 19 nt, Artificial Sequence
  Description of Artificial Sequence: Synthetic oligonucleotide
uugggcuaggacauguguu

SEQ ID NO: 850567 - RNA, 19 nt, Artificial Sequence
  Description of Artificial Sequence: Synthetic oligonucleotide
guacuaucuggugugagga

SEQ ID NO: 850568 - RNA, 19 nt, Artificial Sequence
  Description of Artificial Sequence: Synthetic oligonucleotide
gagcgauagagagcaauug

SEQ ID NO: 850569 - RNA, 19 nt, Artificial Sequence
  Description of Artificial Sequence: Synthetic oligonucleotide
uaauaggcucagcgugucc

SEQ ID NO: 850570 - RNA, 19 nt, Artificial Sequence
  Description of Artificial Sequence: Synthetic oligonucleotide
aggaggcaagccccggcgc

SEQ ID NO: 850571 - RNA, 19 nt, Artificial Sequence
  Description of Artificial Sequence: Synthetic oligonucleotide
uagggagacaggacugaga

SEQ ID NO: 850572 - RNA, 19 nt, Artificial Sequence
  Description of Artificial Sequence: Synthetic oligonucleotide
ggaggggacaaggagacag

SEQ ID NO: 850573 - RNA, 19 nt, Artificial Sequence
  Description of Artificial Sequence: Synthetic oligonucleotide
uucgaucccacugucccca

SEQ ID NO: 850574 - RNA, 19 nt, Artificial Sequence
  Description of Artificial Sequence: Synthetic oligonucleotide
caagcuaggacaggacaag

SEQ ID NO: 850575 - RNA, 19 nt, Artificial Sequence
  Description of Artificial Sequence: Synthetic oligonucleotide
aguagucaacaggugagga

SEQ ID NO: 850576 - RNA, 19 nt, Artificial Sequence
  Description of Artificial Sequence: Synthetic oligonucleotide
cagcguguccguaucuggg

SEQ ID NO: 850577 - RNA, 19 nt, Artificial Sequence
  Description of Artificial Sequence: Synthetic oligonucleotide
uccuaaucgccgcauugau

SEQ ID NO: 850578 - RNA, 19 nt, Artificial Sequence
  Description of Artificial Sequence: Synthetic oligonucleotide
ugcucacaggcaagcuagg

SEQ ID NO: 850579 - RNA, 19 nt, Artificial Sequence
  Description of Artificial Sequence: Synthetic oligonucleotide
cacaggggaagaucgccgc

SEQ ID NO: 850580 - RNA, 19 nt, Artificial Sequence
  Description of Artificial Sequence: Synthetic oligonucleotide
ugauguucccgcucgccuc

SEQ ID NO: 850581 - RNA, 19 nt, Artificial Sequence
  Description of Artificial Sequence: Synthetic oligonucleotide
accugacacugaauuaugg

SEQ ID NO: 850582 - RNA, 19 nt, Artificial Sequence
  Description of Artificial Sequence: Synthetic oligonucleotide
ugugaggaagagcgauaga

SEQ ID NO: 850583 - RNA, 19 nt, Artificial Sequence
  Description of Artificial Sequence: Synthetic oligonucleotide
gagacucaagugccaggag

SEQ ID NO: 850584 - RNA, 19 nt, Artificial Sequence
  Description of Artificial Sequence: Synthetic oligonucleotide
ucccuaaugccacccugga

SEQ ID NO: 850585 - RNA, 19 nt, Artificial Sequence
  Description of Artificial Sequence: Synthetic oligonucleotide
acucguguccucauuucuc

SEQ ID NO: 850586 - RNA, 19 nt, Artificial Sequence
  Description of Artificial Sequence: Synthetic oligonucleotide
guagggucggcucuugcca

SEQ ID NO: 850587 - RNA, 19 nt, Artificial Sequence
  Description of Artificial Sequence: Synthetic oligonucleotide
guucccuaaugccacccug

SEQ ID NO: 850588 - RNA, 19 nt, Artificial Sequence
  Description of Artificial Sequence: Synthetic oligonucleotide
uuaauaggcucagcguguc

SEQ ID NO: 850589 - RNA, 19 nt, Artificial Sequence
  Description of Artificial Sequence: Synthetic oligonucleotide
gcuaaggucacaaggggug

SEQ ID NO: 850590 - RNA, 19 nt, Artificial Sequence
  Description of Artificial Sequence: Synthetic oligonucleotide
auaagggcccagcccaacu

SEQ ID NO: 850591 - RNA, 19 nt, Artificial Sequence
  Description of Artificial Sequence: Synthetic oligonucleotide
gcgauagagagcaauugag

SEQ ID NO: 850592 - RNA, 19 nt, Artificial Sequence
  Description of Artificial Sequence: Synthetic oligonucleotide
ccuucgaucccacuguccc

SEQ ID NO: 850593 - RNA, 19 nt, Artificial Sequence
  Description of Artificial Sequence: Synthetic oligonucleotide
ucagaggccacggugcgaa

SEQ ID NO: 850594 - RNA, 19 nt, Artificial Sequence
  Description of Artificial Sequence: Synthetic oligonucleotide
ccauaaguaagaagucaag

SEQ ID NO: 850595 - RNA, 19 nt, Artificial Sequence
  Description of Artificial Sequence: Synthetic oligonucleotide
acugaguagcgggucuugg

SEQ ID NO: 850596 - RNA, 19 nt, Artificial Sequence
  Description of Artificial Sequence: Synthetic oligonucleotide
ucgccgcgagcccagagga

SEQ ID NO: 850597 - RNA, 19 nt, Artificial Sequence
  Description of Artificial Sequence: Synthetic oligonucleotide
gagcucaaaguagggucgg

SEQ ID NO: 850598 - RNA, 19 nt, Artificial Sequence
  Description of Artificial Sequence: Synthetic oligonucleotide
gcauugauaacaggguuug

SEQ ID NO: 850599 - RNA, 19 nt, Artificial Sequence
  Description of Artificial Sequence: Synthetic oligonucleotide
agaagucaagccagcucac

SEQ ID NO: 850600 - RNA, 19 nt, Artificial Sequence
  Description of Artificial Sequence: Synthetic oligonucleotide
guaaggcaaagagagagcu

SEQ ID NO: 850601 - RNA, 19 nt, Artificial Sequence
  Description of Artificial Sequence: Synthetic oligonucleotide
gcacauggacauuuuacac

SEQ ID NO: 850602 - RNA, 19 nt, Artificial Sequence
  Description of Artificial Sequence: Synthetic oligonucleotide
acaggacucgaggagaaaa

SEQ ID NO: 850603 - RNA, 19 nt, Artificial Sequence
  Description of Artificial Sequence: Synthetic oligonucleotide
acgcaggugcuccacugag

SEQ ID NO: 850604 - RNA, 19 nt, Artificial Sequence
  Description of Artificial Sequence: Synthetic oligonucleotide
cacaaaagggaggcuuugc

SEQ ID NO: 850605 - RNA, 19 nt, Artificial Sequence
  Description of Artificial Sequence: Synthetic oligonucleotide
caucagggagcuacuagca

SEQ ID NO: 850606 - RNA, 19 nt, Artificial Sequence
  Description of Artificial Sequence: Synthetic oligonucleotide
aaaguagggucggcucuug

SEQ ID NO: 850607 - RNA, 19 nt, Artificial Sequence
  Description of Artificial Sequence: Synthetic oligonucleotide
ucauacaacccaggagcac

SEQ ID NO: 850608 - RNA, 19 nt, Artificial Sequence
  Description of Artificial Sequence: Synthetic oligonucleotide
acgcagagcuacugaguag

SEQ ID NO: 850609 - RNA, 19 nt, Artificial Sequence
  Description of Artificial Sequence: Synthetic oligonucleotide
agcuacugaguagcggguc

SEQ ID NO: 850610 - RNA, 19 nt, Artificial Sequence
  Description of Artificial Sequence: Synthetic oligonucleotide
gguuggcacggucucagcc

SEQ ID NO: 850611 - RNA, 19 nt, Artificial Sequence
  Description of Artificial Sequence: Synthetic oligonucleotide
cagagcuacugaguagcgg

SEQ ID NO: 850612 - RNA, 19 nt, Artificial Sequence
  Description of Artificial Sequence: Synthetic oligonucleotide
cagaccaaaucuggggcag

SEQ ID NO: 850613 - RNA, 19 nt, Artificial Sequence
  Description of Artificial Sequence: Synthetic oligonucleotide
gguccgagaggccacgcag

SEQ ID NO: 850614 - RNA, 19 nt, Artificial Sequence
  Description of Artificial Sequence: Synthetic oligonucleotide
ugagaaagcuagggagaca

SEQ ID NO: 850615 - RNA, 19 nt, Artificial Sequence
  Description of Artificial Sequence: Synthetic oligonucleotide
cauugauaacaggguuugg

SEQ ID NO: 850616 - RNA, 19 nt, Artificial Sequence
  Description of Artificial Sequence: Synthetic oligonucleotide
agcucaaaguagggucggc

SEQ ID NO: 850617 - RNA, 19 nt, Artificial Sequence
  Description of Artificial Sequence: Synthetic oligonucleotide
uaaggucacaaggggugca

SEQ ID NO: 850618 - RNA, 19 nt, Artificial Sequence
  Description of Artificial Sequence: Synthetic oligonucleotide
aucgccgcauugauaacag

SEQ ID NO: 850619 - RNA, 19 nt, Artificial Sequence
  Description of Artificial Sequence: Synthetic oligonucleotide
uacuaucuggugugaggaa

SEQ ID NO: 850620 - RNA, 19 nt, Artificial Sequence
  Description of Artificial Sequence: Synthetic oligonucleotide
aagaagggacugugagaaa

SEQ ID NO: 850621 - RNA, 19 nt, Artificial Sequence
  Description of Artificial Sequence: Synthetic oligonucleotide
cuccugaaagaagggacug

SEQ ID NO: 850622 - RNA, 19 nt, Artificial Sequence
  Description of Artificial Sequence: Synthetic oligonucleotide
aguucccuaaugccacccu

SEQ ID NO: 850623 - RNA, 19 nt, Artificial Sequence
  Description of Artificial Sequence: Synthetic oligonucleotide
acagcugaccuugcccagg

SEQ ID NO: 850624 - RNA, 19 nt, Artificial Sequence
  Description of Artificial Sequence: Synthetic oligonucleotide
gguccuaaucgccgcauug

SEQ ID NO: 850625 - RNA, 19 nt, Artificial Sequence
  Description of Artificial Sequence: Synthetic oligonucleotide
cugggugagcacucucccc

SEQ ID NO: 850626 - RNA, 19 nt, Artificial Sequence
  Description of Artificial Sequence: Synthetic oligonucleotide
uccugaaagaagggacugu

SEQ ID NO: 850627 - RNA, 19 nt, Artificial Sequence
  Description of Artificial Sequence: Synthetic oligonucleotide
ggacauguguucucaugug

SEQ ID NO: 850628 - RNA, 19 nt, Artificial Sequence
  Description of Artificial Sequence: Synthetic oligonucleotide
agcgggucuuggccugugc

SEQ ID NO: 850629 - RNA, 19 nt, Artificial Sequence
  Description of Artificial Sequence: Synthetic oligonucleotide
gacugacccuuucccacac

SEQ ID NO: 850630 - RNA, 19 nt, Artificial Sequence
  Description of Artificial Sequence: Synthetic oligonucleotide
gaacugggccuugagcuca

SEQ ID NO: 850631 - RNA, 19 nt, Artificial Sequence
  Description of Artificial Sequence: Synthetic oligonucleotide
ucgccgcauugauaacagg

SEQ ID NO: 850632 - RNA, 19 nt, Artificial Sequence
  Description of Artificial Sequence: Synthetic oligonucleotide
uucucccaccccuggguga

SEQ ID NO: 850633 - RNA, 19 nt, Artificial Sequence
  Description of Artificial Sequence: Synthetic oligonucleotide
auaggcucagcguguccgu

SEQ ID NO: 850634 - RNA, 19 nt, Artificial Sequence
  Description of Artificial Sequence: Synthetic oligonucleotide
caacaggugaggaccuguc

SEQ ID NO: 850635 - RNA, 19 nt, Artificial Sequence
  Description of Artificial Sequence: Synthetic oligonucleotide
ugucucuauccuccagcau

SEQ ID NO: 850636 - RNA, 19 nt, Artificial Sequence
  Description of Artificial Sequence: Synthetic oligonucleotide
gagaaucucaugucucuau

SEQ ID NO: 850637 - RNA, 19 nt, Artificial Sequence
  Description of Artificial Sequence: Synthetic oligonucleotide
uccguaucugggccuggac

SEQ ID NO: 850638 - RNA, 19 nt, Artificial Sequence
  Description of Artificial Sequence: Synthetic oligonucleotide
gcuuaaagcgcuucccaga

SEQ ID NO: 850639 - RNA, 19 nt, Artificial Sequence
  Description of Artificial Sequence: Synthetic oligonucleotide
ggcaagcuaggacaggaca

SEQ ID NO: 850640 - RNA, 19 nt, Artificial Sequence
  Description of Artificial Sequence: Synthetic oligonucleotide
ggucacaaggggugcacug

SEQ ID NO: 850641 - RNA, 19 nt, Artificial Sequence
  Description of Artificial Sequence: Synthetic oligonucleotide
ccagguuacgcagagcuac

SEQ ID NO: 850642 - RNA, 19 nt, Artificial Sequence
  Description of Artificial Sequence: Synthetic oligonucleotide
aggugaggaccuguccaac

SEQ ID NO: 850643 - RNA, 19 nt, Artificial Sequence
  Description of Artificial Sequence: Synthetic oligonucleotide
ggucacacgcugauguucc

SEQ ID NO: 850644 - RNA, 19 nt, Artificial Sequence
  Description of Artificial Sequence: Synthetic oligonucleotide
aagaucgccgcgagcccag

SEQ ID NO: 850645 - RNA, 19 nt, Artificial Sequence
  Description of Artificial Sequence: Synthetic oligonucleotide
gaagaucgccgcgagccca

SEQ ID NO: 850646 - RNA, 19 nt, Artificial Sequence
  Description of Artificial Sequence: Synthetic oligonucleotide
ggucagaggccacggugcg

SEQ ID NO: 850647 - RNA, 19 nt, Artificial Sequence
  Description of Artificial Sequence: Synthetic oligonucleotide
agagcgauagagagcaauu

SEQ ID NO: 850648 - RNA, 19 nt, Artificial Sequence
  Description of Artificial Sequence: Synthetic oligonucleotide
cucacuuccccggcguccc

SEQ ID NO: 850649 - RNA, 19 nt, Artificial Sequence
  Description of Artificial Sequence: Synthetic oligonucleotide
uaaucgccgcauugauaac

SEQ ID NO: 850650 - RNA, 19 nt, Artificial Sequence
  Description of Artificial Sequence: Synthetic oligonucleotide
ccucacuucaggucaacuc

SEQ ID NO: 850651 - RNA, 19 nt, Artificial Sequence
  Description of Artificial Sequence: Synthetic oligonucleotide
guccgagaggccacgcagg

SEQ ID NO: 850652 - RNA, 19 nt, Artificial Sequence
  Description of Artificial Sequence: Synthetic oligonucleotide
uagguacuaucugguguga

SEQ ID NO: 850653 - RNA, 19 nt, Artificial Sequence
  Description of Artificial Sequence: Synthetic oligonucleotide
gcaaugauaagggcccagc

SEQ ID NO: 850654 - RNA, 19 nt, Artificial Sequence
  Description of Artificial Sequence: Synthetic oligonucleotide
gauugcccauaaguaagaa

SEQ ID NO: 850655 - RNA, 19 nt, Artificial Sequence
  Description of Artificial Sequence: Synthetic oligonucleotide
uagggucggcucuugccaa

SEQ ID NO: 850656 - RNA, 19 nt, Artificial Sequence
  Description of Artificial Sequence: Synthetic oligonucleotide
accugaaaauugggagauc

SEQ ID NO: 850657 - RNA, 19 nt, Artificial Sequence
  Description of Artificial Sequence: Synthetic oligonucleotide
aggcaagcuaggacaggac

SEQ ID NO: 850658 - RNA, 19 nt, Artificial Sequence
  Description of Artificial Sequence: Synthetic oligonucleotide
ccugauugcccauaaguaa

SEQ ID NO: 850659 - RNA, 19 nt, Artificial Sequence
  Description of Artificial Sequence: Synthetic oligonucleotide
gaucgccgcgagcccagag

SEQ ID NO: 850660 - RNA, 19 nt, Artificial Sequence
  Description of Artificial Sequence: Synthetic oligonucleotide
ucccgcucgccucgaagac

SEQ ID NO: 850661 - RNA, 19 nt, Artificial Sequence
  Description of Artificial Sequence: Synthetic oligonucleotide
gguuacgcagagcuacuga

SEQ ID NO: 850662 - RNA, 19 nt, Artificial Sequence
  Description of Artificial Sequence: Synthetic oligonucleotide
guugguccuaaucgccgca

SEQ ID NO: 850663 - RNA, 19 nt, Artificial Sequence
  Description of Artificial Sequence: Synthetic oligonucleotide
caugguccgagaggccacg

SEQ ID NO: 850664 - RNA, 19 nt, Artificial Sequence
  Description of Artificial Sequence: Synthetic oligonucleotide
ccguaucugggccuggacc

SEQ ID NO: 850665 - RNA, 19 nt, Artificial Sequence
  Description of Artificial Sequence: Synthetic oligonucleotide
guuggcacggucucagccu

SEQ ID NO: 850666 - RNA, 19 nt, Artificial Sequence
  Description of Artificial Sequence: Synthetic oligonucleotide
gggagcuacuagcaccuug

SEQ ID NO: 850667 - RNA, 19 nt, Artificial Sequence
  Description of Artificial Sequence: Synthetic oligonucleotide
gcgaaggcuuaauaggcuc

SEQ ID NO: 850668 - RNA, 19 nt, Artificial Sequence
  Description of Artificial Sequence: Synthetic oligonucleotide
uacuagcaccuuggcaaug

SEQ ID NO: 850669 - RNA, 19 nt, Artificial Sequence
  Description of Artificial Sequence: Synthetic oligonucleotide
aggugaucuuugaggcugg

SEQ ID NO: 850670 - RNA, 19 nt, Artificial Sequence
  Description of Artificial Sequence: Synthetic oligonucleotide
guccuaaucgccgcauuga

SEQ ID NO: 850671 - RNA, 19 nt, Artificial Sequence
  Description of Artificial Sequence: Synthetic oligonucleotide
agguuacgcagagcuacug

SEQ ID NO: 850672 - RNA, 19 nt, Artificial Sequence
  Description of Artificial Sequence: Synthetic oligonucleotide
cacgcugauguucccgcuc

SEQ ID NO: 850673 - RNA, 19 nt, Artificial Sequence
  Description of Artificial Sequence: Synthetic oligonucleotide
caccagcacaugcacucac

SEQ ID NO: 850674 - RNA, 19 nt, Artificial Sequence
  Description of Artificial Sequence: Synthetic oligonucleotide
caccucaaaccccacaggu

SEQ ID NO: 850675 - RNA, 19 nt, Artificial Sequence
  Description of Artificial Sequence: Synthetic oligonucleotide
gucacaaggggugcacuga

SEQ ID NO: 850676 - RNA, 19 nt, Artificial Sequence
  Description of Artificial Sequence: Synthetic oligonucleotide
cuguggggcccugauugcc

SEQ ID NO: 850677 - RNA, 19 nt, Artificial Sequence
  Description of Artificial Sequence: Synthetic oligonucleotide
cggugcgaaggcuuaauag

SEQ ID NO: 850678 - RNA, 19 nt, Artificial Sequence
  Description of Artificial Sequence: Synthetic oligonucleotide
guaagaagucaagccagcu

SEQ ID NO: 850679 - RNA, 19 nt, Artificial Sequence
  Description of Artificial Sequence: Synthetic oligonucleotide
gcagaccaaaucuggggca

SEQ ID NO: 850680 - RNA, 19 nt, Artificial Sequence
  Description of Artificial Sequence: Synthetic oligonucleotide
ggaagaucgccgcgagccc

SEQ ID NO: 850681 - RNA, 19 nt, Artificial Sequence
  Description of Artificial Sequence: Synthetic oligonucleotide
ggucggcucuugccaaugg

SEQ ID NO: 850682 - RNA, 19 nt, Artificial Sequence
  Description of Artificial Sequence: Synthetic oligonucleotide
acacgcugauguucccgcu

SEQ ID NO: 850683 - RNA, 19 nt, Artificial Sequence
  Description of Artificial Sequence: Synthetic oligonucleotide
uguccguaucugggccugg

SEQ ID NO: 850684 - RNA, 19 nt, Artificial Sequence
  Description of Artificial Sequence: Synthetic oligonucleotide
cuugggcuaggacaugugu

SEQ ID NO: 850685 - RNA, 19 nt, Artificial Sequence
  Description of Artificial Sequence: Synthetic oligonucleotide
cauugugaccauccucaaa

SEQ ID NO: 850686 - RNA, 19 nt, Artificial Sequence
  Description of Artificial Sequence: Synthetic oligonucleotide
cgcagagcuacugaguagc

SEQ ID NO: 850687 - RNA, 19 nt, Artificial Sequence
  Description of Artificial Sequence: Synthetic oligonucleotide
cuugagcucaaaguagggu

SEQ ID NO: 850688 - RNA, 19 nt, Artificial Sequence
  Description of Artificial Sequence: Synthetic oligonucleotide
ugguccuaaucgccgcauu

SEQ ID NO: 850689 - RNA, 19 nt, Artificial Sequence
  Description of Artificial Sequence: Synthetic oligonucleotide
acggugcgaaggcuuaaua

SEQ ID NO: 850690 - RNA, 19 nt, Artificial Sequence
  Description of Artificial Sequence: Synthetic oligonucleotide
ggcuuaauaggcucagcgu

SEQ ID NO: 850691 - RNA, 19 nt, Artificial Sequence
  Description of Artificial Sequence: Synthetic oligonucleotide
uugguccuaaucgccgcau

SEQ ID NO: 850692 - RNA, 19 nt, Artificial Sequence
  Description of Artificial Sequence: Synthetic oligonucleotide
caggugaggaccuguccaa

SEQ ID NO: 850693 - RNA, 19 nt, Artificial Sequence
  Description of Artificial Sequence: Synthetic oligonucleotide
cccugggugagcacucucc

SEQ ID NO: 850694 - RNA, 19 nt, Artificial Sequence
  Description of Artificial Sequence: Synthetic oligonucleotide
cagggagcuacuagcaccu

SEQ ID NO: 850695 - RNA, 19 nt, Artificial Sequence
  Description of Artificial Sequence: Synthetic oligonucleotide
ccgcucgccucgaagacgc

SEQ ID NO: 850696 - RNA, 19 nt, Artificial Sequence
  Description of Artificial Sequence: Synthetic oligonucleotide
gcguguccguaucugggcc

SEQ ID NO: 850697 - RNA, 19 nt, Artificial Sequence
  Description of Artificial Sequence: Synthetic oligonucleotide
gcccugauugcccauaagu

SEQ ID NO: 850698 - RNA, 19 nt, Artificial Sequence
  Description of Artificial Sequence: Synthetic oligonucleotide
cacaaggggugcacugaca

SEQ ID NO: 850699 - RNA, 19 nt, Artificial Sequence
  Description of Artificial Sequence: Synthetic oligonucleotide
gcaagcuaggacaggacaa

SEQ ID NO: 850700 - RNA, 19 nt, Artificial Sequence
  Description of Artificial Sequence: Synthetic oligonucleotide
guguccguaucugggccug

SEQ ID NO: 850701 - RNA, 19 nt, Artificial Sequence
  Description of Artificial Sequence: Synthetic oligonucleotide
gcagagcuacugaguagcg

SEQ ID NO: 850702 - RNA, 19 nt, Artificial Sequence
  Description of Artificial Sequence: Synthetic oligonucleotide
uggcacggucucagccuug

SEQ ID NO: 850703 - RNA, 19 nt, Artificial Sequence
  Description of Artificial Sequence: Synthetic oligonucleotide
agagagcaauugagcacca

SEQ ID NO: 850704 - RNA, 19 nt, Artificial Sequence
  Description of Artificial Sequence: Synthetic oligonucleotide
cugauguucccgcucgccu

SEQ ID NO: 850705 - RNA, 19 nt, Artificial Sequence
  Description of Artificial Sequence: Synthetic oligonucleotide
ugggguuggcacggucuca

SEQ ID NO: 850706 - RNA, 19 nt, Artificial Sequence
  Description of Artificial Sequence: Synthetic oligonucleotide
ggacugacccuuucccaca

SEQ ID NO: 850707 - RNA, 19 nt, Artificial Sequence
  Description of Artificial Sequence: Synthetic oligonucleotide
agaccaaaucuggggcaga

SEQ ID NO: 850708 - RNA, 19 nt, Artificial Sequence
  Description of Artificial Sequence: Synthetic oligonucleotide
ggaguagguacuaucuggu

SEQ ID NO: 850709 - RNA, 19 nt, Artificial Sequence
  Description of Artificial Sequence: Synthetic oligonucleotide
cugggaagacaguaccagu

SEQ ID NO: 850710 - RNA, 19 nt, Artificial Sequence
  Description of Artificial Sequence: Synthetic oligonucleotide
ccgucggagggucuuuugc

SEQ ID NO: 850711 - RNA, 19 nt, Artificial Sequence
  Description of Artificial Sequence: Synthetic oligonucleotide
ggggacaaggagacagggc

SEQ ID NO: 850712 - RNA, 19 nt, Artificial Sequence
  Description of Artificial Sequence: Synthetic oligonucleotide
gagcgcaagccuucugggu

SEQ ID NO: 850713 - RNA, 19 nt, Artificial Sequence
  Description of Artificial Sequence: Synthetic oligonucleotide
augcacucacacacucgug

SEQ ID NO: 850714 - RNA, 19 nt, Artificial Sequence
  Description of Artificial Sequence: Synthetic oligonucleotide
cccugauugcccauaagua

SEQ ID NO: 850715 - RNA, 19 nt, Artificial Sequence
  Description of Artificial Sequence: Synthetic oligonucleotide
gggucacacgcugauguuc

SEQ ID NO: 850716 - RNA, 19 nt, Artificial Sequence
  Description of Artificial Sequence: Synthetic oligonucleotide
caugaaucugcucgcugau

SEQ ID NO: 850717 - RNA, 19 nt, Artificial Sequence
  Description of Artificial Sequence: Synthetic oligonucleotide
uguucccgcucgccucgaa

SEQ ID NO: 850718 - RNA, 19 nt, Artificial Sequence
  Description of Artificial Sequence: Synthetic oligonucleotide
ccagcucacuuccccggcg

SEQ ID NO: 850719 - RNA, 19 nt, Artificial Sequence
  Description of Artificial Sequence: Synthetic oligonucleotide
gccgcgagcccagaggaug

SEQ ID NO: 850720 - RNA, 19 nt, Artificial Sequence
  Description of Artificial Sequence: Synthetic oligonucleotide
agggucggcucuugccaau

SEQ ID NO: 850721 - RNA, 19 nt, Artificial Sequence
  Description of Artificial Sequence: Synthetic oligonucleotide
caggugcuccacugaguca

SEQ ID NO: 850722 - RNA, 19 nt, Artificial Sequence
  Description of Artificial Sequence: Synthetic oligonucleotide
aggcaagccccggcgccgg

SEQ ID NO: 850723 - RNA, 19 nt, Artificial Sequence
  Description of Artificial Sequence: Synthetic oligonucleotide
ggacaaggagacagggcca

SEQ ID NO: 850724 - RNA, 19 nt, Artificial Sequence
  Description of Artificial Sequence: Synthetic oligonucleotide
gcuacugaguagcgggucu

SEQ ID NO: 850725 - RNA, 19 nt, Artificial Sequence
  Description of Artificial Sequence: Synthetic oligonucleotide
gguguggguaaggcaaaga

SEQ ID NO: 850726 - RNA, 19 nt, Artificial Sequence
  Description of Artificial Sequence: Synthetic oligonucleotide
ccuguggggcccugauugc

SEQ ID NO: 850727 - RNA, 19 nt, Artificial Sequence
  Description of Artificial Sequence: Synthetic oligonucleotide
cuacuagcaccuuggcaau

SEQ ID NO: 850728 - RNA, 19 nt, Artificial Sequence
  Description of Artificial Sequence: Synthetic oligonucleotide
cuuugcagccaugcuuaaa

SEQ ID NO: 850729 - RNA, 19 nt, Artificial Sequence
  Description of Artificial Sequence: Synthetic oligonucleotide
gcucacuuccccggcgucc

SEQ ID NO: 850730 - RNA, 19 nt, Artificial Sequence
  Description of Artificial Sequence: Synthetic oligonucleotide
cuccaagauuuggcugaac

SEQ ID NO: 850731 - RNA, 19 nt, Artificial Sequence
  Description of Artificial Sequence: Synthetic oligonucleotide
gacaggacucgaggagaaa

SEQ ID NO: 850732 - RNA, 19 nt, Artificial Sequence
  Description of Artificial Sequence: Synthetic oligonucleotide
gccagcucacuuccccggc

SEQ ID NO: 850733 - RNA, 19 nt, Artificial Sequence
  Description of Artificial Sequence: Synthetic oligonucleotide
ggaccaggcccaaggcugc

SEQ ID NO: 850734 - RNA, 19 nt, Artificial Sequence
  Description of Artificial Sequence: Synthetic oligonucleotide
cagaggccacggugcgaag

SEQ ID NO: 850735 - RNA, 19 nt, Artificial Sequence
  Description of Artificial Sequence: Synthetic oligonucleotide
guccccggcucuggggucc

SEQ ID NO: 850736 - RNA, 19 nt, Artificial Sequence
  Description of Artificial Sequence: Synthetic oligonucleotide
cuucuagaccaaguucccu

SEQ ID NO: 850737 - RNA, 19 nt, Artificial Sequence
  Description of Artificial Sequence: Synthetic oligonucleotide
gagcuacugaguagcgggu

SEQ ID NO: 850738 - RNA, 19 nt, Artificial Sequence
  Description of Artificial Sequence: Synthetic oligonucleotide
ccggcgccgggcaugaauc

SEQ ID NO: 850739 - RNA, 19 nt, Artificial Sequence
  Description of Artificial Sequence: Synthetic oligonucleotide
ucgaucccacuguccccau

SEQ ID NO: 850740 - RNA, 19 nt, Artificial Sequence
  Description of Artificial Sequence: Synthetic oligonucleotide
cagguuacgcagagcuacu

SEQ ID NO: 850741 - RNA, 19 nt, Artificial Sequence
  Description of Artificial Sequence: Synthetic oligonucleotide
ccuccugaaagaagggacu

SEQ ID NO: 850742 - RNA, 19 nt, Artificial Sequence
  Description of Artificial Sequence: Synthetic oligonucleotide
aucugcucgcugaucuguu

SEQ ID NO: 850743 - RNA, 19 nt, Artificial Sequence
  Description of Artificial Sequence: Synthetic oligonucleotide
gccgcauugauaacagggu

SEQ ID NO: 850744 - RNA, 19 nt, Artificial Sequence
  Description of Artificial Sequence: Synthetic oligonucleotide
gcucacaggcaagcuagga

SEQ ID NO: 850745 - RNA, 19 nt, Artificial Sequence
  Description of Artificial Sequence: Synthetic oligonucleotide
caagugccaggaggggaca

SEQ ID NO: 850746 - RNA, 19 nt, Artificial Sequence
  Description of Artificial Sequence: Synthetic oligonucleotide
guccguaucugggccugga

SEQ ID NO: 850747 - RNA, 19 nt, Artificial Sequence
  Description of Artificial Sequence: Synthetic oligonucleotide
ccuaaucgccgcauugaua

SEQ ID NO: 850748 - RNA, 19 nt, Artificial Sequence
  Description of Artificial Sequence: Synthetic oligonucleotide
gaagagcgauagagagcaa

SEQ ID NO: 850749 - RNA, 19 nt, Artificial Sequence
  Description of Artificial Sequence: Synthetic oligonucleotide
agaucccauuugagacaug

SEQ ID NO: 850750 - RNA, 19 nt, Artificial Sequence
  Description of Artificial Sequence: Synthetic oligonucleotide
guguucucaugugaccuuu

SEQ ID NO: 850751 - RNA, 19 nt, Artificial Sequence
  Description of Artificial Sequence: Synthetic oligonucleotide
cgucggagggucuuuugca

SEQ ID NO: 850752 - RNA, 19 nt, Artificial Sequence
  Description of Artificial Sequence: Synthetic oligonucleotide
gggucggcucuugccaaug

SEQ ID NO: 850753 - RNA, 19 nt, Artificial Sequence
  Description of Artificial Sequence: Synthetic oligonucleotide
cccgcucgccucgaagacg

SEQ ID NO: 850754 - RNA, 19 nt, Artificial Sequence
  Description of Artificial Sequence: Synthetic oligonucleotide
ccgggucacacgcugaugu

SEQ ID NO: 850755 - RNA, 19 nt, Artificial Sequence
  Description of Artificial Sequence: Synthetic oligonucleotide
gaccauccucaaaccugaa

SEQ ID NO: 850756 - RNA, 19 nt, Artificial Sequence
  Description of Artificial Sequence: Synthetic oligonucleotide
uggcccgucggagggucuu

SEQ ID NO: 850757 - RNA, 19 nt, Artificial Sequence
  Description of Artificial Sequence: Synthetic oligonucleotide
cucuauccuccagcauaga

SEQ ID NO: 850758 - RNA, 19 nt, Artificial Sequence
  Description of Artificial Sequence: Synthetic oligonucleotide
gccccuucgaucccacugu

SEQ ID NO: 850759 - RNA, 19 nt, Artificial Sequence
  Description of Artificial Sequence: Synthetic oligonucleotide
caggggccauuuggaguug

SEQ ID NO: 850760 - RNA, 19 nt, Artificial Sequence
  Description of Artificial Sequence: Synthetic oligonucleotide
cagcucacuuccccggcgu

SEQ ID NO: 850761 - RNA, 19 nt, Artificial Sequence
  Description of Artificial Sequence: Synthetic oligonucleotide
ggccagagcgcaagccuuc

SEQ ID NO: 850762 - RNA, 19 nt, Artificial Sequence
  Description of Artificial Sequence: Synthetic oligonucleotide
gcucgccucgaagacgcuc

SEQ ID NO: 850763 - RNA, 19 nt, Artificial Sequence
  Description of Artificial Sequence: Synthetic oligonucleotide
agaucgccgcgagcccaga

SEQ ID NO: 850764 - RNA, 19 nt, Artificial Sequence
  Description of Artificial Sequence: Synthetic oligonucleotide
cccgucggagggucuuuug

SEQ ID NO: 850765 - RNA, 19 nt, Artificial Sequence
  Description of Artificial Sequence: Synthetic oligonucleotide
gcucuuggccauccagacu

SEQ ID NO: 850766 - RNA, 19 nt, Artificial Sequence
  Description of Artificial Sequence: Synthetic oligonucleotide
auguucccgcucgccucga

SEQ ID NO: 850767 - RNA, 19 nt, Artificial Sequence
  Description of Artificial Sequence: Synthetic oligonucleotide
ggcaagccccggcgccggg

SEQ ID NO: 850768 - RNA, 19 nt, Artificial Sequence
  Description of Artificial Sequence: Synthetic oligonucleotide
accccucacuucaggucaa

SEQ ID NO: 850769 - RNA, 19 nt, Artificial Sequence
  Description of Artificial Sequence: Synthetic oligonucleotide
gcgcaagccuucugggugu

SEQ ID NO: 850770 - RNA, 19 nt, Artificial Sequence
  Description of Artificial Sequence: Synthetic oligonucleotide
ccccuucgaucccacuguc

SEQ ID NO: 850771 - RNA, 19 nt, Artificial Sequence
  Description of Artificial Sequence: Synthetic oligonucleotide
cgggacucagcagcauacc

SEQ ID NO: 850772 - RNA, 19 nt, Artificial Sequence
  Description of Artificial Sequence: Synthetic oligonucleotide
cuacugaguagcgggucuu

SEQ ID NO: 850773 - RNA, 19 nt, Artificial Sequence
  Description of Artificial Sequence: Synthetic oligonucleotide
cucccaccccugggugagc

SEQ ID NO: 850774 - RNA, 19 nt, Artificial Sequence
  Description of Artificial Sequence: Synthetic oligonucleotide
agggagcuacuagcaccuu

SEQ ID NO: 850775 - RNA, 19 nt, Artificial Sequence
  Description of Artificial Sequence: Synthetic oligonucleotide
ccccaccugacacugaauu

SEQ ID NO: 850776 - RNA, 19 nt, Artificial Sequence
  Description of Artificial Sequence: Synthetic oligonucleotide
gccgggucacacgcugaug

SEQ ID NO: 850777 - RNA, 19 nt, Artificial Sequence
  Description of Artificial Sequence: Synthetic oligonucleotide
cacagccgggucacacgcu

SEQ ID NO: 850778 - RNA, 19 nt, Artificial Sequence
  Description of Artificial Sequence: Synthetic oligonucleotide
gcucuugccaauggcccgu

SEQ ID NO: 850779 - RNA, 19 nt, Artificial Sequence
  Description of Artificial Sequence: Synthetic oligonucleotide
ccgcgagcccagaggauga

SEQ ID NO: 850780 - RNA, 19 nt, Artificial Sequence
  Description of Artificial Sequence: Synthetic oligonucleotide
gccgggcaugaaucugcuc

SEQ ID NO: 850781 - RNA, 19 nt, Artificial Sequence
  Description of Artificial Sequence: Synthetic oligonucleotide
auggcccgucggagggucu

SEQ ID NO: 850782 - RNA, 19 nt, Artificial Sequence
  Description of Artificial Sequence: Synthetic oligonucleotide
gcucagcguguccguaucu

SEQ ID NO: 850783 - RNA, 19 nt, Artificial Sequence
  Description of Artificial Sequence: Synthetic oligonucleotide
cacggugcgaaggcuuaau

SEQ ID NO: 850784 - RNA, 19 nt, Artificial Sequence
  Description of Artificial Sequence: Synthetic oligonucleotide
guagcgggucuuggccugu

SEQ ID NO: 850785 - RNA, 19 nt, Artificial Sequence
  Description of Artificial Sequence: Synthetic oligonucleotide
ccacccucugccccuucga

SEQ ID NO: 850786 - RNA, 19 nt, Artificial Sequence
  Description of Artificial Sequence: Synthetic oligonucleotide
ccccauccucaaugccuuc

SEQ ID NO: 850787 - RNA, 19 nt, Artificial Sequence
  Description of Artificial Sequence: Synthetic oligonucleotide
gggugagcacucuccccau

SEQ ID NO: 850788 - RNA, 19 nt, Artificial Sequence
  Description of Artificial Sequence: Synthetic oligonucleotide
ggggcccugauugcccaua

SEQ ID NO: 850789 - RNA, 19 nt, Artificial Sequence
  Description of Artificial Sequence: Synthetic oligonucleotide
ccagacuggcaugguccga

SEQ ID NO: 850790 - RNA, 19 nt, Artificial Sequence
  Description of Artificial Sequence: Synthetic oligonucleotide
cguguccguaucugggccu

SEQ ID NO: 850791 - RNA, 19 nt, Artificial Sequence
  Description of Artificial Sequence: Synthetic oligonucleotide
gccagagcgcaagccuucu

SEQ ID NO: 850792 - RNA, 19 nt, Artificial Sequence
  Description of Artificial Sequence: Synthetic oligonucleotide
ggccacggugcgaaggcuu

SEQ ID NO: 850793 - RNA, 19 nt, Artificial Sequence
  Description of Artificial Sequence: Synthetic oligonucleotide
agaccccaucagggagcua

SEQ ID NO: 850794 - RNA, 19 nt, Artificial Sequence
  Description of Artificial Sequence: Synthetic oligonucleotide
cgcgagcccagaggaugag

SEQ ID NO: 850795 - RNA, 19 nt, Artificial Sequence
  Description of Artificial Sequence: Synthetic oligonucleotide
cccucacuucaggucaacu

SEQ ID NO: 850796 - RNA, 19 nt, Artificial Sequence
  Description of Artificial Sequence: Synthetic oligonucleotide
cccggcguccccggcucug

SEQ ID NO: 850797 - RNA, 19 nt, Artificial Sequence
  Description of Artificial Sequence: Synthetic oligonucleotide
ccacggugcgaaggcuuaa

SEQ ID NO: 850798 - RNA, 19 nt, Artificial Sequence
  Description of Artificial Sequence: Synthetic oligonucleotide
cccggcgccgggcaugaau

SEQ ID NO: 850799 - RNA, 19 nt, Artificial Sequence
  Description of Artificial Sequence: Synthetic oligonucleotide
gcgcuucccagagguuccu

SEQ ID NO: 850800 - RNA, 19 nt, Artificial Sequence
  Description of Artificial Sequence: Synthetic oligonucleotide
cgggucacacgcugauguu

SEQ ID NO: 850801 - RNA, 19 nt, Artificial Sequence
  Description of Artificial Sequence: Synthetic oligonucleotide
gcccgucggagggucuuuu

SEQ ID NO: 850802 - RNA, 19 nt, Artificial Sequence
  Description of Artificial Sequence: Synthetic oligonucleotide
cggcgccgggcaugaaucu

SEQ ID NO: 850803 - RNA, 19 nt, Artificial Sequence
  Description of Artificial Sequence: Synthetic oligonucleotide
ggcccgucggagggucuuu

SEQ ID NO: 850804 - RNA, 19 nt, Artificial Sequence
  Description of Artificial Sequence: Synthetic oligonucleotide
cgccgcgagcccagaggau

SEQ ID NO: 850805 - RNA, 19 nt, Artificial Sequence
  Description of Artificial Sequence: Synthetic oligonucleotide
cgcucgccucgaagacgcu

SEQ ID NO: 850806 - RNA, 19 nt, Artificial Sequence
  Description of Artificial Sequence: Synthetic oligonucleotide
uugaguuucaaauucaggg

SEQ ID NO: 850807 - RNA, 19 nt, Artificial Sequence
  Description of Artificial Sequence: Synthetic oligonucleotide
uuuggguucaaaccuaggg

SEQ ID NO: 850808 - RNA, 19 nt, Artificial Sequence
  Description of Artificial Sequence: Synthetic oligonucleotide
agagcuaucagcgaaggcc

SEQ ID NO: 850809 - RNA, 19 nt, Artificial Sequence
  Description of Artificial Sequence: Synthetic oligonucleotide
aaacucgggacucuguggg

SEQ ID NO: 850810 - RNA, 19 nt, Artificial Sequence
  Description of Artificial Sequence: Synthetic oligonucleotide
gacucugggauucauaccc

SEQ ID NO: 850811 - RNA, 19 nt, Artificial Sequence
  Description of Artificial Sequence: Synthetic oligonucleotide
cuucgaaccauauccaggg

SEQ ID NO: 850812 - RNA, 19 nt, Artificial Sequence
  Description of Artificial Sequence: Synthetic oligonucleotide
uguaagugcggccuggcag

SEQ ID NO: 850813 - RNA, 19 nt, Artificial Sequence
  Description of Artificial Sequence: Synthetic oligonucleotide
ucgagauucaaacccuggg

SEQ ID NO: 850814 - RNA, 19 nt, Artificial Sequence
  Description of Artificial Sequence: Synthetic oligonucleotide
aguaaaggaguccagggga

SEQ ID NO: 850815 - RNA, 19 nt, Artificial Sequence
  Description of Artificial Sequence: Synthetic oligonucleotide
uaaggggauacucagugga

SEQ ID NO: 850816 - RNA, 19 nt, Artificial Sequence
  Description of Artificial Sequence: Synthetic oligonucleotide
gacucugugggucugauuc

SEQ ID NO: 850817 - RNA, 19 nt, Artificial Sequence
  Description of Artificial Sequence: Synthetic oligonucleotide
auaccuaggacucugggau

SEQ ID NO: 850818 - RNA, 19 nt, Artificial Sequence
  Description of Artificial Sequence: Synthetic oligonucleotide
agugcggccuggcagaugg

SEQ ID NO: 850819 - RNA, 19 nt, Artificial Sequence
  Description of Artificial Sequence: Synthetic oligonucleotide
aaacccagggcuucgagau

SEQ ID NO: 850820 - RNA, 19 nt, Artificial Sequence
  Description of Artificial Sequence: Synthetic oligonucleotide
aagagcuaucagcgaaggc

SEQ ID NO: 850821 - RNA, 19 nt, Artificial Sequence
  Description of Artificial Sequence: Synthetic oligonucleotide
cuuuucacgggcauggcug

SEQ ID NO: 850822 - RNA, 19 nt, Artificial Sequence
  Description of Artificial Sequence: Synthetic oligonucleotide
uggguucaaaccuagggcu

SEQ ID NO: 850823 - RNA, 19 nt, Artificial Sequence
  Description of Artificial Sequence: Synthetic oligonucleotide
ucaaaccuagggcugccgg

SEQ ID NO: 850824 - RNA, 19 nt, Artificial Sequence
  Description of Artificial Sequence: Synthetic oligonucleotide
ugucgaaguagguaagagc

SEQ ID NO: 850825 - RNA, 19 nt, Artificial Sequence
  Description of Artificial Sequence: Synthetic oligonucleotide
acgaguucuggcuauagca

SEQ ID NO: 850826 - RNA, 19 nt, Artificial Sequence
  Description of Artificial Sequence: Synthetic oligonucleotide
uagaauauuccauccuucu

SEQ ID NO: 850827 - RNA, 19 nt, Artificial Sequence
  Description of Artificial Sequence: Synthetic oligonucleotide
uucgagauucaaacccugg

SEQ ID NO: 850828 - RNA, 19 nt, Artificial Sequence
  Description of Artificial Sequence: Synthetic oligonucleotide
aacuccuaaggggauacuc

SEQ ID NO: 850829 - RNA, 19 nt, Artificial Sequence
  Description of Artificial Sequence: Synthetic oligonucleotide
ucaggguagagccucgccc

SEQ ID NO: 850830 - RNA, 19 nt, Artificial Sequence
  Description of Artificial Sequence: Synthetic oligonucleotide
gucaggaccgugcacaucc

SEQ ID NO: 850831 - RNA, 19 nt, Artificial Sequence
  Description of Artificial Sequence: Synthetic oligonucleotide
ugauucaggacuucugggu

SEQ ID NO: 850832 - RNA, 19 nt, Artificial Sequence
  Description of Artificial Sequence: Synthetic oligonucleotide
auacccgggacuuugagau

SEQ ID NO: 850833 - RNA, 19 nt, Artificial Sequence
  Description of Artificial Sequence: Synthetic oligonucleotide
agcgacagaagcccuugcc

SEQ ID NO: 850834 - RNA, 19 nt, Artificial Sequence
  Description of Artificial Sequence: Synthetic oligonucleotide
guaggcauaucaaauggag

SEQ ID NO: 850835 - RNA, 19 nt, Artificial Sequence
  Description of Artificial Sequence: Synthetic oligonucleotide
cuugccacgaccuggggac

SEQ ID NO: 850836 - RNA, 19 nt, Artificial Sequence
  Description of Artificial Sequence: Synthetic oligonucleotide
ucgaaccauauccagggcu

SEQ ID NO: 850837 - RNA, 19 nt, Artificial Sequence
  Description of Artificial Sequence: Synthetic oligonucleotide
auggcuagaaccgagcucu

SEQ ID NO: 850838 - RNA, 19 nt, Artificial Sequence
  Description of Artificial Sequence: Synthetic oligonucleotide
gaaugaguguggaggagcg

SEQ ID NO: 850839 - RNA, 19 nt, Artificial Sequence
  Description of Artificial Sequence: Synthetic oligonucleotide
uauggguuuugaacucagg

SEQ ID NO: 850840 - RNA, 19 nt, Artificial Sequence
  Description of Artificial Sequence: Synthetic oligonucleotide
ucgcccaaagcucuucccg

SEQ ID NO: 850841 - RNA, 19 nt, Artificial Sequence
  Description of Artificial Sequence: Synthetic oligonucleotide
cuucuugagggcaugugac

SEQ ID NO: 850842 - RNA, 19 nt, Artificial Sequence
  Description of Artificial Sequence: Synthetic oligonucleotide
cuagaauauuccauccuuc

SEQ ID NO: 850843 - RNA, 19 nt, Artificial Sequence
  Description of Artificial Sequence: Synthetic oligonucleotide
ggcauggauggcuagaacc

SEQ ID NO: 850844 - RNA, 19 nt, Artificial Sequence
  Description of Artificial Sequence: Synthetic oligonucleotide
ggcuucgagauucaaaccc

SEQ ID NO: 850845 - RNA, 19 nt, Artificial Sequence
  Description of Artificial Sequence: Synthetic oligonucleotide
ggaacuuugaguuucaaau

SEQ ID NO: 850846 - RNA, 19 nt, Artificial Sequence
  Description of Artificial Sequence: Synthetic oligonucleotide
cauuccgucaggaccgugc

SEQ ID NO: 850847 - RNA, 19 nt, Artificial Sequence
  Description of Artificial Sequence: Synthetic oligonucleotide
cuaaggggauacucagugg

SEQ ID NO: 850848 - RNA, 19 nt, Artificial Sequence
  Description of Artificial Sequence: Synthetic oligonucleotide
cuagaaccgagcucuggcc

SEQ ID NO: 850849 - RNA, 19 nt, Artificial Sequence
  Description of Artificial Sequence: Synthetic oligonucleotide
uagaaccgagcucuggcca

SEQ ID NO: 850850 - RNA, 19 nt, Artificial Sequence
  Description of Artificial Sequence: Synthetic oligonucleotide
ugagagacccuucggggcu

SEQ ID NO: 850851 - RNA, 19 nt, Artificial Sequence
  Description of Artificial Sequence: Synthetic oligonucleotide
uguggguugcuccccaaac

SEQ ID NO: 850852 - RNA, 19 nt, Artificial Sequence
  Description of Artificial Sequence: Synthetic oligonucleotide
cuccuaaggggauacucag

SEQ ID NO: 850853 - RNA, 19 nt, Artificial Sequence
  Description of Artificial Sequence: Synthetic oligonucleotide
caacccagcucgaagugcc

SEQ ID NO: 850854 - RNA, 19 nt, Artificial Sequence
  Description of Artificial Sequence: Synthetic oligonucleotide
agaugccgcagcugaaagg

SEQ ID NO: 850855 - RNA, 19 nt, Artificial Sequence
  Description of Artificial Sequence: Synthetic oligonucleotide
ugggauucauacccgggac

SEQ ID NO: 850856 - RNA, 19 nt, Artificial Sequence
  Description of Artificial Sequence: Synthetic oligonucleotide
uuuucacgggcauggcugc

SEQ ID NO: 850857 - RNA, 19 nt, Artificial Sequence
  Description of Artificial Sequence: Synthetic oligonucleotide
agaguggguacgcuggugu

SEQ ID NO: 850858 - RNA, 19 nt, Artificial Sequence
  Description of Artificial Sequence: Synthetic oligonucleotide
gagauucaaacccugggcu

SEQ ID NO: 850859 - RNA, 19 nt, Artificial Sequence
  Description of Artificial Sequence: Synthetic oligonucleotide
caaaccuagggcugccggg

SEQ ID NO: 850860 - RNA, 19 nt, Artificial Sequence
  Description of Artificial Sequence: Synthetic oligonucleotide
ucauacccgggacuuugag

SEQ ID NO: 850861 - RNA, 19 nt, Artificial Sequence
  Description of Artificial Sequence: Synthetic oligonucleotide
uacgcuggugucgaaguag

SEQ ID NO: 850862 - RNA, 19 nt, Artificial Sequence
  Description of Artificial Sequence: Synthetic oligonucleotide
uggauggcuagaaccgagc

SEQ ID NO: 850863 - RNA, 19 nt, Artificial Sequence
  Description of Artificial Sequence: Synthetic oligonucleotide
accuccccacccuugacuc

SEQ ID NO: 850864 - RNA, 19 nt, Artificial Sequence
  Description of Artificial Sequence: Synthetic oligonucleotide
ugaacuccuaaggggauac

SEQ ID NO: 850865 - RNA, 19 nt, Artificial Sequence
  Description of Artificial Sequence: Synthetic oligonucleotide
acuuugagauucaaauucu

SEQ ID NO: 850866 - RNA, 19 nt, Artificial Sequence
  Description of Artificial Sequence: Synthetic oligonucleotide
gacgaguucuggcuauagc

SEQ ID NO: 850867 - RNA, 19 nt, Artificial Sequence
  Description of Artificial Sequence: Synthetic oligonucleotide
ugcaacccagcucgaagug

SEQ ID NO: 850868 - RNA, 19 nt, Artificial Sequence
  Description of Artificial Sequence: Synthetic oligonucleotide
cacgcgauggugcugcagc

SEQ ID NO: 850869 - RNA, 19 nt, Artificial Sequence
  Description of Artificial Sequence: Synthetic oligonucleotide
aacgauccugcaacccagc

SEQ ID NO: 850870 - RNA, 19 nt, Artificial Sequence
  Description of Artificial Sequence: Synthetic oligonucleotide
accuaggacucugggauac

SEQ ID NO: 850871 - RNA, 19 nt, Artificial Sequence
  Description of Artificial Sequence: Synthetic oligonucleotide
gauucaaauucugggaucu

SEQ ID NO: 850872 - RNA, 19 nt, Artificial Sequence
  Description of Artificial Sequence: Synthetic oligonucleotide
gaacgauccugcaacccag

SEQ ID NO: 850873 - RNA, 19 nt, Artificial Sequence
  Description of Artificial Sequence: Synthetic oligonucleotide
gagauucaaauucugggau

SEQ ID NO: 850874 - RNA, 19 nt, Artificial Sequence
  Description of Artificial Sequence: Synthetic oligonucleotide
gauggcuagaaccgagcuc

SEQ ID NO: 850875 - RNA, 19 nt, Artificial Sequence
  Description of Artificial Sequence: Synthetic oligonucleotide
aaccccugaguaaaggagu

SEQ ID NO: 850876 - RNA, 19 nt, Artificial Sequence
  Description of Artificial Sequence: Synthetic oligonucleotide
uggugucgaaguagguaag

SEQ ID NO: 850877 - RNA, 19 nt, Artificial Sequence
  Description of Artificial Sequence: Synthetic oligonucleotide
cucugggauucauacccgg

SEQ ID NO: 850878 - RNA, 19 nt, Artificial Sequence
  Description of Artificial Sequence: Synthetic oligonucleotide
uguagggccgcucguggcu

SEQ ID NO: 850879 - RNA, 19 nt, Artificial Sequence
  Description of Artificial Sequence: Synthetic oligonucleotide
uagcccacuucucauacuu

SEQ ID NO: 850880 - RNA, 19 nt, Artificial Sequence
  Description of Artificial Sequence: Synthetic oligonucleotide
cuucgagauucaaacccug

SEQ ID NO: 850881 - RNA, 19 nt, Artificial Sequence
  Description of Artificial Sequence: Synthetic oligonucleotide
accgguaugggaugcgcug

SEQ ID NO: 850882 - RNA, 19 nt, Artificial Sequence
  Description of Artificial Sequence: Synthetic oligonucleotide
uugagggcaugugacuucc

SEQ ID NO: 850883 - RNA, 19 nt, Artificial Sequence
  Description of Artificial Sequence: Synthetic oligonucleotide
acccugacccaucuucuag

SEQ ID NO: 850884 - RNA, 19 nt, Artificial Sequence
  Description of Artificial Sequence: Synthetic oligonucleotide
acccgggacuuugagauuc

SEQ ID NO: 850885 - RNA, 19 nt, Artificial Sequence
  Description of Artificial Sequence: Synthetic oligonucleotide
ccuaaggggauacucagug

SEQ ID NO: 850886 - RNA, 19 nt, Artificial Sequence
  Description of Artificial Sequence: Synthetic oligonucleotide
accgugcacauccccgggc

SEQ ID NO: 850887 - RNA, 19 nt, Artificial Sequence
  Description of Artificial Sequence: Synthetic oligonucleotide
gguaagagcuaucagcgaa

SEQ ID NO: 850888 - RNA, 19 nt, Artificial Sequence
  Description of Artificial Sequence: Synthetic oligonucleotide
guaagugcggccuggcaga

SEQ ID NO: 850889 - RNA, 19 nt, Artificial Sequence
  Description of Artificial Sequence: Synthetic oligonucleotide
augaguguggaggagcggu

SEQ ID NO: 850890 - RNA, 19 nt, Artificial Sequence
  Description of Artificial Sequence: Synthetic oligonucleotide
ucacgggcauggcugcggg

SEQ ID NO: 850891 - RNA, 19 nt, Artificial Sequence
  Description of Artificial Sequence: Synthetic oligonucleotide
cuggagcaucucaaacugg

SEQ ID NO: 850892 - RNA, 19 nt, Artificial Sequence
  Description of Artificial Sequence: Synthetic oligonucleotide
ggcggaacgauccugcaac

SEQ ID NO: 850893 - RNA, 19 nt, Artificial Sequence
  Description of Artificial Sequence: Synthetic oligonucleotide
guggguugcuccccaaacc

SEQ ID NO: 850894 - RNA, 19 nt, Artificial Sequence
  Description of Artificial Sequence: Synthetic oligonucleotide
uucaaaccuagggcugccg

SEQ ID NO: 850895 - RNA, 19 nt, Artificial Sequence
  Description of Artificial Sequence: Synthetic oligonucleotide
ugcaaccccucuucguagc

SEQ ID NO: 850896 - RNA, 19 nt, Artificial Sequence
  Description of Artificial Sequence: Synthetic oligonucleotide
gcuagaaccgagcucuggc

SEQ ID NO: 850897 - RNA, 19 nt, Artificial Sequence
  Description of Artificial Sequence: Synthetic oligonucleotide
uccuaaggggauacucagu

SEQ ID NO: 850898 - RNA, 19 nt, Artificial Sequence
  Description of Artificial Sequence: Synthetic oligonucleotide
acgaccuggggacacuugu

SEQ ID NO: 850899 - RNA, 19 nt, Artificial Sequence
  Description of Artificial Sequence: Synthetic oligonucleotide
cacccuugacucgucagcg

SEQ ID NO: 850900 - RNA, 19 nt, Artificial Sequence
  Description of Artificial Sequence: Synthetic oligonucleotide
auuccgucaggaccgugca

SEQ ID NO: 850901 - RNA, 19 nt, Artificial Sequence
  Description of Artificial Sequence: Synthetic oligonucleotide
cucugggauucaaacccag

SEQ ID NO: 850902 - RNA, 19 nt, Artificial Sequence
  Description of Artificial Sequence: Synthetic oligonucleotide
agucggggcagcuguaagu

SEQ ID NO: 850903 - RNA, 19 nt, Artificial Sequence
  Description of Artificial Sequence: Synthetic oligonucleotide
cuaucagcgaaggccuugc

SEQ ID NO: 850904 - RNA, 19 nt, Artificial Sequence
  Description of Artificial Sequence: Synthetic oligonucleotide
cucuggggcccauaccuag

SEQ ID NO: 850905 - RNA, 19 nt, Artificial Sequence
  Description of Artificial Sequence: Synthetic oligonucleotide
uucacgggcauggcugcgg

SEQ ID NO: 850906 - RNA, 19 nt, Artificial Sequence
  Description of Artificial Sequence: Synthetic oligonucleotide
cuugacucgucagcggcgc

SEQ ID NO: 850907 - RNA, 19 nt, Artificial Sequence
  Description of Artificial Sequence: Synthetic oligonucleotide
acuccuaaggggauacuca

SEQ ID NO: 850908 - RNA, 19 nt, Artificial Sequence
  Description of Artificial Sequence: Synthetic oligonucleotide
agagacgaguucuggcuau

SEQ ID NO: 850909 - RNA, 19 nt, Artificial Sequence
  Description of Artificial Sequence: Synthetic oligonucleotide
cagaugccgcagcugaaag

SEQ ID NO: 850910 - RNA, 19 nt, Artificial Sequence
  Description of Artificial Sequence: Synthetic oligonucleotide
aacucgggacucugugggu

SEQ ID NO: 850911 - RNA, 19 nt, Artificial Sequence
  Description of Artificial Sequence: Synthetic oligonucleotide
acccuugacucgucagcgg

SEQ ID NO: 850912 - RNA, 19 nt, Artificial Sequence
  Description of Artificial Sequence: Synthetic oligonucleotide
aggcucaaaccugggacuc

SEQ ID NO: 850913 - RNA, 19 nt, Artificial Sequence
  Description of Artificial Sequence: Synthetic oligonucleotide
cugcaaccccucuucguag

SEQ ID NO: 850914 - RNA, 19 nt, Artificial Sequence
  Description of Artificial Sequence: Synthetic oligonucleotide
ugcgccuuccuggaauuug

SEQ ID NO: 850915 - RNA, 19 nt, Artificial Sequence
  Description of Artificial Sequence: Synthetic oligonucleotide
gguacgcugguguuugaug

SEQ ID NO: 850916 - RNA, 19 nt, Artificial Sequence
  Description of Artificial Sequence: Synthetic oligonucleotide
ggaacgauccugcaaccca

SEQ ID NO: 850917 - RNA, 19 nt, Artificial Sequence
  Description of Artificial Sequence: Synthetic oligonucleotide
auacaaacucgggacucug

SEQ ID NO: 850918 - RNA, 19 nt, Artificial Sequence
  Description of Artificial Sequence: Synthetic oligonucleotide
gacggcggaacgauccugc

SEQ ID NO: 850919 - RNA, 19 nt, Artificial Sequence
  Description of Artificial Sequence: Synthetic oligonucleotide
ggcucgaggccccacgacg

SEQ ID NO: 850920 - RNA, 19 nt, Artificial Sequence
  Description of Artificial Sequence: Synthetic oligonucleotide
cugggauucauacccggga

SEQ ID NO: 850921 - RNA, 19 nt, Artificial Sequence
  Description of Artificial Sequence: Synthetic oligonucleotide
gaccgugcacauccccggg

SEQ ID NO: 850922 - RNA, 19 nt, Artificial Sequence
  Description of Artificial Sequence: Synthetic oligonucleotide
caacuuugagagacccuuc

SEQ ID NO: 850923 - RNA, 19 nt, Artificial Sequence
  Description of Artificial Sequence: Synthetic oligonucleotide
cacuaugcacgcgauggug

SEQ ID NO: 850924 - RNA, 19 nt, Artificial Sequence
  Description of Artificial Sequence: Synthetic oligonucleotide
accuagggcugccggguuc

SEQ ID NO: 850925 - RNA, 19 nt, Artificial Sequence
  Description of Artificial Sequence: Synthetic oligonucleotide
gucggggcagcuguaagug

SEQ ID NO: 850926 - RNA, 19 nt, Artificial Sequence
  Description of Artificial Sequence: Synthetic oligonucleotide
ugacucgucagcggcgccc

SEQ ID NO: 850927 - RNA, 19 nt, Artificial Sequence
  Description of Artificial Sequence: Synthetic oligonucleotide
ugggucugauucaggacuu

SEQ ID NO: 850928 - RNA, 19 nt, Artificial Sequence
  Description of Artificial Sequence: Synthetic oligonucleotide
cucgcccaaagcucuuccc

SEQ ID NO: 850929 - RNA, 19 nt, Artificial Sequence
  Description of Artificial Sequence: Synthetic oligonucleotide
cauacccgggacuuugaga

SEQ ID NO: 850930 - RNA, 19 nt, Artificial Sequence
  Description of Artificial Sequence: Synthetic oligonucleotide
agaaccgagcucuggccaa

SEQ ID NO: 850931 - RNA, 19 nt, Artificial Sequence
  Description of Artificial Sequence: Synthetic oligonucleotide
cgagauucaaacccugggc

SEQ ID NO: 850932 - RNA, 19 nt, Artificial Sequence
  Description of Artificial Sequence: Synthetic oligonucleotide
cugaaugaguguggaggag

SEQ ID NO: 850933 - RNA, 19 nt, Artificial Sequence
  Description of Artificial Sequence: Synthetic oligonucleotide
gggauucaaacccagggcu

SEQ ID NO: 850934 - RNA, 19 nt, Artificial Sequence
  Description of Artificial Sequence: Synthetic oligonucleotide
agcgcuugccgcauuccgg

SEQ ID NO: 850935 - RNA, 19 nt, Artificial Sequence
  Description of Artificial Sequence: Synthetic oligonucleotide
gacucgucagcggcgcccg

SEQ ID NO: 850936 - RNA, 19 nt, Artificial Sequence
  Description of Artificial Sequence: Synthetic oligonucleotide
gcccauuccgucaggaccg

SEQ ID NO: 850937 - RNA, 19 nt, Artificial Sequence
  Description of Artificial Sequence: Synthetic oligonucleotide
ggaccgugcacauccccgg

SEQ ID NO: 850938 - RNA, 19 nt, Artificial Sequence
  Description of Artificial Sequence: Synthetic oligonucleotide
uuucacgggcauggcugcg

SEQ ID NO: 850939 - RNA, 19 nt, Artificial Sequence
  Description of Artificial Sequence: Synthetic oligonucleotide
ggggauacucaguggauuc

SEQ ID NO: 850940 - RNA, 19 nt, Artificial Sequence
  Description of Artificial Sequence: Synthetic oligonucleotide
ucgaggccccacgacgacg

SEQ ID NO: 850941 - RNA, 19 nt, Artificial Sequence
  Description of Artificial Sequence: Synthetic oligonucleotide
agacgaguucuggcuauag

SEQ ID NO: 850942 - RNA, 19 nt, Artificial Sequence
  Description of Artificial Sequence: Synthetic oligonucleotide
uucaaacccagggcuuugu

SEQ ID NO: 850943 - RNA, 19 nt, Artificial Sequence
  Description of Artificial Sequence: Synthetic oligonucleotide
gguucaaaccuagggcugc

SEQ ID NO: 850944 - RNA, 19 nt, Artificial Sequence
  Description of Artificial Sequence: Synthetic oligonucleotide
ugaguguggaggagcgguu

SEQ ID NO: 850945 - RNA, 19 nt, Artificial Sequence
  Description of Artificial Sequence: Synthetic oligonucleotide
ugucgccaaaggccuuccc

SEQ ID NO: 850946 - RNA, 19 nt, Artificial Sequence
  Description of Artificial Sequence: Synthetic oligonucleotide
auagcacuugccacacucu

SEQ ID NO: 850947 - RNA, 19 nt, Artificial Sequence
  Description of Artificial Sequence: Synthetic oligonucleotide
aggucagagcucugggaaa

SEQ ID NO: 850948 - RNA, 19 nt, Artificial Sequence
  Description of Artificial Sequence: Synthetic oligonucleotide
gcgcuugccgcauuccggg

SEQ ID NO: 850949 - RNA, 19 nt, Artificial Sequence
  Description of Artificial Sequence: Synthetic oligonucleotide
uaaggucgcuccccacuau

SEQ ID NO: 850950 - RNA, 19 nt, Artificial Sequence
  Description of Artificial Sequence: Synthetic oligonucleotide
uaugcacgcgauggugcug

SEQ ID NO: 850951 - RNA, 19 nt, Artificial Sequence
  Description of Artificial Sequence: Synthetic oligonucleotide
uugacucgucagcggcgcc

SEQ ID NO: 850952 - RNA, 19 nt, Artificial Sequence
  Description of Artificial Sequence: Synthetic oligonucleotide
gggcuauggguuuugaacu

SEQ ID NO: 850953 - RNA, 19 nt, Artificial Sequence
  Description of Artificial Sequence: Synthetic oligonucleotide
ucugcgccuuccuggaauu

SEQ ID NO: 850954 - RNA, 19 nt, Artificial Sequence
  Description of Artificial Sequence: Synthetic oligonucleotide
guucaaaccuagggcugcc

SEQ ID NO: 850955 - RNA, 19 nt, Artificial Sequence
  Description of Artificial Sequence: Synthetic oligonucleotide
ugcgggcauggauggcuag

SEQ ID NO: 850956 - RNA, 19 nt, Artificial Sequence
  Description of Artificial Sequence: Synthetic oligonucleotide
ccauaccuaggacucuggg

SEQ ID NO: 850957 - RNA, 19 nt, Artificial Sequence
  Description of Artificial Sequence: Synthetic oligonucleotide
ggcugccggguucauagcc

SEQ ID NO: 850958 - RNA, 19 nt, Artificial Sequence
  Description of Artificial Sequence: Synthetic oligonucleotide
gagcgacagaagcccuugc

SEQ ID NO: 850959 - RNA, 19 nt, Artificial Sequence
  Description of Artificial Sequence: Synthetic oligonucleotide
caggaccgugcacaucccc

SEQ ID NO: 850960 - RNA, 19 nt, Artificial Sequence
  Description of Artificial Sequence: Synthetic oligonucleotide
uggugccgggaggagguag

SEQ ID NO: 850961 - RNA, 19 nt, Artificial Sequence
  Description of Artificial Sequence: Synthetic oligonucleotide
gggcuucgagauucaaacc

SEQ ID NO: 850962 - RNA, 19 nt, Artificial Sequence
  Description of Artificial Sequence: Synthetic oligonucleotide
cacggaagggucccuguca

SEQ ID NO: 850963 - RNA, 19 nt, Artificial Sequence
  Description of Artificial Sequence: Synthetic oligonucleotide
ggcauaucaaauggaggca

SEQ ID NO: 850964 - RNA, 19 nt, Artificial Sequence
  Description of Artificial Sequence: Synthetic oligonucleotide
cauaucaaauggaggcagu

SEQ ID NO: 850965 - RNA, 19 nt, Artificial Sequence
  Description of Artificial Sequence: Synthetic oligonucleotide
aggggauacucaguggauu

SEQ ID NO: 850966 - RNA, 19 nt, Artificial Sequence
  Description of Artificial Sequence: Synthetic oligonucleotide
agagacccuucggggcugc

SEQ ID NO: 850967 - RNA, 19 nt, Artificial Sequence
  Description of Artificial Sequence: Synthetic oligonucleotide
acucugggauucaaaccca

SEQ ID NO: 850968 - RNA, 19 nt, Artificial Sequence
  Description of Artificial Sequence: Synthetic oligonucleotide
acgcgauggugcugcagca

SEQ ID NO: 850969 - RNA, 19 nt, Artificial Sequence
  Description of Artificial Sequence: Synthetic oligonucleotide
cccuugacucgucagcggc

SEQ ID NO: 850970 - RNA, 19 nt, Artificial Sequence
  Description of Artificial Sequence: Synthetic oligonucleotide
gccugcuuagccucccugc

SEQ ID NO: 850971 - RNA, 19 nt, Artificial Sequence
  Description of Artificial Sequence: Synthetic oligonucleotide
ccuacggccuggaccacgg

SEQ ID NO: 850972 - RNA, 19 nt, Artificial Sequence
  Description of Artificial Sequence: Synthetic oligonucleotide
ggcgacggcggaacgaucc

SEQ ID NO: 850973 - RNA, 19 nt, Artificial Sequence
  Description of Artificial Sequence: Synthetic oligonucleotide
ggccccuguaggcauauca

SEQ ID NO: 850974 - RNA, 19 nt, Artificial Sequence
  Description of Artificial Sequence: Synthetic oligonucleotide
ggggacacuuguagggccg

SEQ ID NO: 850975 - RNA, 19 nt, Artificial Sequence
  Description of Artificial Sequence: Synthetic oligonucleotide
cucaccgguaugggaugcg

SEQ ID NO: 850976 - RNA, 19 nt, Artificial Sequence
  Description of Artificial Sequence: Synthetic oligonucleotide
ucagggcuauggguuuuga

SEQ ID NO: 850977 - RNA, 19 nt, Artificial Sequence
  Description of Artificial Sequence: Synthetic oligonucleotide
aggucggagcucugugaga

SEQ ID NO: 850978 - RNA, 19 nt, Artificial Sequence
  Description of Artificial Sequence: Synthetic oligonucleotide
ggugcugaaugagugugga

SEQ ID NO: 850979 - RNA, 19 nt, Artificial Sequence
  Description of Artificial Sequence: Synthetic oligonucleotide
cauggauggcuagaaccga

SEQ ID NO: 850980 - RNA, 19 nt, Artificial Sequence
  Description of Artificial Sequence: Synthetic oligonucleotide
gauucaaacccagggcuuu

SEQ ID NO: 850981 - RNA, 19 nt, Artificial Sequence
  Description of Artificial Sequence: Synthetic oligonucleotide
agcgaaggccuugccacga

SEQ ID NO: 850982 - RNA, 19 nt, Artificial Sequence
  Description of Artificial Sequence: Synthetic oligonucleotide
ccgcucguggcuaugggug

SEQ ID NO: 850983 - RNA, 19 nt, Artificial Sequence
  Description of Artificial Sequence: Synthetic oligonucleotide
ggguucaaaccuagggcug

SEQ ID NO: 850984 - RNA, 19 nt, Artificial Sequence
  Description of Artificial Sequence: Synthetic oligonucleotide
gaccacggaagggucccug

SEQ ID NO: 850985 - RNA, 19 nt, Artificial Sequence
  Description of Artificial Sequence: Synthetic oligonucleotide
ggccagaguggguacgcug

SEQ ID NO: 850986 - RNA, 19 nt, Artificial Sequence
  Description of Artificial Sequence: Synthetic oligonucleotide
cccacgacgacgccucccg

SEQ ID NO: 850987 - RNA, 19 nt, Artificial Sequence
  Description of Artificial Sequence: Synthetic oligonucleotide
gugcaaacucagggcuugg

SEQ ID NO: 850988 - RNA, 19 nt, Artificial Sequence
  Description of Artificial Sequence: Synthetic oligonucleotide
ggggcacaaacccagggcu

SEQ ID NO: 850989 - RNA, 19 nt, Artificial Sequence
  Description of Artificial Sequence: Synthetic oligonucleotide
gcuuagccucccugcaacc

SEQ ID NO: 850990 - RNA, 19 nt, Artificial Sequence
  Description of Artificial Sequence: Synthetic oligonucleotide
ggagcgacagaagcccuug

SEQ ID NO: 850991 - RNA, 19 nt, Artificial Sequence
  Description of Artificial Sequence: Synthetic oligonucleotide
cacgaccuggggacacuug

SEQ ID NO: 850992 - RNA, 19 nt, Artificial Sequence
  Description of Artificial Sequence: Synthetic oligonucleotide
guggguacgcuggugucga

SEQ ID NO: 850993 - RNA, 19 nt, Artificial Sequence
  Description of Artificial Sequence: Synthetic oligonucleotide
gcuaucagcgaaggccuug

SEQ ID NO: 850994 - RNA, 19 nt, Artificial Sequence
  Description of Artificial Sequence: Synthetic oligonucleotide
gcauggguccgcugguggc

SEQ ID NO: 850995 - RNA, 19 nt, Artificial Sequence
  Description of Artificial Sequence: Synthetic oligonucleotide
gacgacgccucccgcucca

SEQ ID NO: 850996 - RNA, 19 nt, Artificial Sequence
  Description of Artificial Sequence: Synthetic oligonucleotide
gugcugaccguugggagaa

SEQ ID NO: 850997 - RNA, 19 nt, Artificial Sequence
  Description of Artificial Sequence: Synthetic oligonucleotide
acggcggaacgauccugca

SEQ ID NO: 850998 - RNA, 19 nt, Artificial Sequence
  Description of Artificial Sequence: Synthetic oligonucleotide
ggaugagugcugaccguug

SEQ ID NO: 850999 - RNA, 19 nt, Artificial Sequence
  Description of Artificial Sequence: Synthetic oligonucleotide
cuaugcacgcgauggugcu

SEQ ID NO: 851000 - RNA, 19 nt, Artificial Sequence
  Description of Artificial Sequence: Synthetic oligonucleotide
gcaacccagcucgaagugc

SEQ ID NO: 851001 - RNA, 19 nt, Artificial Sequence
  Description of Artificial Sequence: Synthetic oligonucleotide
cuguaagugcggccuggca

SEQ ID NO: 851002 - RNA, 19 nt, Artificial Sequence
  Description of Artificial Sequence: Synthetic oligonucleotide
ucucugcgccuuccuggaa

SEQ ID NO: 851003 - RNA, 19 nt, Artificial Sequence
  Description of Artificial Sequence: Synthetic oligonucleotide
cauccccgggcucgaggcc

SEQ ID NO: 851004 - RNA, 19 nt, Artificial Sequence
  Description of Artificial Sequence: Synthetic oligonucleotide
gcaaccccucuucguagcc

SEQ ID NO: 851005 - RNA, 19 nt, Artificial Sequence
  Description of Artificial Sequence: Synthetic oligonucleotide
ugcacauccccgggcucga

SEQ ID NO: 851006 - RNA, 19 nt, Artificial Sequence
  Description of Artificial Sequence: Synthetic oligonucleotide
cagcucgaagugcccggag

SEQ ID NO: 851007 - RNA, 19 nt, Artificial Sequence
  Description of Artificial Sequence: Synthetic oligonucleotide
uggcugcgcagagacgagu

SEQ ID NO: 851008 - RNA, 19 nt, Artificial Sequence
  Description of Artificial Sequence: Synthetic oligonucleotide
gcuauggguuuugaacuca

SEQ ID NO: 851009 - RNA, 19 nt, Artificial Sequence
  Description of Artificial Sequence: Synthetic oligonucleotide
uccugcaacccagcucgaa

SEQ ID NO: 851010 - RNA, 19 nt, Artificial Sequence
  Description of Artificial Sequence: Synthetic oligonucleotide
guaaaggaguccaggggau

SEQ ID NO: 851011 - RNA, 19 nt, Artificial Sequence
  Description of Artificial Sequence: Synthetic oligonucleotide
cucgaggccccacgacgac

SEQ ID NO: 851012 - RNA, 19 nt, Artificial Sequence
  Description of Artificial Sequence: Synthetic oligonucleotide
gccgcagauguuaggccgg

SEQ ID NO: 851013 - RNA, 19 nt, Artificial Sequence
  Description of Artificial Sequence: Synthetic oligonucleotide
gcggaacgauccugcaacc

SEQ ID NO: 851014 - RNA, 19 nt, Artificial Sequence
  Description of Artificial Sequence: Synthetic oligonucleotide
gcacaaacccagggcuucg

SEQ ID NO: 851015 - RNA, 19 nt, Artificial Sequence
  Description of Artificial Sequence: Synthetic oligonucleotide
ucgggacucugugggucug

SEQ ID NO: 851016 - RNA, 19 nt, Artificial Sequence
  Description of Artificial Sequence: Synthetic oligonucleotide
gggcccauaccuaggacuc

SEQ ID NO: 851017 - RNA, 19 nt, Artificial Sequence
  Description of Artificial Sequence: Synthetic oligonucleotide
uggguacgcugguguuuga

SEQ ID NO: 851018 - RNA, 19 nt, Artificial Sequence
  Description of Artificial Sequence: Synthetic oligonucleotide
cagggcuauggguuuugaa

SEQ ID NO: 851019 - RNA, 19 nt, Artificial Sequence
  Description of Artificial Sequence: Synthetic oligonucleotide
ccgguaugggaugcgcugg

SEQ ID NO: 851020 - RNA, 19 nt, Artificial Sequence
  Description of Artificial Sequence: Synthetic oligonucleotide
cacgggcauggcugcgggc

SEQ ID NO: 851021 - RNA, 19 nt, Artificial Sequence
  Description of Artificial Sequence: Synthetic oligonucleotide
ucguggcuaugggugcgcu

SEQ ID NO: 851022 - RNA, 19 nt, Artificial Sequence
  Description of Artificial Sequence: Synthetic oligonucleotide
gggauucauacccgggacu

SEQ ID NO: 851023 - RNA, 19 nt, Artificial Sequence
  Description of Artificial Sequence: Synthetic oligonucleotide
guacgcuggugucgaagua

SEQ ID NO: 851024 - RNA, 19 nt, Artificial Sequence
  Description of Artificial Sequence: Synthetic oligonucleotide
cgaggccccacgacgacgc

SEQ ID NO: 851025 - RNA, 19 nt, Artificial Sequence
  Description of Artificial Sequence: Synthetic oligonucleotide
gcucguggcuaugggugcg

SEQ ID NO: 851026 - RNA, 19 nt, Artificial Sequence
  Description of Artificial Sequence: Synthetic oligonucleotide
cugcuuagccucccugcaa

SEQ ID NO: 851027 - RNA, 19 nt, Artificial Sequence
  Description of Artificial Sequence: Synthetic oligonucleotide
ugcacgcgauggugcugca

SEQ ID NO: 851028 - RNA, 19 nt, Artificial Sequence
  Description of Artificial Sequence: Synthetic oligonucleotide
uugccacgaccuggggaca

SEQ ID NO: 851029 - RNA, 19 nt, Artificial Sequence
  Description of Artificial Sequence: Synthetic oligonucleotide
uacccgggacuuugagauu

SEQ ID NO: 851030 - RNA, 19 nt, Artificial Sequence
  Description of Artificial Sequence: Synthetic oligonucleotide
gcgcagagacgaguucugg

SEQ ID NO: 851031 - RNA, 19 nt, Artificial Sequence
  Description of Artificial Sequence: Synthetic oligonucleotide
ggccgcucguggcuauggg

SEQ ID NO: 851032 - RNA, 19 nt, Artificial Sequence
  Description of Artificial Sequence: Synthetic oligonucleotide
guccgcugguggcggauga

SEQ ID NO: 851033 - RNA, 19 nt, Artificial Sequence
  Description of Artificial Sequence: Synthetic oligonucleotide
uggcgacggcggaacgauc

SEQ ID NO: 851034 - RNA, 19 nt, Artificial Sequence
  Description of Artificial Sequence: Synthetic oligonucleotide
gaaccgagcucuggccaaa

SEQ ID NO: 851035 - RNA, 19 nt, Artificial Sequence
  Description of Artificial Sequence: Synthetic oligonucleotide
gguaggagcugucgccaaa

SEQ ID NO: 851036 - RNA, 19 nt, Artificial Sequence
  Description of Artificial Sequence: Synthetic oligonucleotide
ugcugaccguugggagaag

SEQ ID NO: 851037 - RNA, 19 nt, Artificial Sequence
  Description of Artificial Sequence: Synthetic oligonucleotide
ggaaaacgccuugcugcac

SEQ ID NO: 851038 - RNA, 19 nt, Artificial Sequence
  Description of Artificial Sequence: Synthetic oligonucleotide
ccugcaaccccucuucgua

SEQ ID NO: 851039 - RNA, 19 nt, Artificial Sequence
  Description of Artificial Sequence: Synthetic oligonucleotide
aggccccacgacgacgccu

SEQ ID NO: 851040 - RNA, 19 nt, Artificial Sequence
  Description of Artificial Sequence: Synthetic oligonucleotide
ccugcuuagccucccugca

SEQ ID NO: 851041 - RNA, 19 nt, Artificial Sequence
  Description of Artificial Sequence: Synthetic oligonucleotide
gcugcgcagagacgaguuc

SEQ ID NO: 851042 - RNA, 19 nt, Artificial Sequence
  Description of Artificial Sequence: Synthetic oligonucleotide
cuggaucaggguagagccu

SEQ ID NO: 851043 - RNA, 19 nt, Artificial Sequence
  Description of Artificial Sequence: Synthetic oligonucleotide
ggauucauacccgggacuu

SEQ ID NO: 851044 - RNA, 19 nt, Artificial Sequence
  Description of Artificial Sequence: Synthetic oligonucleotide
gagacgaguucuggcuaua

SEQ ID NO: 851045 - RNA, 19 nt, Artificial Sequence
  Description of Artificial Sequence: Synthetic oligonucleotide
accguugggagaagcucuu

SEQ ID NO: 851046 - RNA, 19 nt, Artificial Sequence
  Description of Artificial Sequence: Synthetic oligonucleotide
cccugacccaucuucuaga

SEQ ID NO: 851047 - RNA, 19 nt, Artificial Sequence
  Description of Artificial Sequence: Synthetic oligonucleotide
cucugcgccuuccuggaau

SEQ ID NO: 851048 - RNA, 19 nt, Artificial Sequence
  Description of Artificial Sequence: Synthetic oligonucleotide
cucgggacucugugggucu

SEQ ID NO: 851049 - RNA, 19 nt, Artificial Sequence
  Description of Artificial Sequence: Synthetic oligonucleotide
uagggccgcucguggcuau

SEQ ID NO: 851050 - RNA, 19 nt, Artificial Sequence
  Description of Artificial Sequence: Synthetic oligonucleotide
ccugacccaucuucuagaa

SEQ ID NO: 851051 - RNA, 19 nt, Artificial Sequence
  Description of Artificial Sequence: Synthetic oligonucleotide
gcugucgccaaaggccuuc

SEQ ID NO: 851052 - RNA, 19 nt, Artificial Sequence
  Description of Artificial Sequence: Synthetic oligonucleotide
uggguacgcuggugucgaa

SEQ ID NO: 851053 - RNA, 19 nt, Artificial Sequence
  Description of Artificial Sequence: Synthetic oligonucleotide
ggcuaugggugcgcuggug

SEQ ID NO: 851054 - RNA, 19 nt, Artificial Sequence
  Description of Artificial Sequence: Synthetic oligonucleotide
gggccgcucguggcuaugg

SEQ ID NO: 851055 - RNA, 19 nt, Artificial Sequence
  Description of Artificial Sequence: Synthetic oligonucleotide
gaggagcgacagaagcccu

SEQ ID NO: 851056 - RNA, 19 nt, Artificial Sequence
  Description of Artificial Sequence: Synthetic oligonucleotide
caccgguaugggaugcgcu

SEQ ID NO: 851057 - RNA, 19 nt, Artificial Sequence
  Description of Artificial Sequence: Synthetic oligonucleotide
cccuugccacacacggcgc

SEQ ID NO: 851058 - RNA, 19 nt, Artificial Sequence
  Description of Artificial Sequence: Synthetic oligonucleotide
gaacuccuaaggggauacu

SEQ ID NO: 851059 - RNA, 19 nt, Artificial Sequence
  Description of Artificial Sequence: Synthetic oligonucleotide
cggaacgauccugcaaccc

SEQ ID NO: 851060 - RNA, 19 nt, Artificial Sequence
  Description of Artificial Sequence: Synthetic oligonucleotide
ccccaaaccccugaguaaa

SEQ ID NO: 851061 - RNA, 19 nt, Artificial Sequence
  Description of Artificial Sequence: Synthetic oligonucleotide
ccgggcucgaggccccacg

SEQ ID NO: 851062 - RNA, 19 nt, Artificial Sequence
  Description of Artificial Sequence: Synthetic oligonucleotide
ggccccacgacgacgccuc

SEQ ID NO: 851063 - RNA, 19 nt, Artificial Sequence
  Description of Artificial Sequence: Synthetic oligonucleotide
ggauucaaacccagggcuu

SEQ ID NO: 851064 - RNA, 19 nt, Artificial Sequence
  Description of Artificial Sequence: Synthetic oligonucleotide
gggcugccggguucauagc

SEQ ID NO: 851065 - RNA, 19 nt, Artificial Sequence
  Description of Artificial Sequence: Synthetic oligonucleotide
guagggccgcucguggcua

SEQ ID NO: 851066 - RNA, 19 nt, Artificial Sequence
  Description of Artificial Sequence: Synthetic oligonucleotide
gcgguauggccucucgccu

SEQ ID NO: 851067 - RNA, 19 nt, Artificial Sequence
  Description of Artificial Sequence: Synthetic oligonucleotide
gggcucgaggccccacgac

SEQ ID NO: 851068 - RNA, 19 nt, Artificial Sequence
  Description of Artificial Sequence: Synthetic oligonucleotide
guggcgacggcggaacgau

SEQ ID NO: 851069 - RNA, 19 nt, Artificial Sequence
  Description of Artificial Sequence: Synthetic oligonucleotide
cuccccacccuugacucgu

SEQ ID NO: 851070 - RNA, 19 nt, Artificial Sequence
  Description of Artificial Sequence: Synthetic oligonucleotide
cccuacggccuggaccacg

SEQ ID NO: 851071 - RNA, 19 nt, Artificial Sequence
  Description of Artificial Sequence: Synthetic oligonucleotide
ccgcagauguuaggccggg

SEQ ID NO: 851072 - RNA, 19 nt, Artificial Sequence
  Description of Artificial Sequence: Synthetic oligonucleotide
gcagcguggaggagcgaca

SEQ ID NO: 851073 - RNA, 19 nt, Artificial Sequence
  Description of Artificial Sequence: Synthetic oligonucleotide
cgcccggcugcaugggucc

SEQ ID NO: 851074 - RNA, 19 nt, Artificial Sequence
  Description of Artificial Sequence: Synthetic oligonucleotide
gcacgcgauggugcugcag

SEQ ID NO: 851075 - RNA, 19 nt, Artificial Sequence
  Description of Artificial Sequence: Synthetic oligonucleotide
agggccgcucguggcuaug

SEQ ID NO: 851076 - RNA, 19 nt, Artificial Sequence
  Description of Artificial Sequence: Synthetic oligonucleotide
gggaugagugcugaccguu

SEQ ID NO: 851077 - RNA, 19 nt, Artificial Sequence
  Description of Artificial Sequence: Synthetic oligonucleotide
cguggcuaugggugcgcug

SEQ ID NO: 851078 - RNA, 19 nt, Artificial Sequence
  Description of Artificial Sequence: Synthetic oligonucleotide
gccgcucguggcuaugggu

SEQ ID NO: 851079 - RNA, 19 nt, Artificial Sequence
  Description of Artificial Sequence: Synthetic oligonucleotide
cuacggccuggaccacgga

SEQ ID NO: 851080 - RNA, 19 nt, Artificial Sequence
  Description of Artificial Sequence: Synthetic oligonucleotide
gcgggcauggauggcuaga

SEQ ID NO: 851081 - RNA, 19 nt, Artificial Sequence
  Description of Artificial Sequence: Synthetic oligonucleotide
cgggacuuugagauucaaa

SEQ ID NO: 851082 - RNA, 19 nt, Artificial Sequence
  Description of Artificial Sequence: Synthetic oligonucleotide
ccacgacgacgccucccgc

SEQ ID NO: 851083 - RNA, 19 nt, Artificial Sequence
  Description of Artificial Sequence: Synthetic oligonucleotide
cgcucgccgguauggguac

SEQ ID NO: 851084 - RNA, 19 nt, Artificial Sequence
  Description of Artificial Sequence: Synthetic oligonucleotide
gcugccggguucauagccu

SEQ ID NO: 851085 - RNA, 19 nt, Artificial Sequence
  Description of Artificial Sequence: Synthetic oligonucleotide
ggcagaugggugcgggcau

SEQ ID NO: 851086 - RNA, 19 nt, Artificial Sequence
  Description of Artificial Sequence: Synthetic oligonucleotide
agcugucgccaaaggccuu

SEQ ID NO: 851087 - RNA, 19 nt, Artificial Sequence
  Description of Artificial Sequence: Synthetic oligonucleotide
cucccagugcagcggcggu

SEQ ID NO: 851088 - RNA, 19 nt, Artificial Sequence
  Description of Artificial Sequence: Synthetic oligonucleotide
ccccacgacgacgccuccc

SEQ ID NO: 851089 - RNA, 19 nt, Artificial Sequence
  Description of Artificial Sequence: Synthetic oligonucleotide
cugggcuuucaggcucaaa

SEQ ID NO: 851090 - RNA, 19 nt, Artificial Sequence
  Description of Artificial Sequence: Synthetic oligonucleotide
cgcagauguuaggccgggg

SEQ ID NO: 851091 - RNA, 19 nt, Artificial Sequence
  Description of Artificial Sequence: Synthetic oligonucleotide
cgacgacgccucccgcucc

SEQ ID NO: 851092 - RNA, 19 nt, Artificial Sequence
  Description of Artificial Sequence: Synthetic oligonucleotide
gccucgcccaaagcucuuc

SEQ ID NO: 851093 - RNA, 19 nt, Artificial Sequence
  Description of Artificial Sequence: Synthetic oligonucleotide
cccgggacuuugagauuca

SEQ ID NO: 851094 - RNA, 19 nt, Artificial Sequence
  Description of Artificial Sequence: Synthetic oligonucleotide
cgugcacauccccgggcuc

SEQ ID NO: 851095 - RNA, 19 nt, Artificial Sequence
  Description of Artificial Sequence: Synthetic oligonucleotide
agccucgcccaaagcucuu

SEQ ID NO: 851096 - RNA, 19 nt, Artificial Sequence
  Description of Artificial Sequence: Synthetic oligonucleotide
acgacgccucccgcuccau

SEQ ID NO: 851097 - RNA, 19 nt, Artificial Sequence
  Description of Artificial Sequence: Synthetic oligonucleotide
gcgacggcggaacgauccu

SEQ ID NO: 851098 - RNA, 19 nt, Artificial Sequence
  Description of Artificial Sequence: Synthetic oligonucleotide
ccuaggacucugggauaca

SEQ ID NO: 851099 - RNA, 19 nt, Artificial Sequence
  Description of Artificial Sequence: Synthetic oligonucleotide
ggcugcgcagagacgaguu

SEQ ID NO: 851100 - RNA, 19 nt, Artificial Sequence
  Description of Artificial Sequence: Synthetic oligonucleotide
ccauuccgucaggaccgug

SEQ ID NO: 851101 - RNA, 19 nt, Artificial Sequence
  Description of Artificial Sequence: Synthetic oligonucleotide
cgggcauggauggcuagaa

SEQ ID NO: 851102 - RNA, 19 nt, Artificial Sequence
  Description of Artificial Sequence: Synthetic oligonucleotide
ggcccauaccuaggacucu

SEQ ID NO: 851103 - RNA, 19 nt, Artificial Sequence
  Description of Artificial Sequence: Synthetic oligonucleotide
cuggugccgggaggaggua

SEQ ID NO: 851104 - RNA, 19 nt, Artificial Sequence
  Description of Artificial Sequence: Synthetic oligonucleotide
ggcgcccggcugcaugggu

SEQ ID NO: 851105 - RNA, 19 nt, Artificial Sequence
  Description of Artificial Sequence: Synthetic oligonucleotide
cggcggaacgauccugcaa

SEQ ID NO: 851106 - RNA, 19 nt, Artificial Sequence
  Description of Artificial Sequence: Synthetic oligonucleotide
cgggcucgaggccccacga

SEQ ID NO: 851107 - RNA, 19 nt, Artificial Sequence
  Description of Artificial Sequence: Synthetic oligonucleotide
ccgucaggaccgugcacau

SEQ ID NO: 851108 - RNA, 19 nt, Artificial Sequence
  Description of Artificial Sequence: Synthetic oligonucleotide
cugcgccuuccuggaauuu

SEQ ID NO: 851109 - RNA, 19 nt, Artificial Sequence
  Description of Artificial Sequence: Synthetic oligonucleotide
ccccucuucguagcccacu

SEQ ID NO: 851110 - RNA, 19 nt, Artificial Sequence
  Description of Artificial Sequence: Synthetic oligonucleotide
cccgggcucgaggccccac

SEQ ID NO: 851111 - RNA, 19 nt, Artificial Sequence
  Description of Artificial Sequence: Synthetic oligonucleotide
ggguccgcugguggcggau

SEQ ID NO: 851112 - RNA, 19 nt, Artificial Sequence
  Description of Artificial Sequence: Synthetic oligonucleotide
ccccuacggccuggaccac

SEQ ID NO: 851113 - RNA, 19 nt, Artificial Sequence
  Description of Artificial Sequence: Synthetic oligonucleotide
cgggacucugugggucuga

SEQ ID NO: 851114 - RNA, 19 nt, Artificial Sequence
  Description of Artificial Sequence: Synthetic oligonucleotide
cccauuccgucaggaccgu

SEQ ID NO: 851115 - RNA, 19 nt, Artificial Sequence
  Description of Artificial Sequence: Synthetic oligonucleotide
aaacauuccauuuccagcc

SEQ ID NO: 851116 - RNA, 19 nt, Artificial Sequence
  Description of Artificial Sequence: Synthetic oligonucleotide
aaagguacaucauaacugc

SEQ ID NO: 851117 - RNA, 19 nt, Artificial Sequence
  Description of Artificial Sequence: Synthetic oligonucleotide
agaauaaauauucacagag

SEQ ID NO: 851118 - RNA, 19 nt, Artificial Sequence
  Description of Artificial Sequence: Synthetic oligonucleotide
auugagaucccucacaccc

SEQ ID NO: 851119 - RNA, 19 nt, Artificial Sequence
  Description of Artificial Sequence: Synthetic oligonucleotide
cauagcaacagcaacaugg

SEQ ID NO: 851120 - RNA, 19 nt, Artificial Sequence
  Description of Artificial Sequence: Synthetic oligonucleotide
aguaaucaaauguugggcc

SEQ ID NO: 851121 - RNA, 19 nt, Artificial Sequence
  Description of Artificial Sequence: Synthetic oligonucleotide
uguaagaacaagcaguccc

SEQ ID NO: 851122 - RNA, 19 nt, Artificial Sequence
  Description of Artificial Sequence: Synthetic oligonucleotide
aaaauuggaacugucacag

SEQ ID NO: 851123 - RNA, 19 nt, Artificial Sequence
  Description of Artificial Sequence: Synthetic oligonucleotide
aauuauggcaguucgggag

SEQ ID NO: 851124 - RNA, 19 nt, Artificial Sequence
  Description of Artificial Sequence: Synthetic oligonucleotide
auagaugccauaugcaagc

SEQ ID NO: 851125 - RNA, 19 nt, Artificial Sequence
  Description of Artificial Sequence: Synthetic oligonucleotide
aaauguugggcccugaucu

SEQ ID NO: 851126 - RNA, 19 nt, Artificial Sequence
  Description of Artificial Sequence: Synthetic oligonucleotide
uauagugucccacagaggu

SEQ ID NO: 851127 - RNA, 19 nt, Artificial Sequence
  Description of Artificial Sequence: Synthetic oligonucleotide
uaaaaugacaucaaggauu

SEQ ID NO: 851128 - RNA, 19 nt, Artificial Sequence
  Description of Artificial Sequence: Synthetic oligonucleotide
aagaauucuggguacggac

SEQ ID NO: 851129 - RNA, 19 nt, Artificial Sequence
  Description of Artificial Sequence: Synthetic oligonucleotide
aguuucaugacuaaagugg

SEQ ID NO: 851130 - RNA, 19 nt, Artificial Sequence
  Description of Artificial Sequence: Synthetic oligonucleotide
auuaucuaaaauuggaacu

SEQ ID NO: 851131 - RNA, 19 nt, Artificial Sequence
  Description of Artificial Sequence: Synthetic oligonucleotide
auauucaaaaucccagccc

SEQ ID NO: 851132 - RNA, 19 nt, Artificial Sequence
  Description of Artificial Sequence: Synthetic oligonucleotide
aaaaggguagagcuucagc

SEQ ID NO: 851133 - RNA, 19 nt, Artificial Sequence
  Description of Artificial Sequence: Synthetic oligonucleotide
aaaggguagagcuucagcu

SEQ ID NO: 851134 - RNA, 19 nt, Artificial Sequence
  Description of Artificial Sequence: Synthetic oligonucleotide
ucaaaggagaaccagucgc

SEQ ID NO: 851135 - RNA, 19 nt, Artificial Sequence
  Description of Artificial Sequence: Synthetic oligonucleotide
augauaccgacacaggacc

SEQ ID NO: 851136 - RNA, 19 nt, Artificial Sequence
  Description of Artificial Sequence: Synthetic oligonucleotide
aaaaugacaucaaggauuc

SEQ ID NO: 851137 - RNA, 19 nt, Artificial Sequence
  Description of Artificial Sequence: Synthetic oligonucleotide
agaguaaucaaauguuggg

SEQ ID NO: 851138 - RNA, 19 nt, Artificial Sequence
  Description of Artificial Sequence: Synthetic oligonucleotide
ugaaagguacaucauaacu

SEQ ID NO: 851139 - RNA, 19 nt, Artificial Sequence
  Description of Artificial Sequence: Synthetic oligonucleotide
cuuauagugucccacagag

SEQ ID NO: 851140 - RNA, 19 nt, Artificial Sequence
  Description of Artificial Sequence: Synthetic oligonucleotide
aaggagaucgcucuggaca

SEQ ID NO: 851141 - RNA, 19 nt, Artificial Sequence
  Description of Artificial Sequence: Synthetic oligonucleotide
ucuaaaauuggaacuguca

SEQ ID NO: 851142 - RNA, 19 nt, Artificial Sequence
  Description of Artificial Sequence: Synthetic oligonucleotide
uugggaaccauaaauagaa

SEQ ID NO: 851143 - RNA, 19 nt, Artificial Sequence
  Description of Artificial Sequence: Synthetic oligonucleotide
aaugauaccgacacaggac

SEQ ID NO: 851144 - RNA, 19 nt, Artificial Sequence
  Description of Artificial Sequence: Synthetic oligonucleotide
aaaugauaccgacacagga

SEQ ID NO: 851145 - RNA, 19 nt, Artificial Sequence
  Description of Artificial Sequence: Synthetic oligonucleotide
uaaacauuccauuuccagc

SEQ ID NO: 851146 - RNA, 19 nt, Artificial Sequence
  Description of Artificial Sequence: Synthetic oligonucleotide
ucugaaagcagugaggagc

SEQ ID NO: 851147 - RNA, 19 nt, Artificial Sequence
  Description of Artificial Sequence: Synthetic oligonucleotide
aauuggaacugucacagaa

SEQ ID NO: 851148 - RNA, 19 nt, Artificial Sequence
  Description of Artificial Sequence: Synthetic oligonucleotide
gaaagguacaucauaacug

SEQ ID NO: 851149 - RNA, 19 nt, Artificial Sequence
  Description of Artificial Sequence: Synthetic oligonucleotide
cuaaaauuggaacugucac

SEQ ID NO: 851150 - RNA, 19 nt, Artificial Sequence
  Description of Artificial Sequence: Synthetic oligonucleotide
caucauaacugccaguugg

SEQ ID NO: 851151 - RNA, 19 nt, Artificial Sequence
  Description of Artificial Sequence: Synthetic oligonucleotide
uuaucuaaaauuggaacug

SEQ ID NO: 851152 - RNA, 19 nt, Artificial Sequence
  Description of Artificial Sequence: Synthetic oligonucleotide
ugagaguaaucaaauguug

SEQ ID NO: 851153 - RNA, 19 nt, Artificial Sequence
  Description of Artificial Sequence: Synthetic oligonucleotide
acaauuauggcaguucggg

SEQ ID NO: 851154 - RNA, 19 nt, Artificial Sequence
  Description of Artificial Sequence: Synthetic oligonucleotide
guuacuauagacaucacga

SEQ ID NO: 851155 - RNA, 19 nt, Artificial Sequence
  Description of Artificial Sequence: Synthetic oligonucleotide
ugaucucgaccaaacaggg

SEQ ID NO: 851156 - RNA, 19 nt, Artificial Sequence
  Description of Artificial Sequence: Synthetic oligonucleotide
uaaaugauaccgacacagg

SEQ ID NO: 851157 - RNA, 19 nt, Artificial Sequence
  Description of Artificial Sequence: Synthetic oligonucleotide
ugaaaccccaccaaaguac

SEQ ID NO: 851158 - RNA, 19 nt, Artificial Sequence
  Description of Artificial Sequence: Synthetic oligonucleotide
gaggcauuaucuaaaauug

SEQ ID NO: 851159 - RNA, 19 nt, Artificial Sequence
  Description of Artificial Sequence: Synthetic oligonucleotide
uggaaaagagugauguuca

SEQ ID NO: 851160 - RNA, 19 nt, Artificial Sequence
  Description of Artificial Sequence: Synthetic oligonucleotide
gagaguaaucaaauguugg

SEQ ID NO: 851161 - RNA, 19 nt, Artificial Sequence
  Description of Artificial Sequence: Synthetic oligonucleotide
gaugagaguaaucaaaugu

SEQ ID NO: 851162 - RNA, 19 nt, Artificial Sequence
  Description of Artificial Sequence: Synthetic oligonucleotide
uuacuauagacaucacgag

SEQ ID NO: 851163 - RNA, 19 nt, Artificial Sequence
  Description of Artificial Sequence: Synthetic oligonucleotide
aucucgaccaaacagggca

SEQ ID NO: 851164 - RNA, 19 nt, Artificial Sequence
  Description of Artificial Sequence: Synthetic oligonucleotide
aacuuguucauagcaacag

SEQ ID NO: 851165 - RNA, 19 nt, Artificial Sequence
  Description of Artificial Sequence: Synthetic oligonucleotide
uguucauagcaacagcaac

SEQ ID NO: 851166 - RNA, 19 nt, Artificial Sequence
  Description of Artificial Sequence: Synthetic oligonucleotide
uguugguauacagaggacc

SEQ ID NO: 851167 - RNA, 19 nt, Artificial Sequence
  Description of Artificial Sequence: Synthetic oligonucleotide
gcaaagaagaaucagugug

SEQ ID NO: 851168 - RNA, 19 nt, Artificial Sequence
  Description of Artificial Sequence: Synthetic oligonucleotide
uuugucgcauaaaaugaca

SEQ ID NO: 851169 - RNA, 19 nt, Artificial Sequence
  Description of Artificial Sequence: Synthetic oligonucleotide
caaaucugggaccagcggg

SEQ ID NO: 851170 - RNA, 19 nt, Artificial Sequence
  Description of Artificial Sequence: Synthetic oligonucleotide
acuaaagugggcaaagaag

SEQ ID NO: 851171 - RNA, 19 nt, Artificial Sequence
  Description of Artificial Sequence: Synthetic oligonucleotide
aaagaggaaccuccagguc

SEQ ID NO: 851172 - RNA, 19 nt, Artificial Sequence
  Description of Artificial Sequence: Synthetic oligonucleotide
gagguuacuauagacauca

SEQ ID NO: 851173 - RNA, 19 nt, Artificial Sequence
  Description of Artificial Sequence: Synthetic oligonucleotide
gaauugagaucccucacac

SEQ ID NO: 851174 - RNA, 19 nt, Artificial Sequence
  Description of Artificial Sequence: Synthetic oligonucleotide
aguucauuccaucuugugu

SEQ ID NO: 851175 - RNA, 19 nt, Artificial Sequence
  Description of Artificial Sequence: Synthetic oligonucleotide
cauguaagaacaagcaguc

SEQ ID NO: 851176 - RNA, 19 nt, Artificial Sequence
  Description of Artificial Sequence: Synthetic oligonucleotide
ugacaucaaggauucacag

SEQ ID NO: 851177 - RNA, 19 nt, Artificial Sequence
  Description of Artificial Sequence: Synthetic oligonucleotide
uguaacaucucuugucgga

SEQ ID NO: 851178 - RNA, 19 nt, Artificial Sequence
  Description of Artificial Sequence: Synthetic oligonucleotide
uuagccagcaacugguaug

SEQ ID NO: 851179 - RNA, 19 nt, Artificial Sequence
  Description of Artificial Sequence: Synthetic oligonucleotide
uuggaaaagagugauguuc

SEQ ID NO: 851180 - RNA, 19 nt, Artificial Sequence
  Description of Artificial Sequence: Synthetic oligonucleotide
auagacaucacgaggauga

SEQ ID NO: 851181 - RNA, 19 nt, Artificial Sequence
  Description of Artificial Sequence: Synthetic oligonucleotide
gaguaaucaaauguugggc

SEQ ID NO: 851182 - RNA, 19 nt, Artificial Sequence
  Description of Artificial Sequence: Synthetic oligonucleotide
aucaaaggagaaccagucg

SEQ ID NO: 851183 - RNA, 19 nt, Artificial Sequence
  Description of Artificial Sequence: Synthetic oligonucleotide
guaaucaaauguugggccc

SEQ ID NO: 851184 - RNA, 19 nt, Artificial Sequence
  Description of Artificial Sequence: Synthetic oligonucleotide
guuucaugacuaaaguggg

SEQ ID NO: 851185 - RNA, 19 nt, Artificial Sequence
  Description of Artificial Sequence: Synthetic oligonucleotide
acuauagacaucacgagga

SEQ ID NO: 851186 - RNA, 19 nt, Artificial Sequence
  Description of Artificial Sequence: Synthetic oligonucleotide
auaaauauucacagagguc

SEQ ID NO: 851187 - RNA, 19 nt, Artificial Sequence
  Description of Artificial Sequence: Synthetic oligonucleotide
uuugcccuguuaaacauuc

SEQ ID NO: 851188 - RNA, 19 nt, Artificial Sequence
  Description of Artificial Sequence: Synthetic oligonucleotide
agaauucuggguacggacc

SEQ ID NO: 851189 - RNA, 19 nt, Artificial Sequence
  Description of Artificial Sequence: Synthetic oligonucleotide
aaccccaccaaaguacugg

SEQ ID NO: 851190 - RNA, 19 nt, Artificial Sequence
  Description of Artificial Sequence: Synthetic oligonucleotide
caccccaacauucaggagc

SEQ ID NO: 851191 - RNA, 19 nt, Artificial Sequence
  Description of Artificial Sequence: Synthetic oligonucleotide
gauuugucgcauaaaauga

SEQ ID NO: 851192 - RNA, 19 nt, Artificial Sequence
  Description of Artificial Sequence: Synthetic oligonucleotide
gguuacuauagacaucacg

SEQ ID NO: 851193 - RNA, 19 nt, Artificial Sequence
  Description of Artificial Sequence: Synthetic oligonucleotide
aaaguccuuuauuaguaaa

SEQ ID NO: 851194 - RNA, 19 nt, Artificial Sequence
  Description of Artificial Sequence: Synthetic oligonucleotide
uucacagucauaagcccug

SEQ ID NO: 851195 - RNA, 19 nt, Artificial Sequence
  Description of Artificial Sequence: Synthetic oligonucleotide
aggagugagcgcugaaacc

SEQ ID NO: 851196 - RNA, 19 nt, Artificial Sequence
  Description of Artificial Sequence: Synthetic oligonucleotide
uuauagugucccacagagg

SEQ ID NO: 851197 - RNA, 19 nt, Artificial Sequence
  Description of Artificial Sequence: Synthetic oligonucleotide
ugucuagcagugaggagag

SEQ ID NO: 851198 - RNA, 19 nt, Artificial Sequence
  Description of Artificial Sequence: Synthetic oligonucleotide
cauaacugccaguugggag

SEQ ID NO: 851199 - RNA, 19 nt, Artificial Sequence
  Description of Artificial Sequence: Synthetic oligonucleotide
aguccuuuauuaguaaaag

SEQ ID NO: 851200 - RNA, 19 nt, Artificial Sequence
  Description of Artificial Sequence: Synthetic oligonucleotide
aagcccugagaggugaccc

SEQ ID NO: 851201 - RNA, 19 nt, Artificial Sequence
  Description of Artificial Sequence: Synthetic oligonucleotide
acgaggaaggggcuuaggg

SEQ ID NO: 851202 - RNA, 19 nt, Artificial Sequence
  Description of Artificial Sequence: Synthetic oligonucleotide
agaauugagaucccucaca

SEQ ID NO: 851203 - RNA, 19 nt, Artificial Sequence
  Description of Artificial Sequence: Synthetic oligonucleotide
ggucgagagaucuucaucc

SEQ ID NO: 851204 - RNA, 19 nt, Artificial Sequence
  Description of Artificial Sequence: Synthetic oligonucleotide
caggugauagagcagcagg

SEQ ID NO: 851205 - RNA, 19 nt, Artificial Sequence
  Description of Artificial Sequence: Synthetic oligonucleotide
gaccaaaggaagcuacucc

SEQ ID NO: 851206 - RNA, 19 nt, Artificial Sequence
  Description of Artificial Sequence: Synthetic oligonucleotide
uugucggaaggccugggag

SEQ ID NO: 851207 - RNA, 19 nt, Artificial Sequence
  Description of Artificial Sequence: Synthetic oligonucleotide
auuugucgcauaaaaugac

SEQ ID NO: 851208 - RNA, 19 nt, Artificial Sequence
  Description of Artificial Sequence: Synthetic oligonucleotide
ugucggaaggccugggagg

SEQ ID NO: 851209 - RNA, 19 nt, Artificial Sequence
  Description of Artificial Sequence: Synthetic oligonucleotide
auuucuguguucaagcugu

SEQ ID NO: 851210 - RNA, 19 nt, Artificial Sequence
  Description of Artificial Sequence: Synthetic oligonucleotide
gucgcauaaaaugacauca

SEQ ID NO: 851211 - RNA, 19 nt, Artificial Sequence
  Description of Artificial Sequence: Synthetic oligonucleotide
ggcuaaaugauaccgacac

SEQ ID NO: 851212 - RNA, 19 nt, Artificial Sequence
  Description of Artificial Sequence: Synthetic oligonucleotide
caaaggagaaccagucgcc

SEQ ID NO: 851213 - RNA, 19 nt, Artificial Sequence
  Description of Artificial Sequence: Synthetic oligonucleotide
aaucuguggggauuuuccu

SEQ ID NO: 851214 - RNA, 19 nt, Artificial Sequence
  Description of Artificial Sequence: Synthetic oligonucleotide
aagguacaucauaacugcc

SEQ ID NO: 851215 - RNA, 19 nt, Artificial Sequence
  Description of Artificial Sequence: Synthetic oligonucleotide
acgaggaugagaguaauca

SEQ ID NO: 851216 - RNA, 19 nt, Artificial Sequence
  Description of Artificial Sequence: Synthetic oligonucleotide
acagucauaagcccugaga

SEQ ID NO: 851217 - RNA, 19 nt, Artificial Sequence
  Description of Artificial Sequence: Synthetic oligonucleotide
gacugagguuacuauagac

SEQ ID NO: 851218 - RNA, 19 nt, Artificial Sequence
  Description of Artificial Sequence: Synthetic oligonucleotide
ugggcuaaaugauaccgac

SEQ ID NO: 851219 - RNA, 19 nt, Artificial Sequence
  Description of Artificial Sequence: Synthetic oligonucleotide
cucuuuagccagcaacugg

SEQ ID NO: 851220 - RNA, 19 nt, Artificial Sequence
  Description of Artificial Sequence: Synthetic oligonucleotide
gagaucaaaggagaaccag

SEQ ID NO: 851221 - RNA, 19 nt, Artificial Sequence
  Description of Artificial Sequence: Synthetic oligonucleotide
uauacagaggacccagcuc

SEQ ID NO: 851222 - RNA, 19 nt, Artificial Sequence
  Description of Artificial Sequence: Synthetic oligonucleotide
ggcacuaaggcuucggaag

SEQ ID NO: 851223 - RNA, 19 nt, Artificial Sequence
  Description of Artificial Sequence: Synthetic oligonucleotide
gaagagaucaaaggagaac

SEQ ID NO: 851224 - RNA, 19 nt, Artificial Sequence
  Description of Artificial Sequence: Synthetic oligonucleotide
gauacgaccccucugauuu

SEQ ID NO: 851225 - RNA, 19 nt, Artificial Sequence
  Description of Artificial Sequence: Synthetic oligonucleotide
uagaauugagaucccucac

SEQ ID NO: 851226 - RNA, 19 nt, Artificial Sequence
  Description of Artificial Sequence: Synthetic oligonucleotide
gugacugagguuacuauag

SEQ ID NO: 851227 - RNA, 19 nt, Artificial Sequence
  Description of Artificial Sequence: Synthetic oligonucleotide
uucaagcugucuucuuccg

SEQ ID NO: 851228 - RNA, 19 nt, Artificial Sequence
  Description of Artificial Sequence: Synthetic oligonucleotide
aaagugggcaaagaagaau

SEQ ID NO: 851229 - RNA, 19 nt, Artificial Sequence
  Description of Artificial Sequence: Synthetic oligonucleotide
cacaauuauggcaguucgg

SEQ ID NO: 851230 - RNA, 19 nt, Artificial Sequence
  Description of Artificial Sequence: Synthetic oligonucleotide
gagugauguucacagacga

SEQ ID NO: 851231 - RNA, 19 nt, Artificial Sequence
  Description of Artificial Sequence: Synthetic oligonucleotide
agugaaagguacaucauaa

SEQ ID NO: 851232 - RNA, 19 nt, Artificial Sequence
  Description of Artificial Sequence: Synthetic oligonucleotide
aaggagaaccagucgccug

SEQ ID NO: 851233 - RNA, 19 nt, Artificial Sequence
  Description of Artificial Sequence: Synthetic oligonucleotide
ucggacccaagaccaaagg

SEQ ID NO: 851234 - RNA, 19 nt, Artificial Sequence
  Description of Artificial Sequence: Synthetic oligonucleotide
ucucuugucggaaggccug

SEQ ID NO: 851235 - RNA, 19 nt, Artificial Sequence
  Description of Artificial Sequence: Synthetic oligonucleotide
cuaggaaaggagaucgcuc

SEQ ID NO: 851236 - RNA, 19 nt, Artificial Sequence
  Description of Artificial Sequence: Synthetic oligonucleotide
ugguauacagaggacccag

SEQ ID NO: 851237 - RNA, 19 nt, Artificial Sequence
  Description of Artificial Sequence: Synthetic oligonucleotide
gauggggcacaauuauggc

SEQ ID NO: 851238 - RNA, 19 nt, Artificial Sequence
  Description of Artificial Sequence: Synthetic oligonucleotide
caacugguaugucagugag

SEQ ID NO: 851239 - RNA, 19 nt, Artificial Sequence
  Description of Artificial Sequence: Synthetic oligonucleotide
cuguauccaaacuuguuca

SEQ ID NO: 851240 - RNA, 19 nt, Artificial Sequence
  Description of Artificial Sequence: Synthetic oligonucleotide
gacuaaagugggcaaagaa

SEQ ID NO: 851241 - RNA, 19 nt, Artificial Sequence
  Description of Artificial Sequence: Synthetic oligonucleotide
ggauuaccaggauuugucg

SEQ ID NO: 851242 - RNA, 19 nt, Artificial Sequence
  Description of Artificial Sequence: Synthetic oligonucleotide
uccaagaauucuggguacg

SEQ ID NO: 851243 - RNA, 19 nt, Artificial Sequence
  Description of Artificial Sequence: Synthetic oligonucleotide
gaauucuggguacggacca

SEQ ID NO: 851244 - RNA, 19 nt, Artificial Sequence
  Description of Artificial Sequence: Synthetic oligonucleotide
uuuagccagcaacugguau

SEQ ID NO: 851245 - RNA, 19 nt, Artificial Sequence
  Description of Artificial Sequence: Synthetic oligonucleotide
agaccaaaggaagcuacuc

SEQ ID NO: 851246 - RNA, 19 nt, Artificial Sequence
  Description of Artificial Sequence: Synthetic oligonucleotide
gaagggauuucuguguuca

SEQ ID NO: 851247 - RNA, 19 nt, Artificial Sequence
  Description of Artificial Sequence: Synthetic oligonucleotide
gaagcuacuccagcacugg

SEQ ID NO: 851248 - RNA, 19 nt, Artificial Sequence
  Description of Artificial Sequence: Synthetic oligonucleotide
gaugggaggcauuaucuaa

SEQ ID NO: 851249 - RNA, 19 nt, Artificial Sequence
  Description of Artificial Sequence: Synthetic oligonucleotide
ucgcucuggacaaaagggu

SEQ ID NO: 851250 - RNA, 19 nt, Artificial Sequence
  Description of Artificial Sequence: Synthetic oligonucleotide
ugucgcauaaaaugacauc

SEQ ID NO: 851251 - RNA, 19 nt, Artificial Sequence
  Description of Artificial Sequence: Synthetic oligonucleotide
caaacagccaaaucuggga

SEQ ID NO: 851252 - RNA, 19 nt, Artificial Sequence
  Description of Artificial Sequence: Synthetic oligonucleotide
aucauaacugccaguuggg

SEQ ID NO: 851253 - RNA, 19 nt, Artificial Sequence
  Description of Artificial Sequence: Synthetic oligonucleotide
ugauaccgacacaggaccc

SEQ ID NO: 851254 - RNA, 19 nt, Artificial Sequence
  Description of Artificial Sequence: Synthetic oligonucleotide
auggggcacaauuauggca

SEQ ID NO: 851255 - RNA, 19 nt, Artificial Sequence
  Description of Artificial Sequence: Synthetic oligonucleotide
ccuagugaaagguacauca

SEQ ID NO: 851256 - RNA, 19 nt, Artificial Sequence
  Description of Artificial Sequence: Synthetic oligonucleotide
aaaggagaaccagucgccu

SEQ ID NO: 851257 - RNA, 19 nt, Artificial Sequence
  Description of Artificial Sequence: Synthetic oligonucleotide
aucuaaaauuggaacuguc

SEQ ID NO: 851258 - RNA, 19 nt, Artificial Sequence
  Description of Artificial Sequence: Synthetic oligonucleotide
uaaucaaauguugggcccu

SEQ ID NO: 851259 - RNA, 19 nt, Artificial Sequence
  Description of Artificial Sequence: Synthetic oligonucleotide
agccaaaucugggaccagc

SEQ ID NO: 851260 - RNA, 19 nt, Artificial Sequence
  Description of Artificial Sequence: Synthetic oligonucleotide
aaauuggaacugucacaga

SEQ ID NO: 851261 - RNA, 19 nt, Artificial Sequence
  Description of Artificial Sequence: Synthetic oligonucleotide
ugacugagguuacuauaga

SEQ ID NO: 851262 - RNA, 19 nt, Artificial Sequence
  Description of Artificial Sequence: Synthetic oligonucleotide
acuaggaaaggagaucgcu

SEQ ID NO: 851263 - RNA, 19 nt, Artificial Sequence
  Description of Artificial Sequence: Synthetic oligonucleotide
cagugauguugguauacag

SEQ ID NO: 851264 - RNA, 19 nt, Artificial Sequence
  Description of Artificial Sequence: Synthetic oligonucleotide
ggcaauuccaaacagccaa

SEQ ID NO: 851265 - RNA, 19 nt, Artificial Sequence
  Description of Artificial Sequence: Synthetic oligonucleotide
aucaaggauucacagucau

SEQ ID NO: 851266 - RNA, 19 nt, Artificial Sequence
  Description of Artificial Sequence: Synthetic oligonucleotide
aggcauuaucuaaaauugg

SEQ ID NO: 851267 - RNA, 19 nt, Artificial Sequence
  Description of Artificial Sequence: Synthetic oligonucleotide
uguguucaagcugucuucu

SEQ ID NO: 851268 - RNA, 19 nt, Artificial Sequence
  Description of Artificial Sequence: Synthetic oligonucleotide
agaucaaaggagaaccagu

SEQ ID NO: 851269 - RNA, 19 nt, Artificial Sequence
  Description of Artificial Sequence: Synthetic oligonucleotide
ggagugagcgcugaaaccc

SEQ ID NO: 851270 - RNA, 19 nt, Artificial Sequence
  Description of Artificial Sequence: Synthetic oligonucleotide
ugagcgcugaaaccccacc

SEQ ID NO: 851271 - RNA, 19 nt, Artificial Sequence
  Description of Artificial Sequence: Synthetic oligonucleotide
uccgcaacauccugacuug

SEQ ID NO: 851272 - RNA, 19 nt, Artificial Sequence
  Description of Artificial Sequence: Synthetic oligonucleotide
guccuuuauuaguaaaaga

SEQ ID NO: 851273 - RNA, 19 nt, Artificial Sequence
  Description of Artificial Sequence: Synthetic oligonucleotide
ugagguuacuauagacauc

SEQ ID NO: 851274 - RNA, 19 nt, Artificial Sequence
  Description of Artificial Sequence: Synthetic oligonucleotide
uguauccaaacuuguucau

SEQ ID NO: 851275 - RNA, 19 nt, Artificial Sequence
  Description of Artificial Sequence: Synthetic oligonucleotide
augagaguaaucaaauguu

SEQ ID NO: 851276 - RNA, 19 nt, Artificial Sequence
  Description of Artificial Sequence: Synthetic oligonucleotide
gugaaagguacaucauaac

SEQ ID NO: 851277 - RNA, 19 nt, Artificial Sequence
  Description of Artificial Sequence: Synthetic oligonucleotide
gguaugggaggcuguaucc

SEQ ID NO: 851278 - RNA, 19 nt, Artificial Sequence
  Description of Artificial Sequence: Synthetic oligonucleotide
uuauggcaguucgggagcg

SEQ ID NO: 851279 - RNA, 19 nt, Artificial Sequence
  Description of Artificial Sequence: Synthetic oligonucleotide
ggggauuuuccucauugcc

SEQ ID NO: 851280 - RNA, 19 nt, Artificial Sequence
  Description of Artificial Sequence: Synthetic oligonucleotide
aagggaugcaggugauaga

SEQ ID NO: 851281 - RNA, 19 nt, Artificial Sequence
  Description of Artificial Sequence: Synthetic oligonucleotide
uggucgagagaucuucauc

SEQ ID NO: 851282 - RNA, 19 nt, Artificial Sequence
  Description of Artificial Sequence: Synthetic oligonucleotide
acaagcagucccauucuuc

SEQ ID NO: 851283 - RNA, 19 nt, Artificial Sequence
  Description of Artificial Sequence: Synthetic oligonucleotide
ggcguuguaacaucucuug

SEQ ID NO: 851284 - RNA, 19 nt, Artificial Sequence
  Description of Artificial Sequence: Synthetic oligonucleotide
aggaagcuacuccagcacu

SEQ ID NO: 851285 - RNA, 19 nt, Artificial Sequence
  Description of Artificial Sequence: Synthetic oligonucleotide
uggaacugucacagaagac

SEQ ID NO: 851286 - RNA, 19 nt, Artificial Sequence
  Description of Artificial Sequence: Synthetic oligonucleotide
ugucccacagaggugggug

SEQ ID NO: 851287 - RNA, 19 nt, Artificial Sequence
  Description of Artificial Sequence: Synthetic oligonucleotide
aaucaaauguugggcccug

SEQ ID NO: 851288 - RNA, 19 nt, Artificial Sequence
  Description of Artificial Sequence: Synthetic oligonucleotide
ccacuaggaaaggagaucg

SEQ ID NO: 851289 - RNA, 19 nt, Artificial Sequence
  Description of Artificial Sequence: Synthetic oligonucleotide
cuagcagugaggagagguc

SEQ ID NO: 851290 - RNA, 19 nt, Artificial Sequence
  Description of Artificial Sequence: Synthetic oligonucleotide
gaugcucgcgggcacgaug

SEQ ID NO: 851291 - RNA, 19 nt, Artificial Sequence
  Description of Artificial Sequence: Synthetic oligonucleotide
cgauggggcacaauuaugg

SEQ ID NO: 851292 - RNA, 19 nt, Artificial Sequence
  Description of Artificial Sequence: Synthetic oligonucleotide
ggaggucaaaucugugggg

SEQ ID NO: 851293 - RNA, 19 nt, Artificial Sequence
  Description of Artificial Sequence: Synthetic oligonucleotide
uaucggggaccagagggag

SEQ ID NO: 851294 - RNA, 19 nt, Artificial Sequence
  Description of Artificial Sequence: Synthetic oligonucleotide
aggagaucgcucuggacaa

SEQ ID NO: 851295 - RNA, 19 nt, Artificial Sequence
  Description of Artificial Sequence: Synthetic oligonucleotide
ggcauuaucuaaaauugga

SEQ ID NO: 851296 - RNA, 19 nt, Artificial Sequence
  Description of Artificial Sequence: Synthetic oligonucleotide
cucacaccccucugaaagc

SEQ ID NO: 851297 - RNA, 19 nt, Artificial Sequence
  Description of Artificial Sequence: Synthetic oligonucleotide
caucucuugucggaaggcc

SEQ ID NO: 851298 - RNA, 19 nt, Artificial Sequence
  Description of Artificial Sequence: Synthetic oligonucleotide
cauucaucuucagguauug

SEQ ID NO: 851299 - RNA, 19 nt, Artificial Sequence
  Description of Artificial Sequence: Synthetic oligonucleotide
caccaucuuauaguguccc

SEQ ID NO: 851300 - RNA, 19 nt, Artificial Sequence
  Description of Artificial Sequence: Synthetic oligonucleotide
uagccagcaacugguaugu

SEQ ID NO: 851301 - RNA, 19 nt, Artificial Sequence
  Description of Artificial Sequence: Synthetic oligonucleotide
acauccugacuugagggcu

SEQ ID NO: 851302 - RNA, 19 nt, Artificial Sequence
  Description of Artificial Sequence: Synthetic oligonucleotide
accaggauuugucgcauaa

SEQ ID NO: 851303 - RNA, 19 nt, Artificial Sequence
  Description of Artificial Sequence: Synthetic oligonucleotide
auaccgacacaggacccac

SEQ ID NO: 851304 - RNA, 19 nt, Artificial Sequence
  Description of Artificial Sequence: Synthetic oligonucleotide
ggaggcauuaucuaaaauu

SEQ ID NO: 851305 - RNA, 19 nt, Artificial Sequence
  Description of Artificial Sequence: Synthetic oligonucleotide
caguauucauuggggaagc

SEQ ID NO: 851306 - RNA, 19 nt, Artificial Sequence
  Description of Artificial Sequence: Synthetic oligonucleotide
uggcacugggcuaaaugau

SEQ ID NO: 851307 - RNA, 19 nt, Artificial Sequence
  Description of Artificial Sequence: Synthetic oligonucleotide
ugacuaaagugggcaaaga

SEQ ID NO: 851308 - RNA, 19 nt, Artificial Sequence
  Description of Artificial Sequence: Synthetic oligonucleotide
ucgggagcgggccucacau

SEQ ID NO: 851309 - RNA, 19 nt, Artificial Sequence
  Description of Artificial Sequence: Synthetic oligonucleotide
uacgaccccucugauuuag

SEQ ID NO: 851310 - RNA, 19 nt, Artificial Sequence
  Description of Artificial Sequence: Synthetic oligonucleotide
gaccagcgggaacagaaga

SEQ ID NO: 851311 - RNA, 19 nt, Artificial Sequence
  Description of Artificial Sequence: Synthetic oligonucleotide
gggaaccauaaauagaaua

SEQ ID NO: 851312 - RNA, 19 nt, Artificial Sequence
  Description of Artificial Sequence: Synthetic oligonucleotide
uugggcccugaucucgacc

SEQ ID NO: 851313 - RNA, 19 nt, Artificial Sequence
  Description of Artificial Sequence: Synthetic oligonucleotide
gaccagagggagcccgagg

SEQ ID NO: 851314 - RNA, 19 nt, Artificial Sequence
  Description of Artificial Sequence: Synthetic oligonucleotide
caauuauggcaguucggga

SEQ ID NO: 851315 - RNA, 19 nt, Artificial Sequence
  Description of Artificial Sequence: Synthetic oligonucleotide
augcucgcgggcacgaugg

SEQ ID NO: 851316 - RNA, 19 nt, Artificial Sequence
  Description of Artificial Sequence: Synthetic oligonucleotide
ggaucagucccaaugucug

SEQ ID NO: 851317 - RNA, 19 nt, Artificial Sequence
  Description of Artificial Sequence: Synthetic oligonucleotide
cacuaggaaaggagaucgc

SEQ ID NO: 851318 - RNA, 19 nt, Artificial Sequence
  Description of Artificial Sequence: Synthetic oligonucleotide
gauaccgacacaggaccca

SEQ ID NO: 851319 - RNA, 19 nt, Artificial Sequence
  Description of Artificial Sequence: Synthetic oligonucleotide
ugccauaugcaagcugcug

SEQ ID NO: 851320 - RNA, 19 nt, Artificial Sequence
  Description of Artificial Sequence: Synthetic oligonucleotide
ugggaaccauaaauagaau

SEQ ID NO: 851321 - RNA, 19 nt, Artificial Sequence
  Description of Artificial Sequence: Synthetic oligonucleotide
aggcaggugacugagguua

SEQ ID NO: 851322 - RNA, 19 nt, Artificial Sequence
  Description of Artificial Sequence: Synthetic oligonucleotide
caucucgcagggcuucccg

SEQ ID NO: 851323 - RNA, 19 nt, Artificial Sequence
  Description of Artificial Sequence: Synthetic oligonucleotide
agagaucaaaggagaacca

SEQ ID NO: 851324 - RNA, 19 nt, Artificial Sequence
  Description of Artificial Sequence: Synthetic oligonucleotide
aggugaugcucgcgggcac

SEQ ID NO: 851325 - RNA, 19 nt, Artificial Sequence
  Description of Artificial Sequence: Synthetic oligonucleotide
aggaaccugguggguaucg

SEQ ID NO: 851326 - RNA, 19 nt, Artificial Sequence
  Description of Artificial Sequence: Synthetic oligonucleotide
aggaccccgaggaucaguc

SEQ ID NO: 851327 - RNA, 19 nt, Artificial Sequence
  Description of Artificial Sequence: Synthetic oligonucleotide
gagaugggaggcauuaucu

SEQ ID NO: 851328 - RNA, 19 nt, Artificial Sequence
  Description of Artificial Sequence: Synthetic oligonucleotide
ccaacauucaggagcuuug

SEQ ID NO: 851329 - RNA, 19 nt, Artificial Sequence
  Description of Artificial Sequence: Synthetic oligonucleotide
agcgcugaaaccccaccaa

SEQ ID NO: 851330 - RNA, 19 nt, Artificial Sequence
  Description of Artificial Sequence: Synthetic oligonucleotide
gacccacuaggaaaggaga

SEQ ID NO: 851331 - RNA, 19 nt, Artificial Sequence
  Description of Artificial Sequence: Synthetic oligonucleotide
aagggauuucuguguucaa

SEQ ID NO: 851332 - RNA, 19 nt, Artificial Sequence
  Description of Artificial Sequence: Synthetic oligonucleotide
accaucuuauaguguccca

SEQ ID NO: 851333 - RNA, 19 nt, Artificial Sequence
  Description of Artificial Sequence: Synthetic oligonucleotide
ucuugucggaaggccuggg

SEQ ID NO: 851334 - RNA, 19 nt, Artificial Sequence
  Description of Artificial Sequence: Synthetic oligonucleotide
gcacuaaggcuucggaagc

SEQ ID NO: 851335 - RNA, 19 nt, Artificial Sequence
  Description of Artificial Sequence: Synthetic oligonucleotide
gaucucgaccaaacagggc

SEQ ID NO: 851336 - RNA, 19 nt, Artificial Sequence
  Description of Artificial Sequence: Synthetic oligonucleotide
agggcacuaaggcuucgga

SEQ ID NO: 851337 - RNA, 19 nt, Artificial Sequence
  Description of Artificial Sequence: Synthetic oligonucleotide
caucacgaggaugagagua

SEQ ID NO: 851338 - RNA, 19 nt, Artificial Sequence
  Description of Artificial Sequence: Synthetic oligonucleotide
gggauuaccaggauuuguc

SEQ ID NO: 851339 - RNA, 19 nt, Artificial Sequence
  Description of Artificial Sequence: Synthetic oligonucleotide
gaucccucacaccccucug

SEQ ID NO: 851340 - RNA, 19 nt, Artificial Sequence
  Description of Artificial Sequence: Synthetic oligonucleotide
ggucacucuuggaaaagag

SEQ ID NO: 851341 - RNA, 19 nt, Artificial Sequence
  Description of Artificial Sequence: Synthetic oligonucleotide
agugggcaaagaagaauca

SEQ ID NO: 851342 - RNA, 19 nt, Artificial Sequence
  Description of Artificial Sequence: Synthetic oligonucleotide
gagugagcgcugaaacccc

SEQ ID NO: 851343 - RNA, 19 nt, Artificial Sequence
  Description of Artificial Sequence: Synthetic oligonucleotide
cugggcuaaaugauaccga

SEQ ID NO: 851344 - RNA, 19 nt, Artificial Sequence
  Description of Artificial Sequence: Synthetic oligonucleotide
cugcaggacgguaccggcc

SEQ ID NO: 851345 - RNA, 19 nt, Artificial Sequence
  Description of Artificial Sequence: Synthetic oligonucleotide
acacaggacccacuaggaa

SEQ ID NO: 851346 - RNA, 19 nt, Artificial Sequence
  Description of Artificial Sequence: Synthetic oligonucleotide
ggggauacgaccccucuga

SEQ ID NO: 851347 - RNA, 19 nt, Artificial Sequence
  Description of Artificial Sequence: Synthetic oligonucleotide
aacugguaugucagugagu

SEQ ID NO: 851348 - RNA, 19 nt, Artificial Sequence
  Description of Artificial Sequence: Synthetic oligonucleotide
accgacacaggacccacua

SEQ ID NO: 851349 - RNA, 19 nt, Artificial Sequence
  Description of Artificial Sequence: Synthetic oligonucleotide
ucccgcaccccaacauuca

SEQ ID NO: 851350 - RNA, 19 nt, Artificial Sequence
  Description of Artificial Sequence: Synthetic oligonucleotide
aucccucacaccccucuga

SEQ ID NO: 851351 - RNA, 19 nt, Artificial Sequence
  Description of Artificial Sequence: Synthetic oligonucleotide
gagaagccccggcagcaac

SEQ ID NO: 851352 - RNA, 19 nt, Artificial Sequence
  Description of Artificial Sequence: Synthetic oligonucleotide
cacccggggauuccgcucc

SEQ ID NO: 851353 - RNA, 19 nt, Artificial Sequence
  Description of Artificial Sequence: Synthetic oligonucleotide
accccaacauucaggagcu

SEQ ID NO: 851354 - RNA, 19 nt, Artificial Sequence
  Description of Artificial Sequence: Synthetic oligonucleotide
cugaaaccccaccaaagua

SEQ ID NO: 851355 - RNA, 19 nt, Artificial Sequence
  Description of Artificial Sequence: Synthetic oligonucleotide
auagugucccacagaggug

SEQ ID NO: 851356 - RNA, 19 nt, Artificial Sequence
  Description of Artificial Sequence: Synthetic oligonucleotide
aggucacucuuggaaaaga

SEQ ID NO: 851357 - RNA, 19 nt, Artificial Sequence
  Description of Artificial Sequence: Synthetic oligonucleotide
gaaaccccaccaaaguacu

SEQ ID NO: 851358 - RNA, 19 nt, Artificial Sequence
  Description of Artificial Sequence: Synthetic oligonucleotide
cacgaggaugagaguaauc

SEQ ID NO: 851359 - RNA, 19 nt, Artificial Sequence
  Description of Artificial Sequence: Synthetic oligonucleotide
aaaugacaucaaggauuca

SEQ ID NO: 851360 - RNA, 19 nt, Artificial Sequence
  Description of Artificial Sequence: Synthetic oligonucleotide
acaucacgaggaugagagu

SEQ ID NO: 851361 - RNA, 19 nt, Artificial Sequence
  Description of Artificial Sequence: Synthetic oligonucleotide
gagcgggccucacauccug

SEQ ID NO: 851362 - RNA, 19 nt, Artificial Sequence
  Description of Artificial Sequence: Synthetic oligonucleotide
auaagcccugagaggugac

SEQ ID NO: 851363 - RNA, 19 nt, Artificial Sequence
  Description of Artificial Sequence: Synthetic oligonucleotide
ggugacugagguuacuaua

SEQ ID NO: 851364 - RNA, 19 nt, Artificial Sequence
  Description of Artificial Sequence: Synthetic oligonucleotide
gacgaggaaggggcuuagg

SEQ ID NO: 851365 - RNA, 19 nt, Artificial Sequence
  Description of Artificial Sequence: Synthetic oligonucleotide
cucuugucggaaggccugg

SEQ ID NO: 851366 - RNA, 19 nt, Artificial Sequence
  Description of Artificial Sequence: Synthetic oligonucleotide
ucacagucauaagcccuga

SEQ ID NO: 851367 - RNA, 19 nt, Artificial Sequence
  Description of Artificial Sequence: Synthetic oligonucleotide
guuccacccggggauuccg

SEQ ID NO: 851368 - RNA, 19 nt, Artificial Sequence
  Description of Artificial Sequence: Synthetic oligonucleotide
guggguaucggggaccaga

SEQ ID NO: 851369 - RNA, 19 nt, Artificial Sequence
  Description of Artificial Sequence: Synthetic oligonucleotide
uccacccggggauuccgcu

SEQ ID NO: 851370 - RNA, 19 nt, Artificial Sequence
  Description of Artificial Sequence: Synthetic oligonucleotide
acgauggggcacaauuaug

SEQ ID NO: 851371 - RNA, 19 nt, Artificial Sequence
  Description of Artificial Sequence: Synthetic oligonucleotide
uuccacccggggauuccgc

SEQ ID NO: 851372 - RNA, 19 nt, Artificial Sequence
  Description of Artificial Sequence: Synthetic oligonucleotide
ggguaugggaggcuguauc

SEQ ID NO: 851373 - RNA, 19 nt, Artificial Sequence
  Description of Artificial Sequence: Synthetic oligonucleotide
ccaucuuauagugucccac

SEQ ID NO: 851374 - RNA, 19 nt, Artificial Sequence
  Description of Artificial Sequence: Synthetic oligonucleotide
ucaucucgcagggcuuccc

SEQ ID NO: 851375 - RNA, 19 nt, Artificial Sequence
  Description of Artificial Sequence: Synthetic oligonucleotide
ugguggguaucggggacca

SEQ ID NO: 851376 - RNA, 19 nt, Artificial Sequence
  Description of Artificial Sequence: Synthetic oligonucleotide
cuccgcaacauccugacuu

SEQ ID NO: 851377 - RNA, 19 nt, Artificial Sequence
  Description of Artificial Sequence: Synthetic oligonucleotide
cugguggguaucggggacc

SEQ ID NO: 851378 - RNA, 19 nt, Artificial Sequence
  Description of Artificial Sequence: Synthetic oligonucleotide
caggcggacccugguagcg

SEQ ID NO: 851379 - RNA, 19 nt, Artificial Sequence
  Description of Artificial Sequence: Synthetic oligonucleotide
gagaucgcucuggacaaaa

SEQ ID NO: 851380 - RNA, 19 nt, Artificial Sequence
  Description of Artificial Sequence: Synthetic oligonucleotide
guauccaaacuuguucaua

SEQ ID NO: 851381 - RNA, 19 nt, Artificial Sequence
  Description of Artificial Sequence: Synthetic oligonucleotide
uguggggauuuuccucauu

SEQ ID NO: 851382 - RNA, 19 nt, Artificial Sequence
  Description of Artificial Sequence: Synthetic oligonucleotide
gguacggaccaggagguca

SEQ ID NO: 851383 - RNA, 19 nt, Artificial Sequence
  Description of Artificial Sequence: Synthetic oligonucleotide
cuggaaggagguccacauc

SEQ ID NO: 851384 - RNA, 19 nt, Artificial Sequence
  Description of Artificial Sequence: Synthetic oligonucleotide
gccccaguauucauugggg

SEQ ID NO: 851385 - RNA, 19 nt, Artificial Sequence
  Description of Artificial Sequence: Synthetic oligonucleotide
aggacccacuaggaaagga

SEQ ID NO: 851386 - RNA, 19 nt, Artificial Sequence
  Description of Artificial Sequence: Synthetic oligonucleotide
gcuagugauggcacugggc

SEQ ID NO: 851387 - RNA, 19 nt, Artificial Sequence
  Description of Artificial Sequence: Synthetic oligonucleotide
gcuaaaugauaccgacaca

SEQ ID NO: 851388 - RNA, 19 nt, Artificial Sequence
  Description of Artificial Sequence: Synthetic oligonucleotide
cuugucggaaggccuggga

SEQ ID NO: 851389 - RNA, 19 nt, Artificial Sequence
  Description of Artificial Sequence: Synthetic oligonucleotide
gugugaaccauggggagcu

SEQ ID NO: 851390 - RNA, 19 nt, Artificial Sequence
  Description of Artificial Sequence: Synthetic oligonucleotide
uaccgacacaggacccacu

SEQ ID NO: 851391 - RNA, 19 nt, Artificial Sequence
  Description of Artificial Sequence: Synthetic oligonucleotide
cuagugaaagguacaucau

SEQ ID NO: 851392 - RNA, 19 nt, Artificial Sequence
  Description of Artificial Sequence: Synthetic oligonucleotide
ggauuucuguguucaagcu

SEQ ID NO: 851393 - RNA, 19 nt, Artificial Sequence
  Description of Artificial Sequence: Synthetic oligonucleotide
ggauuuuccucauugccuu

SEQ ID NO: 851394 - RNA, 19 nt, Artificial Sequence
  Description of Artificial Sequence: Synthetic oligonucleotide
gguauacagaggacccagc

SEQ ID NO: 851395 - RNA, 19 nt, Artificial Sequence
  Description of Artificial Sequence: Synthetic oligonucleotide
ggcuaggaaaagagugaag

SEQ ID NO: 851396 - RNA, 19 nt, Artificial Sequence
  Description of Artificial Sequence: Synthetic oligonucleotide
caucccagccaggcggacc

SEQ ID NO: 851397 - RNA, 19 nt, Artificial Sequence
  Description of Artificial Sequence: Synthetic oligonucleotide
ccaguugggagcccacaag

SEQ ID NO: 851398 - RNA, 19 nt, Artificial Sequence
  Description of Artificial Sequence: Synthetic oligonucleotide
gaccccucugauuuaguuu

SEQ ID NO: 851399 - RNA, 19 nt, Artificial Sequence
  Description of Artificial Sequence: Synthetic oligonucleotide
gcaggugaugcucgcgggc

SEQ ID NO: 851400 - RNA, 19 nt, Artificial Sequence
  Description of Artificial Sequence: Synthetic oligonucleotide
ucgaccaaacagggcacua

SEQ ID NO: 851401 - RNA, 19 nt, Artificial Sequence
  Description of Artificial Sequence: Synthetic oligonucleotide
gggauuuuccucauugccu

SEQ ID NO: 851402 - RNA, 19 nt, Artificial Sequence
  Description of Artificial Sequence: Synthetic oligonucleotide
guacaucauaacugccagu

SEQ ID NO: 851403 - RNA, 19 nt, Artificial Sequence
  Description of Artificial Sequence: Synthetic oligonucleotide
cucgcagggcuucccgcac

SEQ ID NO: 851404 - RNA, 19 nt, Artificial Sequence
  Description of Artificial Sequence: Synthetic oligonucleotide
agugagcgcugaaacccca

SEQ ID NO: 851405 - RNA, 19 nt, Artificial Sequence
  Description of Artificial Sequence: Synthetic oligonucleotide
ggguaucggggaccagagg

SEQ ID NO: 851406 - RNA, 19 nt, Artificial Sequence
  Description of Artificial Sequence: Synthetic oligonucleotide
uggguggucgagagaucuu

SEQ ID NO: 851407 - RNA, 19 nt, Artificial Sequence
  Description of Artificial Sequence: Synthetic oligonucleotide
cacgauggggcacaauuau

SEQ ID NO: 851408 - RNA, 19 nt, Artificial Sequence
  Description of Artificial Sequence: Synthetic oligonucleotide
guggguggucgagagaucu

SEQ ID NO: 851409 - RNA, 19 nt, Artificial Sequence
  Description of Artificial Sequence: Synthetic oligonucleotide
uaccaggauuugucgcaua

SEQ ID NO: 851410 - RNA, 19 nt, Artificial Sequence
  Description of Artificial Sequence: Synthetic oligonucleotide
ccgcaccccaacauucagg

SEQ ID NO: 851411 - RNA, 19 nt, Artificial Sequence
  Description of Artificial Sequence: Synthetic oligonucleotide
gugaagggauuucuguguu

SEQ ID NO: 851412 - RNA, 19 nt, Artificial Sequence
  Description of Artificial Sequence: Synthetic oligonucleotide
acagacgaggaaggggcuu

SEQ ID NO: 851413 - RNA, 19 nt, Artificial Sequence
  Description of Artificial Sequence: Synthetic oligonucleotide
cuuggaaaagagugauguu

SEQ ID NO: 851414 - RNA, 19 nt, Artificial Sequence
  Description of Artificial Sequence: Synthetic oligonucleotide
ggaccagcgggaacagaag

SEQ ID NO: 851415 - RNA, 19 nt, Artificial Sequence
  Description of Artificial Sequence: Synthetic oligonucleotide
gggcuuaggguccagcccu

SEQ ID NO: 851416 - RNA, 19 nt, Artificial Sequence
  Description of Artificial Sequence: Synthetic oligonucleotide
ggguggucgagagaucuuc

SEQ ID NO: 851417 - RNA, 19 nt, Artificial Sequence
  Description of Artificial Sequence: Synthetic oligonucleotide
gggcacuaaggcuucggaa

SEQ ID NO: 851418 - RNA, 19 nt, Artificial Sequence
  Description of Artificial Sequence: Synthetic oligonucleotide
gcagucccauucuucaucu

SEQ ID NO: 851419 - RNA, 19 nt, Artificial Sequence
  Description of Artificial Sequence: Synthetic oligonucleotide
gcagugauguugguauaca

SEQ ID NO: 851420 - RNA, 19 nt, Artificial Sequence
  Description of Artificial Sequence: Synthetic oligonucleotide
ucauugccuuuguccccuc

SEQ ID NO: 851421 - RNA, 19 nt, Artificial Sequence
  Description of Artificial Sequence: Synthetic oligonucleotide
gcaaccggagccccaggca

SEQ ID NO: 851422 - RNA, 19 nt, Artificial Sequence
  Description of Artificial Sequence: Synthetic oligonucleotide
gugagcgcugaaaccccac

SEQ ID NO: 851423 - RNA, 19 nt, Artificial Sequence
  Description of Artificial Sequence: Synthetic oligonucleotide
cgcaccccaacauucagga

SEQ ID NO: 851424 - RNA, 19 nt, Artificial Sequence
  Description of Artificial Sequence: Synthetic oligonucleotide
guggucgagagaucuucau

SEQ ID NO: 851425 - RNA, 19 nt, Artificial Sequence
  Description of Artificial Sequence: Synthetic oligonucleotide
guccccggggagcagagau

SEQ ID NO: 851426 - RNA, 19 nt, Artificial Sequence
  Description of Artificial Sequence: Synthetic oligonucleotide
gguggucgagagaucuuca

SEQ ID NO: 851427 - RNA, 19 nt, Artificial Sequence
  Description of Artificial Sequence: Synthetic oligonucleotide
cagcgggaacagaagagau

SEQ ID NO: 851428 - RNA, 19 nt, Artificial Sequence
  Description of Artificial Sequence: Synthetic oligonucleotide
ccccucggacccaagacca

SEQ ID NO: 851429 - RNA, 19 nt, Artificial Sequence
  Description of Artificial Sequence: Synthetic oligonucleotide
cuuugcccuguuaaacauu

SEQ ID NO: 851430 - RNA, 19 nt, Artificial Sequence
  Description of Artificial Sequence: Synthetic oligonucleotide
ccccaguauucauugggga

SEQ ID NO: 851431 - RNA, 19 nt, Artificial Sequence
  Description of Artificial Sequence: Synthetic oligonucleotide
cccuagaaagaggaaccuc

SEQ ID NO: 851432 - RNA, 19 nt, Artificial Sequence
  Description of Artificial Sequence: Synthetic oligonucleotide
gcucgcgggcacgaugggg

SEQ ID NO: 851433 - RNA, 19 nt, Artificial Sequence
  Description of Artificial Sequence: Synthetic oligonucleotide
ccaggcggacccugguagc

SEQ ID NO: 851434 - RNA, 19 nt, Artificial Sequence
  Description of Artificial Sequence: Synthetic oligonucleotide
gugaugcucgcgggcacga

SEQ ID NO: 851435 - RNA, 19 nt, Artificial Sequence
  Description of Artificial Sequence: Synthetic oligonucleotide
gcccugaucucgaccaaac

SEQ ID NO: 851436 - RNA, 19 nt, Artificial Sequence
  Description of Artificial Sequence: Synthetic oligonucleotide
gccaguugggagcccacaa

SEQ ID NO: 851437 - RNA, 19 nt, Artificial Sequence
  Description of Artificial Sequence: Synthetic oligonucleotide
ggaggaaccugguggguau

SEQ ID NO: 851438 - RNA, 19 nt, Artificial Sequence
  Description of Artificial Sequence: Synthetic oligonucleotide
ccgacacaggacccacuag

SEQ ID NO: 851439 - RNA, 19 nt, Artificial Sequence
  Description of Artificial Sequence: Synthetic oligonucleotide
cagacgaggaaggggcuua

SEQ ID NO: 851440 - RNA, 19 nt, Artificial Sequence
  Description of Artificial Sequence: Synthetic oligonucleotide
aggcggacccugguagcga

SEQ ID NO: 851441 - RNA, 19 nt, Artificial Sequence
  Description of Artificial Sequence: Synthetic oligonucleotide
gcguuguaacaucucuugu

SEQ ID NO: 851442 - RNA, 19 nt, Artificial Sequence
  Description of Artificial Sequence: Synthetic oligonucleotide
cagccaaaucugggaccag

SEQ ID NO: 851443 - RNA, 19 nt, Artificial Sequence
  Description of Artificial Sequence: Synthetic oligonucleotide
ugaugcucgcgggcacgau

SEQ ID NO: 851444 - RNA, 19 nt, Artificial Sequence
  Description of Artificial Sequence: Synthetic oligonucleotide
cccgcaccccaacauucag

SEQ ID NO: 851445 - RNA, 19 nt, Artificial Sequence
  Description of Artificial Sequence: Synthetic oligonucleotide
gugaaccauggggagcugu

SEQ ID NO: 851446 - RNA, 19 nt, Artificial Sequence
  Description of Artificial Sequence: Synthetic oligonucleotide
ggggauuaccaggauuugu

SEQ ID NO: 851447 - RNA, 19 nt, Artificial Sequence
  Description of Artificial Sequence: Synthetic oligonucleotide
ggagcccgaggaccccgag

SEQ ID NO: 851448 - RNA, 19 nt, Artificial Sequence
  Description of Artificial Sequence: Synthetic oligonucleotide
ggaaaagagugaagggauu

SEQ ID NO: 851449 - RNA, 19 nt, Artificial Sequence
  Description of Artificial Sequence: Synthetic oligonucleotide
gcaggacgguaccggcccc

SEQ ID NO: 851450 - RNA, 19 nt, Artificial Sequence
  Description of Artificial Sequence: Synthetic oligonucleotide
cuucccgcaccccaacauu

SEQ ID NO: 851451 - RNA, 19 nt, Artificial Sequence
  Description of Artificial Sequence: Synthetic oligonucleotide
acgaccccucugauuuagu

SEQ ID NO: 851452 - RNA, 19 nt, Artificial Sequence
  Description of Artificial Sequence: Synthetic oligonucleotide
ggauacgaccccucugauu

SEQ ID NO: 851453 - RNA, 19 nt, Artificial Sequence
  Description of Artificial Sequence: Synthetic oligonucleotide
gcacgauggggcacaauua

SEQ ID NO: 851454 - RNA, 19 nt, Artificial Sequence
  Description of Artificial Sequence: Synthetic oligonucleotide
ggucaggagugagcgcuga

SEQ ID NO: 851455 - RNA, 19 nt, Artificial Sequence
  Description of Artificial Sequence: Synthetic oligonucleotide
gcuuaggguccagcccugc

SEQ ID NO: 851456 - RNA, 19 nt, Artificial Sequence
  Description of Artificial Sequence: Synthetic oligonucleotide
acccggggauuccgcucca

SEQ ID NO: 851457 - RNA, 19 nt, Artificial Sequence
  Description of Artificial Sequence: Synthetic oligonucleotide
gggaggcauuaucuaaaau

SEQ ID NO: 851458 - RNA, 19 nt, Artificial Sequence
  Description of Artificial Sequence: Synthetic oligonucleotide
cgaggaucagucccaaugu

SEQ ID NO: 851459 - RNA, 19 nt, Artificial Sequence
  Description of Artificial Sequence: Synthetic oligonucleotide
cccugaucucgaccaaaca

SEQ ID NO: 851460 - RNA, 19 nt, Artificial Sequence
  Description of Artificial Sequence: Synthetic oligonucleotide
ccccugguuccacccgggg

SEQ ID NO: 851461 - RNA, 19 nt, Artificial Sequence
  Description of Artificial Sequence: Synthetic oligonucleotide
ccacccggggauuccgcuc

SEQ ID NO: 851462 - RNA, 19 nt, Artificial Sequence
  Description of Artificial Sequence: Synthetic oligonucleotide
cucgaccaaacagggcacu

SEQ ID NO: 851463 - RNA, 19 nt, Artificial Sequence
  Description of Artificial Sequence: Synthetic oligonucleotide
ccaagaccaaaggaagcua

SEQ ID NO: 851464 - RNA, 19 nt, Artificial Sequence
  Description of Artificial Sequence: Synthetic oligonucleotide
ccggcguuguaacaucucu

SEQ ID NO: 851465 - RNA, 19 nt, Artificial Sequence
  Description of Artificial Sequence: Synthetic oligonucleotide
guaugucagugaguucauu

SEQ ID NO: 851466 - RNA, 19 nt, Artificial Sequence
  Description of Artificial Sequence: Synthetic oligonucleotide
gguggguggucgagagauc

SEQ ID NO: 851467 - RNA, 19 nt, Artificial Sequence
  Description of Artificial Sequence: Synthetic oligonucleotide
ggaagggaugcaggugaua

SEQ ID NO: 851468 - RNA, 19 nt, Artificial Sequence
  Description of Artificial Sequence: Synthetic oligonucleotide
gggccaaugugcagggccu

SEQ ID NO: 851469 - RNA, 19 nt, Artificial Sequence
  Description of Artificial Sequence: Synthetic oligonucleotide
ggccaaugugcagggccuc

SEQ ID NO: 851470 - RNA, 19 nt, Artificial Sequence
  Description of Artificial Sequence: Synthetic oligonucleotide
ccaggauuugucgcauaaa

SEQ ID NO: 851471 - RNA, 19 nt, Artificial Sequence
  Description of Artificial Sequence: Synthetic oligonucleotide
guucgggagcgggccucac

SEQ ID NO: 851472 - RNA, 19 nt, Artificial Sequence
  Description of Artificial Sequence: Synthetic oligonucleotide
ggcccugaucucgaccaaa

SEQ ID NO: 851473 - RNA, 19 nt, Artificial Sequence
  Description of Artificial Sequence: Synthetic oligonucleotide
cggggauuccgcuccacaa

SEQ ID NO: 851474 - RNA, 19 nt, Artificial Sequence
  Description of Artificial Sequence: Synthetic oligonucleotide
gggauacgaccccucugau

SEQ ID NO: 851475 - RNA, 19 nt, Artificial Sequence
  Description of Artificial Sequence: Synthetic oligonucleotide
ccccucugauuuaguuuca

SEQ ID NO: 851476 - RNA, 19 nt, Artificial Sequence
  Description of Artificial Sequence: Synthetic oligonucleotide
ggagaucgcucuggacaaa

SEQ ID NO: 851477 - RNA, 19 nt, Artificial Sequence
  Description of Artificial Sequence: Synthetic oligonucleotide
ggcggacccugguagcgau

SEQ ID NO: 851478 - RNA, 19 nt, Artificial Sequence
  Description of Artificial Sequence: Synthetic oligonucleotide
gcggacccugguagcgaug

SEQ ID NO: 851479 - RNA, 19 nt, Artificial Sequence
  Description of Artificial Sequence: Synthetic oligonucleotide
gggcccugaucucgaccaa

SEQ ID NO: 851480 - RNA, 19 nt, Artificial Sequence
  Description of Artificial Sequence: Synthetic oligonucleotide
ggccggcguuguaacaucu

SEQ ID NO: 851481 - RNA, 19 nt, Artificial Sequence
  Description of Artificial Sequence: Synthetic oligonucleotide
ccgcaacauccugacuuga

SEQ ID NO: 851482 - RNA, 19 nt, Artificial Sequence
  Description of Artificial Sequence: Synthetic oligonucleotide
ggagcgggccucacauccu

SEQ ID NO: 851483 - RNA, 19 nt, Artificial Sequence
  Description of Artificial Sequence: Synthetic oligonucleotide
cgggagcgggccucacauc

SEQ ID NO: 851484 - RNA, 19 nt, Artificial Sequence
  Description of Artificial Sequence: Synthetic oligonucleotide
cgaccccucugauuuaguu

SEQ ID NO: 851485 - RNA, 19 nt, Artificial Sequence
  Description of Artificial Sequence: Synthetic oligonucleotide
cccucugauuuaguuucau

SEQ ID NO: 851486 - RNA, 19 nt, Artificial Sequence
  Description of Artificial Sequence: Synthetic oligonucleotide
ccuccgcaacauccugacu

SEQ ID NO: 851487 - RNA, 19 nt, Artificial Sequence
  Description of Artificial Sequence: Synthetic oligonucleotide
ccccgaggaucagucccaa

SEQ ID NO: 851488 - RNA, 19 nt, Artificial Sequence
  Description of Artificial Sequence: Synthetic oligonucleotide
cccgaggaucagucccaau

SEQ ID NO: 851489 - RNA, 19 nt, Artificial Sequence
  Description of Artificial Sequence: Synthetic oligonucleotide
ccccaacauucaggagcuu

SEQ ID NO: 851490 - RNA, 19 nt, Artificial Sequence
  Description of Artificial Sequence: Synthetic oligonucleotide
aaauuuccggacuaguucc

SEQ ID NO: 851491 - RNA, 19 nt, Artificial Sequence
  Description of Artificial Sequence: Synthetic oligonucleotide
ugaacgcaaagucaaaggg

SEQ ID NO: 851492 - RNA, 19 nt, Artificial Sequence
  Description of Artificial Sequence: Synthetic oligonucleotide
aaaaugaugaggguaucac

SEQ ID NO: 851493 - RNA, 19 nt, Artificial Sequence
  Description of Artificial Sequence: Synthetic oligonucleotide
guugaagugaugcacaccc

SEQ ID NO: 851494 - RNA, 19 nt, Artificial Sequence
  Description of Artificial Sequence: Synthetic oligonucleotide
guaguaaugguggagaucc

SEQ ID NO: 851495 - RNA, 19 nt, Artificial Sequence
  Description of Artificial Sequence: Synthetic oligonucleotide
ugggauaugaaauggagaa

SEQ ID NO: 851496 - RNA, 19 nt, Artificial Sequence
  Description of Artificial Sequence: Synthetic oligonucleotide
ugguauggacagaagagag

SEQ ID NO: 851497 - RNA, 19 nt, Artificial Sequence
  Description of Artificial Sequence: Synthetic oligonucleotide
gagaauaguggauccgugg

SEQ ID NO: 851498 - RNA, 19 nt, Artificial Sequence
  Description of Artificial Sequence: Synthetic oligonucleotide
uauggaaagccccacugug

SEQ ID NO: 851499 - RNA, 19 nt, Artificial Sequence
  Description of Artificial Sequence: Synthetic oligonucleotide
cugagauugugaaugagac

SEQ ID NO: 851500 - RNA, 19 nt, Artificial Sequence
  Description of Artificial Sequence: Synthetic oligonucleotide
uuuccgauaaugccugugc

SEQ ID NO: 851501 - RNA, 19 nt, Artificial Sequence
  Description of Artificial Sequence: Synthetic oligonucleotide
acguaaaggaagaaaggcc

SEQ ID NO: 851502 - RNA, 19 nt, Artificial Sequence
  Description of Artificial Sequence: Synthetic oligonucleotide
ugaagugaugcacacccug

SEQ ID NO: 851503 - RNA, 19 nt, Artificial Sequence
  Description of Artificial Sequence: Synthetic oligonucleotide
auugugaaggggucggcac

SEQ ID NO: 851504 - RNA, 19 nt, Artificial Sequence
  Description of Artificial Sequence: Synthetic oligonucleotide
uccuuaauccuagugaugu

SEQ ID NO: 851505 - RNA, 19 nt, Artificial Sequence
  Description of Artificial Sequence: Synthetic oligonucleotide
gguaucacucaguacaccg

SEQ ID NO: 851506 - RNA, 19 nt, Artificial Sequence
  Description of Artificial Sequence: Synthetic oligonucleotide
gugaacgcaaagucaaagg

SEQ ID NO: 851507 - RNA, 19 nt, Artificial Sequence
  Description of Artificial Sequence: Synthetic oligonucleotide
ggauaugaaauggagaacc

SEQ ID NO: 851508 - RNA, 19 nt, Artificial Sequence
  Description of Artificial Sequence: Synthetic oligonucleotide
uuccgauaaugccugugcg

SEQ ID NO: 851509 - RNA, 19 nt, Artificial Sequence
  Description of Artificial Sequence: Synthetic oligonucleotide
gaaggcguugaagugaugc

SEQ ID NO: 851510 - RNA, 19 nt, Artificial Sequence
  Description of Artificial Sequence: Synthetic oligonucleotide
ugugaaaaugaugagggua

SEQ ID NO: 851511 - RNA, 19 nt, Artificial Sequence
  Description of Artificial Sequence: Synthetic oligonucleotide
cacguaaaggaagaaaggc

SEQ ID NO: 851512 - RNA, 19 nt, Artificial Sequence
  Description of Artificial Sequence: Synthetic oligonucleotide
ugugaacgcaaagucaaag

SEQ ID NO: 851513 - RNA, 19 nt, Artificial Sequence
  Description of Artificial Sequence: Synthetic oligonucleotide
aauaguggauccguggcca

SEQ ID NO: 851514 - RNA, 19 nt, Artificial Sequence
  Description of Artificial Sequence: Synthetic oligonucleotide
agugguauggacagaagag

SEQ ID NO: 851515 - RNA, 19 nt, Artificial Sequence
  Description of Artificial Sequence: Synthetic oligonucleotide
gcuggauagucuuugagcc

SEQ ID NO: 851516 - RNA, 19 nt, Artificial Sequence
  Description of Artificial Sequence: Synthetic oligonucleotide
uucccgguaguaguaaugg

SEQ ID NO: 851517 - RNA, 19 nt, Artificial Sequence
  Description of Artificial Sequence: Synthetic oligonucleotide
gaauaguggauccguggcc

SEQ ID NO: 851518 - RNA, 19 nt, Artificial Sequence
  Description of Artificial Sequence: Synthetic oligonucleotide
gacaucguagaguucccag

SEQ ID NO: 851519 - RNA, 19 nt, Artificial Sequence
  Description of Artificial Sequence: Synthetic oligonucleotide
uggaaugcgccccaugcca

SEQ ID NO: 851520 - RNA, 19 nt, Artificial Sequence
  Description of Artificial Sequence: Synthetic oligonucleotide
ugugagaauaguggauccg

SEQ ID NO: 851521 - RNA, 19 nt, Artificial Sequence
  Description of Artificial Sequence: Synthetic oligonucleotide
uugugagaauaguggaucc

SEQ ID NO: 851522 - RNA, 19 nt, Artificial Sequence
  Description of Artificial Sequence: Synthetic oligonucleotide
guaaaugaacaacaccaca

SEQ ID NO: 851523 - RNA, 19 nt, Artificial Sequence
  Description of Artificial Sequence: Synthetic oligonucleotide
ugagaauaguggauccgug

SEQ ID NO: 851524 - RNA, 19 nt, Artificial Sequence
  Description of Artificial Sequence: Synthetic oligonucleotide
gaagugaugcacacccugg

SEQ ID NO: 851525 - RNA, 19 nt, Artificial Sequence
  Description of Artificial Sequence: Synthetic oligonucleotide
gaaggucggcgacacauag

SEQ ID NO: 851526 - RNA, 19 nt, Artificial Sequence
  Description of Artificial Sequence: Synthetic oligonucleotide
ugucuguacagcagccuag

SEQ ID NO: 851527 - RNA, 19 nt, Artificial Sequence
  Description of Artificial Sequence: Synthetic oligonucleotide
accggcacuuugcagcucc

SEQ ID NO: 851528 - RNA, 19 nt, Artificial Sequence
  Description of Artificial Sequence: Synthetic oligonucleotide
uggucgauggggaaaggca

SEQ ID NO: 851529 - RNA, 19 nt, Artificial Sequence
  Description of Artificial Sequence: Synthetic oligonucleotide
guauggccuggacugaugg

SEQ ID NO: 851530 - RNA, 19 nt, Artificial Sequence
  Description of Artificial Sequence: Synthetic oligonucleotide
aaagccacguaaaggaaga

SEQ ID NO: 851531 - RNA, 19 nt, Artificial Sequence
  Description of Artificial Sequence: Synthetic oligonucleotide
uguccuagggcugacaguc

SEQ ID NO: 851532 - RNA, 19 nt, Artificial Sequence
  Description of Artificial Sequence: Synthetic oligonucleotide
uccgauaaugccugugcgc

SEQ ID NO: 851533 - RNA, 19 nt, Artificial Sequence
  Description of Artificial Sequence: Synthetic oligonucleotide
cuugugagaauaguggauc

SEQ ID NO: 851534 - RNA, 19 nt, Artificial Sequence
  Description of Artificial Sequence: Synthetic oligonucleotide
agcagaagaaagugguaug

SEQ ID NO: 851535 - RNA, 19 nt, Artificial Sequence
  Description of Artificial Sequence: Synthetic oligonucleotide
acuaguuccuuaauccuag

SEQ ID NO: 851536 - RNA, 19 nt, Artificial Sequence
  Description of Artificial Sequence: Synthetic oligonucleotide
ugguggagauccuuguacc

SEQ ID NO: 851537 - RNA, 19 nt, Artificial Sequence
  Description of Artificial Sequence: Synthetic oligonucleotide
guagacggagcgcaugggg

SEQ ID NO: 851538 - RNA, 19 nt, Artificial Sequence
  Description of Artificial Sequence: Synthetic oligonucleotide
aaaguacggcaccaucaca

SEQ ID NO: 851539 - RNA, 19 nt, Artificial Sequence
  Description of Artificial Sequence: Synthetic oligonucleotide
agucaagguguaaaugaac

SEQ ID NO: 851540 - RNA, 19 nt, Artificial Sequence
  Description of Artificial Sequence: Synthetic oligonucleotide
ucuuggucgauggggaaag

SEQ ID NO: 851541 - RNA, 19 nt, Artificial Sequence
  Description of Artificial Sequence: Synthetic oligonucleotide
uggagauccuuguaccagc

SEQ ID NO: 851542 - RNA, 19 nt, Artificial Sequence
  Description of Artificial Sequence: Synthetic oligonucleotide
accaacaaggguucugcug

SEQ ID NO: 851543 - RNA, 19 nt, Artificial Sequence
  Description of Artificial Sequence: Synthetic oligonucleotide
caaaguacggcaccaucac

SEQ ID NO: 851544 - RNA, 19 nt, Artificial Sequence
  Description of Artificial Sequence: Synthetic oligonucleotide
uguuccgucccaccugcag

SEQ ID NO: 851545 - RNA, 19 nt, Artificial Sequence
  Description of Artificial Sequence: Synthetic oligonucleotide
uuccuuaauccuagugaug

SEQ ID NO: 851546 - RNA, 19 nt, Artificial Sequence
  Description of Artificial Sequence: Synthetic oligonucleotide
aacaaggguucugcuguac

SEQ ID NO: 851547 - RNA, 19 nt, Artificial Sequence
  Description of Artificial Sequence: Synthetic oligonucleotide
aggucggcgacacauagaa

SEQ ID NO: 851548 - RNA, 19 nt, Artificial Sequence
  Description of Artificial Sequence: Synthetic oligonucleotide
ugcagaaauuuccggacua

SEQ ID NO: 851549 - RNA, 19 nt, Artificial Sequence
  Description of Artificial Sequence: Synthetic oligonucleotide
gcugacaucguagaguucc

SEQ ID NO: 851550 - RNA, 19 nt, Artificial Sequence
  Description of Artificial Sequence: Synthetic oligonucleotide
cuagaaggcucacguaggc

SEQ ID NO: 851551 - RNA, 19 nt, Artificial Sequence
  Description of Artificial Sequence: Synthetic oligonucleotide
uaaugguggagauccuugu

SEQ ID NO: 851552 - RNA, 19 nt, Artificial Sequence
  Description of Artificial Sequence: Synthetic oligonucleotide
gcugggagugcccacagcg

SEQ ID NO: 851553 - RNA, 19 nt, Artificial Sequence
  Description of Artificial Sequence: Synthetic oligonucleotide
aguacggcaccaucacauc

SEQ ID NO: 851554 - RNA, 19 nt, Artificial Sequence
  Description of Artificial Sequence: Synthetic oligonucleotide
guaguaguaaugguggaga

SEQ ID NO: 851555 - RNA, 19 nt, Artificial Sequence
  Description of Artificial Sequence: Synthetic oligonucleotide
gaaaaugaugaggguauca

SEQ ID NO: 851556 - RNA, 19 nt, Artificial Sequence
  Description of Artificial Sequence: Synthetic oligonucleotide
accggcaugugcucacagc

SEQ ID NO: 851557 - RNA, 19 nt, Artificial Sequence
  Description of Artificial Sequence: Synthetic oligonucleotide
uacggcaccaucacauccu

SEQ ID NO: 851558 - RNA, 19 nt, Artificial Sequence
  Description of Artificial Sequence: Synthetic oligonucleotide
caacauggggagugcaugc

SEQ ID NO: 851559 - RNA, 19 nt, Artificial Sequence
  Description of Artificial Sequence: Synthetic oligonucleotide
gcuggagugacccggacag

SEQ ID NO: 851560 - RNA, 19 nt, Artificial Sequence
  Description of Artificial Sequence: Synthetic oligonucleotide
gagcuggauagucuuugag

SEQ ID NO: 851561 - RNA, 19 nt, Artificial Sequence
  Description of Artificial Sequence: Synthetic oligonucleotide
ccgguaguaguaauggugg

SEQ ID NO: 851562 - RNA, 19 nt, Artificial Sequence
  Description of Artificial Sequence: Synthetic oligonucleotide
guaucacucaguacaccgg

SEQ ID NO: 851563 - RNA, 19 nt, Artificial Sequence
  Description of Artificial Sequence: Synthetic oligonucleotide
guaaugguggagauccuug

SEQ ID NO: 851564 - RNA, 19 nt, Artificial Sequence
  Description of Artificial Sequence: Synthetic oligonucleotide
gucauggaaagccacguaa

SEQ ID NO: 851565 - RNA, 19 nt, Artificial Sequence
  Description of Artificial Sequence: Synthetic oligonucleotide
gucggcgacacauagaagu

SEQ ID NO: 851566 - RNA, 19 nt, Artificial Sequence
  Description of Artificial Sequence: Synthetic oligonucleotide
uuguguacugggcggcgag

SEQ ID NO: 851567 - RNA, 19 nt, Artificial Sequence
  Description of Artificial Sequence: Synthetic oligonucleotide
cagcccuaccccuuggucc

SEQ ID NO: 851568 - RNA, 19 nt, Artificial Sequence
  Description of Artificial Sequence: Synthetic oligonucleotide
agggucguaggucuggggu

SEQ ID NO: 851569 - RNA, 19 nt, Artificial Sequence
  Description of Artificial Sequence: Synthetic oligonucleotide
gagcgcaugggguaggaca

SEQ ID NO: 851570 - RNA, 19 nt, Artificial Sequence
  Description of Artificial Sequence: Synthetic oligonucleotide
acaacauggggagugcaug

SEQ ID NO: 851571 - RNA, 19 nt, Artificial Sequence
  Description of Artificial Sequence: Synthetic oligonucleotide
uggaaggucggcgacacau

SEQ ID NO: 851572 - RNA, 19 nt, Artificial Sequence
  Description of Artificial Sequence: Synthetic oligonucleotide
aagucuuggucgaugggga

SEQ ID NO: 851573 - RNA, 19 nt, Artificial Sequence
  Description of Artificial Sequence: Synthetic oligonucleotide
uccuuguaccagcccgugg

SEQ ID NO: 851574 - RNA, 19 nt, Artificial Sequence
  Description of Artificial Sequence: Synthetic oligonucleotide
guugucggaugugaaaaug

SEQ ID NO: 851575 - RNA, 19 nt, Artificial Sequence
  Description of Artificial Sequence: Synthetic oligonucleotide
guacggcaccaucacaucc

SEQ ID NO: 851576 - RNA, 19 nt, Artificial Sequence
  Description of Artificial Sequence: Synthetic oligonucleotide
uggcauagcugggauauga

SEQ ID NO: 851577 - RNA, 19 nt, Artificial Sequence
  Description of Artificial Sequence: Synthetic oligonucleotide
ugcaugcugaguccucucu

SEQ ID NO: 851578 - RNA, 19 nt, Artificial Sequence
  Description of Artificial Sequence: Synthetic oligonucleotide
gaaggggucggcacugcgg

SEQ ID NO: 851579 - RNA, 19 nt, Artificial Sequence
  Description of Artificial Sequence: Synthetic oligonucleotide
auaaugccugugcgcacuc

SEQ ID NO: 851580 - RNA, 19 nt, Artificial Sequence
  Description of Artificial Sequence: Synthetic oligonucleotide
uaggacauggugaccucgu

SEQ ID NO: 851581 - RNA, 19 nt, Artificial Sequence
  Description of Artificial Sequence: Synthetic oligonucleotide
ccuuguaccagcccguggg

SEQ ID NO: 851582 - RNA, 19 nt, Artificial Sequence
  Description of Artificial Sequence: Synthetic oligonucleotide
acggaaguuguggugguag

SEQ ID NO: 851583 - RNA, 19 nt, Artificial Sequence
  Description of Artificial Sequence: Synthetic oligonucleotide
agggucccggcugacaucg

SEQ ID NO: 851584 - RNA, 19 nt, Artificial Sequence
  Description of Artificial Sequence: Synthetic oligonucleotide
ugagcagaagaaaguggua

SEQ ID NO: 851585 - RNA, 19 nt, Artificial Sequence
  Description of Artificial Sequence: Synthetic oligonucleotide
uccagucuggaaugcgccc

SEQ ID NO: 851586 - RNA, 19 nt, Artificial Sequence
  Description of Artificial Sequence: Synthetic oligonucleotide
uuggucgauggggaaaggc

SEQ ID NO: 851587 - RNA, 19 nt, Artificial Sequence
  Description of Artificial Sequence: Synthetic oligonucleotide
aaugcgccccaugccacuc

SEQ ID NO: 851588 - RNA, 19 nt, Artificial Sequence
  Description of Artificial Sequence: Synthetic oligonucleotide
ugaggguaucacucaguac

SEQ ID NO: 851589 - RNA, 19 nt, Artificial Sequence
  Description of Artificial Sequence: Synthetic oligonucleotide
aggacaacauggggagugc

SEQ ID NO: 851590 - RNA, 19 nt, Artificial Sequence
  Description of Artificial Sequence: Synthetic oligonucleotide
aggguaucacucaguacac

SEQ ID NO: 851591 - RNA, 19 nt, Artificial Sequence
  Description of Artificial Sequence: Synthetic oligonucleotide
guaggacauggugaccucg

SEQ ID NO: 851592 - RNA, 19 nt, Artificial Sequence
  Description of Artificial Sequence: Synthetic oligonucleotide
ugugcgcacuccagccugg

SEQ ID NO: 851593 - RNA, 19 nt, Artificial Sequence
  Description of Artificial Sequence: Synthetic oligonucleotide
ucggcgacacauagaaguc

SEQ ID NO: 851594 - RNA, 19 nt, Artificial Sequence
  Description of Artificial Sequence: Synthetic oligonucleotide
ucguagaguucccagcguu

SEQ ID NO: 851595 - RNA, 19 nt, Artificial Sequence
  Description of Artificial Sequence: Synthetic oligonucleotide
ccacguaaaggaagaaagg

SEQ ID NO: 851596 - RNA, 19 nt, Artificial Sequence
  Description of Artificial Sequence: Synthetic oligonucleotide
guggagauccuuguaccag

SEQ ID NO: 851597 - RNA, 19 nt, Artificial Sequence
  Description of Artificial Sequence: Synthetic oligonucleotide
cugggagugcccacagcgg

SEQ ID NO: 851598 - RNA, 19 nt, Artificial Sequence
  Description of Artificial Sequence: Synthetic oligonucleotide
agaaauuuccggacuaguu

SEQ ID NO: 851599 - RNA, 19 nt, Artificial Sequence
  Description of Artificial Sequence: Synthetic oligonucleotide
ugcgccuggccauugcaga

SEQ ID NO: 851600 - RNA, 19 nt, Artificial Sequence
  Description of Artificial Sequence: Synthetic oligonucleotide
gacacauagaagucuuggu

SEQ ID NO: 851601 - RNA, 19 nt, Artificial Sequence
  Description of Artificial Sequence: Synthetic oligonucleotide
gaaugagacggaaguugug

SEQ ID NO: 851602 - RNA, 19 nt, Artificial Sequence
  Description of Artificial Sequence: Synthetic oligonucleotide
gagauccuuguaccagccc

SEQ ID NO: 851603 - RNA, 19 nt, Artificial Sequence
  Description of Artificial Sequence: Synthetic oligonucleotide
uggauccguggccagguuc

SEQ ID NO: 851604 - RNA, 19 nt, Artificial Sequence
  Description of Artificial Sequence: Synthetic oligonucleotide
uuccggacuaguuccuuaa

SEQ ID NO: 851605 - RNA, 19 nt, Artificial Sequence
  Description of Artificial Sequence: Synthetic oligonucleotide
uguguacugggcggcgagg

SEQ ID NO: 851606 - RNA, 19 nt, Artificial Sequence
  Description of Artificial Sequence: Synthetic oligonucleotide
uccuagggcugacagucuc

SEQ ID NO: 851607 - RNA, 19 nt, Artificial Sequence
  Description of Artificial Sequence: Synthetic oligonucleotide
caaucacacaguauggccu

SEQ ID NO: 851608 - RNA, 19 nt, Artificial Sequence
  Description of Artificial Sequence: Synthetic oligonucleotide
gucggaugugaaaaugaug

SEQ ID NO: 851609 - RNA, 19 nt, Artificial Sequence
  Description of Artificial Sequence: Synthetic oligonucleotide
uuugaccggcaugugcuca

SEQ ID NO: 851610 - RNA, 19 nt, Artificial Sequence
  Description of Artificial Sequence: Synthetic oligonucleotide
auaguggauccguggccag

SEQ ID NO: 851611 - RNA, 19 nt, Artificial Sequence
  Description of Artificial Sequence: Synthetic oligonucleotide
aauuuccggacuaguuccu

SEQ ID NO: 851612 - RNA, 19 nt, Artificial Sequence
  Description of Artificial Sequence: Synthetic oligonucleotide
cugacaucguagaguuccc

SEQ ID NO: 851613 - RNA, 19 nt, Artificial Sequence
  Description of Artificial Sequence: Synthetic oligonucleotide
gugguauggacagaagaga

SEQ ID NO: 851614 - RNA, 19 nt, Artificial Sequence
  Description of Artificial Sequence: Synthetic oligonucleotide
ugagggucguaggucuggg

SEQ ID NO: 851615 - RNA, 19 nt, Artificial Sequence
  Description of Artificial Sequence: Synthetic oligonucleotide
cagggaucggccugugagc

SEQ ID NO: 851616 - RNA, 19 nt, Artificial Sequence
  Description of Artificial Sequence: Synthetic oligonucleotide
acauggggagugcaugccu

SEQ ID NO: 851617 - RNA, 19 nt, Artificial Sequence
  Description of Artificial Sequence: Synthetic oligonucleotide
cucggcacaucggaggagc

SEQ ID NO: 851618 - RNA, 19 nt, Artificial Sequence
  Description of Artificial Sequence: Synthetic oligonucleotide
cccgguaguaguaauggug

SEQ ID NO: 851619 - RNA, 19 nt, Artificial Sequence
  Description of Artificial Sequence: Synthetic oligonucleotide
agguucugugucucucgag

SEQ ID NO: 851620 - RNA, 19 nt, Artificial Sequence
  Description of Artificial Sequence: Synthetic oligonucleotide
gcuguccuagggcugacag

SEQ ID NO: 851621 - RNA, 19 nt, Artificial Sequence
  Description of Artificial Sequence: Synthetic oligonucleotide
agcggcucggcacaucgga

SEQ ID NO: 851622 - RNA, 19 nt, Artificial Sequence
  Description of Artificial Sequence: Synthetic oligonucleotide
uuuccggacuaguuccuua

SEQ ID NO: 851623 - RNA, 19 nt, Artificial Sequence
  Description of Artificial Sequence: Synthetic oligonucleotide
agugacccggacagucugc

SEQ ID NO: 851624 - RNA, 19 nt, Artificial Sequence
  Description of Artificial Sequence: Synthetic oligonucleotide
cuuuccgauaaugccugug

SEQ ID NO: 851625 - RNA, 19 nt, Artificial Sequence
  Description of Artificial Sequence: Synthetic oligonucleotide
gugaaaaugaugaggguau

SEQ ID NO: 851626 - RNA, 19 nt, Artificial Sequence
  Description of Artificial Sequence: Synthetic oligonucleotide
gacuaguuccuuaauccua

SEQ ID NO: 851627 - RNA, 19 nt, Artificial Sequence
  Description of Artificial Sequence: Synthetic oligonucleotide
uaguggauccguggccagg

SEQ ID NO: 851628 - RNA, 19 nt, Artificial Sequence
  Description of Artificial Sequence: Synthetic oligonucleotide
aucguagaguucccagcgu

SEQ ID NO: 851629 - RNA, 19 nt, Artificial Sequence
  Description of Artificial Sequence: Synthetic oligonucleotide
aguaaugguggagauccuu

SEQ ID NO: 851630 - RNA, 19 nt, Artificial Sequence
  Description of Artificial Sequence: Synthetic oligonucleotide
uugaccggcaugugcucac

SEQ ID NO: 851631 - RNA, 19 nt, Artificial Sequence
  Description of Artificial Sequence: Synthetic oligonucleotide
gucgaaggcguugaaguga

SEQ ID NO: 851632 - RNA, 19 nt, Artificial Sequence
  Description of Artificial Sequence: Synthetic oligonucleotide
ugguuguguacugggcggc

SEQ ID NO: 851633 - RNA, 19 nt, Artificial Sequence
  Description of Artificial Sequence: Synthetic oligonucleotide
ccuagugauguuccguccc

SEQ ID NO: 851634 - RNA, 19 nt, Artificial Sequence
  Description of Artificial Sequence: Synthetic oligonucleotide
cagucaagguguaaaugaa

SEQ ID NO: 851635 - RNA, 19 nt, Artificial Sequence
  Description of Artificial Sequence: Synthetic oligonucleotide
gucauguguuucccacugc

SEQ ID NO: 851636 - RNA, 19 nt, Artificial Sequence
  Description of Artificial Sequence: Synthetic oligonucleotide
gcagcggcucggcacaucg

SEQ ID NO: 851637 - RNA, 19 nt, Artificial Sequence
  Description of Artificial Sequence: Synthetic oligonucleotide
gauaaugccugugcgcacu

SEQ ID NO: 851638 - RNA, 19 nt, Artificial Sequence
  Description of Artificial Sequence: Synthetic oligonucleotide
caggaccccgucaggggcg

SEQ ID NO: 851639 - RNA, 19 nt, Artificial Sequence
  Description of Artificial Sequence: Synthetic oligonucleotide
aggacauggugaccucgug

SEQ ID NO: 851640 - RNA, 19 nt, Artificial Sequence
  Description of Artificial Sequence: Synthetic oligonucleotide
ccgaugguuguguacuggg

SEQ ID NO: 851641 - RNA, 19 nt, Artificial Sequence
  Description of Artificial Sequence: Synthetic oligonucleotide
ucccgguaguaguaauggu

SEQ ID NO: 851642 - RNA, 19 nt, Artificial Sequence
  Description of Artificial Sequence: Synthetic oligonucleotide
ggguuugaccggcaugugc

SEQ ID NO: 851643 - RNA, 19 nt, Artificial Sequence
  Description of Artificial Sequence: Synthetic oligonucleotide
ggacugauggaggacaaca

SEQ ID NO: 851644 - RNA, 19 nt, Artificial Sequence
  Description of Artificial Sequence: Synthetic oligonucleotide
uugugggugcucuggggau

SEQ ID NO: 851645 - RNA, 19 nt, Artificial Sequence
  Description of Artificial Sequence: Synthetic oligonucleotide
ggggucauguguuucccac

SEQ ID NO: 851646 - RNA, 19 nt, Artificial Sequence
  Description of Artificial Sequence: Synthetic oligonucleotide
cuggauagucuuugagcca

SEQ ID NO: 851647 - RNA, 19 nt, Artificial Sequence
  Description of Artificial Sequence: Synthetic oligonucleotide
gacccacgugcuucuuucc

SEQ ID NO: 851648 - RNA, 19 nt, Artificial Sequence
  Description of Artificial Sequence: Synthetic oligonucleotide
gaccggcaugugcucacag

SEQ ID NO: 851649 - RNA, 19 nt, Artificial Sequence
  Description of Artificial Sequence: Synthetic oligonucleotide
acccggacagucugcucag

SEQ ID NO: 851650 - RNA, 19 nt, Artificial Sequence
  Description of Artificial Sequence: Synthetic oligonucleotide
caggggcgcacacccaggg

SEQ ID NO: 851651 - RNA, 19 nt, Artificial Sequence
  Description of Artificial Sequence: Synthetic oligonucleotide
acggucucuggacccacgu

SEQ ID NO: 851652 - RNA, 19 nt, Artificial Sequence
  Description of Artificial Sequence: Synthetic oligonucleotide
ucggccugugagcuggaua

SEQ ID NO: 851653 - RNA, 19 nt, Artificial Sequence
  Description of Artificial Sequence: Synthetic oligonucleotide
gaguagaggaaggcuggca

SEQ ID NO: 851654 - RNA, 19 nt, Artificial Sequence
  Description of Artificial Sequence: Synthetic oligonucleotide
guauggaaagccccacugu

SEQ ID NO: 851655 - RNA, 19 nt, Artificial Sequence
  Description of Artificial Sequence: Synthetic oligonucleotide
acucaguacaccggcacuu

SEQ ID NO: 851656 - RNA, 19 nt, Artificial Sequence
  Description of Artificial Sequence: Synthetic oligonucleotide
uccggacuaguuccuuaau

SEQ ID NO: 851657 - RNA, 19 nt, Artificial Sequence
  Description of Artificial Sequence: Synthetic oligonucleotide
uccucgggcgggugugcgg

SEQ ID NO: 851658 - RNA, 19 nt, Artificial Sequence
  Description of Artificial Sequence: Synthetic oligonucleotide
gguggagauccuuguacca

SEQ ID NO: 851659 - RNA, 19 nt, Artificial Sequence
  Description of Artificial Sequence: Synthetic oligonucleotide
ucggcacaucggaggagca

SEQ ID NO: 851660 - RNA, 19 nt, Artificial Sequence
  Description of Artificial Sequence: Synthetic oligonucleotide
agucuuggucgauggggaa

SEQ ID NO: 851661 - RNA, 19 nt, Artificial Sequence
  Description of Artificial Sequence: Synthetic oligonucleotide
gcucacguaggccucgcug

SEQ ID NO: 851662 - RNA, 19 nt, Artificial Sequence
  Description of Artificial Sequence: Synthetic oligonucleotide
cagcccgugggcuggccgg

SEQ ID NO: 851663 - RNA, 19 nt, Artificial Sequence
  Description of Artificial Sequence: Synthetic oligonucleotide
agccucugacagcuggagu

SEQ ID NO: 851664 - RNA, 19 nt, Artificial Sequence
  Description of Artificial Sequence: Synthetic oligonucleotide
uaaugccugugcgcacucc

SEQ ID NO: 851665 - RNA, 19 nt, Artificial Sequence
  Description of Artificial Sequence: Synthetic oligonucleotide
aaggucggcgacacauaga

SEQ ID NO: 851666 - RNA, 19 nt, Artificial Sequence
  Description of Artificial Sequence: Synthetic oligonucleotide
agauugugaaugagacgga

SEQ ID NO: 851667 - RNA, 19 nt, Artificial Sequence
  Description of Artificial Sequence: Synthetic oligonucleotide
gugagaauaguggauccgu

SEQ ID NO: 851668 - RNA, 19 nt, Artificial Sequence
  Description of Artificial Sequence: Synthetic oligonucleotide
cgacacauagaagucuugg

SEQ ID NO: 851669 - RNA, 19 nt, Artificial Sequence
  Description of Artificial Sequence: Synthetic oligonucleotide
uccuggaaggucggcgaca

SEQ ID NO: 851670 - RNA, 19 nt, Artificial Sequence
  Description of Artificial Sequence: Synthetic oligonucleotide
cauugugaaggggucggca

SEQ ID NO: 851671 - RNA, 19 nt, Artificial Sequence
  Description of Artificial Sequence: Synthetic oligonucleotide
gcuguaccaggccaguaca

SEQ ID NO: 851672 - RNA, 19 nt, Artificial Sequence
  Description of Artificial Sequence: Synthetic oligonucleotide
gaucccguugucggaugug

SEQ ID NO: 851673 - RNA, 19 nt, Artificial Sequence
  Description of Artificial Sequence: Synthetic oligonucleotide
gggauaugaaauggagaac

SEQ ID NO: 851674 - RNA, 19 nt, Artificial Sequence
  Description of Artificial Sequence: Synthetic oligonucleotide
ggacccacgugcuucuuuc

SEQ ID NO: 851675 - RNA, 19 nt, Artificial Sequence
  Description of Artificial Sequence: Synthetic oligonucleotide
agcgcaugggguaggacau

SEQ ID NO: 851676 - RNA, 19 nt, Artificial Sequence
  Description of Artificial Sequence: Synthetic oligonucleotide
ggagauccuuguaccagcc

SEQ ID NO: 851677 - RNA, 19 nt, Artificial Sequence
  Description of Artificial Sequence: Synthetic oligonucleotide
cuuggucgauggggaaagg

SEQ ID NO: 851678 - RNA, 19 nt, Artificial Sequence
  Description of Artificial Sequence: Synthetic oligonucleotide
uggacugauggaggacaac

SEQ ID NO: 851679 - RNA, 19 nt, Artificial Sequence
  Description of Artificial Sequence: Synthetic oligonucleotide
cugcgggcugagcuuuucc

SEQ ID NO: 851680 - RNA, 19 nt, Artificial Sequence
  Description of Artificial Sequence: Synthetic oligonucleotide
guuccauacuggggcuggg

SEQ ID NO: 851681 - RNA, 19 nt, Artificial Sequence
  Description of Artificial Sequence: Synthetic oligonucleotide
ucguaggucuggggugucc

SEQ ID NO: 851682 - RNA, 19 nt, Artificial Sequence
  Description of Artificial Sequence: Synthetic oligonucleotide
gguuugaccggcaugugcu

SEQ ID NO: 851683 - RNA, 19 nt, Artificial Sequence
  Description of Artificial Sequence: Synthetic oligonucleotide
aucacucaguacaccggca

SEQ ID NO: 851684 - RNA, 19 nt, Artificial Sequence
  Description of Artificial Sequence: Synthetic oligonucleotide
ugcgcacuccagccuggcu

SEQ ID NO: 851685 - RNA, 19 nt, Artificial Sequence
  Description of Artificial Sequence: Synthetic oligonucleotide
gguagacggagcgcauggg

SEQ ID NO: 851686 - RNA, 19 nt, Artificial Sequence
  Description of Artificial Sequence: Synthetic oligonucleotide
caacguugugggugcucug

SEQ ID NO: 851687 - RNA, 19 nt, Artificial Sequence
  Description of Artificial Sequence: Synthetic oligonucleotide
ccggacuaguuccuuaauc

SEQ ID NO: 851688 - RNA, 19 nt, Artificial Sequence
  Description of Artificial Sequence: Synthetic oligonucleotide
ccaacaaggguucugcugu

SEQ ID NO: 851689 - RNA, 19 nt, Artificial Sequence
  Description of Artificial Sequence: Synthetic oligonucleotide
ugcgccccaugccacucuc

SEQ ID NO: 851690 - RNA, 19 nt, Artificial Sequence
  Description of Artificial Sequence: Synthetic oligonucleotide
guccuggaaggucggcgac

SEQ ID NO: 851691 - RNA, 19 nt, Artificial Sequence
  Description of Artificial Sequence: Synthetic oligonucleotide
cucucccuuugugugucug

SEQ ID NO: 851692 - RNA, 19 nt, Artificial Sequence
  Description of Artificial Sequence: Synthetic oligonucleotide
cacguaggccucgcugacc

SEQ ID NO: 851693 - RNA, 19 nt, Artificial Sequence
  Description of Artificial Sequence: Synthetic oligonucleotide
ccagucuggaaugcgcccc

SEQ ID NO: 851694 - RNA, 19 nt, Artificial Sequence
  Description of Artificial Sequence: Synthetic oligonucleotide
ccgauaaugccugugcgca

SEQ ID NO: 851695 - RNA, 19 nt, Artificial Sequence
  Description of Artificial Sequence: Synthetic oligonucleotide
gccgaugguuguguacugg

SEQ ID NO: 851696 - RNA, 19 nt, Artificial Sequence
  Description of Artificial Sequence: Synthetic oligonucleotide
gugucucucgagggucccg

SEQ ID NO: 851697 - RNA, 19 nt, Artificial Sequence
  Description of Artificial Sequence: Synthetic oligonucleotide
guuguguacugggcggcga

SEQ ID NO: 851698 - RNA, 19 nt, Artificial Sequence
  Description of Artificial Sequence: Synthetic oligonucleotide
cagcggcucggcacaucgg

SEQ ID NO: 851699 - RNA, 19 nt, Artificial Sequence
  Description of Artificial Sequence: Synthetic oligonucleotide
ggcaggaguggcaucccgc

SEQ ID NO: 851700 - RNA, 19 nt, Artificial Sequence
  Description of Artificial Sequence: Synthetic oligonucleotide
gccccaacguugugggugc

SEQ ID NO: 851701 - RNA, 19 nt, Artificial Sequence
  Description of Artificial Sequence: Synthetic oligonucleotide
ucgcugaccuggccccaac

SEQ ID NO: 851702 - RNA, 19 nt, Artificial Sequence
  Description of Artificial Sequence: Synthetic oligonucleotide
gucucucgagggucccggc

SEQ ID NO: 851703 - RNA, 19 nt, Artificial Sequence
  Description of Artificial Sequence: Synthetic oligonucleotide
ggguaucacucaguacacc

SEQ ID NO: 851704 - RNA, 19 nt, Artificial Sequence
  Description of Artificial Sequence: Synthetic oligonucleotide
gaaugcgccccaugccacu

SEQ ID NO: 851705 - RNA, 19 nt, Artificial Sequence
  Description of Artificial Sequence: Synthetic oligonucleotide
gccaguacagguugguccu

SEQ ID NO: 851706 - RNA, 19 nt, Artificial Sequence
  Description of Artificial Sequence: Synthetic oligonucleotide
ggcucggcacaucggagga

SEQ ID NO: 851707 - RNA, 19 nt, Artificial Sequence
  Description of Artificial Sequence: Synthetic oligonucleotide
ggaaugcgccccaugccac

SEQ ID NO: 851708 - RNA, 19 nt, Artificial Sequence
  Description of Artificial Sequence: Synthetic oligonucleotide
ggugaccucgugguggcuc

SEQ ID NO: 851709 - RNA, 19 nt, Artificial Sequence
  Description of Artificial Sequence: Synthetic oligonucleotide
cuguauggaaagccccacu

SEQ ID NO: 851710 - RNA, 19 nt, Artificial Sequence
  Description of Artificial Sequence: Synthetic oligonucleotide
cguagaguucccagcguuc

SEQ ID NO: 851711 - RNA, 19 nt, Artificial Sequence
  Description of Artificial Sequence: Synthetic oligonucleotide
augcgccccaugccacucu

SEQ ID NO: 851712 - RNA, 19 nt, Artificial Sequence
  Description of Artificial Sequence: Synthetic oligonucleotide
ggccgaugguuguguacug

SEQ ID NO: 851713 - RNA, 19 nt, Artificial Sequence
  Description of Artificial Sequence: Synthetic oligonucleotide
agcguucccgguaguagua

SEQ ID NO: 851714 - RNA, 19 nt, Artificial Sequence
  Description of Artificial Sequence: Synthetic oligonucleotide
auccggccgaugguugugu

SEQ ID NO: 851715 - RNA, 19 nt, Artificial Sequence
  Description of Artificial Sequence: Synthetic oligonucleotide
ggucuagaaggcucacgua

SEQ ID NO: 851716 - RNA, 19 nt, Artificial Sequence
  Description of Artificial Sequence: Synthetic oligonucleotide
cggcucggcacaucggagg

SEQ ID NO: 851717 - RNA, 19 nt, Artificial Sequence
  Description of Artificial Sequence: Synthetic oligonucleotide
gggaucccguugucggaug

SEQ ID NO: 851718 - RNA, 19 nt, Artificial Sequence
  Description of Artificial Sequence: Synthetic oligonucleotide
uccggccgaugguugugua

SEQ ID NO: 851719 - RNA, 19 nt, Artificial Sequence
  Description of Artificial Sequence: Synthetic oligonucleotide
cacucaguacaccggcacu

SEQ ID NO: 851720 - RNA, 19 nt, Artificial Sequence
  Description of Artificial Sequence: Synthetic oligonucleotide
cagguugguccugccgcug

SEQ ID NO: 851721 - RNA, 19 nt, Artificial Sequence
  Description of Artificial Sequence: Synthetic oligonucleotide
caacaaggguucugcugua

SEQ ID NO: 851722 - RNA, 19 nt, Artificial Sequence
  Description of Artificial Sequence: Synthetic oligonucleotide
gcgggugugcggagggugg

SEQ ID NO: 851723 - RNA, 19 nt, Artificial Sequence
  Description of Artificial Sequence: Synthetic oligonucleotide
cggugugucugggacaaag

SEQ ID NO: 851724 - RNA, 19 nt, Artificial Sequence
  Description of Artificial Sequence: Synthetic oligonucleotide
ggcacaucggaggagcagu

SEQ ID NO: 851725 - RNA, 19 nt, Artificial Sequence
  Description of Artificial Sequence: Synthetic oligonucleotide
ggaguggcaucccgcacua

SEQ ID NO: 851726 - RNA, 19 nt, Artificial Sequence
  Description of Artificial Sequence: Synthetic oligonucleotide
ggauccguggccagguucu

SEQ ID NO: 851727 - RNA, 19 nt, Artificial Sequence
  Description of Artificial Sequence: Synthetic oligonucleotide
ccguugucggaugugaaaa

SEQ ID NO: 851728 - RNA, 19 nt, Artificial Sequence
  Description of Artificial Sequence: Synthetic oligonucleotide
guguacugggcggcgaggu

SEQ ID NO: 851729 - RNA, 19 nt, Artificial Sequence
  Description of Artificial Sequence: Synthetic oligonucleotide
ggucggcgacacauagaag

SEQ ID NO: 851730 - RNA, 19 nt, Artificial Sequence
  Description of Artificial Sequence: Synthetic oligonucleotide
cucgggcgggugugcggag

SEQ ID NO: 851731 - RNA, 19 nt, Artificial Sequence
  Description of Artificial Sequence: Synthetic oligonucleotide
gucucuggacccacgugcu

SEQ ID NO: 851732 - RNA, 19 nt, Artificial Sequence
  Description of Artificial Sequence: Synthetic oligonucleotide
ggcauagcugggauaugaa

SEQ ID NO: 851733 - RNA, 19 nt, Artificial Sequence
  Description of Artificial Sequence: Synthetic oligonucleotide
gacggaaguugugguggua

SEQ ID NO: 851734 - RNA, 19 nt, Artificial Sequence
  Description of Artificial Sequence: Synthetic oligonucleotide
cuguccuagggcugacagu

SEQ ID NO: 851735 - RNA, 19 nt, Artificial Sequence
  Description of Artificial Sequence: Synthetic oligonucleotide
gggaucggccugugagcug

SEQ ID NO: 851736 - RNA, 19 nt, Artificial Sequence
  Description of Artificial Sequence: Synthetic oligonucleotide
ggcgaggucugcucgggcu

SEQ ID NO: 851737 - RNA, 19 nt, Artificial Sequence
  Description of Artificial Sequence: Synthetic oligonucleotide
cgauaaugccugugcgcac

SEQ ID NO: 851738 - RNA, 19 nt, Artificial Sequence
  Description of Artificial Sequence: Synthetic oligonucleotide
gcgccuccaguacuuguga

SEQ ID NO: 851739 - RNA, 19 nt, Artificial Sequence
  Description of Artificial Sequence: Synthetic oligonucleotide
caccaacaaggguucugcu

SEQ ID NO: 851740 - RNA, 19 nt, Artificial Sequence
  Description of Artificial Sequence: Synthetic oligonucleotide
ccggccgaugguuguguac

SEQ ID NO: 851741 - RNA, 19 nt, Artificial Sequence
  Description of Artificial Sequence: Synthetic oligonucleotide
cacccaggggucauguguu

SEQ ID NO: 851742 - RNA, 19 nt, Artificial Sequence
  Description of Artificial Sequence: Synthetic oligonucleotide
cacgugcuucuuuccgaua

SEQ ID NO: 851743 - RNA, 19 nt, Artificial Sequence
  Description of Artificial Sequence: Synthetic oligonucleotide
cauagaagucuuggucgau

SEQ ID NO: 851744 - RNA, 19 nt, Artificial Sequence
  Description of Artificial Sequence: Synthetic oligonucleotide
uaccagcccgugggcuggc

SEQ ID NO: 851745 - RNA, 19 nt, Artificial Sequence
  Description of Artificial Sequence: Synthetic oligonucleotide
cucgagggucccggcugac

SEQ ID NO: 851746 - RNA, 19 nt, Artificial Sequence
  Description of Artificial Sequence: Synthetic oligonucleotide
cucgcgugcgccuggccau

SEQ ID NO: 851747 - RNA, 19 nt, Artificial Sequence
  Description of Artificial Sequence: Synthetic oligonucleotide
ggcgacacauagaagucuu

SEQ ID NO: 851748 - RNA, 19 nt, Artificial Sequence
  Description of Artificial Sequence: Synthetic oligonucleotide
ggggagugcaugccugagu

SEQ ID NO: 851749 - RNA, 19 nt, Artificial Sequence
  Description of Artificial Sequence: Synthetic oligonucleotide
ggaucccguugucggaugu

SEQ ID NO: 851750 - RNA, 19 nt, Artificial Sequence
  Description of Artificial Sequence: Synthetic oligonucleotide
gccuggacugauggaggac

SEQ ID NO: 851751 - RNA, 19 nt, Artificial Sequence
  Description of Artificial Sequence: Synthetic oligonucleotide
ggugccccagggacuguca

SEQ ID NO: 851752 - RNA, 19 nt, Artificial Sequence
  Description of Artificial Sequence: Synthetic oligonucleotide
cagcgccuccaguacuugu

SEQ ID NO: 851753 - RNA, 19 nt, Artificial Sequence
  Description of Artificial Sequence: Synthetic oligonucleotide
cccgucaggggcgcacacc

SEQ ID NO: 851754 - RNA, 19 nt, Artificial Sequence
  Description of Artificial Sequence: Synthetic oligonucleotide
ccgcacuacagaggggcuc

SEQ ID NO: 851755 - RNA, 19 nt, Artificial Sequence
  Description of Artificial Sequence: Synthetic oligonucleotide
cucaguacaccggcacuuu

SEQ ID NO: 851756 - RNA, 19 nt, Artificial Sequence
  Description of Artificial Sequence: Synthetic oligonucleotide
gcgugcgccuggccauugc

SEQ ID NO: 851757 - RNA, 19 nt, Artificial Sequence
  Description of Artificial Sequence: Synthetic oligonucleotide
ucgcgugcgccuggccauu

SEQ ID NO: 851758 - RNA, 19 nt, Artificial Sequence
  Description of Artificial Sequence: Synthetic oligonucleotide
ccuagggcugacagucucu

SEQ ID NO: 851759 - RNA, 19 nt, Artificial Sequence
  Description of Artificial Sequence: Synthetic oligonucleotide
ggcgcacacccagggguca

SEQ ID NO: 851760 - RNA, 19 nt, Artificial Sequence
  Description of Artificial Sequence: Synthetic oligonucleotide
gcgcaugggguaggacaug

SEQ ID NO: 851761 - RNA, 19 nt, Artificial Sequence
  Description of Artificial Sequence: Synthetic oligonucleotide
cucgcugaccuggccccaa

SEQ ID NO: 851762 - RNA, 19 nt, Artificial Sequence
  Description of Artificial Sequence: Synthetic oligonucleotide
caccggcacuuugcagcuc

SEQ ID NO: 851763 - RNA, 19 nt, Artificial Sequence
  Description of Artificial Sequence: Synthetic oligonucleotide
cccaacguugugggugcuc

SEQ ID NO: 851764 - RNA, 19 nt, Artificial Sequence
  Description of Artificial Sequence: Synthetic oligonucleotide
ccgaagacaguggcccaca

SEQ ID NO: 851765 - RNA, 19 nt, Artificial Sequence
  Description of Artificial Sequence: Synthetic oligonucleotide
gcguucccgguaguaguaa

SEQ ID NO: 851766 - RNA, 19 nt, Artificial Sequence
  Description of Artificial Sequence: Synthetic oligonucleotide
ggggaucccguugucggau

SEQ ID NO: 851767 - RNA, 19 nt, Artificial Sequence
  Description of Artificial Sequence: Synthetic oligonucleotide
ccuuaauccuagugauguu

SEQ ID NO: 851768 - RNA, 19 nt, Artificial Sequence
  Description of Artificial Sequence: Synthetic oligonucleotide
cgaaggcguugaagugaug

SEQ ID NO: 851769 - RNA, 19 nt, Artificial Sequence
  Description of Artificial Sequence: Synthetic oligonucleotide
ccucgggcgggugugcgga

SEQ ID NO: 851770 - RNA, 19 nt, Artificial Sequence
  Description of Artificial Sequence: Synthetic oligonucleotide
cccggacagucugcucagc

SEQ ID NO: 851771 - RNA, 19 nt, Artificial Sequence
  Description of Artificial Sequence: Synthetic oligonucleotide
gcgccuggccauugcagau

SEQ ID NO: 851772 - RNA, 19 nt, Artificial Sequence
  Description of Artificial Sequence: Synthetic oligonucleotide
cccgugggcuggccggcug

SEQ ID NO: 851773 - RNA, 19 nt, Artificial Sequence
  Description of Artificial Sequence: Synthetic oligonucleotide
cuggagugacccggacagu

SEQ ID NO: 851774 - RNA, 19 nt, Artificial Sequence
  Description of Artificial Sequence: Synthetic oligonucleotide
cugggcggcgaggucugcu

SEQ ID NO: 851775 - RNA, 19 nt, Artificial Sequence
  Description of Artificial Sequence: Synthetic oligonucleotide
ccauccggccgaugguugu

SEQ ID NO: 851776 - RNA, 19 nt, Artificial Sequence
  Description of Artificial Sequence: Synthetic oligonucleotide
ccccgucaggggcgcacac

SEQ ID NO: 851777 - RNA, 19 nt, Artificial Sequence
  Description of Artificial Sequence: Synthetic oligonucleotide
cacccuggugcagcccgua

SEQ ID NO: 851778 - RNA, 19 nt, Artificial Sequence
  Description of Artificial Sequence: Synthetic oligonucleotide
gccuggguuugaccggcau

SEQ ID NO: 851779 - RNA, 19 nt, Artificial Sequence
  Description of Artificial Sequence: Synthetic oligonucleotide
cggccgaugguuguguacu

SEQ ID NO: 851780 - RNA, 19 nt, Artificial Sequence
  Description of Artificial Sequence: Synthetic oligonucleotide
gcacaucggaggagcaguu

SEQ ID NO: 851781 - RNA, 19 nt, Artificial Sequence
  Description of Artificial Sequence: Synthetic oligonucleotide
ggccugugagcuggauagu

SEQ ID NO: 851782 - RNA, 19 nt, Artificial Sequence
  Description of Artificial Sequence: Synthetic oligonucleotide
cccgcacuacagaggggcu

SEQ ID NO: 851783 - RNA, 19 nt, Artificial Sequence
  Description of Artificial Sequence: Synthetic oligonucleotide
cguucccgguaguaguaau

SEQ ID NO: 851784 - RNA, 19 nt, Artificial Sequence
  Description of Artificial Sequence: Synthetic oligonucleotide
cacugcgggcugagcuuuu

SEQ ID NO: 851785 - RNA, 19 nt, Artificial Sequence
  Description of Artificial Sequence: Synthetic oligonucleotide
ccucgcugaccuggcccca

SEQ ID NO: 851786 - RNA, 19 nt, Artificial Sequence
  Description of Artificial Sequence: Synthetic oligonucleotide
cgcgugcgccuggccauug

SEQ ID NO: 851787 - RNA, 19 nt, Artificial Sequence
  Description of Artificial Sequence: Synthetic oligonucleotide
ccggcacuuugcagcuccu

SEQ ID NO: 851788 - RNA, 19 nt, Artificial Sequence
  Description of Artificial Sequence: Synthetic oligonucleotide
gcgccccaugccacucucu

SEQ ID NO: 851789 - RNA, 19 nt, Artificial Sequence
  Description of Artificial Sequence: Synthetic oligonucleotide
gcgcacacccaggggucau

SEQ ID NO: 851790 - RNA, 19 nt, Artificial Sequence
  Description of Artificial Sequence: Synthetic oligonucleotide
gggucccggcugacaucgu

SEQ ID NO: 851791 - RNA, 19 nt, Artificial Sequence
  Description of Artificial Sequence: Synthetic oligonucleotide
ccggugugucugggacaaa

SEQ ID NO: 851792 - RNA, 19 nt, Artificial Sequence
  Description of Artificial Sequence: Synthetic oligonucleotide
ccccaacguugugggugcu

SEQ ID NO: 851793 - RNA, 19 nt, Artificial Sequence
  Description of Artificial Sequence: Synthetic oligonucleotide
auagcuaucaaguugaugc

SEQ ID NO: 851794 - RNA, 19 nt, Artificial Sequence
  Description of Artificial Sequence: Synthetic oligonucleotide
uuaauuacuacuuucuugg

SEQ ID NO: 851795 - RNA, 19 nt, Artificial Sequence
  Description of Artificial Sequence: Synthetic oligonucleotide
uuuauuuuaauccuguuga

SEQ ID NO: 851796 - RNA, 19 nt, Artificial Sequence
  Description of Artificial Sequence: Synthetic oligonucleotide
aauaagacccauugcaccc

SEQ ID NO: 851797 - RNA, 19 nt, Artificial Sequence
  Description of Artificial Sequence: Synthetic oligonucleotide
aaagcuaguagccaaagcu

SEQ ID NO: 851798 - RNA, 19 nt, Artificial Sequence
  Description of Artificial Sequence: Synthetic oligonucleotide
aaugcgcaaacacaaaggg

SEQ ID NO: 851799 - RNA, 19 nt, Artificial Sequence
  Description of Artificial Sequence: Synthetic oligonucleotide
acgucugacauauauaagc

SEQ ID NO: 851800 - RNA, 19 nt, Artificial Sequence
  Description of Artificial Sequence: Synthetic oligonucleotide
auuaagacaugauuggcac

SEQ ID NO: 851801 - RNA, 19 nt, Artificial Sequence
  Description of Artificial Sequence: Synthetic oligonucleotide
aaguuggguaaauuaagac

SEQ ID NO: 851802 - RNA, 19 nt, Artificial Sequence
  Description of Artificial Sequence: Synthetic oligonucleotide
aucuagguuacuuaauuac

SEQ ID NO: 851803 - RNA, 19 nt, Artificial Sequence
  Description of Artificial Sequence: Synthetic oligonucleotide
aaaaccugagcuguuuucc

SEQ ID NO: 851804 - RNA, 19 nt, Artificial Sequence
  Description of Artificial Sequence: Synthetic oligonucleotide
aaagggauuaucucuguug

SEQ ID NO: 851805 - RNA, 19 nt, Artificial Sequence
  Description of Artificial Sequence: Synthetic oligonucleotide
aaacagugccaauugacag

SEQ ID NO: 851806 - RNA, 19 nt, Artificial Sequence
  Description of Artificial Sequence: Synthetic oligonucleotide
aaagaacgguagcagaggg

SEQ ID NO: 851807 - RNA, 19 nt, Artificial Sequence
  Description of Artificial Sequence: Synthetic oligonucleotide
uaaugcgcaaacacaaagg

SEQ ID NO: 851808 - RNA, 19 nt, Artificial Sequence
  Description of Artificial Sequence: Synthetic oligonucleotide
cauauauaagccaaaccag

SEQ ID NO: 851809 - RNA, 19 nt, Artificial Sequence
  Description of Artificial Sequence: Synthetic oligonucleotide
acuaacaaugaagacuucc

SEQ ID NO: 851810 - RNA, 19 nt, Artificial Sequence
  Description of Artificial Sequence: Synthetic oligonucleotide
aagguaacaucuuacuaca

SEQ ID NO: 851811 - RNA, 19 nt, Artificial Sequence
  Description of Artificial Sequence: Synthetic oligonucleotide
uuaagugcuuauucuaucc

SEQ ID NO: 851812 - RNA, 19 nt, Artificial Sequence
  Description of Artificial Sequence: Synthetic oligonucleotide
agagagagagaagagacac

SEQ ID NO: 851813 - RNA, 19 nt, Artificial Sequence
  Description of Artificial Sequence: Synthetic oligonucleotide
auaaugcgcaaacacaaag

SEQ ID NO: 851814 - RNA, 19 nt, Artificial Sequence
  Description of Artificial Sequence: Synthetic oligonucleotide
aaaacguucauacgucuga

SEQ ID NO: 851815 - RNA, 19 nt, Artificial Sequence
  Description of Artificial Sequence: Synthetic oligonucleotide
agaaaguucacuuccagau

SEQ ID NO: 851816 - RNA, 19 nt, Artificial Sequence
  Description of Artificial Sequence: Synthetic oligonucleotide
uuuucaggucacaaacugg

SEQ ID NO: 851817 - RNA, 19 nt, Artificial Sequence
  Description of Artificial Sequence: Synthetic oligonucleotide
ucaucuaagaggaucuucu

SEQ ID NO: 851818 - RNA, 19 nt, Artificial Sequence
  Description of Artificial Sequence: Synthetic oligonucleotide
gaauaagacccauugcacc

SEQ ID NO: 851819 - RNA, 19 nt, Artificial Sequence
  Description of Artificial Sequence: Synthetic oligonucleotide
aguuggguaaauuaagaca

SEQ ID NO: 851820 - RNA, 19 nt, Artificial Sequence
  Description of Artificial Sequence: Synthetic oligonucleotide
uaaacagugccaauugaca

SEQ ID NO: 851821 - RNA, 19 nt, Artificial Sequence
  Description of Artificial Sequence: Synthetic oligonucleotide
caagagagagagaagagac

SEQ ID NO: 851822 - RNA, 19 nt, Artificial Sequence
  Description of Artificial Sequence: Synthetic oligonucleotide
acauacaucaggaccaacc

SEQ ID NO: 851823 - RNA, 19 nt, Artificial Sequence
  Description of Artificial Sequence: Synthetic oligonucleotide
uauccuuccuaaaucuagg

SEQ ID NO: 851824 - RNA, 19 nt, Artificial Sequence
  Description of Artificial Sequence: Synthetic oligonucleotide
aagggauuaucucuguugu

SEQ ID NO: 851825 - RNA, 19 nt, Artificial Sequence
  Description of Artificial Sequence: Synthetic oligonucleotide
agagguuccaacccuacuc

SEQ ID NO: 851826 - RNA, 19 nt, Artificial Sequence
  Description of Artificial Sequence: Synthetic oligonucleotide
gcgaauuucaaauaucagg

SEQ ID NO: 851827 - RNA, 19 nt, Artificial Sequence
  Description of Artificial Sequence: Synthetic oligonucleotide
uggcucuagagacagaagc

SEQ ID NO: 851828 - RNA, 19 nt, Artificial Sequence
  Description of Artificial Sequence: Synthetic oligonucleotide
uuuaauccuguugagggag

SEQ ID NO: 851829 - RNA, 19 nt, Artificial Sequence
  Description of Artificial Sequence: Synthetic oligonucleotide
aaaugggacacaaauuaag

SEQ ID NO: 851830 - RNA, 19 nt, Artificial Sequence
  Description of Artificial Sequence: Synthetic oligonucleotide
uuaucugagagucgaaggu

SEQ ID NO: 851831 - RNA, 19 nt, Artificial Sequence
  Description of Artificial Sequence: Synthetic oligonucleotide
ucuagguuacuuaauuacu

SEQ ID NO: 851832 - RNA, 19 nt, Artificial Sequence
  Description of Artificial Sequence: Synthetic oligonucleotide
aauuaagacaugauuggca

SEQ ID NO: 851833 - RNA, 19 nt, Artificial Sequence
  Description of Artificial Sequence: Synthetic oligonucleotide
aauagccugaugcagcuau

SEQ ID NO: 851834 - RNA, 19 nt, Artificial Sequence
  Description of Artificial Sequence: Synthetic oligonucleotide
gaaaugaaagaacgguagc

SEQ ID NO: 851835 - RNA, 19 nt, Artificial Sequence
  Description of Artificial Sequence: Synthetic oligonucleotide
auacgucugacauauauaa

SEQ ID NO: 851836 - RNA, 19 nt, Artificial Sequence
  Description of Artificial Sequence: Synthetic oligonucleotide
caaauaccaagagagagag

SEQ ID NO: 851837 - RNA, 19 nt, Artificial Sequence
  Description of Artificial Sequence: Synthetic oligonucleotide
uuuacccaagaucauggca

SEQ ID NO: 851838 - RNA, 19 nt, Artificial Sequence
  Description of Artificial Sequence: Synthetic oligonucleotide
uuauuuuaauccuguugag

SEQ ID NO: 851839 - RNA, 19 nt, Artificial Sequence
  Description of Artificial Sequence: Synthetic oligonucleotide
caguauaauacucuuucag

SEQ ID NO: 851840 - RNA, 19 nt, Artificial Sequence
  Description of Artificial Sequence: Synthetic oligonucleotide
cuggagugagucaaaauag

SEQ ID NO: 851841 - RNA, 19 nt, Artificial Sequence
  Description of Artificial Sequence: Synthetic oligonucleotide
ucggcaauaaaaccugagc

SEQ ID NO: 851842 - RNA, 19 nt, Artificial Sequence
  Description of Artificial Sequence: Synthetic oligonucleotide
ucauacgucugacauauau

SEQ ID NO: 851843 - RNA, 19 nt, Artificial Sequence
  Description of Artificial Sequence: Synthetic oligonucleotide
aagccaacuaacaaugaag

SEQ ID NO: 851844 - RNA, 19 nt, Artificial Sequence
  Description of Artificial Sequence: Synthetic oligonucleotide
uuggaaaugaaagaacggu

SEQ ID NO: 851845 - RNA, 19 nt, Artificial Sequence
  Description of Artificial Sequence: Synthetic oligonucleotide
aaccguuuuagaaaguuca

SEQ ID NO: 851846 - RNA, 19 nt, Artificial Sequence
  Description of Artificial Sequence: Synthetic oligonucleotide
uaugcagguuccaaggcca

SEQ ID NO: 851847 - RNA, 19 nt, Artificial Sequence
  Description of Artificial Sequence: Synthetic oligonucleotide
acuggagugagucaaaaua

SEQ ID NO: 851848 - RNA, 19 nt, Artificial Sequence
  Description of Artificial Sequence: Synthetic oligonucleotide
aauaucaggguacccuagu

SEQ ID NO: 851849 - RNA, 19 nt, Artificial Sequence
  Description of Artificial Sequence: Synthetic oligonucleotide
auaauacucuuucagggaa

SEQ ID NO: 851850 - RNA, 19 nt, Artificial Sequence
  Description of Artificial Sequence: Synthetic oligonucleotide
gauuaucugagagucgaag

SEQ ID NO: 851851 - RNA, 19 nt, Artificial Sequence
  Description of Artificial Sequence: Synthetic oligonucleotide
uucuauccuuccuaaaucu

SEQ ID NO: 851852 - RNA, 19 nt, Artificial Sequence
  Description of Artificial Sequence: Synthetic oligonucleotide
uuaagauccucauggcagc

SEQ ID NO: 851853 - RNA, 19 nt, Artificial Sequence
  Description of Artificial Sequence: Synthetic oligonucleotide
gagcuuaugcagcuaacag

SEQ ID NO: 851854 - RNA, 19 nt, Artificial Sequence
  Description of Artificial Sequence: Synthetic oligonucleotide
cuaucggucugccagagug

SEQ ID NO: 851855 - RNA, 19 nt, Artificial Sequence
  Description of Artificial Sequence: Synthetic oligonucleotide
uguaaacagugccaauuga

SEQ ID NO: 851856 - RNA, 19 nt, Artificial Sequence
  Description of Artificial Sequence: Synthetic oligonucleotide
gguuguguccuucagcugg

SEQ ID NO: 851857 - RNA, 19 nt, Artificial Sequence
  Description of Artificial Sequence: Synthetic oligonucleotide
aaucuagguuacuuaauua

SEQ ID NO: 851858 - RNA, 19 nt, Artificial Sequence
  Description of Artificial Sequence: Synthetic oligonucleotide
uaauacucuuucagggaag

SEQ ID NO: 851859 - RNA, 19 nt, Artificial Sequence
  Description of Artificial Sequence: Synthetic oligonucleotide
uggagugagucaaaauagc

SEQ ID NO: 851860 - RNA, 19 nt, Artificial Sequence
  Description of Artificial Sequence: Synthetic oligonucleotide
aaacguucauacgucugac

SEQ ID NO: 851861 - RNA, 19 nt, Artificial Sequence
  Description of Artificial Sequence: Synthetic oligonucleotide
gaaagaacgguagcagagg

SEQ ID NO: 851862 - RNA, 19 nt, Artificial Sequence
  Description of Artificial Sequence: Synthetic oligonucleotide
aacaucuuacuacaugcuu

SEQ ID NO: 851863 - RNA, 19 nt, Artificial Sequence
  Description of Artificial Sequence: Synthetic oligonucleotide
agaguguugcugcuauuac

SEQ ID NO: 851864 - RNA, 19 nt, Artificial Sequence
  Description of Artificial Sequence: Synthetic oligonucleotide
aagcuagacccacauuaag

SEQ ID NO: 851865 - RNA, 19 nt, Artificial Sequence
  Description of Artificial Sequence: Synthetic oligonucleotide
uggcaaccguuuuagaaag

SEQ ID NO: 851866 - RNA, 19 nt, Artificial Sequence
  Description of Artificial Sequence: Synthetic oligonucleotide
agagacagaagccaacuaa

SEQ ID NO: 851867 - RNA, 19 nt, Artificial Sequence
  Description of Artificial Sequence: Synthetic oligonucleotide
agacccauugcaccccucc

SEQ ID NO: 851868 - RNA, 19 nt, Artificial Sequence
  Description of Artificial Sequence: Synthetic oligonucleotide
aaccugagcuguuuuccuc

SEQ ID NO: 851869 - RNA, 19 nt, Artificial Sequence
  Description of Artificial Sequence: Synthetic oligonucleotide
caauugacaguuuugcuga

SEQ ID NO: 851870 - RNA, 19 nt, Artificial Sequence
  Description of Artificial Sequence: Synthetic oligonucleotide
ugcuucaauagacgggcag

SEQ ID NO: 851871 - RNA, 19 nt, Artificial Sequence
  Description of Artificial Sequence: Synthetic oligonucleotide
aacgguagcagagggcaac

SEQ ID NO: 851872 - RNA, 19 nt, Artificial Sequence
  Description of Artificial Sequence: Synthetic oligonucleotide
ugacccaguauaauacucu

SEQ ID NO: 851873 - RNA, 19 nt, Artificial Sequence
  Description of Artificial Sequence: Synthetic oligonucleotide
agguugucuauucccaguc

SEQ ID NO: 851874 - RNA, 19 nt, Artificial Sequence
  Description of Artificial Sequence: Synthetic oligonucleotide
ucuuacuacaugcuucaau

SEQ ID NO: 851875 - RNA, 19 nt, Artificial Sequence
  Description of Artificial Sequence: Synthetic oligonucleotide
agcuuaugcagcuaacaga

SEQ ID NO: 851876 - RNA, 19 nt, Artificial Sequence
  Description of Artificial Sequence: Synthetic oligonucleotide
aacacauaauaaggggaag

SEQ ID NO: 851877 - RNA, 19 nt, Artificial Sequence
  Description of Artificial Sequence: Synthetic oligonucleotide
ugccaauugacaguuuugc

SEQ ID NO: 851878 - RNA, 19 nt, Artificial Sequence
  Description of Artificial Sequence: Synthetic oligonucleotide
auauauaagccaaaccagu

SEQ ID NO: 851879 - RNA, 19 nt, Artificial Sequence
  Description of Artificial Sequence: Synthetic oligonucleotide
aaggcgaauuucaaauauc

SEQ ID NO: 851880 - RNA, 19 nt, Artificial Sequence
  Description of Artificial Sequence: Synthetic oligonucleotide
ugauuggcacaauaacaug

SEQ ID NO: 851881 - RNA, 19 nt, Artificial Sequence
  Description of Artificial Sequence: Synthetic oligonucleotide
gaguguugcugcuauuacc

SEQ ID NO: 851882 - RNA, 19 nt, Artificial Sequence
  Description of Artificial Sequence: Synthetic oligonucleotide
aauacucuuucagggaagu

SEQ ID NO: 851883 - RNA, 19 nt, Artificial Sequence
  Description of Artificial Sequence: Synthetic oligonucleotide
ucgaagguaacaucuuacu

SEQ ID NO: 851884 - RNA, 19 nt, Artificial Sequence
  Description of Artificial Sequence: Synthetic oligonucleotide
ugcccugggauuaucugag

SEQ ID NO: 851885 - RNA, 19 nt, Artificial Sequence
  Description of Artificial Sequence: Synthetic oligonucleotide
aguugugcaagccagcguu

SEQ ID NO: 851886 - RNA, 19 nt, Artificial Sequence
  Description of Artificial Sequence: Synthetic oligonucleotide
ugacauauauaagccaaac

SEQ ID NO: 851887 - RNA, 19 nt, Artificial Sequence
  Description of Artificial Sequence: Synthetic oligonucleotide
uacgucugacauauauaag

SEQ ID NO: 851888 - RNA, 19 nt, Artificial Sequence
  Description of Artificial Sequence: Synthetic oligonucleotide
ugugcaagccagcguuucg

SEQ ID NO: 851889 - RNA, 19 nt, Artificial Sequence
  Description of Artificial Sequence: Synthetic oligonucleotide
agugcuuauucuauccuuc

SEQ ID NO: 851890 - RNA, 19 nt, Artificial Sequence
  Description of Artificial Sequence: Synthetic oligonucleotide
agccaaaccagugucaucu

SEQ ID NO: 851891 - RNA, 19 nt, Artificial Sequence
  Description of Artificial Sequence: Synthetic oligonucleotide
agaacgguagcagagggca

SEQ ID NO: 851892 - RNA, 19 nt, Artificial Sequence
  Description of Artificial Sequence: Synthetic oligonucleotide
acguucauacgucugacau

SEQ ID NO: 851893 - RNA, 19 nt, Artificial Sequence
  Description of Artificial Sequence: Synthetic oligonucleotide
agagucgaagguaacaucu

SEQ ID NO: 851894 - RNA, 19 nt, Artificial Sequence
  Description of Artificial Sequence: Synthetic oligonucleotide
aucaggguacccuaguuaa

SEQ ID NO: 851895 - RNA, 19 nt, Artificial Sequence
  Description of Artificial Sequence: Synthetic oligonucleotide
ucccagucggcaauaaaac

SEQ ID NO: 851896 - RNA, 19 nt, Artificial Sequence
  Description of Artificial Sequence: Synthetic oligonucleotide
uaucggucugccagagugg

SEQ ID NO: 851897 - RNA, 19 nt, Artificial Sequence
  Description of Artificial Sequence: Synthetic oligonucleotide
uugucuauucccagucggc

SEQ ID NO: 851898 - RNA, 19 nt, Artificial Sequence
  Description of Artificial Sequence: Synthetic oligonucleotide
aaaggagggaagccacaug

SEQ ID NO: 851899 - RNA, 19 nt, Artificial Sequence
  Description of Artificial Sequence: Synthetic oligonucleotide
gcagcuaucggucugccag

SEQ ID NO: 851900 - RNA, 19 nt, Artificial Sequence
  Description of Artificial Sequence: Synthetic oligonucleotide
auuaagacaucugcuuaag

SEQ ID NO: 851901 - RNA, 19 nt, Artificial Sequence
  Description of Artificial Sequence: Synthetic oligonucleotide
cuacuccccaacuuauggg

SEQ ID NO: 851902 - RNA, 19 nt, Artificial Sequence
  Description of Artificial Sequence: Synthetic oligonucleotide
ccaaugcaccaaaagaugg

SEQ ID NO: 851903 - RNA, 19 nt, Artificial Sequence
  Description of Artificial Sequence: Synthetic oligonucleotide
augauuggcacaauaacau

SEQ ID NO: 851904 - RNA, 19 nt, Artificial Sequence
  Description of Artificial Sequence: Synthetic oligonucleotide
auugcaccccuccccgucc

SEQ ID NO: 851905 - RNA, 19 nt, Artificial Sequence
  Description of Artificial Sequence: Synthetic oligonucleotide
cuuaugggaguagugggag

SEQ ID NO: 851906 - RNA, 19 nt, Artificial Sequence
  Description of Artificial Sequence: Synthetic oligonucleotide
guggggaggaaugagaaac

SEQ ID NO: 851907 - RNA, 19 nt, Artificial Sequence
  Description of Artificial Sequence: Synthetic oligonucleotide
aacguucauacgucugaca

SEQ ID NO: 851908 - RNA, 19 nt, Artificial Sequence
  Description of Artificial Sequence: Synthetic oligonucleotide
ggaugcaaugcccagacca

SEQ ID NO: 851909 - RNA, 19 nt, Artificial Sequence
  Description of Artificial Sequence: Synthetic oligonucleotide
aguaggaaggcgaauuuca

SEQ ID NO: 851910 - RNA, 19 nt, Artificial Sequence
  Description of Artificial Sequence: Synthetic oligonucleotide
agggaaguuggguaaauua

SEQ ID NO: 851911 - RNA, 19 nt, Artificial Sequence
  Description of Artificial Sequence: Synthetic oligonucleotide
ucuauucccagucggcaau

SEQ ID NO: 851912 - RNA, 19 nt, Artificial Sequence
  Description of Artificial Sequence: Synthetic oligonucleotide
auccuaugcagguuccaag

SEQ ID NO: 851913 - RNA, 19 nt, Artificial Sequence
  Description of Artificial Sequence: Synthetic oligonucleotide
ugcugcuauuaccaugucu

SEQ ID NO: 851914 - RNA, 19 nt, Artificial Sequence
  Description of Artificial Sequence: Synthetic oligonucleotide
uccagugcgguucagcauu

SEQ ID NO: 851915 - RNA, 19 nt, Artificial Sequence
  Description of Artificial Sequence: Synthetic oligonucleotide
gcuuaugcagcuaacagac

SEQ ID NO: 851916 - RNA, 19 nt, Artificial Sequence
  Description of Artificial Sequence: Synthetic oligonucleotide
ugggcaugcugcaaauuac

SEQ ID NO: 851917 - RNA, 19 nt, Artificial Sequence
  Description of Artificial Sequence: Synthetic oligonucleotide
aacccuacuccccaacuua

SEQ ID NO: 851918 - RNA, 19 nt, Artificial Sequence
  Description of Artificial Sequence: Synthetic oligonucleotide
agccaacuaacaaugaaga

SEQ ID NO: 851919 - RNA, 19 nt, Artificial Sequence
  Description of Artificial Sequence: Synthetic oligonucleotide
gagggcaacagguggaaga

SEQ ID NO: 851920 - RNA, 19 nt, Artificial Sequence
  Description of Artificial Sequence: Synthetic oligonucleotide
agugccaauugacaguuuu

SEQ ID NO: 851921 - RNA, 19 nt, Artificial Sequence
  Description of Artificial Sequence: Synthetic oligonucleotide
aggaccauuuuacccaaga

SEQ ID NO: 851922 - RNA, 19 nt, Artificial Sequence
  Description of Artificial Sequence: Synthetic oligonucleotide
ugucuauucccagucggca

SEQ ID NO: 851923 - RNA, 19 nt, Artificial Sequence
  Description of Artificial Sequence: Synthetic oligonucleotide
accucagcgggauaccuug

SEQ ID NO: 851924 - RNA, 19 nt, Artificial Sequence
  Description of Artificial Sequence: Synthetic oligonucleotide
ccaaaagauggaauguccc

SEQ ID NO: 851925 - RNA, 19 nt, Artificial Sequence
  Description of Artificial Sequence: Synthetic oligonucleotide
ugaugcagcuaucggucug

SEQ ID NO: 851926 - RNA, 19 nt, Artificial Sequence
  Description of Artificial Sequence: Synthetic oligonucleotide
acacaccucagcgggauac

SEQ ID NO: 851927 - RNA, 19 nt, Artificial Sequence
  Description of Artificial Sequence: Synthetic oligonucleotide
cagucggcaauaaaaccug

SEQ ID NO: 851928 - RNA, 19 nt, Artificial Sequence
  Description of Artificial Sequence: Synthetic oligonucleotide
aggggcggaaaacacauaa

SEQ ID NO: 851929 - RNA, 19 nt, Artificial Sequence
  Description of Artificial Sequence: Synthetic oligonucleotide
agcuuguguccauuaaaca

SEQ ID NO: 851930 - RNA, 19 nt, Artificial Sequence
  Description of Artificial Sequence: Synthetic oligonucleotide
uuaauccuguugagggaga

SEQ ID NO: 851931 - RNA, 19 nt, Artificial Sequence
  Description of Artificial Sequence: Synthetic oligonucleotide
ucuauccuuccuaaaucua

SEQ ID NO: 851932 - RNA, 19 nt, Artificial Sequence
  Description of Artificial Sequence: Synthetic oligonucleotide
cuagguuacuuaauuacua

SEQ ID NO: 851933 - RNA, 19 nt, Artificial Sequence
  Description of Artificial Sequence: Synthetic oligonucleotide
agugcgguucagcauugag

SEQ ID NO: 851934 - RNA, 19 nt, Artificial Sequence
  Description of Artificial Sequence: Synthetic oligonucleotide
gacaugauuggcacaauaa

SEQ ID NO: 851935 - RNA, 19 nt, Artificial Sequence
  Description of Artificial Sequence: Synthetic oligonucleotide
aauaaggggaagggucucu

SEQ ID NO: 851936 - RNA, 19 nt, Artificial Sequence
  Description of Artificial Sequence: Synthetic oligonucleotide
guaaauuaagacaucugcu

SEQ ID NO: 851937 - RNA, 19 nt, Artificial Sequence
  Description of Artificial Sequence: Synthetic oligonucleotide
uagcuaucaaguugaugcu

SEQ ID NO: 851938 - RNA, 19 nt, Artificial Sequence
  Description of Artificial Sequence: Synthetic oligonucleotide
aagagagagagaagagaca

SEQ ID NO: 851939 - RNA, 19 nt, Artificial Sequence
  Description of Artificial Sequence: Synthetic oligonucleotide
acauaauaaggggaagggu

SEQ ID NO: 851940 - RNA, 19 nt, Artificial Sequence
  Description of Artificial Sequence: Synthetic oligonucleotide
cugacccaguauaauacuc

SEQ ID NO: 851941 - RNA, 19 nt, Artificial Sequence
  Description of Artificial Sequence: Synthetic oligonucleotide
caugccuagaguguugcug

SEQ ID NO: 851942 - RNA, 19 nt, Artificial Sequence
  Description of Artificial Sequence: Synthetic oligonucleotide
aaugcccagaccaacuuuu

SEQ ID NO: 851943 - RNA, 19 nt, Artificial Sequence
  Description of Artificial Sequence: Synthetic oligonucleotide
ugcuguauccgggaccucc

SEQ ID NO: 851944 - RNA, 19 nt, Artificial Sequence
  Description of Artificial Sequence: Synthetic oligonucleotide
uaccaugucuccucucuac

SEQ ID NO: 851945 - RNA, 19 nt, Artificial Sequence
  Description of Artificial Sequence: Synthetic oligonucleotide
guauccgggaccuccaguc

SEQ ID NO: 851946 - RNA, 19 nt, Artificial Sequence
  Description of Artificial Sequence: Synthetic oligonucleotide
cuuuggauagcugcaggac

SEQ ID NO: 851947 - RNA, 19 nt, Artificial Sequence
  Description of Artificial Sequence: Synthetic oligonucleotide
aauccuaugcagguuccaa

SEQ ID NO: 851948 - RNA, 19 nt, Artificial Sequence
  Description of Artificial Sequence: Synthetic oligonucleotide
accguuuuagaaaguucac

SEQ ID NO: 851949 - RNA, 19 nt, Artificial Sequence
  Description of Artificial Sequence: Synthetic oligonucleotide
guggcaaccguuuuagaaa

SEQ ID NO: 851950 - RNA, 19 nt, Artificial Sequence
  Description of Artificial Sequence: Synthetic oligonucleotide
cuagacccacauuaagauc

SEQ ID NO: 851951 - RNA, 19 nt, Artificial Sequence
  Description of Artificial Sequence: Synthetic oligonucleotide
caucuaagaggaucuucug

SEQ ID NO: 851952 - RNA, 19 nt, Artificial Sequence
  Description of Artificial Sequence: Synthetic oligonucleotide
uccuaaaucuagguuacuu

SEQ ID NO: 851953 - RNA, 19 nt, Artificial Sequence
  Description of Artificial Sequence: Synthetic oligonucleotide
cugcuauuaccaugucucc

SEQ ID NO: 851954 - RNA, 19 nt, Artificial Sequence
  Description of Artificial Sequence: Synthetic oligonucleotide
uccuuccuaaaucuagguu

SEQ ID NO: 851955 - RNA, 19 nt, Artificial Sequence
  Description of Artificial Sequence: Synthetic oligonucleotide
auagacgggcagaugguuc

SEQ ID NO: 851956 - RNA, 19 nt, Artificial Sequence
  Description of Artificial Sequence: Synthetic oligonucleotide
uagaguguugcugcuauua

SEQ ID NO: 851957 - RNA, 19 nt, Artificial Sequence
  Description of Artificial Sequence: Synthetic oligonucleotide
uggggaggaaugagaaacu

SEQ ID NO: 851958 - RNA, 19 nt, Artificial Sequence
  Description of Artificial Sequence: Synthetic oligonucleotide
auccuuccuaaaucuaggu

SEQ ID NO: 851959 - RNA, 19 nt, Artificial Sequence
  Description of Artificial Sequence: Synthetic oligonucleotide
agcuagacccacauuaaga

SEQ ID NO: 851960 - RNA, 19 nt, Artificial Sequence
  Description of Artificial Sequence: Synthetic oligonucleotide
aagcuaguagccaaagcua

SEQ ID NO: 851961 - RNA, 19 nt, Artificial Sequence
  Description of Artificial Sequence: Synthetic oligonucleotide
ugcuauuaccaugucuccu

SEQ ID NO: 851962 - RNA, 19 nt, Artificial Sequence
  Description of Artificial Sequence: Synthetic oligonucleotide
ccuacuccccaacuuaugg

SEQ ID NO: 851963 - RNA, 19 nt, Artificial Sequence
  Description of Artificial Sequence: Synthetic oligonucleotide
gcagcuaacagacuuguaa

SEQ ID NO: 851964 - RNA, 19 nt, Artificial Sequence
  Description of Artificial Sequence: Synthetic oligonucleotide
agcuagagcauguuuuauu

SEQ ID NO: 851965 - RNA, 19 nt, Artificial Sequence
  Description of Artificial Sequence: Synthetic oligonucleotide
aauagacgggcagaugguu

SEQ ID NO: 851966 - RNA, 19 nt, Artificial Sequence
  Description of Artificial Sequence: Synthetic oligonucleotide
agggucucuauauaacaua

SEQ ID NO: 851967 - RNA, 19 nt, Artificial Sequence
  Description of Artificial Sequence: Synthetic oligonucleotide
aaacuacagcuugugucca

SEQ ID NO: 851968 - RNA, 19 nt, Artificial Sequence
  Description of Artificial Sequence: Synthetic oligonucleotide
agcguuucguggugguguc

SEQ ID NO: 851969 - RNA, 19 nt, Artificial Sequence
  Description of Artificial Sequence: Synthetic oligonucleotide
ggaauaagacccauugcac

SEQ ID NO: 851970 - RNA, 19 nt, Artificial Sequence
  Description of Artificial Sequence: Synthetic oligonucleotide
gucgaagguaacaucuuac

SEQ ID NO: 851971 - RNA, 19 nt, Artificial Sequence
  Description of Artificial Sequence: Synthetic oligonucleotide
gguugucuauucccagucg

SEQ ID NO: 851972 - RNA, 19 nt, Artificial Sequence
  Description of Artificial Sequence: Synthetic oligonucleotide
gcuauuaccaugucuccuc

SEQ ID NO: 851973 - RNA, 19 nt, Artificial Sequence
  Description of Artificial Sequence: Synthetic oligonucleotide
agcuaucaaguugaugcug

SEQ ID NO: 851974 - RNA, 19 nt, Artificial Sequence
  Description of Artificial Sequence: Synthetic oligonucleotide
caaauaucaggguacccua

SEQ ID NO: 851975 - RNA, 19 nt, Artificial Sequence
  Description of Artificial Sequence: Synthetic oligonucleotide
uaagauccucauggcagcc

SEQ ID NO: 851976 - RNA, 19 nt, Artificial Sequence
  Description of Artificial Sequence: Synthetic oligonucleotide
ugguuaaaagaaggggaaa

SEQ ID NO: 851977 - RNA, 19 nt, Artificial Sequence
  Description of Artificial Sequence: Synthetic oligonucleotide
accaagagagagagaagag

SEQ ID NO: 851978 - RNA, 19 nt, Artificial Sequence
  Description of Artificial Sequence: Synthetic oligonucleotide
uucaauagacgggcagaug

SEQ ID NO: 851979 - RNA, 19 nt, Artificial Sequence
  Description of Artificial Sequence: Synthetic oligonucleotide
guucauacgucugacauau

SEQ ID NO: 851980 - RNA, 19 nt, Artificial Sequence
  Description of Artificial Sequence: Synthetic oligonucleotide
augcaaugcccagaccaac

SEQ ID NO: 851981 - RNA, 19 nt, Artificial Sequence
  Description of Artificial Sequence: Synthetic oligonucleotide
cgucugacauauauaagcc

SEQ ID NO: 851982 - RNA, 19 nt, Artificial Sequence
  Description of Artificial Sequence: Synthetic oligonucleotide
uauccgggaccuccaguca

SEQ ID NO: 851983 - RNA, 19 nt, Artificial Sequence
  Description of Artificial Sequence: Synthetic oligonucleotide
auaucaggguacccuaguu

SEQ ID NO: 851984 - RNA, 19 nt, Artificial Sequence
  Description of Artificial Sequence: Synthetic oligonucleotide
uccccguccaaauccuaug

SEQ ID NO: 851985 - RNA, 19 nt, Artificial Sequence
  Description of Artificial Sequence: Synthetic oligonucleotide
aagccagcguuucguggug

SEQ ID NO: 851986 - RNA, 19 nt, Artificial Sequence
  Description of Artificial Sequence: Synthetic oligonucleotide
gugguuaaaagaaggggaa

SEQ ID NO: 851987 - RNA, 19 nt, Artificial Sequence
  Description of Artificial Sequence: Synthetic oligonucleotide
guuccaacccuacucccca

SEQ ID NO: 851988 - RNA, 19 nt, Artificial Sequence
  Description of Artificial Sequence: Synthetic oligonucleotide
gucggcaauaaaaccugag

SEQ ID NO: 851989 - RNA, 19 nt, Artificial Sequence
  Description of Artificial Sequence: Synthetic oligonucleotide
cuaccaguggcuagguaga

SEQ ID NO: 851990 - RNA, 19 nt, Artificial Sequence
  Description of Artificial Sequence: Synthetic oligonucleotide
aacuacagcuuguguccau

SEQ ID NO: 851991 - RNA, 19 nt, Artificial Sequence
  Description of Artificial Sequence: Synthetic oligonucleotide
cauacgucugacauauaua

SEQ ID NO: 851992 - RNA, 19 nt, Artificial Sequence
  Description of Artificial Sequence: Synthetic oligonucleotide
ucaggguacccuaguuaaa

SEQ ID NO: 851993 - RNA, 19 nt, Artificial Sequence
  Description of Artificial Sequence: Synthetic oligonucleotide
ggcaagggaauuccccggg

SEQ ID NO: 851994 - RNA, 19 nt, Artificial Sequence
  Description of Artificial Sequence: Synthetic oligonucleotide
gggauuaucugagagucga

SEQ ID NO: 851995 - RNA, 19 nt, Artificial Sequence
  Description of Artificial Sequence: Synthetic oligonucleotide
uaauaaggggaagggucuc

SEQ ID NO: 851996 - RNA, 19 nt, Artificial Sequence
  Description of Artificial Sequence: Synthetic oligonucleotide
ccugccucccauuccaucc

SEQ ID NO: 851997 - RNA, 19 nt, Artificial Sequence
  Description of Artificial Sequence: Synthetic oligonucleotide
auaccaagagagagagaag

SEQ ID NO: 851998 - RNA, 19 nt, Artificial Sequence
  Description of Artificial Sequence: Synthetic oligonucleotide
ggcucuagagacagaagcc

SEQ ID NO: 851999 - RNA, 19 nt, Artificial Sequence
  Description of Artificial Sequence: Synthetic oligonucleotide
uuuuagcaccugggcaaag

SEQ ID NO: 852000 - RNA, 19 nt, Artificial Sequence
  Description of Artificial Sequence: Synthetic oligonucleotide
cauaaugcgcaaacacaaa

SEQ ID NO: 852001 - RNA, 19 nt, Artificial Sequence
  Description of Artificial Sequence: Synthetic oligonucleotide
uagccaaagcuagacccac

SEQ ID NO: 852002 - RNA, 19 nt, Artificial Sequence
  Description of Artificial Sequence: Synthetic oligonucleotide
aagcuagagcauguuuuau

SEQ ID NO: 852003 - RNA, 19 nt, Artificial Sequence
  Description of Artificial Sequence: Synthetic oligonucleotide
ccguccaaauccuaugcag

SEQ ID NO: 852004 - RNA, 19 nt, Artificial Sequence
  Description of Artificial Sequence: Synthetic oligonucleotide
acacacaucuugagucuuc

SEQ ID NO: 852005 - RNA, 19 nt, Artificial Sequence
  Description of Artificial Sequence: Synthetic oligonucleotide
agcgggauaccuugccccu

SEQ ID NO: 852006 - RNA, 19 nt, Artificial Sequence
  Description of Artificial Sequence: Synthetic oligonucleotide
ccaacuuaugggaguagug

SEQ ID NO: 852007 - RNA, 19 nt, Artificial Sequence
  Description of Artificial Sequence: Synthetic oligonucleotide
ggaagggucucuauauaac

SEQ ID NO: 852008 - RNA, 19 nt, Artificial Sequence
  Description of Artificial Sequence: Synthetic oligonucleotide
cccagucggcaauaaaacc

SEQ ID NO: 852009 - RNA, 19 nt, Artificial Sequence
  Description of Artificial Sequence: Synthetic oligonucleotide
gccaacuaacaaugaagac

SEQ ID NO: 852010 - RNA, 19 nt, Artificial Sequence
  Description of Artificial Sequence: Synthetic oligonucleotide
gggcggaaaacacauaaua

SEQ ID NO: 852011 - RNA, 19 nt, Artificial Sequence
  Description of Artificial Sequence: Synthetic oligonucleotide
gggaucggugaccuggccc

SEQ ID NO: 852012 - RNA, 19 nt, Artificial Sequence
  Description of Artificial Sequence: Synthetic oligonucleotide
ugguguugacacccuccgu

SEQ ID NO: 852013 - RNA, 19 nt, Artificial Sequence
  Description of Artificial Sequence: Synthetic oligonucleotide
acuccccaacuuaugggag

SEQ ID NO: 852014 - RNA, 19 nt, Artificial Sequence
  Description of Artificial Sequence: Synthetic oligonucleotide
gagagagagaagagacaca

SEQ ID NO: 852015 - RNA, 19 nt, Artificial Sequence
  Description of Artificial Sequence: Synthetic oligonucleotide
gggaagggucucuauauaa

SEQ ID NO: 852016 - RNA, 19 nt, Artificial Sequence
  Description of Artificial Sequence: Synthetic oligonucleotide
gucuauucccagucggcaa

SEQ ID NO: 852017 - RNA, 19 nt, Artificial Sequence
  Description of Artificial Sequence: Synthetic oligonucleotide
ccaacuaacaaugaagacu

SEQ ID NO: 852018 - RNA, 19 nt, Artificial Sequence
  Description of Artificial Sequence: Synthetic oligonucleotide
cauugcaccccuccccguc

SEQ ID NO: 852019 - RNA, 19 nt, Artificial Sequence
  Description of Artificial Sequence: Synthetic oligonucleotide
augcagcuaucggucugcc

SEQ ID NO: 852020 - RNA, 19 nt, Artificial Sequence
  Description of Artificial Sequence: Synthetic oligonucleotide
uugugcaagccagcguuuc

SEQ ID NO: 852021 - RNA, 19 nt, Artificial Sequence
  Description of Artificial Sequence: Synthetic oligonucleotide
caagggaauuccccgggga

SEQ ID NO: 852022 - RNA, 19 nt, Artificial Sequence
  Description of Artificial Sequence: Synthetic oligonucleotide
ggcggaaaacacauaauaa

SEQ ID NO: 852023 - RNA, 19 nt, Artificial Sequence
  Description of Artificial Sequence: Synthetic oligonucleotide
ggagggaauagggaggauc

SEQ ID NO: 852024 - RNA, 19 nt, Artificial Sequence
  Description of Artificial Sequence: Synthetic oligonucleotide
aggguacccuaguuaaauu

SEQ ID NO: 852025 - RNA, 19 nt, Artificial Sequence
  Description of Artificial Sequence: Synthetic oligonucleotide
gcaagggaauuccccgggg

SEQ ID NO: 852026 - RNA, 19 nt, Artificial Sequence
  Description of Artificial Sequence: Synthetic oligonucleotide
gcuagacccacauuaagau

SEQ ID NO: 852027 - RNA, 19 nt, Artificial Sequence
  Description of Artificial Sequence: Synthetic oligonucleotide
agcuaucggucugccagag

SEQ ID NO: 852028 - RNA, 19 nt, Artificial Sequence
  Description of Artificial Sequence: Synthetic oligonucleotide
cacauggcuuggucccagg

SEQ ID NO: 852029 - RNA, 19 nt, Artificial Sequence
  Description of Artificial Sequence: Synthetic oligonucleotide
gguuccaacccuacucccc

SEQ ID NO: 852030 - RNA, 19 nt, Artificial Sequence
  Description of Artificial Sequence: Synthetic oligonucleotide
uccucucuaccaguggcua

SEQ ID NO: 852031 - RNA, 19 nt, Artificial Sequence
  Description of Artificial Sequence: Synthetic oligonucleotide
ccuaaaucuagguuacuua

SEQ ID NO: 852032 - RNA, 19 nt, Artificial Sequence
  Description of Artificial Sequence: Synthetic oligonucleotide
gcgcucaccaugccuagag

SEQ ID NO: 852033 - RNA, 19 nt, Artificial Sequence
  Description of Artificial Sequence: Synthetic oligonucleotide
ugcagcuaacagacuugua

SEQ ID NO: 852034 - RNA, 19 nt, Artificial Sequence
  Description of Artificial Sequence: Synthetic oligonucleotide
cuguauccgggaccuccag

SEQ ID NO: 852035 - RNA, 19 nt, Artificial Sequence
  Description of Artificial Sequence: Synthetic oligonucleotide
guaggaaggcgaauuucaa

SEQ ID NO: 852036 - RNA, 19 nt, Artificial Sequence
  Description of Artificial Sequence: Synthetic oligonucleotide
agagggcaacagguggaag

SEQ ID NO: 852037 - RNA, 19 nt, Artificial Sequence
  Description of Artificial Sequence: Synthetic oligonucleotide
ccagucggcaauaaaaccu

SEQ ID NO: 852038 - RNA, 19 nt, Artificial Sequence
  Description of Artificial Sequence: Synthetic oligonucleotide
gacccaguauaauacucuu

SEQ ID NO: 852039 - RNA, 19 nt, Artificial Sequence
  Description of Artificial Sequence: Synthetic oligonucleotide
gcuucaauagacgggcaga

SEQ ID NO: 852040 - RNA, 19 nt, Artificial Sequence
  Description of Artificial Sequence: Synthetic oligonucleotide
aggcgcucaccaugccuag

SEQ ID NO: 852041 - RNA, 19 nt, Artificial Sequence
  Description of Artificial Sequence: Synthetic oligonucleotide
aggaccaaccacagggaau

SEQ ID NO: 852042 - RNA, 19 nt, Artificial Sequence
  Description of Artificial Sequence: Synthetic oligonucleotide
uugcaccccuccccgucca

SEQ ID NO: 852043 - RNA, 19 nt, Artificial Sequence
  Description of Artificial Sequence: Synthetic oligonucleotide
auaaggggaagggucucua

SEQ ID NO: 852044 - RNA, 19 nt, Artificial Sequence
  Description of Artificial Sequence: Synthetic oligonucleotide
augguucuuuggauagcug

SEQ ID NO: 852045 - RNA, 19 nt, Artificial Sequence
  Description of Artificial Sequence: Synthetic oligonucleotide
ggaccaaccacagggaaua

SEQ ID NO: 852046 - RNA, 19 nt, Artificial Sequence
  Description of Artificial Sequence: Synthetic oligonucleotide
cccuccguggggcuggugg

SEQ ID NO: 852047 - RNA, 19 nt, Artificial Sequence
  Description of Artificial Sequence: Synthetic oligonucleotide
agccagcguuucguggugg

SEQ ID NO: 852048 - RNA, 19 nt, Artificial Sequence
  Description of Artificial Sequence: Synthetic oligonucleotide
ccaagagagagagaagaga

SEQ ID NO: 852049 - RNA, 19 nt, Artificial Sequence
  Description of Artificial Sequence: Synthetic oligonucleotide
ccggggaucggugaccugg

SEQ ID NO: 852050 - RNA, 19 nt, Artificial Sequence
  Description of Artificial Sequence: Synthetic oligonucleotide
agucggcaauaaaaccuga

SEQ ID NO: 852051 - RNA, 19 nt, Artificial Sequence
  Description of Artificial Sequence: Synthetic oligonucleotide
ggaucggugaccuggcccu

SEQ ID NO: 852052 - RNA, 19 nt, Artificial Sequence
  Description of Artificial Sequence: Synthetic oligonucleotide
uuccaacccuacuccccaa

SEQ ID NO: 852053 - RNA, 19 nt, Artificial Sequence
  Description of Artificial Sequence: Synthetic oligonucleotide
ccccguccaaauccuaugc

SEQ ID NO: 852054 - RNA, 19 nt, Artificial Sequence
  Description of Artificial Sequence: Synthetic oligonucleotide
uucauacgucugacauaua

SEQ ID NO: 852055 - RNA, 19 nt, Artificial Sequence
  Description of Artificial Sequence: Synthetic oligonucleotide
caggaccaaccacagggaa

SEQ ID NO: 852056 - RNA, 19 nt, Artificial Sequence
  Description of Artificial Sequence: Synthetic oligonucleotide
cuuuuagcaccugggcaaa

SEQ ID NO: 852057 - RNA, 19 nt, Artificial Sequence
  Description of Artificial Sequence: Synthetic oligonucleotide
ggauaccuugccccuuuuc

SEQ ID NO: 852058 - RNA, 19 nt, Artificial Sequence
  Description of Artificial Sequence: Synthetic oligonucleotide
ugacacccuccguggggcu

SEQ ID NO: 852059 - RNA, 19 nt, Artificial Sequence
  Description of Artificial Sequence: Synthetic oligonucleotide
acagggaauaagacccauu

SEQ ID NO: 852060 - RNA, 19 nt, Artificial Sequence
  Description of Artificial Sequence: Synthetic oligonucleotide
gguggcggcagacugcugu

SEQ ID NO: 852061 - RNA, 19 nt, Artificial Sequence
  Description of Artificial Sequence: Synthetic oligonucleotide
cagcuaucggucugccaga

SEQ ID NO: 852062 - RNA, 19 nt, Artificial Sequence
  Description of Artificial Sequence: Synthetic oligonucleotide
ggguacccuaguuaaauuu

SEQ ID NO: 852063 - RNA, 19 nt, Artificial Sequence
  Description of Artificial Sequence: Synthetic oligonucleotide
cuuaugcagcuaacagacu

SEQ ID NO: 852064 - RNA, 19 nt, Artificial Sequence
  Description of Artificial Sequence: Synthetic oligonucleotide
acccaguauaauacucuuu

SEQ ID NO: 852065 - RNA, 19 nt, Artificial Sequence
  Description of Artificial Sequence: Synthetic oligonucleotide
gggcaugcugcaaauuaca

SEQ ID NO: 852066 - RNA, 19 nt, Artificial Sequence
  Description of Artificial Sequence: Synthetic oligonucleotide
cuucaauagacgggcagau

SEQ ID NO: 852067 - RNA, 19 nt, Artificial Sequence
  Description of Artificial Sequence: Synthetic oligonucleotide
acccuacuccccaacuuau

SEQ ID NO: 852068 - RNA, 19 nt, Artificial Sequence
  Description of Artificial Sequence: Synthetic oligonucleotide
gccaauugacaguuuugcu

SEQ ID NO: 852069 - RNA, 19 nt, Artificial Sequence
  Description of Artificial Sequence: Synthetic oligonucleotide
acgugcccugggauuaucu

SEQ ID NO: 852070 - RNA, 19 nt, Artificial Sequence
  Description of Artificial Sequence: Synthetic oligonucleotide
caggguacccuaguuaaau

SEQ ID NO: 852071 - RNA, 19 nt, Artificial Sequence
  Description of Artificial Sequence: Synthetic oligonucleotide
caucccuccugacccagua

SEQ ID NO: 852072 - RNA, 19 nt, Artificial Sequence
  Description of Artificial Sequence: Synthetic oligonucleotide
cugaugcagcuaucggucu

SEQ ID NO: 852073 - RNA, 19 nt, Artificial Sequence
  Description of Artificial Sequence: Synthetic oligonucleotide
gaacgguagcagagggcaa

SEQ ID NO: 852074 - RNA, 19 nt, Artificial Sequence
  Description of Artificial Sequence: Synthetic oligonucleotide
ggcggcagacugcuguauc

SEQ ID NO: 852075 - RNA, 19 nt, Artificial Sequence
  Description of Artificial Sequence: Synthetic oligonucleotide
cagcguuucgugguggugu

SEQ ID NO: 852076 - RNA, 19 nt, Artificial Sequence
  Description of Artificial Sequence: Synthetic oligonucleotide
cggucugccagaguggaug

SEQ ID NO: 852077 - RNA, 19 nt, Artificial Sequence
  Description of Artificial Sequence: Synthetic oligonucleotide
ggcaacagguggaagaguu

SEQ ID NO: 852078 - RNA, 19 nt, Artificial Sequence
  Description of Artificial Sequence: Synthetic oligonucleotide
cccuacuccccaacuuaug

SEQ ID NO: 852079 - RNA, 19 nt, Artificial Sequence
  Description of Artificial Sequence: Synthetic oligonucleotide
cuucacgugcccugggauu

SEQ ID NO: 852080 - RNA, 19 nt, Artificial Sequence
  Description of Artificial Sequence: Synthetic oligonucleotide
gcaacagguggaagaguuc

SEQ ID NO: 852081 - RNA, 19 nt, Artificial Sequence
  Description of Artificial Sequence: Synthetic oligonucleotide
ccaauagccugaugcagcu

SEQ ID NO: 852082 - RNA, 19 nt, Artificial Sequence
  Description of Artificial Sequence: Synthetic oligonucleotide
gagucgaagguaacaucuu

SEQ ID NO: 852083 - RNA, 19 nt, Artificial Sequence
  Description of Artificial Sequence: Synthetic oligonucleotide
ccagugcgguucagcauug

SEQ ID NO: 852084 - RNA, 19 nt, Artificial Sequence
  Description of Artificial Sequence: Synthetic oligonucleotide
cagagguuccaacccuacu

SEQ ID NO: 852085 - RNA, 19 nt, Artificial Sequence
  Description of Artificial Sequence: Synthetic oligonucleotide
ucacgugcccugggauuau

SEQ ID NO: 852086 - RNA, 19 nt, Artificial Sequence
  Description of Artificial Sequence: Synthetic oligonucleotide
ggggaucggugaccuggcc

SEQ ID NO: 852087 - RNA, 19 nt, Artificial Sequence
  Description of Artificial Sequence: Synthetic oligonucleotide
cucuaagaccuuuccucuu

SEQ ID NO: 852088 - RNA, 19 nt, Artificial Sequence
  Description of Artificial Sequence: Synthetic oligonucleotide
guggcggcagacugcugua

SEQ ID NO: 852089 - RNA, 19 nt, Artificial Sequence
  Description of Artificial Sequence: Synthetic oligonucleotide
caaugcccagaccaacuuu

SEQ ID NO: 852090 - RNA, 19 nt, Artificial Sequence
  Description of Artificial Sequence: Synthetic oligonucleotide
cuccccguccaaauccuau

SEQ ID NO: 852091 - RNA, 19 nt, Artificial Sequence
  Description of Artificial Sequence: Synthetic oligonucleotide
ggauuaucugagagucgaa

SEQ ID NO: 852092 - RNA, 19 nt, Artificial Sequence
  Description of Artificial Sequence: Synthetic oligonucleotide
caguugugcaagccagcgu

SEQ ID NO: 852093 - RNA, 19 nt, Artificial Sequence
  Description of Artificial Sequence: Synthetic oligonucleotide
caacccuacuccccaacuu

SEQ ID NO: 852094 - RNA, 19 nt, Artificial Sequence
  Description of Artificial Sequence: Synthetic oligonucleotide
ccugacccaguauaauacu

SEQ ID NO: 852095 - RNA, 19 nt, Artificial Sequence
  Description of Artificial Sequence: Synthetic oligonucleotide
cccguccaaauccuaugca

SEQ ID NO: 852096 - RNA, 19 nt, Artificial Sequence
  Description of Artificial Sequence: Synthetic oligonucleotide
cugguggcggcagacugcu

SEQ ID NO: 852097 - RNA, 19 nt, Artificial Sequence
  Description of Artificial Sequence: Synthetic oligonucleotide
ccacagggaauaagaccca

SEQ ID NO: 852098 - RNA, 19 nt, Artificial Sequence
  Description of Artificial Sequence: Synthetic oligonucleotide
cucuaccaguggcuaggua

SEQ ID NO: 852099 - RNA, 19 nt, Artificial Sequence
  Description of Artificial Sequence: Synthetic oligonucleotide
cacgugcccugggauuauc

SEQ ID NO: 852100 - RNA, 19 nt, Artificial Sequence
  Description of Artificial Sequence: Synthetic oligonucleotide
agacgggcagaugguucuu

SEQ ID NO: 852101 - RNA, 19 nt, Artificial Sequence
  Description of Artificial Sequence: Synthetic oligonucleotide
cuagaguguugcugcuauu

SEQ ID NO: 852102 - RNA, 19 nt, Artificial Sequence
  Description of Artificial Sequence: Synthetic oligonucleotide
cguucauacgucugacaua

SEQ ID NO: 852103 - RNA, 19 nt, Artificial Sequence
  Description of Artificial Sequence: Synthetic oligonucleotide
caguggcuagguagaaguu

SEQ ID NO: 852104 - RNA, 19 nt, Artificial Sequence
  Description of Artificial Sequence: Synthetic oligonucleotide
caauagccugaugcagcua

SEQ ID NO: 852105 - RNA, 19 nt, Artificial Sequence
  Description of Artificial Sequence: Synthetic oligonucleotide
cccaagaucauggcaacau

SEQ ID NO: 852106 - RNA, 19 nt, Artificial Sequence
  Description of Artificial Sequence: Synthetic oligonucleotide
cggggaucggugaccuggc

SEQ ID NO: 852107 - RNA, 19 nt, Artificial Sequence
  Description of Artificial Sequence: Synthetic oligonucleotide
ccccaacuuaugggaguag

SEQ ID NO: 852108 - RNA, 19 nt, Artificial Sequence
  Description of Artificial Sequence: Synthetic oligonucleotide
gccaaaccagugucaucua

SEQ ID NO: 852109 - RNA, 19 nt, Artificial Sequence
  Description of Artificial Sequence: Synthetic oligonucleotide
gacgggcagaugguucuuu

SEQ ID NO: 852110 - RNA, 19 nt, Artificial Sequence
  Description of Artificial Sequence: Synthetic oligonucleotide
gcccugggauuaucugaga

SEQ ID NO: 852111 - RNA, 19 nt, Artificial Sequence
  Description of Artificial Sequence: Synthetic oligonucleotide
cacacaccucagcgggaua

SEQ ID NO: 852112 - RNA, 19 nt, Artificial Sequence
  Description of Artificial Sequence: Synthetic oligonucleotide
cccaacuuaugggaguagu

SEQ ID NO: 852113 - RNA, 19 nt, Artificial Sequence
  Description of Artificial Sequence: Synthetic oligonucleotide
caccucagcgggauaccuu

SEQ ID NO: 852114 - RNA, 19 nt, Artificial Sequence
  Description of Artificial Sequence: Synthetic oligonucleotide
ccaaggccaucugaggaua

SEQ ID NO: 852115 - RNA, 19 nt, Artificial Sequence
  Description of Artificial Sequence: Synthetic oligonucleotide
cagugcgguucagcauuga

SEQ ID NO: 852116 - RNA, 19 nt, Artificial Sequence
  Description of Artificial Sequence: Synthetic oligonucleotide
gcuaucggucugccagagu

SEQ ID NO: 852117 - RNA, 19 nt, Artificial Sequence
  Description of Artificial Sequence: Synthetic oligonucleotide
ggcaaccguuuuagaaagu

SEQ ID NO: 852118 - RNA, 19 nt, Artificial Sequence
  Description of Artificial Sequence: Synthetic oligonucleotide
ggcgcucaccaugccuaga

SEQ ID NO: 852119 - RNA, 19 nt, Artificial Sequence
  Description of Artificial Sequence: Synthetic oligonucleotide
ccgggaccuccagucaguc

SEQ ID NO: 852120 - RNA, 19 nt, Artificial Sequence
  Description of Artificial Sequence: Synthetic oligonucleotide
gcguuucguggugguguca

SEQ ID NO: 852121 - RNA, 19 nt, Artificial Sequence
  Description of Artificial Sequence: Synthetic oligonucleotide
acccuccguggggcuggug

SEQ ID NO: 852122 - RNA, 19 nt, Artificial Sequence
  Description of Artificial Sequence: Synthetic oligonucleotide
gcucaguaggaaggcgaau

SEQ ID NO: 852123 - RNA, 19 nt, Artificial Sequence
  Description of Artificial Sequence: Synthetic oligonucleotide
cagugccaauugacaguuu

SEQ ID NO: 852124 - RNA, 19 nt, Artificial Sequence
  Description of Artificial Sequence: Synthetic oligonucleotide
cggugaccuggcccucuug

SEQ ID NO: 852125 - RNA, 19 nt, Artificial Sequence
  Description of Artificial Sequence: Synthetic oligonucleotide
gggauaccuugccccuuuu

SEQ ID NO: 852126 - RNA, 19 nt, Artificial Sequence
  Description of Artificial Sequence: Synthetic oligonucleotide
cccggggaucggugaccug

SEQ ID NO: 852127 - RNA, 19 nt, Artificial Sequence
  Description of Artificial Sequence: Synthetic oligonucleotide
gcgguucagcauugagguu

SEQ ID NO: 852128 - RNA, 19 nt, Artificial Sequence
  Description of Artificial Sequence: Synthetic oligonucleotide
ccauugcaccccuccccgu

SEQ ID NO: 852129 - RNA, 19 nt, Artificial Sequence
  Description of Artificial Sequence: Synthetic oligonucleotide
aauuguuauacacuaaugg

SEQ ID NO: 852130 - RNA, 19 nt, Artificial Sequence
  Description of Artificial Sequence: Synthetic oligonucleotide
aaacuguuuacagagaucc

SEQ ID NO: 852131 - RNA, 19 nt, Artificial Sequence
  Description of Artificial Sequence: Synthetic oligonucleotide
aacaucaauuguuauacac

SEQ ID NO: 852132 - RNA, 19 nt, Artificial Sequence
  Description of Artificial Sequence: Synthetic oligonucleotide
aaaaccaugaaacaagcca

SEQ ID NO: 852133 - RNA, 19 nt, Artificial Sequence
  Description of Artificial Sequence: Synthetic oligonucleotide
aauguggugcuccauacac

SEQ ID NO: 852134 - RNA, 19 nt, Artificial Sequence
  Description of Artificial Sequence: Synthetic oligonucleotide
aacaguuggaucuacccgg

SEQ ID NO: 852135 - RNA, 19 nt, Artificial Sequence
  Description of Artificial Sequence: Synthetic oligonucleotide
aggacuaagaaucaaacug

SEQ ID NO: 852136 - RNA, 19 nt, Artificial Sequence
  Description of Artificial Sequence: Synthetic oligonucleotide
auuuauaagugauucgccg

SEQ ID NO: 852137 - RNA, 19 nt, Artificial Sequence
  Description of Artificial Sequence: Synthetic oligonucleotide
acacauauuauaaaagugc

SEQ ID NO: 852138 - RNA, 19 nt, Artificial Sequence
  Description of Artificial Sequence: Synthetic oligonucleotide
uaaaacgugcauuagacac

SEQ ID NO: 852139 - RNA, 19 nt, Artificial Sequence
  Description of Artificial Sequence: Synthetic oligonucleotide
uuuauggcaaccuuuacac

SEQ ID NO: 852140 - RNA, 19 nt, Artificial Sequence
  Description of Artificial Sequence: Synthetic oligonucleotide
ugcauaauccuccaaaaug

SEQ ID NO: 852141 - RNA, 19 nt, Artificial Sequence
  Description of Artificial Sequence: Synthetic oligonucleotide
ucuguugcagaccagaugu

SEQ ID NO: 852142 - RNA, 19 nt, Artificial Sequence
  Description of Artificial Sequence: Synthetic oligonucleotide
agcauuuugucauagagca

SEQ ID NO: 852143 - RNA, 19 nt, Artificial Sequence
  Description of Artificial Sequence: Synthetic oligonucleotide
ucuguuuaaaucaaacaga

SEQ ID NO: 852144 - RNA, 19 nt, Artificial Sequence
  Description of Artificial Sequence: Synthetic oligonucleotide
uguuauacacuaauggucu

SEQ ID NO: 852145 - RNA, 19 nt, Artificial Sequence
  Description of Artificial Sequence: Synthetic oligonucleotide
cacauauuauaaaagugcg

SEQ ID NO: 852146 - RNA, 19 nt, Artificial Sequence
  Description of Artificial Sequence: Synthetic oligonucleotide
aauguuaaaacgugcauua

SEQ ID NO: 852147 - RNA, 19 nt, Artificial Sequence
  Description of Artificial Sequence: Synthetic oligonucleotide
aguugcagaauucuucgcc

SEQ ID NO: 852148 - RNA, 19 nt, Artificial Sequence
  Description of Artificial Sequence: Synthetic oligonucleotide
auuacauugaaguacuccu

SEQ ID NO: 852149 - RNA, 19 nt, Artificial Sequence
  Description of Artificial Sequence: Synthetic oligonucleotide
acacuaauggucuucaaag

SEQ ID NO: 852150 - RNA, 19 nt, Artificial Sequence
  Description of Artificial Sequence: Synthetic oligonucleotide
aaaccaugaaacaagccac

SEQ ID NO: 852151 - RNA, 19 nt, Artificial Sequence
  Description of Artificial Sequence: Synthetic oligonucleotide
ucauagagcauuaacacau

SEQ ID NO: 852152 - RNA, 19 nt, Artificial Sequence
  Description of Artificial Sequence: Synthetic oligonucleotide
uccgaugguacucaggagg

SEQ ID NO: 852153 - RNA, 19 nt, Artificial Sequence
  Description of Artificial Sequence: Synthetic oligonucleotide
gauaguucaguaauaaagc

SEQ ID NO: 852154 - RNA, 19 nt, Artificial Sequence
  Description of Artificial Sequence: Synthetic oligonucleotide
uugucauagagcauuaaca

SEQ ID NO: 852155 - RNA, 19 nt, Artificial Sequence
  Description of Artificial Sequence: Synthetic oligonucleotide
aacaacuccuacaagauug

SEQ ID NO: 852156 - RNA, 19 nt, Artificial Sequence
  Description of Artificial Sequence: Synthetic oligonucleotide
auuguuauacacuaauggu

SEQ ID NO: 852157 - RNA, 19 nt, Artificial Sequence
  Description of Artificial Sequence: Synthetic oligonucleotide
auaguuugcauaauccucc

SEQ ID NO: 852158 - RNA, 19 nt, Artificial Sequence
  Description of Artificial Sequence: Synthetic oligonucleotide
caaaguacagcauuuguac

SEQ ID NO: 852159 - RNA, 19 nt, Artificial Sequence
  Description of Artificial Sequence: Synthetic oligonucleotide
aacuuagcgucagaaacgc

SEQ ID NO: 852160 - RNA, 19 nt, Artificial Sequence
  Description of Artificial Sequence: Synthetic oligonucleotide
aguguucaguuauauacac

SEQ ID NO: 852161 - RNA, 19 nt, Artificial Sequence
  Description of Artificial Sequence: Synthetic oligonucleotide
uuguuauacacuaaugguc

SEQ ID NO: 852162 - RNA, 19 nt, Artificial Sequence
  Description of Artificial Sequence: Synthetic oligonucleotide
uuuauaagugauucgccgc

SEQ ID NO: 852163 - RNA, 19 nt, Artificial Sequence
  Description of Artificial Sequence: Synthetic oligonucleotide
ugucuggugaucaaguccc

SEQ ID NO: 852164 - RNA, 19 nt, Artificial Sequence
  Description of Artificial Sequence: Synthetic oligonucleotide
uauaaaagugcguaguguc

SEQ ID NO: 852165 - RNA, 19 nt, Artificial Sequence
  Description of Artificial Sequence: Synthetic oligonucleotide
uauggcaaccuuuacacac

SEQ ID NO: 852166 - RNA, 19 nt, Artificial Sequence
  Description of Artificial Sequence: Synthetic oligonucleotide
ugaucugcaagaaucucag

SEQ ID NO: 852167 - RNA, 19 nt, Artificial Sequence
  Description of Artificial Sequence: Synthetic oligonucleotide
uuauaagugauucgccgcc

SEQ ID NO: 852168 - RNA, 19 nt, Artificial Sequence
  Description of Artificial Sequence: Synthetic oligonucleotide
aauauccucacgugucuuc

SEQ ID NO: 852169 - RNA, 19 nt, Artificial Sequence
  Description of Artificial Sequence: Synthetic oligonucleotide
auuauaaaagugcguagug

SEQ ID NO: 852170 - RNA, 19 nt, Artificial Sequence
  Description of Artificial Sequence: Synthetic oligonucleotide
aguucaguaauaaagcaag

SEQ ID NO: 852171 - RNA, 19 nt, Artificial Sequence
  Description of Artificial Sequence: Synthetic oligonucleotide
uacuuuaacuucaacucug

SEQ ID NO: 852172 - RNA, 19 nt, Artificial Sequence
  Description of Artificial Sequence: Synthetic oligonucleotide
uuuccauaaaacuguagcu

SEQ ID NO: 852173 - RNA, 19 nt, Artificial Sequence
  Description of Artificial Sequence: Synthetic oligonucleotide
cuaauggucuucaaaguac

SEQ ID NO: 852174 - RNA, 19 nt, Artificial Sequence
  Description of Artificial Sequence: Synthetic oligonucleotide
agcuuugucaacuaggcaa

SEQ ID NO: 852175 - RNA, 19 nt, Artificial Sequence
  Description of Artificial Sequence: Synthetic oligonucleotide
ucuuauaguuugcauaauc

SEQ ID NO: 852176 - RNA, 19 nt, Artificial Sequence
  Description of Artificial Sequence: Synthetic oligonucleotide
aagauugacuuuuccauaa

SEQ ID NO: 852177 - RNA, 19 nt, Artificial Sequence
  Description of Artificial Sequence: Synthetic oligonucleotide
acuccuacaagauugacuu

SEQ ID NO: 852178 - RNA, 19 nt, Artificial Sequence
  Description of Artificial Sequence: Synthetic oligonucleotide
uccucgagauuucuuauag

SEQ ID NO: 852179 - RNA, 19 nt, Artificial Sequence
  Description of Artificial Sequence: Synthetic oligonucleotide
uucaguuauauacacugaa

SEQ ID NO: 852180 - RNA, 19 nt, Artificial Sequence
  Description of Artificial Sequence: Synthetic oligonucleotide
gguguauaggccaacaucg

SEQ ID NO: 852181 - RNA, 19 nt, Artificial Sequence
  Description of Artificial Sequence: Synthetic oligonucleotide
aaguugcagaauucuucgc

SEQ ID NO: 852182 - RNA, 19 nt, Artificial Sequence
  Description of Artificial Sequence: Synthetic oligonucleotide
uggucucucaaauuuguag

SEQ ID NO: 852183 - RNA, 19 nt, Artificial Sequence
  Description of Artificial Sequence: Synthetic oligonucleotide
aaggacuaagaaucaaacu

SEQ ID NO: 852184 - RNA, 19 nt, Artificial Sequence
  Description of Artificial Sequence: Synthetic oligonucleotide
ucuagagguguauaggcca

SEQ ID NO: 852185 - RNA, 19 nt, Artificial Sequence
  Description of Artificial Sequence: Synthetic oligonucleotide
agcuacacgaugcauugcg

SEQ ID NO: 852186 - RNA, 19 nt, Artificial Sequence
  Description of Artificial Sequence: Synthetic oligonucleotide
aaguacagcauuuguacaa

SEQ ID NO: 852187 - RNA, 19 nt, Artificial Sequence
  Description of Artificial Sequence: Synthetic oligonucleotide
auuuccggguguuuucugc

SEQ ID NO: 852188 - RNA, 19 nt, Artificial Sequence
  Description of Artificial Sequence: Synthetic oligonucleotide
aaauaccuaaggaacaaca

SEQ ID NO: 852189 - RNA, 19 nt, Artificial Sequence
  Description of Artificial Sequence: Synthetic oligonucleotide
uuaucuguauuuccucgag

SEQ ID NO: 852190 - RNA, 19 nt, Artificial Sequence
  Description of Artificial Sequence: Synthetic oligonucleotide
caucuagagguguauaggc

SEQ ID NO: 852191 - RNA, 19 nt, Artificial Sequence
  Description of Artificial Sequence: Synthetic oligonucleotide
cauuuauaagugauucgcc

SEQ ID NO: 852192 - RNA, 19 nt, Artificial Sequence
  Description of Artificial Sequence: Synthetic oligonucleotide
ucaaaguacagcauuugua

SEQ ID NO: 852193 - RNA, 19 nt, Artificial Sequence
  Description of Artificial Sequence: Synthetic oligonucleotide
aaagggcuacaauauccuc

SEQ ID NO: 852194 - RNA, 19 nt, Artificial Sequence
  Description of Artificial Sequence: Synthetic oligonucleotide
auggauaaaguauuucacu

SEQ ID NO: 852195 - RNA, 19 nt, Artificial Sequence
  Description of Artificial Sequence: Synthetic oligonucleotide
uacaauauccucacguguc

SEQ ID NO: 852196 - RNA, 19 nt, Artificial Sequence
  Description of Artificial Sequence: Synthetic oligonucleotide
uugggcgccauuuauaagu

SEQ ID NO: 852197 - RNA, 19 nt, Artificial Sequence
  Description of Artificial Sequence: Synthetic oligonucleotide
caacuuagcgucagaaacg

SEQ ID NO: 852198 - RNA, 19 nt, Artificial Sequence
  Description of Artificial Sequence: Synthetic oligonucleotide
uaccccacccaacuuagcg

SEQ ID NO: 852199 - RNA, 19 nt, Artificial Sequence
  Description of Artificial Sequence: Synthetic oligonucleotide
uauuucacuuguuuguccu

SEQ ID NO: 852200 - RNA, 19 nt, Artificial Sequence
  Description of Artificial Sequence: Synthetic oligonucleotide
cuaagaaucaaacuguuua

SEQ ID NO: 852201 - RNA, 19 nt, Artificial Sequence
  Description of Artificial Sequence: Synthetic oligonucleotide
ucaucuagagguguauagg

SEQ ID NO: 852202 - RNA, 19 nt, Artificial Sequence
  Description of Artificial Sequence: Synthetic oligonucleotide
uguuuacagagauccaagc

SEQ ID NO: 852203 - RNA, 19 nt, Artificial Sequence
  Description of Artificial Sequence: Synthetic oligonucleotide
auguagauaguucaguaau

SEQ ID NO: 852204 - RNA, 19 nt, Artificial Sequence
  Description of Artificial Sequence: Synthetic oligonucleotide
aaacuguagcuacacgaug

SEQ ID NO: 852205 - RNA, 19 nt, Artificial Sequence
  Description of Artificial Sequence: Synthetic oligonucleotide
ugcguagugucaaaggaac

SEQ ID NO: 852206 - RNA, 19 nt, Artificial Sequence
  Description of Artificial Sequence: Synthetic oligonucleotide
aaagcaaggcuuuucucau

SEQ ID NO: 852207 - RNA, 19 nt, Artificial Sequence
  Description of Artificial Sequence: Synthetic oligonucleotide
ucacacggcuuuccgaugg

SEQ ID NO: 852208 - RNA, 19 nt, Artificial Sequence
  Description of Artificial Sequence: Synthetic oligonucleotide
uuaaaacgugcauuagaca

SEQ ID NO: 852209 - RNA, 19 nt, Artificial Sequence
  Description of Artificial Sequence: Synthetic oligonucleotide
aacacucuacagcaugucu

SEQ ID NO: 852210 - RNA, 19 nt, Artificial Sequence
  Description of Artificial Sequence: Synthetic oligonucleotide
ugaggacucggcuuucugg

SEQ ID NO: 852211 - RNA, 19 nt, Artificial Sequence
  Description of Artificial Sequence: Synthetic oligonucleotide
ucuguuguccaucacugaa

SEQ ID NO: 852212 - RNA, 19 nt, Artificial Sequence
  Description of Artificial Sequence: Synthetic oligonucleotide
aagcacgagugagagagcg

SEQ ID NO: 852213 - RNA, 19 nt, Artificial Sequence
  Description of Artificial Sequence: Synthetic oligonucleotide
acauauuugaggacucggc

SEQ ID NO: 852214 - RNA, 19 nt, Artificial Sequence
  Description of Artificial Sequence: Synthetic oligonucleotide
uuauaaaagugcguagugu

SEQ ID NO: 852215 - RNA, 19 nt, Artificial Sequence
  Description of Artificial Sequence: Synthetic oligonucleotide
aacauggaugacuugcaaa

SEQ ID NO: 852216 - RNA, 19 nt, Artificial Sequence
  Description of Artificial Sequence: Synthetic oligonucleotide
caacuagaggucaggaggg

SEQ ID NO: 852217 - RNA, 19 nt, Artificial Sequence
  Description of Artificial Sequence: Synthetic oligonucleotide
aagcaaagauaaaauaccu

SEQ ID NO: 852218 - RNA, 19 nt, Artificial Sequence
  Description of Artificial Sequence: Synthetic oligonucleotide
gcauaauccuccaaaaugg

SEQ ID NO: 852219 - RNA, 19 nt, Artificial Sequence
  Description of Artificial Sequence: Synthetic oligonucleotide
uuuaacaauuaagcaaaga

SEQ ID NO: 852220 - RNA, 19 nt, Artificial Sequence
  Description of Artificial Sequence: Synthetic oligonucleotide
cauucaucccaacuagagg

SEQ ID NO: 852221 - RNA, 19 nt, Artificial Sequence
  Description of Artificial Sequence: Synthetic oligonucleotide
cauuacauugaaguacucc

SEQ ID NO: 852222 - RNA, 19 nt, Artificial Sequence
  Description of Artificial Sequence: Synthetic oligonucleotide
gaaggacuaagaaucaaac

SEQ ID NO: 852223 - RNA, 19 nt, Artificial Sequence
  Description of Artificial Sequence: Synthetic oligonucleotide
agugcguagugucaaagga

SEQ ID NO: 852224 - RNA, 19 nt, Artificial Sequence
  Description of Artificial Sequence: Synthetic oligonucleotide
uaaauguggugcuccauac

SEQ ID NO: 852225 - RNA, 19 nt, Artificial Sequence
  Description of Artificial Sequence: Synthetic oligonucleotide
aaucauguagauaguucag

SEQ ID NO: 852226 - RNA, 19 nt, Artificial Sequence
  Description of Artificial Sequence: Synthetic oligonucleotide
ugccacaaccucauuaaca

SEQ ID NO: 852227 - RNA, 19 nt, Artificial Sequence
  Description of Artificial Sequence: Synthetic oligonucleotide
uggaugaguguucaguuau

SEQ ID NO: 852228 - RNA, 19 nt, Artificial Sequence
  Description of Artificial Sequence: Synthetic oligonucleotide
ucuaccccacccaacuuag

SEQ ID NO: 852229 - RNA, 19 nt, Artificial Sequence
  Description of Artificial Sequence: Synthetic oligonucleotide
ccaacuagaggucaggagg

SEQ ID NO: 852230 - RNA, 19 nt, Artificial Sequence
  Description of Artificial Sequence: Synthetic oligonucleotide
caacaguuggaucuacccg

SEQ ID NO: 852231 - RNA, 19 nt, Artificial Sequence
  Description of Artificial Sequence: Synthetic oligonucleotide
guagcuacacgaugcauug

SEQ ID NO: 852232 - RNA, 19 nt, Artificial Sequence
  Description of Artificial Sequence: Synthetic oligonucleotide
uguggucucucaaauuugu

SEQ ID NO: 852233 - RNA, 19 nt, Artificial Sequence
  Description of Artificial Sequence: Synthetic oligonucleotide
aguacuccuuuaucccugc

SEQ ID NO: 852234 - RNA, 19 nt, Artificial Sequence
  Description of Artificial Sequence: Synthetic oligonucleotide
cuguuuaaaucaaacagaa

SEQ ID NO: 852235 - RNA, 19 nt, Artificial Sequence
  Description of Artificial Sequence: Synthetic oligonucleotide
acuaauggucuucaaagua

SEQ ID NO: 852236 - RNA, 19 nt, Artificial Sequence
  Description of Artificial Sequence: Synthetic oligonucleotide
uauuugaggacucggcuuu

SEQ ID NO: 852237 - RNA, 19 nt, Artificial Sequence
  Description of Artificial Sequence: Synthetic oligonucleotide
ucauguagauaguucagua

SEQ ID NO: 852238 - RNA, 19 nt, Artificial Sequence
  Description of Artificial Sequence: Synthetic oligonucleotide
gucucucaaauuuguagag

SEQ ID NO: 852239 - RNA, 19 nt, Artificial Sequence
  Description of Artificial Sequence: Synthetic oligonucleotide
gaauuugggcuucgggucc

SEQ ID NO: 852240 - RNA, 19 nt, Artificial Sequence
  Description of Artificial Sequence: Synthetic oligonucleotide
uguagauaguucaguaaua

SEQ ID NO: 852241 - RNA, 19 nt, Artificial Sequence
  Description of Artificial Sequence: Synthetic oligonucleotide
aucuagagguguauaggcc

SEQ ID NO: 852242 - RNA, 19 nt, Artificial Sequence
  Description of Artificial Sequence: Synthetic oligonucleotide
aauaccuaaggaacaacau

SEQ ID NO: 852243 - RNA, 19 nt, Artificial Sequence
  Description of Artificial Sequence: Synthetic oligonucleotide
gaucuuuacuuuaacuuca

SEQ ID NO: 852244 - RNA, 19 nt, Artificial Sequence
  Description of Artificial Sequence: Synthetic oligonucleotide
agugagagagcgugagcac

SEQ ID NO: 852245 - RNA, 19 nt, Artificial Sequence
  Description of Artificial Sequence: Synthetic oligonucleotide
ucuuccgggaucuuuacuu

SEQ ID NO: 852246 - RNA, 19 nt, Artificial Sequence
  Description of Artificial Sequence: Synthetic oligonucleotide
uucuguugcagaccagaug

SEQ ID NO: 852247 - RNA, 19 nt, Artificial Sequence
  Description of Artificial Sequence: Synthetic oligonucleotide
auuuccucgagauuucuua

SEQ ID NO: 852248 - RNA, 19 nt, Artificial Sequence
  Description of Artificial Sequence: Synthetic oligonucleotide
aaauguggugcuccauaca

SEQ ID NO: 852249 - RNA, 19 nt, Artificial Sequence
  Description of Artificial Sequence: Synthetic oligonucleotide
uacacgaugcauugcgucu

SEQ ID NO: 852250 - RNA, 19 nt, Artificial Sequence
  Description of Artificial Sequence: Synthetic oligonucleotide
guauuucacuuguuugucc

SEQ ID NO: 852251 - RNA, 19 nt, Artificial Sequence
  Description of Artificial Sequence: Synthetic oligonucleotide
aaaacgugcauuagacaca

SEQ ID NO: 852252 - RNA, 19 nt, Artificial Sequence
  Description of Artificial Sequence: Synthetic oligonucleotide
cugaagugaaccuuuggca

SEQ ID NO: 852253 - RNA, 19 nt, Artificial Sequence
  Description of Artificial Sequence: Synthetic oligonucleotide
auacuguuccugauuggcc

SEQ ID NO: 852254 - RNA, 19 nt, Artificial Sequence
  Description of Artificial Sequence: Synthetic oligonucleotide
aacuccuacaagauugacu

SEQ ID NO: 852255 - RNA, 19 nt, Artificial Sequence
  Description of Artificial Sequence: Synthetic oligonucleotide
uccuuuauggcaaccuuua

SEQ ID NO: 852256 - RNA, 19 nt, Artificial Sequence
  Description of Artificial Sequence: Synthetic oligonucleotide
uggugaucaagucccaguc

SEQ ID NO: 852257 - RNA, 19 nt, Artificial Sequence
  Description of Artificial Sequence: Synthetic oligonucleotide
uaagugauucgccgccucc

SEQ ID NO: 852258 - RNA, 19 nt, Artificial Sequence
  Description of Artificial Sequence: Synthetic oligonucleotide
ccauuuauaagugauucgc

SEQ ID NO: 852259 - RNA, 19 nt, Artificial Sequence
  Description of Artificial Sequence: Synthetic oligonucleotide
uuagcgucagaaacgccgu

SEQ ID NO: 852260 - RNA, 19 nt, Artificial Sequence
  Description of Artificial Sequence: Synthetic oligonucleotide
uaucuguauuuccucgaga

SEQ ID NO: 852261 - RNA, 19 nt, Artificial Sequence
  Description of Artificial Sequence: Synthetic oligonucleotide
ccaacuuagcgucagaaac

SEQ ID NO: 852262 - RNA, 19 nt, Artificial Sequence
  Description of Artificial Sequence: Synthetic oligonucleotide
acaucgcuccaauucgcac

SEQ ID NO: 852263 - RNA, 19 nt, Artificial Sequence
  Description of Artificial Sequence: Synthetic oligonucleotide
auaagugauucgccgccuc

SEQ ID NO: 852264 - RNA, 19 nt, Artificial Sequence
  Description of Artificial Sequence: Synthetic oligonucleotide
ucgcuguuucugcaaauug

SEQ ID NO: 852265 - RNA, 19 nt, Artificial Sequence
  Description of Artificial Sequence: Synthetic oligonucleotide
acaauauccucacgugucu

SEQ ID NO: 852266 - RNA, 19 nt, Artificial Sequence
  Description of Artificial Sequence: Synthetic oligonucleotide
uaaaagugcguagugucaa

SEQ ID NO: 852267 - RNA, 19 nt, Artificial Sequence
  Description of Artificial Sequence: Synthetic oligonucleotide
auauuugaggacucggcuu

SEQ ID NO: 852268 - RNA, 19 nt, Artificial Sequence
  Description of Artificial Sequence: Synthetic oligonucleotide
aggaacaacauggaugacu

SEQ ID NO: 852269 - RNA, 19 nt, Artificial Sequence
  Description of Artificial Sequence: Synthetic oligonucleotide
ucucaguaaauguggugcu

SEQ ID NO: 852270 - RNA, 19 nt, Artificial Sequence
  Description of Artificial Sequence: Synthetic oligonucleotide
ccaagcacgagugagagag

SEQ ID NO: 852271 - RNA, 19 nt, Artificial Sequence
  Description of Artificial Sequence: Synthetic oligonucleotide
ugauuggccuuuugaagcu

SEQ ID NO: 852272 - RNA, 19 nt, Artificial Sequence
  Description of Artificial Sequence: Synthetic oligonucleotide
uccucacgugucuucaaag

SEQ ID NO: 852273 - RNA, 19 nt, Artificial Sequence
  Description of Artificial Sequence: Synthetic oligonucleotide
uugaggaaaucauguagau

SEQ ID NO: 852274 - RNA, 19 nt, Artificial Sequence
  Description of Artificial Sequence: Synthetic oligonucleotide
uagauaguucaguaauaaa

SEQ ID NO: 852275 - RNA, 19 nt, Artificial Sequence
  Description of Artificial Sequence: Synthetic oligonucleotide
aguacagcauuuguacaag

SEQ ID NO: 852276 - RNA, 19 nt, Artificial Sequence
  Description of Artificial Sequence: Synthetic oligonucleotide
ugcgucuauaauguuaaaa

SEQ ID NO: 852277 - RNA, 19 nt, Artificial Sequence
  Description of Artificial Sequence: Synthetic oligonucleotide
cucuguucaugaauguuuc

SEQ ID NO: 852278 - RNA, 19 nt, Artificial Sequence
  Description of Artificial Sequence: Synthetic oligonucleotide
acuaggcaauaaaacacuc

SEQ ID NO: 852279 - RNA, 19 nt, Artificial Sequence
  Description of Artificial Sequence: Synthetic oligonucleotide
uuacauugaaguacuccuu

SEQ ID NO: 852280 - RNA, 19 nt, Artificial Sequence
  Description of Artificial Sequence: Synthetic oligonucleotide
uagagcauuaacacauauu

SEQ ID NO: 852281 - RNA, 19 nt, Artificial Sequence
  Description of Artificial Sequence: Synthetic oligonucleotide
agauggaugaguguucagu

SEQ ID NO: 852282 - RNA, 19 nt, Artificial Sequence
  Description of Artificial Sequence: Synthetic oligonucleotide
ucucucacccuccuggaau

SEQ ID NO: 852283 - RNA, 19 nt, Artificial Sequence
  Description of Artificial Sequence: Synthetic oligonucleotide
auagagcauuaacacauau

SEQ ID NO: 852284 - RNA, 19 nt, Artificial Sequence
  Description of Artificial Sequence: Synthetic oligonucleotide
ucuuucccggagcagcccc

SEQ ID NO: 852285 - RNA, 19 nt, Artificial Sequence
  Description of Artificial Sequence: Synthetic oligonucleotide
guucaguaauaaagcaagg

SEQ ID NO: 852286 - RNA, 19 nt, Artificial Sequence
  Description of Artificial Sequence: Synthetic oligonucleotide
ucacgugucuucaaagauu

SEQ ID NO: 852287 - RNA, 19 nt, Artificial Sequence
  Description of Artificial Sequence: Synthetic oligonucleotide
agagagcgugagcacgccc

SEQ ID NO: 852288 - RNA, 19 nt, Artificial Sequence
  Description of Artificial Sequence: Synthetic oligonucleotide
cauuuguacaagagaagga

SEQ ID NO: 852289 - RNA, 19 nt, Artificial Sequence
  Description of Artificial Sequence: Synthetic oligonucleotide
guugcagaauucuucgcca

SEQ ID NO: 852290 - RNA, 19 nt, Artificial Sequence
  Description of Artificial Sequence: Synthetic oligonucleotide
acuguuuacagagauccaa

SEQ ID NO: 852291 - RNA, 19 nt, Artificial Sequence
  Description of Artificial Sequence: Synthetic oligonucleotide
uccuacaagauugacuuuu

SEQ ID NO: 852292 - RNA, 19 nt, Artificial Sequence
  Description of Artificial Sequence: Synthetic oligonucleotide
uguugcagaccagaugucu

SEQ ID NO: 852293 - RNA, 19 nt, Artificial Sequence
  Description of Artificial Sequence: Synthetic oligonucleotide
gacucggcuuucuggaacc

SEQ ID NO: 852294 - RNA, 19 nt, Artificial Sequence
  Description of Artificial Sequence: Synthetic oligonucleotide
ugucucacugguacugcca

SEQ ID NO: 852295 - RNA, 19 nt, Artificial Sequence
  Description of Artificial Sequence: Synthetic oligonucleotide
uccacauauuugaggacuc

SEQ ID NO: 852296 - RNA, 19 nt, Artificial Sequence
  Description of Artificial Sequence: Synthetic oligonucleotide
cacuguaauggauaaagua

SEQ ID NO: 852297 - RNA, 19 nt, Artificial Sequence
  Description of Artificial Sequence: Synthetic oligonucleotide
aaaagugcguagugucaaa

SEQ ID NO: 852298 - RNA, 19 nt, Artificial Sequence
  Description of Artificial Sequence: Synthetic oligonucleotide
uccuuauuaucuguauuuc

SEQ ID NO: 852299 - RNA, 19 nt, Artificial Sequence
  Description of Artificial Sequence: Synthetic oligonucleotide
cuacacgaugcauugcguc

SEQ ID NO: 852300 - RNA, 19 nt, Artificial Sequence
  Description of Artificial Sequence: Synthetic oligonucleotide
guagauaguucaguaauaa

SEQ ID NO: 852301 - RNA, 19 nt, Artificial Sequence
  Description of Artificial Sequence: Synthetic oligonucleotide
ccaacaucgcuccaauucg

SEQ ID NO: 852302 - RNA, 19 nt, Artificial Sequence
  Description of Artificial Sequence: Synthetic oligonucleotide
gugagagagcgugagcacg

SEQ ID NO: 852303 - RNA, 19 nt, Artificial Sequence
  Description of Artificial Sequence: Synthetic oligonucleotide
uuucuguugcagaccagau

SEQ ID NO: 852304 - RNA, 19 nt, Artificial Sequence
  Description of Artificial Sequence: Synthetic oligonucleotide
agugauucgccgccuccuc

SEQ ID NO: 852305 - RNA, 19 nt, Artificial Sequence
  Description of Artificial Sequence: Synthetic oligonucleotide
guaauggauaaaguauuuc

SEQ ID NO: 852306 - RNA, 19 nt, Artificial Sequence
  Description of Artificial Sequence: Synthetic oligonucleotide
ugggcgccauuuauaagug

SEQ ID NO: 852307 - RNA, 19 nt, Artificial Sequence
  Description of Artificial Sequence: Synthetic oligonucleotide
acauauuauaaaagugcgu

SEQ ID NO: 852308 - RNA, 19 nt, Artificial Sequence
  Description of Artificial Sequence: Synthetic oligonucleotide
agcgucagaaacgccgucg

SEQ ID NO: 852309 - RNA, 19 nt, Artificial Sequence
  Description of Artificial Sequence: Synthetic oligonucleotide
ucucucaaauuuguagagu

SEQ ID NO: 852310 - RNA, 19 nt, Artificial Sequence
  Description of Artificial Sequence: Synthetic oligonucleotide
uuuccucgagauuucuuau

SEQ ID NO: 852311 - RNA, 19 nt, Artificial Sequence
  Description of Artificial Sequence: Synthetic oligonucleotide
acuguagcuacacgaugca

SEQ ID NO: 852312 - RNA, 19 nt, Artificial Sequence
  Description of Artificial Sequence: Synthetic oligonucleotide
gugagcacgccccucacac

SEQ ID NO: 852313 - RNA, 19 nt, Artificial Sequence
  Description of Artificial Sequence: Synthetic oligonucleotide
uuuccggguguuuucugcu

SEQ ID NO: 852314 - RNA, 19 nt, Artificial Sequence
  Description of Artificial Sequence: Synthetic oligonucleotide
uaguuugcauaauccucca

SEQ ID NO: 852315 - RNA, 19 nt, Artificial Sequence
  Description of Artificial Sequence: Synthetic oligonucleotide
agaaacgccgucgggaaca

SEQ ID NO: 852316 - RNA, 19 nt, Artificial Sequence
  Description of Artificial Sequence: Synthetic oligonucleotide
gagagcgugagcacgcccc

SEQ ID NO: 852317 - RNA, 19 nt, Artificial Sequence
  Description of Artificial Sequence: Synthetic oligonucleotide
guuggaucuacccgggcuc

SEQ ID NO: 852318 - RNA, 19 nt, Artificial Sequence
  Description of Artificial Sequence: Synthetic oligonucleotide
cauguagauaguucaguaa

SEQ ID NO: 852319 - RNA, 19 nt, Artificial Sequence
  Description of Artificial Sequence: Synthetic oligonucleotide
cuuuacacacuuugcuuca

SEQ ID NO: 852320 - RNA, 19 nt, Artificial Sequence
  Description of Artificial Sequence: Synthetic oligonucleotide
cauaauccuccaaaaugga

SEQ ID NO: 852321 - RNA, 19 nt, Artificial Sequence
  Description of Artificial Sequence: Synthetic oligonucleotide
ucuuccuaggaggcugagg

SEQ ID NO: 852322 - RNA, 19 nt, Artificial Sequence
  Description of Artificial Sequence: Synthetic oligonucleotide
guaaauguggugcuccaua

SEQ ID NO: 852323 - RNA, 19 nt, Artificial Sequence
  Description of Artificial Sequence: Synthetic oligonucleotide
uacucucuaccccacccaa

SEQ ID NO: 852324 - RNA, 19 nt, Artificial Sequence
  Description of Artificial Sequence: Synthetic oligonucleotide
ccuuuacacacuuugcuuc

SEQ ID NO: 852325 - RNA, 19 nt, Artificial Sequence
  Description of Artificial Sequence: Synthetic oligonucleotide
agaaggacuaagaaucaaa

SEQ ID NO: 852326 - RNA, 19 nt, Artificial Sequence
  Description of Artificial Sequence: Synthetic oligonucleotide
agcacugacuccuuuuauu

SEQ ID NO: 852327 - RNA, 19 nt, Artificial Sequence
  Description of Artificial Sequence: Synthetic oligonucleotide
auguggugcuccauacacc

SEQ ID NO: 852328 - RNA, 19 nt, Artificial Sequence
  Description of Artificial Sequence: Synthetic oligonucleotide
uugaggacucggcuuucug

SEQ ID NO: 852329 - RNA, 19 nt, Artificial Sequence
  Description of Artificial Sequence: Synthetic oligonucleotide
aacucuguucaugaauguu

SEQ ID NO: 852330 - RNA, 19 nt, Artificial Sequence
  Description of Artificial Sequence: Synthetic oligonucleotide
ugauucgccgccuccuccu

SEQ ID NO: 852331 - RNA, 19 nt, Artificial Sequence
  Description of Artificial Sequence: Synthetic oligonucleotide
cacagagccgcgacccucg

SEQ ID NO: 852332 - RNA, 19 nt, Artificial Sequence
  Description of Artificial Sequence: Synthetic oligonucleotide
aagugauucgccgccuccu

SEQ ID NO: 852333 - RNA, 19 nt, Artificial Sequence
  Description of Artificial Sequence: Synthetic oligonucleotide
cuguggucucucaaauuug

SEQ ID NO: 852334 - RNA, 19 nt, Artificial Sequence
  Description of Artificial Sequence: Synthetic oligonucleotide
uuccgaugguacucaggag

SEQ ID NO: 852335 - RNA, 19 nt, Artificial Sequence
  Description of Artificial Sequence: Synthetic oligonucleotide
gucgggaacagccagcucu

SEQ ID NO: 852336 - RNA, 19 nt, Artificial Sequence
  Description of Artificial Sequence: Synthetic oligonucleotide
ugagcacgccccucacacg

SEQ ID NO: 852337 - RNA, 19 nt, Artificial Sequence
  Description of Artificial Sequence: Synthetic oligonucleotide
acucuguucaugaauguuu

SEQ ID NO: 852338 - RNA, 19 nt, Artificial Sequence
  Description of Artificial Sequence: Synthetic oligonucleotide
acgagugagagagcgugag

SEQ ID NO: 852339 - RNA, 19 nt, Artificial Sequence
  Description of Artificial Sequence: Synthetic oligonucleotide
caguaauaaagcaaggcuu

SEQ ID NO: 852340 - RNA, 19 nt, Artificial Sequence
  Description of Artificial Sequence: Synthetic oligonucleotide
gauggaugaguguucaguu

SEQ ID NO: 852341 - RNA, 19 nt, Artificial Sequence
  Description of Artificial Sequence: Synthetic oligonucleotide
caucgcuccaauucgcaca

SEQ ID NO: 852342 - RNA, 19 nt, Artificial Sequence
  Description of Artificial Sequence: Synthetic oligonucleotide
ggacaugggugcaucaggg

SEQ ID NO: 852343 - RNA, 19 nt, Artificial Sequence
  Description of Artificial Sequence: Synthetic oligonucleotide
cauauuugaggacucggcu

SEQ ID NO: 852344 - RNA, 19 nt, Artificial Sequence
  Description of Artificial Sequence: Synthetic oligonucleotide
acggcuuuccgaugguacu

SEQ ID NO: 852345 - RNA, 19 nt, Artificial Sequence
  Description of Artificial Sequence: Synthetic oligonucleotide
caucccaacuagaggucag

SEQ ID NO: 852346 - RNA, 19 nt, Artificial Sequence
  Description of Artificial Sequence: Synthetic oligonucleotide
aucgcuccaauucgcacaa

SEQ ID NO: 852347 - RNA, 19 nt, Artificial Sequence
  Description of Artificial Sequence: Synthetic oligonucleotide
gucagaaacgccgucggga

SEQ ID NO: 852348 - RNA, 19 nt, Artificial Sequence
  Description of Artificial Sequence: Synthetic oligonucleotide
aucuacccgggcucuuuuc

SEQ ID NO: 852349 - RNA, 19 nt, Artificial Sequence
  Description of Artificial Sequence: Synthetic oligonucleotide
auaauccuccaaaauggaa

SEQ ID NO: 852350 - RNA, 19 nt, Artificial Sequence
  Description of Artificial Sequence: Synthetic oligonucleotide
auauccucacgugucuuca

SEQ ID NO: 852351 - RNA, 19 nt, Artificial Sequence
  Description of Artificial Sequence: Synthetic oligonucleotide
acaguuggaucuacccggg

SEQ ID NO: 852352 - RNA, 19 nt, Artificial Sequence
  Description of Artificial Sequence: Synthetic oligonucleotide
gauuugccagcgccggcug

SEQ ID NO: 852353 - RNA, 19 nt, Artificial Sequence
  Description of Artificial Sequence: Synthetic oligonucleotide
cuugggcgccauuuauaag

SEQ ID NO: 852354 - RNA, 19 nt, Artificial Sequence
  Description of Artificial Sequence: Synthetic oligonucleotide
ccauacaccugggacaugg

SEQ ID NO: 852355 - RNA, 19 nt, Artificial Sequence
  Description of Artificial Sequence: Synthetic oligonucleotide
ggcgcgauuugccagcgcc

SEQ ID NO: 852356 - RNA, 19 nt, Artificial Sequence
  Description of Artificial Sequence: Synthetic oligonucleotide
ucauaaucacuggcacuga

SEQ ID NO: 852357 - RNA, 19 nt, Artificial Sequence
  Description of Artificial Sequence: Synthetic oligonucleotide
ugcuugggcgccauuuaua

SEQ ID NO: 852358 - RNA, 19 nt, Artificial Sequence
  Description of Artificial Sequence: Synthetic oligonucleotide
uuccucgagauuucuuaua

SEQ ID NO: 852359 - RNA, 19 nt, Artificial Sequence
  Description of Artificial Sequence: Synthetic oligonucleotide
aucccaacuagaggucagg

SEQ ID NO: 852360 - RNA, 19 nt, Artificial Sequence
  Description of Artificial Sequence: Synthetic oligonucleotide
aaauugguguccacauauu

SEQ ID NO: 852361 - RNA, 19 nt, Artificial Sequence
  Description of Artificial Sequence: Synthetic oligonucleotide
ugcagaccagaugucuucu

SEQ ID NO: 852362 - RNA, 19 nt, Artificial Sequence
  Description of Artificial Sequence: Synthetic oligonucleotide
cugggcgcgauuugccagc

SEQ ID NO: 852363 - RNA, 19 nt, Artificial Sequence
  Description of Artificial Sequence: Synthetic oligonucleotide
ggcuacaauauccucacgu

SEQ ID NO: 852364 - RNA, 19 nt, Artificial Sequence
  Description of Artificial Sequence: Synthetic oligonucleotide
guacagcauuuguacaaga

SEQ ID NO: 852365 - RNA, 19 nt, Artificial Sequence
  Description of Artificial Sequence: Synthetic oligonucleotide
uucucaucuagagguguau

SEQ ID NO: 852366 - RNA, 19 nt, Artificial Sequence
  Description of Artificial Sequence: Synthetic oligonucleotide
cuacaauauccucacgugu

SEQ ID NO: 852367 - RNA, 19 nt, Artificial Sequence
  Description of Artificial Sequence: Synthetic oligonucleotide
cugaccucacagagccgcg

SEQ ID NO: 852368 - RNA, 19 nt, Artificial Sequence
  Description of Artificial Sequence: Synthetic oligonucleotide
uccugggcgcgauuugcca

SEQ ID NO: 852369 - RNA, 19 nt, Artificial Sequence
  Description of Artificial Sequence: Synthetic oligonucleotide
gugauucgccgccuccucc

SEQ ID NO: 852370 - RNA, 19 nt, Artificial Sequence
  Description of Artificial Sequence: Synthetic oligonucleotide
cauccugggcgcgauuugc

SEQ ID NO: 852371 - RNA, 19 nt, Artificial Sequence
  Description of Artificial Sequence: Synthetic oligonucleotide
auccugggcgcgauuugcc

SEQ ID NO: 852372 - RNA, 19 nt, Artificial Sequence
  Description of Artificial Sequence: Synthetic oligonucleotide
auuugaggacucggcuuuc

SEQ ID NO: 852373 - RNA, 19 nt, Artificial Sequence
  Description of Artificial Sequence: Synthetic oligonucleotide
ccuacucucuaccccaccc

SEQ ID NO: 852374 - RNA, 19 nt, Artificial Sequence
  Description of Artificial Sequence: Synthetic oligonucleotide
uuugccagcgccggcugac

SEQ ID NO: 852375 - RNA, 19 nt, Artificial Sequence
  Description of Artificial Sequence: Synthetic oligonucleotide
acuaagaaucaaacuguuu

SEQ ID NO: 852376 - RNA, 19 nt, Artificial Sequence
  Description of Artificial Sequence: Synthetic oligonucleotide
gggugguguacugagggag

SEQ ID NO: 852377 - RNA, 19 nt, Artificial Sequence
  Description of Artificial Sequence: Synthetic oligonucleotide
gaccucacagagccgcgac

SEQ ID NO: 852378 - RNA, 19 nt, Artificial Sequence
  Description of Artificial Sequence: Synthetic oligonucleotide
acaacuccuacaagauuga

SEQ ID NO: 852379 - RNA, 19 nt, Artificial Sequence
  Description of Artificial Sequence: Synthetic oligonucleotide
gcugaccucacagagccgc

SEQ ID NO: 852380 - RNA, 19 nt, Artificial Sequence
  Description of Artificial Sequence: Synthetic oligonucleotide
uacuguggucucucaaauu

SEQ ID NO: 852381 - RNA, 19 nt, Artificial Sequence
  Description of Artificial Sequence: Synthetic oligonucleotide
auccucacgugucuucaaa

SEQ ID NO: 852382 - RNA, 19 nt, Artificial Sequence
  Description of Artificial Sequence: Synthetic oligonucleotide
acagagccgcgacccucgc

SEQ ID NO: 852383 - RNA, 19 nt, Artificial Sequence
  Description of Artificial Sequence: Synthetic oligonucleotide
gaugaguguucaguuauau

SEQ ID NO: 852384 - RNA, 19 nt, Artificial Sequence
  Description of Artificial Sequence: Synthetic oligonucleotide
uacauccugggcgcgauuu

SEQ ID NO: 852385 - RNA, 19 nt, Artificial Sequence
  Description of Artificial Sequence: Synthetic oligonucleotide
gagaaggacuaagaaucaa

SEQ ID NO: 852386 - RNA, 19 nt, Artificial Sequence
  Description of Artificial Sequence: Synthetic oligonucleotide
cagauggaugaguguucag

SEQ ID NO: 852387 - RNA, 19 nt, Artificial Sequence
  Description of Artificial Sequence: Synthetic oligonucleotide
uucuuauaguuugcauaau

SEQ ID NO: 852388 - RNA, 19 nt, Artificial Sequence
  Description of Artificial Sequence: Synthetic oligonucleotide
aucaauuguuauacacuaa

SEQ ID NO: 852389 - RNA, 19 nt, Artificial Sequence
  Description of Artificial Sequence: Synthetic oligonucleotide
gcgucagaaacgccgucgg

SEQ ID NO: 852390 - RNA, 19 nt, Artificial Sequence
  Description of Artificial Sequence: Synthetic oligonucleotide
uccaagcacgagugagaga

SEQ ID NO: 852391 - RNA, 19 nt, Artificial Sequence
  Description of Artificial Sequence: Synthetic oligonucleotide
cagagauccaagcacgagu

SEQ ID NO: 852392 - RNA, 19 nt, Artificial Sequence
  Description of Artificial Sequence: Synthetic oligonucleotide
caagcacgagugagagagc

SEQ ID NO: 852393 - RNA, 19 nt, Artificial Sequence
  Description of Artificial Sequence: Synthetic oligonucleotide
guccacauauuugaggacu

SEQ ID NO: 852394 - RNA, 19 nt, Artificial Sequence
  Description of Artificial Sequence: Synthetic oligonucleotide
uuggaucuacccgggcucu

SEQ ID NO: 852395 - RNA, 19 nt, Artificial Sequence
  Description of Artificial Sequence: Synthetic oligonucleotide
aaacgccgucgggaacagc

SEQ ID NO: 852396 - RNA, 19 nt, Artificial Sequence
  Description of Artificial Sequence: Synthetic oligonucleotide
aucagagcauuuugucaua

SEQ ID NO: 852397 - RNA, 19 nt, Artificial Sequence
  Description of Artificial Sequence: Synthetic oligonucleotide
ggcucuuuaagcaccauua

SEQ ID NO: 852398 - RNA, 19 nt, Artificial Sequence
  Description of Artificial Sequence: Synthetic oligonucleotide
gcacgagugagagagcgug

SEQ ID NO: 852399 - RNA, 19 nt, Artificial Sequence
  Description of Artificial Sequence: Synthetic oligonucleotide
acucuacagcaugucucuc

SEQ ID NO: 852400 - RNA, 19 nt, Artificial Sequence
  Description of Artificial Sequence: Synthetic oligonucleotide
ucuacauccugggcgcgau

SEQ ID NO: 852401 - RNA, 19 nt, Artificial Sequence
  Description of Artificial Sequence: Synthetic oligonucleotide
auacacuaauggucuucaa

SEQ ID NO: 852402 - RNA, 19 nt, Artificial Sequence
  Description of Artificial Sequence: Synthetic oligonucleotide
cacuaauggucuucaaagu

SEQ ID NO: 852403 - RNA, 19 nt, Artificial Sequence
  Description of Artificial Sequence: Synthetic oligonucleotide
gaaacgccgucgggaacag

SEQ ID NO: 852404 - RNA, 19 nt, Artificial Sequence
  Description of Artificial Sequence: Synthetic oligonucleotide
cacgugucuucaaagauuu

SEQ ID NO: 852405 - RNA, 19 nt, Artificial Sequence
  Description of Artificial Sequence: Synthetic oligonucleotide
ggugaucaagucccaguca

SEQ ID NO: 852406 - RNA, 19 nt, Artificial Sequence
  Description of Artificial Sequence: Synthetic oligonucleotide
acccaacuuagcgucagaa

SEQ ID NO: 852407 - RNA, 19 nt, Artificial Sequence
  Description of Artificial Sequence: Synthetic oligonucleotide
cucacacggcuuuccgaug

SEQ ID NO: 852408 - RNA, 19 nt, Artificial Sequence
  Description of Artificial Sequence: Synthetic oligonucleotide
cuacucucuaccccaccca

SEQ ID NO: 852409 - RNA, 19 nt, Artificial Sequence
  Description of Artificial Sequence: Synthetic oligonucleotide
gggcucuuuucuuccuagg

SEQ ID NO: 852410 - RNA, 19 nt, Artificial Sequence
  Description of Artificial Sequence: Synthetic oligonucleotide
cacucuacagcaugucucu

SEQ ID NO: 852411 - RNA, 19 nt, Artificial Sequence
  Description of Artificial Sequence: Synthetic oligonucleotide
ugaccucacagagccgcga

SEQ ID NO: 852412 - RNA, 19 nt, Artificial Sequence
  Description of Artificial Sequence: Synthetic oligonucleotide
gcuugggcgccauuuauaa

SEQ ID NO: 852413 - RNA, 19 nt, Artificial Sequence
  Description of Artificial Sequence: Synthetic oligonucleotide
ggugcaucagggugaucug

SEQ ID NO: 852414 - RNA, 19 nt, Artificial Sequence
  Description of Artificial Sequence: Synthetic oligonucleotide
cauagagcauuaacacaua

SEQ ID NO: 852415 - RNA, 19 nt, Artificial Sequence
  Description of Artificial Sequence: Synthetic oligonucleotide
ccuacaagauugacuuuuc

SEQ ID NO: 852416 - RNA, 19 nt, Artificial Sequence
  Description of Artificial Sequence: Synthetic oligonucleotide
ugggcgcgauuugccagcg

SEQ ID NO: 852417 - RNA, 19 nt, Artificial Sequence
  Description of Artificial Sequence: Synthetic oligonucleotide
gagagagcgugagcacgcc

SEQ ID NO: 852418 - RNA, 19 nt, Artificial Sequence
  Description of Artificial Sequence: Synthetic oligonucleotide
cucuaccccacccaacuua

SEQ ID NO: 852419 - RNA, 19 nt, Artificial Sequence
  Description of Artificial Sequence: Synthetic oligonucleotide
cucuacagcaugucucucu

SEQ ID NO: 852420 - RNA, 19 nt, Artificial Sequence
  Description of Artificial Sequence: Synthetic oligonucleotide
gugcguagugucaaaggaa

SEQ ID NO: 852421 - RNA, 19 nt, Artificial Sequence
  Description of Artificial Sequence: Synthetic oligonucleotide
gacuaagaaucaaacuguu

SEQ ID NO: 852422 - RNA, 19 nt, Artificial Sequence
  Description of Artificial Sequence: Synthetic oligonucleotide
agaggcccaugaaagcaca

SEQ ID NO: 852423 - RNA, 19 nt, Artificial Sequence
  Description of Artificial Sequence: Synthetic oligonucleotide
ggugguguacugagggagc

SEQ ID NO: 852424 - RNA, 19 nt, Artificial Sequence
  Description of Artificial Sequence: Synthetic oligonucleotide
ugccagcgccggcugaccu

SEQ ID NO: 852425 - RNA, 19 nt, Artificial Sequence
  Description of Artificial Sequence: Synthetic oligonucleotide
uagcgucagaaacgccguc

SEQ ID NO: 852426 - RNA, 19 nt, Artificial Sequence
  Description of Artificial Sequence: Synthetic oligonucleotide
cagaaacgccgucgggaac

SEQ ID NO: 852427 - RNA, 19 nt, Artificial Sequence
  Description of Artificial Sequence: Synthetic oligonucleotide
uugcgucuauaauguuaaa

SEQ ID NO: 852428 - RNA, 19 nt, Artificial Sequence
  Description of Artificial Sequence: Synthetic oligonucleotide
cuggugaucaagucccagu

SEQ ID NO: 852429 - RNA, 19 nt, Artificial Sequence
  Description of Artificial Sequence: Synthetic oligonucleotide
ucccggagcagccccucuc

SEQ ID NO: 852430 - RNA, 19 nt, Artificial Sequence
  Description of Artificial Sequence: Synthetic oligonucleotide
cucacgugucuucaaagau

SEQ ID NO: 852431 - RNA, 19 nt, Artificial Sequence
  Description of Artificial Sequence: Synthetic oligonucleotide
acacgaugcauugcgucua

SEQ ID NO: 852432 - RNA, 19 nt, Artificial Sequence
  Description of Artificial Sequence: Synthetic oligonucleotide
cgccauuuauaagugauuc

SEQ ID NO: 852433 - RNA, 19 nt, Artificial Sequence
  Description of Artificial Sequence: Synthetic oligonucleotide
ccacauauuugaggacucg

SEQ ID NO: 852434 - RNA, 19 nt, Artificial Sequence
  Description of Artificial Sequence: Synthetic oligonucleotide
ggugucucacugguacugc

SEQ ID NO: 852435 - RNA, 19 nt, Artificial Sequence
  Description of Artificial Sequence: Synthetic oligonucleotide
aaaggagcacugacuccuu

SEQ ID NO: 852436 - RNA, 19 nt, Artificial Sequence
  Description of Artificial Sequence: Synthetic oligonucleotide
cacgagugagagagcguga

SEQ ID NO: 852437 - RNA, 19 nt, Artificial Sequence
  Description of Artificial Sequence: Synthetic oligonucleotide
ccucacgugucuucaaaga

SEQ ID NO: 852438 - RNA, 19 nt, Artificial Sequence
  Description of Artificial Sequence: Synthetic oligonucleotide
ccugggcgcgauuugccag

SEQ ID NO: 852439 - RNA, 19 nt, Artificial Sequence
  Description of Artificial Sequence: Synthetic oligonucleotide
ugguguacugagggagcuc

SEQ ID NO: 852440 - RNA, 19 nt, Artificial Sequence
  Description of Artificial Sequence: Synthetic oligonucleotide
cucucgcuguuucugcaaa

SEQ ID NO: 852441 - RNA, 19 nt, Artificial Sequence
  Description of Artificial Sequence: Synthetic oligonucleotide
ccggguguuuucugcuugg

SEQ ID NO: 852442 - RNA, 19 nt, Artificial Sequence
  Description of Artificial Sequence: Synthetic oligonucleotide
uucccggagcagccccucu

SEQ ID NO: 852443 - RNA, 19 nt, Artificial Sequence
  Description of Artificial Sequence: Synthetic oligonucleotide
ggaaaucauguagauaguu

SEQ ID NO: 852444 - RNA, 19 nt, Artificial Sequence
  Description of Artificial Sequence: Synthetic oligonucleotide
gggcuacaauauccucacg

SEQ ID NO: 852445 - RNA, 19 nt, Artificial Sequence
  Description of Artificial Sequence: Synthetic oligonucleotide
ggaggagccacuucauaau

SEQ ID NO: 852446 - RNA, 19 nt, Artificial Sequence
  Description of Artificial Sequence: Synthetic oligonucleotide
agcacgagugagagagcgu

SEQ ID NO: 852447 - RNA, 19 nt, Artificial Sequence
  Description of Artificial Sequence: Synthetic oligonucleotide
uugccagcgccggcugacc

SEQ ID NO: 852448 - RNA, 19 nt, Artificial Sequence
  Description of Artificial Sequence: Synthetic oligonucleotide
ccggcugaccucacagagc

SEQ ID NO: 852449 - RNA, 19 nt, Artificial Sequence
  Description of Artificial Sequence: Synthetic oligonucleotide
augggugcaucagggugau

SEQ ID NO: 852450 - RNA, 19 nt, Artificial Sequence
  Description of Artificial Sequence: Synthetic oligonucleotide
uccauacaccugggacaug

SEQ ID NO: 852451 - RNA, 19 nt, Artificial Sequence
  Description of Artificial Sequence: Synthetic oligonucleotide
acgccccucacacggcuuu

SEQ ID NO: 852452 - RNA, 19 nt, Artificial Sequence
  Description of Artificial Sequence: Synthetic oligonucleotide
cgaugcauugcgucuauaa

SEQ ID NO: 852453 - RNA, 19 nt, Artificial Sequence
  Description of Artificial Sequence: Synthetic oligonucleotide
ggcgccauuuauaagugau

SEQ ID NO: 852454 - RNA, 19 nt, Artificial Sequence
  Description of Artificial Sequence: Synthetic oligonucleotide
gcgcgauuugccagcgccg

SEQ ID NO: 852455 - RNA, 19 nt, Artificial Sequence
  Description of Artificial Sequence: Synthetic oligonucleotide
gccccucucaucuugcccu

SEQ ID NO: 852456 - RNA, 19 nt, Artificial Sequence
  Description of Artificial Sequence: Synthetic oligonucleotide
ccgggaucuuuacuuuaac

SEQ ID NO: 852457 - RNA, 19 nt, Artificial Sequence
  Description of Artificial Sequence: Synthetic oligonucleotide
cuuccgggaucuuuacuuu

SEQ ID NO: 852458 - RNA, 19 nt, Artificial Sequence
  Description of Artificial Sequence: Synthetic oligonucleotide
gaucuacccgggcucuuuu

SEQ ID NO: 852459 - RNA, 19 nt, Artificial Sequence
  Description of Artificial Sequence: Synthetic oligonucleotide
gcaagaaucucagcauacu

SEQ ID NO: 852460 - RNA, 19 nt, Artificial Sequence
  Description of Artificial Sequence: Synthetic oligonucleotide
cucggcuuucuggaaccca

SEQ ID NO: 852461 - RNA, 19 nt, Artificial Sequence
  Description of Artificial Sequence: Synthetic oligonucleotide
gugguguacugagggagcu

SEQ ID NO: 852462 - RNA, 19 nt, Artificial Sequence
  Description of Artificial Sequence: Synthetic oligonucleotide
cucuacauccugggcgcga

SEQ ID NO: 852463 - RNA, 19 nt, Artificial Sequence
  Description of Artificial Sequence: Synthetic oligonucleotide
cccaacuuagcgucagaaa

SEQ ID NO: 852464 - RNA, 19 nt, Artificial Sequence
  Description of Artificial Sequence: Synthetic oligonucleotide
ccccucacacggcuuuccg

SEQ ID NO: 852465 - RNA, 19 nt, Artificial Sequence
  Description of Artificial Sequence: Synthetic oligonucleotide
gcgauuugccagcgccggc

SEQ ID NO: 852466 - RNA, 19 nt, Artificial Sequence
  Description of Artificial Sequence: Synthetic oligonucleotide
cgcgauuugccagcgccgg

SEQ ID NO: 852467 - RNA, 19 nt, Artificial Sequence
  Description of Artificial Sequence: Synthetic oligonucleotide
cgucagaaacgccgucggg

SEQ ID NO: 852468 - RNA, 19 nt, Artificial Sequence
  Description of Artificial Sequence: Synthetic oligonucleotide
ccacccaacuuagcgucag

SEQ ID NO: 852469 - RNA, 19 nt, Artificial Sequence
  Description of Artificial Sequence: Synthetic oligonucleotide
gggugaucugcaagaaucu

SEQ ID NO: 852470 - RNA, 19 nt, Artificial Sequence
  Description of Artificial Sequence: Synthetic oligonucleotide
gcguagugucaaaggaaca

SEQ ID NO: 852471 - RNA, 19 nt, Artificial Sequence
  Description of Artificial Sequence: Synthetic oligonucleotide
gcaucagggugaucugcaa

SEQ ID NO: 852472 - RNA, 19 nt, Artificial Sequence
  Description of Artificial Sequence: Synthetic oligonucleotide
gcucuacauccugggcgcg

SEQ ID NO: 852473 - RNA, 19 nt, Artificial Sequence
  Description of Artificial Sequence: Synthetic oligonucleotide
cucuuccgggaucuuuacu

SEQ ID NO: 852474 - RNA, 19 nt, Artificial Sequence
  Description of Artificial Sequence: Synthetic oligonucleotide
gggcgccauuuauaaguga

SEQ ID NO: 852475 - RNA, 19 nt, Artificial Sequence
  Description of Artificial Sequence: Synthetic oligonucleotide
accugggacaugggugcau

SEQ ID NO: 852476 - RNA, 19 nt, Artificial Sequence
  Description of Artificial Sequence: Synthetic oligonucleotide
cccuacucucuaccccacc

SEQ ID NO: 852477 - RNA, 19 nt, Artificial Sequence
  Description of Artificial Sequence: Synthetic oligonucleotide
ucagagcgccugggccuca

SEQ ID NO: 852478 - RNA, 19 nt, Artificial Sequence
  Description of Artificial Sequence: Synthetic oligonucleotide
cacccaacuuagcgucaga

SEQ ID NO: 852479 - RNA, 19 nt, Artificial Sequence
  Description of Artificial Sequence: Synthetic oligonucleotide
ggaugaguguucaguuaua

SEQ ID NO: 852480 - RNA, 19 nt, Artificial Sequence
  Description of Artificial Sequence: Synthetic oligonucleotide
gagcgugagcacgccccuc

SEQ ID NO: 852481 - RNA, 19 nt, Artificial Sequence
  Description of Artificial Sequence: Synthetic oligonucleotide
cucgcuguuucugcaaauu

SEQ ID NO: 852482 - RNA, 19 nt, Artificial Sequence
  Description of Artificial Sequence: Synthetic oligonucleotide
cugcuugggcgccauuuau

SEQ ID NO: 852483 - RNA, 19 nt, Artificial Sequence
  Description of Artificial Sequence: Synthetic oligonucleotide
ccucacacggcuuuccgau

SEQ ID NO: 852484 - RNA, 19 nt, Artificial Sequence
  Description of Artificial Sequence: Synthetic oligonucleotide
ggcugaccucacagagccg

SEQ ID NO: 852485 - RNA, 19 nt, Artificial Sequence
  Description of Artificial Sequence: Synthetic oligonucleotide
gccgucgggaacagccagc

SEQ ID NO: 852486 - RNA, 19 nt, Artificial Sequence
  Description of Artificial Sequence: Synthetic oligonucleotide
acgaugcauugcgucuaua

SEQ ID NO: 852487 - RNA, 19 nt, Artificial Sequence
  Description of Artificial Sequence: Synthetic oligonucleotide
gggcucuuuaagcaccauu

SEQ ID NO: 852488 - RNA, 19 nt, Artificial Sequence
  Description of Artificial Sequence: Synthetic oligonucleotide
gauucgccgccuccuccuu

SEQ ID NO: 852489 - RNA, 19 nt, Artificial Sequence
  Description of Artificial Sequence: Synthetic oligonucleotide
caucuccauuuccgggugu

SEQ ID NO: 852490 - RNA, 19 nt, Artificial Sequence
  Description of Artificial Sequence: Synthetic oligonucleotide
cuacccgggcucuuuucuu

SEQ ID NO: 852491 - RNA, 19 nt, Artificial Sequence
  Description of Artificial Sequence: Synthetic oligonucleotide
ccccuacucucuaccccac

SEQ ID NO: 852492 - RNA, 19 nt, Artificial Sequence
  Description of Artificial Sequence: Synthetic oligonucleotide
gcuacacgaugcauugcgu

SEQ ID NO: 852493 - RNA, 19 nt, Artificial Sequence
  Description of Artificial Sequence: Synthetic oligonucleotide
cuaggaggcugaggugucu

SEQ ID NO: 852494 - RNA, 19 nt, Artificial Sequence
  Description of Artificial Sequence: Synthetic oligonucleotide
ucgcuccaauucgcacaaa

SEQ ID NO: 852495 - RNA, 19 nt, Artificial Sequence
  Description of Artificial Sequence: Synthetic oligonucleotide
cuccuacaagauugacuuu

SEQ ID NO: 852496 - RNA, 19 nt, Artificial Sequence
  Description of Artificial Sequence: Synthetic oligonucleotide
cacgaugcauugcgucuau

SEQ ID NO: 852497 - RNA, 19 nt, Artificial Sequence
  Description of Artificial Sequence: Synthetic oligonucleotide
gcgugagcacgccccucac

SEQ ID NO: 852498 - RNA, 19 nt, Artificial Sequence
  Description of Artificial Sequence: Synthetic oligonucleotide
ccugcuugggcgccauuua

SEQ ID NO: 852499 - RNA, 19 nt, Artificial Sequence
  Description of Artificial Sequence: Synthetic oligonucleotide
cccacccaacuuagcguca

SEQ ID NO: 852500 - RNA, 19 nt, Artificial Sequence
  Description of Artificial Sequence: Synthetic oligonucleotide
gggcgcgauuugccagcgc

SEQ ID NO: 852501 - RNA, 19 nt, Artificial Sequence
  Description of Artificial Sequence: Synthetic oligonucleotide
ugggugcaucagggugauc

SEQ ID NO: 852502 - RNA, 19 nt, Artificial Sequence
  Description of Artificial Sequence: Synthetic oligonucleotide
gcgccauuuauaagugauu

SEQ ID NO: 852503 - RNA, 19 nt, Artificial Sequence
  Description of Artificial Sequence: Synthetic oligonucleotide
cgauuugccagcgccggcu

SEQ ID NO: 852504 - RNA, 19 nt, Artificial Sequence
  Description of Artificial Sequence: Synthetic oligonucleotide
cuacauccugggcgcgauu

SEQ ID NO: 852505 - RNA, 19 nt, Artificial Sequence
  Description of Artificial Sequence: Synthetic oligonucleotide
ccgggcucuuuucuuccua

SEQ ID NO: 852506 - RNA, 19 nt, Artificial Sequence
  Description of Artificial Sequence: Synthetic oligonucleotide
ggcaaccuuuacacacuuu

SEQ ID NO: 852507 - RNA, 19 nt, Artificial Sequence
  Description of Artificial Sequence: Synthetic oligonucleotide
ccgucgggaacagccagcu

SEQ ID NO: 852508 - RNA, 19 nt, Artificial Sequence
  Description of Artificial Sequence: Synthetic oligonucleotide
cacgccccucacacggcuu

SEQ ID NO: 852509 - RNA, 19 nt, Artificial Sequence
  Description of Artificial Sequence: Synthetic oligonucleotide
cccucucaucuugcccucu

SEQ ID NO: 852510 - RNA, 19 nt, Artificial Sequence
  Description of Artificial Sequence: Synthetic oligonucleotide
uauagaagaggugacaucg

SEQ ID NO: 852511 - RNA, 19 nt, Artificial Sequence
  Description of Artificial Sequence: Synthetic oligonucleotide
ugcgauaccagucagauuc

SEQ ID NO: 852512 - RNA, 19 nt, Artificial Sequence
  Description of Artificial Sequence: Synthetic oligonucleotide
ucauuguugaguauuacug

SEQ ID NO: 852513 - RNA, 19 nt, Artificial Sequence
  Description of Artificial Sequence: Synthetic oligonucleotide
uuaauagaguacaggaaag

SEQ ID NO: 852514 - RNA, 19 nt, Artificial Sequence
  Description of Artificial Sequence: Synthetic oligonucleotide
aacaugauggaucugcaga

SEQ ID NO: 852515 - RNA, 19 nt, Artificial Sequence
  Description of Artificial Sequence: Synthetic oligonucleotide
uccaaccgcaaacauaucg

SEQ ID NO: 852516 - RNA, 19 nt, Artificial Sequence
  Description of Artificial Sequence: Synthetic oligonucleotide
augagugugacguugcuuc

SEQ ID NO: 852517 - RNA, 19 nt, Artificial Sequence
  Description of Artificial Sequence: Synthetic oligonucleotide
aggaaugggauucuggcac

SEQ ID NO: 852518 - RNA, 19 nt, Artificial Sequence
  Description of Artificial Sequence: Synthetic oligonucleotide
uaucgucugguuaauagag

SEQ ID NO: 852519 - RNA, 19 nt, Artificial Sequence
  Description of Artificial Sequence: Synthetic oligonucleotide
ugguuaauagaguacagga

SEQ ID NO: 852520 - RNA, 19 nt, Artificial Sequence
  Description of Artificial Sequence: Synthetic oligonucleotide
caucggaugccauagauag

SEQ ID NO: 852521 - RNA, 19 nt, Artificial Sequence
  Description of Artificial Sequence: Synthetic oligonucleotide
aauuuauagaagaggugac

SEQ ID NO: 852522 - RNA, 19 nt, Artificial Sequence
  Description of Artificial Sequence: Synthetic oligonucleotide
aggaggaacucucacgugc

SEQ ID NO: 852523 - RNA, 19 nt, Artificial Sequence
  Description of Artificial Sequence: Synthetic oligonucleotide
acaguuagugcugaugugc

SEQ ID NO: 852524 - RNA, 19 nt, Artificial Sequence
  Description of Artificial Sequence: Synthetic oligonucleotide
acaaguuggacacagccug

SEQ ID NO: 852525 - RNA, 19 nt, Artificial Sequence
  Description of Artificial Sequence: Synthetic oligonucleotide
cuuuauagagggauccugg

SEQ ID NO: 852526 - RNA, 19 nt, Artificial Sequence
  Description of Artificial Sequence: Synthetic oligonucleotide
uuugcaaguagccucgaga

SEQ ID NO: 852527 - RNA, 19 nt, Artificial Sequence
  Description of Artificial Sequence: Synthetic oligonucleotide
gacguacugaaccugaaug

SEQ ID NO: 852528 - RNA, 19 nt, Artificial Sequence
  Description of Artificial Sequence: Synthetic oligonucleotide
agacuuuauagagggaucc

SEQ ID NO: 852529 - RNA, 19 nt, Artificial Sequence
  Description of Artificial Sequence: Synthetic oligonucleotide
ugcaguacggcacuuggag

SEQ ID NO: 852530 - RNA, 19 nt, Artificial Sequence
  Description of Artificial Sequence: Synthetic oligonucleotide
cacuauaugaggaugagga

SEQ ID NO: 852531 - RNA, 19 nt, Artificial Sequence
  Description of Artificial Sequence: Synthetic oligonucleotide
cauaucgucugguuaauag

SEQ ID NO: 852532 - RNA, 19 nt, Artificial Sequence
  Description of Artificial Sequence: Synthetic oligonucleotide
accacgaugguguucugcc

SEQ ID NO: 852533 - RNA, 19 nt, Artificial Sequence
  Description of Artificial Sequence: Synthetic oligonucleotide
ugcacuaugcuucuccucu

SEQ ID NO: 852534 - RNA, 19 nt, Artificial Sequence
  Description of Artificial Sequence: Synthetic oligonucleotide
ugugguucuccuacaaugc

SEQ ID NO: 852535 - RNA, 19 nt, Artificial Sequence
  Description of Artificial Sequence: Synthetic oligonucleotide
acuauaugaggaugaggac

SEQ ID NO: 852536 - RNA, 19 nt, Artificial Sequence
  Description of Artificial Sequence: Synthetic oligonucleotide
acgcaucgcacuuuguugc

SEQ ID NO: 852537 - RNA, 19 nt, Artificial Sequence
  Description of Artificial Sequence: Synthetic oligonucleotide
uaggacucaguccugaggu

SEQ ID NO: 852538 - RNA, 19 nt, Artificial Sequence
  Description of Artificial Sequence: Synthetic oligonucleotide
uuagacacggagucacugg

SEQ ID NO: 852539 - RNA, 19 nt, Artificial Sequence
  Description of Artificial Sequence: Synthetic oligonucleotide
ugauuguuguagcucacug

SEQ ID NO: 852540 - RNA, 19 nt, Artificial Sequence
  Description of Artificial Sequence: Synthetic oligonucleotide
caaugcguaguguagggcc

SEQ ID NO: 852541 - RNA, 19 nt, Artificial Sequence
  Description of Artificial Sequence: Synthetic oligonucleotide
uuucccaagaggaggaacu

SEQ ID NO: 852542 - RNA, 19 nt, Artificial Sequence
  Description of Artificial Sequence: Synthetic oligonucleotide
ugcauuucgggcugcagag

SEQ ID NO: 852543 - RNA, 19 nt, Artificial Sequence
  Description of Artificial Sequence: Synthetic oligonucleotide
ugagucaccgcugacagga

SEQ ID NO: 852544 - RNA, 19 nt, Artificial Sequence
  Description of Artificial Sequence: Synthetic oligonucleotide
auaccagucagauuccgug

SEQ ID NO: 852545 - RNA, 19 nt, Artificial Sequence
  Description of Artificial Sequence: Synthetic oligonucleotide
caaauuuauagaagaggug

SEQ ID NO: 852546 - RNA, 19 nt, Artificial Sequence
  Description of Artificial Sequence: Synthetic oligonucleotide
augcuauccaaccgcaaac

SEQ ID NO: 852547 - RNA, 19 nt, Artificial Sequence
  Description of Artificial Sequence: Synthetic oligonucleotide
ucaagcugcauuucgggcu

SEQ ID NO: 852548 - RNA, 19 nt, Artificial Sequence
  Description of Artificial Sequence: Synthetic oligonucleotide
gaucaagugugucuccucc

SEQ ID NO: 852549 - RNA, 19 nt, Artificial Sequence
  Description of Artificial Sequence: Synthetic oligonucleotide
agccucgagagcuugcagc

SEQ ID NO: 852550 - RNA, 19 nt, Artificial Sequence
  Description of Artificial Sequence: Synthetic oligonucleotide
auguucaagcugcauuucg

SEQ ID NO: 852551 - RNA, 19 nt, Artificial Sequence
  Description of Artificial Sequence: Synthetic oligonucleotide
cagagauuugcaaguagcc

SEQ ID NO: 852552 - RNA, 19 nt, Artificial Sequence
  Description of Artificial Sequence: Synthetic oligonucleotide
gauggcacagcguacccgc

SEQ ID NO: 852553 - RNA, 19 nt, Artificial Sequence
  Description of Artificial Sequence: Synthetic oligonucleotide
ucugucacgacaugauucu

SEQ ID NO: 852554 - RNA, 19 nt, Artificial Sequence
  Description of Artificial Sequence: Synthetic oligonucleotide
aagacuuuauagagggauc

SEQ ID NO: 852555 - RNA, 19 nt, Artificial Sequence
  Description of Artificial Sequence: Synthetic oligonucleotide
agggguacccaucaugguc

SEQ ID NO: 852556 - RNA, 19 nt, Artificial Sequence
  Description of Artificial Sequence: Synthetic oligonucleotide
aauggcguucugccgauca

SEQ ID NO: 852557 - RNA, 19 nt, Artificial Sequence
  Description of Artificial Sequence: Synthetic oligonucleotide
agucagauuccgugauucc

SEQ ID NO: 852558 - RNA, 19 nt, Artificial Sequence
  Description of Artificial Sequence: Synthetic oligonucleotide
uggcaauugaucucuaguc

SEQ ID NO: 852559 - RNA, 19 nt, Artificial Sequence
  Description of Artificial Sequence: Synthetic oligonucleotide
uguucgacaguuagugcug

SEQ ID NO: 852560 - RNA, 19 nt, Artificial Sequence
  Description of Artificial Sequence: Synthetic oligonucleotide
ggcaauugaucucuagucg

SEQ ID NO: 852561 - RNA, 19 nt, Artificial Sequence
  Description of Artificial Sequence: Synthetic oligonucleotide
uggaucugcagauugcccu

SEQ ID NO: 852562 - RNA, 19 nt, Artificial Sequence
  Description of Artificial Sequence: Synthetic oligonucleotide
uuuuccagggaauccggug

SEQ ID NO: 852563 - RNA, 19 nt, Artificial Sequence
  Description of Artificial Sequence: Synthetic oligonucleotide
auaucgucugguuaauaga

SEQ ID NO: 852564 - RNA, 19 nt, Artificial Sequence
  Description of Artificial Sequence: Synthetic oligonucleotide
cucgaugcuauccaaccgc

SEQ ID NO: 852565 - RNA, 19 nt, Artificial Sequence
  Description of Artificial Sequence: Synthetic oligonucleotide
guuggccgcaguuagacac

SEQ ID NO: 852566 - RNA, 19 nt, Artificial Sequence
  Description of Artificial Sequence: Synthetic oligonucleotide
aucugucacgacaugauuc

SEQ ID NO: 852567 - RNA, 19 nt, Artificial Sequence
  Description of Artificial Sequence: Synthetic oligonucleotide
uagacacggagucacuggc

SEQ ID NO: 852568 - RNA, 19 nt, Artificial Sequence
  Description of Artificial Sequence: Synthetic oligonucleotide
gacgcaucgcacuuuguug

SEQ ID NO: 852569 - RNA, 19 nt, Artificial Sequence
  Description of Artificial Sequence: Synthetic oligonucleotide
gaauccggugcccuguugc

SEQ ID NO: 852570 - RNA, 19 nt, Artificial Sequence
  Description of Artificial Sequence: Synthetic oligonucleotide
aggaaagacuuuauagagg

SEQ ID NO: 852571 - RNA, 19 nt, Artificial Sequence
  Description of Artificial Sequence: Synthetic oligonucleotide
caucucauuuccagcaggc

SEQ ID NO: 852572 - RNA, 19 nt, Artificial Sequence
  Description of Artificial Sequence: Synthetic oligonucleotide
agcuguucgacaguuagug

SEQ ID NO: 852573 - RNA, 19 nt, Artificial Sequence
  Description of Artificial Sequence: Synthetic oligonucleotide
gcuacaauggcguucugcc

SEQ ID NO: 852574 - RNA, 19 nt, Artificial Sequence
  Description of Artificial Sequence: Synthetic oligonucleotide
aggacugugcuguuuguug

SEQ ID NO: 852575 - RNA, 19 nt, Artificial Sequence
  Description of Artificial Sequence: Synthetic oligonucleotide
uugaugcgauaccagucag

SEQ ID NO: 852576 - RNA, 19 nt, Artificial Sequence
  Description of Artificial Sequence: Synthetic oligonucleotide
ugcucaaugggucuuccau

SEQ ID NO: 852577 - RNA, 19 nt, Artificial Sequence
  Description of Artificial Sequence: Synthetic oligonucleotide
acguacugaaccugaaugu

SEQ ID NO: 852578 - RNA, 19 nt, Artificial Sequence
  Description of Artificial Sequence: Synthetic oligonucleotide
guaggacucaguccugagg

SEQ ID NO: 852579 - RNA, 19 nt, Artificial Sequence
  Description of Artificial Sequence: Synthetic oligonucleotide
auagaguacaggaaagacu

SEQ ID NO: 852580 - RNA, 19 nt, Artificial Sequence
  Description of Artificial Sequence: Synthetic oligonucleotide
uugaucucuagucgcuggc

SEQ ID NO: 852581 - RNA, 19 nt, Artificial Sequence
  Description of Artificial Sequence: Synthetic oligonucleotide
uccgugauuccaaauuuau

SEQ ID NO: 852582 - RNA, 19 nt, Artificial Sequence
  Description of Artificial Sequence: Synthetic oligonucleotide
gaucucuagucgcuggcgc

SEQ ID NO: 852583 - RNA, 19 nt, Artificial Sequence
  Description of Artificial Sequence: Synthetic oligonucleotide
ucgucugguuaauagagua

SEQ ID NO: 852584 - RNA, 19 nt, Artificial Sequence
  Description of Artificial Sequence: Synthetic oligonucleotide
ugcuugaugcgauaccagu

SEQ ID NO: 852585 - RNA, 19 nt, Artificial Sequence
  Description of Artificial Sequence: Synthetic oligonucleotide
ugggauaguccucuucaga

SEQ ID NO: 852586 - RNA, 19 nt, Artificial Sequence
  Description of Artificial Sequence: Synthetic oligonucleotide
auucuccaaaacaacuggg

SEQ ID NO: 852587 - RNA, 19 nt, Artificial Sequence
  Description of Artificial Sequence: Synthetic oligonucleotide
gucaauacucugcuugaug

SEQ ID NO: 852588 - RNA, 19 nt, Artificial Sequence
  Description of Artificial Sequence: Synthetic oligonucleotide
uggagggguacccaucaug

SEQ ID NO: 852589 - RNA, 19 nt, Artificial Sequence
  Description of Artificial Sequence: Synthetic oligonucleotide
gcaauugaucucuagucgc

SEQ ID NO: 852590 - RNA, 19 nt, Artificial Sequence
  Description of Artificial Sequence: Synthetic oligonucleotide
agaggcgacccaucuacuc

SEQ ID NO: 852591 - RNA, 19 nt, Artificial Sequence
  Description of Artificial Sequence: Synthetic oligonucleotide
gaggcgacccaucuacucc

SEQ ID NO: 852592 - RNA, 19 nt, Artificial Sequence
  Description of Artificial Sequence: Synthetic oligonucleotide
acuuuauagagggauccug

SEQ ID NO: 852593 - RNA, 19 nt, Artificial Sequence
  Description of Artificial Sequence: Synthetic oligonucleotide
agaucaagugugucuccuc

SEQ ID NO: 852594 - RNA, 19 nt, Artificial Sequence
  Description of Artificial Sequence: Synthetic oligonucleotide
accugguaccuucaccacg

SEQ ID NO: 852595 - RNA, 19 nt, Artificial Sequence
  Description of Artificial Sequence: Synthetic oligonucleotide
aggaccuuucccaagagga

SEQ ID NO: 852596 - RNA, 19 nt, Artificial Sequence
  Description of Artificial Sequence: Synthetic oligonucleotide
ugaucucuagucgcuggcg

SEQ ID NO: 852597 - RNA, 19 nt, Artificial Sequence
  Description of Artificial Sequence: Synthetic oligonucleotide
augauucuccaaaacaacu

SEQ ID NO: 852598 - RNA, 19 nt, Artificial Sequence
  Description of Artificial Sequence: Synthetic oligonucleotide
acaaugccuggucucacug

SEQ ID NO: 852599 - RNA, 19 nt, Artificial Sequence
  Description of Artificial Sequence: Synthetic oligonucleotide
caucuacuccaguagcagc

SEQ ID NO: 852600 - RNA, 19 nt, Artificial Sequence
  Description of Artificial Sequence: Synthetic oligonucleotide
cuugaugcgauaccaguca

SEQ ID NO: 852601 - RNA, 19 nt, Artificial Sequence
  Description of Artificial Sequence: Synthetic oligonucleotide
caucgcacuuuguugcagg

SEQ ID NO: 852602 - RNA, 19 nt, Artificial Sequence
  Description of Artificial Sequence: Synthetic oligonucleotide
agucgcuggcgcuucaaag

SEQ ID NO: 852603 - RNA, 19 nt, Artificial Sequence
  Description of Artificial Sequence: Synthetic oligonucleotide
gugacaucggaugccauag

SEQ ID NO: 852604 - RNA, 19 nt, Artificial Sequence
  Description of Artificial Sequence: Synthetic oligonucleotide
caguacggcacuuggaguc

SEQ ID NO: 852605 - RNA, 19 nt, Artificial Sequence
  Description of Artificial Sequence: Synthetic oligonucleotide
ucgaugcuauccaaccgca

SEQ ID NO: 852606 - RNA, 19 nt, Artificial Sequence
  Description of Artificial Sequence: Synthetic oligonucleotide
ugcaaguagccucgagagc

SEQ ID NO: 852607 - RNA, 19 nt, Artificial Sequence
  Description of Artificial Sequence: Synthetic oligonucleotide
guauuacuguagucugggg

SEQ ID NO: 852608 - RNA, 19 nt, Artificial Sequence
  Description of Artificial Sequence: Synthetic oligonucleotide
aaugggauucuggcacagg

SEQ ID NO: 852609 - RNA, 19 nt, Artificial Sequence
  Description of Artificial Sequence: Synthetic oligonucleotide
aguuggacacagccugcac

SEQ ID NO: 852610 - RNA, 19 nt, Artificial Sequence
  Description of Artificial Sequence: Synthetic oligonucleotide
gagggauuagccugggcca

SEQ ID NO: 852611 - RNA, 19 nt, Artificial Sequence
  Description of Artificial Sequence: Synthetic oligonucleotide
ugccauagauagugagggg

SEQ ID NO: 852612 - RNA, 19 nt, Artificial Sequence
  Description of Artificial Sequence: Synthetic oligonucleotide
gacaguuagugcugaugug

SEQ ID NO: 852613 - RNA, 19 nt, Artificial Sequence
  Description of Artificial Sequence: Synthetic oligonucleotide
acagcguugcuaaugauau

SEQ ID NO: 852614 - RNA, 19 nt, Artificial Sequence
  Description of Artificial Sequence: Synthetic oligonucleotide
agcguugcuaaugauauuu

SEQ ID NO: 852615 - RNA, 19 nt, Artificial Sequence
  Description of Artificial Sequence: Synthetic oligonucleotide
acucaacacgcucugcacu

SEQ ID NO: 852616 - RNA, 19 nt, Artificial Sequence
  Description of Artificial Sequence: Synthetic oligonucleotide
cugugauuguuguagcuca

SEQ ID NO: 852617 - RNA, 19 nt, Artificial Sequence
  Description of Artificial Sequence: Synthetic oligonucleotide
ugaugcgauaccagucaga

SEQ ID NO: 852618 - RNA, 19 nt, Artificial Sequence
  Description of Artificial Sequence: Synthetic oligonucleotide
uggcccgacaaguuggaca

SEQ ID NO: 852619 - RNA, 19 nt, Artificial Sequence
  Description of Artificial Sequence: Synthetic oligonucleotide
caggacauagggcaguguc

SEQ ID NO: 852620 - RNA, 19 nt, Artificial Sequence
  Description of Artificial Sequence: Synthetic oligonucleotide
auuugcaaguagccucgag

SEQ ID NO: 852621 - RNA, 19 nt, Artificial Sequence
  Description of Artificial Sequence: Synthetic oligonucleotide
ucgcuggcgcuucaaagca

SEQ ID NO: 852622 - RNA, 19 nt, Artificial Sequence
  Description of Artificial Sequence: Synthetic oligonucleotide
aacagcguugcuaaugaua

SEQ ID NO: 852623 - RNA, 19 nt, Artificial Sequence
  Description of Artificial Sequence: Synthetic oligonucleotide
uguucugccgacgcccagg

SEQ ID NO: 852624 - RNA, 19 nt, Artificial Sequence
  Description of Artificial Sequence: Synthetic oligonucleotide
aauccggugcccuguugcu

SEQ ID NO: 852625 - RNA, 19 nt, Artificial Sequence
  Description of Artificial Sequence: Synthetic oligonucleotide
ggagggguacccaucaugg

SEQ ID NO: 852626 - RNA, 19 nt, Artificial Sequence
  Description of Artificial Sequence: Synthetic oligonucleotide
ugcuauccaaccgcaaaca

SEQ ID NO: 852627 - RNA, 19 nt, Artificial Sequence
  Description of Artificial Sequence: Synthetic oligonucleotide
ucgacaguuagugcugaug

SEQ ID NO: 852628 - RNA, 19 nt, Artificial Sequence
  Description of Artificial Sequence: Synthetic oligonucleotide
aaugcguaguguagggccu

SEQ ID NO: 852629 - RNA, 19 nt, Artificial Sequence
  Description of Artificial Sequence: Synthetic oligonucleotide
auggaucugcagauugccc

SEQ ID NO: 852630 - RNA, 19 nt, Artificial Sequence
  Description of Artificial Sequence: Synthetic oligonucleotide
acgaugguguucugccgac

SEQ ID NO: 852631 - RNA, 19 nt, Artificial Sequence
  Description of Artificial Sequence: Synthetic oligonucleotide
guuagacacggagucacug

SEQ ID NO: 852632 - RNA, 19 nt, Artificial Sequence
  Description of Artificial Sequence: Synthetic oligonucleotide
cugggagggauuagccugg

SEQ ID NO: 852633 - RNA, 19 nt, Artificial Sequence
  Description of Artificial Sequence: Synthetic oligonucleotide
ucgagagcuugcagcuugg

SEQ ID NO: 852634 - RNA, 19 nt, Artificial Sequence
  Description of Artificial Sequence: Synthetic oligonucleotide
ugguguucugccgacgccc

SEQ ID NO: 852635 - RNA, 19 nt, Artificial Sequence
  Description of Artificial Sequence: Synthetic oligonucleotide
ggagaggcgacccaucuac

SEQ ID NO: 852636 - RNA, 19 nt, Artificial Sequence
  Description of Artificial Sequence: Synthetic oligonucleotide
ggcgcuucaaagcagguuc

SEQ ID NO: 852637 - RNA, 19 nt, Artificial Sequence
  Description of Artificial Sequence: Synthetic oligonucleotide
caaugccuggucucacugg

SEQ ID NO: 852638 - RNA, 19 nt, Artificial Sequence
  Description of Artificial Sequence: Synthetic oligonucleotide
cacuaugcuucuccucugg

SEQ ID NO: 852639 - RNA, 19 nt, Artificial Sequence
  Description of Artificial Sequence: Synthetic oligonucleotide
gacguugcuuccaauguuc

SEQ ID NO: 852640 - RNA, 19 nt, Artificial Sequence
  Description of Artificial Sequence: Synthetic oligonucleotide
acagcguacccgcaucuca

SEQ ID NO: 852641 - RNA, 19 nt, Artificial Sequence
  Description of Artificial Sequence: Synthetic oligonucleotide
ucugccgaucauuguugag

SEQ ID NO: 852642 - RNA, 19 nt, Artificial Sequence
  Description of Artificial Sequence: Synthetic oligonucleotide
caaccgcaaacauaucguc

SEQ ID NO: 852643 - RNA, 19 nt, Artificial Sequence
  Description of Artificial Sequence: Synthetic oligonucleotide
guacccaucauggucucug

SEQ ID NO: 852644 - RNA, 19 nt, Artificial Sequence
  Description of Artificial Sequence: Synthetic oligonucleotide
ugacguugcuuccaauguu

SEQ ID NO: 852645 - RNA, 19 nt, Artificial Sequence
  Description of Artificial Sequence: Synthetic oligonucleotide
cuaugagcugagcacccug

SEQ ID NO: 852646 - RNA, 19 nt, Artificial Sequence
  Description of Artificial Sequence: Synthetic oligonucleotide
cagucagauuccgugauuc

SEQ ID NO: 852647 - RNA, 19 nt, Artificial Sequence
  Description of Artificial Sequence: Synthetic oligonucleotide
agacacggagucacuggcc

SEQ ID NO: 852648 - RNA, 19 nt, Artificial Sequence
  Description of Artificial Sequence: Synthetic oligonucleotide
ggaacagcguugcuaauga

SEQ ID NO: 852649 - RNA, 19 nt, Artificial Sequence
  Description of Artificial Sequence: Synthetic oligonucleotide
gccgcaguuagacacggag

SEQ ID NO: 852650 - RNA, 19 nt, Artificial Sequence
  Description of Artificial Sequence: Synthetic oligonucleotide
gaaugggauucuggcacag

SEQ ID NO: 852651 - RNA, 19 nt, Artificial Sequence
  Description of Artificial Sequence: Synthetic oligonucleotide
agagggauccuggcaauug

SEQ ID NO: 852652 - RNA, 19 nt, Artificial Sequence
  Description of Artificial Sequence: Synthetic oligonucleotide
agcguacccgcaucucagg

SEQ ID NO: 852653 - RNA, 19 nt, Artificial Sequence
  Description of Artificial Sequence: Synthetic oligonucleotide
aucucuagucgcuggcgcu

SEQ ID NO: 852654 - RNA, 19 nt, Artificial Sequence
  Description of Artificial Sequence: Synthetic oligonucleotide
ggugccauugggauagucc

SEQ ID NO: 852655 - RNA, 19 nt, Artificial Sequence
  Description of Artificial Sequence: Synthetic oligonucleotide
agggauuagccugggccac

SEQ ID NO: 852656 - RNA, 19 nt, Artificial Sequence
  Description of Artificial Sequence: Synthetic oligonucleotide
agaguucagggugaugagu

SEQ ID NO: 852657 - RNA, 19 nt, Artificial Sequence
  Description of Artificial Sequence: Synthetic oligonucleotide
gaugcgauaccagucagau

SEQ ID NO: 852658 - RNA, 19 nt, Artificial Sequence
  Description of Artificial Sequence: Synthetic oligonucleotide
gccaaugcguaguguaggg

SEQ ID NO: 852659 - RNA, 19 nt, Artificial Sequence
  Description of Artificial Sequence: Synthetic oligonucleotide
uucucagcuguucgacagu

SEQ ID NO: 852660 - RNA, 19 nt, Artificial Sequence
  Description of Artificial Sequence: Synthetic oligonucleotide
aacauaucgucugguuaau

SEQ ID NO: 852661 - RNA, 19 nt, Artificial Sequence
  Description of Artificial Sequence: Synthetic oligonucleotide
cagcguacccgcaucucag

SEQ ID NO: 852662 - RNA, 19 nt, Artificial Sequence
  Description of Artificial Sequence: Synthetic oligonucleotide
acuugcaccuguccauccu

SEQ ID NO: 852663 - RNA, 19 nt, Artificial Sequence
  Description of Artificial Sequence: Synthetic oligonucleotide
aacucucacgugcccugca

SEQ ID NO: 852664 - RNA, 19 nt, Artificial Sequence
  Description of Artificial Sequence: Synthetic oligonucleotide
uguccauccuggccaacau

SEQ ID NO: 852665 - RNA, 19 nt, Artificial Sequence
  Description of Artificial Sequence: Synthetic oligonucleotide
cuuucccaagaggaggaac

SEQ ID NO: 852666 - RNA, 19 nt, Artificial Sequence
  Description of Artificial Sequence: Synthetic oligonucleotide
ugacccgcucuccccaucu

SEQ ID NO: 852667 - RNA, 19 nt, Artificial Sequence
  Description of Artificial Sequence: Synthetic oligonucleotide
caagugugucuccucccag

SEQ ID NO: 852668 - RNA, 19 nt, Artificial Sequence
  Description of Artificial Sequence: Synthetic oligonucleotide
ugacaucggaugccauaga

SEQ ID NO: 852669 - RNA, 19 nt, Artificial Sequence
  Description of Artificial Sequence: Synthetic oligonucleotide
caguuagugcugaugugca

SEQ ID NO: 852670 - RNA, 19 nt, Artificial Sequence
  Description of Artificial Sequence: Synthetic oligonucleotide
ggcccgacaaguuggacac

SEQ ID NO: 852671 - RNA, 19 nt, Artificial Sequence
  Description of Artificial Sequence: Synthetic oligonucleotide
aggcgacccaucuacucca

SEQ ID NO: 852672 - RNA, 19 nt, Artificial Sequence
  Description of Artificial Sequence: Synthetic oligonucleotide
aucgcacuuuguugcaggu

SEQ ID NO: 852673 - RNA, 19 nt, Artificial Sequence
  Description of Artificial Sequence: Synthetic oligonucleotide
acccgcucuccccaucuuc

SEQ ID NO: 852674 - RNA, 19 nt, Artificial Sequence
  Description of Artificial Sequence: Synthetic oligonucleotide
ucauccugaccugguaccu

SEQ ID NO: 852675 - RNA, 19 nt, Artificial Sequence
  Description of Artificial Sequence: Synthetic oligonucleotide
gacucaguccugaggugcc

SEQ ID NO: 852676 - RNA, 19 nt, Artificial Sequence
  Description of Artificial Sequence: Synthetic oligonucleotide
gacaucggaugccauagau

SEQ ID NO: 852677 - RNA, 19 nt, Artificial Sequence
  Description of Artificial Sequence: Synthetic oligonucleotide
agauuccgugauuccaaau

SEQ ID NO: 852678 - RNA, 19 nt, Artificial Sequence
  Description of Artificial Sequence: Synthetic oligonucleotide
aguugcccugcugaagcag

SEQ ID NO: 852679 - RNA, 19 nt, Artificial Sequence
  Description of Artificial Sequence: Synthetic oligonucleotide
uggacguacugaaccugaa

SEQ ID NO: 852680 - RNA, 19 nt, Artificial Sequence
  Description of Artificial Sequence: Synthetic oligonucleotide
cacggcuaugagcugagca

SEQ ID NO: 852681 - RNA, 19 nt, Artificial Sequence
  Description of Artificial Sequence: Synthetic oligonucleotide
cugcauuucgggcugcaga

SEQ ID NO: 852682 - RNA, 19 nt, Artificial Sequence
  Description of Artificial Sequence: Synthetic oligonucleotide
gguuaauagaguacaggaa

SEQ ID NO: 852683 - RNA, 19 nt, Artificial Sequence
  Description of Artificial Sequence: Synthetic oligonucleotide
uggccgcaguuagacacgg

SEQ ID NO: 852684 - RNA, 19 nt, Artificial Sequence
  Description of Artificial Sequence: Synthetic oligonucleotide
cucaucacccagccaggug

SEQ ID NO: 852685 - RNA, 19 nt, Artificial Sequence
  Description of Artificial Sequence: Synthetic oligonucleotide
aggacauagggcaguguca

SEQ ID NO: 852686 - RNA, 19 nt, Artificial Sequence
  Description of Artificial Sequence: Synthetic oligonucleotide
cugagucaccgcugacagg

SEQ ID NO: 852687 - RNA, 19 nt, Artificial Sequence
  Description of Artificial Sequence: Synthetic oligonucleotide
gaccugguaccuucaccac

SEQ ID NO: 852688 - RNA, 19 nt, Artificial Sequence
  Description of Artificial Sequence: Synthetic oligonucleotide
cacgaugguguucugccga

SEQ ID NO: 852689 - RNA, 19 nt, Artificial Sequence
  Description of Artificial Sequence: Synthetic oligonucleotide
ccgacgcccaggaacagcg

SEQ ID NO: 852690 - RNA, 19 nt, Artificial Sequence
  Description of Artificial Sequence: Synthetic oligonucleotide
gcacuauaugaggaugagg

SEQ ID NO: 852691 - RNA, 19 nt, Artificial Sequence
  Description of Artificial Sequence: Synthetic oligonucleotide
uacccaucauggucucuga

SEQ ID NO: 852692 - RNA, 19 nt, Artificial Sequence
  Description of Artificial Sequence: Synthetic oligonucleotide
ggcagaucaagugugucuc

SEQ ID NO: 852693 - RNA, 19 nt, Artificial Sequence
  Description of Artificial Sequence: Synthetic oligonucleotide
ucgguggaacagguagucc

SEQ ID NO: 852694 - RNA, 19 nt, Artificial Sequence
  Description of Artificial Sequence: Synthetic oligonucleotide
cucaacacgcucugcacua

SEQ ID NO: 852695 - RNA, 19 nt, Artificial Sequence
  Description of Artificial Sequence: Synthetic oligonucleotide
ucuagucgcuggcgcuuca

SEQ ID NO: 852696 - RNA, 19 nt, Artificial Sequence
  Description of Artificial Sequence: Synthetic oligonucleotide
ggagaagcucuugacugcc

SEQ ID NO: 852697 - RNA, 19 nt, Artificial Sequence
  Description of Artificial Sequence: Synthetic oligonucleotide
cuggcaauugaucucuagu

SEQ ID NO: 852698 - RNA, 19 nt, Artificial Sequence
  Description of Artificial Sequence: Synthetic oligonucleotide
uguagcuguguggucgcuc

SEQ ID NO: 852699 - RNA, 19 nt, Artificial Sequence
  Description of Artificial Sequence: Synthetic oligonucleotide
ucucaucacccagccaggu

SEQ ID NO: 852700 - RNA, 19 nt, Artificial Sequence
  Description of Artificial Sequence: Synthetic oligonucleotide
uagucgcuggcgcuucaaa

SEQ ID NO: 852701 - RNA, 19 nt, Artificial Sequence
  Description of Artificial Sequence: Synthetic oligonucleotide
uucccaagaggaggaacuc

SEQ ID NO: 852702 - RNA, 19 nt, Artificial Sequence
  Description of Artificial Sequence: Synthetic oligonucleotide
aguacggcacuuggaguca

SEQ ID NO: 852703 - RNA, 19 nt, Artificial Sequence
  Description of Artificial Sequence: Synthetic oligonucleotide
gcuggcgcuucaaagcagg

SEQ ID NO: 852704 - RNA, 19 nt, Artificial Sequence
  Description of Artificial Sequence: Synthetic oligonucleotide
gaacucucacgugcccugc

SEQ ID NO: 852705 - RNA, 19 nt, Artificial Sequence
  Description of Artificial Sequence: Synthetic oligonucleotide
aucgucugguuaauagagu

SEQ ID NO: 852706 - RNA, 19 nt, Artificial Sequence
  Description of Artificial Sequence: Synthetic oligonucleotide
ggugcccuguugcucaaug

SEQ ID NO: 852707 - RNA, 19 nt, Artificial Sequence
  Description of Artificial Sequence: Synthetic oligonucleotide
cacaggcgccagcuggacg

SEQ ID NO: 852708 - RNA, 19 nt, Artificial Sequence
  Description of Artificial Sequence: Synthetic oligonucleotide
uggccuacuugcaccuguc

SEQ ID NO: 852709 - RNA, 19 nt, Artificial Sequence
  Description of Artificial Sequence: Synthetic oligonucleotide
caacacgcucugcacuaug

SEQ ID NO: 852710 - RNA, 19 nt, Artificial Sequence
  Description of Artificial Sequence: Synthetic oligonucleotide
guguggucgcucacaggcg

SEQ ID NO: 852711 - RNA, 19 nt, Artificial Sequence
  Description of Artificial Sequence: Synthetic oligonucleotide
cugccgacgcccaggaaca

SEQ ID NO: 852712 - RNA, 19 nt, Artificial Sequence
  Description of Artificial Sequence: Synthetic oligonucleotide
gguguccuccgggagaagc

SEQ ID NO: 852713 - RNA, 19 nt, Artificial Sequence
  Description of Artificial Sequence: Synthetic oligonucleotide
ggaccuuucccaagaggag

SEQ ID NO: 852714 - RNA, 19 nt, Artificial Sequence
  Description of Artificial Sequence: Synthetic oligonucleotide
uguccuccgggagaagcuc

SEQ ID NO: 852715 - RNA, 19 nt, Artificial Sequence
  Description of Artificial Sequence: Synthetic oligonucleotide
caccacgaugguguucugc

SEQ ID NO: 852716 - RNA, 19 nt, Artificial Sequence
  Description of Artificial Sequence: Synthetic oligonucleotide
gcguacccgcaucucaggg

SEQ ID NO: 852717 - RNA, 19 nt, Artificial Sequence
  Description of Artificial Sequence: Synthetic oligonucleotide
cuggaucaucucauuucca

SEQ ID NO: 852718 - RNA, 19 nt, Artificial Sequence
  Description of Artificial Sequence: Synthetic oligonucleotide
gauaccagucagauuccgu

SEQ ID NO: 852719 - RNA, 19 nt, Artificial Sequence
  Description of Artificial Sequence: Synthetic oligonucleotide
acaucggaugccauagaua

SEQ ID NO: 852720 - RNA, 19 nt, Artificial Sequence
  Description of Artificial Sequence: Synthetic oligonucleotide
uucgacaguuagugcugau

SEQ ID NO: 852721 - RNA, 19 nt, Artificial Sequence
  Description of Artificial Sequence: Synthetic oligonucleotide
auccggugcccuguugcuc

SEQ ID NO: 852722 - RNA, 19 nt, Artificial Sequence
  Description of Artificial Sequence: Synthetic oligonucleotide
gcagaucaagugugucucc

SEQ ID NO: 852723 - RNA, 19 nt, Artificial Sequence
  Description of Artificial Sequence: Synthetic oligonucleotide
ggcguucugccgaucauug

SEQ ID NO: 852724 - RNA, 19 nt, Artificial Sequence
  Description of Artificial Sequence: Synthetic oligonucleotide
gcuugaugcgauaccaguc

SEQ ID NO: 852725 - RNA, 19 nt, Artificial Sequence
  Description of Artificial Sequence: Synthetic oligonucleotide
gccuacuugcaccugucca

SEQ ID NO: 852726 - RNA, 19 nt, Artificial Sequence
  Description of Artificial Sequence: Synthetic oligonucleotide
gacuuuauagagggauccu

SEQ ID NO: 852727 - RNA, 19 nt, Artificial Sequence
  Description of Artificial Sequence: Synthetic oligonucleotide
uccugguuggccgcaguua

SEQ ID NO: 852728 - RNA, 19 nt, Artificial Sequence
  Description of Artificial Sequence: Synthetic oligonucleotide
acguugcuuccaauguucu

SEQ ID NO: 852729 - RNA, 19 nt, Artificial Sequence
  Description of Artificial Sequence: Synthetic oligonucleotide
cccacgacuguccauccug

SEQ ID NO: 852730 - RNA, 19 nt, Artificial Sequence
  Description of Artificial Sequence: Synthetic oligonucleotide
ucgcacuuuguugcagguc

SEQ ID NO: 852731 - RNA, 19 nt, Artificial Sequence
  Description of Artificial Sequence: Synthetic oligonucleotide
ucaacacgcucugcacuau

SEQ ID NO: 852732 - RNA, 19 nt, Artificial Sequence
  Description of Artificial Sequence: Synthetic oligonucleotide
cugccgaucauuguugagu

SEQ ID NO: 852733 - RNA, 19 nt, Artificial Sequence
  Description of Artificial Sequence: Synthetic oligonucleotide
uggucgcucacaggcgcca

SEQ ID NO: 852734 - RNA, 19 nt, Artificial Sequence
  Description of Artificial Sequence: Synthetic oligonucleotide
cccgacaaguuggacacag

SEQ ID NO: 852735 - RNA, 19 nt, Artificial Sequence
  Description of Artificial Sequence: Synthetic oligonucleotide
cgucugguuaauagaguac

SEQ ID NO: 852736 - RNA, 19 nt, Artificial Sequence
  Description of Artificial Sequence: Synthetic oligonucleotide
ccgcaaacauaucgucugg

SEQ ID NO: 852737 - RNA, 19 nt, Artificial Sequence
  Description of Artificial Sequence: Synthetic oligonucleotide
uggcguucugccgaucauu

SEQ ID NO: 852738 - RNA, 19 nt, Artificial Sequence
  Description of Artificial Sequence: Synthetic oligonucleotide
guucgacaguuagugcuga

SEQ ID NO: 852739 - RNA, 19 nt, Artificial Sequence
  Description of Artificial Sequence: Synthetic oligonucleotide
augcguaguguagggccug

SEQ ID NO: 852740 - RNA, 19 nt, Artificial Sequence
  Description of Artificial Sequence: Synthetic oligonucleotide
ccacgaugguguucugccg

SEQ ID NO: 852741 - RNA, 19 nt, Artificial Sequence
  Description of Artificial Sequence: Synthetic oligonucleotide
cucucacgugcccugcaga

SEQ ID NO: 852742 - RNA, 19 nt, Artificial Sequence
  Description of Artificial Sequence: Synthetic oligonucleotide
guacccgcaucucaggguu

SEQ ID NO: 852743 - RNA, 19 nt, Artificial Sequence
  Description of Artificial Sequence: Synthetic oligonucleotide
accucucgguggaacaggu

SEQ ID NO: 852744 - RNA, 19 nt, Artificial Sequence
  Description of Artificial Sequence: Synthetic oligonucleotide
cucugacccgcucucccca

SEQ ID NO: 852745 - RNA, 19 nt, Artificial Sequence
  Description of Artificial Sequence: Synthetic oligonucleotide
uacggcacuuggagucaau

SEQ ID NO: 852746 - RNA, 19 nt, Artificial Sequence
  Description of Artificial Sequence: Synthetic oligonucleotide
acauaucgucugguuaaua

SEQ ID NO: 852747 - RNA, 19 nt, Artificial Sequence
  Description of Artificial Sequence: Synthetic oligonucleotide
ugcguaguguagggccugu

SEQ ID NO: 852748 - RNA, 19 nt, Artificial Sequence
  Description of Artificial Sequence: Synthetic oligonucleotide
cagcgucagugccaucuuc

SEQ ID NO: 852749 - RNA, 19 nt, Artificial Sequence
  Description of Artificial Sequence: Synthetic oligonucleotide
guguucugccgacgcccag

SEQ ID NO: 852750 - RNA, 19 nt, Artificial Sequence
  Description of Artificial Sequence: Synthetic oligonucleotide
auaugaggaugaggacggu

SEQ ID NO: 852751 - RNA, 19 nt, Artificial Sequence
  Description of Artificial Sequence: Synthetic oligonucleotide
augcgauaccagucagauu

SEQ ID NO: 852752 - RNA, 19 nt, Artificial Sequence
  Description of Artificial Sequence: Synthetic oligonucleotide
gaugagugugacguugcuu

SEQ ID NO: 852753 - RNA, 19 nt, Artificial Sequence
  Description of Artificial Sequence: Synthetic oligonucleotide
ggccuacuugcaccugucc

SEQ ID NO: 852754 - RNA, 19 nt, Artificial Sequence
  Description of Artificial Sequence: Synthetic oligonucleotide
ggacgguguccuccgggag

SEQ ID NO: 852755 - RNA, 19 nt, Artificial Sequence
  Description of Artificial Sequence: Synthetic oligonucleotide
ccaaugcguaguguagggc

SEQ ID NO: 852756 - RNA, 19 nt, Artificial Sequence
  Description of Artificial Sequence: Synthetic oligonucleotide
aucggaugccauagauagu

SEQ ID NO: 852757 - RNA, 19 nt, Artificial Sequence
  Description of Artificial Sequence: Synthetic oligonucleotide
gcuggacguacugaaccug

SEQ ID NO: 852758 - RNA, 19 nt, Artificial Sequence
  Description of Artificial Sequence: Synthetic oligonucleotide
ccgccaugcaguacggcac

SEQ ID NO: 852759 - RNA, 19 nt, Artificial Sequence
  Description of Artificial Sequence: Synthetic oligonucleotide
ucaccacgaugguguucug

SEQ ID NO: 852760 - RNA, 19 nt, Artificial Sequence
  Description of Artificial Sequence: Synthetic oligonucleotide
cugucacgacaugauucuc

SEQ ID NO: 852761 - RNA, 19 nt, Artificial Sequence
  Description of Artificial Sequence: Synthetic oligonucleotide
gagggguacccaucauggu

SEQ ID NO: 852762 - RNA, 19 nt, Artificial Sequence
  Description of Artificial Sequence: Synthetic oligonucleotide
guggccuacuugcaccugu

SEQ ID NO: 852763 - RNA, 19 nt, Artificial Sequence
  Description of Artificial Sequence: Synthetic oligonucleotide
ggaauccggugcccuguug

SEQ ID NO: 852764 - RNA, 19 nt, Artificial Sequence
  Description of Artificial Sequence: Synthetic oligonucleotide
ccaaccgcaaacauaucgu

SEQ ID NO: 852765 - RNA, 19 nt, Artificial Sequence
  Description of Artificial Sequence: Synthetic oligonucleotide
ccucugacccgcucucccc

SEQ ID NO: 852766 - RNA, 19 nt, Artificial Sequence
  Description of Artificial Sequence: Synthetic oligonucleotide
caguugcccugcugaagca

SEQ ID NO: 852767 - RNA, 19 nt, Artificial Sequence
  Description of Artificial Sequence: Synthetic oligonucleotide
guggucgcucacaggcgcc

SEQ ID NO: 852768 - RNA, 19 nt, Artificial Sequence
  Description of Artificial Sequence: Synthetic oligonucleotide
cucuagucgcuggcgcuuc

SEQ ID NO: 852769 - RNA, 19 nt, Artificial Sequence
  Description of Artificial Sequence: Synthetic oligonucleotide
gcaucgcacuuuguugcag

SEQ ID NO: 852770 - RNA, 19 nt, Artificial Sequence
  Description of Artificial Sequence: Synthetic oligonucleotide
gacgcccaggaacagcguu

SEQ ID NO: 852771 - RNA, 19 nt, Artificial Sequence
  Description of Artificial Sequence: Synthetic oligonucleotide
gaacagcguugcuaaugau

SEQ ID NO: 852772 - RNA, 19 nt, Artificial Sequence
  Description of Artificial Sequence: Synthetic oligonucleotide
uagugcugaugugcagcau

SEQ ID NO: 852773 - RNA, 19 nt, Artificial Sequence
  Description of Artificial Sequence: Synthetic oligonucleotide
cacagcguacccgcaucuc

SEQ ID NO: 852774 - RNA, 19 nt, Artificial Sequence
  Description of Artificial Sequence: Synthetic oligonucleotide
aggcgccagcuggacguac

SEQ ID NO: 852775 - RNA, 19 nt, Artificial Sequence
  Description of Artificial Sequence: Synthetic oligonucleotide
uucugccgacgcccaggaa

SEQ ID NO: 852776 - RNA, 19 nt, Artificial Sequence
  Description of Artificial Sequence: Synthetic oligonucleotide
acccgcaucucaggguuau

SEQ ID NO: 852777 - RNA, 19 nt, Artificial Sequence
  Description of Artificial Sequence: Synthetic oligonucleotide
ccgacaaguuggacacagc

SEQ ID NO: 852778 - RNA, 19 nt, Artificial Sequence
  Description of Artificial Sequence: Synthetic oligonucleotide
gcgauaccagucagauucc

SEQ ID NO: 852779 - RNA, 19 nt, Artificial Sequence
  Description of Artificial Sequence: Synthetic oligonucleotide
ccgcaucucaggguuauuc

SEQ ID NO: 852780 - RNA, 19 nt, Artificial Sequence
  Description of Artificial Sequence: Synthetic oligonucleotide
cacgcucugcacuaugcuu

SEQ ID NO: 852781 - RNA, 19 nt, Artificial Sequence
  Description of Artificial Sequence: Synthetic oligonucleotide
acgugcccugcagaaucca

SEQ ID NO: 852782 - RNA, 19 nt, Artificial Sequence
  Description of Artificial Sequence: Synthetic oligonucleotide
cgauaccagucagauuccg

SEQ ID NO: 852783 - RNA, 19 nt, Artificial Sequence
  Description of Artificial Sequence: Synthetic oligonucleotide
gcuauccaaccgcaaacau

SEQ ID NO: 852784 - RNA, 19 nt, Artificial Sequence
  Description of Artificial Sequence: Synthetic oligonucleotide
gccgucugugcuguagcug

SEQ ID NO: 852785 - RNA, 19 nt, Artificial Sequence
  Description of Artificial Sequence: Synthetic oligonucleotide
caaugccucagccgucugu

SEQ ID NO: 852786 - RNA, 19 nt, Artificial Sequence
  Description of Artificial Sequence: Synthetic oligonucleotide
cuggcccgacaaguuggac

SEQ ID NO: 852787 - RNA, 19 nt, Artificial Sequence
  Description of Artificial Sequence: Synthetic oligonucleotide
cacggagucacuggccucu

SEQ ID NO: 852788 - RNA, 19 nt, Artificial Sequence
  Description of Artificial Sequence: Synthetic oligonucleotide
cagcuguucgacaguuagu

SEQ ID NO: 852789 - RNA, 19 nt, Artificial Sequence
  Description of Artificial Sequence: Synthetic oligonucleotide
gcaguacggcacuuggagu

SEQ ID NO: 852790 - RNA, 19 nt, Artificial Sequence
  Description of Artificial Sequence: Synthetic oligonucleotide
ccuacuugcaccuguccau

SEQ ID NO: 852791 - RNA, 19 nt, Artificial Sequence
  Description of Artificial Sequence: Synthetic oligonucleotide
ggugugguucuccuacaau

SEQ ID NO: 852792 - RNA, 19 nt, Artificial Sequence
  Description of Artificial Sequence: Synthetic oligonucleotide
gguguucugccgacgccca

SEQ ID NO: 852793 - RNA, 19 nt, Artificial Sequence
  Description of Artificial Sequence: Synthetic oligonucleotide
acggagucacuggccucug

SEQ ID NO: 852794 - RNA, 19 nt, Artificial Sequence
  Description of Artificial Sequence: Synthetic oligonucleotide
ggggacgacgcaucgcacu

SEQ ID NO: 852795 - RNA, 19 nt, Artificial Sequence
  Description of Artificial Sequence: Synthetic oligonucleotide
ggccacggcuaugagcuga

SEQ ID NO: 852796 - RNA, 19 nt, Artificial Sequence
  Description of Artificial Sequence: Synthetic oligonucleotide
ggacguacugaaccugaau

SEQ ID NO: 852797 - RNA, 19 nt, Artificial Sequence
  Description of Artificial Sequence: Synthetic oligonucleotide
gccacggcuaugagcugag

SEQ ID NO: 852798 - RNA, 19 nt, Artificial Sequence
  Description of Artificial Sequence: Synthetic oligonucleotide
guuggccaaugcguagugu

SEQ ID NO: 852799 - RNA, 19 nt, Artificial Sequence
  Description of Artificial Sequence: Synthetic oligonucleotide
cccgcucuccccaucuuca

SEQ ID NO: 852800 - RNA, 19 nt, Artificial Sequence
  Description of Artificial Sequence: Synthetic oligonucleotide
ccgugauuccaaauuuaua

SEQ ID NO: 852801 - RNA, 19 nt, Artificial Sequence
  Description of Artificial Sequence: Synthetic oligonucleotide
ccgucugugcuguagcugu

SEQ ID NO: 852802 - RNA, 19 nt, Artificial Sequence
  Description of Artificial Sequence: Synthetic oligonucleotide
gcaaugccucagccgucug

SEQ ID NO: 852803 - RNA, 19 nt, Artificial Sequence
  Description of Artificial Sequence: Synthetic oligonucleotide
gagaggcgacccaucuacu

SEQ ID NO: 852804 - RNA, 19 nt, Artificial Sequence
  Description of Artificial Sequence: Synthetic oligonucleotide
ccuguugcucaaugggucu

SEQ ID NO: 852805 - RNA, 19 nt, Artificial Sequence
  Description of Artificial Sequence: Synthetic oligonucleotide
cuagucgcuggcgcuucaa

SEQ ID NO: 852806 - RNA, 19 nt, Artificial Sequence
  Description of Artificial Sequence: Synthetic oligonucleotide
ggcgacccaucuacuccag

SEQ ID NO: 852807 - RNA, 19 nt, Artificial Sequence
  Description of Artificial Sequence: Synthetic oligonucleotide
guacggcacuuggagucaa

SEQ ID NO: 852808 - RNA, 19 nt, Artificial Sequence
  Description of Artificial Sequence: Synthetic oligonucleotide
gcgcuucaaagcagguuca

SEQ ID NO: 852809 - RNA, 19 nt, Artificial Sequence
  Description of Artificial Sequence: Synthetic oligonucleotide
uuccgccgccaugcaguac

SEQ ID NO: 852810 - RNA, 19 nt, Artificial Sequence
  Description of Artificial Sequence: Synthetic oligonucleotide
gcuugcccuggcccgacaa

SEQ ID NO: 852811 - RNA, 19 nt, Artificial Sequence
  Description of Artificial Sequence: Synthetic oligonucleotide
acgacgcaucgcacuuugu

SEQ ID NO: 852812 - RNA, 19 nt, Artificial Sequence
  Description of Artificial Sequence: Synthetic oligonucleotide
caaguagccucgagagcuu

SEQ ID NO: 852813 - RNA, 19 nt, Artificial Sequence
  Description of Artificial Sequence: Synthetic oligonucleotide
cccaggaacagcguugcua

SEQ ID NO: 852814 - RNA, 19 nt, Artificial Sequence
  Description of Artificial Sequence: Synthetic oligonucleotide
gguggccuacuugcaccug

SEQ ID NO: 852815 - RNA, 19 nt, Artificial Sequence
  Description of Artificial Sequence: Synthetic oligonucleotide
cuggcgcuucaaagcaggu

SEQ ID NO: 852816 - RNA, 19 nt, Artificial Sequence
  Description of Artificial Sequence: Synthetic oligonucleotide
gggacgacgcaucgcacuu

SEQ ID NO: 852817 - RNA, 19 nt, Artificial Sequence
  Description of Artificial Sequence: Synthetic oligonucleotide
ccgaucauuguugaguauu

SEQ ID NO: 852818 - RNA, 19 nt, Artificial Sequence
  Description of Artificial Sequence: Synthetic oligonucleotide
cgaugguguucugccgacg

SEQ ID NO: 852819 - RNA, 19 nt, Artificial Sequence
  Description of Artificial Sequence: Synthetic oligonucleotide
gcacagcguacccgcaucu

SEQ ID NO: 852820 - RNA, 19 nt, Artificial Sequence
  Description of Artificial Sequence: Synthetic oligonucleotide
ccgcaguuagacacggagu

SEQ ID NO: 852821 - RNA, 19 nt, Artificial Sequence
  Description of Artificial Sequence: Synthetic oligonucleotide
ccgccgccaugcaguacgg

SEQ ID NO: 852822 - RNA, 19 nt, Artificial Sequence
  Description of Artificial Sequence: Synthetic oligonucleotide
ccgcugacaggaaugggau

SEQ ID NO: 852823 - RNA, 19 nt, Artificial Sequence
  Description of Artificial Sequence: Synthetic oligonucleotide
cgagagcuugcagcuuggc

SEQ ID NO: 852824 - RNA, 19 nt, Artificial Sequence
  Description of Artificial Sequence: Synthetic oligonucleotide
gcguuggccaaugcguagu

SEQ ID NO: 852825 - RNA, 19 nt, Artificial Sequence
  Description of Artificial Sequence: Synthetic oligonucleotide
cgcaucgcacuuuguugca

SEQ ID NO: 852826 - RNA, 19 nt, Artificial Sequence
  Description of Artificial Sequence: Synthetic oligonucleotide
caggaacagcguugcuaau

SEQ ID NO: 852827 - RNA, 19 nt, Artificial Sequence
  Description of Artificial Sequence: Synthetic oligonucleotide
cagcguugcuaaugauauu

SEQ ID NO: 852828 - RNA, 19 nt, Artificial Sequence
  Description of Artificial Sequence: Synthetic oligonucleotide
cauccugaccugguaccuu

SEQ ID NO: 852829 - RNA, 19 nt, Artificial Sequence
  Description of Artificial Sequence: Synthetic oligonucleotide
gcauuucgggcugcagagu

SEQ ID NO: 852830 - RNA, 19 nt, Artificial Sequence
  Description of Artificial Sequence: Synthetic oligonucleotide
cgaugcuauccaaccgcaa

SEQ ID NO: 852831 - RNA, 19 nt, Artificial Sequence
  Description of Artificial Sequence: Synthetic oligonucleotide
ccacggcuaugagcugagc

SEQ ID NO: 852832 - RNA, 19 nt, Artificial Sequence
  Description of Artificial Sequence: Synthetic oligonucleotide
gcguugcuaaugauauuuu

SEQ ID NO: 852833 - RNA, 19 nt, Artificial Sequence
  Description of Artificial Sequence: Synthetic oligonucleotide
gguacccaucauggucucu

SEQ ID NO: 852834 - RNA, 19 nt, Artificial Sequence
  Description of Artificial Sequence: Synthetic oligonucleotide
cugguaccuucaccacgau

SEQ ID NO: 852835 - RNA, 19 nt, Artificial Sequence
  Description of Artificial Sequence: Synthetic oligonucleotide
cuguagcuguguggucgcu

SEQ ID NO: 852836 - RNA, 19 nt, Artificial Sequence
  Description of Artificial Sequence: Synthetic oligonucleotide
gcgacccaucuacuccagu

SEQ ID NO: 852837 - RNA, 19 nt, Artificial Sequence
  Description of Artificial Sequence: Synthetic oligonucleotide
ggcgccagcuggacguacu

SEQ ID NO: 852838 - RNA, 19 nt, Artificial Sequence
  Description of Artificial Sequence: Synthetic oligonucleotide
cgacgcaucgcacuuuguu

SEQ ID NO: 852839 - RNA, 19 nt, Artificial Sequence
  Description of Artificial Sequence: Synthetic oligonucleotide
ccucucgguggaacaggua

SEQ ID NO: 852840 - RNA, 19 nt, Artificial Sequence
  Description of Artificial Sequence: Synthetic oligonucleotide
ggccgcaguuagacacgga

SEQ ID NO: 852841 - RNA, 19 nt, Artificial Sequence
  Description of Artificial Sequence: Synthetic oligonucleotide
caggcgccagcuggacgua

SEQ ID NO: 852842 - RNA, 19 nt, Artificial Sequence
  Description of Artificial Sequence: Synthetic oligonucleotide
gcccgacaaguuggacaca

SEQ ID NO: 852843 - RNA, 19 nt, Artificial Sequence
  Description of Artificial Sequence: Synthetic oligonucleotide
cgccgccaugcaguacggc

SEQ ID NO: 852844 - RNA, 19 nt, Artificial Sequence
  Description of Artificial Sequence: Synthetic oligonucleotide
ccggugcccuguugcucaa

SEQ ID NO: 852845 - RNA, 19 nt, Artificial Sequence
  Description of Artificial Sequence: Synthetic oligonucleotide
ccugcaccucucgguggaa

SEQ ID NO: 852846 - RNA, 19 nt, Artificial Sequence
  Description of Artificial Sequence: Synthetic oligonucleotide
cgacgcccaggaacagcgu

SEQ ID NO: 852847 - RNA, 19 nt, Artificial Sequence
  Description of Artificial Sequence: Synthetic oligonucleotide
uguucgugcaccaugagcc

SEQ ID NO: 852848 - RNA, 19 nt, Artificial Sequence
  Description of Artificial Sequence: Synthetic oligonucleotide
ucuugagugaguagcagcg

SEQ ID NO: 852849 - RNA, 19 nt, Artificial Sequence
  Description of Artificial Sequence: Synthetic oligonucleotide
gauggguacaucuccaccg

SEQ ID NO: 852850 - RNA, 19 nt, Artificial Sequence
  Description of Artificial Sequence: Synthetic oligonucleotide
uccauuaugggccuggaga

SEQ ID NO: 852851 - RNA, 19 nt, Artificial Sequence
  Description of Artificial Sequence: Synthetic oligonucleotide
uccaccgaggaccagaucc

SEQ ID NO: 852852 - RNA, 19 nt, Artificial Sequence
  Description of Artificial Sequence: Synthetic oligonucleotide
caauguacgacaacaggcg

SEQ ID NO: 852853 - RNA, 19 nt, Artificial Sequence
  Description of Artificial Sequence: Synthetic oligonucleotide
uguuaaguguccagagugg

SEQ ID NO: 852854 - RNA, 19 nt, Artificial Sequence
  Description of Artificial Sequence: Synthetic oligonucleotide
acugcuuagugccacacuc

SEQ ID NO: 852855 - RNA, 19 nt, Artificial Sequence
  Description of Artificial Sequence: Synthetic oligonucleotide
acuaucaggugccacaaag

SEQ ID NO: 852856 - RNA, 19 nt, Artificial Sequence
  Description of Artificial Sequence: Synthetic oligonucleotide
aguguaaggacccgguagg

SEQ ID NO: 852857 - RNA, 19 nt, Artificial Sequence
  Description of Artificial Sequence: Synthetic oligonucleotide
ucuuguuaaguguccagag

SEQ ID NO: 852858 - RNA, 19 nt, Artificial Sequence
  Description of Artificial Sequence: Synthetic oligonucleotide
agaaaucagcagcugugcc

SEQ ID NO: 852859 - RNA, 19 nt, Artificial Sequence
  Description of Artificial Sequence: Synthetic oligonucleotide
cugaaaacuaucaggugcc

SEQ ID NO: 852860 - RNA, 19 nt, Artificial Sequence
  Description of Artificial Sequence: Synthetic oligonucleotide
agugaaaaugccucuggag

SEQ ID NO: 852861 - RNA, 19 nt, Artificial Sequence
  Description of Artificial Sequence: Synthetic oligonucleotide
aguagcagcgggcaauggc

SEQ ID NO: 852862 - RNA, 19 nt, Artificial Sequence
  Description of Artificial Sequence: Synthetic oligonucleotide
auguagucaucuuugcccg

SEQ ID NO: 852863 - RNA, 19 nt, Artificial Sequence
  Description of Artificial Sequence: Synthetic oligonucleotide
acuaaggguggacaguacg

SEQ ID NO: 852864 - RNA, 19 nt, Artificial Sequence
  Description of Artificial Sequence: Synthetic oligonucleotide
cuaaggguggacaguacgg

SEQ ID NO: 852865 - RNA, 19 nt, Artificial Sequence
  Description of Artificial Sequence: Synthetic oligonucleotide
gcugaaaacuaucaggugc

SEQ ID NO: 852866 - RNA, 19 nt, Artificial Sequence
  Description of Artificial Sequence: Synthetic oligonucleotide
aaggguggacaguacggcg

SEQ ID NO: 852867 - RNA, 19 nt, Artificial Sequence
  Description of Artificial Sequence: Synthetic oligonucleotide
aaugacggacacuuucugu

SEQ ID NO: 852868 - RNA, 19 nt, Artificial Sequence
  Description of Artificial Sequence: Synthetic oligonucleotide
aauguacgacaacaggcgu

SEQ ID NO: 852869 - RNA, 19 nt, Artificial Sequence
  Description of Artificial Sequence: Synthetic oligonucleotide
uccggagcugcaauguacg

SEQ ID NO: 852870 - RNA, 19 nt, Artificial Sequence
  Description of Artificial Sequence: Synthetic oligonucleotide
gagauguaguguaaggacc

SEQ ID NO: 852871 - RNA, 19 nt, Artificial Sequence
  Description of Artificial Sequence: Synthetic oligonucleotide
cuaucaggugccacaaagg

SEQ ID NO: 852872 - RNA, 19 nt, Artificial Sequence
  Description of Artificial Sequence: Synthetic oligonucleotide
acuagguuuauuauuucag

SEQ ID NO: 852873 - RNA, 19 nt, Artificial Sequence
  Description of Artificial Sequence: Synthetic oligonucleotide
uucuugagugaguagcagc

SEQ ID NO: 852874 - RNA, 19 nt, Artificial Sequence
  Description of Artificial Sequence: Synthetic oligonucleotide
uacaacuccaucuggcaga

SEQ ID NO: 852875 - RNA, 19 nt, Artificial Sequence
  Description of Artificial Sequence: Synthetic oligonucleotide
cuuagcaaugguagccugg

SEQ ID NO: 852876 - RNA, 19 nt, Artificial Sequence
  Description of Artificial Sequence: Synthetic oligonucleotide
cucaggacguucauagggg

SEQ ID NO: 852877 - RNA, 19 nt, Artificial Sequence
  Description of Artificial Sequence: Synthetic oligonucleotide
uguaguguaaggacccggu

SEQ ID NO: 852878 - RNA, 19 nt, Artificial Sequence
  Description of Artificial Sequence: Synthetic oligonucleotide
aaaggcuccugugcggccc

SEQ ID NO: 852879 - RNA, 19 nt, Artificial Sequence
  Description of Artificial Sequence: Synthetic oligonucleotide
cacgguugcugucauaggg

SEQ ID NO: 852880 - RNA, 19 nt, Artificial Sequence
  Description of Artificial Sequence: Synthetic oligonucleotide
ucaggucuuguuaaguguc

SEQ ID NO: 852881 - RNA, 19 nt, Artificial Sequence
  Description of Artificial Sequence: Synthetic oligonucleotide
uccagaguggauccaggag

SEQ ID NO: 852882 - RNA, 19 nt, Artificial Sequence
  Description of Artificial Sequence: Synthetic oligonucleotide
agcgccucggcgcaaacac

SEQ ID NO: 852883 - RNA, 19 nt, Artificial Sequence
  Description of Artificial Sequence: Synthetic oligonucleotide
ugaucucggaacugcaggc

SEQ ID NO: 852884 - RNA, 19 nt, Artificial Sequence
  Description of Artificial Sequence: Synthetic oligonucleotide
auuaugggccuggagaaag

SEQ ID NO: 852885 - RNA, 19 nt, Artificial Sequence
  Description of Artificial Sequence: Synthetic oligonucleotide
ugauggguacaucuccacc

SEQ ID NO: 852886 - RNA, 19 nt, Artificial Sequence
  Description of Artificial Sequence: Synthetic oligonucleotide
gacggacacuuucuguucg

SEQ ID NO: 852887 - RNA, 19 nt, Artificial Sequence
  Description of Artificial Sequence: Synthetic oligonucleotide
uucuguucgugcaccauga

SEQ ID NO: 852888 - RNA, 19 nt, Artificial Sequence
  Description of Artificial Sequence: Synthetic oligonucleotide
uccacgugccucaccagcg

SEQ ID NO: 852889 - RNA, 19 nt, Artificial Sequence
  Description of Artificial Sequence: Synthetic oligonucleotide
guaaugugcgugcaccucc

SEQ ID NO: 852890 - RNA, 19 nt, Artificial Sequence
  Description of Artificial Sequence: Synthetic oligonucleotide
acucaggucuuguuaagug

SEQ ID NO: 852891 - RNA, 19 nt, Artificial Sequence
  Description of Artificial Sequence: Synthetic oligonucleotide
uacgacaacaggcgugugc

SEQ ID NO: 852892 - RNA, 19 nt, Artificial Sequence
  Description of Artificial Sequence: Synthetic oligonucleotide
aauggaccggccucgggca

SEQ ID NO: 852893 - RNA, 19 nt, Artificial Sequence
  Description of Artificial Sequence: Synthetic oligonucleotide
agcuccggaaucccauucc

SEQ ID NO: 852894 - RNA, 19 nt, Artificial Sequence
  Description of Artificial Sequence: Synthetic oligonucleotide
ugagugaguagcagcgggc

SEQ ID NO: 852895 - RNA, 19 nt, Artificial Sequence
  Description of Artificial Sequence: Synthetic oligonucleotide
cugacugaugcucaugcug

SEQ ID NO: 852896 - RNA, 19 nt, Artificial Sequence
  Description of Artificial Sequence: Synthetic oligonucleotide
caguacaacuccaucuggc

SEQ ID NO: 852897 - RNA, 19 nt, Artificial Sequence
  Description of Artificial Sequence: Synthetic oligonucleotide
cucggcgcaaacacggugg

SEQ ID NO: 852898 - RNA, 19 nt, Artificial Sequence
  Description of Artificial Sequence: Synthetic oligonucleotide
gagcuguccagugaaaaug

SEQ ID NO: 852899 - RNA, 19 nt, Artificial Sequence
  Description of Artificial Sequence: Synthetic oligonucleotide
uguacgacaacaggcgugu

SEQ ID NO: 852900 - RNA, 19 nt, Artificial Sequence
  Description of Artificial Sequence: Synthetic oligonucleotide
aagagaccgcuugaggcuc

SEQ ID NO: 852901 - RNA, 19 nt, Artificial Sequence
  Description of Artificial Sequence: Synthetic oligonucleotide
acagacuagguuuauuauu

SEQ ID NO: 852902 - RNA, 19 nt, Artificial Sequence
  Description of Artificial Sequence: Synthetic oligonucleotide
gcaauguacgacaacaggc

SEQ ID NO: 852903 - RNA, 19 nt, Artificial Sequence
  Description of Artificial Sequence: Synthetic oligonucleotide
gacgguauccagucgcccc

SEQ ID NO: 852904 - RNA, 19 nt, Artificial Sequence
  Description of Artificial Sequence: Synthetic oligonucleotide
gcgaacacugcuuagugcc

SEQ ID NO: 852905 - RNA, 19 nt, Artificial Sequence
  Description of Artificial Sequence: Synthetic oligonucleotide
cacacgguugcugucauag

SEQ ID NO: 852906 - RNA, 19 nt, Artificial Sequence
  Description of Artificial Sequence: Synthetic oligonucleotide
ugcacaagagaccgcuuga

SEQ ID NO: 852907 - RNA, 19 nt, Artificial Sequence
  Description of Artificial Sequence: Synthetic oligonucleotide
acguucauaggggucuugc

SEQ ID NO: 852908 - RNA, 19 nt, Artificial Sequence
  Description of Artificial Sequence: Synthetic oligonucleotide
caugacauccuggugccgg

SEQ ID NO: 852909 - RNA, 19 nt, Artificial Sequence
  Description of Artificial Sequence: Synthetic oligonucleotide
cacacucagggcuccaugc

SEQ ID NO: 852910 - RNA, 19 nt, Artificial Sequence
  Description of Artificial Sequence: Synthetic oligonucleotide
guucauaggggucuugcuc

SEQ ID NO: 852911 - RNA, 19 nt, Artificial Sequence
  Description of Artificial Sequence: Synthetic oligonucleotide
cacaagagaccgcuugagg

SEQ ID NO: 852912 - RNA, 19 nt, Artificial Sequence
  Description of Artificial Sequence: Synthetic oligonucleotide
ugugcgugcaccuccugga

SEQ ID NO: 852913 - RNA, 19 nt, Artificial Sequence
  Description of Artificial Sequence: Synthetic oligonucleotide
ugcgaacacugcuuagugc

SEQ ID NO: 852914 - RNA, 19 nt, Artificial Sequence
  Description of Artificial Sequence: Synthetic oligonucleotide
acguguguuucgguggugc

SEQ ID NO: 852915 - RNA, 19 nt, Artificial Sequence
  Description of Artificial Sequence: Synthetic oligonucleotide
cugcuuuccccgcaaagag

SEQ ID NO: 852916 - RNA, 19 nt, Artificial Sequence
  Description of Artificial Sequence: Synthetic oligonucleotide
ucggaggccuugaagguac

SEQ ID NO: 852917 - RNA, 19 nt, Artificial Sequence
  Description of Artificial Sequence: Synthetic oligonucleotide
guggaggugcacaagagac

SEQ ID NO: 852918 - RNA, 19 nt, Artificial Sequence
  Description of Artificial Sequence: Synthetic oligonucleotide
cuguucgugcaccaugagc

SEQ ID NO: 852919 - RNA, 19 nt, Artificial Sequence
  Description of Artificial Sequence: Synthetic oligonucleotide
agcugaaaacuaucaggug

SEQ ID NO: 852920 - RNA, 19 nt, Artificial Sequence
  Description of Artificial Sequence: Synthetic oligonucleotide
cagguaaugugcgugcacc

SEQ ID NO: 852921 - RNA, 19 nt, Artificial Sequence
  Description of Artificial Sequence: Synthetic oligonucleotide
aaacuaucaggugccacaa

SEQ ID NO: 852922 - RNA, 19 nt, Artificial Sequence
  Description of Artificial Sequence: Synthetic oligonucleotide
guugcugucauagggcaug

SEQ ID NO: 852923 - RNA, 19 nt, Artificial Sequence
  Description of Artificial Sequence: Synthetic oligonucleotide
uuugcccgagcgcaacacc

SEQ ID NO: 852924 - RNA, 19 nt, Artificial Sequence
  Description of Artificial Sequence: Synthetic oligonucleotide
aggggucuugcucaaucag

SEQ ID NO: 852925 - RNA, 19 nt, Artificial Sequence
  Description of Artificial Sequence: Synthetic oligonucleotide
uccagacgguauccagucg

SEQ ID NO: 852926 - RNA, 19 nt, Artificial Sequence
  Description of Artificial Sequence: Synthetic oligonucleotide
ucaggacguucauaggggu

SEQ ID NO: 852927 - RNA, 19 nt, Artificial Sequence
  Description of Artificial Sequence: Synthetic oligonucleotide
gagcugaaaacuaucaggu

SEQ ID NO: 852928 - RNA, 19 nt, Artificial Sequence
  Description of Artificial Sequence: Synthetic oligonucleotide
uguguuucgguggugcgaa

SEQ ID NO: 852929 - RNA, 19 nt, Artificial Sequence
  Description of Artificial Sequence: Synthetic oligonucleotide
aagagcuguccagugaaaa

SEQ ID NO: 852930 - RNA, 19 nt, Artificial Sequence
  Description of Artificial Sequence: Synthetic oligonucleotide
ggagcugcaauguacgaca

SEQ ID NO: 852931 - RNA, 19 nt, Artificial Sequence
  Description of Artificial Sequence: Synthetic oligonucleotide
cagcauguguuuucucugc

SEQ ID NO: 852932 - RNA, 19 nt, Artificial Sequence
  Description of Artificial Sequence: Synthetic oligonucleotide
gaccagauccugugagucc

SEQ ID NO: 852933 - RNA, 19 nt, Artificial Sequence
  Description of Artificial Sequence: Synthetic oligonucleotide
caggucuuguuaagugucc

SEQ ID NO: 852934 - RNA, 19 nt, Artificial Sequence
  Description of Artificial Sequence: Synthetic oligonucleotide
guaaggacccgguaggcaa

SEQ ID NO: 852935 - RNA, 19 nt, Artificial Sequence
  Description of Artificial Sequence: Synthetic oligonucleotide
auguaguguaaggacccgg

SEQ ID NO: 852936 - RNA, 19 nt, Artificial Sequence
  Description of Artificial Sequence: Synthetic oligonucleotide
gugcacaagagaccgcuug

SEQ ID NO: 852937 - RNA, 19 nt, Artificial Sequence
  Description of Artificial Sequence: Synthetic oligonucleotide
ucuguucgugcaccaugag

SEQ ID NO: 852938 - RNA, 19 nt, Artificial Sequence
  Description of Artificial Sequence: Synthetic oligonucleotide
uaaugugcgugcaccuccu

SEQ ID NO: 852939 - RNA, 19 nt, Artificial Sequence
  Description of Artificial Sequence: Synthetic oligonucleotide
agcugcaauguacgacaac

SEQ ID NO: 852940 - RNA, 19 nt, Artificial Sequence
  Description of Artificial Sequence: Synthetic oligonucleotide
uguaaggacccgguaggca

SEQ ID NO: 852941 - RNA, 19 nt, Artificial Sequence
  Description of Artificial Sequence: Synthetic oligonucleotide
agagcuguccagugaaaau

SEQ ID NO: 852942 - RNA, 19 nt, Artificial Sequence
  Description of Artificial Sequence: Synthetic oligonucleotide
ggacaguacggcgagagcc

SEQ ID NO: 852943 - RNA, 19 nt, Artificial Sequence
  Description of Artificial Sequence: Synthetic oligonucleotide
uguuucgguggugcgaaca

SEQ ID NO: 852944 - RNA, 19 nt, Artificial Sequence
  Description of Artificial Sequence: Synthetic oligonucleotide
aggacguucauaggggucu

SEQ ID NO: 852945 - RNA, 19 nt, Artificial Sequence
  Description of Artificial Sequence: Synthetic oligonucleotide
gacaguacggcgagagccc

SEQ ID NO: 852946 - RNA, 19 nt, Artificial Sequence
  Description of Artificial Sequence: Synthetic oligonucleotide
uagcgcgccaccuuuugcu

SEQ ID NO: 852947 - RNA, 19 nt, Artificial Sequence
  Description of Artificial Sequence: Synthetic oligonucleotide
acaaugacggacacuuucu

SEQ ID NO: 852948 - RNA, 19 nt, Artificial Sequence
  Description of Artificial Sequence: Synthetic oligonucleotide
cugcaucuaccuugguagg

SEQ ID NO: 852949 - RNA, 19 nt, Artificial Sequence
  Description of Artificial Sequence: Synthetic oligonucleotide
ugugcggcccacuccggag

SEQ ID NO: 852950 - RNA, 19 nt, Artificial Sequence
  Description of Artificial Sequence: Synthetic oligonucleotide
uuccccgaaagguucucca

SEQ ID NO: 852951 - RNA, 19 nt, Artificial Sequence
  Description of Artificial Sequence: Synthetic oligonucleotide
gacccgguaggcaaagccc

SEQ ID NO: 852952 - RNA, 19 nt, Artificial Sequence
  Description of Artificial Sequence: Synthetic oligonucleotide
uggauggaacugaugggua

SEQ ID NO: 852953 - RNA, 19 nt, Artificial Sequence
  Description of Artificial Sequence: Synthetic oligonucleotide
gugcgaacacugcuuagug

SEQ ID NO: 852954 - RNA, 19 nt, Artificial Sequence
  Description of Artificial Sequence: Synthetic oligonucleotide
caaugacggacacuuucug

SEQ ID NO: 852955 - RNA, 19 nt, Artificial Sequence
  Description of Artificial Sequence: Synthetic oligonucleotide
uccaagccaccuaggggcc

SEQ ID NO: 852956 - RNA, 19 nt, Artificial Sequence
  Description of Artificial Sequence: Synthetic oligonucleotide
uuuccccgcaaagagcugu

SEQ ID NO: 852957 - RNA, 19 nt, Artificial Sequence
  Description of Artificial Sequence: Synthetic oligonucleotide
acaguacggcgagagcccc

SEQ ID NO: 852958 - RNA, 19 nt, Artificial Sequence
  Description of Artificial Sequence: Synthetic oligonucleotide
uuagugccacacucagggc

SEQ ID NO: 852959 - RNA, 19 nt, Artificial Sequence
  Description of Artificial Sequence: Synthetic oligonucleotide
gcugcaauguacgacaaca

SEQ ID NO: 852960 - RNA, 19 nt, Artificial Sequence
  Description of Artificial Sequence: Synthetic oligonucleotide
ggaacugauggguacaucu

SEQ ID NO: 852961 - RNA, 19 nt, Artificial Sequence
  Description of Artificial Sequence: Synthetic oligonucleotide
agcauguguuuucucugcu

SEQ ID NO: 852962 - RNA, 19 nt, Artificial Sequence
  Description of Artificial Sequence: Synthetic oligonucleotide
aucuaccuugguaggcugc

SEQ ID NO: 852963 - RNA, 19 nt, Artificial Sequence
  Description of Artificial Sequence: Synthetic oligonucleotide
augggagauguaguguaag

SEQ ID NO: 852964 - RNA, 19 nt, Artificial Sequence
  Description of Artificial Sequence: Synthetic oligonucleotide
cacgggcuugccuggaggg

SEQ ID NO: 852965 - RNA, 19 nt, Artificial Sequence
  Description of Artificial Sequence: Synthetic oligonucleotide
ugaguagcagcgggcaaug

SEQ ID NO: 852966 - RNA, 19 nt, Artificial Sequence
  Description of Artificial Sequence: Synthetic oligonucleotide
guuucgguggugcgaacac

SEQ ID NO: 852967 - RNA, 19 nt, Artificial Sequence
  Description of Artificial Sequence: Synthetic oligonucleotide
agacgguauccagucgccc

SEQ ID NO: 852968 - RNA, 19 nt, Artificial Sequence
  Description of Artificial Sequence: Synthetic oligonucleotide
guuaaguguccagagugga

SEQ ID NO: 852969 - RNA, 19 nt, Artificial Sequence
  Description of Artificial Sequence: Synthetic oligonucleotide
ugacggacacuuucuguuc

SEQ ID NO: 852970 - RNA, 19 nt, Artificial Sequence
  Description of Artificial Sequence: Synthetic oligonucleotide
agguaaugugcgugcaccu

SEQ ID NO: 852971 - RNA, 19 nt, Artificial Sequence
  Description of Artificial Sequence: Synthetic oligonucleotide
cucucaggacguucauagg

SEQ ID NO: 852972 - RNA, 19 nt, Artificial Sequence
  Description of Artificial Sequence: Synthetic oligonucleotide
guucuugagugaguagcag

SEQ ID NO: 852973 - RNA, 19 nt, Artificial Sequence
  Description of Artificial Sequence: Synthetic oligonucleotide
auggguacaucuccaccga

SEQ ID NO: 852974 - RNA, 19 nt, Artificial Sequence
  Description of Artificial Sequence: Synthetic oligonucleotide
cuccacgugccucaccagc

SEQ ID NO: 852975 - RNA, 19 nt, Artificial Sequence
  Description of Artificial Sequence: Synthetic oligonucleotide
aguagcgcgccaccuuuug

SEQ ID NO: 852976 - RNA, 19 nt, Artificial Sequence
  Description of Artificial Sequence: Synthetic oligonucleotide
uggacaguacggcgagagc

SEQ ID NO: 852977 - RNA, 19 nt, Artificial Sequence
  Description of Artificial Sequence: Synthetic oligonucleotide
acacugcuuagugccacac

SEQ ID NO: 852978 - RNA, 19 nt, Artificial Sequence
  Description of Artificial Sequence: Synthetic oligonucleotide
ggcccuguccauuaugggc

SEQ ID NO: 852979 - RNA, 19 nt, Artificial Sequence
  Description of Artificial Sequence: Synthetic oligonucleotide
ucuuugcccgagcgcaaca

SEQ ID NO: 852980 - RNA, 19 nt, Artificial Sequence
  Description of Artificial Sequence: Synthetic oligonucleotide
cugauggguacaucuccac

SEQ ID NO: 852981 - RNA, 19 nt, Artificial Sequence
  Description of Artificial Sequence: Synthetic oligonucleotide
cagacgguauccagucgcc

SEQ ID NO: 852982 - RNA, 19 nt, Artificial Sequence
  Description of Artificial Sequence: Synthetic oligonucleotide
acacgguugcugucauagg

SEQ ID NO: 852983 - RNA, 19 nt, Artificial Sequence
  Description of Artificial Sequence: Synthetic oligonucleotide
auagggcaugacauccugg

SEQ ID NO: 852984 - RNA, 19 nt, Artificial Sequence
  Description of Artificial Sequence: Synthetic oligonucleotide
gaacugauggguacaucuc

SEQ ID NO: 852985 - RNA, 19 nt, Artificial Sequence
  Description of Artificial Sequence: Synthetic oligonucleotide
acggcgagagccccuccac

SEQ ID NO: 852986 - RNA, 19 nt, Artificial Sequence
  Description of Artificial Sequence: Synthetic oligonucleotide
caucauguuccugugccuc

SEQ ID NO: 852987 - RNA, 19 nt, Artificial Sequence
  Description of Artificial Sequence: Synthetic oligonucleotide
cacuuucuguucgugcacc

SEQ ID NO: 852988 - RNA, 19 nt, Artificial Sequence
  Description of Artificial Sequence: Synthetic oligonucleotide
auguacgacaacaggcgug

SEQ ID NO: 852989 - RNA, 19 nt, Artificial Sequence
  Description of Artificial Sequence: Synthetic oligonucleotide
aguacggcgagagccccuc

SEQ ID NO: 852990 - RNA, 19 nt, Artificial Sequence
  Description of Artificial Sequence: Synthetic oligonucleotide
aggugcacaagagaccgcu

SEQ ID NO: 852991 - RNA, 19 nt, Artificial Sequence
  Description of Artificial Sequence: Synthetic oligonucleotide
ggucuuguuaaguguccag

SEQ ID NO: 852992 - RNA, 19 nt, Artificial Sequence
  Description of Artificial Sequence: Synthetic oligonucleotide
aucuuugcccgagcgcaac

SEQ ID NO: 852993 - RNA, 19 nt, Artificial Sequence
  Description of Artificial Sequence: Synthetic oligonucleotide
uacggcgagagccccucca

SEQ ID NO: 852994 - RNA, 19 nt, Artificial Sequence
  Description of Artificial Sequence: Synthetic oligonucleotide
ggacacuuucuguucgugc

SEQ ID NO: 852995 - RNA, 19 nt, Artificial Sequence
  Description of Artificial Sequence: Synthetic oligonucleotide
ugcguacagcagugcaaag

SEQ ID NO: 852996 - RNA, 19 nt, Artificial Sequence
  Description of Artificial Sequence: Synthetic oligonucleotide
gcucuacaaggccaggaag

SEQ ID NO: 852997 - RNA, 19 nt, Artificial Sequence
  Description of Artificial Sequence: Synthetic oligonucleotide
acacucagggcuccaugca

SEQ ID NO: 852998 - RNA, 19 nt, Artificial Sequence
  Description of Artificial Sequence: Synthetic oligonucleotide
acgguauccagucgccccu

SEQ ID NO: 852999 - RNA, 19 nt, Artificial Sequence
  Description of Artificial Sequence: Synthetic oligonucleotide
ggucuugcucaaucagccg

SEQ ID NO: 853000 - RNA, 19 nt, Artificial Sequence
  Description of Artificial Sequence: Synthetic oligonucleotide
aaggacccgguaggcaaag

SEQ ID NO: 853001 - RNA, 19 nt, Artificial Sequence
  Description of Artificial Sequence: Synthetic oligonucleotide
ggacccgguaggcaaagcc

SEQ ID NO: 853002 - RNA, 19 nt, Artificial Sequence
  Description of Artificial Sequence: Synthetic oligonucleotide
cacucagggcuccaugcac

SEQ ID NO: 853003 - RNA, 19 nt, Artificial Sequence
  Description of Artificial Sequence: Synthetic oligonucleotide
gcguacagcagugcaaagg

SEQ ID NO: 853004 - RNA, 19 nt, Artificial Sequence
  Description of Artificial Sequence: Synthetic oligonucleotide
uccugcaccgcugcguaca

SEQ ID NO: 853005 - RNA, 19 nt, Artificial Sequence
  Description of Artificial Sequence: Synthetic oligonucleotide
caaguagggaaguggaggu

SEQ ID NO: 853006 - RNA, 19 nt, Artificial Sequence
  Description of Artificial Sequence: Synthetic oligonucleotide
cugcaguacaacuccaucu

SEQ ID NO: 853007 - RNA, 19 nt, Artificial Sequence
  Description of Artificial Sequence: Synthetic oligonucleotide
uugcucauccgcugcuuuc

SEQ ID NO: 853008 - RNA, 19 nt, Artificial Sequence
  Description of Artificial Sequence: Synthetic oligonucleotide
gguaggcugcagcaggggc

SEQ ID NO: 853009 - RNA, 19 nt, Artificial Sequence
  Description of Artificial Sequence: Synthetic oligonucleotide
gcucaugcuggccacgggc

SEQ ID NO: 853010 - RNA, 19 nt, Artificial Sequence
  Description of Artificial Sequence: Synthetic oligonucleotide
uggccacuaaggguggaca

SEQ ID NO: 853011 - RNA, 19 nt, Artificial Sequence
  Description of Artificial Sequence: Synthetic oligonucleotide
ccaccuaggggccggaugc

SEQ ID NO: 853012 - RNA, 19 nt, Artificial Sequence
  Description of Artificial Sequence: Synthetic oligonucleotide
caaaggcuccugugcggcc

SEQ ID NO: 853013 - RNA, 19 nt, Artificial Sequence
  Description of Artificial Sequence: Synthetic oligonucleotide
agggcuccaugcaccaugg

SEQ ID NO: 853014 - RNA, 19 nt, Artificial Sequence
  Description of Artificial Sequence: Synthetic oligonucleotide
guagcgcgccaccuuuugc

SEQ ID NO: 853015 - RNA, 19 nt, Artificial Sequence
  Description of Artificial Sequence: Synthetic oligonucleotide
caagagaccgcuugaggcu

SEQ ID NO: 853016 - RNA, 19 nt, Artificial Sequence
  Description of Artificial Sequence: Synthetic oligonucleotide
aaagagcuguccagugaaa

SEQ ID NO: 853017 - RNA, 19 nt, Artificial Sequence
  Description of Artificial Sequence: Synthetic oligonucleotide
uggccgaccggcccucagc

SEQ ID NO: 853018 - RNA, 19 nt, Artificial Sequence
  Description of Artificial Sequence: Synthetic oligonucleotide
ggccacuaaggguggacag

SEQ ID NO: 853019 - RNA, 19 nt, Artificial Sequence
  Description of Artificial Sequence: Synthetic oligonucleotide
gcaauggcaauggaccggc

SEQ ID NO: 853020 - RNA, 19 nt, Artificial Sequence
  Description of Artificial Sequence: Synthetic oligonucleotide
cacuaaggguggacaguac

SEQ ID NO: 853021 - RNA, 19 nt, Artificial Sequence
  Description of Artificial Sequence: Synthetic oligonucleotide
uggugcagguaaugugcgu

SEQ ID NO: 853022 - RNA, 19 nt, Artificial Sequence
  Description of Artificial Sequence: Synthetic oligonucleotide
cugcuuagugccacacuca

SEQ ID NO: 853023 - RNA, 19 nt, Artificial Sequence
  Description of Artificial Sequence: Synthetic oligonucleotide
cucaggucuuguuaagugu

SEQ ID NO: 853024 - RNA, 19 nt, Artificial Sequence
  Description of Artificial Sequence: Synthetic oligonucleotide
cuuugcccgagcgcaacac

SEQ ID NO: 853025 - RNA, 19 nt, Artificial Sequence
  Description of Artificial Sequence: Synthetic oligonucleotide
gaugggagauguaguguaa

SEQ ID NO: 853026 - RNA, 19 nt, Artificial Sequence
  Description of Artificial Sequence: Synthetic oligonucleotide
aggguggacaguacggcga

SEQ ID NO: 853027 - RNA, 19 nt, Artificial Sequence
  Description of Artificial Sequence: Synthetic oligonucleotide
guguaaggacccgguaggc

SEQ ID NO: 853028 - RNA, 19 nt, Artificial Sequence
  Description of Artificial Sequence: Synthetic oligonucleotide
accagcgccucauggcaga

SEQ ID NO: 853029 - RNA, 19 nt, Artificial Sequence
  Description of Artificial Sequence: Synthetic oligonucleotide
caagccaccuaggggccgg

SEQ ID NO: 853030 - RNA, 19 nt, Artificial Sequence
  Description of Artificial Sequence: Synthetic oligonucleotide
ucgcuccacguguguuucg

SEQ ID NO: 853031 - RNA, 19 nt, Artificial Sequence
  Description of Artificial Sequence: Synthetic oligonucleotide
gguggcucugcugucggag

SEQ ID NO: 853032 - RNA, 19 nt, Artificial Sequence
  Description of Artificial Sequence: Synthetic oligonucleotide
ugacaaugacggacacuuu

SEQ ID NO: 853033 - RNA, 19 nt, Artificial Sequence
  Description of Artificial Sequence: Synthetic oligonucleotide
gcggggaugggagauguag

SEQ ID NO: 853034 - RNA, 19 nt, Artificial Sequence
  Description of Artificial Sequence: Synthetic oligonucleotide
uuccccgcaaagagcuguc

SEQ ID NO: 853035 - RNA, 19 nt, Artificial Sequence
  Description of Artificial Sequence: Synthetic oligonucleotide
guaguguaaggacccggua

SEQ ID NO: 853036 - RNA, 19 nt, Artificial Sequence
  Description of Artificial Sequence: Synthetic oligonucleotide
caacaccacacgguugcug

SEQ ID NO: 853037 - RNA, 19 nt, Artificial Sequence
  Description of Artificial Sequence: Synthetic oligonucleotide
accgcugcguacagcagug

SEQ ID NO: 853038 - RNA, 19 nt, Artificial Sequence
  Description of Artificial Sequence: Synthetic oligonucleotide
ggaccagauccugugaguc

SEQ ID NO: 853039 - RNA, 19 nt, Artificial Sequence
  Description of Artificial Sequence: Synthetic oligonucleotide
guuccccgaaagguucucc

SEQ ID NO: 853040 - RNA, 19 nt, Artificial Sequence
  Description of Artificial Sequence: Synthetic oligonucleotide
aggacccgguaggcaaagc

SEQ ID NO: 853041 - RNA, 19 nt, Artificial Sequence
  Description of Artificial Sequence: Synthetic oligonucleotide
ugccgguucuugagugagu

SEQ ID NO: 853042 - RNA, 19 nt, Artificial Sequence
  Description of Artificial Sequence: Synthetic oligonucleotide
ggcaggcccaacucaggcc

SEQ ID NO: 853043 - RNA, 19 nt, Artificial Sequence
  Description of Artificial Sequence: Synthetic oligonucleotide
ccauuaugggccuggagaa

SEQ ID NO: 853044 - RNA, 19 nt, Artificial Sequence
  Description of Artificial Sequence: Synthetic oligonucleotide
accggccucgggcaucaug

SEQ ID NO: 853045 - RNA, 19 nt, Artificial Sequence
  Description of Artificial Sequence: Synthetic oligonucleotide
gcacaagagaccgcuugag

SEQ ID NO: 853046 - RNA, 19 nt, Artificial Sequence
  Description of Artificial Sequence: Synthetic oligonucleotide
cagcuccggaaucccauuc

SEQ ID NO: 853047 - RNA, 19 nt, Artificial Sequence
  Description of Artificial Sequence: Synthetic oligonucleotide
cacagacuagguuuauuau

SEQ ID NO: 853048 - RNA, 19 nt, Artificial Sequence
  Description of Artificial Sequence: Synthetic oligonucleotide
ccccgaaagguucuccagc

SEQ ID NO: 853049 - RNA, 19 nt, Artificial Sequence
  Description of Artificial Sequence: Synthetic oligonucleotide
gacguucauaggggucuug

SEQ ID NO: 853050 - RNA, 19 nt, Artificial Sequence
  Description of Artificial Sequence: Synthetic oligonucleotide
cugcguacagcagugcaaa

SEQ ID NO: 853051 - RNA, 19 nt, Artificial Sequence
  Description of Artificial Sequence: Synthetic oligonucleotide
guguguuucgguggugcga

SEQ ID NO: 853052 - RNA, 19 nt, Artificial Sequence
  Description of Artificial Sequence: Synthetic oligonucleotide
uccacacagcuagcauuga

SEQ ID NO: 853053 - RNA, 19 nt, Artificial Sequence
  Description of Artificial Sequence: Synthetic oligonucleotide
uugccagggcuguccggca

SEQ ID NO: 853054 - RNA, 19 nt, Artificial Sequence
  Description of Artificial Sequence: Synthetic oligonucleotide
ccgaccggcccucagcugc

SEQ ID NO: 853055 - RNA, 19 nt, Artificial Sequence
  Description of Artificial Sequence: Synthetic oligonucleotide
uccccgcaaagagcugucc

SEQ ID NO: 853056 - RNA, 19 nt, Artificial Sequence
  Description of Artificial Sequence: Synthetic oligonucleotide
ggcucuacaaggccaggaa

SEQ ID NO: 853057 - RNA, 19 nt, Artificial Sequence
  Description of Artificial Sequence: Synthetic oligonucleotide
gguaaugugcgugcaccuc

SEQ ID NO: 853058 - RNA, 19 nt, Artificial Sequence
  Description of Artificial Sequence: Synthetic oligonucleotide
ccaaguggggacuaggggu

SEQ ID NO: 853059 - RNA, 19 nt, Artificial Sequence
  Description of Artificial Sequence: Synthetic oligonucleotide
agcacucgcuccacgugug

SEQ ID NO: 853060 - RNA, 19 nt, Artificial Sequence
  Description of Artificial Sequence: Synthetic oligonucleotide
uguuccccgaaagguucuc

SEQ ID NO: 853061 - RNA, 19 nt, Artificial Sequence
  Description of Artificial Sequence: Synthetic oligonucleotide
caccauggcgcugcagaac

SEQ ID NO: 853062 - RNA, 19 nt, Artificial Sequence
  Description of Artificial Sequence: Synthetic oligonucleotide
cgagcgcaacaccacacgg

SEQ ID NO: 853063 - RNA, 19 nt, Artificial Sequence
  Description of Artificial Sequence: Synthetic oligonucleotide
cgccucggcgcaaacacgg

SEQ ID NO: 853064 - RNA, 19 nt, Artificial Sequence
  Description of Artificial Sequence: Synthetic oligonucleotide
accggcccucagcugcauc

SEQ ID NO: 853065 - RNA, 19 nt, Artificial Sequence
  Description of Artificial Sequence: Synthetic oligonucleotide
caggugccacaaaggagca

SEQ ID NO: 853066 - RNA, 19 nt, Artificial Sequence
  Description of Artificial Sequence: Synthetic oligonucleotide
cucaugcuggccacgggcu

SEQ ID NO: 853067 - RNA, 19 nt, Artificial Sequence
  Description of Artificial Sequence: Synthetic oligonucleotide
agcgcgccaccuuuugcuu

SEQ ID NO: 853068 - RNA, 19 nt, Artificial Sequence
  Description of Artificial Sequence: Synthetic oligonucleotide
gggcaucauguuccugugc

SEQ ID NO: 853069 - RNA, 19 nt, Artificial Sequence
  Description of Artificial Sequence: Synthetic oligonucleotide
gaccgcuugaggcucugau

SEQ ID NO: 853070 - RNA, 19 nt, Artificial Sequence
  Description of Artificial Sequence: Synthetic oligonucleotide
cugcagcauguguuuucuc

SEQ ID NO: 853071 - RNA, 19 nt, Artificial Sequence
  Description of Artificial Sequence: Synthetic oligonucleotide
guggccacuaaggguggac

SEQ ID NO: 853072 - RNA, 19 nt, Artificial Sequence
  Description of Artificial Sequence: Synthetic oligonucleotide
gguauccagucgccccugc

SEQ ID NO: 853073 - RNA, 19 nt, Artificial Sequence
  Description of Artificial Sequence: Synthetic oligonucleotide
gucgccccugccucucccc

SEQ ID NO: 853074 - RNA, 19 nt, Artificial Sequence
  Description of Artificial Sequence: Synthetic oligonucleotide
gccaccuaggggccggaug

SEQ ID NO: 853075 - RNA, 19 nt, Artificial Sequence
  Description of Artificial Sequence: Synthetic oligonucleotide
aaguagcgcgccaccuuuu

SEQ ID NO: 853076 - RNA, 19 nt, Artificial Sequence
  Description of Artificial Sequence: Synthetic oligonucleotide
cauuaugggccuggagaaa

SEQ ID NO: 853077 - RNA, 19 nt, Artificial Sequence
  Description of Artificial Sequence: Synthetic oligonucleotide
aggcccaacucaggccaag

SEQ ID NO: 853078 - RNA, 19 nt, Artificial Sequence
  Description of Artificial Sequence: Synthetic oligonucleotide
ggugcgaacacugcuuagu

SEQ ID NO: 853079 - RNA, 19 nt, Artificial Sequence
  Description of Artificial Sequence: Synthetic oligonucleotide
ccucucaguggggaaguag

SEQ ID NO: 853080 - RNA, 19 nt, Artificial Sequence
  Description of Artificial Sequence: Synthetic oligonucleotide
gcgcaaacacggugguggc

SEQ ID NO: 853081 - RNA, 19 nt, Artificial Sequence
  Description of Artificial Sequence: Synthetic oligonucleotide
gcucauccgcugcuuuccc

SEQ ID NO: 853082 - RNA, 19 nt, Artificial Sequence
  Description of Artificial Sequence: Synthetic oligonucleotide
gugaguagcagcgggcaau

SEQ ID NO: 853083 - RNA, 19 nt, Artificial Sequence
  Description of Artificial Sequence: Synthetic oligonucleotide
gagaccgcuugaggcucug

SEQ ID NO: 853084 - RNA, 19 nt, Artificial Sequence
  Description of Artificial Sequence: Synthetic oligonucleotide
acgugccucaccagcgccu

SEQ ID NO: 853085 - RNA, 19 nt, Artificial Sequence
  Description of Artificial Sequence: Synthetic oligonucleotide
ggccugguggccgaccggc

SEQ ID NO: 853086 - RNA, 19 nt, Artificial Sequence
  Description of Artificial Sequence: Synthetic oligonucleotide
guguuucgguggugcgaac

SEQ ID NO: 853087 - RNA, 19 nt, Artificial Sequence
  Description of Artificial Sequence: Synthetic oligonucleotide
auggaccggccucgggcau

SEQ ID NO: 853088 - RNA, 19 nt, Artificial Sequence
  Description of Artificial Sequence: Synthetic oligonucleotide
guacggcgagagccccucc

SEQ ID NO: 853089 - RNA, 19 nt, Artificial Sequence
  Description of Artificial Sequence: Synthetic oligonucleotide
ccgguucuugagugaguag

SEQ ID NO: 853090 - RNA, 19 nt, Artificial Sequence
  Description of Artificial Sequence: Synthetic oligonucleotide
cagcacucgcuccacgugu

SEQ ID NO: 853091 - RNA, 19 nt, Artificial Sequence
  Description of Artificial Sequence: Synthetic oligonucleotide
ccgccucaccagcugaggc

SEQ ID NO: 853092 - RNA, 19 nt, Artificial Sequence
  Description of Artificial Sequence: Synthetic oligonucleotide
guggccgaccggcccucag

SEQ ID NO: 853093 - RNA, 19 nt, Artificial Sequence
  Description of Artificial Sequence: Synthetic oligonucleotide
ccucggcgcaaacacggug

SEQ ID NO: 853094 - RNA, 19 nt, Artificial Sequence
  Description of Artificial Sequence: Synthetic oligonucleotide
gucggaggccuugaaggua

SEQ ID NO: 853095 - RNA, 19 nt, Artificial Sequence
  Description of Artificial Sequence: Synthetic oligonucleotide
gcaggugauucuucugacu

SEQ ID NO: 853096 - RNA, 19 nt, Artificial Sequence
  Description of Artificial Sequence: Synthetic oligonucleotide
agagaccgcuugaggcucu

SEQ ID NO: 853097 - RNA, 19 nt, Artificial Sequence
  Description of Artificial Sequence: Synthetic oligonucleotide
cacucaggucuuguuaagu

SEQ ID NO: 853098 - RNA, 19 nt, Artificial Sequence
  Description of Artificial Sequence: Synthetic oligonucleotide
ccacuccggagcugcaaug

SEQ ID NO: 853099 - RNA, 19 nt, Artificial Sequence
  Description of Artificial Sequence: Synthetic oligonucleotide
guaggcggggcagcccuca

SEQ ID NO: 853100 - RNA, 19 nt, Artificial Sequence
  Description of Artificial Sequence: Synthetic oligonucleotide
ccacgugccucaccagcgc

SEQ ID NO: 853101 - RNA, 19 nt, Artificial Sequence
  Description of Artificial Sequence: Synthetic oligonucleotide
cugugcggcccacuccgga

SEQ ID NO: 853102 - RNA, 19 nt, Artificial Sequence
  Description of Artificial Sequence: Synthetic oligonucleotide
uggaccggccucgggcauc

SEQ ID NO: 853103 - RNA, 19 nt, Artificial Sequence
  Description of Artificial Sequence: Synthetic oligonucleotide
gcaucuaccuugguaggcu

SEQ ID NO: 853104 - RNA, 19 nt, Artificial Sequence
  Description of Artificial Sequence: Synthetic oligonucleotide
caccgcugcguacagcagu

SEQ ID NO: 853105 - RNA, 19 nt, Artificial Sequence
  Description of Artificial Sequence: Synthetic oligonucleotide
gcugcguacagcagugcaa

SEQ ID NO: 853106 - RNA, 19 nt, Artificial Sequence
  Description of Artificial Sequence: Synthetic oligonucleotide
cagucgccccugccucucc

SEQ ID NO: 853107 - RNA, 19 nt, Artificial Sequence
  Description of Artificial Sequence: Synthetic oligonucleotide
gcuccacgugccucaccag

SEQ ID NO: 853108 - RNA, 19 nt, Artificial Sequence
  Description of Artificial Sequence: Synthetic oligonucleotide
gggcucuacaaggccagga

SEQ ID NO: 853109 - RNA, 19 nt, Artificial Sequence
  Description of Artificial Sequence: Synthetic oligonucleotide
gccgcuggugcagguaaug

SEQ ID NO: 853110 - RNA, 19 nt, Artificial Sequence
  Description of Artificial Sequence: Synthetic oligonucleotide
cggagcugcaauguacgac

SEQ ID NO: 853111 - RNA, 19 nt, Artificial Sequence
  Description of Artificial Sequence: Synthetic oligonucleotide
cacuccggagcugcaaugu

SEQ ID NO: 853112 - RNA, 19 nt, Artificial Sequence
  Description of Artificial Sequence: Synthetic oligonucleotide
cgcuccacguguguuucgg

SEQ ID NO: 853113 - RNA, 19 nt, Artificial Sequence
  Description of Artificial Sequence: Synthetic oligonucleotide
ggggcucuacaaggccagg

SEQ ID NO: 853114 - RNA, 19 nt, Artificial Sequence
  Description of Artificial Sequence: Synthetic oligonucleotide
ccacuaaggguggacagua

SEQ ID NO: 853115 - RNA, 19 nt, Artificial Sequence
  Description of Artificial Sequence: Synthetic oligonucleotide
cccgguaggcaaagcccac

SEQ ID NO: 853116 - RNA, 19 nt, Artificial Sequence
  Description of Artificial Sequence: Synthetic oligonucleotide
ccggccucgggcaucaugu

SEQ ID NO: 853117 - RNA, 19 nt, Artificial Sequence
  Description of Artificial Sequence: Synthetic oligonucleotide
gcgccucggcgcaaacacg

SEQ ID NO: 853118 - RNA, 19 nt, Artificial Sequence
  Description of Artificial Sequence: Synthetic oligonucleotide
ggaaucccauucccagccu

SEQ ID NO: 853119 - RNA, 19 nt, Artificial Sequence
  Description of Artificial Sequence: Synthetic oligonucleotide
cgaacacugcuuagugcca

SEQ ID NO: 853120 - RNA, 19 nt, Artificial Sequence
  Description of Artificial Sequence: Synthetic oligonucleotide
ugguggccgaccggcccuc

SEQ ID NO: 853121 - RNA, 19 nt, Artificial Sequence
  Description of Artificial Sequence: Synthetic oligonucleotide
ggaccuccaugcuggcucu

SEQ ID NO: 853122 - RNA, 19 nt, Artificial Sequence
  Description of Artificial Sequence: Synthetic oligonucleotide
gugcgugcaccuccuggau

SEQ ID NO: 853123 - RNA, 19 nt, Artificial Sequence
  Description of Artificial Sequence: Synthetic oligonucleotide
ggccgaccggcccucagcu

SEQ ID NO: 853124 - RNA, 19 nt, Artificial Sequence
  Description of Artificial Sequence: Synthetic oligonucleotide
cagcgccucggcgcaaaca

SEQ ID NO: 853125 - RNA, 19 nt, Artificial Sequence
  Description of Artificial Sequence: Synthetic oligonucleotide
cagcggggaugggagaugu

SEQ ID NO: 853126 - RNA, 19 nt, Artificial Sequence
  Description of Artificial Sequence: Synthetic oligonucleotide
ccggagcugcaauguacga

SEQ ID NO: 853127 - RNA, 19 nt, Artificial Sequence
  Description of Artificial Sequence: Synthetic oligonucleotide
cgcugcguacagcagugca

SEQ ID NO: 853128 - RNA, 19 nt, Artificial Sequence
  Description of Artificial Sequence: Synthetic oligonucleotide
ggaccggccucgggcauca

SEQ ID NO: 853129 - RNA, 19 nt, Artificial Sequence
  Description of Artificial Sequence: Synthetic oligonucleotide
gccgaccggcccucagcug

SEQ ID NO: 853130 - RNA, 19 nt, Artificial Sequence
  Description of Artificial Sequence: Synthetic oligonucleotide
caguacggcgagagccccu

SEQ ID NO: 853131 - RNA, 19 nt, Artificial Sequence
  Description of Artificial Sequence: Synthetic oligonucleotide
ggacuaggggugggcugac

SEQ ID NO: 853132 - RNA, 19 nt, Artificial Sequence
  Description of Artificial Sequence: Synthetic oligonucleotide
ccggcccucagcugcaucu

SEQ ID NO: 853133 - RNA, 19 nt, Artificial Sequence
  Description of Artificial Sequence: Synthetic oligonucleotide
ccacguguguuucgguggu

SEQ ID NO: 853134 - RNA, 19 nt, Artificial Sequence
  Description of Artificial Sequence: Synthetic oligonucleotide
gcuccacguguguuucggu

SEQ ID NO: 853135 - RNA, 19 nt, Artificial Sequence
  Description of Artificial Sequence: Synthetic oligonucleotide
agcggggaugggagaugua

SEQ ID NO: 853136 - RNA, 19 nt, Artificial Sequence
  Description of Artificial Sequence: Synthetic oligonucleotide
gcagcuccggaaucccauu

SEQ ID NO: 853137 - RNA, 19 nt, Artificial Sequence
  Description of Artificial Sequence: Synthetic oligonucleotide
cacucgcuccacguguguu

SEQ ID NO: 853138 - RNA, 19 nt, Artificial Sequence
  Description of Artificial Sequence: Synthetic oligonucleotide
ccgcugcguacagcagugc

SEQ ID NO: 853139 - RNA, 19 nt, Artificial Sequence
  Description of Artificial Sequence: Synthetic oligonucleotide
gcacucgcuccacgugugu

SEQ ID NO: 853140 - RNA, 19 nt, Artificial Sequence
  Description of Artificial Sequence: Synthetic oligonucleotide
caccuaggggccggaugcu

SEQ ID NO: 853141 - RNA, 19 nt, Artificial Sequence
  Description of Artificial Sequence: Synthetic oligonucleotide
gcaacaccacacgguugcu

SEQ ID NO: 853142 - RNA, 19 nt, Artificial Sequence
  Description of Artificial Sequence: Synthetic oligonucleotide
cccacuccggagcugcaau

SEQ ID NO: 853143 - RNA, 19 nt, Artificial Sequence
  Description of Artificial Sequence: Synthetic oligonucleotide
gcccacuccggagcugcaa

SEQ ID NO: 853144 - RNA, 19 nt, Artificial Sequence
  Description of Artificial Sequence: Synthetic oligonucleotide
cgguauccagucgccccug

SEQ ID NO: 853145 - RNA, 19 nt, Artificial Sequence
  Description of Artificial Sequence: Synthetic oligonucleotide
gcuggcucucagggcuaga

SEQ ID NO: 853146 - RNA, 19 nt, Artificial Sequence
  Description of Artificial Sequence: Synthetic oligonucleotide
cggcgagagccccuccaca

SEQ ID NO: 853147 - RNA, 19 nt, Artificial Sequence
  Description of Artificial Sequence: Synthetic oligonucleotide
gcgcgccaccuuuugcuuu

SEQ ID NO: 853148 - RNA, 19 nt, Artificial Sequence
  Description of Artificial Sequence: Synthetic oligonucleotide
ggacguucauaggggucuu

SEQ ID NO: 853149 - RNA, 19 nt, Artificial Sequence
  Description of Artificial Sequence: Synthetic oligonucleotide
ccgcuggugcagguaaugu

SEQ ID NO: 853150 - RNA, 19 nt, Artificial Sequence
  Description of Artificial Sequence: Synthetic oligonucleotide
gguggccgaccggcccuca

SEQ ID NO: 853151 - RNA, 19 nt, Artificial Sequence
  Description of Artificial Sequence: Synthetic oligonucleotide
ccgguaggcaaagcccacu

SEQ ID NO: 853152 - RNA, 19 nt, Artificial Sequence
  Description of Artificial Sequence: Synthetic oligonucleotide
gcuguccggcaggcccaac

SEQ ID NO: 853153 - RNA, 19 nt, Artificial Sequence
  Description of Artificial Sequence: Synthetic oligonucleotide
ggggccggaugcugagcuu

SEQ ID NO: 853154 - RNA, 19 nt, Artificial Sequence
  Description of Artificial Sequence: Synthetic oligonucleotide
gccucggcgcaaacacggu

SEQ ID NO: 853155 - RNA, 19 nt, Artificial Sequence
  Description of Artificial Sequence: Synthetic oligonucleotide
cgcgccaccuuuugcuuuu

SEQ ID NO: 853156 - RNA, 19 nt, Artificial Sequence
  Description of Artificial Sequence: Synthetic oligonucleotide
cggaggccuugaagguacu

SEQ ID NO: 853157 - RNA, 19 nt, Artificial Sequence
  Description of Artificial Sequence: Synthetic oligonucleotide
acuacuugaauuuucaucc

SEQ ID NO: 853158 - RNA, 19 nt, Artificial Sequence
  Description of Artificial Sequence: Synthetic oligonucleotide
ucuaaugucaucaauauga

SEQ ID NO: 853159 - RNA, 19 nt, Artificial Sequence
  Description of Artificial Sequence: Synthetic oligonucleotide
ugaauguagaagcugaagg

SEQ ID NO: 853160 - RNA, 19 nt, Artificial Sequence
  Description of Artificial Sequence: Synthetic oligonucleotide
uuugauaauauacuauuag

SEQ ID NO: 853161 - RNA, 19 nt, Artificial Sequence
  Description of Artificial Sequence: Synthetic oligonucleotide
aacaagauaacugauaucu

SEQ ID NO: 853162 - RNA, 19 nt, Artificial Sequence
  Description of Artificial Sequence: Synthetic oligonucleotide
gauaauauacuauuagcag

SEQ ID NO: 853163 - RNA, 19 nt, Artificial Sequence
  Description of Artificial Sequence: Synthetic oligonucleotide
auaauauacuauuagcagg

SEQ ID NO: 853164 - RNA, 19 nt, Artificial Sequence
  Description of Artificial Sequence: Synthetic oligonucleotide
ugauaauauacuauuagca

SEQ ID NO: 853165 - RNA, 19 nt, Artificial Sequence
  Description of Artificial Sequence: Synthetic oligonucleotide
uauaauuuguaacagcuac

SEQ ID NO: 853166 - RNA, 19 nt, Artificial Sequence
  Description of Artificial Sequence: Synthetic oligonucleotide
uguauaauuuguaacagcu

SEQ ID NO: 853167 - RNA, 19 nt, Artificial Sequence
  Description of Artificial Sequence: Synthetic oligonucleotide
aauaaaaucaugauccuug

SEQ ID NO: 853168 - RNA, 19 nt, Artificial Sequence
  Description of Artificial Sequence: Synthetic oligonucleotide
aagaguaggacauggguuc

SEQ ID NO: 853169 - RNA, 19 nt, Artificial Sequence
  Description of Artificial Sequence: Synthetic oligonucleotide
uuuaaugucaccagaucag

SEQ ID NO: 853170 - RNA, 19 nt, Artificial Sequence
  Description of Artificial Sequence: Synthetic oligonucleotide
auaaacaucaucuuaguau

SEQ ID NO: 853171 - RNA, 19 nt, Artificial Sequence
  Description of Artificial Sequence: Synthetic oligonucleotide
uaacuuagauacaauauca

SEQ ID NO: 853172 - RNA, 19 nt, Artificial Sequence
  Description of Artificial Sequence: Synthetic oligonucleotide
uugauaauauacuauuagc

SEQ ID NO: 853173 - RNA, 19 nt, Artificial Sequence
  Description of Artificial Sequence: Synthetic oligonucleotide
uuagcugaagguagaaugg

SEQ ID NO: 853174 - RNA, 19 nt, Artificial Sequence
  Description of Artificial Sequence: Synthetic oligonucleotide
auuuacauaugguucuagc

SEQ ID NO: 853175 - RNA, 19 nt, Artificial Sequence
  Description of Artificial Sequence: Synthetic oligonucleotide
agcaacauucacaauaucc

SEQ ID NO: 853176 - RNA, 19 nt, Artificial Sequence
  Description of Artificial Sequence: Synthetic oligonucleotide
auuaggucuggguuuaggc

SEQ ID NO: 853177 - RNA, 19 nt, Artificial Sequence
  Description of Artificial Sequence: Synthetic oligonucleotide
uucucuaugucaaaugggc

SEQ ID NO: 853178 - RNA, 19 nt, Artificial Sequence
  Description of Artificial Sequence: Synthetic oligonucleotide
uuuauagaaggcacacugg

SEQ ID NO: 853179 - RNA, 19 nt, Artificial Sequence
  Description of Artificial Sequence: Synthetic oligonucleotide
guuuauagaaggcacacug

SEQ ID NO: 853180 - RNA, 19 nt, Artificial Sequence
  Description of Artificial Sequence: Synthetic oligonucleotide
ucuugagugaacauaacuc

SEQ ID NO: 853181 - RNA, 19 nt, Artificial Sequence
  Description of Artificial Sequence: Synthetic oligonucleotide
ugucaaaugggcugcaagg

SEQ ID NO: 853182 - RNA, 19 nt, Artificial Sequence
  Description of Artificial Sequence: Synthetic oligonucleotide
aaguacuugauuucuugag

SEQ ID NO: 853183 - RNA, 19 nt, Artificial Sequence
  Description of Artificial Sequence: Synthetic oligonucleotide
acuuagauacaauaucauc

SEQ ID NO: 853184 - RNA, 19 nt, Artificial Sequence
  Description of Artificial Sequence: Synthetic oligonucleotide
uuuacauaugguucuagca

SEQ ID NO: 853185 - RNA, 19 nt, Artificial Sequence
  Description of Artificial Sequence: Synthetic oligonucleotide
guuagcugaagguagaaug

SEQ ID NO: 853186 - RNA, 19 nt, Artificial Sequence
  Description of Artificial Sequence: Synthetic oligonucleotide
auaggaagaaacucaguuc

SEQ ID NO: 853187 - RNA, 19 nt, Artificial Sequence
  Description of Artificial Sequence: Synthetic oligonucleotide
uuaauuuugguugggguag

SEQ ID NO: 853188 - RNA, 19 nt, Artificial Sequence
  Description of Artificial Sequence: Synthetic oligonucleotide
uuuaugucagguucacugg

SEQ ID NO: 853189 - RNA, 19 nt, Artificial Sequence
  Description of Artificial Sequence: Synthetic oligonucleotide
auacugguuacucugugcg

SEQ ID NO: 853190 - RNA, 19 nt, Artificial Sequence
  Description of Artificial Sequence: Synthetic oligonucleotide
ugucuggagacuuaaagga

SEQ ID NO: 853191 - RNA, 19 nt, Artificial Sequence
  Description of Artificial Sequence: Synthetic oligonucleotide
aauaacuucccucggcuca

SEQ ID NO: 853192 - RNA, 19 nt, Artificial Sequence
  Description of Artificial Sequence: Synthetic oligonucleotide
ucaaacauacucugucugg

SEQ ID NO: 853193 - RNA, 19 nt, Artificial Sequence
  Description of Artificial Sequence: Synthetic oligonucleotide
uucaauuggaguugaacug

SEQ ID NO: 853194 - RNA, 19 nt, Artificial Sequence
  Description of Artificial Sequence: Synthetic oligonucleotide
aauguguaguaucugcugu

SEQ ID NO: 853195 - RNA, 19 nt, Artificial Sequence
  Description of Artificial Sequence: Synthetic oligonucleotide
uaguauuuacauaugguuc

SEQ ID NO: 853196 - RNA, 19 nt, Artificial Sequence
  Description of Artificial Sequence: Synthetic oligonucleotide
aaugggcuccaacuguagc

SEQ ID NO: 853197 - RNA, 19 nt, Artificial Sequence
  Description of Artificial Sequence: Synthetic oligonucleotide
accacauuuaucaccaucc

SEQ ID NO: 853198 - RNA, 19 nt, Artificial Sequence
  Description of Artificial Sequence: Synthetic oligonucleotide
cauaguuuauagaaggcac

SEQ ID NO: 853199 - RNA, 19 nt, Artificial Sequence
  Description of Artificial Sequence: Synthetic oligonucleotide
aaauguugagagcagacua

SEQ ID NO: 853200 - RNA, 19 nt, Artificial Sequence
  Description of Artificial Sequence: Synthetic oligonucleotide
uauaugcagacucuggacu

SEQ ID NO: 853201 - RNA, 19 nt, Artificial Sequence
  Description of Artificial Sequence: Synthetic oligonucleotide
uaacugauaucuuugcuga

SEQ ID NO: 853202 - RNA, 19 nt, Artificial Sequence
  Description of Artificial Sequence: Synthetic oligonucleotide
aauaacagucucacuuucc

SEQ ID NO: 853203 - RNA, 19 nt, Artificial Sequence
  Description of Artificial Sequence: Synthetic oligonucleotide
uuuucauccucccaaacau

SEQ ID NO: 853204 - RNA, 19 nt, Artificial Sequence
  Description of Artificial Sequence: Synthetic oligonucleotide
ucaauuggaguugaacugg

SEQ ID NO: 853205 - RNA, 19 nt, Artificial Sequence
  Description of Artificial Sequence: Synthetic oligonucleotide
cuaacuuagauacaauauc

SEQ ID NO: 853206 - RNA, 19 nt, Artificial Sequence
  Description of Artificial Sequence: Synthetic oligonucleotide
gauguauuuaaugucacca

SEQ ID NO: 853207 - RNA, 19 nt, Artificial Sequence
  Description of Artificial Sequence: Synthetic oligonucleotide
cuguuuucaguguagcugg

SEQ ID NO: 853208 - RNA, 19 nt, Artificial Sequence
  Description of Artificial Sequence: Synthetic oligonucleotide
acauacucugucuggagac

SEQ ID NO: 853209 - RNA, 19 nt, Artificial Sequence
  Description of Artificial Sequence: Synthetic oligonucleotide
aucacguccuuucaauccc

SEQ ID NO: 853210 - RNA, 19 nt, Artificial Sequence
  Description of Artificial Sequence: Synthetic oligonucleotide
cuugauacugguuacucug

SEQ ID NO: 853211 - RNA, 19 nt, Artificial Sequence
  Description of Artificial Sequence: Synthetic oligonucleotide
uucugaagccaacacaagc

SEQ ID NO: 853212 - RNA, 19 nt, Artificial Sequence
  Description of Artificial Sequence: Synthetic oligonucleotide
aacuaacuuagauacaaua

SEQ ID NO: 853213 - RNA, 19 nt, Artificial Sequence
  Description of Artificial Sequence: Synthetic oligonucleotide
aauguugagagcagacuac

SEQ ID NO: 853214 - RNA, 19 nt, Artificial Sequence
  Description of Artificial Sequence: Synthetic oligonucleotide
ucugauuucuccccgcuug

SEQ ID NO: 853215 - RNA, 19 nt, Artificial Sequence
  Description of Artificial Sequence: Synthetic oligonucleotide
uccuaagaauuauauaugu

SEQ ID NO: 853216 - RNA, 19 nt, Artificial Sequence
  Description of Artificial Sequence: Synthetic oligonucleotide
augucaccagaucagaauc

SEQ ID NO: 853217 - RNA, 19 nt, Artificial Sequence
  Description of Artificial Sequence: Synthetic oligonucleotide
gagaugagaaacuuguaca

SEQ ID NO: 853218 - RNA, 19 nt, Artificial Sequence
  Description of Artificial Sequence: Synthetic oligonucleotide
uuuacuccccauguuaagg

SEQ ID NO: 853219 - RNA, 19 nt, Artificial Sequence
  Description of Artificial Sequence: Synthetic oligonucleotide
aucuaaaacaucacauagc

SEQ ID NO: 853220 - RNA, 19 nt, Artificial Sequence
  Description of Artificial Sequence: Synthetic oligonucleotide
uucuugagugaacauaacu

SEQ ID NO: 853221 - RNA, 19 nt, Artificial Sequence
  Description of Artificial Sequence: Synthetic oligonucleotide
aguguuugugcauacuuug

SEQ ID NO: 853222 - RNA, 19 nt, Artificial Sequence
  Description of Artificial Sequence: Synthetic oligonucleotide
uguguuucucacucaaaag

SEQ ID NO: 853223 - RNA, 19 nt, Artificial Sequence
  Description of Artificial Sequence: Synthetic oligonucleotide
cagcuaauaacuucccucg

SEQ ID NO: 853224 - RNA, 19 nt, Artificial Sequence
  Description of Artificial Sequence: Synthetic oligonucleotide
ucagcuaauaacuucccuc

SEQ ID NO: 853225 - RNA, 19 nt, Artificial Sequence
  Description of Artificial Sequence: Synthetic oligonucleotide
aaucccguugaagaguagg

SEQ ID NO: 853226 - RNA, 19 nt, Artificial Sequence
  Description of Artificial Sequence: Synthetic oligonucleotide
uccauuacuuucuaccaug

SEQ ID NO: 853227 - RNA, 19 nt, Artificial Sequence
  Description of Artificial Sequence: Synthetic oligonucleotide
cagaucagaaucaugacca

SEQ ID NO: 853228 - RNA, 19 nt, Artificial Sequence
  Description of Artificial Sequence: Synthetic oligonucleotide
aacauacucugucuggaga

SEQ ID NO: 853229 - RNA, 19 nt, Artificial Sequence
  Description of Artificial Sequence: Synthetic oligonucleotide
uuucaaucccguugaagag

SEQ ID NO: 853230 - RNA, 19 nt, Artificial Sequence
  Description of Artificial Sequence: Synthetic oligonucleotide
uuguguuucucacucaaaa

SEQ ID NO: 853231 - RNA, 19 nt, Artificial Sequence
  Description of Artificial Sequence: Synthetic oligonucleotide
aaacauacucugucuggag

SEQ ID NO: 853232 - RNA, 19 nt, Artificial Sequence
  Description of Artificial Sequence: Synthetic oligonucleotide
uuucccgaaucccucacag

SEQ ID NO: 853233 - RNA, 19 nt, Artificial Sequence
  Description of Artificial Sequence: Synthetic oligonucleotide
uguuugugcauacuuugcu

SEQ ID NO: 853234 - RNA, 19 nt, Artificial Sequence
  Description of Artificial Sequence: Synthetic oligonucleotide
aacacaagccuuuguucag

SEQ ID NO: 853235 - RNA, 19 nt, Artificial Sequence
  Description of Artificial Sequence: Synthetic oligonucleotide
acuauuagcaggaauaaaa

SEQ ID NO: 853236 - RNA, 19 nt, Artificial Sequence
  Description of Artificial Sequence: Synthetic oligonucleotide
ugaacauaacucuuucuuc

SEQ ID NO: 853237 - RNA, 19 nt, Artificial Sequence
  Description of Artificial Sequence: Synthetic oligonucleotide
uggaucuuaccacaaggca

SEQ ID NO: 853238 - RNA, 19 nt, Artificial Sequence
  Description of Artificial Sequence: Synthetic oligonucleotide
ugcguagcauaguuuauag

SEQ ID NO: 853239 - RNA, 19 nt, Artificial Sequence
  Description of Artificial Sequence: Synthetic oligonucleotide
cuucucuaugucaaauggg

SEQ ID NO: 853240 - RNA, 19 nt, Artificial Sequence
  Description of Artificial Sequence: Synthetic oligonucleotide
cauuuaacaugcuggcugc

SEQ ID NO: 853241 - RNA, 19 nt, Artificial Sequence
  Description of Artificial Sequence: Synthetic oligonucleotide
aagaccgguucacaucuuc

SEQ ID NO: 853242 - RNA, 19 nt, Artificial Sequence
  Description of Artificial Sequence: Synthetic oligonucleotide
aauaaaucacaagauuuua

SEQ ID NO: 853243 - RNA, 19 nt, Artificial Sequence
  Description of Artificial Sequence: Synthetic oligonucleotide
uccaguagagacuguacug

SEQ ID NO: 853244 - RNA, 19 nt, Artificial Sequence
  Description of Artificial Sequence: Synthetic oligonucleotide
uuuguaacagcuacucaau

SEQ ID NO: 853245 - RNA, 19 nt, Artificial Sequence
  Description of Artificial Sequence: Synthetic oligonucleotide
gaaauucuucaacucgccc

SEQ ID NO: 853246 - RNA, 19 nt, Artificial Sequence
  Description of Artificial Sequence: Synthetic oligonucleotide
aacgcuguauuuuauucuu

SEQ ID NO: 853247 - RNA, 19 nt, Artificial Sequence
  Description of Artificial Sequence: Synthetic oligonucleotide
acugagaugagaaacuugu

SEQ ID NO: 853248 - RNA, 19 nt, Artificial Sequence
  Description of Artificial Sequence: Synthetic oligonucleotide
uucucacucaaaaggugag

SEQ ID NO: 853249 - RNA, 19 nt, Artificial Sequence
  Description of Artificial Sequence: Synthetic oligonucleotide
aaaugaagguccuuuucuu

SEQ ID NO: 853250 - RNA, 19 nt, Artificial Sequence
  Description of Artificial Sequence: Synthetic oligonucleotide
aucuucguauuucuguaag

SEQ ID NO: 853251 - RNA, 19 nt, Artificial Sequence
  Description of Artificial Sequence: Synthetic oligonucleotide
aguguagcugguaaacccc

SEQ ID NO: 853252 - RNA, 19 nt, Artificial Sequence
  Description of Artificial Sequence: Synthetic oligonucleotide
caucacguccuuucaaucc

SEQ ID NO: 853253 - RNA, 19 nt, Artificial Sequence
  Description of Artificial Sequence: Synthetic oligonucleotide
agaaauucuucaacucgcc

SEQ ID NO: 853254 - RNA, 19 nt, Artificial Sequence
  Description of Artificial Sequence: Synthetic oligonucleotide
guaguaucuaaugucauca

SEQ ID NO: 853255 - RNA, 19 nt, Artificial Sequence
  Description of Artificial Sequence: Synthetic oligonucleotide
uuuccgcuggaucuuacca

SEQ ID NO: 853256 - RNA, 19 nt, Artificial Sequence
  Description of Artificial Sequence: Synthetic oligonucleotide
uuacuccccauguuaaggc

SEQ ID NO: 853257 - RNA, 19 nt, Artificial Sequence
  Description of Artificial Sequence: Synthetic oligonucleotide
cuggaucuuaccacaaggc

SEQ ID NO: 853258 - RNA, 19 nt, Artificial Sequence
  Description of Artificial Sequence: Synthetic oligonucleotide
uguaguaucuaaugucauc

SEQ ID NO: 853259 - RNA, 19 nt, Artificial Sequence
  Description of Artificial Sequence: Synthetic oligonucleotide
ucccgaaucccucacagaa

SEQ ID NO: 853260 - RNA, 19 nt, Artificial Sequence
  Description of Artificial Sequence: Synthetic oligonucleotide
cuccuaagaauuauauaug

SEQ ID NO: 853261 - RNA, 19 nt, Artificial Sequence
  Description of Artificial Sequence: Synthetic oligonucleotide
aggaacuuccaucauggcu

SEQ ID NO: 853262 - RNA, 19 nt, Artificial Sequence
  Description of Artificial Sequence: Synthetic oligonucleotide
agcauaguuuauagaaggc

SEQ ID NO: 853263 - RNA, 19 nt, Artificial Sequence
  Description of Artificial Sequence: Synthetic oligonucleotide
uaauaacagucucacuuuc

SEQ ID NO: 853264 - RNA, 19 nt, Artificial Sequence
  Description of Artificial Sequence: Synthetic oligonucleotide
agagcagacuacuugaauu

SEQ ID NO: 853265 - RNA, 19 nt, Artificial Sequence
  Description of Artificial Sequence: Synthetic oligonucleotide
gagacuguacuggugaccc

SEQ ID NO: 853266 - RNA, 19 nt, Artificial Sequence
  Description of Artificial Sequence: Synthetic oligonucleotide
uauucuccgugucacacuc

SEQ ID NO: 853267 - RNA, 19 nt, Artificial Sequence
  Description of Artificial Sequence: Synthetic oligonucleotide
uggcauuuaacaugcuggc

SEQ ID NO: 853268 - RNA, 19 nt, Artificial Sequence
  Description of Artificial Sequence: Synthetic oligonucleotide
agguagaauggccuguaag

SEQ ID NO: 853269 - RNA, 19 nt, Artificial Sequence
  Description of Artificial Sequence: Synthetic oligonucleotide
ugagaaacuuguacacaug

SEQ ID NO: 853270 - RNA, 19 nt, Artificial Sequence
  Description of Artificial Sequence: Synthetic oligonucleotide
ucuucguauuucuguaagc

SEQ ID NO: 853271 - RNA, 19 nt, Artificial Sequence
  Description of Artificial Sequence: Synthetic oligonucleotide
ucuguauucuccgugucac

SEQ ID NO: 853272 - RNA, 19 nt, Artificial Sequence
  Description of Artificial Sequence: Synthetic oligonucleotide
guagagacuguacugguga

SEQ ID NO: 853273 - RNA, 19 nt, Artificial Sequence
  Description of Artificial Sequence: Synthetic oligonucleotide
auuucuccccgcuuguuug

SEQ ID NO: 853274 - RNA, 19 nt, Artificial Sequence
  Description of Artificial Sequence: Synthetic oligonucleotide
ucuagcaacaaagcuggca

SEQ ID NO: 853275 - RNA, 19 nt, Artificial Sequence
  Description of Artificial Sequence: Synthetic oligonucleotide
cacacugguuagcugaagg

SEQ ID NO: 853276 - RNA, 19 nt, Artificial Sequence
  Description of Artificial Sequence: Synthetic oligonucleotide
ugggcugcaaggcuugugc

SEQ ID NO: 853277 - RNA, 19 nt, Artificial Sequence
  Description of Artificial Sequence: Synthetic oligonucleotide
uccguauuaggucuggguu

SEQ ID NO: 853278 - RNA, 19 nt, Artificial Sequence
  Description of Artificial Sequence: Synthetic oligonucleotide
uuuuaggugugucucucuc

SEQ ID NO: 853279 - RNA, 19 nt, Artificial Sequence
  Description of Artificial Sequence: Synthetic oligonucleotide
ucucuaugucaaaugggcu

SEQ ID NO: 853280 - RNA, 19 nt, Artificial Sequence
  Description of Artificial Sequence: Synthetic oligonucleotide
acuaacuuagauacaauau

SEQ ID NO: 853281 - RNA, 19 nt, Artificial Sequence
  Description of Artificial Sequence: Synthetic oligonucleotide
aacugauaucuuugcugag

SEQ ID NO: 853282 - RNA, 19 nt, Artificial Sequence
  Description of Artificial Sequence: Synthetic oligonucleotide
uuaggugugucucucucau

SEQ ID NO: 853283 - RNA, 19 nt, Artificial Sequence
  Description of Artificial Sequence: Synthetic oligonucleotide
ucggcucaaacauacucug

SEQ ID NO: 853284 - RNA, 19 nt, Artificial Sequence
  Description of Artificial Sequence: Synthetic oligonucleotide
agcuacucaauucuguaaa

SEQ ID NO: 853285 - RNA, 19 nt, Artificial Sequence
  Description of Artificial Sequence: Synthetic oligonucleotide
aguaucuaaugucaucaau

SEQ ID NO: 853286 - RNA, 19 nt, Artificial Sequence
  Description of Artificial Sequence: Synthetic oligonucleotide
aucaacaacuugauacugg

SEQ ID NO: 853287 - RNA, 19 nt, Artificial Sequence
  Description of Artificial Sequence: Synthetic oligonucleotide
ugauacugguuacucugug

SEQ ID NO: 853288 - RNA, 19 nt, Artificial Sequence
  Description of Artificial Sequence: Synthetic oligonucleotide
agaaaaggagccaacgcug

SEQ ID NO: 853289 - RNA, 19 nt, Artificial Sequence
  Description of Artificial Sequence: Synthetic oligonucleotide
uagauacaauaucaucaac

SEQ ID NO: 853290 - RNA, 19 nt, Artificial Sequence
  Description of Artificial Sequence: Synthetic oligonucleotide
caucuuaguauuuacauau

SEQ ID NO: 853291 - RNA, 19 nt, Artificial Sequence
  Description of Artificial Sequence: Synthetic oligonucleotide
agaaacuuguacacaugac

SEQ ID NO: 853292 - RNA, 19 nt, Artificial Sequence
  Description of Artificial Sequence: Synthetic oligonucleotide
uguauucuccgugucacac

SEQ ID NO: 853293 - RNA, 19 nt, Artificial Sequence
  Description of Artificial Sequence: Synthetic oligonucleotide
guuaauuuugguuggggua

SEQ ID NO: 853294 - RNA, 19 nt, Artificial Sequence
  Description of Artificial Sequence: Synthetic oligonucleotide
uuuaggugugucucucuca

SEQ ID NO: 853295 - RNA, 19 nt, Artificial Sequence
  Description of Artificial Sequence: Synthetic oligonucleotide
ucugcccuaauaacagucu

SEQ ID NO: 853296 - RNA, 19 nt, Artificial Sequence
  Description of Artificial Sequence: Synthetic oligonucleotide
gaaucccucacagaaguac

SEQ ID NO: 853297 - RNA, 19 nt, Artificial Sequence
  Description of Artificial Sequence: Synthetic oligonucleotide
accgguucacaucuucaac

SEQ ID NO: 853298 - RNA, 19 nt, Artificial Sequence
  Description of Artificial Sequence: Synthetic oligonucleotide
guauaugcagacucuggac

SEQ ID NO: 853299 - RNA, 19 nt, Artificial Sequence
  Description of Artificial Sequence: Synthetic oligonucleotide
acugguuagcugaagguag

SEQ ID NO: 853300 - RNA, 19 nt, Artificial Sequence
  Description of Artificial Sequence: Synthetic oligonucleotide
uauuaggucuggguuuagg

SEQ ID NO: 853301 - RNA, 19 nt, Artificial Sequence
  Description of Artificial Sequence: Synthetic oligonucleotide
uuaccacaaggcaaguuau

SEQ ID NO: 853302 - RNA, 19 nt, Artificial Sequence
  Description of Artificial Sequence: Synthetic oligonucleotide
gguagaauggccuguaaga

SEQ ID NO: 853303 - RNA, 19 nt, Artificial Sequence
  Description of Artificial Sequence: Synthetic oligonucleotide
ucacauagcccacuguuuu

SEQ ID NO: 853304 - RNA, 19 nt, Artificial Sequence
  Description of Artificial Sequence: Synthetic oligonucleotide
ucgccuuuuguauuguagu

SEQ ID NO: 853305 - RNA, 19 nt, Artificial Sequence
  Description of Artificial Sequence: Synthetic oligonucleotide
uucaguguagcugguaaac

SEQ ID NO: 853306 - RNA, 19 nt, Artificial Sequence
  Description of Artificial Sequence: Synthetic oligonucleotide
uucagcuaauaacuucccu

SEQ ID NO: 853307 - RNA, 19 nt, Artificial Sequence
  Description of Artificial Sequence: Synthetic oligonucleotide
cacaggauggcguuccggc

SEQ ID NO: 853308 - RNA, 19 nt, Artificial Sequence
  Description of Artificial Sequence: Synthetic oligonucleotide
cucgccuuuuguauuguag

SEQ ID NO: 853309 - RNA, 19 nt, Artificial Sequence
  Description of Artificial Sequence: Synthetic oligonucleotide
agugaacauaacucuuucu

SEQ ID NO: 853310 - RNA, 19 nt, Artificial Sequence
  Description of Artificial Sequence: Synthetic oligonucleotide
aacuucccucggcucaaac

SEQ ID NO: 853311 - RNA, 19 nt, Artificial Sequence
  Description of Artificial Sequence: Synthetic oligonucleotide
cuuuguucagguuucugga

SEQ ID NO: 853312 - RNA, 19 nt, Artificial Sequence
  Description of Artificial Sequence: Synthetic oligonucleotide
agcuaauaacuucccucgg

SEQ ID NO: 853313 - RNA, 19 nt, Artificial Sequence
  Description of Artificial Sequence: Synthetic oligonucleotide
aauuggaguugaacugggg

SEQ ID NO: 853314 - RNA, 19 nt, Artificial Sequence
  Description of Artificial Sequence: Synthetic oligonucleotide
ccuuuuguauuguagugcc

SEQ ID NO: 853315 - RNA, 19 nt, Artificial Sequence
  Description of Artificial Sequence: Synthetic oligonucleotide
caacacaagccuuuguuca

SEQ ID NO: 853316 - RNA, 19 nt, Artificial Sequence
  Description of Artificial Sequence: Synthetic oligonucleotide
uugauacugguuacucugu

SEQ ID NO: 853317 - RNA, 19 nt, Artificial Sequence
  Description of Artificial Sequence: Synthetic oligonucleotide
cugcaguauaugcagacuc

SEQ ID NO: 853318 - RNA, 19 nt, Artificial Sequence
  Description of Artificial Sequence: Synthetic oligonucleotide
ucacguccuuucaaucccg

SEQ ID NO: 853319 - RNA, 19 nt, Artificial Sequence
  Description of Artificial Sequence: Synthetic oligonucleotide
uucagguuucuggauaucu

SEQ ID NO: 853320 - RNA, 19 nt, Artificial Sequence
  Description of Artificial Sequence: Synthetic oligonucleotide
cacucaaaaggugaguuuc

SEQ ID NO: 853321 - RNA, 19 nt, Artificial Sequence
  Description of Artificial Sequence: Synthetic oligonucleotide
ucuggacuugguacaggag

SEQ ID NO: 853322 - RNA, 19 nt, Artificial Sequence
  Description of Artificial Sequence: Synthetic oligonucleotide
auccaauucagcacuuggg

SEQ ID NO: 853323 - RNA, 19 nt, Artificial Sequence
  Description of Artificial Sequence: Synthetic oligonucleotide
gacuauuuucuggacugag

SEQ ID NO: 853324 - RNA, 19 nt, Artificial Sequence
  Description of Artificial Sequence: Synthetic oligonucleotide
cuuaccacaaggcaaguua

SEQ ID NO: 853325 - RNA, 19 nt, Artificial Sequence
  Description of Artificial Sequence: Synthetic oligonucleotide
ucaguguagcugguaaacc

SEQ ID NO: 853326 - RNA, 19 nt, Artificial Sequence
  Description of Artificial Sequence: Synthetic oligonucleotide
agaucuucguauuucugua

SEQ ID NO: 853327 - RNA, 19 nt, Artificial Sequence
  Description of Artificial Sequence: Synthetic oligonucleotide
uccgugucacacucauugg

SEQ ID NO: 853328 - RNA, 19 nt, Artificial Sequence
  Description of Artificial Sequence: Synthetic oligonucleotide
gcuuuuggacgcuggaugg

SEQ ID NO: 853329 - RNA, 19 nt, Artificial Sequence
  Description of Artificial Sequence: Synthetic oligonucleotide
uggccuguaagaccgguuc

SEQ ID NO: 853330 - RNA, 19 nt, Artificial Sequence
  Description of Artificial Sequence: Synthetic oligonucleotide
cuguuaauuuugguugggg

SEQ ID NO: 853331 - RNA, 19 nt, Artificial Sequence
  Description of Artificial Sequence: Synthetic oligonucleotide
cuuuacuccccauguuaag

SEQ ID NO: 853332 - RNA, 19 nt, Artificial Sequence
  Description of Artificial Sequence: Synthetic oligonucleotide
ucccucggcucaaacauac

SEQ ID NO: 853333 - RNA, 19 nt, Artificial Sequence
  Description of Artificial Sequence: Synthetic oligonucleotide
auaaaucacaagauuuuau

SEQ ID NO: 853334 - RNA, 19 nt, Artificial Sequence
  Description of Artificial Sequence: Synthetic oligonucleotide
acacugguuagcugaaggu

SEQ ID NO: 853335 - RNA, 19 nt, Artificial Sequence
  Description of Artificial Sequence: Synthetic oligonucleotide
auaauuuguaacagcuacu

SEQ ID NO: 853336 - RNA, 19 nt, Artificial Sequence
  Description of Artificial Sequence: Synthetic oligonucleotide
uuuguucagguuucuggau

SEQ ID NO: 853337 - RNA, 19 nt, Artificial Sequence
  Description of Artificial Sequence: Synthetic oligonucleotide
acacucauugggcugcuga

SEQ ID NO: 853338 - RNA, 19 nt, Artificial Sequence
  Description of Artificial Sequence: Synthetic oligonucleotide
uaauaacuucccucggcuc

SEQ ID NO: 853339 - RNA, 19 nt, Artificial Sequence
  Description of Artificial Sequence: Synthetic oligonucleotide
guacuggugacccacaagu

SEQ ID NO: 853340 - RNA, 19 nt, Artificial Sequence
  Description of Artificial Sequence: Synthetic oligonucleotide
aguugaacugggguuccac

SEQ ID NO: 853341 - RNA, 19 nt, Artificial Sequence
  Description of Artificial Sequence: Synthetic oligonucleotide
cuggacuugguacaggaga

SEQ ID NO: 853342 - RNA, 19 nt, Artificial Sequence
  Description of Artificial Sequence: Synthetic oligonucleotide
gggguagacuauuuucugg

SEQ ID NO: 853343 - RNA, 19 nt, Artificial Sequence
  Description of Artificial Sequence: Synthetic oligonucleotide
ccagaucagaaucaugacc

SEQ ID NO: 853344 - RNA, 19 nt, Artificial Sequence
  Description of Artificial Sequence: Synthetic oligonucleotide
guucucgccuuuuguauug

SEQ ID NO: 853345 - RNA, 19 nt, Artificial Sequence
  Description of Artificial Sequence: Synthetic oligonucleotide
uucuguuuuaugucagguu

SEQ ID NO: 853346 - RNA, 19 nt, Artificial Sequence
  Description of Artificial Sequence: Synthetic oligonucleotide
guaagaccgguucacaucu

SEQ ID NO: 853347 - RNA, 19 nt, Artificial Sequence
  Description of Artificial Sequence: Synthetic oligonucleotide
ucaucacguccuuucaauc

SEQ ID NO: 853348 - RNA, 19 nt, Artificial Sequence
  Description of Artificial Sequence: Synthetic oligonucleotide
gcuaauaacuucccucggc

SEQ ID NO: 853349 - RNA, 19 nt, Artificial Sequence
  Description of Artificial Sequence: Synthetic oligonucleotide
uuuucccgaaucccucaca

SEQ ID NO: 853350 - RNA, 19 nt, Artificial Sequence
  Description of Artificial Sequence: Synthetic oligonucleotide
cagacuacuugaauuuuca

SEQ ID NO: 853351 - RNA, 19 nt, Artificial Sequence
  Description of Artificial Sequence: Synthetic oligonucleotide
aauucagcacuugggucca

SEQ ID NO: 853352 - RNA, 19 nt, Artificial Sequence
  Description of Artificial Sequence: Synthetic oligonucleotide
aauauacuauuagcaggaa

SEQ ID NO: 853353 - RNA, 19 nt, Artificial Sequence
  Description of Artificial Sequence: Synthetic oligonucleotide
auaugcagacucuggacuu

SEQ ID NO: 853354 - RNA, 19 nt, Artificial Sequence
  Description of Artificial Sequence: Synthetic oligonucleotide
acuucccucggcucaaaca

SEQ ID NO: 853355 - RNA, 19 nt, Artificial Sequence
  Description of Artificial Sequence: Synthetic oligonucleotide
ucucaucacguccuuucaa

SEQ ID NO: 853356 - RNA, 19 nt, Artificial Sequence
  Description of Artificial Sequence: Synthetic oligonucleotide
auacuauuagcaggaauaa

SEQ ID NO: 853357 - RNA, 19 nt, Artificial Sequence
  Description of Artificial Sequence: Synthetic oligonucleotide
agaaggcacacugguuagc

SEQ ID NO: 853358 - RNA, 19 nt, Artificial Sequence
  Description of Artificial Sequence: Synthetic oligonucleotide
uggaguugaacugggguuc

SEQ ID NO: 853359 - RNA, 19 nt, Artificial Sequence
  Description of Artificial Sequence: Synthetic oligonucleotide
ugaagguagaauggccugu

SEQ ID NO: 853360 - RNA, 19 nt, Artificial Sequence
  Description of Artificial Sequence: Synthetic oligonucleotide
cuggauaucuucacacuga

SEQ ID NO: 853361 - RNA, 19 nt, Artificial Sequence
  Description of Artificial Sequence: Synthetic oligonucleotide
acucauugggcugcugagg

SEQ ID NO: 853362 - RNA, 19 nt, Artificial Sequence
  Description of Artificial Sequence: Synthetic oligonucleotide
uuuauccaauucagcacuu

SEQ ID NO: 853363 - RNA, 19 nt, Artificial Sequence
  Description of Artificial Sequence: Synthetic oligonucleotide
cuuuccgcuggaucuuacc

SEQ ID NO: 853364 - RNA, 19 nt, Artificial Sequence
  Description of Artificial Sequence: Synthetic oligonucleotide
uaguaucuaaugucaucaa

SEQ ID NO: 853365 - RNA, 19 nt, Artificial Sequence
  Description of Artificial Sequence: Synthetic oligonucleotide
gacugagaugagaaacuug

SEQ ID NO: 853366 - RNA, 19 nt, Artificial Sequence
  Description of Artificial Sequence: Synthetic oligonucleotide
cacucauugggcugcugag

SEQ ID NO: 853367 - RNA, 19 nt, Artificial Sequence
  Description of Artificial Sequence: Synthetic oligonucleotide
aaacaucacauagcccacu

SEQ ID NO: 853368 - RNA, 19 nt, Artificial Sequence
  Description of Artificial Sequence: Synthetic oligonucleotide
uacuccccauguuaaggca

SEQ ID NO: 853369 - RNA, 19 nt, Artificial Sequence
  Description of Artificial Sequence: Synthetic oligonucleotide
uccucccaaacaucuaaaa

SEQ ID NO: 853370 - RNA, 19 nt, Artificial Sequence
  Description of Artificial Sequence: Synthetic oligonucleotide
gugaacauaacucuuucuu

SEQ ID NO: 853371 - RNA, 19 nt, Artificial Sequence
  Description of Artificial Sequence: Synthetic oligonucleotide
caucaacaacuugauacug

SEQ ID NO: 853372 - RNA, 19 nt, Artificial Sequence
  Description of Artificial Sequence: Synthetic oligonucleotide
cuuucuaccauguccuucu

SEQ ID NO: 853373 - RNA, 19 nt, Artificial Sequence
  Description of Artificial Sequence: Synthetic oligonucleotide
cacaugacgagguagcugu

SEQ ID NO: 853374 - RNA, 19 nt, Artificial Sequence
  Description of Artificial Sequence: Synthetic oligonucleotide
aguuuauagaaggcacacu

SEQ ID NO: 853375 - RNA, 19 nt, Artificial Sequence
  Description of Artificial Sequence: Synthetic oligonucleotide
gacuccuaagaauuauaua

SEQ ID NO: 853376 - RNA, 19 nt, Artificial Sequence
  Description of Artificial Sequence: Synthetic oligonucleotide
ucacucaaaaggugaguuu

SEQ ID NO: 853377 - RNA, 19 nt, Artificial Sequence
  Description of Artificial Sequence: Synthetic oligonucleotide
uacugguuacucugugcga

SEQ ID NO: 853378 - RNA, 19 nt, Artificial Sequence
  Description of Artificial Sequence: Synthetic oligonucleotide
ugugcguagcauaguuuau

SEQ ID NO: 853379 - RNA, 19 nt, Artificial Sequence
  Description of Artificial Sequence: Synthetic oligonucleotide
agacuccuaagaauuauau

SEQ ID NO: 853380 - RNA, 19 nt, Artificial Sequence
  Description of Artificial Sequence: Synthetic oligonucleotide
uacuauuagcaggaauaaa

SEQ ID NO: 853381 - RNA, 19 nt, Artificial Sequence
  Description of Artificial Sequence: Synthetic oligonucleotide
uagagacuguacuggugac

SEQ ID NO: 853382 - RNA, 19 nt, Artificial Sequence
  Description of Artificial Sequence: Synthetic oligonucleotide
acugguuacucugugcgaa

SEQ ID NO: 853383 - RNA, 19 nt, Artificial Sequence
  Description of Artificial Sequence: Synthetic oligonucleotide
caccacauuuaucaccauc

SEQ ID NO: 853384 - RNA, 19 nt, Artificial Sequence
  Description of Artificial Sequence: Synthetic oligonucleotide
uguugagagcagacuacuu

SEQ ID NO: 853385 - RNA, 19 nt, Artificial Sequence
  Description of Artificial Sequence: Synthetic oligonucleotide
ugauaucuuugcugagaaa

SEQ ID NO: 853386 - RNA, 19 nt, Artificial Sequence
  Description of Artificial Sequence: Synthetic oligonucleotide
ggguagacuauuuucugga

SEQ ID NO: 853387 - RNA, 19 nt, Artificial Sequence
  Description of Artificial Sequence: Synthetic oligonucleotide
uggcguuccggccuucacu

SEQ ID NO: 853388 - RNA, 19 nt, Artificial Sequence
  Description of Artificial Sequence: Synthetic oligonucleotide
cauaacucuuucuucuucu

SEQ ID NO: 853389 - RNA, 19 nt, Artificial Sequence
  Description of Artificial Sequence: Synthetic oligonucleotide
ucucacucaaaaggugagu

SEQ ID NO: 853390 - RNA, 19 nt, Artificial Sequence
  Description of Artificial Sequence: Synthetic oligonucleotide
auuuugguugggguagacu

SEQ ID NO: 853391 - RNA, 19 nt, Artificial Sequence
  Description of Artificial Sequence: Synthetic oligonucleotide
uuuaacaugcuggcugcuu

SEQ ID NO: 853392 - RNA, 19 nt, Artificial Sequence
  Description of Artificial Sequence: Synthetic oligonucleotide
gacgagguagcuguguaaa

SEQ ID NO: 853393 - RNA, 19 nt, Artificial Sequence
  Description of Artificial Sequence: Synthetic oligonucleotide
cugguuacucugugcgaag

SEQ ID NO: 853394 - RNA, 19 nt, Artificial Sequence
  Description of Artificial Sequence: Synthetic oligonucleotide
auguguaguaucugcuguu

SEQ ID NO: 853395 - RNA, 19 nt, Artificial Sequence
  Description of Artificial Sequence: Synthetic oligonucleotide
agacuuaaaggaacuucca

SEQ ID NO: 853396 - RNA, 19 nt, Artificial Sequence
  Description of Artificial Sequence: Synthetic oligonucleotide
gaccacaggauggcguucc

SEQ ID NO: 853397 - RNA, 19 nt, Artificial Sequence
  Description of Artificial Sequence: Synthetic oligonucleotide
uaauuuugguugggguaga

SEQ ID NO: 853398 - RNA, 19 nt, Artificial Sequence
  Description of Artificial Sequence: Synthetic oligonucleotide
cucuggacuugguacagga

SEQ ID NO: 853399 - RNA, 19 nt, Artificial Sequence
  Description of Artificial Sequence: Synthetic oligonucleotide
uacacaugacgagguagcu

SEQ ID NO: 853400 - RNA, 19 nt, Artificial Sequence
  Description of Artificial Sequence: Synthetic oligonucleotide
ugacgagguagcuguguaa

SEQ ID NO: 853401 - RNA, 19 nt, Artificial Sequence
  Description of Artificial Sequence: Synthetic oligonucleotide
aggugaggugguuucugca

SEQ ID NO: 853402 - RNA, 19 nt, Artificial Sequence
  Description of Artificial Sequence: Synthetic oligonucleotide
ucccguugaagaguaggac

SEQ ID NO: 853403 - RNA, 19 nt, Artificial Sequence
  Description of Artificial Sequence: Synthetic oligonucleotide
agaucagaaucaugaccaa

SEQ ID NO: 853404 - RNA, 19 nt, Artificial Sequence
  Description of Artificial Sequence: Synthetic oligonucleotide
acacaugacgagguagcug

SEQ ID NO: 853405 - RNA, 19 nt, Artificial Sequence
  Description of Artificial Sequence: Synthetic oligonucleotide
cuuuuggacgcuggauggc

SEQ ID NO: 853406 - RNA, 19 nt, Artificial Sequence
  Description of Artificial Sequence: Synthetic oligonucleotide
cacauagcccacuguuuuc

SEQ ID NO: 853407 - RNA, 19 nt, Artificial Sequence
  Description of Artificial Sequence: Synthetic oligonucleotide
cugcccuaauaacagucuc

SEQ ID NO: 853408 - RNA, 19 nt, Artificial Sequence
  Description of Artificial Sequence: Synthetic oligonucleotide
gguagacuauuuucuggac

SEQ ID NO: 853409 - RNA, 19 nt, Artificial Sequence
  Description of Artificial Sequence: Synthetic oligonucleotide
gaacugggguuccaccaca

SEQ ID NO: 853410 - RNA, 19 nt, Artificial Sequence
  Description of Artificial Sequence: Synthetic oligonucleotide
gagucucccuguucucgcc

SEQ ID NO: 853411 - RNA, 19 nt, Artificial Sequence
  Description of Artificial Sequence: Synthetic oligonucleotide
ccuaauaacagucucacuu

SEQ ID NO: 853412 - RNA, 19 nt, Artificial Sequence
  Description of Artificial Sequence: Synthetic oligonucleotide
ggcguuccggccuucacug

SEQ ID NO: 853413 - RNA, 19 nt, Artificial Sequence
  Description of Artificial Sequence: Synthetic oligonucleotide
ggaucuuaccacaaggcaa

SEQ ID NO: 853414 - RNA, 19 nt, Artificial Sequence
  Description of Artificial Sequence: Synthetic oligonucleotide
gagcagacuacuugaauuu

SEQ ID NO: 853415 - RNA, 19 nt, Artificial Sequence
  Description of Artificial Sequence: Synthetic oligonucleotide
gaccgguucacaucuucaa

SEQ ID NO: 853416 - RNA, 19 nt, Artificial Sequence
  Description of Artificial Sequence: Synthetic oligonucleotide
cuuuuguauuguagugcca

SEQ ID NO: 853417 - RNA, 19 nt, Artificial Sequence
  Description of Artificial Sequence: Synthetic oligonucleotide
cauccucccaaacaucuaa

SEQ ID NO: 853418 - RNA, 19 nt, Artificial Sequence
  Description of Artificial Sequence: Synthetic oligonucleotide
ucauccucccaaacaucua

SEQ ID NO: 853419 - RNA, 19 nt, Artificial Sequence
  Description of Artificial Sequence: Synthetic oligonucleotide
guauaauuuguaacagcua

SEQ ID NO: 853420 - RNA, 19 nt, Artificial Sequence
  Description of Artificial Sequence: Synthetic oligonucleotide
uucccgaaucccucacaga

SEQ ID NO: 853421 - RNA, 19 nt, Artificial Sequence
  Description of Artificial Sequence: Synthetic oligonucleotide
gagccaacgcuguauuuua

SEQ ID NO: 853422 - RNA, 19 nt, Artificial Sequence
  Description of Artificial Sequence: Synthetic oligonucleotide
uuggacgcuggauggcuuc

SEQ ID NO: 853423 - RNA, 19 nt, Artificial Sequence
  Description of Artificial Sequence: Synthetic oligonucleotide
uuuggacgcuggauggcuu

SEQ ID NO: 853424 - RNA, 19 nt, Artificial Sequence
  Description of Artificial Sequence: Synthetic oligonucleotide
gcaaguuaucuguauucuc

SEQ ID NO: 853425 - RNA, 19 nt, Artificial Sequence
  Description of Artificial Sequence: Synthetic oligonucleotide
ccgugucacacucauuggg

SEQ ID NO: 853426 - RNA, 19 nt, Artificial Sequence
  Description of Artificial Sequence: Synthetic oligonucleotide
cucggcucaaacauacucu

SEQ ID NO: 853427 - RNA, 19 nt, Artificial Sequence
  Description of Artificial Sequence: Synthetic oligonucleotide
ccuucaauuggaguugaac

SEQ ID NO: 853428 - RNA, 19 nt, Artificial Sequence
  Description of Artificial Sequence: Synthetic oligonucleotide
accacaggauggcguuccg

SEQ ID NO: 853429 - RNA, 19 nt, Artificial Sequence
  Description of Artificial Sequence: Synthetic oligonucleotide
gaaaaggagccaacgcugu

SEQ ID NO: 853430 - RNA, 19 nt, Artificial Sequence
  Description of Artificial Sequence: Synthetic oligonucleotide
aucccguugaagaguagga

SEQ ID NO: 853431 - RNA, 19 nt, Artificial Sequence
  Description of Artificial Sequence: Synthetic oligonucleotide
ugcaaggcuugugcguagc

SEQ ID NO: 853432 - RNA, 19 nt, Artificial Sequence
  Description of Artificial Sequence: Synthetic oligonucleotide
guauuguagugccagcuuu

SEQ ID NO: 853433 - RNA, 19 nt, Artificial Sequence
  Description of Artificial Sequence: Synthetic oligonucleotide
agaguaggacauggguucu

SEQ ID NO: 853434 - RNA, 19 nt, Artificial Sequence
  Description of Artificial Sequence: Synthetic oligonucleotide
ucuuaccacaaggcaaguu

SEQ ID NO: 853435 - RNA, 19 nt, Artificial Sequence
  Description of Artificial Sequence: Synthetic oligonucleotide
uugguugggguagacuauu

SEQ ID NO: 853436 - RNA, 19 nt, Artificial Sequence
  Description of Artificial Sequence: Synthetic oligonucleotide
cuucccucggcucaaacau

SEQ ID NO: 853437 - RNA, 19 nt, Artificial Sequence
  Description of Artificial Sequence: Synthetic oligonucleotide
caacgcuguauuuuauucu

SEQ ID NO: 853438 - RNA, 19 nt, Artificial Sequence
  Description of Artificial Sequence: Synthetic oligonucleotide
ugguuagcugaagguagaa

SEQ ID NO: 853439 - RNA, 19 nt, Artificial Sequence
  Description of Artificial Sequence: Synthetic oligonucleotide
auguaguaucuaaugucau

SEQ ID NO: 853440 - RNA, 19 nt, Artificial Sequence
  Description of Artificial Sequence: Synthetic oligonucleotide
cguccuuucaaucccguug

SEQ ID NO: 853441 - RNA, 19 nt, Artificial Sequence
  Description of Artificial Sequence: Synthetic oligonucleotide
aggugguuucugcaguaua

SEQ ID NO: 853442 - RNA, 19 nt, Artificial Sequence
  Description of Artificial Sequence: Synthetic oligonucleotide
aacuuccaucauggcuggg

SEQ ID NO: 853443 - RNA, 19 nt, Artificial Sequence
  Description of Artificial Sequence: Synthetic oligonucleotide
agcccacuguuuucagugu

SEQ ID NO: 853444 - RNA, 19 nt, Artificial Sequence
  Description of Artificial Sequence: Synthetic oligonucleotide
acuuuccgcuggaucuuac

SEQ ID NO: 853445 - RNA, 19 nt, Artificial Sequence
  Description of Artificial Sequence: Synthetic oligonucleotide
cacauuuaucaccauccgu

SEQ ID NO: 853446 - RNA, 19 nt, Artificial Sequence
  Description of Artificial Sequence: Synthetic oligonucleotide
gauuucuccccgcuuguuu

SEQ ID NO: 853447 - RNA, 19 nt, Artificial Sequence
  Description of Artificial Sequence: Synthetic oligonucleotide
uccuucaauuggaguugaa

SEQ ID NO: 853448 - RNA, 19 nt, Artificial Sequence
  Description of Artificial Sequence: Synthetic oligonucleotide
ccacaaggcaaguuaucug

SEQ ID NO: 853449 - RNA, 19 nt, Artificial Sequence
  Description of Artificial Sequence: Synthetic oligonucleotide
cuccccgcuuguuugaaaa

SEQ ID NO: 853450 - RNA, 19 nt, Artificial Sequence
  Description of Artificial Sequence: Synthetic oligonucleotide
aggcaguuguccauuacuu

SEQ ID NO: 853451 - RNA, 19 nt, Artificial Sequence
  Description of Artificial Sequence: Synthetic oligonucleotide
agaccgguucacaucuuca

SEQ ID NO: 853452 - RNA, 19 nt, Artificial Sequence
  Description of Artificial Sequence: Synthetic oligonucleotide
cauuuaucaccauccguau

SEQ ID NO: 853453 - RNA, 19 nt, Artificial Sequence
  Description of Artificial Sequence: Synthetic oligonucleotide
cagacuccuaagaauuaua

SEQ ID NO: 853454 - RNA, 19 nt, Artificial Sequence
  Description of Artificial Sequence: Synthetic oligonucleotide
gagagcagacuacuugaau

SEQ ID NO: 853455 - RNA, 19 nt, Artificial Sequence
  Description of Artificial Sequence: Synthetic oligonucleotide
cccauguuaaggcauuuga

SEQ ID NO: 853456 - RNA, 19 nt, Artificial Sequence
  Description of Artificial Sequence: Synthetic oligonucleotide
ccucggcucaaacauacuc

SEQ ID NO: 853457 - RNA, 19 nt, Artificial Sequence
  Description of Artificial Sequence: Synthetic oligonucleotide
gguacaggagaaacuugac

SEQ ID NO: 853458 - RNA, 19 nt, Artificial Sequence
  Description of Artificial Sequence: Synthetic oligonucleotide
caccauccguauuaggucu

SEQ ID NO: 853459 - RNA, 19 nt, Artificial Sequence
  Description of Artificial Sequence: Synthetic oligonucleotide
cucaucacguccuuucaau

SEQ ID NO: 853460 - RNA, 19 nt, Artificial Sequence
  Description of Artificial Sequence: Synthetic oligonucleotide
cccguugaagaguaggaca

SEQ ID NO: 853461 - RNA, 19 nt, Artificial Sequence
  Description of Artificial Sequence: Synthetic oligonucleotide
uucccucggcucaaacaua

SEQ ID NO: 853462 - RNA, 19 nt, Artificial Sequence
  Description of Artificial Sequence: Synthetic oligonucleotide
gaagccaacacaagccuuu

SEQ ID NO: 853463 - RNA, 19 nt, Artificial Sequence
  Description of Artificial Sequence: Synthetic oligonucleotide
guucaauguaguaucuaau

SEQ ID NO: 853464 - RNA, 19 nt, Artificial Sequence
  Description of Artificial Sequence: Synthetic oligonucleotide
agcagacuacuugaauuuu

SEQ ID NO: 853465 - RNA, 19 nt, Artificial Sequence
  Description of Artificial Sequence: Synthetic oligonucleotide
ccuuucaaucccguugaag

SEQ ID NO: 853466 - RNA, 19 nt, Artificial Sequence
  Description of Artificial Sequence: Synthetic oligonucleotide
caaucccguugaagaguag

SEQ ID NO: 853467 - RNA, 19 nt, Artificial Sequence
  Description of Artificial Sequence: Synthetic oligonucleotide
ucucgccuuuuguauugua

SEQ ID NO: 853468 - RNA, 19 nt, Artificial Sequence
  Description of Artificial Sequence: Synthetic oligonucleotide
gcuacucaauucuguaaaa

SEQ ID NO: 853469 - RNA, 19 nt, Artificial Sequence
  Description of Artificial Sequence: Synthetic oligonucleotide
cuacuugaauuuucauccu

SEQ ID NO: 853470 - RNA, 19 nt, Artificial Sequence
  Description of Artificial Sequence: Synthetic oligonucleotide
cugagaugagaaacuugua

SEQ ID NO: 853471 - RNA, 19 nt, Artificial Sequence
  Description of Artificial Sequence: Synthetic oligonucleotide
acauggguucugaagccaa

SEQ ID NO: 853472 - RNA, 19 nt, Artificial Sequence
  Description of Artificial Sequence: Synthetic oligonucleotide
guauucuccgugucacacu

SEQ ID NO: 853473 - RNA, 19 nt, Artificial Sequence
  Description of Artificial Sequence: Synthetic oligonucleotide
cacugguuagcugaaggua

SEQ ID NO: 853474 - RNA, 19 nt, Artificial Sequence
  Description of Artificial Sequence: Synthetic oligonucleotide
caggcaguuguccauuacu

SEQ ID NO: 853475 - RNA, 19 nt, Artificial Sequence
  Description of Artificial Sequence: Synthetic oligonucleotide
acuccccauguuaaggcau

SEQ ID NO: 853476 - RNA, 19 nt, Artificial Sequence
  Description of Artificial Sequence: Synthetic oligonucleotide
uucucgccuuuuguauugu

SEQ ID NO: 853477 - RNA, 19 nt, Artificial Sequence
  Description of Artificial Sequence: Synthetic oligonucleotide
gcagacuacuugaauuuuc

SEQ ID NO: 853478 - RNA, 19 nt, Artificial Sequence
  Description of Artificial Sequence: Synthetic oligonucleotide
uaagaccgguucacaucuu

SEQ ID NO: 853479 - RNA, 19 nt, Artificial Sequence
  Description of Artificial Sequence: Synthetic oligonucleotide
guauuaggucuggguuuag

SEQ ID NO: 853480 - RNA, 19 nt, Artificial Sequence
  Description of Artificial Sequence: Synthetic oligonucleotide
ucuccccgcuuguuugaaa

SEQ ID NO: 853481 - RNA, 19 nt, Artificial Sequence
  Description of Artificial Sequence: Synthetic oligonucleotide
ugauuucuccccgcuuguu

SEQ ID NO: 853482 - RNA, 19 nt, Artificial Sequence
  Description of Artificial Sequence: Synthetic oligonucleotide
cuguaagaccgguucacau

SEQ ID NO: 853483 - RNA, 19 nt, Artificial Sequence
  Description of Artificial Sequence: Synthetic oligonucleotide
accauccguauuaggucug

SEQ ID NO: 853484 - RNA, 19 nt, Artificial Sequence
  Description of Artificial Sequence: Synthetic oligonucleotide
uggacgcuggauggcuucu

SEQ ID NO: 853485 - RNA, 19 nt, Artificial Sequence
  Description of Artificial Sequence: Synthetic oligonucleotide
guuacucugugcgaaguuu

SEQ ID NO: 853486 - RNA, 19 nt, Artificial Sequence
  Description of Artificial Sequence: Synthetic oligonucleotide
aggagccaacgcuguauuu

SEQ ID NO: 853487 - RNA, 19 nt, Artificial Sequence
  Description of Artificial Sequence: Synthetic oligonucleotide
cccgaaucccucacagaag

SEQ ID NO: 853488 - RNA, 19 nt, Artificial Sequence
  Description of Artificial Sequence: Synthetic oligonucleotide
cugggguuccaccacauuu

SEQ ID NO: 853489 - RNA, 19 nt, Artificial Sequence
  Description of Artificial Sequence: Synthetic oligonucleotide
uccggccuucacuguuagc

SEQ ID NO: 853490 - RNA, 19 nt, Artificial Sequence
  Description of Artificial Sequence: Synthetic oligonucleotide
gacgcuggauggcuucucu

SEQ ID NO: 853491 - RNA, 19 nt, Artificial Sequence
  Description of Artificial Sequence: Synthetic oligonucleotide
cucacucaaaaggugaguu

SEQ ID NO: 853492 - RNA, 19 nt, Artificial Sequence
  Description of Artificial Sequence: Synthetic oligonucleotide
ucucccuguucucgccuuu

SEQ ID NO: 853493 - RNA, 19 nt, Artificial Sequence
  Description of Artificial Sequence: Synthetic oligonucleotide
gcugaagguagaauggccu

SEQ ID NO: 853494 - RNA, 19 nt, Artificial Sequence
  Description of Artificial Sequence: Synthetic oligonucleotide
caguagagacuguacuggu

SEQ ID NO: 853495 - RNA, 19 nt, Artificial Sequence
  Description of Artificial Sequence: Synthetic oligonucleotide
ucuccgugucacacucauu

SEQ ID NO: 853496 - RNA, 19 nt, Artificial Sequence
  Description of Artificial Sequence: Synthetic oligonucleotide
gguagcuguguaaacuucu

SEQ ID NO: 853497 - RNA, 19 nt, Artificial Sequence
  Description of Artificial Sequence: Synthetic oligonucleotide
ggcaaguuaucuguauucu

SEQ ID NO: 853498 - RNA, 19 nt, Artificial Sequence
  Description of Artificial Sequence: Synthetic oligonucleotide
agcagacuccuaagaauua

SEQ ID NO: 853499 - RNA, 19 nt, Artificial Sequence
  Description of Artificial Sequence: Synthetic oligonucleotide
acugggguuccaccacauu

SEQ ID NO: 853500 - RNA, 19 nt, Artificial Sequence
  Description of Artificial Sequence: Synthetic oligonucleotide
gaggaccacaggauggcgu

SEQ ID NO: 853501 - RNA, 19 nt, Artificial Sequence
  Description of Artificial Sequence: Synthetic oligonucleotide
caguguuugugcauacuuu

SEQ ID NO: 853502 - RNA, 19 nt, Artificial Sequence
  Description of Artificial Sequence: Synthetic oligonucleotide
cuguacuggugacccacaa

SEQ ID NO: 853503 - RNA, 19 nt, Artificial Sequence
  Description of Artificial Sequence: Synthetic oligonucleotide
gauggcguuccggccuuca

SEQ ID NO: 853504 - RNA, 19 nt, Artificial Sequence
  Description of Artificial Sequence: Synthetic oligonucleotide
acaugacgagguagcugug

SEQ ID NO: 853505 - RNA, 19 nt, Artificial Sequence
  Description of Artificial Sequence: Synthetic oligonucleotide
ggccuguaagaccgguuca

SEQ ID NO: 853506 - RNA, 19 nt, Artificial Sequence
  Description of Artificial Sequence: Synthetic oligonucleotide
gccaacacaagccuuuguu

SEQ ID NO: 853507 - RNA, 19 nt, Artificial Sequence
  Description of Artificial Sequence: Synthetic oligonucleotide
gacccacaaguucugucuu

SEQ ID NO: 853508 - RNA, 19 nt, Artificial Sequence
  Description of Artificial Sequence: Synthetic oligonucleotide
gcagacucuggacuuggua

SEQ ID NO: 853509 - RNA, 19 nt, Artificial Sequence
  Description of Artificial Sequence: Synthetic oligonucleotide
cugauuucuccccgcuugu

SEQ ID NO: 853510 - RNA, 19 nt, Artificial Sequence
  Description of Artificial Sequence: Synthetic oligonucleotide
ccauccguauuaggucugg

SEQ ID NO: 853511 - RNA, 19 nt, Artificial Sequence
  Description of Artificial Sequence: Synthetic oligonucleotide
uccccauguuaaggcauuu

SEQ ID NO: 853512 - RNA, 19 nt, Artificial Sequence
  Description of Artificial Sequence: Synthetic oligonucleotide
acgcuguauuuuauucuuu

SEQ ID NO: 853513 - RNA, 19 nt, Artificial Sequence
  Description of Artificial Sequence: Synthetic oligonucleotide
ccgaaucccucacagaagu

SEQ ID NO: 853514 - RNA, 19 nt, Artificial Sequence
  Description of Artificial Sequence: Synthetic oligonucleotide
uaacuucccucggcucaaa

SEQ ID NO: 853515 - RNA, 19 nt, Artificial Sequence
  Description of Artificial Sequence: Synthetic oligonucleotide
cauacucugucuggagacu

SEQ ID NO: 853516 - RNA, 19 nt, Artificial Sequence
  Description of Artificial Sequence: Synthetic oligonucleotide
caugacgagguagcugugu

SEQ ID NO: 853517 - RNA, 19 nt, Artificial Sequence
  Description of Artificial Sequence: Synthetic oligonucleotide
gcaaggcuugugcguagca

SEQ ID NO: 853518 - RNA, 19 nt, Artificial Sequence
  Description of Artificial Sequence: Synthetic oligonucleotide
ccauguuaaggcauuugau

SEQ ID NO: 853519 - RNA, 19 nt, Artificial Sequence
  Description of Artificial Sequence: Synthetic oligonucleotide
agccaacgcuguauuuuau

SEQ ID NO: 853520 - RNA, 19 nt, Artificial Sequence
  Description of Artificial Sequence: Synthetic oligonucleotide
ccacaggauggcguuccgg

SEQ ID NO: 853521 - RNA, 19 nt, Artificial Sequence
  Description of Artificial Sequence: Synthetic oligonucleotide
ggagccaacgcuguauuuu

SEQ ID NO: 853522 - RNA, 19 nt, Artificial Sequence
  Description of Artificial Sequence: Synthetic oligonucleotide
caacuguagcuucuccuuu

SEQ ID NO: 853523 - RNA, 19 nt, Artificial Sequence
  Description of Artificial Sequence: Synthetic oligonucleotide
auggccuguaagaccgguu

SEQ ID NO: 853524 - RNA, 19 nt, Artificial Sequence
  Description of Artificial Sequence: Synthetic oligonucleotide
ccauuacuuucuaccaugu

SEQ ID NO: 853525 - RNA, 19 nt, Artificial Sequence
  Description of Artificial Sequence: Synthetic oligonucleotide
cccacaaguucugucuuca

SEQ ID NO: 853526 - RNA, 19 nt, Artificial Sequence
  Description of Artificial Sequence: Synthetic oligonucleotide
gugcauacuuugcuuccuu

SEQ ID NO: 853527 - RNA, 19 nt, Artificial Sequence
  Description of Artificial Sequence: Synthetic oligonucleotide
cgcuggaucuuaccacaag

SEQ ID NO: 853528 - RNA, 19 nt, Artificial Sequence
  Description of Artificial Sequence: Synthetic oligonucleotide
caaggcuugugcguagcau

SEQ ID NO: 853529 - RNA, 19 nt, Artificial Sequence
  Description of Artificial Sequence: Synthetic oligonucleotide
ccccauguuaaggcauuug

SEQ ID NO: 853530 - RNA, 19 nt, Artificial Sequence
  Description of Artificial Sequence: Synthetic oligonucleotide
gguuacucugugcgaaguu

SEQ ID NO: 853531 - RNA, 19 nt, Artificial Sequence
  Description of Artificial Sequence: Synthetic oligonucleotide
gguuagcugaagguagaau

SEQ ID NO: 853532 - RNA, 19 nt, Artificial Sequence
  Description of Artificial Sequence: Synthetic oligonucleotide
ccuguaagaccgguucaca

SEQ ID NO: 853533 - RNA, 19 nt, Artificial Sequence
  Description of Artificial Sequence: Synthetic oligonucleotide
cacguccuuucaaucccgu

SEQ ID NO: 853534 - RNA, 19 nt, Artificial Sequence
  Description of Artificial Sequence: Synthetic oligonucleotide
gcagacuccuaagaauuau

SEQ ID NO: 853535 - RNA, 19 nt, Artificial Sequence
  Description of Artificial Sequence: Synthetic oligonucleotide
gccaacgcuguauuuuauu

SEQ ID NO: 853536 - RNA, 19 nt, Artificial Sequence
  Description of Artificial Sequence: Synthetic oligonucleotide
ggcacacugguuagcugaa

SEQ ID NO: 853537 - RNA, 19 nt, Artificial Sequence
  Description of Artificial Sequence: Synthetic oligonucleotide
ggaugaggugaggugguuu

SEQ ID NO: 853538 - RNA, 19 nt, Artificial Sequence
  Description of Artificial Sequence: Synthetic oligonucleotide
ccgcuggaucuuaccacaa

SEQ ID NO: 853539 - RNA, 19 nt, Artificial Sequence
  Description of Artificial Sequence: Synthetic oligonucleotide
cgaaucccucacagaagua

SEQ ID NO: 853540 - RNA, 19 nt, Artificial Sequence
  Description of Artificial Sequence: Synthetic oligonucleotide
gcguuccggccuucacugu

SEQ ID NO: 853541 - RNA, 19 nt, Artificial Sequence
  Description of Artificial Sequence: Synthetic oligonucleotide
gggaugaggugaggugguu

SEQ ID NO: 853542 - RNA, 19 nt, Artificial Sequence
  Description of Artificial Sequence: Synthetic oligonucleotide
cguuccggccuucacuguu

SEQ ID NO: 853543 - RNA, 19 nt, Artificial Sequence
  Description of Artificial Sequence: Synthetic oligonucleotide
aaaaggcugaaacaauccc

SEQ ID NO: 853544 - RNA, 19 nt, Artificial Sequence
  Description of Artificial Sequence: Synthetic oligonucleotide
aaauagacgucucugaggu

SEQ ID NO: 853545 - RNA, 19 nt, Artificial Sequence
  Description of Artificial Sequence: Synthetic oligonucleotide
aaaauagacgucucugagg

SEQ ID NO: 853546 - RNA, 19 nt, Artificial Sequence
  Description of Artificial Sequence: Synthetic oligonucleotide
cauuaaguuggcucgaucg

SEQ ID NO: 853547 - RNA, 19 nt, Artificial Sequence
  Description of Artificial Sequence: Synthetic oligonucleotide
uccacauuaaguuggcucg

SEQ ID NO: 853548 - RNA, 19 nt, Artificial Sequence
  Description of Artificial Sequence: Synthetic oligonucleotide
acaaaagucucggagaggc

SEQ ID NO: 853549 - RNA, 19 nt, Artificial Sequence
  Description of Artificial Sequence: Synthetic oligonucleotide
aacgcuuccacauuaaguu

SEQ ID NO: 853550 - RNA, 19 nt, Artificial Sequence
  Description of Artificial Sequence: Synthetic oligonucleotide
aaaaccucgaaggucgugg

SEQ ID NO: 853551 - RNA, 19 nt, Artificial Sequence
  Description of Artificial Sequence: Synthetic oligonucleotide
ugugugacgagccaucuug

SEQ ID NO: 853552 - RNA, 19 nt, Artificial Sequence
  Description of Artificial Sequence: Synthetic oligonucleotide
uguagcacggcguugagga

SEQ ID NO: 853553 - RNA, 19 nt, Artificial Sequence
  Description of Artificial Sequence: Synthetic oligonucleotide
aaccgaguaggauucacag

SEQ ID NO: 853554 - RNA, 19 nt, Artificial Sequence
  Description of Artificial Sequence: Synthetic oligonucleotide
aaaggcugaaacaaucccg

SEQ ID NO: 853555 - RNA, 19 nt, Artificial Sequence
  Description of Artificial Sequence: Synthetic oligonucleotide
uccccuauuagauuaaaga

SEQ ID NO: 853556 - RNA, 19 nt, Artificial Sequence
  Description of Artificial Sequence: Synthetic oligonucleotide
uucgaagacaaaagucucg

SEQ ID NO: 853557 - RNA, 19 nt, Artificial Sequence
  Description of Artificial Sequence: Synthetic oligonucleotide
uugauuucaagguguaacc

SEQ ID NO: 853558 - RNA, 19 nt, Artificial Sequence
  Description of Artificial Sequence: Synthetic oligonucleotide
caauucagguucuucaugc

SEQ ID NO: 853559 - RNA, 19 nt, Artificial Sequence
  Description of Artificial Sequence: Synthetic oligonucleotide
uuggaacgggcuaaguugg

SEQ ID NO: 853560 - RNA, 19 nt, Artificial Sequence
  Description of Artificial Sequence: Synthetic oligonucleotide
uccauaguggacacuaccc

SEQ ID NO: 853561 - RNA, 19 nt, Artificial Sequence
  Description of Artificial Sequence: Synthetic oligonucleotide
ucggaggccaacaugacca

SEQ ID NO: 853562 - RNA, 19 nt, Artificial Sequence
  Description of Artificial Sequence: Synthetic oligonucleotide
cuuggaacgggcuaaguug

SEQ ID NO: 853563 - RNA, 19 nt, Artificial Sequence
  Description of Artificial Sequence: Synthetic oligonucleotide
uggagcgauacccacaggc

SEQ ID NO: 853564 - RNA, 19 nt, Artificial Sequence
  Description of Artificial Sequence: Synthetic oligonucleotide
aaaauaaugggagcuacaa

SEQ ID NO: 853565 - RNA, 19 nt, Artificial Sequence
  Description of Artificial Sequence: Synthetic oligonucleotide
auuucccagauuucggagg

SEQ ID NO: 853566 - RNA, 19 nt, Artificial Sequence
  Description of Artificial Sequence: Synthetic oligonucleotide
ucgaagacaaaagucucgg

SEQ ID NO: 853567 - RNA, 19 nt, Artificial Sequence
  Description of Artificial Sequence: Synthetic oligonucleotide
ccuauuagauuaaagacac

SEQ ID NO: 853568 - RNA, 19 nt, Artificial Sequence
  Description of Artificial Sequence: Synthetic oligonucleotide
guaacacggaguuuggccc

SEQ ID NO: 853569 - RNA, 19 nt, Artificial Sequence
  Description of Artificial Sequence: Synthetic oligonucleotide
acucaauucagguucuuca

SEQ ID NO: 853570 - RNA, 19 nt, Artificial Sequence
  Description of Artificial Sequence: Synthetic oligonucleotide
uuucaacuggcccacaaau

SEQ ID NO: 853571 - RNA, 19 nt, Artificial Sequence
  Description of Artificial Sequence: Synthetic oligonucleotide
uggagcacgaggauucggg

SEQ ID NO: 853572 - RNA, 19 nt, Artificial Sequence
  Description of Artificial Sequence: Synthetic oligonucleotide
uaaccuuuccaugaguagc

SEQ ID NO: 853573 - RNA, 19 nt, Artificial Sequence
  Description of Artificial Sequence: Synthetic oligonucleotide
gaaaaggcugaaacaaucc

SEQ ID NO: 853574 - RNA, 19 nt, Artificial Sequence
  Description of Artificial Sequence: Synthetic oligonucleotide
uaacgcuuccacauuaagu

SEQ ID NO: 853575 - RNA, 19 nt, Artificial Sequence
  Description of Artificial Sequence: Synthetic oligonucleotide
aacgggcuaaguugguccg

SEQ ID NO: 853576 - RNA, 19 nt, Artificial Sequence
  Description of Artificial Sequence: Synthetic oligonucleotide
accuacugaacuuuucuug

SEQ ID NO: 853577 - RNA, 19 nt, Artificial Sequence
  Description of Artificial Sequence: Synthetic oligonucleotide
aggcaauccccauuggacg

SEQ ID NO: 853578 - RNA, 19 nt, Artificial Sequence
  Description of Artificial Sequence: Synthetic oligonucleotide
ugcgucucaaagugggugg

SEQ ID NO: 853579 - RNA, 19 nt, Artificial Sequence
  Description of Artificial Sequence: Synthetic oligonucleotide
cuggcccacaaauaggucc

SEQ ID NO: 853580 - RNA, 19 nt, Artificial Sequence
  Description of Artificial Sequence: Synthetic oligonucleotide
aggucguggagcgauaccc

SEQ ID NO: 853581 - RNA, 19 nt, Artificial Sequence
  Description of Artificial Sequence: Synthetic oligonucleotide
aaggucguaacacggaguu

SEQ ID NO: 853582 - RNA, 19 nt, Artificial Sequence
  Description of Artificial Sequence: Synthetic oligonucleotide
gaacgggcuaaguuggucc

SEQ ID NO: 853583 - RNA, 19 nt, Artificial Sequence
  Description of Artificial Sequence: Synthetic oligonucleotide
aaggucguggagcgauacc

SEQ ID NO: 853584 - RNA, 19 nt, Artificial Sequence
  Description of Artificial Sequence: Synthetic oligonucleotide
uacuucguguuuucugccg

SEQ ID NO: 853585 - RNA, 19 nt, Artificial Sequence
  Description of Artificial Sequence: Synthetic oligonucleotide
uucaagguguaaccuuucc

SEQ ID NO: 853586 - RNA, 19 nt, Artificial Sequence
  Description of Artificial Sequence: Synthetic oligonucleotide
accgaguaggauucacagc

SEQ ID NO: 853587 - RNA, 19 nt, Artificial Sequence
  Description of Artificial Sequence: Synthetic oligonucleotide
gacacuacccgagugguug

SEQ ID NO: 853588 - RNA, 19 nt, Artificial Sequence
  Description of Artificial Sequence: Synthetic oligonucleotide
acuucguguuuucugccgg

SEQ ID NO: 853589 - RNA, 19 nt, Artificial Sequence
  Description of Artificial Sequence: Synthetic oligonucleotide
gguaacacgugguaggagc

SEQ ID NO: 853590 - RNA, 19 nt, Artificial Sequence
  Description of Artificial Sequence: Synthetic oligonucleotide
ggaaucuuuguacugucag

SEQ ID NO: 853591 - RNA, 19 nt, Artificial Sequence
  Description of Artificial Sequence: Synthetic oligonucleotide
agguguaaccuuuccauga

SEQ ID NO: 853592 - RNA, 19 nt, Artificial Sequence
  Description of Artificial Sequence: Synthetic oligonucleotide
gguacuucguguuuucugc

SEQ ID NO: 853593 - RNA, 19 nt, Artificial Sequence
  Description of Artificial Sequence: Synthetic oligonucleotide
guaaccuuuccaugaguag

SEQ ID NO: 853594 - RNA, 19 nt, Artificial Sequence
  Description of Artificial Sequence: Synthetic oligonucleotide
ugggaagucaacaccuacu

SEQ ID NO: 853595 - RNA, 19 nt, Artificial Sequence
  Description of Artificial Sequence: Synthetic oligonucleotide
caaaggucguaacacggag

SEQ ID NO: 853596 - RNA, 19 nt, Artificial Sequence
  Description of Artificial Sequence: Synthetic oligonucleotide
acauuaaguuggcucgauc

SEQ ID NO: 853597 - RNA, 19 nt, Artificial Sequence
  Description of Artificial Sequence: Synthetic oligonucleotide
agucguuguagacaugcca

SEQ ID NO: 853598 - RNA, 19 nt, Artificial Sequence
  Description of Artificial Sequence: Synthetic oligonucleotide
aggcaaaggucguaacacg

SEQ ID NO: 853599 - RNA, 19 nt, Artificial Sequence
  Description of Artificial Sequence: Synthetic oligonucleotide
agucaacaccuacugaacu

SEQ ID NO: 853600 - RNA, 19 nt, Artificial Sequence
  Description of Artificial Sequence: Synthetic oligonucleotide
ugacgagccaucuugucau

SEQ ID NO: 853601 - RNA, 19 nt, Artificial Sequence
  Description of Artificial Sequence: Synthetic oligonucleotide
ugauuucaagguguaaccu

SEQ ID NO: 853602 - RNA, 19 nt, Artificial Sequence
  Description of Artificial Sequence: Synthetic oligonucleotide
agugccaagcggcucagug

SEQ ID NO: 853603 - RNA, 19 nt, Artificial Sequence
  Description of Artificial Sequence: Synthetic oligonucleotide
uucggaggccaacaugacc

SEQ ID NO: 853604 - RNA, 19 nt, Artificial Sequence
  Description of Artificial Sequence: Synthetic oligonucleotide
ucacagacuuggaacgggc

SEQ ID NO: 853605 - RNA, 19 nt, Artificial Sequence
  Description of Artificial Sequence: Synthetic oligonucleotide
ucccuucgaagacaaaagu

SEQ ID NO: 853606 - RNA, 19 nt, Artificial Sequence
  Description of Artificial Sequence: Synthetic oligonucleotide
auccccauuggacgcaacg

SEQ ID NO: 853607 - RNA, 19 nt, Artificial Sequence
  Description of Artificial Sequence: Synthetic oligonucleotide
agggcuuccggcuuuguca

SEQ ID NO: 853608 - RNA, 19 nt, Artificial Sequence
  Description of Artificial Sequence: Synthetic oligonucleotide
uaggauucacagcuucaca

SEQ ID NO: 853609 - RNA, 19 nt, Artificial Sequence
  Description of Artificial Sequence: Synthetic oligonucleotide
ucuaggacgagagccugag

SEQ ID NO: 853610 - RNA, 19 nt, Artificial Sequence
  Description of Artificial Sequence: Synthetic oligonucleotide
agguggaaaaucgauucag

SEQ ID NO: 853611 - RNA, 19 nt, Artificial Sequence
  Description of Artificial Sequence: Synthetic oligonucleotide
cuugccggaagucccuucg

SEQ ID NO: 853612 - RNA, 19 nt, Artificial Sequence
  Description of Artificial Sequence: Synthetic oligonucleotide
uggguuucggcgcuccuug

SEQ ID NO: 853613 - RNA, 19 nt, Artificial Sequence
  Description of Artificial Sequence: Synthetic oligonucleotide
gauugguggugcccggcgg

SEQ ID NO: 853614 - RNA, 19 nt, Artificial Sequence
  Description of Artificial Sequence: Synthetic oligonucleotide
aaccuuuccaugaguagcu

SEQ ID NO: 853615 - RNA, 19 nt, Artificial Sequence
  Description of Artificial Sequence: Synthetic oligonucleotide
guuggcucgaucgucauca

SEQ ID NO: 853616 - RNA, 19 nt, Artificial Sequence
  Description of Artificial Sequence: Synthetic oligonucleotide
guccauaguggacacuacc

SEQ ID NO: 853617 - RNA, 19 nt, Artificial Sequence
  Description of Artificial Sequence: Synthetic oligonucleotide
ccccuauuagauuaaagac

SEQ ID NO: 853618 - RNA, 19 nt, Artificial Sequence
  Description of Artificial Sequence: Synthetic oligonucleotide
gacgcaacgucccggcugc

SEQ ID NO: 853619 - RNA, 19 nt, Artificial Sequence
  Description of Artificial Sequence: Synthetic oligonucleotide
ucgaucgucaucacucaau

SEQ ID NO: 853620 - RNA, 19 nt, Artificial Sequence
  Description of Artificial Sequence: Synthetic oligonucleotide
aacaagguggaagggugcu

SEQ ID NO: 853621 - RNA, 19 nt, Artificial Sequence
  Description of Artificial Sequence: Synthetic oligonucleotide
auaaugggagcuacaacca

SEQ ID NO: 853622 - RNA, 19 nt, Artificial Sequence
  Description of Artificial Sequence: Synthetic oligonucleotide
acuuggaacgggcuaaguu

SEQ ID NO: 853623 - RNA, 19 nt, Artificial Sequence
  Description of Artificial Sequence: Synthetic oligonucleotide
aguccccuaggcucagucg

SEQ ID NO: 853624 - RNA, 19 nt, Artificial Sequence
  Description of Artificial Sequence: Synthetic oligonucleotide
ggugaaaaggcugaaacaa

SEQ ID NO: 853625 - RNA, 19 nt, Artificial Sequence
  Description of Artificial Sequence: Synthetic oligonucleotide
auaguggacacuacccgag

SEQ ID NO: 853626 - RNA, 19 nt, Artificial Sequence
  Description of Artificial Sequence: Synthetic oligonucleotide
gacaaaagucucggagagg

SEQ ID NO: 853627 - RNA, 19 nt, Artificial Sequence
  Description of Artificial Sequence: Synthetic oligonucleotide
aggucggagugccaagcgg

SEQ ID NO: 853628 - RNA, 19 nt, Artificial Sequence
  Description of Artificial Sequence: Synthetic oligonucleotide
gggaagucaacaccuacug

SEQ ID NO: 853629 - RNA, 19 nt, Artificial Sequence
  Description of Artificial Sequence: Synthetic oligonucleotide
aaacacuguagcacggcgu

SEQ ID NO: 853630 - RNA, 19 nt, Artificial Sequence
  Description of Artificial Sequence: Synthetic oligonucleotide
uacccgagugguugcagag

SEQ ID NO: 853631 - RNA, 19 nt, Artificial Sequence
  Description of Artificial Sequence: Synthetic oligonucleotide
cuucaagguggugucacag

SEQ ID NO: 853632 - RNA, 19 nt, Artificial Sequence
  Description of Artificial Sequence: Synthetic oligonucleotide
aagacagcccggaaccgag

SEQ ID NO: 853633 - RNA, 19 nt, Artificial Sequence
  Description of Artificial Sequence: Synthetic oligonucleotide
gggagcuacaaccaacccc

SEQ ID NO: 853634 - RNA, 19 nt, Artificial Sequence
  Description of Artificial Sequence: Synthetic oligonucleotide
gcuguauccagagaaggag

SEQ ID NO: 853635 - RNA, 19 nt, Artificial Sequence
  Description of Artificial Sequence: Synthetic oligonucleotide
uuucugccggcaucgguca

SEQ ID NO: 853636 - RNA, 19 nt, Artificial Sequence
  Description of Artificial Sequence: Synthetic oligonucleotide
aaaggucguaacacggagu

SEQ ID NO: 853637 - RNA, 19 nt, Artificial Sequence
  Description of Artificial Sequence: Synthetic oligonucleotide
ggagucguuguagacaugc

SEQ ID NO: 853638 - RNA, 19 nt, Artificial Sequence
  Description of Artificial Sequence: Synthetic oligonucleotide
uuucaagguguaaccuuuc

SEQ ID NO: 853639 - RNA, 19 nt, Artificial Sequence
  Description of Artificial Sequence: Synthetic oligonucleotide
auccgcaaaggcuuccgug

SEQ ID NO: 853640 - RNA, 19 nt, Artificial Sequence
  Description of Artificial Sequence: Synthetic oligonucleotide
cauaguggacacuacccga

SEQ ID NO: 853641 - RNA, 19 nt, Artificial Sequence
  Description of Artificial Sequence: Synthetic oligonucleotide
ggcugaaacaaucccgcag

SEQ ID NO: 853642 - RNA, 19 nt, Artificial Sequence
  Description of Artificial Sequence: Synthetic oligonucleotide
auuggacgcaacgucccgg

SEQ ID NO: 853643 - RNA, 19 nt, Artificial Sequence
  Description of Artificial Sequence: Synthetic oligonucleotide
cuccccuauuagauuaaag

SEQ ID NO: 853644 - RNA, 19 nt, Artificial Sequence
  Description of Artificial Sequence: Synthetic oligonucleotide
cucggcgagguggagaggg

SEQ ID NO: 853645 - RNA, 19 nt, Artificial Sequence
  Description of Artificial Sequence: Synthetic oligonucleotide
ggcaaaggucguaacacgg

SEQ ID NO: 853646 - RNA, 19 nt, Artificial Sequence
  Description of Artificial Sequence: Synthetic oligonucleotide
uuggacgcaacgucccggc

SEQ ID NO: 853647 - RNA, 19 nt, Artificial Sequence
  Description of Artificial Sequence: Synthetic oligonucleotide
cugaaacaaucccgcagag

SEQ ID NO: 853648 - RNA, 19 nt, Artificial Sequence
  Description of Artificial Sequence: Synthetic oligonucleotide
uuucggcgcuccuugcugc

SEQ ID NO: 853649 - RNA, 19 nt, Artificial Sequence
  Description of Artificial Sequence: Synthetic oligonucleotide
ucaaaguggguggcucagg

SEQ ID NO: 853650 - RNA, 19 nt, Artificial Sequence
  Description of Artificial Sequence: Synthetic oligonucleotide
ucggucacacacuggggca

SEQ ID NO: 853651 - RNA, 19 nt, Artificial Sequence
  Description of Artificial Sequence: Synthetic oligonucleotide
cccuauuagauuaaagaca

SEQ ID NO: 853652 - RNA, 19 nt, Artificial Sequence
  Description of Artificial Sequence: Synthetic oligonucleotide
ugggagcuacaaccaaccc

SEQ ID NO: 853653 - RNA, 19 nt, Artificial Sequence
  Description of Artificial Sequence: Synthetic oligonucleotide
gcuaaguugguccgggaug

SEQ ID NO: 853654 - RNA, 19 nt, Artificial Sequence
  Description of Artificial Sequence: Synthetic oligonucleotide
acgcuuccacauuaaguug

SEQ ID NO: 853655 - RNA, 19 nt, Artificial Sequence
  Description of Artificial Sequence: Synthetic oligonucleotide
gugacgagccaucuuguca

SEQ ID NO: 853656 - RNA, 19 nt, Artificial Sequence
  Description of Artificial Sequence: Synthetic oligonucleotide
gcugaaacaaucccgcaga

SEQ ID NO: 853657 - RNA, 19 nt, Artificial Sequence
  Description of Artificial Sequence: Synthetic oligonucleotide
gacgucucugagguaaaug

SEQ ID NO: 853658 - RNA, 19 nt, Artificial Sequence
  Description of Artificial Sequence: Synthetic oligonucleotide
agacgccggagagaagugc

SEQ ID NO: 853659 - RNA, 19 nt, Artificial Sequence
  Description of Artificial Sequence: Synthetic oligonucleotide
ccauaguggacacuacccg

SEQ ID NO: 853660 - RNA, 19 nt, Artificial Sequence
  Description of Artificial Sequence: Synthetic oligonucleotide
gaucgucaucacucaauuc

SEQ ID NO: 853661 - RNA, 19 nt, Artificial Sequence
  Description of Artificial Sequence: Synthetic oligonucleotide
acggucgccccucccaagg

SEQ ID NO: 853662 - RNA, 19 nt, Artificial Sequence
  Description of Artificial Sequence: Synthetic oligonucleotide
gaauggcucagagggccgg

SEQ ID NO: 853663 - RNA, 19 nt, Artificial Sequence
  Description of Artificial Sequence: Synthetic oligonucleotide
gauuucaagguguaaccuu

SEQ ID NO: 853664 - RNA, 19 nt, Artificial Sequence
  Description of Artificial Sequence: Synthetic oligonucleotide
agaggccuagugcugcuca

SEQ ID NO: 853665 - RNA, 19 nt, Artificial Sequence
  Description of Artificial Sequence: Synthetic oligonucleotide
caucggucacacacugggg

SEQ ID NO: 853666 - RNA, 19 nt, Artificial Sequence
  Description of Artificial Sequence: Synthetic oligonucleotide
aguuggcucgaucgucauc

SEQ ID NO: 853667 - RNA, 19 nt, Artificial Sequence
  Description of Artificial Sequence: Synthetic oligonucleotide
ggcucagucgcugcaaugg

SEQ ID NO: 853668 - RNA, 19 nt, Artificial Sequence
  Description of Artificial Sequence: Synthetic oligonucleotide
caaccagucuggcaccggc

SEQ ID NO: 853669 - RNA, 19 nt, Artificial Sequence
  Description of Artificial Sequence: Synthetic oligonucleotide
gaccccaugaucugcucga

SEQ ID NO: 853670 - RNA, 19 nt, Artificial Sequence
  Description of Artificial Sequence: Synthetic oligonucleotide
cauuggacgcaacgucccg

SEQ ID NO: 853671 - RNA, 19 nt, Artificial Sequence
  Description of Artificial Sequence: Synthetic oligonucleotide
gagagccugagguccgacc

SEQ ID NO: 853672 - RNA, 19 nt, Artificial Sequence
  Description of Artificial Sequence: Synthetic oligonucleotide
guugaggaaacauguauuu

SEQ ID NO: 853673 - RNA, 19 nt, Artificial Sequence
  Description of Artificial Sequence: Synthetic oligonucleotide
ucguggagcgauacccaca

SEQ ID NO: 853674 - RNA, 19 nt, Artificial Sequence
  Description of Artificial Sequence: Synthetic oligonucleotide
uggacacuacccgaguggu

SEQ ID NO: 853675 - RNA, 19 nt, Artificial Sequence
  Description of Artificial Sequence: Synthetic oligonucleotide
guccguaugcugagcaggg

SEQ ID NO: 853676 - RNA, 19 nt, Artificial Sequence
  Description of Artificial Sequence: Synthetic oligonucleotide
agucgcugcaaugggaagu

SEQ ID NO: 853677 - RNA, 19 nt, Artificial Sequence
  Description of Artificial Sequence: Synthetic oligonucleotide
ucgaaggucguggagcgau

SEQ ID NO: 853678 - RNA, 19 nt, Artificial Sequence
  Description of Artificial Sequence: Synthetic oligonucleotide
caaggggaccccaugaucu

SEQ ID NO: 853679 - RNA, 19 nt, Artificial Sequence
  Description of Artificial Sequence: Synthetic oligonucleotide
ggcaauccccauuggacgc

SEQ ID NO: 853680 - RNA, 19 nt, Artificial Sequence
  Description of Artificial Sequence: Synthetic oligonucleotide
gccggcaucggucacacac

SEQ ID NO: 853681 - RNA, 19 nt, Artificial Sequence
  Description of Artificial Sequence: Synthetic oligonucleotide
gucguuguagacaugccaa

SEQ ID NO: 853682 - RNA, 19 nt, Artificial Sequence
  Description of Artificial Sequence: Synthetic oligonucleotide
ggagcacgaggauucgggg

SEQ ID NO: 853683 - RNA, 19 nt, Artificial Sequence
  Description of Artificial Sequence: Synthetic oligonucleotide
cagcccggaaccgaguagg

SEQ ID NO: 853684 - RNA, 19 nt, Artificial Sequence
  Description of Artificial Sequence: Synthetic oligonucleotide
acauccgcaaaggcuuccg

SEQ ID NO: 853685 - RNA, 19 nt, Artificial Sequence
  Description of Artificial Sequence: Synthetic oligonucleotide
agcacggcguugaggaaac

SEQ ID NO: 853686 - RNA, 19 nt, Artificial Sequence
  Description of Artificial Sequence: Synthetic oligonucleotide
gacgagagccugagguccg

SEQ ID NO: 853687 - RNA, 19 nt, Artificial Sequence
  Description of Artificial Sequence: Synthetic oligonucleotide
caaggcaauccccauugga

SEQ ID NO: 853688 - RNA, 19 nt, Artificial Sequence
  Description of Artificial Sequence: Synthetic oligonucleotide
guggaaaaucgauucagau

SEQ ID NO: 853689 - RNA, 19 nt, Artificial Sequence
  Description of Artificial Sequence: Synthetic oligonucleotide
cccauuggacgcaacgucc

SEQ ID NO: 853690 - RNA, 19 nt, Artificial Sequence
  Description of Artificial Sequence: Synthetic oligonucleotide
agcagugugugacgagcca

SEQ ID NO: 853691 - RNA, 19 nt, Artificial Sequence
  Description of Artificial Sequence: Synthetic oligonucleotide
aacacggaguuuggcccag

SEQ ID NO: 853692 - RNA, 19 nt, Artificial Sequence
  Description of Artificial Sequence: Synthetic oligonucleotide
uccccauuggacgcaacgu

SEQ ID NO: 853693 - RNA, 19 nt, Artificial Sequence
  Description of Artificial Sequence: Synthetic oligonucleotide
caggucggagugccaagcg

SEQ ID NO: 853694 - RNA, 19 nt, Artificial Sequence
  Description of Artificial Sequence: Synthetic oligonucleotide
gaaggucguggagcgauac

SEQ ID NO: 853695 - RNA, 19 nt, Artificial Sequence
  Description of Artificial Sequence: Synthetic oligonucleotide
ugagguaaauggggagcug

SEQ ID NO: 853696 - RNA, 19 nt, Artificial Sequence
  Description of Artificial Sequence: Synthetic oligonucleotide
gaaccgaguaggauucaca

SEQ ID NO: 853697 - RNA, 19 nt, Artificial Sequence
  Description of Artificial Sequence: Synthetic oligonucleotide
ggcucgaucgucaucacuc

SEQ ID NO: 853698 - RNA, 19 nt, Artificial Sequence
  Description of Artificial Sequence: Synthetic oligonucleotide
ggauugguggugcccggcg

SEQ ID NO: 853699 - RNA, 19 nt, Artificial Sequence
  Description of Artificial Sequence: Synthetic oligonucleotide
ggagacacgggagucguug

SEQ ID NO: 853700 - RNA, 19 nt, Artificial Sequence
  Description of Artificial Sequence: Synthetic oligonucleotide
uagcucgccagugcccacg

SEQ ID NO: 853701 - RNA, 19 nt, Artificial Sequence
  Description of Artificial Sequence: Synthetic oligonucleotide
uccgugagcuccugggcuc

SEQ ID NO: 853702 - RNA, 19 nt, Artificial Sequence
  Description of Artificial Sequence: Synthetic oligonucleotide
gaagacagcccggaaccga

SEQ ID NO: 853703 - RNA, 19 nt, Artificial Sequence
  Description of Artificial Sequence: Synthetic oligonucleotide
cagugugugacgagccauc

SEQ ID NO: 853704 - RNA, 19 nt, Artificial Sequence
  Description of Artificial Sequence: Synthetic oligonucleotide
ucacauccgcaaaggcuuc

SEQ ID NO: 853705 - RNA, 19 nt, Artificial Sequence
  Description of Artificial Sequence: Synthetic oligonucleotide
uugguccgggaugggagag

SEQ ID NO: 853706 - RNA, 19 nt, Artificial Sequence
  Description of Artificial Sequence: Synthetic oligonucleotide
agcgauacccacaggccug

SEQ ID NO: 853707 - RNA, 19 nt, Artificial Sequence
  Description of Artificial Sequence: Synthetic oligonucleotide
cugguagacagggcuuccg

SEQ ID NO: 853708 - RNA, 19 nt, Artificial Sequence
  Description of Artificial Sequence: Synthetic oligonucleotide
gucguggagcgauacccac

SEQ ID NO: 853709 - RNA, 19 nt, Artificial Sequence
  Description of Artificial Sequence: Synthetic oligonucleotide
cucaggucggagugccaag

SEQ ID NO: 853710 - RNA, 19 nt, Artificial Sequence
  Description of Artificial Sequence: Synthetic oligonucleotide
uaggcucagucgcugcaau

SEQ ID NO: 853711 - RNA, 19 nt, Artificial Sequence
  Description of Artificial Sequence: Synthetic oligonucleotide
cuaggacgagagccugagg

SEQ ID NO: 853712 - RNA, 19 nt, Artificial Sequence
  Description of Artificial Sequence: Synthetic oligonucleotide
gaaaaucgauucagaugga

SEQ ID NO: 853713 - RNA, 19 nt, Artificial Sequence
  Description of Artificial Sequence: Synthetic oligonucleotide
gcaccaaucacauccgcaa

SEQ ID NO: 853714 - RNA, 19 nt, Artificial Sequence
  Description of Artificial Sequence: Synthetic oligonucleotide
agggcaccaaucacauccg

SEQ ID NO: 853715 - RNA, 19 nt, Artificial Sequence
  Description of Artificial Sequence: Synthetic oligonucleotide
uagacgucucugagguaaa

SEQ ID NO: 853716 - RNA, 19 nt, Artificial Sequence
  Description of Artificial Sequence: Synthetic oligonucleotide
ggagcgauacccacaggcc

SEQ ID NO: 853717 - RNA, 19 nt, Artificial Sequence
  Description of Artificial Sequence: Synthetic oligonucleotide
uugccggaagucccuucga

SEQ ID NO: 853718 - RNA, 19 nt, Artificial Sequence
  Description of Artificial Sequence: Synthetic oligonucleotide
agguaacacgugguaggag

SEQ ID NO: 853719 - RNA, 19 nt, Artificial Sequence
  Description of Artificial Sequence: Synthetic oligonucleotide
ucacuggaugccaccugau

SEQ ID NO: 853720 - RNA, 19 nt, Artificial Sequence
  Description of Artificial Sequence: Synthetic oligonucleotide
caggauugguggugcccgg

SEQ ID NO: 853721 - RNA, 19 nt, Artificial Sequence
  Description of Artificial Sequence: Synthetic oligonucleotide
uggaacgggcuaaguuggu

SEQ ID NO: 853722 - RNA, 19 nt, Artificial Sequence
  Description of Artificial Sequence: Synthetic oligonucleotide
gcucagucgcugcaauggg

SEQ ID NO: 853723 - RNA, 19 nt, Artificial Sequence
  Description of Artificial Sequence: Synthetic oligonucleotide
ggucggagugccaagcggc

SEQ ID NO: 853724 - RNA, 19 nt, Artificial Sequence
  Description of Artificial Sequence: Synthetic oligonucleotide
cucagucgcugcaauggga

SEQ ID NO: 853725 - RNA, 19 nt, Artificial Sequence
  Description of Artificial Sequence: Synthetic oligonucleotide
aaagucucggagaggccua

SEQ ID NO: 853726 - RNA, 19 nt, Artificial Sequence
  Description of Artificial Sequence: Synthetic oligonucleotide
caagacgccggagagaagu

SEQ ID NO: 853727 - RNA, 19 nt, Artificial Sequence
  Description of Artificial Sequence: Synthetic oligonucleotide
gggacguauuucuggaaga

SEQ ID NO: 853728 - RNA, 19 nt, Artificial Sequence
  Description of Artificial Sequence: Synthetic oligonucleotide
acuacccgagugguugcag

SEQ ID NO: 853729 - RNA, 19 nt, Artificial Sequence
  Description of Artificial Sequence: Synthetic oligonucleotide
ccgaguaggauucacagcu

SEQ ID NO: 853730 - RNA, 19 nt, Artificial Sequence
  Description of Artificial Sequence: Synthetic oligonucleotide
ggacgcaacgucccggcug

SEQ ID NO: 853731 - RNA, 19 nt, Artificial Sequence
  Description of Artificial Sequence: Synthetic oligonucleotide
ccaggauugguggugcccg

SEQ ID NO: 853732 - RNA, 19 nt, Artificial Sequence
  Description of Artificial Sequence: Synthetic oligonucleotide
aaccagucuggcaccggca

SEQ ID NO: 853733 - RNA, 19 nt, Artificial Sequence
  Description of Artificial Sequence: Synthetic oligonucleotide
agggccgggcagguaacac

SEQ ID NO: 853734 - RNA, 19 nt, Artificial Sequence
  Description of Artificial Sequence: Synthetic oligonucleotide
ccgaccccgacccagcucc

SEQ ID NO: 853735 - RNA, 19 nt, Artificial Sequence
  Description of Artificial Sequence: Synthetic oligonucleotide
ucuugccggaagucccuuc

SEQ ID NO: 853736 - RNA, 19 nt, Artificial Sequence
  Description of Artificial Sequence: Synthetic oligonucleotide
uggagccucgggaggugga

SEQ ID NO: 853737 - RNA, 19 nt, Artificial Sequence
  Description of Artificial Sequence: Synthetic oligonucleotide
caagcggcucagugcggcc

SEQ ID NO: 853738 - RNA, 19 nt, Artificial Sequence
  Description of Artificial Sequence: Synthetic oligonucleotide
accggcacagggcugugua

SEQ ID NO: 853739 - RNA, 19 nt, Artificial Sequence
  Description of Artificial Sequence: Synthetic oligonucleotide
gacagcccggaaccgagua

SEQ ID NO: 853740 - RNA, 19 nt, Artificial Sequence
  Description of Artificial Sequence: Synthetic oligonucleotide
cacuguagcacggcguuga

SEQ ID NO: 853741 - RNA, 19 nt, Artificial Sequence
  Description of Artificial Sequence: Synthetic oligonucleotide
ggaagacagcccggaaccg

SEQ ID NO: 853742 - RNA, 19 nt, Artificial Sequence
  Description of Artificial Sequence: Synthetic oligonucleotide
cuacccgagugguugcaga

SEQ ID NO: 853743 - RNA, 19 nt, Artificial Sequence
  Description of Artificial Sequence: Synthetic oligonucleotide
agguccgaccccgacccag

SEQ ID NO: 853744 - RNA, 19 nt, Artificial Sequence
  Description of Artificial Sequence: Synthetic oligonucleotide
ggccuagugcugcucaaac

SEQ ID NO: 853745 - RNA, 19 nt, Artificial Sequence
  Description of Artificial Sequence: Synthetic oligonucleotide
gccggagagaagugcugcg

SEQ ID NO: 853746 - RNA, 19 nt, Artificial Sequence
  Description of Artificial Sequence: Synthetic oligonucleotide
cguggagcgauacccacag

SEQ ID NO: 853747 - RNA, 19 nt, Artificial Sequence
  Description of Artificial Sequence: Synthetic oligonucleotide
uggacgcaacgucccggcu

SEQ ID NO: 853748 - RNA, 19 nt, Artificial Sequence
  Description of Artificial Sequence: Synthetic oligonucleotide
cucagugcggccccuagcu

SEQ ID NO: 853749 - RNA, 19 nt, Artificial Sequence
  Description of Artificial Sequence: Synthetic oligonucleotide
caaaguggguggcucaggu

SEQ ID NO: 853750 - RNA, 19 nt, Artificial Sequence
  Description of Artificial Sequence: Synthetic oligonucleotide
aggggacguauuucuggaa

SEQ ID NO: 853751 - RNA, 19 nt, Artificial Sequence
  Description of Artificial Sequence: Synthetic oligonucleotide
acgggcuaaguugguccgg

SEQ ID NO: 853752 - RNA, 19 nt, Artificial Sequence
  Description of Artificial Sequence: Synthetic oligonucleotide
acgucccggcugcucacag

SEQ ID NO: 853753 - RNA, 19 nt, Artificial Sequence
  Description of Artificial Sequence: Synthetic oligonucleotide
ccggaaccgaguaggauuc

SEQ ID NO: 853754 - RNA, 19 nt, Artificial Sequence
  Description of Artificial Sequence: Synthetic oligonucleotide
ccggaagucccuucgaaga

SEQ ID NO: 853755 - RNA, 19 nt, Artificial Sequence
  Description of Artificial Sequence: Synthetic oligonucleotide
cagaguagaauggcucaga

SEQ ID NO: 853756 - RNA, 19 nt, Artificial Sequence
  Description of Artificial Sequence: Synthetic oligonucleotide
cagguaacacgugguagga

SEQ ID NO: 853757 - RNA, 19 nt, Artificial Sequence
  Description of Artificial Sequence: Synthetic oligonucleotide
ggcagcuuuucaacuggcc

SEQ ID NO: 853758 - RNA, 19 nt, Artificial Sequence
  Description of Artificial Sequence: Synthetic oligonucleotide
uccguaugcugagcagggu

SEQ ID NO: 853759 - RNA, 19 nt, Artificial Sequence
  Description of Artificial Sequence: Synthetic oligonucleotide
ccgcagagacacuuugccc

SEQ ID NO: 853760 - RNA, 19 nt, Artificial Sequence
  Description of Artificial Sequence: Synthetic oligonucleotide
uccgaccccgacccagcuc

SEQ ID NO: 853761 - RNA, 19 nt, Artificial Sequence
  Description of Artificial Sequence: Synthetic oligonucleotide
gcaaaguccccuaggcuca

SEQ ID NO: 853762 - RNA, 19 nt, Artificial Sequence
  Description of Artificial Sequence: Synthetic oligonucleotide
cucuaggacgagagccuga

SEQ ID NO: 853763 - RNA, 19 nt, Artificial Sequence
  Description of Artificial Sequence: Synthetic oligonucleotide
ggaaccgaguaggauucac

SEQ ID NO: 853764 - RNA, 19 nt, Artificial Sequence
  Description of Artificial Sequence: Synthetic oligonucleotide
uucugccggcaucggucac

SEQ ID NO: 853765 - RNA, 19 nt, Artificial Sequence
  Description of Artificial Sequence: Synthetic oligonucleotide
gggcccggggaggaaaugg

SEQ ID NO: 853766 - RNA, 19 nt, Artificial Sequence
  Description of Artificial Sequence: Synthetic oligonucleotide
gcguugaggaaacauguau

SEQ ID NO: 853767 - RNA, 19 nt, Artificial Sequence
  Description of Artificial Sequence: Synthetic oligonucleotide
guacauggucaagggccug

SEQ ID NO: 853768 - RNA, 19 nt, Artificial Sequence
  Description of Artificial Sequence: Synthetic oligonucleotide
gcucgguccguaugcugag

SEQ ID NO: 853769 - RNA, 19 nt, Artificial Sequence
  Description of Artificial Sequence: Synthetic oligonucleotide
gccuagugcugcucaaaca

SEQ ID NO: 853770 - RNA, 19 nt, Artificial Sequence
  Description of Artificial Sequence: Synthetic oligonucleotide
cuagcucgccagugcccac

SEQ ID NO: 853771 - RNA, 19 nt, Artificial Sequence
  Description of Artificial Sequence: Synthetic oligonucleotide
cacggucgccccucccaag

SEQ ID NO: 853772 - RNA, 19 nt, Artificial Sequence
  Description of Artificial Sequence: Synthetic oligonucleotide
ccccauuggacgcaacguc

SEQ ID NO: 853773 - RNA, 19 nt, Artificial Sequence
  Description of Artificial Sequence: Synthetic oligonucleotide
ccaaggcaauccccauugg

SEQ ID NO: 853774 - RNA, 19 nt, Artificial Sequence
  Description of Artificial Sequence: Synthetic oligonucleotide
ucggagugccaagcggcuc

SEQ ID NO: 853775 - RNA, 19 nt, Artificial Sequence
  Description of Artificial Sequence: Synthetic oligonucleotide
ggcucgguccguaugcuga

SEQ ID NO: 853776 - RNA, 19 nt, Artificial Sequence
  Description of Artificial Sequence: Synthetic oligonucleotide
cugccggcaucggucacac

SEQ ID NO: 853777 - RNA, 19 nt, Artificial Sequence
  Description of Artificial Sequence: Synthetic oligonucleotide
cacggaguuuggcccagga

SEQ ID NO: 853778 - RNA, 19 nt, Artificial Sequence
  Description of Artificial Sequence: Synthetic oligonucleotide
ucgcugcaaugggaaguca

SEQ ID NO: 853779 - RNA, 19 nt, Artificial Sequence
  Description of Artificial Sequence: Synthetic oligonucleotide
ggaacgggcuaaguugguc

SEQ ID NO: 853780 - RNA, 19 nt, Artificial Sequence
  Description of Artificial Sequence: Synthetic oligonucleotide
cucgaucgucaucacucaa

SEQ ID NO: 853781 - RNA, 19 nt, Artificial Sequence
  Description of Artificial Sequence: Synthetic oligonucleotide
agacgucucugagguaaau

SEQ ID NO: 853782 - RNA, 19 nt, Artificial Sequence
  Description of Artificial Sequence: Synthetic oligonucleotide
cguguuuucugccggcauc

SEQ ID NO: 853783 - RNA, 19 nt, Artificial Sequence
  Description of Artificial Sequence: Synthetic oligonucleotide
acacggaguuuggcccagg

SEQ ID NO: 853784 - RNA, 19 nt, Artificial Sequence
  Description of Artificial Sequence: Synthetic oligonucleotide
ccggggaggaaaugguauc

SEQ ID NO: 853785 - RNA, 19 nt, Artificial Sequence
  Description of Artificial Sequence: Synthetic oligonucleotide
gccaggauugguggugccc

SEQ ID NO: 853786 - RNA, 19 nt, Artificial Sequence
  Description of Artificial Sequence: Synthetic oligonucleotide
ggggcuguacauggucaag

SEQ ID NO: 853787 - RNA, 19 nt, Artificial Sequence
  Description of Artificial Sequence: Synthetic oligonucleotide
gguaacgcuuccacauuaa

SEQ ID NO: 853788 - RNA, 19 nt, Artificial Sequence
  Description of Artificial Sequence: Synthetic oligonucleotide
gcucagugcggccccuagc

SEQ ID NO: 853789 - RNA, 19 nt, Artificial Sequence
  Description of Artificial Sequence: Synthetic oligonucleotide
ccggcuuugucacuggcaa

SEQ ID NO: 853790 - RNA, 19 nt, Artificial Sequence
  Description of Artificial Sequence: Synthetic oligonucleotide
ccgcaaaggcuuccgugag

SEQ ID NO: 853791 - RNA, 19 nt, Artificial Sequence
  Description of Artificial Sequence: Synthetic oligonucleotide
caccuacugaacuuuucuu

SEQ ID NO: 853792 - RNA, 19 nt, Artificial Sequence
  Description of Artificial Sequence: Synthetic oligonucleotide
guagcacggcguugaggaa

SEQ ID NO: 853793 - RNA, 19 nt, Artificial Sequence
  Description of Artificial Sequence: Synthetic oligonucleotide
cuaggcucagucgcugcaa

SEQ ID NO: 853794 - RNA, 19 nt, Artificial Sequence
  Description of Artificial Sequence: Synthetic oligonucleotide
ggccucgucgguugauuuc

SEQ ID NO: 853795 - RNA, 19 nt, Artificial Sequence
  Description of Artificial Sequence: Synthetic oligonucleotide
ucgccccucccaaggcaau

SEQ ID NO: 853796 - RNA, 19 nt, Artificial Sequence
  Description of Artificial Sequence: Synthetic oligonucleotide
cccaagacgccggagagaa

SEQ ID NO: 853797 - RNA, 19 nt, Artificial Sequence
  Description of Artificial Sequence: Synthetic oligonucleotide
ggucguggagcgauaccca

SEQ ID NO: 853798 - RNA, 19 nt, Artificial Sequence
  Description of Artificial Sequence: Synthetic oligonucleotide
cccuaggcucagucgcugc

SEQ ID NO: 853799 - RNA, 19 nt, Artificial Sequence
  Description of Artificial Sequence: Synthetic oligonucleotide
gggcucgguccguaugcug

SEQ ID NO: 853800 - RNA, 19 nt, Artificial Sequence
  Description of Artificial Sequence: Synthetic oligonucleotide
aggucguaacacggaguuu

SEQ ID NO: 853801 - RNA, 19 nt, Artificial Sequence
  Description of Artificial Sequence: Synthetic oligonucleotide
ccgagugguugcagagggc

SEQ ID NO: 853802 - RNA, 19 nt, Artificial Sequence
  Description of Artificial Sequence: Synthetic oligonucleotide
gguuucggcgcuccuugcu

SEQ ID NO: 853803 - RNA, 19 nt, Artificial Sequence
  Description of Artificial Sequence: Synthetic oligonucleotide
gagaaggaggggacguauu

SEQ ID NO: 853804 - RNA, 19 nt, Artificial Sequence
  Description of Artificial Sequence: Synthetic oligonucleotide
agcccggaaccgaguagga

SEQ ID NO: 853805 - RNA, 19 nt, Artificial Sequence
  Description of Artificial Sequence: Synthetic oligonucleotide
gugugacgagccaucuugu

SEQ ID NO: 853806 - RNA, 19 nt, Artificial Sequence
  Description of Artificial Sequence: Synthetic oligonucleotide
ccggcacagggcuguguag

SEQ ID NO: 853807 - RNA, 19 nt, Artificial Sequence
  Description of Artificial Sequence: Synthetic oligonucleotide
cagauggagcacgaggauu

SEQ ID NO: 853808 - RNA, 19 nt, Artificial Sequence
  Description of Artificial Sequence: Synthetic oligonucleotide
ccguaugcugagcagggua

SEQ ID NO: 853809 - RNA, 19 nt, Artificial Sequence
  Description of Artificial Sequence: Synthetic oligonucleotide
ccuagcucgccagugccca

SEQ ID NO: 853810 - RNA, 19 nt, Artificial Sequence
  Description of Artificial Sequence: Synthetic oligonucleotide
ccccuccccuauuagauua

SEQ ID NO: 853811 - RNA, 19 nt, Artificial Sequence
  Description of Artificial Sequence: Synthetic oligonucleotide
gagguccgaccccgaccca

SEQ ID NO: 853812 - RNA, 19 nt, Artificial Sequence
  Description of Artificial Sequence: Synthetic oligonucleotide
cacuacccgagugguugca

SEQ ID NO: 853813 - RNA, 19 nt, Artificial Sequence
  Description of Artificial Sequence: Synthetic oligonucleotide
cgaagacaaaagucucgga

SEQ ID NO: 853814 - RNA, 19 nt, Artificial Sequence
  Description of Artificial Sequence: Synthetic oligonucleotide
cacggcguugaggaaacau

SEQ ID NO: 853815 - RNA, 19 nt, Artificial Sequence
  Description of Artificial Sequence: Synthetic oligonucleotide
ccaaccagucuggcaccgg

SEQ ID NO: 853816 - RNA, 19 nt, Artificial Sequence
  Description of Artificial Sequence: Synthetic oligonucleotide
cagagaaggaggggacgua

SEQ ID NO: 853817 - RNA, 19 nt, Artificial Sequence
  Description of Artificial Sequence: Synthetic oligonucleotide
ccgacccagcuccacuuuc

SEQ ID NO: 853818 - RNA, 19 nt, Artificial Sequence
  Description of Artificial Sequence: Synthetic oligonucleotide
cacauuaaguuggcucgau

SEQ ID NO: 853819 - RNA, 19 nt, Artificial Sequence
  Description of Artificial Sequence: Synthetic oligonucleotide
gucggagugccaagcggcu

SEQ ID NO: 853820 - RNA, 19 nt, Artificial Sequence
  Description of Artificial Sequence: Synthetic oligonucleotide
ggcguugaggaaacaugua

SEQ ID NO: 853821 - RNA, 19 nt, Artificial Sequence
  Description of Artificial Sequence: Synthetic oligonucleotide
cggcaucggucacacacug

SEQ ID NO: 853822 - RNA, 19 nt, Artificial Sequence
  Description of Artificial Sequence: Synthetic oligonucleotide
ccaagacgccggagagaag

SEQ ID NO: 853823 - RNA, 19 nt, Artificial Sequence
  Description of Artificial Sequence: Synthetic oligonucleotide
gggagguggaaaaucgauu

SEQ ID NO: 853824 - RNA, 19 nt, Artificial Sequence
  Description of Artificial Sequence: Synthetic oligonucleotide
cgguccguaugcugagcag

SEQ ID NO: 853825 - RNA, 19 nt, Artificial Sequence
  Description of Artificial Sequence: Synthetic oligonucleotide
ccgugagcuccugggcucg

SEQ ID NO: 853826 - RNA, 19 nt, Artificial Sequence
  Description of Artificial Sequence: Synthetic oligonucleotide
cgauucagauggagcacga

SEQ ID NO: 853827 - RNA, 19 nt, Artificial Sequence
  Description of Artificial Sequence: Synthetic oligonucleotide
ccacauuaaguuggcucga

SEQ ID NO: 853828 - RNA, 19 nt, Artificial Sequence
  Description of Artificial Sequence: Synthetic oligonucleotide
ugccggcaucggucacaca

SEQ ID NO: 853829 - RNA, 19 nt, Artificial Sequence
  Description of Artificial Sequence: Synthetic oligonucleotide
ggccgggcagguaacacgu

SEQ ID NO: 853830 - RNA, 19 nt, Artificial Sequence
  Description of Artificial Sequence: Synthetic oligonucleotide
aggcuuccgugagcuccug

SEQ ID NO: 853831 - RNA, 19 nt, Artificial Sequence
  Description of Artificial Sequence: Synthetic oligonucleotide
cggagugccaagcggcuca

SEQ ID NO: 853832 - RNA, 19 nt, Artificial Sequence
  Description of Artificial Sequence: Synthetic oligonucleotide
cccacggucgccccuccca

SEQ ID NO: 853833 - RNA, 19 nt, Artificial Sequence
  Description of Artificial Sequence: Synthetic oligonucleotide
gggagucguuguagacaug

SEQ ID NO: 853834 - RNA, 19 nt, Artificial Sequence
  Description of Artificial Sequence: Synthetic oligonucleotide
guccgaccccgacccagcu

SEQ ID NO: 853835 - RNA, 19 nt, Artificial Sequence
  Description of Artificial Sequence: Synthetic oligonucleotide
cgggagucguuguagacau

SEQ ID NO: 853836 - RNA, 19 nt, Artificial Sequence
  Description of Artificial Sequence: Synthetic oligonucleotide
ccccuaggcucagucgcug

SEQ ID NO: 853837 - RNA, 19 nt, Artificial Sequence
  Description of Artificial Sequence: Synthetic oligonucleotide
guccgggaugggagaggca

SEQ ID NO: 853838 - RNA, 19 nt, Artificial Sequence
  Description of Artificial Sequence: Synthetic oligonucleotide
cgaucgucaucacucaauu

SEQ ID NO: 853839 - RNA, 19 nt, Artificial Sequence
  Description of Artificial Sequence: Synthetic oligonucleotide
cgguugauuucaaggugua

SEQ ID NO: 853840 - RNA, 19 nt, Artificial Sequence
  Description of Artificial Sequence: Synthetic oligonucleotide
cggucgccccucccaaggc

SEQ ID NO: 853841 - RNA, 19 nt, Artificial Sequence
  Description of Artificial Sequence: Synthetic oligonucleotide
cccuccccuauuagauuaa

SEQ ID NO: 853842 - RNA, 19 nt, Artificial Sequence
  Description of Artificial Sequence: Synthetic oligonucleotide
ccggcaucggucacacacu

SEQ ID NO: 853843 - RNA, 19 nt, Artificial Sequence
  Description of Artificial Sequence: Synthetic oligonucleotide
gccgggcagguaacacgug

SEQ ID NO: 853844 - RNA, 19 nt, Artificial Sequence
  Description of Artificial Sequence: Synthetic oligonucleotide
acgcaacgucccggcugcu

SEQ ID NO: 853845 - RNA, 19 nt, Artificial Sequence
  Description of Artificial Sequence: Synthetic oligonucleotide
ccuccccuauuagauuaaa

SEQ ID NO: 853846 - RNA, 19 nt, Artificial Sequence
  Description of Artificial Sequence: Synthetic oligonucleotide
ccacggucgccccucccaa

SEQ ID NO: 853847 - RNA, 19 nt, Artificial Sequence
  Description of Artificial Sequence: Synthetic oligonucleotide
ccucgucgguugauuucaa

SEQ ID NO: 853848 - RNA, 19 nt, Artificial Sequence
  Description of Artificial Sequence: Synthetic oligonucleotide
gcccggggaggaaauggua

SEQ ID NO: 853849 - RNA, 19 nt, Artificial Sequence
  Description of Artificial Sequence: Synthetic oligonucleotide
ccggagagaagugcugcgu

SEQ ID NO: 853850 - RNA, 19 nt, Artificial Sequence
  Description of Artificial Sequence: Synthetic oligonucleotide
ccccaagacgccggagaga

SEQ ID NO: 853851 - RNA, 19 nt, Artificial Sequence
  Description of Artificial Sequence: Synthetic oligonucleotide
cgcaacgucccggcugcuc

SEQ ID NO: 853852 - RNA, 19 nt, Artificial Sequence
  Description of Artificial Sequence: Synthetic oligonucleotide
cucuugccggaagucccuu

SEQ ID NO: 853853 - RNA, 19 nt, Artificial Sequence
  Description of Artificial Sequence: Synthetic oligonucleotide
ggggcucgguccguaugcu

SEQ ID NO: 853854 - RNA, 19 nt, Artificial Sequence
  Description of Artificial Sequence: Synthetic oligonucleotide
ggucacacacuggggcauu

SEQ ID NO: 853855 - RNA, 19 nt, Artificial Sequence
  Description of Artificial Sequence: Synthetic oligonucleotide
cggcuuugucacuggcaaa

SEQ ID NO: 853856 - RNA, 19 nt, Artificial Sequence
  Description of Artificial Sequence: Synthetic oligonucleotide
ggacacuacccgagugguu

SEQ ID NO: 853857 - RNA, 19 nt, Artificial Sequence
  Description of Artificial Sequence: Synthetic oligonucleotide
gccucgggagguggaaaau

SEQ ID NO: 853858 - RNA, 19 nt, Artificial Sequence
  Description of Artificial Sequence: Synthetic oligonucleotide
gcccggaaccgaguaggau

SEQ ID NO: 853859 - RNA, 19 nt, Artificial Sequence
  Description of Artificial Sequence: Synthetic oligonucleotide
gcacggcguugaggaaaca

SEQ ID NO: 853860 - RNA, 19 nt, Artificial Sequence
  Description of Artificial Sequence: Synthetic oligonucleotide
cggaaccgaguaggauuca

SEQ ID NO: 853861 - RNA, 19 nt, Artificial Sequence
  Description of Artificial Sequence: Synthetic oligonucleotide
gcggccucgucgguugauu

SEQ ID NO: 853862 - RNA, 19 nt, Artificial Sequence
  Description of Artificial Sequence: Synthetic oligonucleotide
ggcggccucgucgguugau

SEQ ID NO: 853863 - RNA, 19 nt, Artificial Sequence
  Description of Artificial Sequence: Synthetic oligonucleotide
cccgacccagcuccacuuu

SEQ ID NO: 853864 - RNA, 19 nt, Artificial Sequence
  Description of Artificial Sequence: Synthetic oligonucleotide
cggucacacacuggggcau

SEQ ID NO: 853865 - RNA, 19 nt, Artificial Sequence
  Description of Artificial Sequence: Synthetic oligonucleotide
cggccucgucgguugauuu

SEQ ID NO: 853866 - RNA, 19 nt, Artificial Sequence
  Description of Artificial Sequence: Synthetic oligonucleotide
cggcggccucgucgguuga

SEQ ID NO: 853867 - RNA, 19 nt, Artificial Sequence
  Description of Artificial Sequence: Synthetic oligonucleotide
uguuaauuaacucauguac

SEQ ID NO: 853868 - RNA, 19 nt, Artificial Sequence
  Description of Artificial Sequence: Synthetic oligonucleotide
auugaaacggaccuguugc

SEQ ID NO: 853869 - RNA, 19 nt, Artificial Sequence
  Description of Artificial Sequence: Synthetic oligonucleotide
aguacauugacauaguugu

SEQ ID NO: 853870 - RNA, 19 nt, Artificial Sequence
  Description of Artificial Sequence: Synthetic oligonucleotide
aaacaaagcguacaucugg

SEQ ID NO: 853871 - RNA, 19 nt, Artificial Sequence
  Description of Artificial Sequence: Synthetic oligonucleotide
aaagcguacaucuggacag

SEQ ID NO: 853872 - RNA, 19 nt, Artificial Sequence
  Description of Artificial Sequence: Synthetic oligonucleotide
ucuucgaaagcccagagca

SEQ ID NO: 853873 - RNA, 19 nt, Artificial Sequence
  Description of Artificial Sequence: Synthetic oligonucleotide
gaaauauuauaguagagga

SEQ ID NO: 853874 - RNA, 19 nt, Artificial Sequence
  Description of Artificial Sequence: Synthetic oligonucleotide
caauaaagcaccuaugccc

SEQ ID NO: 853875 - RNA, 19 nt, Artificial Sequence
  Description of Artificial Sequence: Synthetic oligonucleotide
ugauugaagaauaugggaa

SEQ ID NO: 853876 - RNA, 19 nt, Artificial Sequence
  Description of Artificial Sequence: Synthetic oligonucleotide
ucgggaauaaaauacuugc

SEQ ID NO: 853877 - RNA, 19 nt, Artificial Sequence
  Description of Artificial Sequence: Synthetic oligonucleotide
aaagacgucgucuauggga

SEQ ID NO: 853878 - RNA, 19 nt, Artificial Sequence
  Description of Artificial Sequence: Synthetic oligonucleotide
uugguuaaugagcagcggg

SEQ ID NO: 853879 - RNA, 19 nt, Artificial Sequence
  Description of Artificial Sequence: Synthetic oligonucleotide
aagcguuccauugaaacgg

SEQ ID NO: 853880 - RNA, 19 nt, Artificial Sequence
  Description of Artificial Sequence: Synthetic oligonucleotide
uguuuguacgaaaauguga

SEQ ID NO: 853881 - RNA, 19 nt, Artificial Sequence
  Description of Artificial Sequence: Synthetic oligonucleotide
agaaagacgucgucuaugg

SEQ ID NO: 853882 - RNA, 19 nt, Artificial Sequence
  Description of Artificial Sequence: Synthetic oligonucleotide
uuaagcguuccauugaaac

SEQ ID NO: 853883 - RNA, 19 nt, Artificial Sequence
  Description of Artificial Sequence: Synthetic oligonucleotide
ugauauguaguuaagcguu

SEQ ID NO: 853884 - RNA, 19 nt, Artificial Sequence
  Description of Artificial Sequence: Synthetic oligonucleotide
aaucuuaggacuccuggga

SEQ ID NO: 853885 - RNA, 19 nt, Artificial Sequence
  Description of Artificial Sequence: Synthetic oligonucleotide
aaacaggggucaaaggugc

SEQ ID NO: 853886 - RNA, 19 nt, Artificial Sequence
  Description of Artificial Sequence: Synthetic oligonucleotide
aucaccugcaagaaggucc

SEQ ID NO: 853887 - RNA, 19 nt, Artificial Sequence
  Description of Artificial Sequence: Synthetic oligonucleotide
uuaaugagcagcgggaagc

SEQ ID NO: 853888 - RNA, 19 nt, Artificial Sequence
  Description of Artificial Sequence: Synthetic oligonucleotide
guaguuaagcguuccauug

SEQ ID NO: 853889 - RNA, 19 nt, Artificial Sequence
  Description of Artificial Sequence: Synthetic oligonucleotide
aagucugacguacggcuuc

SEQ ID NO: 853890 - RNA, 19 nt, Artificial Sequence
  Description of Artificial Sequence: Synthetic oligonucleotide
ucucgguagaaacaggggu

SEQ ID NO: 853891 - RNA, 19 nt, Artificial Sequence
  Description of Artificial Sequence: Synthetic oligonucleotide
auaguagaggaaucuuagg

SEQ ID NO: 853892 - RNA, 19 nt, Artificial Sequence
  Description of Artificial Sequence: Synthetic oligonucleotide
aacacaucggcaucgcccu

SEQ ID NO: 853893 - RNA, 19 nt, Artificial Sequence
  Description of Artificial Sequence: Synthetic oligonucleotide
agcgaauuggccuugccug

SEQ ID NO: 853894 - RNA, 19 nt, Artificial Sequence
  Description of Artificial Sequence: Synthetic oligonucleotide
agcguuagauugaagaagg

SEQ ID NO: 853895 - RNA, 19 nt, Artificial Sequence
  Description of Artificial Sequence: Synthetic oligonucleotide
augaaugugcaggggaucc

SEQ ID NO: 853896 - RNA, 19 nt, Artificial Sequence
  Description of Artificial Sequence: Synthetic oligonucleotide
cuccuugagcguuagauug

SEQ ID NO: 853897 - RNA, 19 nt, Artificial Sequence
  Description of Artificial Sequence: Synthetic oligonucleotide
caucccuuuccaauaaagc

SEQ ID NO: 853898 - RNA, 19 nt, Artificial Sequence
  Description of Artificial Sequence: Synthetic oligonucleotide
cuccggaaagaacaaagcc

SEQ ID NO: 853899 - RNA, 19 nt, Artificial Sequence
  Description of Artificial Sequence: Synthetic oligonucleotide
cugaacgcgacccucggcg

SEQ ID NO: 853900 - RNA, 19 nt, Artificial Sequence
  Description of Artificial Sequence: Synthetic oligonucleotide
ugagcguuagauugaagaa

SEQ ID NO: 853901 - RNA, 19 nt, Artificial Sequence
  Description of Artificial Sequence: Synthetic oligonucleotide
acagacuugaccgcgauga

SEQ ID NO: 853902 - RNA, 19 nt, Artificial Sequence
  Description of Artificial Sequence: Synthetic oligonucleotide
aaauauuauaguagaggaa

SEQ ID NO: 853903 - RNA, 19 nt, Artificial Sequence
  Description of Artificial Sequence: Synthetic oligonucleotide
cucugcggcauuuacgcgg

SEQ ID NO: 853904 - RNA, 19 nt, Artificial Sequence
  Description of Artificial Sequence: Synthetic oligonucleotide
gacuuuuguuaauuaacuc

SEQ ID NO: 853905 - RNA, 19 nt, Artificial Sequence
  Description of Artificial Sequence: Synthetic oligonucleotide
aaaggugcgaagaugcggu

SEQ ID NO: 853906 - RNA, 19 nt, Artificial Sequence
  Description of Artificial Sequence: Synthetic oligonucleotide
agccucgggaauaaaauac

SEQ ID NO: 853907 - RNA, 19 nt, Artificial Sequence
  Description of Artificial Sequence: Synthetic oligonucleotide
gagcguuagauugaagaag

SEQ ID NO: 853908 - RNA, 19 nt, Artificial Sequence
  Description of Artificial Sequence: Synthetic oligonucleotide
aucggcaucgcccuuaaaa

SEQ ID NO: 853909 - RNA, 19 nt, Artificial Sequence
  Description of Artificial Sequence: Synthetic oligonucleotide
agacagcccaugcacuacc

SEQ ID NO: 853910 - RNA, 19 nt, Artificial Sequence
  Description of Artificial Sequence: Synthetic oligonucleotide
gaugagcagauccggcggg

SEQ ID NO: 853911 - RNA, 19 nt, Artificial Sequence
  Description of Artificial Sequence: Synthetic oligonucleotide
ugccccgucacgcugcgcg

SEQ ID NO: 853912 - RNA, 19 nt, Artificial Sequence
  Description of Artificial Sequence: Synthetic oligonucleotide
uggacgaacacaucggcau

SEQ ID NO: 853913 - RNA, 19 nt, Artificial Sequence
  Description of Artificial Sequence: Synthetic oligonucleotide
acgagugcucccugaacgc

SEQ ID NO: 853914 - RNA, 19 nt, Artificial Sequence
  Description of Artificial Sequence: Synthetic oligonucleotide
augccaaaggugcgaaacg

SEQ ID NO: 853915 - RNA, 19 nt, Artificial Sequence
  Description of Artificial Sequence: Synthetic oligonucleotide
guuaaugagcagcgggaag

SEQ ID NO: 853916 - RNA, 19 nt, Artificial Sequence
  Description of Artificial Sequence: Synthetic oligonucleotide
caucuuguauaguucauga

SEQ ID NO: 853917 - RNA, 19 nt, Artificial Sequence
  Description of Artificial Sequence: Synthetic oligonucleotide
uagaggaaucuuaggacuc

SEQ ID NO: 853918 - RNA, 19 nt, Artificial Sequence
  Description of Artificial Sequence: Synthetic oligonucleotide
uaaugagcagcgggaagcg

SEQ ID NO: 853919 - RNA, 19 nt, Artificial Sequence
  Description of Artificial Sequence: Synthetic oligonucleotide
cauugaaacggaccuguug

SEQ ID NO: 853920 - RNA, 19 nt, Artificial Sequence
  Description of Artificial Sequence: Synthetic oligonucleotide
ugcgaaacgcuggaugagg

SEQ ID NO: 853921 - RNA, 19 nt, Artificial Sequence
  Description of Artificial Sequence: Synthetic oligonucleotide
accggcaguccauacacag

SEQ ID NO: 853922 - RNA, 19 nt, Artificial Sequence
  Description of Artificial Sequence: Synthetic oligonucleotide
cauaggccggguaaaccgg

SEQ ID NO: 853923 - RNA, 19 nt, Artificial Sequence
  Description of Artificial Sequence: Synthetic oligonucleotide
aguuaagcguuccauugaa

SEQ ID NO: 853924 - RNA, 19 nt, Artificial Sequence
  Description of Artificial Sequence: Synthetic oligonucleotide
gaaagacgucgucuauggg

SEQ ID NO: 853925 - RNA, 19 nt, Artificial Sequence
  Description of Artificial Sequence: Synthetic oligonucleotide
cucgguagaaacagggguc

SEQ ID NO: 853926 - RNA, 19 nt, Artificial Sequence
  Description of Artificial Sequence: Synthetic oligonucleotide
agccguguacaccauuauc

SEQ ID NO: 853927 - RNA, 19 nt, Artificial Sequence
  Description of Artificial Sequence: Synthetic oligonucleotide
gaagaaggugucuucgaaa

SEQ ID NO: 853928 - RNA, 19 nt, Artificial Sequence
  Description of Artificial Sequence: Synthetic oligonucleotide
augcacuaccaccaguucu

SEQ ID NO: 853929 - RNA, 19 nt, Artificial Sequence
  Description of Artificial Sequence: Synthetic oligonucleotide
aagacgucgucuaugggaa

SEQ ID NO: 853930 - RNA, 19 nt, Artificial Sequence
  Description of Artificial Sequence: Synthetic oligonucleotide
ugccaaaggugcgaaacgc

SEQ ID NO: 853931 - RNA, 19 nt, Artificial Sequence
  Description of Artificial Sequence: Synthetic oligonucleotide
aggugcgaaacgcuggaug

SEQ ID NO: 853932 - RNA, 19 nt, Artificial Sequence
  Description of Artificial Sequence: Synthetic oligonucleotide
gaaacgcuggaugaggcuc

SEQ ID NO: 853933 - RNA, 19 nt, Artificial Sequence
  Description of Artificial Sequence: Synthetic oligonucleotide
uuggcgcgcagauaucugc

SEQ ID NO: 853934 - RNA, 19 nt, Artificial Sequence
  Description of Artificial Sequence: Synthetic oligonucleotide
agcaagcgccacauaagcc

SEQ ID NO: 853935 - RNA, 19 nt, Artificial Sequence
  Description of Artificial Sequence: Synthetic oligonucleotide
guuccauugaaacggaccu

SEQ ID NO: 853936 - RNA, 19 nt, Artificial Sequence
  Description of Artificial Sequence: Synthetic oligonucleotide
aaacggaccuguugcuaca

SEQ ID NO: 853937 - RNA, 19 nt, Artificial Sequence
  Description of Artificial Sequence: Synthetic oligonucleotide
cacgcaucccggcaaaagc

SEQ ID NO: 853938 - RNA, 19 nt, Artificial Sequence
  Description of Artificial Sequence: Synthetic oligonucleotide
uccuugagcguuagauuga

SEQ ID NO: 853939 - RNA, 19 nt, Artificial Sequence
  Description of Artificial Sequence: Synthetic oligonucleotide
ucuugagcgaauuggccuu

SEQ ID NO: 853940 - RNA, 19 nt, Artificial Sequence
  Description of Artificial Sequence: Synthetic oligonucleotide
gacgucgucuaugggaaag

SEQ ID NO: 853941 - RNA, 19 nt, Artificial Sequence
  Description of Artificial Sequence: Synthetic oligonucleotide
gugauauguaguuaagcgu

SEQ ID NO: 853942 - RNA, 19 nt, Artificial Sequence
  Description of Artificial Sequence: Synthetic oligonucleotide
acgaaaaugugaacuguug

SEQ ID NO: 853943 - RNA, 19 nt, Artificial Sequence
  Description of Artificial Sequence: Synthetic oligonucleotide
gccguguacaccauuaucc

SEQ ID NO: 853944 - RNA, 19 nt, Artificial Sequence
  Description of Artificial Sequence: Synthetic oligonucleotide
ugcauaagcacggcucuca

SEQ ID NO: 853945 - RNA, 19 nt, Artificial Sequence
  Description of Artificial Sequence: Synthetic oligonucleotide
uugaccgcgaugagcagau

SEQ ID NO: 853946 - RNA, 19 nt, Artificial Sequence
  Description of Artificial Sequence: Synthetic oligonucleotide
cauaagcacggcucucagc

SEQ ID NO: 853947 - RNA, 19 nt, Artificial Sequence
  Description of Artificial Sequence: Synthetic oligonucleotide
acaugccccagaaagacgu

SEQ ID NO: 853948 - RNA, 19 nt, Artificial Sequence
  Description of Artificial Sequence: Synthetic oligonucleotide
uguacaccauuaucccaca

SEQ ID NO: 853949 - RNA, 19 nt, Artificial Sequence
  Description of Artificial Sequence: Synthetic oligonucleotide
uuacgcgguugguuaauga

SEQ ID NO: 853950 - RNA, 19 nt, Artificial Sequence
  Description of Artificial Sequence: Synthetic oligonucleotide
aaagccguguacaccauua

SEQ ID NO: 853951 - RNA, 19 nt, Artificial Sequence
  Description of Artificial Sequence: Synthetic oligonucleotide
uuguauaguucaugaugaa

SEQ ID NO: 853952 - RNA, 19 nt, Artificial Sequence
  Description of Artificial Sequence: Synthetic oligonucleotide
guugguuaaugagcagcgg

SEQ ID NO: 853953 - RNA, 19 nt, Artificial Sequence
  Description of Artificial Sequence: Synthetic oligonucleotide
aggcccgugcagcaagcgc

SEQ ID NO: 853954 - RNA, 19 nt, Artificial Sequence
  Description of Artificial Sequence: Synthetic oligonucleotide
caccauuaucccacauggg

SEQ ID NO: 853955 - RNA, 19 nt, Artificial Sequence
  Description of Artificial Sequence: Synthetic oligonucleotide
gguucuagcaacuugugau

SEQ ID NO: 853956 - RNA, 19 nt, Artificial Sequence
  Description of Artificial Sequence: Synthetic oligonucleotide
gucuucgaaagcccagagc

SEQ ID NO: 853957 - RNA, 19 nt, Artificial Sequence
  Description of Artificial Sequence: Synthetic oligonucleotide
agucugacguacggcuucc

SEQ ID NO: 853958 - RNA, 19 nt, Artificial Sequence
  Description of Artificial Sequence: Synthetic oligonucleotide
cucagguguaagccgcagg

SEQ ID NO: 853959 - RNA, 19 nt, Artificial Sequence
  Description of Artificial Sequence: Synthetic oligonucleotide
caccuaugcccucagugac

SEQ ID NO: 853960 - RNA, 19 nt, Artificial Sequence
  Description of Artificial Sequence: Synthetic oligonucleotide
uuuacgcgguugguuaaug

SEQ ID NO: 853961 - RNA, 19 nt, Artificial Sequence
  Description of Artificial Sequence: Synthetic oligonucleotide
uggcgcgcagauaucugcc

SEQ ID NO: 853962 - RNA, 19 nt, Artificial Sequence
  Description of Artificial Sequence: Synthetic oligonucleotide
auaggccggguaaaccggc

SEQ ID NO: 853963 - RNA, 19 nt, Artificial Sequence
  Description of Artificial Sequence: Synthetic oligonucleotide
cagcaagaacacucggcgc

SEQ ID NO: 853964 - RNA, 19 nt, Artificial Sequence
  Description of Artificial Sequence: Synthetic oligonucleotide
aaaagcgcagccgccuccu

SEQ ID NO: 853965 - RNA, 19 nt, Artificial Sequence
  Description of Artificial Sequence: Synthetic oligonucleotide
cagaaagacgucgucuaug

SEQ ID NO: 853966 - RNA, 19 nt, Artificial Sequence
  Description of Artificial Sequence: Synthetic oligonucleotide
gggaaauauuauaguagag

SEQ ID NO: 853967 - RNA, 19 nt, Artificial Sequence
  Description of Artificial Sequence: Synthetic oligonucleotide
ugaacgcgacccucggcgc

SEQ ID NO: 853968 - RNA, 19 nt, Artificial Sequence
  Description of Artificial Sequence: Synthetic oligonucleotide
ggugcgaaacgcuggauga

SEQ ID NO: 853969 - RNA, 19 nt, Artificial Sequence
  Description of Artificial Sequence: Synthetic oligonucleotide
cagauaucugccgaaguca

SEQ ID NO: 853970 - RNA, 19 nt, Artificial Sequence
  Description of Artificial Sequence: Synthetic oligonucleotide
gcagauaucugccgaaguc

SEQ ID NO: 853971 - RNA, 19 nt, Artificial Sequence
  Description of Artificial Sequence: Synthetic oligonucleotide
uuccauugaaacggaccug

SEQ ID NO: 853972 - RNA, 19 nt, Artificial Sequence
  Description of Artificial Sequence: Synthetic oligonucleotide
aagccguguacaccauuau

SEQ ID NO: 853973 - RNA, 19 nt, Artificial Sequence
  Description of Artificial Sequence: Synthetic oligonucleotide
gcgccguugauccuuggcg

SEQ ID NO: 853974 - RNA, 19 nt, Artificial Sequence
  Description of Artificial Sequence: Synthetic oligonucleotide
aaacgcuggaugaggcuca

SEQ ID NO: 853975 - RNA, 19 nt, Artificial Sequence
  Description of Artificial Sequence: Synthetic oligonucleotide
ugcggcauuuacgcgguug

SEQ ID NO: 853976 - RNA, 19 nt, Artificial Sequence
  Description of Artificial Sequence: Synthetic oligonucleotide
uuguuggggagcccgcguc

SEQ ID NO: 853977 - RNA, 19 nt, Artificial Sequence
  Description of Artificial Sequence: Synthetic oligonucleotide
cuugagcguuagauugaag

SEQ ID NO: 853978 - RNA, 19 nt, Artificial Sequence
  Description of Artificial Sequence: Synthetic oligonucleotide
aucccgcggcuccaggaac

SEQ ID NO: 853979 - RNA, 19 nt, Artificial Sequence
  Description of Artificial Sequence: Synthetic oligonucleotide
cguuccauugaaacggacc

SEQ ID NO: 853980 - RNA, 19 nt, Artificial Sequence
  Description of Artificial Sequence: Synthetic oligonucleotide
gcggcauuuacgcgguugg

SEQ ID NO: 853981 - RNA, 19 nt, Artificial Sequence
  Description of Artificial Sequence: Synthetic oligonucleotide
ccaaaggugcgaaacgcug

SEQ ID NO: 853982 - RNA, 19 nt, Artificial Sequence
  Description of Artificial Sequence: Synthetic oligonucleotide
cauuuggaccuuggucugg

SEQ ID NO: 853983 - RNA, 19 nt, Artificial Sequence
  Description of Artificial Sequence: Synthetic oligonucleotide
gaacgcgacccucggcgcc

SEQ ID NO: 853984 - RNA, 19 nt, Artificial Sequence
  Description of Artificial Sequence: Synthetic oligonucleotide
cuuggcgcgcagauaucug

SEQ ID NO: 853985 - RNA, 19 nt, Artificial Sequence
  Description of Artificial Sequence: Synthetic oligonucleotide
uccucacauggacgaacac

SEQ ID NO: 853986 - RNA, 19 nt, Artificial Sequence
  Description of Artificial Sequence: Synthetic oligonucleotide
cacuaccaccaguucucgg

SEQ ID NO: 853987 - RNA, 19 nt, Artificial Sequence
  Description of Artificial Sequence: Synthetic oligonucleotide
agugcucccugaacgcgac

SEQ ID NO: 853988 - RNA, 19 nt, Artificial Sequence
  Description of Artificial Sequence: Synthetic oligonucleotide
ccguguacaccauuauccc

SEQ ID NO: 853989 - RNA, 19 nt, Artificial Sequence
  Description of Artificial Sequence: Synthetic oligonucleotide
cagguguaagccgcaggcg

SEQ ID NO: 853990 - RNA, 19 nt, Artificial Sequence
  Description of Artificial Sequence: Synthetic oligonucleotide
gucgaugccccugggcacg

SEQ ID NO: 853991 - RNA, 19 nt, Artificial Sequence
  Description of Artificial Sequence: Synthetic oligonucleotide
gaacacucggcgcacgagu

SEQ ID NO: 853992 - RNA, 19 nt, Artificial Sequence
  Description of Artificial Sequence: Synthetic oligonucleotide
cagcgugagccacgcaucc

SEQ ID NO: 853993 - RNA, 19 nt, Artificial Sequence
  Description of Artificial Sequence: Synthetic oligonucleotide
gagcgaauuggccuugccu

SEQ ID NO: 853994 - RNA, 19 nt, Artificial Sequence
  Description of Artificial Sequence: Synthetic oligonucleotide
ggagcguggcuccggaaag

SEQ ID NO: 853995 - RNA, 19 nt, Artificial Sequence
  Description of Artificial Sequence: Synthetic oligonucleotide
aagcguacaucuggacaga

SEQ ID NO: 853996 - RNA, 19 nt, Artificial Sequence
  Description of Artificial Sequence: Synthetic oligonucleotide
ugugccggaucccgcggcu

SEQ ID NO: 853997 - RNA, 19 nt, Artificial Sequence
  Description of Artificial Sequence: Synthetic oligonucleotide
uaugguuccugggccuaca

SEQ ID NO: 853998 - RNA, 19 nt, Artificial Sequence
  Description of Artificial Sequence: Synthetic oligonucleotide
ccggcaaaagcgcagccgc

SEQ ID NO: 853999 - RNA, 19 nt, Artificial Sequence
  Description of Artificial Sequence: Synthetic oligonucleotide
auggacgaacacaucggca

SEQ ID NO: 854000 - RNA, 19 nt, Artificial Sequence
  Description of Artificial Sequence: Synthetic oligonucleotide
gagcgcgccagugcguccg

SEQ ID NO: 854001 - RNA, 19 nt, Artificial Sequence
  Description of Artificial Sequence: Synthetic oligonucleotide
agauccggcgggccgccag

SEQ ID NO: 854002 - RNA, 19 nt, Artificial Sequence
  Description of Artificial Sequence: Synthetic oligonucleotide
cagaggaaacuuccucauc

SEQ ID NO: 854003 - RNA, 19 nt, Artificial Sequence
  Description of Artificial Sequence: Synthetic oligonucleotide
uaggccggguaaaccggca

SEQ ID NO: 854004 - RNA, 19 nt, Artificial Sequence
  Description of Artificial Sequence: Synthetic oligonucleotide
gcauuuacgcgguugguua

SEQ ID NO: 854005 - RNA, 19 nt, Artificial Sequence
  Description of Artificial Sequence: Synthetic oligonucleotide
caagaacacucggcgcacg

SEQ ID NO: 854006 - RNA, 19 nt, Artificial Sequence
  Description of Artificial Sequence: Synthetic oligonucleotide
cacgcugcgcguagagcag

SEQ ID NO: 854007 - RNA, 19 nt, Artificial Sequence
  Description of Artificial Sequence: Synthetic oligonucleotide
ggcucuugagcgaauuggc

SEQ ID NO: 854008 - RNA, 19 nt, Artificial Sequence
  Description of Artificial Sequence: Synthetic oligonucleotide
uguaugguuccugggccua

SEQ ID NO: 854009 - RNA, 19 nt, Artificial Sequence
  Description of Artificial Sequence: Synthetic oligonucleotide
gccguugauccuuggcgcg

SEQ ID NO: 854010 - RNA, 19 nt, Artificial Sequence
  Description of Artificial Sequence: Synthetic oligonucleotide
gcaccuaugcccucaguga

SEQ ID NO: 854011 - RNA, 19 nt, Artificial Sequence
  Description of Artificial Sequence: Synthetic oligonucleotide
ggaaagagcucaaccugug

SEQ ID NO: 854012 - RNA, 19 nt, Artificial Sequence
  Description of Artificial Sequence: Synthetic oligonucleotide
cgggaagcgccguugaucc

SEQ ID NO: 854013 - RNA, 19 nt, Artificial Sequence
  Description of Artificial Sequence: Synthetic oligonucleotide
aagcgccguugauccuugg

SEQ ID NO: 854014 - RNA, 19 nt, Artificial Sequence
  Description of Artificial Sequence: Synthetic oligonucleotide
aagcaccuaugcccucagu

SEQ ID NO: 854015 - RNA, 19 nt, Artificial Sequence
  Description of Artificial Sequence: Synthetic oligonucleotide
cguuagauugaagaaggug

SEQ ID NO: 854016 - RNA, 19 nt, Artificial Sequence
  Description of Artificial Sequence: Synthetic oligonucleotide
cuucccgggguccucuauc

SEQ ID NO: 854017 - RNA, 19 nt, Artificial Sequence
  Description of Artificial Sequence: Synthetic oligonucleotide
auacugugauauguaguua

SEQ ID NO: 854018 - RNA, 19 nt, Artificial Sequence
  Description of Artificial Sequence: Synthetic oligonucleotide
ggcgcgcagauaucugccg

SEQ ID NO: 854019 - RNA, 19 nt, Artificial Sequence
  Description of Artificial Sequence: Synthetic oligonucleotide
gcuccggaaagaacaaagc

SEQ ID NO: 854020 - RNA, 19 nt, Artificial Sequence
  Description of Artificial Sequence: Synthetic oligonucleotide
gaggcuugauacugugaua

SEQ ID NO: 854021 - RNA, 19 nt, Artificial Sequence
  Description of Artificial Sequence: Synthetic oligonucleotide
gcauaagcacggcucucag

SEQ ID NO: 854022 - RNA, 19 nt, Artificial Sequence
  Description of Artificial Sequence: Synthetic oligonucleotide
cauuuacgcgguugguuaa

SEQ ID NO: 854023 - RNA, 19 nt, Artificial Sequence
  Description of Artificial Sequence: Synthetic oligonucleotide
gaagcgccguugauccuug

SEQ ID NO: 854024 - RNA, 19 nt, Artificial Sequence
  Description of Artificial Sequence: Synthetic oligonucleotide
gugcgaaacgcuggaugag

SEQ ID NO: 854025 - RNA, 19 nt, Artificial Sequence
  Description of Artificial Sequence: Synthetic oligonucleotide
cacagacuugaccgcgaug

SEQ ID NO: 854026 - RNA, 19 nt, Artificial Sequence
  Description of Artificial Sequence: Synthetic oligonucleotide
cuugaccgcgaugagcaga

SEQ ID NO: 854027 - RNA, 19 nt, Artificial Sequence
  Description of Artificial Sequence: Synthetic oligonucleotide
gaucccgcggcuccaggaa

SEQ ID NO: 854028 - RNA, 19 nt, Artificial Sequence
  Description of Artificial Sequence: Synthetic oligonucleotide
auuuacgcgguugguuaau

SEQ ID NO: 854029 - RNA, 19 nt, Artificial Sequence
  Description of Artificial Sequence: Synthetic oligonucleotide
gcucuugagcgaauuggcc

SEQ ID NO: 854030 - RNA, 19 nt, Artificial Sequence
  Description of Artificial Sequence: Synthetic oligonucleotide
gagugcucccugaacgcga

SEQ ID NO: 854031 - RNA, 19 nt, Artificial Sequence
  Description of Artificial Sequence: Synthetic oligonucleotide
guuaagcguuccauugaaa

SEQ ID NO: 854032 - RNA, 19 nt, Artificial Sequence
  Description of Artificial Sequence: Synthetic oligonucleotide
cgucucugcggcauuuacg

SEQ ID NO: 854033 - RNA, 19 nt, Artificial Sequence
  Description of Artificial Sequence: Synthetic oligonucleotide
cagccucgggaauaaaaua

SEQ ID NO: 854034 - RNA, 19 nt, Artificial Sequence
  Description of Artificial Sequence: Synthetic oligonucleotide
acgucgucuaugggaaaga

SEQ ID NO: 854035 - RNA, 19 nt, Artificial Sequence
  Description of Artificial Sequence: Synthetic oligonucleotide
acaucggcaucgcccuuaa

SEQ ID NO: 854036 - RNA, 19 nt, Artificial Sequence
  Description of Artificial Sequence: Synthetic oligonucleotide
gguuaaugagcagcgggaa

SEQ ID NO: 854037 - RNA, 19 nt, Artificial Sequence
  Description of Artificial Sequence: Synthetic oligonucleotide
uccgcgugccugcccugcc

SEQ ID NO: 854038 - RNA, 19 nt, Artificial Sequence
  Description of Artificial Sequence: Synthetic oligonucleotide
gucacgcugcgcguagagc

SEQ ID NO: 854039 - RNA, 19 nt, Artificial Sequence
  Description of Artificial Sequence: Synthetic oligonucleotide
agcgcgccagugcguccgc

SEQ ID NO: 854040 - RNA, 19 nt, Artificial Sequence
  Description of Artificial Sequence: Synthetic oligonucleotide
ggacgaacacaucggcauc

SEQ ID NO: 854041 - RNA, 19 nt, Artificial Sequence
  Description of Artificial Sequence: Synthetic oligonucleotide
uccuuggcgcgcagauauc

SEQ ID NO: 854042 - RNA, 19 nt, Artificial Sequence
  Description of Artificial Sequence: Synthetic oligonucleotide
aaccggcaguccauacaca

SEQ ID NO: 854043 - RNA, 19 nt, Artificial Sequence
  Description of Artificial Sequence: Synthetic oligonucleotide
gcgaaacgcuggaugaggc

SEQ ID NO: 854044 - RNA, 19 nt, Artificial Sequence
  Description of Artificial Sequence: Synthetic oligonucleotide
agcguuccauugaaacgga

SEQ ID NO: 854045 - RNA, 19 nt, Artificial Sequence
  Description of Artificial Sequence: Synthetic oligonucleotide
ccaagucugacguacggcu

SEQ ID NO: 854046 - RNA, 19 nt, Artificial Sequence
  Description of Artificial Sequence: Synthetic oligonucleotide
ugcguccgcgugccugccc

SEQ ID NO: 854047 - RNA, 19 nt, Artificial Sequence
  Description of Artificial Sequence: Synthetic oligonucleotide
ucgcccucauaggccggcg

SEQ ID NO: 854048 - RNA, 19 nt, Artificial Sequence
  Description of Artificial Sequence: Synthetic oligonucleotide
gaagucaaaggggcccgua

SEQ ID NO: 854049 - RNA, 19 nt, Artificial Sequence
  Description of Artificial Sequence: Synthetic oligonucleotide
guaugguuccugggccuac

SEQ ID NO: 854050 - RNA, 19 nt, Artificial Sequence
  Description of Artificial Sequence: Synthetic oligonucleotide
gauccggcgggccgccaga

SEQ ID NO: 854051 - RNA, 19 nt, Artificial Sequence
  Description of Artificial Sequence: Synthetic oligonucleotide
uggcuccggaaagaacaaa

SEQ ID NO: 854052 - RNA, 19 nt, Artificial Sequence
  Description of Artificial Sequence: Synthetic oligonucleotide
cgccguugauccuuggcgc

SEQ ID NO: 854053 - RNA, 19 nt, Artificial Sequence
  Description of Artificial Sequence: Synthetic oligonucleotide
agacgucgucuaugggaaa

SEQ ID NO: 854054 - RNA, 19 nt, Artificial Sequence
  Description of Artificial Sequence: Synthetic oligonucleotide
cccaagucugacguacggc

SEQ ID NO: 854055 - RNA, 19 nt, Artificial Sequence
  Description of Artificial Sequence: Synthetic oligonucleotide
cugcauaagcacggcucuc

SEQ ID NO: 854056 - RNA, 19 nt, Artificial Sequence
  Description of Artificial Sequence: Synthetic oligonucleotide
guuguuggggagcccgcgu

SEQ ID NO: 854057 - RNA, 19 nt, Artificial Sequence
  Description of Artificial Sequence: Synthetic oligonucleotide
agcgggaagcgccguugau

SEQ ID NO: 854058 - RNA, 19 nt, Artificial Sequence
  Description of Artificial Sequence: Synthetic oligonucleotide
uccggcgggccgccagaug

SEQ ID NO: 854059 - RNA, 19 nt, Artificial Sequence
  Description of Artificial Sequence: Synthetic oligonucleotide
ggcgccccaagucugacgu

SEQ ID NO: 854060 - RNA, 19 nt, Artificial Sequence
  Description of Artificial Sequence: Synthetic oligonucleotide
cccggcaaaagcgcagccg

SEQ ID NO: 854061 - RNA, 19 nt, Artificial Sequence
  Description of Artificial Sequence: Synthetic oligonucleotide
ucgcgcugguggugguucu

SEQ ID NO: 854062 - RNA, 19 nt, Artificial Sequence
  Description of Artificial Sequence: Synthetic oligonucleotide
caggggucaaaggugcgaa

SEQ ID NO: 854063 - RNA, 19 nt, Artificial Sequence
  Description of Artificial Sequence: Synthetic oligonucleotide
gucgcccucauaggccggc

SEQ ID NO: 854064 - RNA, 19 nt, Artificial Sequence
  Description of Artificial Sequence: Synthetic oligonucleotide
gcgcagauaucugccgaag

SEQ ID NO: 854065 - RNA, 19 nt, Artificial Sequence
  Description of Artificial Sequence: Synthetic oligonucleotide
cauaggccggcggggccgc

SEQ ID NO: 854066 - RNA, 19 nt, Artificial Sequence
  Description of Artificial Sequence: Synthetic oligonucleotide
guggcuccggaaagaacaa

SEQ ID NO: 854067 - RNA, 19 nt, Artificial Sequence
  Description of Artificial Sequence: Synthetic oligonucleotide
gccagagucgaugccccug

SEQ ID NO: 854068 - RNA, 19 nt, Artificial Sequence
  Description of Artificial Sequence: Synthetic oligonucleotide
ccugaacgcgacccucggc

SEQ ID NO: 854069 - RNA, 19 nt, Artificial Sequence
  Description of Artificial Sequence: Synthetic oligonucleotide
cccugaacgcgacccucgg

SEQ ID NO: 854070 - RNA, 19 nt, Artificial Sequence
  Description of Artificial Sequence: Synthetic oligonucleotide
gugcucccugaacgcgacc

SEQ ID NO: 854071 - RNA, 19 nt, Artificial Sequence
  Description of Artificial Sequence: Synthetic oligonucleotide
caagucugacguacggcuu

SEQ ID NO: 854072 - RNA, 19 nt, Artificial Sequence
  Description of Artificial Sequence: Synthetic oligonucleotide
ccacgcaucccggcaaaag

SEQ ID NO: 854073 - RNA, 19 nt, Artificial Sequence
  Description of Artificial Sequence: Synthetic oligonucleotide
cgagugcucccugaacgcg

SEQ ID NO: 854074 - RNA, 19 nt, Artificial Sequence
  Description of Artificial Sequence: Synthetic oligonucleotide
cgugagccacgcaucccgg

SEQ ID NO: 854075 - RNA, 19 nt, Artificial Sequence
  Description of Artificial Sequence: Synthetic oligonucleotide
gccccaagucugacguacg

SEQ ID NO: 854076 - RNA, 19 nt, Artificial Sequence
  Description of Artificial Sequence: Synthetic oligonucleotide
gcugccccgucacgcugcg

SEQ ID NO: 854077 - RNA, 19 nt, Artificial Sequence
  Description of Artificial Sequence: Synthetic oligonucleotide
gcgcgcagauaucugccga

SEQ ID NO: 854078 - RNA, 19 nt, Artificial Sequence
  Description of Artificial Sequence: Synthetic oligonucleotide
cacaucggcaucgcccuua

SEQ ID NO: 854079 - RNA, 19 nt, Artificial Sequence
  Description of Artificial Sequence: Synthetic oligonucleotide
acacaucggcaucgcccuu

SEQ ID NO: 854080 - RNA, 19 nt, Artificial Sequence
  Description of Artificial Sequence: Synthetic oligonucleotide
cagcgggaagcgccguuga

SEQ ID NO: 854081 - RNA, 19 nt, Artificial Sequence
  Description of Artificial Sequence: Synthetic oligonucleotide
gccucgggaauaaaauacu

SEQ ID NO: 854082 - RNA, 19 nt, Artificial Sequence
  Description of Artificial Sequence: Synthetic oligonucleotide
ggcauuuacgcgguugguu

SEQ ID NO: 854083 - RNA, 19 nt, Artificial Sequence
  Description of Artificial Sequence: Synthetic oligonucleotide
cgucacgcugcgcguagag

SEQ ID NO: 854084 - RNA, 19 nt, Artificial Sequence
  Description of Artificial Sequence: Synthetic oligonucleotide
gcgggcguuguuggggagc

SEQ ID NO: 854085 - RNA, 19 nt, Artificial Sequence
  Description of Artificial Sequence: Synthetic oligonucleotide
cccgucacgcugcgcguag

SEQ ID NO: 854086 - RNA, 19 nt, Artificial Sequence
  Description of Artificial Sequence: Synthetic oligonucleotide
gcguuccauugaaacggac

SEQ ID NO: 854087 - RNA, 19 nt, Artificial Sequence
  Description of Artificial Sequence: Synthetic oligonucleotide
ccuugagcguuagauugaa

SEQ ID NO: 854088 - RNA, 19 nt, Artificial Sequence
  Description of Artificial Sequence: Synthetic oligonucleotide
ggaagcgccguugauccuu

SEQ ID NO: 854089 - RNA, 19 nt, Artificial Sequence
  Description of Artificial Sequence: Synthetic oligonucleotide
gcguacaucuggacagaaa

SEQ ID NO: 854090 - RNA, 19 nt, Artificial Sequence
  Description of Artificial Sequence: Synthetic oligonucleotide
gccacagacuugaccgcga

SEQ ID NO: 854091 - RNA, 19 nt, Artificial Sequence
  Description of Artificial Sequence: Synthetic oligonucleotide
gcccguaggugugggcggc

SEQ ID NO: 854092 - RNA, 19 nt, Artificial Sequence
  Description of Artificial Sequence: Synthetic oligonucleotide
ggcucagguguaagccgca

SEQ ID NO: 854093 - RNA, 19 nt, Artificial Sequence
  Description of Artificial Sequence: Synthetic oligonucleotide
gcguuagauugaagaaggu

SEQ ID NO: 854094 - RNA, 19 nt, Artificial Sequence
  Description of Artificial Sequence: Synthetic oligonucleotide
ccuuggcgcgcagauaucu

SEQ ID NO: 854095 - RNA, 19 nt, Artificial Sequence
  Description of Artificial Sequence: Synthetic oligonucleotide
cggcgccccaagucugacg

SEQ ID NO: 854096 - RNA, 19 nt, Artificial Sequence
  Description of Artificial Sequence: Synthetic oligonucleotide
gcguccgcgugccugcccu

SEQ ID NO: 854097 - RNA, 19 nt, Artificial Sequence
  Description of Artificial Sequence: Synthetic oligonucleotide
caucggcaucgcccuuaaa

SEQ ID NO: 854098 - RNA, 19 nt, Artificial Sequence
  Description of Artificial Sequence: Synthetic oligonucleotide
cggcgggccgccagaugcg

SEQ ID NO: 854099 - RNA, 19 nt, Artificial Sequence
  Description of Artificial Sequence: Synthetic oligonucleotide
cgcgcagauaucugccgaa

SEQ ID NO: 854100 - RNA, 19 nt, Artificial Sequence
  Description of Artificial Sequence: Synthetic oligonucleotide
cugccccgucacgcugcgc

SEQ ID NO: 854101 - RNA, 19 nt, Artificial Sequence
  Description of Artificial Sequence: Synthetic oligonucleotide
cgcagauaucugccgaagu

SEQ ID NO: 854102 - RNA, 19 nt, Artificial Sequence
  Description of Artificial Sequence: Synthetic oligonucleotide
cguugauccuuggcgcgca

SEQ ID NO: 854103 - RNA, 19 nt, Artificial Sequence
  Description of Artificial Sequence: Synthetic oligonucleotide
gcgcgccagugcguccgcg

SEQ ID NO: 854104 - RNA, 19 nt, Artificial Sequence
  Description of Artificial Sequence: Synthetic oligonucleotide
ggaaagccguguacaccau

SEQ ID NO: 854105 - RNA, 19 nt, Artificial Sequence
  Description of Artificial Sequence: Synthetic oligonucleotide
gggaagcgccguugauccu

SEQ ID NO: 854106 - RNA, 19 nt, Artificial Sequence
  Description of Artificial Sequence: Synthetic oligonucleotide
ccauugaaacggaccuguu

SEQ ID NO: 854107 - RNA, 19 nt, Artificial Sequence
  Description of Artificial Sequence: Synthetic oligonucleotide
gggcggcacuggggugucg

SEQ ID NO: 854108 - RNA, 19 nt, Artificial Sequence
  Description of Artificial Sequence: Synthetic oligonucleotide
cugcuaggcggcggagcgu

SEQ ID NO: 854109 - RNA, 19 nt, Artificial Sequence
  Description of Artificial Sequence: Synthetic oligonucleotide
gcggagcguggcuccggaa

SEQ ID NO: 854110 - RNA, 19 nt, Artificial Sequence
  Description of Artificial Sequence: Synthetic oligonucleotide
gccacgcaucccggcaaaa

SEQ ID NO: 854111 - RNA, 19 nt, Artificial Sequence
  Description of Artificial Sequence: Synthetic oligonucleotide
cagauccggcgggccgcca

SEQ ID NO: 854112 - RNA, 19 nt, Artificial Sequence
  Description of Artificial Sequence: Synthetic oligonucleotide
ccgcgugccugcccugcca

SEQ ID NO: 854113 - RNA, 19 nt, Artificial Sequence
  Description of Artificial Sequence: Synthetic oligonucleotide
cguccgcgugccugcccug

SEQ ID NO: 854114 - RNA, 19 nt, Artificial Sequence
  Description of Artificial Sequence: Synthetic oligonucleotide
gccccgucacgcugcgcgu

SEQ ID NO: 854115 - RNA, 19 nt, Artificial Sequence
  Description of Artificial Sequence: Synthetic oligonucleotide
gcgccccaagucugacgua

SEQ ID NO: 854116 - RNA, 19 nt, Artificial Sequence
  Description of Artificial Sequence: Synthetic oligonucleotide
gcgacccucggcgccccaa

SEQ ID NO: 854117 - RNA, 19 nt, Artificial Sequence
  Description of Artificial Sequence: Synthetic oligonucleotide
ccgucacgcugcgcguaga

SEQ ID NO: 854118 - RNA, 19 nt, Artificial Sequence
  Description of Artificial Sequence: Synthetic oligonucleotide
ccccugcauaggccgggua

SEQ ID NO: 854119 - RNA, 19 nt, Artificial Sequence
  Description of Artificial Sequence: Synthetic oligonucleotide
gccccgcccuucccggggu

SEQ ID NO: 854120 - RNA, 19 nt, Artificial Sequence
  Description of Artificial Sequence: Synthetic oligonucleotide
cgcgccagugcguccgcgu

SEQ ID NO: 854121 - RNA, 19 nt, Artificial Sequence
  Description of Artificial Sequence: Synthetic oligonucleotide
cugcggcauuuacgcgguu

SEQ ID NO: 854122 - RNA, 19 nt, Artificial Sequence
  Description of Artificial Sequence: Synthetic oligonucleotide
ccccgucacgcugcgcgua

SEQ ID NO: 854123 - RNA, 19 nt, Artificial Sequence
  Description of Artificial Sequence: Synthetic oligonucleotide
cggcauuuacgcgguuggu

SEQ ID NO: 854124 - RNA, 19 nt, Artificial Sequence
  Description of Artificial Sequence: Synthetic oligonucleotide
gcgccgucucugcggcauu

SEQ ID NO: 854125 - RNA, 19 nt, Artificial Sequence
  Description of Artificial Sequence: Synthetic oligonucleotide
ccagugcguccgcgugccu

SEQ ID NO: 854126 - RNA, 19 nt, Artificial Sequence
  Description of Artificial Sequence: Synthetic oligonucleotide
cgcgacccucggcgcccca

SEQ ID NO: 854127 - RNA, 19 nt, Artificial Sequence
  Description of Artificial Sequence: Synthetic oligonucleotide
cgccgucucugcggcauuu

SEQ ID NO: 854128 - RNA, 19 nt, Artificial Sequence
  Description of Artificial Sequence: Synthetic oligonucleotide
gggccgcgcgggcguuguu

SEQ ID NO: 854129 - RNA, 19 nt, Artificial Sequence
  Description of Artificial Sequence: Synthetic oligonucleotide
aacccuagcaacgacgugc

SEQ ID NO: 854130 - RNA, 19 nt, Artificial Sequence
  Description of Artificial Sequence: Synthetic oligonucleotide
aacgacgugcuucagguuc

SEQ ID NO: 854131 - RNA, 19 nt, Artificial Sequence
  Description of Artificial Sequence: Synthetic oligonucleotide
acgcaaagcaaccaugucc

SEQ ID NO: 854132 - RNA, 19 nt, Artificial Sequence
  Description of Artificial Sequence: Synthetic oligonucleotide
aaaagggguugacacuugc

SEQ ID NO: 854133 - RNA, 19 nt, Artificial Sequence
  Description of Artificial Sequence: Synthetic oligonucleotide
uuaugucuggaucugcggg

SEQ ID NO: 854134 - RNA, 19 nt, Artificial Sequence
  Description of Artificial Sequence: Synthetic oligonucleotide
aagggguugacacuugcag

SEQ ID NO: 854135 - RNA, 19 nt, Artificial Sequence
  Description of Artificial Sequence: Synthetic oligonucleotide
gaccccaucauagaaaagg

SEQ ID NO: 854136 - RNA, 19 nt, Artificial Sequence
  Description of Artificial Sequence: Synthetic oligonucleotide
accccuauuucucacaagg

SEQ ID NO: 854137 - RNA, 19 nt, Artificial Sequence
  Description of Artificial Sequence: Synthetic oligonucleotide
ucagcuacgagacuaguuc

SEQ ID NO: 854138 - RNA, 19 nt, Artificial Sequence
  Description of Artificial Sequence: Synthetic oligonucleotide
aggaucacucuauauuagc

SEQ ID NO: 854139 - RNA, 19 nt, Artificial Sequence
  Description of Artificial Sequence: Synthetic oligonucleotide
gaucacucuauauuagccc

SEQ ID NO: 854140 - RNA, 19 nt, Artificial Sequence
  Description of Artificial Sequence: Synthetic oligonucleotide
uuagacgugggccucauuc

SEQ ID NO: 854141 - RNA, 19 nt, Artificial Sequence
  Description of Artificial Sequence: Synthetic oligonucleotide
uuaggaucacucuauauua

SEQ ID NO: 854142 - RNA, 19 nt, Artificial Sequence
  Description of Artificial Sequence: Synthetic oligonucleotide
accaaauucccacucgggg

SEQ ID NO: 854143 - RNA, 19 nt, Artificial Sequence
  Description of Artificial Sequence: Synthetic oligonucleotide
cuaaacccuagcaacgacg

SEQ ID NO: 854144 - RNA, 19 nt, Artificial Sequence
  Description of Artificial Sequence: Synthetic oligonucleotide
gaaguuuccggcaaccaag

SEQ ID NO: 854145 - RNA, 19 nt, Artificial Sequence
  Description of Artificial Sequence: Synthetic oligonucleotide
uaaacccuagcaacgacgu

SEQ ID NO: 854146 - RNA, 19 nt, Artificial Sequence
  Description of Artificial Sequence: Synthetic oligonucleotide
auuugugugugugugaaug

SEQ ID NO: 854147 - RNA, 19 nt, Artificial Sequence
  Description of Artificial Sequence: Synthetic oligonucleotide
ucgaaguuagcgacagagg

SEQ ID NO: 854148 - RNA, 19 nt, Artificial Sequence
  Description of Artificial Sequence: Synthetic oligonucleotide
agaccaaauucccacucgg

SEQ ID NO: 854149 - RNA, 19 nt, Artificial Sequence
  Description of Artificial Sequence: Synthetic oligonucleotide
ugagauuugugugugugug

SEQ ID NO: 854150 - RNA, 19 nt, Artificial Sequence
  Description of Artificial Sequence: Synthetic oligonucleotide
aaccuaaucucaacacagc

SEQ ID NO: 854151 - RNA, 19 nt, Artificial Sequence
  Description of Artificial Sequence: Synthetic oligonucleotide
auuaaggcagucacgcccc

SEQ ID NO: 854152 - RNA, 19 nt, Artificial Sequence
  Description of Artificial Sequence: Synthetic oligonucleotide
aacgguugaagcugaggug

SEQ ID NO: 854153 - RNA, 19 nt, Artificial Sequence
  Description of Artificial Sequence: Synthetic oligonucleotide
uuucuuaggaucacucuau

SEQ ID NO: 854154 - RNA, 19 nt, Artificial Sequence
  Description of Artificial Sequence: Synthetic oligonucleotide
agaaagagcgcaagaaagg

SEQ ID NO: 854155 - RNA, 19 nt, Artificial Sequence
  Description of Artificial Sequence: Synthetic oligonucleotide
uaggaucacucuauauuag

SEQ ID NO: 854156 - RNA, 19 nt, Artificial Sequence
  Description of Artificial Sequence: Synthetic oligonucleotide
ucaagccacuguuuagacg

SEQ ID NO: 854157 - RNA, 19 nt, Artificial Sequence
  Description of Artificial Sequence: Synthetic oligonucleotide
guaugccuguccuaaaccc

SEQ ID NO: 854158 - RNA, 19 nt, Artificial Sequence
  Description of Artificial Sequence: Synthetic oligonucleotide
cuaguaggugucuugguuc

SEQ ID NO: 854159 - RNA, 19 nt, Artificial Sequence
  Description of Artificial Sequence: Synthetic oligonucleotide
aacgggagguguuuccgag

SEQ ID NO: 854160 - RNA, 19 nt, Artificial Sequence
  Description of Artificial Sequence: Synthetic oligonucleotide
agguaugucggggaaacgg

SEQ ID NO: 854161 - RNA, 19 nt, Artificial Sequence
  Description of Artificial Sequence: Synthetic oligonucleotide
ucacaugacguuuuccggu

SEQ ID NO: 854162 - RNA, 19 nt, Artificial Sequence
  Description of Artificial Sequence: Synthetic oligonucleotide
aggucggcgauacuagacg

SEQ ID NO: 854163 - RNA, 19 nt, Artificial Sequence
  Description of Artificial Sequence: Synthetic oligonucleotide
caagcaugcgcaagaagag

SEQ ID NO: 854164 - RNA, 19 nt, Artificial Sequence
  Description of Artificial Sequence: Synthetic oligonucleotide
agguucucccacugaauac

SEQ ID NO: 854165 - RNA, 19 nt, Artificial Sequence
  Description of Artificial Sequence: Synthetic oligonucleotide
cacuguuuagacgugggcc

SEQ ID NO: 854166 - RNA, 19 nt, Artificial Sequence
  Description of Artificial Sequence: Synthetic oligonucleotide
gaugcccugagcugauagg

SEQ ID NO: 854167 - RNA, 19 nt, Artificial Sequence
  Description of Artificial Sequence: Synthetic oligonucleotide
gaguuggcaaccuaaucuc

SEQ ID NO: 854168 - RNA, 19 nt, Artificial Sequence
  Description of Artificial Sequence: Synthetic oligonucleotide
gaacgcguggggcagagac

SEQ ID NO: 854169 - RNA, 19 nt, Artificial Sequence
  Description of Artificial Sequence: Synthetic oligonucleotide
uuugugugugugugaauga

SEQ ID NO: 854170 - RNA, 19 nt, Artificial Sequence
  Description of Artificial Sequence: Synthetic oligonucleotide
ugcgccacccagaagguga

SEQ ID NO: 854171 - RNA, 19 nt, Artificial Sequence
  Description of Artificial Sequence: Synthetic oligonucleotide
agacuaguaggugucuugg

SEQ ID NO: 854172 - RNA, 19 nt, Artificial Sequence
  Description of Artificial Sequence: Synthetic oligonucleotide
ugugugugugugaaugagu

SEQ ID NO: 854173 - RNA, 19 nt, Artificial Sequence
  Description of Artificial Sequence: Synthetic oligonucleotide
ucccuuucgaaguuagcga

SEQ ID NO: 854174 - RNA, 19 nt, Artificial Sequence
  Description of Artificial Sequence: Synthetic oligonucleotide
aagaggacgguugaacggu

SEQ ID NO: 854175 - RNA, 19 nt, Artificial Sequence
  Description of Artificial Sequence: Synthetic oligonucleotide
agcaacgacgugcuucagg

SEQ ID NO: 854176 - RNA, 19 nt, Artificial Sequence
  Description of Artificial Sequence: Synthetic oligonucleotide
uagaaaagggguugacacu

SEQ ID NO: 854177 - RNA, 19 nt, Artificial Sequence
  Description of Artificial Sequence: Synthetic oligonucleotide
auacagguagugaaggcag

SEQ ID NO: 854178 - RNA, 19 nt, Artificial Sequence
  Description of Artificial Sequence: Synthetic oligonucleotide
cuuucgaaguuagcgacag

SEQ ID NO: 854179 - RNA, 19 nt, Artificial Sequence
  Description of Artificial Sequence: Synthetic oligonucleotide
gauagggcgcuucccgagg

SEQ ID NO: 854180 - RNA, 19 nt, Artificial Sequence
  Description of Artificial Sequence: Synthetic oligonucleotide
acgccggugagauacaggu

SEQ ID NO: 854181 - RNA, 19 nt, Artificial Sequence
  Description of Artificial Sequence: Synthetic oligonucleotide
gugaaaaccaggucggcga

SEQ ID NO: 854182 - RNA, 19 nt, Artificial Sequence
  Description of Artificial Sequence: Synthetic oligonucleotide
uugugugugugugaaugag

SEQ ID NO: 854183 - RNA, 19 nt, Artificial Sequence
  Description of Artificial Sequence: Synthetic oligonucleotide
gaacgguugaagcugaggu

SEQ ID NO: 854184 - RNA, 19 nt, Artificial Sequence
  Description of Artificial Sequence: Synthetic oligonucleotide
auaccugauuccuguaugu

SEQ ID NO: 854185 - RNA, 19 nt, Artificial Sequence
  Description of Artificial Sequence: Synthetic oligonucleotide
ugauagggcgcuucccgag

SEQ ID NO: 854186 - RNA, 19 nt, Artificial Sequence
  Description of Artificial Sequence: Synthetic oligonucleotide
uagacgugggccucauucc

SEQ ID NO: 854187 - RNA, 19 nt, Artificial Sequence
  Description of Artificial Sequence: Synthetic oligonucleotide
ucagguaugucggggaaac

SEQ ID NO: 854188 - RNA, 19 nt, Artificial Sequence
  Description of Artificial Sequence: Synthetic oligonucleotide
acuaguaggugucuugguu

SEQ ID NO: 854189 - RNA, 19 nt, Artificial Sequence
  Description of Artificial Sequence: Synthetic oligonucleotide
gccggugagauacagguag

SEQ ID NO: 854190 - RNA, 19 nt, Artificial Sequence
  Description of Artificial Sequence: Synthetic oligonucleotide
uaguaggugucuugguucu

SEQ ID NO: 854191 - RNA, 19 nt, Artificial Sequence
  Description of Artificial Sequence: Synthetic oligonucleotide
gacgguugaacgguugaag

SEQ ID NO: 854192 - RNA, 19 nt, Artificial Sequence
  Description of Artificial Sequence: Synthetic oligonucleotide
agaaaagggguugacacuu

SEQ ID NO: 854193 - RNA, 19 nt, Artificial Sequence
  Description of Artificial Sequence: Synthetic oligonucleotide
gaaggggcgauggacuuag

SEQ ID NO: 854194 - RNA, 19 nt, Artificial Sequence
  Description of Artificial Sequence: Synthetic oligonucleotide
gggcgauggacuuagggag

SEQ ID NO: 854195 - RNA, 19 nt, Artificial Sequence
  Description of Artificial Sequence: Synthetic oligonucleotide
aucaagcaugcgcaagaag

SEQ ID NO: 854196 - RNA, 19 nt, Artificial Sequence
  Description of Artificial Sequence: Synthetic oligonucleotide
agagcgggagaccagugga

SEQ ID NO: 854197 - RNA, 19 nt, Artificial Sequence
  Description of Artificial Sequence: Synthetic oligonucleotide
caugcgcaagaagaggacg

SEQ ID NO: 854198 - RNA, 19 nt, Artificial Sequence
  Description of Artificial Sequence: Synthetic oligonucleotide
agugccaccccuauuucuc

SEQ ID NO: 854199 - RNA, 19 nt, Artificial Sequence
  Description of Artificial Sequence: Synthetic oligonucleotide
uugagugcgccucccauua

SEQ ID NO: 854200 - RNA, 19 nt, Artificial Sequence
  Description of Artificial Sequence: Synthetic oligonucleotide
uacgagacuaguucuccaa

SEQ ID NO: 854201 - RNA, 19 nt, Artificial Sequence
  Description of Artificial Sequence: Synthetic oligonucleotide
cugacggugggcucaguag

SEQ ID NO: 854202 - RNA, 19 nt, Artificial Sequence
  Description of Artificial Sequence: Synthetic oligonucleotide
ucugggaccguuuguuccu

SEQ ID NO: 854203 - RNA, 19 nt, Artificial Sequence
  Description of Artificial Sequence: Synthetic oligonucleotide
gauacuagacgggcgccag

SEQ ID NO: 854204 - RNA, 19 nt, Artificial Sequence
  Description of Artificial Sequence: Synthetic oligonucleotide
uuagggcuagcuaguuucu

SEQ ID NO: 854205 - RNA, 19 nt, Artificial Sequence
  Description of Artificial Sequence: Synthetic oligonucleotide
cuuggacaaucccaucuug

SEQ ID NO: 854206 - RNA, 19 nt, Artificial Sequence
  Description of Artificial Sequence: Synthetic oligonucleotide
gagugcgccucccauuaag

SEQ ID NO: 854207 - RNA, 19 nt, Artificial Sequence
  Description of Artificial Sequence: Synthetic oligonucleotide
aaccaagaugggcuguaaa

SEQ ID NO: 854208 - RNA, 19 nt, Artificial Sequence
  Description of Artificial Sequence: Synthetic oligonucleotide
uuaaggcagucacgccccg

SEQ ID NO: 854209 - RNA, 19 nt, Artificial Sequence
  Description of Artificial Sequence: Synthetic oligonucleotide
ucggcgauacuagacgggc

SEQ ID NO: 854210 - RNA, 19 nt, Artificial Sequence
  Description of Artificial Sequence: Synthetic oligonucleotide
augcgcaagaagaggacgg

SEQ ID NO: 854211 - RNA, 19 nt, Artificial Sequence
  Description of Artificial Sequence: Synthetic oligonucleotide
uccuccuaacugcagcagu

SEQ ID NO: 854212 - RNA, 19 nt, Artificial Sequence
  Description of Artificial Sequence: Synthetic oligonucleotide
aauucccacucggggaaag

SEQ ID NO: 854213 - RNA, 19 nt, Artificial Sequence
  Description of Artificial Sequence: Synthetic oligonucleotide
cagacuaguaggugucuug

SEQ ID NO: 854214 - RNA, 19 nt, Artificial Sequence
  Description of Artificial Sequence: Synthetic oligonucleotide
gagcaccaagcuuuaagga

SEQ ID NO: 854215 - RNA, 19 nt, Artificial Sequence
  Description of Artificial Sequence: Synthetic oligonucleotide
ggaucacucuauauuagcc

SEQ ID NO: 854216 - RNA, 19 nt, Artificial Sequence
  Description of Artificial Sequence: Synthetic oligonucleotide
cugauuccuguauguaaac

SEQ ID NO: 854217 - RNA, 19 nt, Artificial Sequence
  Description of Artificial Sequence: Synthetic oligonucleotide
gguaugccuguccuaaacc

SEQ ID NO: 854218 - RNA, 19 nt, Artificial Sequence
  Description of Artificial Sequence: Synthetic oligonucleotide
aaacccuagcaacgacgug

SEQ ID NO: 854219 - RNA, 19 nt, Artificial Sequence
  Description of Artificial Sequence: Synthetic oligonucleotide
gagacgcaaagcaaccaug

SEQ ID NO: 854220 - RNA, 19 nt, Artificial Sequence
  Description of Artificial Sequence: Synthetic oligonucleotide
agauuugugugugugugaa

SEQ ID NO: 854221 - RNA, 19 nt, Artificial Sequence
  Description of Artificial Sequence: Synthetic oligonucleotide
ugaaaaccaggucggcgau

SEQ ID NO: 854222 - RNA, 19 nt, Artificial Sequence
  Description of Artificial Sequence: Synthetic oligonucleotide
ggugaaaaccaggucggcg

SEQ ID NO: 854223 - RNA, 19 nt, Artificial Sequence
  Description of Artificial Sequence: Synthetic oligonucleotide
uccgaggggccccaauacc

SEQ ID NO: 854224 - RNA, 19 nt, Artificial Sequence
  Description of Artificial Sequence: Synthetic oligonucleotide
acgggcgccaguccccugc

SEQ ID NO: 854225 - RNA, 19 nt, Artificial Sequence
  Description of Artificial Sequence: Synthetic oligonucleotide
cuuaggaucacucuauauu

SEQ ID NO: 854226 - RNA, 19 nt, Artificial Sequence
  Description of Artificial Sequence: Synthetic oligonucleotide
gagauuuguguguguguga

SEQ ID NO: 854227 - RNA, 19 nt, Artificial Sequence
  Description of Artificial Sequence: Synthetic oligonucleotide
cuacgcgggacaagacugg

SEQ ID NO: 854228 - RNA, 19 nt, Artificial Sequence
  Description of Artificial Sequence: Synthetic oligonucleotide
uugucagcgaagggaacgc

SEQ ID NO: 854229 - RNA, 19 nt, Artificial Sequence
  Description of Artificial Sequence: Synthetic oligonucleotide
cuagcuaguuucuaucucu

SEQ ID NO: 854230 - RNA, 19 nt, Artificial Sequence
  Description of Artificial Sequence: Synthetic oligonucleotide
uucuuaggaucacucuaua

SEQ ID NO: 854231 - RNA, 19 nt, Artificial Sequence
  Description of Artificial Sequence: Synthetic oligonucleotide
agcaugcgcaagaagagga

SEQ ID NO: 854232 - RNA, 19 nt, Artificial Sequence
  Description of Artificial Sequence: Synthetic oligonucleotide
cauagaaaagggguugaca

SEQ ID NO: 854233 - RNA, 19 nt, Artificial Sequence
  Description of Artificial Sequence: Synthetic oligonucleotide
ggucggcgauacuagacgg

SEQ ID NO: 854234 - RNA, 19 nt, Artificial Sequence
  Description of Artificial Sequence: Synthetic oligonucleotide
aaagggguugacacuugca

SEQ ID NO: 854235 - RNA, 19 nt, Artificial Sequence
  Description of Artificial Sequence: Synthetic oligonucleotide
uccggcaaccaagaugggc

SEQ ID NO: 854236 - RNA, 19 nt, Artificial Sequence
  Description of Artificial Sequence: Synthetic oligonucleotide
aaguuuccggcaaccaaga

SEQ ID NO: 854237 - RNA, 19 nt, Artificial Sequence
  Description of Artificial Sequence: Synthetic oligonucleotide
ggcgauacuagacgggcgc

SEQ ID NO: 854238 - RNA, 19 nt, Artificial Sequence
  Description of Artificial Sequence: Synthetic oligonucleotide
ugucagcgaagggaacgcg

SEQ ID NO: 854239 - RNA, 19 nt, Artificial Sequence
  Description of Artificial Sequence: Synthetic oligonucleotide
uuugagugcgccucccauu

SEQ ID NO: 854240 - RNA, 19 nt, Artificial Sequence
  Description of Artificial Sequence: Synthetic oligonucleotide
agacgcaaagcaaccaugu

SEQ ID NO: 854241 - RNA, 19 nt, Artificial Sequence
  Description of Artificial Sequence: Synthetic oligonucleotide
ggcggagggauucuggagc

SEQ ID NO: 854242 - RNA, 19 nt, Artificial Sequence
  Description of Artificial Sequence: Synthetic oligonucleotide
agacgugggccucauuccu

SEQ ID NO: 854243 - RNA, 19 nt, Artificial Sequence
  Description of Artificial Sequence: Synthetic oligonucleotide
agggcuagcuaguuucuau

SEQ ID NO: 854244 - RNA, 19 nt, Artificial Sequence
  Description of Artificial Sequence: Synthetic oligonucleotide
aacuccguccccagacuag

SEQ ID NO: 854245 - RNA, 19 nt, Artificial Sequence
  Description of Artificial Sequence: Synthetic oligonucleotide
caggucggcgauacuagac

SEQ ID NO: 854246 - RNA, 19 nt, Artificial Sequence
  Description of Artificial Sequence: Synthetic oligonucleotide
uagacgggcgccagucccc

SEQ ID NO: 854247 - RNA, 19 nt, Artificial Sequence
  Description of Artificial Sequence: Synthetic oligonucleotide
agcuacgagacuaguucuc

SEQ ID NO: 854248 - RNA, 19 nt, Artificial Sequence
  Description of Artificial Sequence: Synthetic oligonucleotide
gacgcaaagcaaccauguc

SEQ ID NO: 854249 - RNA, 19 nt, Artificial Sequence
  Description of Artificial Sequence: Synthetic oligonucleotide
uacuagacgggcgccaguc

SEQ ID NO: 854250 - RNA, 19 nt, Artificial Sequence
  Description of Artificial Sequence: Synthetic oligonucleotide
gucacgccccguugggucg

SEQ ID NO: 854251 - RNA, 19 nt, Artificial Sequence
  Description of Artificial Sequence: Synthetic oligonucleotide
guuagcgacagaggccugc

SEQ ID NO: 854252 - RNA, 19 nt, Artificial Sequence
  Description of Artificial Sequence: Synthetic oligonucleotide
ugugcgccacccagaaggu

SEQ ID NO: 854253 - RNA, 19 nt, Artificial Sequence
  Description of Artificial Sequence: Synthetic oligonucleotide
uuucgaaguuagcgacaga

SEQ ID NO: 854254 - RNA, 19 nt, Artificial Sequence
  Description of Artificial Sequence: Synthetic oligonucleotide
acgagacuaguucuccaaa

SEQ ID NO: 854255 - RNA, 19 nt, Artificial Sequence
  Description of Artificial Sequence: Synthetic oligonucleotide
agucacgcgguggagggug

SEQ ID NO: 854256 - RNA, 19 nt, Artificial Sequence
  Description of Artificial Sequence: Synthetic oligonucleotide
uccgggaucaaaggauuuc

SEQ ID NO: 854257 - RNA, 19 nt, Artificial Sequence
  Description of Artificial Sequence: Synthetic oligonucleotide
gugcgccucccauuaaggc

SEQ ID NO: 854258 - RNA, 19 nt, Artificial Sequence
  Description of Artificial Sequence: Synthetic oligonucleotide
auagggcgcuucccgagga

SEQ ID NO: 854259 - RNA, 19 nt, Artificial Sequence
  Description of Artificial Sequence: Synthetic oligonucleotide
agggcggagggauucugga

SEQ ID NO: 854260 - RNA, 19 nt, Artificial Sequence
  Description of Artificial Sequence: Synthetic oligonucleotide
cacgccggugagauacagg

SEQ ID NO: 854261 - RNA, 19 nt, Artificial Sequence
  Description of Artificial Sequence: Synthetic oligonucleotide
gcuacgcgggacaagacug

SEQ ID NO: 854262 - RNA, 19 nt, Artificial Sequence
  Description of Artificial Sequence: Synthetic oligonucleotide
ccuggucucuccucaagcc

SEQ ID NO: 854263 - RNA, 19 nt, Artificial Sequence
  Description of Artificial Sequence: Synthetic oligonucleotide
cccuuucgaaguuagcgac

SEQ ID NO: 854264 - RNA, 19 nt, Artificial Sequence
  Description of Artificial Sequence: Synthetic oligonucleotide
acgcguggggcagagaccu

SEQ ID NO: 854265 - RNA, 19 nt, Artificial Sequence
  Description of Artificial Sequence: Synthetic oligonucleotide
gucggcgauacuagacggg

SEQ ID NO: 854266 - RNA, 19 nt, Artificial Sequence
  Description of Artificial Sequence: Synthetic oligonucleotide
ggcuguaaaggcagucacg

SEQ ID NO: 854267 - RNA, 19 nt, Artificial Sequence
  Description of Artificial Sequence: Synthetic oligonucleotide
gaaggggcgugccgcccgg

SEQ ID NO: 854268 - RNA, 19 nt, Artificial Sequence
  Description of Artificial Sequence: Synthetic oligonucleotide
cucccuuugagugcgccuc

SEQ ID NO: 854269 - RNA, 19 nt, Artificial Sequence
  Description of Artificial Sequence: Synthetic oligonucleotide
cuccgaggggccccaauac

SEQ ID NO: 854270 - RNA, 19 nt, Artificial Sequence
  Description of Artificial Sequence: Synthetic oligonucleotide
aggggcgugccgcccggcc

SEQ ID NO: 854271 - RNA, 19 nt, Artificial Sequence
  Description of Artificial Sequence: Synthetic oligonucleotide
guugaacgguugaagcuga

SEQ ID NO: 854272 - RNA, 19 nt, Artificial Sequence
  Description of Artificial Sequence: Synthetic oligonucleotide
ugcgcaagaagaggacggu

SEQ ID NO: 854273 - RNA, 19 nt, Artificial Sequence
  Description of Artificial Sequence: Synthetic oligonucleotide
cagagaggaugcccugagc

SEQ ID NO: 854274 - RNA, 19 nt, Artificial Sequence
  Description of Artificial Sequence: Synthetic oligonucleotide
gcuacgagacuaguucucc

SEQ ID NO: 854275 - RNA, 19 nt, Artificial Sequence
  Description of Artificial Sequence: Synthetic oligonucleotide
ccccuauuucucacaaggg

SEQ ID NO: 854276 - RNA, 19 nt, Artificial Sequence
  Description of Artificial Sequence: Synthetic oligonucleotide
ccaaauucccacucgggga

SEQ ID NO: 854277 - RNA, 19 nt, Artificial Sequence
  Description of Artificial Sequence: Synthetic oligonucleotide
cuacgagacuaguucucca

SEQ ID NO: 854278 - RNA, 19 nt, Artificial Sequence
  Description of Artificial Sequence: Synthetic oligonucleotide
gcaagaagaggacgguuga

SEQ ID NO: 854279 - RNA, 19 nt, Artificial Sequence
  Description of Artificial Sequence: Synthetic oligonucleotide
gcuagcuaguuucuaucuc

SEQ ID NO: 854280 - RNA, 19 nt, Artificial Sequence
  Description of Artificial Sequence: Synthetic oligonucleotide
gaacuccguccccagacua

SEQ ID NO: 854281 - RNA, 19 nt, Artificial Sequence
  Description of Artificial Sequence: Synthetic oligonucleotide
guucagguaugucggggaa

SEQ ID NO: 854282 - RNA, 19 nt, Artificial Sequence
  Description of Artificial Sequence: Synthetic oligonucleotide
aaaccaggucggcgauacu

SEQ ID NO: 854283 - RNA, 19 nt, Artificial Sequence
  Description of Artificial Sequence: Synthetic oligonucleotide
gaggacgguugaacgguug

SEQ ID NO: 854284 - RNA, 19 nt, Artificial Sequence
  Description of Artificial Sequence: Synthetic oligonucleotide
ggguucagguaugucgggg

SEQ ID NO: 854285 - RNA, 19 nt, Artificial Sequence
  Description of Artificial Sequence: Synthetic oligonucleotide
auacuagacgggcgccagu

SEQ ID NO: 854286 - RNA, 19 nt, Artificial Sequence
  Description of Artificial Sequence: Synthetic oligonucleotide
cgcaaagcaaccaugucca

SEQ ID NO: 854287 - RNA, 19 nt, Artificial Sequence
  Description of Artificial Sequence: Synthetic oligonucleotide
cgcaagaagaggacgguug

SEQ ID NO: 854288 - RNA, 19 nt, Artificial Sequence
  Description of Artificial Sequence: Synthetic oligonucleotide
gacgugggccucauuccug

SEQ ID NO: 854289 - RNA, 19 nt, Artificial Sequence
  Description of Artificial Sequence: Synthetic oligonucleotide
ucucagcuacgagacuagu

SEQ ID NO: 854290 - RNA, 19 nt, Artificial Sequence
  Description of Artificial Sequence: Synthetic oligonucleotide
cccuauuucucacaaggga

SEQ ID NO: 854291 - RNA, 19 nt, Artificial Sequence
  Description of Artificial Sequence: Synthetic oligonucleotide
ugccaccccuauuucucac

SEQ ID NO: 854292 - RNA, 19 nt, Artificial Sequence
  Description of Artificial Sequence: Synthetic oligonucleotide
aguuuccggcaaccaagau

SEQ ID NO: 854293 - RNA, 19 nt, Artificial Sequence
  Description of Artificial Sequence: Synthetic oligonucleotide
uacgcgggacaagacugga

SEQ ID NO: 854294 - RNA, 19 nt, Artificial Sequence
  Description of Artificial Sequence: Synthetic oligonucleotide
aaauucccacucggggaaa

SEQ ID NO: 854295 - RNA, 19 nt, Artificial Sequence
  Description of Artificial Sequence: Synthetic oligonucleotide
caccccuauuucucacaag

SEQ ID NO: 854296 - RNA, 19 nt, Artificial Sequence
  Description of Artificial Sequence: Synthetic oligonucleotide
gcgcaagaaaggcccagag

SEQ ID NO: 854297 - RNA, 19 nt, Artificial Sequence
  Description of Artificial Sequence: Synthetic oligonucleotide
ggcagucacgcgguggagg

SEQ ID NO: 854298 - RNA, 19 nt, Artificial Sequence
  Description of Artificial Sequence: Synthetic oligonucleotide
aggcagucacgccccguug

SEQ ID NO: 854299 - RNA, 19 nt, Artificial Sequence
  Description of Artificial Sequence: Synthetic oligonucleotide
gggcuagcuaguuucuauc

SEQ ID NO: 854300 - RNA, 19 nt, Artificial Sequence
  Description of Artificial Sequence: Synthetic oligonucleotide
uggagcgaaggggcgugcc

SEQ ID NO: 854301 - RNA, 19 nt, Artificial Sequence
  Description of Artificial Sequence: Synthetic oligonucleotide
guaaaggcagucacgcggu

SEQ ID NO: 854302 - RNA, 19 nt, Artificial Sequence
  Description of Artificial Sequence: Synthetic oligonucleotide
cucucccuuugagugcgcc

SEQ ID NO: 854303 - RNA, 19 nt, Artificial Sequence
  Description of Artificial Sequence: Synthetic oligonucleotide
uggcuacgcgggacaagac

SEQ ID NO: 854304 - RNA, 19 nt, Artificial Sequence
  Description of Artificial Sequence: Synthetic oligonucleotide
accguuuguuccugagauu

SEQ ID NO: 854305 - RNA, 19 nt, Artificial Sequence
  Description of Artificial Sequence: Synthetic oligonucleotide
ggacuuagggaggagccca

SEQ ID NO: 854306 - RNA, 19 nt, Artificial Sequence
  Description of Artificial Sequence: Synthetic oligonucleotide
ugagugcgccucccauuaa

SEQ ID NO: 854307 - RNA, 19 nt, Artificial Sequence
  Description of Artificial Sequence: Synthetic oligonucleotide
ugcugguaugccuguccua

SEQ ID NO: 854308 - RNA, 19 nt, Artificial Sequence
  Description of Artificial Sequence: Synthetic oligonucleotide
cuguuuagacgugggccuc

SEQ ID NO: 854309 - RNA, 19 nt, Artificial Sequence
  Description of Artificial Sequence: Synthetic oligonucleotide
acccuagcaacgacgugcu

SEQ ID NO: 854310 - RNA, 19 nt, Artificial Sequence
  Description of Artificial Sequence: Synthetic oligonucleotide
ccacuguuuagacgugggc

SEQ ID NO: 854311 - RNA, 19 nt, Artificial Sequence
  Description of Artificial Sequence: Synthetic oligonucleotide
uuuagacgugggccucauu

SEQ ID NO: 854312 - RNA, 19 nt, Artificial Sequence
  Description of Artificial Sequence: Synthetic oligonucleotide
ccuaaacccuagcaacgac

SEQ ID NO: 854313 - RNA, 19 nt, Artificial Sequence
  Description of Artificial Sequence: Synthetic oligonucleotide
aaggggcgugccgcccggc

SEQ ID NO: 854314 - RNA, 19 nt, Artificial Sequence
  Description of Artificial Sequence: Synthetic oligonucleotide
gcugguaugccuguccuaa

SEQ ID NO: 854315 - RNA, 19 nt, Artificial Sequence
  Description of Artificial Sequence: Synthetic oligonucleotide
acgacgugcuucagguucu

SEQ ID NO: 854316 - RNA, 19 nt, Artificial Sequence
  Description of Artificial Sequence: Synthetic oligonucleotide
gauuugugugugugugaau

SEQ ID NO: 854317 - RNA, 19 nt, Artificial Sequence
  Description of Artificial Sequence: Synthetic oligonucleotide
ggcuagcuaguuucuaucu

SEQ ID NO: 854318 - RNA, 19 nt, Artificial Sequence
  Description of Artificial Sequence: Synthetic oligonucleotide
cagcuacgagacuaguucu

SEQ ID NO: 854319 - RNA, 19 nt, Artificial Sequence
  Description of Artificial Sequence: Synthetic oligonucleotide
uagggcuagcuaguuucua

SEQ ID NO: 854320 - RNA, 19 nt, Artificial Sequence
  Description of Artificial Sequence: Synthetic oligonucleotide
cuuugagugcgccucccau

SEQ ID NO: 854321 - RNA, 19 nt, Artificial Sequence
  Description of Artificial Sequence: Synthetic oligonucleotide
ggacaaucccaucuuggau

SEQ ID NO: 854322 - RNA, 19 nt, Artificial Sequence
  Description of Artificial Sequence: Synthetic oligonucleotide
gucacgcgguggagggugg

SEQ ID NO: 854323 - RNA, 19 nt, Artificial Sequence
  Description of Artificial Sequence: Synthetic oligonucleotide
ccggcaaccaagaugggcu

SEQ ID NO: 854324 - RNA, 19 nt, Artificial Sequence
  Description of Artificial Sequence: Synthetic oligonucleotide
ccuuucgaaguuagcgaca

SEQ ID NO: 854325 - RNA, 19 nt, Artificial Sequence
  Description of Artificial Sequence: Synthetic oligonucleotide
uagcaacgacgugcuucag

SEQ ID NO: 854326 - RNA, 19 nt, Artificial Sequence
  Description of Artificial Sequence: Synthetic oligonucleotide
cugggaccguuuguuccug

SEQ ID NO: 854327 - RNA, 19 nt, Artificial Sequence
  Description of Artificial Sequence: Synthetic oligonucleotide
ugguggcuacgcgggacaa

SEQ ID NO: 854328 - RNA, 19 nt, Artificial Sequence
  Description of Artificial Sequence: Synthetic oligonucleotide
ggcuacgcgggacaagacu

SEQ ID NO: 854329 - RNA, 19 nt, Artificial Sequence
  Description of Artificial Sequence: Synthetic oligonucleotide
gugauuguugagacuggau

SEQ ID NO: 854330 - RNA, 19 nt, Artificial Sequence
  Description of Artificial Sequence: Synthetic oligonucleotide
gcgauacuagacgggcgcc

SEQ ID NO: 854331 - RNA, 19 nt, Artificial Sequence
  Description of Artificial Sequence: Synthetic oligonucleotide
ccucccuuucgaaguuagc

SEQ ID NO: 854332 - RNA, 19 nt, Artificial Sequence
  Description of Artificial Sequence: Synthetic oligonucleotide
cugguaugccuguccuaaa

SEQ ID NO: 854333 - RNA, 19 nt, Artificial Sequence
  Description of Artificial Sequence: Synthetic oligonucleotide
ggcgcuucccgaggagggg

SEQ ID NO: 854334 - RNA, 19 nt, Artificial Sequence
  Description of Artificial Sequence: Synthetic oligonucleotide
ucacgccccguugggucga

SEQ ID NO: 854335 - RNA, 19 nt, Artificial Sequence
  Description of Artificial Sequence: Synthetic oligonucleotide
ggggcuagagcgggagacc

SEQ ID NO: 854336 - RNA, 19 nt, Artificial Sequence
  Description of Artificial Sequence: Synthetic oligonucleotide
agacgggcgccaguccccu

SEQ ID NO: 854337 - RNA, 19 nt, Artificial Sequence
  Description of Artificial Sequence: Synthetic oligonucleotide
cagugccaccccuauuucu

SEQ ID NO: 854338 - RNA, 19 nt, Artificial Sequence
  Description of Artificial Sequence: Synthetic oligonucleotide
gggcuagagcgggagacca

SEQ ID NO: 854339 - RNA, 19 nt, Artificial Sequence
  Description of Artificial Sequence: Synthetic oligonucleotide
agaggacgguugaacgguu

SEQ ID NO: 854340 - RNA, 19 nt, Artificial Sequence
  Description of Artificial Sequence: Synthetic oligonucleotide
cacgcgguggaggguggug

SEQ ID NO: 854341 - RNA, 19 nt, Artificial Sequence
  Description of Artificial Sequence: Synthetic oligonucleotide
gcugacggugggcucagua

SEQ ID NO: 854342 - RNA, 19 nt, Artificial Sequence
  Description of Artificial Sequence: Synthetic oligonucleotide
ggcuagagcgggagaccag

SEQ ID NO: 854343 - RNA, 19 nt, Artificial Sequence
  Description of Artificial Sequence: Synthetic oligonucleotide
gagcggcggagcgccagac

SEQ ID NO: 854344 - RNA, 19 nt, Artificial Sequence
  Description of Artificial Sequence: Synthetic oligonucleotide
cggcgauacuagacgggcg

SEQ ID NO: 854345 - RNA, 19 nt, Artificial Sequence
  Description of Artificial Sequence: Synthetic oligonucleotide
ccccguugggucgagagga

SEQ ID NO: 854346 - RNA, 19 nt, Artificial Sequence
  Description of Artificial Sequence: Synthetic oligonucleotide
gggaacgcguggggcagag

SEQ ID NO: 854347 - RNA, 19 nt, Artificial Sequence
  Description of Artificial Sequence: Synthetic oligonucleotide
caaccaagaugggcuguaa

SEQ ID NO: 854348 - RNA, 19 nt, Artificial Sequence
  Description of Artificial Sequence: Synthetic oligonucleotide
ggaacuccguccccagacu

SEQ ID NO: 854349 - RNA, 19 nt, Artificial Sequence
  Description of Artificial Sequence: Synthetic oligonucleotide
ugcgcgccccgcugacggu

SEQ ID NO: 854350 - RNA, 19 nt, Artificial Sequence
  Description of Artificial Sequence: Synthetic oligonucleotide
gacgggcgccaguccccug

SEQ ID NO: 854351 - RNA, 19 nt, Artificial Sequence
  Description of Artificial Sequence: Synthetic oligonucleotide
gcuagagcgggagaccagu

SEQ ID NO: 854352 - RNA, 19 nt, Artificial Sequence
  Description of Artificial Sequence: Synthetic oligonucleotide
cgaaggggcgugccgcccg

SEQ ID NO: 854353 - RNA, 19 nt, Artificial Sequence
  Description of Artificial Sequence: Synthetic oligonucleotide
ggacgguugaacgguugaa

SEQ ID NO: 854354 - RNA, 19 nt, Artificial Sequence
  Description of Artificial Sequence: Synthetic oligonucleotide
cgccccguugggucgagag

SEQ ID NO: 854355 - RNA, 19 nt, Artificial Sequence
  Description of Artificial Sequence: Synthetic oligonucleotide
acgcgggacaagacuggau

SEQ ID NO: 854356 - RNA, 19 nt, Artificial Sequence
  Description of Artificial Sequence: Synthetic oligonucleotide
aggggucgaggaggacucu

SEQ ID NO: 854357 - RNA, 19 nt, Artificial Sequence
  Description of Artificial Sequence: Synthetic oligonucleotide
ccaggucggcgauacuaga

SEQ ID NO: 854358 - RNA, 19 nt, Artificial Sequence
  Description of Artificial Sequence: Synthetic oligonucleotide
cggggcuagagcgggagac

SEQ ID NO: 854359 - RNA, 19 nt, Artificial Sequence
  Description of Artificial Sequence: Synthetic oligonucleotide
cccuuugagugcgccuccc

SEQ ID NO: 854360 - RNA, 19 nt, Artificial Sequence
  Description of Artificial Sequence: Synthetic oligonucleotide
guuuagacgugggccucau

SEQ ID NO: 854361 - RNA, 19 nt, Artificial Sequence
  Description of Artificial Sequence: Synthetic oligonucleotide
cuccgggaucaaaggauuu

SEQ ID NO: 854362 - RNA, 19 nt, Artificial Sequence
  Description of Artificial Sequence: Synthetic oligonucleotide
ggggcgugccgcccggcca

SEQ ID NO: 854363 - RNA, 19 nt, Artificial Sequence
  Description of Artificial Sequence: Synthetic oligonucleotide
ggcgugcgcgccccgcuga

SEQ ID NO: 854364 - RNA, 19 nt, Artificial Sequence
  Description of Artificial Sequence: Synthetic oligonucleotide
cccggccacgaggaggggc

SEQ ID NO: 854365 - RNA, 19 nt, Artificial Sequence
  Description of Artificial Sequence: Synthetic oligonucleotide
ccgagacgcaaagcaacca

SEQ ID NO: 854366 - RNA, 19 nt, Artificial Sequence
  Description of Artificial Sequence: Synthetic oligonucleotide
caacgacgugcuucagguu

SEQ ID NO: 854367 - RNA, 19 nt, Artificial Sequence
  Description of Artificial Sequence: Synthetic oligonucleotide
cgauacuagacgggcgcca

SEQ ID NO: 854368 - RNA, 19 nt, Artificial Sequence
  Description of Artificial Sequence: Synthetic oligonucleotide
cgagacgcaaagcaaccau

SEQ ID NO: 854369 - RNA, 19 nt, Artificial Sequence
  Description of Artificial Sequence: Synthetic oligonucleotide
cacgccccguugggucgag

SEQ ID NO: 854370 - RNA, 19 nt, Artificial Sequence
  Description of Artificial Sequence: Synthetic oligonucleotide
cagucacgccccguugggu

SEQ ID NO: 854371 - RNA, 19 nt, Artificial Sequence
  Description of Artificial Sequence: Synthetic oligonucleotide
cacgggcuccgggaucaaa

SEQ ID NO: 854372 - RNA, 19 nt, Artificial Sequence
  Description of Artificial Sequence: Synthetic oligonucleotide
gcugcgcgggagauggggu

SEQ ID NO: 854373 - RNA, 19 nt, Artificial Sequence
  Description of Artificial Sequence: Synthetic oligonucleotide
gccacgaggaggggcgugu

SEQ ID NO: 854374 - RNA, 19 nt, Artificial Sequence
  Description of Artificial Sequence: Synthetic oligonucleotide
ggaacgcguggggcagaga

SEQ ID NO: 854375 - RNA, 19 nt, Artificial Sequence
  Description of Artificial Sequence: Synthetic oligonucleotide
cgugccgcccggccacgag

SEQ ID NO: 854376 - RNA, 19 nt, Artificial Sequence
  Description of Artificial Sequence: Synthetic oligonucleotide
acgccccguugggucgaga

SEQ ID NO: 854377 - RNA, 19 nt, Artificial Sequence
  Description of Artificial Sequence: Synthetic oligonucleotide
ccgcugacggugggcucag

SEQ ID NO: 854378 - RNA, 19 nt, Artificial Sequence
  Description of Artificial Sequence: Synthetic oligonucleotide
gccccgcugacggugggcu

SEQ ID NO: 854379 - RNA, 19 nt, Artificial Sequence
  Description of Artificial Sequence: Synthetic oligonucleotide
gcgcaagaagaggacgguu

SEQ ID NO: 854380 - RNA, 19 nt, Artificial Sequence
  Description of Artificial Sequence: Synthetic oligonucleotide
cagucacgcgguggagggu

SEQ ID NO: 854381 - RNA, 19 nt, Artificial Sequence
  Description of Artificial Sequence: Synthetic oligonucleotide
cugagcugauagggcgcuu

SEQ ID NO: 854382 - RNA, 19 nt, Artificial Sequence
  Description of Artificial Sequence: Synthetic oligonucleotide
cgccggugagauacaggua

SEQ ID NO: 854383 - RNA, 19 nt, Artificial Sequence
  Description of Artificial Sequence: Synthetic oligonucleotide
cccuagcaacgacgugcuu

SEQ ID NO: 854384 - RNA, 19 nt, Artificial Sequence
  Description of Artificial Sequence: Synthetic oligonucleotide
ccacgggcuccgggaucaa

SEQ ID NO: 854385 - RNA, 19 nt, Artificial Sequence
  Description of Artificial Sequence: Synthetic oligonucleotide
uuuacaaucagucauugug

SEQ ID NO: 854386 - RNA, 19 nt, Artificial Sequence
  Description of Artificial Sequence: Synthetic oligonucleotide
uuagguuucaccuugaugu

SEQ ID NO: 854387 - RNA, 19 nt, Artificial Sequence
  Description of Artificial Sequence: Synthetic oligonucleotide
uuuaacaucuuuaaggcca

SEQ ID NO: 854388 - RNA, 19 nt, Artificial Sequence
  Description of Artificial Sequence: Synthetic oligonucleotide
acuacaguuaaguagggac

SEQ ID NO: 854389 - RNA, 19 nt, Artificial Sequence
  Description of Artificial Sequence: Synthetic oligonucleotide
  modified_base (8)..(8): a, c, u, g, unknown or other
aaggguanaaagugaaacg

SEQ ID NO: 854390 - RNA, 19 nt, Artificial Sequence
  Description of Artificial Sequence: Synthetic oligonucleotide
uugaggauuuuccugaggg

SEQ ID NO: 854391 - RNA, 19 nt, Artificial Sequence
  Description of Artificial Sequence: Synthetic oligonucleotide
agucaauucgccuuucugc

SEQ ID NO: 854392 - RNA, 19 nt, Artificial Sequence
  Description of Artificial Sequence: Synthetic oligonucleotide
aauagcugacucuuacccc

SEQ ID NO: 854393 - RNA, 19 nt, Artificial Sequence
  Description of Artificial Sequence: Synthetic oligonucleotide
aauuacugaaguucuuuuc

SEQ ID NO: 854394 - RNA, 19 nt, Artificial Sequence
  Description of Artificial Sequence: Synthetic oligonucleotide
uuaagacucuuucaugucg

SEQ ID NO: 854395 - RNA, 19 nt, Artificial Sequence
  Description of Artificial Sequence: Synthetic oligonucleotide
ucaaaggaugguaauagag

SEQ ID NO: 854396 - RNA, 19 nt, Artificial Sequence
  Description of Artificial Sequence: Synthetic oligonucleotide
  modified_base (7)..(7): a, c, u, g, unknown or other
aggguanaaagugaaacgc

SEQ ID NO: 854397 - RNA, 19 nt, Artificial Sequence
  Description of Artificial Sequence: Synthetic oligonucleotide
ugcacuuuaagcaaguuaa

SEQ ID NO: 854398 - RNA, 19 nt, Artificial Sequence
  Description of Artificial Sequence: Synthetic oligonucleotide
acggaaaugcccucgaugc

SEQ ID NO: 854399 - RNA, 19 nt, Artificial Sequence
  Description of Artificial Sequence: Synthetic oligonucleotide
ugugacaacauauguaccc

SEQ ID NO: 854400 - RNA, 19 nt, Artificial Sequence
  Description of Artificial Sequence: Synthetic oligonucleotide
aauaugcccacccucuuag

SEQ ID NO: 854401 - RNA, 19 nt, Artificial Sequence
  Description of Artificial Sequence: Synthetic oligonucleotide
uuaagcaucucgaagccug

SEQ ID NO: 854402 - RNA, 19 nt, Artificial Sequence
  Description of Artificial Sequence: Synthetic oligonucleotide
uuacaaucagucauugugc

SEQ ID NO: 854403 - RNA, 19 nt, Artificial Sequence
  Description of Artificial Sequence: Synthetic oligonucleotide
agagauuacaauccccugg

SEQ ID NO: 854404 - RNA, 19 nt, Artificial Sequence
  Description of Artificial Sequence: Synthetic oligonucleotide
aaacuacccucuucuaccc

SEQ ID NO: 854405 - RNA, 19 nt, Artificial Sequence
  Description of Artificial Sequence: Synthetic oligonucleotide
uagucuaggaauaugccca

SEQ ID NO: 854406 - RNA, 19 nt, Artificial Sequence
  Description of Artificial Sequence: Synthetic oligonucleotide
auagauaugugagcggucc

SEQ ID NO: 854407 - RNA, 19 nt, Artificial Sequence
  Description of Artificial Sequence: Synthetic oligonucleotide
gagauuacaauccccuggg

SEQ ID NO: 854408 - RNA, 19 nt, Artificial Sequence
  Description of Artificial Sequence: Synthetic oligonucleotide
aguuaagacucuuucaugu

SEQ ID NO: 854409 - RNA, 19 nt, Artificial Sequence
  Description of Artificial Sequence: Synthetic oligonucleotide
auaacuacuuuuaacaucu

SEQ ID NO: 854410 - RNA, 19 nt, Artificial Sequence
  Description of Artificial Sequence: Synthetic oligonucleotide
agucuuguuacccaagcag

SEQ ID NO: 854411 - RNA, 19 nt, Artificial Sequence
  Description of Artificial Sequence: Synthetic oligonucleotide
agaaccacagucaaggcac

SEQ ID NO: 854412 - RNA, 19 nt, Artificial Sequence
  Description of Artificial Sequence: Synthetic oligonucleotide
agcuaagugggccagaucu

SEQ ID NO: 854413 - RNA, 19 nt, Artificial Sequence
  Description of Artificial Sequence: Synthetic oligonucleotide
gaaaaggggaaugucaaag

SEQ ID NO: 854414 - RNA, 19 nt, Artificial Sequence
  Description of Artificial Sequence: Synthetic oligonucleotide
  modified_base (3)..(3): a, c, u, g, unknown or other
uanaaagugaaacgcugac

SEQ ID NO: 854415 - RNA, 19 nt, Artificial Sequence
  Description of Artificial Sequence: Synthetic oligonucleotide
gauuacaauccccuggggc

SEQ ID NO: 854416 - RNA, 19 nt, Artificial Sequence
  Description of Artificial Sequence: Synthetic oligonucleotide
auuacaauccccuggggcu

SEQ ID NO: 854417 - RNA, 19 nt, Artificial Sequence
  Description of Artificial Sequence: Synthetic oligonucleotide
agguauagauaugugagcg

SEQ ID NO: 854418 - RNA, 19 nt, Artificial Sequence
  Description of Artificial Sequence: Synthetic oligonucleotide
cuuuccaacacagagguac

SEQ ID NO: 854419 - RNA, 19 nt, Artificial Sequence
  Description of Artificial Sequence: Synthetic oligonucleotide
caauagcugacucuuaccc

SEQ ID NO: 854420 - RNA, 19 nt, Artificial Sequence
  Description of Artificial Sequence: Synthetic oligonucleotide
uuggccuaacuuaaaauga

SEQ ID NO: 854421 - RNA, 19 nt, Artificial Sequence
  Description of Artificial Sequence: Synthetic oligonucleotide
aagacaaugugccggccuc

SEQ ID NO: 854422 - RNA, 19 nt, Artificial Sequence
  Description of Artificial Sequence: Synthetic oligonucleotide
agauacuguugucaccucc

SEQ ID NO: 854423 - RNA, 19 nt, Artificial Sequence
  Description of Artificial Sequence: Synthetic oligonucleotide
aggugaagccuucaguagc

SEQ ID NO: 854424 - RNA, 19 nt, Artificial Sequence
  Description of Artificial Sequence: Synthetic oligonucleotide
uuuuaacaucuuuaaggcc

SEQ ID NO: 854425 - RNA, 19 nt, Artificial Sequence
  Description of Artificial Sequence: Synthetic oligonucleotide
uggucaaaauauaucuugc

SEQ ID NO: 854426 - RNA, 19 nt, Artificial Sequence
  Description of Artificial Sequence: Synthetic oligonucleotide
acaaggcuacccuugaguc

SEQ ID NO: 854427 - RNA, 19 nt, Artificial Sequence
  Description of Artificial Sequence: Synthetic oligonucleotide
ucgcuuaaacaccuaagcc

SEQ ID NO: 854428 - RNA, 19 nt, Artificial Sequence
  Description of Artificial Sequence: Synthetic oligonucleotide
aacggaaaugcccucgaug

SEQ ID NO: 854429 - RNA, 19 nt, Artificial Sequence
  Description of Artificial Sequence: Synthetic oligonucleotide
uccuuucucgcuuaaacac

SEQ ID NO: 854430 - RNA, 19 nt, Artificial Sequence
  Description of Artificial Sequence: Synthetic oligonucleotide
ugaacugaaugcccaaucu

SEQ ID NO: 854431 - RNA, 19 nt, Artificial Sequence
  Description of Artificial Sequence: Synthetic oligonucleotide
agggaguggagucaauucg

SEQ ID NO: 854432 - RNA, 19 nt, Artificial Sequence
  Description of Artificial Sequence: Synthetic oligonucleotide
cuugaugugcaaaggagug

SEQ ID NO: 854433 - RNA, 19 nt, Artificial Sequence
  Description of Artificial Sequence: Synthetic oligonucleotide
ugggagaacggaaaugccc

SEQ ID NO: 854434 - RNA, 19 nt, Artificial Sequence
  Description of Artificial Sequence: Synthetic oligonucleotide
caggguacuuuucacaucc

SEQ ID NO: 854435 - RNA, 19 nt, Artificial Sequence
  Description of Artificial Sequence: Synthetic oligonucleotide
cucgcuuaaacaccuaagc

SEQ ID NO: 854436 - RNA, 19 nt, Artificial Sequence
  Description of Artificial Sequence: Synthetic oligonucleotide
ucuacucguucacacaaug

SEQ ID NO: 854437 - RNA, 19 nt, Artificial Sequence
  Description of Artificial Sequence: Synthetic oligonucleotide
cacguugacaccaagcuuc

SEQ ID NO: 854438 - RNA, 19 nt, Artificial Sequence
  Description of Artificial Sequence: Synthetic oligonucleotide
auauguacccuauggguug

SEQ ID NO: 854439 - RNA, 19 nt, Artificial Sequence
  Description of Artificial Sequence: Synthetic oligonucleotide
agcuguuugaggauuuucc

SEQ ID NO: 854440 - RNA, 19 nt, Artificial Sequence
  Description of Artificial Sequence: Synthetic oligonucleotide
aggaugagccgucucaggg

SEQ ID NO: 854441 - RNA, 19 nt, Artificial Sequence
  Description of Artificial Sequence: Synthetic oligonucleotide
  modified_base (2)..(2): a, c, u, g, unknown or other
anaaagugaaacgcugaca

SEQ ID NO: 854442 - RNA, 19 nt, Artificial Sequence
  Description of Artificial Sequence: Synthetic oligonucleotide
  modified_base (11)..(11): a, c, u, g, unknown or other
agagucccggnauacuccc

SEQ ID NO: 854443 - RNA, 19 nt, Artificial Sequence
  Description of Artificial Sequence: Synthetic oligonucleotide
aaagacaaugugccggccu

SEQ ID NO: 854444 - RNA, 19 nt, Artificial Sequence
  Description of Artificial Sequence: Synthetic oligonucleotide
auaucuugccacaaagaac

SEQ ID NO: 854445 - RNA, 19 nt, Artificial Sequence
  Description of Artificial Sequence: Synthetic oligonucleotide
  modified_base (9)..(9): a, c, u, g, unknown or other
caaggguanaaagugaaac

SEQ ID NO: 854446 - RNA, 19 nt, Artificial Sequence
  Description of Artificial Sequence: Synthetic oligonucleotide
uucuacccuguucucacgg

SEQ ID NO: 854447 - RNA, 19 nt, Artificial Sequence
  Description of Artificial Sequence: Synthetic oligonucleotide
uauagauacuguugucacc

SEQ ID NO: 854448 - RNA, 19 nt, Artificial Sequence
  Description of Artificial Sequence: Synthetic oligonucleotide
acaagguuaggaugagccg

SEQ ID NO: 854449 - RNA, 19 nt, Artificial Sequence
  Description of Artificial Sequence: Synthetic oligonucleotide
ucaguaaaagugucaguga

SEQ ID NO: 854450 - RNA, 19 nt, Artificial Sequence
  Description of Artificial Sequence: Synthetic oligonucleotide
gaggacuggaaccacguug

SEQ ID NO: 854451 - RNA, 19 nt, Artificial Sequence
  Description of Artificial Sequence: Synthetic oligonucleotide
agccguacucuccaguagc

SEQ ID NO: 854452 - RNA, 19 nt, Artificial Sequence
  Description of Artificial Sequence: Synthetic oligonucleotide
auagcugacucuuacccca

SEQ ID NO: 854453 - RNA, 19 nt, Artificial Sequence
  Description of Artificial Sequence: Synthetic oligonucleotide
uggguuguuuauuuuggcc

SEQ ID NO: 854454 - RNA, 19 nt, Artificial Sequence
  Description of Artificial Sequence: Synthetic oligonucleotide
aggcgaaugaagcugucuc

SEQ ID NO: 854455 - RNA, 19 nt, Artificial Sequence
  Description of Artificial Sequence: Synthetic oligonucleotide
agaucucggcgcuuggccc

SEQ ID NO: 854456 - RNA, 19 nt, Artificial Sequence
  Description of Artificial Sequence: Synthetic oligonucleotide
guaauagaggcgaaugaag

SEQ ID NO: 854457 - RNA, 19 nt, Artificial Sequence
  Description of Artificial Sequence: Synthetic oligonucleotide
cacacaaugcaucccagag

SEQ ID NO: 854458 - RNA, 19 nt, Artificial Sequence
  Description of Artificial Sequence: Synthetic oligonucleotide
aaccacguugacaccaagc

SEQ ID NO: 854459 - RNA, 19 nt, Artificial Sequence
  Description of Artificial Sequence: Synthetic oligonucleotide
agggcuuuuggacacacca

SEQ ID NO: 854460 - RNA, 19 nt, Artificial Sequence
  Description of Artificial Sequence: Synthetic oligonucleotide
  modified_base (7)..(7): a, c, u, g, unknown or other
ucccggnauacucccaugc

SEQ ID NO: 854461 - RNA, 19 nt, Artificial Sequence
  Description of Artificial Sequence: Synthetic oligonucleotide
ucucaauucuacaaucaua

SEQ ID NO: 854462 - RNA, 19 nt, Artificial Sequence
  Description of Artificial Sequence: Synthetic oligonucleotide
uuaagcaaguuaagacucu

SEQ ID NO: 854463 - RNA, 19 nt, Artificial Sequence
  Description of Artificial Sequence: Synthetic oligonucleotide
ugauuuacauucucugaaa

SEQ ID NO: 854464 - RNA, 19 nt, Artificial Sequence
  Description of Artificial Sequence: Synthetic oligonucleotide
agagaggccuuuucuuuac

SEQ ID NO: 854465 - RNA, 19 nt, Artificial Sequence
  Description of Artificial Sequence: Synthetic oligonucleotide
uucgccuuucugcucacag

SEQ ID NO: 854466 - RNA, 19 nt, Artificial Sequence
  Description of Artificial Sequence: Synthetic oligonucleotide
ugacucuuaccccaaguuc

SEQ ID NO: 854467 - RNA, 19 nt, Artificial Sequence
  Description of Artificial Sequence: Synthetic oligonucleotide
ugauccuacuccugaacug

SEQ ID NO: 854468 - RNA, 19 nt, Artificial Sequence
  Description of Artificial Sequence: Synthetic oligonucleotide
uccgcaauuagcuguuuga

SEQ ID NO: 854469 - RNA, 19 nt, Artificial Sequence
  Description of Artificial Sequence: Synthetic oligonucleotide
uagauaugugagcgguccg

SEQ ID NO: 854470 - RNA, 19 nt, Artificial Sequence
  Description of Artificial Sequence: Synthetic oligonucleotide
cucgucucagucuuguuac

SEQ ID NO: 854471 - RNA, 19 nt, Artificial Sequence
  Description of Artificial Sequence: Synthetic oligonucleotide
ugguuggucaaaauauauc

SEQ ID NO: 854472 - RNA, 19 nt, Artificial Sequence
  Description of Artificial Sequence: Synthetic oligonucleotide
uaugugagcgguccgugac

SEQ ID NO: 854473 - RNA, 19 nt, Artificial Sequence
  Description of Artificial Sequence: Synthetic oligonucleotide
aaacgcugacaggacaagg

SEQ ID NO: 854474 - RNA, 19 nt, Artificial Sequence
  Description of Artificial Sequence: Synthetic oligonucleotide
agucuaggaauaugcccac

SEQ ID NO: 854475 - RNA, 19 nt, Artificial Sequence
  Description of Artificial Sequence: Synthetic oligonucleotide
acuacuuuuaacaucuuua

SEQ ID NO: 854476 - RNA, 19 nt, Artificial Sequence
  Description of Artificial Sequence: Synthetic oligonucleotide
  modified_base (5)..(5): a, c, u, g, unknown or other
gguanaaagugaaacgcug

SEQ ID NO: 854477 - RNA, 19 nt, Artificial Sequence
  Description of Artificial Sequence: Synthetic oligonucleotide
cuuagguuucaccuugaug

SEQ ID NO: 854478 - RNA, 19 nt, Artificial Sequence
  Description of Artificial Sequence: Synthetic oligonucleotide
ugucucuacucguucacac

SEQ ID NO: 854479 - RNA, 19 nt, Artificial Sequence
  Description of Artificial Sequence: Synthetic oligonucleotide
ugaggauuuuccugagggc

SEQ ID NO: 854480 - RNA, 19 nt, Artificial Sequence
  Description of Artificial Sequence: Synthetic oligonucleotide
uaugcccacccucuuaggu

SEQ ID NO: 854481 - RNA, 19 nt, Artificial Sequence
  Description of Artificial Sequence: Synthetic oligonucleotide
augucgacuuucuauuucu

SEQ ID NO: 854482 - RNA, 19 nt, Artificial Sequence
  Description of Artificial Sequence: Synthetic oligonucleotide
ugauaguaaguggugcagc

SEQ ID NO: 854483 - RNA, 19 nt, Artificial Sequence
  Description of Artificial Sequence: Synthetic oligonucleotide
uuaggaugagccgucucag

SEQ ID NO: 854484 - RNA, 19 nt, Artificial Sequence
  Description of Artificial Sequence: Synthetic oligonucleotide
uaagugggccagaucucgg

SEQ ID NO: 854485 - RNA, 19 nt, Artificial Sequence
  Description of Artificial Sequence: Synthetic oligonucleotide
ucuagagaggccuuuucuu

SEQ ID NO: 854486 - RNA, 19 nt, Artificial Sequence
  Description of Artificial Sequence: Synthetic oligonucleotide
cuacucguucacacaaugc

SEQ ID NO: 854487 - RNA, 19 nt, Artificial Sequence
  Description of Artificial Sequence: Synthetic oligonucleotide
uguuacccaagcagcaggu

SEQ ID NO: 854488 - RNA, 19 nt, Artificial Sequence
  Description of Artificial Sequence: Synthetic oligonucleotide
ugaugugcaaaggagugaa

SEQ ID NO: 854489 - RNA, 19 nt, Artificial Sequence
  Description of Artificial Sequence: Synthetic oligonucleotide
guuaggaugagccgucuca

SEQ ID NO: 854490 - RNA, 19 nt, Artificial Sequence
  Description of Artificial Sequence: Synthetic oligonucleotide
aguggagucaauucgccuu

SEQ ID NO: 854491 - RNA, 19 nt, Artificial Sequence
  Description of Artificial Sequence: Synthetic oligonucleotide
gcuuaaacaccuaagccag

SEQ ID NO: 854492 - RNA, 19 nt, Artificial Sequence
  Description of Artificial Sequence: Synthetic oligonucleotide
cuacccuugagucacagaa

SEQ ID NO: 854493 - RNA, 19 nt, Artificial Sequence
  Description of Artificial Sequence: Synthetic oligonucleotide
guagugucgaccugaggug

SEQ ID NO: 854494 - RNA, 19 nt, Artificial Sequence
  Description of Artificial Sequence: Synthetic oligonucleotide
agcucuauagauacuguug

SEQ ID NO: 854495 - RNA, 19 nt, Artificial Sequence
  Description of Artificial Sequence: Synthetic oligonucleotide
cucguucacacaaugcauc

SEQ ID NO: 854496 - RNA, 19 nt, Artificial Sequence
  Description of Artificial Sequence: Synthetic oligonucleotide
gagaacggaaaugcccucg

SEQ ID NO: 854497 - RNA, 19 nt, Artificial Sequence
  Description of Artificial Sequence: Synthetic oligonucleotide
cuacaguuaaguagggaca

SEQ ID NO: 854498 - RNA, 19 nt, Artificial Sequence
  Description of Artificial Sequence: Synthetic oligonucleotide
acuacccucuucuacccug

SEQ ID NO: 854499 - RNA, 19 nt, Artificial Sequence
  Description of Artificial Sequence: Synthetic oligonucleotide
uacccuugagucacagaag

SEQ ID NO: 854500 - RNA, 19 nt, Artificial Sequence
  Description of Artificial Sequence: Synthetic oligonucleotide
cugaaugcccaaucucugc

SEQ ID NO: 854501 - RNA, 19 nt, Artificial Sequence
  Description of Artificial Sequence: Synthetic oligonucleotide
aagguuaggaugagccguc

SEQ ID NO: 854502 - RNA, 19 nt, Artificial Sequence
  Description of Artificial Sequence: Synthetic oligonucleotide
ugacaggacaagguuagga

SEQ ID NO: 854503 - RNA, 19 nt, Artificial Sequence
  Description of Artificial Sequence: Synthetic oligonucleotide
ucgaagccucuguagaaug

SEQ ID NO: 854504 - RNA, 19 nt, Artificial Sequence
  Description of Artificial Sequence: Synthetic oligonucleotide
aauucgccuuucugcucac

SEQ ID NO: 854505 - RNA, 19 nt, Artificial Sequence
  Description of Artificial Sequence: Synthetic oligonucleotide
  modified_base (4)..(4): a, c, u, g, unknown or other
guanaaagugaaacgcuga

SEQ ID NO: 854506 - RNA, 19 nt, Artificial Sequence
  Description of Artificial Sequence: Synthetic oligonucleotide
uaaaagugucagugaaggu

SEQ ID NO: 854507 - RNA, 19 nt, Artificial Sequence
  Description of Artificial Sequence: Synthetic oligonucleotide
agauuacaauccccugggg

SEQ ID NO: 854508 - RNA, 19 nt, Artificial Sequence
  Description of Artificial Sequence: Synthetic oligonucleotide
agugggucuugucucccac

SEQ ID NO: 854509 - RNA, 19 nt, Artificial Sequence
  Description of Artificial Sequence: Synthetic oligonucleotide
uggccuaacuuaaaaugau

SEQ ID NO: 854510 - RNA, 19 nt, Artificial Sequence
  Description of Artificial Sequence: Synthetic oligonucleotide
ucaccuuuugugacaacau

SEQ ID NO: 854511 - RNA, 19 nt, Artificial Sequence
  Description of Artificial Sequence: Synthetic oligonucleotide
aacgcugacaggacaaggu

SEQ ID NO: 854512 - RNA, 19 nt, Artificial Sequence
  Description of Artificial Sequence: Synthetic oligonucleotide
aguuucucgucucagucuu

SEQ ID NO: 854513 - RNA, 19 nt, Artificial Sequence
  Description of Artificial Sequence: Synthetic oligonucleotide
gguaagaagagaguggaca

SEQ ID NO: 854514 - RNA, 19 nt, Artificial Sequence
  Description of Artificial Sequence: Synthetic oligonucleotide
ugugccggccucauagucu

SEQ ID NO: 854515 - RNA, 19 nt, Artificial Sequence
  Description of Artificial Sequence: Synthetic oligonucleotide
gaugagccgucucaggguc

SEQ ID NO: 854516 - RNA, 19 nt, Artificial Sequence
  Description of Artificial Sequence: Synthetic oligonucleotide
agggcaaaguacugccggg

SEQ ID NO: 854517 - RNA, 19 nt, Artificial Sequence
  Description of Artificial Sequence: Synthetic oligonucleotide
  modified_base (12)..(12): a, c, u, g, unknown or other
cagagucccggnauacucc

SEQ ID NO: 854518 - RNA, 19 nt, Artificial Sequence
  Description of Artificial Sequence: Synthetic oligonucleotide
uggcagacaacuugggaau

SEQ ID NO: 854519 - RNA, 19 nt, Artificial Sequence
  Description of Artificial Sequence: Synthetic oligonucleotide
aaucagucauugugcagua

SEQ ID NO: 854520 - RNA, 19 nt, Artificial Sequence
  Description of Artificial Sequence: Synthetic oligonucleotide
aaugugccggccucauagu

SEQ ID NO: 854521 - RNA, 19 nt, Artificial Sequence
  Description of Artificial Sequence: Synthetic oligonucleotide
cucgaagccugacuguaag

SEQ ID NO: 854522 - RNA, 19 nt, Artificial Sequence
  Description of Artificial Sequence: Synthetic oligonucleotide
uacccuguucucacggggc

SEQ ID NO: 854523 - RNA, 19 nt, Artificial Sequence
  Description of Artificial Sequence: Synthetic oligonucleotide
cugaaaaggggaaugucaa

SEQ ID NO: 854524 - RNA, 19 nt, Artificial Sequence
  Description of Artificial Sequence: Synthetic oligonucleotide
cugauaguaaguggugcag

SEQ ID NO: 854525 - RNA, 19 nt, Artificial Sequence
  Description of Artificial Sequence: Synthetic oligonucleotide
ugagcgguccgugacguug

SEQ ID NO: 854526 - RNA, 19 nt, Artificial Sequence
  Description of Artificial Sequence: Synthetic oligonucleotide
ggggaaauuacugaaguuc

SEQ ID NO: 854527 - RNA, 19 nt, Artificial Sequence
  Description of Artificial Sequence: Synthetic oligonucleotide
ucacauccgcaauuagcug

SEQ ID NO: 854528 - RNA, 19 nt, Artificial Sequence
  Description of Artificial Sequence: Synthetic oligonucleotide
ucucugaaaaggggaaugu

SEQ ID NO: 854529 - RNA, 19 nt, Artificial Sequence
  Description of Artificial Sequence: Synthetic oligonucleotide
gauccuacuccugaacuga

SEQ ID NO: 854530 - RNA, 19 nt, Artificial Sequence
  Description of Artificial Sequence: Synthetic oligonucleotide
gauaugugagcgguccgug

SEQ ID NO: 854531 - RNA, 19 nt, Artificial Sequence
  Description of Artificial Sequence: Synthetic oligonucleotide
uacccuauggguuguuuau

SEQ ID NO: 854532 - RNA, 19 nt, Artificial Sequence
  Description of Artificial Sequence: Synthetic oligonucleotide
agaguggacaauguccugu

SEQ ID NO: 854533 - RNA, 19 nt, Artificial Sequence
  Description of Artificial Sequence: Synthetic oligonucleotide
ccuaugugcucccucaagg

SEQ ID NO: 854534 - RNA, 19 nt, Artificial Sequence
  Description of Artificial Sequence: Synthetic oligonucleotide
cagaucucggcgcuuggcc

SEQ ID NO: 854535 - RNA, 19 nt, Artificial Sequence
  Description of Artificial Sequence: Synthetic oligonucleotide
aagcacuugcccuccacuu

SEQ ID NO: 854536 - RNA, 19 nt, Artificial Sequence
  Description of Artificial Sequence: Synthetic oligonucleotide
caugucgacuuucuauuuc

SEQ ID NO: 854537 - RNA, 19 nt, Artificial Sequence
  Description of Artificial Sequence: Synthetic oligonucleotide
augugagcgguccgugacg

SEQ ID NO: 854538 - RNA, 19 nt, Artificial Sequence
  Description of Artificial Sequence: Synthetic oligonucleotide
augugccggccucauaguc

SEQ ID NO: 854539 - RNA, 19 nt, Artificial Sequence
  Description of Artificial Sequence: Synthetic oligonucleotide
ugcuggacuucagagauua

SEQ ID NO: 854540 - RNA, 19 nt, Artificial Sequence
  Description of Artificial Sequence: Synthetic oligonucleotide
gaucucggcgcuuggcccc

SEQ ID NO: 854541 - RNA, 19 nt, Artificial Sequence
  Description of Artificial Sequence: Synthetic oligonucleotide
aucccuaugugcucccuca

SEQ ID NO: 854542 - RNA, 19 nt, Artificial Sequence
  Description of Artificial Sequence: Synthetic oligonucleotide
uaauccagguuguuugguu

SEQ ID NO: 854543 - RNA, 19 nt, Artificial Sequence
  Description of Artificial Sequence: Synthetic oligonucleotide
caguuaaguagggacacuc

SEQ ID NO: 854544 - RNA, 19 nt, Artificial Sequence
  Description of Artificial Sequence: Synthetic oligonucleotide
acccuguucucacggggcg

SEQ ID NO: 854545 - RNA, 19 nt, Artificial Sequence
  Description of Artificial Sequence: Synthetic oligonucleotide
ucgaagccugacuguaagc

SEQ ID NO: 854546 - RNA, 19 nt, Artificial Sequence
  Description of Artificial Sequence: Synthetic oligonucleotide
agaacggaaaugcccucga

SEQ ID NO: 854547 - RNA, 19 nt, Artificial Sequence
  Description of Artificial Sequence: Synthetic oligonucleotide
aaaccucuucccugauccu

SEQ ID NO: 854548 - RNA, 19 nt, Artificial Sequence
  Description of Artificial Sequence: Synthetic oligonucleotide
uuucucgucucagucuugu

SEQ ID NO: 854549 - RNA, 19 nt, Artificial Sequence
  Description of Artificial Sequence: Synthetic oligonucleotide
cagagauuacaauccccug

SEQ ID NO: 854550 - RNA, 19 nt, Artificial Sequence
  Description of Artificial Sequence: Synthetic oligonucleotide
uaaguggugcagcauucuu

SEQ ID NO: 854551 - RNA, 19 nt, Artificial Sequence
  Description of Artificial Sequence: Synthetic oligonucleotide
gacaaggcuacccuugagu

SEQ ID NO: 854552 - RNA, 19 nt, Artificial Sequence
  Description of Artificial Sequence: Synthetic oligonucleotide
ccuuuugugacaacauaug

SEQ ID NO: 854553 - RNA, 19 nt, Artificial Sequence
  Description of Artificial Sequence: Synthetic oligonucleotide
cucaagauggcugaggacu

SEQ ID NO: 854554 - RNA, 19 nt, Artificial Sequence
  Description of Artificial Sequence: Synthetic oligonucleotide
ucuuagguuucaccuugau

SEQ ID NO: 854555 - RNA, 19 nt, Artificial Sequence
  Description of Artificial Sequence: Synthetic oligonucleotide
caauucgccuuucugcuca

SEQ ID NO: 854556 - RNA, 19 nt, Artificial Sequence
  Description of Artificial Sequence: Synthetic oligonucleotide
ugaagccuucaguagccaa

SEQ ID NO: 854557 - RNA, 19 nt, Artificial Sequence
  Description of Artificial Sequence: Synthetic oligonucleotide
cucgaugcaguuucucguc

SEQ ID NO: 854558 - RNA, 19 nt, Artificial Sequence
  Description of Artificial Sequence: Synthetic oligonucleotide
auccgcaauuagcuguuug

SEQ ID NO: 854559 - RNA, 19 nt, Artificial Sequence
  Description of Artificial Sequence: Synthetic oligonucleotide
caaggugagcagcauuuuc

SEQ ID NO: 854560 - RNA, 19 nt, Artificial Sequence
  Description of Artificial Sequence: Synthetic oligonucleotide
gucaauucgccuuucugcu

SEQ ID NO: 854561 - RNA, 19 nt, Artificial Sequence
  Description of Artificial Sequence: Synthetic oligonucleotide
ucuugccacaaagaaccac

SEQ ID NO: 854562 - RNA, 19 nt, Artificial Sequence
  Description of Artificial Sequence: Synthetic oligonucleotide
auaugugagcgguccguga

SEQ ID NO: 854563 - RNA, 19 nt, Artificial Sequence
  Description of Artificial Sequence: Synthetic oligonucleotide
aacuacccucuucuacccu

SEQ ID NO: 854564 - RNA, 19 nt, Artificial Sequence
  Description of Artificial Sequence: Synthetic oligonucleotide
gucgaccugaggugaagcc

SEQ ID NO: 854565 - RNA, 19 nt, Artificial Sequence
  Description of Artificial Sequence: Synthetic oligonucleotide
guauagauaugugagcggu

SEQ ID NO: 854566 - RNA, 19 nt, Artificial Sequence
  Description of Artificial Sequence: Synthetic oligonucleotide
agauaugugagcgguccgu

SEQ ID NO: 854567 - RNA, 19 nt, Artificial Sequence
  Description of Artificial Sequence: Synthetic oligonucleotide
agccucucaauucuacaau

SEQ ID NO: 854568 - RNA, 19 nt, Artificial Sequence
  Description of Artificial Sequence: Synthetic oligonucleotide
cacccucuuagguuucacc

SEQ ID NO: 854569 - RNA, 19 nt, Artificial Sequence
  Description of Artificial Sequence: Synthetic oligonucleotide
gacaggacaagguuaggau

SEQ ID NO: 854570 - RNA, 19 nt, Artificial Sequence
  Description of Artificial Sequence: Synthetic oligonucleotide
ucgaccugaggugaagccu

SEQ ID NO: 854571 - RNA, 19 nt, Artificial Sequence
  Description of Artificial Sequence: Synthetic oligonucleotide
gaaauuacugaaguucuuu

SEQ ID NO: 854572 - RNA, 19 nt, Artificial Sequence
  Description of Artificial Sequence: Synthetic oligonucleotide
uagugucgaccugagguga

SEQ ID NO: 854573 - RNA, 19 nt, Artificial Sequence
  Description of Artificial Sequence: Synthetic oligonucleotide
ugucgaccugaggugaagc

SEQ ID NO: 854574 - RNA, 19 nt, Artificial Sequence
  Description of Artificial Sequence: Synthetic oligonucleotide
gagaguggacaauguccug

SEQ ID NO: 854575 - RNA, 19 nt, Artificial Sequence
  Description of Artificial Sequence: Synthetic oligonucleotide
guuaaguagggacacucau

SEQ ID NO: 854576 - RNA, 19 nt, Artificial Sequence
  Description of Artificial Sequence: Synthetic oligonucleotide
ugugagcgguccgugacgu

SEQ ID NO: 854577 - RNA, 19 nt, Artificial Sequence
  Description of Artificial Sequence: Synthetic oligonucleotide
gguaauagaggcgaaugaa

SEQ ID NO: 854578 - RNA, 19 nt, Artificial Sequence
  Description of Artificial Sequence: Synthetic oligonucleotide
gaaccacguugacaccaag

SEQ ID NO: 854579 - RNA, 19 nt, Artificial Sequence
  Description of Artificial Sequence: Synthetic oligonucleotide
auacucccaugcccagugg

SEQ ID NO: 854580 - RNA, 19 nt, Artificial Sequence
  Description of Artificial Sequence: Synthetic oligonucleotide
  modified_base (10)..(10): a, c, u, g, unknown or other
acaaggguanaaagugaaa

SEQ ID NO: 854581 - RNA, 19 nt, Artificial Sequence
  Description of Artificial Sequence: Synthetic oligonucleotide
  modified_base (9)..(9): a, c, u, g, unknown or other
agucccggnauacucccau

SEQ ID NO: 854582 - RNA, 19 nt, Artificial Sequence
  Description of Artificial Sequence: Synthetic oligonucleotide
ccugacuguaagcacuugc

SEQ ID NO: 854583 - RNA, 19 nt, Artificial Sequence
  Description of Artificial Sequence: Synthetic oligonucleotide
ggguuguuuauuuuggccu

SEQ ID NO: 854584 - RNA, 19 nt, Artificial Sequence
  Description of Artificial Sequence: Synthetic oligonucleotide
cauauguacccuauggguu

SEQ ID NO: 854585 - RNA, 19 nt, Artificial Sequence
  Description of Artificial Sequence: Synthetic oligonucleotide
ucgucucagucuuguuacc

SEQ ID NO: 854586 - RNA, 19 nt, Artificial Sequence
  Description of Artificial Sequence: Synthetic oligonucleotide
cuuucucgcuuaaacaccu

SEQ ID NO: 854587 - RNA, 19 nt, Artificial Sequence
  Description of Artificial Sequence: Synthetic oligonucleotide
uuacaauccccuggggcuc

SEQ ID NO: 854588 - RNA, 19 nt, Artificial Sequence
  Description of Artificial Sequence: Synthetic oligonucleotide
  modified_base (5)..(5): a, c, u, g, unknown or other
ccggnauacucccaugccc

SEQ ID NO: 854589 - RNA, 19 nt, Artificial Sequence
  Description of Artificial Sequence: Synthetic oligonucleotide
ccaauagcugacucuuacc

SEQ ID NO: 854590 - RNA, 19 nt, Artificial Sequence
  Description of Artificial Sequence: Synthetic oligonucleotide
  modified_base (15)..(15): a, c, u, g, unknown or other
ucacagagucccggnauac

SEQ ID NO: 854591 - RNA, 19 nt, Artificial Sequence
  Description of Artificial Sequence: Synthetic oligonucleotide
cagugaagguauagauaug

SEQ ID NO: 854592 - RNA, 19 nt, Artificial Sequence
  Description of Artificial Sequence: Synthetic oligonucleotide
ugcccacccucuuagguuu

SEQ ID NO: 854593 - RNA, 19 nt, Artificial Sequence
  Description of Artificial Sequence: Synthetic oligonucleotide
agccucuuaaagguuucug

SEQ ID NO: 854594 - RNA, 19 nt, Artificial Sequence
  Description of Artificial Sequence: Synthetic oligonucleotide
cgcuuaaacaccuaagcca

SEQ ID NO: 854595 - RNA, 19 nt, Artificial Sequence
  Description of Artificial Sequence: Synthetic oligonucleotide
uauguacccuauggguugu

SEQ ID NO: 854596 - RNA, 19 nt, Artificial Sequence
  Description of Artificial Sequence: Synthetic oligonucleotide
cauaacagcagcagccacu

SEQ ID NO: 854597 - RNA, 19 nt, Artificial Sequence
  Description of Artificial Sequence: Synthetic oligonucleotide
agacucuuucaugucgacu

SEQ ID NO: 854598 - RNA, 19 nt, Artificial Sequence
  Description of Artificial Sequence: Synthetic oligonucleotide
cgcaauuagcuguuugagg

SEQ ID NO: 854599 - RNA, 19 nt, Artificial Sequence
  Description of Artificial Sequence: Synthetic oligonucleotide
uccuacuccugaacugaau

SEQ ID NO: 854600 - RNA, 19 nt, Artificial Sequence
  Description of Artificial Sequence: Synthetic oligonucleotide
cacauccgcaauuagcugu

SEQ ID NO: 854601 - RNA, 19 nt, Artificial Sequence
  Description of Artificial Sequence: Synthetic oligonucleotide
  modified_base (3)..(3): a, c, u, g, unknown or other
ggnauacucccaugcccag

SEQ ID NO: 854602 - RNA, 19 nt, Artificial Sequence
  Description of Artificial Sequence: Synthetic oligonucleotide
guccuguuugaggugggag

SEQ ID NO: 854603 - RNA, 19 nt, Artificial Sequence
  Description of Artificial Sequence: Synthetic oligonucleotide
  modified_base (19)..(19): a, c, u, g, unknown or other
agccaagacacaaggguan

SEQ ID NO: 854604 - RNA, 19 nt, Artificial Sequence
  Description of Artificial Sequence: Synthetic oligonucleotide
auaguaaguggugcagcau

SEQ ID NO: 854605 - RNA, 19 nt, Artificial Sequence
  Description of Artificial Sequence: Synthetic oligonucleotide
augcccaaucucugcccuc

SEQ ID NO: 854606 - RNA, 19 nt, Artificial Sequence
  Description of Artificial Sequence: Synthetic oligonucleotide
acgcugacaggacaagguu

SEQ ID NO: 854607 - RNA, 19 nt, Artificial Sequence
  Description of Artificial Sequence: Synthetic oligonucleotide
cauuuucucgaagccucug

SEQ ID NO: 854608 - RNA, 19 nt, Artificial Sequence
  Description of Artificial Sequence: Synthetic oligonucleotide
cuguaagcacuugcccucc

SEQ ID NO: 854609 - RNA, 19 nt, Artificial Sequence
  Description of Artificial Sequence: Synthetic oligonucleotide
aggacaagguuaggaugag

SEQ ID NO: 854610 - RNA, 19 nt, Artificial Sequence
  Description of Artificial Sequence: Synthetic oligonucleotide
agcccggaucccuggguag

SEQ ID NO: 854611 - RNA, 19 nt, Artificial Sequence
  Description of Artificial Sequence: Synthetic oligonucleotide
agcugacucuuaccccaag

SEQ ID NO: 854612 - RNA, 19 nt, Artificial Sequence
  Description of Artificial Sequence: Synthetic oligonucleotide
gccucucaauucuacaauc

SEQ ID NO: 854613 - RNA, 19 nt, Artificial Sequence
  Description of Artificial Sequence: Synthetic oligonucleotide
gugggucuugucucccacc

SEQ ID NO: 854614 - RNA, 19 nt, Artificial Sequence
  Description of Artificial Sequence: Synthetic oligonucleotide
caagguuaggaugagccgu

SEQ ID NO: 854615 - RNA, 19 nt, Artificial Sequence
  Description of Artificial Sequence: Synthetic oligonucleotide
gguuguuuauuuuggccua

SEQ ID NO: 854616 - RNA, 19 nt, Artificial Sequence
  Description of Artificial Sequence: Synthetic oligonucleotide
guacccuauggguuguuua

SEQ ID NO: 854617 - RNA, 19 nt, Artificial Sequence
  Description of Artificial Sequence: Synthetic oligonucleotide
caguagugucgaccugagg

SEQ ID NO: 854618 - RNA, 19 nt, Artificial Sequence
  Description of Artificial Sequence: Synthetic oligonucleotide
cugauccuacuccugaacu

SEQ ID NO: 854619 - RNA, 19 nt, Artificial Sequence
  Description of Artificial Sequence: Synthetic oligonucleotide
auuagcuguuugaggauuu

SEQ ID NO: 854620 - RNA, 19 nt, Artificial Sequence
  Description of Artificial Sequence: Synthetic oligonucleotide
uuucucgcuuaaacaccua

SEQ ID NO: 854621 - RNA, 19 nt, Artificial Sequence
  Description of Artificial Sequence: Synthetic oligonucleotide
ccaguccugucucuacucg

SEQ ID NO: 854622 - RNA, 19 nt, Artificial Sequence
  Description of Artificial Sequence: Synthetic oligonucleotide
gccgucucaggguccaggg

SEQ ID NO: 854623 - RNA, 19 nt, Artificial Sequence
  Description of Artificial Sequence: Synthetic oligonucleotide
gggaaauuacugaaguucu

SEQ ID NO: 854624 - RNA, 19 nt, Artificial Sequence
  Description of Artificial Sequence: Synthetic oligonucleotide
ucccuaugugcucccucaa

SEQ ID NO: 854625 - RNA, 19 nt, Artificial Sequence
  Description of Artificial Sequence: Synthetic oligonucleotide
gaugguaauagaggcgaau

SEQ ID NO: 854626 - RNA, 19 nt, Artificial Sequence
  Description of Artificial Sequence: Synthetic oligonucleotide
uuagcuguuugaggauuuu

SEQ ID NO: 854627 - RNA, 19 nt, Artificial Sequence
  Description of Artificial Sequence: Synthetic oligonucleotide
gucugcggcucuccacuag

SEQ ID NO: 854628 - RNA, 19 nt, Artificial Sequence
  Description of Artificial Sequence: Synthetic oligonucleotide
uguacccuauggguuguuu

SEQ ID NO: 854629 - RNA, 19 nt, Artificial Sequence
  Description of Artificial Sequence: Synthetic oligonucleotide
cuagagaggccuuuucuuu

SEQ ID NO: 854630 - RNA, 19 nt, Artificial Sequence
  Description of Artificial Sequence: Synthetic oligonucleotide
gaagaggggccaaaguuuu

SEQ ID NO: 854631 - RNA, 19 nt, Artificial Sequence
  Description of Artificial Sequence: Synthetic oligonucleotide
guuguuuauuuuggccuaa

SEQ ID NO: 854632 - RNA, 19 nt, Artificial Sequence
  Description of Artificial Sequence: Synthetic oligonucleotide
agaggcgaaugaagcuguc

SEQ ID NO: 854633 - RNA, 19 nt, Artificial Sequence
  Description of Artificial Sequence: Synthetic oligonucleotide
cuucccugauccuacuccu

SEQ ID NO: 854634 - RNA, 19 nt, Artificial Sequence
  Description of Artificial Sequence: Synthetic oligonucleotide
ggacaaggcuacccuugag

SEQ ID NO: 854635 - RNA, 19 nt, Artificial Sequence
  Description of Artificial Sequence: Synthetic oligonucleotide
  modified_base (8)..(8): a, c, u, g, unknown or other
gucccggnauacucccaug

SEQ ID NO: 854636 - RNA, 19 nt, Artificial Sequence
  Description of Artificial Sequence: Synthetic oligonucleotide
  modified_base (6)..(6): a, c, u, g, unknown or other
cccggnauacucccaugcc

SEQ ID NO: 854637 - RNA, 19 nt, Artificial Sequence
  Description of Artificial Sequence: Synthetic oligonucleotide
ccgcaauuagcuguuugag

SEQ ID NO: 854638 - RNA, 19 nt, Artificial Sequence
  Description of Artificial Sequence: Synthetic oligonucleotide
  modified_base (6)..(6): a, c, u, g, unknown or other
ggguanaaagugaaacgcu

SEQ ID NO: 854639 - RNA, 19 nt, Artificial Sequence
  Description of Artificial Sequence: Synthetic oligonucleotide
ggaaaccucuucccugauc

SEQ ID NO: 854640 - RNA, 19 nt, Artificial Sequence
  Description of Artificial Sequence: Synthetic oligonucleotide
gugucgaccugaggugaag

SEQ ID NO: 854641 - RNA, 19 nt, Artificial Sequence
  Description of Artificial Sequence: Synthetic oligonucleotide
ccaguagugucgaccugag

SEQ ID NO: 854642 - RNA, 19 nt, Artificial Sequence
  Description of Artificial Sequence: Synthetic oligonucleotide
gaaaugcccucgaugcagu

SEQ ID NO: 854643 - RNA, 19 nt, Artificial Sequence
  Description of Artificial Sequence: Synthetic oligonucleotide
  modified_base (4)..(4): a, c, u, g, unknown or other
cggnauacucccaugccca

SEQ ID NO: 854644 - RNA, 19 nt, Artificial Sequence
  Description of Artificial Sequence: Synthetic oligonucleotide
cacuacaguuaaguaggga

SEQ ID NO: 854645 - RNA, 19 nt, Artificial Sequence
  Description of Artificial Sequence: Synthetic oligonucleotide
accuaagccaggggucaug

SEQ ID NO: 854646 - RNA, 19 nt, Artificial Sequence
  Description of Artificial Sequence: Synthetic oligonucleotide
gcgaaugaagcugucucuc

SEQ ID NO: 854647 - RNA, 19 nt, Artificial Sequence
  Description of Artificial Sequence: Synthetic oligonucleotide
acauccgcaauuagcuguu

SEQ ID NO: 854648 - RNA, 19 nt, Artificial Sequence
  Description of Artificial Sequence: Synthetic oligonucleotide
gaaccacagucaaggcaca

SEQ ID NO: 854649 - RNA, 19 nt, Artificial Sequence
  Description of Artificial Sequence: Synthetic oligonucleotide
gagucacagaagccucuua

SEQ ID NO: 854650 - RNA, 19 nt, Artificial Sequence
  Description of Artificial Sequence: Synthetic oligonucleotide
gcggcucuccacuagucuc

SEQ ID NO: 854651 - RNA, 19 nt, Artificial Sequence
  Description of Artificial Sequence: Synthetic oligonucleotide
cugucugcggcucuccacu

SEQ ID NO: 854652 - RNA, 19 nt, Artificial Sequence
  Description of Artificial Sequence: Synthetic oligonucleotide
gguuaggaugagccgucuc

SEQ ID NO: 854653 - RNA, 19 nt, Artificial Sequence
  Description of Artificial Sequence: Synthetic oligonucleotide
  modified_base (2)..(2): a, c, u, g, unknown or other
gnauacucccaugcccagu

SEQ ID NO: 854654 - RNA, 19 nt, Artificial Sequence
  Description of Artificial Sequence: Synthetic oligonucleotide
uucucgucucagucuuguu

SEQ ID NO: 854655 - RNA, 19 nt, Artificial Sequence
  Description of Artificial Sequence: Synthetic oligonucleotide
cccaaacuuaggcuccaug

SEQ ID NO: 854656 - RNA, 19 nt, Artificial Sequence
  Description of Artificial Sequence: Synthetic oligonucleotide
ggacaagguuaggaugagc

SEQ ID NO: 854657 - RNA, 19 nt, Artificial Sequence
  Description of Artificial Sequence: Synthetic oligonucleotide
  modified_base (10)..(10): a, c, u, g, unknown or other
gagucccggnauacuccca

SEQ ID NO: 854658 - RNA, 19 nt, Artificial Sequence
  Description of Artificial Sequence: Synthetic oligonucleotide
agguuaggaugagccgucu

SEQ ID NO: 854659 - RNA, 19 nt, Artificial Sequence
  Description of Artificial Sequence: Synthetic oligonucleotide
guucucacggggcgagaaa

SEQ ID NO: 854660 - RNA, 19 nt, Artificial Sequence
  Description of Artificial Sequence: Synthetic oligonucleotide
acaaugugccggccucaua

SEQ ID NO: 854661 - RNA, 19 nt, Artificial Sequence
  Description of Artificial Sequence: Synthetic oligonucleotide
gaggcgaaugaagcugucu

SEQ ID NO: 854662 - RNA, 19 nt, Artificial Sequence
  Description of Artificial Sequence: Synthetic oligonucleotide
ggcgaaugaagcugucucu

SEQ ID NO: 854663 - RNA, 19 nt, Artificial Sequence
  Description of Artificial Sequence: Synthetic oligonucleotide
guuucaccuugaugugcaa

SEQ ID NO: 854664 - RNA, 19 nt, Artificial Sequence
  Description of Artificial Sequence: Synthetic oligonucleotide
cccuaugugcucccucaag

SEQ ID NO: 854665 - RNA, 19 nt, Artificial Sequence
  Description of Artificial Sequence: Synthetic oligonucleotide
ugccggccucauagucuag

SEQ ID NO: 854666 - RNA, 19 nt, Artificial Sequence
  Description of Artificial Sequence: Synthetic oligonucleotide
cagcuaagugggccagauc

SEQ ID NO: 854667 - RNA, 19 nt, Artificial Sequence
  Description of Artificial Sequence: Synthetic oligonucleotide
cugucucuacucguucaca

SEQ ID NO: 854668 - RNA, 19 nt, Artificial Sequence
  Description of Artificial Sequence: Synthetic oligonucleotide
gccggccucauagucuagg

SEQ ID NO: 854669 - RNA, 19 nt, Artificial Sequence
  Description of Artificial Sequence: Synthetic oligonucleotide
ggauuugcugucugcggcu

SEQ ID NO: 854670 - RNA, 19 nt, Artificial Sequence
  Description of Artificial Sequence: Synthetic oligonucleotide
cuccuguggagcucuucaa

SEQ ID NO: 854671 - RNA, 19 nt, Artificial Sequence
  Description of Artificial Sequence: Synthetic oligonucleotide
gccagucucagggagugga

SEQ ID NO: 854672 - RNA, 19 nt, Artificial Sequence
  Description of Artificial Sequence: Synthetic oligonucleotide
gccguacucuccaguagcc

SEQ ID NO: 854673 - RNA, 19 nt, Artificial Sequence
  Description of Artificial Sequence: Synthetic oligonucleotide
agccagucucagggagugg

SEQ ID NO: 854674 - RNA, 19 nt, Artificial Sequence
  Description of Artificial Sequence: Synthetic oligonucleotide
gaacggaaaugcccucgau

SEQ ID NO: 854675 - RNA, 19 nt, Artificial Sequence
  Description of Artificial Sequence: Synthetic oligonucleotide
ggaugagccgucucagggu

SEQ ID NO: 854676 - RNA, 19 nt, Artificial Sequence
  Description of Artificial Sequence: Synthetic oligonucleotide
cagcucuauagauacuguu

SEQ ID NO: 854677 - RNA, 19 nt, Artificial Sequence
  Description of Artificial Sequence: Synthetic oligonucleotide
ccuguucucacggggcgag

SEQ ID NO: 854678 - RNA, 19 nt, Artificial Sequence
  Description of Artificial Sequence: Synthetic oligonucleotide
guggagucaauucgccuuu

SEQ ID NO: 854679 - RNA, 19 nt, Artificial Sequence
  Description of Artificial Sequence: Synthetic oligonucleotide
agugucgaccugaggugaa

SEQ ID NO: 854680 - RNA, 19 nt, Artificial Sequence
  Description of Artificial Sequence: Synthetic oligonucleotide
gguccgugacguuguaaaa

SEQ ID NO: 854681 - RNA, 19 nt, Artificial Sequence
  Description of Artificial Sequence: Synthetic oligonucleotide
ggacuucagagauuacaau

SEQ ID NO: 854682 - RNA, 19 nt, Artificial Sequence
  Description of Artificial Sequence: Synthetic oligonucleotide
agcagcuaagugggccaga

SEQ ID NO: 854683 - RNA, 19 nt, Artificial Sequence
  Description of Artificial Sequence: Synthetic oligonucleotide
gggaaugucaaaggauggu

SEQ ID NO: 854684 - RNA, 19 nt, Artificial Sequence
  Description of Artificial Sequence: Synthetic oligonucleotide
  modified_base (14)..(14): a, c, u, g, unknown or other
cacagagucccggnauacu

SEQ ID NO: 854685 - RNA, 19 nt, Artificial Sequence
  Description of Artificial Sequence: Synthetic oligonucleotide
cuauuucuagagaggccuu

SEQ ID NO: 854686 - RNA, 19 nt, Artificial Sequence
  Description of Artificial Sequence: Synthetic oligonucleotide
aggguacuuuucacauccu

SEQ ID NO: 854687 - RNA, 19 nt, Artificial Sequence
  Description of Artificial Sequence: Synthetic oligonucleotide
cuccaauagcugacucuua

SEQ ID NO: 854688 - RNA, 19 nt, Artificial Sequence
  Description of Artificial Sequence: Synthetic oligonucleotide
guuacccaagcagcaggua

SEQ ID NO: 854689 - RNA, 19 nt, Artificial Sequence
  Description of Artificial Sequence: Synthetic oligonucleotide
cuacccucuucuacccugu

SEQ ID NO: 854690 - RNA, 19 nt, Artificial Sequence
  Description of Artificial Sequence: Synthetic oligonucleotide
ggcuccaugucuugucacu

SEQ ID NO: 854691 - RNA, 19 nt, Artificial Sequence
  Description of Artificial Sequence: Synthetic oligonucleotide
ggacacucaucugugcugu

SEQ ID NO: 854692 - RNA, 19 nt, Artificial Sequence
  Description of Artificial Sequence: Synthetic oligonucleotide
gccagcccggaucccuggg

SEQ ID NO: 854693 - RNA, 19 nt, Artificial Sequence
  Description of Artificial Sequence: Synthetic oligonucleotide
cagguaauccagguuguuu

SEQ ID NO: 854694 - RNA, 19 nt, Artificial Sequence
  Description of Artificial Sequence: Synthetic oligonucleotide
ccucgaugcaguuucucgu

SEQ ID NO: 854695 - RNA, 19 nt, Artificial Sequence
  Description of Artificial Sequence: Synthetic oligonucleotide
cucuacucguucacacaau

SEQ ID NO: 854696 - RNA, 19 nt, Artificial Sequence
  Description of Artificial Sequence: Synthetic oligonucleotide
gggcucacucucccacuac

SEQ ID NO: 854697 - RNA, 19 nt, Artificial Sequence
  Description of Artificial Sequence: Synthetic oligonucleotide
cacagccguacucuccagu

SEQ ID NO: 854698 - RNA, 19 nt, Artificial Sequence
  Description of Artificial Sequence: Synthetic oligonucleotide
cgaugcaguuucucgucuc

SEQ ID NO: 854699 - RNA, 19 nt, Artificial Sequence
  Description of Artificial Sequence: Synthetic oligonucleotide
ggaaccacguugacaccaa

SEQ ID NO: 854700 - RNA, 19 nt, Artificial Sequence
  Description of Artificial Sequence: Synthetic oligonucleotide
aucucggcgcuuggcccca

SEQ ID NO: 854701 - RNA, 19 nt, Artificial Sequence
  Description of Artificial Sequence: Synthetic oligonucleotide
cgguccgugacguuguaaa

SEQ ID NO: 854702 - RNA, 19 nt, Artificial Sequence
  Description of Artificial Sequence: Synthetic oligonucleotide
cagcccggaucccugggua

SEQ ID NO: 854703 - RNA, 19 nt, Artificial Sequence
  Description of Artificial Sequence: Synthetic oligonucleotide
ggaaauuacugaaguucuu

SEQ ID NO: 854704 - RNA, 19 nt, Artificial Sequence
  Description of Artificial Sequence: Synthetic oligonucleotide
gagccgucucaggguccag

SEQ ID NO: 854705 - RNA, 19 nt, Artificial Sequence
  Description of Artificial Sequence: Synthetic oligonucleotide
ggaugguaauagaggcgaa

SEQ ID NO: 854706 - RNA, 19 nt, Artificial Sequence
  Description of Artificial Sequence: Synthetic oligonucleotide
ccggccucauagucuagga

SEQ ID NO: 854707 - RNA, 19 nt, Artificial Sequence
  Description of Artificial Sequence: Synthetic oligonucleotide
ggccuaacuuaaaaugauu

SEQ ID NO: 854708 - RNA, 19 nt, Artificial Sequence
  Description of Artificial Sequence: Synthetic oligonucleotide
ccagcucuauagauacugu

SEQ ID NO: 854709 - RNA, 19 nt, Artificial Sequence
  Description of Artificial Sequence: Synthetic oligonucleotide
cccuauggguuguuuauuu

SEQ ID NO: 854710 - RNA, 19 nt, Artificial Sequence
  Description of Artificial Sequence: Synthetic oligonucleotide
auguacccuauggguuguu

SEQ ID NO: 854711 - RNA, 19 nt, Artificial Sequence
  Description of Artificial Sequence: Synthetic oligonucleotide
ccggaucccuggguagaag

SEQ ID NO: 854712 - RNA, 19 nt, Artificial Sequence
  Description of Artificial Sequence: Synthetic oligonucleotide
aggcuacccuugagucaca

SEQ ID NO: 854713 - RNA, 19 nt, Artificial Sequence
  Description of Artificial Sequence: Synthetic oligonucleotide
cccucuuagguuucaccuu

SEQ ID NO: 854714 - RNA, 19 nt, Artificial Sequence
  Description of Artificial Sequence: Synthetic oligonucleotide
caccuaagccaggggucau

SEQ ID NO: 854715 - RNA, 19 nt, Artificial Sequence
  Description of Artificial Sequence: Synthetic oligonucleotide
cauccgcaauuagcuguuu

SEQ ID NO: 854716 - RNA, 19 nt, Artificial Sequence
  Description of Artificial Sequence: Synthetic oligonucleotide
cccggaucccuggguagaa

SEQ ID NO: 854717 - RNA, 19 nt, Artificial Sequence
  Description of Artificial Sequence: Synthetic oligonucleotide
ccgucucaggguccagggu

SEQ ID NO: 854718 - RNA, 19 nt, Artificial Sequence
  Description of Artificial Sequence: Synthetic oligonucleotide
gggccagaucucggcgcuu

SEQ ID NO: 854719 - RNA, 19 nt, Artificial Sequence
  Description of Artificial Sequence: Synthetic oligonucleotide
uuaauuaucucccacacgc

SEQ ID NO: 854720 - RNA, 19 nt, Artificial Sequence
  Description of Artificial Sequence: Synthetic oligonucleotide
uuugauucuagaaaacugg

SEQ ID NO: 854721 - RNA, 19 nt, Artificial Sequence
  Description of Artificial Sequence: Synthetic oligonucleotide
aauuaucucccacacgccc

SEQ ID NO: 854722 - RNA, 19 nt, Artificial Sequence
  Description of Artificial Sequence: Synthetic oligonucleotide
uuuaaucuuauauuaacuc

SEQ ID NO: 854723 - RNA, 19 nt, Artificial Sequence
  Description of Artificial Sequence: Synthetic oligonucleotide
uuaaucuuauauuaacuca

SEQ ID NO: 854724 - RNA, 19 nt, Artificial Sequence
  Description of Artificial Sequence: Synthetic oligonucleotide
uuuugauucuagaaaacug

SEQ ID NO: 854725 - RNA, 19 nt, Artificial Sequence
  Description of Artificial Sequence: Synthetic oligonucleotide
cuagaaaacuggaauaggg

SEQ ID NO: 854726 - RNA, 19 nt, Artificial Sequence
  Description of Artificial Sequence: Synthetic oligonucleotide
acguuaaugacgugaaagc

SEQ ID NO: 854727 - RNA, 19 nt, Artificial Sequence
  Description of Artificial Sequence: Synthetic oligonucleotide
uauuacaauguccgcaagg

SEQ ID NO: 854728 - RNA, 19 nt, Artificial Sequence
  Description of Artificial Sequence: Synthetic oligonucleotide
guaaguuucacccaaucug

SEQ ID NO: 854729 - RNA, 19 nt, Artificial Sequence
  Description of Artificial Sequence: Synthetic oligonucleotide
uaaucuuauauuaacucaa

SEQ ID NO: 854730 - RNA, 19 nt, Artificial Sequence
  Description of Artificial Sequence: Synthetic oligonucleotide
acaguuggaaauuuaaagu

SEQ ID NO: 854731 - RNA, 19 nt, Artificial Sequence
  Description of Artificial Sequence: Synthetic oligonucleotide
uuuaugcccacaucgauga

SEQ ID NO: 854732 - RNA, 19 nt, Artificial Sequence
  Description of Artificial Sequence: Synthetic oligonucleotide
uacguuaaugacgugaaag

SEQ ID NO: 854733 - RNA, 19 nt, Artificial Sequence
  Description of Artificial Sequence: Synthetic oligonucleotide
agaaaacuggaauagggca

SEQ ID NO: 854734 - RNA, 19 nt, Artificial Sequence
  Description of Artificial Sequence: Synthetic oligonucleotide
ugugaucagauuuggaaug

SEQ ID NO: 854735 - RNA, 19 nt, Artificial Sequence
  Description of Artificial Sequence: Synthetic oligonucleotide
uuaaugacgugaaagccgu

SEQ ID NO: 854736 - RNA, 19 nt, Artificial Sequence
  Description of Artificial Sequence: Synthetic oligonucleotide
uccugauugaacucaacag

SEQ ID NO: 854737 - RNA, 19 nt, Artificial Sequence
  Description of Artificial Sequence: Synthetic oligonucleotide
aaguggggaaauccuaaac

SEQ ID NO: 854738 - RNA, 19 nt, Artificial Sequence
  Description of Artificial Sequence: Synthetic oligonucleotide
gaagcuuucaauaaauaca

SEQ ID NO: 854739 - RNA, 19 nt, Artificial Sequence
  Description of Artificial Sequence: Synthetic oligonucleotide
aaaccuuccccagugacuc

SEQ ID NO: 854740 - RNA, 19 nt, Artificial Sequence
  Description of Artificial Sequence: Synthetic oligonucleotide
guuaaugacgugaaagccg

SEQ ID NO: 854741 - RNA, 19 nt, Artificial Sequence
  Description of Artificial Sequence: Synthetic oligonucleotide
aauccuaaaccuuccccag

SEQ ID NO: 854742 - RNA, 19 nt, Artificial Sequence
  Description of Artificial Sequence: Synthetic oligonucleotide
acaggagugauguaaccgg

SEQ ID NO: 854743 - RNA, 19 nt, Artificial Sequence
  Description of Artificial Sequence: Synthetic oligonucleotide
uguucgcuuaauuaucucc

SEQ ID NO: 854744 - RNA, 19 nt, Artificial Sequence
  Description of Artificial Sequence: Synthetic oligonucleotide
ucuaguaaguuuuccuuug

SEQ ID NO: 854745 - RNA, 19 nt, Artificial Sequence
  Description of Artificial Sequence: Synthetic oligonucleotide
gcugauauuacaauguccg

SEQ ID NO: 854746 - RNA, 19 nt, Artificial Sequence
  Description of Artificial Sequence: Synthetic oligonucleotide
ugauauuacaauguccgca

SEQ ID NO: 854747 - RNA, 19 nt, Artificial Sequence
  Description of Artificial Sequence: Synthetic oligonucleotide
uacgugaaagacacgcagg

SEQ ID NO: 854748 - RNA, 19 nt, Artificial Sequence
  Description of Artificial Sequence: Synthetic oligonucleotide
gagucaucaacucguauug

SEQ ID NO: 854749 - RNA, 19 nt, Artificial Sequence
  Description of Artificial Sequence: Synthetic oligonucleotide
aucuccaaccaacuugggc

SEQ ID NO: 854750 - RNA, 19 nt, Artificial Sequence
  Description of Artificial Sequence: Synthetic oligonucleotide
aucggugagauaucguaac

SEQ ID NO: 854751 - RNA, 19 nt, Artificial Sequence
  Description of Artificial Sequence: Synthetic oligonucleotide
uggaauagcacuugggaaa

SEQ ID NO: 854752 - RNA, 19 nt, Artificial Sequence
  Description of Artificial Sequence: Synthetic oligonucleotide
aaagccgucaacauccuug

SEQ ID NO: 854753 - RNA, 19 nt, Artificial Sequence
  Description of Artificial Sequence: Synthetic oligonucleotide
aagcuuaugccaaagaaaa

SEQ ID NO: 854754 - RNA, 19 nt, Artificial Sequence
  Description of Artificial Sequence: Synthetic oligonucleotide
gauauuacaauguccgcaa

SEQ ID NO: 854755 - RNA, 19 nt, Artificial Sequence
  Description of Artificial Sequence: Synthetic oligonucleotide
gagauaucguaacuguggc

SEQ ID NO: 854756 - RNA, 19 nt, Artificial Sequence
  Description of Artificial Sequence: Synthetic oligonucleotide
aauagggcaagcucacaga

SEQ ID NO: 854757 - RNA, 19 nt, Artificial Sequence
  Description of Artificial Sequence: Synthetic oligonucleotide
aaucuuauauuaacucaag

SEQ ID NO: 854758 - RNA, 19 nt, Artificial Sequence
  Description of Artificial Sequence: Synthetic oligonucleotide
ucgcccuacguuaaugacg

SEQ ID NO: 854759 - RNA, 19 nt, Artificial Sequence
  Description of Artificial Sequence: Synthetic oligonucleotide
gaacgugacaaugacacac

SEQ ID NO: 854760 - RNA, 19 nt, Artificial Sequence
  Description of Artificial Sequence: Synthetic oligonucleotide
uaccuuuuaggaaagccaa

SEQ ID NO: 854761 - RNA, 19 nt, Artificial Sequence
  Description of Artificial Sequence: Synthetic oligonucleotide
aaagcuuaugccaaagaaa

SEQ ID NO: 854762 - RNA, 19 nt, Artificial Sequence
  Description of Artificial Sequence: Synthetic oligonucleotide
uucaguuuccugauugaac

SEQ ID NO: 854763 - RNA, 19 nt, Artificial Sequence
  Description of Artificial Sequence: Synthetic oligonucleotide
aucacgacaaguuuuguuu

SEQ ID NO: 854764 - RNA, 19 nt, Artificial Sequence
  Description of Artificial Sequence: Synthetic oligonucleotide
gaucagauuuggaaugccg

SEQ ID NO: 854765 - RNA, 19 nt, Artificial Sequence
  Description of Artificial Sequence: Synthetic oligonucleotide
gcuacaaccacguucuucc

SEQ ID NO: 854766 - RNA, 19 nt, Artificial Sequence
  Description of Artificial Sequence: Synthetic oligonucleotide
uccuaaaccuuccccagug

SEQ ID NO: 854767 - RNA, 19 nt, Artificial Sequence
  Description of Artificial Sequence: Synthetic oligonucleotide
ugcaauuggcauuccaaca

SEQ ID NO: 854768 - RNA, 19 nt, Artificial Sequence
  Description of Artificial Sequence: Synthetic oligonucleotide
ccuauuuugcucuaguaag

SEQ ID NO: 854769 - RNA, 19 nt, Artificial Sequence
  Description of Artificial Sequence: Synthetic oligonucleotide
gaagccauggcccgcgccg

SEQ ID NO: 854770 - RNA, 19 nt, Artificial Sequence
  Description of Artificial Sequence: Synthetic oligonucleotide
guacgugaaagacacgcag

SEQ ID NO: 854771 - RNA, 19 nt, Artificial Sequence
  Description of Artificial Sequence: Synthetic oligonucleotide
uuggaauagcacuugggaa

SEQ ID NO: 854772 - RNA, 19 nt, Artificial Sequence
  Description of Artificial Sequence: Synthetic oligonucleotide
aucagauuuggaaugccgg

SEQ ID NO: 854773 - RNA, 19 nt, Artificial Sequence
  Description of Artificial Sequence: Synthetic oligonucleotide
agugauguaaccggcuuuc

SEQ ID NO: 854774 - RNA, 19 nt, Artificial Sequence
  Description of Artificial Sequence: Synthetic oligonucleotide
ugcgucaccaggucagugg

SEQ ID NO: 854775 - RNA, 19 nt, Artificial Sequence
  Description of Artificial Sequence: Synthetic oligonucleotide
uuugggaguguaucgguga

SEQ ID NO: 854776 - RNA, 19 nt, Artificial Sequence
  Description of Artificial Sequence: Synthetic oligonucleotide
auuaucucccacacgcccc

SEQ ID NO: 854777 - RNA, 19 nt, Artificial Sequence
  Description of Artificial Sequence: Synthetic oligonucleotide
ucaugauuaucacgacaag

SEQ ID NO: 854778 - RNA, 19 nt, Artificial Sequence
  Description of Artificial Sequence: Synthetic oligonucleotide
ucaucaacucguauuggaa

SEQ ID NO: 854779 - RNA, 19 nt, Artificial Sequence
  Description of Artificial Sequence: Synthetic oligonucleotide
guauuggaauagcacuugg

SEQ ID NO: 854780 - RNA, 19 nt, Artificial Sequence
  Description of Artificial Sequence: Synthetic oligonucleotide
ucaguaccuuuuaggaaag

SEQ ID NO: 854781 - RNA, 19 nt, Artificial Sequence
  Description of Artificial Sequence: Synthetic oligonucleotide
aaauugaggcugguuucac

SEQ ID NO: 854782 - RNA, 19 nt, Artificial Sequence
  Description of Artificial Sequence: Synthetic oligonucleotide
ugucauggggccgacaccc

SEQ ID NO: 854783 - RNA, 19 nt, Artificial Sequence
  Description of Artificial Sequence: Synthetic oligonucleotide
cagaugagucaucaacucg

SEQ ID NO: 854784 - RNA, 19 nt, Artificial Sequence
  Description of Artificial Sequence: Synthetic oligonucleotide
ugauuaucacgacaaguuu

SEQ ID NO: 854785 - RNA, 19 nt, Artificial Sequence
  Description of Artificial Sequence: Synthetic oligonucleotide
auugaggcugguuucacaa

SEQ ID NO: 854786 - RNA, 19 nt, Artificial Sequence
  Description of Artificial Sequence: Synthetic oligonucleotide
cucaguaccuuuuaggaaa

SEQ ID NO: 854787 - RNA, 19 nt, Artificial Sequence
  Description of Artificial Sequence: Synthetic oligonucleotide
ugcucuaguaaguuuuccu

SEQ ID NO: 854788 - RNA, 19 nt, Artificial Sequence
  Description of Artificial Sequence: Synthetic oligonucleotide
aaccgcacagccaacgcgg

SEQ ID NO: 854789 - RNA, 19 nt, Artificial Sequence
  Description of Artificial Sequence: Synthetic oligonucleotide
aauugaggcugguuucaca

SEQ ID NO: 854790 - RNA, 19 nt, Artificial Sequence
  Description of Artificial Sequence: Synthetic oligonucleotide
uguuuaugcccacaucgau

SEQ ID NO: 854791 - RNA, 19 nt, Artificial Sequence
  Description of Artificial Sequence: Synthetic oligonucleotide
gguccaagcacauucgccc

SEQ ID NO: 854792 - RNA, 19 nt, Artificial Sequence
  Description of Artificial Sequence: Synthetic oligonucleotide
agaugagucaucaacucgu

SEQ ID NO: 854793 - RNA, 19 nt, Artificial Sequence
  Description of Artificial Sequence: Synthetic oligonucleotide
guugauucccacuucagcu

SEQ ID NO: 854794 - RNA, 19 nt, Artificial Sequence
  Description of Artificial Sequence: Synthetic oligonucleotide
uaucggugagauaucguaa

SEQ ID NO: 854795 - RNA, 19 nt, Artificial Sequence
  Description of Artificial Sequence: Synthetic oligonucleotide
cuggaauagggcaagcuca

SEQ ID NO: 854796 - RNA, 19 nt, Artificial Sequence
  Description of Artificial Sequence: Synthetic oligonucleotide
acgcggauaacagagagga

SEQ ID NO: 854797 - RNA, 19 nt, Artificial Sequence
  Description of Artificial Sequence: Synthetic oligonucleotide
uucauuucgcacugccgcc

SEQ ID NO: 854798 - RNA, 19 nt, Artificial Sequence
  Description of Artificial Sequence: Synthetic oligonucleotide
cugauauuacaauguccgc

SEQ ID NO: 854799 - RNA, 19 nt, Artificial Sequence
  Description of Artificial Sequence: Synthetic oligonucleotide
ucguauuggaauagcacuu

SEQ ID NO: 854800 - RNA, 19 nt, Artificial Sequence
  Description of Artificial Sequence: Synthetic oligonucleotide
ccgaacgugacaaugacac

SEQ ID NO: 854801 - RNA, 19 nt, Artificial Sequence
  Description of Artificial Sequence: Synthetic oligonucleotide
augauuaucacgacaaguu

SEQ ID NO: 854802 - RNA, 19 nt, Artificial Sequence
  Description of Artificial Sequence: Synthetic oligonucleotide
aaauaggccucaaagcuua

SEQ ID NO: 854803 - RNA, 19 nt, Artificial Sequence
  Description of Artificial Sequence: Synthetic oligonucleotide
aagccgucaacauccuugu

SEQ ID NO: 854804 - RNA, 19 nt, Artificial Sequence
  Description of Artificial Sequence: Synthetic oligonucleotide
ugccguuucuuccuuuccc

SEQ ID NO: 854805 - RNA, 19 nt, Artificial Sequence
  Description of Artificial Sequence: Synthetic oligonucleotide
cuaaaccuuccccagugac

SEQ ID NO: 854806 - RNA, 19 nt, Artificial Sequence
  Description of Artificial Sequence: Synthetic oligonucleotide
agccgaacgugacaaugac

SEQ ID NO: 854807 - RNA, 19 nt, Artificial Sequence
  Description of Artificial Sequence: Synthetic oligonucleotide
aaccagaaugacacugagg

SEQ ID NO: 854808 - RNA, 19 nt, Artificial Sequence
  Description of Artificial Sequence: Synthetic oligonucleotide
caucgaugugcucugggag

SEQ ID NO: 854809 - RNA, 19 nt, Artificial Sequence
  Description of Artificial Sequence: Synthetic oligonucleotide
gaguguaucggugagauau

SEQ ID NO: 854810 - RNA, 19 nt, Artificial Sequence
  Description of Artificial Sequence: Synthetic oligonucleotide
acccaaucugcccucauga

SEQ ID NO: 854811 - RNA, 19 nt, Artificial Sequence
  Description of Artificial Sequence: Synthetic oligonucleotide
caacgcggauaacagagag

SEQ ID NO: 854812 - RNA, 19 nt, Artificial Sequence
  Description of Artificial Sequence: Synthetic oligonucleotide
caaagcuuaugccaaagaa

SEQ ID NO: 854813 - RNA, 19 nt, Artificial Sequence
  Description of Artificial Sequence: Synthetic oligonucleotide
aaaauaggccucaaagcuu

SEQ ID NO: 854814 - RNA, 19 nt, Artificial Sequence
  Description of Artificial Sequence: Synthetic oligonucleotide
aggagaaacggcauugcag

SEQ ID NO: 854815 - RNA, 19 nt, Artificial Sequence
  Description of Artificial Sequence: Synthetic oligonucleotide
ggagaaacggcauugcaga

SEQ ID NO: 854816 - RNA, 19 nt, Artificial Sequence
  Description of Artificial Sequence: Synthetic oligonucleotide
gauaucguaacuguggcau

SEQ ID NO: 854817 - RNA, 19 nt, Artificial Sequence
  Description of Artificial Sequence: Synthetic oligonucleotide
auauuacaauguccgcaag

SEQ ID NO: 854818 - RNA, 19 nt, Artificial Sequence
  Description of Artificial Sequence: Synthetic oligonucleotide
guuuaugcccacaucgaug

SEQ ID NO: 854819 - RNA, 19 nt, Artificial Sequence
  Description of Artificial Sequence: Synthetic oligonucleotide
guaacuguggcaucaccuc

SEQ ID NO: 854820 - RNA, 19 nt, Artificial Sequence
  Description of Artificial Sequence: Synthetic oligonucleotide
auagggcaagcucacagaa

SEQ ID NO: 854821 - RNA, 19 nt, Artificial Sequence
  Description of Artificial Sequence: Synthetic oligonucleotide
uccgcaaggaucgugugcu

SEQ ID NO: 854822 - RNA, 19 nt, Artificial Sequence
  Description of Artificial Sequence: Synthetic oligonucleotide
acagccaacgcggauaaca

SEQ ID NO: 854823 - RNA, 19 nt, Artificial Sequence
  Description of Artificial Sequence: Synthetic oligonucleotide
aucaacucguauuggaaua

SEQ ID NO: 854824 - RNA, 19 nt, Artificial Sequence
  Description of Artificial Sequence: Synthetic oligonucleotide
caaucugcccucaugauua

SEQ ID NO: 854825 - RNA, 19 nt, Artificial Sequence
  Description of Artificial Sequence: Synthetic oligonucleotide
accaaccagaaugacacug

SEQ ID NO: 854826 - RNA, 19 nt, Artificial Sequence
  Description of Artificial Sequence: Synthetic oligonucleotide
aucuacguuuucaucauug

SEQ ID NO: 854827 - RNA, 19 nt, Artificial Sequence
  Description of Artificial Sequence: Synthetic oligonucleotide
auccuugucaggagaaacg

SEQ ID NO: 854828 - RNA, 19 nt, Artificial Sequence
  Description of Artificial Sequence: Synthetic oligonucleotide
uucgcuuaauuaucuccca

SEQ ID NO: 854829 - RNA, 19 nt, Artificial Sequence
  Description of Artificial Sequence: Synthetic oligonucleotide
aacucguauuggaauagca

SEQ ID NO: 854830 - RNA, 19 nt, Artificial Sequence
  Description of Artificial Sequence: Synthetic oligonucleotide
aacgcggauaacagagagg

SEQ ID NO: 854831 - RNA, 19 nt, Artificial Sequence
  Description of Artificial Sequence: Synthetic oligonucleotide
uuaucucccacacgcccca

SEQ ID NO: 854832 - RNA, 19 nt, Artificial Sequence
  Description of Artificial Sequence: Synthetic oligonucleotide
uguaucggugagauaucgu

SEQ ID NO: 854833 - RNA, 19 nt, Artificial Sequence
  Description of Artificial Sequence: Synthetic oligonucleotide
auucgcccuacguuaauga

SEQ ID NO: 854834 - RNA, 19 nt, Artificial Sequence
  Description of Artificial Sequence: Synthetic oligonucleotide
guaaccggcuuucuucuug

SEQ ID NO: 854835 - RNA, 19 nt, Artificial Sequence
  Description of Artificial Sequence: Synthetic oligonucleotide
uaucacgacaaguuuuguu

SEQ ID NO: 854836 - RNA, 19 nt, Artificial Sequence
  Description of Artificial Sequence: Synthetic oligonucleotide
cuuugggaguguaucggug

SEQ ID NO: 854837 - RNA, 19 nt, Artificial Sequence
  Description of Artificial Sequence: Synthetic oligonucleotide
gacaaugacacacaucauu

SEQ ID NO: 854838 - RNA, 19 nt, Artificial Sequence
  Description of Artificial Sequence: Synthetic oligonucleotide
guguaucggugagauaucg

SEQ ID NO: 854839 - RNA, 19 nt, Artificial Sequence
  Description of Artificial Sequence: Synthetic oligonucleotide
guaucggugagauaucgua

SEQ ID NO: 854840 - RNA, 19 nt, Artificial Sequence
  Description of Artificial Sequence: Synthetic oligonucleotide
agauaucguaacuguggca

SEQ ID NO: 854841 - RNA, 19 nt, Artificial Sequence
  Description of Artificial Sequence: Synthetic oligonucleotide
aauguccgcaaggaucgug

SEQ ID NO: 854842 - RNA, 19 nt, Artificial Sequence
  Description of Artificial Sequence: Synthetic oligonucleotide
ucggugagauaucguaacu

SEQ ID NO: 854843 - RNA, 19 nt, Artificial Sequence
  Description of Artificial Sequence: Synthetic oligonucleotide
aaccacguucuucccuaag

SEQ ID NO: 854844 - RNA, 19 nt, Artificial Sequence
  Description of Artificial Sequence: Synthetic oligonucleotide
ugccgcaaaagccgaacgu

SEQ ID NO: 854845 - RNA, 19 nt, Artificial Sequence
  Description of Artificial Sequence: Synthetic oligonucleotide
ggaauacugguccaagcac

SEQ ID NO: 854846 - RNA, 19 nt, Artificial Sequence
  Description of Artificial Sequence: Synthetic oligonucleotide
gcggauaacagagaggaug

SEQ ID NO: 854847 - RNA, 19 nt, Artificial Sequence
  Description of Artificial Sequence: Synthetic oligonucleotide
ucguaacuguggcaucacc

SEQ ID NO: 854848 - RNA, 19 nt, Artificial Sequence
  Description of Artificial Sequence: Synthetic oligonucleotide
gacgacagcuucauuucgc

SEQ ID NO: 854849 - RNA, 19 nt, Artificial Sequence
  Description of Artificial Sequence: Synthetic oligonucleotide
ugacgugaaagccgucaac

SEQ ID NO: 854850 - RNA, 19 nt, Artificial Sequence
  Description of Artificial Sequence: Synthetic oligonucleotide
uucuguuuaugcccacauc

SEQ ID NO: 854851 - RNA, 19 nt, Artificial Sequence
  Description of Artificial Sequence: Synthetic oligonucleotide
acaaccacguucuucccua

SEQ ID NO: 854852 - RNA, 19 nt, Artificial Sequence
  Description of Artificial Sequence: Synthetic oligonucleotide
ggguacgugaaagacacgc

SEQ ID NO: 854853 - RNA, 19 nt, Artificial Sequence
  Description of Artificial Sequence: Synthetic oligonucleotide
ugauguaaccggcuuucuu

SEQ ID NO: 854854 - RNA, 19 nt, Artificial Sequence
  Description of Artificial Sequence: Synthetic oligonucleotide
cagccaacgcggauaacag

SEQ ID NO: 854855 - RNA, 19 nt, Artificial Sequence
  Description of Artificial Sequence: Synthetic oligonucleotide
agucaucaacucguauugg

SEQ ID NO: 854856 - RNA, 19 nt, Artificial Sequence
  Description of Artificial Sequence: Synthetic oligonucleotide
uggggaaauccuaaaccuu

SEQ ID NO: 854857 - RNA, 19 nt, Artificial Sequence
  Description of Artificial Sequence: Synthetic oligonucleotide
ucgcuguugauucccacuu

SEQ ID NO: 854858 - RNA, 19 nt, Artificial Sequence
  Description of Artificial Sequence: Synthetic oligonucleotide
cuaguugguggcaacucca

SEQ ID NO: 854859 - RNA, 19 nt, Artificial Sequence
  Description of Artificial Sequence: Synthetic oligonucleotide
aaugugccgcaaaagccga

SEQ ID NO: 854860 - RNA, 19 nt, Artificial Sequence
  Description of Artificial Sequence: Synthetic oligonucleotide
cacucuaacaguuggaaau

SEQ ID NO: 854861 - RNA, 19 nt, Artificial Sequence
  Description of Artificial Sequence: Synthetic oligonucleotide
acgacagcuucauuucgca

SEQ ID NO: 854862 - RNA, 19 nt, Artificial Sequence
  Description of Artificial Sequence: Synthetic oligonucleotide
cauccguucucagugugag

SEQ ID NO: 854863 - RNA, 19 nt, Artificial Sequence
  Description of Artificial Sequence: Synthetic oligonucleotide
ucacgacaaguuuuguuuu

SEQ ID NO: 854864 - RNA, 19 nt, Artificial Sequence
  Description of Artificial Sequence: Synthetic oligonucleotide
uucgcccuacguuaaugac

SEQ ID NO: 854865 - RNA, 19 nt, Artificial Sequence
  Description of Artificial Sequence: Synthetic oligonucleotide
ugucucgcuguugauuccc

SEQ ID NO: 854866 - RNA, 19 nt, Artificial Sequence
  Description of Artificial Sequence: Synthetic oligonucleotide
agcaaccgcacagccaacg

SEQ ID NO: 854867 - RNA, 19 nt, Artificial Sequence
  Description of Artificial Sequence: Synthetic oligonucleotide
guggggaaauccuaaaccu

SEQ ID NO: 854868 - RNA, 19 nt, Artificial Sequence
  Description of Artificial Sequence: Synthetic oligonucleotide
agcuaggugcugccguuuc

SEQ ID NO: 854869 - RNA, 19 nt, Artificial Sequence
  Description of Artificial Sequence: Synthetic oligonucleotide
ugaacucagaaggcuuggc

SEQ ID NO: 854870 - RNA, 19 nt, Artificial Sequence
  Description of Artificial Sequence: Synthetic oligonucleotide
ucgaugugcucugggagug

SEQ ID NO: 854871 - RNA, 19 nt, Artificial Sequence
  Description of Artificial Sequence: Synthetic oligonucleotide
gccaacgcggauaacagag

SEQ ID NO: 854872 - RNA, 19 nt, Artificial Sequence
  Description of Artificial Sequence: Synthetic oligonucleotide
agcuaguugguggcaacuc

SEQ ID NO: 854873 - RNA, 19 nt, Artificial Sequence
  Description of Artificial Sequence: Synthetic oligonucleotide
aggaugucucccaugcguc

SEQ ID NO: 854874 - RNA, 19 nt, Artificial Sequence
  Description of Artificial Sequence: Synthetic oligonucleotide
ggaaauccuaaaccuuccc

SEQ ID NO: 854875 - RNA, 19 nt, Artificial Sequence
  Description of Artificial Sequence: Synthetic oligonucleotide
gugccgcaaaagccgaacg

SEQ ID NO: 854876 - RNA, 19 nt, Artificial Sequence
  Description of Artificial Sequence: Synthetic oligonucleotide
cucgugugcuccaucggug

SEQ ID NO: 854877 - RNA, 19 nt, Artificial Sequence
  Description of Artificial Sequence: Synthetic oligonucleotide
gauuaucacgacaaguuuu

SEQ ID NO: 854878 - RNA, 19 nt, Artificial Sequence
  Description of Artificial Sequence: Synthetic oligonucleotide
gaggccaucuacguuuuca

SEQ ID NO: 854879 - RNA, 19 nt, Artificial Sequence
  Description of Artificial Sequence: Synthetic oligonucleotide
cugaacucagaaggcuugg

SEQ ID NO: 854880 - RNA, 19 nt, Artificial Sequence
  Description of Artificial Sequence: Synthetic oligonucleotide
agaagcgcgcgcgcgggcc

SEQ ID NO: 854881 - RNA, 19 nt, Artificial Sequence
  Description of Artificial Sequence: Synthetic oligonucleotide
ggcuuggcaccucagauga

SEQ ID NO: 854882 - RNA, 19 nt, Artificial Sequence
  Description of Artificial Sequence: Synthetic oligonucleotide
ucgugugcuccaucggugu

SEQ ID NO: 854883 - RNA, 19 nt, Artificial Sequence
  Description of Artificial Sequence: Synthetic oligonucleotide
uuucgcacugccgccaggu

SEQ ID NO: 854884 - RNA, 19 nt, Artificial Sequence
  Description of Artificial Sequence: Synthetic oligonucleotide
aguguaucggugagauauc

SEQ ID NO: 854885 - RNA, 19 nt, Artificial Sequence
  Description of Artificial Sequence: Synthetic oligonucleotide
gcuaguugguggcaacucc

SEQ ID NO: 854886 - RNA, 19 nt, Artificial Sequence
  Description of Artificial Sequence: Synthetic oligonucleotide
cuauuuugcucuaguaagu

SEQ ID NO: 854887 - RNA, 19 nt, Artificial Sequence
  Description of Artificial Sequence: Synthetic oligonucleotide
ugugccgcaaaagccgaac

SEQ ID NO: 854888 - RNA, 19 nt, Artificial Sequence
  Description of Artificial Sequence: Synthetic oligonucleotide
aggagugacuggcaggauu

SEQ ID NO: 854889 - RNA, 19 nt, Artificial Sequence
  Description of Artificial Sequence: Synthetic oligonucleotide
augacgugaaagccgucaa

SEQ ID NO: 854890 - RNA, 19 nt, Artificial Sequence
  Description of Artificial Sequence: Synthetic oligonucleotide
ugggaugccuguucgcuua

SEQ ID NO: 854891 - RNA, 19 nt, Artificial Sequence
  Description of Artificial Sequence: Synthetic oligonucleotide
auccuaaaccuuccccagu

SEQ ID NO: 854892 - RNA, 19 nt, Artificial Sequence
  Description of Artificial Sequence: Synthetic oligonucleotide
cuacaaccacguucuuccc

SEQ ID NO: 854893 - RNA, 19 nt, Artificial Sequence
  Description of Artificial Sequence: Synthetic oligonucleotide
caugauuaucacgacaagu

SEQ ID NO: 854894 - RNA, 19 nt, Artificial Sequence
  Description of Artificial Sequence: Synthetic oligonucleotide
auccguucucagugugagg

SEQ ID NO: 854895 - RNA, 19 nt, Artificial Sequence
  Description of Artificial Sequence: Synthetic oligonucleotide
uuaucacgacaaguuuugu

SEQ ID NO: 854896 - RNA, 19 nt, Artificial Sequence
  Description of Artificial Sequence: Synthetic oligonucleotide
cauuagcauggccacuguc

SEQ ID NO: 854897 - RNA, 19 nt, Artificial Sequence
  Description of Artificial Sequence: Synthetic oligonucleotide
uguccgcaaggaucgugug

SEQ ID NO: 854898 - RNA, 19 nt, Artificial Sequence
  Description of Artificial Sequence: Synthetic oligonucleotide
ugugcuccaucggugugca

SEQ ID NO: 854899 - RNA, 19 nt, Artificial Sequence
  Description of Artificial Sequence: Synthetic oligonucleotide
caacucguauuggaauagc

SEQ ID NO: 854900 - RNA, 19 nt, Artificial Sequence
  Description of Artificial Sequence: Synthetic oligonucleotide
aaucugcccucaugauuau

SEQ ID NO: 854901 - RNA, 19 nt, Artificial Sequence
  Description of Artificial Sequence: Synthetic oligonucleotide
gacugguauggaguacagc

SEQ ID NO: 854902 - RNA, 19 nt, Artificial Sequence
  Description of Artificial Sequence: Synthetic oligonucleotide
guccgcaaggaucgugugc

SEQ ID NO: 854903 - RNA, 19 nt, Artificial Sequence
  Description of Artificial Sequence: Synthetic oligonucleotide
ggggaaauccuaaaccuuc

SEQ ID NO: 854904 - RNA, 19 nt, Artificial Sequence
  Description of Artificial Sequence: Synthetic oligonucleotide
cauucgcccuacguuaaug

SEQ ID NO: 854905 - RNA, 19 nt, Artificial Sequence
  Description of Artificial Sequence: Synthetic oligonucleotide
ccuaagguugggaugccug

SEQ ID NO: 854906 - RNA, 19 nt, Artificial Sequence
  Description of Artificial Sequence: Synthetic oligonucleotide
uguggccgcuuguugccug

SEQ ID NO: 854907 - RNA, 19 nt, Artificial Sequence
  Description of Artificial Sequence: Synthetic oligonucleotide
gaaguucagcauccguucu

SEQ ID NO: 854908 - RNA, 19 nt, Artificial Sequence
  Description of Artificial Sequence: Synthetic oligonucleotide
auaggccucaaagcuuaug

SEQ ID NO: 854909 - RNA, 19 nt, Artificial Sequence
  Description of Artificial Sequence: Synthetic oligonucleotide
auguccgcaaggaucgugu

SEQ ID NO: 854910 - RNA, 19 nt, Artificial Sequence
  Description of Artificial Sequence: Synthetic oligonucleotide
cucagacugguauggagua

SEQ ID NO: 854911 - RNA, 19 nt, Artificial Sequence
  Description of Artificial Sequence: Synthetic oligonucleotide
ggacaggagugauguaacc

SEQ ID NO: 854912 - RNA, 19 nt, Artificial Sequence
  Description of Artificial Sequence: Synthetic oligonucleotide
agccaacgcggauaacaga

SEQ ID NO: 854913 - RNA, 19 nt, Artificial Sequence
  Description of Artificial Sequence: Synthetic oligonucleotide
uucgcacugccgccaggug

SEQ ID NO: 854914 - RNA, 19 nt, Artificial Sequence
  Description of Artificial Sequence: Synthetic oligonucleotide
uccaagcacauucgcccua

SEQ ID NO: 854915 - RNA, 19 nt, Artificial Sequence
  Description of Artificial Sequence: Synthetic oligonucleotide
accuccaggccgcucgugu

SEQ ID NO: 854916 - RNA, 19 nt, Artificial Sequence
  Description of Artificial Sequence: Synthetic oligonucleotide
caacaggguacgugaaaga

SEQ ID NO: 854917 - RNA, 19 nt, Artificial Sequence
  Description of Artificial Sequence: Synthetic oligonucleotide
caucaacucguauuggaau

SEQ ID NO: 854918 - RNA, 19 nt, Artificial Sequence
  Description of Artificial Sequence: Synthetic oligonucleotide
cacacauccacccguugaa

SEQ ID NO: 854919 - RNA, 19 nt, Artificial Sequence
  Description of Artificial Sequence: Synthetic oligonucleotide
ugguggcaaguaaguuuca

SEQ ID NO: 854920 - RNA, 19 nt, Artificial Sequence
  Description of Artificial Sequence: Synthetic oligonucleotide
gccucucagacugguaugg

SEQ ID NO: 854921 - RNA, 19 nt, Artificial Sequence
  Description of Artificial Sequence: Synthetic oligonucleotide
uuccccuauuuugcucuag

SEQ ID NO: 854922 - RNA, 19 nt, Artificial Sequence
  Description of Artificial Sequence: Synthetic oligonucleotide
caagcacauucgcccuacg

SEQ ID NO: 854923 - RNA, 19 nt, Artificial Sequence
  Description of Artificial Sequence: Synthetic oligonucleotide
uaagguugggaugccuguu

SEQ ID NO: 854924 - RNA, 19 nt, Artificial Sequence
  Description of Artificial Sequence: Synthetic oligonucleotide
ugggaguguaucggugaga

SEQ ID NO: 854925 - RNA, 19 nt, Artificial Sequence
  Description of Artificial Sequence: Synthetic oligonucleotide
cuaagguugggaugccugu

SEQ ID NO: 854926 - RNA, 19 nt, Artificial Sequence
  Description of Artificial Sequence: Synthetic oligonucleotide
gaugagucaucaacucgua

SEQ ID NO: 854927 - RNA, 19 nt, Artificial Sequence
  Description of Artificial Sequence: Synthetic oligonucleotide
gcaauuggcauuccaacau

SEQ ID NO: 854928 - RNA, 19 nt, Artificial Sequence
  Description of Artificial Sequence: Synthetic oligonucleotide
cuugggaaaugagagccua

SEQ ID NO: 854929 - RNA, 19 nt, Artificial Sequence
  Description of Artificial Sequence: Synthetic oligonucleotide
uguaaccggcuuucuucuu

SEQ ID NO: 854930 - RNA, 19 nt, Artificial Sequence
  Description of Artificial Sequence: Synthetic oligonucleotide
gaugccuguucgcuuaauu

SEQ ID NO: 854931 - RNA, 19 nt, Artificial Sequence
  Description of Artificial Sequence: Synthetic oligonucleotide
ccuacguuaaugacgugaa

SEQ ID NO: 854932 - RNA, 19 nt, Artificial Sequence
  Description of Artificial Sequence: Synthetic oligonucleotide
ccgguagcauggaauacug

SEQ ID NO: 854933 - RNA, 19 nt, Artificial Sequence
  Description of Artificial Sequence: Synthetic oligonucleotide
gggaaaugagagccuaaaa

SEQ ID NO: 854934 - RNA, 19 nt, Artificial Sequence
  Description of Artificial Sequence: Synthetic oligonucleotide
gguugggaugccuguucgc

SEQ ID NO: 854935 - RNA, 19 nt, Artificial Sequence
  Description of Artificial Sequence: Synthetic oligonucleotide
gcgucaccaggucaguggc

SEQ ID NO: 854936 - RNA, 19 nt, Artificial Sequence
  Description of Artificial Sequence: Synthetic oligonucleotide
cagaaggguaacagcaagu

SEQ ID NO: 854937 - RNA, 19 nt, Artificial Sequence
  Description of Artificial Sequence: Synthetic oligonucleotide
ggggucgccgguagcaugg

SEQ ID NO: 854938 - RNA, 19 nt, Artificial Sequence
  Description of Artificial Sequence: Synthetic oligonucleotide
uggcccacuuugccucuca

SEQ ID NO: 854939 - RNA, 19 nt, Artificial Sequence
  Description of Artificial Sequence: Synthetic oligonucleotide
guugggaugccuguucgcu

SEQ ID NO: 854940 - RNA, 19 nt, Artificial Sequence
  Description of Artificial Sequence: Synthetic oligonucleotide
cacgcugcuuggacuucag

SEQ ID NO: 854941 - RNA, 19 nt, Artificial Sequence
  Description of Artificial Sequence: Synthetic oligonucleotide
gcaaccgcacagccaacgc

SEQ ID NO: 854942 - RNA, 19 nt, Artificial Sequence
  Description of Artificial Sequence: Synthetic oligonucleotide
cccguugaagcuuucaaua

SEQ ID NO: 854943 - RNA, 19 nt, Artificial Sequence
  Description of Artificial Sequence: Synthetic oligonucleotide
gggacaggagugauguaac

SEQ ID NO: 854944 - RNA, 19 nt, Artificial Sequence
  Description of Artificial Sequence: Synthetic oligonucleotide
uuguugccugaggccaccc

SEQ ID NO: 854945 - RNA, 19 nt, Artificial Sequence
  Description of Artificial Sequence: Synthetic oligonucleotide
ccgcucgugugcuccaucg

SEQ ID NO: 854946 - RNA, 19 nt, Artificial Sequence
  Description of Artificial Sequence: Synthetic oligonucleotide
gagaaacggcauugcagau

SEQ ID NO: 854947 - RNA, 19 nt, Artificial Sequence
  Description of Artificial Sequence: Synthetic oligonucleotide
cacccguugaagcuuucaa

SEQ ID NO: 854948 - RNA, 19 nt, Artificial Sequence
  Description of Artificial Sequence: Synthetic oligonucleotide
gguacgugaaagacacgca

SEQ ID NO: 854949 - RNA, 19 nt, Artificial Sequence
  Description of Artificial Sequence: Synthetic oligonucleotide
cuacguuaaugacgugaaa

SEQ ID NO: 854950 - RNA, 19 nt, Artificial Sequence
  Description of Artificial Sequence: Synthetic oligonucleotide
cacacgccccacggggucg

SEQ ID NO: 854951 - RNA, 19 nt, Artificial Sequence
  Description of Artificial Sequence: Synthetic oligonucleotide
augcgucaccaggucagug

SEQ ID NO: 854952 - RNA, 19 nt, Artificial Sequence
  Description of Artificial Sequence: Synthetic oligonucleotide
uccaggccgcucgugugcu

SEQ ID NO: 854953 - RNA, 19 nt, Artificial Sequence
  Description of Artificial Sequence: Synthetic oligonucleotide
ucccuaagguugggaugcc

SEQ ID NO: 854954 - RNA, 19 nt, Artificial Sequence
  Description of Artificial Sequence: Synthetic oligonucleotide
cguauuggaauagcacuug

SEQ ID NO: 854955 - RNA, 19 nt, Artificial Sequence
  Description of Artificial Sequence: Synthetic oligonucleotide
ugccggcagcugauauuac

SEQ ID NO: 854956 - RNA, 19 nt, Artificial Sequence
  Description of Artificial Sequence: Synthetic oligonucleotide
gaccugccggcuacaacca

SEQ ID NO: 854957 - RNA, 19 nt, Artificial Sequence
  Description of Artificial Sequence: Synthetic oligonucleotide
cccuacguuaaugacguga

SEQ ID NO: 854958 - RNA, 19 nt, Artificial Sequence
  Description of Artificial Sequence: Synthetic oligonucleotide
aggguacgugaaagacacg

SEQ ID NO: 854959 - RNA, 19 nt, Artificial Sequence
  Description of Artificial Sequence: Synthetic oligonucleotide
cgcaaaagccgaacgugac

SEQ ID NO: 854960 - RNA, 19 nt, Artificial Sequence
  Description of Artificial Sequence: Synthetic oligonucleotide
gccuguucgcuuaauuauc

SEQ ID NO: 854961 - RNA, 19 nt, Artificial Sequence
  Description of Artificial Sequence: Synthetic oligonucleotide
ggacagcuaggugcugccg

SEQ ID NO: 854962 - RNA, 19 nt, Artificial Sequence
  Description of Artificial Sequence: Synthetic oligonucleotide
cauggcccgcgccggugcc

SEQ ID NO: 854963 - RNA, 19 nt, Artificial Sequence
  Description of Artificial Sequence: Synthetic oligonucleotide
guccaagcacauucgcccu

SEQ ID NO: 854964 - RNA, 19 nt, Artificial Sequence
  Description of Artificial Sequence: Synthetic oligonucleotide
gaagcgcgcgcgcgggcca

SEQ ID NO: 854965 - RNA, 19 nt, Artificial Sequence
  Description of Artificial Sequence: Synthetic oligonucleotide
ccggagagaagcgcgcgcg

SEQ ID NO: 854966 - RNA, 19 nt, Artificial Sequence
  Description of Artificial Sequence: Synthetic oligonucleotide
ccggcuacaaccacguucu

SEQ ID NO: 854967 - RNA, 19 nt, Artificial Sequence
  Description of Artificial Sequence: Synthetic oligonucleotide
guuucacaauugucucgcu

SEQ ID NO: 854968 - RNA, 19 nt, Artificial Sequence
  Description of Artificial Sequence: Synthetic oligonucleotide
ccgcaaaagccgaacguga

SEQ ID NO: 854969 - RNA, 19 nt, Artificial Sequence
  Description of Artificial Sequence: Synthetic oligonucleotide
agccgccgugaguucuuug

SEQ ID NO: 854970 - RNA, 19 nt, Artificial Sequence
  Description of Artificial Sequence: Synthetic oligonucleotide
ggcaagcucacagaagggu

SEQ ID NO: 854971 - RNA, 19 nt, Artificial Sequence
  Description of Artificial Sequence: Synthetic oligonucleotide
cgcgccggagagaagcgcg

SEQ ID NO: 854972 - RNA, 19 nt, Artificial Sequence
  Description of Artificial Sequence: Synthetic oligonucleotide
uccacccguugaagcuuuc

SEQ ID NO: 854973 - RNA, 19 nt, Artificial Sequence
  Description of Artificial Sequence: Synthetic oligonucleotide
uccaaccaacuugggcuuu

SEQ ID NO: 854974 - RNA, 19 nt, Artificial Sequence
  Description of Artificial Sequence: Synthetic oligonucleotide
cacggggucgccgguagca

SEQ ID NO: 854975 - RNA, 19 nt, Artificial Sequence
  Description of Artificial Sequence: Synthetic oligonucleotide
gucauggggccgacacccc

SEQ ID NO: 854976 - RNA, 19 nt, Artificial Sequence
  Description of Artificial Sequence: Synthetic oligonucleotide
gggaguguaucggugagau

SEQ ID NO: 854977 - RNA, 19 nt, Artificial Sequence
  Description of Artificial Sequence: Synthetic oligonucleotide
cacguucuucccuaagguu

SEQ ID NO: 854978 - RNA, 19 nt, Artificial Sequence
  Description of Artificial Sequence: Synthetic oligonucleotide
ggcccacuuugccucucag

SEQ ID NO: 854979 - RNA, 19 nt, Artificial Sequence
  Description of Artificial Sequence: Synthetic oligonucleotide
cucagaaggcuuggcaccu

SEQ ID NO: 854980 - RNA, 19 nt, Artificial Sequence
  Description of Artificial Sequence: Synthetic oligonucleotide
uaggagugacuggcaggau

SEQ ID NO: 854981 - RNA, 19 nt, Artificial Sequence
  Description of Artificial Sequence: Synthetic oligonucleotide
gccggagagaagcgcgcgc

SEQ ID NO: 854982 - RNA, 19 nt, Artificial Sequence
  Description of Artificial Sequence: Synthetic oligonucleotide
ccaagcacauucgcccuac

SEQ ID NO: 854983 - RNA, 19 nt, Artificial Sequence
  Description of Artificial Sequence: Synthetic oligonucleotide
guggccgcuuguugccuga

SEQ ID NO: 854984 - RNA, 19 nt, Artificial Sequence
  Description of Artificial Sequence: Synthetic oligonucleotide
cagcaaccgcacagccaac

SEQ ID NO: 854985 - RNA, 19 nt, Artificial Sequence
  Description of Artificial Sequence: Synthetic oligonucleotide
gucgccgguagcauggaau

SEQ ID NO: 854986 - RNA, 19 nt, Artificial Sequence
  Description of Artificial Sequence: Synthetic oligonucleotide
gcucgugugcuccaucggu

SEQ ID NO: 854987 - RNA, 19 nt, Artificial Sequence
  Description of Artificial Sequence: Synthetic oligonucleotide
agccaacaggguacgugaa

SEQ ID NO: 854988 - RNA, 19 nt, Artificial Sequence
  Description of Artificial Sequence: Synthetic oligonucleotide
ggguaacagcaagugggga

SEQ ID NO: 854989 - RNA, 19 nt, Artificial Sequence
  Description of Artificial Sequence: Synthetic oligonucleotide
gugcccgcgccggagagaa

SEQ ID NO: 854990 - RNA, 19 nt, Artificial Sequence
  Description of Artificial Sequence: Synthetic oligonucleotide
cacugccgccagguggaag

SEQ ID NO: 854991 - RNA, 19 nt, Artificial Sequence
  Description of Artificial Sequence: Synthetic oligonucleotide
cgccgugaguucuuuggug

SEQ ID NO: 854992 - RNA, 19 nt, Artificial Sequence
  Description of Artificial Sequence: Synthetic oligonucleotide
ccaacgcggauaacagaga

SEQ ID NO: 854993 - RNA, 19 nt, Artificial Sequence
  Description of Artificial Sequence: Synthetic oligonucleotide
caaccacguucuucccuaa

SEQ ID NO: 854994 - RNA, 19 nt, Artificial Sequence
  Description of Artificial Sequence: Synthetic oligonucleotide
gccgaacgugacaaugaca

SEQ ID NO: 854995 - RNA, 19 nt, Artificial Sequence
  Description of Artificial Sequence: Synthetic oligonucleotide
accgcacagccaacgcgga

SEQ ID NO: 854996 - RNA, 19 nt, Artificial Sequence
  Description of Artificial Sequence: Synthetic oligonucleotide
auccacccguugaagcuuu

SEQ ID NO: 854997 - RNA, 19 nt, Artificial Sequence
  Description of Artificial Sequence: Synthetic oligonucleotide
acgccccacggggucgccg

SEQ ID NO: 854998 - RNA, 19 nt, Artificial Sequence
  Description of Artificial Sequence: Synthetic oligonucleotide
aggaggccaucuacguuuu

SEQ ID NO: 854999 - RNA, 19 nt, Artificial Sequence
  Description of Artificial Sequence: Synthetic oligonucleotide
ccgcacuucuugcuugauc

SEQ ID NO: 855000 - RNA, 19 nt, Artificial Sequence
  Description of Artificial Sequence: Synthetic oligonucleotide
caaggaggccaucuacguu

SEQ ID NO: 855001 - RNA, 19 nt, Artificial Sequence
  Description of Artificial Sequence: Synthetic oligonucleotide
cgcccuacguuaaugacgu

SEQ ID NO: 855002 - RNA, 19 nt, Artificial Sequence
  Description of Artificial Sequence: Synthetic oligonucleotide
cccacggggucgccgguag

SEQ ID NO: 855003 - RNA, 19 nt, Artificial Sequence
  Description of Artificial Sequence: Synthetic oligonucleotide
acggggucgccgguagcau

SEQ ID NO: 855004 - RNA, 19 nt, Artificial Sequence
  Description of Artificial Sequence: Synthetic oligonucleotide
augugccgcaaaagccgaa

SEQ ID NO: 855005 - RNA, 19 nt, Artificial Sequence
  Description of Artificial Sequence: Synthetic oligonucleotide
ggaguguaucggugagaua

SEQ ID NO: 855006 - RNA, 19 nt, Artificial Sequence
  Description of Artificial Sequence: Synthetic oligonucleotide
cgcucgugugcuccaucgg

SEQ ID NO: 855007 - RNA, 19 nt, Artificial Sequence
  Description of Artificial Sequence: Synthetic oligonucleotide
cacagccaacgcggauaac

SEQ ID NO: 855008 - RNA, 19 nt, Artificial Sequence
  Description of Artificial Sequence: Synthetic oligonucleotide
ccaaucugcccucaugauu

SEQ ID NO: 855009 - RNA, 19 nt, Artificial Sequence
  Description of Artificial Sequence: Synthetic oligonucleotide
gcgcggggcgcagcaaccg

SEQ ID NO: 855010 - RNA, 19 nt, Artificial Sequence
  Description of Artificial Sequence: Synthetic oligonucleotide
gcuaggugcugccguuucu

SEQ ID NO: 855011 - RNA, 19 nt, Artificial Sequence
  Description of Artificial Sequence: Synthetic oligonucleotide
cgaacgugacaaugacaca

SEQ ID NO: 855012 - RNA, 19 nt, Artificial Sequence
  Description of Artificial Sequence: Synthetic oligonucleotide
cgcaaggaucgugugcuuc

SEQ ID NO: 855013 - RNA, 19 nt, Artificial Sequence
  Description of Artificial Sequence: Synthetic oligonucleotide
ccacacgccccacgggguc

SEQ ID NO: 855014 - RNA, 19 nt, Artificial Sequence
  Description of Artificial Sequence: Synthetic oligonucleotide
cauccacccguugaagcuu

SEQ ID NO: 855015 - RNA, 19 nt, Artificial Sequence
  Description of Artificial Sequence: Synthetic oligonucleotide
ggaggccaucuacguuuuc

SEQ ID NO: 855016 - RNA, 19 nt, Artificial Sequence
  Description of Artificial Sequence: Synthetic oligonucleotide
caugcgucaccaggucagu

SEQ ID NO: 855017 - RNA, 19 nt, Artificial Sequence
  Description of Artificial Sequence: Synthetic oligonucleotide
ggucgccgguagcauggaa

SEQ ID NO: 855018 - RNA, 19 nt, Artificial Sequence
  Description of Artificial Sequence: Synthetic oligonucleotide
gccgcucgugugcuccauc

SEQ ID NO: 855019 - RNA, 19 nt, Artificial Sequence
  Description of Artificial Sequence: Synthetic oligonucleotide
gcccuacguuaaugacgug

SEQ ID NO: 855020 - RNA, 19 nt, Artificial Sequence
  Description of Artificial Sequence: Synthetic oligonucleotide
gcggggcgcagcaaccgca

SEQ ID NO: 855021 - RNA, 19 nt, Artificial Sequence
  Description of Artificial Sequence: Synthetic oligonucleotide
caaggaucgugugcuucuu

SEQ ID NO: 855022 - RNA, 19 nt, Artificial Sequence
  Description of Artificial Sequence: Synthetic oligonucleotide
cggggucgccgguagcaug

SEQ ID NO: 855023 - RNA, 19 nt, Artificial Sequence
  Description of Artificial Sequence: Synthetic oligonucleotide
ccucucagacugguaugga

SEQ ID NO: 855024 - RNA, 19 nt, Artificial Sequence
  Description of Artificial Sequence: Synthetic oligonucleotide
guguggccgcuuguugccu

SEQ ID NO: 855025 - RNA, 19 nt, Artificial Sequence
  Description of Artificial Sequence: Synthetic oligonucleotide
ccacccguugaagcuuuca

SEQ ID NO: 855026 - RNA, 19 nt, Artificial Sequence
  Description of Artificial Sequence: Synthetic oligonucleotide
ccacggggucgccgguagc

SEQ ID NO: 855027 - RNA, 19 nt, Artificial Sequence
  Description of Artificial Sequence: Synthetic oligonucleotide
cgcggggcgcagcaaccgc

SEQ ID NO: 855028 - RNA, 19 nt, Artificial Sequence
  Description of Artificial Sequence: Synthetic oligonucleotide
ccgcgccggagagaagcgc

SEQ ID NO: 855029 - RNA, 19 nt, Artificial Sequence
  Description of Artificial Sequence: Synthetic oligonucleotide
cacgccccacggggucgcc

SEQ ID NO: 855030 - RNA, 19 nt, Artificial Sequence
  Description of Artificial Sequence: Synthetic oligonucleotide
cccaaucugcccucaugau

SEQ ID NO: 855031 - RNA, 19 nt, Artificial Sequence
  Description of Artificial Sequence: Synthetic oligonucleotide
caauguccgcaaggaucgu

SEQ ID NO: 855032 - RNA, 19 nt, Artificial Sequence
  Description of Artificial Sequence: Synthetic oligonucleotide
ccgccgugaguucuuuggu

SEQ ID NO: 855033 - RNA, 19 nt, Artificial Sequence
  Description of Artificial Sequence: Synthetic oligonucleotide
gggucgccgguagcaugga

SEQ ID NO: 855034 - RNA, 19 nt, Artificial Sequence
  Description of Artificial Sequence: Synthetic oligonucleotide
ggaugccuguucgcuuaau

SEQ ID NO: 855035 - RNA, 19 nt, Artificial Sequence
  Description of Artificial Sequence: Synthetic oligonucleotide
ggacacugaugggcacccu

SEQ ID NO: 855036 - RNA, 19 nt, Artificial Sequence
  Description of Artificial Sequence: Synthetic oligonucleotide
cccuaagguugggaugccu

SEQ ID NO: 855037 - RNA, 19 nt, Artificial Sequence
  Description of Artificial Sequence: Synthetic oligonucleotide
cgcggauaacagagaggau

SEQ ID NO: 855038 - RNA, 19 nt, Artificial Sequence
  Description of Artificial Sequence: Synthetic oligonucleotide
cagccgccgugaguucuuu

SEQ ID NO: 855039 - RNA, 19 nt, Artificial Sequence
  Description of Artificial Sequence: Synthetic oligonucleotide
ccgcacagccaacgcggau

SEQ ID NO: 855040 - RNA, 19 nt, Artificial Sequence
  Description of Artificial Sequence: Synthetic oligonucleotide
ccgcaaggaucgugugcuu

SEQ ID NO: 855041 - RNA, 19 nt, Artificial Sequence
  Description of Artificial Sequence: Synthetic oligonucleotide
uuuucuuacuuucaagggg

SEQ ID NO: 855042 - RNA, 19 nt, Artificial Sequence
  Description of Artificial Sequence: Synthetic oligonucleotide
uacagauagacaaugagcu

SEQ ID NO: 855043 - RNA, 19 nt, Artificial Sequence
  Description of Artificial Sequence: Synthetic oligonucleotide
aagugugccauccucagag

SEQ ID NO: 855044 - RNA, 19 nt, Artificial Sequence
  Description of Artificial Sequence: Synthetic oligonucleotide
aaagccagaccccacacag

SEQ ID NO: 855045 - RNA, 19 nt, Artificial Sequence
  Description of Artificial Sequence: Synthetic oligonucleotide
auacagauagacaaugagc

SEQ ID NO: 855046 - RNA, 19 nt, Artificial Sequence
  Description of Artificial Sequence: Synthetic oligonucleotide
uaaacuuaggguuccaugu

SEQ ID NO: 855047 - RNA, 19 nt, Artificial Sequence
  Description of Artificial Sequence: Synthetic oligonucleotide
gacucugagacucucgagg

SEQ ID NO: 855048 - RNA, 19 nt, Artificial Sequence
  Description of Artificial Sequence: Synthetic oligonucleotide
ugucuaggcuccauaagcg

SEQ ID NO: 855049 - RNA, 19 nt, Artificial Sequence
  Description of Artificial Sequence: Synthetic oligonucleotide
acccaaauaauaaagagug

SEQ ID NO: 855050 - RNA, 19 nt, Artificial Sequence
  Description of Artificial Sequence: Synthetic oligonucleotide
uugucuaggcuccauaagc

SEQ ID NO: 855051 - RNA, 19 nt, Artificial Sequence
  Description of Artificial Sequence: Synthetic oligonucleotide
ucacacagugauaacgcgg

SEQ ID NO: 855052 - RNA, 19 nt, Artificial Sequence
  Description of Artificial Sequence: Synthetic oligonucleotide
aaagggauggggcuuauaa

SEQ ID NO: 855053 - RNA, 19 nt, Artificial Sequence
  Description of Artificial Sequence: Synthetic oligonucleotide
aaacuuaggguuccauguc

SEQ ID NO: 855054 - RNA, 19 nt, Artificial Sequence
  Description of Artificial Sequence: Synthetic oligonucleotide
augaaagaggccgagacuc

SEQ ID NO: 855055 - RNA, 19 nt, Artificial Sequence
  Description of Artificial Sequence: Synthetic oligonucleotide
cuuauaaacaggaaccuga

SEQ ID NO: 855056 - RNA, 19 nt, Artificial Sequence
  Description of Artificial Sequence: Synthetic oligonucleotide
aacgaaaggaggccacgac

SEQ ID NO: 855057 - RNA, 19 nt, Artificial Sequence
  Description of Artificial Sequence: Synthetic oligonucleotide
agcacuguaacaguacucg

SEQ ID NO: 855058 - RNA, 19 nt, Artificial Sequence
  Description of Artificial Sequence: Synthetic oligonucleotide
ucauaaagaacagugucac

SEQ ID NO: 855059 - RNA, 19 nt, Artificial Sequence
  Description of Artificial Sequence: Synthetic oligonucleotide
cacacagugauaacgcggg

SEQ ID NO: 855060 - RNA, 19 nt, Artificial Sequence
  Description of Artificial Sequence: Synthetic oligonucleotide
gaucauacgaagaccuugg

SEQ ID NO: 855061 - RNA, 19 nt, Artificial Sequence
  Description of Artificial Sequence: Synthetic oligonucleotide
ugggaucauacgaagaccu

SEQ ID NO: 855062 - RNA, 19 nt, Artificial Sequence
  Description of Artificial Sequence: Synthetic oligonucleotide
acuguaacaguacucgcug

SEQ ID NO: 855063 - RNA, 19 nt, Artificial Sequence
  Description of Artificial Sequence: Synthetic oligonucleotide
cagauagacaaugagcuag

SEQ ID NO: 855064 - RNA, 19 nt, Artificial Sequence
  Description of Artificial Sequence: Synthetic oligonucleotide
aaucggaugccccugucgu

SEQ ID NO: 855065 - RNA, 19 nt, Artificial Sequence
  Description of Artificial Sequence: Synthetic oligonucleotide
uaaauagaggcggagugug

SEQ ID NO: 855066 - RNA, 19 nt, Artificial Sequence
  Description of Artificial Sequence: Synthetic oligonucleotide
acucugagacucucgaggg

SEQ ID NO: 855067 - RNA, 19 nt, Artificial Sequence
  Description of Artificial Sequence: Synthetic oligonucleotide
aaugcgaacggugccauca

SEQ ID NO: 855068 - RNA, 19 nt, Artificial Sequence
  Description of Artificial Sequence: Synthetic oligonucleotide
guaaacuuaggguuccaug

SEQ ID NO: 855069 - RNA, 19 nt, Artificial Sequence
  Description of Artificial Sequence: Synthetic oligonucleotide
ucuaggcuccauaagcgca

SEQ ID NO: 855070 - RNA, 19 nt, Artificial Sequence
  Description of Artificial Sequence: Synthetic oligonucleotide
uuaccuguccgauugucca

SEQ ID NO: 855071 - RNA, 19 nt, Artificial Sequence
  Description of Artificial Sequence: Synthetic oligonucleotide
ucaagggguuuauugagac

SEQ ID NO: 855072 - RNA, 19 nt, Artificial Sequence
  Description of Artificial Sequence: Synthetic oligonucleotide
cuaugcccaacucuggagg

SEQ ID NO: 855073 - RNA, 19 nt, Artificial Sequence
  Description of Artificial Sequence: Synthetic oligonucleotide
guuggcgccaugaaaaucc

SEQ ID NO: 855074 - RNA, 19 nt, Artificial Sequence
  Description of Artificial Sequence: Synthetic oligonucleotide
auaagcgcagagaacaguc

SEQ ID NO: 855075 - RNA, 19 nt, Artificial Sequence
  Description of Artificial Sequence: Synthetic oligonucleotide
ugacucaccaccugguuga

SEQ ID NO: 855076 - RNA, 19 nt, Artificial Sequence
  Description of Artificial Sequence: Synthetic oligonucleotide
acagugauaacgcggggug

SEQ ID NO: 855077 - RNA, 19 nt, Artificial Sequence
  Description of Artificial Sequence: Synthetic oligonucleotide
aucacacagugauaacgcg

SEQ ID NO: 855078 - RNA, 19 nt, Artificial Sequence
  Description of Artificial Sequence: Synthetic oligonucleotide
gaaucggaugccccugucg

SEQ ID NO: 855079 - RNA, 19 nt, Artificial Sequence
  Description of Artificial Sequence: Synthetic oligonucleotide
aagagggccacaggagacc

SEQ ID NO: 855080 - RNA, 19 nt, Artificial Sequence
  Description of Artificial Sequence: Synthetic oligonucleotide
uccaggacgugacucagca

SEQ ID NO: 855081 - RNA, 19 nt, Artificial Sequence
  Description of Artificial Sequence: Synthetic oligonucleotide
uccaggugggcaaccauag

SEQ ID NO: 855082 - RNA, 19 nt, Artificial Sequence
  Description of Artificial Sequence: Synthetic oligonucleotide
ggauuuaccuguccgauug

SEQ ID NO: 855083 - RNA, 19 nt, Artificial Sequence
  Description of Artificial Sequence: Synthetic oligonucleotide
auugucuaggcuccauaag

SEQ ID NO: 855084 - RNA, 19 nt, Artificial Sequence
  Description of Artificial Sequence: Synthetic oligonucleotide
aaccauagagugcacggau

SEQ ID NO: 855085 - RNA, 19 nt, Artificial Sequence
  Description of Artificial Sequence: Synthetic oligonucleotide
acuaucacacagugauaac

SEQ ID NO: 855086 - RNA, 19 nt, Artificial Sequence
  Description of Artificial Sequence: Synthetic oligonucleotide
aauagaggcggagugugga

SEQ ID NO: 855087 - RNA, 19 nt, Artificial Sequence
  Description of Artificial Sequence: Synthetic oligonucleotide
cacgacaugggcaggcucg

SEQ ID NO: 855088 - RNA, 19 nt, Artificial Sequence
  Description of Artificial Sequence: Synthetic oligonucleotide
uggggcaugagcagaaagu

SEQ ID NO: 855089 - RNA, 19 nt, Artificial Sequence
  Description of Artificial Sequence: Synthetic oligonucleotide
auacgaagaccuuggcuag

SEQ ID NO: 855090 - RNA, 19 nt, Artificial Sequence
  Description of Artificial Sequence: Synthetic oligonucleotide
aagucauaaagaacagugu

SEQ ID NO: 855091 - RNA, 19 nt, Artificial Sequence
  Description of Artificial Sequence: Synthetic oligonucleotide
ugccaucguagugugagcg

SEQ ID NO: 855092 - RNA, 19 nt, Artificial Sequence
  Description of Artificial Sequence: Synthetic oligonucleotide
aagaggccgagacucugag

SEQ ID NO: 855093 - RNA, 19 nt, Artificial Sequence
  Description of Artificial Sequence: Synthetic oligonucleotide
ugggucguagccaucguac

SEQ ID NO: 855094 - RNA, 19 nt, Artificial Sequence
  Description of Artificial Sequence: Synthetic oligonucleotide
ugaaaaucccauucauuua

SEQ ID NO: 855095 - RNA, 19 nt, Artificial Sequence
  Description of Artificial Sequence: Synthetic oligonucleotide
cagaggccauccuugaggg

SEQ ID NO: 855096 - RNA, 19 nt, Artificial Sequence
  Description of Artificial Sequence: Synthetic oligonucleotide
ugauuggggugacucacca

SEQ ID NO: 855097 - RNA, 19 nt, Artificial Sequence
  Description of Artificial Sequence: Synthetic oligonucleotide
cuguaucaggacuuagggc

SEQ ID NO: 855098 - RNA, 19 nt, Artificial Sequence
  Description of Artificial Sequence: Synthetic oligonucleotide
gacuaucacacagugauaa

SEQ ID NO: 855099 - RNA, 19 nt, Artificial Sequence
  Description of Artificial Sequence: Synthetic oligonucleotide
ucgucgugcgcugugaugc

SEQ ID NO: 855100 - RNA, 19 nt, Artificial Sequence
  Description of Artificial Sequence: Synthetic oligonucleotide
gcaaccauagagugcacgg

SEQ ID NO: 855101 - RNA, 19 nt, Artificial Sequence
  Description of Artificial Sequence: Synthetic oligonucleotide
ugugagcgcggaaagcaug

SEQ ID NO: 855102 - RNA, 19 nt, Artificial Sequence
  Description of Artificial Sequence: Synthetic oligonucleotide
ucguagugugagcggaggg

SEQ ID NO: 855103 - RNA, 19 nt, Artificial Sequence
  Description of Artificial Sequence: Synthetic oligonucleotide
aggguaaacuuaggguucc

SEQ ID NO: 855104 - RNA, 19 nt, Artificial Sequence
  Description of Artificial Sequence: Synthetic oligonucleotide
gauagacaaugagcuaggg

SEQ ID NO: 855105 - RNA, 19 nt, Artificial Sequence
  Description of Artificial Sequence: Synthetic oligonucleotide
auaagugccuugcugggau

SEQ ID NO: 855106 - RNA, 19 nt, Artificial Sequence
  Description of Artificial Sequence: Synthetic oligonucleotide
uuggcuagagcaucagcac

SEQ ID NO: 855107 - RNA, 19 nt, Artificial Sequence
  Description of Artificial Sequence: Synthetic oligonucleotide
gaagaugaaagaggccgag

SEQ ID NO: 855108 - RNA, 19 nt, Artificial Sequence
  Description of Artificial Sequence: Synthetic oligonucleotide
acagcuuaagugugccauc

SEQ ID NO: 855109 - RNA, 19 nt, Artificial Sequence
  Description of Artificial Sequence: Synthetic oligonucleotide
ggaaagggccauuagcacc

SEQ ID NO: 855110 - RNA, 19 nt, Artificial Sequence
  Description of Artificial Sequence: Synthetic oligonucleotide
aaauagaggcggagugugg

SEQ ID NO: 855111 - RNA, 19 nt, Artificial Sequence
  Description of Artificial Sequence: Synthetic oligonucleotide
agacucucgagggaggccg

SEQ ID NO: 855112 - RNA, 19 nt, Artificial Sequence
  Description of Artificial Sequence: Synthetic oligonucleotide
ucggaugccccugucgucg

SEQ ID NO: 855113 - RNA, 19 nt, Artificial Sequence
  Description of Artificial Sequence: Synthetic oligonucleotide
uugguuaguguuggaaagc

SEQ ID NO: 855114 - RNA, 19 nt, Artificial Sequence
  Description of Artificial Sequence: Synthetic oligonucleotide
gucauaaagaacaguguca

SEQ ID NO: 855115 - RNA, 19 nt, Artificial Sequence
  Description of Artificial Sequence: Synthetic oligonucleotide
agcgcggaaagcaugaaug

SEQ ID NO: 855116 - RNA, 19 nt, Artificial Sequence
  Description of Artificial Sequence: Synthetic oligonucleotide
cuggcaauaagugccuugc

SEQ ID NO: 855117 - RNA, 19 nt, Artificial Sequence
  Description of Artificial Sequence: Synthetic oligonucleotide
aagggauggggcuuauaaa

SEQ ID NO: 855118 - RNA, 19 nt, Artificial Sequence
  Description of Artificial Sequence: Synthetic oligonucleotide
ugagcggaggguaaacuua

SEQ ID NO: 855119 - RNA, 19 nt, Artificial Sequence
  Description of Artificial Sequence: Synthetic oligonucleotide
agauagacaaugagcuagg

SEQ ID NO: 855120 - RNA, 19 nt, Artificial Sequence
  Description of Artificial Sequence: Synthetic oligonucleotide
ugguuaguguuggaaagca

SEQ ID NO: 855121 - RNA, 19 nt, Artificial Sequence
  Description of Artificial Sequence: Synthetic oligonucleotide
ugcacacacgucuuauugu

SEQ ID NO: 855122 - RNA, 19 nt, Artificial Sequence
  Description of Artificial Sequence: Synthetic oligonucleotide
guaacugcguccagguggg

SEQ ID NO: 855123 - RNA, 19 nt, Artificial Sequence
  Description of Artificial Sequence: Synthetic oligonucleotide
uccaggaaucggaugcccc

SEQ ID NO: 855124 - RNA, 19 nt, Artificial Sequence
  Description of Artificial Sequence: Synthetic oligonucleotide
uuauugucuaggcuccaua

SEQ ID NO: 855125 - RNA, 19 nt, Artificial Sequence
  Description of Artificial Sequence: Synthetic oligonucleotide
ucguacggguccauguuga

SEQ ID NO: 855126 - RNA, 19 nt, Artificial Sequence
  Description of Artificial Sequence: Synthetic oligonucleotide
ugguugaucuguguugggc

SEQ ID NO: 855127 - RNA, 19 nt, Artificial Sequence
  Description of Artificial Sequence: Synthetic oligonucleotide
ucuagagcggagccuggca

SEQ ID NO: 855128 - RNA, 19 nt, Artificial Sequence
  Description of Artificial Sequence: Synthetic oligonucleotide
uccgauuguccaggaaucg

SEQ ID NO: 855129 - RNA, 19 nt, Artificial Sequence
  Description of Artificial Sequence: Synthetic oligonucleotide
aacggugccaucagcggag

SEQ ID NO: 855130 - RNA, 19 nt, Artificial Sequence
  Description of Artificial Sequence: Synthetic oligonucleotide
acuggcaauaagugccuug

SEQ ID NO: 855131 - RNA, 19 nt, Artificial Sequence
  Description of Artificial Sequence: Synthetic oligonucleotide
uaugcccaacucuggagga

SEQ ID NO: 855132 - RNA, 19 nt, Artificial Sequence
  Description of Artificial Sequence: Synthetic oligonucleotide
aaaugcgaacggugccauc

SEQ ID NO: 855133 - RNA, 19 nt, Artificial Sequence
  Description of Artificial Sequence: Synthetic oligonucleotide
gucguagccaucguacggg

SEQ ID NO: 855134 - RNA, 19 nt, Artificial Sequence
  Description of Artificial Sequence: Synthetic oligonucleotide
ggcaauaagugccuugcug

SEQ ID NO: 855135 - RNA, 19 nt, Artificial Sequence
  Description of Artificial Sequence: Synthetic oligonucleotide
gacaugggcaggcucggug

SEQ ID NO: 855136 - RNA, 19 nt, Artificial Sequence
  Description of Artificial Sequence: Synthetic oligonucleotide
gaugcuagucgcugggaga

SEQ ID NO: 855137 - RNA, 19 nt, Artificial Sequence
  Description of Artificial Sequence: Synthetic oligonucleotide
gugacucaccaccugguug

SEQ ID NO: 855138 - RNA, 19 nt, Artificial Sequence
  Description of Artificial Sequence: Synthetic oligonucleotide
gucuuauugucuaggcucc

SEQ ID NO: 855139 - RNA, 19 nt, Artificial Sequence
  Description of Artificial Sequence: Synthetic oligonucleotide
cagcuaggcagguaacugc

SEQ ID NO: 855140 - RNA, 19 nt, Artificial Sequence
  Description of Artificial Sequence: Synthetic oligonucleotide
aucguacggguccauguug

SEQ ID NO: 855141 - RNA, 19 nt, Artificial Sequence
  Description of Artificial Sequence: Synthetic oligonucleotide
agcuaggcagguaacugcg

SEQ ID NO: 855142 - RNA, 19 nt, Artificial Sequence
  Description of Artificial Sequence: Synthetic oligonucleotide
agaacgaaaggaggccacg

SEQ ID NO: 855143 - RNA, 19 nt, Artificial Sequence
  Description of Artificial Sequence: Synthetic oligonucleotide
auagaggcggaguguggag

SEQ ID NO: 855144 - RNA, 19 nt, Artificial Sequence
  Description of Artificial Sequence: Synthetic oligonucleotide
acgucuuauugucuaggcu

SEQ ID NO: 855145 - RNA, 19 nt, Artificial Sequence
  Description of Artificial Sequence: Synthetic oligonucleotide
ucccucgggacuccaaugu

SEQ ID NO: 855146 - RNA, 19 nt, Artificial Sequence
  Description of Artificial Sequence: Synthetic oligonucleotide
agucgcugggagauggggc

SEQ ID NO: 855147 - RNA, 19 nt, Artificial Sequence
  Description of Artificial Sequence: Synthetic oligonucleotide
augccaucguagugugagc

SEQ ID NO: 855148 - RNA, 19 nt, Artificial Sequence
  Description of Artificial Sequence: Synthetic oligonucleotide
ggauacggccaucagcucc

SEQ ID NO: 855149 - RNA, 19 nt, Artificial Sequence
  Description of Artificial Sequence: Synthetic oligonucleotide
agcacgcuugggucguagc

SEQ ID NO: 855150 - RNA, 19 nt, Artificial Sequence
  Description of Artificial Sequence: Synthetic oligonucleotide
acagcuaggcagguaacug

SEQ ID NO: 855151 - RNA, 19 nt, Artificial Sequence
  Description of Artificial Sequence: Synthetic oligonucleotide
cuagagcggagccuggcac

SEQ ID NO: 855152 - RNA, 19 nt, Artificial Sequence
  Description of Artificial Sequence: Synthetic oligonucleotide
cagcggagcaggaugcuag

SEQ ID NO: 855153 - RNA, 19 nt, Artificial Sequence
  Description of Artificial Sequence: Synthetic oligonucleotide
gagcggaggguaaacuuag

SEQ ID NO: 855154 - RNA, 19 nt, Artificial Sequence
  Description of Artificial Sequence: Synthetic oligonucleotide
uagagcggagccuggcacc

SEQ ID NO: 855155 - RNA, 19 nt, Artificial Sequence
  Description of Artificial Sequence: Synthetic oligonucleotide
aggagaccccucucagcgc

SEQ ID NO: 855156 - RNA, 19 nt, Artificial Sequence
  Description of Artificial Sequence: Synthetic oligonucleotide
ggagcaggaugcuagucgc

SEQ ID NO: 855157 - RNA, 19 nt, Artificial Sequence
  Description of Artificial Sequence: Synthetic oligonucleotide
uccucgugcuucuugcggu

SEQ ID NO: 855158 - RNA, 19 nt, Artificial Sequence
  Description of Artificial Sequence: Synthetic oligonucleotide
aucguagugugagcggagg

SEQ ID NO: 855159 - RNA, 19 nt, Artificial Sequence
  Description of Artificial Sequence: Synthetic oligonucleotide
cuaggcagguaacugcguc

SEQ ID NO: 855160 - RNA, 19 nt, Artificial Sequence
  Description of Artificial Sequence: Synthetic oligonucleotide
gcggaggguaaacuuaggg

SEQ ID NO: 855161 - RNA, 19 nt, Artificial Sequence
  Description of Artificial Sequence: Synthetic oligonucleotide
cagauccccaaggacaccc

SEQ ID NO: 855162 - RNA, 19 nt, Artificial Sequence
  Description of Artificial Sequence: Synthetic oligonucleotide
ggucguagccaucguacgg

SEQ ID NO: 855163 - RNA, 19 nt, Artificial Sequence
  Description of Artificial Sequence: Synthetic oligonucleotide
cugauuggggugacucacc

SEQ ID NO: 855164 - RNA, 19 nt, Artificial Sequence
  Description of Artificial Sequence: Synthetic oligonucleotide
cgucuuauugucuaggcuc

SEQ ID NO: 855165 - RNA, 19 nt, Artificial Sequence
  Description of Artificial Sequence: Synthetic oligonucleotide
ggaucauacgaagaccuug

SEQ ID NO: 855166 - RNA, 19 nt, Artificial Sequence
  Description of Artificial Sequence: Synthetic oligonucleotide
acacacgucuuauugucua

SEQ ID NO: 855167 - RNA, 19 nt, Artificial Sequence
  Description of Artificial Sequence: Synthetic oligonucleotide
gcacggauuuaccuguccg

SEQ ID NO: 855168 - RNA, 19 nt, Artificial Sequence
  Description of Artificial Sequence: Synthetic oligonucleotide
gaacggugccaucagcgga

SEQ ID NO: 855169 - RNA, 19 nt, Artificial Sequence
  Description of Artificial Sequence: Synthetic oligonucleotide
gaugaaagaggccgagacu

SEQ ID NO: 855170 - RNA, 19 nt, Artificial Sequence
  Description of Artificial Sequence: Synthetic oligonucleotide
aggacgugacucagcacgc

SEQ ID NO: 855171 - RNA, 19 nt, Artificial Sequence
  Description of Artificial Sequence: Synthetic oligonucleotide
ugacgggugagggaggggu

SEQ ID NO: 855172 - RNA, 19 nt, Artificial Sequence
  Description of Artificial Sequence: Synthetic oligonucleotide
acagauagacaaugagcua

SEQ ID NO: 855173 - RNA, 19 nt, Artificial Sequence
  Description of Artificial Sequence: Synthetic oligonucleotide
gauacggccaucagcucca

SEQ ID NO: 855174 - RNA, 19 nt, Artificial Sequence
  Description of Artificial Sequence: Synthetic oligonucleotide
gcgcagagaacagucaugg

SEQ ID NO: 855175 - RNA, 19 nt, Artificial Sequence
  Description of Artificial Sequence: Synthetic oligonucleotide
cuuaggguuccaugucuuc

SEQ ID NO: 855176 - RNA, 19 nt, Artificial Sequence
  Description of Artificial Sequence: Synthetic oligonucleotide
ggauccacagcuaggcagg

SEQ ID NO: 855177 - RNA, 19 nt, Artificial Sequence
  Description of Artificial Sequence: Synthetic oligonucleotide
auggugacggccagcacag

SEQ ID NO: 855178 - RNA, 19 nt, Artificial Sequence
  Description of Artificial Sequence: Synthetic oligonucleotide
guaacugccuucugaaggu

SEQ ID NO: 855179 - RNA, 19 nt, Artificial Sequence
  Description of Artificial Sequence: Synthetic oligonucleotide
gugggaucauacgaagacc

SEQ ID NO: 855180 - RNA, 19 nt, Artificial Sequence
  Description of Artificial Sequence: Synthetic oligonucleotide
ugugagcggaggguaaacu

SEQ ID NO: 855181 - RNA, 19 nt, Artificial Sequence
  Description of Artificial Sequence: Synthetic oligonucleotide
aacugcguccaggugggca

SEQ ID NO: 855182 - RNA, 19 nt, Artificial Sequence
  Description of Artificial Sequence: Synthetic oligonucleotide
guacggguccauguugagg

SEQ ID NO: 855183 - RNA, 19 nt, Artificial Sequence
  Description of Artificial Sequence: Synthetic oligonucleotide
ugcgaacggugccaucagc

SEQ ID NO: 855184 - RNA, 19 nt, Artificial Sequence
  Description of Artificial Sequence: Synthetic oligonucleotide
agcggaugccaucguagug

SEQ ID NO: 855185 - RNA, 19 nt, Artificial Sequence
  Description of Artificial Sequence: Synthetic oligonucleotide
ggaugcuagucgcugggag

SEQ ID NO: 855186 - RNA, 19 nt, Artificial Sequence
  Description of Artificial Sequence: Synthetic oligonucleotide
caucguagugugagcggag

SEQ ID NO: 855187 - RNA, 19 nt, Artificial Sequence
  Description of Artificial Sequence: Synthetic oligonucleotide
aggguuccaugucuucuug

SEQ ID NO: 855188 - RNA, 19 nt, Artificial Sequence
  Description of Artificial Sequence: Synthetic oligonucleotide
cacacagcauccccauggc

SEQ ID NO: 855189 - RNA, 19 nt, Artificial Sequence
  Description of Artificial Sequence: Synthetic oligonucleotide
acugcguccaggugggcaa

SEQ ID NO: 855190 - RNA, 19 nt, Artificial Sequence
  Description of Artificial Sequence: Synthetic oligonucleotide
cucgaagccucggugcgcg

SEQ ID NO: 855191 - RNA, 19 nt, Artificial Sequence
  Description of Artificial Sequence: Synthetic oligonucleotide
ggggugacucaccaccugg

SEQ ID NO: 855192 - RNA, 19 nt, Artificial Sequence
  Description of Artificial Sequence: Synthetic oligonucleotide
ugggauccacagcuaggca

SEQ ID NO: 855193 - RNA, 19 nt, Artificial Sequence
  Description of Artificial Sequence: Synthetic oligonucleotide
gcuaugcccaacucuggag

SEQ ID NO: 855194 - RNA, 19 nt, Artificial Sequence
  Description of Artificial Sequence: Synthetic oligonucleotide
agagcggagccuggcaccg

SEQ ID NO: 855195 - RNA, 19 nt, Artificial Sequence
  Description of Artificial Sequence: Synthetic oligonucleotide
uaagugccuugcugggaug

SEQ ID NO: 855196 - RNA, 19 nt, Artificial Sequence
  Description of Artificial Sequence: Synthetic oligonucleotide
gcuagucgcugggagaugg

SEQ ID NO: 855197 - RNA, 19 nt, Artificial Sequence
  Description of Artificial Sequence: Synthetic oligonucleotide
gaagccucggugcgcgcgc

SEQ ID NO: 855198 - RNA, 19 nt, Artificial Sequence
  Description of Artificial Sequence: Synthetic oligonucleotide
gcgcggaaagcaugaaugg

SEQ ID NO: 855199 - RNA, 19 nt, Artificial Sequence
  Description of Artificial Sequence: Synthetic oligonucleotide
cuagucgcugggagauggg

SEQ ID NO: 855200 - RNA, 19 nt, Artificial Sequence
  Description of Artificial Sequence: Synthetic oligonucleotide
uugggucguagccaucgua

SEQ ID NO: 855201 - RNA, 19 nt, Artificial Sequence
  Description of Artificial Sequence: Synthetic oligonucleotide
gaggucccagaggacagcc

SEQ ID NO: 855202 - RNA, 19 nt, Artificial Sequence
  Description of Artificial Sequence: Synthetic oligonucleotide
accgucuacugucuuggaa

SEQ ID NO: 855203 - RNA, 19 nt, Artificial Sequence
  Description of Artificial Sequence: Synthetic oligonucleotide
gcuugggucguagccaucg

SEQ ID NO: 855204 - RNA, 19 nt, Artificial Sequence
  Description of Artificial Sequence: Synthetic oligonucleotide
gaugccccugucgucgugc

SEQ ID NO: 855205 - RNA, 19 nt, Artificial Sequence
  Description of Artificial Sequence: Synthetic oligonucleotide
gaacgaaaggaggccacga

SEQ ID NO: 855206 - RNA, 19 nt, Artificial Sequence
  Description of Artificial Sequence: Synthetic oligonucleotide
gcgaacggugccaucagcg

SEQ ID NO: 855207 - RNA, 19 nt, Artificial Sequence
  Description of Artificial Sequence: Synthetic oligonucleotide
ucuuacuuucaagggguuu

SEQ ID NO: 855208 - RNA, 19 nt, Artificial Sequence
  Description of Artificial Sequence: Synthetic oligonucleotide
cucagcgcagcccuucauc

SEQ ID NO: 855209 - RNA, 19 nt, Artificial Sequence
  Description of Artificial Sequence: Synthetic oligonucleotide
uucuuacuuucaagggguu

SEQ ID NO: 855210 - RNA, 19 nt, Artificial Sequence
  Description of Artificial Sequence: Synthetic oligonucleotide
augcgaacggugccaucag

SEQ ID NO: 855211 - RNA, 19 nt, Artificial Sequence
  Description of Artificial Sequence: Synthetic oligonucleotide
cuagagcaucagcaccagc

SEQ ID NO: 855212 - RNA, 19 nt, Artificial Sequence
  Description of Artificial Sequence: Synthetic oligonucleotide
gcuuaagugugccauccuc

SEQ ID NO: 855213 - RNA, 19 nt, Artificial Sequence
  Description of Artificial Sequence: Synthetic oligonucleotide
cacggauuuaccuguccga

SEQ ID NO: 855214 - RNA, 19 nt, Artificial Sequence
  Description of Artificial Sequence: Synthetic oligonucleotide
ucuuauugucuaggcucca

SEQ ID NO: 855215 - RNA, 19 nt, Artificial Sequence
  Description of Artificial Sequence: Synthetic oligonucleotide
cagugauaacgcggggugg

SEQ ID NO: 855216 - RNA, 19 nt, Artificial Sequence
  Description of Artificial Sequence: Synthetic oligonucleotide
accccucucagcgcagccc

SEQ ID NO: 855217 - RNA, 19 nt, Artificial Sequence
  Description of Artificial Sequence: Synthetic oligonucleotide
ggggcaaaagggauggggc

SEQ ID NO: 855218 - RNA, 19 nt, Artificial Sequence
  Description of Artificial Sequence: Synthetic oligonucleotide
agcuuaagugugccauccu

SEQ ID NO: 855219 - RNA, 19 nt, Artificial Sequence
  Description of Artificial Sequence: Synthetic oligonucleotide
ggagcggaugccaucguag

SEQ ID NO: 855220 - RNA, 19 nt, Artificial Sequence
  Description of Artificial Sequence: Synthetic oligonucleotide
acggauuuaccuguccgau

SEQ ID NO: 855221 - RNA, 19 nt, Artificial Sequence
  Description of Artificial Sequence: Synthetic oligonucleotide
cauggauggccuccucgug

SEQ ID NO: 855222 - RNA, 19 nt, Artificial Sequence
  Description of Artificial Sequence: Synthetic oligonucleotide
ucguagccaucguacgggu

SEQ ID NO: 855223 - RNA, 19 nt, Artificial Sequence
  Description of Artificial Sequence: Synthetic oligonucleotide
gugacggccagcacagggc

SEQ ID NO: 855224 - RNA, 19 nt, Artificial Sequence
  Description of Artificial Sequence: Synthetic oligonucleotide
agcccuucaucugacgggu

SEQ ID NO: 855225 - RNA, 19 nt, Artificial Sequence
  Description of Artificial Sequence: Synthetic oligonucleotide
augcccaacucuggaggac

SEQ ID NO: 855226 - RNA, 19 nt, Artificial Sequence
  Description of Artificial Sequence: Synthetic oligonucleotide
gcaccgucuacugucuugg

SEQ ID NO: 855227 - RNA, 19 nt, Artificial Sequence
  Description of Artificial Sequence: Synthetic oligonucleotide
gacauggggaagguacaga

SEQ ID NO: 855228 - RNA, 19 nt, Artificial Sequence
  Description of Artificial Sequence: Synthetic oligonucleotide
gccaggugggaucauacga

SEQ ID NO: 855229 - RNA, 19 nt, Artificial Sequence
  Description of Artificial Sequence: Synthetic oligonucleotide
acagacuaucacacaguga

SEQ ID NO: 855230 - RNA, 19 nt, Artificial Sequence
  Description of Artificial Sequence: Synthetic oligonucleotide
cacgccauugggauccaca

SEQ ID NO: 855231 - RNA, 19 nt, Artificial Sequence
  Description of Artificial Sequence: Synthetic oligonucleotide
caagggcacaaaaguagaa

SEQ ID NO: 855232 - RNA, 19 nt, Artificial Sequence
  Description of Artificial Sequence: Synthetic oligonucleotide
gugggcaaccauagagugc

SEQ ID NO: 855233 - RNA, 19 nt, Artificial Sequence
  Description of Artificial Sequence: Synthetic oligonucleotide
gccaucguagugugagcgg

SEQ ID NO: 855234 - RNA, 19 nt, Artificial Sequence
  Description of Artificial Sequence: Synthetic oligonucleotide
gagacucucgagggaggcc

SEQ ID NO: 855235 - RNA, 19 nt, Artificial Sequence
  Description of Artificial Sequence: Synthetic oligonucleotide
acgugacucagcacgcuug

SEQ ID NO: 855236 - RNA, 19 nt, Artificial Sequence
  Description of Artificial Sequence: Synthetic oligonucleotide
acggguccauguugagguc

SEQ ID NO: 855237 - RNA, 19 nt, Artificial Sequence
  Description of Artificial Sequence: Synthetic oligonucleotide
ccguguucuccagacaugg

SEQ ID NO: 855238 - RNA, 19 nt, Artificial Sequence
  Description of Artificial Sequence: Synthetic oligonucleotide
cucccucgggacuccaaug

SEQ ID NO: 855239 - RNA, 19 nt, Artificial Sequence
  Description of Artificial Sequence: Synthetic oligonucleotide
ugucgucgugcgcugugau

SEQ ID NO: 855240 - RNA, 19 nt, Artificial Sequence
  Description of Artificial Sequence: Synthetic oligonucleotide
gucgucgugcgcugugaug

SEQ ID NO: 855241 - RNA, 19 nt, Artificial Sequence
  Description of Artificial Sequence: Synthetic oligonucleotide
cuguggauacggccaucag

SEQ ID NO: 855242 - RNA, 19 nt, Artificial Sequence
  Description of Artificial Sequence: Synthetic oligonucleotide
gcaugaaugggcuccacgu

SEQ ID NO: 855243 - RNA, 19 nt, Artificial Sequence
  Description of Artificial Sequence: Synthetic oligonucleotide
acgcuugggucguagccau

SEQ ID NO: 855244 - RNA, 19 nt, Artificial Sequence
  Description of Artificial Sequence: Synthetic oligonucleotide
gcacgcuugggucguagcc

SEQ ID NO: 855245 - RNA, 19 nt, Artificial Sequence
  Description of Artificial Sequence: Synthetic oligonucleotide
ugaucuguguugggccgcu

SEQ ID NO: 855246 - RNA, 19 nt, Artificial Sequence
  Description of Artificial Sequence: Synthetic oligonucleotide
gccucgaagccucggugcg

SEQ ID NO: 855247 - RNA, 19 nt, Artificial Sequence
  Description of Artificial Sequence: Synthetic oligonucleotide
ggcaccgucuacugucuug

SEQ ID NO: 855248 - RNA, 19 nt, Artificial Sequence
  Description of Artificial Sequence: Synthetic oligonucleotide
gaccccucucagcgcagcc

SEQ ID NO: 855249 - RNA, 19 nt, Artificial Sequence
  Description of Artificial Sequence: Synthetic oligonucleotide
guagugugagcggagggua

SEQ ID NO: 855250 - RNA, 19 nt, Artificial Sequence
  Description of Artificial Sequence: Synthetic oligonucleotide
ggguuccaugucuucuugc

SEQ ID NO: 855251 - RNA, 19 nt, Artificial Sequence
  Description of Artificial Sequence: Synthetic oligonucleotide
gacucucgagggaggccgg

SEQ ID NO: 855252 - RNA, 19 nt, Artificial Sequence
  Description of Artificial Sequence: Synthetic oligonucleotide
agugugagcggaggguaaa

SEQ ID NO: 855253 - RNA, 19 nt, Artificial Sequence
  Description of Artificial Sequence: Synthetic oligonucleotide
gugacucagcacgcuuggg

SEQ ID NO: 855254 - RNA, 19 nt, Artificial Sequence
  Description of Artificial Sequence: Synthetic oligonucleotide
ucucagcgcagcccuucau

SEQ ID NO: 855255 - RNA, 19 nt, Artificial Sequence
  Description of Artificial Sequence: Synthetic oligonucleotide
gauuuaccuguccgauugu

SEQ ID NO: 855256 - RNA, 19 nt, Artificial Sequence
  Description of Artificial Sequence: Synthetic oligonucleotide
caaccauagagugcacgga

SEQ ID NO: 855257 - RNA, 19 nt, Artificial Sequence
  Description of Artificial Sequence: Synthetic oligonucleotide
aaaagggauggggcuuaua

SEQ ID NO: 855258 - RNA, 19 nt, Artificial Sequence
  Description of Artificial Sequence: Synthetic oligonucleotide
cuggggucccaaaugcgaa

SEQ ID NO: 855259 - RNA, 19 nt, Artificial Sequence
  Description of Artificial Sequence: Synthetic oligonucleotide
ccaagggcacaaaaguaga

SEQ ID NO: 855260 - RNA, 19 nt, Artificial Sequence
  Description of Artificial Sequence: Synthetic oligonucleotide
ccgauuguccaggaaucgg

SEQ ID NO: 855261 - RNA, 19 nt, Artificial Sequence
  Description of Artificial Sequence: Synthetic oligonucleotide
ccgucuacugucuuggaaa

SEQ ID NO: 855262 - RNA, 19 nt, Artificial Sequence
  Description of Artificial Sequence: Synthetic oligonucleotide
cgaacggugccaucagcgg

SEQ ID NO: 855263 - RNA, 19 nt, Artificial Sequence
  Description of Artificial Sequence: Synthetic oligonucleotide
cacgcuugggucguagcca

SEQ ID NO: 855264 - RNA, 19 nt, Artificial Sequence
  Description of Artificial Sequence: Synthetic oligonucleotide
gcaggcucggugcugguga

SEQ ID NO: 855265 - RNA, 19 nt, Artificial Sequence
  Description of Artificial Sequence: Synthetic oligonucleotide
uuagcaccaccaggcucca

SEQ ID NO: 855266 - RNA, 19 nt, Artificial Sequence
  Description of Artificial Sequence: Synthetic oligonucleotide
cacagcuuaagugugccau

SEQ ID NO: 855267 - RNA, 19 nt, Artificial Sequence
  Description of Artificial Sequence: Synthetic oligonucleotide
acuuagggcuggggcauga

SEQ ID NO: 855268 - RNA, 19 nt, Artificial Sequence
  Description of Artificial Sequence: Synthetic oligonucleotide
cucugagacucucgaggga

SEQ ID NO: 855269 - RNA, 19 nt, Artificial Sequence
  Description of Artificial Sequence: Synthetic oligonucleotide
accauagagugcacggauu

SEQ ID NO: 855270 - RNA, 19 nt, Artificial Sequence
  Description of Artificial Sequence: Synthetic oligonucleotide
cucggugcgcgcgcgcgcg

SEQ ID NO: 855271 - RNA, 19 nt, Artificial Sequence
  Description of Artificial Sequence: Synthetic oligonucleotide
cgugacucagcacgcuugg

SEQ ID NO: 855272 - RNA, 19 nt, Artificial Sequence
  Description of Artificial Sequence: Synthetic oligonucleotide
gguggcacucuagagcgga

SEQ ID NO: 855273 - RNA, 19 nt, Artificial Sequence
  Description of Artificial Sequence: Synthetic oligonucleotide
agcuguggauacggccauc

SEQ ID NO: 855274 - RNA, 19 nt, Artificial Sequence
  Description of Artificial Sequence: Synthetic oligonucleotide
ggcuccauaagcgcagaga

SEQ ID NO: 855275 - RNA, 19 nt, Artificial Sequence
  Description of Artificial Sequence: Synthetic oligonucleotide
ugcuagucgcugggagaug

SEQ ID NO: 855276 - RNA, 19 nt, Artificial Sequence
  Description of Artificial Sequence: Synthetic oligonucleotide
ugccccugucgucgugcgc

SEQ ID NO: 855277 - RNA, 19 nt, Artificial Sequence
  Description of Artificial Sequence: Synthetic oligonucleotide
gugagcggaggguaaacuu

SEQ ID NO: 855278 - RNA, 19 nt, Artificial Sequence
  Description of Artificial Sequence: Synthetic oligonucleotide
gugugagcggaggguaaac

SEQ ID NO: 855279 - RNA, 19 nt, Artificial Sequence
  Description of Artificial Sequence: Synthetic oligonucleotide
cauaagcgcagagaacagu

SEQ ID NO: 855280 - RNA, 19 nt, Artificial Sequence
  Description of Artificial Sequence: Synthetic oligonucleotide
ccaggugggaucauacgaa

SEQ ID NO: 855281 - RNA, 19 nt, Artificial Sequence
  Description of Artificial Sequence: Synthetic oligonucleotide
gugcgcugugaugcugagg

SEQ ID NO: 855282 - RNA, 19 nt, Artificial Sequence
  Description of Artificial Sequence: Synthetic oligonucleotide
cacacacgucuuauugucu

SEQ ID NO: 855283 - RNA, 19 nt, Artificial Sequence
  Description of Artificial Sequence: Synthetic oligonucleotide
aacgcgggguggguggguu

SEQ ID NO: 855284 - RNA, 19 nt, Artificial Sequence
  Description of Artificial Sequence: Synthetic oligonucleotide
cgauuguccaggaaucgga

SEQ ID NO: 855285 - RNA, 19 nt, Artificial Sequence
  Description of Artificial Sequence: Synthetic oligonucleotide
agacuaucacacagugaua

SEQ ID NO: 855286 - RNA, 19 nt, Artificial Sequence
  Description of Artificial Sequence: Synthetic oligonucleotide
ccagcgggccuucucggcc

SEQ ID NO: 855287 - RNA, 19 nt, Artificial Sequence
  Description of Artificial Sequence: Synthetic oligonucleotide
gagaccccucucagcgcag

SEQ ID NO: 855288 - RNA, 19 nt, Artificial Sequence
  Description of Artificial Sequence: Synthetic oligonucleotide
ugcgcgcgcgcgcgcgcgg

SEQ ID NO: 855289 - RNA, 19 nt, Artificial Sequence
  Description of Artificial Sequence: Synthetic oligonucleotide
gagcgcggaaagcaugaau

SEQ ID NO: 855290 - RNA, 19 nt, Artificial Sequence
  Description of Artificial Sequence: Synthetic oligonucleotide
cauagagugcacggauuua

SEQ ID NO: 855291 - RNA, 19 nt, Artificial Sequence
  Description of Artificial Sequence: Synthetic oligonucleotide
gucgugcgcugugaugcug

SEQ ID NO: 855292 - RNA, 19 nt, Artificial Sequence
  Description of Artificial Sequence: Synthetic oligonucleotide
gguuggcgccaugaaaauc

SEQ ID NO: 855293 - RNA, 19 nt, Artificial Sequence
  Description of Artificial Sequence: Synthetic oligonucleotide
agauccccaaggacaccca

SEQ ID NO: 855294 - RNA, 19 nt, Artificial Sequence
  Description of Artificial Sequence: Synthetic oligonucleotide
agggagcggaugccaucgu

SEQ ID NO: 855295 - RNA, 19 nt, Artificial Sequence
  Description of Artificial Sequence: Synthetic oligonucleotide
ggaaucggaugccccuguc

SEQ ID NO: 855296 - RNA, 19 nt, Artificial Sequence
  Description of Artificial Sequence: Synthetic oligonucleotide
cguguucuccagacauggg

SEQ ID NO: 855297 - RNA, 19 nt, Artificial Sequence
  Description of Artificial Sequence: Synthetic oligonucleotide
ggauuccguguucuccaga

SEQ ID NO: 855298 - RNA, 19 nt, Artificial Sequence
  Description of Artificial Sequence: Synthetic oligonucleotide
acguccagugcagcguuuu

SEQ ID NO: 855299 - RNA, 19 nt, Artificial Sequence
  Description of Artificial Sequence: Synthetic oligonucleotide
agggguuuauugagacaau

SEQ ID NO: 855300 - RNA, 19 nt, Artificial Sequence
  Description of Artificial Sequence: Synthetic oligonucleotide
gggcugaaagccagacccc

SEQ ID NO: 855301 - RNA, 19 nt, Artificial Sequence
  Description of Artificial Sequence: Synthetic oligonucleotide
ggagccuggcaccgucuac

SEQ ID NO: 855302 - RNA, 19 nt, Artificial Sequence
  Description of Artificial Sequence: Synthetic oligonucleotide
acgcgggguggguggguug

SEQ ID NO: 855303 - RNA, 19 nt, Artificial Sequence
  Description of Artificial Sequence: Synthetic oligonucleotide
ggccacgacaugggcaggc

SEQ ID NO: 855304 - RNA, 19 nt, Artificial Sequence
  Description of Artificial Sequence: Synthetic oligonucleotide
uggcaccgucuacugucuu

SEQ ID NO: 855305 - RNA, 19 nt, Artificial Sequence
  Description of Artificial Sequence: Synthetic oligonucleotide
ucggugcgcgcgcgcgcgc

SEQ ID NO: 855306 - RNA, 19 nt, Artificial Sequence
  Description of Artificial Sequence: Synthetic oligonucleotide
auacggccaucagcuccag

SEQ ID NO: 855307 - RNA, 19 nt, Artificial Sequence
  Description of Artificial Sequence: Synthetic oligonucleotide
uaacugcguccaggugggc

SEQ ID NO: 855308 - RNA, 19 nt, Artificial Sequence
  Description of Artificial Sequence: Synthetic oligonucleotide
ccaucguagugugagcgga

SEQ ID NO: 855309 - RNA, 19 nt, Artificial Sequence
  Description of Artificial Sequence: Synthetic oligonucleotide
aggccacgacaugggcagg

SEQ ID NO: 855310 - RNA, 19 nt, Artificial Sequence
  Description of Artificial Sequence: Synthetic oligonucleotide
uaacgcggggugggugggu

SEQ ID NO: 855311 - RNA, 19 nt, Artificial Sequence
  Description of Artificial Sequence: Synthetic oligonucleotide
ccccugugagcgcggaaag

SEQ ID NO: 855312 - RNA, 19 nt, Artificial Sequence
  Description of Artificial Sequence: Synthetic oligonucleotide
caucguacggguccauguu

SEQ ID NO: 855313 - RNA, 19 nt, Artificial Sequence
  Description of Artificial Sequence: Synthetic oligonucleotide
gguaaacuuaggguuccau

SEQ ID NO: 855314 - RNA, 19 nt, Artificial Sequence
  Description of Artificial Sequence: Synthetic oligonucleotide
ccugucgucgugcgcugug

SEQ ID NO: 855315 - RNA, 19 nt, Artificial Sequence
  Description of Artificial Sequence: Synthetic oligonucleotide
cuggcaccgucuacugucu

SEQ ID NO: 855316 - RNA, 19 nt, Artificial Sequence
  Description of Artificial Sequence: Synthetic oligonucleotide
cugucgucgugcgcuguga

SEQ ID NO: 855317 - RNA, 19 nt, Artificial Sequence
  Description of Artificial Sequence: Synthetic oligonucleotide
cucggcgcgcucggccucc

SEQ ID NO: 855318 - RNA, 19 nt, Artificial Sequence
  Description of Artificial Sequence: Synthetic oligonucleotide
cugugagcgcggaaagcau

SEQ ID NO: 855319 - RNA, 19 nt, Artificial Sequence
  Description of Artificial Sequence: Synthetic oligonucleotide
ccuggcuaugcccaacucu

SEQ ID NO: 855320 - RNA, 19 nt, Artificial Sequence
  Description of Artificial Sequence: Synthetic oligonucleotide
uucuugcggugggccguga

SEQ ID NO: 855321 - RNA, 19 nt, Artificial Sequence
  Description of Artificial Sequence: Synthetic oligonucleotide
cguacggguccauguugag

SEQ ID NO: 855322 - RNA, 19 nt, Artificial Sequence
  Description of Artificial Sequence: Synthetic oligonucleotide
gccaucguacggguccaug

SEQ ID NO: 855323 - RNA, 19 nt, Artificial Sequence
  Description of Artificial Sequence: Synthetic oligonucleotide
caccgucuacugucuugga

SEQ ID NO: 855324 - RNA, 19 nt, Artificial Sequence
  Description of Artificial Sequence: Synthetic oligonucleotide
cugcguccaggugggcaac

SEQ ID NO: 855325 - RNA, 19 nt, Artificial Sequence
  Description of Artificial Sequence: Synthetic oligonucleotide
cuucucggccucgaagccu

SEQ ID NO: 855326 - RNA, 19 nt, Artificial Sequence
  Description of Artificial Sequence: Synthetic oligonucleotide
ccaucguacggguccaugu

SEQ ID NO: 855327 - RNA, 19 nt, Artificial Sequence
  Description of Artificial Sequence: Synthetic oligonucleotide
cccugugagcgcggaaagc

SEQ ID NO: 855328 - RNA, 19 nt, Artificial Sequence
  Description of Artificial Sequence: Synthetic oligonucleotide
cuggccccgcucucugcca

SEQ ID NO: 855329 - RNA, 19 nt, Artificial Sequence
  Description of Artificial Sequence: Synthetic oligonucleotide
gugcgcgcgcgcgcgcgcg

SEQ ID NO: 855330 - RNA, 19 nt, Artificial Sequence
  Description of Artificial Sequence: Synthetic oligonucleotide
ccacgacaugggcaggcuc

SEQ ID NO: 855331 - RNA, 19 nt, Artificial Sequence
  Description of Artificial Sequence: Synthetic oligonucleotide
ccauagagugcacggauuu

SEQ ID NO: 855332 - RNA, 19 nt, Artificial Sequence
  Description of Artificial Sequence: Synthetic oligonucleotide
cuugggucguagccaucgu

SEQ ID NO: 855333 - RNA, 19 nt, Artificial Sequence
  Description of Artificial Sequence: Synthetic oligonucleotide
caggcucggugcuggugaa

SEQ ID NO: 855334 - RNA, 19 nt, Artificial Sequence
  Description of Artificial Sequence: Synthetic oligonucleotide
cucagcacgcuugggucgu

SEQ ID NO: 855335 - RNA, 19 nt, Artificial Sequence
  Description of Artificial Sequence: Synthetic oligonucleotide
ggguaaacuuaggguucca

SEQ ID NO: 855336 - RNA, 19 nt, Artificial Sequence
  Description of Artificial Sequence: Synthetic oligonucleotide
caucucaaggagggccugu

SEQ ID NO: 855337 - RNA, 19 nt, Artificial Sequence
  Description of Artificial Sequence: Synthetic oligonucleotide
ggugcgcgcgcgcgcgcgc

SEQ ID NO: 855338 - RNA, 19 nt, Artificial Sequence
  Description of Artificial Sequence: Synthetic oligonucleotide
gcggagcaggaugcuaguc

SEQ ID NO: 855339 - RNA, 19 nt, Artificial Sequence
  Description of Artificial Sequence: Synthetic oligonucleotide
gccccugucgucgugcgcu

SEQ ID NO: 855340 - RNA, 19 nt, Artificial Sequence
  Description of Artificial Sequence: Synthetic oligonucleotide
cccuggcuaugcccaacuc

SEQ ID NO: 855341 - RNA, 19 nt, Artificial Sequence
  Description of Artificial Sequence: Synthetic oligonucleotide
ccaggugggcaaccauaga

SEQ ID NO: 855342 - RNA, 19 nt, Artificial Sequence
  Description of Artificial Sequence: Synthetic oligonucleotide
ccucggugcgcgcgcgcgc

SEQ ID NO: 855343 - RNA, 19 nt, Artificial Sequence
  Description of Artificial Sequence: Synthetic oligonucleotide
ccucccagcgggccuucuc

SEQ ID NO: 855344 - RNA, 19 nt, Artificial Sequence
  Description of Artificial Sequence: Synthetic oligonucleotide
ccuggggaaagggccauua

SEQ ID NO: 855345 - RNA, 19 nt, Artificial Sequence
  Description of Artificial Sequence: Synthetic oligonucleotide
gcacucuagagcggagccu

SEQ ID NO: 855346 - RNA, 19 nt, Artificial Sequence
  Description of Artificial Sequence: Synthetic oligonucleotide
ccccugucgucgugcgcug

SEQ ID NO: 855347 - RNA, 19 nt, Artificial Sequence
  Description of Artificial Sequence: Synthetic oligonucleotide
gcuaggcagguaacugcgu

SEQ ID NO: 855348 - RNA, 19 nt, Artificial Sequence
  Description of Artificial Sequence: Synthetic oligonucleotide
gggaucauacgaagaccuu

SEQ ID NO: 855349 - RNA, 19 nt, Artificial Sequence
  Description of Artificial Sequence: Synthetic oligonucleotide
cgcugcucccucgggacuc

SEQ ID NO: 855350 - RNA, 19 nt, Artificial Sequence
  Description of Artificial Sequence: Synthetic oligonucleotide
gcgcgcgcgcgcgcggcgg

SEQ ID NO: 855351 - RNA, 19 nt, Artificial Sequence
  Description of Artificial Sequence: Synthetic oligonucleotide
ggccccugugagcgcggaa

SEQ ID NO: 855352 - RNA, 19 nt, Artificial Sequence
  Description of Artificial Sequence: Synthetic oligonucleotide
gccgagacucugagacucu

SEQ ID NO: 855353 - RNA, 19 nt, Artificial Sequence
  Description of Artificial Sequence: Synthetic oligonucleotide
cgcuugggucguagccauc

SEQ ID NO: 855354 - RNA, 19 nt, Artificial Sequence
  Description of Artificial Sequence: Synthetic oligonucleotide
cggauuuaccuguccgauu

SEQ ID NO: 855355 - RNA, 19 nt, Artificial Sequence
  Description of Artificial Sequence: Synthetic oligonucleotide
cggugcgcgcgcgcgcgcg

SEQ ID NO: 855356 - RNA, 19 nt, Artificial Sequence
  Description of Artificial Sequence: Synthetic oligonucleotide
gggccccugugagcgcgga

SEQ ID NO: 855357 - RNA, 19 nt, Artificial Sequence
  Description of Artificial Sequence: Synthetic oligonucleotide
cgcgcgcgcgcgcggcggg

SEQ ID NO: 855358 - RNA, 19 nt, Artificial Sequence
  Description of Artificial Sequence: Synthetic oligonucleotide
gcgcgcgcgcgcgcgcggc

SEQ ID NO: 855359 - RNA, 19 nt, Artificial Sequence
  Description of Artificial Sequence: Synthetic oligonucleotide
cgcgcgcgcgcgcgcggcg

SEQ ID NO: 855360 - RNA, 19 nt, Artificial Sequence
  Description of Artificial Sequence: Synthetic oligonucleotide
gggcgaggccaggugggau

SEQ ID NO: 855361 - RNA, 19 nt, Artificial Sequence
  Description of Artificial Sequence: Synthetic oligonucleotide
cgucgugcgcugugaugcu

SEQ ID NO: 855362 - RNA, 19 nt, Artificial Sequence
  Description of Artificial Sequence: Synthetic oligonucleotide
gcgcgcgcgcgcggcgggc

SEQ ID NO: 855363 - RNA, 19 nt, Artificial Sequence
  Description of Artificial Sequence: Synthetic oligonucleotide
cggaugccccugucgucgu

SEQ ID NO: 855364 - RNA, 19 nt, Artificial Sequence
  Description of Artificial Sequence: Synthetic oligonucleotide
cccugucgucgugcgcugu

SEQ ID NO: 855365 - RNA, 19 nt, Artificial Sequence
  Description of Artificial Sequence: Synthetic oligonucleotide
uauuaaaccauccaacugc

SEQ ID NO: 855366 - RNA, 19 nt, Artificial Sequence
  Description of Artificial Sequence: Synthetic oligonucleotide
uacuaaguuaaaauaagag

SEQ ID NO: 855367 - RNA, 19 nt, Artificial Sequence
  Description of Artificial Sequence: Synthetic oligonucleotide
uucuauaucaauguucugg

SEQ ID NO: 855368 - RNA, 19 nt, Artificial Sequence
  Description of Artificial Sequence: Synthetic oligonucleotide
aguuagaugaaccaaugag

SEQ ID NO: 855369 - RNA, 19 nt, Artificial Sequence
  Description of Artificial Sequence: Synthetic oligonucleotide
uuucaugacguuuauacug

SEQ ID NO: 855370 - RNA, 19 nt, Artificial Sequence
  Description of Artificial Sequence: Synthetic oligonucleotide
caaaauggcgacaacacgg

SEQ ID NO: 855371 - RNA, 19 nt, Artificial Sequence
  Description of Artificial Sequence: Synthetic oligonucleotide
aaugcuaugcuccuucgag

SEQ ID NO: 855372 - RNA, 19 nt, Artificial Sequence
  Description of Artificial Sequence: Synthetic oligonucleotide
acuaaguuaaaauaagagu

SEQ ID NO: 855373 - RNA, 19 nt, Artificial Sequence
  Description of Artificial Sequence: Synthetic oligonucleotide
uuagaugaaccaaugagcu

SEQ ID NO: 855374 - RNA, 19 nt, Artificial Sequence
  Description of Artificial Sequence: Synthetic oligonucleotide
uaucagacuaaacauaaga

SEQ ID NO: 855375 - RNA, 19 nt, Artificial Sequence
  Description of Artificial Sequence: Synthetic oligonucleotide
ucuacugcuacuaaguuaa

SEQ ID NO: 855376 - RNA, 19 nt, Artificial Sequence
  Description of Artificial Sequence: Synthetic oligonucleotide
aacauacaugguuugacag

SEQ ID NO: 855377 - RNA, 19 nt, Artificial Sequence
  Description of Artificial Sequence: Synthetic oligonucleotide
uaagacgucaucucgauac

SEQ ID NO: 855378 - RNA, 19 nt, Artificial Sequence
  Description of Artificial Sequence: Synthetic oligonucleotide
uuaaaucuauauuuuguug

SEQ ID NO: 855379 - RNA, 19 nt, Artificial Sequence
  Description of Artificial Sequence: Synthetic oligonucleotide
uuuauaauuggccauucaa

SEQ ID NO: 855380 - RNA, 19 nt, Artificial Sequence
  Description of Artificial Sequence: Synthetic oligonucleotide
uguauacaaaccaugacau

SEQ ID NO: 855381 - RNA, 19 nt, Artificial Sequence
  Description of Artificial Sequence: Synthetic oligonucleotide
ugcucaaugauccuugcag

SEQ ID NO: 855382 - RNA, 19 nt, Artificial Sequence
  Description of Artificial Sequence: Synthetic oligonucleotide
aaagauccauuccaggaag

SEQ ID NO: 855383 - RNA, 19 nt, Artificial Sequence
  Description of Artificial Sequence: Synthetic oligonucleotide
acaagaaaccaauguauac

SEQ ID NO: 855384 - RNA, 19 nt, Artificial Sequence
  Description of Artificial Sequence: Synthetic oligonucleotide
aaaguagccggauugacau

SEQ ID NO: 855385 - RNA, 19 nt, Artificial Sequence
  Description of Artificial Sequence: Synthetic oligonucleotide
uuagaaaagcuccacacuc

SEQ ID NO: 855386 - RNA, 19 nt, Artificial Sequence
  Description of Artificial Sequence: Synthetic oligonucleotide
uuaaaugucugaacacggg

SEQ ID NO: 855387 - RNA, 19 nt, Artificial Sequence
  Description of Artificial Sequence: Synthetic oligonucleotide
gagucuaauccauaggucc

SEQ ID NO: 855388 - RNA, 19 nt, Artificial Sequence
  Description of Artificial Sequence: Synthetic oligonucleotide
agagcauuuauaauuggcc

SEQ ID NO: 855389 - RNA, 19 nt, Artificial Sequence
  Description of Artificial Sequence: Synthetic oligonucleotide
aacauaagacuaacgagcg

SEQ ID NO: 855390 - RNA, 19 nt, Artificial Sequence
  Description of Artificial Sequence: Synthetic oligonucleotide
gaaucuugcucaaugaucc

SEQ ID NO: 855391 - RNA, 19 nt, Artificial Sequence
  Description of Artificial Sequence: Synthetic oligonucleotide
aagucgucccuucaaaguc

SEQ ID NO: 855392 - RNA, 19 nt, Artificial Sequence
  Description of Artificial Sequence: Synthetic oligonucleotide
ucaagugucaguauuuggu

SEQ ID NO: 855393 - RNA, 19 nt, Artificial Sequence
  Description of Artificial Sequence: Synthetic oligonucleotide
aaggcgaaggaauauccuc

SEQ ID NO: 855394 - RNA, 19 nt, Artificial Sequence
  Description of Artificial Sequence: Synthetic oligonucleotide
aacaugcuagaaaaguagc

SEQ ID NO: 855395 - RNA, 19 nt, Artificial Sequence
  Description of Artificial Sequence: Synthetic oligonucleotide
aagauucccaacuaaaauu

SEQ ID NO: 855396 - RNA, 19 nt, Artificial Sequence
  Description of Artificial Sequence: Synthetic oligonucleotide
uuauaauuggccauucaaa

SEQ ID NO: 855397 - RNA, 19 nt, Artificial Sequence
  Description of Artificial Sequence: Synthetic oligonucleotide
cacaaaagcacuuacucug

SEQ ID NO: 855398 - RNA, 19 nt, Artificial Sequence
  Description of Artificial Sequence: Synthetic oligonucleotide
ugcuacuaaguuaaaauaa

SEQ ID NO: 855399 - RNA, 19 nt, Artificial Sequence
  Description of Artificial Sequence: Synthetic oligonucleotide
aaaauggcgacaacacggc

SEQ ID NO: 855400 - RNA, 19 nt, Artificial Sequence
  Description of Artificial Sequence: Synthetic oligonucleotide
auaauauucaugcuggauu

SEQ ID NO: 855401 - RNA, 19 nt, Artificial Sequence
  Description of Artificial Sequence: Synthetic oligonucleotide
ucuauaucaauguucuggu

SEQ ID NO: 855402 - RNA, 19 nt, Artificial Sequence
  Description of Artificial Sequence: Synthetic oligonucleotide
aaggcaccaacuaaagagc

SEQ ID NO: 855403 - RNA, 19 nt, Artificial Sequence
  Description of Artificial Sequence: Synthetic oligonucleotide
aaaugucugaacacgggcg

SEQ ID NO: 855404 - RNA, 19 nt, Artificial Sequence
  Description of Artificial Sequence: Synthetic oligonucleotide
uuuauuaagacgucaucuc

SEQ ID NO: 855405 - RNA, 19 nt, Artificial Sequence
  Description of Artificial Sequence: Synthetic oligonucleotide
auaaauuccaacaaucaga

SEQ ID NO: 855406 - RNA, 19 nt, Artificial Sequence
  Description of Artificial Sequence: Synthetic oligonucleotide
aagugucaguauuugguag

SEQ ID NO: 855407 - RNA, 19 nt, Artificial Sequence
  Description of Artificial Sequence: Synthetic oligonucleotide
uaaguuagaugaaccaaug

SEQ ID NO: 855408 - RNA, 19 nt, Artificial Sequence
  Description of Artificial Sequence: Synthetic oligonucleotide
uauuaagacgucaucucga

SEQ ID NO: 855409 - RNA, 19 nt, Artificial Sequence
  Description of Artificial Sequence: Synthetic oligonucleotide
uguguaauagccacacaca

SEQ ID NO: 855410 - RNA, 19 nt, Artificial Sequence
  Description of Artificial Sequence: Synthetic oligonucleotide
guuagaugaaccaaugagc

SEQ ID NO: 855411 - RNA, 19 nt, Artificial Sequence
  Description of Artificial Sequence: Synthetic oligonucleotide
aucagacuaaacauaagac

SEQ ID NO: 855412 - RNA, 19 nt, Artificial Sequence
  Description of Artificial Sequence: Synthetic oligonucleotide
aaagucgucccuucaaagu

SEQ ID NO: 855413 - RNA, 19 nt, Artificial Sequence
  Description of Artificial Sequence: Synthetic oligonucleotide
aaccaugacaugcauacau

SEQ ID NO: 855414 - RNA, 19 nt, Artificial Sequence
  Description of Artificial Sequence: Synthetic oligonucleotide
aauagccacacacaguuuu

SEQ ID NO: 855415 - RNA, 19 nt, Artificial Sequence
  Description of Artificial Sequence: Synthetic oligonucleotide
ugaacacgggcgcaaacgg

SEQ ID NO: 855416 - RNA, 19 nt, Artificial Sequence
  Description of Artificial Sequence: Synthetic oligonucleotide
caugcuagaaaaguagccg

SEQ ID NO: 855417 - RNA, 19 nt, Artificial Sequence
  Description of Artificial Sequence: Synthetic oligonucleotide
auaaggcgaaggaauaucc

SEQ ID NO: 855418 - RNA, 19 nt, Artificial Sequence
  Description of Artificial Sequence: Synthetic oligonucleotide
agaacacagagugucagac

SEQ ID NO: 855419 - RNA, 19 nt, Artificial Sequence
  Description of Artificial Sequence: Synthetic oligonucleotide
uacaucucauucuugacaa

SEQ ID NO: 855420 - RNA, 19 nt, Artificial Sequence
  Description of Artificial Sequence: Synthetic oligonucleotide
uucaugacguuuauacuga

SEQ ID NO: 855421 - RNA, 19 nt, Artificial Sequence
  Description of Artificial Sequence: Synthetic oligonucleotide
cauaagacuaacgagcgac

SEQ ID NO: 855422 - RNA, 19 nt, Artificial Sequence
  Description of Artificial Sequence: Synthetic oligonucleotide
ccaaucgcaaucuaaaugc

SEQ ID NO: 855423 - RNA, 19 nt, Artificial Sequence
  Description of Artificial Sequence: Synthetic oligonucleotide
ucagacaagaccacacaca

SEQ ID NO: 855424 - RNA, 19 nt, Artificial Sequence
  Description of Artificial Sequence: Synthetic oligonucleotide
ucauugucucaccacacug

SEQ ID NO: 855425 - RNA, 19 nt, Artificial Sequence
  Description of Artificial Sequence: Synthetic oligonucleotide
augacguuuauacugaguu

SEQ ID NO: 855426 - RNA, 19 nt, Artificial Sequence
  Description of Artificial Sequence: Synthetic oligonucleotide
uuccacuacuaucaaaaga

SEQ ID NO: 855427 - RNA, 19 nt, Artificial Sequence
  Description of Artificial Sequence: Synthetic oligonucleotide
uucagagguuacaaagucc

SEQ ID NO: 855428 - RNA, 19 nt, Artificial Sequence
  Description of Artificial Sequence: Synthetic oligonucleotide
auaauuggccauucaaacu

SEQ ID NO: 855429 - RNA, 19 nt, Artificial Sequence
  Description of Artificial Sequence: Synthetic oligonucleotide
uucaagugucaguauuugg

SEQ ID NO: 855430 - RNA, 19 nt, Artificial Sequence
  Description of Artificial Sequence: Synthetic oligonucleotide
aguuguuuucacacgaacg

SEQ ID NO: 855431 - RNA, 19 nt, Artificial Sequence
  Description of Artificial Sequence: Synthetic oligonucleotide
ggaacaaauuuacagauga

SEQ ID NO: 855432 - RNA, 19 nt, Artificial Sequence
  Description of Artificial Sequence: Synthetic oligonucleotide
auauacauccaucuccacu

SEQ ID NO: 855433 - RNA, 19 nt, Artificial Sequence
  Description of Artificial Sequence: Synthetic oligonucleotide
aaacgguuuucccuguuca

SEQ ID NO: 855434 - RNA, 19 nt, Artificial Sequence
  Description of Artificial Sequence: Synthetic oligonucleotide
acaugcuagaaaaguagcc

SEQ ID NO: 855435 - RNA, 19 nt, Artificial Sequence
  Description of Artificial Sequence: Synthetic oligonucleotide
guauuaaaccauccaacug

SEQ ID NO: 855436 - RNA, 19 nt, Artificial Sequence
  Description of Artificial Sequence: Synthetic oligonucleotide
cacgaaaucuguuugcgug

SEQ ID NO: 855437 - RNA, 19 nt, Artificial Sequence
  Description of Artificial Sequence: Synthetic oligonucleotide
gaaagucgucccuucaaag

SEQ ID NO: 855438 - RNA, 19 nt, Artificial Sequence
  Description of Artificial Sequence: Synthetic oligonucleotide
aauccaaccgauuucccuu

SEQ ID NO: 855439 - RNA, 19 nt, Artificial Sequence
  Description of Artificial Sequence: Synthetic oligonucleotide
ugcucuacugcauaugagu

SEQ ID NO: 855440 - RNA, 19 nt, Artificial Sequence
  Description of Artificial Sequence: Synthetic oligonucleotide
ugaaccaaugagcuguuuc

SEQ ID NO: 855441 - RNA, 19 nt, Artificial Sequence
  Description of Artificial Sequence: Synthetic oligonucleotide
cacacgaacgcuucguucc

SEQ ID NO: 855442 - RNA, 19 nt, Artificial Sequence
  Description of Artificial Sequence: Synthetic oligonucleotide
auauccuuuuaacauacau

SEQ ID NO: 855443 - RNA, 19 nt, Artificial Sequence
  Description of Artificial Sequence: Synthetic oligonucleotide
uguaauagccacacacagu

SEQ ID NO: 855444 - RNA, 19 nt, Artificial Sequence
  Description of Artificial Sequence: Synthetic oligonucleotide
agugaaguucacuaacacu

SEQ ID NO: 855445 - RNA, 19 nt, Artificial Sequence
  Description of Artificial Sequence: Synthetic oligonucleotide
acagagucuaauccauagg

SEQ ID NO: 855446 - RNA, 19 nt, Artificial Sequence
  Description of Artificial Sequence: Synthetic oligonucleotide
aacuaugcccuuagcauuc

SEQ ID NO: 855447 - RNA, 19 nt, Artificial Sequence
  Description of Artificial Sequence: Synthetic oligonucleotide
aggaacacccacuuuuaag

SEQ ID NO: 855448 - RNA, 19 nt, Artificial Sequence
  Description of Artificial Sequence: Synthetic oligonucleotide
ugcuaugcuccuucgaggc

SEQ ID NO: 855449 - RNA, 19 nt, Artificial Sequence
  Description of Artificial Sequence: Synthetic oligonucleotide
agucuaauccauagguccc

SEQ ID NO: 855450 - RNA, 19 nt, Artificial Sequence
  Description of Artificial Sequence: Synthetic oligonucleotide
ugcauaugaguuuuccacu

SEQ ID NO: 855451 - RNA, 19 nt, Artificial Sequence
  Description of Artificial Sequence: Synthetic oligonucleotide
cagacuaaacauaagacua

SEQ ID NO: 855452 - RNA, 19 nt, Artificial Sequence
  Description of Artificial Sequence: Synthetic oligonucleotide
aagacuaacgagcgacuga

SEQ ID NO: 855453 - RNA, 19 nt, Artificial Sequence
  Description of Artificial Sequence: Synthetic oligonucleotide
aaccgauuucccuuauuca

SEQ ID NO: 855454 - RNA, 19 nt, Artificial Sequence
  Description of Artificial Sequence: Synthetic oligonucleotide
cugagcucaaguaggaaac

SEQ ID NO: 855455 - RNA, 19 nt, Artificial Sequence
  Description of Artificial Sequence: Synthetic oligonucleotide
ugauaauguacuguagccu

SEQ ID NO: 855456 - RNA, 19 nt, Artificial Sequence
  Description of Artificial Sequence: Synthetic oligonucleotide
aaguccuaaagcugauugu

SEQ ID NO: 855457 - RNA, 19 nt, Artificial Sequence
  Description of Artificial Sequence: Synthetic oligonucleotide
aacgcuucguucccagcuc

SEQ ID NO: 855458 - RNA, 19 nt, Artificial Sequence
  Description of Artificial Sequence: Synthetic oligonucleotide
cuccuguacauucaccacg

SEQ ID NO: 855459 - RNA, 19 nt, Artificial Sequence
  Description of Artificial Sequence: Synthetic oligonucleotide
caguucaauaauauucaug

SEQ ID NO: 855460 - RNA, 19 nt, Artificial Sequence
  Description of Artificial Sequence: Synthetic oligonucleotide
acuuacucugacuggagga

SEQ ID NO: 855461 - RNA, 19 nt, Artificial Sequence
  Description of Artificial Sequence: Synthetic oligonucleotide
gcuguaagcugacagacag

SEQ ID NO: 855462 - RNA, 19 nt, Artificial Sequence
  Description of Artificial Sequence: Synthetic oligonucleotide
uucccaacuaaaauuugaa

SEQ ID NO: 855463 - RNA, 19 nt, Artificial Sequence
  Description of Artificial Sequence: Synthetic oligonucleotide
aaguucacuaacacuaggu

SEQ ID NO: 855464 - RNA, 19 nt, Artificial Sequence
  Description of Artificial Sequence: Synthetic oligonucleotide
acuaacgagcgacugaaaa

SEQ ID NO: 855465 - RNA, 19 nt, Artificial Sequence
  Description of Artificial Sequence: Synthetic oligonucleotide
uuguugcaaagaaaugaga

SEQ ID NO: 855466 - RNA, 19 nt, Artificial Sequence
  Description of Artificial Sequence: Synthetic oligonucleotide
aacgguuuucccuguucag

SEQ ID NO: 855467 - RNA, 19 nt, Artificial Sequence
  Description of Artificial Sequence: Synthetic oligonucleotide
agcugacagacagagaauc

SEQ ID NO: 855468 - RNA, 19 nt, Artificial Sequence
  Description of Artificial Sequence: Synthetic oligonucleotide
auaugaguuuuccacuacu

SEQ ID NO: 855469 - RNA, 19 nt, Artificial Sequence
  Description of Artificial Sequence: Synthetic oligonucleotide
aaaaguagccggauugaca

SEQ ID NO: 855470 - RNA, 19 nt, Artificial Sequence
  Description of Artificial Sequence: Synthetic oligonucleotide
ugacgagugccucaguuuc

SEQ ID NO: 855471 - RNA, 19 nt, Artificial Sequence
  Description of Artificial Sequence: Synthetic oligonucleotide
uauuugguagccaguugcu

SEQ ID NO: 855472 - RNA, 19 nt, Artificial Sequence
  Description of Artificial Sequence: Synthetic oligonucleotide
cuaaagcugauuguuguug

SEQ ID NO: 855473 - RNA, 19 nt, Artificial Sequence
  Description of Artificial Sequence: Synthetic oligonucleotide
aaucuguuugcguguguga

SEQ ID NO: 855474 - RNA, 19 nt, Artificial Sequence
  Description of Artificial Sequence: Synthetic oligonucleotide
ugguuugacagauacuuuu

SEQ ID NO: 855475 - RNA, 19 nt, Artificial Sequence
  Description of Artificial Sequence: Synthetic oligonucleotide
acugcuguauuaaaccauc

SEQ ID NO: 855476 - RNA, 19 nt, Artificial Sequence
  Description of Artificial Sequence: Synthetic oligonucleotide
cuacuaaguuaaaauaaga

SEQ ID NO: 855477 - RNA, 19 nt, Artificial Sequence
  Description of Artificial Sequence: Synthetic oligonucleotide
gcgugugugacucaaaggc

SEQ ID NO: 855478 - RNA, 19 nt, Artificial Sequence
  Description of Artificial Sequence: Synthetic oligonucleotide
aacaagauucccaacuaaa

SEQ ID NO: 855479 - RNA, 19 nt, Artificial Sequence
  Description of Artificial Sequence: Synthetic oligonucleotide
augcuaugcuccuucgagg

SEQ ID NO: 855480 - RNA, 19 nt, Artificial Sequence
  Description of Artificial Sequence: Synthetic oligonucleotide
ugcuagaaaaguagccgga

SEQ ID NO: 855481 - RNA, 19 nt, Artificial Sequence
  Description of Artificial Sequence: Synthetic oligonucleotide
aaaugcuaugcuccuucga

SEQ ID NO: 855482 - RNA, 19 nt, Artificial Sequence
  Description of Artificial Sequence: Synthetic oligonucleotide
uguuuucacacgaacgcuu

SEQ ID NO: 855483 - RNA, 19 nt, Artificial Sequence
  Description of Artificial Sequence: Synthetic oligonucleotide
acgucaucucgauacagug

SEQ ID NO: 855484 - RNA, 19 nt, Artificial Sequence
  Description of Artificial Sequence: Synthetic oligonucleotide
accgauuucccuuauucaa

SEQ ID NO: 855485 - RNA, 19 nt, Artificial Sequence
  Description of Artificial Sequence: Synthetic oligonucleotide
caaccgauuucccuuauuc

SEQ ID NO: 855486 - RNA, 19 nt, Artificial Sequence
  Description of Artificial Sequence: Synthetic oligonucleotide
aaauaggaacaaauuuaca

SEQ ID NO: 855487 - RNA, 19 nt, Artificial Sequence
  Description of Artificial Sequence: Synthetic oligonucleotide
auaaguuagaugaaccaau

SEQ ID NO: 855488 - RNA, 19 nt, Artificial Sequence
  Description of Artificial Sequence: Synthetic oligonucleotide
uaaggcgaaggaauauccu

SEQ ID NO: 855489 - RNA, 19 nt, Artificial Sequence
  Description of Artificial Sequence: Synthetic oligonucleotide
aguauuugguagccaguug

SEQ ID NO: 855490 - RNA, 19 nt, Artificial Sequence
  Description of Artificial Sequence: Synthetic oligonucleotide
guaauagccacacacaguu

SEQ ID NO: 855491 - RNA, 19 nt, Artificial Sequence
  Description of Artificial Sequence: Synthetic oligonucleotide
aaauuuacccacagcaauu

SEQ ID NO: 855492 - RNA, 19 nt, Artificial Sequence
  Description of Artificial Sequence: Synthetic oligonucleotide
auuaagacgucaucucgau

SEQ ID NO: 855493 - RNA, 19 nt, Artificial Sequence
  Description of Artificial Sequence: Synthetic oligonucleotide
aauuuacccacagcaauuu

SEQ ID NO: 855494 - RNA, 19 nt, Artificial Sequence
  Description of Artificial Sequence: Synthetic oligonucleotide
uaagacuaacgagcgacug

SEQ ID NO: 855495 - RNA, 19 nt, Artificial Sequence
  Description of Artificial Sequence: Synthetic oligonucleotide
aguucacuaacacuaggua

SEQ ID NO: 855496 - RNA, 19 nt, Artificial Sequence
  Description of Artificial Sequence: Synthetic oligonucleotide
gauccauuccaggaaggag

SEQ ID NO: 855497 - RNA, 19 nt, Artificial Sequence
  Description of Artificial Sequence: Synthetic oligonucleotide
ucaguauuugguagccagu

SEQ ID NO: 855498 - RNA, 19 nt, Artificial Sequence
  Description of Artificial Sequence: Synthetic oligonucleotide
agagucuaauccauagguc

SEQ ID NO: 855499 - RNA, 19 nt, Artificial Sequence
  Description of Artificial Sequence: Synthetic oligonucleotide
aagauccauuccaggaagg

SEQ ID NO: 855500 - RNA, 19 nt, Artificial Sequence
  Description of Artificial Sequence: Synthetic oligonucleotide
gacguuuauacugaguucu

SEQ ID NO: 855501 - RNA, 19 nt, Artificial Sequence
  Description of Artificial Sequence: Synthetic oligonucleotide
cugaacacgggcgcaaacg

SEQ ID NO: 855502 - RNA, 19 nt, Artificial Sequence
  Description of Artificial Sequence: Synthetic oligonucleotide
agaucacugauaauguacu

SEQ ID NO: 855503 - RNA, 19 nt, Artificial Sequence
  Description of Artificial Sequence: Synthetic oligonucleotide
aaggaaagucgucccuuca

SEQ ID NO: 855504 - RNA, 19 nt, Artificial Sequence
  Description of Artificial Sequence: Synthetic oligonucleotide
acggcuggguuuuauuaag

SEQ ID NO: 855505 - RNA, 19 nt, Artificial Sequence
  Description of Artificial Sequence: Synthetic oligonucleotide
uuccaacaaucagagaaca

SEQ ID NO: 855506 - RNA, 19 nt, Artificial Sequence
  Description of Artificial Sequence: Synthetic oligonucleotide
ccuuaaaugucugaacacg

SEQ ID NO: 855507 - RNA, 19 nt, Artificial Sequence
  Description of Artificial Sequence: Synthetic oligonucleotide
aagacgucaucucgauaca

SEQ ID NO: 855508 - RNA, 19 nt, Artificial Sequence
  Description of Artificial Sequence: Synthetic oligonucleotide
uacauccaucuccacuugc

SEQ ID NO: 855509 - RNA, 19 nt, Artificial Sequence
  Description of Artificial Sequence: Synthetic oligonucleotide
cuucauugucucaccacac

SEQ ID NO: 855510 - RNA, 19 nt, Artificial Sequence
  Description of Artificial Sequence: Synthetic oligonucleotide
aaucuauauuuuguugcaa

SEQ ID NO: 855511 - RNA, 19 nt, Artificial Sequence
  Description of Artificial Sequence: Synthetic oligonucleotide
ucaugacguuuauacugag

SEQ ID NO: 855512 - RNA, 19 nt, Artificial Sequence
  Description of Artificial Sequence: Synthetic oligonucleotide
acgaaaucuguuugcgugu

SEQ ID NO: 855513 - RNA, 19 nt, Artificial Sequence
  Description of Artificial Sequence: Synthetic oligonucleotide
uucuuuagaaaagcuccac

SEQ ID NO: 855514 - RNA, 19 nt, Artificial Sequence
  Description of Artificial Sequence: Synthetic oligonucleotide
gaaaaguagccggauugac

SEQ ID NO: 855515 - RNA, 19 nt, Artificial Sequence
  Description of Artificial Sequence: Synthetic oligonucleotide
ugacguuuauacugaguuc

SEQ ID NO: 855516 - RNA, 19 nt, Artificial Sequence
  Description of Artificial Sequence: Synthetic oligonucleotide
ugacgaugacuuucggucu

SEQ ID NO: 855517 - RNA, 19 nt, Artificial Sequence
  Description of Artificial Sequence: Synthetic oligonucleotide
guaggaaacaagauuccca

SEQ ID NO: 855518 - RNA, 19 nt, Artificial Sequence
  Description of Artificial Sequence: Synthetic oligonucleotide
acgcuucguucccagcucc

SEQ ID NO: 855519 - RNA, 19 nt, Artificial Sequence
  Description of Artificial Sequence: Synthetic oligonucleotide
aagccaaucgcaaucuaaa

SEQ ID NO: 855520 - RNA, 19 nt, Artificial Sequence
  Description of Artificial Sequence: Synthetic oligonucleotide
ccaauguauacaaaccaug

SEQ ID NO: 855521 - RNA, 19 nt, Artificial Sequence
  Description of Artificial Sequence: Synthetic oligonucleotide
guacuguagccuuaaaugu

SEQ ID NO: 855522 - RNA, 19 nt, Artificial Sequence
  Description of Artificial Sequence: Synthetic oligonucleotide
auucccaacuaaaauuuga

SEQ ID NO: 855523 - RNA, 19 nt, Artificial Sequence
  Description of Artificial Sequence: Synthetic oligonucleotide
cauaugaguuuuccacuac

SEQ ID NO: 855524 - RNA, 19 nt, Artificial Sequence
  Description of Artificial Sequence: Synthetic oligonucleotide
cuacuaucaaaagaagcca

SEQ ID NO: 855525 - RNA, 19 nt, Artificial Sequence
  Description of Artificial Sequence: Synthetic oligonucleotide
agaaaaguagccggauuga

SEQ ID NO: 855526 - RNA, 19 nt, Artificial Sequence
  Description of Artificial Sequence: Synthetic oligonucleotide
augcauacaucucauucuu

SEQ ID NO: 855527 - RNA, 19 nt, Artificial Sequence
  Description of Artificial Sequence: Synthetic oligonucleotide
uccuucauugucucaccac

SEQ ID NO: 855528 - RNA, 19 nt, Artificial Sequence
  Description of Artificial Sequence: Synthetic oligonucleotide
gccaaucgcaaucuaaaug

SEQ ID NO: 855529 - RNA, 19 nt, Artificial Sequence
  Description of Artificial Sequence: Synthetic oligonucleotide
aguuucaaggaaagucguc

SEQ ID NO: 855530 - RNA, 19 nt, Artificial Sequence
  Description of Artificial Sequence: Synthetic oligonucleotide
aaccagacaucugucucug

SEQ ID NO: 855531 - RNA, 19 nt, Artificial Sequence
  Description of Artificial Sequence: Synthetic oligonucleotide
cugcuguauuaaaccaucc

SEQ ID NO: 855532 - RNA, 19 nt, Artificial Sequence
  Description of Artificial Sequence: Synthetic oligonucleotide
guagccaguugcucuacug

SEQ ID NO: 855533 - RNA, 19 nt, Artificial Sequence
  Description of Artificial Sequence: Synthetic oligonucleotide
cauaaggcgaaggaauauc

SEQ ID NO: 855534 - RNA, 19 nt, Artificial Sequence
  Description of Artificial Sequence: Synthetic oligonucleotide
agcucaaguaggaaacaag

SEQ ID NO: 855535 - RNA, 19 nt, Artificial Sequence
  Description of Artificial Sequence: Synthetic oligonucleotide
uuucacacgaacgcuucgu

SEQ ID NO: 855536 - RNA, 19 nt, Artificial Sequence
  Description of Artificial Sequence: Synthetic oligonucleotide
ucgcaaucuaaaugcuaug

SEQ ID NO: 855537 - RNA, 19 nt, Artificial Sequence
  Description of Artificial Sequence: Synthetic oligonucleotide
agcacuuacucugacugga

SEQ ID NO: 855538 - RNA, 19 nt, Artificial Sequence
  Description of Artificial Sequence: Synthetic oligonucleotide
agaauccaaccgauuuccc

SEQ ID NO: 855539 - RNA, 19 nt, Artificial Sequence
  Description of Artificial Sequence: Synthetic oligonucleotide
agccaguugcucuacugca

SEQ ID NO: 855540 - RNA, 19 nt, Artificial Sequence
  Description of Artificial Sequence: Synthetic oligonucleotide
agacuaacgagcgacugaa

SEQ ID NO: 855541 - RNA, 19 nt, Artificial Sequence
  Description of Artificial Sequence: Synthetic oligonucleotide
acaagauucccaacuaaaa

SEQ ID NO: 855542 - RNA, 19 nt, Artificial Sequence
  Description of Artificial Sequence: Synthetic oligonucleotide
gcagauauacaaagggaag

SEQ ID NO: 855543 - RNA, 19 nt, Artificial Sequence
  Description of Artificial Sequence: Synthetic oligonucleotide
aguccuaaagcugauuguu

SEQ ID NO: 855544 - RNA, 19 nt, Artificial Sequence
  Description of Artificial Sequence: Synthetic oligonucleotide
cuaugcuccuucgaggcug

SEQ ID NO: 855545 - RNA, 19 nt, Artificial Sequence
  Description of Artificial Sequence: Synthetic oligonucleotide
ucacacgaacgcuucguuc

SEQ ID NO: 855546 - RNA, 19 nt, Artificial Sequence
  Description of Artificial Sequence: Synthetic oligonucleotide
ucacuaacacuagguagga

SEQ ID NO: 855547 - RNA, 19 nt, Artificial Sequence
  Description of Artificial Sequence: Synthetic oligonucleotide
uaggaaaguuaaaguuuaa

SEQ ID NO: 855548 - RNA, 19 nt, Artificial Sequence
  Description of Artificial Sequence: Synthetic oligonucleotide
ucugaacacgggcgcaaac

SEQ ID NO: 855549 - RNA, 19 nt, Artificial Sequence
  Description of Artificial Sequence: Synthetic oligonucleotide
gaaggaauauccucagaau

SEQ ID NO: 855550 - RNA, 19 nt, Artificial Sequence
  Description of Artificial Sequence: Synthetic oligonucleotide
acauaagacuaacgagcga

SEQ ID NO: 855551 - RNA, 19 nt, Artificial Sequence
  Description of Artificial Sequence: Synthetic oligonucleotide
gugugugacucaaaggcac

SEQ ID NO: 855552 - RNA, 19 nt, Artificial Sequence
  Description of Artificial Sequence: Synthetic oligonucleotide
gguaucagacuaaacauaa

SEQ ID NO: 855553 - RNA, 19 nt, Artificial Sequence
  Description of Artificial Sequence: Synthetic oligonucleotide
auagccacacacaguuuuc

SEQ ID NO: 855554 - RNA, 19 nt, Artificial Sequence
  Description of Artificial Sequence: Synthetic oligonucleotide
ccaaaauggcgacaacacg

SEQ ID NO: 855555 - RNA, 19 nt, Artificial Sequence
  Description of Artificial Sequence: Synthetic oligonucleotide
accaauguauacaaaccau

SEQ ID NO: 855556 - RNA, 19 nt, Artificial Sequence
  Description of Artificial Sequence: Synthetic oligonucleotide
gugauccaaaugcaaccug

SEQ ID NO: 855557 - RNA, 19 nt, Artificial Sequence
  Description of Artificial Sequence: Synthetic oligonucleotide
cuguuugcgugugugacuc

SEQ ID NO: 855558 - RNA, 19 nt, Artificial Sequence
  Description of Artificial Sequence: Synthetic oligonucleotide
uuaagacgucaucucgaua

SEQ ID NO: 855559 - RNA, 19 nt, Artificial Sequence
  Description of Artificial Sequence: Synthetic oligonucleotide
aaucgcaaucuaaaugcua

SEQ ID NO: 855560 - RNA, 19 nt, Artificial Sequence
  Description of Artificial Sequence: Synthetic oligonucleotide
aggaaagucgucccuucaa

SEQ ID NO: 855561 - RNA, 19 nt, Artificial Sequence
  Description of Artificial Sequence: Synthetic oligonucleotide
aacacggcuggguuuuauu

SEQ ID NO: 855562 - RNA, 19 nt, Artificial Sequence
  Description of Artificial Sequence: Synthetic oligonucleotide
gucaucucgauacagugau

SEQ ID NO: 855563 - RNA, 19 nt, Artificial Sequence
  Description of Artificial Sequence: Synthetic oligonucleotide
ugagcucaaguaggaaaca

SEQ ID NO: 855564 - RNA, 19 nt, Artificial Sequence
  Description of Artificial Sequence: Synthetic oligonucleotide
caaggaaagucgucccuuc

SEQ ID NO: 855565 - RNA, 19 nt, Artificial Sequence
  Description of Artificial Sequence: Synthetic oligonucleotide
gaagccaaucgcaaucuaa

SEQ ID NO: 855566 - RNA, 19 nt, Artificial Sequence
  Description of Artificial Sequence: Synthetic oligonucleotide
cugggaagguaucagacua

SEQ ID NO: 855567 - RNA, 19 nt, Artificial Sequence
  Description of Artificial Sequence: Synthetic oligonucleotide
caaacgguuuucccuguuc

SEQ ID NO: 855568 - RNA, 19 nt, Artificial Sequence
  Description of Artificial Sequence: Synthetic oligonucleotide
cuggugauauguacaagaa

SEQ ID NO: 855569 - RNA, 19 nt, Artificial Sequence
  Description of Artificial Sequence: Synthetic oligonucleotide
cagcugaaggaacacccac

SEQ ID NO: 855570 - RNA, 19 nt, Artificial Sequence
  Description of Artificial Sequence: Synthetic oligonucleotide
uucacacgaacgcuucguu

SEQ ID NO: 855571 - RNA, 19 nt, Artificial Sequence
  Description of Artificial Sequence: Synthetic oligonucleotide
aacacgggcgcaaacgguu

SEQ ID NO: 855572 - RNA, 19 nt, Artificial Sequence
  Description of Artificial Sequence: Synthetic oligonucleotide
aaugcaaccugcagugcuu

SEQ ID NO: 855573 - RNA, 19 nt, Artificial Sequence
  Description of Artificial Sequence: Synthetic oligonucleotide
auaagacuaacgagcgacu

SEQ ID NO: 855574 - RNA, 19 nt, Artificial Sequence
  Description of Artificial Sequence: Synthetic oligonucleotide
acacggcuggguuuuauua

SEQ ID NO: 855575 - RNA, 19 nt, Artificial Sequence
  Description of Artificial Sequence: Synthetic oligonucleotide
agccaaucgcaaucuaaau

SEQ ID NO: 855576 - RNA, 19 nt, Artificial Sequence
  Description of Artificial Sequence: Synthetic oligonucleotide
aggcgaaggaauauccuca

SEQ ID NO: 855577 - RNA, 19 nt, Artificial Sequence
  Description of Artificial Sequence: Synthetic oligonucleotide
guuucaugacguuuauacu

SEQ ID NO: 855578 - RNA, 19 nt, Artificial Sequence
  Description of Artificial Sequence: Synthetic oligonucleotide
aucucgauacagugaucca

SEQ ID NO: 855579 - RNA, 19 nt, Artificial Sequence
  Description of Artificial Sequence: Synthetic oligonucleotide
agacgucaucucgauacag

SEQ ID NO: 855580 - RNA, 19 nt, Artificial Sequence
  Description of Artificial Sequence: Synthetic oligonucleotide
guuuucacacgaacgcuuc

SEQ ID NO: 855581 - RNA, 19 nt, Artificial Sequence
  Description of Artificial Sequence: Synthetic oligonucleotide
uuugcgugugugacucaaa

SEQ ID NO: 855582 - RNA, 19 nt, Artificial Sequence
  Description of Artificial Sequence: Synthetic oligonucleotide
agaaguuacagcagauaua

SEQ ID NO: 855583 - RNA, 19 nt, Artificial Sequence
  Description of Artificial Sequence: Synthetic oligonucleotide
ccgauuucccuuauucaag

SEQ ID NO: 855584 - RNA, 19 nt, Artificial Sequence
  Description of Artificial Sequence: Synthetic oligonucleotide
augcccuuagcauucucuu

SEQ ID NO: 855585 - RNA, 19 nt, Artificial Sequence
  Description of Artificial Sequence: Synthetic oligonucleotide
uucccuuauucaaguuuau

SEQ ID NO: 855586 - RNA, 19 nt, Artificial Sequence
  Description of Artificial Sequence: Synthetic oligonucleotide
ggcuggguuuuauuaagac

SEQ ID NO: 855587 - RNA, 19 nt, Artificial Sequence
  Description of Artificial Sequence: Synthetic oligonucleotide
cuccuucgaggcuguaagc

SEQ ID NO: 855588 - RNA, 19 nt, Artificial Sequence
  Description of Artificial Sequence: Synthetic oligonucleotide
acaagaaguuacagcagau

SEQ ID NO: 855589 - RNA, 19 nt, Artificial Sequence
  Description of Artificial Sequence: Synthetic oligonucleotide
augcaaccugcagugcuuc

SEQ ID NO: 855590 - RNA, 19 nt, Artificial Sequence
  Description of Artificial Sequence: Synthetic oligonucleotide
gaggaaaaugagaguggca

SEQ ID NO: 855591 - RNA, 19 nt, Artificial Sequence
  Description of Artificial Sequence: Synthetic oligonucleotide
ucuaaaugcuaugcuccuu

SEQ ID NO: 855592 - RNA, 19 nt, Artificial Sequence
  Description of Artificial Sequence: Synthetic oligonucleotide
cugauguguaauagccaca

SEQ ID NO: 855593 - RNA, 19 nt, Artificial Sequence
  Description of Artificial Sequence: Synthetic oligonucleotide
acacucuggugagucauca

SEQ ID NO: 855594 - RNA, 19 nt, Artificial Sequence
  Description of Artificial Sequence: Synthetic oligonucleotide
gcuuuaaaggcaccaacua

SEQ ID NO: 855595 - RNA, 19 nt, Artificial Sequence
  Description of Artificial Sequence: Synthetic oligonucleotide
aaccauccaacugcagcau

SEQ ID NO: 855596 - RNA, 19 nt, Artificial Sequence
  Description of Artificial Sequence: Synthetic oligonucleotide
cacacauaaggcgaaggaa

SEQ ID NO: 855597 - RNA, 19 nt, Artificial Sequence
  Description of Artificial Sequence: Synthetic oligonucleotide
gcgcaaacgguuuucccug

SEQ ID NO: 855598 - RNA, 19 nt, Artificial Sequence
  Description of Artificial Sequence: Synthetic oligonucleotide
agucgucccuucaaagucu

SEQ ID NO: 855599 - RNA, 19 nt, Artificial Sequence
  Description of Artificial Sequence: Synthetic oligonucleotide
gacgagugccucaguuucc

SEQ ID NO: 855600 - RNA, 19 nt, Artificial Sequence
  Description of Artificial Sequence: Synthetic oligonucleotide
ugucugaacacgggcgcaa

SEQ ID NO: 855601 - RNA, 19 nt, Artificial Sequence
  Description of Artificial Sequence: Synthetic oligonucleotide
gggaagaccagaagccugc

SEQ ID NO: 855602 - RNA, 19 nt, Artificial Sequence
  Description of Artificial Sequence: Synthetic oligonucleotide
aggcaccaacuaaagagca

SEQ ID NO: 855603 - RNA, 19 nt, Artificial Sequence
  Description of Artificial Sequence: Synthetic oligonucleotide
cgcaaucuaaaugcuaugc

SEQ ID NO: 855604 - RNA, 19 nt, Artificial Sequence
  Description of Artificial Sequence: Synthetic oligonucleotide
ccuucauugucucaccaca

SEQ ID NO: 855605 - RNA, 19 nt, Artificial Sequence
  Description of Artificial Sequence: Synthetic oligonucleotide
ggaaagucgucccuucaaa

SEQ ID NO: 855606 - RNA, 19 nt, Artificial Sequence
  Description of Artificial Sequence: Synthetic oligonucleotide
auccaaccgauuucccuua

SEQ ID NO: 855607 - RNA, 19 nt, Artificial Sequence
  Description of Artificial Sequence: Synthetic oligonucleotide
caacuaaaauuugaacaua

SEQ ID NO: 855608 - RNA, 19 nt, Artificial Sequence
  Description of Artificial Sequence: Synthetic oligonucleotide
accaacuaaagagcauuua

SEQ ID NO: 855609 - RNA, 19 nt, Artificial Sequence
  Description of Artificial Sequence: Synthetic oligonucleotide
acgagugccucaguuuccu

SEQ ID NO: 855610 - RNA, 19 nt, Artificial Sequence
  Description of Artificial Sequence: Synthetic oligonucleotide
uguuugcgugugugacuca

SEQ ID NO: 855611 - RNA, 19 nt, Artificial Sequence
  Description of Artificial Sequence: Synthetic oligonucleotide
auaauguacuguagccuua

SEQ ID NO: 855612 - RNA, 19 nt, Artificial Sequence
  Description of Artificial Sequence: Synthetic oligonucleotide
agaagccaaucgcaaucua

SEQ ID NO: 855613 - RNA, 19 nt, Artificial Sequence
  Description of Artificial Sequence: Synthetic oligonucleotide
cacggcuggguuuuauuaa

SEQ ID NO: 855614 - RNA, 19 nt, Artificial Sequence
  Description of Artificial Sequence: Synthetic oligonucleotide
ugcuccuucgaggcuguaa

SEQ ID NO: 855615 - RNA, 19 nt, Artificial Sequence
  Description of Artificial Sequence: Synthetic oligonucleotide
acgggcgcaaacgguuuuc

SEQ ID NO: 855616 - RNA, 19 nt, Artificial Sequence
  Description of Artificial Sequence: Synthetic oligonucleotide
gacgucaucucgauacagu

SEQ ID NO: 855617 - RNA, 19 nt, Artificial Sequence
  Description of Artificial Sequence: Synthetic oligonucleotide
uccaaccgauuucccuuau

SEQ ID NO: 855618 - RNA, 19 nt, Artificial Sequence
  Description of Artificial Sequence: Synthetic oligonucleotide
cuguaagcugacagacaga

SEQ ID NO: 855619 - RNA, 19 nt, Artificial Sequence
  Description of Artificial Sequence: Synthetic oligonucleotide
caugacguuuauacugagu

SEQ ID NO: 855620 - RNA, 19 nt, Artificial Sequence
  Description of Artificial Sequence: Synthetic oligonucleotide
augucugaacacgggcgca

SEQ ID NO: 855621 - RNA, 19 nt, Artificial Sequence
  Description of Artificial Sequence: Synthetic oligonucleotide
ggcgcaaacgguuuucccu

SEQ ID NO: 855622 - RNA, 19 nt, Artificial Sequence
  Description of Artificial Sequence: Synthetic oligonucleotide
cauucaaacuaugcccuua

SEQ ID NO: 855623 - RNA, 19 nt, Artificial Sequence
  Description of Artificial Sequence: Synthetic oligonucleotide
gcagccaaaauggcgacaa

SEQ ID NO: 855624 - RNA, 19 nt, Artificial Sequence
  Description of Artificial Sequence: Synthetic oligonucleotide
augguuugacagauacuuu

SEQ ID NO: 855625 - RNA, 19 nt, Artificial Sequence
  Description of Artificial Sequence: Synthetic oligonucleotide
gacaacacggcuggguuuu

SEQ ID NO: 855626 - RNA, 19 nt, Artificial Sequence
  Description of Artificial Sequence: Synthetic oligonucleotide
cacugcuguauuaaaccau

SEQ ID NO: 855627 - RNA, 19 nt, Artificial Sequence
  Description of Artificial Sequence: Synthetic oligonucleotide
uucuggugacgaugacuuu

SEQ ID NO: 855628 - RNA, 19 nt, Artificial Sequence
  Description of Artificial Sequence: Synthetic oligonucleotide
guaagcugacagacagaga

SEQ ID NO: 855629 - RNA, 19 nt, Artificial Sequence
  Description of Artificial Sequence: Synthetic oligonucleotide
gacgaugacuuucggucuu

SEQ ID NO: 855630 - RNA, 19 nt, Artificial Sequence
  Description of Artificial Sequence: Synthetic oligonucleotide
cagccaaaauggcgacaac

SEQ ID NO: 855631 - RNA, 19 nt, Artificial Sequence
  Description of Artificial Sequence: Synthetic oligonucleotide
ucgaggcuguaagcugaca

SEQ ID NO: 855632 - RNA, 19 nt, Artificial Sequence
  Description of Artificial Sequence: Synthetic oligonucleotide
gccauucaaacuaugcccu

SEQ ID NO: 855633 - RNA, 19 nt, Artificial Sequence
  Description of Artificial Sequence: Synthetic oligonucleotide
gggcgcaaacgguuuuccc

SEQ ID NO: 855634 - RNA, 19 nt, Artificial Sequence
  Description of Artificial Sequence: Synthetic oligonucleotide
gucuaauccauaggucccu

SEQ ID NO: 855635 - RNA, 19 nt, Artificial Sequence
  Description of Artificial Sequence: Synthetic oligonucleotide
cccugcugauguguaauag

SEQ ID NO: 855636 - RNA, 19 nt, Artificial Sequence
  Description of Artificial Sequence: Synthetic oligonucleotide
gcacuuacucugacuggag

SEQ ID NO: 855637 - RNA, 19 nt, Artificial Sequence
  Description of Artificial Sequence: Synthetic oligonucleotide
acguuuauacugaguucuu

SEQ ID NO: 855638 - RNA, 19 nt, Artificial Sequence
  Description of Artificial Sequence: Synthetic oligonucleotide
gaacacgggcgcaaacggu

SEQ ID NO: 855639 - RNA, 19 nt, Artificial Sequence
  Description of Artificial Sequence: Synthetic oligonucleotide
caguauuugguagccaguu

SEQ ID NO: 855640 - RNA, 19 nt, Artificial Sequence
  Description of Artificial Sequence: Synthetic oligonucleotide
gacuaacgagcgacugaaa

SEQ ID NO: 855641 - RNA, 19 nt, Artificial Sequence
  Description of Artificial Sequence: Synthetic oligonucleotide
caccaacuaaagagcauuu

SEQ ID NO: 855642 - RNA, 19 nt, Artificial Sequence
  Description of Artificial Sequence: Synthetic oligonucleotide
gcgaaggaauauccucaga

SEQ ID NO: 855643 - RNA, 19 nt, Artificial Sequence
  Description of Artificial Sequence: Synthetic oligonucleotide
auacaugguuugacagaua

SEQ ID NO: 855644 - RNA, 19 nt, Artificial Sequence
  Description of Artificial Sequence: Synthetic oligonucleotide
cuacugcuacuaaguuaaa

SEQ ID NO: 855645 - RNA, 19 nt, Artificial Sequence
  Description of Artificial Sequence: Synthetic oligonucleotide
gcaccaacuaaagagcauu

SEQ ID NO: 855646 - RNA, 19 nt, Artificial Sequence
  Description of Artificial Sequence: Synthetic oligonucleotide
acacgggcgcaaacgguuu

SEQ ID NO: 855647 - RNA, 19 nt, Artificial Sequence
  Description of Artificial Sequence: Synthetic oligonucleotide
cgauuucccuuauucaagu

SEQ ID NO: 855648 - RNA, 19 nt, Artificial Sequence
  Description of Artificial Sequence: Synthetic oligonucleotide
gcuaugcuccuucgaggcu

SEQ ID NO: 855649 - RNA, 19 nt, Artificial Sequence
  Description of Artificial Sequence: Synthetic oligonucleotide
caacugcagcauacacgcu

SEQ ID NO: 855650 - RNA, 19 nt, Artificial Sequence
  Description of Artificial Sequence: Synthetic oligonucleotide
acaacacggcuggguuuua

SEQ ID NO: 855651 - RNA, 19 nt, Artificial Sequence
  Description of Artificial Sequence: Synthetic oligonucleotide
cgggcgcaaacgguuuucc

SEQ ID NO: 855652 - RNA, 19 nt, Artificial Sequence
  Description of Artificial Sequence: Synthetic oligonucleotide
gucgucccuucaaagucuu

SEQ ID NO: 855653 - RNA, 19 nt, Artificial Sequence
  Description of Artificial Sequence: Synthetic oligonucleotide
cggcuggguuuuauuaaga

SEQ ID NO: 855654 - RNA, 19 nt, Artificial Sequence
  Description of Artificial Sequence: Synthetic oligonucleotide
gcaaacgguuuucccuguu

SEQ ID NO: 855655 - RNA, 19 nt, Artificial Sequence
  Description of Artificial Sequence: Synthetic oligonucleotide
caacacggcuggguuuuau

SEQ ID NO: 855656 - RNA, 19 nt, Artificial Sequence
  Description of Artificial Sequence: Synthetic oligonucleotide
cacgggcgcaaacgguuuu

SEQ ID NO: 855657 - RNA, 19 nt, Artificial Sequence
  Description of Artificial Sequence: Synthetic oligonucleotide
ccaaccgauuucccuuauu

SEQ ID NO: 855658 - RNA, 19 nt, Artificial Sequence
  Description of Artificial Sequence: Synthetic oligonucleotide
cgcaaacgguuuucccugu

SEQ ID NO: 855659 - RNA, 19 nt, Artificial Sequence
  Description of Artificial Sequence: Synthetic oligonucleotide
cgacaacacggcuggguuu

SEQ ID NO: 855660 - RNA, 19 nt, Artificial Sequence
  Description of Artificial Sequence: Synthetic oligonucleotide
uaaacaauagguuagcgcu

SEQ ID NO: 855661 - RNA, 19 nt, Artificial Sequence
  Description of Artificial Sequence: Synthetic oligonucleotide
acuggaauuugauagauag

SEQ ID NO: 855662 - RNA, 19 nt, Artificial Sequence
  Description of Artificial Sequence: Synthetic oligonucleotide
aagcccgugaacuuggccc

SEQ ID NO: 855663 - RNA, 19 nt, Artificial Sequence
  Description of Artificial Sequence: Synthetic oligonucleotide
aauuggaacccauccacac

SEQ ID NO: 855664 - RNA, 19 nt, Artificial Sequence
  Description of Artificial Sequence: Synthetic oligonucleotide
aaauguaacagcaagcccu

SEQ ID NO: 855665 - RNA, 19 nt, Artificial Sequence
  Description of Artificial Sequence: Synthetic oligonucleotide
agugagacggcucgaaucc

SEQ ID NO: 855666 - RNA, 19 nt, Artificial Sequence
  Description of Artificial Sequence: Synthetic oligonucleotide
aauagguuagcgcuggcug

SEQ ID NO: 855667 - RNA, 19 nt, Artificial Sequence
  Description of Artificial Sequence: Synthetic oligonucleotide
aauaauucaaaaggccagg

SEQ ID NO: 855668 - RNA, 19 nt, Artificial Sequence
  Description of Artificial Sequence: Synthetic oligonucleotide
ucuucggccaccuugaucu

SEQ ID NO: 855669 - RNA, 19 nt, Artificial Sequence
  Description of Artificial Sequence: Synthetic oligonucleotide
aaauaauucaaaaggccag

SEQ ID NO: 855670 - RNA, 19 nt, Artificial Sequence
  Description of Artificial Sequence: Synthetic oligonucleotide
ucuuuaaaaucuuccuggg

SEQ ID NO: 855671 - RNA, 19 nt, Artificial Sequence
  Description of Artificial Sequence: Synthetic oligonucleotide
cuaaacaauagguuagcgc

SEQ ID NO: 855672 - RNA, 19 nt, Artificial Sequence
  Description of Artificial Sequence: Synthetic oligonucleotide
agucccugcaaucaagagc

SEQ ID NO: 855673 - RNA, 19 nt, Artificial Sequence
  Description of Artificial Sequence: Synthetic oligonucleotide
aggaacgacagcuuccugc

SEQ ID NO: 855674 - RNA, 19 nt, Artificial Sequence
  Description of Artificial Sequence: Synthetic oligonucleotide
cacaauuugcugcaggucg

SEQ ID NO: 855675 - RNA, 19 nt, Artificial Sequence
  Description of Artificial Sequence: Synthetic oligonucleotide
agggucaagccacauaugg

SEQ ID NO: 855676 - RNA, 19 nt, Artificial Sequence
  Description of Artificial Sequence: Synthetic oligonucleotide
acaucccgaaauuggaacc

SEQ ID NO: 855677 - RNA, 19 nt, Artificial Sequence
  Description of Artificial Sequence: Synthetic oligonucleotide
guuggugcuaaacaauagg

SEQ ID NO: 855678 - RNA, 19 nt, Artificial Sequence
  Description of Artificial Sequence: Synthetic oligonucleotide
ucaaauaccgagugacuag

SEQ ID NO: 855679 - RNA, 19 nt, Artificial Sequence
  Description of Artificial Sequence: Synthetic oligonucleotide
cagacuuauaccagcaggg

SEQ ID NO: 855680 - RNA, 19 nt, Artificial Sequence
  Description of Artificial Sequence: Synthetic oligonucleotide
uacgaaggccugaaggucg

SEQ ID NO: 855681 - RNA, 19 nt, Artificial Sequence
  Description of Artificial Sequence: Synthetic oligonucleotide
uuggugcuaaacaauaggu

SEQ ID NO: 855682 - RNA, 19 nt, Artificial Sequence
  Description of Artificial Sequence: Synthetic oligonucleotide
ucuuagacagguaggguca

SEQ ID NO: 855683 - RNA, 19 nt, Artificial Sequence
  Description of Artificial Sequence: Synthetic oligonucleotide
aacaauagguuagcgcugg

SEQ ID NO: 855684 - RNA, 19 nt, Artificial Sequence
  Description of Artificial Sequence: Synthetic oligonucleotide
aacgacagcuuccugcaag

SEQ ID NO: 855685 - RNA, 19 nt, Artificial Sequence
  Description of Artificial Sequence: Synthetic oligonucleotide
acuuauaccagcagggagg

SEQ ID NO: 855686 - RNA, 19 nt, Artificial Sequence
  Description of Artificial Sequence: Synthetic oligonucleotide
accuacgaaggccugaagg

SEQ ID NO: 855687 - RNA, 19 nt, Artificial Sequence
  Description of Artificial Sequence: Synthetic oligonucleotide
aagucgguuccauugacgu

SEQ ID NO: 855688 - RNA, 19 nt, Artificial Sequence
  Description of Artificial Sequence: Synthetic oligonucleotide
agggugguaggucuuagac

SEQ ID NO: 855689 - RNA, 19 nt, Artificial Sequence
  Description of Artificial Sequence: Synthetic oligonucleotide
agacagguagggucaagcc

SEQ ID NO: 855690 - RNA, 19 nt, Artificial Sequence
  Description of Artificial Sequence: Synthetic oligonucleotide
gacuuauaccagcagggag

SEQ ID NO: 855691 - RNA, 19 nt, Artificial Sequence
  Description of Artificial Sequence: Synthetic oligonucleotide
ucgccgacgcgauagaggg

SEQ ID NO: 855692 - RNA, 19 nt, Artificial Sequence
  Description of Artificial Sequence: Synthetic oligonucleotide
uguuggugcuaaacaauag

SEQ ID NO: 855693 - RNA, 19 nt, Artificial Sequence
  Description of Artificial Sequence: Synthetic oligonucleotide
ucgaguauggucacaauuu

SEQ ID NO: 855694 - RNA, 19 nt, Artificial Sequence
  Description of Artificial Sequence: Synthetic oligonucleotide
gucccugcaaucaagagcc

SEQ ID NO: 855695 - RNA, 19 nt, Artificial Sequence
  Description of Artificial Sequence: Synthetic oligonucleotide
auagguuagcgcuggcugg

SEQ ID NO: 855696 - RNA, 19 nt, Artificial Sequence
  Description of Artificial Sequence: Synthetic oligonucleotide
auaauucaaaaggccaggg

SEQ ID NO: 855697 - RNA, 19 nt, Artificial Sequence
  Description of Artificial Sequence: Synthetic oligonucleotide
gagagcguuccuuaccccg

SEQ ID NO: 855698 - RNA, 19 nt, Artificial Sequence
  Description of Artificial Sequence: Synthetic oligonucleotide
gucaacagcaggucgcugg

SEQ ID NO: 855699 - RNA, 19 nt, Artificial Sequence
  Description of Artificial Sequence: Synthetic oligonucleotide
agguuggcggccucuagcc

SEQ ID NO: 855700 - RNA, 19 nt, Artificial Sequence
  Description of Artificial Sequence: Synthetic oligonucleotide
gauaggagcuggucaacag

SEQ ID NO: 855701 - RNA, 19 nt, Artificial Sequence
  Description of Artificial Sequence: Synthetic oligonucleotide
auagcugaaaacagggguc

SEQ ID NO: 855702 - RNA, 19 nt, Artificial Sequence
  Description of Artificial Sequence: Synthetic oligonucleotide
uugagcaccaccagguaac

SEQ ID NO: 855703 - RNA, 19 nt, Artificial Sequence
  Description of Artificial Sequence: Synthetic oligonucleotide
ggaaauguaacagcaagcc

SEQ ID NO: 855704 - RNA, 19 nt, Artificial Sequence
  Description of Artificial Sequence: Synthetic oligonucleotide
ugcagaaccggugacacga

SEQ ID NO: 855705 - RNA, 19 nt, Artificial Sequence
  Description of Artificial Sequence: Synthetic oligonucleotide
ugcaaucaagagccuaucc

SEQ ID NO: 855706 - RNA, 19 nt, Artificial Sequence
  Description of Artificial Sequence: Synthetic oligonucleotide
uuaugugucccggaguuug

SEQ ID NO: 855707 - RNA, 19 nt, Artificial Sequence
  Description of Artificial Sequence: Synthetic oligonucleotide
ucauguucgugcuuaugug

SEQ ID NO: 855708 - RNA, 19 nt, Artificial Sequence
  Description of Artificial Sequence: Synthetic oligonucleotide
aauaccgagugacuagcaa

SEQ ID NO: 855709 - RNA, 19 nt, Artificial Sequence
  Description of Artificial Sequence: Synthetic oligonucleotide
aaugaugugaaugcucuuu

SEQ ID NO: 855710 - RNA, 19 nt, Artificial Sequence
  Description of Artificial Sequence: Synthetic oligonucleotide
cagguaacgcucauucugg

SEQ ID NO: 855711 - RNA, 19 nt, Artificial Sequence
  Description of Artificial Sequence: Synthetic oligonucleotide
aggagaagaugccagguga

SEQ ID NO: 855712 - RNA, 19 nt, Artificial Sequence
  Description of Artificial Sequence: Synthetic oligonucleotide
cugcaagccgaucucaucc

SEQ ID NO: 855713 - RNA, 19 nt, Artificial Sequence
  Description of Artificial Sequence: Synthetic oligonucleotide
ugguucuugugaauugggc

SEQ ID NO: 855714 - RNA, 19 nt, Artificial Sequence
  Description of Artificial Sequence: Synthetic oligonucleotide
uccacaucccgaaauugga

SEQ ID NO: 855715 - RNA, 19 nt, Artificial Sequence
  Description of Artificial Sequence: Synthetic oligonucleotide
gaauggggccuccacaggc

SEQ ID NO: 855716 - RNA, 19 nt, Artificial Sequence
  Description of Artificial Sequence: Synthetic oligonucleotide
uugugaauugggcccaaca

SEQ ID NO: 855717 - RNA, 19 nt, Artificial Sequence
  Description of Artificial Sequence: Synthetic oligonucleotide
uucgaguauggucacaauu

SEQ ID NO: 855718 - RNA, 19 nt, Artificial Sequence
  Description of Artificial Sequence: Synthetic oligonucleotide
uccgguucuaguucguuca

SEQ ID NO: 855719 - RNA, 19 nt, Artificial Sequence
  Description of Artificial Sequence: Synthetic oligonucleotide
aucaagagccuauccucac

SEQ ID NO: 855720 - RNA, 19 nt, Artificial Sequence
  Description of Artificial Sequence: Synthetic oligonucleotide
ucauaggcugcuucuccgg

SEQ ID NO: 855721 - RNA, 19 nt, Artificial Sequence
  Description of Artificial Sequence: Synthetic oligonucleotide
gcagacuuauaccagcagg

SEQ ID NO: 855722 - RNA, 19 nt, Artificial Sequence
  Description of Artificial Sequence: Synthetic oligonucleotide
gucuuagacagguaggguc

SEQ ID NO: 855723 - RNA, 19 nt, Artificial Sequence
  Description of Artificial Sequence: Synthetic oligonucleotide
ugcuccccaguaaaacugg

SEQ ID NO: 855724 - RNA, 19 nt, Artificial Sequence
  Description of Artificial Sequence: Synthetic oligonucleotide
guggauucgaguaugguca

SEQ ID NO: 855725 - RNA, 19 nt, Artificial Sequence
  Description of Artificial Sequence: Synthetic oligonucleotide
gaaccggugacacgacacg

SEQ ID NO: 855726 - RNA, 19 nt, Artificial Sequence
  Description of Artificial Sequence: Synthetic oligonucleotide
aaggucgccgacgcgauag

SEQ ID NO: 855727 - RNA, 19 nt, Artificial Sequence
  Description of Artificial Sequence: Synthetic oligonucleotide
agcccgugaacuuggcccc

SEQ ID NO: 855728 - RNA, 19 nt, Artificial Sequence
  Description of Artificial Sequence: Synthetic oligonucleotide
uguaccggcagcucacggc

SEQ ID NO: 855729 - RNA, 19 nt, Artificial Sequence
  Description of Artificial Sequence: Synthetic oligonucleotide
gugcuaaacaauagguuag

SEQ ID NO: 855730 - RNA, 19 nt, Artificial Sequence
  Description of Artificial Sequence: Synthetic oligonucleotide
caaauaccgagugacuagc

SEQ ID NO: 855731 - RNA, 19 nt, Artificial Sequence
  Description of Artificial Sequence: Synthetic oligonucleotide
aaacaauagguuagcgcug

SEQ ID NO: 855732 - RNA, 19 nt, Artificial Sequence
  Description of Artificial Sequence: Synthetic oligonucleotide
cuucuccgguucuaguucg

SEQ ID NO: 855733 - RNA, 19 nt, Artificial Sequence
  Description of Artificial Sequence: Synthetic oligonucleotide
ugugucccggaguuugggg

SEQ ID NO: 855734 - RNA, 19 nt, Artificial Sequence
  Description of Artificial Sequence: Synthetic oligonucleotide
caagucgguuccauugacg

SEQ ID NO: 855735 - RNA, 19 nt, Artificial Sequence
  Description of Artificial Sequence: Synthetic oligonucleotide
aguacccugcucuuggccu

SEQ ID NO: 855736 - RNA, 19 nt, Artificial Sequence
  Description of Artificial Sequence: Synthetic oligonucleotide
gaagucaccgugcaacaga

SEQ ID NO: 855737 - RNA, 19 nt, Artificial Sequence
  Description of Artificial Sequence: Synthetic oligonucleotide
agaaccggugacacgacac

SEQ ID NO: 855738 - RNA, 19 nt, Artificial Sequence
  Description of Artificial Sequence: Synthetic oligonucleotide
accagaccguucuucuccc

SEQ ID NO: 855739 - RNA, 19 nt, Artificial Sequence
  Description of Artificial Sequence: Synthetic oligonucleotide
uugacgucauccuucuggu

SEQ ID NO: 855740 - RNA, 19 nt, Artificial Sequence
  Description of Artificial Sequence: Synthetic oligonucleotide
agagagcguuccuuacccc

SEQ ID NO: 855741 - RNA, 19 nt, Artificial Sequence
  Description of Artificial Sequence: Synthetic oligonucleotide
uucggaccuacgaaggccu

SEQ ID NO: 855742 - RNA, 19 nt, Artificial Sequence
  Description of Artificial Sequence: Synthetic oligonucleotide
ugcuaaacaauagguuagc

SEQ ID NO: 855743 - RNA, 19 nt, Artificial Sequence
  Description of Artificial Sequence: Synthetic oligonucleotide
uucagaccagcuaugccuc

SEQ ID NO: 855744 - RNA, 19 nt, Artificial Sequence
  Description of Artificial Sequence: Synthetic oligonucleotide
auaccgagugacuagcaau

SEQ ID NO: 855745 - RNA, 19 nt, Artificial Sequence
  Description of Artificial Sequence: Synthetic oligonucleotide
aaccggugacacgacacgg

SEQ ID NO: 855746 - RNA, 19 nt, Artificial Sequence
  Description of Artificial Sequence: Synthetic oligonucleotide
uagcugaaaacaggggucc

SEQ ID NO: 855747 - RNA, 19 nt, Artificial Sequence
  Description of Artificial Sequence: Synthetic oligonucleotide
ggugcuaaacaauagguua

SEQ ID NO: 855748 - RNA, 19 nt, Artificial Sequence
  Description of Artificial Sequence: Synthetic oligonucleotide
uggugcuaaacaauagguu

SEQ ID NO: 855749 - RNA, 19 nt, Artificial Sequence
  Description of Artificial Sequence: Synthetic oligonucleotide
aggucggaggagucagucc

SEQ ID NO: 855750 - RNA, 19 nt, Artificial Sequence
  Description of Artificial Sequence: Synthetic oligonucleotide
ucaagucgguuccauugac

SEQ ID NO: 855751 - RNA, 19 nt, Artificial Sequence
  Description of Artificial Sequence: Synthetic oligonucleotide
caccagaccguucuucucc

SEQ ID NO: 855752 - RNA, 19 nt, Artificial Sequence
  Description of Artificial Sequence: Synthetic oligonucleotide
ucacucagccaccggaacu

SEQ ID NO: 855753 - RNA, 19 nt, Artificial Sequence
  Description of Artificial Sequence: Synthetic oligonucleotide
ugagacggcucgaauccug

SEQ ID NO: 855754 - RNA, 19 nt, Artificial Sequence
  Description of Artificial Sequence: Synthetic oligonucleotide
gacacacuccagcugcacc

SEQ ID NO: 855755 - RNA, 19 nt, Artificial Sequence
  Description of Artificial Sequence: Synthetic oligonucleotide
acaauagguuagcgcuggc

SEQ ID NO: 855756 - RNA, 19 nt, Artificial Sequence
  Description of Artificial Sequence: Synthetic oligonucleotide
auuuuguaugcuccccagu

SEQ ID NO: 855757 - RNA, 19 nt, Artificial Sequence
  Description of Artificial Sequence: Synthetic oligonucleotide
uaccgagugacuagcaauu

SEQ ID NO: 855758 - RNA, 19 nt, Artificial Sequence
  Description of Artificial Sequence: Synthetic oligonucleotide
ucaagccacauaugggaaa

SEQ ID NO: 855759 - RNA, 19 nt, Artificial Sequence
  Description of Artificial Sequence: Synthetic oligonucleotide
agaccguucuucuccccgg

SEQ ID NO: 855760 - RNA, 19 nt, Artificial Sequence
  Description of Artificial Sequence: Synthetic oligonucleotide
uugauagauaggagcuggu

SEQ ID NO: 855761 - RNA, 19 nt, Artificial Sequence
  Description of Artificial Sequence: Synthetic oligonucleotide
aaguacaaggaugcaucca

SEQ ID NO: 855762 - RNA, 19 nt, Artificial Sequence
  Description of Artificial Sequence: Synthetic oligonucleotide
agcuaugccucccgcguuc

SEQ ID NO: 855763 - RNA, 19 nt, Artificial Sequence
  Description of Artificial Sequence: Synthetic oligonucleotide
aauuugcugcaggucggag

SEQ ID NO: 855764 - RNA, 19 nt, Artificial Sequence
  Description of Artificial Sequence: Synthetic oligonucleotide
ugcuuaugugucccggagu

SEQ ID NO: 855765 - RNA, 19 nt, Artificial Sequence
  Description of Artificial Sequence: Synthetic oligonucleotide
ccgaaauuggaacccaucc

SEQ ID NO: 855766 - RNA, 19 nt, Artificial Sequence
  Description of Artificial Sequence: Synthetic oligonucleotide
agcaugccaagccagccga

SEQ ID NO: 855767 - RNA, 19 nt, Artificial Sequence
  Description of Artificial Sequence: Synthetic oligonucleotide
aagagccuauccucacuga

SEQ ID NO: 855768 - RNA, 19 nt, Artificial Sequence
  Description of Artificial Sequence: Synthetic oligonucleotide
gauucgaguauggucacaa

SEQ ID NO: 855769 - RNA, 19 nt, Artificial Sequence
  Description of Artificial Sequence: Synthetic oligonucleotide
uaacgcucauucugguccc

SEQ ID NO: 855770 - RNA, 19 nt, Artificial Sequence
  Description of Artificial Sequence: Synthetic oligonucleotide
acggccuguggucagugag

SEQ ID NO: 855771 - RNA, 19 nt, Artificial Sequence
  Description of Artificial Sequence: Synthetic oligonucleotide
cuggauucaucccauggca

SEQ ID NO: 855772 - RNA, 19 nt, Artificial Sequence
  Description of Artificial Sequence: Synthetic oligonucleotide
gauucaucccauggcauga

SEQ ID NO: 855773 - RNA, 19 nt, Artificial Sequence
  Description of Artificial Sequence: Synthetic oligonucleotide
cagugagacggcucgaauc

SEQ ID NO: 855774 - RNA, 19 nt, Artificial Sequence
  Description of Artificial Sequence: Synthetic oligonucleotide
guuggcggccucuagccug

SEQ ID NO: 855775 - RNA, 19 nt, Artificial Sequence
  Description of Artificial Sequence: Synthetic oligonucleotide
caucccgaaauuggaaccc

SEQ ID NO: 855776 - RNA, 19 nt, Artificial Sequence
  Description of Artificial Sequence: Synthetic oligonucleotide
cagaccguucuucuccccg

SEQ ID NO: 855777 - RNA, 19 nt, Artificial Sequence
  Description of Artificial Sequence: Synthetic oligonucleotide
uccuuggacaagcccguga

SEQ ID NO: 855778 - RNA, 19 nt, Artificial Sequence
  Description of Artificial Sequence: Synthetic oligonucleotide
uaguucguucagcuccacc

SEQ ID NO: 855779 - RNA, 19 nt, Artificial Sequence
  Description of Artificial Sequence: Synthetic oligonucleotide
cucacggcagcgcggagcc

SEQ ID NO: 855780 - RNA, 19 nt, Artificial Sequence
  Description of Artificial Sequence: Synthetic oligonucleotide
accguucuucuccccggcc

SEQ ID NO: 855781 - RNA, 19 nt, Artificial Sequence
  Description of Artificial Sequence: Synthetic oligonucleotide
caauuuuguaugcucccca

SEQ ID NO: 855782 - RNA, 19 nt, Artificial Sequence
  Description of Artificial Sequence: Synthetic oligonucleotide
agagccuauccucacugaa

SEQ ID NO: 855783 - RNA, 19 nt, Artificial Sequence
  Description of Artificial Sequence: Synthetic oligonucleotide
ggugacacgacacggccug

SEQ ID NO: 855784 - RNA, 19 nt, Artificial Sequence
  Description of Artificial Sequence: Synthetic oligonucleotide
agccacauaugggaaaugu

SEQ ID NO: 855785 - RNA, 19 nt, Artificial Sequence
  Description of Artificial Sequence: Synthetic oligonucleotide
gcuaaacaauagguuagcg

SEQ ID NO: 855786 - RNA, 19 nt, Artificial Sequence
  Description of Artificial Sequence: Synthetic oligonucleotide
ucgcugguggauucgagua

SEQ ID NO: 855787 - RNA, 19 nt, Artificial Sequence
  Description of Artificial Sequence: Synthetic oligonucleotide
guucggaccuacgaaggcc

SEQ ID NO: 855788 - RNA, 19 nt, Artificial Sequence
  Description of Artificial Sequence: Synthetic oligonucleotide
aaauaccgagugacuagca

SEQ ID NO: 855789 - RNA, 19 nt, Artificial Sequence
  Description of Artificial Sequence: Synthetic oligonucleotide
aagccgaucucauccccau

SEQ ID NO: 855790 - RNA, 19 nt, Artificial Sequence
  Description of Artificial Sequence: Synthetic oligonucleotide
ggucaaucuguuucaaguc

SEQ ID NO: 855791 - RNA, 19 nt, Artificial Sequence
  Description of Artificial Sequence: Synthetic oligonucleotide
uagggucaagccacauaug

SEQ ID NO: 855792 - RNA, 19 nt, Artificial Sequence
  Description of Artificial Sequence: Synthetic oligonucleotide
ucagugagacggcucgaau

SEQ ID NO: 855793 - RNA, 19 nt, Artificial Sequence
  Description of Artificial Sequence: Synthetic oligonucleotide
accggugacacgacacggc

SEQ ID NO: 855794 - RNA, 19 nt, Artificial Sequence
  Description of Artificial Sequence: Synthetic oligonucleotide
ugaucuucaccagaccguu

SEQ ID NO: 855795 - RNA, 19 nt, Artificial Sequence
  Description of Artificial Sequence: Synthetic oligonucleotide
agacuuauaccagcaggga

SEQ ID NO: 855796 - RNA, 19 nt, Artificial Sequence
  Description of Artificial Sequence: Synthetic oligonucleotide
uggauucgaguauggucac

SEQ ID NO: 855797 - RNA, 19 nt, Artificial Sequence
  Description of Artificial Sequence: Synthetic oligonucleotide
gugcacggaagucaccgug

SEQ ID NO: 855798 - RNA, 19 nt, Artificial Sequence
  Description of Artificial Sequence: Synthetic oligonucleotide
cugccggcuaccuucaaca

SEQ ID NO: 855799 - RNA, 19 nt, Artificial Sequence
  Description of Artificial Sequence: Synthetic oligonucleotide
guaccggcagcucacggca

SEQ ID NO: 855800 - RNA, 19 nt, Artificial Sequence
  Description of Artificial Sequence: Synthetic oligonucleotide
ugggacggaggcugucagg

SEQ ID NO: 855801 - RNA, 19 nt, Artificial Sequence
  Description of Artificial Sequence: Synthetic oligonucleotide
ggaacgacagcuuccugca

SEQ ID NO: 855802 - RNA, 19 nt, Artificial Sequence
  Description of Artificial Sequence: Synthetic oligonucleotide
guuccuuaccccgaagguc

SEQ ID NO: 855803 - RNA, 19 nt, Artificial Sequence
  Description of Artificial Sequence: Synthetic oligonucleotide
cacguccugaaaguugagc

SEQ ID NO: 855804 - RNA, 19 nt, Artificial Sequence
  Description of Artificial Sequence: Synthetic oligonucleotide
uaugccucccgcguucgga

SEQ ID NO: 855805 - RNA, 19 nt, Artificial Sequence
  Description of Artificial Sequence: Synthetic oligonucleotide
gggucaaucuguuucaagu

SEQ ID NO: 855806 - RNA, 19 nt, Artificial Sequence
  Description of Artificial Sequence: Synthetic oligonucleotide
gccgacgcgauagagggcg

SEQ ID NO: 855807 - RNA, 19 nt, Artificial Sequence
  Description of Artificial Sequence: Synthetic oligonucleotide
gucgccgacgcgauagagg

SEQ ID NO: 855808 - RNA, 19 nt, Artificial Sequence
  Description of Artificial Sequence: Synthetic oligonucleotide
ucagaccagcuaugccucc

SEQ ID NO: 855809 - RNA, 19 nt, Artificial Sequence
  Description of Artificial Sequence: Synthetic oligonucleotide
cagucccugcaaucaagag

SEQ ID NO: 855810 - RNA, 19 nt, Artificial Sequence
  Description of Artificial Sequence: Synthetic oligonucleotide
uuagcgcuggcuggcagac

SEQ ID NO: 855811 - RNA, 19 nt, Artificial Sequence
  Description of Artificial Sequence: Synthetic oligonucleotide
ugccggcuaccuucaacag

SEQ ID NO: 855812 - RNA, 19 nt, Artificial Sequence
  Description of Artificial Sequence: Synthetic oligonucleotide
cacgacacggccugugguc

SEQ ID NO: 855813 - RNA, 19 nt, Artificial Sequence
  Description of Artificial Sequence: Synthetic oligonucleotide
augaccacggcgcccgcca

SEQ ID NO: 855814 - RNA, 19 nt, Artificial Sequence
  Description of Artificial Sequence: Synthetic oligonucleotide
cuauccucacugaaguucu

SEQ ID NO: 855815 - RNA, 19 nt, Artificial Sequence
  Description of Artificial Sequence: Synthetic oligonucleotide
uguggucagugagacggcu

SEQ ID NO: 855816 - RNA, 19 nt, Artificial Sequence
  Description of Artificial Sequence: Synthetic oligonucleotide
acgaaggccugaaggucgc

SEQ ID NO: 855817 - RNA, 19 nt, Artificial Sequence
  Description of Artificial Sequence: Synthetic oligonucleotide
gagacggcucgaauccugc

SEQ ID NO: 855818 - RNA, 19 nt, Artificial Sequence
  Description of Artificial Sequence: Synthetic oligonucleotide
gguucuaguucguucagcu

SEQ ID NO: 855819 - RNA, 19 nt, Artificial Sequence
  Description of Artificial Sequence: Synthetic oligonucleotide
agguaacgcucauucuggu

SEQ ID NO: 855820 - RNA, 19 nt, Artificial Sequence
  Description of Artificial Sequence: Synthetic oligonucleotide
uagccggguacuguuggug

SEQ ID NO: 855821 - RNA, 19 nt, Artificial Sequence
  Description of Artificial Sequence: Synthetic oligonucleotide
caguagcggacguaggaga

SEQ ID NO: 855822 - RNA, 19 nt, Artificial Sequence
  Description of Artificial Sequence: Synthetic oligonucleotide
ccuauccucacugaaguuc

SEQ ID NO: 855823 - RNA, 19 nt, Artificial Sequence
  Description of Artificial Sequence: Synthetic oligonucleotide
gcaaucaagagccuauccu

SEQ ID NO: 855824 - RNA, 19 nt, Artificial Sequence
  Description of Artificial Sequence: Synthetic oligonucleotide
gaccguucuucuccccggc

SEQ ID NO: 855825 - RNA, 19 nt, Artificial Sequence
  Description of Artificial Sequence: Synthetic oligonucleotide
guuagcgcuggcuggcaga

SEQ ID NO: 855826 - RNA, 19 nt, Artificial Sequence
  Description of Artificial Sequence: Synthetic oligonucleotide
ucccgaaauuggaacccau

SEQ ID NO: 855827 - RNA, 19 nt, Artificial Sequence
  Description of Artificial Sequence: Synthetic oligonucleotide
uuaccccgaaggucacuca

SEQ ID NO: 855828 - RNA, 19 nt, Artificial Sequence
  Description of Artificial Sequence: Synthetic oligonucleotide
agugcacggaagucaccgu

SEQ ID NO: 855829 - RNA, 19 nt, Artificial Sequence
  Description of Artificial Sequence: Synthetic oligonucleotide
ggcagacuuauaccagcag

SEQ ID NO: 855830 - RNA, 19 nt, Artificial Sequence
  Description of Artificial Sequence: Synthetic oligonucleotide
cuguaccggcagcucacgg

SEQ ID NO: 855831 - RNA, 19 nt, Artificial Sequence
  Description of Artificial Sequence: Synthetic oligonucleotide
gacgcgauagagggcgccc

SEQ ID NO: 855832 - RNA, 19 nt, Artificial Sequence
  Description of Artificial Sequence: Synthetic oligonucleotide
gaccagcuaugccucccgc

SEQ ID NO: 855833 - RNA, 19 nt, Artificial Sequence
  Description of Artificial Sequence: Synthetic oligonucleotide
auucgaguauggucacaau

SEQ ID NO: 855834 - RNA, 19 nt, Artificial Sequence
  Description of Artificial Sequence: Synthetic oligonucleotide
cccauggcaugaauggggc

SEQ ID NO: 855835 - RNA, 19 nt, Artificial Sequence
  Description of Artificial Sequence: Synthetic oligonucleotide
ugguggauucgaguauggu

SEQ ID NO: 855836 - RNA, 19 nt, Artificial Sequence
  Description of Artificial Sequence: Synthetic oligonucleotide
cugggacggaggcugucag

SEQ ID NO: 855837 - RNA, 19 nt, Artificial Sequence
  Description of Artificial Sequence: Synthetic oligonucleotide
ggagccuaaacugggguca

SEQ ID NO: 855838 - RNA, 19 nt, Artificial Sequence
  Description of Artificial Sequence: Synthetic oligonucleotide
guagcggacguaggagaag

SEQ ID NO: 855839 - RNA, 19 nt, Artificial Sequence
  Description of Artificial Sequence: Synthetic oligonucleotide
agcguuccuuaccccgaag

SEQ ID NO: 855840 - RNA, 19 nt, Artificial Sequence
  Description of Artificial Sequence: Synthetic oligonucleotide
gaggaggucagugcacgga

SEQ ID NO: 855841 - RNA, 19 nt, Artificial Sequence
  Description of Artificial Sequence: Synthetic oligonucleotide
cagccuccaaaacaauaca

SEQ ID NO: 855842 - RNA, 19 nt, Artificial Sequence
  Description of Artificial Sequence: Synthetic oligonucleotide
auaggcugcuucuccgguu

SEQ ID NO: 855843 - RNA, 19 nt, Artificial Sequence
  Description of Artificial Sequence: Synthetic oligonucleotide
ucggaccuacgaaggccug

SEQ ID NO: 855844 - RNA, 19 nt, Artificial Sequence
  Description of Artificial Sequence: Synthetic oligonucleotide
acaagcccgugaacuuggc

SEQ ID NO: 855845 - RNA, 19 nt, Artificial Sequence
  Description of Artificial Sequence: Synthetic oligonucleotide
aguagcggacguaggagaa

SEQ ID NO: 855846 - RNA, 19 nt, Artificial Sequence
  Description of Artificial Sequence: Synthetic oligonucleotide
uucuccgguucuaguucgu

SEQ ID NO: 855847 - RNA, 19 nt, Artificial Sequence
  Description of Artificial Sequence: Synthetic oligonucleotide
gguaguugggagugagguc

SEQ ID NO: 855848 - RNA, 19 nt, Artificial Sequence
  Description of Artificial Sequence: Synthetic oligonucleotide
ccuagccggguacuguugg

SEQ ID NO: 855849 - RNA, 19 nt, Artificial Sequence
  Description of Artificial Sequence: Synthetic oligonucleotide
caagccgaucucaucccca

SEQ ID NO: 855850 - RNA, 19 nt, Artificial Sequence
  Description of Artificial Sequence: Synthetic oligonucleotide
gugcaacagagagcguucc

SEQ ID NO: 855851 - RNA, 19 nt, Artificial Sequence
  Description of Artificial Sequence: Synthetic oligonucleotide
uuggccuagccggguacug

SEQ ID NO: 855852 - RNA, 19 nt, Artificial Sequence
  Description of Artificial Sequence: Synthetic oligonucleotide
ugaccacggcgcccgccag

SEQ ID NO: 855853 - RNA, 19 nt, Artificial Sequence
  Description of Artificial Sequence: Synthetic oligonucleotide
acgacacggccugugguca

SEQ ID NO: 855854 - RNA, 19 nt, Artificial Sequence
  Description of Artificial Sequence: Synthetic oligonucleotide
agagcguuccuuaccccga

SEQ ID NO: 855855 - RNA, 19 nt, Artificial Sequence
  Description of Artificial Sequence: Synthetic oligonucleotide
gagugacuagcaauuuugu

SEQ ID NO: 855856 - RNA, 19 nt, Artificial Sequence
  Description of Artificial Sequence: Synthetic oligonucleotide
aucccgaaauuggaaccca

SEQ ID NO: 855857 - RNA, 19 nt, Artificial Sequence
  Description of Artificial Sequence: Synthetic oligonucleotide
ucccgcguucggaccuacg

SEQ ID NO: 855858 - RNA, 19 nt, Artificial Sequence
  Description of Artificial Sequence: Synthetic oligonucleotide
ggaagucaccgugcaacag

SEQ ID NO: 855859 - RNA, 19 nt, Artificial Sequence
  Description of Artificial Sequence: Synthetic oligonucleotide
ggacaagcccgugaacuug

SEQ ID NO: 855860 - RNA, 19 nt, Artificial Sequence
  Description of Artificial Sequence: Synthetic oligonucleotide
cgaguauggucacaauuug

SEQ ID NO: 855861 - RNA, 19 nt, Artificial Sequence
  Description of Artificial Sequence: Synthetic oligonucleotide
gucaagccacauaugggaa

SEQ ID NO: 855862 - RNA, 19 nt, Artificial Sequence
  Description of Artificial Sequence: Synthetic oligonucleotide
gcguucggaccuacgaagg

SEQ ID NO: 855863 - RNA, 19 nt, Artificial Sequence
  Description of Artificial Sequence: Synthetic oligonucleotide
agccaccggaacuggguaa

SEQ ID NO: 855864 - RNA, 19 nt, Artificial Sequence
  Description of Artificial Sequence: Synthetic oligonucleotide
gcaagccgaucucaucccc

SEQ ID NO: 855865 - RNA, 19 nt, Artificial Sequence
  Description of Artificial Sequence: Synthetic oligonucleotide
cuuauaccagcagggaggu

SEQ ID NO: 855866 - RNA, 19 nt, Artificial Sequence
  Description of Artificial Sequence: Synthetic oligonucleotide
gccggcuaccuucaacagc

SEQ ID NO: 855867 - RNA, 19 nt, Artificial Sequence
  Description of Artificial Sequence: Synthetic oligonucleotide
cccgccagcaugccaagcc

SEQ ID NO: 855868 - RNA, 19 nt, Artificial Sequence
  Description of Artificial Sequence: Synthetic oligonucleotide
cuugugaauugggcccaac

SEQ ID NO: 855869 - RNA, 19 nt, Artificial Sequence
  Description of Artificial Sequence: Synthetic oligonucleotide
cgcguucggaccuacgaag

SEQ ID NO: 855870 - RNA, 19 nt, Artificial Sequence
  Description of Artificial Sequence: Synthetic oligonucleotide
ccggugacacgacacggcc

SEQ ID NO: 855871 - RNA, 19 nt, Artificial Sequence
  Description of Artificial Sequence: Synthetic oligonucleotide
cugacaggcccacguccug

SEQ ID NO: 855872 - RNA, 19 nt, Artificial Sequence
  Description of Artificial Sequence: Synthetic oligonucleotide
aacgcucauucugguccca

SEQ ID NO: 855873 - RNA, 19 nt, Artificial Sequence
  Description of Artificial Sequence: Synthetic oligonucleotide
aggcuggauucaucccaug

SEQ ID NO: 855874 - RNA, 19 nt, Artificial Sequence
  Description of Artificial Sequence: Synthetic oligonucleotide
caaucuguuucaagucggu

SEQ ID NO: 855875 - RNA, 19 nt, Artificial Sequence
  Description of Artificial Sequence: Synthetic oligonucleotide
gggacggaggcugucagga

SEQ ID NO: 855876 - RNA, 19 nt, Artificial Sequence
  Description of Artificial Sequence: Synthetic oligonucleotide
caggucgcugguggauucg

SEQ ID NO: 855877 - RNA, 19 nt, Artificial Sequence
  Description of Artificial Sequence: Synthetic oligonucleotide
uggccuagccggguacugu

SEQ ID NO: 855878 - RNA, 19 nt, Artificial Sequence
  Description of Artificial Sequence: Synthetic oligonucleotide
cccgaaauuggaacccauc

SEQ ID NO: 855879 - RNA, 19 nt, Artificial Sequence
  Description of Artificial Sequence: Synthetic oligonucleotide
gcggacguaggagaagaug

SEQ ID NO: 855880 - RNA, 19 nt, Artificial Sequence
  Description of Artificial Sequence: Synthetic oligonucleotide
gcccggacgaugaugacca

SEQ ID NO: 855881 - RNA, 19 nt, Artificial Sequence
  Description of Artificial Sequence: Synthetic oligonucleotide
ccuacgaaggccugaaggu

SEQ ID NO: 855882 - RNA, 19 nt, Artificial Sequence
  Description of Artificial Sequence: Synthetic oligonucleotide
ucccugcaaucaagagccu

SEQ ID NO: 855883 - RNA, 19 nt, Artificial Sequence
  Description of Artificial Sequence: Synthetic oligonucleotide
gcgauagagggcgcccucg

SEQ ID NO: 855884 - RNA, 19 nt, Artificial Sequence
  Description of Artificial Sequence: Synthetic oligonucleotide
gcuuaugugucccggaguu

SEQ ID NO: 855885 - RNA, 19 nt, Artificial Sequence
  Description of Artificial Sequence: Synthetic oligonucleotide
gaacgacagcuuccugcaa

SEQ ID NO: 855886 - RNA, 19 nt, Artificial Sequence
  Description of Artificial Sequence: Synthetic oligonucleotide
gagcguuccuuaccccgaa

SEQ ID NO: 855887 - RNA, 19 nt, Artificial Sequence
  Description of Artificial Sequence: Synthetic oligonucleotide
ucgugccaccaccucugua

SEQ ID NO: 855888 - RNA, 19 nt, Artificial Sequence
  Description of Artificial Sequence: Synthetic oligonucleotide
caauagguuagcgcuggcu

SEQ ID NO: 855889 - RNA, 19 nt, Artificial Sequence
  Description of Artificial Sequence: Synthetic oligonucleotide
ccggacgaugaugaccacg

SEQ ID NO: 855890 - RNA, 19 nt, Artificial Sequence
  Description of Artificial Sequence: Synthetic oligonucleotide
guggucagugagacggcuc

SEQ ID NO: 855891 - RNA, 19 nt, Artificial Sequence
  Description of Artificial Sequence: Synthetic oligonucleotide
cgugcaacagagagcguuc

SEQ ID NO: 855892 - RNA, 19 nt, Artificial Sequence
  Description of Artificial Sequence: Synthetic oligonucleotide
gcuaugccucccgcguucg

SEQ ID NO: 855893 - RNA, 19 nt, Artificial Sequence
  Description of Artificial Sequence: Synthetic oligonucleotide
cuaguucguucagcuccac

SEQ ID NO: 855894 - RNA, 19 nt, Artificial Sequence
  Description of Artificial Sequence: Synthetic oligonucleotide
cuuagacagguagggucaa

SEQ ID NO: 855895 - RNA, 19 nt, Artificial Sequence
  Description of Artificial Sequence: Synthetic oligonucleotide
ccuaaacuggggucaaucu

SEQ ID NO: 855896 - RNA, 19 nt, Artificial Sequence
  Description of Artificial Sequence: Synthetic oligonucleotide
acgcgauagagggcgcccu

SEQ ID NO: 855897 - RNA, 19 nt, Artificial Sequence
  Description of Artificial Sequence: Synthetic oligonucleotide
ccuuggacaagcccgugaa

SEQ ID NO: 855898 - RNA, 19 nt, Artificial Sequence
  Description of Artificial Sequence: Synthetic oligonucleotide
aggucgccgacgcgauaga

SEQ ID NO: 855899 - RNA, 19 nt, Artificial Sequence
  Description of Artificial Sequence: Synthetic oligonucleotide
cguucggaccuacgaaggc

SEQ ID NO: 855900 - RNA, 19 nt, Artificial Sequence
  Description of Artificial Sequence: Synthetic oligonucleotide
ccugagacacacuccagcu

SEQ ID NO: 855901 - RNA, 19 nt, Artificial Sequence
  Description of Artificial Sequence: Synthetic oligonucleotide
ggucgccgacgcgauagag

SEQ ID NO: 855902 - RNA, 19 nt, Artificial Sequence
  Description of Artificial Sequence: Synthetic oligonucleotide
gcaggucgcugguggauuc

SEQ ID NO: 855903 - RNA, 19 nt, Artificial Sequence
  Description of Artificial Sequence: Synthetic oligonucleotide
gccccgguaguugggagug

SEQ ID NO: 855904 - RNA, 19 nt, Artificial Sequence
  Description of Artificial Sequence: Synthetic oligonucleotide
agucaccgugcaacagaga

SEQ ID NO: 855905 - RNA, 19 nt, Artificial Sequence
  Description of Artificial Sequence: Synthetic oligonucleotide
gcagcgcccagcgggugcg

SEQ ID NO: 855906 - RNA, 19 nt, Artificial Sequence
  Description of Artificial Sequence: Synthetic oligonucleotide
cccgguaguugggagugag

SEQ ID NO: 855907 - RNA, 19 nt, Artificial Sequence
  Description of Artificial Sequence: Synthetic oligonucleotide
gcgcccucgugccaccacc

SEQ ID NO: 855908 - RNA, 19 nt, Artificial Sequence
  Description of Artificial Sequence: Synthetic oligonucleotide
uuauaccagcagggagguu

SEQ ID NO: 855909 - RNA, 19 nt, Artificial Sequence
  Description of Artificial Sequence: Synthetic oligonucleotide
cacggaagucaccgugcaa

SEQ ID NO: 855910 - RNA, 19 nt, Artificial Sequence
  Description of Artificial Sequence: Synthetic oligonucleotide
ccagaccguucuucucccc

SEQ ID NO: 855911 - RNA, 19 nt, Artificial Sequence
  Description of Artificial Sequence: Synthetic oligonucleotide
ccaccaccucuguaccggc

SEQ ID NO: 855912 - RNA, 19 nt, Artificial Sequence
  Description of Artificial Sequence: Synthetic oligonucleotide
cgccgcauucauaggcugc

SEQ ID NO: 855913 - RNA, 19 nt, Artificial Sequence
  Description of Artificial Sequence: Synthetic oligonucleotide
ggucaacagcaggucgcug

SEQ ID NO: 855914 - RNA, 19 nt, Artificial Sequence
  Description of Artificial Sequence: Synthetic oligonucleotide
cuagccggguacuguuggu

SEQ ID NO: 855915 - RNA, 19 nt, Artificial Sequence
  Description of Artificial Sequence: Synthetic oligonucleotide
ggauucgaguauggucaca

SEQ ID NO: 855916 - RNA, 19 nt, Artificial Sequence
  Description of Artificial Sequence: Synthetic oligonucleotide
ggucuuagacagguagggu

SEQ ID NO: 855917 - RNA, 19 nt, Artificial Sequence
  Description of Artificial Sequence: Synthetic oligonucleotide
cccugcucuuggccuagcc

SEQ ID NO: 855918 - RNA, 19 nt, Artificial Sequence
  Description of Artificial Sequence: Synthetic oligonucleotide
cccgcguucggaccuacga

SEQ ID NO: 855919 - RNA, 19 nt, Artificial Sequence
  Description of Artificial Sequence: Synthetic oligonucleotide
agcggacguaggagaagau

SEQ ID NO: 855920 - RNA, 19 nt, Artificial Sequence
  Description of Artificial Sequence: Synthetic oligonucleotide
ccauugacgucauccuucu

SEQ ID NO: 855921 - RNA, 19 nt, Artificial Sequence
  Description of Artificial Sequence: Synthetic oligonucleotide
cacggccuguggucaguga

SEQ ID NO: 855922 - RNA, 19 nt, Artificial Sequence
  Description of Artificial Sequence: Synthetic oligonucleotide
gccuagccggguacuguug

SEQ ID NO: 855923 - RNA, 19 nt, Artificial Sequence
  Description of Artificial Sequence: Synthetic oligonucleotide
cuuggccuagccggguacu

SEQ ID NO: 855924 - RNA, 19 nt, Artificial Sequence
  Description of Artificial Sequence: Synthetic oligonucleotide
cagggagguuggcggccuc

SEQ ID NO: 855925 - RNA, 19 nt, Artificial Sequence
  Description of Artificial Sequence: Synthetic oligonucleotide
gacacggccuguggucagu

SEQ ID NO: 855926 - RNA, 19 nt, Artificial Sequence
  Description of Artificial Sequence: Synthetic oligonucleotide
gugagacggcucgaauccu

SEQ ID NO: 855927 - RNA, 19 nt, Artificial Sequence
  Description of Artificial Sequence: Synthetic oligonucleotide
ccgugaacuuggccccggc

SEQ ID NO: 855928 - RNA, 19 nt, Artificial Sequence
  Description of Artificial Sequence: Synthetic oligonucleotide
gccgcauucauaggcugcu

SEQ ID NO: 855929 - RNA, 19 nt, Artificial Sequence
  Description of Artificial Sequence: Synthetic oligonucleotide
gcccgugaacuuggccccg

SEQ ID NO: 855930 - RNA, 19 nt, Artificial Sequence
  Description of Artificial Sequence: Synthetic oligonucleotide
cuuaugugucccggaguuu

SEQ ID NO: 855931 - RNA, 19 nt, Artificial Sequence
  Description of Artificial Sequence: Synthetic oligonucleotide
gccacucagccaaguacaa

SEQ ID NO: 855932 - RNA, 19 nt, Artificial Sequence
  Description of Artificial Sequence: Synthetic oligonucleotide
gucggaggagucagucccu

SEQ ID NO: 855933 - RNA, 19 nt, Artificial Sequence
  Description of Artificial Sequence: Synthetic oligonucleotide
gguuggcggccucuagccu

SEQ ID NO: 855934 - RNA, 19 nt, Artificial Sequence
  Description of Artificial Sequence: Synthetic oligonucleotide
cccgugaacuuggccccgg

SEQ ID NO: 855935 - RNA, 19 nt, Artificial Sequence
  Description of Artificial Sequence: Synthetic oligonucleotide
cucccgcguucggaccuac

SEQ ID NO: 855936 - RNA, 19 nt, Artificial Sequence
  Description of Artificial Sequence: Synthetic oligonucleotide
ccgccagcaugccaagcca

SEQ ID NO: 855937 - RNA, 19 nt, Artificial Sequence
  Description of Artificial Sequence: Synthetic oligonucleotide
ccaugcacucuggccccgg

SEQ ID NO: 855938 - RNA, 19 nt, Artificial Sequence
  Description of Artificial Sequence: Synthetic oligonucleotide
caugcacucuggccccggu

SEQ ID NO: 855939 - RNA, 19 nt, Artificial Sequence
  Description of Artificial Sequence: Synthetic oligonucleotide
ccgacgcgauagagggcgc

SEQ ID NO: 855940 - RNA, 19 nt, Artificial Sequence
  Description of Artificial Sequence: Synthetic oligonucleotide
cccgaaggucacucagcca

SEQ ID NO: 855941 - RNA, 19 nt, Artificial Sequence
  Description of Artificial Sequence: Synthetic oligonucleotide
cgguaguugggagugaggu

SEQ ID NO: 855942 - RNA, 19 nt, Artificial Sequence
  Description of Artificial Sequence: Synthetic oligonucleotide
gccucuagccuggcugaca

SEQ ID NO: 855943 - RNA, 19 nt, Artificial Sequence
  Description of Artificial Sequence: Synthetic oligonucleotide
ggccccgguaguugggagu

SEQ ID NO: 855944 - RNA, 19 nt, Artificial Sequence
  Description of Artificial Sequence: Synthetic oligonucleotide
cguuccuuaccccgaaggu

SEQ ID NO: 855945 - RNA, 19 nt, Artificial Sequence
  Description of Artificial Sequence: Synthetic oligonucleotide
accgugcaacagagagcgu

SEQ ID NO: 855946 - RNA, 19 nt, Artificial Sequence
  Description of Artificial Sequence: Synthetic oligonucleotide
ccgcguucggaccuacgaa

SEQ ID NO: 855947 - RNA, 19 nt, Artificial Sequence
  Description of Artificial Sequence: Synthetic oligonucleotide
cgacacggccuguggucag

SEQ ID NO: 855948 - RNA, 19 nt, Artificial Sequence
  Description of Artificial Sequence: Synthetic oligonucleotide
gcgcggagcccggacgaug

SEQ ID NO: 855949 - RNA, 19 nt, Artificial Sequence
  Description of Artificial Sequence: Synthetic oligonucleotide
cgacgcgauagagggcgcc

SEQ ID NO: 855950 - RNA, 19 nt, Artificial Sequence
  Description of Artificial Sequence: Synthetic oligonucleotide
cgcgauagagggcgcccuc

SEQ ID NO: 855951 - RNA, 19 nt, Artificial Sequence
  Description of Artificial Sequence: Synthetic oligonucleotide
ccgugcaacagagagcguu

SEQ ID NO: 855952 - RNA, 19 nt, Artificial Sequence
  Description of Artificial Sequence: Synthetic oligonucleotide
gccuauccucacugaaguu

SEQ ID NO: 855953 - RNA, 19 nt, Artificial Sequence
  Description of Artificial Sequence: Synthetic oligonucleotide
cgccgacgcgauagagggc

SEQ ID NO: 855954 - RNA, 19 nt, Artificial Sequence
  Description of Artificial Sequence: Synthetic oligonucleotide
cccggacgaugaugaccac

SEQ ID NO: 855955 - RNA, 19 nt, Artificial Sequence
  Description of Artificial Sequence: Synthetic oligonucleotide
gcaagcccucaugaggauu

SEQ ID NO: 855956 - RNA, 19 nt, Artificial Sequence
  Description of Artificial Sequence: Synthetic oligonucleotide
ggggucccuggcagaguga

SEQ ID NO: 855957 - RNA, 19 nt, Artificial Sequence
  Description of Artificial Sequence: Synthetic oligonucleotide
cggccgccgcauucauagg

SEQ ID NO: 855958 - RNA, 19 nt, Artificial Sequence
  Description of Artificial Sequence: Synthetic oligonucleotide
cggaccuacgaaggccuga

SEQ ID NO: 855959 - RNA, 19 nt, Artificial Sequence
  Description of Artificial Sequence: Synthetic oligonucleotide
cggcuaccuucaacagcuc

SEQ ID NO: 855960 - RNA, 19 nt, Artificial Sequence
  Description of Artificial Sequence: Synthetic oligonucleotide
ccgccucgucuucggccac

SEQ ID NO: 855961 - RNA, 19 nt, Artificial Sequence
  Description of Artificial Sequence: Synthetic oligonucleotide
cgauagagggcgcccucgu

SEQ ID NO: 855962 - RNA, 19 nt, Artificial Sequence
  Description of Artificial Sequence: Synthetic oligonucleotide
cggugacacgacacggccu

SEQ ID NO: 855963 - RNA, 19 nt, Artificial Sequence
  Description of Artificial Sequence: Synthetic oligonucleotide
gcggagcccggacgaugau

SEQ ID NO: 855964 - RNA, 19 nt, Artificial Sequence
  Description of Artificial Sequence: Synthetic oligonucleotide
ccccgguaguugggaguga

SEQ ID NO: 855965 - RNA, 19 nt, Artificial Sequence
  Description of Artificial Sequence: Synthetic oligonucleotide
ccucccgcguucggaccua

SEQ ID NO: 855966 - RNA, 19 nt, Artificial Sequence
  Description of Artificial Sequence: Synthetic oligonucleotide
ccgcauucauaggcugcuu

SEQ ID NO: 855967 - RNA, 19 nt, Artificial Sequence
  Description of Artificial Sequence: Synthetic oligonucleotide
ccggggcugccggcuaccu

SEQ ID NO: 855968 - RNA, 19 nt, Artificial Sequence
  Description of Artificial Sequence: Synthetic oligonucleotide
ccccggccgccgcauucau

SEQ ID NO: 855969 - RNA, 19 nt, Artificial Sequence
  Description of Artificial Sequence: Synthetic oligonucleotide
aaguuuaugaauccaaguc

SEQ ID NO: 855970 - RNA, 19 nt, Artificial Sequence
  Description of Artificial Sequence: Synthetic oligonucleotide
ucauauaagauguacagug

SEQ ID NO: 855971 - RNA, 19 nt, Artificial Sequence
  Description of Artificial Sequence: Synthetic oligonucleotide
auucuaaugccauaagucc

SEQ ID NO: 855972 - RNA, 19 nt, Artificial Sequence
  Description of Artificial Sequence: Synthetic oligonucleotide
auacuugucagcuaagcgc

SEQ ID NO: 855973 - RNA, 19 nt, Artificial Sequence
  Description of Artificial Sequence: Synthetic oligonucleotide
aaacuugugaaguuuauga

SEQ ID NO: 855974 - RNA, 19 nt, Artificial Sequence
  Description of Artificial Sequence: Synthetic oligonucleotide
acuaacauaggucaggaag

SEQ ID NO: 855975 - RNA, 19 nt, Artificial Sequence
  Description of Artificial Sequence: Synthetic oligonucleotide
aacagacuaacauagguca

SEQ ID NO: 855976 - RNA, 19 nt, Artificial Sequence
  Description of Artificial Sequence: Synthetic oligonucleotide
ucuaguacaacacagugau

SEQ ID NO: 855977 - RNA, 19 nt, Artificial Sequence
  Description of Artificial Sequence: Synthetic oligonucleotide
aaugcauuuucgcugguag

SEQ ID NO: 855978 - RNA, 19 nt, Artificial Sequence
  Description of Artificial Sequence: Synthetic oligonucleotide
uuguguuaacuucaggugg

SEQ ID NO: 855979 - RNA, 19 nt, Artificial Sequence
  Description of Artificial Sequence: Synthetic oligonucleotide
uauguguucacccucuucc

SEQ ID NO: 855980 - RNA, 19 nt, Artificial Sequence
  Description of Artificial Sequence: Synthetic oligonucleotide
uuuucagacgauuuuaaga

SEQ ID NO: 855981 - RNA, 19 nt, Artificial Sequence
  Description of Artificial Sequence: Synthetic oligonucleotide
agaauccucgaauuggagc

SEQ ID NO: 855982 - RNA, 19 nt, Artificial Sequence
  Description of Artificial Sequence: Synthetic oligonucleotide
cuagagaugcuguauaugc

SEQ ID NO: 855983 - RNA, 19 nt, Artificial Sequence
  Description of Artificial Sequence: Synthetic oligonucleotide
uuucagacgauuuuaagaa

SEQ ID NO: 855984 - RNA, 19 nt, Artificial Sequence
  Description of Artificial Sequence: Synthetic oligonucleotide
ucucgaaacaccugggugg

SEQ ID NO: 855985 - RNA, 19 nt, Artificial Sequence
  Description of Artificial Sequence: Synthetic oligonucleotide
aguuguguuaacuucaggu

SEQ ID NO: 855986 - RNA, 19 nt, Artificial Sequence
  Description of Artificial Sequence: Synthetic oligonucleotide
auacagaucaucguaggcc

SEQ ID NO: 855987 - RNA, 19 nt, Artificial Sequence
  Description of Artificial Sequence: Synthetic oligonucleotide
ucugcugauaagcugaaga

SEQ ID NO: 855988 - RNA, 19 nt, Artificial Sequence
  Description of Artificial Sequence: Synthetic oligonucleotide
aaguccuucauuccuauca

SEQ ID NO: 855989 - RNA, 19 nt, Artificial Sequence
  Description of Artificial Sequence: Synthetic oligonucleotide
  modified_base (5)..(5): a, c, u, g, unknown or other
aaagngguagagcugguga

SEQ ID NO: 855990 - RNA, 19 nt, Artificial Sequence
  Description of Artificial Sequence: Synthetic oligonucleotide
aguuuaugaauccaaguca

SEQ ID NO: 855991 - RNA, 19 nt, Artificial Sequence
  Description of Artificial Sequence: Synthetic oligonucleotide
agauguacaguggauacgc

SEQ ID NO: 855992 - RNA, 19 nt, Artificial Sequence
  Description of Artificial Sequence: Synthetic oligonucleotide
caagaugguuuuaauaugc

SEQ ID NO: 855993 - RNA, 19 nt, Artificial Sequence
  Description of Artificial Sequence: Synthetic oligonucleotide
caauuacuaagauauuggg

SEQ ID NO: 855994 - RNA, 19 nt, Artificial Sequence
  Description of Artificial Sequence: Synthetic oligonucleotide
ugaaaguacaaucaccuua

SEQ ID NO: 855995 - RNA, 19 nt, Artificial Sequence
  Description of Artificial Sequence: Synthetic oligonucleotide
uucucgacaguaauugagg

SEQ ID NO: 855996 - RNA, 19 nt, Artificial Sequence
  Description of Artificial Sequence: Synthetic oligonucleotide
uaguacaacacagugauac

SEQ ID NO: 855997 - RNA, 19 nt, Artificial Sequence
  Description of Artificial Sequence: Synthetic oligonucleotide
ugaguauuaagcuuucuuc

SEQ ID NO: 855998 - RNA, 19 nt, Artificial Sequence
  Description of Artificial Sequence: Synthetic oligonucleotide
uuauugaguauuaagcuuu

SEQ ID NO: 855999 - RNA, 19 nt, Artificial Sequence
  Description of Artificial Sequence: Synthetic oligonucleotide
guacaaucaccuuaguggg

SEQ ID NO: 856000 - RNA, 19 nt, Artificial Sequence
  Description of Artificial Sequence: Synthetic oligonucleotide
uuaugaauccaagucagcc

SEQ ID NO: 856001 - RNA, 19 nt, Artificial Sequence
  Description of Artificial Sequence: Synthetic oligonucleotide
uaauuggacaggaaaaguc

SEQ ID NO: 856002 - RNA, 19 nt, Artificial Sequence
  Description of Artificial Sequence: Synthetic oligonucleotide
ucuugaguauucuaaugcc

SEQ ID NO: 856003 - RNA, 19 nt, Artificial Sequence
  Description of Artificial Sequence: Synthetic oligonucleotide
auaauaauuugacccuccg

SEQ ID NO: 856004 - RNA, 19 nt, Artificial Sequence
  Description of Artificial Sequence: Synthetic oligonucleotide
cauauaagauguacagugg

SEQ ID NO: 856005 - RNA, 19 nt, Artificial Sequence
  Description of Artificial Sequence: Synthetic oligonucleotide
gauacagcauuccugacuc

SEQ ID NO: 856006 - RNA, 19 nt, Artificial Sequence
  Description of Artificial Sequence: Synthetic oligonucleotide
uucugaaaguacaaucacc

SEQ ID NO: 856007 - RNA, 19 nt, Artificial Sequence
  Description of Artificial Sequence: Synthetic oligonucleotide
auugaggucuucuaguugu

SEQ ID NO: 856008 - RNA, 19 nt, Artificial Sequence
  Description of Artificial Sequence: Synthetic oligonucleotide
uauauggggauccagcauc

SEQ ID NO: 856009 - RNA, 19 nt, Artificial Sequence
  Description of Artificial Sequence: Synthetic oligonucleotide
uuuguacacagaaugugcu

SEQ ID NO: 856010 - RNA, 19 nt, Artificial Sequence
  Description of Artificial Sequence: Synthetic oligonucleotide
guacuggugauacagauca

SEQ ID NO: 856011 - RNA, 19 nt, Artificial Sequence
  Description of Artificial Sequence: Synthetic oligonucleotide
uuuauugaguauuaagcuu

SEQ ID NO: 856012 - RNA, 19 nt, Artificial Sequence
  Description of Artificial Sequence: Synthetic oligonucleotide
uucucggguacacagcagg

SEQ ID NO: 856013 - RNA, 19 nt, Artificial Sequence
  Description of Artificial Sequence: Synthetic oligonucleotide
aauuacuaagauauuggga

SEQ ID NO: 856014 - RNA, 19 nt, Artificial Sequence
  Description of Artificial Sequence: Synthetic oligonucleotide
aaggccuuaugagacauuc

SEQ ID NO: 856015 - RNA, 19 nt, Artificial Sequence
  Description of Artificial Sequence: Synthetic oligonucleotide
uagaugucguaguugauca

SEQ ID NO: 856016 - RNA, 19 nt, Artificial Sequence
  Description of Artificial Sequence: Synthetic oligonucleotide
aaugcaacugcagucucuc

SEQ ID NO: 856017 - RNA, 19 nt, Artificial Sequence
  Description of Artificial Sequence: Synthetic oligonucleotide
augagacauucauagguac

SEQ ID NO: 856018 - RNA, 19 nt, Artificial Sequence
  Description of Artificial Sequence: Synthetic oligonucleotide
auauaagauguacagugga

SEQ ID NO: 856019 - RNA, 19 nt, Artificial Sequence
  Description of Artificial Sequence: Synthetic oligonucleotide
auagguacuggugauacag

SEQ ID NO: 856020 - RNA, 19 nt, Artificial Sequence
  Description of Artificial Sequence: Synthetic oligonucleotide
aauuggacaggaaaaguca

SEQ ID NO: 856021 - RNA, 19 nt, Artificial Sequence
  Description of Artificial Sequence: Synthetic oligonucleotide
ccuuaugagacauucauag

SEQ ID NO: 856022 - RNA, 19 nt, Artificial Sequence
  Description of Artificial Sequence: Synthetic oligonucleotide
uucauaauaucuucuugcu

SEQ ID NO: 856023 - RNA, 19 nt, Artificial Sequence
  Description of Artificial Sequence: Synthetic oligonucleotide
accguaguuaucuucagcu

SEQ ID NO: 856024 - RNA, 19 nt, Artificial Sequence
  Description of Artificial Sequence: Synthetic oligonucleotide
guuguguuaacuucaggug

SEQ ID NO: 856025 - RNA, 19 nt, Artificial Sequence
  Description of Artificial Sequence: Synthetic oligonucleotide
ucagucgcaauuacuaaga

SEQ ID NO: 856026 - RNA, 19 nt, Artificial Sequence
  Description of Artificial Sequence: Synthetic oligonucleotide
cauacuugucagcuaagcg

SEQ ID NO: 856027 - RNA, 19 nt, Artificial Sequence
  Description of Artificial Sequence: Synthetic oligonucleotide
cuuaauuggacaggaaaag

SEQ ID NO: 856028 - RNA, 19 nt, Artificial Sequence
  Description of Artificial Sequence: Synthetic oligonucleotide
uguguaacagacuaacaua

SEQ ID NO: 856029 - RNA, 19 nt, Artificial Sequence
  Description of Artificial Sequence: Synthetic oligonucleotide
aagcucuaauucaacacac

SEQ ID NO: 856030 - RNA, 19 nt, Artificial Sequence
  Description of Artificial Sequence: Synthetic oligonucleotide
gauccaagaaacuugugaa

SEQ ID NO: 856031 - RNA, 19 nt, Artificial Sequence
  Description of Artificial Sequence: Synthetic oligonucleotide
ugauacagcauuccugacu

SEQ ID NO: 856032 - RNA, 19 nt, Artificial Sequence
  Description of Artificial Sequence: Synthetic oligonucleotide
  modified_base (8)..(8): a, c, u, g, unknown or other
gucaaagngguagagcugg

SEQ ID NO: 856033 - RNA, 19 nt, Artificial Sequence
  Description of Artificial Sequence: Synthetic oligonucleotide
aacuuggauaccacgcagc

SEQ ID NO: 856034 - RNA, 19 nt, Artificial Sequence
  Description of Artificial Sequence: Synthetic oligonucleotide
ugccauaaguccuucauuc

SEQ ID NO: 856035 - RNA, 19 nt, Artificial Sequence
  Description of Artificial Sequence: Synthetic oligonucleotide
ucgaauuggagcuggcugc

SEQ ID NO: 856036 - RNA, 19 nt, Artificial Sequence
  Description of Artificial Sequence: Synthetic oligonucleotide
aagauauugggaacacagg

SEQ ID NO: 856037 - RNA, 19 nt, Artificial Sequence
  Description of Artificial Sequence: Synthetic oligonucleotide
uguguuaacuucagguggu

SEQ ID NO: 856038 - RNA, 19 nt, Artificial Sequence
  Description of Artificial Sequence: Synthetic oligonucleotide
uuuaugaauccaagucagc

SEQ ID NO: 856039 - RNA, 19 nt, Artificial Sequence
  Description of Artificial Sequence: Synthetic oligonucleotide
uuaucacauugucugacgu

SEQ ID NO: 856040 - RNA, 19 nt, Artificial Sequence
  Description of Artificial Sequence: Synthetic oligonucleotide
cacuauauggggauccagc

SEQ ID NO: 856041 - RNA, 19 nt, Artificial Sequence
  Description of Artificial Sequence: Synthetic oligonucleotide
aguauucuaaugccauaag

SEQ ID NO: 856042 - RNA, 19 nt, Artificial Sequence
  Description of Artificial Sequence: Synthetic oligonucleotide
uugaguauuaagcuuucuu

SEQ ID NO: 856043 - RNA, 19 nt, Artificial Sequence
  Description of Artificial Sequence: Synthetic oligonucleotide
gaagggaugaggucaacuc

SEQ ID NO: 856044 - RNA, 19 nt, Artificial Sequence
  Description of Artificial Sequence: Synthetic oligonucleotide
auggcagugguuuuguaca

SEQ ID NO: 856045 - RNA, 19 nt, Artificial Sequence
  Description of Artificial Sequence: Synthetic oligonucleotide
acuaagauauugggaacac

SEQ ID NO: 856046 - RNA, 19 nt, Artificial Sequence
  Description of Artificial Sequence: Synthetic oligonucleotide
aggauguccgguacaaucc

SEQ ID NO: 856047 - RNA, 19 nt, Artificial Sequence
  Description of Artificial Sequence: Synthetic oligonucleotide
uuaauuggacaggaaaagu

SEQ ID NO: 856048 - RNA, 19 nt, Artificial Sequence
  Description of Artificial Sequence: Synthetic oligonucleotide
uggucacauaauaauuuga

SEQ ID NO: 856049 - RNA, 19 nt, Artificial Sequence
  Description of Artificial Sequence: Synthetic oligonucleotide
cucagucgcaauuacuaag

SEQ ID NO: 856050 - RNA, 19 nt, Artificial Sequence
  Description of Artificial Sequence: Synthetic oligonucleotide
uugaaggacacuugggauc

SEQ ID NO: 856051 - RNA, 19 nt, Artificial Sequence
  Description of Artificial Sequence: Synthetic oligonucleotide
uacuaagauauugggaaca

SEQ ID NO: 856052 - RNA, 19 nt, Artificial Sequence
  Description of Artificial Sequence: Synthetic oligonucleotide
uuacuaagauauugggaac

SEQ ID NO: 856053 - RNA, 19 nt, Artificial Sequence
  Description of Artificial Sequence: Synthetic oligonucleotide
ugagacauucauagguacu

SEQ ID NO: 856054 - RNA, 19 nt, Artificial Sequence
  Description of Artificial Sequence: Synthetic oligonucleotide
aucguaaccguaguuaucu

SEQ ID NO: 856055 - RNA, 19 nt, Artificial Sequence
  Description of Artificial Sequence: Synthetic oligonucleotide
  modified_base (4)..(4): a, c, u, g, unknown or other
aagngguagagcuggugaa

SEQ ID NO: 856056 - RNA, 19 nt, Artificial Sequence
  Description of Artificial Sequence: Synthetic oligonucleotide
gaauccucgaauuggagcu

SEQ ID NO: 856057 - RNA, 19 nt, Artificial Sequence
  Description of Artificial Sequence: Synthetic oligonucleotide
uucccguagacuuuuccug

SEQ ID NO: 856058 - RNA, 19 nt, Artificial Sequence
  Description of Artificial Sequence: Synthetic oligonucleotide
ucacggagagaguaaauuc

SEQ ID NO: 856059 - RNA, 19 nt, Artificial Sequence
  Description of Artificial Sequence: Synthetic oligonucleotide
uuucccguagacuuuuccu

SEQ ID NO: 856060 - RNA, 19 nt, Artificial Sequence
  Description of Artificial Sequence: Synthetic oligonucleotide
acauaggucaggaaggucu

SEQ ID NO: 856061 - RNA, 19 nt, Artificial Sequence
  Description of Artificial Sequence: Synthetic oligonucleotide
gucgcaauuacuaagauau

SEQ ID NO: 856062 - RNA, 19 nt, Artificial Sequence
  Description of Artificial Sequence: Synthetic oligonucleotide
uguugcaaguggcccaaag

SEQ ID NO: 856063 - RNA, 19 nt, Artificial Sequence
  Description of Artificial Sequence: Synthetic oligonucleotide
ucaccauuucccuuaugug

SEQ ID NO: 856064 - RNA, 19 nt, Artificial Sequence
  Description of Artificial Sequence: Synthetic oligonucleotide
gacaugauuucggauauca

SEQ ID NO: 856065 - RNA, 19 nt, Artificial Sequence
  Description of Artificial Sequence: Synthetic oligonucleotide
aucacauugucugacguca

SEQ ID NO: 856066 - RNA, 19 nt, Artificial Sequence
  Description of Artificial Sequence: Synthetic oligonucleotide
aguugaucagguaucagcu

SEQ ID NO: 856067 - RNA, 19 nt, Artificial Sequence
  Description of Artificial Sequence: Synthetic oligonucleotide
ucuaaugccauaaguccuu

SEQ ID NO: 856068 - RNA, 19 nt, Artificial Sequence
  Description of Artificial Sequence: Synthetic oligonucleotide
ucucggguacacagcaggg

SEQ ID NO: 856069 - RNA, 19 nt, Artificial Sequence
  Description of Artificial Sequence: Synthetic oligonucleotide
auugccuagaugucguagu

SEQ ID NO: 856070 - RNA, 19 nt, Artificial Sequence
  Description of Artificial Sequence: Synthetic oligonucleotide
ucggguacacagcagggga

SEQ ID NO: 856071 - RNA, 19 nt, Artificial Sequence
  Description of Artificial Sequence: Synthetic oligonucleotide
ucuuaucacauugucugac

SEQ ID NO: 856072 - RNA, 19 nt, Artificial Sequence
  Description of Artificial Sequence: Synthetic oligonucleotide
ugaaggacacuugggaucu

SEQ ID NO: 856073 - RNA, 19 nt, Artificial Sequence
  Description of Artificial Sequence: Synthetic oligonucleotide
acgucaacagcacuauaug

SEQ ID NO: 856074 - RNA, 19 nt, Artificial Sequence
  Description of Artificial Sequence: Synthetic oligonucleotide
auaugcccuuccuuuauug

SEQ ID NO: 856075 - RNA, 19 nt, Artificial Sequence
  Description of Artificial Sequence: Synthetic oligonucleotide
acaaucaccuuagugggug

SEQ ID NO: 856076 - RNA, 19 nt, Artificial Sequence
  Description of Artificial Sequence: Synthetic oligonucleotide
ucucgacaguaauugaggu

SEQ ID NO: 856077 - RNA, 19 nt, Artificial Sequence
  Description of Artificial Sequence: Synthetic oligonucleotide
ucguaguugaucagguauc

SEQ ID NO: 856078 - RNA, 19 nt, Artificial Sequence
  Description of Artificial Sequence: Synthetic oligonucleotide
uguacuuaauaaaggccuu

SEQ ID NO: 856079 - RNA, 19 nt, Artificial Sequence
  Description of Artificial Sequence: Synthetic oligonucleotide
agcaaguuccuguaaacua

SEQ ID NO: 856080 - RNA, 19 nt, Artificial Sequence
  Description of Artificial Sequence: Synthetic oligonucleotide
cuguacuuaauaaaggccu

SEQ ID NO: 856081 - RNA, 19 nt, Artificial Sequence
  Description of Artificial Sequence: Synthetic oligonucleotide
caucguaggccccaggaug

SEQ ID NO: 856082 - RNA, 19 nt, Artificial Sequence
  Description of Artificial Sequence: Synthetic oligonucleotide
accuguuugauggcauugc

SEQ ID NO: 856083 - RNA, 19 nt, Artificial Sequence
  Description of Artificial Sequence: Synthetic oligonucleotide
ucuuucgcuguugauaauc

SEQ ID NO: 856084 - RNA, 19 nt, Artificial Sequence
  Description of Artificial Sequence: Synthetic oligonucleotide
cagacuaacauaggucagg

SEQ ID NO: 856085 - RNA, 19 nt, Artificial Sequence
  Description of Artificial Sequence: Synthetic oligonucleotide
cauuuucgcugguaggcgc

SEQ ID NO: 856086 - RNA, 19 nt, Artificial Sequence
  Description of Artificial Sequence: Synthetic oligonucleotide
uaugcccuuccuuuauuga

SEQ ID NO: 856087 - RNA, 19 nt, Artificial Sequence
  Description of Artificial Sequence: Synthetic oligonucleotide
aucaucguaggccccagga

SEQ ID NO: 856088 - RNA, 19 nt, Artificial Sequence
  Description of Artificial Sequence: Synthetic oligonucleotide
aauauucccagggcugugu

SEQ ID NO: 856089 - RNA, 19 nt, Artificial Sequence
  Description of Artificial Sequence: Synthetic oligonucleotide
ucccguagacuuuuccugc

SEQ ID NO: 856090 - RNA, 19 nt, Artificial Sequence
  Description of Artificial Sequence: Synthetic oligonucleotide
aaucaccuuaguggguguc

SEQ ID NO: 856091 - RNA, 19 nt, Artificial Sequence
  Description of Artificial Sequence: Synthetic oligonucleotide
aauuugacccuccgcugaa

SEQ ID NO: 856092 - RNA, 19 nt, Artificial Sequence
  Description of Artificial Sequence: Synthetic oligonucleotide
uacgcaguggagacucugc

SEQ ID NO: 856093 - RNA, 19 nt, Artificial Sequence
  Description of Artificial Sequence: Synthetic oligonucleotide
caucuuucgcuguugauaa

SEQ ID NO: 856094 - RNA, 19 nt, Artificial Sequence
  Description of Artificial Sequence: Synthetic oligonucleotide
uaucacauugucugacguc

SEQ ID NO: 856095 - RNA, 19 nt, Artificial Sequence
  Description of Artificial Sequence: Synthetic oligonucleotide
ggagccaaauccuuuucag

SEQ ID NO: 856096 - RNA, 19 nt, Artificial Sequence
  Description of Artificial Sequence: Synthetic oligonucleotide
aaccuguuugauggcauug

SEQ ID NO: 856097 - RNA, 19 nt, Artificial Sequence
  Description of Artificial Sequence: Synthetic oligonucleotide
ucuucucgacaguaauuga

SEQ ID NO: 856098 - RNA, 19 nt, Artificial Sequence
  Description of Artificial Sequence: Synthetic oligonucleotide
ugacucagucgcaauuacu

SEQ ID NO: 856099 - RNA, 19 nt, Artificial Sequence
  Description of Artificial Sequence: Synthetic oligonucleotide
guaauugaggucuucuagu

SEQ ID NO: 856100 - RNA, 19 nt, Artificial Sequence
  Description of Artificial Sequence: Synthetic oligonucleotide
uucauggguacagugguau

SEQ ID NO: 856101 - RNA, 19 nt, Artificial Sequence
  Description of Artificial Sequence: Synthetic oligonucleotide
guugaucagguaucagcug

SEQ ID NO: 856102 - RNA, 19 nt, Artificial Sequence
  Description of Artificial Sequence: Synthetic oligonucleotide
uggauaccacgcagcaugc

SEQ ID NO: 856103 - RNA, 19 nt, Artificial Sequence
  Description of Artificial Sequence: Synthetic oligonucleotide
aguggcccaaagucaaaug

SEQ ID NO: 856104 - RNA, 19 nt, Artificial Sequence
  Description of Artificial Sequence: Synthetic oligonucleotide
acaggcaucguaaccguag

SEQ ID NO: 856105 - RNA, 19 nt, Artificial Sequence
  Description of Artificial Sequence: Synthetic oligonucleotide
  modified_base (7)..(7): a, c, u, g, unknown or other
ucaaagngguagagcuggu

SEQ ID NO: 856106 - RNA, 19 nt, Artificial Sequence
  Description of Artificial Sequence: Synthetic oligonucleotide
auaaguccuucauuccuau

SEQ ID NO: 856107 - RNA, 19 nt, Artificial Sequence
  Description of Artificial Sequence: Synthetic oligonucleotide
gcaugcuucagagucaaag

SEQ ID NO: 856108 - RNA, 19 nt, Artificial Sequence
  Description of Artificial Sequence: Synthetic oligonucleotide
ugugcucuacaaagcauuu

SEQ ID NO: 856109 - RNA, 19 nt, Artificial Sequence
  Description of Artificial Sequence: Synthetic oligonucleotide
uacaaucaccuuagugggu

SEQ ID NO: 856110 - RNA, 19 nt, Artificial Sequence
  Description of Artificial Sequence: Synthetic oligonucleotide
gacucagucgcaauuacua

SEQ ID NO: 856111 - RNA, 19 nt, Artificial Sequence
  Description of Artificial Sequence: Synthetic oligonucleotide
cucgacaguaauugagguc

SEQ ID NO: 856112 - RNA, 19 nt, Artificial Sequence
  Description of Artificial Sequence: Synthetic oligonucleotide
aaaugcaacugcagucucu

SEQ ID NO: 856113 - RNA, 19 nt, Artificial Sequence
  Description of Artificial Sequence: Synthetic oligonucleotide
uugucagcuaagcgcucag

SEQ ID NO: 856114 - RNA, 19 nt, Artificial Sequence
  Description of Artificial Sequence: Synthetic oligonucleotide
uguucacccucuuccuuca

SEQ ID NO: 856115 - RNA, 19 nt, Artificial Sequence
  Description of Artificial Sequence: Synthetic oligonucleotide
aguugacaugauuucggau

SEQ ID NO: 856116 - RNA, 19 nt, Artificial Sequence
  Description of Artificial Sequence: Synthetic oligonucleotide
uccuagagaugcuguauau

SEQ ID NO: 856117 - RNA, 19 nt, Artificial Sequence
  Description of Artificial Sequence: Synthetic oligonucleotide
gcagugguuuuguacacag

SEQ ID NO: 856118 - RNA, 19 nt, Artificial Sequence
  Description of Artificial Sequence: Synthetic oligonucleotide
uggauacgccacuaccucu

SEQ ID NO: 856119 - RNA, 19 nt, Artificial Sequence
  Description of Artificial Sequence: Synthetic oligonucleotide
agucgcaauuacuaagaua

SEQ ID NO: 856120 - RNA, 19 nt, Artificial Sequence
  Description of Artificial Sequence: Synthetic oligonucleotide
uguuaacuucagguggugu

SEQ ID NO: 856121 - RNA, 19 nt, Artificial Sequence
  Description of Artificial Sequence: Synthetic oligonucleotide
ucaucguaggccccaggau

SEQ ID NO: 856122 - RNA, 19 nt, Artificial Sequence
  Description of Artificial Sequence: Synthetic oligonucleotide
ucauuccuaucagugcuac

SEQ ID NO: 856123 - RNA, 19 nt, Artificial Sequence
  Description of Artificial Sequence: Synthetic oligonucleotide
uaacuucagguggugucag

SEQ ID NO: 856124 - RNA, 19 nt, Artificial Sequence
  Description of Artificial Sequence: Synthetic oligonucleotide
uuugacccuccgcugaauu

SEQ ID NO: 856125 - RNA, 19 nt, Artificial Sequence
  Description of Artificial Sequence: Synthetic oligonucleotide
uucauuccuaucagugcua

SEQ ID NO: 856126 - RNA, 19 nt, Artificial Sequence
  Description of Artificial Sequence: Synthetic oligonucleotide
cauugccuagaugucguag

SEQ ID NO: 856127 - RNA, 19 nt, Artificial Sequence
  Description of Artificial Sequence: Synthetic oligonucleotide
aucucaacuuggauaccac

SEQ ID NO: 856128 - RNA, 19 nt, Artificial Sequence
  Description of Artificial Sequence: Synthetic oligonucleotide
uuagugggugucugaggcu

SEQ ID NO: 856129 - RNA, 19 nt, Artificial Sequence
  Description of Artificial Sequence: Synthetic oligonucleotide
cuggguuggcagcacuacg

SEQ ID NO: 856130 - RNA, 19 nt, Artificial Sequence
  Description of Artificial Sequence: Synthetic oligonucleotide
uauaugcccuuccuuuauu

SEQ ID NO: 856131 - RNA, 19 nt, Artificial Sequence
  Description of Artificial Sequence: Synthetic oligonucleotide
acucagucgcaauuacuaa

SEQ ID NO: 856132 - RNA, 19 nt, Artificial Sequence
  Description of Artificial Sequence: Synthetic oligonucleotide
gaucaucguaggccccagg

SEQ ID NO: 856133 - RNA, 19 nt, Artificial Sequence
  Description of Artificial Sequence: Synthetic oligonucleotide
gccacuaccucuucuuugc

SEQ ID NO: 856134 - RNA, 19 nt, Artificial Sequence
  Description of Artificial Sequence: Synthetic oligonucleotide
guggauacgccacuaccuc

SEQ ID NO: 856135 - RNA, 19 nt, Artificial Sequence
  Description of Artificial Sequence: Synthetic oligonucleotide
acagacuaacauaggucag

SEQ ID NO: 856136 - RNA, 19 nt, Artificial Sequence
  Description of Artificial Sequence: Synthetic oligonucleotide
cugacucagucgcaauuac

SEQ ID NO: 856137 - RNA, 19 nt, Artificial Sequence
  Description of Artificial Sequence: Synthetic oligonucleotide
  modified_base (9)..(9): a, c, u, g, unknown or other
agucaaagngguagagcug

SEQ ID NO: 856138 - RNA, 19 nt, Artificial Sequence
  Description of Artificial Sequence: Synthetic oligonucleotide
guaggccccaggauguccg

SEQ ID NO: 856139 - RNA, 19 nt, Artificial Sequence
  Description of Artificial Sequence: Synthetic oligonucleotide
cucgaaacaccuggguggc

SEQ ID NO: 856140 - RNA, 19 nt, Artificial Sequence
  Description of Artificial Sequence: Synthetic oligonucleotide
ucaccuuagugggugucug

SEQ ID NO: 856141 - RNA, 19 nt, Artificial Sequence
  Description of Artificial Sequence: Synthetic oligonucleotide
aacuucagguggugucaga

SEQ ID NO: 856142 - RNA, 19 nt, Artificial Sequence
  Description of Artificial Sequence: Synthetic oligonucleotide
cagcacuauauggggaucc

SEQ ID NO: 856143 - RNA, 19 nt, Artificial Sequence
  Description of Artificial Sequence: Synthetic oligonucleotide
uagugggugucugaggcuc

SEQ ID NO: 856144 - RNA, 19 nt, Artificial Sequence
  Description of Artificial Sequence: Synthetic oligonucleotide
acuacguugcaagaugguu

SEQ ID NO: 856145 - RNA, 19 nt, Artificial Sequence
  Description of Artificial Sequence: Synthetic oligonucleotide
cgucaacagcacuauaugg

SEQ ID NO: 856146 - RNA, 19 nt, Artificial Sequence
  Description of Artificial Sequence: Synthetic oligonucleotide
cucggguacacagcagggg

SEQ ID NO: 856147 - RNA, 19 nt, Artificial Sequence
  Description of Artificial Sequence: Synthetic oligonucleotide
acagcacuauauggggauc

SEQ ID NO: 856148 - RNA, 19 nt, Artificial Sequence
  Description of Artificial Sequence: Synthetic oligonucleotide
gguuucagccaggauacgc

SEQ ID NO: 856149 - RNA, 19 nt, Artificial Sequence
  Description of Artificial Sequence: Synthetic oligonucleotide
gacgucaacagcacuauau

SEQ ID NO: 856150 - RNA, 19 nt, Artificial Sequence
  Description of Artificial Sequence: Synthetic oligonucleotide
cacggagagaguaaauucu

SEQ ID NO: 856151 - RNA, 19 nt, Artificial Sequence
  Description of Artificial Sequence: Synthetic oligonucleotide
  modified_base (6)..(6): a, c, u, g, unknown or other
caaagngguagagcuggug

SEQ ID NO: 856152 - RNA, 19 nt, Artificial Sequence
  Description of Artificial Sequence: Synthetic oligonucleotide
guaguugaucagguaucag

SEQ ID NO: 856153 - RNA, 19 nt, Artificial Sequence
  Description of Artificial Sequence: Synthetic oligonucleotide
caaucggugugguacugca

SEQ ID NO: 856154 - RNA, 19 nt, Artificial Sequence
  Description of Artificial Sequence: Synthetic oligonucleotide
gaauccaagucagcccaac

SEQ ID NO: 856155 - RNA, 19 nt, Artificial Sequence
  Description of Artificial Sequence: Synthetic oligonucleotide
gcuuaauuggacaggaaaa

SEQ ID NO: 856156 - RNA, 19 nt, Artificial Sequence
  Description of Artificial Sequence: Synthetic oligonucleotide
ggcuguguaacagacuaac

SEQ ID NO: 856157 - RNA, 19 nt, Artificial Sequence
  Description of Artificial Sequence: Synthetic oligonucleotide
ucauggguacagugguauc

SEQ ID NO: 856158 - RNA, 19 nt, Artificial Sequence
  Description of Artificial Sequence: Synthetic oligonucleotide
guugcaaguggcccaaagu

SEQ ID NO: 856159 - RNA, 19 nt, Artificial Sequence
  Description of Artificial Sequence: Synthetic oligonucleotide
augucguaguugaucaggu

SEQ ID NO: 856160 - RNA, 19 nt, Artificial Sequence
  Description of Artificial Sequence: Synthetic oligonucleotide
  modified_base (2)..(2): a, c, u, g, unknown or other
gngguagagcuggugaaaa

SEQ ID NO: 856161 - RNA, 19 nt, Artificial Sequence
  Description of Artificial Sequence: Synthetic oligonucleotide
ugucguaguugaucaggua

SEQ ID NO: 856162 - RNA, 19 nt, Artificial Sequence
  Description of Artificial Sequence: Synthetic oligonucleotide
cgcaauuacuaagauauug

SEQ ID NO: 856163 - RNA, 19 nt, Artificial Sequence
  Description of Artificial Sequence: Synthetic oligonucleotide
gcacuacguugcaagaugg

SEQ ID NO: 856164 - RNA, 19 nt, Artificial Sequence
  Description of Artificial Sequence: Synthetic oligonucleotide
uagacuuuuccugccucuc

SEQ ID NO: 856165 - RNA, 19 nt, Artificial Sequence
  Description of Artificial Sequence: Synthetic oligonucleotide
ugcauggcagugguuuugu

SEQ ID NO: 856166 - RNA, 19 nt, Artificial Sequence
  Description of Artificial Sequence: Synthetic oligonucleotide
gauaccacgcagcaugcuu

SEQ ID NO: 856167 - RNA, 19 nt, Artificial Sequence
  Description of Artificial Sequence: Synthetic oligonucleotide
gguacagugguaucuugaa

SEQ ID NO: 856168 - RNA, 19 nt, Artificial Sequence
  Description of Artificial Sequence: Synthetic oligonucleotide
cuugaaggacacuugggau

SEQ ID NO: 856169 - RNA, 19 nt, Artificial Sequence
  Description of Artificial Sequence: Synthetic oligonucleotide
ugucagcuaagcgcucagc

SEQ ID NO: 856170 - RNA, 19 nt, Artificial Sequence
  Description of Artificial Sequence: Synthetic oligonucleotide
aucguaggccccaggaugu

SEQ ID NO: 856171 - RNA, 19 nt, Artificial Sequence
  Description of Artificial Sequence: Synthetic oligonucleotide
ggauacgcaguggagacuc

SEQ ID NO: 856172 - RNA, 19 nt, Artificial Sequence
  Description of Artificial Sequence: Synthetic oligonucleotide
  modified_base (3)..(3): a, c, u, g, unknown or other
agngguagagcuggugaaa

SEQ ID NO: 856173 - RNA, 19 nt, Artificial Sequence
  Description of Artificial Sequence: Synthetic oligonucleotide
gcauuuucgcugguaggcg

SEQ ID NO: 856174 - RNA, 19 nt, Artificial Sequence
  Description of Artificial Sequence: Synthetic oligonucleotide
auauggggauccagcaucu

SEQ ID NO: 856175 - RNA, 19 nt, Artificial Sequence
  Description of Artificial Sequence: Synthetic oligonucleotide
auacgccacuaccucuucu

SEQ ID NO: 856176 - RNA, 19 nt, Artificial Sequence
  Description of Artificial Sequence: Synthetic oligonucleotide
aucaccuuagugggugucu

SEQ ID NO: 856177 - RNA, 19 nt, Artificial Sequence
  Description of Artificial Sequence: Synthetic oligonucleotide
uccucgaauuggagcuggc

SEQ ID NO: 856178 - RNA, 19 nt, Artificial Sequence
  Description of Artificial Sequence: Synthetic oligonucleotide
gauacgccacuaccucuuc

SEQ ID NO: 856179 - RNA, 19 nt, Artificial Sequence
  Description of Artificial Sequence: Synthetic oligonucleotide
gaugcuggguggacuguac

SEQ ID NO: 856180 - RNA, 19 nt, Artificial Sequence
  Description of Artificial Sequence: Synthetic oligonucleotide
gaggcucacggagagagua

SEQ ID NO: 856181 - RNA, 19 nt, Artificial Sequence
  Description of Artificial Sequence: Synthetic oligonucleotide
ccuguuugauggcauugcc

SEQ ID NO: 856182 - RNA, 19 nt, Artificial Sequence
  Description of Artificial Sequence: Synthetic oligonucleotide
ggugugguacugcaauuca

SEQ ID NO: 856183 - RNA, 19 nt, Artificial Sequence
  Description of Artificial Sequence: Synthetic oligonucleotide
auuccugacucagucgcaa

SEQ ID NO: 856184 - RNA, 19 nt, Artificial Sequence
  Description of Artificial Sequence: Synthetic oligonucleotide
cuaagauauugggaacaca

SEQ ID NO: 856185 - RNA, 19 nt, Artificial Sequence
  Description of Artificial Sequence: Synthetic oligonucleotide
uuuucgcugguaggcgcug

SEQ ID NO: 856186 - RNA, 19 nt, Artificial Sequence
  Description of Artificial Sequence: Synthetic oligonucleotide
auuuucgcugguaggcgcu

SEQ ID NO: 856187 - RNA, 19 nt, Artificial Sequence
  Description of Artificial Sequence: Synthetic oligonucleotide
auauucccagggcugugua

SEQ ID NO: 856188 - RNA, 19 nt, Artificial Sequence
  Description of Artificial Sequence: Synthetic oligonucleotide
cuacguugcaagaugguuu

SEQ ID NO: 856189 - RNA, 19 nt, Artificial Sequence
  Description of Artificial Sequence: Synthetic oligonucleotide
gugauacagcauuccugac

SEQ ID NO: 856190 - RNA, 19 nt, Artificial Sequence
  Description of Artificial Sequence: Synthetic oligonucleotide
agcucuaauucaacacacu

SEQ ID NO: 856191 - RNA, 19 nt, Artificial Sequence
  Description of Artificial Sequence: Synthetic oligonucleotide
aggucaacucugggauccc

SEQ ID NO: 856192 - RNA, 19 nt, Artificial Sequence
  Description of Artificial Sequence: Synthetic oligonucleotide
ucgcaauuacuaagauauu

SEQ ID NO: 856193 - RNA, 19 nt, Artificial Sequence
  Description of Artificial Sequence: Synthetic oligonucleotide
gugugguacugcaauucac

SEQ ID NO: 856194 - RNA, 19 nt, Artificial Sequence
  Description of Artificial Sequence: Synthetic oligonucleotide
caguaauugaggucuucua

SEQ ID NO: 856195 - RNA, 19 nt, Artificial Sequence
  Description of Artificial Sequence: Synthetic oligonucleotide
caggaaggucuccccauuc

SEQ ID NO: 856196 - RNA, 19 nt, Artificial Sequence
  Description of Artificial Sequence: Synthetic oligonucleotide
ugacgucaacagcacuaua

SEQ ID NO: 856197 - RNA, 19 nt, Artificial Sequence
  Description of Artificial Sequence: Synthetic oligonucleotide
gcgcugagagaaaugguag

SEQ ID NO: 856198 - RNA, 19 nt, Artificial Sequence
  Description of Artificial Sequence: Synthetic oligonucleotide
auacagcauuccugacuca

SEQ ID NO: 856199 - RNA, 19 nt, Artificial Sequence
  Description of Artificial Sequence: Synthetic oligonucleotide
gaucagguaucagcuguaa

SEQ ID NO: 856200 - RNA, 19 nt, Artificial Sequence
  Description of Artificial Sequence: Synthetic oligonucleotide
cauagguacuggugauaca

SEQ ID NO: 856201 - RNA, 19 nt, Artificial Sequence
  Description of Artificial Sequence: Synthetic oligonucleotide
agaucaucguaggccccag

SEQ ID NO: 856202 - RNA, 19 nt, Artificial Sequence
  Description of Artificial Sequence: Synthetic oligonucleotide
guaggcgcugagagaaaug

SEQ ID NO: 856203 - RNA, 19 nt, Artificial Sequence
  Description of Artificial Sequence: Synthetic oligonucleotide
cacccucuaguacaacaca

SEQ ID NO: 856204 - RNA, 19 nt, Artificial Sequence
  Description of Artificial Sequence: Synthetic oligonucleotide
gggaucuuugugcagcuua

SEQ ID NO: 856205 - RNA, 19 nt, Artificial Sequence
  Description of Artificial Sequence: Synthetic oligonucleotide
aaucggugugguacugcaa

SEQ ID NO: 856206 - RNA, 19 nt, Artificial Sequence
  Description of Artificial Sequence: Synthetic oligonucleotide
acggagagaguaaauucuu

SEQ ID NO: 856207 - RNA, 19 nt, Artificial Sequence
  Description of Artificial Sequence: Synthetic oligonucleotide
gaaugcauuuucgcuggua

SEQ ID NO: 856208 - RNA, 19 nt, Artificial Sequence
  Description of Artificial Sequence: Synthetic oligonucleotide
gggagccaaauccuuuuca

SEQ ID NO: 856209 - RNA, 19 nt, Artificial Sequence
  Description of Artificial Sequence: Synthetic oligonucleotide
cauucucauauaagaugua

SEQ ID NO: 856210 - RNA, 19 nt, Artificial Sequence
  Description of Artificial Sequence: Synthetic oligonucleotide
gcuucccaauauucccagg

SEQ ID NO: 856211 - RNA, 19 nt, Artificial Sequence
  Description of Artificial Sequence: Synthetic oligonucleotide
gcauuucugcucugcagca

SEQ ID NO: 856212 - RNA, 19 nt, Artificial Sequence
  Description of Artificial Sequence: Synthetic oligonucleotide
agcaaucggugugguacug

SEQ ID NO: 856213 - RNA, 19 nt, Artificial Sequence
  Description of Artificial Sequence: Synthetic oligonucleotide
guauaugcccuuccuuuau

SEQ ID NO: 856214 - RNA, 19 nt, Artificial Sequence
  Description of Artificial Sequence: Synthetic oligonucleotide
cguaaccguaguuaucuuc

SEQ ID NO: 856215 - RNA, 19 nt, Artificial Sequence
  Description of Artificial Sequence: Synthetic oligonucleotide
ggcaucguaaccguaguua

SEQ ID NO: 856216 - RNA, 19 nt, Artificial Sequence
  Description of Artificial Sequence: Synthetic oligonucleotide
cauaggcaauggucccaac

SEQ ID NO: 856217 - RNA, 19 nt, Artificial Sequence
  Description of Artificial Sequence: Synthetic oligonucleotide
ccguaguuaucuucagcug

SEQ ID NO: 856218 - RNA, 19 nt, Artificial Sequence
  Description of Artificial Sequence: Synthetic oligonucleotide
cauuucccguagacuuuuc

SEQ ID NO: 856219 - RNA, 19 nt, Artificial Sequence
  Description of Artificial Sequence: Synthetic oligonucleotide
uuucgcugguaggcgcuga

SEQ ID NO: 856220 - RNA, 19 nt, Artificial Sequence
  Description of Artificial Sequence: Synthetic oligonucleotide
ucguaaccguaguuaucuu

SEQ ID NO: 856221 - RNA, 19 nt, Artificial Sequence
  Description of Artificial Sequence: Synthetic oligonucleotide
aggauacgcaguggagacu

SEQ ID NO: 856222 - RNA, 19 nt, Artificial Sequence
  Description of Artificial Sequence: Synthetic oligonucleotide
ggguggacuguacuuaaua

SEQ ID NO: 856223 - RNA, 19 nt, Artificial Sequence
  Description of Artificial Sequence: Synthetic oligonucleotide
aucuuucgcuguugauaau

SEQ ID NO: 856224 - RNA, 19 nt, Artificial Sequence
  Description of Artificial Sequence: Synthetic oligonucleotide
ugguaggcgcugagagaaa

SEQ ID NO: 856225 - RNA, 19 nt, Artificial Sequence
  Description of Artificial Sequence: Synthetic oligonucleotide
cagaucaucguaggcccca

SEQ ID NO: 856226 - RNA, 19 nt, Artificial Sequence
  Description of Artificial Sequence: Synthetic oligonucleotide
aaaggccuuaugagacauu

SEQ ID NO: 856227 - RNA, 19 nt, Artificial Sequence
  Description of Artificial Sequence: Synthetic oligonucleotide
cuauauggggauccagcau

SEQ ID NO: 856228 - RNA, 19 nt, Artificial Sequence
  Description of Artificial Sequence: Synthetic oligonucleotide
gcaaguggcccaaagucaa

SEQ ID NO: 856229 - RNA, 19 nt, Artificial Sequence
  Description of Artificial Sequence: Synthetic oligonucleotide
acgccacuaccucuucuuu

SEQ ID NO: 856230 - RNA, 19 nt, Artificial Sequence
  Description of Artificial Sequence: Synthetic oligonucleotide
ucgcugguaggcgcugaga

SEQ ID NO: 856231 - RNA, 19 nt, Artificial Sequence
  Description of Artificial Sequence: Synthetic oligonucleotide
acgcagcaugcuucagagu

SEQ ID NO: 856232 - RNA, 19 nt, Artificial Sequence
  Description of Artificial Sequence: Synthetic oligonucleotide
aggccuuaugagacauuca

SEQ ID NO: 856233 - RNA, 19 nt, Artificial Sequence
  Description of Artificial Sequence: Synthetic oligonucleotide
cuaguacaacacagugaua

SEQ ID NO: 856234 - RNA, 19 nt, Artificial Sequence
  Description of Artificial Sequence: Synthetic oligonucleotide
cucacggagagaguaaauu

SEQ ID NO: 856235 - RNA, 19 nt, Artificial Sequence
  Description of Artificial Sequence: Synthetic oligonucleotide
ggaucuuugugcagcuuaa

SEQ ID NO: 856236 - RNA, 19 nt, Artificial Sequence
  Description of Artificial Sequence: Synthetic oligonucleotide
gcaaucggugugguacugc

SEQ ID NO: 856237 - RNA, 19 nt, Artificial Sequence
  Description of Artificial Sequence: Synthetic oligonucleotide
ucgaaacaccuggguggcu

SEQ ID NO: 856238 - RNA, 19 nt, Artificial Sequence
  Description of Artificial Sequence: Synthetic oligonucleotide
agugggugucugaggcuca

SEQ ID NO: 856239 - RNA, 19 nt, Artificial Sequence
  Description of Artificial Sequence: Synthetic oligonucleotide
caaaguccugcuugagaau

SEQ ID NO: 856240 - RNA, 19 nt, Artificial Sequence
  Description of Artificial Sequence: Synthetic oligonucleotide
cacuacguugcaagauggu

SEQ ID NO: 856241 - RNA, 19 nt, Artificial Sequence
  Description of Artificial Sequence: Synthetic oligonucleotide
gguaucagcuguaacucuu

SEQ ID NO: 856242 - RNA, 19 nt, Artificial Sequence
  Description of Artificial Sequence: Synthetic oligonucleotide
gugggugucugaggcucac

SEQ ID NO: 856243 - RNA, 19 nt, Artificial Sequence
  Description of Artificial Sequence: Synthetic oligonucleotide
gcuguauaugcccuuccuu

SEQ ID NO: 856244 - RNA, 19 nt, Artificial Sequence
  Description of Artificial Sequence: Synthetic oligonucleotide
cagcaaucggugugguacu

SEQ ID NO: 856245 - RNA, 19 nt, Artificial Sequence
  Description of Artificial Sequence: Synthetic oligonucleotide
caaucaccuuagugggugu

SEQ ID NO: 856246 - RNA, 19 nt, Artificial Sequence
  Description of Artificial Sequence: Synthetic oligonucleotide
caggcaucguaaccguagu

SEQ ID NO: 856247 - RNA, 19 nt, Artificial Sequence
  Description of Artificial Sequence: Synthetic oligonucleotide
ggcauugccuagaugucgu

SEQ ID NO: 856248 - RNA, 19 nt, Artificial Sequence
  Description of Artificial Sequence: Synthetic oligonucleotide
ucguaggccccaggauguc

SEQ ID NO: 856249 - RNA, 19 nt, Artificial Sequence
  Description of Artificial Sequence: Synthetic oligonucleotide
aggcucacggagagaguaa

SEQ ID NO: 856250 - RNA, 19 nt, Artificial Sequence
  Description of Artificial Sequence: Synthetic oligonucleotide
ggguuucagccaggauacg

SEQ ID NO: 856251 - RNA, 19 nt, Artificial Sequence
  Description of Artificial Sequence: Synthetic oligonucleotide
cagucgcaauuacuaagau

SEQ ID NO: 856252 - RNA, 19 nt, Artificial Sequence
  Description of Artificial Sequence: Synthetic oligonucleotide
gacccuccgcugaauuucu

SEQ ID NO: 856253 - RNA, 19 nt, Artificial Sequence
  Description of Artificial Sequence: Synthetic oligonucleotide
gauacgcaguggagacucu

SEQ ID NO: 856254 - RNA, 19 nt, Artificial Sequence
  Description of Artificial Sequence: Synthetic oligonucleotide
ggucaacucugggauccca

SEQ ID NO: 856255 - RNA, 19 nt, Artificial Sequence
  Description of Artificial Sequence: Synthetic oligonucleotide
agcuaagcgcucagccauu

SEQ ID NO: 856256 - RNA, 19 nt, Artificial Sequence
  Description of Artificial Sequence: Synthetic oligonucleotide
ccugacucagucgcaauua

SEQ ID NO: 856257 - RNA, 19 nt, Artificial Sequence
  Description of Artificial Sequence: Synthetic oligonucleotide
gguaggcgcugagagaaau

SEQ ID NO: 856258 - RNA, 19 nt, Artificial Sequence
  Description of Artificial Sequence: Synthetic oligonucleotide
ccuaucagugcuacaugau

SEQ ID NO: 856259 - RNA, 19 nt, Artificial Sequence
  Description of Artificial Sequence: Synthetic oligonucleotide
ggauacgccacuaccucuu

SEQ ID NO: 856260 - RNA, 19 nt, Artificial Sequence
  Description of Artificial Sequence: Synthetic oligonucleotide
ggguuggcagcacuacguu

SEQ ID NO: 856261 - RNA, 19 nt, Artificial Sequence
  Description of Artificial Sequence: Synthetic oligonucleotide
ccccaggauguccgguaca

SEQ ID NO: 856262 - RNA, 19 nt, Artificial Sequence
  Description of Artificial Sequence: Synthetic oligonucleotide
ccuagaugucguaguugau

SEQ ID NO: 856263 - RNA, 19 nt, Artificial Sequence
  Description of Artificial Sequence: Synthetic oligonucleotide
acccuccgcugaauuucuu

SEQ ID NO: 856264 - RNA, 19 nt, Artificial Sequence
  Description of Artificial Sequence: Synthetic oligonucleotide
cuguugcaaguggcccaaa

SEQ ID NO: 856265 - RNA, 19 nt, Artificial Sequence
  Description of Artificial Sequence: Synthetic oligonucleotide
gcuaagcgcucagccauuu

SEQ ID NO: 856266 - RNA, 19 nt, Artificial Sequence
  Description of Artificial Sequence: Synthetic oligonucleotide
ccauuucccguagacuuuu

SEQ ID NO: 856267 - RNA, 19 nt, Artificial Sequence
  Description of Artificial Sequence: Synthetic oligonucleotide
aaagauaagguccugccac

SEQ ID NO: 856268 - RNA, 19 nt, Artificial Sequence
  Description of Artificial Sequence: Synthetic oligonucleotide
aauaacuacacauucucca

SEQ ID NO: 856269 - RNA, 19 nt, Artificial Sequence
  Description of Artificial Sequence: Synthetic oligonucleotide
uauuggauacagaagauac

SEQ ID NO: 856270 - RNA, 19 nt, Artificial Sequence
  Description of Artificial Sequence: Synthetic oligonucleotide
aaccagacauauuuugggc

SEQ ID NO: 856271 - RNA, 19 nt, Artificial Sequence
  Description of Artificial Sequence: Synthetic oligonucleotide
aaugcuaugaaaagaagug

SEQ ID NO: 856272 - RNA, 19 nt, Artificial Sequence
  Description of Artificial Sequence: Synthetic oligonucleotide
aacgaagguugacaaaugg

SEQ ID NO: 856273 - RNA, 19 nt, Artificial Sequence
  Description of Artificial Sequence: Synthetic oligonucleotide
cauauugacuaguagcugg

SEQ ID NO: 856274 - RNA, 19 nt, Artificial Sequence
  Description of Artificial Sequence: Synthetic oligonucleotide
uuuugggcaagaaagaaaa

SEQ ID NO: 856275 - RNA, 19 nt, Artificial Sequence
  Description of Artificial Sequence: Synthetic oligonucleotide
uuggauuccagccuaaugu

SEQ ID NO: 856276 - RNA, 19 nt, Artificial Sequence
  Description of Artificial Sequence: Synthetic oligonucleotide
ucuagcuaaggcuaaagca

SEQ ID NO: 856277 - RNA, 19 nt, Artificial Sequence
  Description of Artificial Sequence: Synthetic oligonucleotide
gagucuaaagauaaggucc

SEQ ID NO: 856278 - RNA, 19 nt, Artificial Sequence
  Description of Artificial Sequence: Synthetic oligonucleotide
cauccaaguaggaagaggg

SEQ ID NO: 856279 - RNA, 19 nt, Artificial Sequence
  Description of Artificial Sequence: Synthetic oligonucleotide
uuuaaccccucacaguugg

SEQ ID NO: 856280 - RNA, 19 nt, Artificial Sequence
  Description of Artificial Sequence: Synthetic oligonucleotide
ugcauauugacuaguagcu

SEQ ID NO: 856281 - RNA, 19 nt, Artificial Sequence
  Description of Artificial Sequence: Synthetic oligonucleotide
uauacaucauucuuagcgc

SEQ ID NO: 856282 - RNA, 19 nt, Artificial Sequence
  Description of Artificial Sequence: Synthetic oligonucleotide
uguuuauuggauacagaag

SEQ ID NO: 856283 - RNA, 19 nt, Artificial Sequence
  Description of Artificial Sequence: Synthetic oligonucleotide
gauagcauauggcugucgg

SEQ ID NO: 856284 - RNA, 19 nt, Artificial Sequence
  Description of Artificial Sequence: Synthetic oligonucleotide
uuuguauacaucauucuua

SEQ ID NO: 856285 - RNA, 19 nt, Artificial Sequence
  Description of Artificial Sequence: Synthetic oligonucleotide
aagggcaauacccaaagau

SEQ ID NO: 856286 - RNA, 19 nt, Artificial Sequence
  Description of Artificial Sequence: Synthetic oligonucleotide
auaagguccugccacaguc

SEQ ID NO: 856287 - RNA, 19 nt, Artificial Sequence
  Description of Artificial Sequence: Synthetic oligonucleotide
cuaaagauaagguccugcc

SEQ ID NO: 856288 - RNA, 19 nt, Artificial Sequence
  Description of Artificial Sequence: Synthetic oligonucleotide
acgugggucaaauuuggcc

SEQ ID NO: 856289 - RNA, 19 nt, Artificial Sequence
  Description of Artificial Sequence: Synthetic oligonucleotide
uaaggcuaaagcaaggcuc

SEQ ID NO: 856290 - RNA, 19 nt, Artificial Sequence
  Description of Artificial Sequence: Synthetic oligonucleotide
ugggcaagaaagaaaauaa

SEQ ID NO: 856291 - RNA, 19 nt, Artificial Sequence
  Description of Artificial Sequence: Synthetic oligonucleotide
ucuugauagcauauggcug

SEQ ID NO: 856292 - RNA, 19 nt, Artificial Sequence
  Description of Artificial Sequence: Synthetic oligonucleotide
aaggcugccuacugaaagg

SEQ ID NO: 856293 - RNA, 19 nt, Artificial Sequence
  Description of Artificial Sequence: Synthetic oligonucleotide
auuguggagcuguaaagag

SEQ ID NO: 856294 - RNA, 19 nt, Artificial Sequence
  Description of Artificial Sequence: Synthetic oligonucleotide
augaaauggacauccaagu

SEQ ID NO: 856295 - RNA, 19 nt, Artificial Sequence
  Description of Artificial Sequence: Synthetic oligonucleotide
caaccagacauauuuuggg

SEQ ID NO: 856296 - RNA, 19 nt, Artificial Sequence
  Description of Artificial Sequence: Synthetic oligonucleotide
acaccuacccuaccuaccc

SEQ ID NO: 856297 - RNA, 19 nt, Artificial Sequence
  Description of Artificial Sequence: Synthetic oligonucleotide
uucuuagcgccgcuaaagg

SEQ ID NO: 856298 - RNA, 19 nt, Artificial Sequence
  Description of Artificial Sequence: Synthetic oligonucleotide
uuguggagcuguaaagagg

SEQ ID NO: 856299 - RNA, 19 nt, Artificial Sequence
  Description of Artificial Sequence: Synthetic oligonucleotide
ugguggaccuaucaaaggc

SEQ ID NO: 856300 - RNA, 19 nt, Artificial Sequence
  Description of Artificial Sequence: Synthetic oligonucleotide
auaaaacgaagguugacaa

SEQ ID NO: 856301 - RNA, 19 nt, Artificial Sequence
  Description of Artificial Sequence: Synthetic oligonucleotide
gauaaaacgaagguugaca

SEQ ID NO: 856302 - RNA, 19 nt, Artificial Sequence
  Description of Artificial Sequence: Synthetic oligonucleotide
agggagacaauacucagcu

SEQ ID NO: 856303 - RNA, 19 nt, Artificial Sequence
  Description of Artificial Sequence: Synthetic oligonucleotide
auacuuagcugucacacgu

SEQ ID NO: 856304 - RNA, 19 nt, Artificial Sequence
  Description of Artificial Sequence: Synthetic oligonucleotide
uuuagaaaggaaccagcaa

SEQ ID NO: 856305 - RNA, 19 nt, Artificial Sequence
  Description of Artificial Sequence: Synthetic oligonucleotide
uggagucuaaagauaaggu

SEQ ID NO: 856306 - RNA, 19 nt, Artificial Sequence
  Description of Artificial Sequence: Synthetic oligonucleotide
ucauacuuagcugucacac

SEQ ID NO: 856307 - RNA, 19 nt, Artificial Sequence
  Description of Artificial Sequence: Synthetic oligonucleotide
aguacggcuaaguuccagg

SEQ ID NO: 856308 - RNA, 19 nt, Artificial Sequence
  Description of Artificial Sequence: Synthetic oligonucleotide
ugcuuagucuagcuaaggc

SEQ ID NO: 856309 - RNA, 19 nt, Artificial Sequence
  Description of Artificial Sequence: Synthetic oligonucleotide
ucccuuuaaccccucacag

SEQ ID NO: 856310 - RNA, 19 nt, Artificial Sequence
  Description of Artificial Sequence: Synthetic oligonucleotide
uggaaaguuaaugcuauga

SEQ ID NO: 856311 - RNA, 19 nt, Artificial Sequence
  Description of Artificial Sequence: Synthetic oligonucleotide
uccuuuucgacgguugugg

SEQ ID NO: 856312 - RNA, 19 nt, Artificial Sequence
  Description of Artificial Sequence: Synthetic oligonucleotide
aguagugggaacaccaggg

SEQ ID NO: 856313 - RNA, 19 nt, Artificial Sequence
  Description of Artificial Sequence: Synthetic oligonucleotide
acuuagcugucacacgugg

SEQ ID NO: 856314 - RNA, 19 nt, Artificial Sequence
  Description of Artificial Sequence: Synthetic oligonucleotide
cuguauuuggccacccugg

SEQ ID NO: 856315 - RNA, 19 nt, Artificial Sequence
  Description of Artificial Sequence: Synthetic oligonucleotide
agcuaagugggaaucagac

SEQ ID NO: 856316 - RNA, 19 nt, Artificial Sequence
  Description of Artificial Sequence: Synthetic oligonucleotide
uuggauacagaagauacau

SEQ ID NO: 856317 - RNA, 19 nt, Artificial Sequence
  Description of Artificial Sequence: Synthetic oligonucleotide
uaucauacuuagcugucac

SEQ ID NO: 856318 - RNA, 19 nt, Artificial Sequence
  Description of Artificial Sequence: Synthetic oligonucleotide
uguaaggagaggguaaaga

SEQ ID NO: 856319 - RNA, 19 nt, Artificial Sequence
  Description of Artificial Sequence: Synthetic oligonucleotide
acgguuguggguugcaagg

SEQ ID NO: 856320 - RNA, 19 nt, Artificial Sequence
  Description of Artificial Sequence: Synthetic oligonucleotide
acggcuaaguuccagggug

SEQ ID NO: 856321 - RNA, 19 nt, Artificial Sequence
  Description of Artificial Sequence: Synthetic oligonucleotide
cuauacccagaccagacac

SEQ ID NO: 856322 - RNA, 19 nt, Artificial Sequence
  Description of Artificial Sequence: Synthetic oligonucleotide
cuuggcuagggucacacac

SEQ ID NO: 856323 - RNA, 19 nt, Artificial Sequence
  Description of Artificial Sequence: Synthetic oligonucleotide
aaauuuggcccuguauuug

SEQ ID NO: 856324 - RNA, 19 nt, Artificial Sequence
  Description of Artificial Sequence: Synthetic oligonucleotide
cuagcuaaggcuaaagcaa

SEQ ID NO: 856325 - RNA, 19 nt, Artificial Sequence
  Description of Artificial Sequence: Synthetic oligonucleotide
aaggagcuaagugggaauc

SEQ ID NO: 856326 - RNA, 19 nt, Artificial Sequence
  Description of Artificial Sequence: Synthetic oligonucleotide
agaguggucucuuugguau

SEQ ID NO: 856327 - RNA, 19 nt, Artificial Sequence
  Description of Artificial Sequence: Synthetic oligonucleotide
cuuugguaucccaauggag

SEQ ID NO: 856328 - RNA, 19 nt, Artificial Sequence
  Description of Artificial Sequence: Synthetic oligonucleotide
uaccacucggcuaaagcug

SEQ ID NO: 856329 - RNA, 19 nt, Artificial Sequence
  Description of Artificial Sequence: Synthetic oligonucleotide
cauacuuagcugucacacg

SEQ ID NO: 856330 - RNA, 19 nt, Artificial Sequence
  Description of Artificial Sequence: Synthetic oligonucleotide
aaucagggccuugauauca

SEQ ID NO: 856331 - RNA, 19 nt, Artificial Sequence
  Description of Artificial Sequence: Synthetic oligonucleotide
auagcauauggcugucggg

SEQ ID NO: 856332 - RNA, 19 nt, Artificial Sequence
  Description of Artificial Sequence: Synthetic oligonucleotide
guagaaagagggccuagcc

SEQ ID NO: 856333 - RNA, 19 nt, Artificial Sequence
  Description of Artificial Sequence: Synthetic oligonucleotide
uguauuuggccacccuggc

SEQ ID NO: 856334 - RNA, 19 nt, Artificial Sequence
  Description of Artificial Sequence: Synthetic oligonucleotide
agauaaaacgaagguugac

SEQ ID NO: 856335 - RNA, 19 nt, Artificial Sequence
  Description of Artificial Sequence: Synthetic oligonucleotide
agagggagacaauacucag

SEQ ID NO: 856336 - RNA, 19 nt, Artificial Sequence
  Description of Artificial Sequence: Synthetic oligonucleotide
auaacuacacauucuccau

SEQ ID NO: 856337 - RNA, 19 nt, Artificial Sequence
  Description of Artificial Sequence: Synthetic oligonucleotide
acuagauggugccauugug

SEQ ID NO: 856338 - RNA, 19 nt, Artificial Sequence
  Description of Artificial Sequence: Synthetic oligonucleotide
aacugcuguggcucaguuc

SEQ ID NO: 856339 - RNA, 19 nt, Artificial Sequence
  Description of Artificial Sequence: Synthetic oligonucleotide
cccaaagauaaaacgaagg

SEQ ID NO: 856340 - RNA, 19 nt, Artificial Sequence
  Description of Artificial Sequence: Synthetic oligonucleotide
acaucauucuuagcgccgc

SEQ ID NO: 856341 - RNA, 19 nt, Artificial Sequence
  Description of Artificial Sequence: Synthetic oligonucleotide
gaagagggagacaauacuc

SEQ ID NO: 856342 - RNA, 19 nt, Artificial Sequence
  Description of Artificial Sequence: Synthetic oligonucleotide
gggaaugaaauggacaucc

SEQ ID NO: 856343 - RNA, 19 nt, Artificial Sequence
  Description of Artificial Sequence: Synthetic oligonucleotide
auucuuagcgccgcuaaag

SEQ ID NO: 856344 - RNA, 19 nt, Artificial Sequence
  Description of Artificial Sequence: Synthetic oligonucleotide
uugguaucccaauggaggu

SEQ ID NO: 856345 - RNA, 19 nt, Artificial Sequence
  Description of Artificial Sequence: Synthetic oligonucleotide
guacggcuaaguuccaggg

SEQ ID NO: 856346 - RNA, 19 nt, Artificial Sequence
  Description of Artificial Sequence: Synthetic oligonucleotide
guaaggagaggguaaagaa

SEQ ID NO: 856347 - RNA, 19 nt, Artificial Sequence
  Description of Artificial Sequence: Synthetic oligonucleotide
aagauaaaacgaagguuga

SEQ ID NO: 856348 - RNA, 19 nt, Artificial Sequence
  Description of Artificial Sequence: Synthetic oligonucleotide
cuuagucuagcuaaggcua

SEQ ID NO: 856349 - RNA, 19 nt, Artificial Sequence
  Description of Artificial Sequence: Synthetic oligonucleotide
aggcacauacucccucugc

SEQ ID NO: 856350 - RNA, 19 nt, Artificial Sequence
  Description of Artificial Sequence: Synthetic oligonucleotide
uagcauauggcugucgggu

SEQ ID NO: 856351 - RNA, 19 nt, Artificial Sequence
  Description of Artificial Sequence: Synthetic oligonucleotide
aguccuaccacaagagguc

SEQ ID NO: 856352 - RNA, 19 nt, Artificial Sequence
  Description of Artificial Sequence: Synthetic oligonucleotide
gucuagcuaaggcuaaagc

SEQ ID NO: 856353 - RNA, 19 nt, Artificial Sequence
  Description of Artificial Sequence: Synthetic oligonucleotide
ugggaaagcagccccugca

SEQ ID NO: 856354 - RNA, 19 nt, Artificial Sequence
  Description of Artificial Sequence: Synthetic oligonucleotide
acauccaaguaggaagagg

SEQ ID NO: 856355 - RNA, 19 nt, Artificial Sequence
  Description of Artificial Sequence: Synthetic oligonucleotide
gacgguuguggguugcaag

SEQ ID NO: 856356 - RNA, 19 nt, Artificial Sequence
  Description of Artificial Sequence: Synthetic oligonucleotide
uaaaacgaagguugacaaa

SEQ ID NO: 856357 - RNA, 19 nt, Artificial Sequence
  Description of Artificial Sequence: Synthetic oligonucleotide
ggagucuaaagauaagguc

SEQ ID NO: 856358 - RNA, 19 nt, Artificial Sequence
  Description of Artificial Sequence: Synthetic oligonucleotide
uauacccagaccagacacu

SEQ ID NO: 856359 - RNA, 19 nt, Artificial Sequence
  Description of Artificial Sequence: Synthetic oligonucleotide
cuaugaaaagaaguggaca

SEQ ID NO: 856360 - RNA, 19 nt, Artificial Sequence
  Description of Artificial Sequence: Synthetic oligonucleotide
uguauacaucauucuuagc

SEQ ID NO: 856361 - RNA, 19 nt, Artificial Sequence
  Description of Artificial Sequence: Synthetic oligonucleotide
uuuucgacgguuguggguu

SEQ ID NO: 856362 - RNA, 19 nt, Artificial Sequence
  Description of Artificial Sequence: Synthetic oligonucleotide
gguacagaggccgacaggc

SEQ ID NO: 856363 - RNA, 19 nt, Artificial Sequence
  Description of Artificial Sequence: Synthetic oligonucleotide
gaugaaguguuuguauaca

SEQ ID NO: 856364 - RNA, 19 nt, Artificial Sequence
  Description of Artificial Sequence: Synthetic oligonucleotide
agacaauacucagcucugc

SEQ ID NO: 856365 - RNA, 19 nt, Artificial Sequence
  Description of Artificial Sequence: Synthetic oligonucleotide
uuagucuagcuaaggcuaa

SEQ ID NO: 856366 - RNA, 19 nt, Artificial Sequence
  Description of Artificial Sequence: Synthetic oligonucleotide
augaaguguuuguauacau

SEQ ID NO: 856367 - RNA, 19 nt, Artificial Sequence
  Description of Artificial Sequence: Synthetic oligonucleotide
gacuaguagcuggaaaccc

SEQ ID NO: 856368 - RNA, 19 nt, Artificial Sequence
  Description of Artificial Sequence: Synthetic oligonucleotide
aaagggcaauacccaaaga

SEQ ID NO: 856369 - RNA, 19 nt, Artificial Sequence
  Description of Artificial Sequence: Synthetic oligonucleotide
cuuggauuccagccuaaug

SEQ ID NO: 856370 - RNA, 19 nt, Artificial Sequence
  Description of Artificial Sequence: Synthetic oligonucleotide
aacccuuuucaggaacauc

SEQ ID NO: 856371 - RNA, 19 nt, Artificial Sequence
  Description of Artificial Sequence: Synthetic oligonucleotide
gccuugauaucauacuuag

SEQ ID NO: 856372 - RNA, 19 nt, Artificial Sequence
  Description of Artificial Sequence: Synthetic oligonucleotide
gauaucauacuuagcuguc

SEQ ID NO: 856373 - RNA, 19 nt, Artificial Sequence
  Description of Artificial Sequence: Synthetic oligonucleotide
auacucagcucugcaaagg

SEQ ID NO: 856374 - RNA, 19 nt, Artificial Sequence
  Description of Artificial Sequence: Synthetic oligonucleotide
gaaggaccuugcuuguccc

SEQ ID NO: 856375 - RNA, 19 nt, Artificial Sequence
  Description of Artificial Sequence: Synthetic oligonucleotide
cuugauagcauauggcugu

SEQ ID NO: 856376 - RNA, 19 nt, Artificial Sequence
  Description of Artificial Sequence: Synthetic oligonucleotide
ucggguugcccgaugcucc

SEQ ID NO: 856377 - RNA, 19 nt, Artificial Sequence
  Description of Artificial Sequence: Synthetic oligonucleotide
uuggcuagggucacacacu

SEQ ID NO: 856378 - RNA, 19 nt, Artificial Sequence
  Description of Artificial Sequence: Synthetic oligonucleotide
ugucugaccccuuccuacc

SEQ ID NO: 856379 - RNA, 19 nt, Artificial Sequence
  Description of Artificial Sequence: Synthetic oligonucleotide
caguagugggaacaccagg

SEQ ID NO: 856380 - RNA, 19 nt, Artificial Sequence
  Description of Artificial Sequence: Synthetic oligonucleotide
cuugcuugucccacagccc

SEQ ID NO: 856381 - RNA, 19 nt, Artificial Sequence
  Description of Artificial Sequence: Synthetic oligonucleotide
ucggcuaaagcugccucgg

SEQ ID NO: 856382 - RNA, 19 nt, Artificial Sequence
  Description of Artificial Sequence: Synthetic oligonucleotide
gauuccuggggaacuagug

SEQ ID NO: 856383 - RNA, 19 nt, Artificial Sequence
  Description of Artificial Sequence: Synthetic oligonucleotide
agccuaauguggugguagg

SEQ ID NO: 856384 - RNA, 19 nt, Artificial Sequence
  Description of Artificial Sequence: Synthetic oligonucleotide
accuauacccagaccagac

SEQ ID NO: 856385 - RNA, 19 nt, Artificial Sequence
  Description of Artificial Sequence: Synthetic oligonucleotide
uaauguggugguagggaaa

SEQ ID NO: 856386 - RNA, 19 nt, Artificial Sequence
  Description of Artificial Sequence: Synthetic oligonucleotide
aaggcacauacucccucug

SEQ ID NO: 856387 - RNA, 19 nt, Artificial Sequence
  Description of Artificial Sequence: Synthetic oligonucleotide
gcagcuuuagaaaggaacc

SEQ ID NO: 856388 - RNA, 19 nt, Artificial Sequence
  Description of Artificial Sequence: Synthetic oligonucleotide
ggagacaauacucagcucu

SEQ ID NO: 856389 - RNA, 19 nt, Artificial Sequence
  Description of Artificial Sequence: Synthetic oligonucleotide
uugcuuagucuagcuaagg

SEQ ID NO: 856390 - RNA, 19 nt, Artificial Sequence
  Description of Artificial Sequence: Synthetic oligonucleotide
cucacaaccagacauauuu

SEQ ID NO: 856391 - RNA, 19 nt, Artificial Sequence
  Description of Artificial Sequence: Synthetic oligonucleotide
caggaggauguaaggagag

SEQ ID NO: 856392 - RNA, 19 nt, Artificial Sequence
  Description of Artificial Sequence: Synthetic oligonucleotide
accacucggcuaaagcugc

SEQ ID NO: 856393 - RNA, 19 nt, Artificial Sequence
  Description of Artificial Sequence: Synthetic oligonucleotide
gccaccuauacccagacca

SEQ ID NO: 856394 - RNA, 19 nt, Artificial Sequence
  Description of Artificial Sequence: Synthetic oligonucleotide
accuacccuaccuacccag

SEQ ID NO: 856395 - RNA, 19 nt, Artificial Sequence
  Description of Artificial Sequence: Synthetic oligonucleotide
cugucugaccccuuccuac

SEQ ID NO: 856396 - RNA, 19 nt, Artificial Sequence
  Description of Artificial Sequence: Synthetic oligonucleotide
uacuuagcugucacacgug

SEQ ID NO: 856397 - RNA, 19 nt, Artificial Sequence
  Description of Artificial Sequence: Synthetic oligonucleotide
uuaaccccucacaguuggg

SEQ ID NO: 856398 - RNA, 19 nt, Artificial Sequence
  Description of Artificial Sequence: Synthetic oligonucleotide
ccuugcuugucccacagcc

SEQ ID NO: 856399 - RNA, 19 nt, Artificial Sequence
  Description of Artificial Sequence: Synthetic oligonucleotide
ugauagcauauggcugucg

SEQ ID NO: 856400 - RNA, 19 nt, Artificial Sequence
  Description of Artificial Sequence: Synthetic oligonucleotide
guugcaagggugugcacca

SEQ ID NO: 856401 - RNA, 19 nt, Artificial Sequence
  Description of Artificial Sequence: Synthetic oligonucleotide
gagggagacaauacucagc

SEQ ID NO: 856402 - RNA, 19 nt, Artificial Sequence
  Description of Artificial Sequence: Synthetic oligonucleotide
agaguacacaaaauaaaua

SEQ ID NO: 856403 - RNA, 19 nt, Artificial Sequence
  Description of Artificial Sequence: Synthetic oligonucleotide
cuacccuaccuacccagcc

SEQ ID NO: 856404 - RNA, 19 nt, Artificial Sequence
  Description of Artificial Sequence: Synthetic oligonucleotide
ggaaaguuaaugcuaugaa

SEQ ID NO: 856405 - RNA, 19 nt, Artificial Sequence
  Description of Artificial Sequence: Synthetic oligonucleotide
cuuuaaccccucacaguug

SEQ ID NO: 856406 - RNA, 19 nt, Artificial Sequence
  Description of Artificial Sequence: Synthetic oligonucleotide
aggaccuugcuugucccac

SEQ ID NO: 856407 - RNA, 19 nt, Artificial Sequence
  Description of Artificial Sequence: Synthetic oligonucleotide
uggguugcaagggugugca

SEQ ID NO: 856408 - RNA, 19 nt, Artificial Sequence
  Description of Artificial Sequence: Synthetic oligonucleotide
acacgugggucaaauuugg

SEQ ID NO: 856409 - RNA, 19 nt, Artificial Sequence
  Description of Artificial Sequence: Synthetic oligonucleotide
guauuuggccacccuggcc

SEQ ID NO: 856410 - RNA, 19 nt, Artificial Sequence
  Description of Artificial Sequence: Synthetic oligonucleotide
auuuggcccuguauuuggc

SEQ ID NO: 856411 - RNA, 19 nt, Artificial Sequence
  Description of Artificial Sequence: Synthetic oligonucleotide
uacggcuaaguuccagggu

SEQ ID NO: 856412 - RNA, 19 nt, Artificial Sequence
  Description of Artificial Sequence: Synthetic oligonucleotide
agucuagcuaaggcuaaag

SEQ ID NO: 856413 - RNA, 19 nt, Artificial Sequence
  Description of Artificial Sequence: Synthetic oligonucleotide
gaccuugcuugucccacag

SEQ ID NO: 856414 - RNA, 19 nt, Artificial Sequence
  Description of Artificial Sequence: Synthetic oligonucleotide
auuggauacagaagauaca

SEQ ID NO: 856415 - RNA, 19 nt, Artificial Sequence
  Description of Artificial Sequence: Synthetic oligonucleotide
guggggccaaccuggaaag

SEQ ID NO: 856416 - RNA, 19 nt, Artificial Sequence
  Description of Artificial Sequence: Synthetic oligonucleotide
ggcagcuuuagaaaggaac

SEQ ID NO: 856417 - RNA, 19 nt, Artificial Sequence
  Description of Artificial Sequence: Synthetic oligonucleotide
auaucauacuuagcuguca

SEQ ID NO: 856418 - RNA, 19 nt, Artificial Sequence
  Description of Artificial Sequence: Synthetic oligonucleotide
uacccuaccuacccagccu

SEQ ID NO: 856419 - RNA, 19 nt, Artificial Sequence
  Description of Artificial Sequence: Synthetic oligonucleotide
agagggccgacacugucca

SEQ ID NO: 856420 - RNA, 19 nt, Artificial Sequence
  Description of Artificial Sequence: Synthetic oligonucleotide
gaucucucucauagagagg

SEQ ID NO: 856421 - RNA, 19 nt, Artificial Sequence
  Description of Artificial Sequence: Synthetic oligonucleotide
acuaguagcuggaaaccca

SEQ ID NO: 856422 - RNA, 19 nt, Artificial Sequence
  Description of Artificial Sequence: Synthetic oligonucleotide
ugacaacuauaggaacugc

SEQ ID NO: 856423 - RNA, 19 nt, Artificial Sequence
  Description of Artificial Sequence: Synthetic oligonucleotide
ggaggcgccuguuuauugg

SEQ ID NO: 856424 - RNA, 19 nt, Artificial Sequence
  Description of Artificial Sequence: Synthetic oligonucleotide
ucacaaccagacauauuuu

SEQ ID NO: 856425 - RNA, 19 nt, Artificial Sequence
  Description of Artificial Sequence: Synthetic oligonucleotide
gauguaaggagaggguaaa

SEQ ID NO: 856426 - RNA, 19 nt, Artificial Sequence
  Description of Artificial Sequence: Synthetic oligonucleotide
auauugacuaguagcugga

SEQ ID NO: 856427 - RNA, 19 nt, Artificial Sequence
  Description of Artificial Sequence: Synthetic oligonucleotide
cucucucauagagaggcug

SEQ ID NO: 856428 - RNA, 19 nt, Artificial Sequence
  Description of Artificial Sequence: Synthetic oligonucleotide
cagccuaauguggugguag

SEQ ID NO: 856429 - RNA, 19 nt, Artificial Sequence
  Description of Artificial Sequence: Synthetic oligonucleotide
guaccacucggcuaaagcu

SEQ ID NO: 856430 - RNA, 19 nt, Artificial Sequence
  Description of Artificial Sequence: Synthetic oligonucleotide
cuucucgguacuuggucuc

SEQ ID NO: 856431 - RNA, 19 nt, Artificial Sequence
  Description of Artificial Sequence: Synthetic oligonucleotide
gagagggccgacacugucc

SEQ ID NO: 856432 - RNA, 19 nt, Artificial Sequence
  Description of Artificial Sequence: Synthetic oligonucleotide
guagggaaaccaugacaac

SEQ ID NO: 856433 - RNA, 19 nt, Artificial Sequence
  Description of Artificial Sequence: Synthetic oligonucleotide
ggauuccagccuaaugugg

SEQ ID NO: 856434 - RNA, 19 nt, Artificial Sequence
  Description of Artificial Sequence: Synthetic oligonucleotide
ggcuaaagcugccucggcc

SEQ ID NO: 856435 - RNA, 19 nt, Artificial Sequence
  Description of Artificial Sequence: Synthetic oligonucleotide
gggaggugcauauugacua

SEQ ID NO: 856436 - RNA, 19 nt, Artificial Sequence
  Description of Artificial Sequence: Synthetic oligonucleotide
uccagccuaaugugguggu

SEQ ID NO: 856437 - RNA, 19 nt, Artificial Sequence
  Description of Artificial Sequence: Synthetic oligonucleotide
cccagccugacucaguggg

SEQ ID NO: 856438 - RNA, 19 nt, Artificial Sequence
  Description of Artificial Sequence: Synthetic oligonucleotide
uggcuagggucacacacuu

SEQ ID NO: 856439 - RNA, 19 nt, Artificial Sequence
  Description of Artificial Sequence: Synthetic oligonucleotide
agggcaauacccaaagaua

SEQ ID NO: 856440 - RNA, 19 nt, Artificial Sequence
  Description of Artificial Sequence: Synthetic oligonucleotide
caguccuaccacaagaggu

SEQ ID NO: 856441 - RNA, 19 nt, Artificial Sequence
  Description of Artificial Sequence: Synthetic oligonucleotide
ggaggugcauauugacuag

SEQ ID NO: 856442 - RNA, 19 nt, Artificial Sequence
  Description of Artificial Sequence: Synthetic oligonucleotide
gcuaugaaaagaaguggac

SEQ ID NO: 856443 - RNA, 19 nt, Artificial Sequence
  Description of Artificial Sequence: Synthetic oligonucleotide
gcuaaggcuaaagcaaggc

SEQ ID NO: 856444 - RNA, 19 nt, Artificial Sequence
  Description of Artificial Sequence: Synthetic oligonucleotide
agauagggcaaggccagcu

SEQ ID NO: 856445 - RNA, 19 nt, Artificial Sequence
  Description of Artificial Sequence: Synthetic oligonucleotide
gcugccucggccaaucagg

SEQ ID NO: 856446 - RNA, 19 nt, Artificial Sequence
  Description of Artificial Sequence: Synthetic oligonucleotide
uccuaccacaagagguccu

SEQ ID NO: 856447 - RNA, 19 nt, Artificial Sequence
  Description of Artificial Sequence: Synthetic oligonucleotide
ugucacacgugggucaaau

SEQ ID NO: 856448 - RNA, 19 nt, Artificial Sequence
  Description of Artificial Sequence: Synthetic oligonucleotide
gcuaaagcugccucggcca

SEQ ID NO: 856449 - RNA, 19 nt, Artificial Sequence
  Description of Artificial Sequence: Synthetic oligonucleotide
uccucacaaccagacauau

SEQ ID NO: 856450 - RNA, 19 nt, Artificial Sequence
  Description of Artificial Sequence: Synthetic oligonucleotide
ugguaucccaauggaggug

SEQ ID NO: 856451 - RNA, 19 nt, Artificial Sequence
  Description of Artificial Sequence: Synthetic oligonucleotide
cugucggguugcccgaugc

SEQ ID NO: 856452 - RNA, 19 nt, Artificial Sequence
  Description of Artificial Sequence: Synthetic oligonucleotide
agggccuagcccaaggcug

SEQ ID NO: 856453 - RNA, 19 nt, Artificial Sequence
  Description of Artificial Sequence: Synthetic oligonucleotide
aucccaauggagguggcau

SEQ ID NO: 856454 - RNA, 19 nt, Artificial Sequence
  Description of Artificial Sequence: Synthetic oligonucleotide
cacgugggucaaauuuggc

SEQ ID NO: 856455 - RNA, 19 nt, Artificial Sequence
  Description of Artificial Sequence: Synthetic oligonucleotide
gcuaaagggcuccacuuuc

SEQ ID NO: 856456 - RNA, 19 nt, Artificial Sequence
  Description of Artificial Sequence: Synthetic oligonucleotide
gcuuagucuagcuaaggcu

SEQ ID NO: 856457 - RNA, 19 nt, Artificial Sequence
  Description of Artificial Sequence: Synthetic oligonucleotide
ggcagauagggcaaggcca

SEQ ID NO: 856458 - RNA, 19 nt, Artificial Sequence
  Description of Artificial Sequence: Synthetic oligonucleotide
cagacauauuuugggcaag

SEQ ID NO: 856459 - RNA, 19 nt, Artificial Sequence
  Description of Artificial Sequence: Synthetic oligonucleotide
auacccagaccagacacua

SEQ ID NO: 856460 - RNA, 19 nt, Artificial Sequence
  Description of Artificial Sequence: Synthetic oligonucleotide
cuaaggcuaaagcaaggcu

SEQ ID NO: 856461 - RNA, 19 nt, Artificial Sequence
  Description of Artificial Sequence: Synthetic oligonucleotide
uuucgacgguuguggguug

SEQ ID NO: 856462 - RNA, 19 nt, Artificial Sequence
  Description of Artificial Sequence: Synthetic oligonucleotide
ugucggguugcccgaugcu

SEQ ID NO: 856463 - RNA, 19 nt, Artificial Sequence
  Description of Artificial Sequence: Synthetic oligonucleotide
caaucagggccuugauauc

SEQ ID NO: 856464 - RNA, 19 nt, Artificial Sequence
  Description of Artificial Sequence: Synthetic oligonucleotide
gaggcgccuguuuauugga

SEQ ID NO: 856465 - RNA, 19 nt, Artificial Sequence
  Description of Artificial Sequence: Synthetic oligonucleotide
cuaccacaagagguccugg

SEQ ID NO: 856466 - RNA, 19 nt, Artificial Sequence
  Description of Artificial Sequence: Synthetic oligonucleotide
agggaggugcauauugacu

SEQ ID NO: 856467 - RNA, 19 nt, Artificial Sequence
  Description of Artificial Sequence: Synthetic oligonucleotide
aggccugguggaccuauca

SEQ ID NO: 856468 - RNA, 19 nt, Artificial Sequence
  Description of Artificial Sequence: Synthetic oligonucleotide
uccugcugacagaggcuug

SEQ ID NO: 856469 - RNA, 19 nt, Artificial Sequence
  Description of Artificial Sequence: Synthetic oligonucleotide
cugaccccuuccuacccac

SEQ ID NO: 856470 - RNA, 19 nt, Artificial Sequence
  Description of Artificial Sequence: Synthetic oligonucleotide
guccuaccacaagaggucc

SEQ ID NO: 856471 - RNA, 19 nt, Artificial Sequence
  Description of Artificial Sequence: Synthetic oligonucleotide
agcauauggcugucggguu

SEQ ID NO: 856472 - RNA, 19 nt, Artificial Sequence
  Description of Artificial Sequence: Synthetic oligonucleotide
aggaucucucucauagaga

SEQ ID NO: 856473 - RNA, 19 nt, Artificial Sequence
  Description of Artificial Sequence: Synthetic oligonucleotide
ggaagagggagacaauacu

SEQ ID NO: 856474 - RNA, 19 nt, Artificial Sequence
  Description of Artificial Sequence: Synthetic oligonucleotide
gaguggucucuuugguauc

SEQ ID NO: 856475 - RNA, 19 nt, Artificial Sequence
  Description of Artificial Sequence: Synthetic oligonucleotide
uucucgguacuuggucuca

SEQ ID NO: 856476 - RNA, 19 nt, Artificial Sequence
  Description of Artificial Sequence: Synthetic oligonucleotide
cgaagguugacaaauggaa

SEQ ID NO: 856477 - RNA, 19 nt, Artificial Sequence
  Description of Artificial Sequence: Synthetic oligonucleotide
cugcguggugguucugaag

SEQ ID NO: 856478 - RNA, 19 nt, Artificial Sequence
  Description of Artificial Sequence: Synthetic oligonucleotide
cuagcccaaggcugccuac

SEQ ID NO: 856479 - RNA, 19 nt, Artificial Sequence
  Description of Artificial Sequence: Synthetic oligonucleotide
caucguagaaagagggccu

SEQ ID NO: 856480 - RNA, 19 nt, Artificial Sequence
  Description of Artificial Sequence: Synthetic oligonucleotide
cagcuuuagaaaggaacca

SEQ ID NO: 856481 - RNA, 19 nt, Artificial Sequence
  Description of Artificial Sequence: Synthetic oligonucleotide
gcgccuguuuauuggauac

SEQ ID NO: 856482 - RNA, 19 nt, Artificial Sequence
  Description of Artificial Sequence: Synthetic oligonucleotide
ccaaguaggaagagggaga

SEQ ID NO: 856483 - RNA, 19 nt, Artificial Sequence
  Description of Artificial Sequence: Synthetic oligonucleotide
uagcugucacacguggguc

SEQ ID NO: 856484 - RNA, 19 nt, Artificial Sequence
  Description of Artificial Sequence: Synthetic oligonucleotide
ccuuuucgacgguuguggg

SEQ ID NO: 856485 - RNA, 19 nt, Artificial Sequence
  Description of Artificial Sequence: Synthetic oligonucleotide
ugaccccuuccuacccaca

SEQ ID NO: 856486 - RNA, 19 nt, Artificial Sequence
  Description of Artificial Sequence: Synthetic oligonucleotide
cccaauggagguggcaucg

SEQ ID NO: 856487 - RNA, 19 nt, Artificial Sequence
  Description of Artificial Sequence: Synthetic oligonucleotide
gcccuauccucacaaccag

SEQ ID NO: 856488 - RNA, 19 nt, Artificial Sequence
  Description of Artificial Sequence: Synthetic oligonucleotide
ccaccuauacccagaccag

SEQ ID NO: 856489 - RNA, 19 nt, Artificial Sequence
  Description of Artificial Sequence: Synthetic oligonucleotide
uucgacgguuguggguugc

SEQ ID NO: 856490 - RNA, 19 nt, Artificial Sequence
  Description of Artificial Sequence: Synthetic oligonucleotide
uucccgcccuucucgguac

SEQ ID NO: 856491 - RNA, 19 nt, Artificial Sequence
  Description of Artificial Sequence: Synthetic oligonucleotide
uagucuagcuaaggcuaaa

SEQ ID NO: 856492 - RNA, 19 nt, Artificial Sequence
  Description of Artificial Sequence: Synthetic oligonucleotide
auucugaggagaacccuuu

SEQ ID NO: 856493 - RNA, 19 nt, Artificial Sequence
  Description of Artificial Sequence: Synthetic oligonucleotide
acauacucccucugcccua

SEQ ID NO: 856494 - RNA, 19 nt, Artificial Sequence
  Description of Artificial Sequence: Synthetic oligonucleotide
cuaaagggcuccacuuucu

SEQ ID NO: 856495 - RNA, 19 nt, Artificial Sequence
  Description of Artificial Sequence: Synthetic oligonucleotide
ggcuggagucuaaagauaa

SEQ ID NO: 856496 - RNA, 19 nt, Artificial Sequence
  Description of Artificial Sequence: Synthetic oligonucleotide
gccuaauguggugguaggg

SEQ ID NO: 856497 - RNA, 19 nt, Artificial Sequence
  Description of Artificial Sequence: Synthetic oligonucleotide
aguugacuuggcacagagu

SEQ ID NO: 856498 - RNA, 19 nt, Artificial Sequence
  Description of Artificial Sequence: Synthetic oligonucleotide
gccacaguccuaccacaag

SEQ ID NO: 856499 - RNA, 19 nt, Artificial Sequence
  Description of Artificial Sequence: Synthetic oligonucleotide
cuuuucgacgguugugggu

SEQ ID NO: 856500 - RNA, 19 nt, Artificial Sequence
  Description of Artificial Sequence: Synthetic oligonucleotide
agcuggaaacccagcuuug

SEQ ID NO: 856501 - RNA, 19 nt, Artificial Sequence
  Description of Artificial Sequence: Synthetic oligonucleotide
ggaguugagcagcccagga

SEQ ID NO: 856502 - RNA, 19 nt, Artificial Sequence
  Description of Artificial Sequence: Synthetic oligonucleotide
ugggaacaccagggguagg

SEQ ID NO: 856503 - RNA, 19 nt, Artificial Sequence
  Description of Artificial Sequence: Synthetic oligonucleotide
gucggguugcccgaugcuc

SEQ ID NO: 856504 - RNA, 19 nt, Artificial Sequence
  Description of Artificial Sequence: Synthetic oligonucleotide
ccagacauauuuugggcaa

SEQ ID NO: 856505 - RNA, 19 nt, Artificial Sequence
  Description of Artificial Sequence: Synthetic oligonucleotide
cauucuuagcgccgcuaaa

SEQ ID NO: 856506 - RNA, 19 nt, Artificial Sequence
  Description of Artificial Sequence: Synthetic oligonucleotide
gaaagagggccuagcccaa

SEQ ID NO: 856507 - RNA, 19 nt, Artificial Sequence
  Description of Artificial Sequence: Synthetic oligonucleotide
aggugcauauugacuagua

SEQ ID NO: 856508 - RNA, 19 nt, Artificial Sequence
  Description of Artificial Sequence: Synthetic oligonucleotide
agcacccaaggcacccggg

SEQ ID NO: 856509 - RNA, 19 nt, Artificial Sequence
  Description of Artificial Sequence: Synthetic oligonucleotide
ccuacccuaccuacccagc

SEQ ID NO: 856510 - RNA, 19 nt, Artificial Sequence
  Description of Artificial Sequence: Synthetic oligonucleotide
agggguagggaggugcaua

SEQ ID NO: 856511 - RNA, 19 nt, Artificial Sequence
  Description of Artificial Sequence: Synthetic oligonucleotide
ucgacgguuguggguugca

SEQ ID NO: 856512 - RNA, 19 nt, Artificial Sequence
  Description of Artificial Sequence: Synthetic oligonucleotide
auacucccucugcccuauc

SEQ ID NO: 856513 - RNA, 19 nt, Artificial Sequence
  Description of Artificial Sequence: Synthetic oligonucleotide
ggcuaaguuccagggugag

SEQ ID NO: 856514 - RNA, 19 nt, Artificial Sequence
  Description of Artificial Sequence: Synthetic oligonucleotide
caccuauacccagaccaga

SEQ ID NO: 856515 - RNA, 19 nt, Artificial Sequence
  Description of Artificial Sequence: Synthetic oligonucleotide
ccuuuaaccccucacaguu

SEQ ID NO: 856516 - RNA, 19 nt, Artificial Sequence
  Description of Artificial Sequence: Synthetic oligonucleotide
cacucguaccacucggcua

SEQ ID NO: 856517 - RNA, 19 nt, Artificial Sequence
  Description of Artificial Sequence: Synthetic oligonucleotide
cguagaaagagggccuagc

SEQ ID NO: 856518 - RNA, 19 nt, Artificial Sequence
  Description of Artificial Sequence: Synthetic oligonucleotide
cacuagauggugccauugu

SEQ ID NO: 856519 - RNA, 19 nt, Artificial Sequence
  Description of Artificial Sequence: Synthetic oligonucleotide
gcuagaagggguuccuggu

SEQ ID NO: 856520 - RNA, 19 nt, Artificial Sequence
  Description of Artificial Sequence: Synthetic oligonucleotide
ccgaugcuccacucguacc

SEQ ID NO: 856521 - RNA, 19 nt, Artificial Sequence
  Description of Artificial Sequence: Synthetic oligonucleotide
ggcaauacccaaagauaaa

SEQ ID NO: 856522 - RNA, 19 nt, Artificial Sequence
  Description of Artificial Sequence: Synthetic oligonucleotide
guacagaggccgacaggca

SEQ ID NO: 856523 - RNA, 19 nt, Artificial Sequence
  Description of Artificial Sequence: Synthetic oligonucleotide
cccuucucgguacuugguc

SEQ ID NO: 856524 - RNA, 19 nt, Artificial Sequence
  Description of Artificial Sequence: Synthetic oligonucleotide
ugccuacugaaaggagcua

SEQ ID NO: 856525 - RNA, 19 nt, Artificial Sequence
  Description of Artificial Sequence: Synthetic oligonucleotide
ccuauacccagaccagaca

SEQ ID NO: 856526 - RNA, 19 nt, Artificial Sequence
  Description of Artificial Sequence: Synthetic oligonucleotide
gacacuagauggugccauu

SEQ ID NO: 856527 - RNA, 19 nt, Artificial Sequence
  Description of Artificial Sequence: Synthetic oligonucleotide
gcaaagggcaauacccaaa

SEQ ID NO: 856528 - RNA, 19 nt, Artificial Sequence
  Description of Artificial Sequence: Synthetic oligonucleotide
cuaccuacccagccugacu

SEQ ID NO: 856529 - RNA, 19 nt, Artificial Sequence
  Description of Artificial Sequence: Synthetic oligonucleotide
cgaugcuccacucguacca

SEQ ID NO: 856530 - RNA, 19 nt, Artificial Sequence
  Description of Artificial Sequence: Synthetic oligonucleotide
ggcuugcuuagucuagcua

SEQ ID NO: 856531 - RNA, 19 nt, Artificial Sequence
  Description of Artificial Sequence: Synthetic oligonucleotide
ggcgccuguuuauuggaua

SEQ ID NO: 856532 - RNA, 19 nt, Artificial Sequence
  Description of Artificial Sequence: Synthetic oligonucleotide
caccuacccuaccuaccca

SEQ ID NO: 856533 - RNA, 19 nt, Artificial Sequence
  Description of Artificial Sequence: Synthetic oligonucleotide
ucccgcccuucucgguacu

SEQ ID NO: 856534 - RNA, 19 nt, Artificial Sequence
  Description of Artificial Sequence: Synthetic oligonucleotide
ggccaguagugggaacacc

SEQ ID NO: 856535 - RNA, 19 nt, Artificial Sequence
  Description of Artificial Sequence: Synthetic oligonucleotide
agcuuggauuccagccuaa

SEQ ID NO: 856536 - RNA, 19 nt, Artificial Sequence
  Description of Artificial Sequence: Synthetic oligonucleotide
ccuaccuacccagccugac

SEQ ID NO: 856537 - RNA, 19 nt, Artificial Sequence
  Description of Artificial Sequence: Synthetic oligonucleotide
ccgacacuguccaccucug

SEQ ID NO: 856538 - RNA, 19 nt, Artificial Sequence
  Description of Artificial Sequence: Synthetic oligonucleotide
ggccaaccuggaaaguuaa

SEQ ID NO: 856539 - RNA, 19 nt, Artificial Sequence
  Description of Artificial Sequence: Synthetic oligonucleotide
gcugucggguugcccgaug

SEQ ID NO: 856540 - RNA, 19 nt, Artificial Sequence
  Description of Artificial Sequence: Synthetic oligonucleotide
gggguagggaggugcauau

SEQ ID NO: 856541 - RNA, 19 nt, Artificial Sequence
  Description of Artificial Sequence: Synthetic oligonucleotide
caucauucuuagcgccgcu

SEQ ID NO: 856542 - RNA, 19 nt, Artificial Sequence
  Description of Artificial Sequence: Synthetic oligonucleotide
gguugcccgaugcuccacu

SEQ ID NO: 856543 - RNA, 19 nt, Artificial Sequence
  Description of Artificial Sequence: Synthetic oligonucleotide
gucacacgugggucaaauu

SEQ ID NO: 856544 - RNA, 19 nt, Artificial Sequence
  Description of Artificial Sequence: Synthetic oligonucleotide
ggguugcaagggugugcac

SEQ ID NO: 856545 - RNA, 19 nt, Artificial Sequence
  Description of Artificial Sequence: Synthetic oligonucleotide
gcugucacacgugggucaa

SEQ ID NO: 856546 - RNA, 19 nt, Artificial Sequence
  Description of Artificial Sequence: Synthetic oligonucleotide
cacucggcuaaagcugccu

SEQ ID NO: 856547 - RNA, 19 nt, Artificial Sequence
  Description of Artificial Sequence: Synthetic oligonucleotide
caaaggcccaaggcacaua

SEQ ID NO: 856548 - RNA, 19 nt, Artificial Sequence
  Description of Artificial Sequence: Synthetic oligonucleotide
ccggccaccuauacccaga

SEQ ID NO: 856549 - RNA, 19 nt, Artificial Sequence
  Description of Artificial Sequence: Synthetic oligonucleotide
ccugcguggugguucugaa

SEQ ID NO: 856550 - RNA, 19 nt, Artificial Sequence
  Description of Artificial Sequence: Synthetic oligonucleotide
cggcuaaagcugccucggc

SEQ ID NO: 856551 - RNA, 19 nt, Artificial Sequence
  Description of Artificial Sequence: Synthetic oligonucleotide
cggcuaaguuccaggguga

SEQ ID NO: 856552 - RNA, 19 nt, Artificial Sequence
  Description of Artificial Sequence: Synthetic oligonucleotide
ccacucguaccacucggcu

SEQ ID NO: 856553 - RNA, 19 nt, Artificial Sequence
  Description of Artificial Sequence: Synthetic oligonucleotide
ggggcuagaagggguuccu

SEQ ID NO: 856554 - RNA, 19 nt, Artificial Sequence
  Description of Artificial Sequence: Synthetic oligonucleotide
gccgacaggcaggaucucu

SEQ ID NO: 856555 - RNA, 19 nt, Artificial Sequence
  Description of Artificial Sequence: Synthetic oligonucleotide
ccgcuaaagggcuccacuu

SEQ ID NO: 856556 - RNA, 19 nt, Artificial Sequence
  Description of Artificial Sequence: Synthetic oligonucleotide
cucguaccacucggcuaaa

SEQ ID NO: 856557 - RNA, 19 nt, Artificial Sequence
  Description of Artificial Sequence: Synthetic oligonucleotide
ggccaaucagggccuugau

SEQ ID NO: 856558 - RNA, 19 nt, Artificial Sequence
  Description of Artificial Sequence: Synthetic oligonucleotide
cccugcguggugguucuga

SEQ ID NO: 856559 - RNA, 19 nt, Artificial Sequence
  Description of Artificial Sequence: Synthetic oligonucleotide
cggguugcccgaugcucca

SEQ ID NO: 856560 - RNA, 19 nt, Artificial Sequence
  Description of Artificial Sequence: Synthetic oligonucleotide
gcccuucucgguacuuggu

SEQ ID NO: 856561 - RNA, 19 nt, Artificial Sequence
  Description of Artificial Sequence: Synthetic oligonucleotide
ccagccuaaugugguggua

SEQ ID NO: 856562 - RNA, 19 nt, Artificial Sequence
  Description of Artificial Sequence: Synthetic oligonucleotide
ggggaggcgccuguuuauu

SEQ ID NO: 856563 - RNA, 19 nt, Artificial Sequence
  Description of Artificial Sequence: Synthetic oligonucleotide
ccaaggcacccgggguuca

SEQ ID NO: 856564 - RNA, 19 nt, Artificial Sequence
  Description of Artificial Sequence: Synthetic oligonucleotide
ggccgacaggcaggaucuc

SEQ ID NO: 856565 - RNA, 19 nt, Artificial Sequence
  Description of Artificial Sequence: Synthetic oligonucleotide
ccaauggagguggcaucgu

SEQ ID NO: 856566 - RNA, 19 nt, Artificial Sequence
  Description of Artificial Sequence: Synthetic oligonucleotide
cgccgcuaaagggcuccac

SEQ ID NO: 856567 - RNA, 19 nt, Artificial Sequence
  Description of Artificial Sequence: Synthetic oligonucleotide
gcgccgcuaaagggcucca

SEQ ID NO: 856568 - RNA, 19 nt, Artificial Sequence
  Description of Artificial Sequence: Synthetic oligonucleotide
cgacgguuguggguugcaa

SEQ ID NO: 856569 - RNA, 19 nt, Artificial Sequence
  Description of Artificial Sequence: Synthetic oligonucleotide
ggccacccuggcccugcgu

SEQ ID NO: 856570 - RNA, 19 nt, Artificial Sequence
  Description of Artificial Sequence: Synthetic oligonucleotide
gcccugcguggugguucug

SEQ ID NO: 856571 - RNA, 19 nt, Artificial Sequence
  Description of Artificial Sequence: Synthetic oligonucleotide
cucggccaaucagggccuu

SEQ ID NO: 856572 - RNA, 19 nt, Artificial Sequence
  Description of Artificial Sequence: Synthetic oligonucleotide
cccgcccuucucgguacuu

SEQ ID NO: 856573 - RNA, 19 nt, Artificial Sequence
  Description of Artificial Sequence: Synthetic oligonucleotide
acuaucgacauucauaggc

SEQ ID NO: 856574 - RNA, 19 nt, Artificial Sequence
  Description of Artificial Sequence: Synthetic oligonucleotide
aaucuuaacacccagacaa

SEQ ID NO: 856575 - RNA, 19 nt, Artificial Sequence
  Description of Artificial Sequence: Synthetic oligonucleotide
uauauuaacuaacugucgg

SEQ ID NO: 856576 - RNA, 19 nt, Artificial Sequence
  Description of Artificial Sequence: Synthetic oligonucleotide
aauggacucauuuauacca

SEQ ID NO: 856577 - RNA, 19 nt, Artificial Sequence
  Description of Artificial Sequence: Synthetic oligonucleotide
acauauuaaucuuaacacc

SEQ ID NO: 856578 - RNA, 19 nt, Artificial Sequence
  Description of Artificial Sequence: Synthetic oligonucleotide
uaugaauaagaacauaugu

SEQ ID NO: 856579 - RNA, 19 nt, Artificial Sequence
  Description of Artificial Sequence: Synthetic oligonucleotide
aacucugacauauuaaucu

SEQ ID NO: 856580 - RNA, 19 nt, Artificial Sequence
  Description of Artificial Sequence: Synthetic oligonucleotide
gacauauuaaucuuaacac

SEQ ID NO: 856581 - RNA, 19 nt, Artificial Sequence
  Description of Artificial Sequence: Synthetic oligonucleotide
uuucaaaagggaauuaugc

SEQ ID NO: 856582 - RNA, 19 nt, Artificial Sequence
  Description of Artificial Sequence: Synthetic oligonucleotide
gguauuauagcccauaucc

SEQ ID NO: 856583 - RNA, 19 nt, Artificial Sequence
  Description of Artificial Sequence: Synthetic oligonucleotide
gaacuaucgacauucauag

SEQ ID NO: 856584 - RNA, 19 nt, Artificial Sequence
  Description of Artificial Sequence: Synthetic oligonucleotide
aaucuaagaaaaguguugg

SEQ ID NO: 856585 - RNA, 19 nt, Artificial Sequence
  Description of Artificial Sequence: Synthetic oligonucleotide
uauuauagcccauauccgg

SEQ ID NO: 856586 - RNA, 19 nt, Artificial Sequence
  Description of Artificial Sequence: Synthetic oligonucleotide
aaagccuugggcaaugugc

SEQ ID NO: 856587 - RNA, 19 nt, Artificial Sequence
  Description of Artificial Sequence: Synthetic oligonucleotide
cuuugauacagucagcacg

SEQ ID NO: 856588 - RNA, 19 nt, Artificial Sequence
  Description of Artificial Sequence: Synthetic oligonucleotide
aaaugacuaucacaccagc

SEQ ID NO: 856589 - RNA, 19 nt, Artificial Sequence
  Description of Artificial Sequence: Synthetic oligonucleotide
acugaauuauaguuacugc

SEQ ID NO: 856590 - RNA, 19 nt, Artificial Sequence
  Description of Artificial Sequence: Synthetic oligonucleotide
gaauuauaguuacugcacg

SEQ ID NO: 856591 - RNA, 19 nt, Artificial Sequence
  Description of Artificial Sequence: Synthetic oligonucleotide
uuaauggauaaaaugcaca

SEQ ID NO: 856592 - RNA, 19 nt, Artificial Sequence
  Description of Artificial Sequence: Synthetic oligonucleotide
ugaauuauaguuacugcac

SEQ ID NO: 856593 - RNA, 19 nt, Artificial Sequence
  Description of Artificial Sequence: Synthetic oligonucleotide
uucacuacaaucuaugaau

SEQ ID NO: 856594 - RNA, 19 nt, Artificial Sequence
  Description of Artificial Sequence: Synthetic oligonucleotide
acacagagaguauaaauuc

SEQ ID NO: 856595 - RNA, 19 nt, Artificial Sequence
  Description of Artificial Sequence: Synthetic oligonucleotide
uucaaucuaagaaaagugu

SEQ ID NO: 856596 - RNA, 19 nt, Artificial Sequence
  Description of Artificial Sequence: Synthetic oligonucleotide
uuuaaguuauuuugguugc

SEQ ID NO: 856597 - RNA, 19 nt, Artificial Sequence
  Description of Artificial Sequence: Synthetic oligonucleotide
cuuugcuacgucauaaacg

SEQ ID NO: 856598 - RNA, 19 nt, Artificial Sequence
  Description of Artificial Sequence: Synthetic oligonucleotide
aacuucacuaaauugucca

SEQ ID NO: 856599 - RNA, 19 nt, Artificial Sequence
  Description of Artificial Sequence: Synthetic oligonucleotide
ucauuuauaccauuuaaau

SEQ ID NO: 856600 - RNA, 19 nt, Artificial Sequence
  Description of Artificial Sequence: Synthetic oligonucleotide
aggaauuagccucuuuugc

SEQ ID NO: 856601 - RNA, 19 nt, Artificial Sequence
  Description of Artificial Sequence: Synthetic oligonucleotide
uaaaucaaauaucugcacu

SEQ ID NO: 856602 - RNA, 19 nt, Artificial Sequence
  Description of Artificial Sequence: Synthetic oligonucleotide
cuccuaacaagauaaacgc

SEQ ID NO: 856603 - RNA, 19 nt, Artificial Sequence
  Description of Artificial Sequence: Synthetic oligonucleotide
aacgcgcacacacacacac

SEQ ID NO: 856604 - RNA, 19 nt, Artificial Sequence
  Description of Artificial Sequence: Synthetic oligonucleotide
aacugaauuauaguuacug

SEQ ID NO: 856605 - RNA, 19 nt, Artificial Sequence
  Description of Artificial Sequence: Synthetic oligonucleotide
auuaacuaacugucggagc

SEQ ID NO: 856606 - RNA, 19 nt, Artificial Sequence
  Description of Artificial Sequence: Synthetic oligonucleotide
uaucacaccagccaaacaa

SEQ ID NO: 856607 - RNA, 19 nt, Artificial Sequence
  Description of Artificial Sequence: Synthetic oligonucleotide
acugguuaaggauucaaag

SEQ ID NO: 856608 - RNA, 19 nt, Artificial Sequence
  Description of Artificial Sequence: Synthetic oligonucleotide
uuagauuuauaaagaaacu

SEQ ID NO: 856609 - RNA, 19 nt, Artificial Sequence
  Description of Artificial Sequence: Synthetic oligonucleotide
aaaugacucagaacuaucg

SEQ ID NO: 856610 - RNA, 19 nt, Artificial Sequence
  Description of Artificial Sequence: Synthetic oligonucleotide
cugaguagugaucugacgg

SEQ ID NO: 856611 - RNA, 19 nt, Artificial Sequence
  Description of Artificial Sequence: Synthetic oligonucleotide
gaaugcaugugauccagcg

SEQ ID NO: 856612 - RNA, 19 nt, Artificial Sequence
  Description of Artificial Sequence: Synthetic oligonucleotide
uaauggauaaaaugcacac

SEQ ID NO: 856613 - RNA, 19 nt, Artificial Sequence
  Description of Artificial Sequence: Synthetic oligonucleotide
augacucagaacuaucgac

SEQ ID NO: 856614 - RNA, 19 nt, Artificial Sequence
  Description of Artificial Sequence: Synthetic oligonucleotide
ucuucuuacacagagagua

SEQ ID NO: 856615 - RNA, 19 nt, Artificial Sequence
  Description of Artificial Sequence: Synthetic oligonucleotide
aaugacuaucacaccagcc

SEQ ID NO: 856616 - RNA, 19 nt, Artificial Sequence
  Description of Artificial Sequence: Synthetic oligonucleotide
acaagauaaacgcgcacac

SEQ ID NO: 856617 - RNA, 19 nt, Artificial Sequence
  Description of Artificial Sequence: Synthetic oligonucleotide
ucgagaaugcaugugaucc

SEQ ID NO: 856618 - RNA, 19 nt, Artificial Sequence
  Description of Artificial Sequence: Synthetic oligonucleotide
aauaacguuugggugauug

SEQ ID NO: 856619 - RNA, 19 nt, Artificial Sequence
  Description of Artificial Sequence: Synthetic oligonucleotide
uuauaugaaaacugguuaa

SEQ ID NO: 856620 - RNA, 19 nt, Artificial Sequence
  Description of Artificial Sequence: Synthetic oligonucleotide
uaagguguacccacuaaag

SEQ ID NO: 856621 - RNA, 19 nt, Artificial Sequence
  Description of Artificial Sequence: Synthetic oligonucleotide
uauaccauuuaaaugcaaa

SEQ ID NO: 856622 - RNA, 19 nt, Artificial Sequence
  Description of Artificial Sequence: Synthetic oligonucleotide
agaugcauaauauuuaaua

SEQ ID NO: 856623 - RNA, 19 nt, Artificial Sequence
  Description of Artificial Sequence: Synthetic oligonucleotide
uuaacucugacauauuaau

SEQ ID NO: 856624 - RNA, 19 nt, Artificial Sequence
  Description of Artificial Sequence: Synthetic oligonucleotide
aagcuuauaugaaaacugg

SEQ ID NO: 856625 - RNA, 19 nt, Artificial Sequence
  Description of Artificial Sequence: Synthetic oligonucleotide
aguucauuaucuucaauga

SEQ ID NO: 856626 - RNA, 19 nt, Artificial Sequence
  Description of Artificial Sequence: Synthetic oligonucleotide
ucuucgagaaugcauguga

SEQ ID NO: 856627 - RNA, 19 nt, Artificial Sequence
  Description of Artificial Sequence: Synthetic oligonucleotide
uauuaacuaacugucggag

SEQ ID NO: 856628 - RNA, 19 nt, Artificial Sequence
  Description of Artificial Sequence: Synthetic oligonucleotide
uuuaucauucuggagaggu

SEQ ID NO: 856629 - RNA, 19 nt, Artificial Sequence
  Description of Artificial Sequence: Synthetic oligonucleotide
uauaguuacugcacgauua

SEQ ID NO: 856630 - RNA, 19 nt, Artificial Sequence
  Description of Artificial Sequence: Synthetic oligonucleotide
aauauucugaaggggaucu

SEQ ID NO: 856631 - RNA, 19 nt, Artificial Sequence
  Description of Artificial Sequence: Synthetic oligonucleotide
ucaaagcacauuaacucug

SEQ ID NO: 856632 - RNA, 19 nt, Artificial Sequence
  Description of Artificial Sequence: Synthetic oligonucleotide
agcuguucgcgguacaugc

SEQ ID NO: 856633 - RNA, 19 nt, Artificial Sequence
  Description of Artificial Sequence: Synthetic oligonucleotide
ucuauaaacuucacuaaau

SEQ ID NO: 856634 - RNA, 19 nt, Artificial Sequence
  Description of Artificial Sequence: Synthetic oligonucleotide
ugaguagugaucugacggg

SEQ ID NO: 856635 - RNA, 19 nt, Artificial Sequence
  Description of Artificial Sequence: Synthetic oligonucleotide
ugcauauauuaacuaacug

SEQ ID NO: 856636 - RNA, 19 nt, Artificial Sequence
  Description of Artificial Sequence: Synthetic oligonucleotide
aaugacucagaacuaucga

SEQ ID NO: 856637 - RNA, 19 nt, Artificial Sequence
  Description of Artificial Sequence: Synthetic oligonucleotide
ucuaaucuucacuacaauc

SEQ ID NO: 856638 - RNA, 19 nt, Artificial Sequence
  Description of Artificial Sequence: Synthetic oligonucleotide
gaauuaugcucucagaaaa

SEQ ID NO: 856639 - RNA, 19 nt, Artificial Sequence
  Description of Artificial Sequence: Synthetic oligonucleotide
auguauucucucuggagac

SEQ ID NO: 856640 - RNA, 19 nt, Artificial Sequence
  Description of Artificial Sequence: Synthetic oligonucleotide
uccuaacaagauaaacgcg

SEQ ID NO: 856641 - RNA, 19 nt, Artificial Sequence
  Description of Artificial Sequence: Synthetic oligonucleotide
aacgaaguauuuccaaaca

SEQ ID NO: 856642 - RNA, 19 nt, Artificial Sequence
  Description of Artificial Sequence: Synthetic oligonucleotide
acuacaaucuaugaauaag

SEQ ID NO: 856643 - RNA, 19 nt, Artificial Sequence
  Description of Artificial Sequence: Synthetic oligonucleotide
uuggcuaagguauuauagc

SEQ ID NO: 856644 - RNA, 19 nt, Artificial Sequence
  Description of Artificial Sequence: Synthetic oligonucleotide
ugacucagaacuaucgaca

SEQ ID NO: 856645 - RNA, 19 nt, Artificial Sequence
  Description of Artificial Sequence: Synthetic oligonucleotide
cuuaaccacuuuuaaaaug

SEQ ID NO: 856646 - RNA, 19 nt, Artificial Sequence
  Description of Artificial Sequence: Synthetic oligonucleotide
aauuaugcucucagaaaac

SEQ ID NO: 856647 - RNA, 19 nt, Artificial Sequence
  Description of Artificial Sequence: Synthetic oligonucleotide
aaaacagggagguaugauu

SEQ ID NO: 856648 - RNA, 19 nt, Artificial Sequence
  Description of Artificial Sequence: Synthetic oligonucleotide
uacacagagaguauaaauu

SEQ ID NO: 856649 - RNA, 19 nt, Artificial Sequence
  Description of Artificial Sequence: Synthetic oligonucleotide
uggcuaagguauuauagcc

SEQ ID NO: 856650 - RNA, 19 nt, Artificial Sequence
  Description of Artificial Sequence: Synthetic oligonucleotide
aacaagauaaacgcgcaca

SEQ ID NO: 856651 - RNA, 19 nt, Artificial Sequence
  Description of Artificial Sequence: Synthetic oligonucleotide
aaaccgaccaaguccaaga

SEQ ID NO: 856652 - RNA, 19 nt, Artificial Sequence
  Description of Artificial Sequence: Synthetic oligonucleotide
augacuaucacaccagcca

SEQ ID NO: 856653 - RNA, 19 nt, Artificial Sequence
  Description of Artificial Sequence: Synthetic oligonucleotide
ugcuaauuccaaaacuaug

SEQ ID NO: 856654 - RNA, 19 nt, Artificial Sequence
  Description of Artificial Sequence: Synthetic oligonucleotide
ugaugcauauauuaacuaa

SEQ ID NO: 856655 - RNA, 19 nt, Artificial Sequence
  Description of Artificial Sequence: Synthetic oligonucleotide
ucuuugucggcaaaugacu

SEQ ID NO: 856656 - RNA, 19 nt, Artificial Sequence
  Description of Artificial Sequence: Synthetic oligonucleotide
ugaagcuuauaugaaaacu

SEQ ID NO: 856657 - RNA, 19 nt, Artificial Sequence
  Description of Artificial Sequence: Synthetic oligonucleotide
ugcacgauuauuccaagaa

SEQ ID NO: 856658 - RNA, 19 nt, Artificial Sequence
  Description of Artificial Sequence: Synthetic oligonucleotide
aguuaaauguauuuagauu

SEQ ID NO: 856659 - RNA, 19 nt, Artificial Sequence
  Description of Artificial Sequence: Synthetic oligonucleotide
aaggggaucuaaucuucac

SEQ ID NO: 856660 - RNA, 19 nt, Artificial Sequence
  Description of Artificial Sequence: Synthetic oligonucleotide
guuguauccauuuucaugu

SEQ ID NO: 856661 - RNA, 19 nt, Artificial Sequence
  Description of Artificial Sequence: Synthetic oligonucleotide
aaagcacauuaacucugac

SEQ ID NO: 856662 - RNA, 19 nt, Artificial Sequence
  Description of Artificial Sequence: Synthetic oligonucleotide
aauucauuuugucaccgua

SEQ ID NO: 856663 - RNA, 19 nt, Artificial Sequence
  Description of Artificial Sequence: Synthetic oligonucleotide
acgaaguauuuccaaacag

SEQ ID NO: 856664 - RNA, 19 nt, Artificial Sequence
  Description of Artificial Sequence: Synthetic oligonucleotide
aacuauguucaguucauua

SEQ ID NO: 856665 - RNA, 19 nt, Artificial Sequence
  Description of Artificial Sequence: Synthetic oligonucleotide
uuuuaaagcuacugguacu

SEQ ID NO: 856666 - RNA, 19 nt, Artificial Sequence
  Description of Artificial Sequence: Synthetic oligonucleotide
uucacuaaauuguccacga

SEQ ID NO: 856667 - RNA, 19 nt, Artificial Sequence
  Description of Artificial Sequence: Synthetic oligonucleotide
gaaauguuacucucguaac

SEQ ID NO: 856668 - RNA, 19 nt, Artificial Sequence
  Description of Artificial Sequence: Synthetic oligonucleotide
ccuaacaagauaaacgcgc

SEQ ID NO: 856669 - RNA, 19 nt, Artificial Sequence
  Description of Artificial Sequence: Synthetic oligonucleotide
uauagcccauauccggucg

SEQ ID NO: 856670 - RNA, 19 nt, Artificial Sequence
  Description of Artificial Sequence: Synthetic oligonucleotide
gugauugaguugcuuaagg

SEQ ID NO: 856671 - RNA, 19 nt, Artificial Sequence
  Description of Artificial Sequence: Synthetic oligonucleotide
aaaagggaauuaugcucuc

SEQ ID NO: 856672 - RNA, 19 nt, Artificial Sequence
  Description of Artificial Sequence: Synthetic oligonucleotide
guuggcuaagguauuauag

SEQ ID NO: 856673 - RNA, 19 nt, Artificial Sequence
  Description of Artificial Sequence: Synthetic oligonucleotide
acgucauaaacguaggcga

SEQ ID NO: 856674 - RNA, 19 nt, Artificial Sequence
  Description of Artificial Sequence: Synthetic oligonucleotide
cacauuuaggagauugagc

SEQ ID NO: 856675 - RNA, 19 nt, Artificial Sequence
  Description of Artificial Sequence: Synthetic oligonucleotide
ugagacauauuaguaaagu

SEQ ID NO: 856676 - RNA, 19 nt, Artificial Sequence
  Description of Artificial Sequence: Synthetic oligonucleotide
auauuaacuaacugucgga

SEQ ID NO: 856677 - RNA, 19 nt, Artificial Sequence
  Description of Artificial Sequence: Synthetic oligonucleotide
uguccuaaacauauucuaa

SEQ ID NO: 856678 - RNA, 19 nt, Artificial Sequence
  Description of Artificial Sequence: Synthetic oligonucleotide
aaacguaggcgaugucugg

SEQ ID NO: 856679 - RNA, 19 nt, Artificial Sequence
  Description of Artificial Sequence: Synthetic oligonucleotide
  modified_base (13)..(13): a, c, u, g, unknown or other
uccaauaaccccnccauuu

SEQ ID NO: 856680 - RNA, 19 nt, Artificial Sequence
  Description of Artificial Sequence: Synthetic oligonucleotide
acuaaauuguccacgacca

SEQ ID NO: 856681 - RNA, 19 nt, Artificial Sequence
  Description of Artificial Sequence: Synthetic oligonucleotide
cacacacacacacugagug

SEQ ID NO: 856682 - RNA, 19 nt, Artificial Sequence
  Description of Artificial Sequence: Synthetic oligonucleotide
guucuuucaggaauuagcc

SEQ ID NO: 856683 - RNA, 19 nt, Artificial Sequence
  Description of Artificial Sequence: Synthetic oligonucleotide
aucuuugucggcaaaugac

SEQ ID NO: 856684 - RNA, 19 nt, Artificial Sequence
  Description of Artificial Sequence: Synthetic oligonucleotide
uacccacuaaagaaugugc

SEQ ID NO: 856685 - RNA, 19 nt, Artificial Sequence
  Description of Artificial Sequence: Synthetic oligonucleotide
uaaucuuaacacccagaca

SEQ ID NO: 856686 - RNA, 19 nt, Artificial Sequence
  Description of Artificial Sequence: Synthetic oligonucleotide
cuacaaucuaugaauaaga

SEQ ID NO: 856687 - RNA, 19 nt, Artificial Sequence
  Description of Artificial Sequence: Synthetic oligonucleotide
uggguugaugcauauauua

SEQ ID NO: 856688 - RNA, 19 nt, Artificial Sequence
  Description of Artificial Sequence: Synthetic oligonucleotide
ugaacgaaguauuuccaaa

SEQ ID NO: 856689 - RNA, 19 nt, Artificial Sequence
  Description of Artificial Sequence: Synthetic oligonucleotide
auaaacguaggcgaugucu

SEQ ID NO: 856690 - RNA, 19 nt, Artificial Sequence
  Description of Artificial Sequence: Synthetic oligonucleotide
gacucuucgagaaugcaug

SEQ ID NO: 856691 - RNA, 19 nt, Artificial Sequence
  Description of Artificial Sequence: Synthetic oligonucleotide
uggcauaccaaauaucuuu

SEQ ID NO: 856692 - RNA, 19 nt, Artificial Sequence
  Description of Artificial Sequence: Synthetic oligonucleotide
guauuauagcccauauccg

SEQ ID NO: 856693 - RNA, 19 nt, Artificial Sequence
  Description of Artificial Sequence: Synthetic oligonucleotide
cuucacuaaauuguccacg

SEQ ID NO: 856694 - RNA, 19 nt, Artificial Sequence
  Description of Artificial Sequence: Synthetic oligonucleotide
caugcaugcauccucuuug

SEQ ID NO: 856695 - RNA, 19 nt, Artificial Sequence
  Description of Artificial Sequence: Synthetic oligonucleotide
auaccauuuaaaugcaaaa

SEQ ID NO: 856696 - RNA, 19 nt, Artificial Sequence
  Description of Artificial Sequence: Synthetic oligonucleotide
agguguacccacuaaagaa

SEQ ID NO: 856697 - RNA, 19 nt, Artificial Sequence
  Description of Artificial Sequence: Synthetic oligonucleotide
  modified_base (15)..(15): a, c, u, g, unknown or other
uguccaauaaccccnccau

SEQ ID NO: 856698 - RNA, 19 nt, Artificial Sequence
  Description of Artificial Sequence: Synthetic oligonucleotide
aacuaucgacauucauagg

SEQ ID NO: 856699 - RNA, 19 nt, Artificial Sequence
  Description of Artificial Sequence: Synthetic oligonucleotide
aagguauuauagcccauau

SEQ ID NO: 856700 - RNA, 19 nt, Artificial Sequence
  Description of Artificial Sequence: Synthetic oligonucleotide
cucguaacaguucugucug

SEQ ID NO: 856701 - RNA, 19 nt, Artificial Sequence
  Description of Artificial Sequence: Synthetic oligonucleotide
acuaucacaccagccaaac

SEQ ID NO: 856702 - RNA, 19 nt, Artificial Sequence
  Description of Artificial Sequence: Synthetic oligonucleotide
ugaucugacgggagaggcg

SEQ ID NO: 856703 - RNA, 19 nt, Artificial Sequence
  Description of Artificial Sequence: Synthetic oligonucleotide
uacugcacgauuauuccaa

SEQ ID NO: 856704 - RNA, 19 nt, Artificial Sequence
  Description of Artificial Sequence: Synthetic oligonucleotide
uguacagucaugaguuaaa

SEQ ID NO: 856705 - RNA, 19 nt, Artificial Sequence
  Description of Artificial Sequence: Synthetic oligonucleotide
acucacauuuaggagauug

SEQ ID NO: 856706 - RNA, 19 nt, Artificial Sequence
  Description of Artificial Sequence: Synthetic oligonucleotide
augcaugcauccucuuugc

SEQ ID NO: 856707 - RNA, 19 nt, Artificial Sequence
  Description of Artificial Sequence: Synthetic oligonucleotide
gaaagggcucugcaaggcg

SEQ ID NO: 856708 - RNA, 19 nt, Artificial Sequence
  Description of Artificial Sequence: Synthetic oligonucleotide
uaaagcuacugguacucca

SEQ ID NO: 856709 - RNA, 19 nt, Artificial Sequence
  Description of Artificial Sequence: Synthetic oligonucleotide
cacugaaauguuacucucg

SEQ ID NO: 856710 - RNA, 19 nt, Artificial Sequence
  Description of Artificial Sequence: Synthetic oligonucleotide
uccaaguuucaccacccca

SEQ ID NO: 856711 - RNA, 19 nt, Artificial Sequence
  Description of Artificial Sequence: Synthetic oligonucleotide
aaaaccgaccaaguccaag

SEQ ID NO: 856712 - RNA, 19 nt, Artificial Sequence
  Description of Artificial Sequence: Synthetic oligonucleotide
uuugucggcaaaugacuca

SEQ ID NO: 856713 - RNA, 19 nt, Artificial Sequence
  Description of Artificial Sequence: Synthetic oligonucleotide
ucuauucggaaguuggcua

SEQ ID NO: 856714 - RNA, 19 nt, Artificial Sequence
  Description of Artificial Sequence: Synthetic oligonucleotide
uuauaguuacugcacgauu

SEQ ID NO: 856715 - RNA, 19 nt, Artificial Sequence
  Description of Artificial Sequence: Synthetic oligonucleotide
aaaacuauguucaguucau

SEQ ID NO: 856716 - RNA, 19 nt, Artificial Sequence
  Description of Artificial Sequence: Synthetic oligonucleotide
cauaggcacauuguaauac

SEQ ID NO: 856717 - RNA, 19 nt, Artificial Sequence
  Description of Artificial Sequence: Synthetic oligonucleotide
uacugguacuccauccaag

SEQ ID NO: 856718 - RNA, 19 nt, Artificial Sequence
  Description of Artificial Sequence: Synthetic oligonucleotide
auaggcacauuguaauaca

SEQ ID NO: 856719 - RNA, 19 nt, Artificial Sequence
  Description of Artificial Sequence: Synthetic oligonucleotide
agaaaaguguuggcauacc

SEQ ID NO: 856720 - RNA, 19 nt, Artificial Sequence
  Description of Artificial Sequence: Synthetic oligonucleotide
augaauaagaacauauguu

SEQ ID NO: 856721 - RNA, 19 nt, Artificial Sequence
  Description of Artificial Sequence: Synthetic oligonucleotide
acacacacacacugagugg

SEQ ID NO: 856722 - RNA, 19 nt, Artificial Sequence
  Description of Artificial Sequence: Synthetic oligonucleotide
gguugaugcauauauuaac

SEQ ID NO: 856723 - RNA, 19 nt, Artificial Sequence
  Description of Artificial Sequence: Synthetic oligonucleotide
ugggcaaugugcaacuuua

SEQ ID NO: 856724 - RNA, 19 nt, Artificial Sequence
  Description of Artificial Sequence: Synthetic oligonucleotide
uucuauucggaaguuggcu

SEQ ID NO: 856725 - RNA, 19 nt, Artificial Sequence
  Description of Artificial Sequence: Synthetic oligonucleotide
uugucggcaaaugacucag

SEQ ID NO: 856726 - RNA, 19 nt, Artificial Sequence
  Description of Artificial Sequence: Synthetic oligonucleotide
uaacaagauaaacgcgcac

SEQ ID NO: 856727 - RNA, 19 nt, Artificial Sequence
  Description of Artificial Sequence: Synthetic oligonucleotide
auguccuaaacauauucua

SEQ ID NO: 856728 - RNA, 19 nt, Artificial Sequence
  Description of Artificial Sequence: Synthetic oligonucleotide
agaacuaucgacauucaua

SEQ ID NO: 856729 - RNA, 19 nt, Artificial Sequence
  Description of Artificial Sequence: Synthetic oligonucleotide
uuacugcacgauuauucca

SEQ ID NO: 856730 - RNA, 19 nt, Artificial Sequence
  Description of Artificial Sequence: Synthetic oligonucleotide
ugucaccguagaaagggcu

SEQ ID NO: 856731 - RNA, 19 nt, Artificial Sequence
  Description of Artificial Sequence: Synthetic oligonucleotide
aaugcacacacaauauaaa

SEQ ID NO: 856732 - RNA, 19 nt, Artificial Sequence
  Description of Artificial Sequence: Synthetic oligonucleotide
uaggcacauuguaauacac

SEQ ID NO: 856733 - RNA, 19 nt, Artificial Sequence
  Description of Artificial Sequence: Synthetic oligonucleotide
auuauaucuuugucggcaa

SEQ ID NO: 856734 - RNA, 19 nt, Artificial Sequence
  Description of Artificial Sequence: Synthetic oligonucleotide
cacgauuauuccaagaaua

SEQ ID NO: 856735 - RNA, 19 nt, Artificial Sequence
  Description of Artificial Sequence: Synthetic oligonucleotide
uuauaccauuuaaaugcaa

SEQ ID NO: 856736 - RNA, 19 nt, Artificial Sequence
  Description of Artificial Sequence: Synthetic oligonucleotide
uguacccacuaaagaaugu

SEQ ID NO: 856737 - RNA, 19 nt, Artificial Sequence
  Description of Artificial Sequence: Synthetic oligonucleotide
cuaacaagauaaacgcgca

SEQ ID NO: 856738 - RNA, 19 nt, Artificial Sequence
  Description of Artificial Sequence: Synthetic oligonucleotide
ugaguggcccagaaguuaa

SEQ ID NO: 856739 - RNA, 19 nt, Artificial Sequence
  Description of Artificial Sequence: Synthetic oligonucleotide
uucggaaguuggcuaaggu

SEQ ID NO: 856740 - RNA, 19 nt, Artificial Sequence
  Description of Artificial Sequence: Synthetic oligonucleotide
accugaaacauuaauggau

SEQ ID NO: 856741 - RNA, 19 nt, Artificial Sequence
  Description of Artificial Sequence: Synthetic oligonucleotide
cuaucgacauucauaggca

SEQ ID NO: 856742 - RNA, 19 nt, Artificial Sequence
  Description of Artificial Sequence: Synthetic oligonucleotide
aaauuguccacgaccaauu

SEQ ID NO: 856743 - RNA, 19 nt, Artificial Sequence
  Description of Artificial Sequence: Synthetic oligonucleotide
acgaccaauuuucuuuucu

SEQ ID NO: 856744 - RNA, 19 nt, Artificial Sequence
  Description of Artificial Sequence: Synthetic oligonucleotide
uuaauaacguuugggugau

SEQ ID NO: 856745 - RNA, 19 nt, Artificial Sequence
  Description of Artificial Sequence: Synthetic oligonucleotide
ugcagcaagggccagucuu

SEQ ID NO: 856746 - RNA, 19 nt, Artificial Sequence
  Description of Artificial Sequence: Synthetic oligonucleotide
gaucuaaucuucacuacaa

SEQ ID NO: 856747 - RNA, 19 nt, Artificial Sequence
  Description of Artificial Sequence: Synthetic oligonucleotide
caucugcuaauuccaaaac

SEQ ID NO: 856748 - RNA, 19 nt, Artificial Sequence
  Description of Artificial Sequence: Synthetic oligonucleotide
gauacagucagcacgugcu

SEQ ID NO: 856749 - RNA, 19 nt, Artificial Sequence
  Description of Artificial Sequence: Synthetic oligonucleotide
auuaacucugacauauuaa

SEQ ID NO: 856750 - RNA, 19 nt, Artificial Sequence
  Description of Artificial Sequence: Synthetic oligonucleotide
uauccggucguaaugccuu

SEQ ID NO: 856751 - RNA, 19 nt, Artificial Sequence
  Description of Artificial Sequence: Synthetic oligonucleotide
caucuucccuccuaacaag

SEQ ID NO: 856752 - RNA, 19 nt, Artificial Sequence
  Description of Artificial Sequence: Synthetic oligonucleotide
auaacguuugggugauuga

SEQ ID NO: 856753 - RNA, 19 nt, Artificial Sequence
  Description of Artificial Sequence: Synthetic oligonucleotide
uugcaguuuagcuguucgc

SEQ ID NO: 856754 - RNA, 19 nt, Artificial Sequence
  Description of Artificial Sequence: Synthetic oligonucleotide
gcaaugugcaacuuuaaaa

SEQ ID NO: 856755 - RNA, 19 nt, Artificial Sequence
  Description of Artificial Sequence: Synthetic oligonucleotide
ucgacauucauaggcacau

SEQ ID NO: 856756 - RNA, 19 nt, Artificial Sequence
  Description of Artificial Sequence: Synthetic oligonucleotide
augcauauauuaacuaacu

SEQ ID NO: 856757 - RNA, 19 nt, Artificial Sequence
  Description of Artificial Sequence: Synthetic oligonucleotide
auuauagcccauauccggu

SEQ ID NO: 856758 - RNA, 19 nt, Artificial Sequence
  Description of Artificial Sequence: Synthetic oligonucleotide
accgaccaaguccaagauc

SEQ ID NO: 856759 - RNA, 19 nt, Artificial Sequence
  Description of Artificial Sequence: Synthetic oligonucleotide
uuauagcccauauccgguc

SEQ ID NO: 856760 - RNA, 19 nt, Artificial Sequence
  Description of Artificial Sequence: Synthetic oligonucleotide
gcuaagguauuauagccca

SEQ ID NO: 856761 - RNA, 19 nt, Artificial Sequence
  Description of Artificial Sequence: Synthetic oligonucleotide
ucucuaugcaugacucuuc

SEQ ID NO: 856762 - RNA, 19 nt, Artificial Sequence
  Description of Artificial Sequence: Synthetic oligonucleotide
uuauaucuuugucggcaaa

SEQ ID NO: 856763 - RNA, 19 nt, Artificial Sequence
  Description of Artificial Sequence: Synthetic oligonucleotide
aacguuugggugauugagu

SEQ ID NO: 856764 - RNA, 19 nt, Artificial Sequence
  Description of Artificial Sequence: Synthetic oligonucleotide
uaagguauuauagcccaua

SEQ ID NO: 856765 - RNA, 19 nt, Artificial Sequence
  Description of Artificial Sequence: Synthetic oligonucleotide
cuacgucauaaacguaggc

SEQ ID NO: 856766 - RNA, 19 nt, Artificial Sequence
  Description of Artificial Sequence: Synthetic oligonucleotide
guucgcgguacaugcaugc

SEQ ID NO: 856767 - RNA, 19 nt, Artificial Sequence
  Description of Artificial Sequence: Synthetic oligonucleotide
guaagguguacccacuaaa

SEQ ID NO: 856768 - RNA, 19 nt, Artificial Sequence
  Description of Artificial Sequence: Synthetic oligonucleotide
guacccacuaaagaaugug

SEQ ID NO: 856769 - RNA, 19 nt, Artificial Sequence
  Description of Artificial Sequence: Synthetic oligonucleotide
ucacuaaauuguccacgac

SEQ ID NO: 856770 - RNA, 19 nt, Artificial Sequence
  Description of Artificial Sequence: Synthetic oligonucleotide
uguucgcgguacaugcaug

SEQ ID NO: 856771 - RNA, 19 nt, Artificial Sequence
  Description of Artificial Sequence: Synthetic oligonucleotide
acucugacauauuaaucuu

SEQ ID NO: 856772 - RNA, 19 nt, Artificial Sequence
  Description of Artificial Sequence: Synthetic oligonucleotide
aaagggaauuaugcucuca

SEQ ID NO: 856773 - RNA, 19 nt, Artificial Sequence
  Description of Artificial Sequence: Synthetic oligonucleotide
uucgagaaugcaugugauc

SEQ ID NO: 856774 - RNA, 19 nt, Artificial Sequence
  Description of Artificial Sequence: Synthetic oligonucleotide
ugacgggagaggcggguag

SEQ ID NO: 856775 - RNA, 19 nt, Artificial Sequence
  Description of Artificial Sequence: Synthetic oligonucleotide
aguaagguguacccacuaa

SEQ ID NO: 856776 - RNA, 19 nt, Artificial Sequence
  Description of Artificial Sequence: Synthetic oligonucleotide
gggaauuaugcucucagaa

SEQ ID NO: 856777 - RNA, 19 nt, Artificial Sequence
  Description of Artificial Sequence: Synthetic oligonucleotide
acguaggcgaugucugguc

SEQ ID NO: 856778 - RNA, 19 nt, Artificial Sequence
  Description of Artificial Sequence: Synthetic oligonucleotide
cuuuucuauucggaaguug

SEQ ID NO: 856779 - RNA, 19 nt, Artificial Sequence
  Description of Artificial Sequence: Synthetic oligonucleotide
uguauucucucuggagaca

SEQ ID NO: 856780 - RNA, 19 nt, Artificial Sequence
  Description of Artificial Sequence: Synthetic oligonucleotide
aaccgaccaaguccaagau

SEQ ID NO: 856781 - RNA, 19 nt, Artificial Sequence
  Description of Artificial Sequence: Synthetic oligonucleotide
aacguaggcgaugucuggu

SEQ ID NO: 856782 - RNA, 19 nt, Artificial Sequence
  Description of Artificial Sequence: Synthetic oligonucleotide
agaaugugcagcugugguu

SEQ ID NO: 856783 - RNA, 19 nt, Artificial Sequence
  Description of Artificial Sequence: Synthetic oligonucleotide
agaaugcaugugauccagc

SEQ ID NO: 856784 - RNA, 19 nt, Artificial Sequence
  Description of Artificial Sequence: Synthetic oligonucleotide
uuggcauaccaaauaucuu

SEQ ID NO: 856785 - RNA, 19 nt, Artificial Sequence
  Description of Artificial Sequence: Synthetic oligonucleotide
uauucggaaguuggcuaag

SEQ ID NO: 856786 - RNA, 19 nt, Artificial Sequence
  Description of Artificial Sequence: Synthetic oligonucleotide
gagacaggaugcucuauaa

SEQ ID NO: 856787 - RNA, 19 nt, Artificial Sequence
  Description of Artificial Sequence: Synthetic oligonucleotide
ggaauuaugcucucagaaa

SEQ ID NO: 856788 - RNA, 19 nt, Artificial Sequence
  Description of Artificial Sequence: Synthetic oligonucleotide
auucggaaguuggcuaagg

SEQ ID NO: 856789 - RNA, 19 nt, Artificial Sequence
  Description of Artificial Sequence: Synthetic oligonucleotide
acgauuauuccaagaauau

SEQ ID NO: 856790 - RNA, 19 nt, Artificial Sequence
  Description of Artificial Sequence: Synthetic oligonucleotide
gagaucuauuucuuugaua

SEQ ID NO: 856791 - RNA, 19 nt, Artificial Sequence
  Description of Artificial Sequence: Synthetic oligonucleotide
aaggcggccaucucauaua

SEQ ID NO: 856792 - RNA, 19 nt, Artificial Sequence
  Description of Artificial Sequence: Synthetic oligonucleotide
agcuuauaugaaaacuggu

SEQ ID NO: 856793 - RNA, 19 nt, Artificial Sequence
  Description of Artificial Sequence: Synthetic oligonucleotide
acucuucgagaaugcaugu

SEQ ID NO: 856794 - RNA, 19 nt, Artificial Sequence
  Description of Artificial Sequence: Synthetic oligonucleotide
gugaucugacgggagaggc

SEQ ID NO: 856795 - RNA, 19 nt, Artificial Sequence
  Description of Artificial Sequence: Synthetic oligonucleotide
aggcggccaucucauauag

SEQ ID NO: 856796 - RNA, 19 nt, Artificial Sequence
  Description of Artificial Sequence: Synthetic oligonucleotide
guuacucucguaacaguuc

SEQ ID NO: 856797 - RNA, 19 nt, Artificial Sequence
  Description of Artificial Sequence: Synthetic oligonucleotide
uugggcaaugugcaacuuu

SEQ ID NO: 856798 - RNA, 19 nt, Artificial Sequence
  Description of Artificial Sequence: Synthetic oligonucleotide
cucacauuuaggagauuga

SEQ ID NO: 856799 - RNA, 19 nt, Artificial Sequence
  Description of Artificial Sequence: Synthetic oligonucleotide
gaauuagccucuuuugcuu

SEQ ID NO: 856800 - RNA, 19 nt, Artificial Sequence
  Description of Artificial Sequence: Synthetic oligonucleotide
agacaggaugcucuauaaa

SEQ ID NO: 856801 - RNA, 19 nt, Artificial Sequence
  Description of Artificial Sequence: Synthetic oligonucleotide
guaggcgaugucuggucgc

SEQ ID NO: 856802 - RNA, 19 nt, Artificial Sequence
  Description of Artificial Sequence: Synthetic oligonucleotide
ugcaugugauccagcgcac

SEQ ID NO: 856803 - RNA, 19 nt, Artificial Sequence
  Description of Artificial Sequence: Synthetic oligonucleotide
cuauucggaaguuggcuaa

SEQ ID NO: 856804 - RNA, 19 nt, Artificial Sequence
  Description of Artificial Sequence: Synthetic oligonucleotide
ucaccguagaaagggcucu

SEQ ID NO: 856805 - RNA, 19 nt, Artificial Sequence
  Description of Artificial Sequence: Synthetic oligonucleotide
ggcuaagguauuauagccc

SEQ ID NO: 856806 - RNA, 19 nt, Artificial Sequence
  Description of Artificial Sequence: Synthetic oligonucleotide
ucgcgguacaugcaugcau

SEQ ID NO: 856807 - RNA, 19 nt, Artificial Sequence
  Description of Artificial Sequence: Synthetic oligonucleotide
ggaauuagccucuuuugcu

SEQ ID NO: 856808 - RNA, 19 nt, Artificial Sequence
  Description of Artificial Sequence: Synthetic oligonucleotide
ucguaacaguucugucugc

SEQ ID NO: 856809 - RNA, 19 nt, Artificial Sequence
  Description of Artificial Sequence: Synthetic oligonucleotide
ggggaucuaaucuucacua

SEQ ID NO: 856810 - RNA, 19 nt, Artificial Sequence
  Description of Artificial Sequence: Synthetic oligonucleotide
cacuaaagaaugugcagcu

SEQ ID NO: 856811 - RNA, 19 nt, Artificial Sequence
  Description of Artificial Sequence: Synthetic oligonucleotide
auagcccauauccggucgu

SEQ ID NO: 856812 - RNA, 19 nt, Artificial Sequence
  Description of Artificial Sequence: Synthetic oligonucleotide
auacacaucuucccuccua

SEQ ID NO: 856813 - RNA, 19 nt, Artificial Sequence
  Description of Artificial Sequence: Synthetic oligonucleotide
ccaguaguuugcuccaaag

SEQ ID NO: 856814 - RNA, 19 nt, Artificial Sequence
  Description of Artificial Sequence: Synthetic oligonucleotide
cacuacaaucuaugaauaa

SEQ ID NO: 856815 - RNA, 19 nt, Artificial Sequence
  Description of Artificial Sequence: Synthetic oligonucleotide
gacucagaacuaucgacau

SEQ ID NO: 856816 - RNA, 19 nt, Artificial Sequence
  Description of Artificial Sequence: Synthetic oligonucleotide
aguuuagcuguucgcggua

SEQ ID NO: 856817 - RNA, 19 nt, Artificial Sequence
  Description of Artificial Sequence: Synthetic oligonucleotide
uuuugcaguuuagcuguuc

SEQ ID NO: 856818 - RNA, 19 nt, Artificial Sequence
  Description of Artificial Sequence: Synthetic oligonucleotide
aucgacauucauaggcaca

SEQ ID NO: 856819 - RNA, 19 nt, Artificial Sequence
  Description of Artificial Sequence: Synthetic oligonucleotide
aggcacauuguaauacaca

SEQ ID NO: 856820 - RNA, 19 nt, Artificial Sequence
  Description of Artificial Sequence: Synthetic oligonucleotide
uagcuguucgcgguacaug

SEQ ID NO: 856821 - RNA, 19 nt, Artificial Sequence
  Description of Artificial Sequence: Synthetic oligonucleotide
ccauauccggucguaaugc

SEQ ID NO: 856822 - RNA, 19 nt, Artificial Sequence
  Description of Artificial Sequence: Synthetic oligonucleotide
cugucggagcuccucugag

SEQ ID NO: 856823 - RNA, 19 nt, Artificial Sequence
  Description of Artificial Sequence: Synthetic oligonucleotide
accaguaguuugcuccaaa

SEQ ID NO: 856824 - RNA, 19 nt, Artificial Sequence
  Description of Artificial Sequence: Synthetic oligonucleotide
auauccggucguaaugccu

SEQ ID NO: 856825 - RNA, 19 nt, Artificial Sequence
  Description of Artificial Sequence: Synthetic oligonucleotide
cucuucgagaaugcaugug

SEQ ID NO: 856826 - RNA, 19 nt, Artificial Sequence
  Description of Artificial Sequence: Synthetic oligonucleotide
guuuagcuguucgcgguac

SEQ ID NO: 856827 - RNA, 19 nt, Artificial Sequence
  Description of Artificial Sequence: Synthetic oligonucleotide
cacauuagcugguuuuaua

SEQ ID NO: 856828 - RNA, 19 nt, Artificial Sequence
  Description of Artificial Sequence: Synthetic oligonucleotide
gucaccguagaaagggcuc

SEQ ID NO: 856829 - RNA, 19 nt, Artificial Sequence
  Description of Artificial Sequence: Synthetic oligonucleotide
acaaauccuuaaccacuuu

SEQ ID NO: 856830 - RNA, 19 nt, Artificial Sequence
  Description of Artificial Sequence: Synthetic oligonucleotide
ucccuccuaacaagauaaa

SEQ ID NO: 856831 - RNA, 19 nt, Artificial Sequence
  Description of Artificial Sequence: Synthetic oligonucleotide
uaggcgaugucuggucgcu

SEQ ID NO: 856832 - RNA, 19 nt, Artificial Sequence
  Description of Artificial Sequence: Synthetic oligonucleotide
ccgaccaaguccaagaucu

SEQ ID NO: 856833 - RNA, 19 nt, Artificial Sequence
  Description of Artificial Sequence: Synthetic oligonucleotide
uucgcgguacaugcaugca

SEQ ID NO: 856834 - RNA, 19 nt, Artificial Sequence
  Description of Artificial Sequence: Synthetic oligonucleotide
auccaagagacaggaugcu

SEQ ID NO: 856835 - RNA, 19 nt, Artificial Sequence
  Description of Artificial Sequence: Synthetic oligonucleotide
ccacugaaauguuacucuc

SEQ ID NO: 856836 - RNA, 19 nt, Artificial Sequence
  Description of Artificial Sequence: Synthetic oligonucleotide
cccauauccggucguaaug

SEQ ID NO: 856837 - RNA, 19 nt, Artificial Sequence
  Description of Artificial Sequence: Synthetic oligonucleotide
cuaaauuguccacgaccaa

SEQ ID NO: 856838 - RNA, 19 nt, Artificial Sequence
  Description of Artificial Sequence: Synthetic oligonucleotide
agauugagccugguagaaa

SEQ ID NO: 856839 - RNA, 19 nt, Artificial Sequence
  Description of Artificial Sequence: Synthetic oligonucleotide
aaacgcgcacacacacaca

SEQ ID NO: 856840 - RNA, 19 nt, Artificial Sequence
  Description of Artificial Sequence: Synthetic oligonucleotide
gacuaucacaccagccaaa

SEQ ID NO: 856841 - RNA, 19 nt, Artificial Sequence
  Description of Artificial Sequence: Synthetic oligonucleotide
cugcacgauuauuccaaga

SEQ ID NO: 856842 - RNA, 19 nt, Artificial Sequence
  Description of Artificial Sequence: Synthetic oligonucleotide
cuaucacaccagccaaaca

SEQ ID NO: 856843 - RNA, 19 nt, Artificial Sequence
  Description of Artificial Sequence: Synthetic oligonucleotide
cacgaccaauuuucuuuuc

SEQ ID NO: 856844 - RNA, 19 nt, Artificial Sequence
  Description of Artificial Sequence: Synthetic oligonucleotide
ccugguagaaaaugaagcu

SEQ ID NO: 856845 - RNA, 19 nt, Artificial Sequence
  Description of Artificial Sequence: Synthetic oligonucleotide
aucuuaacacccagacaaa

SEQ ID NO: 856846 - RNA, 19 nt, Artificial Sequence
  Description of Artificial Sequence: Synthetic oligonucleotide
gcaugcauccucuuugcua

SEQ ID NO: 856847 - RNA, 19 nt, Artificial Sequence
  Description of Artificial Sequence: Synthetic oligonucleotide
acgugcuuuuggcauccau

SEQ ID NO: 856848 - RNA, 19 nt, Artificial Sequence
  Description of Artificial Sequence: Synthetic oligonucleotide
gcgguacaugcaugcaucc

SEQ ID NO: 856849 - RNA, 19 nt, Artificial Sequence
  Description of Artificial Sequence: Synthetic oligonucleotide
gcuuauaugaaaacugguu

SEQ ID NO: 856850 - RNA, 19 nt, Artificial Sequence
  Description of Artificial Sequence: Synthetic oligonucleotide
cagagcugaacgaaguauu

SEQ ID NO: 856851 - RNA, 19 nt, Artificial Sequence
  Description of Artificial Sequence: Synthetic oligonucleotide
cgcacacacacacacugag

SEQ ID NO: 856852 - RNA, 19 nt, Artificial Sequence
  Description of Artificial Sequence: Synthetic oligonucleotide
guacaugcaugcauccucu

SEQ ID NO: 856853 - RNA, 19 nt, Artificial Sequence
  Description of Artificial Sequence: Synthetic oligonucleotide
cugaaauguuacucucgua

SEQ ID NO: 856854 - RNA, 19 nt, Artificial Sequence
  Description of Artificial Sequence: Synthetic oligonucleotide
ggcgaugucuggucgcuuc

SEQ ID NO: 856855 - RNA, 19 nt, Artificial Sequence
  Description of Artificial Sequence: Synthetic oligonucleotide
cuucgagaaugcaugugau

SEQ ID NO: 856856 - RNA, 19 nt, Artificial Sequence
  Description of Artificial Sequence: Synthetic oligonucleotide
ggguugaugcauauauuaa

SEQ ID NO: 856857 - RNA, 19 nt, Artificial Sequence
  Description of Artificial Sequence: Synthetic oligonucleotide
cguaggcgaugucuggucg

SEQ ID NO: 856858 - RNA, 19 nt, Artificial Sequence
  Description of Artificial Sequence: Synthetic oligonucleotide
cgcgcacacacacacacug

SEQ ID NO: 856859 - RNA, 19 nt, Artificial Sequence
  Description of Artificial Sequence: Synthetic oligonucleotide
uccggucguaaugccuucu

SEQ ID NO: 856860 - RNA, 19 nt, Artificial Sequence
  Description of Artificial Sequence: Synthetic oligonucleotide
gguguacccacuaaagaau

SEQ ID NO: 856861 - RNA, 19 nt, Artificial Sequence
  Description of Artificial Sequence: Synthetic oligonucleotide
cagcgcacugcagagcuga

SEQ ID NO: 856862 - RNA, 19 nt, Artificial Sequence
  Description of Artificial Sequence: Synthetic oligonucleotide
guacagucaugaguuaaau

SEQ ID NO: 856863 - RNA, 19 nt, Artificial Sequence
  Description of Artificial Sequence: Synthetic oligonucleotide
cagucagcacgugcuuuug

SEQ ID NO: 856864 - RNA, 19 nt, Artificial Sequence
  Description of Artificial Sequence: Synthetic oligonucleotide
cugaguggcccagaaguua

SEQ ID NO: 856865 - RNA, 19 nt, Artificial Sequence
  Description of Artificial Sequence: Synthetic oligonucleotide
caaggcggccaucucauau

SEQ ID NO: 856866 - RNA, 19 nt, Artificial Sequence
  Description of Artificial Sequence: Synthetic oligonucleotide
aucugacgggagaggcggg

SEQ ID NO: 856867 - RNA, 19 nt, Artificial Sequence
  Description of Artificial Sequence: Synthetic oligonucleotide
ggagaucuauuucuuugau

SEQ ID NO: 856868 - RNA, 19 nt, Artificial Sequence
  Description of Artificial Sequence: Synthetic oligonucleotide
caccguagaaagggcucug

SEQ ID NO: 856869 - RNA, 19 nt, Artificial Sequence
  Description of Artificial Sequence: Synthetic oligonucleotide
cgcgguacaugcaugcauc

SEQ ID NO: 856870 - RNA, 19 nt, Artificial Sequence
  Description of Artificial Sequence: Synthetic oligonucleotide
uagcccauauccggucgua

SEQ ID NO: 856871 - RNA, 19 nt, Artificial Sequence
  Description of Artificial Sequence: Synthetic oligonucleotide
gcacgauuauuccaagaau

SEQ ID NO: 856872 - RNA, 19 nt, Artificial Sequence
  Description of Artificial Sequence: Synthetic oligonucleotide
acuaacugucggagcuccu

SEQ ID NO: 856873 - RNA, 19 nt, Artificial Sequence
  Description of Artificial Sequence: Synthetic oligonucleotide
gcacgugcuuuuggcaucc

SEQ ID NO: 856874 - RNA, 19 nt, Artificial Sequence
  Description of Artificial Sequence: Synthetic oligonucleotide
cagaacuaucgacauucau

SEQ ID NO: 856875 - RNA, 19 nt, Artificial Sequence
  Description of Artificial Sequence: Synthetic oligonucleotide
cuguucgcgguacaugcau

SEQ ID NO: 856876 - RNA, 19 nt, Artificial Sequence
  Description of Artificial Sequence: Synthetic oligonucleotide
cuaagguauuauagcccau

SEQ ID NO: 856877 - RNA, 19 nt, Artificial Sequence
  Description of Artificial Sequence: Synthetic oligonucleotide
agcccauauccggucguaa

SEQ ID NO: 856878 - RNA, 19 nt, Artificial Sequence
  Description of Artificial Sequence: Synthetic oligonucleotide
cguuugggugauugaguug

SEQ ID NO: 856879 - RNA, 19 nt, Artificial Sequence
  Description of Artificial Sequence: Synthetic oligonucleotide
ccuuaaccacuuuuaaaau

SEQ ID NO: 856880 - RNA, 19 nt, Artificial Sequence
  Description of Artificial Sequence: Synthetic oligonucleotide
auuuugcaguuuagcuguu

SEQ ID NO: 856881 - RNA, 19 nt, Artificial Sequence
  Description of Artificial Sequence: Synthetic oligonucleotide
  modified_base (17)..(17): a, c, u, g, unknown or other
ccuguccaauaaccccncc

SEQ ID NO: 856882 - RNA, 19 nt, Artificial Sequence
  Description of Artificial Sequence: Synthetic oligonucleotide
cagcaagggccagucuuca

SEQ ID NO: 856883 - RNA, 19 nt, Artificial Sequence
  Description of Artificial Sequence: Synthetic oligonucleotide
cgagaaugcaugugaucca

SEQ ID NO: 856884 - RNA, 19 nt, Artificial Sequence
  Description of Artificial Sequence: Synthetic oligonucleotide
acgcgcacacacacacacu

SEQ ID NO: 856885 - RNA, 19 nt, Artificial Sequence
  Description of Artificial Sequence: Synthetic oligonucleotide
guccacgaccaauuuucuu

SEQ ID NO: 856886 - RNA, 19 nt, Artificial Sequence
  Description of Artificial Sequence: Synthetic oligonucleotide
gacgggagaggcggguagu

SEQ ID NO: 856887 - RNA, 19 nt, Artificial Sequence
  Description of Artificial Sequence: Synthetic oligonucleotide
gcuucuccgggucuggguu

SEQ ID NO: 856888 - RNA, 19 nt, Artificial Sequence
  Description of Artificial Sequence: Synthetic oligonucleotide
gucuggguugaugcauaua

SEQ ID NO: 856889 - RNA, 19 nt, Artificial Sequence
  Description of Artificial Sequence: Synthetic oligonucleotide
gcuguucgcgguacaugca

SEQ ID NO: 856890 - RNA, 19 nt, Artificial Sequence
  Description of Artificial Sequence: Synthetic oligonucleotide
  modified_base (12)..(12): a, c, u, g, unknown or other
ccaauaaccccnccauuuu

SEQ ID NO: 856891 - RNA, 19 nt, Artificial Sequence
  Description of Artificial Sequence: Synthetic oligonucleotide
gcccauauccggucguaau

SEQ ID NO: 856892 - RNA, 19 nt, Artificial Sequence
  Description of Artificial Sequence: Synthetic oligonucleotide
cugacgggagaggcgggua

SEQ ID NO: 856893 - RNA, 19 nt, Artificial Sequence
  Description of Artificial Sequence: Synthetic oligonucleotide
caccaguaguuugcuccaa

SEQ ID NO: 856894 - RNA, 19 nt, Artificial Sequence
  Description of Artificial Sequence: Synthetic oligonucleotide
gcgcacacacacacacuga

SEQ ID NO: 856895 - RNA, 19 nt, Artificial Sequence
  Description of Artificial Sequence: Synthetic oligonucleotide
gcacacacacacacugagu

SEQ ID NO: 856896 - RNA, 19 nt, Artificial Sequence
  Description of Artificial Sequence: Synthetic oligonucleotide
aggcgaugucuggucgcuu

SEQ ID NO: 856897 - RNA, 19 nt, Artificial Sequence
  Description of Artificial Sequence: Synthetic oligonucleotide
ccgggucuggguugaugca

SEQ ID NO: 856898 - RNA, 19 nt, Artificial Sequence
  Description of Artificial Sequence: Synthetic oligonucleotide
cgucauaaacguaggcgau

SEQ ID NO: 856899 - RNA, 19 nt, Artificial Sequence
  Description of Artificial Sequence: Synthetic oligonucleotide
cacgugcuuuuggcaucca

SEQ ID NO: 856900 - RNA, 19 nt, Artificial Sequence
  Description of Artificial Sequence: Synthetic oligonucleotide
gacucacauuuaggagauu

SEQ ID NO: 856901 - RNA, 19 nt, Artificial Sequence
  Description of Artificial Sequence: Synthetic oligonucleotide
gugccaccaccaguaguuu

SEQ ID NO: 856902 - RNA, 19 nt, Artificial Sequence
  Description of Artificial Sequence: Synthetic oligonucleotide
aauuugagaucuuuaagag

SEQ ID NO: 856903 - RNA, 19 nt, Artificial Sequence
  Description of Artificial Sequence: Synthetic oligonucleotide
aauacaaaccaagacuggc

SEQ ID NO: 856904 - RNA, 19 nt, Artificial Sequence
  Description of Artificial Sequence: Synthetic oligonucleotide
aguagcacaauuuuguguc

SEQ ID NO: 856905 - RNA, 19 nt, Artificial Sequence
  Description of Artificial Sequence: Synthetic oligonucleotide
uucucaggaacuaaguagg

SEQ ID NO: 856906 - RNA, 19 nt, Artificial Sequence
  Description of Artificial Sequence: Synthetic oligonucleotide
agaagcuacguaaugaucc

SEQ ID NO: 856907 - RNA, 19 nt, Artificial Sequence
  Description of Artificial Sequence: Synthetic oligonucleotide
guaggcuugacucaggagg

SEQ ID NO: 856908 - RNA, 19 nt, Artificial Sequence
  Description of Artificial Sequence: Synthetic oligonucleotide
ugugguaugggacagggga

SEQ ID NO: 856909 - RNA, 19 nt, Artificial Sequence
  Description of Artificial Sequence: Synthetic oligonucleotide
aauucaaggaccugcucag

SEQ ID NO: 856910 - RNA, 19 nt, Artificial Sequence
  Description of Artificial Sequence: Synthetic oligonucleotide
uuaagaguuaacuugucuc

SEQ ID NO: 856911 - RNA, 19 nt, Artificial Sequence
  Description of Artificial Sequence: Synthetic oligonucleotide
uacguaaugauccuggcaa

SEQ ID NO: 856912 - RNA, 19 nt, Artificial Sequence
  Description of Artificial Sequence: Synthetic oligonucleotide
uaagaguuaacuugucuca

SEQ ID NO: 856913 - RNA, 19 nt, Artificial Sequence
  Description of Artificial Sequence: Synthetic oligonucleotide
uuuaagaguuaacuugucu

SEQ ID NO: 856914 - RNA, 19 nt, Artificial Sequence
  Description of Artificial Sequence: Synthetic oligonucleotide
cacaagaauacaaaccaag

SEQ ID NO: 856915 - RNA, 19 nt, Artificial Sequence
  Description of Artificial Sequence: Synthetic oligonucleotide
uucaagagcaccacggugu

SEQ ID NO: 856916 - RNA, 19 nt, Artificial Sequence
  Description of Artificial Sequence: Synthetic oligonucleotide
ucugaauguccauugacga

SEQ ID NO: 856917 - RNA, 19 nt, Artificial Sequence
  Description of Artificial Sequence: Synthetic oligonucleotide
acaacacaacaucugacuc

SEQ ID NO: 856918 - RNA, 19 nt, Artificial Sequence
  Description of Artificial Sequence: Synthetic oligonucleotide
ugaauagcucuuaaacuug

SEQ ID NO: 856919 - RNA, 19 nt, Artificial Sequence
  Description of Artificial Sequence: Synthetic oligonucleotide
aaaugucagaggcaauuug

SEQ ID NO: 856920 - RNA, 19 nt, Artificial Sequence
  Description of Artificial Sequence: Synthetic oligonucleotide
gaacuaaguaggcucgugg

SEQ ID NO: 856921 - RNA, 19 nt, Artificial Sequence
  Description of Artificial Sequence: Synthetic oligonucleotide
caauuugagaucuuuaaga

SEQ ID NO: 856922 - RNA, 19 nt, Artificial Sequence
  Description of Artificial Sequence: Synthetic oligonucleotide
gaauugaacuucaaguagc

SEQ ID NO: 856923 - RNA, 19 nt, Artificial Sequence
  Description of Artificial Sequence: Synthetic oligonucleotide
ucuagcuuaggucccaaca

SEQ ID NO: 856924 - RNA, 19 nt, Artificial Sequence
  Description of Artificial Sequence: Synthetic oligonucleotide
aacagccaauuguuuacac

SEQ ID NO: 856925 - RNA, 19 nt, Artificial Sequence
  Description of Artificial Sequence: Synthetic oligonucleotide
ugaauguccauugacgaug

SEQ ID NO: 856926 - RNA, 19 nt, Artificial Sequence
  Description of Artificial Sequence: Synthetic oligonucleotide
uagcucuuaaacuugcuga

SEQ ID NO: 856927 - RNA, 19 nt, Artificial Sequence
  Description of Artificial Sequence: Synthetic oligonucleotide
cucuuaaacuugcugaagc

SEQ ID NO: 856928 - RNA, 19 nt, Artificial Sequence
  Description of Artificial Sequence: Synthetic oligonucleotide
gaauucaaggaccugcuca

SEQ ID NO: 856929 - RNA, 19 nt, Artificial Sequence
  Description of Artificial Sequence: Synthetic oligonucleotide
uguccauugacgaugguua

SEQ ID NO: 856930 - RNA, 19 nt, Artificial Sequence
  Description of Artificial Sequence: Synthetic oligonucleotide
guuuacacaacacaacauc

SEQ ID NO: 856931 - RNA, 19 nt, Artificial Sequence
  Description of Artificial Sequence: Synthetic oligonucleotide
aacuaaguaggcucguggu

SEQ ID NO: 856932 - RNA, 19 nt, Artificial Sequence
  Description of Artificial Sequence: Synthetic oligonucleotide
aaacuggagaagccagggg

SEQ ID NO: 856933 - RNA, 19 nt, Artificial Sequence
  Description of Artificial Sequence: Synthetic oligonucleotide
aguacugagccgcagagau

SEQ ID NO: 856934 - RNA, 19 nt, Artificial Sequence
  Description of Artificial Sequence: Synthetic oligonucleotide
aacuguuggguguuagucu

SEQ ID NO: 856935 - RNA, 19 nt, Artificial Sequence
  Description of Artificial Sequence: Synthetic oligonucleotide
gaaacuggagaagccaggg

SEQ ID NO: 856936 - RNA, 19 nt, Artificial Sequence
  Description of Artificial Sequence: Synthetic oligonucleotide
ugaaacagccaauuguuua

SEQ ID NO: 856937 - RNA, 19 nt, Artificial Sequence
  Description of Artificial Sequence: Synthetic oligonucleotide
uacugagccgcagagauca

SEQ ID NO: 856938 - RNA, 19 nt, Artificial Sequence
  Description of Artificial Sequence: Synthetic oligonucleotide
agucggggugcuuucaugg

SEQ ID NO: 856939 - RNA, 19 nt, Artificial Sequence
  Description of Artificial Sequence: Synthetic oligonucleotide
gagacaucuagcuuagguc

SEQ ID NO: 856940 - RNA, 19 nt, Artificial Sequence
  Description of Artificial Sequence: Synthetic oligonucleotide
auuugagaucuuuaagagu

SEQ ID NO: 856941 - RNA, 19 nt, Artificial Sequence
  Description of Artificial Sequence: Synthetic oligonucleotide
aacuucaaguagcacaauu

SEQ ID NO: 856942 - RNA, 19 nt, Artificial Sequence
  Description of Artificial Sequence: Synthetic oligonucleotide
uacaaaccaagacuggcuc

SEQ ID NO: 856943 - RNA, 19 nt, Artificial Sequence
  Description of Artificial Sequence: Synthetic oligonucleotide
agcuuaggucccaacaucc

SEQ ID NO: 856944 - RNA, 19 nt, Artificial Sequence
  Description of Artificial Sequence: Synthetic oligonucleotide
guaaugauccuggcaaugg

SEQ ID NO: 856945 - RNA, 19 nt, Artificial Sequence
  Description of Artificial Sequence: Synthetic oligonucleotide
uguuuacacaacacaacau

SEQ ID NO: 856946 - RNA, 19 nt, Artificial Sequence
  Description of Artificial Sequence: Synthetic oligonucleotide
guuagucugccacacauuc

SEQ ID NO: 856947 - RNA, 19 nt, Artificial Sequence
  Description of Artificial Sequence: Synthetic oligonucleotide
ucuuccugugguaugggac

SEQ ID NO: 856948 - RNA, 19 nt, Artificial Sequence
  Description of Artificial Sequence: Synthetic oligonucleotide
aauugaacuucaaguagca

SEQ ID NO: 856949 - RNA, 19 nt, Artificial Sequence
  Description of Artificial Sequence: Synthetic oligonucleotide
agccgcagagaucauuccc

SEQ ID NO: 856950 - RNA, 19 nt, Artificial Sequence
  Description of Artificial Sequence: Synthetic oligonucleotide
cuugguggagcucugggug

SEQ ID NO: 856951 - RNA, 19 nt, Artificial Sequence
  Description of Artificial Sequence: Synthetic oligonucleotide
acuaaguaggcucguggug

SEQ ID NO: 856952 - RNA, 19 nt, Artificial Sequence
  Description of Artificial Sequence: Synthetic oligonucleotide
ugagccgcagagaucauuc

SEQ ID NO: 856953 - RNA, 19 nt, Artificial Sequence
  Description of Artificial Sequence: Synthetic oligonucleotide
aacauccuagcccuccccu

SEQ ID NO: 856954 - RNA, 19 nt, Artificial Sequence
  Description of Artificial Sequence: Synthetic oligonucleotide
auggugcacagguagacca

SEQ ID NO: 856955 - RNA, 19 nt, Artificial Sequence
  Description of Artificial Sequence: Synthetic oligonucleotide
agaauucaaggaccugcuc

SEQ ID NO: 856956 - RNA, 19 nt, Artificial Sequence
  Description of Artificial Sequence: Synthetic oligonucleotide
gucucggcagcuuuuguag

SEQ ID NO: 856957 - RNA, 19 nt, Artificial Sequence
  Description of Artificial Sequence: Synthetic oligonucleotide
aaguaggggacagaacuca

SEQ ID NO: 856958 - RNA, 19 nt, Artificial Sequence
  Description of Artificial Sequence: Synthetic oligonucleotide
acaagaauacaaaccaaga

SEQ ID NO: 856959 - RNA, 19 nt, Artificial Sequence
  Description of Artificial Sequence: Synthetic oligonucleotide
agcuacguaaugauccugg

SEQ ID NO: 856960 - RNA, 19 nt, Artificial Sequence
  Description of Artificial Sequence: Synthetic oligonucleotide
gggacagaacucaugagcg

SEQ ID NO: 856961 - RNA, 19 nt, Artificial Sequence
  Description of Artificial Sequence: Synthetic oligonucleotide
caaccuagcugccuggcag

SEQ ID NO: 856962 - RNA, 19 nt, Artificial Sequence
  Description of Artificial Sequence: Synthetic oligonucleotide
uguaggcuugacucaggag

SEQ ID NO: 856963 - RNA, 19 nt, Artificial Sequence
  Description of Artificial Sequence: Synthetic oligonucleotide
ugguuacuggcacuucagc

SEQ ID NO: 856964 - RNA, 19 nt, Artificial Sequence
  Description of Artificial Sequence: Synthetic oligonucleotide
guuccaagcugagaugagg

SEQ ID NO: 856965 - RNA, 19 nt, Artificial Sequence
  Description of Artificial Sequence: Synthetic oligonucleotide
ucacgacugcagaagucag

SEQ ID NO: 856966 - RNA, 19 nt, Artificial Sequence
  Description of Artificial Sequence: Synthetic oligonucleotide
cuucaagagcaccacggug

SEQ ID NO: 856967 - RNA, 19 nt, Artificial Sequence
  Description of Artificial Sequence: Synthetic oligonucleotide
uucucacgacugcagaagu

SEQ ID NO: 856968 - RNA, 19 nt, Artificial Sequence
  Description of Artificial Sequence: Synthetic oligonucleotide
ugauggacugaaugagcug

SEQ ID NO: 856969 - RNA, 19 nt, Artificial Sequence
  Description of Artificial Sequence: Synthetic oligonucleotide
ggucccaacauccuagccc

SEQ ID NO: 856970 - RNA, 19 nt, Artificial Sequence
  Description of Artificial Sequence: Synthetic oligonucleotide
agcagaagcuacguaauga

SEQ ID NO: 856971 - RNA, 19 nt, Artificial Sequence
  Description of Artificial Sequence: Synthetic oligonucleotide
uuagucugccacacauucu

SEQ ID NO: 856972 - RNA, 19 nt, Artificial Sequence
  Description of Artificial Sequence: Synthetic oligonucleotide
ucaugagcgauggugcaca

SEQ ID NO: 856973 - RNA, 19 nt, Artificial Sequence
  Description of Artificial Sequence: Synthetic oligonucleotide
aagaagagacagccacugu

SEQ ID NO: 856974 - RNA, 19 nt, Artificial Sequence
  Description of Artificial Sequence: Synthetic oligonucleotide
ucaucacucugcagaaagu

SEQ ID NO: 856975 - RNA, 19 nt, Artificial Sequence
  Description of Artificial Sequence: Synthetic oligonucleotide
uagcuuaggucccaacauc

SEQ ID NO: 856976 - RNA, 19 nt, Artificial Sequence
  Description of Artificial Sequence: Synthetic oligonucleotide
aacccgaagcugucagcuc

SEQ ID NO: 856977 - RNA, 19 nt, Artificial Sequence
  Description of Artificial Sequence: Synthetic oligonucleotide
aggucccaacauccuagcc

SEQ ID NO: 856978 - RNA, 19 nt, Artificial Sequence
  Description of Artificial Sequence: Synthetic oligonucleotide
auggugguggugguggugg

SEQ ID NO: 856979 - RNA, 19 nt, Artificial Sequence
  Description of Artificial Sequence: Synthetic oligonucleotide
aagaguuaacuugucucau

SEQ ID NO: 856980 - RNA, 19 nt, Artificial Sequence
  Description of Artificial Sequence: Synthetic oligonucleotide
ucggggugcuuucauggug

SEQ ID NO: 856981 - RNA, 19 nt, Artificial Sequence
  Description of Artificial Sequence: Synthetic oligonucleotide
cugaauagcucuuaaacuu

SEQ ID NO: 856982 - RNA, 19 nt, Artificial Sequence
  Description of Artificial Sequence: Synthetic oligonucleotide
gagaucauucccugucuga

SEQ ID NO: 856983 - RNA, 19 nt, Artificial Sequence
  Description of Artificial Sequence: Synthetic oligonucleotide
caaguaggggacagaacuc

SEQ ID NO: 856984 - RNA, 19 nt, Artificial Sequence
  Description of Artificial Sequence: Synthetic oligonucleotide
ggggcuguaggcuugacuc

SEQ ID NO: 856985 - RNA, 19 nt, Artificial Sequence
  Description of Artificial Sequence: Synthetic oligonucleotide
aagagaauucaaggaccug

SEQ ID NO: 856986 - RNA, 19 nt, Artificial Sequence
  Description of Artificial Sequence: Synthetic oligonucleotide
uguuggguguuagucugcc

SEQ ID NO: 856987 - RNA, 19 nt, Artificial Sequence
  Description of Artificial Sequence: Synthetic oligonucleotide
caggaggacucucuucagg

SEQ ID NO: 856988 - RNA, 19 nt, Artificial Sequence
  Description of Artificial Sequence: Synthetic oligonucleotide
caacuguuggguguuaguc

SEQ ID NO: 856989 - RNA, 19 nt, Artificial Sequence
  Description of Artificial Sequence: Synthetic oligonucleotide
aguaggcucgugguguggg

SEQ ID NO: 856990 - RNA, 19 nt, Artificial Sequence
  Description of Artificial Sequence: Synthetic oligonucleotide
agcgugcagugccuggugg

SEQ ID NO: 856991 - RNA, 19 nt, Artificial Sequence
  Description of Artificial Sequence: Synthetic oligonucleotide
gacaucuagcuuagguccc

SEQ ID NO: 856992 - RNA, 19 nt, Artificial Sequence
  Description of Artificial Sequence: Synthetic oligonucleotide
ucucuucaggccacugaga

SEQ ID NO: 856993 - RNA, 19 nt, Artificial Sequence
  Description of Artificial Sequence: Synthetic oligonucleotide
acccgaagcugucagcucu

SEQ ID NO: 856994 - RNA, 19 nt, Artificial Sequence
  Description of Artificial Sequence: Synthetic oligonucleotide
agcaccagugaacccgaag

SEQ ID NO: 856995 - RNA, 19 nt, Artificial Sequence
  Description of Artificial Sequence: Synthetic oligonucleotide
gauggugcacagguagacc

SEQ ID NO: 856996 - RNA, 19 nt, Artificial Sequence
  Description of Artificial Sequence: Synthetic oligonucleotide
uccucaucuacuggggcug

SEQ ID NO: 856997 - RNA, 19 nt, Artificial Sequence
  Description of Artificial Sequence: Synthetic oligonucleotide
cuuccugugguaugggaca

SEQ ID NO: 856998 - RNA, 19 nt, Artificial Sequence
  Description of Artificial Sequence: Synthetic oligonucleotide
ugcagaagucagugugugc

SEQ ID NO: 856999 - RNA, 19 nt, Artificial Sequence
  Description of Artificial Sequence: Synthetic oligonucleotide
agaggcgcuagggugugac

SEQ ID NO: 857000 - RNA, 19 nt, Artificial Sequence
  Description of Artificial Sequence: Synthetic oligonucleotide
uguuuggcugugucuggca

SEQ ID NO: 857001 - RNA, 19 nt, Artificial Sequence
  Description of Artificial Sequence: Synthetic oligonucleotide
guggugguggugguggugg

SEQ ID NO: 857002 - RNA, 19 nt, Artificial Sequence
  Description of Artificial Sequence: Synthetic oligonucleotide
uggguguuagucggggugc

SEQ ID NO: 857003 - RNA, 19 nt, Artificial Sequence
  Description of Artificial Sequence: Synthetic oligonucleotide
ucucacgacugcagaaguc

SEQ ID NO: 857004 - RNA, 19 nt, Artificial Sequence
  Description of Artificial Sequence: Synthetic oligonucleotide
ugggccacccuuccggcca

SEQ ID NO: 857005 - RNA, 19 nt, Artificial Sequence
  Description of Artificial Sequence: Synthetic oligonucleotide
auucccugucugaacuccc

SEQ ID NO: 857006 - RNA, 19 nt, Artificial Sequence
  Description of Artificial Sequence: Synthetic oligonucleotide
aagcuacguaaugauccug

SEQ ID NO: 857007 - RNA, 19 nt, Artificial Sequence
  Description of Artificial Sequence: Synthetic oligonucleotide
agaguuaacuugucucaua

SEQ ID NO: 857008 - RNA, 19 nt, Artificial Sequence
  Description of Artificial Sequence: Synthetic oligonucleotide
acucaugagcgauggugca

SEQ ID NO: 857009 - RNA, 19 nt, Artificial Sequence
  Description of Artificial Sequence: Synthetic oligonucleotide
cugggcaggaaacuggaga

SEQ ID NO: 857010 - RNA, 19 nt, Artificial Sequence
  Description of Artificial Sequence: Synthetic oligonucleotide
ugccaaguaggggacagaa

SEQ ID NO: 857011 - RNA, 19 nt, Artificial Sequence
  Description of Artificial Sequence: Synthetic oligonucleotide
agaucauucccugucugaa

SEQ ID NO: 857012 - RNA, 19 nt, Artificial Sequence
  Description of Artificial Sequence: Synthetic oligonucleotide
aaagaggcgcuagggugug

SEQ ID NO: 857013 - RNA, 19 nt, Artificial Sequence
  Description of Artificial Sequence: Synthetic oligonucleotide
gccaauuguuuacacaaca

SEQ ID NO: 857014 - RNA, 19 nt, Artificial Sequence
  Description of Artificial Sequence: Synthetic oligonucleotide
caacagcucacugaagauc

SEQ ID NO: 857015 - RNA, 19 nt, Artificial Sequence
  Description of Artificial Sequence: Synthetic oligonucleotide
uuagucggggugcuuucau

SEQ ID NO: 857016 - RNA, 19 nt, Artificial Sequence
  Description of Artificial Sequence: Synthetic oligonucleotide
accagugaacccgaagcug

SEQ ID NO: 857017 - RNA, 19 nt, Artificial Sequence
  Description of Artificial Sequence: Synthetic oligonucleotide
aaguaggcucguggugugg

SEQ ID NO: 857018 - RNA, 19 nt, Artificial Sequence
  Description of Artificial Sequence: Synthetic oligonucleotide
gaagcuacguaaugauccu

SEQ ID NO: 857019 - RNA, 19 nt, Artificial Sequence
  Description of Artificial Sequence: Synthetic oligonucleotide
aggcgcuagggugugacag

SEQ ID NO: 857020 - RNA, 19 nt, Artificial Sequence
  Description of Artificial Sequence: Synthetic oligonucleotide
uguuagucggggugcuuuc

SEQ ID NO: 857021 - RNA, 19 nt, Artificial Sequence
  Description of Artificial Sequence: Synthetic oligonucleotide
caauggcuugaagggaggg

SEQ ID NO: 857022 - RNA, 19 nt, Artificial Sequence
  Description of Artificial Sequence: Synthetic oligonucleotide
cuacguaaugauccuggca

SEQ ID NO: 857023 - RNA, 19 nt, Artificial Sequence
  Description of Artificial Sequence: Synthetic oligonucleotide
cucacgacugcagaaguca

SEQ ID NO: 857024 - RNA, 19 nt, Artificial Sequence
  Description of Artificial Sequence: Synthetic oligonucleotide
ugacuccagcaccagugaa

SEQ ID NO: 857025 - RNA, 19 nt, Artificial Sequence
  Description of Artificial Sequence: Synthetic oligonucleotide
uagucggggugcuuucaug

SEQ ID NO: 857026 - RNA, 19 nt, Artificial Sequence
  Description of Artificial Sequence: Synthetic oligonucleotide
uccauugacgaugguuacu

SEQ ID NO: 857027 - RNA, 19 nt, Artificial Sequence
  Description of Artificial Sequence: Synthetic oligonucleotide
uggggcuguaggcuugacu

SEQ ID NO: 857028 - RNA, 19 nt, Artificial Sequence
  Description of Artificial Sequence: Synthetic oligonucleotide
cagcuuugcuugaagagaa

SEQ ID NO: 857029 - RNA, 19 nt, Artificial Sequence
  Description of Artificial Sequence: Synthetic oligonucleotide
guagguagguuccccuuuc

SEQ ID NO: 857030 - RNA, 19 nt, Artificial Sequence
  Description of Artificial Sequence: Synthetic oligonucleotide
uagguagguuccccuuucu

SEQ ID NO: 857031 - RNA, 19 nt, Artificial Sequence
  Description of Artificial Sequence: Synthetic oligonucleotide
ggcgcugugcccuucaaga

SEQ ID NO: 857032 - RNA, 19 nt, Artificial Sequence
  Description of Artificial Sequence: Synthetic oligonucleotide
cuucccugccuuccgggag

SEQ ID NO: 857033 - RNA, 19 nt, Artificial Sequence
  Description of Artificial Sequence: Synthetic oligonucleotide
ucucggcagcuuuuguagu

SEQ ID NO: 857034 - RNA, 19 nt, Artificial Sequence
  Description of Artificial Sequence: Synthetic oligonucleotide
aauguccauugacgauggu

SEQ ID NO: 857035 - RNA, 19 nt, Artificial Sequence
  Description of Artificial Sequence: Synthetic oligonucleotide
aggacucucuucaggccac

SEQ ID NO: 857036 - RNA, 19 nt, Artificial Sequence
  Description of Artificial Sequence: Synthetic oligonucleotide
ggcuuugggauaugaucag

SEQ ID NO: 857037 - RNA, 19 nt, Artificial Sequence
  Description of Artificial Sequence: Synthetic oligonucleotide
uccgugccagggcuggccc

SEQ ID NO: 857038 - RNA, 19 nt, Artificial Sequence
  Description of Artificial Sequence: Synthetic oligonucleotide
gagccgcagagaucauucc

SEQ ID NO: 857039 - RNA, 19 nt, Artificial Sequence
  Description of Artificial Sequence: Synthetic oligonucleotide
acguaaugauccuggcaau

SEQ ID NO: 857040 - RNA, 19 nt, Artificial Sequence
  Description of Artificial Sequence: Synthetic oligonucleotide
uggugggcacacuccgaag

SEQ ID NO: 857041 - RNA, 19 nt, Artificial Sequence
  Description of Artificial Sequence: Synthetic oligonucleotide
cuguuggguguuagucugc

SEQ ID NO: 857042 - RNA, 19 nt, Artificial Sequence
  Description of Artificial Sequence: Synthetic oligonucleotide
guccauugacgaugguuac

SEQ ID NO: 857043 - RNA, 19 nt, Artificial Sequence
  Description of Artificial Sequence: Synthetic oligonucleotide
uccugaugucguccuggca

SEQ ID NO: 857044 - RNA, 19 nt, Artificial Sequence
  Description of Artificial Sequence: Synthetic oligonucleotide
cagcagaagcuacguaaug

SEQ ID NO: 857045 - RNA, 19 nt, Artificial Sequence
  Description of Artificial Sequence: Synthetic oligonucleotide
ccauugacgaugguuacug

SEQ ID NO: 857046 - RNA, 19 nt, Artificial Sequence
  Description of Artificial Sequence: Synthetic oligonucleotide
guguuagucugccacacau

SEQ ID NO: 857047 - RNA, 19 nt, Artificial Sequence
  Description of Artificial Sequence: Synthetic oligonucleotide
uaguacugagccgcagaga

SEQ ID NO: 857048 - RNA, 19 nt, Artificial Sequence
  Description of Artificial Sequence: Synthetic oligonucleotide
ccaaguaggggacagaacu

SEQ ID NO: 857049 - RNA, 19 nt, Artificial Sequence
  Description of Artificial Sequence: Synthetic oligonucleotide
gcuacguaaugauccuggc

SEQ ID NO: 857050 - RNA, 19 nt, Artificial Sequence
  Description of Artificial Sequence: Synthetic oligonucleotide
ugguggugguggugguggg

SEQ ID NO: 857051 - RNA, 19 nt, Artificial Sequence
  Description of Artificial Sequence: Synthetic oligonucleotide
gagaauucaaggaccugcu

SEQ ID NO: 857052 - RNA, 19 nt, Artificial Sequence
  Description of Artificial Sequence: Synthetic oligonucleotide
ggaggacucucuucaggcc

SEQ ID NO: 857053 - RNA, 19 nt, Artificial Sequence
  Description of Artificial Sequence: Synthetic oligonucleotide
agaacucaugagcgauggu

SEQ ID NO: 857054 - RNA, 19 nt, Artificial Sequence
  Description of Artificial Sequence: Synthetic oligonucleotide
cucgugguguggguguuag

SEQ ID NO: 857055 - RNA, 19 nt, Artificial Sequence
  Description of Artificial Sequence: Synthetic oligonucleotide
cuuaggucccaacauccua

SEQ ID NO: 857056 - RNA, 19 nt, Artificial Sequence
  Description of Artificial Sequence: Synthetic oligonucleotide
cucaugagcgauggugcac

SEQ ID NO: 857057 - RNA, 19 nt, Artificial Sequence
  Description of Artificial Sequence: Synthetic oligonucleotide
ugucguccuggcaggccug

SEQ ID NO: 857058 - RNA, 19 nt, Artificial Sequence
  Description of Artificial Sequence: Synthetic oligonucleotide
cuggccccucugaaugucc

SEQ ID NO: 857059 - RNA, 19 nt, Artificial Sequence
  Description of Artificial Sequence: Synthetic oligonucleotide
caugagcgauggugcacag

SEQ ID NO: 857060 - RNA, 19 nt, Artificial Sequence
  Description of Artificial Sequence: Synthetic oligonucleotide
aggcgcugugcccuucaag

SEQ ID NO: 857061 - RNA, 19 nt, Artificial Sequence
  Description of Artificial Sequence: Synthetic oligonucleotide
cuagcuuaggucccaacau

SEQ ID NO: 857062 - RNA, 19 nt, Artificial Sequence
  Description of Artificial Sequence: Synthetic oligonucleotide
ggacaagggccuccaagug

SEQ ID NO: 857063 - RNA, 19 nt, Artificial Sequence
  Description of Artificial Sequence: Synthetic oligonucleotide
aggcucguggugugggugu

SEQ ID NO: 857064 - RNA, 19 nt, Artificial Sequence
  Description of Artificial Sequence: Synthetic oligonucleotide
cauuccugaugucguccug

SEQ ID NO: 857065 - RNA, 19 nt, Artificial Sequence
  Description of Artificial Sequence: Synthetic oligonucleotide
ggagguuccuuuggggugc

SEQ ID NO: 857066 - RNA, 19 nt, Artificial Sequence
  Description of Artificial Sequence: Synthetic oligonucleotide
agagggcuuugggauauga

SEQ ID NO: 857067 - RNA, 19 nt, Artificial Sequence
  Description of Artificial Sequence: Synthetic oligonucleotide
acaucuagcuuagguccca

SEQ ID NO: 857068 - RNA, 19 nt, Artificial Sequence
  Description of Artificial Sequence: Synthetic oligonucleotide
acgaugguuacuggcacuu

SEQ ID NO: 857069 - RNA, 19 nt, Artificial Sequence
  Description of Artificial Sequence: Synthetic oligonucleotide
ugaugucguccuggcaggc

SEQ ID NO: 857070 - RNA, 19 nt, Artificial Sequence
  Description of Artificial Sequence: Synthetic oligonucleotide
gcugggaagucuuccugug

SEQ ID NO: 857071 - RNA, 19 nt, Artificial Sequence
  Description of Artificial Sequence: Synthetic oligonucleotide
ccugaauagcucuuaaacu

SEQ ID NO: 857072 - RNA, 19 nt, Artificial Sequence
  Description of Artificial Sequence: Synthetic oligonucleotide
agguagguuccccuuucuu

SEQ ID NO: 857073 - RNA, 19 nt, Artificial Sequence
  Description of Artificial Sequence: Synthetic oligonucleotide
cuugggugcugaggaaaac

SEQ ID NO: 857074 - RNA, 19 nt, Artificial Sequence
  Description of Artificial Sequence: Synthetic oligonucleotide
gucuuccugugguauggga

SEQ ID NO: 857075 - RNA, 19 nt, Artificial Sequence
  Description of Artificial Sequence: Synthetic oligonucleotide
cccggaaguucucaggaac

SEQ ID NO: 857076 - RNA, 19 nt, Artificial Sequence
  Description of Artificial Sequence: Synthetic oligonucleotide
ggaacuaaguaggcucgug

SEQ ID NO: 857077 - RNA, 19 nt, Artificial Sequence
  Description of Artificial Sequence: Synthetic oligonucleotide
cacagguugagugggagcu

SEQ ID NO: 857078 - RNA, 19 nt, Artificial Sequence
  Description of Artificial Sequence: Synthetic oligonucleotide
guggugggcacacuccgaa

SEQ ID NO: 857079 - RNA, 19 nt, Artificial Sequence
  Description of Artificial Sequence: Synthetic oligonucleotide
cugacuccagcaccaguga

SEQ ID NO: 857080 - RNA, 19 nt, Artificial Sequence
  Description of Artificial Sequence: Synthetic oligonucleotide
ugccaaccuugguggagcu

SEQ ID NO: 857081 - RNA, 19 nt, Artificial Sequence
  Description of Artificial Sequence: Synthetic oligonucleotide
cugguguagguagguuccc

SEQ ID NO: 857082 - RNA, 19 nt, Artificial Sequence
  Description of Artificial Sequence: Synthetic oligonucleotide
gacgaugguuacuggcacu

SEQ ID NO: 857083 - RNA, 19 nt, Artificial Sequence
  Description of Artificial Sequence: Synthetic oligonucleotide
guagcacaauuuugugucu

SEQ ID NO: 857084 - RNA, 19 nt, Artificial Sequence
  Description of Artificial Sequence: Synthetic oligonucleotide
gcuagggugugacagcucu

SEQ ID NO: 857085 - RNA, 19 nt, Artificial Sequence
  Description of Artificial Sequence: Synthetic oligonucleotide
aggcaauuugagaucuuua

SEQ ID NO: 857086 - RNA, 19 nt, Artificial Sequence
  Description of Artificial Sequence: Synthetic oligonucleotide
aggucucggcagcuuuugu

SEQ ID NO: 857087 - RNA, 19 nt, Artificial Sequence
  Description of Artificial Sequence: Synthetic oligonucleotide
cucggcagcuuuuguagua

SEQ ID NO: 857088 - RNA, 19 nt, Artificial Sequence
  Description of Artificial Sequence: Synthetic oligonucleotide
aguaggggacagaacucau

SEQ ID NO: 857089 - RNA, 19 nt, Artificial Sequence
  Description of Artificial Sequence: Synthetic oligonucleotide
ggcgcuagggugugacagc

SEQ ID NO: 857090 - RNA, 19 nt, Artificial Sequence
  Description of Artificial Sequence: Synthetic oligonucleotide
cauggugguggugguggug

SEQ ID NO: 857091 - RNA, 19 nt, Artificial Sequence
  Description of Artificial Sequence: Synthetic oligonucleotide
gaacuccccugaauagcuc

SEQ ID NO: 857092 - RNA, 19 nt, Artificial Sequence
  Description of Artificial Sequence: Synthetic oligonucleotide
guuagucggggugcuuuca

SEQ ID NO: 857093 - RNA, 19 nt, Artificial Sequence
  Description of Artificial Sequence: Synthetic oligonucleotide
ccaacauccuagcccuccc

SEQ ID NO: 857094 - RNA, 19 nt, Artificial Sequence
  Description of Artificial Sequence: Synthetic oligonucleotide
gugugacagcucuugcucu

SEQ ID NO: 857095 - RNA, 19 nt, Artificial Sequence
  Description of Artificial Sequence: Synthetic oligonucleotide
ugucuggcaggagcgccaa

SEQ ID NO: 857096 - RNA, 19 nt, Artificial Sequence
  Description of Artificial Sequence: Synthetic oligonucleotide
cuuagacuuggagcuggga

SEQ ID NO: 857097 - RNA, 19 nt, Artificial Sequence
  Description of Artificial Sequence: Synthetic oligonucleotide
cugagacaucuagcuuagg

SEQ ID NO: 857098 - RNA, 19 nt, Artificial Sequence
  Description of Artificial Sequence: Synthetic oligonucleotide
agguugagugggagcuggg

SEQ ID NO: 857099 - RNA, 19 nt, Artificial Sequence
  Description of Artificial Sequence: Synthetic oligonucleotide
gcgcugugcccuucaagag

SEQ ID NO: 857100 - RNA, 19 nt, Artificial Sequence
  Description of Artificial Sequence: Synthetic oligonucleotide
caacuacagccugggcccc

SEQ ID NO: 857101 - RNA, 19 nt, Artificial Sequence
  Description of Artificial Sequence: Synthetic oligonucleotide
ugguggugguggugguggu

SEQ ID NO: 857102 - RNA, 19 nt, Artificial Sequence
  Description of Artificial Sequence: Synthetic oligonucleotide
gaggcgcuagggugugaca

SEQ ID NO: 857103 - RNA, 19 nt, Artificial Sequence
  Description of Artificial Sequence: Synthetic oligonucleotide
cccaacauccuagcccucc

SEQ ID NO: 857104 - RNA, 19 nt, Artificial Sequence
  Description of Artificial Sequence: Synthetic oligonucleotide
cuuucaugguggugguggu

SEQ ID NO: 857105 - RNA, 19 nt, Artificial Sequence
  Description of Artificial Sequence: Synthetic oligonucleotide
ucgugguguggguguuagu

SEQ ID NO: 857106 - RNA, 19 nt, Artificial Sequence
  Description of Artificial Sequence: Synthetic oligonucleotide
guacugagccgcagagauc

SEQ ID NO: 857107 - RNA, 19 nt, Artificial Sequence
  Description of Artificial Sequence: Synthetic oligonucleotide
gaaugagcuguagguuccu

SEQ ID NO: 857108 - RNA, 19 nt, Artificial Sequence
  Description of Artificial Sequence: Synthetic oligonucleotide
ccgcagagaucauucccug

SEQ ID NO: 857109 - RNA, 19 nt, Artificial Sequence
  Description of Artificial Sequence: Synthetic oligonucleotide
cacgacugcagaagucagu

SEQ ID NO: 857110 - RNA, 19 nt, Artificial Sequence
  Description of Artificial Sequence: Synthetic oligonucleotide
aagaggcgcuaggguguga

SEQ ID NO: 857111 - RNA, 19 nt, Artificial Sequence
  Description of Artificial Sequence: Synthetic oligonucleotide
gggugcuccgugccagggc

SEQ ID NO: 857112 - RNA, 19 nt, Artificial Sequence
  Description of Artificial Sequence: Synthetic oligonucleotide
ggaagucuuccugugguau

SEQ ID NO: 857113 - RNA, 19 nt, Artificial Sequence
  Description of Artificial Sequence: Synthetic oligonucleotide
cuccccuggcacauuccaa

SEQ ID NO: 857114 - RNA, 19 nt, Artificial Sequence
  Description of Artificial Sequence: Synthetic oligonucleotide
cucucaccagcagaagcua

SEQ ID NO: 857115 - RNA, 19 nt, Artificial Sequence
  Description of Artificial Sequence: Synthetic oligonucleotide
gguggugguggugguggug

SEQ ID NO: 857116 - RNA, 19 nt, Artificial Sequence
  Description of Artificial Sequence: Synthetic oligonucleotide
gucggggugcuuucauggu

SEQ ID NO: 857117 - RNA, 19 nt, Artificial Sequence
  Description of Artificial Sequence: Synthetic oligonucleotide
ggggugcuccgugccaggg

SEQ ID NO: 857118 - RNA, 19 nt, Artificial Sequence
  Description of Artificial Sequence: Synthetic oligonucleotide
guguuagucggggugcuuu

SEQ ID NO: 857119 - RNA, 19 nt, Artificial Sequence
  Description of Artificial Sequence: Synthetic oligonucleotide
guaggcucguggugugggu

SEQ ID NO: 857120 - RNA, 19 nt, Artificial Sequence
  Description of Artificial Sequence: Synthetic oligonucleotide
agaggcaauuugagaucuu

SEQ ID NO: 857121 - RNA, 19 nt, Artificial Sequence
  Description of Artificial Sequence: Synthetic oligonucleotide
gaggcgcugugcccuucaa

SEQ ID NO: 857122 - RNA, 19 nt, Artificial Sequence
  Description of Artificial Sequence: Synthetic oligonucleotide
cagguagaccauuccugau

SEQ ID NO: 857123 - RNA, 19 nt, Artificial Sequence
  Description of Artificial Sequence: Synthetic oligonucleotide
gccgcagagaucauucccu

SEQ ID NO: 857124 - RNA, 19 nt, Artificial Sequence
  Description of Artificial Sequence: Synthetic oligonucleotide
agguuccuuuggggugcuc

SEQ ID NO: 857125 - RNA, 19 nt, Artificial Sequence
  Description of Artificial Sequence: Synthetic oligonucleotide
cccaaccuagcugccuggc

SEQ ID NO: 857126 - RNA, 19 nt, Artificial Sequence
  Description of Artificial Sequence: Synthetic oligonucleotide
ggaggcgcugugcccuuca

SEQ ID NO: 857127 - RNA, 19 nt, Artificial Sequence
  Description of Artificial Sequence: Synthetic oligonucleotide
aggggacccaggggccuug

SEQ ID NO: 857128 - RNA, 19 nt, Artificial Sequence
  Description of Artificial Sequence: Synthetic oligonucleotide
ccaaccuagcugccuggca

SEQ ID NO: 857129 - RNA, 19 nt, Artificial Sequence
  Description of Artificial Sequence: Synthetic oligonucleotide
gucguccuggcaggccuga

SEQ ID NO: 857130 - RNA, 19 nt, Artificial Sequence
  Description of Artificial Sequence: Synthetic oligonucleotide
gguggugguggugguggga

SEQ ID NO: 857131 - RNA, 19 nt, Artificial Sequence
  Description of Artificial Sequence: Synthetic oligonucleotide
cagagggcuuugggauaug

SEQ ID NO: 857132 - RNA, 19 nt, Artificial Sequence
  Description of Artificial Sequence: Synthetic oligonucleotide
ccaagugcugggaagucuu

SEQ ID NO: 857133 - RNA, 19 nt, Artificial Sequence
  Description of Artificial Sequence: Synthetic oligonucleotide
gcuuaggucccaacauccu

SEQ ID NO: 857134 - RNA, 19 nt, Artificial Sequence
  Description of Artificial Sequence: Synthetic oligonucleotide
ccugggccccugguguagg

SEQ ID NO: 857135 - RNA, 19 nt, Artificial Sequence
  Description of Artificial Sequence: Synthetic oligonucleotide
cuggggcuguaggcuugac

SEQ ID NO: 857136 - RNA, 19 nt, Artificial Sequence
  Description of Artificial Sequence: Synthetic oligonucleotide
gguggacaagggccuccaa

SEQ ID NO: 857137 - RNA, 19 nt, Artificial Sequence
  Description of Artificial Sequence: Synthetic oligonucleotide
ccgugccagggcuggcccc

SEQ ID NO: 857138 - RNA, 19 nt, Artificial Sequence
  Description of Artificial Sequence: Synthetic oligonucleotide
gcgcuagggugugacagcu

SEQ ID NO: 857139 - RNA, 19 nt, Artificial Sequence
  Description of Artificial Sequence: Synthetic oligonucleotide
gcacaauuuugugucucuu

SEQ ID NO: 857140 - RNA, 19 nt, Artificial Sequence
  Description of Artificial Sequence: Synthetic oligonucleotide
gggccacccuuccggccac

SEQ ID NO: 857141 - RNA, 19 nt, Artificial Sequence
  Description of Artificial Sequence: Synthetic oligonucleotide
cugagccgcagagaucauu

SEQ ID NO: 857142 - RNA, 19 nt, Artificial Sequence
  Description of Artificial Sequence: Synthetic oligonucleotide
ggagcgccaacagcucacu

SEQ ID NO: 857143 - RNA, 19 nt, Artificial Sequence
  Description of Artificial Sequence: Synthetic oligonucleotide
ggguguuagucggggugcu

SEQ ID NO: 857144 - RNA, 19 nt, Artificial Sequence
  Description of Artificial Sequence: Synthetic oligonucleotide
gcuccgugccagggcuggc

SEQ ID NO: 857145 - RNA, 19 nt, Artificial Sequence
  Description of Artificial Sequence: Synthetic oligonucleotide
gccccucugaauguccauu

SEQ ID NO: 857146 - RNA, 19 nt, Artificial Sequence
  Description of Artificial Sequence: Synthetic oligonucleotide
cgcagagaucauucccugu

SEQ ID NO: 857147 - RNA, 19 nt, Artificial Sequence
  Description of Artificial Sequence: Synthetic oligonucleotide
ggccccucugaauguccau

SEQ ID NO: 857148 - RNA, 19 nt, Artificial Sequence
  Description of Artificial Sequence: Synthetic oligonucleotide
ggacucucuucaggccacu

SEQ ID NO: 857149 - RNA, 19 nt, Artificial Sequence
  Description of Artificial Sequence: Synthetic oligonucleotide
ccaguaccugcuggcaggu

SEQ ID NO: 857150 - RNA, 19 nt, Artificial Sequence
  Description of Artificial Sequence: Synthetic oligonucleotide
gguguuagucggggugcuu

SEQ ID NO: 857151 - RNA, 19 nt, Artificial Sequence
  Description of Artificial Sequence: Synthetic oligonucleotide
gcccaacuguuggguguua

SEQ ID NO: 857152 - RNA, 19 nt, Artificial Sequence
  Description of Artificial Sequence: Synthetic oligonucleotide
gccuuccgggaggcuggcu

SEQ ID NO: 857153 - RNA, 19 nt, Artificial Sequence
  Description of Artificial Sequence: Synthetic oligonucleotide
gggcaacaguggggaugau

SEQ ID NO: 857154 - RNA, 19 nt, Artificial Sequence
  Description of Artificial Sequence: Synthetic oligonucleotide
uuaacgaugucucauaucg

SEQ ID NO: 857155 - RNA, 19 nt, Artificial Sequence
  Description of Artificial Sequence: Synthetic oligonucleotide
aauucaugcacacaugugg

SEQ ID NO: 857156 - RNA, 19 nt, Artificial Sequence
  Description of Artificial Sequence: Synthetic oligonucleotide
aacacacacacacacauac

SEQ ID NO: 857157 - RNA, 19 nt, Artificial Sequence
  Description of Artificial Sequence: Synthetic oligonucleotide
caaaagugcaguuagagcc

SEQ ID NO: 857158 - RNA, 19 nt, Artificial Sequence
  Description of Artificial Sequence: Synthetic oligonucleotide
ucgauaaauaaauaaacgc

SEQ ID NO: 857159 - RNA, 19 nt, Artificial Sequence
  Description of Artificial Sequence: Synthetic oligonucleotide
auaaacgcuccauuaaagc

SEQ ID NO: 857160 - RNA, 19 nt, Artificial Sequence
  Description of Artificial Sequence: Synthetic oligonucleotide
ucagaguauaggaaguugg

SEQ ID NO: 857161 - RNA, 19 nt, Artificial Sequence
  Description of Artificial Sequence: Synthetic oligonucleotide
cucgauaaauaaauaaacg

SEQ ID NO: 857162 - RNA, 19 nt, Artificial Sequence
  Description of Artificial Sequence: Synthetic oligonucleotide
aaugcgcacacaugaauuc

SEQ ID NO: 857163 - RNA, 19 nt, Artificial Sequence
  Description of Artificial Sequence: Synthetic oligonucleotide
ucagauuuaacgaugucuc

SEQ ID NO: 857164 - RNA, 19 nt, Artificial Sequence
  Description of Artificial Sequence: Synthetic oligonucleotide
aacgaugucucauaucgug

SEQ ID NO: 857165 - RNA, 19 nt, Artificial Sequence
  Description of Artificial Sequence: Synthetic oligonucleotide
acacaacacacacacacac

SEQ ID NO: 857166 - RNA, 19 nt, Artificial Sequence
  Description of Artificial Sequence: Synthetic oligonucleotide
cacacauacacacacacac

SEQ ID NO: 857167 - RNA, 19 nt, Artificial Sequence
  Description of Artificial Sequence: Synthetic oligonucleotide
uaugcuacgaagguccugg

SEQ ID NO: 857168 - RNA, 19 nt, Artificial Sequence
  Description of Artificial Sequence: Synthetic oligonucleotide
uaaauaaacgcuccauuaa

SEQ ID NO: 857169 - RNA, 19 nt, Artificial Sequence
  Description of Artificial Sequence: Synthetic oligonucleotide
guacacaacacacacacac

SEQ ID NO: 857170 - RNA, 19 nt, Artificial Sequence
  Description of Artificial Sequence: Synthetic oligonucleotide
uacacacacacacacacac

SEQ ID NO: 857171 - RNA, 19 nt, Artificial Sequence
  Description of Artificial Sequence: Synthetic oligonucleotide
aauaaacgcuccauuaaag

SEQ ID NO: 857172 - RNA, 19 nt, Artificial Sequence
  Description of Artificial Sequence: Synthetic oligonucleotide
ugacagauggucuucuucc

SEQ ID NO: 857173 - RNA, 19 nt, Artificial Sequence
  Description of Artificial Sequence: Synthetic oligonucleotide
cauacacacacacacacac

SEQ ID NO: 857174 - RNA, 19 nt, Artificial Sequence
  Description of Artificial Sequence: Synthetic oligonucleotide
uaaacgcuccauuaaagcu

SEQ ID NO: 857175 - RNA, 19 nt, Artificial Sequence
  Description of Artificial Sequence: Synthetic oligonucleotide
ugcaguuagagccccaccc

SEQ ID NO: 857176 - RNA, 19 nt, Artificial Sequence
  Description of Artificial Sequence: Synthetic oligonucleotide
acaccaaaagugcaguuag

SEQ ID NO: 857177 - RNA, 19 nt, Artificial Sequence
  Description of Artificial Sequence: Synthetic oligonucleotide
cauaucgugacuucucccc

SEQ ID NO: 857178 - RNA, 19 nt, Artificial Sequence
  Description of Artificial Sequence: Synthetic oligonucleotide
uagcuuauuccccaggcug

SEQ ID NO: 857179 - RNA, 19 nt, Artificial Sequence
  Description of Artificial Sequence: Synthetic oligonucleotide
ugggguauuagcccaaucu

SEQ ID NO: 857180 - RNA, 19 nt, Artificial Sequence
  Description of Artificial Sequence: Synthetic oligonucleotide
uugcucuuaagagagaucu

SEQ ID NO: 857181 - RNA, 19 nt, Artificial Sequence
  Description of Artificial Sequence: Synthetic oligonucleotide
caaagugguagucaagggc

SEQ ID NO: 857182 - RNA, 19 nt, Artificial Sequence
  Description of Artificial Sequence: Synthetic oligonucleotide
agcugagcggcucagcagc

SEQ ID NO: 857183 - RNA, 19 nt, Artificial Sequence
  Description of Artificial Sequence: Synthetic oligonucleotide
uauuagcccaaucucacuc

SEQ ID NO: 857184 - RNA, 19 nt, Artificial Sequence
  Description of Artificial Sequence: Synthetic oligonucleotide
cacacacacacauacacac

SEQ ID NO: 857185 - RNA, 19 nt, Artificial Sequence
  Description of Artificial Sequence: Synthetic oligonucleotide
uccgugacaauacugguuc

SEQ ID NO: 857186 - RNA, 19 nt, Artificial Sequence
  Description of Artificial Sequence: Synthetic oligonucleotide
uauaagucgugcuuuucca

SEQ ID NO: 857187 - RNA, 19 nt, Artificial Sequence
  Description of Artificial Sequence: Synthetic oligonucleotide
caacccuuagcuuauuccc

SEQ ID NO: 857188 - RNA, 19 nt, Artificial Sequence
  Description of Artificial Sequence: Synthetic oligonucleotide
guagucaagggccucuugg

SEQ ID NO: 857189 - RNA, 19 nt, Artificial Sequence
  Description of Artificial Sequence: Synthetic oligonucleotide
agauuucacaccuuugccu

SEQ ID NO: 857190 - RNA, 19 nt, Artificial Sequence
  Description of Artificial Sequence: Synthetic oligonucleotide
ugcucaaucuggcagcagc

SEQ ID NO: 857191 - RNA, 19 nt, Artificial Sequence
  Description of Artificial Sequence: Synthetic oligonucleotide
guauaagucgugcuuuucc

SEQ ID NO: 857192 - RNA, 19 nt, Artificial Sequence
  Description of Artificial Sequence: Synthetic oligonucleotide
acaacacacacacacacau

SEQ ID NO: 857193 - RNA, 19 nt, Artificial Sequence
  Description of Artificial Sequence: Synthetic oligonucleotide
gagauuucacaccuuugcc

SEQ ID NO: 857194 - RNA, 19 nt, Artificial Sequence
  Description of Artificial Sequence: Synthetic oligonucleotide
cacacacacacacacacag

SEQ ID NO: 857195 - RNA, 19 nt, Artificial Sequence
  Description of Artificial Sequence: Synthetic oligonucleotide
aaugucuccgcagagucca

SEQ ID NO: 857196 - RNA, 19 nt, Artificial Sequence
  Description of Artificial Sequence: Synthetic oligonucleotide
uggauaugauucuuggacu

SEQ ID NO: 857197 - RNA, 19 nt, Artificial Sequence
  Description of Artificial Sequence: Synthetic oligonucleotide
cacauacacacacacacac

SEQ ID NO: 857198 - RNA, 19 nt, Artificial Sequence
  Description of Artificial Sequence: Synthetic oligonucleotide
aucgauggggccuuguuug

SEQ ID NO: 857199 - RNA, 19 nt, Artificial Sequence
  Description of Artificial Sequence: Synthetic oligonucleotide
uaaagcuucgaucgggaaa

SEQ ID NO: 857200 - RNA, 19 nt, Artificial Sequence
  Description of Artificial Sequence: Synthetic oligonucleotide
aucgggaaaccuuuaagca

SEQ ID NO: 857201 - RNA, 19 nt, Artificial Sequence
  Description of Artificial Sequence: Synthetic oligonucleotide
cacacacacacacauacac

SEQ ID NO: 857202 - RNA, 19 nt, Artificial Sequence
  Description of Artificial Sequence: Synthetic oligonucleotide
cuuuaagcagugcuauugc

SEQ ID NO: 857203 - RNA, 19 nt, Artificial Sequence
  Description of Artificial Sequence: Synthetic oligonucleotide
cugauccccaccauggugc

SEQ ID NO: 857204 - RNA, 19 nt, Artificial Sequence
  Description of Artificial Sequence: Synthetic oligonucleotide
cauuaaagcuucgaucggg

SEQ ID NO: 857205 - RNA, 19 nt, Artificial Sequence
  Description of Artificial Sequence: Synthetic oligonucleotide
accaaaagugcaguuagag

SEQ ID NO: 857206 - RNA, 19 nt, Artificial Sequence
  Description of Artificial Sequence: Synthetic oligonucleotide
cacuggauaugauucuugg

SEQ ID NO: 857207 - RNA, 19 nt, Artificial Sequence
  Description of Artificial Sequence: Synthetic oligonucleotide
cacacacacacacacacac

SEQ ID NO: 857208 - RNA, 19 nt, Artificial Sequence
  Description of Artificial Sequence: Synthetic oligonucleotide
cacacacacauacacacac

SEQ ID NO: 857209 - RNA, 19 nt, Artificial Sequence
  Description of Artificial Sequence: Synthetic oligonucleotide
aagucgugcuuuuccaaug

SEQ ID NO: 857210 - RNA, 19 nt, Artificial Sequence
  Description of Artificial Sequence: Synthetic oligonucleotide
uuuaagcagugcuauugcu

SEQ ID NO: 857211 - RNA, 19 nt, Artificial Sequence
  Description of Artificial Sequence: Synthetic oligonucleotide
auacugauggucaguuucc

SEQ ID NO: 857212 - RNA, 19 nt, Artificial Sequence
  Description of Artificial Sequence: Synthetic oligonucleotide
acauacagauguguucacc

SEQ ID NO: 857213 - RNA, 19 nt, Artificial Sequence
  Description of Artificial Sequence: Synthetic oligonucleotide
cacacacauacacacacac

SEQ ID NO: 857214 - RNA, 19 nt, Artificial Sequence
  Description of Artificial Sequence: Synthetic oligonucleotide
aacgcuccauuaaagcuuc

SEQ ID NO: 857215 - RNA, 19 nt, Artificial Sequence
  Description of Artificial Sequence: Synthetic oligonucleotide
acagugcgcagucaugggg

SEQ ID NO: 857216 - RNA, 19 nt, Artificial Sequence
  Description of Artificial Sequence: Synthetic oligonucleotide
caucaggcgguccaggugc

SEQ ID NO: 857217 - RNA, 19 nt, Artificial Sequence
  Description of Artificial Sequence: Synthetic oligonucleotide
gacgcggugcacuaggcgc

SEQ ID NO: 857218 - RNA, 19 nt, Artificial Sequence
  Description of Artificial Sequence: Synthetic oligonucleotide
aggucaacaaccccaucag

SEQ ID NO: 857219 - RNA, 19 nt, Artificial Sequence
  Description of Artificial Sequence: Synthetic oligonucleotide
uacacaacacacacacaca

SEQ ID NO: 857220 - RNA, 19 nt, Artificial Sequence
  Description of Artificial Sequence: Synthetic oligonucleotide
ucucacuccaacccuuagc

SEQ ID NO: 857221 - RNA, 19 nt, Artificial Sequence
  Description of Artificial Sequence: Synthetic oligonucleotide
agucaagggccucuugggg

SEQ ID NO: 857222 - RNA, 19 nt, Artificial Sequence
  Description of Artificial Sequence: Synthetic oligonucleotide
cuuacugauccccaccaug

SEQ ID NO: 857223 - RNA, 19 nt, Artificial Sequence
  Description of Artificial Sequence: Synthetic oligonucleotide
cauggggugcacauuugcg

SEQ ID NO: 857224 - RNA, 19 nt, Artificial Sequence
  Description of Artificial Sequence: Synthetic oligonucleotide
agagaguauaagucgugcu

SEQ ID NO: 857225 - RNA, 19 nt, Artificial Sequence
  Description of Artificial Sequence: Synthetic oligonucleotide
uccgcuaugcuacgaaggu

SEQ ID NO: 857226 - RNA, 19 nt, Artificial Sequence
  Description of Artificial Sequence: Synthetic oligonucleotide
uuuaacgaugucucauauc

SEQ ID NO: 857227 - RNA, 19 nt, Artificial Sequence
  Description of Artificial Sequence: Synthetic oligonucleotide
auuuaacgaugucucauau

SEQ ID NO: 857228 - RNA, 19 nt, Artificial Sequence
  Description of Artificial Sequence: Synthetic oligonucleotide
acacagugcgcagucaugg

SEQ ID NO: 857229 - RNA, 19 nt, Artificial Sequence
  Description of Artificial Sequence: Synthetic oligonucleotide
agcuccaagaagcguuugg

SEQ ID NO: 857230 - RNA, 19 nt, Artificial Sequence
  Description of Artificial Sequence: Synthetic oligonucleotide
accucagccgcccaguuca

SEQ ID NO: 857231 - RNA, 19 nt, Artificial Sequence
  Description of Artificial Sequence: Synthetic oligonucleotide
aaccuuuaagcagugcuau

SEQ ID NO: 857232 - RNA, 19 nt, Artificial Sequence
  Description of Artificial Sequence: Synthetic oligonucleotide
gguacagaugugcaucagg

SEQ ID NO: 857233 - RNA, 19 nt, Artificial Sequence
  Description of Artificial Sequence: Synthetic oligonucleotide
gauuuaacgaugucucaua

SEQ ID NO: 857234 - RNA, 19 nt, Artificial Sequence
  Description of Artificial Sequence: Synthetic oligonucleotide
agaauacacccaacuacac

SEQ ID NO: 857235 - RNA, 19 nt, Artificial Sequence
  Description of Artificial Sequence: Synthetic oligonucleotide
acugauccccaccauggug

SEQ ID NO: 857236 - RNA, 19 nt, Artificial Sequence
  Description of Artificial Sequence: Synthetic oligonucleotide
aaacgcuccauuaaagcuu

SEQ ID NO: 857237 - RNA, 19 nt, Artificial Sequence
  Description of Artificial Sequence: Synthetic oligonucleotide
ugaaaugucuccgcagagu

SEQ ID NO: 857238 - RNA, 19 nt, Artificial Sequence
  Description of Artificial Sequence: Synthetic oligonucleotide
ccauccgugacaauacugg

SEQ ID NO: 857239 - RNA, 19 nt, Artificial Sequence
  Description of Artificial Sequence: Synthetic oligonucleotide
uaagucgugcuuuuccaau

SEQ ID NO: 857240 - RNA, 19 nt, Artificial Sequence
  Description of Artificial Sequence: Synthetic oligonucleotide
uccccgguacacaacacac

SEQ ID NO: 857241 - RNA, 19 nt, Artificial Sequence
  Description of Artificial Sequence: Synthetic oligonucleotide
acacacacacacagaauac

SEQ ID NO: 857242 - RNA, 19 nt, Artificial Sequence
  Description of Artificial Sequence: Synthetic oligonucleotide
uggggugcacauuugcgca

SEQ ID NO: 857243 - RNA, 19 nt, Artificial Sequence
  Description of Artificial Sequence: Synthetic oligonucleotide
cacauuugcgcaugcgcgc

SEQ ID NO: 857244 - RNA, 19 nt, Artificial Sequence
  Description of Artificial Sequence: Synthetic oligonucleotide
agauuuaacgaugucucau

SEQ ID NO: 857245 - RNA, 19 nt, Artificial Sequence
  Description of Artificial Sequence: Synthetic oligonucleotide
caguucaggucaacaaccc

SEQ ID NO: 857246 - RNA, 19 nt, Artificial Sequence
  Description of Artificial Sequence: Synthetic oligonucleotide
uucauuccccgguacacaa

SEQ ID NO: 857247 - RNA, 19 nt, Artificial Sequence
  Description of Artificial Sequence: Synthetic oligonucleotide
gaagagaguauaagucgug

SEQ ID NO: 857248 - RNA, 19 nt, Artificial Sequence
  Description of Artificial Sequence: Synthetic oligonucleotide
acuggauaugauucuugga

SEQ ID NO: 857249 - RNA, 19 nt, Artificial Sequence
  Description of Artificial Sequence: Synthetic oligonucleotide
aguauaagucgugcuuuuc

SEQ ID NO: 857250 - RNA, 19 nt, Artificial Sequence
  Description of Artificial Sequence: Synthetic oligonucleotide
uuugguggucagauuuaac

SEQ ID NO: 857251 - RNA, 19 nt, Artificial Sequence
  Description of Artificial Sequence: Synthetic oligonucleotide
cucccuagacuucugucag

SEQ ID NO: 857252 - RNA, 19 nt, Artificial Sequence
  Description of Artificial Sequence: Synthetic oligonucleotide
aaaccuuuaagcagugcua

SEQ ID NO: 857253 - RNA, 19 nt, Artificial Sequence
  Description of Artificial Sequence: Synthetic oligonucleotide
cacacacacacacagaaua

SEQ ID NO: 857254 - RNA, 19 nt, Artificial Sequence
  Description of Artificial Sequence: Synthetic oligonucleotide
uuccccgguacacaacaca

SEQ ID NO: 857255 - RNA, 19 nt, Artificial Sequence
  Description of Artificial Sequence: Synthetic oligonucleotide
uguaggucccgggucaagc

SEQ ID NO: 857256 - RNA, 19 nt, Artificial Sequence
  Description of Artificial Sequence: Synthetic oligonucleotide
ucagccgcccaguucaggu

SEQ ID NO: 857257 - RNA, 19 nt, Artificial Sequence
  Description of Artificial Sequence: Synthetic oligonucleotide
auaucgugacuucuccccu

SEQ ID NO: 857258 - RNA, 19 nt, Artificial Sequence
  Description of Artificial Sequence: Synthetic oligonucleotide
aaaacaucgauggggccuu

SEQ ID NO: 857259 - RNA, 19 nt, Artificial Sequence
  Description of Artificial Sequence: Synthetic oligonucleotide
cugaaaugucuccgcagag

SEQ ID NO: 857260 - RNA, 19 nt, Artificial Sequence
  Description of Artificial Sequence: Synthetic oligonucleotide
gaaaacaucgauggggccu

SEQ ID NO: 857261 - RNA, 19 nt, Artificial Sequence
  Description of Artificial Sequence: Synthetic oligonucleotide
cacacacacacacacagaa

SEQ ID NO: 857262 - RNA, 19 nt, Artificial Sequence
  Description of Artificial Sequence: Synthetic oligonucleotide
auaagucgugcuuuuccaa

SEQ ID NO: 857263 - RNA, 19 nt, Artificial Sequence
  Description of Artificial Sequence: Synthetic oligonucleotide
uaacgaugucucauaucgu

SEQ ID NO: 857264 - RNA, 19 nt, Artificial Sequence
  Description of Artificial Sequence: Synthetic oligonucleotide
aagcguuugguggucagau

SEQ ID NO: 857265 - RNA, 19 nt, Artificial Sequence
  Description of Artificial Sequence: Synthetic oligonucleotide
agucgugcuuuuccaauga

SEQ ID NO: 857266 - RNA, 19 nt, Artificial Sequence
  Description of Artificial Sequence: Synthetic oligonucleotide
agaguauaagucgugcuuu

SEQ ID NO: 857267 - RNA, 19 nt, Artificial Sequence
  Description of Artificial Sequence: Synthetic oligonucleotide
auucaugcacacaugugga

SEQ ID NO: 857268 - RNA, 19 nt, Artificial Sequence
  Description of Artificial Sequence: Synthetic oligonucleotide
uaucgugacuucuccccug

SEQ ID NO: 857269 - RNA, 19 nt, Artificial Sequence
  Description of Artificial Sequence: Synthetic oligonucleotide
acauuugcgcaugcgcgcg

SEQ ID NO: 857270 - RNA, 19 nt, Artificial Sequence
  Description of Artificial Sequence: Synthetic oligonucleotide
ugcuacgaagguccuggca

SEQ ID NO: 857271 - RNA, 19 nt, Artificial Sequence
  Description of Artificial Sequence: Synthetic oligonucleotide
auuaaagcuucgaucggga

SEQ ID NO: 857272 - RNA, 19 nt, Artificial Sequence
  Description of Artificial Sequence: Synthetic oligonucleotide
aagcuaccccaccuggcca

SEQ ID NO: 857273 - RNA, 19 nt, Artificial Sequence
  Description of Artificial Sequence: Synthetic oligonucleotide
guccgcuaugcuacgaagg

SEQ ID NO: 857274 - RNA, 19 nt, Artificial Sequence
  Description of Artificial Sequence: Synthetic oligonucleotide
cccaaucucacuccaaccc

SEQ ID NO: 857275 - RNA, 19 nt, Artificial Sequence
  Description of Artificial Sequence: Synthetic oligonucleotide
ugucuuccccagaggaugu

SEQ ID NO: 857276 - RNA, 19 nt, Artificial Sequence
  Description of Artificial Sequence: Synthetic oligonucleotide
ucgaucgggaaaccuuuaa

SEQ ID NO: 857277 - RNA, 19 nt, Artificial Sequence
  Description of Artificial Sequence: Synthetic oligonucleotide
guggucagauuuaacgaug

SEQ ID NO: 857278 - RNA, 19 nt, Artificial Sequence
  Description of Artificial Sequence: Synthetic oligonucleotide
cccagccagauacugaugg

SEQ ID NO: 857279 - RNA, 19 nt, Artificial Sequence
  Description of Artificial Sequence: Synthetic oligonucleotide
caccagcggugacagaugg

SEQ ID NO: 857280 - RNA, 19 nt, Artificial Sequence
  Description of Artificial Sequence: Synthetic oligonucleotide
acccuuagcuuauucccca

SEQ ID NO: 857281 - RNA, 19 nt, Artificial Sequence
  Description of Artificial Sequence: Synthetic oligonucleotide
gugacagauggucuucuuc

SEQ ID NO: 857282 - RNA, 19 nt, Artificial Sequence
  Description of Artificial Sequence: Synthetic oligonucleotide
ugcgcacacaugaauucau

SEQ ID NO: 857283 - RNA, 19 nt, Artificial Sequence
  Description of Artificial Sequence: Synthetic oligonucleotide
ccaacccuuagcuuauucc

SEQ ID NO: 857284 - RNA, 19 nt, Artificial Sequence
  Description of Artificial Sequence: Synthetic oligonucleotide
cgcuaugcuacgaaggucc

SEQ ID NO: 857285 - RNA, 19 nt, Artificial Sequence
  Description of Artificial Sequence: Synthetic oligonucleotide
uggugcggcugccuaacca

SEQ ID NO: 857286 - RNA, 19 nt, Artificial Sequence
  Description of Artificial Sequence: Synthetic oligonucleotide
gguauuagcccaaucucac

SEQ ID NO: 857287 - RNA, 19 nt, Artificial Sequence
  Description of Artificial Sequence: Synthetic oligonucleotide
uccaacccuuagcuuauuc

SEQ ID NO: 857288 - RNA, 19 nt, Artificial Sequence
  Description of Artificial Sequence: Synthetic oligonucleotide
ugccuaaccacuggauaug

SEQ ID NO: 857289 - RNA, 19 nt, Artificial Sequence
  Description of Artificial Sequence: Synthetic oligonucleotide
cgcacacacacacagaccc

SEQ ID NO: 857290 - RNA, 19 nt, Artificial Sequence
  Description of Artificial Sequence: Synthetic oligonucleotide
guaggucccgggucaagcc

SEQ ID NO: 857291 - RNA, 19 nt, Artificial Sequence
  Description of Artificial Sequence: Synthetic oligonucleotide
agcuaccccaccuggccag

SEQ ID NO: 857292 - RNA, 19 nt, Artificial Sequence
  Description of Artificial Sequence: Synthetic oligonucleotide
cacuccaacccuuagcuua

SEQ ID NO: 857293 - RNA, 19 nt, Artificial Sequence
  Description of Artificial Sequence: Synthetic oligonucleotide
augcuacgaagguccuggc

SEQ ID NO: 857294 - RNA, 19 nt, Artificial Sequence
  Description of Artificial Sequence: Synthetic oligonucleotide
aagcuucgaucgggaaacc

SEQ ID NO: 857295 - RNA, 19 nt, Artificial Sequence
  Description of Artificial Sequence: Synthetic oligonucleotide
ugugcaucaggcgguccag

SEQ ID NO: 857296 - RNA, 19 nt, Artificial Sequence
  Description of Artificial Sequence: Synthetic oligonucleotide
ugcacuaggcgcgggccgg

SEQ ID NO: 857297 - RNA, 19 nt, Artificial Sequence
  Description of Artificial Sequence: Synthetic oligonucleotide
cauuccccgguacacaaca

SEQ ID NO: 857298 - RNA, 19 nt, Artificial Sequence
  Description of Artificial Sequence: Synthetic oligonucleotide
ccuuuaagcagugcuauug

SEQ ID NO: 857299 - RNA, 19 nt, Artificial Sequence
  Description of Artificial Sequence: Synthetic oligonucleotide
gaggccucgauaaauaaau

SEQ ID NO: 857300 - RNA, 19 nt, Artificial Sequence
  Description of Artificial Sequence: Synthetic oligonucleotide
cgguacacaacacacacac

SEQ ID NO: 857301 - RNA, 19 nt, Artificial Sequence
  Description of Artificial Sequence: Synthetic oligonucleotide
augucucauaucgugacuu

SEQ ID NO: 857302 - RNA, 19 nt, Artificial Sequence
  Description of Artificial Sequence: Synthetic oligonucleotide
cacagugcgcagucauggg

SEQ ID NO: 857303 - RNA, 19 nt, Artificial Sequence
  Description of Artificial Sequence: Synthetic oligonucleotide
gggguauuagcccaaucuc

SEQ ID NO: 857304 - RNA, 19 nt, Artificial Sequence
  Description of Artificial Sequence: Synthetic oligonucleotide
gacaccaaaagugcaguua

SEQ ID NO: 857305 - RNA, 19 nt, Artificial Sequence
  Description of Artificial Sequence: Synthetic oligonucleotide
agauccagccuccguuuca

SEQ ID NO: 857306 - RNA, 19 nt, Artificial Sequence
  Description of Artificial Sequence: Synthetic oligonucleotide
accuuugccuggguggcgg

SEQ ID NO: 857307 - RNA, 19 nt, Artificial Sequence
  Description of Artificial Sequence: Synthetic oligonucleotide
ggccucgauaaauaaauaa

SEQ ID NO: 857308 - RNA, 19 nt, Artificial Sequence
  Description of Artificial Sequence: Synthetic oligonucleotide
gauggucaguuuccagauc

SEQ ID NO: 857309 - RNA, 19 nt, Artificial Sequence
  Description of Artificial Sequence: Synthetic oligonucleotide
aguugggucucaggagggg

SEQ ID NO: 857310 - RNA, 19 nt, Artificial Sequence
  Description of Artificial Sequence: Synthetic oligonucleotide
cagauuuaacgaugucuca

SEQ ID NO: 857311 - RNA, 19 nt, Artificial Sequence
  Description of Artificial Sequence: Synthetic oligonucleotide
ggccuugaucacuaugacc

SEQ ID NO: 857312 - RNA, 19 nt, Artificial Sequence
  Description of Artificial Sequence: Synthetic oligonucleotide
auggugcggcugccuaacc

SEQ ID NO: 857313 - RNA, 19 nt, Artificial Sequence
  Description of Artificial Sequence: Synthetic oligonucleotide
gcucuuaagagagaucuga

SEQ ID NO: 857314 - RNA, 19 nt, Artificial Sequence
  Description of Artificial Sequence: Synthetic oligonucleotide
ucauuccccgguacacaac

SEQ ID NO: 857315 - RNA, 19 nt, Artificial Sequence
  Description of Artificial Sequence: Synthetic oligonucleotide
ugcgcagucauggggugca

SEQ ID NO: 857316 - RNA, 19 nt, Artificial Sequence
  Description of Artificial Sequence: Synthetic oligonucleotide
uggcccauccgugacaaua

SEQ ID NO: 857317 - RNA, 19 nt, Artificial Sequence
  Description of Artificial Sequence: Synthetic oligonucleotide
gauccagccuccguuucac

SEQ ID NO: 857318 - RNA, 19 nt, Artificial Sequence
  Description of Artificial Sequence: Synthetic oligonucleotide
acacacacacacauacaca

SEQ ID NO: 857319 - RNA, 19 nt, Artificial Sequence
  Description of Artificial Sequence: Synthetic oligonucleotide
cacaacacacacacacaca

SEQ ID NO: 857320 - RNA, 19 nt, Artificial Sequence
  Description of Artificial Sequence: Synthetic oligonucleotide
gcaguuagagccccacccc

SEQ ID NO: 857321 - RNA, 19 nt, Artificial Sequence
  Description of Artificial Sequence: Synthetic oligonucleotide
agccgcccaguucagguca

SEQ ID NO: 857322 - RNA, 19 nt, Artificial Sequence
  Description of Artificial Sequence: Synthetic oligonucleotide
ggaaaacaucgauggggcc

SEQ ID NO: 857323 - RNA, 19 nt, Artificial Sequence
  Description of Artificial Sequence: Synthetic oligonucleotide
uucaagccgcuuacugauc

SEQ ID NO: 857324 - RNA, 19 nt, Artificial Sequence
  Description of Artificial Sequence: Synthetic oligonucleotide
gugcacuaggcgcgggccg

SEQ ID NO: 857325 - RNA, 19 nt, Artificial Sequence
  Description of Artificial Sequence: Synthetic oligonucleotide
cccgguacacaacacacac

SEQ ID NO: 857326 - RNA, 19 nt, Artificial Sequence
  Description of Artificial Sequence: Synthetic oligonucleotide
caaaugcagccagccaagc

SEQ ID NO: 857327 - RNA, 19 nt, Artificial Sequence
  Description of Artificial Sequence: Synthetic oligonucleotide
uugggguauuagcccaauc

SEQ ID NO: 857328 - RNA, 19 nt, Artificial Sequence
  Description of Artificial Sequence: Synthetic oligonucleotide
acacauacacacacacaca

SEQ ID NO: 857329 - RNA, 19 nt, Artificial Sequence
  Description of Artificial Sequence: Synthetic oligonucleotide
ugguacagaugugcaucag

SEQ ID NO: 857330 - RNA, 19 nt, Artificial Sequence
  Description of Artificial Sequence: Synthetic oligonucleotide
acauacacacacacacaca

SEQ ID NO: 857331 - RNA, 19 nt, Artificial Sequence
  Description of Artificial Sequence: Synthetic oligonucleotide
acgaugucucauaucguga

SEQ ID NO: 857332 - RNA, 19 nt, Artificial Sequence
  Description of Artificial Sequence: Synthetic oligonucleotide
cacacacacacagaauaca

SEQ ID NO: 857333 - RNA, 19 nt, Artificial Sequence
  Description of Artificial Sequence: Synthetic oligonucleotide
ccauuaaagcuucgaucgg

SEQ ID NO: 857334 - RNA, 19 nt, Artificial Sequence
  Description of Artificial Sequence: Synthetic oligonucleotide
cacuaugaccaucuguucu

SEQ ID NO: 857335 - RNA, 19 nt, Artificial Sequence
  Description of Artificial Sequence: Synthetic oligonucleotide
uucgaucgggaaaccuuua

SEQ ID NO: 857336 - RNA, 19 nt, Artificial Sequence
  Description of Artificial Sequence: Synthetic oligonucleotide
gguccgcuaugcuacgaag

SEQ ID NO: 857337 - RNA, 19 nt, Artificial Sequence
  Description of Artificial Sequence: Synthetic oligonucleotide
cugaugaacuccccaggga

SEQ ID NO: 857338 - RNA, 19 nt, Artificial Sequence
  Description of Artificial Sequence: Synthetic oligonucleotide
ggugcggcugccuaaccac

SEQ ID NO: 857339 - RNA, 19 nt, Artificial Sequence
  Description of Artificial Sequence: Synthetic oligonucleotide
augcgcacacaugaauuca

SEQ ID NO: 857340 - RNA, 19 nt, Artificial Sequence
  Description of Artificial Sequence: Synthetic oligonucleotide
cugcacucuccucaggaca

SEQ ID NO: 857341 - RNA, 19 nt, Artificial Sequence
  Description of Artificial Sequence: Synthetic oligonucleotide
acacacauacacacacaca

SEQ ID NO: 857342 - RNA, 19 nt, Artificial Sequence
  Description of Artificial Sequence: Synthetic oligonucleotide
ggguauuagcccaaucuca

SEQ ID NO: 857343 - RNA, 19 nt, Artificial Sequence
  Description of Artificial Sequence: Synthetic oligonucleotide
ccaacuacacagugcgcag

SEQ ID NO: 857344 - RNA, 19 nt, Artificial Sequence
  Description of Artificial Sequence: Synthetic oligonucleotide
ucccuagacuucugucaga

SEQ ID NO: 857345 - RNA, 19 nt, Artificial Sequence
  Description of Artificial Sequence: Synthetic oligonucleotide
auacacacacacacacaca

SEQ ID NO: 857346 - RNA, 19 nt, Artificial Sequence
  Description of Artificial Sequence: Synthetic oligonucleotide
ggcgcuggcugucugaguc

SEQ ID NO: 857347 - RNA, 19 nt, Artificial Sequence
  Description of Artificial Sequence: Synthetic oligonucleotide
ccgggucaagccuucaagc

SEQ ID NO: 857348 - RNA, 19 nt, Artificial Sequence
  Description of Artificial Sequence: Synthetic oligonucleotide
uauaggaaguugggguauu

SEQ ID NO: 857349 - RNA, 19 nt, Artificial Sequence
  Description of Artificial Sequence: Synthetic oligonucleotide
uggcaaugagcuggaugcc

SEQ ID NO: 857350 - RNA, 19 nt, Artificial Sequence
  Description of Artificial Sequence: Synthetic oligonucleotide
gugcaguuagagccccacc

SEQ ID NO: 857351 - RNA, 19 nt, Artificial Sequence
  Description of Artificial Sequence: Synthetic oligonucleotide
agaggccucgauaaauaaa

SEQ ID NO: 857352 - RNA, 19 nt, Artificial Sequence
  Description of Artificial Sequence: Synthetic oligonucleotide
cauggugcggcugccuaac

SEQ ID NO: 857353 - RNA, 19 nt, Artificial Sequence
  Description of Artificial Sequence: Synthetic oligonucleotide
uuccccuuuugcucugcuc

SEQ ID NO: 857354 - RNA, 19 nt, Artificial Sequence
  Description of Artificial Sequence: Synthetic oligonucleotide
ggcaaugagcuggaugccc

SEQ ID NO: 857355 - RNA, 19 nt, Artificial Sequence
  Description of Artificial Sequence: Synthetic oligonucleotide
uacgaagguccuggcaggu

SEQ ID NO: 857356 - RNA, 19 nt, Artificial Sequence
  Description of Artificial Sequence: Synthetic oligonucleotide
cacacacacacagacccca

SEQ ID NO: 857357 - RNA, 19 nt, Artificial Sequence
  Description of Artificial Sequence: Synthetic oligonucleotide
cauuugcgcaugcgcgcgc

SEQ ID NO: 857358 - RNA, 19 nt, Artificial Sequence
  Description of Artificial Sequence: Synthetic oligonucleotide
gaagcguuugguggucaga

SEQ ID NO: 857359 - RNA, 19 nt, Artificial Sequence
  Description of Artificial Sequence: Synthetic oligonucleotide
acccaacuacacagugcgc

SEQ ID NO: 857360 - RNA, 19 nt, Artificial Sequence
  Description of Artificial Sequence: Synthetic oligonucleotide
acacacacacauacacaca

SEQ ID NO: 857361 - RNA, 19 nt, Artificial Sequence
  Description of Artificial Sequence: Synthetic oligonucleotide
acacacacauacacacaca

SEQ ID NO: 857362 - RNA, 19 nt, Artificial Sequence
  Description of Artificial Sequence: Synthetic oligonucleotide
ucacuccaacccuuagcuu

SEQ ID NO: 857363 - RNA, 19 nt, Artificial Sequence
  Description of Artificial Sequence: Synthetic oligonucleotide
cuaugcuacgaagguccug

SEQ ID NO: 857364 - RNA, 19 nt, Artificial Sequence
  Description of Artificial Sequence: Synthetic oligonucleotide
uuugcgcaugcgcgcgcac

SEQ ID NO: 857365 - RNA, 19 nt, Artificial Sequence
  Description of Artificial Sequence: Synthetic oligonucleotide
cugccuaaccacuggauau

SEQ ID NO: 857366 - RNA, 19 nt, Artificial Sequence
  Description of Artificial Sequence: Synthetic oligonucleotide
guauuagcccaaucucacu

SEQ ID NO: 857367 - RNA, 19 nt, Artificial Sequence
  Description of Artificial Sequence: Synthetic oligonucleotide
caaugcgcacacaugaauu

SEQ ID NO: 857368 - RNA, 19 nt, Artificial Sequence
  Description of Artificial Sequence: Synthetic oligonucleotide
gcccaaucucacuccaacc

SEQ ID NO: 857369 - RNA, 19 nt, Artificial Sequence
  Description of Artificial Sequence: Synthetic oligonucleotide
agcuucgaucgggaaaccu

SEQ ID NO: 857370 - RNA, 19 nt, Artificial Sequence
  Description of Artificial Sequence: Synthetic oligonucleotide
acacacacacacacauaca

SEQ ID NO: 857371 - RNA, 19 nt, Artificial Sequence
  Description of Artificial Sequence: Synthetic oligonucleotide
gguggucagauuuaacgau

SEQ ID NO: 857372 - RNA, 19 nt, Artificial Sequence
  Description of Artificial Sequence: Synthetic oligonucleotide
cagaggccucgauaaauaa

SEQ ID NO: 857373 - RNA, 19 nt, Artificial Sequence
  Description of Artificial Sequence: Synthetic oligonucleotide
gauccaagguuggggaugu

SEQ ID NO: 857374 - RNA, 19 nt, Artificial Sequence
  Description of Artificial Sequence: Synthetic oligonucleotide
aggauucugggagcaggca

SEQ ID NO: 857375 - RNA, 19 nt, Artificial Sequence
  Description of Artificial Sequence: Synthetic oligonucleotide
cuucauuccccgguacaca

SEQ ID NO: 857376 - RNA, 19 nt, Artificial Sequence
  Description of Artificial Sequence: Synthetic oligonucleotide
acacacacacacacacaca

SEQ ID NO: 857377 - RNA, 19 nt, Artificial Sequence
  Description of Artificial Sequence: Synthetic oligonucleotide
caggguccgcuaugcuacg

SEQ ID NO: 857378 - RNA, 19 nt, Artificial Sequence
  Description of Artificial Sequence: Synthetic oligonucleotide
caccuucauuccccgguac

SEQ ID NO: 857379 - RNA, 19 nt, Artificial Sequence
  Description of Artificial Sequence: Synthetic oligonucleotide
gaguauaagucgugcuuuu

SEQ ID NO: 857380 - RNA, 19 nt, Artificial Sequence
  Description of Artificial Sequence: Synthetic oligonucleotide
auuugcgcaugcgcgcgca

SEQ ID NO: 857381 - RNA, 19 nt, Artificial Sequence
  Description of Artificial Sequence: Synthetic oligonucleotide
ccacuggauaugauucuug

SEQ ID NO: 857382 - RNA, 19 nt, Artificial Sequence
  Description of Artificial Sequence: Synthetic oligonucleotide
cagguggcccauccgugac

SEQ ID NO: 857383 - RNA, 19 nt, Artificial Sequence
  Description of Artificial Sequence: Synthetic oligonucleotide
cccauccgugacaauacug

SEQ ID NO: 857384 - RNA, 19 nt, Artificial Sequence
  Description of Artificial Sequence: Synthetic oligonucleotide
uugcgcaugcgcgcgcaca

SEQ ID NO: 857385 - RNA, 19 nt, Artificial Sequence
  Description of Artificial Sequence: Synthetic oligonucleotide
cuuugccuggguggcggcc

SEQ ID NO: 857386 - RNA, 19 nt, Artificial Sequence
  Description of Artificial Sequence: Synthetic oligonucleotide
ggauaugauucuuggacuu

SEQ ID NO: 857387 - RNA, 19 nt, Artificial Sequence
  Description of Artificial Sequence: Synthetic oligonucleotide
acacacacacacacacaga

SEQ ID NO: 857388 - RNA, 19 nt, Artificial Sequence
  Description of Artificial Sequence: Synthetic oligonucleotide
auccgugacaauacugguu

SEQ ID NO: 857389 - RNA, 19 nt, Artificial Sequence
  Description of Artificial Sequence: Synthetic oligonucleotide
cagcuuguaguugggucuc

SEQ ID NO: 857390 - RNA, 19 nt, Artificial Sequence
  Description of Artificial Sequence: Synthetic oligonucleotide
cgcgcacacacacacagac

SEQ ID NO: 857391 - RNA, 19 nt, Artificial Sequence
  Description of Artificial Sequence: Synthetic oligonucleotide
auaggaaguugggguauua

SEQ ID NO: 857392 - RNA, 19 nt, Artificial Sequence
  Description of Artificial Sequence: Synthetic oligonucleotide
acuccaacccuuagcuuau

SEQ ID NO: 857393 - RNA, 19 nt, Artificial Sequence
  Description of Artificial Sequence: Synthetic oligonucleotide
aaacaucgauggggccuug

SEQ ID NO: 857394 - RNA, 19 nt, Artificial Sequence
  Description of Artificial Sequence: Synthetic oligonucleotide
cuucgaucgggaaaccuuu

SEQ ID NO: 857395 - RNA, 19 nt, Artificial Sequence
  Description of Artificial Sequence: Synthetic oligonucleotide
ccccaaugcgcacacauga

SEQ ID NO: 857396 - RNA, 19 nt, Artificial Sequence
  Description of Artificial Sequence: Synthetic oligonucleotide
acacacacacacacagaau

SEQ ID NO: 857397 - RNA, 19 nt, Artificial Sequence
  Description of Artificial Sequence: Synthetic oligonucleotide
ggugcacuaggcgcgggcc

SEQ ID NO: 857398 - RNA, 19 nt, Artificial Sequence
  Description of Artificial Sequence: Synthetic oligonucleotide
cacaggauucugggagcag

SEQ ID NO: 857399 - RNA, 19 nt, Artificial Sequence
  Description of Artificial Sequence: Synthetic oligonucleotide
gcggcugccuaaccacugg

SEQ ID NO: 857400 - RNA, 19 nt, Artificial Sequence
  Description of Artificial Sequence: Synthetic oligonucleotide
agcguuugguggucagauu

SEQ ID NO: 857401 - RNA, 19 nt, Artificial Sequence
  Description of Artificial Sequence: Synthetic oligonucleotide
cccaacuacacagugcgca

SEQ ID NO: 857402 - RNA, 19 nt, Artificial Sequence
  Description of Artificial Sequence: Synthetic oligonucleotide
cccgggucaagccuucaag

SEQ ID NO: 857403 - RNA, 19 nt, Artificial Sequence
  Description of Artificial Sequence: Synthetic oligonucleotide
gcugccuaaccacuggaua

SEQ ID NO: 857404 - RNA, 19 nt, Artificial Sequence
  Description of Artificial Sequence: Synthetic oligonucleotide
cauccgugacaauacuggu

SEQ ID NO: 857405 - RNA, 19 nt, Artificial Sequence
  Description of Artificial Sequence: Synthetic oligonucleotide
agcaccucagccgcccagu

SEQ ID NO: 857406 - RNA, 19 nt, Artificial Sequence
  Description of Artificial Sequence: Synthetic oligonucleotide
caacacacacacacacaua

SEQ ID NO: 857407 - RNA, 19 nt, Artificial Sequence
  Description of Artificial Sequence: Synthetic oligonucleotide
gucucauaucgugacuucu

SEQ ID NO: 857408 - RNA, 19 nt, Artificial Sequence
  Description of Artificial Sequence: Synthetic oligonucleotide
cgcgcgcacacacacacag

SEQ ID NO: 857409 - RNA, 19 nt, Artificial Sequence
  Description of Artificial Sequence: Synthetic oligonucleotide
gcguuugguggucagauuu

SEQ ID NO: 857410 - RNA, 19 nt, Artificial Sequence
  Description of Artificial Sequence: Synthetic oligonucleotide
ggcccauccgugacaauac

SEQ ID NO: 857411 - RNA, 19 nt, Artificial Sequence
  Description of Artificial Sequence: Synthetic oligonucleotide
cagccgcccaguucagguc

SEQ ID NO: 857412 - RNA, 19 nt, Artificial Sequence
  Description of Artificial Sequence: Synthetic oligonucleotide
guuucaccggcgggcggcc

SEQ ID NO: 857413 - RNA, 19 nt, Artificial Sequence
  Description of Artificial Sequence: Synthetic oligonucleotide
ccgcuuacugauccccacc

SEQ ID NO: 857414 - RNA, 19 nt, Artificial Sequence
  Description of Artificial Sequence: Synthetic oligonucleotide
gguggaggcccugcagugc

SEQ ID NO: 857415 - RNA, 19 nt, Artificial Sequence
  Description of Artificial Sequence: Synthetic oligonucleotide
cggaacggcccacugcucc

SEQ ID NO: 857416 - RNA, 19 nt, Artificial Sequence
  Description of Artificial Sequence: Synthetic oligonucleotide
ccuccguuucaccggcggg

SEQ ID NO: 857417 - RNA, 19 nt, Artificial Sequence
  Description of Artificial Sequence: Synthetic oligonucleotide
gccgcuuacugauccccac

SEQ ID NO: 857418 - RNA, 19 nt, Artificial Sequence
  Description of Artificial Sequence: Synthetic oligonucleotide
ccaagaagcguuugguggu

SEQ ID NO: 857419 - RNA, 19 nt, Artificial Sequence
  Description of Artificial Sequence: Synthetic oligonucleotide
gugcgcagucauggggugc

SEQ ID NO: 857420 - RNA, 19 nt, Artificial Sequence
  Description of Artificial Sequence: Synthetic oligonucleotide
agcuuguaguugggucuca

SEQ ID NO: 857421 - RNA, 19 nt, Artificial Sequence
  Description of Artificial Sequence: Synthetic oligonucleotide
gguacacaacacacacaca

SEQ ID NO: 857422 - RNA, 19 nt, Artificial Sequence
  Description of Artificial Sequence: Synthetic oligonucleotide
agccgcuuacugaucccca

SEQ ID NO: 857423 - RNA, 19 nt, Artificial Sequence
  Description of Artificial Sequence: Synthetic oligonucleotide
gggugcacauuugcgcaug

SEQ ID NO: 857424 - RNA, 19 nt, Artificial Sequence
  Description of Artificial Sequence: Synthetic oligonucleotide
cugcucaaucuggcagcag

SEQ ID NO: 857425 - RNA, 19 nt, Artificial Sequence
  Description of Artificial Sequence: Synthetic oligonucleotide
aggccucgauaaauaaaua

SEQ ID NO: 857426 - RNA, 19 nt, Artificial Sequence
  Description of Artificial Sequence: Synthetic oligonucleotide
gcgcacacaugaauucaug

SEQ ID NO: 857427 - RNA, 19 nt, Artificial Sequence
  Description of Artificial Sequence: Synthetic oligonucleotide
gcacacacacacagacccc

SEQ ID NO: 857428 - RNA, 19 nt, Artificial Sequence
  Description of Artificial Sequence: Synthetic oligonucleotide
gcggccgagagcgggacgc

SEQ ID NO: 857429 - RNA, 19 nt, Artificial Sequence
  Description of Artificial Sequence: Synthetic oligonucleotide
ccucuuggggcggggaaag

SEQ ID NO: 857430 - RNA, 19 nt, Artificial Sequence
  Description of Artificial Sequence: Synthetic oligonucleotide
cacuaggcgcgggccgggg

SEQ ID NO: 857431 - RNA, 19 nt, Artificial Sequence
  Description of Artificial Sequence: Synthetic oligonucleotide
aggcgcuggcugucugagu

SEQ ID NO: 857432 - RNA, 19 nt, Artificial Sequence
  Description of Artificial Sequence: Synthetic oligonucleotide
aggguccgcuaugcuacga

SEQ ID NO: 857433 - RNA, 19 nt, Artificial Sequence
  Description of Artificial Sequence: Synthetic oligonucleotide
gcgcacacacacacagacc

SEQ ID NO: 857434 - RNA, 19 nt, Artificial Sequence
  Description of Artificial Sequence: Synthetic oligonucleotide
ccaccagcggugacagaug

SEQ ID NO: 857435 - RNA, 19 nt, Artificial Sequence
  Description of Artificial Sequence: Synthetic oligonucleotide
acgcuccauuaaagcuucg

SEQ ID NO: 857436 - RNA, 19 nt, Artificial Sequence
  Description of Artificial Sequence: Synthetic oligonucleotide
cgggacgcggugcacuagg

SEQ ID NO: 857437 - RNA, 19 nt, Artificial Sequence
  Description of Artificial Sequence: Synthetic oligonucleotide
aggucccgggucaagccuu

SEQ ID NO: 857438 - RNA, 19 nt, Artificial Sequence
  Description of Artificial Sequence: Synthetic oligonucleotide
cugcggcguggcgaagagc

SEQ ID NO: 857439 - RNA, 19 nt, Artificial Sequence
  Description of Artificial Sequence: Synthetic oligonucleotide
ccugcggcguggcgaagag

SEQ ID NO: 857440 - RNA, 19 nt, Artificial Sequence
  Description of Artificial Sequence: Synthetic oligonucleotide
gccucugccccggaacggc

SEQ ID NO: 857441 - RNA, 19 nt, Artificial Sequence
  Description of Artificial Sequence: Synthetic oligonucleotide
cccuagacuucugucagaa

SEQ ID NO: 857442 - RNA, 19 nt, Artificial Sequence
  Description of Artificial Sequence: Synthetic oligonucleotide
caacuacacagugcgcagu

SEQ ID NO: 857443 - RNA, 19 nt, Artificial Sequence
  Description of Artificial Sequence: Synthetic oligonucleotide
agccuccguuucaccggcg

SEQ ID NO: 857444 - RNA, 19 nt, Artificial Sequence
  Description of Artificial Sequence: Synthetic oligonucleotide
gcuaccccaccuggccagg

SEQ ID NO: 857445 - RNA, 19 nt, Artificial Sequence
  Description of Artificial Sequence: Synthetic oligonucleotide
ccuuugccuggguggcggc

SEQ ID NO: 857446 - RNA, 19 nt, Artificial Sequence
  Description of Artificial Sequence: Synthetic oligonucleotide
ccgguacacaacacacaca

SEQ ID NO: 857447 - RNA, 19 nt, Artificial Sequence
  Description of Artificial Sequence: Synthetic oligonucleotide
ccccggaacggcccacugc

SEQ ID NO: 857448 - RNA, 19 nt, Artificial Sequence
  Description of Artificial Sequence: Synthetic oligonucleotide
gggacgcggugcacuaggc

SEQ ID NO: 857449 - RNA, 19 nt, Artificial Sequence
  Description of Artificial Sequence: Synthetic oligonucleotide
gcuucgaucgggaaaccuu

SEQ ID NO: 857450 - RNA, 19 nt, Artificial Sequence
  Description of Artificial Sequence: Synthetic oligonucleotide
cccaaugcgcacacaugaa

SEQ ID NO: 857451 - RNA, 19 nt, Artificial Sequence
  Description of Artificial Sequence: Synthetic oligonucleotide
ggagccccgagaagucuuc

SEQ ID NO: 857452 - RNA, 19 nt, Artificial Sequence
  Description of Artificial Sequence: Synthetic oligonucleotide
gcggugacagauggucuuc

SEQ ID NO: 857453 - RNA, 19 nt, Artificial Sequence
  Description of Artificial Sequence: Synthetic oligonucleotide
ccccgguacacaacacaca

SEQ ID NO: 857454 - RNA, 19 nt, Artificial Sequence
  Description of Artificial Sequence: Synthetic oligonucleotide
cccggaacggcccacugcu

SEQ ID NO: 857455 - RNA, 19 nt, Artificial Sequence
  Description of Artificial Sequence: Synthetic oligonucleotide
ccucagguggcccauccgu

SEQ ID NO: 857456 - RNA, 19 nt, Artificial Sequence
  Description of Artificial Sequence: Synthetic oligonucleotide
ggacaccaaaagugcaguu

SEQ ID NO: 857457 - RNA, 19 nt, Artificial Sequence
  Description of Artificial Sequence: Synthetic oligonucleotide
guugggguauuagcccaau

SEQ ID NO: 857458 - RNA, 19 nt, Artificial Sequence
  Description of Artificial Sequence: Synthetic oligonucleotide
gcacuaggcgcgggccggg

SEQ ID NO: 857459 - RNA, 19 nt, Artificial Sequence
  Description of Artificial Sequence: Synthetic oligonucleotide
cguuugguggucagauuua

SEQ ID NO: 857460 - RNA, 19 nt, Artificial Sequence
  Description of Artificial Sequence: Synthetic oligonucleotide
ccucagccgcccaguucag

SEQ ID NO: 857461 - RNA, 19 nt, Artificial Sequence
  Description of Artificial Sequence: Synthetic oligonucleotide
gcuuacugauccccaccau

SEQ ID NO: 857462 - RNA, 19 nt, Artificial Sequence
  Description of Artificial Sequence: Synthetic oligonucleotide
cggugcacuaggcgcgggc

SEQ ID NO: 857463 - RNA, 19 nt, Artificial Sequence
  Description of Artificial Sequence: Synthetic oligonucleotide
ccauggugcggcugccuaa

SEQ ID NO: 857464 - RNA, 19 nt, Artificial Sequence
  Description of Artificial Sequence: Synthetic oligonucleotide
ccccuuuugcucugcucaa

SEQ ID NO: 857465 - RNA, 19 nt, Artificial Sequence
  Description of Artificial Sequence: Synthetic oligonucleotide
gcuaugcuacgaagguccu

SEQ ID NO: 857466 - RNA, 19 nt, Artificial Sequence
  Description of Artificial Sequence: Synthetic oligonucleotide
ggggugcacauuugcgcau

SEQ ID NO: 857467 - RNA, 19 nt, Artificial Sequence
  Description of Artificial Sequence: Synthetic oligonucleotide
gaggggccuugaucacuau

SEQ ID NO: 857468 - RNA, 19 nt, Artificial Sequence
  Description of Artificial Sequence: Synthetic oligonucleotide
gccucuuggggcggggaaa

SEQ ID NO: 857469 - RNA, 19 nt, Artificial Sequence
  Description of Artificial Sequence: Synthetic oligonucleotide
cgcuccauuaaagcuucga

SEQ ID NO: 857470 - RNA, 19 nt, Artificial Sequence
  Description of Artificial Sequence: Synthetic oligonucleotide
gcccauccgugacaauacu

SEQ ID NO: 857471 - RNA, 19 nt, Artificial Sequence
  Description of Artificial Sequence: Synthetic oligonucleotide
gccugcggcguggcgaaga

SEQ ID NO: 857472 - RNA, 19 nt, Artificial Sequence
  Description of Artificial Sequence: Synthetic oligonucleotide
ccggaacggcccacugcuc

SEQ ID NO: 857473 - RNA, 19 nt, Artificial Sequence
  Description of Artificial Sequence: Synthetic oligonucleotide
gcggugcacuaggcgcggg

SEQ ID NO: 857474 - RNA, 19 nt, Artificial Sequence
  Description of Artificial Sequence: Synthetic oligonucleotide
ggcugccuaaccacuggau

SEQ ID NO: 857475 - RNA, 19 nt, Artificial Sequence
  Description of Artificial Sequence: Synthetic oligonucleotide
gcgggacgcggugcacuag

SEQ ID NO: 857476 - RNA, 19 nt, Artificial Sequence
  Description of Artificial Sequence: Synthetic oligonucleotide
gcgcgcacacacacacaga

SEQ ID NO: 857477 - RNA, 19 nt, Artificial Sequence
  Description of Artificial Sequence: Synthetic oligonucleotide
cgcggugcacuaggcgcgg

SEQ ID NO: 857478 - RNA, 19 nt, Artificial Sequence
  Description of Artificial Sequence: Synthetic oligonucleotide
ccgugacaauacugguucu

SEQ ID NO: 857479 - RNA, 19 nt, Artificial Sequence
  Description of Artificial Sequence: Synthetic oligonucleotide
gcguggcgaagagcagcac

SEQ ID NO: 857480 - RNA, 19 nt, Artificial Sequence
  Description of Artificial Sequence: Synthetic oligonucleotide
ggggcgccugcggcguggc

SEQ ID NO: 857481 - RNA, 19 nt, Artificial Sequence
  Description of Artificial Sequence: Synthetic oligonucleotide
gcgcaugcgcgcgcacaca

SEQ ID NO: 857482 - RNA, 19 nt, Artificial Sequence
  Description of Artificial Sequence: Synthetic oligonucleotide
gcgcgcgcacacacacaca

SEQ ID NO: 857483 - RNA, 19 nt, Artificial Sequence
  Description of Artificial Sequence: Synthetic oligonucleotide
ccgcccaguucaggucaac

SEQ ID NO: 857484 - RNA, 19 nt, Artificial Sequence
  Description of Artificial Sequence: Synthetic oligonucleotide
cggggcgccugcggcgugg

SEQ ID NO: 857485 - RNA, 19 nt, Artificial Sequence
  Description of Artificial Sequence: Synthetic oligonucleotide
gccgcccaguucaggucaa

SEQ ID NO: 857486 - RNA, 19 nt, Artificial Sequence
  Description of Artificial Sequence: Synthetic oligonucleotide
cuccaacccuuagcuuauu

SEQ ID NO: 857487 - RNA, 19 nt, Artificial Sequence
  Description of Artificial Sequence: Synthetic oligonucleotide
caccggcgggcggccgaga

SEQ ID NO: 857488 - RNA, 19 nt, Artificial Sequence
  Description of Artificial Sequence: Synthetic oligonucleotide
uuuuaaauuggcuugggag

SEQ ID NO: 857489 - RNA, 19 nt, Artificial Sequence
  Description of Artificial Sequence: Synthetic oligonucleotide
agacuuaauauuaaaaggc

SEQ ID NO: 857490 - RNA, 19 nt, Artificial Sequence
  Description of Artificial Sequence: Synthetic oligonucleotide
auguuguccgauuagaugg

SEQ ID NO: 857491 - RNA, 19 nt, Artificial Sequence
  Description of Artificial Sequence: Synthetic oligonucleotide
cuucagaucagcuaugugg

SEQ ID NO: 857492 - RNA, 19 nt, Artificial Sequence
  Description of Artificial Sequence: Synthetic oligonucleotide
auuacuacaccccaaaucu

SEQ ID NO: 857493 - RNA, 19 nt, Artificial Sequence
  Description of Artificial Sequence: Synthetic oligonucleotide
gauuaaacauuccggagcg

SEQ ID NO: 857494 - RNA, 19 nt, Artificial Sequence
  Description of Artificial Sequence: Synthetic oligonucleotide
agaaggaccugauaaaugg

SEQ ID NO: 857495 - RNA, 19 nt, Artificial Sequence
  Description of Artificial Sequence: Synthetic oligonucleotide
uucaaaaugagugggaucc

SEQ ID NO: 857496 - RNA, 19 nt, Artificial Sequence
  Description of Artificial Sequence: Synthetic oligonucleotide
cagacuuaauauuaaaagg

SEQ ID NO: 857497 - RNA, 19 nt, Artificial Sequence
  Description of Artificial Sequence: Synthetic oligonucleotide
uuagcuaaugguuugaaau

SEQ ID NO: 857498 - RNA, 19 nt, Artificial Sequence
  Description of Artificial Sequence: Synthetic oligonucleotide
uuaucuuccaaguaacuca

SEQ ID NO: 857499 - RNA, 19 nt, Artificial Sequence
  Description of Artificial Sequence: Synthetic oligonucleotide
aguacaaggucauuacuac

SEQ ID NO: 857500 - RNA, 19 nt, Artificial Sequence
  Description of Artificial Sequence: Synthetic oligonucleotide
ugauguuaguacaagguca

SEQ ID NO: 857501 - RNA, 19 nt, Artificial Sequence
  Description of Artificial Sequence: Synthetic oligonucleotide
uaaaauuuacacuggauua

SEQ ID NO: 857502 - RNA, 19 nt, Artificial Sequence
  Description of Artificial Sequence: Synthetic oligonucleotide
uguguaguacuccuuauca

SEQ ID NO: 857503 - RNA, 19 nt, Artificial Sequence
  Description of Artificial Sequence: Synthetic oligonucleotide
ucaaguauuuguugagugg

SEQ ID NO: 857504 - RNA, 19 nt, Artificial Sequence
  Description of Artificial Sequence: Synthetic oligonucleotide
uuaaaaggcauaugcaugu

SEQ ID NO: 857505 - RNA, 19 nt, Artificial Sequence
  Description of Artificial Sequence: Synthetic oligonucleotide
gauuccuuuguacuugacg

SEQ ID NO: 857506 - RNA, 19 nt, Artificial Sequence
  Description of Artificial Sequence: Synthetic oligonucleotide
uaaaauccgagucacagua

SEQ ID NO: 857507 - RNA, 19 nt, Artificial Sequence
  Description of Artificial Sequence: Synthetic oligonucleotide
aacauacugucgugaaccc

SEQ ID NO: 857508 - RNA, 19 nt, Artificial Sequence
  Description of Artificial Sequence: Synthetic oligonucleotide
aguaacucagggcacuagc

SEQ ID NO: 857509 - RNA, 19 nt, Artificial Sequence
  Description of Artificial Sequence: Synthetic oligonucleotide
uacaaggucauuacuacac

SEQ ID NO: 857510 - RNA, 19 nt, Artificial Sequence
  Description of Artificial Sequence: Synthetic oligonucleotide
augagcuugauaccauucc

SEQ ID NO: 857511 - RNA, 19 nt, Artificial Sequence
  Description of Artificial Sequence: Synthetic oligonucleotide
ugaaacaaugucuggauuc

SEQ ID NO: 857512 - RNA, 19 nt, Artificial Sequence
  Description of Artificial Sequence: Synthetic oligonucleotide
gaacauacugucgugaacc

SEQ ID NO: 857513 - RNA, 19 nt, Artificial Sequence
  Description of Artificial Sequence: Synthetic oligonucleotide
gaucauaguucaugcagcg

SEQ ID NO: 857514 - RNA, 19 nt, Artificial Sequence
  Description of Artificial Sequence: Synthetic oligonucleotide
uucuauguuagcuaauggu

SEQ ID NO: 857515 - RNA, 19 nt, Artificial Sequence
  Description of Artificial Sequence: Synthetic oligonucleotide
ucuauguuagcuaaugguu

SEQ ID NO: 857516 - RNA, 19 nt, Artificial Sequence
  Description of Artificial Sequence: Synthetic oligonucleotide
cugucgugaacccagauag

SEQ ID NO: 857517 - RNA, 19 nt, Artificial Sequence
  Description of Artificial Sequence: Synthetic oligonucleotide
caugaagagauccaauggc

SEQ ID NO: 857518 - RNA, 19 nt, Artificial Sequence
  Description of Artificial Sequence: Synthetic oligonucleotide
ucuuuaguauguuuauuug

SEQ ID NO: 857519 - RNA, 19 nt, Artificial Sequence
  Description of Artificial Sequence: Synthetic oligonucleotide
uguccgauuagaugguugg

SEQ ID NO: 857520 - RNA, 19 nt, Artificial Sequence
  Description of Artificial Sequence: Synthetic oligonucleotide
guaaguacaucacuuuucc

SEQ ID NO: 857521 - RNA, 19 nt, Artificial Sequence
  Description of Artificial Sequence: Synthetic oligonucleotide
uuauuuuccacaucucgga

SEQ ID NO: 857522 - RNA, 19 nt, Artificial Sequence
  Description of Artificial Sequence: Synthetic oligonucleotide
agcuaaugguuugaaaugc

SEQ ID NO: 857523 - RNA, 19 nt, Artificial Sequence
  Description of Artificial Sequence: Synthetic oligonucleotide
ucacguauccucuucagga

SEQ ID NO: 857524 - RNA, 19 nt, Artificial Sequence
  Description of Artificial Sequence: Synthetic oligonucleotide
aaugagugggauccacuuc

SEQ ID NO: 857525 - RNA, 19 nt, Artificial Sequence
  Description of Artificial Sequence: Synthetic oligonucleotide
uguaguacuccuuaucagu

SEQ ID NO: 857526 - RNA, 19 nt, Artificial Sequence
  Description of Artificial Sequence: Synthetic oligonucleotide
gaaugggccaaucucacug

SEQ ID NO: 857527 - RNA, 19 nt, Artificial Sequence
  Description of Artificial Sequence: Synthetic oligonucleotide
aaacauuccggagcguacc

SEQ ID NO: 857528 - RNA, 19 nt, Artificial Sequence
  Description of Artificial Sequence: Synthetic oligonucleotide
uuccguaagaucucuaucu

SEQ ID NO: 857529 - RNA, 19 nt, Artificial Sequence
  Description of Artificial Sequence: Synthetic oligonucleotide
ugugaagucuuuaguaugu

SEQ ID NO: 857530 - RNA, 19 nt, Artificial Sequence
  Description of Artificial Sequence: Synthetic oligonucleotide
uucaacacacucaggagca

SEQ ID NO: 857531 - RNA, 19 nt, Artificial Sequence
  Description of Artificial Sequence: Synthetic oligonucleotide
acccagauaguccaucccc

SEQ ID NO: 857532 - RNA, 19 nt, Artificial Sequence
  Description of Artificial Sequence: Synthetic oligonucleotide
uguaaguacaucacuuuuc

SEQ ID NO: 857533 - RNA, 19 nt, Artificial Sequence
  Description of Artificial Sequence: Synthetic oligonucleotide
agauaguccauccccuuac

SEQ ID NO: 857534 - RNA, 19 nt, Artificial Sequence
  Description of Artificial Sequence: Synthetic oligonucleotide
uauguuagcuaaugguuug

SEQ ID NO: 857535 - RNA, 19 nt, Artificial Sequence
  Description of Artificial Sequence: Synthetic oligonucleotide
cauacugucgugaacccag

SEQ ID NO: 857536 - RNA, 19 nt, Artificial Sequence
  Description of Artificial Sequence: Synthetic oligonucleotide
uuuaggcagaauacaaacu

SEQ ID NO: 857537 - RNA, 19 nt, Artificial Sequence
  Description of Artificial Sequence: Synthetic oligonucleotide
aacccagauaguccauccc

SEQ ID NO: 857538 - RNA, 19 nt, Artificial Sequence
  Description of Artificial Sequence: Synthetic oligonucleotide
uggauuaaacauuccggag

SEQ ID NO: 857539 - RNA, 19 nt, Artificial Sequence
  Description of Artificial Sequence: Synthetic oligonucleotide
ucgaccuucccaaaguggc

SEQ ID NO: 857540 - RNA, 19 nt, Artificial Sequence
  Description of Artificial Sequence: Synthetic oligonucleotide
ugaugaaugggccaaucuc

SEQ ID NO: 857541 - RNA, 19 nt, Artificial Sequence
  Description of Artificial Sequence: Synthetic oligonucleotide
uagcuaaugguuugaaaug

SEQ ID NO: 857542 - RNA, 19 nt, Artificial Sequence
  Description of Artificial Sequence: Synthetic oligonucleotide
gaugguuggaauucccagc

SEQ ID NO: 857543 - RNA, 19 nt, Artificial Sequence
  Description of Artificial Sequence: Synthetic oligonucleotide
agaucagcuaugugguuac

SEQ ID NO: 857544 - RNA, 19 nt, Artificial Sequence
  Description of Artificial Sequence: Synthetic oligonucleotide
auaguuuagcugcuguuug

SEQ ID NO: 857545 - RNA, 19 nt, Artificial Sequence
  Description of Artificial Sequence: Synthetic oligonucleotide
ucaucuggccaugaguugg

SEQ ID NO: 857546 - RNA, 19 nt, Artificial Sequence
  Description of Artificial Sequence: Synthetic oligonucleotide
acaguaggugagcagcucg

SEQ ID NO: 857547 - RNA, 19 nt, Artificial Sequence
  Description of Artificial Sequence: Synthetic oligonucleotide
ggauuaaacauuccggagc

SEQ ID NO: 857548 - RNA, 19 nt, Artificial Sequence
  Description of Artificial Sequence: Synthetic oligonucleotide
aagucuccaaucuucacuu

SEQ ID NO: 857549 - RNA, 19 nt, Artificial Sequence
  Description of Artificial Sequence: Synthetic oligonucleotide
aaggcauaugcaugugaag

SEQ ID NO: 857550 - RNA, 19 nt, Artificial Sequence
  Description of Artificial Sequence: Synthetic oligonucleotide
ggcgauguaaaauuuacac

SEQ ID NO: 857551 - RNA, 19 nt, Artificial Sequence
  Description of Artificial Sequence: Synthetic oligonucleotide
aagugcauauagagcaggc

SEQ ID NO: 857552 - RNA, 19 nt, Artificial Sequence
  Description of Artificial Sequence: Synthetic oligonucleotide
gcugauaaaccucaucagg

SEQ ID NO: 857553 - RNA, 19 nt, Artificial Sequence
  Description of Artificial Sequence: Synthetic oligonucleotide
agaugguuggaauucccag

SEQ ID NO: 857554 - RNA, 19 nt, Artificial Sequence
  Description of Artificial Sequence: Synthetic oligonucleotide
cuguuugagguuaauuuug

SEQ ID NO: 857555 - RNA, 19 nt, Artificial Sequence
  Description of Artificial Sequence: Synthetic oligonucleotide
cuuaauauuaaaaggcaua

SEQ ID NO: 857556 - RNA, 19 nt, Artificial Sequence
  Description of Artificial Sequence: Synthetic oligonucleotide
cauuacuacaccccaaauc

SEQ ID NO: 857557 - RNA, 19 nt, Artificial Sequence
  Description of Artificial Sequence: Synthetic oligonucleotide
ucuauugccaggugcagaa

SEQ ID NO: 857558 - RNA, 19 nt, Artificial Sequence
  Description of Artificial Sequence: Synthetic oligonucleotide
ucugaaacaaugucuggau

SEQ ID NO: 857559 - RNA, 19 nt, Artificial Sequence
  Description of Artificial Sequence: Synthetic oligonucleotide
uuagaugguuggaauuccc

SEQ ID NO: 857560 - RNA, 19 nt, Artificial Sequence
  Description of Artificial Sequence: Synthetic oligonucleotide
aauuuaaauggcaacugua

SEQ ID NO: 857561 - RNA, 19 nt, Artificial Sequence
  Description of Artificial Sequence: Synthetic oligonucleotide
augugaagucuuuaguaug

SEQ ID NO: 857562 - RNA, 19 nt, Artificial Sequence
  Description of Artificial Sequence: Synthetic oligonucleotide
cauaaaaucucuccuucuc

SEQ ID NO: 857563 - RNA, 19 nt, Artificial Sequence
  Description of Artificial Sequence: Synthetic oligonucleotide
cauccccuuacaaaucugg

SEQ ID NO: 857564 - RNA, 19 nt, Artificial Sequence
  Description of Artificial Sequence: Synthetic oligonucleotide
ugcaugugaagucuuuagu

SEQ ID NO: 857565 - RNA, 19 nt, Artificial Sequence
  Description of Artificial Sequence: Synthetic oligonucleotide
ggaucacuaagcuugauga

SEQ ID NO: 857566 - RNA, 19 nt, Artificial Sequence
  Description of Artificial Sequence: Synthetic oligonucleotide
gggaucauaguucaugcag

SEQ ID NO: 857567 - RNA, 19 nt, Artificial Sequence
  Description of Artificial Sequence: Synthetic oligonucleotide
uaagucccggugaacauac

SEQ ID NO: 857568 - RNA, 19 nt, Artificial Sequence
  Description of Artificial Sequence: Synthetic oligonucleotide
uaacucagggcacuagcca

SEQ ID NO: 857569 - RNA, 19 nt, Artificial Sequence
  Description of Artificial Sequence: Synthetic oligonucleotide
uguuaguacaaggucauua

SEQ ID NO: 857570 - RNA, 19 nt, Artificial Sequence
  Description of Artificial Sequence: Synthetic oligonucleotide
agugauguuaguacaaggu

SEQ ID NO: 857571 - RNA, 19 nt, Artificial Sequence
  Description of Artificial Sequence: Synthetic oligonucleotide
uuacacuggauuaaacauu

SEQ ID NO: 857572 - RNA, 19 nt, Artificial Sequence
  Description of Artificial Sequence: Synthetic oligonucleotide
ugaguugggccuaucauuu

SEQ ID NO: 857573 - RNA, 19 nt, Artificial Sequence
  Description of Artificial Sequence: Synthetic oligonucleotide
agcguaccaaaacaccggg

SEQ ID NO: 857574 - RNA, 19 nt, Artificial Sequence
  Description of Artificial Sequence: Synthetic oligonucleotide
aggaucacuaagcuugaug

SEQ ID NO: 857575 - RNA, 19 nt, Artificial Sequence
  Description of Artificial Sequence: Synthetic oligonucleotide
uaaacauuccggagcguac

SEQ ID NO: 857576 - RNA, 19 nt, Artificial Sequence
  Description of Artificial Sequence: Synthetic oligonucleotide
ucgugaacccagauagucc

SEQ ID NO: 857577 - RNA, 19 nt, Artificial Sequence
  Description of Artificial Sequence: Synthetic oligonucleotide
augcaugugaagucuuuag

SEQ ID NO: 857578 - RNA, 19 nt, Artificial Sequence
  Description of Artificial Sequence: Synthetic oligonucleotide
uuguaaguacaucacuuuu

SEQ ID NO: 857579 - RNA, 19 nt, Artificial Sequence
  Description of Artificial Sequence: Synthetic oligonucleotide
uaucugcagaguucgaccu

SEQ ID NO: 857580 - RNA, 19 nt, Artificial Sequence
  Description of Artificial Sequence: Synthetic oligonucleotide
cuggauuaaacauuccgga

SEQ ID NO: 857581 - RNA, 19 nt, Artificial Sequence
  Description of Artificial Sequence: Synthetic oligonucleotide
ugaacauacugucgugaac

SEQ ID NO: 857582 - RNA, 19 nt, Artificial Sequence
  Description of Artificial Sequence: Synthetic oligonucleotide
ugacugggaucauaguuca

SEQ ID NO: 857583 - RNA, 19 nt, Artificial Sequence
  Description of Artificial Sequence: Synthetic oligonucleotide
uuccggugcaugaagagau

SEQ ID NO: 857584 - RNA, 19 nt, Artificial Sequence
  Description of Artificial Sequence: Synthetic oligonucleotide
uagaugguuggaauuccca

SEQ ID NO: 857585 - RNA, 19 nt, Artificial Sequence
  Description of Artificial Sequence: Synthetic oligonucleotide
aagaagggucucugacugg

SEQ ID NO: 857586 - RNA, 19 nt, Artificial Sequence
  Description of Artificial Sequence: Synthetic oligonucleotide
acuaagcuugaugaauggg

SEQ ID NO: 857587 - RNA, 19 nt, Artificial Sequence
  Description of Artificial Sequence: Synthetic oligonucleotide
agucauaaggucagccagc

SEQ ID NO: 857588 - RNA, 19 nt, Artificial Sequence
  Description of Artificial Sequence: Synthetic oligonucleotide
gaacccagauaguccaucc

SEQ ID NO: 857589 - RNA, 19 nt, Artificial Sequence
  Description of Artificial Sequence: Synthetic oligonucleotide
gaaggaccugauaaauggg

SEQ ID NO: 857590 - RNA, 19 nt, Artificial Sequence
  Description of Artificial Sequence: Synthetic oligonucleotide
gugauguuaguacaagguc

SEQ ID NO: 857591 - RNA, 19 nt, Artificial Sequence
  Description of Artificial Sequence: Synthetic oligonucleotide
aaugggccaaucucacugu

SEQ ID NO: 857592 - RNA, 19 nt, Artificial Sequence
  Description of Artificial Sequence: Synthetic oligonucleotide
acacacucaggagcaaucc

SEQ ID NO: 857593 - RNA, 19 nt, Artificial Sequence
  Description of Artificial Sequence: Synthetic oligonucleotide
acuuuuccggugcaugaag

SEQ ID NO: 857594 - RNA, 19 nt, Artificial Sequence
  Description of Artificial Sequence: Synthetic oligonucleotide
uguuacucaugcuucuuau

SEQ ID NO: 857595 - RNA, 19 nt, Artificial Sequence
  Description of Artificial Sequence: Synthetic oligonucleotide
uuaaacauuccggagcgua

SEQ ID NO: 857596 - RNA, 19 nt, Artificial Sequence
  Description of Artificial Sequence: Synthetic oligonucleotide
gaucucgccauuguagcag

SEQ ID NO: 857597 - RNA, 19 nt, Artificial Sequence
  Description of Artificial Sequence: Synthetic oligonucleotide
cuacaccccaaaucuaggc

SEQ ID NO: 857598 - RNA, 19 nt, Artificial Sequence
  Description of Artificial Sequence: Synthetic oligonucleotide
gaaauguuguccgauuaga

SEQ ID NO: 857599 - RNA, 19 nt, Artificial Sequence
  Description of Artificial Sequence: Synthetic oligonucleotide
cucuaugcacucuugccug

SEQ ID NO: 857600 - RNA, 19 nt, Artificial Sequence
  Description of Artificial Sequence: Synthetic oligonucleotide
aguucgaccuucccaaagu

SEQ ID NO: 857601 - RNA, 19 nt, Artificial Sequence
  Description of Artificial Sequence: Synthetic oligonucleotide
augucccucaugauggccc

SEQ ID NO: 857602 - RNA, 19 nt, Artificial Sequence
  Description of Artificial Sequence: Synthetic oligonucleotide
uuguccgauuagaugguug

SEQ ID NO: 857603 - RNA, 19 nt, Artificial Sequence
  Description of Artificial Sequence: Synthetic oligonucleotide
guguaguacuccuuaucag

SEQ ID NO: 857604 - RNA, 19 nt, Artificial Sequence
  Description of Artificial Sequence: Synthetic oligonucleotide
auaguucaugcagcgaguc

SEQ ID NO: 857605 - RNA, 19 nt, Artificial Sequence
  Description of Artificial Sequence: Synthetic oligonucleotide
gucacguauccucuucagg

SEQ ID NO: 857606 - RNA, 19 nt, Artificial Sequence
  Description of Artificial Sequence: Synthetic oligonucleotide
ugagcugauaaaccucauc

SEQ ID NO: 857607 - RNA, 19 nt, Artificial Sequence
  Description of Artificial Sequence: Synthetic oligonucleotide
uccgaggcgauguaaaauu

SEQ ID NO: 857608 - RNA, 19 nt, Artificial Sequence
  Description of Artificial Sequence: Synthetic oligonucleotide
caggggauccgcucuaugc

SEQ ID NO: 857609 - RNA, 19 nt, Artificial Sequence
  Description of Artificial Sequence: Synthetic oligonucleotide
ggccaugggacuaaaaucc

SEQ ID NO: 857610 - RNA, 19 nt, Artificial Sequence
  Description of Artificial Sequence: Synthetic oligonucleotide
aaaauccgagucacaguag

SEQ ID NO: 857611 - RNA, 19 nt, Artificial Sequence
  Description of Artificial Sequence: Synthetic oligonucleotide
gagcguaccaaaacaccgg

SEQ ID NO: 857612 - RNA, 19 nt, Artificial Sequence
  Description of Artificial Sequence: Synthetic oligonucleotide
aaauguuguccgauuagau

SEQ ID NO: 857613 - RNA, 19 nt, Artificial Sequence
  Description of Artificial Sequence: Synthetic oligonucleotide
ugauggcccggaagaaggg

SEQ ID NO: 857614 - RNA, 19 nt, Artificial Sequence
  Description of Artificial Sequence: Synthetic oligonucleotide
ggagcguaccaaaacaccg

SEQ ID NO: 857615 - RNA, 19 nt, Artificial Sequence
  Description of Artificial Sequence: Synthetic oligonucleotide
uccguaagaucucuaucuc

SEQ ID NO: 857616 - RNA, 19 nt, Artificial Sequence
  Description of Artificial Sequence: Synthetic oligonucleotide
aggucauuacuacacccca

SEQ ID NO: 857617 - RNA, 19 nt, Artificial Sequence
  Description of Artificial Sequence: Synthetic oligonucleotide
gagcuugauaccauucccc

SEQ ID NO: 857618 - RNA, 19 nt, Artificial Sequence
  Description of Artificial Sequence: Synthetic oligonucleotide
cagcuaugugguuaccucc

SEQ ID NO: 857619 - RNA, 19 nt, Artificial Sequence
  Description of Artificial Sequence: Synthetic oligonucleotide
gaguucgaccuucccaaag

SEQ ID NO: 857620 - RNA, 19 nt, Artificial Sequence
  Description of Artificial Sequence: Synthetic oligonucleotide
uccacuugucagcagccac

SEQ ID NO: 857621 - RNA, 19 nt, Artificial Sequence
  Description of Artificial Sequence: Synthetic oligonucleotide
agccguguuacugucaucu

SEQ ID NO: 857622 - RNA, 19 nt, Artificial Sequence
  Description of Artificial Sequence: Synthetic oligonucleotide
cuuuucaaaaugaguggga

SEQ ID NO: 857623 - RNA, 19 nt, Artificial Sequence
  Description of Artificial Sequence: Synthetic oligonucleotide
cauaucugcagaguucgac

SEQ ID NO: 857624 - RNA, 19 nt, Artificial Sequence
  Description of Artificial Sequence: Synthetic oligonucleotide
uguuguccgauuagauggu

SEQ ID NO: 857625 - RNA, 19 nt, Artificial Sequence
  Description of Artificial Sequence: Synthetic oligonucleotide
cuuuaggcuucccgaaggc

SEQ ID NO: 857626 - RNA, 19 nt, Artificial Sequence
  Description of Artificial Sequence: Synthetic oligonucleotide
guaacucagggcacuagcc

SEQ ID NO: 857627 - RNA, 19 nt, Artificial Sequence
  Description of Artificial Sequence: Synthetic oligonucleotide
ugcacacauuuccauggac

SEQ ID NO: 857628 - RNA, 19 nt, Artificial Sequence
  Description of Artificial Sequence: Synthetic oligonucleotide
uccgauuagaugguuggaa

SEQ ID NO: 857629 - RNA, 19 nt, Artificial Sequence
  Description of Artificial Sequence: Synthetic oligonucleotide
guaggugagcagcucgugc

SEQ ID NO: 857630 - RNA, 19 nt, Artificial Sequence
  Description of Artificial Sequence: Synthetic oligonucleotide
aaguaacucagggcacuag

SEQ ID NO: 857631 - RNA, 19 nt, Artificial Sequence
  Description of Artificial Sequence: Synthetic oligonucleotide
uuuccggugcaugaagaga

SEQ ID NO: 857632 - RNA, 19 nt, Artificial Sequence
  Description of Artificial Sequence: Synthetic oligonucleotide
guuacugucaucuggccau

SEQ ID NO: 857633 - RNA, 19 nt, Artificial Sequence
  Description of Artificial Sequence: Synthetic oligonucleotide
uccccuuacaaaucuggau

SEQ ID NO: 857634 - RNA, 19 nt, Artificial Sequence
  Description of Artificial Sequence: Synthetic oligonucleotide
uuuaggcuucccgaaggca

SEQ ID NO: 857635 - RNA, 19 nt, Artificial Sequence
  Description of Artificial Sequence: Synthetic oligonucleotide
acgauguucucaugguaga

SEQ ID NO: 857636 - RNA, 19 nt, Artificial Sequence
  Description of Artificial Sequence: Synthetic oligonucleotide
ugggaucauaguucaugca

SEQ ID NO: 857637 - RNA, 19 nt, Artificial Sequence
  Description of Artificial Sequence: Synthetic oligonucleotide
cucacgggcuaagaggagg

SEQ ID NO: 857638 - RNA, 19 nt, Artificial Sequence
  Description of Artificial Sequence: Synthetic oligonucleotide
uacucaugcuucuuauuuu

SEQ ID NO: 857639 - RNA, 19 nt, Artificial Sequence
  Description of Artificial Sequence: Synthetic oligonucleotide
ucacgggcuaagaggaggu

SEQ ID NO: 857640 - RNA, 19 nt, Artificial Sequence
  Description of Artificial Sequence: Synthetic oligonucleotide
guucgaccuucccaaagug

SEQ ID NO: 857641 - RNA, 19 nt, Artificial Sequence
  Description of Artificial Sequence: Synthetic oligonucleotide
gguuaaaccaaagucucca

SEQ ID NO: 857642 - RNA, 19 nt, Artificial Sequence
  Description of Artificial Sequence: Synthetic oligonucleotide
guauccucuucaggaaacg

SEQ ID NO: 857643 - RNA, 19 nt, Artificial Sequence
  Description of Artificial Sequence: Synthetic oligonucleotide
acuacaccccaaaucuagg

SEQ ID NO: 857644 - RNA, 19 nt, Artificial Sequence
  Description of Artificial Sequence: Synthetic oligonucleotide
gucauuacuacaccccaaa

SEQ ID NO: 857645 - RNA, 19 nt, Artificial Sequence
  Description of Artificial Sequence: Synthetic oligonucleotide
caaaaugagugggauccac

SEQ ID NO: 857646 - RNA, 19 nt, Artificial Sequence
  Description of Artificial Sequence: Synthetic oligonucleotide
uccaauggcccucccucca

SEQ ID NO: 857647 - RNA, 19 nt, Artificial Sequence
  Description of Artificial Sequence: Synthetic oligonucleotide
aguaacaugcagagugucu

SEQ ID NO: 857648 - RNA, 19 nt, Artificial Sequence
  Description of Artificial Sequence: Synthetic oligonucleotide
ggaucauaguucaugcagc

SEQ ID NO: 857649 - RNA, 19 nt, Artificial Sequence
  Description of Artificial Sequence: Synthetic oligonucleotide
uuacuacaccccaaaucua

SEQ ID NO: 857650 - RNA, 19 nt, Artificial Sequence
  Description of Artificial Sequence: Synthetic oligonucleotide
caccaugauuauuuuccac

SEQ ID NO: 857651 - RNA, 19 nt, Artificial Sequence
  Description of Artificial Sequence: Synthetic oligonucleotide
uauuuguugaguggcuuuu

SEQ ID NO: 857652 - RNA, 19 nt, Artificial Sequence
  Description of Artificial Sequence: Synthetic oligonucleotide
caucuggccaugaguuggg

SEQ ID NO: 857653 - RNA, 19 nt, Artificial Sequence
  Description of Artificial Sequence: Synthetic oligonucleotide
cucaugagcugauaaaccu

SEQ ID NO: 857654 - RNA, 19 nt, Artificial Sequence
  Description of Artificial Sequence: Synthetic oligonucleotide
guuccguaagaucucuauc

SEQ ID NO: 857655 - RNA, 19 nt, Artificial Sequence
  Description of Artificial Sequence: Synthetic oligonucleotide
gaucacuaagcuugaugaa

SEQ ID NO: 857656 - RNA, 19 nt, Artificial Sequence
  Description of Artificial Sequence: Synthetic oligonucleotide
acugucgugaacccagaua

SEQ ID NO: 857657 - RNA, 19 nt, Artificial Sequence
  Description of Artificial Sequence: Synthetic oligonucleotide
cauauagagcaggccacag

SEQ ID NO: 857658 - RNA, 19 nt, Artificial Sequence
  Description of Artificial Sequence: Synthetic oligonucleotide
aauguuacucaugcuucuu

SEQ ID NO: 857659 - RNA, 19 nt, Artificial Sequence
  Description of Artificial Sequence: Synthetic oligonucleotide
ccccuuacaaaucuggaug

SEQ ID NO: 857660 - RNA, 19 nt, Artificial Sequence
  Description of Artificial Sequence: Synthetic oligonucleotide
ugagugggauccacuucug

SEQ ID NO: 857661 - RNA, 19 nt, Artificial Sequence
  Description of Artificial Sequence: Synthetic oligonucleotide
ggcgcuuuccuucuuucag

SEQ ID NO: 857662 - RNA, 19 nt, Artificial Sequence
  Description of Artificial Sequence: Synthetic oligonucleotide
aaugcccucacgggcuaag

SEQ ID NO: 857663 - RNA, 19 nt, Artificial Sequence
  Description of Artificial Sequence: Synthetic oligonucleotide
guuagcuaaugguuugaaa

SEQ ID NO: 857664 - RNA, 19 nt, Artificial Sequence
  Description of Artificial Sequence: Synthetic oligonucleotide
uaugcaugugaagucuuua

SEQ ID NO: 857665 - RNA, 19 nt, Artificial Sequence
  Description of Artificial Sequence: Synthetic oligonucleotide
uguuagcuaaugguuugaa

SEQ ID NO: 857666 - RNA, 19 nt, Artificial Sequence
  Description of Artificial Sequence: Synthetic oligonucleotide
gucgugaacccagauaguc

SEQ ID NO: 857667 - RNA, 19 nt, Artificial Sequence
  Description of Artificial Sequence: Synthetic oligonucleotide
cuucaauaagguucugaaa

SEQ ID NO: 857668 - RNA, 19 nt, Artificial Sequence
  Description of Artificial Sequence: Synthetic oligonucleotide
cuuuuccggugcaugaaga

SEQ ID NO: 857669 - RNA, 19 nt, Artificial Sequence
  Description of Artificial Sequence: Synthetic oligonucleotide
uaccagugacucaaguauu

SEQ ID NO: 857670 - RNA, 19 nt, Artificial Sequence
  Description of Artificial Sequence: Synthetic oligonucleotide
guaacaugcagagugucua

SEQ ID NO: 857671 - RNA, 19 nt, Artificial Sequence
  Description of Artificial Sequence: Synthetic oligonucleotide
auaguccauccccuuacaa

SEQ ID NO: 857672 - RNA, 19 nt, Artificial Sequence
  Description of Artificial Sequence: Synthetic oligonucleotide
agagguuccguaagaucuc

SEQ ID NO: 857673 - RNA, 19 nt, Artificial Sequence
  Description of Artificial Sequence: Synthetic oligonucleotide
auguuacucaugcuucuua

SEQ ID NO: 857674 - RNA, 19 nt, Artificial Sequence
  Description of Artificial Sequence: Synthetic oligonucleotide
ggagcaauccaggggaucc

SEQ ID NO: 857675 - RNA, 19 nt, Artificial Sequence
  Description of Artificial Sequence: Synthetic oligonucleotide
aagccguguuacugucauc

SEQ ID NO: 857676 - RNA, 19 nt, Artificial Sequence
  Description of Artificial Sequence: Synthetic oligonucleotide
aucagcuaugugguuaccu

SEQ ID NO: 857677 - RNA, 19 nt, Artificial Sequence
  Description of Artificial Sequence: Synthetic oligonucleotide
guguuacugucaucuggcc

SEQ ID NO: 857678 - RNA, 19 nt, Artificial Sequence
  Description of Artificial Sequence: Synthetic oligonucleotide
ccuuuaggcuucccgaagg

SEQ ID NO: 857679 - RNA, 19 nt, Artificial Sequence
  Description of Artificial Sequence: Synthetic oligonucleotide
uccgcucuaugcacucuug

SEQ ID NO: 857680 - RNA, 19 nt, Artificial Sequence
  Description of Artificial Sequence: Synthetic oligonucleotide
ugucgugaacccagauagu

SEQ ID NO: 857681 - RNA, 19 nt, Artificial Sequence
  Description of Artificial Sequence: Synthetic oligonucleotide
guuaaaccaaagucuccaa

SEQ ID NO: 857682 - RNA, 19 nt, Artificial Sequence
  Description of Artificial Sequence: Synthetic oligonucleotide
caauuuaaauggcaacugu

SEQ ID NO: 857683 - RNA, 19 nt, Artificial Sequence
  Description of Artificial Sequence: Synthetic oligonucleotide
aggaaacgcuuuucaaaau

SEQ ID NO: 857684 - RNA, 19 nt, Artificial Sequence
  Description of Artificial Sequence: Synthetic oligonucleotide
agaaccaguuugucccaca

SEQ ID NO: 857685 - RNA, 19 nt, Artificial Sequence
  Description of Artificial Sequence: Synthetic oligonucleotide
gauguuaguacaaggucau

SEQ ID NO: 857686 - RNA, 19 nt, Artificial Sequence
  Description of Artificial Sequence: Synthetic oligonucleotide
acguauccucuucaggaaa

SEQ ID NO: 857687 - RNA, 19 nt, Artificial Sequence
  Description of Artificial Sequence: Synthetic oligonucleotide
gcaugugaagucuuuagua

SEQ ID NO: 857688 - RNA, 19 nt, Artificial Sequence
  Description of Artificial Sequence: Synthetic oligonucleotide
uaaauuggcuugggagaga

SEQ ID NO: 857689 - RNA, 19 nt, Artificial Sequence
  Description of Artificial Sequence: Synthetic oligonucleotide
cuauguuagcuaaugguuu

SEQ ID NO: 857690 - RNA, 19 nt, Artificial Sequence
  Description of Artificial Sequence: Synthetic oligonucleotide
gaccacacguccgaggcga

SEQ ID NO: 857691 - RNA, 19 nt, Artificial Sequence
  Description of Artificial Sequence: Synthetic oligonucleotide
cugaaauguuguccgauua

SEQ ID NO: 857692 - RNA, 19 nt, Artificial Sequence
  Description of Artificial Sequence: Synthetic oligonucleotide
ggggaucucgccauuguag

SEQ ID NO: 857693 - RNA, 19 nt, Artificial Sequence
  Description of Artificial Sequence: Synthetic oligonucleotide
ccguguuacugucaucugg

SEQ ID NO: 857694 - RNA, 19 nt, Artificial Sequence
  Description of Artificial Sequence: Synthetic oligonucleotide
ccguaagaucucuaucucc

SEQ ID NO: 857695 - RNA, 19 nt, Artificial Sequence
  Description of Artificial Sequence: Synthetic oligonucleotide
agcuaugugguuaccucca

SEQ ID NO: 857696 - RNA, 19 nt, Artificial Sequence
  Description of Artificial Sequence: Synthetic oligonucleotide
cacaagccguguuacuguc

SEQ ID NO: 857697 - RNA, 19 nt, Artificial Sequence
  Description of Artificial Sequence: Synthetic oligonucleotide
ucgugcaaugucacuccaa

SEQ ID NO: 857698 - RNA, 19 nt, Artificial Sequence
  Description of Artificial Sequence: Synthetic oligonucleotide
aggcagaauacaaacuuuu

SEQ ID NO: 857699 - RNA, 19 nt, Artificial Sequence
  Description of Artificial Sequence: Synthetic oligonucleotide
agcgagucauaaggucagc

SEQ ID NO: 857700 - RNA, 19 nt, Artificial Sequence
  Description of Artificial Sequence: Synthetic oligonucleotide
uggguaccagugacucaag

SEQ ID NO: 857701 - RNA, 19 nt, Artificial Sequence
  Description of Artificial Sequence: Synthetic oligonucleotide
caguggguaccagugacuc

SEQ ID NO: 857702 - RNA, 19 nt, Artificial Sequence
  Description of Artificial Sequence: Synthetic oligonucleotide
gcagauuccuuuguacuug

SEQ ID NO: 857703 - RNA, 19 nt, Artificial Sequence
  Description of Artificial Sequence: Synthetic oligonucleotide
auguuagcuaaugguuuga

SEQ ID NO: 857704 - RNA, 19 nt, Artificial Sequence
  Description of Artificial Sequence: Synthetic oligonucleotide
uacugucgugaacccagau

SEQ ID NO: 857705 - RNA, 19 nt, Artificial Sequence
  Description of Artificial Sequence: Synthetic oligonucleotide
cagcggcuuucauaaaauc

SEQ ID NO: 857706 - RNA, 19 nt, Artificial Sequence
  Description of Artificial Sequence: Synthetic oligonucleotide
acauacugucgugaaccca

SEQ ID NO: 857707 - RNA, 19 nt, Artificial Sequence
  Description of Artificial Sequence: Synthetic oligonucleotide
aggaccugauaaaugggaa

SEQ ID NO: 857708 - RNA, 19 nt, Artificial Sequence
  Description of Artificial Sequence: Synthetic oligonucleotide
gaccugauaaaugggaauu

SEQ ID NO: 857709 - RNA, 19 nt, Artificial Sequence
  Description of Artificial Sequence: Synthetic oligonucleotide
guguucacaagccguguua

SEQ ID NO: 857710 - RNA, 19 nt, Artificial Sequence
  Description of Artificial Sequence: Synthetic oligonucleotide
cuaucauuuucaggaacaa

SEQ ID NO: 857711 - RNA, 19 nt, Artificial Sequence
  Description of Artificial Sequence: Synthetic oligonucleotide
cagagaccgggaugccagg

SEQ ID NO: 857712 - RNA, 19 nt, Artificial Sequence
  Description of Artificial Sequence: Synthetic oligonucleotide
uccggugcaugaagagauc

SEQ ID NO: 857713 - RNA, 19 nt, Artificial Sequence
  Description of Artificial Sequence: Synthetic oligonucleotide
aggcgauguaaaauuuaca

SEQ ID NO: 857714 - RNA, 19 nt, Artificial Sequence
  Description of Artificial Sequence: Synthetic oligonucleotide
ggacuugacagccaccugu

SEQ ID NO: 857715 - RNA, 19 nt, Artificial Sequence
  Description of Artificial Sequence: Synthetic oligonucleotide
accugauaaaugggaauuu

SEQ ID NO: 857716 - RNA, 19 nt, Artificial Sequence
  Description of Artificial Sequence: Synthetic oligonucleotide
uggcauaguuuagcugcug

SEQ ID NO: 857717 - RNA, 19 nt, Artificial Sequence
  Description of Artificial Sequence: Synthetic oligonucleotide
cacguauccucuucaggaa

SEQ ID NO: 857718 - RNA, 19 nt, Artificial Sequence
  Description of Artificial Sequence: Synthetic oligonucleotide
gaccgggaugccaggauca

SEQ ID NO: 857719 - RNA, 19 nt, Artificial Sequence
  Description of Artificial Sequence: Synthetic oligonucleotide
gggguuguaaguacaucac

SEQ ID NO: 857720 - RNA, 19 nt, Artificial Sequence
  Description of Artificial Sequence: Synthetic oligonucleotide
ggaagaagggucucugacu

SEQ ID NO: 857721 - RNA, 19 nt, Artificial Sequence
  Description of Artificial Sequence: Synthetic oligonucleotide
ugacagccaccuguucccc

SEQ ID NO: 857722 - RNA, 19 nt, Artificial Sequence
  Description of Artificial Sequence: Synthetic oligonucleotide
auccccuuacaaaucugga

SEQ ID NO: 857723 - RNA, 19 nt, Artificial Sequence
  Description of Artificial Sequence: Synthetic oligonucleotide
gccaugggacuaaaauccg

SEQ ID NO: 857724 - RNA, 19 nt, Artificial Sequence
  Description of Artificial Sequence: Synthetic oligonucleotide
cauaguucaugcagcgagu

SEQ ID NO: 857725 - RNA, 19 nt, Artificial Sequence
  Description of Artificial Sequence: Synthetic oligonucleotide
accgggaugccaggaucac

SEQ ID NO: 857726 - RNA, 19 nt, Artificial Sequence
  Description of Artificial Sequence: Synthetic oligonucleotide
gaucagcuaugugguuacc

SEQ ID NO: 857727 - RNA, 19 nt, Artificial Sequence
  Description of Artificial Sequence: Synthetic oligonucleotide
auccgcucuaugcacucuu

SEQ ID NO: 857728 - RNA, 19 nt, Artificial Sequence
  Description of Artificial Sequence: Synthetic oligonucleotide
ggaacaaggccaugggacu

SEQ ID NO: 857729 - RNA, 19 nt, Artificial Sequence
  Description of Artificial Sequence: Synthetic oligonucleotide
caugaguugggccuaucau

SEQ ID NO: 857730 - RNA, 19 nt, Artificial Sequence
  Description of Artificial Sequence: Synthetic oligonucleotide
auaugcaugugaagucuuu

SEQ ID NO: 857731 - RNA, 19 nt, Artificial Sequence
  Description of Artificial Sequence: Synthetic oligonucleotide
augcagcgagucauaaggu

SEQ ID NO: 857732 - RNA, 19 nt, Artificial Sequence
  Description of Artificial Sequence: Synthetic oligonucleotide
gucauaaggucagccagcu

SEQ ID NO: 857733 - RNA, 19 nt, Artificial Sequence
  Description of Artificial Sequence: Synthetic oligonucleotide
gcgagucauaaggucagcc

SEQ ID NO: 857734 - RNA, 19 nt, Artificial Sequence
  Description of Artificial Sequence: Synthetic oligonucleotide
ccgagucacaguaggugag

SEQ ID NO: 857735 - RNA, 19 nt, Artificial Sequence
  Description of Artificial Sequence: Synthetic oligonucleotide
ggaucucgccauuguagca

SEQ ID NO: 857736 - RNA, 19 nt, Artificial Sequence
  Description of Artificial Sequence: Synthetic oligonucleotide
cuugcugcuaagucccggu

SEQ ID NO: 857737 - RNA, 19 nt, Artificial Sequence
  Description of Artificial Sequence: Synthetic oligonucleotide
agagaccgggaugccagga

SEQ ID NO: 857738 - RNA, 19 nt, Artificial Sequence
  Description of Artificial Sequence: Synthetic oligonucleotide
guaguacuccuuaucaguu

SEQ ID NO: 857739 - RNA, 19 nt, Artificial Sequence
  Description of Artificial Sequence: Synthetic oligonucleotide
cuauugccaggugcagaac

SEQ ID NO: 857740 - RNA, 19 nt, Artificial Sequence
  Description of Artificial Sequence: Synthetic oligonucleotide
cggagcguaccaaaacacc

SEQ ID NO: 857741 - RNA, 19 nt, Artificial Sequence
  Description of Artificial Sequence: Synthetic oligonucleotide
cacaguaggugagcagcuc

SEQ ID NO: 857742 - RNA, 19 nt, Artificial Sequence
  Description of Artificial Sequence: Synthetic oligonucleotide
cacgcucagguucuuggaa

SEQ ID NO: 857743 - RNA, 19 nt, Artificial Sequence
  Description of Artificial Sequence: Synthetic oligonucleotide
cuucccgaaggcagaaacu

SEQ ID NO: 857744 - RNA, 19 nt, Artificial Sequence
  Description of Artificial Sequence: Synthetic oligonucleotide
cauccuugacuguguagua

SEQ ID NO: 857745 - RNA, 19 nt, Artificial Sequence
  Description of Artificial Sequence: Synthetic oligonucleotide
guuacucaugcuucuuauu

SEQ ID NO: 857746 - RNA, 19 nt, Artificial Sequence
  Description of Artificial Sequence: Synthetic oligonucleotide
cccucacgggcuaagagga

SEQ ID NO: 857747 - RNA, 19 nt, Artificial Sequence
  Description of Artificial Sequence: Synthetic oligonucleotide
cuaagucccggugaacaua

SEQ ID NO: 857748 - RNA, 19 nt, Artificial Sequence
  Description of Artificial Sequence: Synthetic oligonucleotide
gguuccguaagaucucuau

SEQ ID NO: 857749 - RNA, 19 nt, Artificial Sequence
  Description of Artificial Sequence: Synthetic oligonucleotide
guagcagauuucccagagu

SEQ ID NO: 857750 - RNA, 19 nt, Artificial Sequence
  Description of Artificial Sequence: Synthetic oligonucleotide
cccgaaggcagaaacucca

SEQ ID NO: 857751 - RNA, 19 nt, Artificial Sequence
  Description of Artificial Sequence: Synthetic oligonucleotide
acaagccguguuacuguca

SEQ ID NO: 857752 - RNA, 19 nt, Artificial Sequence
  Description of Artificial Sequence: Synthetic oligonucleotide
gagcaggccacagguuuga

SEQ ID NO: 857753 - RNA, 19 nt, Artificial Sequence
  Description of Artificial Sequence: Synthetic oligonucleotide
ggguuguaaguacaucacu

SEQ ID NO: 857754 - RNA, 19 nt, Artificial Sequence
  Description of Artificial Sequence: Synthetic oligonucleotide
cguaagaucucuaucuccu

SEQ ID NO: 857755 - RNA, 19 nt, Artificial Sequence
  Description of Artificial Sequence: Synthetic oligonucleotide
ccuuaucaguuucgauggc

SEQ ID NO: 857756 - RNA, 19 nt, Artificial Sequence
  Description of Artificial Sequence: Synthetic oligonucleotide
ggauccgcucuaugcacuc

SEQ ID NO: 857757 - RNA, 19 nt, Artificial Sequence
  Description of Artificial Sequence: Synthetic oligonucleotide
caagccguguuacugucau

SEQ ID NO: 857758 - RNA, 19 nt, Artificial Sequence
  Description of Artificial Sequence: Synthetic oligonucleotide
auacugucgugaacccaga

SEQ ID NO: 857759 - RNA, 19 nt, Artificial Sequence
  Description of Artificial Sequence: Synthetic oligonucleotide
cauaugcaugugaagucuu

SEQ ID NO: 857760 - RNA, 19 nt, Artificial Sequence
  Description of Artificial Sequence: Synthetic oligonucleotide
acguccgaggcgauguaaa

SEQ ID NO: 857761 - RNA, 19 nt, Artificial Sequence
  Description of Artificial Sequence: Synthetic oligonucleotide
guccgauuagaugguugga

SEQ ID NO: 857762 - RNA, 19 nt, Artificial Sequence
  Description of Artificial Sequence: Synthetic oligonucleotide
ggaccugauaaaugggaau

SEQ ID NO: 857763 - RNA, 19 nt, Artificial Sequence
  Description of Artificial Sequence: Synthetic oligonucleotide
gagguuccguaagaucucu

SEQ ID NO: 857764 - RNA, 19 nt, Artificial Sequence
  Description of Artificial Sequence: Synthetic oligonucleotide
cugaaacaaugucuggauu

SEQ ID NO: 857765 - RNA, 19 nt, Artificial Sequence
  Description of Artificial Sequence: Synthetic oligonucleotide
gcauauagagcaggccaca

SEQ ID NO: 857766 - RNA, 19 nt, Artificial Sequence
  Description of Artificial Sequence: Synthetic oligonucleotide
ccgcucuaugcacucuugc

SEQ ID NO: 857767 - RNA, 19 nt, Artificial Sequence
  Description of Artificial Sequence: Synthetic oligonucleotide
auguuaguacaaggucauu

SEQ ID NO: 857768 - RNA, 19 nt, Artificial Sequence
  Description of Artificial Sequence: Synthetic oligonucleotide
ccaugggacuaaaauccga

SEQ ID NO: 857769 - RNA, 19 nt, Artificial Sequence
  Description of Artificial Sequence: Synthetic oligonucleotide
caccccaaaucuaggcugu

SEQ ID NO: 857770 - RNA, 19 nt, Artificial Sequence
  Description of Artificial Sequence: Synthetic oligonucleotide
cacuuuuccggugcaugaa

SEQ ID NO: 857771 - RNA, 19 nt, Artificial Sequence
  Description of Artificial Sequence: Synthetic oligonucleotide
gccguguuacugucaucug

SEQ ID NO: 857772 - RNA, 19 nt, Artificial Sequence
  Description of Artificial Sequence: Synthetic oligonucleotide
aagucccggugaacauacu

SEQ ID NO: 857773 - RNA, 19 nt, Artificial Sequence
  Description of Artificial Sequence: Synthetic oligonucleotide
cgugcaaugucacuccaaa

SEQ ID NO: 857774 - RNA, 19 nt, Artificial Sequence
  Description of Artificial Sequence: Synthetic oligonucleotide
gcguaccaaaacaccgggc

SEQ ID NO: 857775 - RNA, 19 nt, Artificial Sequence
  Description of Artificial Sequence: Synthetic oligonucleotide
ggucauuacuacaccccaa

SEQ ID NO: 857776 - RNA, 19 nt, Artificial Sequence
  Description of Artificial Sequence: Synthetic oligonucleotide
guucaugcagcgagucaua

SEQ ID NO: 857777 - RNA, 19 nt, Artificial Sequence
  Description of Artificial Sequence: Synthetic oligonucleotide
ccggugaacauacugucgu

SEQ ID NO: 857778 - RNA, 19 nt, Artificial Sequence
  Description of Artificial Sequence: Synthetic oligonucleotide
ccaauggcccucccuccac

SEQ ID NO: 857779 - RNA, 19 nt, Artificial Sequence
  Description of Artificial Sequence: Synthetic oligonucleotide
acacguccgaggcgaugua

SEQ ID NO: 857780 - RNA, 19 nt, Artificial Sequence
  Description of Artificial Sequence: Synthetic oligonucleotide
gcauaguuuagcugcuguu

SEQ ID NO: 857781 - RNA, 19 nt, Artificial Sequence
  Description of Artificial Sequence: Synthetic oligonucleotide
guccgaggcgauguaaaau

SEQ ID NO: 857782 - RNA, 19 nt, Artificial Sequence
  Description of Artificial Sequence: Synthetic oligonucleotide
cuuccaccaugauuauuuu

SEQ ID NO: 857783 - RNA, 19 nt, Artificial Sequence
  Description of Artificial Sequence: Synthetic oligonucleotide
gaguugggccuaucauuuu

SEQ ID NO: 857784 - RNA, 19 nt, Artificial Sequence
  Description of Artificial Sequence: Synthetic oligonucleotide
ccucacgggcuaagaggag

SEQ ID NO: 857785 - RNA, 19 nt, Artificial Sequence
  Description of Artificial Sequence: Synthetic oligonucleotide
ccgauuagaugguuggaau

SEQ ID NO: 857786 - RNA, 19 nt, Artificial Sequence
  Description of Artificial Sequence: Synthetic oligonucleotide
cacguccgaggcgauguaa

SEQ ID NO: 857787 - RNA, 19 nt, Artificial Sequence
  Description of Artificial Sequence: Synthetic oligonucleotide
agguuccguaagaucucua

SEQ ID NO: 857788 - RNA, 19 nt, Artificial Sequence
  Description of Artificial Sequence: Synthetic oligonucleotide
ccaggggauccgcucuaug

SEQ ID NO: 857789 - RNA, 19 nt, Artificial Sequence
  Description of Artificial Sequence: Synthetic oligonucleotide
guuguccgauuagaugguu

SEQ ID NO: 857790 - RNA, 19 nt, Artificial Sequence
  Description of Artificial Sequence: Synthetic oligonucleotide
gcagcggcuuucauaaaau

SEQ ID NO: 857791 - RNA, 19 nt, Artificial Sequence
  Description of Artificial Sequence: Synthetic oligonucleotide
caggagcaauccaggggau

SEQ ID NO: 857792 - RNA, 19 nt, Artificial Sequence
  Description of Artificial Sequence: Synthetic oligonucleotide
caucacuuuuccggugcau

SEQ ID NO: 857793 - RNA, 19 nt, Artificial Sequence
  Description of Artificial Sequence: Synthetic oligonucleotide
ccaaaucuaggcuguuauu

SEQ ID NO: 857794 - RNA, 19 nt, Artificial Sequence
  Description of Artificial Sequence: Synthetic oligonucleotide
ccucucccaagucacguau

SEQ ID NO: 857795 - RNA, 19 nt, Artificial Sequence
  Description of Artificial Sequence: Synthetic oligonucleotide
accacacguccgaggcgau

SEQ ID NO: 857796 - RNA, 19 nt, Artificial Sequence
  Description of Artificial Sequence: Synthetic oligonucleotide
caaugcccucacgggcuaa

SEQ ID NO: 857797 - RNA, 19 nt, Artificial Sequence
  Description of Artificial Sequence: Synthetic oligonucleotide
gcccucucccaagucacgu

SEQ ID NO: 857798 - RNA, 19 nt, Artificial Sequence
  Description of Artificial Sequence: Synthetic oligonucleotide
ccgaggcgauguaaaauuu

SEQ ID NO: 857799 - RNA, 19 nt, Artificial Sequence
  Description of Artificial Sequence: Synthetic oligonucleotide
cccucucccaagucacgua

SEQ ID NO: 857800 - RNA, 19 nt, Artificial Sequence
  Description of Artificial Sequence: Synthetic oligonucleotide
gccaugaguugggccuauc

SEQ ID NO: 857801 - RNA, 19 nt, Artificial Sequence
  Description of Artificial Sequence: Synthetic oligonucleotide
ccaagucacguauccucuu

SEQ ID NO: 857802 - RNA, 19 nt, Artificial Sequence
  Description of Artificial Sequence: Synthetic oligonucleotide
cacgggcuaagaggagguu

SEQ ID NO: 857803 - RNA, 19 nt, Artificial Sequence
  Description of Artificial Sequence: Synthetic oligonucleotide
gggcacuagccagcuguuu

SEQ ID NO: 857804 - RNA, 19 nt, Artificial Sequence
  Description of Artificial Sequence: Synthetic oligonucleotide
ggccaugaguugggccuau

SEQ ID NO: 857805 - RNA, 19 nt, Artificial Sequence
  Description of Artificial Sequence: Synthetic oligonucleotide
cagccacgcucagguucuu

SEQ ID NO: 857806 - RNA, 19 nt, Artificial Sequence
  Description of Artificial Sequence: Synthetic oligonucleotide
ugaaacaugucuccuaugg

SEQ ID NO: 857807 - RNA, 19 nt, Artificial Sequence
  Description of Artificial Sequence: Synthetic oligonucleotide
uacgucaagaaccuuaagg

SEQ ID NO: 857808 - RNA, 19 nt, Artificial Sequence
  Description of Artificial Sequence: Synthetic oligonucleotide
ucaguuuagccuuugagag

SEQ ID NO: 857809 - RNA, 19 nt, Artificial Sequence
  Description of Artificial Sequence: Synthetic oligonucleotide
acauguaccaauaaagggc

SEQ ID NO: 857810 - RNA, 19 nt, Artificial Sequence
  Description of Artificial Sequence: Synthetic oligonucleotide
ucugaugacauccagugac

SEQ ID NO: 857811 - RNA, 19 nt, Artificial Sequence
  Description of Artificial Sequence: Synthetic oligonucleotide
ucuccuaugguuuugucag

SEQ ID NO: 857812 - RNA, 19 nt, Artificial Sequence
  Description of Artificial Sequence: Synthetic oligonucleotide
augguaacgaaugaagucc

SEQ ID NO: 857813 - RNA, 19 nt, Artificial Sequence
  Description of Artificial Sequence: Synthetic oligonucleotide
aguuuagccuuugagagcc

SEQ ID NO: 857814 - RNA, 19 nt, Artificial Sequence
  Description of Artificial Sequence: Synthetic oligonucleotide
aacgacccgaaccaaacac

SEQ ID NO: 857815 - RNA, 19 nt, Artificial Sequence
  Description of Artificial Sequence: Synthetic oligonucleotide
uuuguuggcgccaagggug

SEQ ID NO: 857816 - RNA, 19 nt, Artificial Sequence
  Description of Artificial Sequence: Synthetic oligonucleotide
uuuauuacgucaagaaccu

SEQ ID NO: 857817 - RNA, 19 nt, Artificial Sequence
  Description of Artificial Sequence: Synthetic oligonucleotide
aaacagguagccugugggc

SEQ ID NO: 857818 - RNA, 19 nt, Artificial Sequence
  Description of Artificial Sequence: Synthetic oligonucleotide
uuaaagaaccauuguagug

SEQ ID NO: 857819 - RNA, 19 nt, Artificial Sequence
  Description of Artificial Sequence: Synthetic oligonucleotide
aacgcaugaaguccccugc

SEQ ID NO: 857820 - RNA, 19 nt, Artificial Sequence
  Description of Artificial Sequence: Synthetic oligonucleotide
cucguuaacacacaugccc

SEQ ID NO: 857821 - RNA, 19 nt, Artificial Sequence
  Description of Artificial Sequence: Synthetic oligonucleotide
ugcacgucaaagaugagca

SEQ ID NO: 857822 - RNA, 19 nt, Artificial Sequence
  Description of Artificial Sequence: Synthetic oligonucleotide
acauuugggaaagugaagg

SEQ ID NO: 857823 - RNA, 19 nt, Artificial Sequence
  Description of Artificial Sequence: Synthetic oligonucleotide
aagucgaugacaugcacgu

SEQ ID NO: 857824 - RNA, 19 nt, Artificial Sequence
  Description of Artificial Sequence: Synthetic oligonucleotide
gauuuauuacgucaagaac

SEQ ID NO: 857825 - RNA, 19 nt, Artificial Sequence
  Description of Artificial Sequence: Synthetic oligonucleotide
ucaaauaacaggacagcac

SEQ ID NO: 857826 - RNA, 19 nt, Artificial Sequence
  Description of Artificial Sequence: Synthetic oligonucleotide
auuaaagaaccauuguagu

SEQ ID NO: 857827 - RNA, 19 nt, Artificial Sequence
  Description of Artificial Sequence: Synthetic oligonucleotide
aaugagacgacggcgcucg

SEQ ID NO: 857828 - RNA, 19 nt, Artificial Sequence
  Description of Artificial Sequence: Synthetic oligonucleotide
agugauagcgcacgaaguc

SEQ ID NO: 857829 - RNA, 19 nt, Artificial Sequence
  Description of Artificial Sequence: Synthetic oligonucleotide
uguguuguggacuggaaac

SEQ ID NO: 857830 - RNA, 19 nt, Artificial Sequence
  Description of Artificial Sequence: Synthetic oligonucleotide
gauuggauuuauuacguca

SEQ ID NO: 857831 - RNA, 19 nt, Artificial Sequence
  Description of Artificial Sequence: Synthetic oligonucleotide
acgucaagaaccuuaagga

SEQ ID NO: 857832 - RNA, 19 nt, Artificial Sequence
  Description of Artificial Sequence: Synthetic oligonucleotide
aucaguuuagccuuugaga

SEQ ID NO: 857833 - RNA, 19 nt, Artificial Sequence
  Description of Artificial Sequence: Synthetic oligonucleotide
agccuuucuccccauaagc

SEQ ID NO: 857834 - RNA, 19 nt, Artificial Sequence
  Description of Artificial Sequence: Synthetic oligonucleotide
guuguaaugguaacgaaug

SEQ ID NO: 857835 - RNA, 19 nt, Artificial Sequence
  Description of Artificial Sequence: Synthetic oligonucleotide
uaugguuuugucagggucu

SEQ ID NO: 857836 - RNA, 19 nt, Artificial Sequence
  Description of Artificial Sequence: Synthetic oligonucleotide
guaaugguaacgaaugaag

SEQ ID NO: 857837 - RNA, 19 nt, Artificial Sequence
  Description of Artificial Sequence: Synthetic oligonucleotide
auucacuugagccuugaug

SEQ ID NO: 857838 - RNA, 19 nt, Artificial Sequence
  Description of Artificial Sequence: Synthetic oligonucleotide
acacacaugcccaugagac

SEQ ID NO: 857839 - RNA, 19 nt, Artificial Sequence
  Description of Artificial Sequence: Synthetic oligonucleotide
aaucuuggaugucucguug

SEQ ID NO: 857840 - RNA, 19 nt, Artificial Sequence
  Description of Artificial Sequence: Synthetic oligonucleotide
ugugguugcgggaauagcu

SEQ ID NO: 857841 - RNA, 19 nt, Artificial Sequence
  Description of Artificial Sequence: Synthetic oligonucleotide
aaccuuaaggaagaggugu

SEQ ID NO: 857842 - RNA, 19 nt, Artificial Sequence
  Description of Artificial Sequence: Synthetic oligonucleotide
guagugauagcgcacgaag

SEQ ID NO: 857843 - RNA, 19 nt, Artificial Sequence
  Description of Artificial Sequence: Synthetic oligonucleotide
uccccauaagccaggaagg

SEQ ID NO: 857844 - RNA, 19 nt, Artificial Sequence
  Description of Artificial Sequence: Synthetic oligonucleotide
uuguggacuggaaaccacg

SEQ ID NO: 857845 - RNA, 19 nt, Artificial Sequence
  Description of Artificial Sequence: Synthetic oligonucleotide
caguuauccccacugaggg

SEQ ID NO: 857846 - RNA, 19 nt, Artificial Sequence
  Description of Artificial Sequence: Synthetic oligonucleotide
uguggacuggaaaccacgg

SEQ ID NO: 857847 - RNA, 19 nt, Artificial Sequence
  Description of Artificial Sequence: Synthetic oligonucleotide
acuuuguuggcgccaaggg

SEQ ID NO: 857848 - RNA, 19 nt, Artificial Sequence
  Description of Artificial Sequence: Synthetic oligonucleotide
aaaauagaggguggcauca

SEQ ID NO: 857849 - RNA, 19 nt, Artificial Sequence
  Description of Artificial Sequence: Synthetic oligonucleotide
acgaaugaaguccccaauc

SEQ ID NO: 857850 - RNA, 19 nt, Artificial Sequence
  Description of Artificial Sequence: Synthetic oligonucleotide
aggauggucguuugcaccg

SEQ ID NO: 857851 - RNA, 19 nt, Artificial Sequence
  Description of Artificial Sequence: Synthetic oligonucleotide
gauuggaucaguuuagccu

SEQ ID NO: 857852 - RNA, 19 nt, Artificial Sequence
  Description of Artificial Sequence: Synthetic oligonucleotide
acauagguauuguaggugu

SEQ ID NO: 857853 - RNA, 19 nt, Artificial Sequence
  Description of Artificial Sequence: Synthetic oligonucleotide
uagcuguugucaaagucag

SEQ ID NO: 857854 - RNA, 19 nt, Artificial Sequence
  Description of Artificial Sequence: Synthetic oligonucleotide
aucuuggaugucucguugc

SEQ ID NO: 857855 - RNA, 19 nt, Artificial Sequence
  Description of Artificial Sequence: Synthetic oligonucleotide
aggacacaugcccagcagc

SEQ ID NO: 857856 - RNA, 19 nt, Artificial Sequence
  Description of Artificial Sequence: Synthetic oligonucleotide
ugcgucugaggucagaccu

SEQ ID NO: 857857 - RNA, 19 nt, Artificial Sequence
  Description of Artificial Sequence: Synthetic oligonucleotide
ucgauccugguucugaaac

SEQ ID NO: 857858 - RNA, 19 nt, Artificial Sequence
  Description of Artificial Sequence: Synthetic oligonucleotide
ugccguuguagugauagcg

SEQ ID NO: 857859 - RNA, 19 nt, Artificial Sequence
  Description of Artificial Sequence: Synthetic oligonucleotide
augcacgucaaagaugagc

SEQ ID NO: 857860 - RNA, 19 nt, Artificial Sequence
  Description of Artificial Sequence: Synthetic oligonucleotide
ucguuaacacacaugccca

SEQ ID NO: 857861 - RNA, 19 nt, Artificial Sequence
  Description of Artificial Sequence: Synthetic oligonucleotide
uguagggcugggaagagaa

SEQ ID NO: 857862 - RNA, 19 nt, Artificial Sequence
  Description of Artificial Sequence: Synthetic oligonucleotide
auuggaucaguuuagccuu

SEQ ID NO: 857863 - RNA, 19 nt, Artificial Sequence
  Description of Artificial Sequence: Synthetic oligonucleotide
gaccacgucaaaauagagg

SEQ ID NO: 857864 - RNA, 19 nt, Artificial Sequence
  Description of Artificial Sequence: Synthetic oligonucleotide
agugccguuguagugauag

SEQ ID NO: 857865 - RNA, 19 nt, Artificial Sequence
  Description of Artificial Sequence: Synthetic oligonucleotide
uugaggggccucauagucg

SEQ ID NO: 857866 - RNA, 19 nt, Artificial Sequence
  Description of Artificial Sequence: Synthetic oligonucleotide
cugguuucgauccugguuc

SEQ ID NO: 857867 - RNA, 19 nt, Artificial Sequence
  Description of Artificial Sequence: Synthetic oligonucleotide
guuguagugauagcgcacg

SEQ ID NO: 857868 - RNA, 19 nt, Artificial Sequence
  Description of Artificial Sequence: Synthetic oligonucleotide
gucagcaacgacccgaacc

SEQ ID NO: 857869 - RNA, 19 nt, Artificial Sequence
  Description of Artificial Sequence: Synthetic oligonucleotide
uuguaggugugguugcggg

SEQ ID NO: 857870 - RNA, 19 nt, Artificial Sequence
  Description of Artificial Sequence: Synthetic oligonucleotide
uguaaugguaacgaaugaa

SEQ ID NO: 857871 - RNA, 19 nt, Artificial Sequence
  Description of Artificial Sequence: Synthetic oligonucleotide
ugacaugcacgucaaagau

SEQ ID NO: 857872 - RNA, 19 nt, Artificial Sequence
  Description of Artificial Sequence: Synthetic oligonucleotide
uagugguaacgcaugaagu

SEQ ID NO: 857873 - RNA, 19 nt, Artificial Sequence
  Description of Artificial Sequence: Synthetic oligonucleotide
guuauccccacugagggag

SEQ ID NO: 857874 - RNA, 19 nt, Artificial Sequence
  Description of Artificial Sequence: Synthetic oligonucleotide
agaaggucaccgcagucuc

SEQ ID NO: 857875 - RNA, 19 nt, Artificial Sequence
  Description of Artificial Sequence: Synthetic oligonucleotide
ugguaacgaaugaaguccc

SEQ ID NO: 857876 - RNA, 19 nt, Artificial Sequence
  Description of Artificial Sequence: Synthetic oligonucleotide
augacaugcacgucaaaga

SEQ ID NO: 857877 - RNA, 19 nt, Artificial Sequence
  Description of Artificial Sequence: Synthetic oligonucleotide
auagguauuguaggugugg

SEQ ID NO: 857878 - RNA, 19 nt, Artificial Sequence
  Description of Artificial Sequence: Synthetic oligonucleotide
cagagagcaguuguaaugg

SEQ ID NO: 857879 - RNA, 19 nt, Artificial Sequence
  Description of Artificial Sequence: Synthetic oligonucleotide
cauguaccaauaaagggca

SEQ ID NO: 857880 - RNA, 19 nt, Artificial Sequence
  Description of Artificial Sequence: Synthetic oligonucleotide
aaggauuggaucaguuuag

SEQ ID NO: 857881 - RNA, 19 nt, Artificial Sequence
  Description of Artificial Sequence: Synthetic oligonucleotide
augagcacggcugagcccg

SEQ ID NO: 857882 - RNA, 19 nt, Artificial Sequence
  Description of Artificial Sequence: Synthetic oligonucleotide
acaugcacgucaaagauga

SEQ ID NO: 857883 - RNA, 19 nt, Artificial Sequence
  Description of Artificial Sequence: Synthetic oligonucleotide
gucguuugcaccguguccg

SEQ ID NO: 857884 - RNA, 19 nt, Artificial Sequence
  Description of Artificial Sequence: Synthetic oligonucleotide
augcaugcgcccugcagcc

SEQ ID NO: 857885 - RNA, 19 nt, Artificial Sequence
  Description of Artificial Sequence: Synthetic oligonucleotide
ucuagugugugggugggag

SEQ ID NO: 857886 - RNA, 19 nt, Artificial Sequence
  Description of Artificial Sequence: Synthetic oligonucleotide
uuguaaugguaacgaauga

SEQ ID NO: 857887 - RNA, 19 nt, Artificial Sequence
  Description of Artificial Sequence: Synthetic oligonucleotide
guaacccugcccaacauag

SEQ ID NO: 857888 - RNA, 19 nt, Artificial Sequence
  Description of Artificial Sequence: Synthetic oligonucleotide
agauuggauuuauuacguc

SEQ ID NO: 857889 - RNA, 19 nt, Artificial Sequence
  Description of Artificial Sequence: Synthetic oligonucleotide
acuugagccuugaugaagg

SEQ ID NO: 857890 - RNA, 19 nt, Artificial Sequence
  Description of Artificial Sequence: Synthetic oligonucleotide
aggaccggggagcucaccc

SEQ ID NO: 857891 - RNA, 19 nt, Artificial Sequence
  Description of Artificial Sequence: Synthetic oligonucleotide
uccuaugguuuugucaggg

SEQ ID NO: 857892 - RNA, 19 nt, Artificial Sequence
  Description of Artificial Sequence: Synthetic oligonucleotide
guaccauccauuaaagaac

SEQ ID NO: 857893 - RNA, 19 nt, Artificial Sequence
  Description of Artificial Sequence: Synthetic oligonucleotide
ucgaucacuuuguuggcgc

SEQ ID NO: 857894 - RNA, 19 nt, Artificial Sequence
  Description of Artificial Sequence: Synthetic oligonucleotide
acaguuauccccacugagg

SEQ ID NO: 857895 - RNA, 19 nt, Artificial Sequence
  Description of Artificial Sequence: Synthetic oligonucleotide
aggcccgccacaccaaugc

SEQ ID NO: 857896 - RNA, 19 nt, Artificial Sequence
  Description of Artificial Sequence: Synthetic oligonucleotide
caggaccacgucaaaauag

SEQ ID NO: 857897 - RNA, 19 nt, Artificial Sequence
  Description of Artificial Sequence: Synthetic oligonucleotide
cuguugaggggccucauag

SEQ ID NO: 857898 - RNA, 19 nt, Artificial Sequence
  Description of Artificial Sequence: Synthetic oligonucleotide
uggugccacacaaacaggu

SEQ ID NO: 857899 - RNA, 19 nt, Artificial Sequence
  Description of Artificial Sequence: Synthetic oligonucleotide
caugaggcguccuuugccc

SEQ ID NO: 857900 - RNA, 19 nt, Artificial Sequence
  Description of Artificial Sequence: Synthetic oligonucleotide
cuucguuccccuaugcaug

SEQ ID NO: 857901 - RNA, 19 nt, Artificial Sequence
  Description of Artificial Sequence: Synthetic oligonucleotide
agaaccauuguagugguaa

SEQ ID NO: 857902 - RNA, 19 nt, Artificial Sequence
  Description of Artificial Sequence: Synthetic oligonucleotide
uagucgugggaagagaaca

SEQ ID NO: 857903 - RNA, 19 nt, Artificial Sequence
  Description of Artificial Sequence: Synthetic oligonucleotide
gugacucccacaguuaucc

SEQ ID NO: 857904 - RNA, 19 nt, Artificial Sequence
  Description of Artificial Sequence: Synthetic oligonucleotide
uaucacagucccauagccu

SEQ ID NO: 857905 - RNA, 19 nt, Artificial Sequence
  Description of Artificial Sequence: Synthetic oligonucleotide
uagugauagcgcacgaagu

SEQ ID NO: 857906 - RNA, 19 nt, Artificial Sequence
  Description of Artificial Sequence: Synthetic oligonucleotide
aacgaaugaaguccccaau

SEQ ID NO: 857907 - RNA, 19 nt, Artificial Sequence
  Description of Artificial Sequence: Synthetic oligonucleotide
auccauuaaagaaccauug

SEQ ID NO: 857908 - RNA, 19 nt, Artificial Sequence
  Description of Artificial Sequence: Synthetic oligonucleotide
cuaugguuuugucaggguc

SEQ ID NO: 857909 - RNA, 19 nt, Artificial Sequence
  Description of Artificial Sequence: Synthetic oligonucleotide
uuguuggcgccaagggugg

SEQ ID NO: 857910 - RNA, 19 nt, Artificial Sequence
  Description of Artificial Sequence: Synthetic oligonucleotide
ucaccgcagucucugauga

SEQ ID NO: 857911 - RNA, 19 nt, Artificial Sequence
  Description of Artificial Sequence: Synthetic oligonucleotide
guaagugccuccccuacug

SEQ ID NO: 857912 - RNA, 19 nt, Artificial Sequence
  Description of Artificial Sequence: Synthetic oligonucleotide
ugaaggaccggggagcuca

SEQ ID NO: 857913 - RNA, 19 nt, Artificial Sequence
  Description of Artificial Sequence: Synthetic oligonucleotide
gaauagcuggaaucaaaga

SEQ ID NO: 857914 - RNA, 19 nt, Artificial Sequence
  Description of Artificial Sequence: Synthetic oligonucleotide
aaacaggcuggcugcagga

SEQ ID NO: 857915 - RNA, 19 nt, Artificial Sequence
  Description of Artificial Sequence: Synthetic oligonucleotide
ugggagguauagaugugug

SEQ ID NO: 857916 - RNA, 19 nt, Artificial Sequence
  Description of Artificial Sequence: Synthetic oligonucleotide
uccgccuuguuccacacau

SEQ ID NO: 857917 - RNA, 19 nt, Artificial Sequence
  Description of Artificial Sequence: Synthetic oligonucleotide
aggauuggaucaguuuagc

SEQ ID NO: 857918 - RNA, 19 nt, Artificial Sequence
  Description of Artificial Sequence: Synthetic oligonucleotide
ugcgggaauagcuggaauc

SEQ ID NO: 857919 - RNA, 19 nt, Artificial Sequence
  Description of Artificial Sequence: Synthetic oligonucleotide
uaacgaaugaaguccccaa

SEQ ID NO: 857920 - RNA, 19 nt, Artificial Sequence
  Description of Artificial Sequence: Synthetic oligonucleotide
caugccuuuaaucagccaa

SEQ ID NO: 857921 - RNA, 19 nt, Artificial Sequence
  Description of Artificial Sequence: Synthetic oligonucleotide
cauaagccaggaagggagg

SEQ ID NO: 857922 - RNA, 19 nt, Artificial Sequence
  Description of Artificial Sequence: Synthetic oligonucleotide
ugucguaagugccuccccu

SEQ ID NO: 857923 - RNA, 19 nt, Artificial Sequence
  Description of Artificial Sequence: Synthetic oligonucleotide
ugagucuagugugugggug

SEQ ID NO: 857924 - RNA, 19 nt, Artificial Sequence
  Description of Artificial Sequence: Synthetic oligonucleotide
cugaacuguguccuucggg

SEQ ID NO: 857925 - RNA, 19 nt, Artificial Sequence
  Description of Artificial Sequence: Synthetic oligonucleotide
uagccuuucuccccauaag

SEQ ID NO: 857926 - RNA, 19 nt, Artificial Sequence
  Description of Artificial Sequence: Synthetic oligonucleotide
caaccagagccgauguagg

SEQ ID NO: 857927 - RNA, 19 nt, Artificial Sequence
  Description of Artificial Sequence: Synthetic oligonucleotide
agcaggaccacgucaaaau

SEQ ID NO: 857928 - RNA, 19 nt, Artificial Sequence
  Description of Artificial Sequence: Synthetic oligonucleotide
aguuguaaugguaacgaau

SEQ ID NO: 857929 - RNA, 19 nt, Artificial Sequence
  Description of Artificial Sequence: Synthetic oligonucleotide
ccauaagccaggaagggag

SEQ ID NO: 857930 - RNA, 19 nt, Artificial Sequence
  Description of Artificial Sequence: Synthetic oligonucleotide
ugcaguucucagguggccg

SEQ ID NO: 857931 - RNA, 19 nt, Artificial Sequence
  Description of Artificial Sequence: Synthetic oligonucleotide
acaguaauccuccuucguu

SEQ ID NO: 857932 - RNA, 19 nt, Artificial Sequence
  Description of Artificial Sequence: Synthetic oligonucleotide
gugguaacgcaugaagucc

SEQ ID NO: 857933 - RNA, 19 nt, Artificial Sequence
  Description of Artificial Sequence: Synthetic oligonucleotide
aaauagaggguggcaucag

SEQ ID NO: 857934 - RNA, 19 nt, Artificial Sequence
  Description of Artificial Sequence: Synthetic oligonucleotide
uguuguggacuggaaacca

SEQ ID NO: 857935 - RNA, 19 nt, Artificial Sequence
  Description of Artificial Sequence: Synthetic oligonucleotide
agaaggauuggaucaguuu

SEQ ID NO: 857936 - RNA, 19 nt, Artificial Sequence
  Description of Artificial Sequence: Synthetic oligonucleotide
uaacccugcccaacauagg

SEQ ID NO: 857937 - RNA, 19 nt, Artificial Sequence
  Description of Artificial Sequence: Synthetic oligonucleotide
auuggauuuauuacgucaa

SEQ ID NO: 857938 - RNA, 19 nt, Artificial Sequence
  Description of Artificial Sequence: Synthetic oligonucleotide
caguuuagccuuugagagc

SEQ ID NO: 857939 - RNA, 19 nt, Artificial Sequence
  Description of Artificial Sequence: Synthetic oligonucleotide
uuugcgucugaggucagac

SEQ ID NO: 857940 - RNA, 19 nt, Artificial Sequence
  Description of Artificial Sequence: Synthetic oligonucleotide
ugccauccagcagagagca

SEQ ID NO: 857941 - RNA, 19 nt, Artificial Sequence
  Description of Artificial Sequence: Synthetic oligonucleotide
augccuuuaaucagccaac

SEQ ID NO: 857942 - RNA, 19 nt, Artificial Sequence
  Description of Artificial Sequence: Synthetic oligonucleotide
uucguuccccuaugcaugc

SEQ ID NO: 857943 - RNA, 19 nt, Artificial Sequence
  Description of Artificial Sequence: Synthetic oligonucleotide
gaaccauuguagugguaac

SEQ ID NO: 857944 - RNA, 19 nt, Artificial Sequence
  Description of Artificial Sequence: Synthetic oligonucleotide
uguccuucggguuguggac

SEQ ID NO: 857945 - RNA, 19 nt, Artificial Sequence
  Description of Artificial Sequence: Synthetic oligonucleotide
agugagaaggucaccgcag

SEQ ID NO: 857946 - RNA, 19 nt, Artificial Sequence
  Description of Artificial Sequence: Synthetic oligonucleotide
uuauccccacugagggagg

SEQ ID NO: 857947 - RNA, 19 nt, Artificial Sequence
  Description of Artificial Sequence: Synthetic oligonucleotide
uguaacccugcccaacaua

SEQ ID NO: 857948 - RNA, 19 nt, Artificial Sequence
  Description of Artificial Sequence: Synthetic oligonucleotide
ucccauucuccccguaggc

SEQ ID NO: 857949 - RNA, 19 nt, Artificial Sequence
  Description of Artificial Sequence: Synthetic oligonucleotide
acggcgcucguuaacacac

SEQ ID NO: 857950 - RNA, 19 nt, Artificial Sequence
  Description of Artificial Sequence: Synthetic oligonucleotide
cauagguauuguaggugug

SEQ ID NO: 857951 - RNA, 19 nt, Artificial Sequence
  Description of Artificial Sequence: Synthetic oligonucleotide
auagucgugggaagagaac

SEQ ID NO: 857952 - RNA, 19 nt, Artificial Sequence
  Description of Artificial Sequence: Synthetic oligonucleotide
cgcucguuaacacacaugc

SEQ ID NO: 857953 - RNA, 19 nt, Artificial Sequence
  Description of Artificial Sequence: Synthetic oligonucleotide
ggaaaccacggccagugag

SEQ ID NO: 857954 - RNA, 19 nt, Artificial Sequence
  Description of Artificial Sequence: Synthetic oligonucleotide
ucauggaucugcucccggu

SEQ ID NO: 857955 - RNA, 19 nt, Artificial Sequence
  Description of Artificial Sequence: Synthetic oligonucleotide
accuucgaucacuuuguug

SEQ ID NO: 857956 - RNA, 19 nt, Artificial Sequence
  Description of Artificial Sequence: Synthetic oligonucleotide
uccuucguuccccuaugca

SEQ ID NO: 857957 - RNA, 19 nt, Artificial Sequence
  Description of Artificial Sequence: Synthetic oligonucleotide
cuagugugugggugggagg

SEQ ID NO: 857958 - RNA, 19 nt, Artificial Sequence
  Description of Artificial Sequence: Synthetic oligonucleotide
uuuagccuuugagagccca

SEQ ID NO: 857959 - RNA, 19 nt, Artificial Sequence
  Description of Artificial Sequence: Synthetic oligonucleotide
agguauagauguguggggu

SEQ ID NO: 857960 - RNA, 19 nt, Artificial Sequence
  Description of Artificial Sequence: Synthetic oligonucleotide
ucgaugacaugcacgucaa

SEQ ID NO: 857961 - RNA, 19 nt, Artificial Sequence
  Description of Artificial Sequence: Synthetic oligonucleotide
cuucgaucacuuuguuggc

SEQ ID NO: 857962 - RNA, 19 nt, Artificial Sequence
  Description of Artificial Sequence: Synthetic oligonucleotide
ucguaagugccuccccuac

SEQ ID NO: 857963 - RNA, 19 nt, Artificial Sequence
  Description of Artificial Sequence: Synthetic oligonucleotide
uuauugucacaaggagaag

SEQ ID NO: 857964 - RNA, 19 nt, Artificial Sequence
  Description of Artificial Sequence: Synthetic oligonucleotide
gcccucauucacuugagcc

SEQ ID NO: 857965 - RNA, 19 nt, Artificial Sequence
  Description of Artificial Sequence: Synthetic oligonucleotide
ugccuuuaaucagccaacc

SEQ ID NO: 857966 - RNA, 19 nt, Artificial Sequence
  Description of Artificial Sequence: Synthetic oligonucleotide
uguugaggggccucauagu

SEQ ID NO: 857967 - RNA, 19 nt, Artificial Sequence
  Description of Artificial Sequence: Synthetic oligonucleotide
gcugagucuaguguguggg

SEQ ID NO: 857968 - RNA, 19 nt, Artificial Sequence
  Description of Artificial Sequence: Synthetic oligonucleotide
gaaaccacggccagugaga

SEQ ID NO: 857969 - RNA, 19 nt, Artificial Sequence
  Description of Artificial Sequence: Synthetic oligonucleotide
cucauagucgugggaagag

SEQ ID NO: 857970 - RNA, 19 nt, Artificial Sequence
  Description of Artificial Sequence: Synthetic oligonucleotide
ugucucguugcaguucuca

SEQ ID NO: 857971 - RNA, 19 nt, Artificial Sequence
  Description of Artificial Sequence: Synthetic oligonucleotide
gggagguauagaugugugg

SEQ ID NO: 857972 - RNA, 19 nt, Artificial Sequence
  Description of Artificial Sequence: Synthetic oligonucleotide
cauagucgugggaagagaa

SEQ ID NO: 857973 - RNA, 19 nt, Artificial Sequence
  Description of Artificial Sequence: Synthetic oligonucleotide
acaaugagacgacggcgcu

SEQ ID NO: 857974 - RNA, 19 nt, Artificial Sequence
  Description of Artificial Sequence: Synthetic oligonucleotide
uccccguaggcaaggugag

SEQ ID NO: 857975 - RNA, 19 nt, Artificial Sequence
  Description of Artificial Sequence: Synthetic oligonucleotide
uuguagugauagcgcacga

SEQ ID NO: 857976 - RNA, 19 nt, Artificial Sequence
  Description of Artificial Sequence: Synthetic oligonucleotide
ucauagucgugggaagaga

SEQ ID NO: 857977 - RNA, 19 nt, Artificial Sequence
  Description of Artificial Sequence: Synthetic oligonucleotide
uagauguguggggucagca

SEQ ID NO: 857978 - RNA, 19 nt, Artificial Sequence
  Description of Artificial Sequence: Synthetic oligonucleotide
uguagugauagcgcacgaa

SEQ ID NO: 857979 - RNA, 19 nt, Artificial Sequence
  Description of Artificial Sequence: Synthetic oligonucleotide
ucgucugacuucagcuuga

SEQ ID NO: 857980 - RNA, 19 nt, Artificial Sequence
  Description of Artificial Sequence: Synthetic oligonucleotide
uugcccucauucacuugag

SEQ ID NO: 857981 - RNA, 19 nt, Artificial Sequence
  Description of Artificial Sequence: Synthetic oligonucleotide
guguuguggacuggaaacc

SEQ ID NO: 857982 - RNA, 19 nt, Artificial Sequence
  Description of Artificial Sequence: Synthetic oligonucleotide
agucuaguguguggguggg

SEQ ID NO: 857983 - RNA, 19 nt, Artificial Sequence
  Description of Artificial Sequence: Synthetic oligonucleotide
cacuugagccuugaugaag

SEQ ID NO: 857984 - RNA, 19 nt, Artificial Sequence
  Description of Artificial Sequence: Synthetic oligonucleotide
auagcgcacgaagucacug

SEQ ID NO: 857985 - RNA, 19 nt, Artificial Sequence
  Description of Artificial Sequence: Synthetic oligonucleotide
uguagugguaacgcaugaa

SEQ ID NO: 857986 - RNA, 19 nt, Artificial Sequence
  Description of Artificial Sequence: Synthetic oligonucleotide
uggucguuugcaccguguc

SEQ ID NO: 857987 - RNA, 19 nt, Artificial Sequence
  Description of Artificial Sequence: Synthetic oligonucleotide
gucaccgcagucucugaug

SEQ ID NO: 857988 - RNA, 19 nt, Artificial Sequence
  Description of Artificial Sequence: Synthetic oligonucleotide
agcagagagcaguuguaau

SEQ ID NO: 857989 - RNA, 19 nt, Artificial Sequence
  Description of Artificial Sequence: Synthetic oligonucleotide
guccaugccuuuaaucagc

SEQ ID NO: 857990 - RNA, 19 nt, Artificial Sequence
  Description of Artificial Sequence: Synthetic oligonucleotide
gguggggaggcacaaugag

SEQ ID NO: 857991 - RNA, 19 nt, Artificial Sequence
  Description of Artificial Sequence: Synthetic oligonucleotide
guaacgaaugaagucccca

SEQ ID NO: 857992 - RNA, 19 nt, Artificial Sequence
  Description of Artificial Sequence: Synthetic oligonucleotide
ucucgggauaccagcucca

SEQ ID NO: 857993 - RNA, 19 nt, Artificial Sequence
  Description of Artificial Sequence: Synthetic oligonucleotide
aguuccccugccacugucc

SEQ ID NO: 857994 - RNA, 19 nt, Artificial Sequence
  Description of Artificial Sequence: Synthetic oligonucleotide
uaagugccuccccuacugu

SEQ ID NO: 857995 - RNA, 19 nt, Artificial Sequence
  Description of Artificial Sequence: Synthetic oligonucleotide
agaccuucgaucacuuugu

SEQ ID NO: 857996 - RNA, 19 nt, Artificial Sequence
  Description of Artificial Sequence: Synthetic oligonucleotide
uugcgucugaggucagacc

SEQ ID NO: 857997 - RNA, 19 nt, Artificial Sequence
  Description of Artificial Sequence: Synthetic oligonucleotide
aggguaccauccauuaaag

SEQ ID NO: 857998 - RNA, 19 nt, Artificial Sequence
  Description of Artificial Sequence: Synthetic oligonucleotide
aguuauccccacugaggga

SEQ ID NO: 857999 - RNA, 19 nt, Artificial Sequence
  Description of Artificial Sequence: Synthetic oligonucleotide
aaaccacggccagugagaa

SEQ ID NO: 858000 - RNA, 19 nt, Artificial Sequence
  Description of Artificial Sequence: Synthetic oligonucleotide
ugggaaagugaaggaccgg

SEQ ID NO: 858001 - RNA, 19 nt, Artificial Sequence
  Description of Artificial Sequence: Synthetic oligonucleotide
cuccuaugguuuugucagg

SEQ ID NO: 858002 - RNA, 19 nt, Artificial Sequence
  Description of Artificial Sequence: Synthetic oligonucleotide
cugcccaacauagguauug

SEQ ID NO: 858003 - RNA, 19 nt, Artificial Sequence
  Description of Artificial Sequence: Synthetic oligonucleotide
aggaccacgucaaaauaga

SEQ ID NO: 858004 - RNA, 19 nt, Artificial Sequence
  Description of Artificial Sequence: Synthetic oligonucleotide
acccuugcugagucuagug

SEQ ID NO: 858005 - RNA, 19 nt, Artificial Sequence
  Description of Artificial Sequence: Synthetic oligonucleotide
uuccccuaugcaugcgccc

SEQ ID NO: 858006 - RNA, 19 nt, Artificial Sequence
  Description of Artificial Sequence: Synthetic oligonucleotide
ugcccucauucacuugagc

SEQ ID NO: 858007 - RNA, 19 nt, Artificial Sequence
  Description of Artificial Sequence: Synthetic oligonucleotide
cauggaucugcucccgguc

SEQ ID NO: 858008 - RNA, 19 nt, Artificial Sequence
  Description of Artificial Sequence: Synthetic oligonucleotide
ccuugcugagucuagugug

SEQ ID NO: 858009 - RNA, 19 nt, Artificial Sequence
  Description of Artificial Sequence: Synthetic oligonucleotide
gcaguuguaaugguaacga

SEQ ID NO: 858010 - RNA, 19 nt, Artificial Sequence
  Description of Artificial Sequence: Synthetic oligonucleotide
ucgccggacacagucccgg

SEQ ID NO: 858011 - RNA, 19 nt, Artificial Sequence
  Description of Artificial Sequence: Synthetic oligonucleotide
gugguugcgggaauagcug

SEQ ID NO: 858012 - RNA, 19 nt, Artificial Sequence
  Description of Artificial Sequence: Synthetic oligonucleotide
aaccacggccagugagaag

SEQ ID NO: 858013 - RNA, 19 nt, Artificial Sequence
  Description of Artificial Sequence: Synthetic oligonucleotide
agugacucccacaguuauc

SEQ ID NO: 858014 - RNA, 19 nt, Artificial Sequence
  Description of Artificial Sequence: Synthetic oligonucleotide
gugauagcgcacgaaguca

SEQ ID NO: 858015 - RNA, 19 nt, Artificial Sequence
  Description of Artificial Sequence: Synthetic oligonucleotide
aggcaugaggcguccuuug

SEQ ID NO: 858016 - RNA, 19 nt, Artificial Sequence
  Description of Artificial Sequence: Synthetic oligonucleotide
cacugccaggaacaccccg

SEQ ID NO: 858017 - RNA, 19 nt, Artificial Sequence
  Description of Artificial Sequence: Synthetic oligonucleotide
cucguugcaguucucaggu

SEQ ID NO: 858018 - RNA, 19 nt, Artificial Sequence
  Description of Artificial Sequence: Synthetic oligonucleotide
caacauagguauuguaggu

SEQ ID NO: 858019 - RNA, 19 nt, Artificial Sequence
  Description of Artificial Sequence: Synthetic oligonucleotide
gggaugauguaacccugcc

SEQ ID NO: 858020 - RNA, 19 nt, Artificial Sequence
  Description of Artificial Sequence: Synthetic oligonucleotide
augcagaggucuguguugu

SEQ ID NO: 858021 - RNA, 19 nt, Artificial Sequence
  Description of Artificial Sequence: Synthetic oligonucleotide
agagugccguuguagugau

SEQ ID NO: 858022 - RNA, 19 nt, Artificial Sequence
  Description of Artificial Sequence: Synthetic oligonucleotide
agccaaccagagccgaugu

SEQ ID NO: 858023 - RNA, 19 nt, Artificial Sequence
  Description of Artificial Sequence: Synthetic oligonucleotide
aaggaccggggagcucacc

SEQ ID NO: 858024 - RNA, 19 nt, Artificial Sequence
  Description of Artificial Sequence: Synthetic oligonucleotide
aaguccccugccacggcuc

SEQ ID NO: 858025 - RNA, 19 nt, Artificial Sequence
  Description of Artificial Sequence: Synthetic oligonucleotide
ccauuaaagaaccauugua

SEQ ID NO: 858026 - RNA, 19 nt, Artificial Sequence
  Description of Artificial Sequence: Synthetic oligonucleotide
uagccugugggcaggccau

SEQ ID NO: 858027 - RNA, 19 nt, Artificial Sequence
  Description of Artificial Sequence: Synthetic oligonucleotide
gacggcgcucguuaacaca

SEQ ID NO: 858028 - RNA, 19 nt, Artificial Sequence
  Description of Artificial Sequence: Synthetic oligonucleotide
agugaaggaccggggagcu

SEQ ID NO: 858029 - RNA, 19 nt, Artificial Sequence
  Description of Artificial Sequence: Synthetic oligonucleotide
uccccuaugcaugcgcccu

SEQ ID NO: 858030 - RNA, 19 nt, Artificial Sequence
  Description of Artificial Sequence: Synthetic oligonucleotide
gauaccagcuccaccucaa

SEQ ID NO: 858031 - RNA, 19 nt, Artificial Sequence
  Description of Artificial Sequence: Synthetic oligonucleotide
cauccauuaaagaaccauu

SEQ ID NO: 858032 - RNA, 19 nt, Artificial Sequence
  Description of Artificial Sequence: Synthetic oligonucleotide
guuccccuaugcaugcgcc

SEQ ID NO: 858033 - RNA, 19 nt, Artificial Sequence
  Description of Artificial Sequence: Synthetic oligonucleotide
ccucaaauaacaggacagc

SEQ ID NO: 858034 - RNA, 19 nt, Artificial Sequence
  Description of Artificial Sequence: Synthetic oligonucleotide
gaucacuuuguuggcgcca

SEQ ID NO: 858035 - RNA, 19 nt, Artificial Sequence
  Description of Artificial Sequence: Synthetic oligonucleotide
ugugggugggagguauaga

SEQ ID NO: 858036 - RNA, 19 nt, Artificial Sequence
  Description of Artificial Sequence: Synthetic oligonucleotide
cuucggguuguggacauca

SEQ ID NO: 858037 - RNA, 19 nt, Artificial Sequence
  Description of Artificial Sequence: Synthetic oligonucleotide
gcguccuuugcccucauuc

SEQ ID NO: 858038 - RNA, 19 nt, Artificial Sequence
  Description of Artificial Sequence: Synthetic oligonucleotide
guuguggacuggaaaccac

SEQ ID NO: 858039 - RNA, 19 nt, Artificial Sequence
  Description of Artificial Sequence: Synthetic oligonucleotide
augaggcguccuuugcccu

SEQ ID NO: 858040 - RNA, 19 nt, Artificial Sequence
  Description of Artificial Sequence: Synthetic oligonucleotide
cagagugccguuguaguga

SEQ ID NO: 858041 - RNA, 19 nt, Artificial Sequence
  Description of Artificial Sequence: Synthetic oligonucleotide
agguauuguaggugugguu

SEQ ID NO: 858042 - RNA, 19 nt, Artificial Sequence
  Description of Artificial Sequence: Synthetic oligonucleotide
cccguaggcaaggugaggg

SEQ ID NO: 858043 - RNA, 19 nt, Artificial Sequence
  Description of Artificial Sequence: Synthetic oligonucleotide
uaggugucguaagugccuc

SEQ ID NO: 858044 - RNA, 19 nt, Artificial Sequence
  Description of Artificial Sequence: Synthetic oligonucleotide
ugucuccuaugguuuuguc

SEQ ID NO: 858045 - RNA, 19 nt, Artificial Sequence
  Description of Artificial Sequence: Synthetic oligonucleotide
gacgacggcgcucguuaac

SEQ ID NO: 858046 - RNA, 19 nt, Artificial Sequence
  Description of Artificial Sequence: Synthetic oligonucleotide
acgacggcgcucguuaaca

SEQ ID NO: 858047 - RNA, 19 nt, Artificial Sequence
  Description of Artificial Sequence: Synthetic oligonucleotide
ugaggcguccuuugcccuc

SEQ ID NO: 858048 - RNA, 19 nt, Artificial Sequence
  Description of Artificial Sequence: Synthetic oligonucleotide
agcgcacgaagucacuguu

SEQ ID NO: 858049 - RNA, 19 nt, Artificial Sequence
  Description of Artificial Sequence: Synthetic oligonucleotide
cuccuucguuccccuaugc

SEQ ID NO: 858050 - RNA, 19 nt, Artificial Sequence
  Description of Artificial Sequence: Synthetic oligonucleotide
cacaaugagcugccgccuc

SEQ ID NO: 858051 - RNA, 19 nt, Artificial Sequence
  Description of Artificial Sequence: Synthetic oligonucleotide
ggaggauggucguuugcac

SEQ ID NO: 858052 - RNA, 19 nt, Artificial Sequence
  Description of Artificial Sequence: Synthetic oligonucleotide
ucguugcaguucucaggug

SEQ ID NO: 858053 - RNA, 19 nt, Artificial Sequence
  Description of Artificial Sequence: Synthetic oligonucleotide
cuugcugagucuagugugu

SEQ ID NO: 858054 - RNA, 19 nt, Artificial Sequence
  Description of Artificial Sequence: Synthetic oligonucleotide
gcugaacuguguccuucgg

SEQ ID NO: 858055 - RNA, 19 nt, Artificial Sequence
  Description of Artificial Sequence: Synthetic oligonucleotide
aucacuuuguuggcgccaa

SEQ ID NO: 858056 - RNA, 19 nt, Artificial Sequence
  Description of Artificial Sequence: Synthetic oligonucleotide
uguccgccuuguuccacac

SEQ ID NO: 858057 - RNA, 19 nt, Artificial Sequence
  Description of Artificial Sequence: Synthetic oligonucleotide
augucuccuaugguuuugu

SEQ ID NO: 858058 - RNA, 19 nt, Artificial Sequence
  Description of Artificial Sequence: Synthetic oligonucleotide
ggugugguugcgggaauag

SEQ ID NO: 858059 - RNA, 19 nt, Artificial Sequence
  Description of Artificial Sequence: Synthetic oligonucleotide
cacggcucgccggacacag

SEQ ID NO: 858060 - RNA, 19 nt, Artificial Sequence
  Description of Artificial Sequence: Synthetic oligonucleotide
ugaggcccgccacaccaau

SEQ ID NO: 858061 - RNA, 19 nt, Artificial Sequence
  Description of Artificial Sequence: Synthetic oligonucleotide
caugcacgucaaagaugag

SEQ ID NO: 858062 - RNA, 19 nt, Artificial Sequence
  Description of Artificial Sequence: Synthetic oligonucleotide
gccguuguagugauagcgc

SEQ ID NO: 858063 - RNA, 19 nt, Artificial Sequence
  Description of Artificial Sequence: Synthetic oligonucleotide
cucgccggacacagucccg

SEQ ID NO: 858064 - RNA, 19 nt, Artificial Sequence
  Description of Artificial Sequence: Synthetic oligonucleotide
ggaccacgucaaaauagag

SEQ ID NO: 858065 - RNA, 19 nt, Artificial Sequence
  Description of Artificial Sequence: Synthetic oligonucleotide
ggcaugaggcguccuuugc

SEQ ID NO: 858066 - RNA, 19 nt, Artificial Sequence
  Description of Artificial Sequence: Synthetic oligonucleotide
ugugugggugggagguaua

SEQ ID NO: 858067 - RNA, 19 nt, Artificial Sequence
  Description of Artificial Sequence: Synthetic oligonucleotide
gguaacgaaugaagucccc

SEQ ID NO: 858068 - RNA, 19 nt, Artificial Sequence
  Description of Artificial Sequence: Synthetic oligonucleotide
gcaacgacccgaaccaaac

SEQ ID NO: 858069 - RNA, 19 nt, Artificial Sequence
  Description of Artificial Sequence: Synthetic oligonucleotide
gugugguugcgggaauagc

SEQ ID NO: 858070 - RNA, 19 nt, Artificial Sequence
  Description of Artificial Sequence: Synthetic oligonucleotide
gggcacauuugggaaagug

SEQ ID NO: 858071 - RNA, 19 nt, Artificial Sequence
  Description of Artificial Sequence: Synthetic oligonucleotide
ucguuccccuaugcaugcg

SEQ ID NO: 858072 - RNA, 19 nt, Artificial Sequence
  Description of Artificial Sequence: Synthetic oligonucleotide
uuauuacgucaagaaccuu

SEQ ID NO: 858073 - RNA, 19 nt, Artificial Sequence
  Description of Artificial Sequence: Synthetic oligonucleotide
ggaaugaggcccgccacac

SEQ ID NO: 858074 - RNA, 19 nt, Artificial Sequence
  Description of Artificial Sequence: Synthetic oligonucleotide
ggagggcgcaggaggaugg

SEQ ID NO: 858075 - RNA, 19 nt, Artificial Sequence
  Description of Artificial Sequence: Synthetic oligonucleotide
ccgauguaggugucguaag

SEQ ID NO: 858076 - RNA, 19 nt, Artificial Sequence
  Description of Artificial Sequence: Synthetic oligonucleotide
caaugagacgacggcgcuc

SEQ ID NO: 858077 - RNA, 19 nt, Artificial Sequence
  Description of Artificial Sequence: Synthetic oligonucleotide
gcgggaauagcuggaauca

SEQ ID NO: 858078 - RNA, 19 nt, Artificial Sequence
  Description of Artificial Sequence: Synthetic oligonucleotide
accuuaaggaagaggugua

SEQ ID NO: 858079 - RNA, 19 nt, Artificial Sequence
  Description of Artificial Sequence: Synthetic oligonucleotide
gcucgccggacacaguccc

SEQ ID NO: 858080 - RNA, 19 nt, Artificial Sequence
  Description of Artificial Sequence: Synthetic oligonucleotide
gugccguuguagugauagc

SEQ ID NO: 858081 - RNA, 19 nt, Artificial Sequence
  Description of Artificial Sequence: Synthetic oligonucleotide
ccgaaccaaacaccagugc

SEQ ID NO: 858082 - RNA, 19 nt, Artificial Sequence
  Description of Artificial Sequence: Synthetic oligonucleotide
ggauaccagcuccaccuca

SEQ ID NO: 858083 - RNA, 19 nt, Artificial Sequence
  Description of Artificial Sequence: Synthetic oligonucleotide
caacgacccgaaccaaaca

SEQ ID NO: 858084 - RNA, 19 nt, Artificial Sequence
  Description of Artificial Sequence: Synthetic oligonucleotide
agcaacgacccgaaccaaa

SEQ ID NO: 858085 - RNA, 19 nt, Artificial Sequence
  Description of Artificial Sequence: Synthetic oligonucleotide
guguccgccuuguuccaca

SEQ ID NO: 858086 - RNA, 19 nt, Artificial Sequence
  Description of Artificial Sequence: Synthetic oligonucleotide
gagugccuuugcgucugag

SEQ ID NO: 858087 - RNA, 19 nt, Artificial Sequence
  Description of Artificial Sequence: Synthetic oligonucleotide
gucguaagugccuccccua

SEQ ID NO: 858088 - RNA, 19 nt, Artificial Sequence
  Description of Artificial Sequence: Synthetic oligonucleotide
aggccauccucucgggaua

SEQ ID NO: 858089 - RNA, 19 nt, Artificial Sequence
  Description of Artificial Sequence: Synthetic oligonucleotide
cacggcugagcccgggauc

SEQ ID NO: 858090 - RNA, 19 nt, Artificial Sequence
  Description of Artificial Sequence: Synthetic oligonucleotide
gcaugcgcccugcagcccc

SEQ ID NO: 858091 - RNA, 19 nt, Artificial Sequence
  Description of Artificial Sequence: Synthetic oligonucleotide
ggcaguaaggagggcgcag

SEQ ID NO: 858092 - RNA, 19 nt, Artificial Sequence
  Description of Artificial Sequence: Synthetic oligonucleotide
guugcgggaauagcuggaa

SEQ ID NO: 858093 - RNA, 19 nt, Artificial Sequence
  Description of Artificial Sequence: Synthetic oligonucleotide
gugggagguauagaugugu

SEQ ID NO: 858094 - RNA, 19 nt, Artificial Sequence
  Description of Artificial Sequence: Synthetic oligonucleotide
auggucguuugcaccgugu

SEQ ID NO: 858095 - RNA, 19 nt, Artificial Sequence
  Description of Artificial Sequence: Synthetic oligonucleotide
cguuguagugauagcgcac

SEQ ID NO: 858096 - RNA, 19 nt, Artificial Sequence
  Description of Artificial Sequence: Synthetic oligonucleotide
caguaaggagggcgcagga

SEQ ID NO: 858097 - RNA, 19 nt, Artificial Sequence
  Description of Artificial Sequence: Synthetic oligonucleotide
ccagggaugauguaacccu

SEQ ID NO: 858098 - RNA, 19 nt, Artificial Sequence
  Description of Artificial Sequence: Synthetic oligonucleotide
ccguaggcaaggugagggg

SEQ ID NO: 858099 - RNA, 19 nt, Artificial Sequence
  Description of Artificial Sequence: Synthetic oligonucleotide
gcucguuaacacacaugcc

SEQ ID NO: 858100 - RNA, 19 nt, Artificial Sequence
  Description of Artificial Sequence: Synthetic oligonucleotide
guccuucggguuguggaca

SEQ ID NO: 858101 - RNA, 19 nt, Artificial Sequence
  Description of Artificial Sequence: Synthetic oligonucleotide
caaucuuggaugucucguu

SEQ ID NO: 858102 - RNA, 19 nt, Artificial Sequence
  Description of Artificial Sequence: Synthetic oligonucleotide
ccguuguagugauagcgca

SEQ ID NO: 858103 - RNA, 19 nt, Artificial Sequence
  Description of Artificial Sequence: Synthetic oligonucleotide
gaggcccgccacaccaaug

SEQ ID NO: 858104 - RNA, 19 nt, Artificial Sequence
  Description of Artificial Sequence: Synthetic oligonucleotide
aagaaccauuguaguggua

SEQ ID NO: 858105 - RNA, 19 nt, Artificial Sequence
  Description of Artificial Sequence: Synthetic oligonucleotide
agccccugguccaucccag

SEQ ID NO: 858106 - RNA, 19 nt, Artificial Sequence
  Description of Artificial Sequence: Synthetic oligonucleotide
cugagcccgggaucuuguc

SEQ ID NO: 858107 - RNA, 19 nt, Artificial Sequence
  Description of Artificial Sequence: Synthetic oligonucleotide
guuuagccuuugagagccc

SEQ ID NO: 858108 - RNA, 19 nt, Artificial Sequence
  Description of Artificial Sequence: Synthetic oligonucleotide
cagcagagagcaguuguaa

SEQ ID NO: 858109 - RNA, 19 nt, Artificial Sequence
  Description of Artificial Sequence: Synthetic oligonucleotide
agacgacggcgcucguuaa

SEQ ID NO: 858110 - RNA, 19 nt, Artificial Sequence
  Description of Artificial Sequence: Synthetic oligonucleotide
cucccacaguuauccccac

SEQ ID NO: 858111 - RNA, 19 nt, Artificial Sequence
  Description of Artificial Sequence: Synthetic oligonucleotide
gaccugagacucuggcccu

SEQ ID NO: 858112 - RNA, 19 nt, Artificial Sequence
  Description of Artificial Sequence: Synthetic oligonucleotide
gccgauguaggugucguaa

SEQ ID NO: 858113 - RNA, 19 nt, Artificial Sequence
  Description of Artificial Sequence: Synthetic oligonucleotide
gagaaggauuggaucaguu

SEQ ID NO: 858114 - RNA, 19 nt, Artificial Sequence
  Description of Artificial Sequence: Synthetic oligonucleotide
aggucaccgcagucucuga

SEQ ID NO: 858115 - RNA, 19 nt, Artificial Sequence
  Description of Artificial Sequence: Synthetic oligonucleotide
agcccuugguccaugccuu

SEQ ID NO: 858116 - RNA, 19 nt, Artificial Sequence
  Description of Artificial Sequence: Synthetic oligonucleotide
cgucaagaaccuuaaggaa

SEQ ID NO: 858117 - RNA, 19 nt, Artificial Sequence
  Description of Artificial Sequence: Synthetic oligonucleotide
cagagccgauguagguguc

SEQ ID NO: 858118 - RNA, 19 nt, Artificial Sequence
  Description of Artificial Sequence: Synthetic oligonucleotide
gauagcgcacgaagucacu

SEQ ID NO: 858119 - RNA, 19 nt, Artificial Sequence
  Description of Artificial Sequence: Synthetic oligonucleotide
gagccgauguaggugucgu

SEQ ID NO: 858120 - RNA, 19 nt, Artificial Sequence
  Description of Artificial Sequence: Synthetic oligonucleotide
gaaggaccggggagcucac

SEQ ID NO: 858121 - RNA, 19 nt, Artificial Sequence
  Description of Artificial Sequence: Synthetic oligonucleotide
ggacacagucccggggcag

SEQ ID NO: 858122 - RNA, 19 nt, Artificial Sequence
  Description of Artificial Sequence: Synthetic oligonucleotide
aggucagaccugagacucu

SEQ ID NO: 858123 - RNA, 19 nt, Artificial Sequence
  Description of Artificial Sequence: Synthetic oligonucleotide
agccgauguaggugucgua

SEQ ID NO: 858124 - RNA, 19 nt, Artificial Sequence
  Description of Artificial Sequence: Synthetic oligonucleotide
gguugcgggaauagcugga

SEQ ID NO: 858125 - RNA, 19 nt, Artificial Sequence
  Description of Artificial Sequence: Synthetic oligonucleotide
ccagagccgauguaggugu

SEQ ID NO: 858126 - RNA, 19 nt, Artificial Sequence
  Description of Artificial Sequence: Synthetic oligonucleotide
cgacccgaaccaaacacca

SEQ ID NO: 858127 - RNA, 19 nt, Artificial Sequence
  Description of Artificial Sequence: Synthetic oligonucleotide
ggguggccuguugaggggc

SEQ ID NO: 858128 - RNA, 19 nt, Artificial Sequence
  Description of Artificial Sequence: Synthetic oligonucleotide
cuuugcgucugaggucaga

SEQ ID NO: 858129 - RNA, 19 nt, Artificial Sequence
  Description of Artificial Sequence: Synthetic oligonucleotide
cgaaugaaguccccaaucu

SEQ ID NO: 858130 - RNA, 19 nt, Artificial Sequence
  Description of Artificial Sequence: Synthetic oligonucleotide
guaacgcaugaaguccccu

SEQ ID NO: 858131 - RNA, 19 nt, Artificial Sequence
  Description of Artificial Sequence: Synthetic oligonucleotide
gccccuguccagaccuucg

SEQ ID NO: 858132 - RNA, 19 nt, Artificial Sequence
  Description of Artificial Sequence: Synthetic oligonucleotide
gaaggucaccgcagucucu

SEQ ID NO: 858133 - RNA, 19 nt, Artificial Sequence
  Description of Artificial Sequence: Synthetic oligonucleotide
ggucuugcccaggcaugag

SEQ ID NO: 858134 - RNA, 19 nt, Artificial Sequence
  Description of Artificial Sequence: Synthetic oligonucleotide
gccacggcucgccggacac

SEQ ID NO: 858135 - RNA, 19 nt, Artificial Sequence
  Description of Artificial Sequence: Synthetic oligonucleotide
accggggagcucacccuug

SEQ ID NO: 858136 - RNA, 19 nt, Artificial Sequence
  Description of Artificial Sequence: Synthetic oligonucleotide
gcgcucguuaacacacaug

SEQ ID NO: 858137 - RNA, 19 nt, Artificial Sequence
  Description of Artificial Sequence: Synthetic oligonucleotide
gaauggggacagacaugua

SEQ ID NO: 858138 - RNA, 19 nt, Artificial Sequence
  Description of Artificial Sequence: Synthetic oligonucleotide
gcgucugaggucagaccug

SEQ ID NO: 858139 - RNA, 19 nt, Artificial Sequence
  Description of Artificial Sequence: Synthetic oligonucleotide
ggcucgccggacacagucc

SEQ ID NO: 858140 - RNA, 19 nt, Artificial Sequence
  Description of Artificial Sequence: Synthetic oligonucleotide
gaccuucgaucacuuuguu

SEQ ID NO: 858141 - RNA, 19 nt, Artificial Sequence
  Description of Artificial Sequence: Synthetic oligonucleotide
gaccggggagcucacccuu

SEQ ID NO: 858142 - RNA, 19 nt, Artificial Sequence
  Description of Artificial Sequence: Synthetic oligonucleotide
gucuaguguguggguggga

SEQ ID NO: 858143 - RNA, 19 nt, Artificial Sequence
  Description of Artificial Sequence: Synthetic oligonucleotide
gaggggccucauagucgug

SEQ ID NO: 858144 - RNA, 19 nt, Artificial Sequence
  Description of Artificial Sequence: Synthetic oligonucleotide
cccuaugcaugcgcccugc

SEQ ID NO: 858145 - RNA, 19 nt, Artificial Sequence
  Description of Artificial Sequence: Synthetic oligonucleotide
ccggggagcucacccuugc

SEQ ID NO: 858146 - RNA, 19 nt, Artificial Sequence
  Description of Artificial Sequence: Synthetic oligonucleotide
ccgagugccuuugcgucug

SEQ ID NO: 858147 - RNA, 19 nt, Artificial Sequence
  Description of Artificial Sequence: Synthetic oligonucleotide
gugaaggaccggggagcuc

SEQ ID NO: 858148 - RNA, 19 nt, Artificial Sequence
  Description of Artificial Sequence: Synthetic oligonucleotide
ggccagugagaaggucacc

SEQ ID NO: 858149 - RNA, 19 nt, Artificial Sequence
  Description of Artificial Sequence: Synthetic oligonucleotide
cggcucgccggacacaguc

SEQ ID NO: 858150 - RNA, 19 nt, Artificial Sequence
  Description of Artificial Sequence: Synthetic oligonucleotide
gggucagcaacgacccgaa

SEQ ID NO: 858151 - RNA, 19 nt, Artificial Sequence
  Description of Artificial Sequence: Synthetic oligonucleotide
ggcgcucguuaacacacau

SEQ ID NO: 858152 - RNA, 19 nt, Artificial Sequence
  Description of Artificial Sequence: Synthetic oligonucleotide
ggucaccgcagucucugau

SEQ ID NO: 858153 - RNA, 19 nt, Artificial Sequence
  Description of Artificial Sequence: Synthetic oligonucleotide
gcgcacgaagucacuguuc

SEQ ID NO: 858154 - RNA, 19 nt, Artificial Sequence
  Description of Artificial Sequence: Synthetic oligonucleotide
cccuugcugagucuagugu

SEQ ID NO: 858155 - RNA, 19 nt, Artificial Sequence
  Description of Artificial Sequence: Synthetic oligonucleotide
ggaccggggagcucacccu

SEQ ID NO: 858156 - RNA, 19 nt, Artificial Sequence
  Description of Artificial Sequence: Synthetic oligonucleotide
guccccugccacggcucgc

SEQ ID NO: 858157 - RNA, 19 nt, Artificial Sequence
  Description of Artificial Sequence: Synthetic oligonucleotide
ccccuaugcaugcgcccug

SEQ ID NO: 858158 - RNA, 19 nt, Artificial Sequence
  Description of Artificial Sequence: Synthetic oligonucleotide
gggcaguaaggagggcgca

SEQ ID NO: 858159 - RNA, 19 nt, Artificial Sequence
  Description of Artificial Sequence: Synthetic oligonucleotide
cauccagcagagugccguu

SEQ ID NO: 858160 - RNA, 19 nt, Artificial Sequence
  Description of Artificial Sequence: Synthetic oligonucleotide
cccgggcuccacucucccc

SEQ ID NO: 858161 - RNA, 19 nt, Artificial Sequence
  Description of Artificial Sequence: Synthetic oligonucleotide
cguuugcaccguguccgcc

SEQ ID NO: 858162 - RNA, 19 nt, Artificial Sequence
  Description of Artificial Sequence: Synthetic oligonucleotide
cgacggcgcucguuaacac

SEQ ID NO: 858163 - RNA, 19 nt, Artificial Sequence
  Description of Artificial Sequence: Synthetic oligonucleotide
gccaaccagagccgaugua

SEQ ID NO: 858164 - RNA, 19 nt, Artificial Sequence
  Description of Artificial Sequence: Synthetic oligonucleotide
cacccuugcugagucuagu

SEQ ID NO: 858165 - RNA, 19 nt, Artificial Sequence
  Description of Artificial Sequence: Synthetic oligonucleotide
cagcaacgacccgaaccaa

SEQ ID NO: 858166 - RNA, 19 nt, Artificial Sequence
  Description of Artificial Sequence: Synthetic oligonucleotide
caggcaugaggcguccuuu

SEQ ID NO: 858167 - RNA, 19 nt, Artificial Sequence
  Description of Artificial Sequence: Synthetic oligonucleotide
ggccccuguccagaccuuc

SEQ ID NO: 858168 - RNA, 19 nt, Artificial Sequence
  Description of Artificial Sequence: Synthetic oligonucleotide
gagggcgcaggaggauggu

SEQ ID NO: 858169 - RNA, 19 nt, Artificial Sequence
  Description of Artificial Sequence: Synthetic oligonucleotide
ggaacaccccgggcuccac

SEQ ID NO: 858170 - RNA, 19 nt, Artificial Sequence
  Description of Artificial Sequence: Synthetic oligonucleotide
cugccacggcucgccggac

SEQ ID NO: 858171 - RNA, 19 nt, Artificial Sequence
  Description of Artificial Sequence: Synthetic oligonucleotide
cgccggacacagucccggg

SEQ ID NO: 858172 - RNA, 19 nt, Artificial Sequence
  Description of Artificial Sequence: Synthetic oligonucleotide
caugcgcccugcagccccu

SEQ ID NO: 858173 - RNA, 19 nt, Artificial Sequence
  Description of Artificial Sequence: Synthetic oligonucleotide
ggauggucguuugcaccgu

SEQ ID NO: 858174 - RNA, 19 nt, Artificial Sequence
  Description of Artificial Sequence: Synthetic oligonucleotide
gcugagcccgggaucuugu

SEQ ID NO: 858175 - RNA, 19 nt, Artificial Sequence
  Description of Artificial Sequence: Synthetic oligonucleotide
acggcucgccggacacagu

SEQ ID NO: 858176 - RNA, 19 nt, Artificial Sequence
  Description of Artificial Sequence: Synthetic oligonucleotide
ccccugccacggcucgccg

SEQ ID NO: 858177 - RNA, 19 nt, Artificial Sequence
  Description of Artificial Sequence: Synthetic oligonucleotide
gcacggcugagcccgggau

SEQ ID NO: 858178 - RNA, 19 nt, Artificial Sequence
  Description of Artificial Sequence: Synthetic oligonucleotide
cguuaacacacaugcccau

SEQ ID NO: 858179 - RNA, 19 nt, Artificial Sequence
  Description of Artificial Sequence: Synthetic oligonucleotide
ccgcagucucugaugacau

SEQ ID NO: 858180 - RNA, 19 nt, Artificial Sequence
  Description of Artificial Sequence: Synthetic oligonucleotide
ccacacaaacagguagccu

SEQ ID NO: 858181 - RNA, 19 nt, Artificial Sequence
  Description of Artificial Sequence: Synthetic oligonucleotide
ggcgccaaggguggccugu

SEQ ID NO: 858182 - RNA, 19 nt, Artificial Sequence
  Description of Artificial Sequence: Synthetic oligonucleotide
ccgggaucuugucuccugu

SEQ ID NO: 858183 - RNA, 19 nt, Artificial Sequence
  Description of Artificial Sequence: Synthetic oligonucleotide
ggcccgccacaccaaugcu

SEQ ID NO: 858184 - RNA, 19 nt, Artificial Sequence
  Description of Artificial Sequence: Synthetic oligonucleotide
cguguccgccuuguuccac

SEQ ID NO: 858185 - RNA, 19 nt, Artificial Sequence
  Description of Artificial Sequence: Synthetic oligonucleotide
ccguguccgccuuguucca

SEQ ID NO: 858186 - RNA, 19 nt, Artificial Sequence
  Description of Artificial Sequence: Synthetic oligonucleotide
cguaagugccuccccuacu

SEQ ID NO: 858187 - RNA, 19 nt, Artificial Sequence
  Description of Artificial Sequence: Synthetic oligonucleotide
cggacacagucccggggca

SEQ ID NO: 858188 - RNA, 19 nt, Artificial Sequence
  Description of Artificial Sequence: Synthetic oligonucleotide
ccccuacuguagcuguugu

SEQ ID NO: 858189 - RNA, 19 nt, Artificial Sequence
  Description of Artificial Sequence: Synthetic oligonucleotide
cgggaauagcuggaaucaa

SEQ ID NO: 858190 - RNA, 19 nt, Artificial Sequence
  Description of Artificial Sequence: Synthetic oligonucleotide
gguccaucccagggaugau

SEQ ID NO: 858191 - RNA, 19 nt, Artificial Sequence
  Description of Artificial Sequence: Synthetic oligonucleotide
cggcgcucguuaacacaca

SEQ ID NO: 858192 - RNA, 19 nt, Artificial Sequence
  Description of Artificial Sequence: Synthetic oligonucleotide
ggcguccuuugcccucauu

SEQ ID NO: 858193 - RNA, 19 nt, Artificial Sequence
  Description of Artificial Sequence: Synthetic oligonucleotide
ccacggcucgccggacaca

SEQ ID NO: 858194 - RNA, 19 nt, Artificial Sequence
  Description of Artificial Sequence: Synthetic oligonucleotide
gcgccaaggguggccuguu

SEQ ID NO: 858195 - RNA, 19 nt, Artificial Sequence
  Description of Artificial Sequence: Synthetic oligonucleotide
cccaggcaugaggcguccu

SEQ ID NO: 858196 - RNA, 19 nt, Artificial Sequence
  Description of Artificial Sequence: Synthetic oligonucleotide
ucuaaugaaccacacauag

SEQ ID NO: 858197 - RNA, 19 nt, Artificial Sequence
  Description of Artificial Sequence: Synthetic oligonucleotide
aauaccucagaguggaagg

SEQ ID NO: 858198 - RNA, 19 nt, Artificial Sequence
  Description of Artificial Sequence: Synthetic oligonucleotide
uuauaauucuucaagucug

SEQ ID NO: 858199 - RNA, 19 nt, Artificial Sequence
  Description of Artificial Sequence: Synthetic oligonucleotide
ucugcaauaaacugcagcc

SEQ ID NO: 858200 - RNA, 19 nt, Artificial Sequence
  Description of Artificial Sequence: Synthetic oligonucleotide
uauacuuccgugcagccag

SEQ ID NO: 858201 - RNA, 19 nt, Artificial Sequence
  Description of Artificial Sequence: Synthetic oligonucleotide
uauaguguccucacguggg

SEQ ID NO: 858202 - RNA, 19 nt, Artificial Sequence
  Description of Artificial Sequence: Synthetic oligonucleotide
ucagcugacacguaggggc

SEQ ID NO: 858203 - RNA, 19 nt, Artificial Sequence
  Description of Artificial Sequence: Synthetic oligonucleotide
ucgugaguaacauuugagg

SEQ ID NO: 858204 - RNA, 19 nt, Artificial Sequence
  Description of Artificial Sequence: Synthetic oligonucleotide
ucguccaacaucuucaagc

SEQ ID NO: 858205 - RNA, 19 nt, Artificial Sequence
  Description of Artificial Sequence: Synthetic oligonucleotide
aaaagaagccagaaggaag

SEQ ID NO: 858206 - RNA, 19 nt, Artificial Sequence
  Description of Artificial Sequence: Synthetic oligonucleotide
uuugcaaguagacacugac

SEQ ID NO: 858207 - RNA, 19 nt, Artificial Sequence
  Description of Artificial Sequence: Synthetic oligonucleotide
cuugcuuauacuuccgugc

SEQ ID NO: 858208 - RNA, 19 nt, Artificial Sequence
  Description of Artificial Sequence: Synthetic oligonucleotide
ugcaauaaacugcagccgc

SEQ ID NO: 858209 - RNA, 19 nt, Artificial Sequence
  Description of Artificial Sequence: Synthetic oligonucleotide
ugcugugcgagucaaugcg

SEQ ID NO: 858210 - RNA, 19 nt, Artificial Sequence
  Description of Artificial Sequence: Synthetic oligonucleotide
gacauugaggcacauguug

SEQ ID NO: 858211 - RNA, 19 nt, Artificial Sequence
  Description of Artificial Sequence: Synthetic oligonucleotide
ugcgaaucuggguauauag

SEQ ID NO: 858212 - RNA, 19 nt, Artificial Sequence
  Description of Artificial Sequence: Synthetic oligonucleotide
ugagacagaaaccuagagu

SEQ ID NO: 858213 - RNA, 19 nt, Artificial Sequence
  Description of Artificial Sequence: Synthetic oligonucleotide
agaauugcccuuauaauuc

SEQ ID NO: 858214 - RNA, 19 nt, Artificial Sequence
  Description of Artificial Sequence: Synthetic oligonucleotide
acuacacacggacaggagg

SEQ ID NO: 858215 - RNA, 19 nt, Artificial Sequence
  Description of Artificial Sequence: Synthetic oligonucleotide
auauaguguccucacgugg

SEQ ID NO: 858216 - RNA, 19 nt, Artificial Sequence
  Description of Artificial Sequence: Synthetic oligonucleotide
ugaccaauuuugcaaguag

SEQ ID NO: 858217 - RNA, 19 nt, Artificial Sequence
  Description of Artificial Sequence: Synthetic oligonucleotide
acucauaaaauuugaagau

SEQ ID NO: 858218 - RNA, 19 nt, Artificial Sequence
  Description of Artificial Sequence: Synthetic oligonucleotide
ugaaccacacauagucugg

SEQ ID NO: 858219 - RNA, 19 nt, Artificial Sequence
  Description of Artificial Sequence: Synthetic oligonucleotide
ugaguaacauuugagggca

SEQ ID NO: 858220 - RNA, 19 nt, Artificial Sequence
  Description of Artificial Sequence: Synthetic oligonucleotide
aaguauugaaugagagccc

SEQ ID NO: 858221 - RNA, 19 nt, Artificial Sequence
  Description of Artificial Sequence: Synthetic oligonucleotide
cuacacacggacaggaggg

SEQ ID NO: 858222 - RNA, 19 nt, Artificial Sequence
  Description of Artificial Sequence: Synthetic oligonucleotide
uagaauugcccuuauaauu

SEQ ID NO: 858223 - RNA, 19 nt, Artificial Sequence
  Description of Artificial Sequence: Synthetic oligonucleotide
ucggucugcaauaaacugc

SEQ ID NO: 858224 - RNA, 19 nt, Artificial Sequence
  Description of Artificial Sequence: Synthetic oligonucleotide
ugaaugagagcccgguugc

SEQ ID NO: 858225 - RNA, 19 nt, Artificial Sequence
  Description of Artificial Sequence: Synthetic oligonucleotide
augaagcauacuuggacuc

SEQ ID NO: 858226 - RNA, 19 nt, Artificial Sequence
  Description of Artificial Sequence: Synthetic oligonucleotide
uugagacagaaaccuagag

SEQ ID NO: 858227 - RNA, 19 nt, Artificial Sequence
  Description of Artificial Sequence: Synthetic oligonucleotide
agaaaccuagagucaggcc

SEQ ID NO: 858228 - RNA, 19 nt, Artificial Sequence
  Description of Artificial Sequence: Synthetic oligonucleotide
ugggaagucgcagugauca

SEQ ID NO: 858229 - RNA, 19 nt, Artificial Sequence
  Description of Artificial Sequence: Synthetic oligonucleotide
ggacucauaaaauuugaag

SEQ ID NO: 858230 - RNA, 19 nt, Artificial Sequence
  Description of Artificial Sequence: Synthetic oligonucleotide
cagaacuacacacggacag

SEQ ID NO: 858231 - RNA, 19 nt, Artificial Sequence
  Description of Artificial Sequence: Synthetic oligonucleotide
gacauugcguugcagcucc

SEQ ID NO: 858232 - RNA, 19 nt, Artificial Sequence
  Description of Artificial Sequence: Synthetic oligonucleotide
gucagaacuacacacggac

SEQ ID NO: 858233 - RNA, 19 nt, Artificial Sequence
  Description of Artificial Sequence: Synthetic oligonucleotide
ugcacaaaggacagggcca

SEQ ID NO: 858234 - RNA, 19 nt, Artificial Sequence
  Description of Artificial Sequence: Synthetic oligonucleotide
aacacaugugaccaauuuu

SEQ ID NO: 858235 - RNA, 19 nt, Artificial Sequence
  Description of Artificial Sequence: Synthetic oligonucleotide
cacacggucuguuucauug

SEQ ID NO: 858236 - RNA, 19 nt, Artificial Sequence
  Description of Artificial Sequence: Synthetic oligonucleotide
uugcuuauacuuccgugca

SEQ ID NO: 858237 - RNA, 19 nt, Artificial Sequence
  Description of Artificial Sequence: Synthetic oligonucleotide
aauuuugcaaguagacacu

SEQ ID NO: 858238 - RNA, 19 nt, Artificial Sequence
  Description of Artificial Sequence: Synthetic oligonucleotide
caggcugcucuaaugaacc

SEQ ID NO: 858239 - RNA, 19 nt, Artificial Sequence
  Description of Artificial Sequence: Synthetic oligonucleotide
cucgugaguaacauuugag

SEQ ID NO: 858240 - RNA, 19 nt, Artificial Sequence
  Description of Artificial Sequence: Synthetic oligonucleotide
aguggaagggcagugaacu

SEQ ID NO: 858241 - RNA, 19 nt, Artificial Sequence
  Description of Artificial Sequence: Synthetic oligonucleotide
uggaguuagcuccccuugg

SEQ ID NO: 858242 - RNA, 19 nt, Artificial Sequence
  Description of Artificial Sequence: Synthetic oligonucleotide
aucggucugcaauaaacug

SEQ ID NO: 858243 - RNA, 19 nt, Artificial Sequence
  Description of Artificial Sequence: Synthetic oligonucleotide
agucgcagugaucaaaaga

SEQ ID NO: 858244 - RNA, 19 nt, Artificial Sequence
  Description of Artificial Sequence: Synthetic oligonucleotide
cauccugugagggucaggg

SEQ ID NO: 858245 - RNA, 19 nt, Artificial Sequence
  Description of Artificial Sequence: Synthetic oligonucleotide
acguaguucacaucaggug

SEQ ID NO: 858246 - RNA, 19 nt, Artificial Sequence
  Description of Artificial Sequence: Synthetic oligonucleotide
caugugaccaauuuugcaa

SEQ ID NO: 858247 - RNA, 19 nt, Artificial Sequence
  Description of Artificial Sequence: Synthetic oligonucleotide
uugcugacauagcuuaaca

SEQ ID NO: 858248 - RNA, 19 nt, Artificial Sequence
  Description of Artificial Sequence: Synthetic oligonucleotide
agcuuaacacaugugacca

SEQ ID NO: 858249 - RNA, 19 nt, Artificial Sequence
  Description of Artificial Sequence: Synthetic oligonucleotide
uauugaaugagagcccggu

SEQ ID NO: 858250 - RNA, 19 nt, Artificial Sequence
  Description of Artificial Sequence: Synthetic oligonucleotide
cuuauacuuccgugcagcc

SEQ ID NO: 858251 - RNA, 19 nt, Artificial Sequence
  Description of Artificial Sequence: Synthetic oligonucleotide
uaacacaugugaccaauuu

SEQ ID NO: 858252 - RNA, 19 nt, Artificial Sequence
  Description of Artificial Sequence: Synthetic oligonucleotide
ugcugacauagcuuaacac

SEQ ID NO: 858253 - RNA, 19 nt, Artificial Sequence
  Description of Artificial Sequence: Synthetic oligonucleotide
guaguucacaucaggugcg

SEQ ID NO: 858254 - RNA, 19 nt, Artificial Sequence
  Description of Artificial Sequence: Synthetic oligonucleotide
ucgcagugaucaaaagaag

SEQ ID NO: 858255 - RNA, 19 nt, Artificial Sequence
  Description of Artificial Sequence: Synthetic oligonucleotide
uuuugcaaguagacacuga

SEQ ID NO: 858256 - RNA, 19 nt, Artificial Sequence
  Description of Artificial Sequence: Synthetic oligonucleotide
uuccgaguggccuccaccc

SEQ ID NO: 858257 - RNA, 19 nt, Artificial Sequence
  Description of Artificial Sequence: Synthetic oligonucleotide
ugcagcacacuugagcuug

SEQ ID NO: 858258 - RNA, 19 nt, Artificial Sequence
  Description of Artificial Sequence: Synthetic oligonucleotide
cgugaguaacauuugaggg

SEQ ID NO: 858259 - RNA, 19 nt, Artificial Sequence
  Description of Artificial Sequence: Synthetic oligonucleotide
ucauggccgcgccugaugc

SEQ ID NO: 858260 - RNA, 19 nt, Artificial Sequence
  Description of Artificial Sequence: Synthetic oligonucleotide
uggacucauaaaauuugaa

SEQ ID NO: 858261 - RNA, 19 nt, Artificial Sequence
  Description of Artificial Sequence: Synthetic oligonucleotide
ugcucuaaugaaccacaca

SEQ ID NO: 858262 - RNA, 19 nt, Artificial Sequence
  Description of Artificial Sequence: Synthetic oligonucleotide
cauccaaguggccaggcug

SEQ ID NO: 858263 - RNA, 19 nt, Artificial Sequence
  Description of Artificial Sequence: Synthetic oligonucleotide
guauauaguguccucacgu

SEQ ID NO: 858264 - RNA, 19 nt, Artificial Sequence
  Description of Artificial Sequence: Synthetic oligonucleotide
ugcuuauacuuccgugcag

SEQ ID NO: 858265 - RNA, 19 nt, Artificial Sequence
  Description of Artificial Sequence: Synthetic oligonucleotide
aagucgcagugaucaaaag

SEQ ID NO: 858266 - RNA, 19 nt, Artificial Sequence
  Description of Artificial Sequence: Synthetic oligonucleotide
auuuugcaaguagacacug

SEQ ID NO: 858267 - RNA, 19 nt, Artificial Sequence
  Description of Artificial Sequence: Synthetic oligonucleotide
gucgcagugaucaaaagaa

SEQ ID NO: 858268 - RNA, 19 nt, Artificial Sequence
  Description of Artificial Sequence: Synthetic oligonucleotide
gguauauaguguccucacg

SEQ ID NO: 858269 - RNA, 19 nt, Artificial Sequence
  Description of Artificial Sequence: Synthetic oligonucleotide
ucucgugcguacaguaucu

SEQ ID NO: 858270 - RNA, 19 nt, Artificial Sequence
  Description of Artificial Sequence: Synthetic oligonucleotide
ucaaugcgcaucaggccgc

SEQ ID NO: 858271 - RNA, 19 nt, Artificial Sequence
  Description of Artificial Sequence: Synthetic oligonucleotide
agaacuacacacggacagg

SEQ ID NO: 858272 - RNA, 19 nt, Artificial Sequence
  Description of Artificial Sequence: Synthetic oligonucleotide
cucccuaguggccucagag

SEQ ID NO: 858273 - RNA, 19 nt, Artificial Sequence
  Description of Artificial Sequence: Synthetic oligonucleotide
caggccgacaggcugacgc

SEQ ID NO: 858274 - RNA, 19 nt, Artificial Sequence
  Description of Artificial Sequence: Synthetic oligonucleotide
gacgacgaggcggagcugg

SEQ ID NO: 858275 - RNA, 19 nt, Artificial Sequence
  Description of Artificial Sequence: Synthetic oligonucleotide
ggucaaaaguggcuaaggc

SEQ ID NO: 858276 - RNA, 19 nt, Artificial Sequence
  Description of Artificial Sequence: Synthetic oligonucleotide
auccgugacuggcuguugg

SEQ ID NO: 858277 - RNA, 19 nt, Artificial Sequence
  Description of Artificial Sequence: Synthetic oligonucleotide
uuuggcgcgccguuggaac

SEQ ID NO: 858278 - RNA, 19 nt, Artificial Sequence
  Description of Artificial Sequence: Synthetic oligonucleotide
uucucuaggaggagacuuc

SEQ ID NO: 858279 - RNA, 19 nt, Artificial Sequence
  Description of Artificial Sequence: Synthetic oligonucleotide
uccugccggucaaaagugg

SEQ ID NO: 858280 - RNA, 19 nt, Artificial Sequence
  Description of Artificial Sequence: Synthetic oligonucleotide
uuucggggauggcaucggg

SEQ ID NO: 858281 - RNA, 19 nt, Artificial Sequence
  Description of Artificial Sequence: Synthetic oligonucleotide
uuguagucgcccgacgugc

SEQ ID NO: 858282 - RNA, 19 nt, Artificial Sequence
  Description of Artificial Sequence: Synthetic oligonucleotide
auaccucagaguggaaggg

SEQ ID NO: 858283 - RNA, 19 nt, Artificial Sequence
  Description of Artificial Sequence: Synthetic oligonucleotide
caacugucguguugaaggc

SEQ ID NO: 858284 - RNA, 19 nt, Artificial Sequence
  Description of Artificial Sequence: Synthetic oligonucleotide
cguaguucacaucaggugc

SEQ ID NO: 858285 - RNA, 19 nt, Artificial Sequence
  Description of Artificial Sequence: Synthetic oligonucleotide
cugauccacgucucgugcg

SEQ ID NO: 858286 - RNA, 19 nt, Artificial Sequence
  Description of Artificial Sequence: Synthetic oligonucleotide
uucggggauggcaucgggc

SEQ ID NO: 858287 - RNA, 19 nt, Artificial Sequence
  Description of Artificial Sequence: Synthetic oligonucleotide
guuguagucgcccgacgug

SEQ ID NO: 858288 - RNA, 19 nt, Artificial Sequence
  Description of Artificial Sequence: Synthetic oligonucleotide
uuauacuuccgugcagcca

SEQ ID NO: 858289 - RNA, 19 nt, Artificial Sequence
  Description of Artificial Sequence: Synthetic oligonucleotide
cugcguuagcucauccucc

SEQ ID NO: 858290 - RNA, 19 nt, Artificial Sequence
  Description of Artificial Sequence: Synthetic oligonucleotide
ugugaccaauuuugcaagu

SEQ ID NO: 858291 - RNA, 19 nt, Artificial Sequence
  Description of Artificial Sequence: Synthetic oligonucleotide
ugcgcugauccacgucucg

SEQ ID NO: 858292 - RNA, 19 nt, Artificial Sequence
  Description of Artificial Sequence: Synthetic oligonucleotide
ucgugcguacaguaucuug

SEQ ID NO: 858293 - RNA, 19 nt, Artificial Sequence
  Description of Artificial Sequence: Synthetic oligonucleotide
ugauccacgucucgugcgu

SEQ ID NO: 858294 - RNA, 19 nt, Artificial Sequence
  Description of Artificial Sequence: Synthetic oligonucleotide
caaugcgggcguuaaugag

SEQ ID NO: 858295 - RNA, 19 nt, Artificial Sequence
  Description of Artificial Sequence: Synthetic oligonucleotide
ugcguuagcucauccucca

SEQ ID NO: 858296 - RNA, 19 nt, Artificial Sequence
  Description of Artificial Sequence: Synthetic oligonucleotide
aguaucuugcugugcgagu

SEQ ID NO: 858297 - RNA, 19 nt, Artificial Sequence
  Description of Artificial Sequence: Synthetic oligonucleotide
aucuugugcaugucagcug

SEQ ID NO: 858298 - RNA, 19 nt, Artificial Sequence
  Description of Artificial Sequence: Synthetic oligonucleotide
uaaugagacccuccaggau

SEQ ID NO: 858299 - RNA, 19 nt, Artificial Sequence
  Description of Artificial Sequence: Synthetic oligonucleotide
gaccaauuuugcaaguaga

SEQ ID NO: 858300 - RNA, 19 nt, Artificial Sequence
  Description of Artificial Sequence: Synthetic oligonucleotide
gaacuacacacggacagga

SEQ ID NO: 858301 - RNA, 19 nt, Artificial Sequence
  Description of Artificial Sequence: Synthetic oligonucleotide
uuaacacaugugaccaauu

SEQ ID NO: 858302 - RNA, 19 nt, Artificial Sequence
  Description of Artificial Sequence: Synthetic oligonucleotide
ggaagcacuuagcagcuug

SEQ ID NO: 858303 - RNA, 19 nt, Artificial Sequence
  Description of Artificial Sequence: Synthetic oligonucleotide
aaugggcagccugccuacc

SEQ ID NO: 858304 - RNA, 19 nt, Artificial Sequence
  Description of Artificial Sequence: Synthetic oligonucleotide
ugcgagucaaugcgggcgu

SEQ ID NO: 858305 - RNA, 19 nt, Artificial Sequence
  Description of Artificial Sequence: Synthetic oligonucleotide
acugucguguugaaggcug

SEQ ID NO: 858306 - RNA, 19 nt, Artificial Sequence
  Description of Artificial Sequence: Synthetic oligonucleotide
gacacguaggggcugaagu

SEQ ID NO: 858307 - RNA, 19 nt, Artificial Sequence
  Description of Artificial Sequence: Synthetic oligonucleotide
aguagucccgggcucguga

SEQ ID NO: 858308 - RNA, 19 nt, Artificial Sequence
  Description of Artificial Sequence: Synthetic oligonucleotide
auccacgucucgugcguac

SEQ ID NO: 858309 - RNA, 19 nt, Artificial Sequence
  Description of Artificial Sequence: Synthetic oligonucleotide
uguagucgcccgacgugcc

SEQ ID NO: 858310 - RNA, 19 nt, Artificial Sequence
  Description of Artificial Sequence: Synthetic oligonucleotide
augcgggcguuaaugagac

SEQ ID NO: 858311 - RNA, 19 nt, Artificial Sequence
  Description of Artificial Sequence: Synthetic oligonucleotide
ugugcgagucaaugcgggc

SEQ ID NO: 858312 - RNA, 19 nt, Artificial Sequence
  Description of Artificial Sequence: Synthetic oligonucleotide
cuugggucuggcugucccg

SEQ ID NO: 858313 - RNA, 19 nt, Artificial Sequence
  Description of Artificial Sequence: Synthetic oligonucleotide
auugagacagaaaccuaga

SEQ ID NO: 858314 - RNA, 19 nt, Artificial Sequence
  Description of Artificial Sequence: Synthetic oligonucleotide
ugacgcucagguuguaguc

SEQ ID NO: 858315 - RNA, 19 nt, Artificial Sequence
  Description of Artificial Sequence: Synthetic oligonucleotide
gcucuaaugaaccacacau

SEQ ID NO: 858316 - RNA, 19 nt, Artificial Sequence
  Description of Artificial Sequence: Synthetic oligonucleotide
ugauagaauugcccuuaua

SEQ ID NO: 858317 - RNA, 19 nt, Artificial Sequence
  Description of Artificial Sequence: Synthetic oligonucleotide
gaagucgcagugaucaaaa

SEQ ID NO: 858318 - RNA, 19 nt, Artificial Sequence
  Description of Artificial Sequence: Synthetic oligonucleotide
uacacacggacaggagggg

SEQ ID NO: 858319 - RNA, 19 nt, Artificial Sequence
  Description of Artificial Sequence: Synthetic oligonucleotide
ugccuuucacauguuggug

SEQ ID NO: 858320 - RNA, 19 nt, Artificial Sequence
  Description of Artificial Sequence: Synthetic oligonucleotide
aggucggaggccgacgacg

SEQ ID NO: 858321 - RNA, 19 nt, Artificial Sequence
  Description of Artificial Sequence: Synthetic oligonucleotide
aacugucguguugaaggcu

SEQ ID NO: 858322 - RNA, 19 nt, Artificial Sequence
  Description of Artificial Sequence: Synthetic oligonucleotide
uugauagaauugcccuuau

SEQ ID NO: 858323 - RNA, 19 nt, Artificial Sequence
  Description of Artificial Sequence: Synthetic oligonucleotide
gucucgugcguacaguauc

SEQ ID NO: 858324 - RNA, 19 nt, Artificial Sequence
  Description of Artificial Sequence: Synthetic oligonucleotide
cuccugccggucaaaagug

SEQ ID NO: 858325 - RNA, 19 nt, Artificial Sequence
  Description of Artificial Sequence: Synthetic oligonucleotide
guauugaaugagagcccgg

SEQ ID NO: 858326 - RNA, 19 nt, Artificial Sequence
  Description of Artificial Sequence: Synthetic oligonucleotide
ugcauggguuccacagccc

SEQ ID NO: 858327 - RNA, 19 nt, Artificial Sequence
  Description of Artificial Sequence: Synthetic oligonucleotide
guaucuugcugugcgaguc

SEQ ID NO: 858328 - RNA, 19 nt, Artificial Sequence
  Description of Artificial Sequence: Synthetic oligonucleotide
agguuguagucgcccgacg

SEQ ID NO: 858329 - RNA, 19 nt, Artificial Sequence
  Description of Artificial Sequence: Synthetic oligonucleotide
gcuugcuuauacuuccgug

SEQ ID NO: 858330 - RNA, 19 nt, Artificial Sequence
  Description of Artificial Sequence: Synthetic oligonucleotide
uccgugacuggcuguuggc

SEQ ID NO: 858331 - RNA, 19 nt, Artificial Sequence
  Description of Artificial Sequence: Synthetic oligonucleotide
cgugcguacaguaucuugc

SEQ ID NO: 858332 - RNA, 19 nt, Artificial Sequence
  Description of Artificial Sequence: Synthetic oligonucleotide
auugaaugagagcccgguu

SEQ ID NO: 858333 - RNA, 19 nt, Artificial Sequence
  Description of Artificial Sequence: Synthetic oligonucleotide
aucuucaagcaugaagcau

SEQ ID NO: 858334 - RNA, 19 nt, Artificial Sequence
  Description of Artificial Sequence: Synthetic oligonucleotide
gcgggcguuaaugagaccc

SEQ ID NO: 858335 - RNA, 19 nt, Artificial Sequence
  Description of Artificial Sequence: Synthetic oligonucleotide
agcugcguuagcucauccu

SEQ ID NO: 858336 - RNA, 19 nt, Artificial Sequence
  Description of Artificial Sequence: Synthetic oligonucleotide
aucauggccgcgccugaug

SEQ ID NO: 858337 - RNA, 19 nt, Artificial Sequence
  Description of Artificial Sequence: Synthetic oligonucleotide
cucuacccgcaguggaggg

SEQ ID NO: 858338 - RNA, 19 nt, Artificial Sequence
  Description of Artificial Sequence: Synthetic oligonucleotide
ggguauauaguguccucac

SEQ ID NO: 858339 - RNA, 19 nt, Artificial Sequence
  Description of Artificial Sequence: Synthetic oligonucleotide
ggaguuagcuccccuuggc

SEQ ID NO: 858340 - RNA, 19 nt, Artificial Sequence
  Description of Artificial Sequence: Synthetic oligonucleotide
agcacuuagcagcuugcuu

SEQ ID NO: 858341 - RNA, 19 nt, Artificial Sequence
  Description of Artificial Sequence: Synthetic oligonucleotide
cugcucuaaugaaccacac

SEQ ID NO: 858342 - RNA, 19 nt, Artificial Sequence
  Description of Artificial Sequence: Synthetic oligonucleotide
guagucccgggcucgugag

SEQ ID NO: 858343 - RNA, 19 nt, Artificial Sequence
  Description of Artificial Sequence: Synthetic oligonucleotide
cccuaguggccucagagag

SEQ ID NO: 858344 - RNA, 19 nt, Artificial Sequence
  Description of Artificial Sequence: Synthetic oligonucleotide
uugggucuggcugucccgc

SEQ ID NO: 858345 - RNA, 19 nt, Artificial Sequence
  Description of Artificial Sequence: Synthetic oligonucleotide
uagucgcccgacgugccgg

SEQ ID NO: 858346 - RNA, 19 nt, Artificial Sequence
  Description of Artificial Sequence: Synthetic oligonucleotide
guagucgcccgacgugccg

SEQ ID NO: 858347 - RNA, 19 nt, Artificial Sequence
  Description of Artificial Sequence: Synthetic oligonucleotide
caaaaguggcuaaggcaca

SEQ ID NO: 858348 - RNA, 19 nt, Artificial Sequence
  Description of Artificial Sequence: Synthetic oligonucleotide
agggcaucggucugcaaua

SEQ ID NO: 858349 - RNA, 19 nt, Artificial Sequence
  Description of Artificial Sequence: Synthetic oligonucleotide
gcaucggucugcaauaaac

SEQ ID NO: 858350 - RNA, 19 nt, Artificial Sequence
  Description of Artificial Sequence: Synthetic oligonucleotide
uccgguggaucucuucaua

SEQ ID NO: 858351 - RNA, 19 nt, Artificial Sequence
  Description of Artificial Sequence: Synthetic oligonucleotide
gcucaaugcgcaucaggcc

SEQ ID NO: 858352 - RNA, 19 nt, Artificial Sequence
  Description of Artificial Sequence: Synthetic oligonucleotide
gagggcaucggucugcaau

SEQ ID NO: 858353 - RNA, 19 nt, Artificial Sequence
  Description of Artificial Sequence: Synthetic oligonucleotide
cucuaaugaaccacacaua

SEQ ID NO: 858354 - RNA, 19 nt, Artificial Sequence
  Description of Artificial Sequence: Synthetic oligonucleotide
ugacacguaggggcugaag

SEQ ID NO: 858355 - RNA, 19 nt, Artificial Sequence
  Description of Artificial Sequence: Synthetic oligonucleotide
gcagcgugcaggccgacag

SEQ ID NO: 858356 - RNA, 19 nt, Artificial Sequence
  Description of Artificial Sequence: Synthetic oligonucleotide
ucuacccgcaguggagggc

SEQ ID NO: 858357 - RNA, 19 nt, Artificial Sequence
  Description of Artificial Sequence: Synthetic oligonucleotide
cuaaugaaccacacauagu

SEQ ID NO: 858358 - RNA, 19 nt, Artificial Sequence
  Description of Artificial Sequence: Synthetic oligonucleotide
aguaacauuugagggcauu

SEQ ID NO: 858359 - RNA, 19 nt, Artificial Sequence
  Description of Artificial Sequence: Synthetic oligonucleotide
cacguaguucacaucaggu

SEQ ID NO: 858360 - RNA, 19 nt, Artificial Sequence
  Description of Artificial Sequence: Synthetic oligonucleotide
caucggucugcaauaaacu

SEQ ID NO: 858361 - RNA, 19 nt, Artificial Sequence
  Description of Artificial Sequence: Synthetic oligonucleotide
ucauggcuuuggcgcgccg

SEQ ID NO: 858362 - RNA, 19 nt, Artificial Sequence
  Description of Artificial Sequence: Synthetic oligonucleotide
cuaaggcacacaggccacc

SEQ ID NO: 858363 - RNA, 19 nt, Artificial Sequence
  Description of Artificial Sequence: Synthetic oligonucleotide
uggugcugcgcugauccac

SEQ ID NO: 858364 - RNA, 19 nt, Artificial Sequence
  Description of Artificial Sequence: Synthetic oligonucleotide
gcucucuuugauagaauug

SEQ ID NO: 858365 - RNA, 19 nt, Artificial Sequence
  Description of Artificial Sequence: Synthetic oligonucleotide
uccgaguggccuccaccca

SEQ ID NO: 858366 - RNA, 19 nt, Artificial Sequence
  Description of Artificial Sequence: Synthetic oligonucleotide
accucagaguggaagggca

SEQ ID NO: 858367 - RNA, 19 nt, Artificial Sequence
  Description of Artificial Sequence: Synthetic oligonucleotide
cagggccauuuucaaggcc

SEQ ID NO: 858368 - RNA, 19 nt, Artificial Sequence
  Description of Artificial Sequence: Synthetic oligonucleotide
cagggcugcaacugucgug

SEQ ID NO: 858369 - RNA, 19 nt, Artificial Sequence
  Description of Artificial Sequence: Synthetic oligonucleotide
ugccggucaaaaguggcua

SEQ ID NO: 858370 - RNA, 19 nt, Artificial Sequence
  Description of Artificial Sequence: Synthetic oligonucleotide
accccuaccugggcauugc

SEQ ID NO: 858371 - RNA, 19 nt, Artificial Sequence
  Description of Artificial Sequence: Synthetic oligonucleotide
gagcugcguuagcucaucc

SEQ ID NO: 858372 - RNA, 19 nt, Artificial Sequence
  Description of Artificial Sequence: Synthetic oligonucleotide
ggugcugcgcugauccacg

SEQ ID NO: 858373 - RNA, 19 nt, Artificial Sequence
  Description of Artificial Sequence: Synthetic oligonucleotide
acgucucgugcguacagua

SEQ ID NO: 858374 - RNA, 19 nt, Artificial Sequence
  Description of Artificial Sequence: Synthetic oligonucleotide
agucagaacuacacacgga

SEQ ID NO: 858375 - RNA, 19 nt, Artificial Sequence
  Description of Artificial Sequence: Synthetic oligonucleotide
gagguaccccuaccugggc

SEQ ID NO: 858376 - RNA, 19 nt, Artificial Sequence
  Description of Artificial Sequence: Synthetic oligonucleotide
auacuuccgugcagccagc

SEQ ID NO: 858377 - RNA, 19 nt, Artificial Sequence
  Description of Artificial Sequence: Synthetic oligonucleotide
gccguuggaacuccuugcc

SEQ ID NO: 858378 - RNA, 19 nt, Artificial Sequence
  Description of Artificial Sequence: Synthetic oligonucleotide
gaguuagcuccccuuggcu

SEQ ID NO: 858379 - RNA, 19 nt, Artificial Sequence
  Description of Artificial Sequence: Synthetic oligonucleotide
aauccagggugggguucuc

SEQ ID NO: 858380 - RNA, 19 nt, Artificial Sequence
  Description of Artificial Sequence: Synthetic oligonucleotide
gcguuaaugagacccucca

SEQ ID NO: 858381 - RNA, 19 nt, Artificial Sequence
  Description of Artificial Sequence: Synthetic oligonucleotide
agucgcccgacgugccggg

SEQ ID NO: 858382 - RNA, 19 nt, Artificial Sequence
  Description of Artificial Sequence: Synthetic oligonucleotide
ccugccggucaaaaguggc

SEQ ID NO: 858383 - RNA, 19 nt, Artificial Sequence
  Description of Artificial Sequence: Synthetic oligonucleotide
gucagggcgaugccuuuca

SEQ ID NO: 858384 - RNA, 19 nt, Artificial Sequence
  Description of Artificial Sequence: Synthetic oligonucleotide
cuuaacacaugugaccaau

SEQ ID NO: 858385 - RNA, 19 nt, Artificial Sequence
  Description of Artificial Sequence: Synthetic oligonucleotide
cagguuguagucgcccgac

SEQ ID NO: 858386 - RNA, 19 nt, Artificial Sequence
  Description of Artificial Sequence: Synthetic oligonucleotide
gcugugcgagucaaugcgg

SEQ ID NO: 858387 - RNA, 19 nt, Artificial Sequence
  Description of Artificial Sequence: Synthetic oligonucleotide
ggggauccacaucaaucug

SEQ ID NO: 858388 - RNA, 19 nt, Artificial Sequence
  Description of Artificial Sequence: Synthetic oligonucleotide
uucaagcaugaagcauacu

SEQ ID NO: 858389 - RNA, 19 nt, Artificial Sequence
  Description of Artificial Sequence: Synthetic oligonucleotide
ggcguuaaugagacccucc

SEQ ID NO: 858390 - RNA, 19 nt, Artificial Sequence
  Description of Artificial Sequence: Synthetic oligonucleotide
uugcgaaucuggguauaua

SEQ ID NO: 858391 - RNA, 19 nt, Artificial Sequence
  Description of Artificial Sequence: Synthetic oligonucleotide
auggcuuuggcgcgccguu

SEQ ID NO: 858392 - RNA, 19 nt, Artificial Sequence
  Description of Artificial Sequence: Synthetic oligonucleotide
cugacgcucagguuguagu

SEQ ID NO: 858393 - RNA, 19 nt, Artificial Sequence
  Description of Artificial Sequence: Synthetic oligonucleotide
ccgguggaucucuucauac

SEQ ID NO: 858394 - RNA, 19 nt, Artificial Sequence
  Description of Artificial Sequence: Synthetic oligonucleotide
aggagggguuugagguacc

SEQ ID NO: 858395 - RNA, 19 nt, Artificial Sequence
  Description of Artificial Sequence: Synthetic oligonucleotide
ccuaguggccucagagagc

SEQ ID NO: 858396 - RNA, 19 nt, Artificial Sequence
  Description of Artificial Sequence: Synthetic oligonucleotide
cugggaagucgcagugauc

SEQ ID NO: 858397 - RNA, 19 nt, Artificial Sequence
  Description of Artificial Sequence: Synthetic oligonucleotide
uaccccuaccugggcauug

SEQ ID NO: 858398 - RNA, 19 nt, Artificial Sequence
  Description of Artificial Sequence: Synthetic oligonucleotide
acacacggacaggaggggu

SEQ ID NO: 858399 - RNA, 19 nt, Artificial Sequence
  Description of Artificial Sequence: Synthetic oligonucleotide
acauagucuggagccuccu

SEQ ID NO: 858400 - RNA, 19 nt, Artificial Sequence
  Description of Artificial Sequence: Synthetic oligonucleotide
ucaggccgcuguagcuggc

SEQ ID NO: 858401 - RNA, 19 nt, Artificial Sequence
  Description of Artificial Sequence: Synthetic oligonucleotide
agagcccgguugcgaaucu

SEQ ID NO: 858402 - RNA, 19 nt, Artificial Sequence
  Description of Artificial Sequence: Synthetic oligonucleotide
cagcgugcaggccgacagg

SEQ ID NO: 858403 - RNA, 19 nt, Artificial Sequence
  Description of Artificial Sequence: Synthetic oligonucleotide
ggcugcucuaaugaaccac

SEQ ID NO: 858404 - RNA, 19 nt, Artificial Sequence
  Description of Artificial Sequence: Synthetic oligonucleotide
cuacccgcaguggagggca

SEQ ID NO: 858405 - RNA, 19 nt, Artificial Sequence
  Description of Artificial Sequence: Synthetic oligonucleotide
cauucugcagcucccuagu

SEQ ID NO: 858406 - RNA, 19 nt, Artificial Sequence
  Description of Artificial Sequence: Synthetic oligonucleotide
aggccucuacccgcagugg

SEQ ID NO: 858407 - RNA, 19 nt, Artificial Sequence
  Description of Artificial Sequence: Synthetic oligonucleotide
gguccgagcggcugugcgc

SEQ ID NO: 858408 - RNA, 19 nt, Artificial Sequence
  Description of Artificial Sequence: Synthetic oligonucleotide
gcgccugaugcucucuuug

SEQ ID NO: 858409 - RNA, 19 nt, Artificial Sequence
  Description of Artificial Sequence: Synthetic oligonucleotide
gguuguagucgcccgacgu

SEQ ID NO: 858410 - RNA, 19 nt, Artificial Sequence
  Description of Artificial Sequence: Synthetic oligonucleotide
gcgccguuggaacuccuug

SEQ ID NO: 858411 - RNA, 19 nt, Artificial Sequence
  Description of Artificial Sequence: Synthetic oligonucleotide
aagcauacuuggacucaua

SEQ ID NO: 858412 - RNA, 19 nt, Artificial Sequence
  Description of Artificial Sequence: Synthetic oligonucleotide
cguuggaacuccuugccca

SEQ ID NO: 858413 - RNA, 19 nt, Artificial Sequence
  Description of Artificial Sequence: Synthetic oligonucleotide
ggaagucgcagugaucaaa

SEQ ID NO: 858414 - RNA, 19 nt, Artificial Sequence
  Description of Artificial Sequence: Synthetic oligonucleotide
cggucugcaauaaacugca

SEQ ID NO: 858415 - RNA, 19 nt, Artificial Sequence
  Description of Artificial Sequence: Synthetic oligonucleotide
cuucucuaggaggagacuu

SEQ ID NO: 858416 - RNA, 19 nt, Artificial Sequence
  Description of Artificial Sequence: Synthetic oligonucleotide
ccguuggaacuccuugccc

SEQ ID NO: 858417 - RNA, 19 nt, Artificial Sequence
  Description of Artificial Sequence: Synthetic oligonucleotide
ugcgggcguuaaugagacc

SEQ ID NO: 858418 - RNA, 19 nt, Artificial Sequence
  Description of Artificial Sequence: Synthetic oligonucleotide
guggaucucuucauacaua

SEQ ID NO: 858419 - RNA, 19 nt, Artificial Sequence
  Description of Artificial Sequence: Synthetic oligonucleotide
cggucaaaaguggcuaagg

SEQ ID NO: 858420 - RNA, 19 nt, Artificial Sequence
  Description of Artificial Sequence: Synthetic oligonucleotide
gcugacgcucagguuguag

SEQ ID NO: 858421 - RNA, 19 nt, Artificial Sequence
  Description of Artificial Sequence: Synthetic oligonucleotide
ggagggguuugagguaccc

SEQ ID NO: 858422 - RNA, 19 nt, Artificial Sequence
  Description of Artificial Sequence: Synthetic oligonucleotide
cccuaccugggcauugcac

SEQ ID NO: 858423 - RNA, 19 nt, Artificial Sequence
  Description of Artificial Sequence: Synthetic oligonucleotide
acacggacaggagggguuu

SEQ ID NO: 858424 - RNA, 19 nt, Artificial Sequence
  Description of Artificial Sequence: Synthetic oligonucleotide
gcuaaggcacacaggccac

SEQ ID NO: 858425 - RNA, 19 nt, Artificial Sequence
  Description of Artificial Sequence: Synthetic oligonucleotide
ggcucgugaguaacauuug

SEQ ID NO: 858426 - RNA, 19 nt, Artificial Sequence
  Description of Artificial Sequence: Synthetic oligonucleotide
ccgguugcgaaucugggua

SEQ ID NO: 858427 - RNA, 19 nt, Artificial Sequence
  Description of Artificial Sequence: Synthetic oligonucleotide
cagaccauccugugagggu

SEQ ID NO: 858428 - RNA, 19 nt, Artificial Sequence
  Description of Artificial Sequence: Synthetic oligonucleotide
cugccggucaaaaguggcu

SEQ ID NO: 858429 - RNA, 19 nt, Artificial Sequence
  Description of Artificial Sequence: Synthetic oligonucleotide
ggcacauguuggugacaug

SEQ ID NO: 858430 - RNA, 19 nt, Artificial Sequence
  Description of Artificial Sequence: Synthetic oligonucleotide
ggccucuacccgcagugga

SEQ ID NO: 858431 - RNA, 19 nt, Artificial Sequence
  Description of Artificial Sequence: Synthetic oligonucleotide
gcaguggagggcaucgguc

SEQ ID NO: 858432 - RNA, 19 nt, Artificial Sequence
  Description of Artificial Sequence: Synthetic oligonucleotide
cgccguuggaacuccuugc

SEQ ID NO: 858433 - RNA, 19 nt, Artificial Sequence
  Description of Artificial Sequence: Synthetic oligonucleotide
caggucggaggccgacgac

SEQ ID NO: 858434 - RNA, 19 nt, Artificial Sequence
  Description of Artificial Sequence: Synthetic oligonucleotide
gcuuaacacaugugaccaa

SEQ ID NO: 858435 - RNA, 19 nt, Artificial Sequence
  Description of Artificial Sequence: Synthetic oligonucleotide
cauccgugacuggcuguug

SEQ ID NO: 858436 - RNA, 19 nt, Artificial Sequence
  Description of Artificial Sequence: Synthetic oligonucleotide
gggcucgugaguaacauuu

SEQ ID NO: 858437 - RNA, 19 nt, Artificial Sequence
  Description of Artificial Sequence: Synthetic oligonucleotide
acccgcaguggagggcauc

SEQ ID NO: 858438 - RNA, 19 nt, Artificial Sequence
  Description of Artificial Sequence: Synthetic oligonucleotide
gcccgguugcgaaucuggg

SEQ ID NO: 858439 - RNA, 19 nt, Artificial Sequence
  Description of Artificial Sequence: Synthetic oligonucleotide
cacguaggggcugaaguau

SEQ ID NO: 858440 - RNA, 19 nt, Artificial Sequence
  Description of Artificial Sequence: Synthetic oligonucleotide
guugcgaaucuggguauau

SEQ ID NO: 858441 - RNA, 19 nt, Artificial Sequence
  Description of Artificial Sequence: Synthetic oligonucleotide
cgcugauccacgucucgug

SEQ ID NO: 858442 - RNA, 19 nt, Artificial Sequence
  Description of Artificial Sequence: Synthetic oligonucleotide
caggagugcagaccauccu

SEQ ID NO: 858443 - RNA, 19 nt, Artificial Sequence
  Description of Artificial Sequence: Synthetic oligonucleotide
cuuuggcgcgccguuggaa

SEQ ID NO: 858444 - RNA, 19 nt, Artificial Sequence
  Description of Artificial Sequence: Synthetic oligonucleotide
gugccgggccgcagguccg

SEQ ID NO: 858445 - RNA, 19 nt, Artificial Sequence
  Description of Artificial Sequence: Synthetic oligonucleotide
cugcacuuucggggauggc

SEQ ID NO: 858446 - RNA, 19 nt, Artificial Sequence
  Description of Artificial Sequence: Synthetic oligonucleotide
gacgugccgggccgcaggu

SEQ ID NO: 858447 - RNA, 19 nt, Artificial Sequence
  Description of Artificial Sequence: Synthetic oligonucleotide
gcgaaucuggguauauagu

SEQ ID NO: 858448 - RNA, 19 nt, Artificial Sequence
  Description of Artificial Sequence: Synthetic oligonucleotide
uacccgcaguggagggcau

SEQ ID NO: 858449 - RNA, 19 nt, Artificial Sequence
  Description of Artificial Sequence: Synthetic oligonucleotide
ggcaucggucugcaauaaa

SEQ ID NO: 858450 - RNA, 19 nt, Artificial Sequence
  Description of Artificial Sequence: Synthetic oligonucleotide
gggcguuaaugagacccuc

SEQ ID NO: 858451 - RNA, 19 nt, Artificial Sequence
  Description of Artificial Sequence: Synthetic oligonucleotide
ccuagagucaggccugagu

SEQ ID NO: 858452 - RNA, 19 nt, Artificial Sequence
  Description of Artificial Sequence: Synthetic oligonucleotide
acgugccgggccgcagguc

SEQ ID NO: 858453 - RNA, 19 nt, Artificial Sequence
  Description of Artificial Sequence: Synthetic oligonucleotide
cucugaccuguggcuccag

SEQ ID NO: 858454 - RNA, 19 nt, Artificial Sequence
  Description of Artificial Sequence: Synthetic oligonucleotide
cauggcuuuggcgcgccgu

SEQ ID NO: 858455 - RNA, 19 nt, Artificial Sequence
  Description of Artificial Sequence: Synthetic oligonucleotide
ggucagggcgaugccuuuc

SEQ ID NO: 858456 - RNA, 19 nt, Artificial Sequence
  Description of Artificial Sequence: Synthetic oligonucleotide
gcacuuucggggauggcau

SEQ ID NO: 858457 - RNA, 19 nt, Artificial Sequence
  Description of Artificial Sequence: Synthetic oligonucleotide
gcuuuggcgcgccguugga

SEQ ID NO: 858458 - RNA, 19 nt, Artificial Sequence
  Description of Artificial Sequence: Synthetic oligonucleotide
cgacgugccgggccgcagg

SEQ ID NO: 858459 - RNA, 19 nt, Artificial Sequence
  Description of Artificial Sequence: Synthetic oligonucleotide
caggccugaguggccacaa

SEQ ID NO: 858460 - RNA, 19 nt, Artificial Sequence
  Description of Artificial Sequence: Synthetic oligonucleotide
acuccgccuugcugacaua

SEQ ID NO: 858461 - RNA, 19 nt, Artificial Sequence
  Description of Artificial Sequence: Synthetic oligonucleotide
cauggccgcgccugaugcu

SEQ ID NO: 858462 - RNA, 19 nt, Artificial Sequence
  Description of Artificial Sequence: Synthetic oligonucleotide
cacgucucgugcguacagu

SEQ ID NO: 858463 - RNA, 19 nt, Artificial Sequence
  Description of Artificial Sequence: Synthetic oligonucleotide
gugcugcgcugauccacgu

SEQ ID NO: 858464 - RNA, 19 nt, Artificial Sequence
  Description of Artificial Sequence: Synthetic oligonucleotide
cgagcggcugugcgcgggg

SEQ ID NO: 858465 - RNA, 19 nt, Artificial Sequence
  Description of Artificial Sequence: Synthetic oligonucleotide
ccgagcggcugugcgcggg

SEQ ID NO: 858466 - RNA, 19 nt, Artificial Sequence
  Description of Artificial Sequence: Synthetic oligonucleotide
ggcauugcacacggucugu

SEQ ID NO: 858467 - RNA, 19 nt, Artificial Sequence
  Description of Artificial Sequence: Synthetic oligonucleotide
gggcaucggucugcaauaa

SEQ ID NO: 858468 - RNA, 19 nt, Artificial Sequence
  Description of Artificial Sequence: Synthetic oligonucleotide
ccaugggcggggcaggagu

SEQ ID NO: 858469 - RNA, 19 nt, Artificial Sequence
  Description of Artificial Sequence: Synthetic oligonucleotide
ccaaguggccaggcugcuc

SEQ ID NO: 858470 - RNA, 19 nt, Artificial Sequence
  Description of Artificial Sequence: Synthetic oligonucleotide
cccgguugcgaaucugggu

SEQ ID NO: 858471 - RNA, 19 nt, Artificial Sequence
  Description of Artificial Sequence: Synthetic oligonucleotide
caaugcgcaucaggccgcu

SEQ ID NO: 858472 - RNA, 19 nt, Artificial Sequence
  Description of Artificial Sequence: Synthetic oligonucleotide
gcaggccgacaggcugacg

SEQ ID NO: 858473 - RNA, 19 nt, Artificial Sequence
  Description of Artificial Sequence: Synthetic oligonucleotide
cugacacguaggggcugaa

SEQ ID NO: 858474 - RNA, 19 nt, Artificial Sequence
  Description of Artificial Sequence: Synthetic oligonucleotide
gcgcugauccacgucucgu

SEQ ID NO: 858475 - RNA, 19 nt, Artificial Sequence
  Description of Artificial Sequence: Synthetic oligonucleotide
cugucccgcucuccacgcu

SEQ ID NO: 858476 - RNA, 19 nt, Artificial Sequence
  Description of Artificial Sequence: Synthetic oligonucleotide
cucgugcguacaguaucuu

SEQ ID NO: 858477 - RNA, 19 nt, Artificial Sequence
  Description of Artificial Sequence: Synthetic oligonucleotide
ccccuaccugggcauugca

SEQ ID NO: 858478 - RNA, 19 nt, Artificial Sequence
  Description of Artificial Sequence: Synthetic oligonucleotide
cgggcguuaaugagacccu

SEQ ID NO: 858479 - RNA, 19 nt, Artificial Sequence
  Description of Artificial Sequence: Synthetic oligonucleotide
cgucucgugcguacaguau

SEQ ID NO: 858480 - RNA, 19 nt, Artificial Sequence
  Description of Artificial Sequence: Synthetic oligonucleotide
ggccgacgacgaggcggag

SEQ ID NO: 858481 - RNA, 19 nt, Artificial Sequence
  Description of Artificial Sequence: Synthetic oligonucleotide
cgagucaaugcgggcguua

SEQ ID NO: 858482 - RNA, 19 nt, Artificial Sequence
  Description of Artificial Sequence: Synthetic oligonucleotide
gcgugcaggccgacaggcu

SEQ ID NO: 858483 - RNA, 19 nt, Artificial Sequence
  Description of Artificial Sequence: Synthetic oligonucleotide
gccgcgccugaugcucucu

SEQ ID NO: 858484 - RNA, 19 nt, Artificial Sequence
  Description of Artificial Sequence: Synthetic oligonucleotide
gcgagucaaugcgggcguu

SEQ ID NO: 858485 - RNA, 19 nt, Artificial Sequence
  Description of Artificial Sequence: Synthetic oligonucleotide
cgggcucgugaguaacauu

SEQ ID NO: 858486 - RNA, 19 nt, Artificial Sequence
  Description of Artificial Sequence: Synthetic oligonucleotide
cgcgccugaugcucucuuu

SEQ ID NO: 858487 - RNA, 19 nt, Artificial Sequence
  Description of Artificial Sequence: Synthetic oligonucleotide
ccgcgccugaugcucucuu

SEQ ID NO: 858488 - RNA, 19 nt, Artificial Sequence
  Description of Artificial Sequence: Synthetic oligonucleotide
cgcgccguuggaacuccuu

SEQ ID NO: 858489 - RNA, 19 nt, Artificial Sequence
  Description of Artificial Sequence: Synthetic oligonucleotide
gcgccgggcugccccgcau

SEQ ID NO: 858490 - RNA, 19 nt, Artificial Sequence
  Description of Artificial Sequence: Synthetic oligonucleotide
ccgggcugccccgcauccu

SEQ ID NO: 858491 - RNA, 19 nt, Artificial Sequence
  Description of Artificial Sequence: Synthetic oligonucleotide
aauaaaagugaccagaaga

SEQ ID NO: 858492 - RNA, 19 nt, Artificial Sequence
  Description of Artificial Sequence: Synthetic oligonucleotide
uuaucauguauuuacaggg

SEQ ID NO: 858493 - RNA, 19 nt, Artificial Sequence
  Description of Artificial Sequence: Synthetic oligonucleotide
aaagguaucugcuaaauca

SEQ ID NO: 858494 - RNA, 19 nt, Artificial Sequence
  Description of Artificial Sequence: Synthetic oligonucleotide
aauaauguaaaaucugugu

SEQ ID NO: 858495 - RNA, 19 nt, Artificial Sequence
  Description of Artificial Sequence: Synthetic oligonucleotide
ucaacuaauucuuuuauag

SEQ ID NO: 858496 - RNA, 19 nt, Artificial Sequence
  Description of Artificial Sequence: Synthetic oligonucleotide
aagaguuacugacacaggg

SEQ ID NO: 858497 - RNA, 19 nt, Artificial Sequence
  Description of Artificial Sequence: Synthetic oligonucleotide
aauuaucauguauuuacag

SEQ ID NO: 858498 - RNA, 19 nt, Artificial Sequence
  Description of Artificial Sequence: Synthetic oligonucleotide
uguuagaccaacaauacaa

SEQ ID NO: 858499 - RNA, 19 nt, Artificial Sequence
  Description of Artificial Sequence: Synthetic oligonucleotide
aaagcauuaguccugugug

SEQ ID NO: 858500 - RNA, 19 nt, Artificial Sequence
  Description of Artificial Sequence: Synthetic oligonucleotide
uguugcuauacauauacag

SEQ ID NO: 858501 - RNA, 19 nt, Artificial Sequence
  Description of Artificial Sequence: Synthetic oligonucleotide
uguguugcuauacauauac

SEQ ID NO: 858502 - RNA, 19 nt, Artificial Sequence
  Description of Artificial Sequence: Synthetic oligonucleotide
aauagaagacuacaacuug

SEQ ID NO: 858503 - RNA, 19 nt, Artificial Sequence
  Description of Artificial Sequence: Synthetic oligonucleotide
auaauguaaaaucugugug

SEQ ID NO: 858504 - RNA, 19 nt, Artificial Sequence
  Description of Artificial Sequence: Synthetic oligonucleotide
acauaaguuguuuucuagc

SEQ ID NO: 858505 - RNA, 19 nt, Artificial Sequence
  Description of Artificial Sequence: Synthetic oligonucleotide
uaaaagaugauacuuucaa

SEQ ID NO: 858506 - RNA, 19 nt, Artificial Sequence
  Description of Artificial Sequence: Synthetic oligonucleotide
ucuuguuagaccaacaaua

SEQ ID NO: 858507 - RNA, 19 nt, Artificial Sequence
  Description of Artificial Sequence: Synthetic oligonucleotide
uaauguaaaaucugugugc

SEQ ID NO: 858508 - RNA, 19 nt, Artificial Sequence
  Description of Artificial Sequence: Synthetic oligonucleotide
uugaaaagagcccuuagac

SEQ ID NO: 858509 - RNA, 19 nt, Artificial Sequence
  Description of Artificial Sequence: Synthetic oligonucleotide
auuuacagggccuuguuag

SEQ ID NO: 858510 - RNA, 19 nt, Artificial Sequence
  Description of Artificial Sequence: Synthetic oligonucleotide
aaugaauaaaagugaccag

SEQ ID NO: 858511 - RNA, 19 nt, Artificial Sequence
  Description of Artificial Sequence: Synthetic oligonucleotide
auuacaaucccugaaguag

SEQ ID NO: 858512 - RNA, 19 nt, Artificial Sequence
  Description of Artificial Sequence: Synthetic oligonucleotide
ucugcuaaaucaaugaaua

SEQ ID NO: 858513 - RNA, 19 nt, Artificial Sequence
  Description of Artificial Sequence: Synthetic oligonucleotide
ugagcuaucugacagucug

SEQ ID NO: 858514 - RNA, 19 nt, Artificial Sequence
  Description of Artificial Sequence: Synthetic oligonucleotide
aacaagaacuauauuggac

SEQ ID NO: 858515 - RNA, 19 nt, Artificial Sequence
  Description of Artificial Sequence: Synthetic oligonucleotide
aagccuuuacagcaaaguc

SEQ ID NO: 858516 - RNA, 19 nt, Artificial Sequence
  Description of Artificial Sequence: Synthetic oligonucleotide
agguaggucaguuuaaaag

SEQ ID NO: 858517 - RNA, 19 nt, Artificial Sequence
  Description of Artificial Sequence: Synthetic oligonucleotide
aacuuugagaccagaagac

SEQ ID NO: 858518 - RNA, 19 nt, Artificial Sequence
  Description of Artificial Sequence: Synthetic oligonucleotide
aaaaggauuacaaucccug

SEQ ID NO: 858519 - RNA, 19 nt, Artificial Sequence
  Description of Artificial Sequence: Synthetic oligonucleotide
ugugcaauuaucauguauu

SEQ ID NO: 858520 - RNA, 19 nt, Artificial Sequence
  Description of Artificial Sequence: Synthetic oligonucleotide
aaaugguaauguugaaaag

SEQ ID NO: 858521 - RNA, 19 nt, Artificial Sequence
  Description of Artificial Sequence: Synthetic oligonucleotide
guacauauagugcaucagg

SEQ ID NO: 858522 - RNA, 19 nt, Artificial Sequence
  Description of Artificial Sequence: Synthetic oligonucleotide
gaaguaguaguguugguac

SEQ ID NO: 858523 - RNA, 19 nt, Artificial Sequence
  Description of Artificial Sequence: Synthetic oligonucleotide
auaaaagugaccagaagag

SEQ ID NO: 858524 - RNA, 19 nt, Artificial Sequence
  Description of Artificial Sequence: Synthetic oligonucleotide
uaagacauggcuuaagaua

SEQ ID NO: 858525 - RNA, 19 nt, Artificial Sequence
  Description of Artificial Sequence: Synthetic oligonucleotide
ggagaauaaguacauauag

SEQ ID NO: 858526 - RNA, 19 nt, Artificial Sequence
  Description of Artificial Sequence: Synthetic oligonucleotide
guagcugagacccuggaag

SEQ ID NO: 858527 - RNA, 19 nt, Artificial Sequence
  Description of Artificial Sequence: Synthetic oligonucleotide
agaccauuuuaucacaaag

SEQ ID NO: 858528 - RNA, 19 nt, Artificial Sequence
  Description of Artificial Sequence: Synthetic oligonucleotide
uggauauauauauuugugu

SEQ ID NO: 858529 - RNA, 19 nt, Artificial Sequence
  Description of Artificial Sequence: Synthetic oligonucleotide
uuuuauagaccacauuuua

SEQ ID NO: 858530 - RNA, 19 nt, Artificial Sequence
  Description of Artificial Sequence: Synthetic oligonucleotide
aaauaauguaaaaucugug

SEQ ID NO: 858531 - RNA, 19 nt, Artificial Sequence
  Description of Artificial Sequence: Synthetic oligonucleotide
aucaaugaauaaaagugac

SEQ ID NO: 858532 - RNA, 19 nt, Artificial Sequence
  Description of Artificial Sequence: Synthetic oligonucleotide
uacauaaguuguuuucuag

SEQ ID NO: 858533 - RNA, 19 nt, Artificial Sequence
  Description of Artificial Sequence: Synthetic oligonucleotide
uuugaagucuccauacagu

SEQ ID NO: 858534 - RNA, 19 nt, Artificial Sequence
  Description of Artificial Sequence: Synthetic oligonucleotide
cacacucucaacauaagac

SEQ ID NO: 858535 - RNA, 19 nt, Artificial Sequence
  Description of Artificial Sequence: Synthetic oligonucleotide
aggauuacaaucccugaag

SEQ ID NO: 858536 - RNA, 19 nt, Artificial Sequence
  Description of Artificial Sequence: Synthetic oligonucleotide
uguguggauauauauauuu

SEQ ID NO: 858537 - RNA, 19 nt, Artificial Sequence
  Description of Artificial Sequence: Synthetic oligonucleotide
ugauacuuucaacuaauuc

SEQ ID NO: 858538 - RNA, 19 nt, Artificial Sequence
  Description of Artificial Sequence: Synthetic oligonucleotide
cacacagacacacacacac

SEQ ID NO: 858539 - RNA, 19 nt, Artificial Sequence
  Description of Artificial Sequence: Synthetic oligonucleotide
uguuagucauuuucaauga

SEQ ID NO: 858540 - RNA, 19 nt, Artificial Sequence
  Description of Artificial Sequence: Synthetic oligonucleotide
cuuguuagaccaacaauac

SEQ ID NO: 858541 - RNA, 19 nt, Artificial Sequence
  Description of Artificial Sequence: Synthetic oligonucleotide
agaggcuagcccuggaagc

SEQ ID NO: 858542 - RNA, 19 nt, Artificial Sequence
  Description of Artificial Sequence: Synthetic oligonucleotide
ucugagaacauauuuccau

SEQ ID NO: 858543 - RNA, 19 nt, Artificial Sequence
  Description of Artificial Sequence: Synthetic oligonucleotide
uccccuuugggucugagcu

SEQ ID NO: 858544 - RNA, 19 nt, Artificial Sequence
  Description of Artificial Sequence: Synthetic oligonucleotide
aagacauggcuuaagauaa

SEQ ID NO: 858545 - RNA, 19 nt, Artificial Sequence
  Description of Artificial Sequence: Synthetic oligonucleotide
augaauaaaagugaccaga

SEQ ID NO: 858546 - RNA, 19 nt, Artificial Sequence
  Description of Artificial Sequence: Synthetic oligonucleotide
uguaguuuugaaggaagcc

SEQ ID NO: 858547 - RNA, 19 nt, Artificial Sequence
  Description of Artificial Sequence: Synthetic oligonucleotide
uuugagaccagaagacaga

SEQ ID NO: 858548 - RNA, 19 nt, Artificial Sequence
  Description of Artificial Sequence: Synthetic oligonucleotide
aaaguuuauguaaggauaa

SEQ ID NO: 858549 - RNA, 19 nt, Artificial Sequence
  Description of Artificial Sequence: Synthetic oligonucleotide
gacacacacagacacacac

SEQ ID NO: 858550 - RNA, 19 nt, Artificial Sequence
  Description of Artificial Sequence: Synthetic oligonucleotide
aaagccuuuacagcaaagu

SEQ ID NO: 858551 - RNA, 19 nt, Artificial Sequence
  Description of Artificial Sequence: Synthetic oligonucleotide
gacacaauuaguuuccucu

SEQ ID NO: 858552 - RNA, 19 nt, Artificial Sequence
  Description of Artificial Sequence: Synthetic oligonucleotide
acacucucaacauaagaca

SEQ ID NO: 858553 - RNA, 19 nt, Artificial Sequence
  Description of Artificial Sequence: Synthetic oligonucleotide
ugauuauuucaacaauguc

SEQ ID NO: 858554 - RNA, 19 nt, Artificial Sequence
  Description of Artificial Sequence: Synthetic oligonucleotide
auauauuugugugugugug

SEQ ID NO: 858555 - RNA, 19 nt, Artificial Sequence
  Description of Artificial Sequence: Synthetic oligonucleotide
ucauguauuuacagggccu

SEQ ID NO: 858556 - RNA, 19 nt, Artificial Sequence
  Description of Artificial Sequence: Synthetic oligonucleotide
uuacaaucccugaaguagu

SEQ ID NO: 858557 - RNA, 19 nt, Artificial Sequence
  Description of Artificial Sequence: Synthetic oligonucleotide
augaaauguguugcuauac

SEQ ID NO: 858558 - RNA, 19 nt, Artificial Sequence
  Description of Artificial Sequence: Synthetic oligonucleotide
agaguuacugacacagggc

SEQ ID NO: 858559 - RNA, 19 nt, Artificial Sequence
  Description of Artificial Sequence: Synthetic oligonucleotide
agaacuauauuggacaaaa

SEQ ID NO: 858560 - RNA, 19 nt, Artificial Sequence
  Description of Artificial Sequence: Synthetic oligonucleotide
ugucccguggagaauaagu

SEQ ID NO: 858561 - RNA, 19 nt, Artificial Sequence
  Description of Artificial Sequence: Synthetic oligonucleotide
uacuaggccaaacacuuuc

SEQ ID NO: 858562 - RNA, 19 nt, Artificial Sequence
  Description of Artificial Sequence: Synthetic oligonucleotide
aguaaagguucccauucug

SEQ ID NO: 858563 - RNA, 19 nt, Artificial Sequence
  Description of Artificial Sequence: Synthetic oligonucleotide
ucuuaagugcuaugggaga

SEQ ID NO: 858564 - RNA, 19 nt, Artificial Sequence
  Description of Artificial Sequence: Synthetic oligonucleotide
uacacaagaguuccuucug

SEQ ID NO: 858565 - RNA, 19 nt, Artificial Sequence
  Description of Artificial Sequence: Synthetic oligonucleotide
acaaugucacacucucaac

SEQ ID NO: 858566 - RNA, 19 nt, Artificial Sequence
  Description of Artificial Sequence: Synthetic oligonucleotide
uggagaauaaguacauaua

SEQ ID NO: 858567 - RNA, 19 nt, Artificial Sequence
  Description of Artificial Sequence: Synthetic oligonucleotide
uuguuagaccaacaauaca

SEQ ID NO: 858568 - RNA, 19 nt, Artificial Sequence
  Description of Artificial Sequence: Synthetic oligonucleotide
cacacacagacacacacac

SEQ ID NO: 858569 - RNA, 19 nt, Artificial Sequence
  Description of Artificial Sequence: Synthetic oligonucleotide
cuggaaguaguaguguugg

SEQ ID NO: 858570 - RNA, 19 nt, Artificial Sequence
  Description of Artificial Sequence: Synthetic oligonucleotide
guaacugagcuuucagacc

SEQ ID NO: 858571 - RNA, 19 nt, Artificial Sequence
  Description of Artificial Sequence: Synthetic oligonucleotide
uauauuugugugugugugu

SEQ ID NO: 858572 - RNA, 19 nt, Artificial Sequence
  Description of Artificial Sequence: Synthetic oligonucleotide
uaggucaguuuaaaagaug

SEQ ID NO: 858573 - RNA, 19 nt, Artificial Sequence
  Description of Artificial Sequence: Synthetic oligonucleotide
gguaggucaguuuaaaaga

SEQ ID NO: 858574 - RNA, 19 nt, Artificial Sequence
  Description of Artificial Sequence: Synthetic oligonucleotide
guggauauauauauuugug

SEQ ID NO: 858575 - RNA, 19 nt, Artificial Sequence
  Description of Artificial Sequence: Synthetic oligonucleotide
agugucuuguuagaccaac

SEQ ID NO: 858576 - RNA, 19 nt, Artificial Sequence
  Description of Artificial Sequence: Synthetic oligonucleotide
auauuugugugugugugug

SEQ ID NO: 858577 - RNA, 19 nt, Artificial Sequence
  Description of Artificial Sequence: Synthetic oligonucleotide
auaagacauggcuuaagau

SEQ ID NO: 858578 - RNA, 19 nt, Artificial Sequence
  Description of Artificial Sequence: Synthetic oligonucleotide
agaugauacuuucaacuaa

SEQ ID NO: 858579 - RNA, 19 nt, Artificial Sequence
  Description of Artificial Sequence: Synthetic oligonucleotide
uuuacacaagaguuccuuc

SEQ ID NO: 858580 - RNA, 19 nt, Artificial Sequence
  Description of Artificial Sequence: Synthetic oligonucleotide
aaguaguaguguugguaca

SEQ ID NO: 858581 - RNA, 19 nt, Artificial Sequence
  Description of Artificial Sequence: Synthetic oligonucleotide
uaaagguucccauucugua

SEQ ID NO: 858582 - RNA, 19 nt, Artificial Sequence
  Description of Artificial Sequence: Synthetic oligonucleotide
guugaaaagagcccuuaga

SEQ ID NO: 858583 - RNA, 19 nt, Artificial Sequence
  Description of Artificial Sequence: Synthetic oligonucleotide
caagcugccuuggagaagc

SEQ ID NO: 858584 - RNA, 19 nt, Artificial Sequence
  Description of Artificial Sequence: Synthetic oligonucleotide
agaagcuuggccacugaac

SEQ ID NO: 858585 - RNA, 19 nt, Artificial Sequence
  Description of Artificial Sequence: Synthetic oligonucleotide
caaugucacacucucaaca

SEQ ID NO: 858586 - RNA, 19 nt, Artificial Sequence
  Description of Artificial Sequence: Synthetic oligonucleotide
auuugugugugugugugug

SEQ ID NO: 858587 - RNA, 19 nt, Artificial Sequence
  Description of Artificial Sequence: Synthetic oligonucleotide
agaccuacuaggccaaaca

SEQ ID NO: 858588 - RNA, 19 nt, Artificial Sequence
  Description of Artificial Sequence: Synthetic oligonucleotide
caagcucccguaccgaugc

SEQ ID NO: 858589 - RNA, 19 nt, Artificial Sequence
  Description of Artificial Sequence: Synthetic oligonucleotide
gaauagagguucugcuccc

SEQ ID NO: 858590 - RNA, 19 nt, Artificial Sequence
  Description of Artificial Sequence: Synthetic oligonucleotide
ugugaggcuggguauuggc

SEQ ID NO: 858591 - RNA, 19 nt, Artificial Sequence
  Description of Artificial Sequence: Synthetic oligonucleotide
gaagcuuggccacugaacu

SEQ ID NO: 858592 - RNA, 19 nt, Artificial Sequence
  Description of Artificial Sequence: Synthetic oligonucleotide
guugcuauacauauacaga

SEQ ID NO: 858593 - RNA, 19 nt, Artificial Sequence
  Description of Artificial Sequence: Synthetic oligonucleotide
uauuuacagggccuuguua

SEQ ID NO: 858594 - RNA, 19 nt, Artificial Sequence
  Description of Artificial Sequence: Synthetic oligonucleotide
uaauucuuuuauagaccac

SEQ ID NO: 858595 - RNA, 19 nt, Artificial Sequence
  Description of Artificial Sequence: Synthetic oligonucleotide
gugaccagaagaguuacug

SEQ ID NO: 858596 - RNA, 19 nt, Artificial Sequence
  Description of Artificial Sequence: Synthetic oligonucleotide
acagggccgacacaauuag

SEQ ID NO: 858597 - RNA, 19 nt, Artificial Sequence
  Description of Artificial Sequence: Synthetic oligonucleotide
agagcaggcuacugccacc

SEQ ID NO: 858598 - RNA, 19 nt, Artificial Sequence
  Description of Artificial Sequence: Synthetic oligonucleotide
ugaccagaagaguuacuga

SEQ ID NO: 858599 - RNA, 19 nt, Artificial Sequence
  Description of Artificial Sequence: Synthetic oligonucleotide
gaccuacuaggccaaacac

SEQ ID NO: 858600 - RNA, 19 nt, Artificial Sequence
  Description of Artificial Sequence: Synthetic oligonucleotide
aguaugguccaggugcagg

SEQ ID NO: 858601 - RNA, 19 nt, Artificial Sequence
  Description of Artificial Sequence: Synthetic oligonucleotide
gcagccacuaggcagaggc

SEQ ID NO: 858602 - RNA, 19 nt, Artificial Sequence
  Description of Artificial Sequence: Synthetic oligonucleotide
aggaagccagacuuugaag

SEQ ID NO: 858603 - RNA, 19 nt, Artificial Sequence
  Description of Artificial Sequence: Synthetic oligonucleotide
ccuuagaccauuuuaucac

SEQ ID NO: 858604 - RNA, 19 nt, Artificial Sequence
  Description of Artificial Sequence: Synthetic oligonucleotide
cugacagucugucccgugg

SEQ ID NO: 858605 - RNA, 19 nt, Artificial Sequence
  Description of Artificial Sequence: Synthetic oligonucleotide
cgaugcaugggccagaucc

SEQ ID NO: 858606 - RNA, 19 nt, Artificial Sequence
  Description of Artificial Sequence: Synthetic oligonucleotide
aaagguaggucaguuuaaa

SEQ ID NO: 858607 - RNA, 19 nt, Artificial Sequence
  Description of Artificial Sequence: Synthetic oligonucleotide
aauauucugagaacauauu

SEQ ID NO: 858608 - RNA, 19 nt, Artificial Sequence
  Description of Artificial Sequence: Synthetic oligonucleotide
uaguccugugugaacuuug

SEQ ID NO: 858609 - RNA, 19 nt, Artificial Sequence
  Description of Artificial Sequence: Synthetic oligonucleotide
uuuacagggccuuguuagu

SEQ ID NO: 858610 - RNA, 19 nt, Artificial Sequence
  Description of Artificial Sequence: Synthetic oligonucleotide
auaaauauucugagaacau

SEQ ID NO: 858611 - RNA, 19 nt, Artificial Sequence
  Description of Artificial Sequence: Synthetic oligonucleotide
ucaagcucccguaccgaug

SEQ ID NO: 858612 - RNA, 19 nt, Artificial Sequence
  Description of Artificial Sequence: Synthetic oligonucleotide
ucccguggagaauaaguac

SEQ ID NO: 858613 - RNA, 19 nt, Artificial Sequence
  Description of Artificial Sequence: Synthetic oligonucleotide
agagcggugcccaugguag

SEQ ID NO: 858614 - RNA, 19 nt, Artificial Sequence
  Description of Artificial Sequence: Synthetic oligonucleotide
uguguguguguguaguuuu

SEQ ID NO: 858615 - RNA, 19 nt, Artificial Sequence
  Description of Artificial Sequence: Synthetic oligonucleotide
ucccauucuguaacugagc

SEQ ID NO: 858616 - RNA, 19 nt, Artificial Sequence
  Description of Artificial Sequence: Synthetic oligonucleotide
uugugugugugugugugug

SEQ ID NO: 858617 - RNA, 19 nt, Artificial Sequence
  Description of Artificial Sequence: Synthetic oligonucleotide
uguguguguguguguguag

SEQ ID NO: 858618 - RNA, 19 nt, Artificial Sequence
  Description of Artificial Sequence: Synthetic oligonucleotide
cuuucagauggcaaaaggu

SEQ ID NO: 858619 - RNA, 19 nt, Artificial Sequence
  Description of Artificial Sequence: Synthetic oligonucleotide
cuaggccaaacacuuucag

SEQ ID NO: 858620 - RNA, 19 nt, Artificial Sequence
  Description of Artificial Sequence: Synthetic oligonucleotide
cuuagaccauuuuaucaca

SEQ ID NO: 858621 - RNA, 19 nt, Artificial Sequence
  Description of Artificial Sequence: Synthetic oligonucleotide
cucuacgugggugggaggg

SEQ ID NO: 858622 - RNA, 19 nt, Artificial Sequence
  Description of Artificial Sequence: Synthetic oligonucleotide
ucucaacauaagacauggc

SEQ ID NO: 858623 - RNA, 19 nt, Artificial Sequence
  Description of Artificial Sequence: Synthetic oligonucleotide
cacuuggugggaaggcacg

SEQ ID NO: 858624 - RNA, 19 nt, Artificial Sequence
  Description of Artificial Sequence: Synthetic oligonucleotide
guacauggucucauacugg

SEQ ID NO: 858625 - RNA, 19 nt, Artificial Sequence
  Description of Artificial Sequence: Synthetic oligonucleotide
guauuggcuggccuccugc

SEQ ID NO: 858626 - RNA, 19 nt, Artificial Sequence
  Description of Artificial Sequence: Synthetic oligonucleotide
uauuugugugugugugugu

SEQ ID NO: 858627 - RNA, 19 nt, Artificial Sequence
  Description of Artificial Sequence: Synthetic oligonucleotide
aguuacugacacagggccg

SEQ ID NO: 858628 - RNA, 19 nt, Artificial Sequence
  Description of Artificial Sequence: Synthetic oligonucleotide
auagauuaucucucccuuu

SEQ ID NO: 858629 - RNA, 19 nt, Artificial Sequence
  Description of Artificial Sequence: Synthetic oligonucleotide
ugcggaagggaugggcugg

SEQ ID NO: 858630 - RNA, 19 nt, Artificial Sequence
  Description of Artificial Sequence: Synthetic oligonucleotide
uacuuguccugguagggua

SEQ ID NO: 858631 - RNA, 19 nt, Artificial Sequence
  Description of Artificial Sequence: Synthetic oligonucleotide
cagacacacacacacaaaa

SEQ ID NO: 858632 - RNA, 19 nt, Artificial Sequence
  Description of Artificial Sequence: Synthetic oligonucleotide
aucugcuaaaucaaugaau

SEQ ID NO: 858633 - RNA, 19 nt, Artificial Sequence
  Description of Artificial Sequence: Synthetic oligonucleotide
ugaguaggcccgguguucc

SEQ ID NO: 858634 - RNA, 19 nt, Artificial Sequence
  Description of Artificial Sequence: Synthetic oligonucleotide
uuugugugugugugugugu

SEQ ID NO: 858635 - RNA, 19 nt, Artificial Sequence
  Description of Artificial Sequence: Synthetic oligonucleotide
guucccauucuguaacuga

SEQ ID NO: 858636 - RNA, 19 nt, Artificial Sequence
  Description of Artificial Sequence: Synthetic oligonucleotide
aagaacuauauuggacaaa

SEQ ID NO: 858637 - RNA, 19 nt, Artificial Sequence
  Description of Artificial Sequence: Synthetic oligonucleotide
agugcaucaggcagauagg

SEQ ID NO: 858638 - RNA, 19 nt, Artificial Sequence
  Description of Artificial Sequence: Synthetic oligonucleotide
acacaauuaguuuccucua

SEQ ID NO: 858639 - RNA, 19 nt, Artificial Sequence
  Description of Artificial Sequence: Synthetic oligonucleotide
uugccaugggaguccauac

SEQ ID NO: 858640 - RNA, 19 nt, Artificial Sequence
  Description of Artificial Sequence: Synthetic oligonucleotide
gacagucugucccguggag

SEQ ID NO: 858641 - RNA, 19 nt, Artificial Sequence
  Description of Artificial Sequence: Synthetic oligonucleotide
cacagacacacacacacaa

SEQ ID NO: 858642 - RNA, 19 nt, Artificial Sequence
  Description of Artificial Sequence: Synthetic oligonucleotide
guuacugacacagggccga

SEQ ID NO: 858643 - RNA, 19 nt, Artificial Sequence
  Description of Artificial Sequence: Synthetic oligonucleotide
caauagaagacuacaacuu

SEQ ID NO: 858644 - RNA, 19 nt, Artificial Sequence
  Description of Artificial Sequence: Synthetic oligonucleotide
ggugggaggggccaugugc

SEQ ID NO: 858645 - RNA, 19 nt, Artificial Sequence
  Description of Artificial Sequence: Synthetic oligonucleotide
cucccguaccgaugcaugg

SEQ ID NO: 858646 - RNA, 19 nt, Artificial Sequence
  Description of Artificial Sequence: Synthetic oligonucleotide
aauguugaaaagagcccuu

SEQ ID NO: 858647 - RNA, 19 nt, Artificial Sequence
  Description of Artificial Sequence: Synthetic oligonucleotide
uggguauuggcuggccucc

SEQ ID NO: 858648 - RNA, 19 nt, Artificial Sequence
  Description of Artificial Sequence: Synthetic oligonucleotide
cuggguauuggcuggccuc

SEQ ID NO: 858649 - RNA, 19 nt, Artificial Sequence
  Description of Artificial Sequence: Synthetic oligonucleotide
ugccaugggaguccauacu

SEQ ID NO: 858650 - RNA, 19 nt, Artificial Sequence
  Description of Artificial Sequence: Synthetic oligonucleotide
cuucugagcucaagcuccc

SEQ ID NO: 858651 - RNA, 19 nt, Artificial Sequence
  Description of Artificial Sequence: Synthetic oligonucleotide
cacaggacugaagauggac

SEQ ID NO: 858652 - RNA, 19 nt, Artificial Sequence
  Description of Artificial Sequence: Synthetic oligonucleotide
ucccguaccgaugcauggg

SEQ ID NO: 858653 - RNA, 19 nt, Artificial Sequence
  Description of Artificial Sequence: Synthetic oligonucleotide
aaggcacgggaugggcccc

SEQ ID NO: 858654 - RNA, 19 nt, Artificial Sequence
  Description of Artificial Sequence: Synthetic oligonucleotide
ggaagccagacuuugaagu

SEQ ID NO: 858655 - RNA, 19 nt, Artificial Sequence
  Description of Artificial Sequence: Synthetic oligonucleotide
ugugaacuuugagaccaga

SEQ ID NO: 858656 - RNA, 19 nt, Artificial Sequence
  Description of Artificial Sequence: Synthetic oligonucleotide
ucuacgugggugggagggg

SEQ ID NO: 858657 - RNA, 19 nt, Artificial Sequence
  Description of Artificial Sequence: Synthetic oligonucleotide
uuacagggccuuguuaguc

SEQ ID NO: 858658 - RNA, 19 nt, Artificial Sequence
  Description of Artificial Sequence: Synthetic oligonucleotide
gugcaucaggcagauaggc

SEQ ID NO: 858659 - RNA, 19 nt, Artificial Sequence
  Description of Artificial Sequence: Synthetic oligonucleotide
agauguguggauauauaua

SEQ ID NO: 858660 - RNA, 19 nt, Artificial Sequence
  Description of Artificial Sequence: Synthetic oligonucleotide
ugugugugugugugugugu

SEQ ID NO: 858661 - RNA, 19 nt, Artificial Sequence
  Description of Artificial Sequence: Synthetic oligonucleotide
agcauuaguccugugugaa

SEQ ID NO: 858662 - RNA, 19 nt, Artificial Sequence
  Description of Artificial Sequence: Synthetic oligonucleotide
ggacugaagauggacacac

SEQ ID NO: 858663 - RNA, 19 nt, Artificial Sequence
  Description of Artificial Sequence: Synthetic oligonucleotide
accuacuaggccaaacacu

SEQ ID NO: 858664 - RNA, 19 nt, Artificial Sequence
  Description of Artificial Sequence: Synthetic oligonucleotide
acucucaacauaagacaug

SEQ ID NO: 858665 - RNA, 19 nt, Artificial Sequence
  Description of Artificial Sequence: Synthetic oligonucleotide
gagcccuuagaccauuuua

SEQ ID NO: 858666 - RNA, 19 nt, Artificial Sequence
  Description of Artificial Sequence: Synthetic oligonucleotide
ggccuuguuagucauuuuc

SEQ ID NO: 858667 - RNA, 19 nt, Artificial Sequence
  Description of Artificial Sequence: Synthetic oligonucleotide
agcccuuagaccauuuuau

SEQ ID NO: 858668 - RNA, 19 nt, Artificial Sequence
  Description of Artificial Sequence: Synthetic oligonucleotide
ugaggggccagaguauggu

SEQ ID NO: 858669 - RNA, 19 nt, Artificial Sequence
  Description of Artificial Sequence: Synthetic oligonucleotide
guaguaguguugguacaug

SEQ ID NO: 858670 - RNA, 19 nt, Artificial Sequence
  Description of Artificial Sequence: Synthetic oligonucleotide
gugugugugugugugugug

SEQ ID NO: 858671 - RNA, 19 nt, Artificial Sequence
  Description of Artificial Sequence: Synthetic oligonucleotide
ucucuacgugggugggagg

SEQ ID NO: 858672 - RNA, 19 nt, Artificial Sequence
  Description of Artificial Sequence: Synthetic oligonucleotide
ccaauagaagacuacaacu

SEQ ID NO: 858673 - RNA, 19 nt, Artificial Sequence
  Description of Artificial Sequence: Synthetic oligonucleotide
auuaguccugugugaacuu

SEQ ID NO: 858674 - RNA, 19 nt, Artificial Sequence
  Description of Artificial Sequence: Synthetic oligonucleotide
ugccgguccauggucagca

SEQ ID NO: 858675 - RNA, 19 nt, Artificial Sequence
  Description of Artificial Sequence: Synthetic oligonucleotide
agauaggcuagcagaccuc

SEQ ID NO: 858676 - RNA, 19 nt, Artificial Sequence
  Description of Artificial Sequence: Synthetic oligonucleotide
aggguuuggccagaagaug

SEQ ID NO: 858677 - RNA, 19 nt, Artificial Sequence
  Description of Artificial Sequence: Synthetic oligonucleotide
accagaagaguuacugaca

SEQ ID NO: 858678 - RNA, 19 nt, Artificial Sequence
  Description of Artificial Sequence: Synthetic oligonucleotide
aggugcugccgcucucuac

SEQ ID NO: 858679 - RNA, 19 nt, Artificial Sequence
  Description of Artificial Sequence: Synthetic oligonucleotide
agccagacuuugaagucuc

SEQ ID NO: 858680 - RNA, 19 nt, Artificial Sequence
  Description of Artificial Sequence: Synthetic oligonucleotide
auugccaugggaguccaua

SEQ ID NO: 858681 - RNA, 19 nt, Artificial Sequence
  Description of Artificial Sequence: Synthetic oligonucleotide
agccacuaggcagaggccu

SEQ ID NO: 858682 - RNA, 19 nt, Artificial Sequence
  Description of Artificial Sequence: Synthetic oligonucleotide
uguguguguguguguaguu

SEQ ID NO: 858683 - RNA, 19 nt, Artificial Sequence
  Description of Artificial Sequence: Synthetic oligonucleotide
gaagauguguggauauaua

SEQ ID NO: 858684 - RNA, 19 nt, Artificial Sequence
  Description of Artificial Sequence: Synthetic oligonucleotide
uccccgugccgguccaugg

SEQ ID NO: 858685 - RNA, 19 nt, Artificial Sequence
  Description of Artificial Sequence: Synthetic oligonucleotide
aaucccugaaguaguuuua

SEQ ID NO: 858686 - RNA, 19 nt, Artificial Sequence
  Description of Artificial Sequence: Synthetic oligonucleotide
agauuaucucucccuuuua

SEQ ID NO: 858687 - RNA, 19 nt, Artificial Sequence
  Description of Artificial Sequence: Synthetic oligonucleotide
agggccgacacaauuaguu

SEQ ID NO: 858688 - RNA, 19 nt, Artificial Sequence
  Description of Artificial Sequence: Synthetic oligonucleotide
cauuaguccugugugaacu

SEQ ID NO: 858689 - RNA, 19 nt, Artificial Sequence
  Description of Artificial Sequence: Synthetic oligonucleotide
ggccgacacaauuaguuuc

SEQ ID NO: 858690 - RNA, 19 nt, Artificial Sequence
  Description of Artificial Sequence: Synthetic oligonucleotide
gauaggcuagcagaccucu

SEQ ID NO: 858691 - RNA, 19 nt, Artificial Sequence
  Description of Artificial Sequence: Synthetic oligonucleotide
uucugagcucaagcucccg

SEQ ID NO: 858692 - RNA, 19 nt, Artificial Sequence
  Description of Artificial Sequence: Synthetic oligonucleotide
auguauuuacagggccuug

SEQ ID NO: 858693 - RNA, 19 nt, Artificial Sequence
  Description of Artificial Sequence: Synthetic oligonucleotide
ugcagucggcaccuccgcu

SEQ ID NO: 858694 - RNA, 19 nt, Artificial Sequence
  Description of Artificial Sequence: Synthetic oligonucleotide
acuaggccaaacacuuuca

SEQ ID NO: 858695 - RNA, 19 nt, Artificial Sequence
  Description of Artificial Sequence: Synthetic oligonucleotide
guaccgaugcaugggccag

SEQ ID NO: 858696 - RNA, 19 nt, Artificial Sequence
  Description of Artificial Sequence: Synthetic oligonucleotide
agaguaugguccaggugca

SEQ ID NO: 858697 - RNA, 19 nt, Artificial Sequence
  Description of Artificial Sequence: Synthetic oligonucleotide
aguaggcccgguguuccag

SEQ ID NO: 858698 - RNA, 19 nt, Artificial Sequence
  Description of Artificial Sequence: Synthetic oligonucleotide
cccuuagaccauuuuauca

SEQ ID NO: 858699 - RNA, 19 nt, Artificial Sequence
  Description of Artificial Sequence: Synthetic oligonucleotide
auacugggagaagcaagcu

SEQ ID NO: 858700 - RNA, 19 nt, Artificial Sequence
  Description of Artificial Sequence: Synthetic oligonucleotide
cuacgugggugggaggggc

SEQ ID NO: 858701 - RNA, 19 nt, Artificial Sequence
  Description of Artificial Sequence: Synthetic oligonucleotide
guaaagguucccauucugu

SEQ ID NO: 858702 - RNA, 19 nt, Artificial Sequence
  Description of Artificial Sequence: Synthetic oligonucleotide
cagauaggcuagcagaccu

SEQ ID NO: 858703 - RNA, 19 nt, Artificial Sequence
  Description of Artificial Sequence: Synthetic oligonucleotide
agcgaugaggggccagagu

SEQ ID NO: 858704 - RNA, 19 nt, Artificial Sequence
  Description of Artificial Sequence: Synthetic oligonucleotide
aaagagcccuuagaccauu

SEQ ID NO: 858705 - RNA, 19 nt, Artificial Sequence
  Description of Artificial Sequence: Synthetic oligonucleotide
cugccgcucucuacguggg

SEQ ID NO: 858706 - RNA, 19 nt, Artificial Sequence
  Description of Artificial Sequence: Synthetic oligonucleotide
ggcagauaggcuagcagac

SEQ ID NO: 858707 - RNA, 19 nt, Artificial Sequence
  Description of Artificial Sequence: Synthetic oligonucleotide
ggauuacaaucccugaagu

SEQ ID NO: 858708 - RNA, 19 nt, Artificial Sequence
  Description of Artificial Sequence: Synthetic oligonucleotide
gccgacacaauuaguuucc

SEQ ID NO: 858709 - RNA, 19 nt, Artificial Sequence
  Description of Artificial Sequence: Synthetic oligonucleotide
cacucucaacauaagacau

SEQ ID NO: 858710 - RNA, 19 nt, Artificial Sequence
  Description of Artificial Sequence: Synthetic oligonucleotide
acacacacagacacacaca

SEQ ID NO: 858711 - RNA, 19 nt, Artificial Sequence
  Description of Artificial Sequence: Synthetic oligonucleotide
agauggcaaaagguaucug

SEQ ID NO: 858712 - RNA, 19 nt, Artificial Sequence
  Description of Artificial Sequence: Synthetic oligonucleotide
ggaaguaguaguguuggua

SEQ ID NO: 858713 - RNA, 19 nt, Artificial Sequence
  Description of Artificial Sequence: Synthetic oligonucleotide
gccaugugcaccacaguag

SEQ ID NO: 858714 - RNA, 19 nt, Artificial Sequence
  Description of Artificial Sequence: Synthetic oligonucleotide
cuccauacaguuuuccgau

SEQ ID NO: 858715 - RNA, 19 nt, Artificial Sequence
  Description of Artificial Sequence: Synthetic oligonucleotide
guguguguguguaguuuug

SEQ ID NO: 858716 - RNA, 19 nt, Artificial Sequence
  Description of Artificial Sequence: Synthetic oligonucleotide
ucccgggcacacagagcgg

SEQ ID NO: 858717 - RNA, 19 nt, Artificial Sequence
  Description of Artificial Sequence: Synthetic oligonucleotide
ugcugccgcucucuacgug

SEQ ID NO: 858718 - RNA, 19 nt, Artificial Sequence
  Description of Artificial Sequence: Synthetic oligonucleotide
cccguggagaauaaguaca

SEQ ID NO: 858719 - RNA, 19 nt, Artificial Sequence
  Description of Artificial Sequence: Synthetic oligonucleotide
guuagucauuuucaaugau

SEQ ID NO: 858720 - RNA, 19 nt, Artificial Sequence
  Description of Artificial Sequence: Synthetic oligonucleotide
caugggaguccauacuugu

SEQ ID NO: 858721 - RNA, 19 nt, Artificial Sequence
  Description of Artificial Sequence: Synthetic oligonucleotide
ugugugcaauuaucaugua

SEQ ID NO: 858722 - RNA, 19 nt, Artificial Sequence
  Description of Artificial Sequence: Synthetic oligonucleotide
ggcaauggagaggcuagcc

SEQ ID NO: 858723 - RNA, 19 nt, Artificial Sequence
  Description of Artificial Sequence: Synthetic oligonucleotide
guaggucaguuuaaaagau

SEQ ID NO: 858724 - RNA, 19 nt, Artificial Sequence
  Description of Artificial Sequence: Synthetic oligonucleotide
ggugagcuacugcagccac

SEQ ID NO: 858725 - RNA, 19 nt, Artificial Sequence
  Description of Artificial Sequence: Synthetic oligonucleotide
acgggaugggccccugggu

SEQ ID NO: 858726 - RNA, 19 nt, Artificial Sequence
  Description of Artificial Sequence: Synthetic oligonucleotide
cagucggcaccuccgcuug

SEQ ID NO: 858727 - RNA, 19 nt, Artificial Sequence
  Description of Artificial Sequence: Synthetic oligonucleotide
gagcuacugcagccacuag

SEQ ID NO: 858728 - RNA, 19 nt, Artificial Sequence
  Description of Artificial Sequence: Synthetic oligonucleotide
ggccaugugcaccacagua

SEQ ID NO: 858729 - RNA, 19 nt, Artificial Sequence
  Description of Artificial Sequence: Synthetic oligonucleotide
ggcccgguguuccaggcug

SEQ ID NO: 858730 - RNA, 19 nt, Artificial Sequence
  Description of Artificial Sequence: Synthetic oligonucleotide
agucggcaccuccgcuugg

SEQ ID NO: 858731 - RNA, 19 nt, Artificial Sequence
  Description of Artificial Sequence: Synthetic oligonucleotide
gccuuguuagucauuuuca

SEQ ID NO: 858732 - RNA, 19 nt, Artificial Sequence
  Description of Artificial Sequence: Synthetic oligonucleotide
acagacacacacacacaaa

SEQ ID NO: 858733 - RNA, 19 nt, Artificial Sequence
  Description of Artificial Sequence: Synthetic oligonucleotide
acacagacacacacacaca

SEQ ID NO: 858734 - RNA, 19 nt, Artificial Sequence
  Description of Artificial Sequence: Synthetic oligonucleotide
gguuuggccagaagaugug

SEQ ID NO: 858735 - RNA, 19 nt, Artificial Sequence
  Description of Artificial Sequence: Synthetic oligonucleotide
ccaugggaguccauacuug

SEQ ID NO: 858736 - RNA, 19 nt, Artificial Sequence
  Description of Artificial Sequence: Synthetic oligonucleotide
aagugucuuguuagaccaa

SEQ ID NO: 858737 - RNA, 19 nt, Artificial Sequence
  Description of Artificial Sequence: Synthetic oligonucleotide
gcauuaguccugugugaac

SEQ ID NO: 858738 - RNA, 19 nt, Artificial Sequence
  Description of Artificial Sequence: Synthetic oligonucleotide
caggguuuggccagaagau

SEQ ID NO: 858739 - RNA, 19 nt, Artificial Sequence
  Description of Artificial Sequence: Synthetic oligonucleotide
gucccguggagaauaagua

SEQ ID NO: 858740 - RNA, 19 nt, Artificial Sequence
  Description of Artificial Sequence: Synthetic oligonucleotide
acacagagcggugcccaug

SEQ ID NO: 858741 - RNA, 19 nt, Artificial Sequence
  Description of Artificial Sequence: Synthetic oligonucleotide
agggaugggcuggugagua

SEQ ID NO: 858742 - RNA, 19 nt, Artificial Sequence
  Description of Artificial Sequence: Synthetic oligonucleotide
ugcagcgaugaggggccag

SEQ ID NO: 858743 - RNA, 19 nt, Artificial Sequence
  Description of Artificial Sequence: Synthetic oligonucleotide
caugggccagauccugguc

SEQ ID NO: 858744 - RNA, 19 nt, Artificial Sequence
  Description of Artificial Sequence: Synthetic oligonucleotide
gguauuggcuggccuccug

SEQ ID NO: 858745 - RNA, 19 nt, Artificial Sequence
  Description of Artificial Sequence: Synthetic oligonucleotide
gugucuuguuagaccaaca

SEQ ID NO: 858746 - RNA, 19 nt, Artificial Sequence
  Description of Artificial Sequence: Synthetic oligonucleotide
gcccuuagaccauuuuauc

SEQ ID NO: 858747 - RNA, 19 nt, Artificial Sequence
  Description of Artificial Sequence: Synthetic oligonucleotide
acacacagacacacacaca

SEQ ID NO: 858748 - RNA, 19 nt, Artificial Sequence
  Description of Artificial Sequence: Synthetic oligonucleotide
gugugaacuuugagaccag

SEQ ID NO: 858749 - RNA, 19 nt, Artificial Sequence
  Description of Artificial Sequence: Synthetic oligonucleotide
uuacugacacagggccgac

SEQ ID NO: 858750 - RNA, 19 nt, Artificial Sequence
  Description of Artificial Sequence: Synthetic oligonucleotide
gugaguaggcccgguguuc

SEQ ID NO: 858751 - RNA, 19 nt, Artificial Sequence
  Description of Artificial Sequence: Synthetic oligonucleotide
ccuacuaggccaaacacuu

SEQ ID NO: 858752 - RNA, 19 nt, Artificial Sequence
  Description of Artificial Sequence: Synthetic oligonucleotide
aagcucccguaccgaugca

SEQ ID NO: 858753 - RNA, 19 nt, Artificial Sequence
  Description of Artificial Sequence: Synthetic oligonucleotide
gugugugugugugugugua

SEQ ID NO: 858754 - RNA, 19 nt, Artificial Sequence
  Description of Artificial Sequence: Synthetic oligonucleotide
ugggccccugggugugagg

SEQ ID NO: 858755 - RNA, 19 nt, Artificial Sequence
  Description of Artificial Sequence: Synthetic oligonucleotide
ccgcucucuacgugggugg

SEQ ID NO: 858756 - RNA, 19 nt, Artificial Sequence
  Description of Artificial Sequence: Synthetic oligonucleotide
cccguaccgaugcaugggc

SEQ ID NO: 858757 - RNA, 19 nt, Artificial Sequence
  Description of Artificial Sequence: Synthetic oligonucleotide
cgguccauggucagcagug

SEQ ID NO: 858758 - RNA, 19 nt, Artificial Sequence
  Description of Artificial Sequence: Synthetic oligonucleotide
uaccgaugcaugggccaga

SEQ ID NO: 858759 - RNA, 19 nt, Artificial Sequence
  Description of Artificial Sequence: Synthetic oligonucleotide
guguguguguguguguagu

SEQ ID NO: 858760 - RNA, 19 nt, Artificial Sequence
  Description of Artificial Sequence: Synthetic oligonucleotide
gucggcaccuccgcuuggc

SEQ ID NO: 858761 - RNA, 19 nt, Artificial Sequence
  Description of Artificial Sequence: Synthetic oligonucleotide
ugccgcucucuacgugggu

SEQ ID NO: 858762 - RNA, 19 nt, Artificial Sequence
  Description of Artificial Sequence: Synthetic oligonucleotide
cugucccguggagaauaag

SEQ ID NO: 858763 - RNA, 19 nt, Artificial Sequence
  Description of Artificial Sequence: Synthetic oligonucleotide
aagagcccuuagaccauuu

SEQ ID NO: 858764 - RNA, 19 nt, Artificial Sequence
  Description of Artificial Sequence: Synthetic oligonucleotide
auguguugcuauacauaua

SEQ ID NO: 858765 - RNA, 19 nt, Artificial Sequence
  Description of Artificial Sequence: Synthetic oligonucleotide
cagagcggugcccauggua

SEQ ID NO: 858766 - RNA, 19 nt, Artificial Sequence
  Description of Artificial Sequence: Synthetic oligonucleotide
cuagcagaccucugcuggu

SEQ ID NO: 858767 - RNA, 19 nt, Artificial Sequence
  Description of Artificial Sequence: Synthetic oligonucleotide
accgaugcaugggccagau

SEQ ID NO: 858768 - RNA, 19 nt, Artificial Sequence
  Description of Artificial Sequence: Synthetic oligonucleotide
guguugguacauggucuca

SEQ ID NO: 858769 - RNA, 19 nt, Artificial Sequence
  Description of Artificial Sequence: Synthetic oligonucleotide
ccguaccgaugcaugggcc

SEQ ID NO: 858770 - RNA, 19 nt, Artificial Sequence
  Description of Artificial Sequence: Synthetic oligonucleotide
gcucccguaccgaugcaug

SEQ ID NO: 858771 - RNA, 19 nt, Artificial Sequence
  Description of Artificial Sequence: Synthetic oligonucleotide
gggccugaaccacaggacu

SEQ ID NO: 858772 - RNA, 19 nt, Artificial Sequence
  Description of Artificial Sequence: Synthetic oligonucleotide
gccgcucucuacgugggug

SEQ ID NO: 858773 - RNA, 19 nt, Artificial Sequence
  Description of Artificial Sequence: Synthetic oligonucleotide
augggccccugggugugag

SEQ ID NO: 858774 - RNA, 19 nt, Artificial Sequence
  Description of Artificial Sequence: Synthetic oligonucleotide
cagaagauguguggauaua

SEQ ID NO: 858775 - RNA, 19 nt, Artificial Sequence
  Description of Artificial Sequence: Synthetic oligonucleotide
cucaagcucccguaccgau

SEQ ID NO: 858776 - RNA, 19 nt, Artificial Sequence
  Description of Artificial Sequence: Synthetic oligonucleotide
agucugucccguggagaau

SEQ ID NO: 858777 - RNA, 19 nt, Artificial Sequence
  Description of Artificial Sequence: Synthetic oligonucleotide
gccagaagauguguggaua

SEQ ID NO: 858778 - RNA, 19 nt, Artificial Sequence
  Description of Artificial Sequence: Synthetic oligonucleotide
guguguguguguguaguuu

SEQ ID NO: 858779 - RNA, 19 nt, Artificial Sequence
  Description of Artificial Sequence: Synthetic oligonucleotide
cgacacaauuaguuuccuc

SEQ ID NO: 858780 - RNA, 19 nt, Artificial Sequence
  Description of Artificial Sequence: Synthetic oligonucleotide
gccaugggaguccauacuu

SEQ ID NO: 858781 - RNA, 19 nt, Artificial Sequence
  Description of Artificial Sequence: Synthetic oligonucleotide
cguaccgaugcaugggcca

SEQ ID NO: 858782 - RNA, 19 nt, Artificial Sequence
  Description of Artificial Sequence: Synthetic oligonucleotide
gggcaugggacuccugagu

SEQ ID NO: 858783 - RNA, 19 nt, Artificial Sequence
  Description of Artificial Sequence: Synthetic oligonucleotide
ggugaguaggcccgguguu

SEQ ID NO: 858784 - RNA, 19 nt, Artificial Sequence
  Description of Artificial Sequence: Synthetic oligonucleotide
ggacacacacagacacaca

SEQ ID NO: 858785 - RNA, 19 nt, Artificial Sequence
  Description of Artificial Sequence: Synthetic oligonucleotide
cuccgcuuggcagcaugga

SEQ ID NO: 858786 - RNA, 19 nt, Artificial Sequence
  Description of Artificial Sequence: Synthetic oligonucleotide
ggcuggugaguaggcccgg

SEQ ID NO: 858787 - RNA, 19 nt, Artificial Sequence
  Description of Artificial Sequence: Synthetic oligonucleotide
cauggagccuguuccucuu

SEQ ID NO: 858788 - RNA, 19 nt, Artificial Sequence
  Description of Artificial Sequence: Synthetic oligonucleotide
gcagcgaugaggggccaga

SEQ ID NO: 858789 - RNA, 19 nt, Artificial Sequence
  Description of Artificial Sequence: Synthetic oligonucleotide
cuacuaggccaaacacuuu

SEQ ID NO: 858790 - RNA, 19 nt, Artificial Sequence
  Description of Artificial Sequence: Synthetic oligonucleotide
gcucaagcucccguaccga

SEQ ID NO: 858791 - RNA, 19 nt, Artificial Sequence
  Description of Artificial Sequence: Synthetic oligonucleotide
gggccgacacaauuaguuu

SEQ ID NO: 858792 - RNA, 19 nt, Artificial Sequence
  Description of Artificial Sequence: Synthetic oligonucleotide
cccgugccgguccaugguc

SEQ ID NO: 858793 - RNA, 19 nt, Artificial Sequence
  Description of Artificial Sequence: Synthetic oligonucleotide
cgugccgguccauggucag

SEQ ID NO: 858794 - RNA, 19 nt, Artificial Sequence
  Description of Artificial Sequence: Synthetic oligonucleotide
gacacagggccgacacaau

SEQ ID NO: 858795 - RNA, 19 nt, Artificial Sequence
  Description of Artificial Sequence: Synthetic oligonucleotide
cagggccgacacaauuagu

SEQ ID NO: 858796 - RNA, 19 nt, Artificial Sequence
  Description of Artificial Sequence: Synthetic oligonucleotide
gugcugccgcucucuacgu

SEQ ID NO: 858797 - RNA, 19 nt, Artificial Sequence
  Description of Artificial Sequence: Synthetic oligonucleotide
ccguggagaauaaguacau

SEQ ID NO: 858798 - RNA, 19 nt, Artificial Sequence
  Description of Artificial Sequence: Synthetic oligonucleotide
ccgugccgguccaugguca

SEQ ID NO: 858799 - RNA, 19 nt, Artificial Sequence
  Description of Artificial Sequence: Synthetic oligonucleotide
cacacagagcggugcccau

SEQ ID NO: 858800 - RNA, 19 nt, Artificial Sequence
  Description of Artificial Sequence: Synthetic oligonucleotide
ccauucuguaacugagcuu

SEQ ID NO: 858801 - RNA, 19 nt, Artificial Sequence
  Description of Artificial Sequence: Synthetic oligonucleotide
gcaccuccgcuuggcagca

SEQ ID NO: 858802 - RNA, 19 nt, Artificial Sequence
  Description of Artificial Sequence: Synthetic oligonucleotide
gggccaugugcaccacagu

SEQ ID NO: 858803 - RNA, 19 nt, Artificial Sequence
  Description of Artificial Sequence: Synthetic oligonucleotide
ccgaugcaugggccagauc

SEQ ID NO: 858804 - RNA, 19 nt, Artificial Sequence
  Description of Artificial Sequence: Synthetic oligonucleotide
ggguauuggcuggccuccu

SEQ ID NO: 858805 - RNA, 19 nt, Artificial Sequence
  Description of Artificial Sequence: Synthetic oligonucleotide
cccgggcacacagagcggu

SEQ ID NO: 858806 - RNA, 19 nt, Artificial Sequence
  Description of Artificial Sequence: Synthetic oligonucleotide
ccgacacaauuaguuuccu

SEQ ID NO: 858807 - RNA, 19 nt, Artificial Sequence
  Description of Artificial Sequence: Synthetic oligonucleotide
caccuccgcuuggcagcau

SEQ ID NO: 858808 - RNA, 19 nt, Artificial Sequence
  Description of Artificial Sequence: Synthetic oligonucleotide
ugggaaauaaccuagaaag

SEQ ID NO: 858809 - RNA, 19 nt, Artificial Sequence
  Description of Artificial Sequence: Synthetic oligonucleotide
agaacuaaucaccagacac

SEQ ID NO: 858810 - RNA, 19 nt, Artificial Sequence
  Description of Artificial Sequence: Synthetic oligonucleotide
auaaccaaccuccauacac

SEQ ID NO: 858811 - RNA, 19 nt, Artificial Sequence
  Description of Artificial Sequence: Synthetic oligonucleotide
auaaauaaggugcuggcuc

SEQ ID NO: 858812 - RNA, 19 nt, Artificial Sequence
  Description of Artificial Sequence: Synthetic oligonucleotide
ugaaacuaagacuagaauc

SEQ ID NO: 858813 - RNA, 19 nt, Artificial Sequence
  Description of Artificial Sequence: Synthetic oligonucleotide
uuguacaugguuucuaugg

SEQ ID NO: 858814 - RNA, 19 nt, Artificial Sequence
  Description of Artificial Sequence: Synthetic oligonucleotide
uguaacagaacucuauccc

SEQ ID NO: 858815 - RNA, 19 nt, Artificial Sequence
  Description of Artificial Sequence: Synthetic oligonucleotide
uuuucaaggaucuuggggu

SEQ ID NO: 858816 - RNA, 19 nt, Artificial Sequence
  Description of Artificial Sequence: Synthetic oligonucleotide
ucaagaaauguucaggcca

SEQ ID NO: 858817 - RNA, 19 nt, Artificial Sequence
  Description of Artificial Sequence: Synthetic oligonucleotide
aacuaaucaccagacacgc

SEQ ID NO: 858818 - RNA, 19 nt, Artificial Sequence
  Description of Artificial Sequence: Synthetic oligonucleotide
aagguauuucuauaauccg

SEQ ID NO: 858819 - RNA, 19 nt, Artificial Sequence
  Description of Artificial Sequence: Synthetic oligonucleotide
aauuaagguauuucuauaa

SEQ ID NO: 858820 - RNA, 19 nt, Artificial Sequence
  Description of Artificial Sequence: Synthetic oligonucleotide
acauaaauaaggugcuggc

SEQ ID NO: 858821 - RNA, 19 nt, Artificial Sequence
  Description of Artificial Sequence: Synthetic oligonucleotide
aacguguacaccuauucug

SEQ ID NO: 858822 - RNA, 19 nt, Artificial Sequence
  Description of Artificial Sequence: Synthetic oligonucleotide
agaaggaaggcuugcaugg

SEQ ID NO: 858823 - RNA, 19 nt, Artificial Sequence
  Description of Artificial Sequence: Synthetic oligonucleotide
uacauaaauaaggugcugg

SEQ ID NO: 858824 - RNA, 19 nt, Artificial Sequence
  Description of Artificial Sequence: Synthetic oligonucleotide
aacagaacucuaucccugc

SEQ ID NO: 858825 - RNA, 19 nt, Artificial Sequence
  Description of Artificial Sequence: Synthetic oligonucleotide
uuauugucaagaaauguuc

SEQ ID NO: 858826 - RNA, 19 nt, Artificial Sequence
  Description of Artificial Sequence: Synthetic oligonucleotide
ucauccaccguucagggug

SEQ ID NO: 858827 - RNA, 19 nt, Artificial Sequence
  Description of Artificial Sequence: Synthetic oligonucleotide
cuccgauaaauauuaaagg

SEQ ID NO: 858828 - RNA, 19 nt, Artificial Sequence
  Description of Artificial Sequence: Synthetic oligonucleotide
uuuucgagaaaucauugaa

SEQ ID NO: 858829 - RNA, 19 nt, Artificial Sequence
  Description of Artificial Sequence: Synthetic oligonucleotide
auauggaucauauccaagu

SEQ ID NO: 858830 - RNA, 19 nt, Artificial Sequence
  Description of Artificial Sequence: Synthetic oligonucleotide
ucuacgauggcagaggcgc

SEQ ID NO: 858831 - RNA, 19 nt, Artificial Sequence
  Description of Artificial Sequence: Synthetic oligonucleotide
ucugaaacaaugcacugaa

SEQ ID NO: 858832 - RNA, 19 nt, Artificial Sequence
  Description of Artificial Sequence: Synthetic oligonucleotide
agaaagguaagucaaggau

SEQ ID NO: 858833 - RNA, 19 nt, Artificial Sequence
  Description of Artificial Sequence: Synthetic oligonucleotide
gaacuaaucaccagacacg

SEQ ID NO: 858834 - RNA, 19 nt, Artificial Sequence
  Description of Artificial Sequence: Synthetic oligonucleotide
uaaauaaggugcuggcucc

SEQ ID NO: 858835 - RNA, 19 nt, Artificial Sequence
  Description of Artificial Sequence: Synthetic oligonucleotide
aacuuuaagagcguucuca

SEQ ID NO: 858836 - RNA, 19 nt, Artificial Sequence
  Description of Artificial Sequence: Synthetic oligonucleotide
uauuguacaaaacgcugga

SEQ ID NO: 858837 - RNA, 19 nt, Artificial Sequence
  Description of Artificial Sequence: Synthetic oligonucleotide
auacauuuaaacaggcgcg

SEQ ID NO: 858838 - RNA, 19 nt, Artificial Sequence
  Description of Artificial Sequence: Synthetic oligonucleotide
uucccaacgucucugaaac

SEQ ID NO: 858839 - RNA, 19 nt, Artificial Sequence
  Description of Artificial Sequence: Synthetic oligonucleotide
agguauuucuauaauccgc

SEQ ID NO: 858840 - RNA, 19 nt, Artificial Sequence
  Description of Artificial Sequence: Synthetic oligonucleotide
agagcguucucauccaccg

SEQ ID NO: 858841 - RNA, 19 nt, Artificial Sequence
  Description of Artificial Sequence: Synthetic oligonucleotide
aaguuuggcaagcaugggu

SEQ ID NO: 858842 - RNA, 19 nt, Artificial Sequence
  Description of Artificial Sequence: Synthetic oligonucleotide
aagucauuagguuguaaau

SEQ ID NO: 858843 - RNA, 19 nt, Artificial Sequence
  Description of Artificial Sequence: Synthetic oligonucleotide
auggucagcaucuacgaug

SEQ ID NO: 858844 - RNA, 19 nt, Artificial Sequence
  Description of Artificial Sequence: Synthetic oligonucleotide
aacgagacugccaaguuug

SEQ ID NO: 858845 - RNA, 19 nt, Artificial Sequence
  Description of Artificial Sequence: Synthetic oligonucleotide
uagguuguaaauguguaca

SEQ ID NO: 858846 - RNA, 19 nt, Artificial Sequence
  Description of Artificial Sequence: Synthetic oligonucleotide
uacauuuaaacaggcgcgg

SEQ ID NO: 858847 - RNA, 19 nt, Artificial Sequence
  Description of Artificial Sequence: Synthetic oligonucleotide
aacuaagacuagaaucugg

SEQ ID NO: 858848 - RNA, 19 nt, Artificial Sequence
  Description of Artificial Sequence: Synthetic oligonucleotide
guauuguacaaaacgcugg

SEQ ID NO: 858849 - RNA, 19 nt, Artificial Sequence
  Description of Artificial Sequence: Synthetic oligonucleotide
aaggauccgagggaugacc

SEQ ID NO: 858850 - RNA, 19 nt, Artificial Sequence
  Description of Artificial Sequence: Synthetic oligonucleotide
cuguaacagaacucuaucc

SEQ ID NO: 858851 - RNA, 19 nt, Artificial Sequence
  Description of Artificial Sequence: Synthetic oligonucleotide
aggugaauguuuuguuggc

SEQ ID NO: 858852 - RNA, 19 nt, Artificial Sequence
  Description of Artificial Sequence: Synthetic oligonucleotide
agguuuuccguaauuaggg

SEQ ID NO: 858853 - RNA, 19 nt, Artificial Sequence
  Description of Artificial Sequence: Synthetic oligonucleotide
uucugaacgagacugccaa

SEQ ID NO: 858854 - RNA, 19 nt, Artificial Sequence
  Description of Artificial Sequence: Synthetic oligonucleotide
uccgcaucaauacauuuaa

SEQ ID NO: 858855 - RNA, 19 nt, Artificial Sequence
  Description of Artificial Sequence: Synthetic oligonucleotide
aguaauuucccaacgucuc

SEQ ID NO: 858856 - RNA, 19 nt, Artificial Sequence
  Description of Artificial Sequence: Synthetic oligonucleotide
uccuuuauagacccuucug

SEQ ID NO: 858857 - RNA, 19 nt, Artificial Sequence
  Description of Artificial Sequence: Synthetic oligonucleotide
ugugauaggugaauguuuu

SEQ ID NO: 858858 - RNA, 19 nt, Artificial Sequence
  Description of Artificial Sequence: Synthetic oligonucleotide
aggccauggagauucuacc

SEQ ID NO: 858859 - RNA, 19 nt, Artificial Sequence
  Description of Artificial Sequence: Synthetic oligonucleotide
gcuaugguaacuuuucgag

SEQ ID NO: 858860 - RNA, 19 nt, Artificial Sequence
  Description of Artificial Sequence: Synthetic oligonucleotide
auauccaaguuuggcaagc

SEQ ID NO: 858861 - RNA, 19 nt, Artificial Sequence
  Description of Artificial Sequence: Synthetic oligonucleotide
uuugacagugccccgacau

SEQ ID NO: 858862 - RNA, 19 nt, Artificial Sequence
  Description of Artificial Sequence: Synthetic oligonucleotide
uugaaacuaagacuagaau

SEQ ID NO: 858863 - RNA, 19 nt, Artificial Sequence
  Description of Artificial Sequence: Synthetic oligonucleotide
agucauuagguuguaaaug

SEQ ID NO: 858864 - RNA, 19 nt, Artificial Sequence
  Description of Artificial Sequence: Synthetic oligonucleotide
ccuccgauaaauauuaaag

SEQ ID NO: 858865 - RNA, 19 nt, Artificial Sequence
  Description of Artificial Sequence: Synthetic oligonucleotide
uaaccaaccuccauacacu

SEQ ID NO: 858866 - RNA, 19 nt, Artificial Sequence
  Description of Artificial Sequence: Synthetic oligonucleotide
aauaaccuagaaagguaag

SEQ ID NO: 858867 - RNA, 19 nt, Artificial Sequence
  Description of Artificial Sequence: Synthetic oligonucleotide
uagaaagguaagucaagga

SEQ ID NO: 858868 - RNA, 19 nt, Artificial Sequence
  Description of Artificial Sequence: Synthetic oligonucleotide
gcggguauuguacaaaacg

SEQ ID NO: 858869 - RNA, 19 nt, Artificial Sequence
  Description of Artificial Sequence: Synthetic oligonucleotide
ugauaggugaauguuuugu

SEQ ID NO: 858870 - RNA, 19 nt, Artificial Sequence
  Description of Artificial Sequence: Synthetic oligonucleotide
auuaagguauuucuauaau

SEQ ID NO: 858871 - RNA, 19 nt, Artificial Sequence
  Description of Artificial Sequence: Synthetic oligonucleotide
cucauuucgaggguggugc

SEQ ID NO: 858872 - RNA, 19 nt, Artificial Sequence
  Description of Artificial Sequence: Synthetic oligonucleotide
uggcauugggaaauaaccu

SEQ ID NO: 858873 - RNA, 19 nt, Artificial Sequence
  Description of Artificial Sequence: Synthetic oligonucleotide
aagagcguucucauccacc

SEQ ID NO: 858874 - RNA, 19 nt, Artificial Sequence
  Description of Artificial Sequence: Synthetic oligonucleotide
aaagguaagucaaggauuu

SEQ ID NO: 858875 - RNA, 19 nt, Artificial Sequence
  Description of Artificial Sequence: Synthetic oligonucleotide
ucgagaaaucauugaaugu

SEQ ID NO: 858876 - RNA, 19 nt, Artificial Sequence
  Description of Artificial Sequence: Synthetic oligonucleotide
aaacuaagacuagaaucug

SEQ ID NO: 858877 - RNA, 19 nt, Artificial Sequence
  Description of Artificial Sequence: Synthetic oligonucleotide
ugaauguacugaugcccgg

SEQ ID NO: 858878 - RNA, 19 nt, Artificial Sequence
  Description of Artificial Sequence: Synthetic oligonucleotide
ucuugaaacuaagacuaga

SEQ ID NO: 858879 - RNA, 19 nt, Artificial Sequence
  Description of Artificial Sequence: Synthetic oligonucleotide
ccuuuauagacccuucugg

SEQ ID NO: 858880 - RNA, 19 nt, Artificial Sequence
  Description of Artificial Sequence: Synthetic oligonucleotide
uauucugaacgagacugcc

SEQ ID NO: 858881 - RNA, 19 nt, Artificial Sequence
  Description of Artificial Sequence: Synthetic oligonucleotide
aauuucccaacgucucuga

SEQ ID NO: 858882 - RNA, 19 nt, Artificial Sequence
  Description of Artificial Sequence: Synthetic oligonucleotide
cacuaaaggaggcuggcug

SEQ ID NO: 858883 - RNA, 19 nt, Artificial Sequence
  Description of Artificial Sequence: Synthetic oligonucleotide
auaaccuagaaagguaagu

SEQ ID NO: 858884 - RNA, 19 nt, Artificial Sequence
  Description of Artificial Sequence: Synthetic oligonucleotide
ucgaggguggugcauguca

SEQ ID NO: 858885 - RNA, 19 nt, Artificial Sequence
  Description of Artificial Sequence: Synthetic oligonucleotide
acacgccaaaaguaaguuc

SEQ ID NO: 858886 - RNA, 19 nt, Artificial Sequence
  Description of Artificial Sequence: Synthetic oligonucleotide
gaaauuuggcauugggaaa

SEQ ID NO: 858887 - RNA, 19 nt, Artificial Sequence
  Description of Artificial Sequence: Synthetic oligonucleotide
acuaagacuagaaucuggu

SEQ ID NO: 858888 - RNA, 19 nt, Artificial Sequence
  Description of Artificial Sequence: Synthetic oligonucleotide
uuaagagcguucucaucca

SEQ ID NO: 858889 - RNA, 19 nt, Artificial Sequence
  Description of Artificial Sequence: Synthetic oligonucleotide
uuccucuauccggugaugg

SEQ ID NO: 858890 - RNA, 19 nt, Artificial Sequence
  Description of Artificial Sequence: Synthetic oligonucleotide
guaaaacacugucacagaa

SEQ ID NO: 858891 - RNA, 19 nt, Artificial Sequence
  Description of Artificial Sequence: Synthetic oligonucleotide
gucauuagguuguaaaugu

SEQ ID NO: 858892 - RNA, 19 nt, Artificial Sequence
  Description of Artificial Sequence: Synthetic oligonucleotide
aauccgcaucaauacauuu

SEQ ID NO: 858893 - RNA, 19 nt, Artificial Sequence
  Description of Artificial Sequence: Synthetic oligonucleotide
uuuaaacaggcgcggguau

SEQ ID NO: 858894 - RNA, 19 nt, Artificial Sequence
  Description of Artificial Sequence: Synthetic oligonucleotide
uccacagcggaugucagga

SEQ ID NO: 858895 - RNA, 19 nt, Artificial Sequence
  Description of Artificial Sequence: Synthetic oligonucleotide
augagcgugguuccacuuc

SEQ ID NO: 858896 - RNA, 19 nt, Artificial Sequence
  Description of Artificial Sequence: Synthetic oligonucleotide
auaauccgcaucaauacau

SEQ ID NO: 858897 - RNA, 19 nt, Artificial Sequence
  Description of Artificial Sequence: Synthetic oligonucleotide
acauuuaaacaggcgcggg

SEQ ID NO: 858898 - RNA, 19 nt, Artificial Sequence
  Description of Artificial Sequence: Synthetic oligonucleotide
uguacugaugcccggccau

SEQ ID NO: 858899 - RNA, 19 nt, Artificial Sequence
  Description of Artificial Sequence: Synthetic oligonucleotide
cgugguuccacuucgaggc

SEQ ID NO: 858900 - RNA, 19 nt, Artificial Sequence
  Description of Artificial Sequence: Synthetic oligonucleotide
uaaacaggcgcggguauug

SEQ ID NO: 858901 - RNA, 19 nt, Artificial Sequence
  Description of Artificial Sequence: Synthetic oligonucleotide
uugggguucuccagucuag

SEQ ID NO: 858902 - RNA, 19 nt, Artificial Sequence
  Description of Artificial Sequence: Synthetic oligonucleotide
cacuucgaggcacaccucc

SEQ ID NO: 858903 - RNA, 19 nt, Artificial Sequence
  Description of Artificial Sequence: Synthetic oligonucleotide
aggugguuaggauacccca

SEQ ID NO: 858904 - RNA, 19 nt, Artificial Sequence
  Description of Artificial Sequence: Synthetic oligonucleotide
ucauggugcaaaacugaau

SEQ ID NO: 858905 - RNA, 19 nt, Artificial Sequence
  Description of Artificial Sequence: Synthetic oligonucleotide
cacgccaaaaguaaguucu

SEQ ID NO: 858906 - RNA, 19 nt, Artificial Sequence
  Description of Artificial Sequence: Synthetic oligonucleotide
gaauguacugaugcccggc

SEQ ID NO: 858907 - RNA, 19 nt, Artificial Sequence
  Description of Artificial Sequence: Synthetic oligonucleotide
accguucaggguguaagac

SEQ ID NO: 858908 - RNA, 19 nt, Artificial Sequence
  Description of Artificial Sequence: Synthetic oligonucleotide
aacucuaucccugcuggau

SEQ ID NO: 858909 - RNA, 19 nt, Artificial Sequence
  Description of Artificial Sequence: Synthetic oligonucleotide
gggaaauaaccuagaaagg

SEQ ID NO: 858910 - RNA, 19 nt, Artificial Sequence
  Description of Artificial Sequence: Synthetic oligonucleotide
caucuacgauggcagaggc

SEQ ID NO: 858911 - RNA, 19 nt, Artificial Sequence
  Description of Artificial Sequence: Synthetic oligonucleotide
uuuucucccgcccgccgcc

SEQ ID NO: 858912 - RNA, 19 nt, Artificial Sequence
  Description of Artificial Sequence: Synthetic oligonucleotide
gguauuucuauaauccgca

SEQ ID NO: 858913 - RNA, 19 nt, Artificial Sequence
  Description of Artificial Sequence: Synthetic oligonucleotide
uuucuauggcccgauucca

SEQ ID NO: 858914 - RNA, 19 nt, Artificial Sequence
  Description of Artificial Sequence: Synthetic oligonucleotide
uuccgcucuugaaacuaag

SEQ ID NO: 858915 - RNA, 19 nt, Artificial Sequence
  Description of Artificial Sequence: Synthetic oligonucleotide
agacugccaaguuuguuaa

SEQ ID NO: 858916 - RNA, 19 nt, Artificial Sequence
  Description of Artificial Sequence: Synthetic oligonucleotide
cagacacgccaaaaguaag

SEQ ID NO: 858917 - RNA, 19 nt, Artificial Sequence
  Description of Artificial Sequence: Synthetic oligonucleotide
accuccgauaaauauuaaa

SEQ ID NO: 858918 - RNA, 19 nt, Artificial Sequence
  Description of Artificial Sequence: Synthetic oligonucleotide
cuaugguaacuuuucgaga

SEQ ID NO: 858919 - RNA, 19 nt, Artificial Sequence
  Description of Artificial Sequence: Synthetic oligonucleotide
ucugaacgagacugccaag

SEQ ID NO: 858920 - RNA, 19 nt, Artificial Sequence
  Description of Artificial Sequence: Synthetic oligonucleotide
uccucuauccggugauggc

SEQ ID NO: 858921 - RNA, 19 nt, Artificial Sequence
  Description of Artificial Sequence: Synthetic oligonucleotide
guaacagaacucuaucccu

SEQ ID NO: 858922 - RNA, 19 nt, Artificial Sequence
  Description of Artificial Sequence: Synthetic oligonucleotide
uaauccgcaucaauacauu

SEQ ID NO: 858923 - RNA, 19 nt, Artificial Sequence
  Description of Artificial Sequence: Synthetic oligonucleotide
ggugauggcacuccauggc

SEQ ID NO: 858924 - RNA, 19 nt, Artificial Sequence
  Description of Artificial Sequence: Synthetic oligonucleotide
cucuauccggugauggcac

SEQ ID NO: 858925 - RNA, 19 nt, Artificial Sequence
  Description of Artificial Sequence: Synthetic oligonucleotide
cuuuauagacccuucuggu

SEQ ID NO: 858926 - RNA, 19 nt, Artificial Sequence
  Description of Artificial Sequence: Synthetic oligonucleotide
uaagagcguucucauccac

SEQ ID NO: 858927 - RNA, 19 nt, Artificial Sequence
  Description of Artificial Sequence: Synthetic oligonucleotide
aggguguaagacaagcugu

SEQ ID NO: 858928 - RNA, 19 nt, Artificial Sequence
  Description of Artificial Sequence: Synthetic oligonucleotide
aacaaugcacugaauuauu

SEQ ID NO: 858929 - RNA, 19 nt, Artificial Sequence
  Description of Artificial Sequence: Synthetic oligonucleotide
gauccgagggaugacccug

SEQ ID NO: 858930 - RNA, 19 nt, Artificial Sequence
  Description of Artificial Sequence: Synthetic oligonucleotide
ugaacgagacugccaaguu

SEQ ID NO: 858931 - RNA, 19 nt, Artificial Sequence
  Description of Artificial Sequence: Synthetic oligonucleotide
accuagaaagguaagucaa

SEQ ID NO: 858932 - RNA, 19 nt, Artificial Sequence
  Description of Artificial Sequence: Synthetic oligonucleotide
ggaacguguacaccuauuc

SEQ ID NO: 858933 - RNA, 19 nt, Artificial Sequence
  Description of Artificial Sequence: Synthetic oligonucleotide
uucacaagaggagcuguaa

SEQ ID NO: 858934 - RNA, 19 nt, Artificial Sequence
  Description of Artificial Sequence: Synthetic oligonucleotide
gcucuugaaacuaagacua

SEQ ID NO: 858935 - RNA, 19 nt, Artificial Sequence
  Description of Artificial Sequence: Synthetic oligonucleotide
auaccccacuucucccagc

SEQ ID NO: 858936 - RNA, 19 nt, Artificial Sequence
  Description of Artificial Sequence: Synthetic oligonucleotide
gccaucucggaccaucagg

SEQ ID NO: 858937 - RNA, 19 nt, Artificial Sequence
  Description of Artificial Sequence: Synthetic oligonucleotide
gugcaaaacugaaugguuc

SEQ ID NO: 858938 - RNA, 19 nt, Artificial Sequence
  Description of Artificial Sequence: Synthetic oligonucleotide
uggcugugugacaccaccc

SEQ ID NO: 858939 - RNA, 19 nt, Artificial Sequence
  Description of Artificial Sequence: Synthetic oligonucleotide
cacagcggaugucaggaug

SEQ ID NO: 858940 - RNA, 19 nt, Artificial Sequence
  Description of Artificial Sequence: Synthetic oligonucleotide
agcgugguuccacuucgag

SEQ ID NO: 858941 - RNA, 19 nt, Artificial Sequence
  Description of Artificial Sequence: Synthetic oligonucleotide
accuauucugaacgagacu

SEQ ID NO: 858942 - RNA, 19 nt, Artificial Sequence
  Description of Artificial Sequence: Synthetic oligonucleotide
cggguauuguacaaaacgc

SEQ ID NO: 858943 - RNA, 19 nt, Artificial Sequence
  Description of Artificial Sequence: Synthetic oligonucleotide
auggcccgauuccacuugg

SEQ ID NO: 858944 - RNA, 19 nt, Artificial Sequence
  Description of Artificial Sequence: Synthetic oligonucleotide
ucggccuuuucucccgccc

SEQ ID NO: 858945 - RNA, 19 nt, Artificial Sequence
  Description of Artificial Sequence: Synthetic oligonucleotide
gugauaggugaauguuuug

SEQ ID NO: 858946 - RNA, 19 nt, Artificial Sequence
  Description of Artificial Sequence: Synthetic oligonucleotide
uacgauggcagaggcgcag

SEQ ID NO: 858947 - RNA, 19 nt, Artificial Sequence
  Description of Artificial Sequence: Synthetic oligonucleotide
gaacguguacaccuauucu

SEQ ID NO: 858948 - RNA, 19 nt, Artificial Sequence
  Description of Artificial Sequence: Synthetic oligonucleotide
acaccuauucugaacgaga

SEQ ID NO: 858949 - RNA, 19 nt, Artificial Sequence
  Description of Artificial Sequence: Synthetic oligonucleotide
acagaacucuaucccugcu

SEQ ID NO: 858950 - RNA, 19 nt, Artificial Sequence
  Description of Artificial Sequence: Synthetic oligonucleotide
uacuggaccgggaccacau

SEQ ID NO: 858951 - RNA, 19 nt, Artificial Sequence
  Description of Artificial Sequence: Synthetic oligonucleotide
ggcuacguuccucuauccg

SEQ ID NO: 858952 - RNA, 19 nt, Artificial Sequence
  Description of Artificial Sequence: Synthetic oligonucleotide
caacccacuuugacagugc

SEQ ID NO: 858953 - RNA, 19 nt, Artificial Sequence
  Description of Artificial Sequence: Synthetic oligonucleotide
acguguacaccuauucuga

SEQ ID NO: 858954 - RNA, 19 nt, Artificial Sequence
  Description of Artificial Sequence: Synthetic oligonucleotide
ucauuucgaggguggugca

SEQ ID NO: 858955 - RNA, 19 nt, Artificial Sequence
  Description of Artificial Sequence: Synthetic oligonucleotide
ucaacgccaggcgaccgcc

SEQ ID NO: 858956 - RNA, 19 nt, Artificial Sequence
  Description of Artificial Sequence: Synthetic oligonucleotide
uuucgaggguggugcaugu

SEQ ID NO: 858957 - RNA, 19 nt, Artificial Sequence
  Description of Artificial Sequence: Synthetic oligonucleotide
agcagucgucccuugcugu

SEQ ID NO: 858958 - RNA, 19 nt, Artificial Sequence
  Description of Artificial Sequence: Synthetic oligonucleotide
agacacgccaaaaguaagu

SEQ ID NO: 858959 - RNA, 19 nt, Artificial Sequence
  Description of Artificial Sequence: Synthetic oligonucleotide
caaguuuggcaagcauggg

SEQ ID NO: 858960 - RNA, 19 nt, Artificial Sequence
  Description of Artificial Sequence: Synthetic oligonucleotide
ggugcaaucacugccaugu

SEQ ID NO: 858961 - RNA, 19 nt, Artificial Sequence
  Description of Artificial Sequence: Synthetic oligonucleotide
cuuugugauaggugaaugu

SEQ ID NO: 858962 - RNA, 19 nt, Artificial Sequence
  Description of Artificial Sequence: Synthetic oligonucleotide
gcaucuacgauggcagagg

SEQ ID NO: 858963 - RNA, 19 nt, Artificial Sequence
  Description of Artificial Sequence: Synthetic oligonucleotide
ucacuaaaggaggcuggcu

SEQ ID NO: 858964 - RNA, 19 nt, Artificial Sequence
  Description of Artificial Sequence: Synthetic oligonucleotide
uucgaggcacaccuccgau

SEQ ID NO: 858965 - RNA, 19 nt, Artificial Sequence
  Description of Artificial Sequence: Synthetic oligonucleotide
uauagacccuucugguguu

SEQ ID NO: 858966 - RNA, 19 nt, Artificial Sequence
  Description of Artificial Sequence: Synthetic oligonucleotide
gagggaugacccugguuuc

SEQ ID NO: 858967 - RNA, 19 nt, Artificial Sequence
  Description of Artificial Sequence: Synthetic oligonucleotide
uuucuauaauccgcaucaa

SEQ ID NO: 858968 - RNA, 19 nt, Artificial Sequence
  Description of Artificial Sequence: Synthetic oligonucleotide
uggcuacguuccucuaucc

SEQ ID NO: 858969 - RNA, 19 nt, Artificial Sequence
  Description of Artificial Sequence: Synthetic oligonucleotide
acuucgaggcacaccuccg

SEQ ID NO: 858970 - RNA, 19 nt, Artificial Sequence
  Description of Artificial Sequence: Synthetic oligonucleotide
aucuacgauggcagaggcg

SEQ ID NO: 858971 - RNA, 19 nt, Artificial Sequence
  Description of Artificial Sequence: Synthetic oligonucleotide
ggcauugggaaauaaccua

SEQ ID NO: 858972 - RNA, 19 nt, Artificial Sequence
  Description of Artificial Sequence: Synthetic oligonucleotide
ggcauauggaucauaucca

SEQ ID NO: 858973 - RNA, 19 nt, Artificial Sequence
  Description of Artificial Sequence: Synthetic oligonucleotide
guaauuucccaacgucucu

SEQ ID NO: 858974 - RNA, 19 nt, Artificial Sequence
  Description of Artificial Sequence: Synthetic oligonucleotide
ucuauccggugauggcacu

SEQ ID NO: 858975 - RNA, 19 nt, Artificial Sequence
  Description of Artificial Sequence: Synthetic oligonucleotide
aaacaggcgcggguauugu

SEQ ID NO: 858976 - RNA, 19 nt, Artificial Sequence
  Description of Artificial Sequence: Synthetic oligonucleotide
guacaccuauucugaacga

SEQ ID NO: 858977 - RNA, 19 nt, Artificial Sequence
  Description of Artificial Sequence: Synthetic oligonucleotide
uccucaacgccaggcgacc

SEQ ID NO: 858978 - RNA, 19 nt, Artificial Sequence
  Description of Artificial Sequence: Synthetic oligonucleotide
uuaaacaggcgcggguauu

SEQ ID NO: 858979 - RNA, 19 nt, Artificial Sequence
  Description of Artificial Sequence: Synthetic oligonucleotide
gcaagcaugggugcaauca

SEQ ID NO: 858980 - RNA, 19 nt, Artificial Sequence
  Description of Artificial Sequence: Synthetic oligonucleotide
acgcuggaacguguacacc

SEQ ID NO: 858981 - RNA, 19 nt, Artificial Sequence
  Description of Artificial Sequence: Synthetic oligonucleotide
uggggucagguuuuccgua

SEQ ID NO: 858982 - RNA, 19 nt, Artificial Sequence
  Description of Artificial Sequence: Synthetic oligonucleotide
ugguuguacaugguuucua

SEQ ID NO: 858983 - RNA, 19 nt, Artificial Sequence
  Description of Artificial Sequence: Synthetic oligonucleotide
gaacucuaucccugcugga

SEQ ID NO: 858984 - RNA, 19 nt, Artificial Sequence
  Description of Artificial Sequence: Synthetic oligonucleotide
ggaauauggaggaacuuua

SEQ ID NO: 858985 - RNA, 19 nt, Artificial Sequence
  Description of Artificial Sequence: Synthetic oligonucleotide
uacugaugcccggccaucu

SEQ ID NO: 858986 - RNA, 19 nt, Artificial Sequence
  Description of Artificial Sequence: Synthetic oligonucleotide
cgaucauuucuucauggug

SEQ ID NO: 858987 - RNA, 19 nt, Artificial Sequence
  Description of Artificial Sequence: Synthetic oligonucleotide
agucgucccuugcugugga

SEQ ID NO: 858988 - RNA, 19 nt, Artificial Sequence
  Description of Artificial Sequence: Synthetic oligonucleotide
ugguuccacuucgaggcac

SEQ ID NO: 858989 - RNA, 19 nt, Artificial Sequence
  Description of Artificial Sequence: Synthetic oligonucleotide
gcauauggaucauauccaa

SEQ ID NO: 858990 - RNA, 19 nt, Artificial Sequence
  Description of Artificial Sequence: Synthetic oligonucleotide
cagcagucgucccuugcug

SEQ ID NO: 858991 - RNA, 19 nt, Artificial Sequence
  Description of Artificial Sequence: Synthetic oligonucleotide
gacugccaaguuuguuaac

SEQ ID NO: 858992 - RNA, 19 nt, Artificial Sequence
  Description of Artificial Sequence: Synthetic oligonucleotide
ugggugcaaucacugccau

SEQ ID NO: 858993 - RNA, 19 nt, Artificial Sequence
  Description of Artificial Sequence: Synthetic oligonucleotide
ucgaggcacaccuccgaua

SEQ ID NO: 858994 - RNA, 19 nt, Artificial Sequence
  Description of Artificial Sequence: Synthetic oligonucleotide
auccgcaucaauacauuua

SEQ ID NO: 858995 - RNA, 19 nt, Artificial Sequence
  Description of Artificial Sequence: Synthetic oligonucleotide
gcccgauuccacuugguca

SEQ ID NO: 858996 - RNA, 19 nt, Artificial Sequence
  Description of Artificial Sequence: Synthetic oligonucleotide
caaaacgcuggaacgugua

SEQ ID NO: 858997 - RNA, 19 nt, Artificial Sequence
  Description of Artificial Sequence: Synthetic oligonucleotide
gugguuaggauaccccacu

SEQ ID NO: 858998 - RNA, 19 nt, Artificial Sequence
  Description of Artificial Sequence: Synthetic oligonucleotide
cuugggguucuccagucua

SEQ ID NO: 858999 - RNA, 19 nt, Artificial Sequence
  Description of Artificial Sequence: Synthetic oligonucleotide
ggccauggagauucuacca

SEQ ID NO: 859000 - RNA, 19 nt, Artificial Sequence
  Description of Artificial Sequence: Synthetic oligonucleotide
ucgucccuugcuguggaaa

SEQ ID NO: 859001 - RNA, 19 nt, Artificial Sequence
  Description of Artificial Sequence: Synthetic oligonucleotide
gcggaugucaggaugggca

SEQ ID NO: 859002 - RNA, 19 nt, Artificial Sequence
  Description of Artificial Sequence: Synthetic oligonucleotide
guuaacagaaugccaucuu

SEQ ID NO: 859003 - RNA, 19 nt, Artificial Sequence
  Description of Artificial Sequence: Synthetic oligonucleotide
gaacgagacugccaaguuu

SEQ ID NO: 859004 - RNA, 19 nt, Artificial Sequence
  Description of Artificial Sequence: Synthetic oligonucleotide
uccggugauggcacuccau

SEQ ID NO: 859005 - RNA, 19 nt, Artificial Sequence
  Description of Artificial Sequence: Synthetic oligonucleotide
uccucauuucgaggguggu

SEQ ID NO: 859006 - RNA, 19 nt, Artificial Sequence
  Description of Artificial Sequence: Synthetic oligonucleotide
gccaaaaguaaguucugcu

SEQ ID NO: 859007 - RNA, 19 nt, Artificial Sequence
  Description of Artificial Sequence: Synthetic oligonucleotide
gaaugguuccauggaauau

SEQ ID NO: 859008 - RNA, 19 nt, Artificial Sequence
  Description of Artificial Sequence: Synthetic oligonucleotide
cccgacauugacaggcuug

SEQ ID NO: 859009 - RNA, 19 nt, Artificial Sequence
  Description of Artificial Sequence: Synthetic oligonucleotide
auccgagggaugacccugg

SEQ ID NO: 859010 - RNA, 19 nt, Artificial Sequence
  Description of Artificial Sequence: Synthetic oligonucleotide
ggggauuggcauauggauc

SEQ ID NO: 859011 - RNA, 19 nt, Artificial Sequence
  Description of Artificial Sequence: Synthetic oligonucleotide
ggugguuaggauaccccac

SEQ ID NO: 859012 - RNA, 19 nt, Artificial Sequence
  Description of Artificial Sequence: Synthetic oligonucleotide
ccagacacgccaaaaguaa

SEQ ID NO: 859013 - RNA, 19 nt, Artificial Sequence
  Description of Artificial Sequence: Synthetic oligonucleotide
ggauaccccacuucuccca

SEQ ID NO: 859014 - RNA, 19 nt, Artificial Sequence
  Description of Artificial Sequence: Synthetic oligonucleotide
cuucgaggcacaccuccga

SEQ ID NO: 859015 - RNA, 19 nt, Artificial Sequence
  Description of Artificial Sequence: Synthetic oligonucleotide
gacagugccccgacauuga

SEQ ID NO: 859016 - RNA, 19 nt, Artificial Sequence
  Description of Artificial Sequence: Synthetic oligonucleotide
cuauccggugauggcacuc

SEQ ID NO: 859017 - RNA, 19 nt, Artificial Sequence
  Description of Artificial Sequence: Synthetic oligonucleotide
acgccaaaaguaaguucug

SEQ ID NO: 859018 - RNA, 19 nt, Artificial Sequence
  Description of Artificial Sequence: Synthetic oligonucleotide
caccguucaggguguaaga

SEQ ID NO: 859019 - RNA, 19 nt, Artificial Sequence
  Description of Artificial Sequence: Synthetic oligonucleotide
cacaccuccgauaaauauu

SEQ ID NO: 859020 - RNA, 19 nt, Artificial Sequence
  Description of Artificial Sequence: Synthetic oligonucleotide
ucggaccaucaggagaaau

SEQ ID NO: 859021 - RNA, 19 nt, Artificial Sequence
  Description of Artificial Sequence: Synthetic oligonucleotide
cugaacgagacugccaagu

SEQ ID NO: 859022 - RNA, 19 nt, Artificial Sequence
  Description of Artificial Sequence: Synthetic oligonucleotide
auucacaagaggagcugua

SEQ ID NO: 859023 - RNA, 19 nt, Artificial Sequence
  Description of Artificial Sequence: Synthetic oligonucleotide
ggguauuguacaaaacgcu

SEQ ID NO: 859024 - RNA, 19 nt, Artificial Sequence
  Description of Artificial Sequence: Synthetic oligonucleotide
ccggugauggcacuccaug

SEQ ID NO: 859025 - RNA, 19 nt, Artificial Sequence
  Description of Artificial Sequence: Synthetic oligonucleotide
gaaagauggucagcaucua

SEQ ID NO: 859026 - RNA, 19 nt, Artificial Sequence
  Description of Artificial Sequence: Synthetic oligonucleotide
cuuccgcucuugaaacuaa

SEQ ID NO: 859027 - RNA, 19 nt, Artificial Sequence
  Description of Artificial Sequence: Synthetic oligonucleotide
cacugguuguacaugguuu

SEQ ID NO: 859028 - RNA, 19 nt, Artificial Sequence
  Description of Artificial Sequence: Synthetic oligonucleotide
gacacgccaaaaguaaguu

SEQ ID NO: 859029 - RNA, 19 nt, Artificial Sequence
  Description of Artificial Sequence: Synthetic oligonucleotide
cgagaaaucauugaaugua

SEQ ID NO: 859030 - RNA, 19 nt, Artificial Sequence
  Description of Artificial Sequence: Synthetic oligonucleotide
uguagcuguucaggucaaa

SEQ ID NO: 859031 - RNA, 19 nt, Artificial Sequence
  Description of Artificial Sequence: Synthetic oligonucleotide
ccaccguucaggguguaag

SEQ ID NO: 859032 - RNA, 19 nt, Artificial Sequence
  Description of Artificial Sequence: Synthetic oligonucleotide
cacuuugacagugccccga

SEQ ID NO: 859033 - RNA, 19 nt, Artificial Sequence
  Description of Artificial Sequence: Synthetic oligonucleotide
cccuucuguagaaaaggca

SEQ ID NO: 859034 - RNA, 19 nt, Artificial Sequence
  Description of Artificial Sequence: Synthetic oligonucleotide
cguucaggguguaagacaa

SEQ ID NO: 859035 - RNA, 19 nt, Artificial Sequence
  Description of Artificial Sequence: Synthetic oligonucleotide
uggcccgauuccacuuggu

SEQ ID NO: 859036 - RNA, 19 nt, Artificial Sequence
  Description of Artificial Sequence: Synthetic oligonucleotide
cagugccccgacauugaca

SEQ ID NO: 859037 - RNA, 19 nt, Artificial Sequence
  Description of Artificial Sequence: Synthetic oligonucleotide
cagcggaugucaggauggg

SEQ ID NO: 859038 - RNA, 19 nt, Artificial Sequence
  Description of Artificial Sequence: Synthetic oligonucleotide
cggugauggcacuccaugg

SEQ ID NO: 859039 - RNA, 19 nt, Artificial Sequence
  Description of Artificial Sequence: Synthetic oligonucleotide
ugguuucuauggcccgauu

SEQ ID NO: 859040 - RNA, 19 nt, Artificial Sequence
  Description of Artificial Sequence: Synthetic oligonucleotide
cccgcaugagcgugguucc

SEQ ID NO: 859041 - RNA, 19 nt, Artificial Sequence
  Description of Artificial Sequence: Synthetic oligonucleotide
caggcgcggguauuguaca

SEQ ID NO: 859042 - RNA, 19 nt, Artificial Sequence
  Description of Artificial Sequence: Synthetic oligonucleotide
cuggaccgggaccacaucu

SEQ ID NO: 859043 - RNA, 19 nt, Artificial Sequence
  Description of Artificial Sequence: Synthetic oligonucleotide
gcccgcaugagcgugguuc

SEQ ID NO: 859044 - RNA, 19 nt, Artificial Sequence
  Description of Artificial Sequence: Synthetic oligonucleotide
ggcccgauuccacuugguc

SEQ ID NO: 859045 - RNA, 19 nt, Artificial Sequence
  Description of Artificial Sequence: Synthetic oligonucleotide
cuacgauggcagaggcgca

SEQ ID NO: 859046 - RNA, 19 nt, Artificial Sequence
  Description of Artificial Sequence: Synthetic oligonucleotide
aggcgcagccgugccgucg

SEQ ID NO: 859047 - RNA, 19 nt, Artificial Sequence
  Description of Artificial Sequence: Synthetic oligonucleotide
gugguuccacuucgaggca

SEQ ID NO: 859048 - RNA, 19 nt, Artificial Sequence
  Description of Artificial Sequence: Synthetic oligonucleotide
gcauaucuuugugauaggu

SEQ ID NO: 859049 - RNA, 19 nt, Artificial Sequence
  Description of Artificial Sequence: Synthetic oligonucleotide
aggcgcggguauuguacaa

SEQ ID NO: 859050 - RNA, 19 nt, Artificial Sequence
  Description of Artificial Sequence: Synthetic oligonucleotide
guacugaugcccggccauc

SEQ ID NO: 859051 - RNA, 19 nt, Artificial Sequence
  Description of Artificial Sequence: Synthetic oligonucleotide
guucuccagucuagcuggc

SEQ ID NO: 859052 - RNA, 19 nt, Artificial Sequence
  Description of Artificial Sequence: Synthetic oligonucleotide
ccguucaggguguaagaca

SEQ ID NO: 859053 - RNA, 19 nt, Artificial Sequence
  Description of Artificial Sequence: Synthetic oligonucleotide
gguagcugaaauucuccuu

SEQ ID NO: 859054 - RNA, 19 nt, Artificial Sequence
  Description of Artificial Sequence: Synthetic oligonucleotide
uccaccguucaggguguaa

SEQ ID NO: 859055 - RNA, 19 nt, Artificial Sequence
  Description of Artificial Sequence: Synthetic oligonucleotide
gggugcaaucacugccaug

SEQ ID NO: 859056 - RNA, 19 nt, Artificial Sequence
  Description of Artificial Sequence: Synthetic oligonucleotide
agccgugccgucgcuccag

SEQ ID NO: 859057 - RNA, 19 nt, Artificial Sequence
  Description of Artificial Sequence: Synthetic oligonucleotide
cccaacgucucugaaacaa

SEQ ID NO: 859058 - RNA, 19 nt, Artificial Sequence
  Description of Artificial Sequence: Synthetic oligonucleotide
cgcucuugaaacuaagacu

SEQ ID NO: 859059 - RNA, 19 nt, Artificial Sequence
  Description of Artificial Sequence: Synthetic oligonucleotide
ccucuauccggugauggca

SEQ ID NO: 859060 - RNA, 19 nt, Artificial Sequence
  Description of Artificial Sequence: Synthetic oligonucleotide
uggcagaauccagcacauc

SEQ ID NO: 859061 - RNA, 19 nt, Artificial Sequence
  Description of Artificial Sequence: Synthetic oligonucleotide
gcgcggguauuguacaaaa

SEQ ID NO: 859062 - RNA, 19 nt, Artificial Sequence
  Description of Artificial Sequence: Synthetic oligonucleotide
gaggcacaccuccgauaaa

SEQ ID NO: 859063 - RNA, 19 nt, Artificial Sequence
  Description of Artificial Sequence: Synthetic oligonucleotide
cuggcuccccaugcuuaac

SEQ ID NO: 859064 - RNA, 19 nt, Artificial Sequence
  Description of Artificial Sequence: Synthetic oligonucleotide
ggcggaucuucucuuuacu

SEQ ID NO: 859065 - RNA, 19 nt, Artificial Sequence
  Description of Artificial Sequence: Synthetic oligonucleotide
cuauggcccgauuccacuu

SEQ ID NO: 859066 - RNA, 19 nt, Artificial Sequence
  Description of Artificial Sequence: Synthetic oligonucleotide
gaccgcccuggccggcccc

SEQ ID NO: 859067 - RNA, 19 nt, Artificial Sequence
  Description of Artificial Sequence: Synthetic oligonucleotide
gagcgugguuccacuucga

SEQ ID NO: 859068 - RNA, 19 nt, Artificial Sequence
  Description of Artificial Sequence: Synthetic oligonucleotide
cgggagcgcuuccucaacg

SEQ ID NO: 859069 - RNA, 19 nt, Artificial Sequence
  Description of Artificial Sequence: Synthetic oligonucleotide
cgcggguauuguacaaaac

SEQ ID NO: 859070 - RNA, 19 nt, Artificial Sequence
  Description of Artificial Sequence: Synthetic oligonucleotide
gaccgggaccacaucugcu

SEQ ID NO: 859071 - RNA, 19 nt, Artificial Sequence
  Description of Artificial Sequence: Synthetic oligonucleotide
ccucaacgccaggcgaccg

SEQ ID NO: 859072 - RNA, 19 nt, Artificial Sequence
  Description of Artificial Sequence: Synthetic oligonucleotide
caugagcgugguuccacuu

SEQ ID NO: 859073 - RNA, 19 nt, Artificial Sequence
  Description of Artificial Sequence: Synthetic oligonucleotide
ccgggaccacaucugcuuc

SEQ ID NO: 859074 - RNA, 19 nt, Artificial Sequence
  Description of Artificial Sequence: Synthetic oligonucleotide
ccgaucauuucuucauggu

SEQ ID NO: 859075 - RNA, 19 nt, Artificial Sequence
  Description of Artificial Sequence: Synthetic oligonucleotide
caguucgcacaguugucuu

SEQ ID NO: 859076 - RNA, 19 nt, Artificial Sequence
  Description of Artificial Sequence: Synthetic oligonucleotide
gccaguucgcacaguuguc

SEQ ID NO: 859077 - RNA, 19 nt, Artificial Sequence
  Description of Artificial Sequence: Synthetic oligonucleotide
ggaggaacuuuaagagcgu

SEQ ID NO: 859078 - RNA, 19 nt, Artificial Sequence
  Description of Artificial Sequence: Synthetic oligonucleotide
ggccccgccgagaagcgca

SEQ ID NO: 859079 - RNA, 19 nt, Artificial Sequence
  Description of Artificial Sequence: Synthetic oligonucleotide
cgcccgccgcccuagcugg

SEQ ID NO: 859080 - RNA, 19 nt, Artificial Sequence
  Description of Artificial Sequence: Synthetic oligonucleotide
ggcgcggguauuguacaaa

SEQ ID NO: 859081 - RNA, 19 nt, Artificial Sequence
  Description of Artificial Sequence: Synthetic oligonucleotide
ccggccaucucggaccauc

SEQ ID NO: 859082 - RNA, 19 nt, Artificial Sequence
  Description of Artificial Sequence: Synthetic oligonucleotide
gucgucccuugcuguggaa

SEQ ID NO: 859083 - RNA, 19 nt, Artificial Sequence
  Description of Artificial Sequence: Synthetic oligonucleotide
cgccgagaagcgcacccgc

SEQ ID NO: 859084 - RNA, 19 nt, Artificial Sequence
  Description of Artificial Sequence: Synthetic oligonucleotide
ccgccgagaagcgcacccg

SEQ ID NO: 859085 - RNA, 19 nt, Artificial Sequence
  Description of Artificial Sequence: Synthetic oligonucleotide
cguguacaccuauucugaa

SEQ ID NO: 859086 - RNA, 19 nt, Artificial Sequence
  Description of Artificial Sequence: Synthetic oligonucleotide
ccgcccgccgcccuagcug

SEQ ID NO: 859087 - RNA, 19 nt, Artificial Sequence
  Description of Artificial Sequence: Synthetic oligonucleotide
caaccuccauacacugguu

SEQ ID NO: 859088 - RNA, 19 nt, Artificial Sequence
  Description of Artificial Sequence: Synthetic oligonucleotide
ccgcaucaauacauuuaaa

SEQ ID NO: 859089 - RNA, 19 nt, Artificial Sequence
  Description of Artificial Sequence: Synthetic oligonucleotide
gccgugccgucgcuccagc

SEQ ID NO: 859090 - RNA, 19 nt, Artificial Sequence
  Description of Artificial Sequence: Synthetic oligonucleotide
gccgcccuagcugguggcc

SEQ ID NO: 859091 - RNA, 19 nt, Artificial Sequence
  Description of Artificial Sequence: Synthetic oligonucleotide
gggcaaggauccgagggau

SEQ ID NO: 859092 - RNA, 19 nt, Artificial Sequence
  Description of Artificial Sequence: Synthetic oligonucleotide
cgccaggcgaccgcccugg

SEQ ID NO: 859093 - RNA, 19 nt, Artificial Sequence
  Description of Artificial Sequence: Synthetic oligonucleotide
cucggaccaucaggagaaa

SEQ ID NO: 859094 - RNA, 19 nt, Artificial Sequence
  Description of Artificial Sequence: Synthetic oligonucleotide
cuggccggccccgccgaga

SEQ ID NO: 859095 - RNA, 19 nt, Artificial Sequence
  Description of Artificial Sequence: Synthetic oligonucleotide
ggauuggcauauggaucau

SEQ ID NO: 859096 - RNA, 19 nt, Artificial Sequence
  Description of Artificial Sequence: Synthetic oligonucleotide
cgugccgucgcuccagcau

SEQ ID NO: 859097 - RNA, 19 nt, Artificial Sequence
  Description of Artificial Sequence: Synthetic oligonucleotide
ccgcccuagcugguggcca

SEQ ID NO: 859098 - RNA, 19 nt, Artificial Sequence
  Description of Artificial Sequence: Synthetic oligonucleotide
ccgugccgucgcuccagca

SEQ ID NO: 859099 - RNA, 19 nt, Artificial Sequence
  Description of Artificial Sequence: Synthetic oligonucleotide
ccccgccgagaagcgcacc

SEQ ID NO: 859100 - RNA, 19 nt, Artificial Sequence
  Description of Artificial Sequence: Synthetic oligonucleotide
ccacagcggaugucaggau

SEQ ID NO: 859101 - RNA, 19 nt, Artificial Sequence
  Description of Artificial Sequence: Synthetic oligonucleotide
ccgccccgggagcgcuucc

SEQ ID NO: 859102 - RNA, 19 nt, Artificial Sequence
  Description of Artificial Sequence: Synthetic oligonucleotide
cgcagccgugccgucgcuc

SEQ ID NO: 859103 - RNA, 19 nt, Artificial Sequence
  Description of Artificial Sequence: Synthetic oligonucleotide
ccgagggaugacccugguu

SEQ ID NO: 859104 - RNA, 19 nt, Artificial Sequence
  Description of Artificial Sequence: Synthetic oligonucleotide
cgcccuagcugguggccau

SEQ ID NO: 859105 - RNA, 19 nt, Artificial Sequence
  Description of Artificial Sequence: Synthetic oligonucleotide
aauucaaucccacacucac

SEQ ID NO: 859106 - RNA, 19 nt, Artificial Sequence
  Description of Artificial Sequence: Synthetic oligonucleotide
uccacuuuaaacuggaaca

SEQ ID NO: 859107 - RNA, 19 nt, Artificial Sequence
  Description of Artificial Sequence: Synthetic oligonucleotide
uccaaaaucuuccacggag

SEQ ID NO: 859108 - RNA, 19 nt, Artificial Sequence
  Description of Artificial Sequence: Synthetic oligonucleotide
gacaucguaguugugaugg

SEQ ID NO: 859109 - RNA, 19 nt, Artificial Sequence
  Description of Artificial Sequence: Synthetic oligonucleotide
gaacacaccauacacauca

SEQ ID NO: 859110 - RNA, 19 nt, Artificial Sequence
  Description of Artificial Sequence: Synthetic oligonucleotide
guuguaauccacuuuaaac

SEQ ID NO: 859111 - RNA, 19 nt, Artificial Sequence
  Description of Artificial Sequence: Synthetic oligonucleotide
aaugacagcuguuuucucu

SEQ ID NO: 859112 - RNA, 19 nt, Artificial Sequence
  Description of Artificial Sequence: Synthetic oligonucleotide
aauaccucugggcaccggg

SEQ ID NO: 859113 - RNA, 19 nt, Artificial Sequence
  Description of Artificial Sequence: Synthetic oligonucleotide
ucgcuaaagaaauccaggg

SEQ ID NO: 859114 - RNA, 19 nt, Artificial Sequence
  Description of Artificial Sequence: Synthetic oligonucleotide
gcuaaagaaauccagggag

SEQ ID NO: 859115 - RNA, 19 nt, Artificial Sequence
  Description of Artificial Sequence: Synthetic oligonucleotide
uuugccugaauguaagaug

SEQ ID NO: 859116 - RNA, 19 nt, Artificial Sequence
  Description of Artificial Sequence: Synthetic oligonucleotide
aaacaacuauucccugccc

SEQ ID NO: 859117 - RNA, 19 nt, Artificial Sequence
  Description of Artificial Sequence: Synthetic oligonucleotide
aguacagguguguguagcc

SEQ ID NO: 859118 - RNA, 19 nt, Artificial Sequence
  Description of Artificial Sequence: Synthetic oligonucleotide
guguguguagccuagccgg

SEQ ID NO: 859119 - RNA, 19 nt, Artificial Sequence
  Description of Artificial Sequence: Synthetic oligonucleotide
aguugcucgaucacaaugc

SEQ ID NO: 859120 - RNA, 19 nt, Artificial Sequence
  Description of Artificial Sequence: Synthetic oligonucleotide
uccccguacuuaaugaggg

SEQ ID NO: 859121 - RNA, 19 nt, Artificial Sequence
  Description of Artificial Sequence: Synthetic oligonucleotide
ucugagacaucguaguugu

SEQ ID NO: 859122 - RNA, 19 nt, Artificial Sequence
  Description of Artificial Sequence: Synthetic oligonucleotide
uuaugcuuuauuugguugu

SEQ ID NO: 859123 - RNA, 19 nt, Artificial Sequence
  Description of Artificial Sequence: Synthetic oligonucleotide
aaacccaacccauccagug

SEQ ID NO: 859124 - RNA, 19 nt, Artificial Sequence
  Description of Artificial Sequence: Synthetic oligonucleotide
aguaucagccacgaugagc

SEQ ID NO: 859125 - RNA, 19 nt, Artificial Sequence
  Description of Artificial Sequence: Synthetic oligonucleotide
aagaacaucgagugcgugu

SEQ ID NO: 859126 - RNA, 19 nt, Artificial Sequence
  Description of Artificial Sequence: Synthetic oligonucleotide
ucgaucacaaugcuguacu

SEQ ID NO: 859127 - RNA, 19 nt, Artificial Sequence
  Description of Artificial Sequence: Synthetic oligonucleotide
aacaucgagugcguguccc

SEQ ID NO: 859128 - RNA, 19 nt, Artificial Sequence
  Description of Artificial Sequence: Synthetic oligonucleotide
aacccaacccauccagugg

SEQ ID NO: 859129 - RNA, 19 nt, Artificial Sequence
  Description of Artificial Sequence: Synthetic oligonucleotide
ggacuagaguuacagaugg

SEQ ID NO: 859130 - RNA, 19 nt, Artificial Sequence
  Description of Artificial Sequence: Synthetic oligonucleotide
auaguugccugucugagaa

SEQ ID NO: 859131 - RNA, 19 nt, Artificial Sequence
  Description of Artificial Sequence: Synthetic oligonucleotide
ucugcggucuugaagguga

SEQ ID NO: 859132 - RNA, 19 nt, Artificial Sequence
  Description of Artificial Sequence: Synthetic oligonucleotide
ugagacaucguaguuguga

SEQ ID NO: 859133 - RNA, 19 nt, Artificial Sequence
  Description of Artificial Sequence: Synthetic oligonucleotide
aagugugaggggccaacgg

SEQ ID NO: 859134 - RNA, 19 nt, Artificial Sequence
  Description of Artificial Sequence: Synthetic oligonucleotide
cauaguagggguaagccga

SEQ ID NO: 859135 - RNA, 19 nt, Artificial Sequence
  Description of Artificial Sequence: Synthetic oligonucleotide
gaagcgcucauacugugug

SEQ ID NO: 859136 - RNA, 19 nt, Artificial Sequence
  Description of Artificial Sequence: Synthetic oligonucleotide
guaguugugauggucaaug

SEQ ID NO: 859137 - RNA, 19 nt, Artificial Sequence
  Description of Artificial Sequence: Synthetic oligonucleotide
cacgaugagcguaugcugg

SEQ ID NO: 859138 - RNA, 19 nt, Artificial Sequence
  Description of Artificial Sequence: Synthetic oligonucleotide
gaagugucccucgaggccg

SEQ ID NO: 859139 - RNA, 19 nt, Artificial Sequence
  Description of Artificial Sequence: Synthetic oligonucleotide
ccagccaucauagagaagg

SEQ ID NO: 859140 - RNA, 19 nt, Artificial Sequence
  Description of Artificial Sequence: Synthetic oligonucleotide
ugacgagguugucauagag

SEQ ID NO: 859141 - RNA, 19 nt, Artificial Sequence
  Description of Artificial Sequence: Synthetic oligonucleotide
acuagaguuacagauggcu

SEQ ID NO: 859142 - RNA, 19 nt, Artificial Sequence
  Description of Artificial Sequence: Synthetic oligonucleotide
cuagaguuacagauggcug

SEQ ID NO: 859143 - RNA, 19 nt, Artificial Sequence
  Description of Artificial Sequence: Synthetic oligonucleotide
caccauacacaucaggcag

SEQ ID NO: 859144 - RNA, 19 nt, Artificial Sequence
  Description of Artificial Sequence: Synthetic oligonucleotide
aucgcuaaagaaauccagg

SEQ ID NO: 859145 - RNA, 19 nt, Artificial Sequence
  Description of Artificial Sequence: Synthetic oligonucleotide
caucgcuaaagaaauccag

SEQ ID NO: 859146 - RNA, 19 nt, Artificial Sequence
  Description of Artificial Sequence: Synthetic oligonucleotide
agaacaucgagugcguguc

SEQ ID NO: 859147 - RNA, 19 nt, Artificial Sequence
  Description of Artificial Sequence: Synthetic oligonucleotide
agguguguguagccuagcc

SEQ ID NO: 859148 - RNA, 19 nt, Artificial Sequence
  Description of Artificial Sequence: Synthetic oligonucleotide
auuaucagggucagccacc

SEQ ID NO: 859149 - RNA, 19 nt, Artificial Sequence
  Description of Artificial Sequence: Synthetic oligonucleotide
auagaggaacuccccguac

SEQ ID NO: 859150 - RNA, 19 nt, Artificial Sequence
  Description of Artificial Sequence: Synthetic oligonucleotide
ugcuguauggaggaguccc

SEQ ID NO: 859151 - RNA, 19 nt, Artificial Sequence
  Description of Artificial Sequence: Synthetic oligonucleotide
gaucacaaugcuguacucc

SEQ ID NO: 859152 - RNA, 19 nt, Artificial Sequence
  Description of Artificial Sequence: Synthetic oligonucleotide
uccacguugauguugccuc

SEQ ID NO: 859153 - RNA, 19 nt, Artificial Sequence
  Description of Artificial Sequence: Synthetic oligonucleotide
agcccuaccaucaugaagu

SEQ ID NO: 859154 - RNA, 19 nt, Artificial Sequence
  Description of Artificial Sequence: Synthetic oligonucleotide
aacuccccguacuuaauga

SEQ ID NO: 859155 - RNA, 19 nt, Artificial Sequence
  Description of Artificial Sequence: Synthetic oligonucleotide
aaggcaucgcuaaagaaau

SEQ ID NO: 859156 - RNA, 19 nt, Artificial Sequence
  Description of Artificial Sequence: Synthetic oligonucleotide
agaagcacgagggugcggg

SEQ ID NO: 859157 - RNA, 19 nt, Artificial Sequence
  Description of Artificial Sequence: Synthetic oligonucleotide
agugacuuaaagugggaaa

SEQ ID NO: 859158 - RNA, 19 nt, Artificial Sequence
  Description of Artificial Sequence: Synthetic oligonucleotide
aaugucggaacuggcagcu

SEQ ID NO: 859159 - RNA, 19 nt, Artificial Sequence
  Description of Artificial Sequence: Synthetic oligonucleotide
acagagugacuuaaagugg

SEQ ID NO: 859160 - RNA, 19 nt, Artificial Sequence
  Description of Artificial Sequence: Synthetic oligonucleotide
augucguccccaucaaagg

SEQ ID NO: 859161 - RNA, 19 nt, Artificial Sequence
  Description of Artificial Sequence: Synthetic oligonucleotide
acgaugagcguaugcuggc

SEQ ID NO: 859162 - RNA, 19 nt, Artificial Sequence
  Description of Artificial Sequence: Synthetic oligonucleotide
aaaggggacccacuugcca

SEQ ID NO: 859163 - RNA, 19 nt, Artificial Sequence
  Description of Artificial Sequence: Synthetic oligonucleotide
agggcaucagaucuccuag

SEQ ID NO: 859164 - RNA, 19 nt, Artificial Sequence
  Description of Artificial Sequence: Synthetic oligonucleotide
uaagaugcgccacuugaau

SEQ ID NO: 859165 - RNA, 19 nt, Artificial Sequence
  Description of Artificial Sequence: Synthetic oligonucleotide
cuuaucugggaagaaggag

SEQ ID NO: 859166 - RNA, 19 nt, Artificial Sequence
  Description of Artificial Sequence: Synthetic oligonucleotide
uugauguugccuccaaaau

SEQ ID NO: 859167 - RNA, 19 nt, Artificial Sequence
  Description of Artificial Sequence: Synthetic oligonucleotide
ucaugaagugugaggggcc

SEQ ID NO: 859168 - RNA, 19 nt, Artificial Sequence
  Description of Artificial Sequence: Synthetic oligonucleotide
uuuucaguaucagccacga

SEQ ID NO: 859169 - RNA, 19 nt, Artificial Sequence
  Description of Artificial Sequence: Synthetic oligonucleotide
uuuugccugaauguaagau

SEQ ID NO: 859170 - RNA, 19 nt, Artificial Sequence
  Description of Artificial Sequence: Synthetic oligonucleotide
uacuccacuaggucgguga

SEQ ID NO: 859171 - RNA, 19 nt, Artificial Sequence
  Description of Artificial Sequence: Synthetic oligonucleotide
ucauguguaagaagacgau

SEQ ID NO: 859172 - RNA, 19 nt, Artificial Sequence
  Description of Artificial Sequence: Synthetic oligonucleotide
gagaauaccucugggcacc

SEQ ID NO: 859173 - RNA, 19 nt, Artificial Sequence
  Description of Artificial Sequence: Synthetic oligonucleotide
cuccccguacuuaaugagg

SEQ ID NO: 859174 - RNA, 19 nt, Artificial Sequence
  Description of Artificial Sequence: Synthetic oligonucleotide
aggucggugacaguguagg

SEQ ID NO: 859175 - RNA, 19 nt, Artificial Sequence
  Description of Artificial Sequence: Synthetic oligonucleotide
ucggaggacgcccuccucc

SEQ ID NO: 859176 - RNA, 19 nt, Artificial Sequence
  Description of Artificial Sequence: Synthetic oligonucleotide
gcauaguagggguaagccg

SEQ ID NO: 859177 - RNA, 19 nt, Artificial Sequence
  Description of Artificial Sequence: Synthetic oligonucleotide
cuaccaaaacacugccgcc

SEQ ID NO: 859178 - RNA, 19 nt, Artificial Sequence
  Description of Artificial Sequence: Synthetic oligonucleotide
uugaacacccagcgggaga

SEQ ID NO: 859179 - RNA, 19 nt, Artificial Sequence
  Description of Artificial Sequence: Synthetic oligonucleotide
acuccccguacuuaaugag

SEQ ID NO: 859180 - RNA, 19 nt, Artificial Sequence
  Description of Artificial Sequence: Synthetic oligonucleotide
aucaaaggggacccacuug

SEQ ID NO: 859181 - RNA, 19 nt, Artificial Sequence
  Description of Artificial Sequence: Synthetic oligonucleotide
cacuaggucggugacagug

SEQ ID NO: 859182 - RNA, 19 nt, Artificial Sequence
  Description of Artificial Sequence: Synthetic oligonucleotide
cuucccaacaaugguuggg

SEQ ID NO: 859183 - RNA, 19 nt, Artificial Sequence
  Description of Artificial Sequence: Synthetic oligonucleotide
caaugucggaacuggcagc

SEQ ID NO: 859184 - RNA, 19 nt, Artificial Sequence
  Description of Artificial Sequence: Synthetic oligonucleotide
agccacgaugagcguaugc

SEQ ID NO: 859185 - RNA, 19 nt, Artificial Sequence
  Description of Artificial Sequence: Synthetic oligonucleotide
acuccacuaggucggugac

SEQ ID NO: 859186 - RNA, 19 nt, Artificial Sequence
  Description of Artificial Sequence: Synthetic oligonucleotide
ugacuuaaagugggaaaac

SEQ ID NO: 859187 - RNA, 19 nt, Artificial Sequence
  Description of Artificial Sequence: Synthetic oligonucleotide
ucagccacgaugagcguau

SEQ ID NO: 859188 - RNA, 19 nt, Artificial Sequence
  Description of Artificial Sequence: Synthetic oligonucleotide
gucaaugcgcacgaacucc

SEQ ID NO: 859189 - RNA, 19 nt, Artificial Sequence
  Description of Artificial Sequence: Synthetic oligonucleotide
agagggucaccaaugucgg

SEQ ID NO: 859190 - RNA, 19 nt, Artificial Sequence
  Description of Artificial Sequence: Synthetic oligonucleotide
uugcucgaucacaaugcug

SEQ ID NO: 859191 - RNA, 19 nt, Artificial Sequence
  Description of Artificial Sequence: Synthetic oligonucleotide
agaugacuucccaacaaug

SEQ ID NO: 859192 - RNA, 19 nt, Artificial Sequence
  Description of Artificial Sequence: Synthetic oligonucleotide
ugaagcgcucauacugugu

SEQ ID NO: 859193 - RNA, 19 nt, Artificial Sequence
  Description of Artificial Sequence: Synthetic oligonucleotide
cucgaggccgcccaauggc

SEQ ID NO: 859194 - RNA, 19 nt, Artificial Sequence
  Description of Artificial Sequence: Synthetic oligonucleotide
augaagcgcucauacugug

SEQ ID NO: 859195 - RNA, 19 nt, Artificial Sequence
  Description of Artificial Sequence: Synthetic oligonucleotide
acccaacccauccagugga

SEQ ID NO: 859196 - RNA, 19 nt, Artificial Sequence
  Description of Artificial Sequence: Synthetic oligonucleotide
gaugagcguaugcuggcca

SEQ ID NO: 859197 - RNA, 19 nt, Artificial Sequence
  Description of Artificial Sequence: Synthetic oligonucleotide
caggggauuaucaggguca

SEQ ID NO: 859198 - RNA, 19 nt, Artificial Sequence
  Description of Artificial Sequence: Synthetic oligonucleotide
uggccaaggucugagacau

SEQ ID NO: 859199 - RNA, 19 nt, Artificial Sequence
  Description of Artificial Sequence: Synthetic oligonucleotide
uguguguagccuagccggu

SEQ ID NO: 859200 - RNA, 19 nt, Artificial Sequence
  Description of Artificial Sequence: Synthetic oligonucleotide
aaugggguucagagaugac

SEQ ID NO: 859201 - RNA, 19 nt, Artificial Sequence
  Description of Artificial Sequence: Synthetic oligonucleotide
ggguccucucccuaaacag

SEQ ID NO: 859202 - RNA, 19 nt, Artificial Sequence
  Description of Artificial Sequence: Synthetic oligonucleotide
accauuccaacuccucgga

SEQ ID NO: 859203 - RNA, 19 nt, Artificial Sequence
  Description of Artificial Sequence: Synthetic oligonucleotide
acaccggaagugucccucg

SEQ ID NO: 859204 - RNA, 19 nt, Artificial Sequence
  Description of Artificial Sequence: Synthetic oligonucleotide
ucgaggccgcccaauggcc

SEQ ID NO: 859205 - RNA, 19 nt, Artificial Sequence
  Description of Artificial Sequence: Synthetic oligonucleotide
ccuaggacuagaguuacag

SEQ ID NO: 859206 - RNA, 19 nt, Artificial Sequence
  Description of Artificial Sequence: Synthetic oligonucleotide
agacaucguaguugugaug

SEQ ID NO: 859207 - RNA, 19 nt, Artificial Sequence
  Description of Artificial Sequence: Synthetic oligonucleotide
uagccgguuguaauccacu

SEQ ID NO: 859208 - RNA, 19 nt, Artificial Sequence
  Description of Artificial Sequence: Synthetic oligonucleotide
agggucagccaccauucca

SEQ ID NO: 859209 - RNA, 19 nt, Artificial Sequence
  Description of Artificial Sequence: Synthetic oligonucleotide
ggcauaguagggguaagcc

SEQ ID NO: 859210 - RNA, 19 nt, Artificial Sequence
  Description of Artificial Sequence: Synthetic oligonucleotide
acaaaggggucaaugcgca

SEQ ID NO: 859211 - RNA, 19 nt, Artificial Sequence
  Description of Artificial Sequence: Synthetic oligonucleotide
cagcccuaccaucaugaag

SEQ ID NO: 859212 - RNA, 19 nt, Artificial Sequence
  Description of Artificial Sequence: Synthetic oligonucleotide
gaagcacgagggugcgggg

SEQ ID NO: 859213 - RNA, 19 nt, Artificial Sequence
  Description of Artificial Sequence: Synthetic oligonucleotide
uggacaccggaaguguccc

SEQ ID NO: 859214 - RNA, 19 nt, Artificial Sequence
  Description of Artificial Sequence: Synthetic oligonucleotide
gacuuaaagugggaaaacu

SEQ ID NO: 859215 - RNA, 19 nt, Artificial Sequence
  Description of Artificial Sequence: Synthetic oligonucleotide
agcgcucauacugugugug

SEQ ID NO: 859216 - RNA, 19 nt, Artificial Sequence
  Description of Artificial Sequence: Synthetic oligonucleotide
gcugcggaagaacaucgag

SEQ ID NO: 859217 - RNA, 19 nt, Artificial Sequence
  Description of Artificial Sequence: Synthetic oligonucleotide
gaacaucgagugcgugucc

SEQ ID NO: 859218 - RNA, 19 nt, Artificial Sequence
  Description of Artificial Sequence: Synthetic oligonucleotide
ucguaguugugauggucaa

SEQ ID NO: 859219 - RNA, 19 nt, Artificial Sequence
  Description of Artificial Sequence: Synthetic oligonucleotide
agggucaccaaugucggaa

SEQ ID NO: 859220 - RNA, 19 nt, Artificial Sequence
  Description of Artificial Sequence: Synthetic oligonucleotide
gagaguugcucgaucacaa

SEQ ID NO: 859221 - RNA, 19 nt, Artificial Sequence
  Description of Artificial Sequence: Synthetic oligonucleotide
uaugcuuuauuugguuguu

SEQ ID NO: 859222 - RNA, 19 nt, Artificial Sequence
  Description of Artificial Sequence: Synthetic oligonucleotide
gucaccaaugucggaacug

SEQ ID NO: 859223 - RNA, 19 nt, Artificial Sequence
  Description of Artificial Sequence: Synthetic oligonucleotide
caucacucacugagguaag

SEQ ID NO: 859224 - RNA, 19 nt, Artificial Sequence
  Description of Artificial Sequence: Synthetic oligonucleotide
cucgaucacaaugcuguac

SEQ ID NO: 859225 - RNA, 19 nt, Artificial Sequence
  Description of Artificial Sequence: Synthetic oligonucleotide
agcagcccuaccaucauga

SEQ ID NO: 859226 - RNA, 19 nt, Artificial Sequence
  Description of Artificial Sequence: Synthetic oligonucleotide
acuggcauaguagggguaa

SEQ ID NO: 859227 - RNA, 19 nt, Artificial Sequence
  Description of Artificial Sequence: Synthetic oligonucleotide
agcgggagagggccacagc

SEQ ID NO: 859228 - RNA, 19 nt, Artificial Sequence
  Description of Artificial Sequence: Synthetic oligonucleotide
guauggaggagucccaggu

SEQ ID NO: 859229 - RNA, 19 nt, Artificial Sequence
  Description of Artificial Sequence: Synthetic oligonucleotide
aagugucccucgaggccgc

SEQ ID NO: 859230 - RNA, 19 nt, Artificial Sequence
  Description of Artificial Sequence: Synthetic oligonucleotide
ugagcguaugcuggccaag

SEQ ID NO: 859231 - RNA, 19 nt, Artificial Sequence
  Description of Artificial Sequence: Synthetic oligonucleotide
cuaggacuagaguuacaga

SEQ ID NO: 859232 - RNA, 19 nt, Artificial Sequence
  Description of Artificial Sequence: Synthetic oligonucleotide
gugcgugucccgcacguug

SEQ ID NO: 859233 - RNA, 19 nt, Artificial Sequence
  Description of Artificial Sequence: Synthetic oligonucleotide
ucgagugcgugucccgcac

SEQ ID NO: 859234 - RNA, 19 nt, Artificial Sequence
  Description of Artificial Sequence: Synthetic oligonucleotide
caaugguuggggccuucag

SEQ ID NO: 859235 - RNA, 19 nt, Artificial Sequence
  Description of Artificial Sequence: Synthetic oligonucleotide
gagacaucguaguugugau

SEQ ID NO: 859236 - RNA, 19 nt, Artificial Sequence
  Description of Artificial Sequence: Synthetic oligonucleotide
ccaccgucaaugaaggcac

SEQ ID NO: 859237 - RNA, 19 nt, Artificial Sequence
  Description of Artificial Sequence: Synthetic oligonucleotide
gaugaagcgcucauacugu

SEQ ID NO: 859238 - RNA, 19 nt, Artificial Sequence
  Description of Artificial Sequence: Synthetic oligonucleotide
cuugaacacccagcgggag

SEQ ID NO: 859239 - RNA, 19 nt, Artificial Sequence
  Description of Artificial Sequence: Synthetic oligonucleotide
auaguagggguaagccgag

SEQ ID NO: 859240 - RNA, 19 nt, Artificial Sequence
  Description of Artificial Sequence: Synthetic oligonucleotide
augacgagguugucauaga

SEQ ID NO: 859241 - RNA, 19 nt, Artificial Sequence
  Description of Artificial Sequence: Synthetic oligonucleotide
gacuagaguuacagauggc

SEQ ID NO: 859242 - RNA, 19 nt, Artificial Sequence
  Description of Artificial Sequence: Synthetic oligonucleotide
accccauagucaucacuca

SEQ ID NO: 859243 - RNA, 19 nt, Artificial Sequence
  Description of Artificial Sequence: Synthetic oligonucleotide
agaauaccucugggcaccg

SEQ ID NO: 859244 - RNA, 19 nt, Artificial Sequence
  Description of Artificial Sequence: Synthetic oligonucleotide
agcguaugcuggccaaggu

SEQ ID NO: 859245 - RNA, 19 nt, Artificial Sequence
  Description of Artificial Sequence: Synthetic oligonucleotide
guacuuaaugagggacaag

SEQ ID NO: 859246 - RNA, 19 nt, Artificial Sequence
  Description of Artificial Sequence: Synthetic oligonucleotide
gacaccggaagugucccuc

SEQ ID NO: 859247 - RNA, 19 nt, Artificial Sequence
  Description of Artificial Sequence: Synthetic oligonucleotide
gguuguaauccacuuuaaa

SEQ ID NO: 859248 - RNA, 19 nt, Artificial Sequence
  Description of Artificial Sequence: Synthetic oligonucleotide
uccuaggacuagaguuaca

SEQ ID NO: 859249 - RNA, 19 nt, Artificial Sequence
  Description of Artificial Sequence: Synthetic oligonucleotide
auucaaucccacacucacu

SEQ ID NO: 859250 - RNA, 19 nt, Artificial Sequence
  Description of Artificial Sequence: Synthetic oligonucleotide
aggggauuaucagggucag

SEQ ID NO: 859251 - RNA, 19 nt, Artificial Sequence
  Description of Artificial Sequence: Synthetic oligonucleotide
accggguguggcuuucugu

SEQ ID NO: 859252 - RNA, 19 nt, Artificial Sequence
  Description of Artificial Sequence: Synthetic oligonucleotide
augagcguaugcuggccaa

SEQ ID NO: 859253 - RNA, 19 nt, Artificial Sequence
  Description of Artificial Sequence: Synthetic oligonucleotide
accgucaaugaaggcacug

SEQ ID NO: 859254 - RNA, 19 nt, Artificial Sequence
  Description of Artificial Sequence: Synthetic oligonucleotide
ggcaucagaucuccuagga

SEQ ID NO: 859255 - RNA, 19 nt, Artificial Sequence
  Description of Artificial Sequence: Synthetic oligonucleotide
gcuggccaaggucugagac

SEQ ID NO: 859256 - RNA, 19 nt, Artificial Sequence
  Description of Artificial Sequence: Synthetic oligonucleotide
gggcaucagaucuccuagg

SEQ ID NO: 859257 - RNA, 19 nt, Artificial Sequence
  Description of Artificial Sequence: Synthetic oligonucleotide
caucgagugcgugucccgc

SEQ ID NO: 859258 - RNA, 19 nt, Artificial Sequence
  Description of Artificial Sequence: Synthetic oligonucleotide
guaugguggccugagaggu

SEQ ID NO: 859259 - RNA, 19 nt, Artificial Sequence
  Description of Artificial Sequence: Synthetic oligonucleotide
aucgagugcgugucccgca

SEQ ID NO: 859260 - RNA, 19 nt, Artificial Sequence
  Description of Artificial Sequence: Synthetic oligonucleotide
gaggccgcccaauggccgc

SEQ ID NO: 859261 - RNA, 19 nt, Artificial Sequence
  Description of Artificial Sequence: Synthetic oligonucleotide
cauagucaucacucacuga

SEQ ID NO: 859262 - RNA, 19 nt, Artificial Sequence
  Description of Artificial Sequence: Synthetic oligonucleotide
ugccacagagugacuuaaa

SEQ ID NO: 859263 - RNA, 19 nt, Artificial Sequence
  Description of Artificial Sequence: Synthetic oligonucleotide
ggucaaugcgcacgaacuc

SEQ ID NO: 859264 - RNA, 19 nt, Artificial Sequence
  Description of Artificial Sequence: Synthetic oligonucleotide
guaagaugcgccacuugaa

SEQ ID NO: 859265 - RNA, 19 nt, Artificial Sequence
  Description of Artificial Sequence: Synthetic oligonucleotide
gaauaccucugggcaccgg

SEQ ID NO: 859266 - RNA, 19 nt, Artificial Sequence
  Description of Artificial Sequence: Synthetic oligonucleotide
guaagccgaggggaugaag

SEQ ID NO: 859267 - RNA, 19 nt, Artificial Sequence
  Description of Artificial Sequence: Synthetic oligonucleotide
gaucuccuaggacuagagu

SEQ ID NO: 859268 - RNA, 19 nt, Artificial Sequence
  Description of Artificial Sequence: Synthetic oligonucleotide
gggcuuaucugggaagaag

SEQ ID NO: 859269 - RNA, 19 nt, Artificial Sequence
  Description of Artificial Sequence: Synthetic oligonucleotide
aacccgugaggauguccaa

SEQ ID NO: 859270 - RNA, 19 nt, Artificial Sequence
  Description of Artificial Sequence: Synthetic oligonucleotide
ggaguaggagguugaagaa

SEQ ID NO: 859271 - RNA, 19 nt, Artificial Sequence
  Description of Artificial Sequence: Synthetic oligonucleotide
agaaugggguucagagaug

SEQ ID NO: 859272 - RNA, 19 nt, Artificial Sequence
  Description of Artificial Sequence: Synthetic oligonucleotide
cagcuagcucauaguugcc

SEQ ID NO: 859273 - RNA, 19 nt, Artificial Sequence
  Description of Artificial Sequence: Synthetic oligonucleotide
cugcggaagaacaucgagu

SEQ ID NO: 859274 - RNA, 19 nt, Artificial Sequence
  Description of Artificial Sequence: Synthetic oligonucleotide
ucccgcacguugagguugu

SEQ ID NO: 859275 - RNA, 19 nt, Artificial Sequence
  Description of Artificial Sequence: Synthetic oligonucleotide
gccaacggaugggugaggg

SEQ ID NO: 859276 - RNA, 19 nt, Artificial Sequence
  Description of Artificial Sequence: Synthetic oligonucleotide
guugccugucugagaauac

SEQ ID NO: 859277 - RNA, 19 nt, Artificial Sequence
  Description of Artificial Sequence: Synthetic oligonucleotide
guugcucgaucacaaugcu

SEQ ID NO: 859278 - RNA, 19 nt, Artificial Sequence
  Description of Artificial Sequence: Synthetic oligonucleotide
ggcacgggcggcgaggcgg

SEQ ID NO: 859279 - RNA, 19 nt, Artificial Sequence
  Description of Artificial Sequence: Synthetic oligonucleotide
ggagaguugcucgaucaca

SEQ ID NO: 859280 - RNA, 19 nt, Artificial Sequence
  Description of Artificial Sequence: Synthetic oligonucleotide
caguaucagccacgaugag

SEQ ID NO: 859281 - RNA, 19 nt, Artificial Sequence
  Description of Artificial Sequence: Synthetic oligonucleotide
ugugcuggaguggccucac

SEQ ID NO: 859282 - RNA, 19 nt, Artificial Sequence
  Description of Artificial Sequence: Synthetic oligonucleotide
aggugaguucaaagccccg

SEQ ID NO: 859283 - RNA, 19 nt, Artificial Sequence
  Description of Artificial Sequence: Synthetic oligonucleotide
augccacagagugacuuaa

SEQ ID NO: 859284 - RNA, 19 nt, Artificial Sequence
  Description of Artificial Sequence: Synthetic oligonucleotide
cccguacuuaaugagggac

SEQ ID NO: 859285 - RNA, 19 nt, Artificial Sequence
  Description of Artificial Sequence: Synthetic oligonucleotide
aucagccacgaugagcgua

SEQ ID NO: 859286 - RNA, 19 nt, Artificial Sequence
  Description of Artificial Sequence: Synthetic oligonucleotide
cagggucagccaccauucc

SEQ ID NO: 859287 - RNA, 19 nt, Artificial Sequence
  Description of Artificial Sequence: Synthetic oligonucleotide
ugacccgggcauuguuccu

SEQ ID NO: 859288 - RNA, 19 nt, Artificial Sequence
  Description of Artificial Sequence: Synthetic oligonucleotide
gcgcagacgccgccgagcg

SEQ ID NO: 859289 - RNA, 19 nt, Artificial Sequence
  Description of Artificial Sequence: Synthetic oligonucleotide
ggggccaacggauggguga

SEQ ID NO: 859290 - RNA, 19 nt, Artificial Sequence
  Description of Artificial Sequence: Synthetic oligonucleotide
gagggacaagcugggguca

SEQ ID NO: 859291 - RNA, 19 nt, Artificial Sequence
  Description of Artificial Sequence: Synthetic oligonucleotide
gggucaccaaugucggaac

SEQ ID NO: 859292 - RNA, 19 nt, Artificial Sequence
  Description of Artificial Sequence: Synthetic oligonucleotide
auaccucugggcaccgggu

SEQ ID NO: 859293 - RNA, 19 nt, Artificial Sequence
  Description of Artificial Sequence: Synthetic oligonucleotide
gccgcuggcgcagacgccg

SEQ ID NO: 859294 - RNA, 19 nt, Artificial Sequence
  Description of Artificial Sequence: Synthetic oligonucleotide
gccuagccgguuguaaucc

SEQ ID NO: 859295 - RNA, 19 nt, Artificial Sequence
  Description of Artificial Sequence: Synthetic oligonucleotide
gcuuaucugggaagaagga

SEQ ID NO: 859296 - RNA, 19 nt, Artificial Sequence
  Description of Artificial Sequence: Synthetic oligonucleotide
gccgagcgcagccagcagc

SEQ ID NO: 859297 - RNA, 19 nt, Artificial Sequence
  Description of Artificial Sequence: Synthetic oligonucleotide
uguagccuagccgguugua

SEQ ID NO: 859298 - RNA, 19 nt, Artificial Sequence
  Description of Artificial Sequence: Synthetic oligonucleotide
ccgguuguaauccacuuua

SEQ ID NO: 859299 - RNA, 19 nt, Artificial Sequence
  Description of Artificial Sequence: Synthetic oligonucleotide
guagccuagccgguuguaa

SEQ ID NO: 859300 - RNA, 19 nt, Artificial Sequence
  Description of Artificial Sequence: Synthetic oligonucleotide
ggucggugacaguguaggc

SEQ ID NO: 859301 - RNA, 19 nt, Artificial Sequence
  Description of Artificial Sequence: Synthetic oligonucleotide
ugucccgcacguugagguu

SEQ ID NO: 859302 - RNA, 19 nt, Artificial Sequence
  Description of Artificial Sequence: Synthetic oligonucleotide
cuaggucggugacagugua

SEQ ID NO: 859303 - RNA, 19 nt, Artificial Sequence
  Description of Artificial Sequence: Synthetic oligonucleotide
gagugcgugucccgcacgu

SEQ ID NO: 859304 - RNA, 19 nt, Artificial Sequence
  Description of Artificial Sequence: Synthetic oligonucleotide
ccccauagucaucacucac

SEQ ID NO: 859305 - RNA, 19 nt, Artificial Sequence
  Description of Artificial Sequence: Synthetic oligonucleotide
ccacguugauguugccucc

SEQ ID NO: 859306 - RNA, 19 nt, Artificial Sequence
  Description of Artificial Sequence: Synthetic oligonucleotide
gaugcgccacuugaaugua

SEQ ID NO: 859307 - RNA, 19 nt, Artificial Sequence
  Description of Artificial Sequence: Synthetic oligonucleotide
gcggacacccaucuucauc

SEQ ID NO: 859308 - RNA, 19 nt, Artificial Sequence
  Description of Artificial Sequence: Synthetic oligonucleotide
ugcggucuugaaggugagu

SEQ ID NO: 859309 - RNA, 19 nt, Artificial Sequence
  Description of Artificial Sequence: Synthetic oligonucleotide
gcagacgccgccgagcgca

SEQ ID NO: 859310 - RNA, 19 nt, Artificial Sequence
  Description of Artificial Sequence: Synthetic oligonucleotide
ggucagccaccauuccaac

SEQ ID NO: 859311 - RNA, 19 nt, Artificial Sequence
  Description of Artificial Sequence: Synthetic oligonucleotide
gggguucagagaugacuuc

SEQ ID NO: 859312 - RNA, 19 nt, Artificial Sequence
  Description of Artificial Sequence: Synthetic oligonucleotide
ggcggcgaggcggacaccc

SEQ ID NO: 859313 - RNA, 19 nt, Artificial Sequence
  Description of Artificial Sequence: Synthetic oligonucleotide
ccaacggaugggugagggc

SEQ ID NO: 859314 - RNA, 19 nt, Artificial Sequence
  Description of Artificial Sequence: Synthetic oligonucleotide
cccgaugaugggacacagg

SEQ ID NO: 859315 - RNA, 19 nt, Artificial Sequence
  Description of Artificial Sequence: Synthetic oligonucleotide
ccucggaagagaauggggu

SEQ ID NO: 859316 - RNA, 19 nt, Artificial Sequence
  Description of Artificial Sequence: Synthetic oligonucleotide
gggccaacggaugggugag

SEQ ID NO: 859317 - RNA, 19 nt, Artificial Sequence
  Description of Artificial Sequence: Synthetic oligonucleotide
ggguaagccgaggggauga

SEQ ID NO: 859318 - RNA, 19 nt, Artificial Sequence
  Description of Artificial Sequence: Synthetic oligonucleotide
caccggguguggcuuucug

SEQ ID NO: 859319 - RNA, 19 nt, Artificial Sequence
  Description of Artificial Sequence: Synthetic oligonucleotide
guacuccacuaggucggug

SEQ ID NO: 859320 - RNA, 19 nt, Artificial Sequence
  Description of Artificial Sequence: Synthetic oligonucleotide
gccacgaugagcguaugcu

SEQ ID NO: 859321 - RNA, 19 nt, Artificial Sequence
  Description of Artificial Sequence: Synthetic oligonucleotide
ccuugaacacccagcggga

SEQ ID NO: 859322 - RNA, 19 nt, Artificial Sequence
  Description of Artificial Sequence: Synthetic oligonucleotide
cacguugauguugccucca

SEQ ID NO: 859323 - RNA, 19 nt, Artificial Sequence
  Description of Artificial Sequence: Synthetic oligonucleotide
gcccuaccaucaugaagug

SEQ ID NO: 859324 - RNA, 19 nt, Artificial Sequence
  Description of Artificial Sequence: Synthetic oligonucleotide
cagacgccgccgagcgcag

SEQ ID NO: 859325 - RNA, 19 nt, Artificial Sequence
  Description of Artificial Sequence: Synthetic oligonucleotide
gggguaagccgaggggaug

SEQ ID NO: 859326 - RNA, 19 nt, Artificial Sequence
  Description of Artificial Sequence: Synthetic oligonucleotide
ccgugaggauguccaaaac

SEQ ID NO: 859327 - RNA, 19 nt, Artificial Sequence
  Description of Artificial Sequence: Synthetic oligonucleotide
cccgugaggauguccaaaa

SEQ ID NO: 859328 - RNA, 19 nt, Artificial Sequence
  Description of Artificial Sequence: Synthetic oligonucleotide
ggcgcagacgccgccgagc

SEQ ID NO: 859329 - RNA, 19 nt, Artificial Sequence
  Description of Artificial Sequence: Synthetic oligonucleotide
agggacaagcuggggucau

SEQ ID NO: 859330 - RNA, 19 nt, Artificial Sequence
  Description of Artificial Sequence: Synthetic oligonucleotide
ggugagggcagugguucuc

SEQ ID NO: 859331 - RNA, 19 nt, Artificial Sequence
  Description of Artificial Sequence: Synthetic oligonucleotide
ggucaaugacagcuguuuu

SEQ ID NO: 859332 - RNA, 19 nt, Artificial Sequence
  Description of Artificial Sequence: Synthetic oligonucleotide
cuccacguugauguugccu

SEQ ID NO: 859333 - RNA, 19 nt, Artificial Sequence
  Description of Artificial Sequence: Synthetic oligonucleotide
ggacaagcuggggucaucu

SEQ ID NO: 859334 - RNA, 19 nt, Artificial Sequence
  Description of Artificial Sequence: Synthetic oligonucleotide
ccggguguggcuuucugua

SEQ ID NO: 859335 - RNA, 19 nt, Artificial Sequence
  Description of Artificial Sequence: Synthetic oligonucleotide
ggucaccaaugucggaacu

SEQ ID NO: 859336 - RNA, 19 nt, Artificial Sequence
  Description of Artificial Sequence: Synthetic oligonucleotide
caccggaagugucccucga

SEQ ID NO: 859337 - RNA, 19 nt, Artificial Sequence
  Description of Artificial Sequence: Synthetic oligonucleotide
cguacuuaaugagggacaa

SEQ ID NO: 859338 - RNA, 19 nt, Artificial Sequence
  Description of Artificial Sequence: Synthetic oligonucleotide
gcggucuugaaggugaguu

SEQ ID NO: 859339 - RNA, 19 nt, Artificial Sequence
  Description of Artificial Sequence: Synthetic oligonucleotide
augcgccacuugaauguau

SEQ ID NO: 859340 - RNA, 19 nt, Artificial Sequence
  Description of Artificial Sequence: Synthetic oligonucleotide
ccgcacguugagguugucc

SEQ ID NO: 859341 - RNA, 19 nt, Artificial Sequence
  Description of Artificial Sequence: Synthetic oligonucleotide
gcgugucccgcacguugag

SEQ ID NO: 859342 - RNA, 19 nt, Artificial Sequence
  Description of Artificial Sequence: Synthetic oligonucleotide
ccauccaguggaauccucu

SEQ ID NO: 859343 - RNA, 19 nt, Artificial Sequence
  Description of Artificial Sequence: Synthetic oligonucleotide
ccaggcacgggcggcgagg

SEQ ID NO: 859344 - RNA, 19 nt, Artificial Sequence
  Description of Artificial Sequence: Synthetic oligonucleotide
ccgucaaugaaggcacuga

SEQ ID NO: 859345 - RNA, 19 nt, Artificial Sequence
  Description of Artificial Sequence: Synthetic oligonucleotide
ggggauuaucagggucagc

SEQ ID NO: 859346 - RNA, 19 nt, Artificial Sequence
  Description of Artificial Sequence: Synthetic oligonucleotide
gcccacccgaugaugggac

SEQ ID NO: 859347 - RNA, 19 nt, Artificial Sequence
  Description of Artificial Sequence: Synthetic oligonucleotide
agugcgugucccgcacguu

SEQ ID NO: 859348 - RNA, 19 nt, Artificial Sequence
  Description of Artificial Sequence: Synthetic oligonucleotide
gccgcccaauggccgcucg

SEQ ID NO: 859349 - RNA, 19 nt, Artificial Sequence
  Description of Artificial Sequence: Synthetic oligonucleotide
cgaugagcguaugcuggcc

SEQ ID NO: 859350 - RNA, 19 nt, Artificial Sequence
  Description of Artificial Sequence: Synthetic oligonucleotide
uggagccgucucgcccacc

SEQ ID NO: 859351 - RNA, 19 nt, Artificial Sequence
  Description of Artificial Sequence: Synthetic oligonucleotide
ggccaacggaugggugagg

SEQ ID NO: 859352 - RNA, 19 nt, Artificial Sequence
  Description of Artificial Sequence: Synthetic oligonucleotide
cggguguggcuuucuguac

SEQ ID NO: 859353 - RNA, 19 nt, Artificial Sequence
  Description of Artificial Sequence: Synthetic oligonucleotide
gccgaggggaugaagcgcu

SEQ ID NO: 859354 - RNA, 19 nt, Artificial Sequence
  Description of Artificial Sequence: Synthetic oligonucleotide
gcagcccuaccaucaugaa

SEQ ID NO: 859355 - RNA, 19 nt, Artificial Sequence
  Description of Artificial Sequence: Synthetic oligonucleotide
ggcagugguucucuuuauu

SEQ ID NO: 859356 - RNA, 19 nt, Artificial Sequence
  Description of Artificial Sequence: Synthetic oligonucleotide
gcucgaucacaaugcugua

SEQ ID NO: 859357 - RNA, 19 nt, Artificial Sequence
  Description of Artificial Sequence: Synthetic oligonucleotide
cgagugcgugucccgcacg

SEQ ID NO: 859358 - RNA, 19 nt, Artificial Sequence
  Description of Artificial Sequence: Synthetic oligonucleotide
cgucucgcccacccgauga

SEQ ID NO: 859359 - RNA, 19 nt, Artificial Sequence
  Description of Artificial Sequence: Synthetic oligonucleotide
cgugucccgcacguugagg

SEQ ID NO: 859360 - RNA, 19 nt, Artificial Sequence
  Description of Artificial Sequence: Synthetic oligonucleotide
gcgaggcggacacccaucu

SEQ ID NO: 859361 - RNA, 19 nt, Artificial Sequence
  Description of Artificial Sequence: Synthetic oligonucleotide
aggccgcccaauggccgcu

SEQ ID NO: 859362 - RNA, 19 nt, Artificial Sequence
  Description of Artificial Sequence: Synthetic oligonucleotide
ggcgaggcggacacccauc

SEQ ID NO: 859363 - RNA, 19 nt, Artificial Sequence
  Description of Artificial Sequence: Synthetic oligonucleotide
ccccguacuuaaugaggga

SEQ ID NO: 859364 - RNA, 19 nt, Artificial Sequence
  Description of Artificial Sequence: Synthetic oligonucleotide
gucucgcccacccgaugau

SEQ ID NO: 859365 - RNA, 19 nt, Artificial Sequence
  Description of Artificial Sequence: Synthetic oligonucleotide
gccagccaucauagagaag

SEQ ID NO: 859366 - RNA, 19 nt, Artificial Sequence
  Description of Artificial Sequence: Synthetic oligonucleotide
gguaagccgaggggaugaa

SEQ ID NO: 859367 - RNA, 19 nt, Artificial Sequence
  Description of Artificial Sequence: Synthetic oligonucleotide
gccgguuguaauccacuuu

SEQ ID NO: 859368 - RNA, 19 nt, Artificial Sequence
  Description of Artificial Sequence: Synthetic oligonucleotide
gggacaagcuggggucauc

SEQ ID NO: 859369 - RNA, 19 nt, Artificial Sequence
  Description of Artificial Sequence: Synthetic oligonucleotide
ggcgagcccagcaccugga

SEQ ID NO: 859370 - RNA, 19 nt, Artificial Sequence
  Description of Artificial Sequence: Synthetic oligonucleotide
caccgucaaugaaggcacu

SEQ ID NO: 859371 - RNA, 19 nt, Artificial Sequence
  Description of Artificial Sequence: Synthetic oligonucleotide
cgguuguaauccacuuuaa

SEQ ID NO: 859372 - RNA, 19 nt, Artificial Sequence
  Description of Artificial Sequence: Synthetic oligonucleotide
gggcagugguucucuuuau

SEQ ID NO: 859373 - RNA, 19 nt, Artificial Sequence
  Description of Artificial Sequence: Synthetic oligonucleotide
ggacaccggaagugucccu

SEQ ID NO: 859374 - RNA, 19 nt, Artificial Sequence
  Description of Artificial Sequence: Synthetic oligonucleotide
cccacccgaugaugggaca

SEQ ID NO: 859375 - RNA, 19 nt, Artificial Sequence
  Description of Artificial Sequence: Synthetic oligonucleotide
ccacuugccauuggagagu

SEQ ID NO: 859376 - RNA, 19 nt, Artificial Sequence
  Description of Artificial Sequence: Synthetic oligonucleotide
gccccacucggaggacgcc

SEQ ID NO: 859377 - RNA, 19 nt, Artificial Sequence
  Description of Artificial Sequence: Synthetic oligonucleotide
ggccgcuggcgcagacgcc

SEQ ID NO: 859378 - RNA, 19 nt, Artificial Sequence
  Description of Artificial Sequence: Synthetic oligonucleotide
ggacacccaucuucaucuu

SEQ ID NO: 859379 - RNA, 19 nt, Artificial Sequence
  Description of Artificial Sequence: Synthetic oligonucleotide
ggacgcccuccuccuugaa

SEQ ID NO: 859380 - RNA, 19 nt, Artificial Sequence
  Description of Artificial Sequence: Synthetic oligonucleotide
gcacgggcggcgaggcgga

SEQ ID NO: 859381 - RNA, 19 nt, Artificial Sequence
  Description of Artificial Sequence: Synthetic oligonucleotide
ccgcaaucaggagaguguu

SEQ ID NO: 859382 - RNA, 19 nt, Artificial Sequence
  Description of Artificial Sequence: Synthetic oligonucleotide
cccuaccaucaugaagugu

SEQ ID NO: 859383 - RNA, 19 nt, Artificial Sequence
  Description of Artificial Sequence: Synthetic oligonucleotide
gcggcgaggcggacaccca

SEQ ID NO: 859384 - RNA, 19 nt, Artificial Sequence
  Description of Artificial Sequence: Synthetic oligonucleotide
cggaggacgcccuccuccu

SEQ ID NO: 859385 - RNA, 19 nt, Artificial Sequence
  Description of Artificial Sequence: Synthetic oligonucleotide
ggccgcccaauggccgcuc

SEQ ID NO: 859386 - RNA, 19 nt, Artificial Sequence
  Description of Artificial Sequence: Synthetic oligonucleotide
cguaguugugauggucaau

SEQ ID NO: 859387 - RNA, 19 nt, Artificial Sequence
  Description of Artificial Sequence: Synthetic oligonucleotide
gcaccggguguggcuuucu

SEQ ID NO: 859388 - RNA, 19 nt, Artificial Sequence
  Description of Artificial Sequence: Synthetic oligonucleotide
ggcccgcaaucaggagagu

SEQ ID NO: 859389 - RNA, 19 nt, Artificial Sequence
  Description of Artificial Sequence: Synthetic oligonucleotide
cgaggcggacacccaucuu

SEQ ID NO: 859390 - RNA, 19 nt, Artificial Sequence
  Description of Artificial Sequence: Synthetic oligonucleotide
aauaguaaaauagcuaagg

SEQ ID NO: 859391 - RNA, 19 nt, Artificial Sequence
  Description of Artificial Sequence: Synthetic oligonucleotide
aaugcuuauuuucacuggc

SEQ ID NO: 859392 - RNA, 19 nt, Artificial Sequence
  Description of Artificial Sequence: Synthetic oligonucleotide
ugagccauuacucagcagg

SEQ ID NO: 859393 - RNA, 19 nt, Artificial Sequence
  Description of Artificial Sequence: Synthetic oligonucleotide
auaguaaaauagcuaaggc

SEQ ID NO: 859394 - RNA, 19 nt, Artificial Sequence
  Description of Artificial Sequence: Synthetic oligonucleotide
guugcuauuucccacaugg

SEQ ID NO: 859395 - RNA, 19 nt, Artificial Sequence
  Description of Artificial Sequence: Synthetic oligonucleotide
aaccuaacuaaauacuuuc

SEQ ID NO: 859396 - RNA, 19 nt, Artificial Sequence
  Description of Artificial Sequence: Synthetic oligonucleotide
uuaauuggaggcuucaucc

SEQ ID NO: 859397 - RNA, 19 nt, Artificial Sequence
  Description of Artificial Sequence: Synthetic oligonucleotide
aaucauggacucuaacccc

SEQ ID NO: 859398 - RNA, 19 nt, Artificial Sequence
  Description of Artificial Sequence: Synthetic oligonucleotide
uaaaagucaugacugagcc

SEQ ID NO: 859399 - RNA, 19 nt, Artificial Sequence
  Description of Artificial Sequence: Synthetic oligonucleotide
uggguauugauguagauga

SEQ ID NO: 859400 - RNA, 19 nt, Artificial Sequence
  Description of Artificial Sequence: Synthetic oligonucleotide
agucucaacacugagaagg

SEQ ID NO: 859401 - RNA, 19 nt, Artificial Sequence
  Description of Artificial Sequence: Synthetic oligonucleotide
uuaaaagucaugacugagc

SEQ ID NO: 859402 - RNA, 19 nt, Artificial Sequence
  Description of Artificial Sequence: Synthetic oligonucleotide
ucguucaagaaacacagug

SEQ ID NO: 859403 - RNA, 19 nt, Artificial Sequence
  Description of Artificial Sequence: Synthetic oligonucleotide
uaguaaaauagcuaaggca

SEQ ID NO: 859404 - RNA, 19 nt, Artificial Sequence
  Description of Artificial Sequence: Synthetic oligonucleotide
ucagucucaacacugagaa

SEQ ID NO: 859405 - RNA, 19 nt, Artificial Sequence
  Description of Artificial Sequence: Synthetic oligonucleotide
acagcaauaguaaaauagc

SEQ ID NO: 859406 - RNA, 19 nt, Artificial Sequence
  Description of Artificial Sequence: Synthetic oligonucleotide
caaucauggacucuaaccc

SEQ ID NO: 859407 - RNA, 19 nt, Artificial Sequence
  Description of Artificial Sequence: Synthetic oligonucleotide
guauugauguagaugaugg

SEQ ID NO: 859408 - RNA, 19 nt, Artificial Sequence
  Description of Artificial Sequence: Synthetic oligonucleotide
uucauaacagcaauaguaa

SEQ ID NO: 859409 - RNA, 19 nt, Artificial Sequence
  Description of Artificial Sequence: Synthetic oligonucleotide
aguaaaauagcuaaggcaa

SEQ ID NO: 859410 - RNA, 19 nt, Artificial Sequence
  Description of Artificial Sequence: Synthetic oligonucleotide
aaagucaugacugagccau

SEQ ID NO: 859411 - RNA, 19 nt, Artificial Sequence
  Description of Artificial Sequence: Synthetic oligonucleotide
aauguucaugucuagccca

SEQ ID NO: 859412 - RNA, 19 nt, Artificial Sequence
  Description of Artificial Sequence: Synthetic oligonucleotide
ucaggaucaauguucaugu

SEQ ID NO: 859413 - RNA, 19 nt, Artificial Sequence
  Description of Artificial Sequence: Synthetic oligonucleotide
aaauagcuaaggcaaccag

SEQ ID NO: 859414 - RNA, 19 nt, Artificial Sequence
  Description of Artificial Sequence: Synthetic oligonucleotide
ugacuuuacaaguaaagua

SEQ ID NO: 859415 - RNA, 19 nt, Artificial Sequence
  Description of Artificial Sequence: Synthetic oligonucleotide
ucaugucuagcccagcgag

SEQ ID NO: 859416 - RNA, 19 nt, Artificial Sequence
  Description of Artificial Sequence: Synthetic oligonucleotide
augugagauauccuguacg

SEQ ID NO: 859417 - RNA, 19 nt, Artificial Sequence
  Description of Artificial Sequence: Synthetic oligonucleotide
ucauauguuagagugcuug

SEQ ID NO: 859418 - RNA, 19 nt, Artificial Sequence
  Description of Artificial Sequence: Synthetic oligonucleotide
auucguucaagaaacacag

SEQ ID NO: 859419 - RNA, 19 nt, Artificial Sequence
  Description of Artificial Sequence: Synthetic oligonucleotide
guuccgacaggacacaccg

SEQ ID NO: 859420 - RNA, 19 nt, Artificial Sequence
  Description of Artificial Sequence: Synthetic oligonucleotide
uuuaaaggugcuacagaug

SEQ ID NO: 859421 - RNA, 19 nt, Artificial Sequence
  Description of Artificial Sequence: Synthetic oligonucleotide
acugaaagguccaacgccc

SEQ ID NO: 859422 - RNA, 19 nt, Artificial Sequence
  Description of Artificial Sequence: Synthetic oligonucleotide
uaaaccuaacuaaauacuu

SEQ ID NO: 859423 - RNA, 19 nt, Artificial Sequence
  Description of Artificial Sequence: Synthetic oligonucleotide
guacggugaggacagaugg

SEQ ID NO: 859424 - RNA, 19 nt, Artificial Sequence
  Description of Artificial Sequence: Synthetic oligonucleotide
cauacagaugugucgaagc

SEQ ID NO: 859425 - RNA, 19 nt, Artificial Sequence
  Description of Artificial Sequence: Synthetic oligonucleotide
aaccagaucccauggagca

SEQ ID NO: 859426 - RNA, 19 nt, Artificial Sequence
  Description of Artificial Sequence: Synthetic oligonucleotide
cauccuggcgcuuaauugg

SEQ ID NO: 859427 - RNA, 19 nt, Artificial Sequence
  Description of Artificial Sequence: Synthetic oligonucleotide
aaauggggaguauccauca

SEQ ID NO: 859428 - RNA, 19 nt, Artificial Sequence
  Description of Artificial Sequence: Synthetic oligonucleotide
aguuauaaccagugugcgg

SEQ ID NO: 859429 - RNA, 19 nt, Artificial Sequence
  Description of Artificial Sequence: Synthetic oligonucleotide
ucggaaagcucucucuggg

SEQ ID NO: 859430 - RNA, 19 nt, Artificial Sequence
  Description of Artificial Sequence: Synthetic oligonucleotide
gggaguauccaucaaaacc

SEQ ID NO: 859431 - RNA, 19 nt, Artificial Sequence
  Description of Artificial Sequence: Synthetic oligonucleotide
auuucguuccgacaggaca

SEQ ID NO: 859432 - RNA, 19 nt, Artificial Sequence
  Description of Artificial Sequence: Synthetic oligonucleotide
gagguauuaaaagucauga

SEQ ID NO: 859433 - RNA, 19 nt, Artificial Sequence
  Description of Artificial Sequence: Synthetic oligonucleotide
uauguuagagugcuugguc

SEQ ID NO: 859434 - RNA, 19 nt, Artificial Sequence
  Description of Artificial Sequence: Synthetic oligonucleotide
uuucguuccgacaggacac

SEQ ID NO: 859435 - RNA, 19 nt, Artificial Sequence
  Description of Artificial Sequence: Synthetic oligonucleotide
auuaaaagucaugacugag

SEQ ID NO: 859436 - RNA, 19 nt, Artificial Sequence
  Description of Artificial Sequence: Synthetic oligonucleotide
uagguugccuugcucacgg

SEQ ID NO: 859437 - RNA, 19 nt, Artificial Sequence
  Description of Artificial Sequence: Synthetic oligonucleotide
aaugccaaagcaucaguua

SEQ ID NO: 859438 - RNA, 19 nt, Artificial Sequence
  Description of Artificial Sequence: Synthetic oligonucleotide
cuggauuucauacagaugu

SEQ ID NO: 859439 - RNA, 19 nt, Artificial Sequence
  Description of Artificial Sequence: Synthetic oligonucleotide
aggaucaauguucaugucu

SEQ ID NO: 859440 - RNA, 19 nt, Artificial Sequence
  Description of Artificial Sequence: Synthetic oligonucleotide
ugugcggccuugaacagag

SEQ ID NO: 859441 - RNA, 19 nt, Artificial Sequence
  Description of Artificial Sequence: Synthetic oligonucleotide
gauguaucucuccucauga

SEQ ID NO: 859442 - RNA, 19 nt, Artificial Sequence
  Description of Artificial Sequence: Synthetic oligonucleotide
aaaauagcuaaggcaacca

SEQ ID NO: 859443 - RNA, 19 nt, Artificial Sequence
  Description of Artificial Sequence: Synthetic oligonucleotide
cauccaucugauuuccacg

SEQ ID NO: 859444 - RNA, 19 nt, Artificial Sequence
  Description of Artificial Sequence: Synthetic oligonucleotide
uuuacaaguaaaguaggua

SEQ ID NO: 859445 - RNA, 19 nt, Artificial Sequence
  Description of Artificial Sequence: Synthetic oligonucleotide
agauucguucaagaaacac

SEQ ID NO: 859446 - RNA, 19 nt, Artificial Sequence
  Description of Artificial Sequence: Synthetic oligonucleotide
gaugugucgaagcagaggu

SEQ ID NO: 859447 - RNA, 19 nt, Artificial Sequence
  Description of Artificial Sequence: Synthetic oligonucleotide
aagaaugccaaagcaucag

SEQ ID NO: 859448 - RNA, 19 nt, Artificial Sequence
  Description of Artificial Sequence: Synthetic oligonucleotide
cuauaggcucauauguuag

SEQ ID NO: 859449 - RNA, 19 nt, Artificial Sequence
  Description of Artificial Sequence: Synthetic oligonucleotide
cucagcuggccucacaugg

SEQ ID NO: 859450 - RNA, 19 nt, Artificial Sequence
  Description of Artificial Sequence: Synthetic oligonucleotide
gaggggaucgcuuugaugu

SEQ ID NO: 859451 - RNA, 19 nt, Artificial Sequence
  Description of Artificial Sequence: Synthetic oligonucleotide
ugucgugcuggccagaauc

SEQ ID NO: 859452 - RNA, 19 nt, Artificial Sequence
  Description of Artificial Sequence: Synthetic oligonucleotide
uccgaacucucccacaugu

SEQ ID NO: 859453 - RNA, 19 nt, Artificial Sequence
  Description of Artificial Sequence: Synthetic oligonucleotide
ugucagaccuuugucauug

SEQ ID NO: 859454 - RNA, 19 nt, Artificial Sequence
  Description of Artificial Sequence: Synthetic oligonucleotide
gcaauaguaaaauagcuaa

SEQ ID NO: 859455 - RNA, 19 nt, Artificial Sequence
  Description of Artificial Sequence: Synthetic oligonucleotide
ucugcaaacaaaaguucau

SEQ ID NO: 859456 - RNA, 19 nt, Artificial Sequence
  Description of Artificial Sequence: Synthetic oligonucleotide
gaagguuguucucaugaac

SEQ ID NO: 859457 - RNA, 19 nt, Artificial Sequence
  Description of Artificial Sequence: Synthetic oligonucleotide
ucauccaucugauuuccac

SEQ ID NO: 859458 - RNA, 19 nt, Artificial Sequence
  Description of Artificial Sequence: Synthetic oligonucleotide
gauucguucaagaaacaca

SEQ ID NO: 859459 - RNA, 19 nt, Artificial Sequence
  Description of Artificial Sequence: Synthetic oligonucleotide
ugacugagccauuacucag

SEQ ID NO: 859460 - RNA, 19 nt, Artificial Sequence
  Description of Artificial Sequence: Synthetic oligonucleotide
guucaugucuagcccagcg

SEQ ID NO: 859461 - RNA, 19 nt, Artificial Sequence
  Description of Artificial Sequence: Synthetic oligonucleotide
aauuggaggcuucauccau

SEQ ID NO: 859462 - RNA, 19 nt, Artificial Sequence
  Description of Artificial Sequence: Synthetic oligonucleotide
gguauuaaaagucaugacu

SEQ ID NO: 859463 - RNA, 19 nt, Artificial Sequence
  Description of Artificial Sequence: Synthetic oligonucleotide
gccaauuucguuccgacag

SEQ ID NO: 859464 - RNA, 19 nt, Artificial Sequence
  Description of Artificial Sequence: Synthetic oligonucleotide
cacugaaagguccaacgcc

SEQ ID NO: 859465 - RNA, 19 nt, Artificial Sequence
  Description of Artificial Sequence: Synthetic oligonucleotide
cacgcuuauugguagauuc

SEQ ID NO: 859466 - RNA, 19 nt, Artificial Sequence
  Description of Artificial Sequence: Synthetic oligonucleotide
acaccgaugcuguaauuag

SEQ ID NO: 859467 - RNA, 19 nt, Artificial Sequence
  Description of Artificial Sequence: Synthetic oligonucleotide
accuaacuaaauacuuucc

SEQ ID NO: 859468 - RNA, 19 nt, Artificial Sequence
  Description of Artificial Sequence: Synthetic oligonucleotide
auggucacgccaaaagccc

SEQ ID NO: 859469 - RNA, 19 nt, Artificial Sequence
  Description of Artificial Sequence: Synthetic oligonucleotide
aucaggcaaacucucggag

SEQ ID NO: 859470 - RNA, 19 nt, Artificial Sequence
  Description of Artificial Sequence: Synthetic oligonucleotide
ucacgguguuucauaacag

SEQ ID NO: 859471 - RNA, 19 nt, Artificial Sequence
  Description of Artificial Sequence: Synthetic oligonucleotide
uggggaguauccaucaaaa

SEQ ID NO: 859472 - RNA, 19 nt, Artificial Sequence
  Description of Artificial Sequence: Synthetic oligonucleotide
auaggcucauauguuagag

SEQ ID NO: 859473 - RNA, 19 nt, Artificial Sequence
  Description of Artificial Sequence: Synthetic oligonucleotide
acugaccccauccaagaug

SEQ ID NO: 859474 - RNA, 19 nt, Artificial Sequence
  Description of Artificial Sequence: Synthetic oligonucleotide
cuugaacagagauggcccc

SEQ ID NO: 859475 - RNA, 19 nt, Artificial Sequence
  Description of Artificial Sequence: Synthetic oligonucleotide
auacagaugugucgaagca

SEQ ID NO: 859476 - RNA, 19 nt, Artificial Sequence
  Description of Artificial Sequence: Synthetic oligonucleotide
ucauacagaugugucgaag

SEQ ID NO: 859477 - RNA, 19 nt, Artificial Sequence
  Description of Artificial Sequence: Synthetic oligonucleotide
ucuucggaaagcucucucu

SEQ ID NO: 859478 - RNA, 19 nt, Artificial Sequence
  Description of Artificial Sequence: Synthetic oligonucleotide
uauaggcucauauguuaga

SEQ ID NO: 859479 - RNA, 19 nt, Artificial Sequence
  Description of Artificial Sequence: Synthetic oligonucleotide
uaauuggaggcuucaucca

SEQ ID NO: 859480 - RNA, 19 nt, Artificial Sequence
  Description of Artificial Sequence: Synthetic oligonucleotide
uacagaugugucgaagcag

SEQ ID NO: 859481 - RNA, 19 nt, Artificial Sequence
  Description of Artificial Sequence: Synthetic oligonucleotide
uccuucauagguugccuug

SEQ ID NO: 859482 - RNA, 19 nt, Artificial Sequence
  Description of Artificial Sequence: Synthetic oligonucleotide
aggugcuacagauggagcu

SEQ ID NO: 859483 - RNA, 19 nt, Artificial Sequence
  Description of Artificial Sequence: Synthetic oligonucleotide
cacgguguuucauaacagc

SEQ ID NO: 859484 - RNA, 19 nt, Artificial Sequence
  Description of Artificial Sequence: Synthetic oligonucleotide
aauuucguuccgacaggac

SEQ ID NO: 859485 - RNA, 19 nt, Artificial Sequence
  Description of Artificial Sequence: Synthetic oligonucleotide
uauugguagauucguucaa

SEQ ID NO: 859486 - RNA, 19 nt, Artificial Sequence
  Description of Artificial Sequence: Synthetic oligonucleotide
cuauuucccacauggucac

SEQ ID NO: 859487 - RNA, 19 nt, Artificial Sequence
  Description of Artificial Sequence: Synthetic oligonucleotide
caaccagaucccauggagc

SEQ ID NO: 859488 - RNA, 19 nt, Artificial Sequence
  Description of Artificial Sequence: Synthetic oligonucleotide
augucuagcccagcgaggg

SEQ ID NO: 859489 - RNA, 19 nt, Artificial Sequence
  Description of Artificial Sequence: Synthetic oligonucleotide
auugguagauucguucaag

SEQ ID NO: 859490 - RNA, 19 nt, Artificial Sequence
  Description of Artificial Sequence: Synthetic oligonucleotide
cuggcgcuuaauuggaggc

SEQ ID NO: 859491 - RNA, 19 nt, Artificial Sequence
  Description of Artificial Sequence: Synthetic oligonucleotide
ugugucgaagcagagguau

SEQ ID NO: 859492 - RNA, 19 nt, Artificial Sequence
  Description of Artificial Sequence: Synthetic oligonucleotide
guuuaaaggugcuacagau

SEQ ID NO: 859493 - RNA, 19 nt, Artificial Sequence
  Description of Artificial Sequence: Synthetic oligonucleotide
acgccaaaagcccacacau

SEQ ID NO: 859494 - RNA, 19 nt, Artificial Sequence
  Description of Artificial Sequence: Synthetic oligonucleotide
aggagguguggccuuauug

SEQ ID NO: 859495 - RNA, 19 nt, Artificial Sequence
  Description of Artificial Sequence: Synthetic oligonucleotide
uggagaagguaaucguaca

SEQ ID NO: 859496 - RNA, 19 nt, Artificial Sequence
  Description of Artificial Sequence: Synthetic oligonucleotide
cuguacgcccaccaguucc

SEQ ID NO: 859497 - RNA, 19 nt, Artificial Sequence
  Description of Artificial Sequence: Synthetic oligonucleotide
ggaaucugagcccagcuac

SEQ ID NO: 859498 - RNA, 19 nt, Artificial Sequence
  Description of Artificial Sequence: Synthetic oligonucleotide
aagucuccgaacucuccca

SEQ ID NO: 859499 - RNA, 19 nt, Artificial Sequence
  Description of Artificial Sequence: Synthetic oligonucleotide
ugguagauucguucaagaa

SEQ ID NO: 859500 - RNA, 19 nt, Artificial Sequence
  Description of Artificial Sequence: Synthetic oligonucleotide
agaauccaagggcucacug

SEQ ID NO: 859501 - RNA, 19 nt, Artificial Sequence
  Description of Artificial Sequence: Synthetic oligonucleotide
uguacgcccaccaguuccc

SEQ ID NO: 859502 - RNA, 19 nt, Artificial Sequence
  Description of Artificial Sequence: Synthetic oligonucleotide
uauccuguacgcccaccag

SEQ ID NO: 859503 - RNA, 19 nt, Artificial Sequence
  Description of Artificial Sequence: Synthetic oligonucleotide
cucacgguguuucauaaca

SEQ ID NO: 859504 - RNA, 19 nt, Artificial Sequence
  Description of Artificial Sequence: Synthetic oligonucleotide
caguuauaaccagugugcg

SEQ ID NO: 859505 - RNA, 19 nt, Artificial Sequence
  Description of Artificial Sequence: Synthetic oligonucleotide
gguagauucguucaagaaa

SEQ ID NO: 859506 - RNA, 19 nt, Artificial Sequence
  Description of Artificial Sequence: Synthetic oligonucleotide
agucuccgaacucucccac

SEQ ID NO: 859507 - RNA, 19 nt, Artificial Sequence
  Description of Artificial Sequence: Synthetic oligonucleotide
agaugugucgaagcagagg

SEQ ID NO: 859508 - RNA, 19 nt, Artificial Sequence
  Description of Artificial Sequence: Synthetic oligonucleotide
aggccaugacuuuacaagu

SEQ ID NO: 859509 - RNA, 19 nt, Artificial Sequence
  Description of Artificial Sequence: Synthetic oligonucleotide
ucauucacacggcugcuau

SEQ ID NO: 859510 - RNA, 19 nt, Artificial Sequence
  Description of Artificial Sequence: Synthetic oligonucleotide
gaaggaucaggaggugugg

SEQ ID NO: 859511 - RNA, 19 nt, Artificial Sequence
  Description of Artificial Sequence: Synthetic oligonucleotide
agaaugccaaagcaucagu

SEQ ID NO: 859512 - RNA, 19 nt, Artificial Sequence
  Description of Artificial Sequence: Synthetic oligonucleotide
auauccuguacgcccacca

SEQ ID NO: 859513 - RNA, 19 nt, Artificial Sequence
  Description of Artificial Sequence: Synthetic oligonucleotide
cuaaggauguggacuucag

SEQ ID NO: 859514 - RNA, 19 nt, Artificial Sequence
  Description of Artificial Sequence: Synthetic oligonucleotide
ccuugaacagagauggccc

SEQ ID NO: 859515 - RNA, 19 nt, Artificial Sequence
  Description of Artificial Sequence: Synthetic oligonucleotide
caugucuagcccagcgagg

SEQ ID NO: 859516 - RNA, 19 nt, Artificial Sequence
  Description of Artificial Sequence: Synthetic oligonucleotide
aucugcaaacaaaaguuca

SEQ ID NO: 859517 - RNA, 19 nt, Artificial Sequence
  Description of Artificial Sequence: Synthetic oligonucleotide
cagugagaccaggagaucc

SEQ ID NO: 859518 - RNA, 19 nt, Artificial Sequence
  Description of Artificial Sequence: Synthetic oligonucleotide
uucuggccgacuucuucgg

SEQ ID NO: 859519 - RNA, 19 nt, Artificial Sequence
  Description of Artificial Sequence: Synthetic oligonucleotide
cuggguauugauguagaug

SEQ ID NO: 859520 - RNA, 19 nt, Artificial Sequence
  Description of Artificial Sequence: Synthetic oligonucleotide
ucuccgaacucucccacau

SEQ ID NO: 859521 - RNA, 19 nt, Artificial Sequence
  Description of Artificial Sequence: Synthetic oligonucleotide
aguauccaucaaaaccugg

SEQ ID NO: 859522 - RNA, 19 nt, Artificial Sequence
  Description of Artificial Sequence: Synthetic oligonucleotide
gguggaacuguugggaagg

SEQ ID NO: 859523 - RNA, 19 nt, Artificial Sequence
  Description of Artificial Sequence: Synthetic oligonucleotide
ugcggccuugaacagagau

SEQ ID NO: 859524 - RNA, 19 nt, Artificial Sequence
  Description of Artificial Sequence: Synthetic oligonucleotide
agcaauaguaaaauagcua

SEQ ID NO: 859525 - RNA, 19 nt, Artificial Sequence
  Description of Artificial Sequence: Synthetic oligonucleotide
ucuagcaacuggguauuga

SEQ ID NO: 859526 - RNA, 19 nt, Artificial Sequence
  Description of Artificial Sequence: Synthetic oligonucleotide
gguauugauguagaugaug

SEQ ID NO: 859527 - RNA, 19 nt, Artificial Sequence
  Description of Artificial Sequence: Synthetic oligonucleotide
gcaucaggcaaacucucgg

SEQ ID NO: 859528 - RNA, 19 nt, Artificial Sequence
  Description of Artificial Sequence: Synthetic oligonucleotide
gguagcguacugcagugag

SEQ ID NO: 859529 - RNA, 19 nt, Artificial Sequence
  Description of Artificial Sequence: Synthetic oligonucleotide
ugggaagucuccgaacucu

SEQ ID NO: 859530 - RNA, 19 nt, Artificial Sequence
  Description of Artificial Sequence: Synthetic oligonucleotide
cucgcagcucucuagcaac

SEQ ID NO: 859531 - RNA, 19 nt, Artificial Sequence
  Description of Artificial Sequence: Synthetic oligonucleotide
agauauccuguacgcccac

SEQ ID NO: 859532 - RNA, 19 nt, Artificial Sequence
  Description of Artificial Sequence: Synthetic oligonucleotide
cugaaagguccaacgcccc

SEQ ID NO: 859533 - RNA, 19 nt, Artificial Sequence
  Description of Artificial Sequence: Synthetic oligonucleotide
accccauccaagauguauc

SEQ ID NO: 859534 - RNA, 19 nt, Artificial Sequence
  Description of Artificial Sequence: Synthetic oligonucleotide
aauggggaguauccaucaa

SEQ ID NO: 859535 - RNA, 19 nt, Artificial Sequence
  Description of Artificial Sequence: Synthetic oligonucleotide
acgguguuucauaacagca

SEQ ID NO: 859536 - RNA, 19 nt, Artificial Sequence
  Description of Artificial Sequence: Synthetic oligonucleotide
ggaguauccaucaaaaccu

SEQ ID NO: 859537 - RNA, 19 nt, Artificial Sequence
  Description of Artificial Sequence: Synthetic oligonucleotide
acaggacacaccgaugcug

SEQ ID NO: 859538 - RNA, 19 nt, Artificial Sequence
  Description of Artificial Sequence: Synthetic oligonucleotide
uccuguacgcccaccaguu

SEQ ID NO: 859539 - RNA, 19 nt, Artificial Sequence
  Description of Artificial Sequence: Synthetic oligonucleotide
auccuguacgcccaccagu

SEQ ID NO: 859540 - RNA, 19 nt, Artificial Sequence
  Description of Artificial Sequence: Synthetic oligonucleotide
acgcuuauugguagauucg

SEQ ID NO: 859541 - RNA, 19 nt, Artificial Sequence
  Description of Artificial Sequence: Synthetic oligonucleotide
aggguagcguacugcagug

SEQ ID NO: 859542 - RNA, 19 nt, Artificial Sequence
  Description of Artificial Sequence: Synthetic oligonucleotide
gaguauccaucaaaaccug

SEQ ID NO: 859543 - RNA, 19 nt, Artificial Sequence
  Description of Artificial Sequence: Synthetic oligonucleotide
uucguucaagaaacacagu

SEQ ID NO: 859544 - RNA, 19 nt, Artificial Sequence
  Description of Artificial Sequence: Synthetic oligonucleotide
aacuggguauugauguaga

SEQ ID NO: 859545 - RNA, 19 nt, Artificial Sequence
  Description of Artificial Sequence: Synthetic oligonucleotide
ugcucacgguguuucauaa

SEQ ID NO: 859546 - RNA, 19 nt, Artificial Sequence
  Description of Artificial Sequence: Synthetic oligonucleotide
auagguugccuugcucacg

SEQ ID NO: 859547 - RNA, 19 nt, Artificial Sequence
  Description of Artificial Sequence: Synthetic oligonucleotide
acuucuucggaaagcucuc

SEQ ID NO: 859548 - RNA, 19 nt, Artificial Sequence
  Description of Artificial Sequence: Synthetic oligonucleotide
ugcaagaggcaaugaugga

SEQ ID NO: 859549 - RNA, 19 nt, Artificial Sequence
  Description of Artificial Sequence: Synthetic oligonucleotide
auuguggauuuggacagga

SEQ ID NO: 859550 - RNA, 19 nt, Artificial Sequence
  Description of Artificial Sequence: Synthetic oligonucleotide
uugcuauuucccacauggu

SEQ ID NO: 859551 - RNA, 19 nt, Artificial Sequence
  Description of Artificial Sequence: Synthetic oligonucleotide
cuugaccugaaugcugcag

SEQ ID NO: 859552 - RNA, 19 nt, Artificial Sequence
  Description of Artificial Sequence: Synthetic oligonucleotide
uggucacgccaaaagccca

SEQ ID NO: 859553 - RNA, 19 nt, Artificial Sequence
  Description of Artificial Sequence: Synthetic oligonucleotide
uugggagugcaagaggcaa

SEQ ID NO: 859554 - RNA, 19 nt, Artificial Sequence
  Description of Artificial Sequence: Synthetic oligonucleotide
uaugugccugguccuuuca

SEQ ID NO: 859555 - RNA, 19 nt, Artificial Sequence
  Description of Artificial Sequence: Synthetic oligonucleotide
gaucgcuuugauguugauc

SEQ ID NO: 859556 - RNA, 19 nt, Artificial Sequence
  Description of Artificial Sequence: Synthetic oligonucleotide
uccaucugauuuccacgcu

SEQ ID NO: 859557 - RNA, 19 nt, Artificial Sequence
  Description of Artificial Sequence: Synthetic oligonucleotide
gucuagcccagcgagggag

SEQ ID NO: 859558 - RNA, 19 nt, Artificial Sequence
  Description of Artificial Sequence: Synthetic oligonucleotide
gaccuuugucauugugggc

SEQ ID NO: 859559 - RNA, 19 nt, Artificial Sequence
  Description of Artificial Sequence: Synthetic oligonucleotide
ucucaacacugagaaggug

SEQ ID NO: 859560 - RNA, 19 nt, Artificial Sequence
  Description of Artificial Sequence: Synthetic oligonucleotide
cagccaauuucguuccgac

SEQ ID NO: 859561 - RNA, 19 nt, Artificial Sequence
  Description of Artificial Sequence: Synthetic oligonucleotide
gagauauccuguacgccca

SEQ ID NO: 859562 - RNA, 19 nt, Artificial Sequence
  Description of Artificial Sequence: Synthetic oligonucleotide
gaggugugucacugggagc

SEQ ID NO: 859563 - RNA, 19 nt, Artificial Sequence
  Description of Artificial Sequence: Synthetic oligonucleotide
uucauccaucugauuucca

SEQ ID NO: 859564 - RNA, 19 nt, Artificial Sequence
  Description of Artificial Sequence: Synthetic oligonucleotide
augcuguaauuagccaggg

SEQ ID NO: 859565 - RNA, 19 nt, Artificial Sequence
  Description of Artificial Sequence: Synthetic oligonucleotide
cuucugucgugcuggccag

SEQ ID NO: 859566 - RNA, 19 nt, Artificial Sequence
  Description of Artificial Sequence: Synthetic oligonucleotide
agccaauuucguuccgaca

SEQ ID NO: 859567 - RNA, 19 nt, Artificial Sequence
  Description of Artificial Sequence: Synthetic oligonucleotide
cauuacucagcaggucagc

SEQ ID NO: 859568 - RNA, 19 nt, Artificial Sequence
  Description of Artificial Sequence: Synthetic oligonucleotide
gccauuacucagcagguca

SEQ ID NO: 859569 - RNA, 19 nt, Artificial Sequence
  Description of Artificial Sequence: Synthetic oligonucleotide
caaaaggaguggaggccac

SEQ ID NO: 859570 - RNA, 19 nt, Artificial Sequence
  Description of Artificial Sequence: Synthetic oligonucleotide
ggaaggaucaggaggugug

SEQ ID NO: 859571 - RNA, 19 nt, Artificial Sequence
  Description of Artificial Sequence: Synthetic oligonucleotide
ugaggacagauggggaccu

SEQ ID NO: 859572 - RNA, 19 nt, Artificial Sequence
  Description of Artificial Sequence: Synthetic oligonucleotide
gccuugaacagagauggcc

SEQ ID NO: 859573 - RNA, 19 nt, Artificial Sequence
  Description of Artificial Sequence: Synthetic oligonucleotide
aggaaucugagcccagcua

SEQ ID NO: 859574 - RNA, 19 nt, Artificial Sequence
  Description of Artificial Sequence: Synthetic oligonucleotide
gauauccuguacgcccacc

SEQ ID NO: 859575 - RNA, 19 nt, Artificial Sequence
  Description of Artificial Sequence: Synthetic oligonucleotide
uagacacgaucugccaggc

SEQ ID NO: 859576 - RNA, 19 nt, Artificial Sequence
  Description of Artificial Sequence: Synthetic oligonucleotide
auguaucucuccucaugaa

SEQ ID NO: 859577 - RNA, 19 nt, Artificial Sequence
  Description of Artificial Sequence: Synthetic oligonucleotide
caucaggcaaacucucgga

SEQ ID NO: 859578 - RNA, 19 nt, Artificial Sequence
  Description of Artificial Sequence: Synthetic oligonucleotide
uugcucacgguguuucaua

SEQ ID NO: 859579 - RNA, 19 nt, Artificial Sequence
  Description of Artificial Sequence: Synthetic oligonucleotide
cuccccaaggguagcguac

SEQ ID NO: 859580 - RNA, 19 nt, Artificial Sequence
  Description of Artificial Sequence: Synthetic oligonucleotide
uuccacgcuuauugguaga

SEQ ID NO: 859581 - RNA, 19 nt, Artificial Sequence
  Description of Artificial Sequence: Synthetic oligonucleotide
aggcaaacucucggagagc

SEQ ID NO: 859582 - RNA, 19 nt, Artificial Sequence
  Description of Artificial Sequence: Synthetic oligonucleotide
gugaguuuguccucuggua

SEQ ID NO: 859583 - RNA, 19 nt, Artificial Sequence
  Description of Artificial Sequence: Synthetic oligonucleotide
cauuguggauuuggacagg

SEQ ID NO: 859584 - RNA, 19 nt, Artificial Sequence
  Description of Artificial Sequence: Synthetic oligonucleotide
cugaccccauccaagaugu

SEQ ID NO: 859585 - RNA, 19 nt, Artificial Sequence
  Description of Artificial Sequence: Synthetic oligonucleotide
ucuggccgacuucuucgga

SEQ ID NO: 859586 - RNA, 19 nt, Artificial Sequence
  Description of Artificial Sequence: Synthetic oligonucleotide
ugcgauccucacugugcag

SEQ ID NO: 859587 - RNA, 19 nt, Artificial Sequence
  Description of Artificial Sequence: Synthetic oligonucleotide
auguggacuucaguuggug

SEQ ID NO: 859588 - RNA, 19 nt, Artificial Sequence
  Description of Artificial Sequence: Synthetic oligonucleotide
ucgcagcucucuagcaacu

SEQ ID NO: 859589 - RNA, 19 nt, Artificial Sequence
  Description of Artificial Sequence: Synthetic oligonucleotide
ucucaugguucuggacucc

SEQ ID NO: 859590 - RNA, 19 nt, Artificial Sequence
  Description of Artificial Sequence: Synthetic oligonucleotide
ggugcugucaggccaugac

SEQ ID NO: 859591 - RNA, 19 nt, Artificial Sequence
  Description of Artificial Sequence: Synthetic oligonucleotide
ggaaagcucucucugggaa

SEQ ID NO: 859592 - RNA, 19 nt, Artificial Sequence
  Description of Artificial Sequence: Synthetic oligonucleotide
ggaccuuucugguuucuca

SEQ ID NO: 859593 - RNA, 19 nt, Artificial Sequence
  Description of Artificial Sequence: Synthetic oligonucleotide
uggccgacuucuucggaaa

SEQ ID NO: 859594 - RNA, 19 nt, Artificial Sequence
  Description of Artificial Sequence: Synthetic oligonucleotide
ccauuacucagcaggucag

SEQ ID NO: 859595 - RNA, 19 nt, Artificial Sequence
  Description of Artificial Sequence: Synthetic oligonucleotide
ugucuagcccagcgaggga

SEQ ID NO: 859596 - RNA, 19 nt, Artificial Sequence
  Description of Artificial Sequence: Synthetic oligonucleotide
ccaauuucguuccgacagg

SEQ ID NO: 859597 - RNA, 19 nt, Artificial Sequence
  Description of Artificial Sequence: Synthetic oligonucleotide
auaaccagugugcggccuu

SEQ ID NO: 859598 - RNA, 19 nt, Artificial Sequence
  Description of Artificial Sequence: Synthetic oligonucleotide
aagcucucucugggaaguc

SEQ ID NO: 859599 - RNA, 19 nt, Artificial Sequence
  Description of Artificial Sequence: Synthetic oligonucleotide
uccucugguaagacaccau

SEQ ID NO: 859600 - RNA, 19 nt, Artificial Sequence
  Description of Artificial Sequence: Synthetic oligonucleotide
cugaaugcugcaguccuga

SEQ ID NO: 859601 - RNA, 19 nt, Artificial Sequence
  Description of Artificial Sequence: Synthetic oligonucleotide
uccacgcuuauugguagau

SEQ ID NO: 859602 - RNA, 19 nt, Artificial Sequence
  Description of Artificial Sequence: Synthetic oligonucleotide
aguuccccauccuggcgcu
